United States Patent Application Publication US 2024/0066150 A1 - sequence listing, part 5

SEQ ID NO: 44341 - DNA, 20 bp, synthetic construct
  misc_feature 1..20: note = Description of Artificial Sequence: Synthetic oligonucleotide
  misc_feature 1..20: note = Target: SCN10A; (-) strand; PAM type: YTN; PAM sequence: TTT
  source 1..20: mol_type = other DNA
gattcattcttctatccaac

SEQ ID NO: 44342 - DNA, 20 bp, synthetic construct
  misc_feature 1..20: note = Description of Artificial Sequence: Synthetic oligonucleotide
  misc_feature 1..20: note = Target: SCN10A; (-) strand; PAM type: YTN; PAM sequence: TTT
  source 1..20: mol_type = other DNA
tgattcattcttctatccaa

SEQ ID NO: 44343 - DNA, 20 bp, synthetic construct
  misc_feature 1..20: note = Description of Artificial Sequence: Synthetic oligonucleotide
  misc_feature 1..20: note = Target: SCN10A; (-) strand; PAM type: YTN; PAM sequence: CTT
  source 1..20: mol_type = other DNA
ttgattcattcttctatcca

SEQ ID NO: 44344 - DNA, 20 bp, synthetic construct
  misc_feature 1..20: note = Description of Artificial Sequence: Synthetic oligonucleotide
  misc_feature 1..20: note = Target: SCN10A; (-) strand; PAM type: YTN; PAM sequence: CTA
  source 1..20: mol_type = other DNA
tcttttgattcattcttcta

SEQ ID NO: 44345 - DNA, 20 bp, synthetic construct
  misc_feature 1..20: note = Description of Artificial Sequence: Synthetic oligonucleotide
  misc_feature 1..20: note = Target: SCN10A; (-) strand; PAM type: YTN; PAM sequence: TTC
  source 1..20: mol_type = other DNA
tatcttttgattcattcttc

SEQ ID NO: 44346 - DNA, 20 bp, synthetic construct
  misc_feature 1..20: note = Description of Artificial Sequence: Synthetic oligonucleotide
  misc_feature 1..20: note = Target: SCN10A; (-) strand; PAM type: YTN; PAM sequence: TTT
  source 1..20: mol_type = other DNA
ctatcttttgattcattctt

SEQ ID NO: 44347 - DNA, 20 bp, synthetic construct
  misc_feature 1..20: note = Description of Artificial Sequence: Synthetic oligonucleotide
  misc_feature 1..20: note = Target: SCN10A; (-) strand; PAM type: YTN; PAM sequence: CTT
  source 1..20: mol_type = other DNA
tctatcttttgattcattct

SEQ ID NO: 44348 - DNA, 20 bp, synthetic construct
  misc_feature 1..20: note = Description of Artificial Sequence: Synthetic oligonucleotide
  misc_feature 1..20: note = Target: SCN10A; (-) strand; PAM type: YTN; PAM sequence: TTA
  source 1..20: mol_type = other DNA
tatctttctatcttttgatt

SEQ ID NO: 44349 - DNA, 20 bp, synthetic construct
  misc_feature 1..20: note = Description of Artificial Sequence: Synthetic oligonucleotide
  misc_feature 1..20: note = Target: SCN10A; (-) strand; PAM type: YTN; PAM sequence: CTT
  source 1..20: mol_type = other DNA
atatctttctatcttttgat

SEQ ID NO: 44350 - DNA, 20 bp, synthetic construct
  misc_feature 1..20: note = Description of Artificial Sequence: Synthetic oligonucleotide
  misc_feature 1..20: note = Target: SCN10A; (-) strand; PAM type: YTN; PAM sequence: TTA
  source 1..20: mol_type = other DNA
acccttatatctttctatct

SEQ ID NO: 44351 - DNA, 20 bp, synthetic construct
  misc_feature 1..20: note = Description of Artificial Sequence: Synthetic oligonucleotide
  misc_feature 1..20: note = Target: SCN10A; (-) strand; PAM type: YTN; PAM sequence: CTT
  source 1..20: mol_type = other DNA
aacccttatatctttctatc

SEQ ID NO: 44352 - DNA, 20 bp, synthetic construct
  misc_feature 1..20: note = Description of Artificial Sequence: Synthetic oligonucleotide
  misc_feature 1..20: note = Target: SCN10A; (-) strand; PAM type: YTN; PAM sequence: TTC
  source 1..20: mol_type = other DNA
atcatccttaacccttatat

SEQ ID NO: 44353 - DNA, 20 bp, synthetic construct
  misc_feature 1..20: note = Description of Artificial Sequence: Synthetic oligonucleotide
  misc_feature 1..20: note = Target: SCN10A; (-) strand; PAM type: YTN; PAM sequence: CTA
  source 1..20: mol_type = other DNA
ttcatcatccttaaccctta

SEQ ID NO: 44354 - DNA, 20 bp, synthetic construct
  misc_feature 1..20: note = Description of Artificial Sequence: Synthetic oligonucleotide
  misc_feature 1..20: note = Target: SCN10A; (-) strand; PAM type: YTN; PAM sequence: TTC
  source 1..20: mol_type = other DNA
catctattcatcatccttaa

SEQ ID NO: 44355 - DNA, 20 bp, synthetic construct
  misc_feature 1..20: note = Description of Artificial Sequence: Synthetic oligonucleotide
  misc_feature 1..20: note = Target: SCN10A; (-) strand; PAM type: YTN; PAM sequence: CTT
  source 1..20: mol_type = other DNA
ccatctattcatcatcctta

SEQ ID NO: 44356 - DNA, 20 bp, synthetic construct
  misc_feature 1..20: note = Description of Artificial Sequence: Synthetic oligonucleotide
  misc_feature 1..20: note = Target: SCN10A; (-) strand; PAM type: YTN; PAM sequence: TTC
  source 1..20: mol_type = other DNA
cttccatctattcatcatcc

SEQ ID NO: 44357 - DNA, 20 bp, synthetic construct
  misc_feature 1..20: note = Description of Artificial Sequence: Synthetic oligonucleotide
  misc_feature 1..20: note = Target: SCN10A; (-) strand; PAM type: YTN; PAM sequence: CTT
  source 1..20: mol_type = other DNA
ccttccatctattcatcatc

SEQ ID NO: 44358 - DNA, 20 bp, synthetic construct
  misc_feature 1..20: note = Description of Artificial Sequence: Synthetic oligonucleotide
  misc_feature 1..20: note = Target: SCN10A; (-) strand; PAM type: YTN; PAM sequence: CTA
  source 1..20: mol_type = other DNA
aacttccttccatctattca

SEQ ID NO: 44359 - DNA, 20 bp, synthetic construct
  misc_feature 1..20: note = Description of Artificial Sequence: Synthetic oligonucleotide
  misc_feature 1..20: note = Target: SCN10A; (-) strand; PAM type: YTN; PAM sequence: TTC
  source 1..20: mol_type = other DNA
taaacttccttccatctatt

SEQ ID NO: 44360 - DNA, 20 bp, synthetic construct
  misc_feature 1..20: note = Description of Artificial Sequence: Synthetic oligonucleotide
  misc_feature 1..20: note = Target: SCN10A; (-) strand; PAM type: YTN; PAM sequence: TTA
  source 1..20: mol_type = other DNA
ttctaaacttccttccatct

SEQ ID NO: 44361 - DNA, 20 bp, synthetic construct
  misc_feature 1..20: note = Description of Artificial Sequence: Synthetic oligonucleotide
  misc_feature 1..20: note = Target: SCN10A; (-) strand; PAM type: YTN; PAM sequence: TTT
  source 1..20: mol_type = other DNA
attctaaacttccttccatc

SEQ ID NO: 44362 - DNA, 20 bp, synthetic construct
  misc_feature 1..20: note = Description of Artificial Sequence: Synthetic oligonucleotide
  misc_feature 1..20: note = Target: SCN10A; (-) strand; PAM type: YTN; PAM sequence: TTT
  source 1..20: mol_type = other DNA
tattctaaacttccttccat

SEQ ID NO: 44363 - DNA, 20 bp, synthetic construct
  misc_feature 1..20: note = Description of Artificial Sequence: Synthetic oligonucleotide
  misc_feature 1..20: note = Target: SCN10A; (-) strand; PAM type: YTN; PAM sequence: CTT
  source 1..20: mol_type = other DNA
ttattctaaacttccttcca

SEQ ID NO: 44364 - DNA, 20 bp, synthetic construct
  misc_feature 1..20: note = Description of Artificial Sequence: Synthetic oligonucleotide
  misc_feature 1..20: note = Target: SCN10A; (-) strand; PAM type: YTN; PAM sequence: CTG
  source 1..20: mol_type = other DNA
cccaatcttttattctaaac

SEQ ID NO: 44365 - DNA, 20 bp, synthetic construct
  misc_feature 1..20: note = Description of Artificial Sequence: Synthetic oligonucleotide
  misc_feature 1..20: note = Target: SCN10A; (-) strand; PAM type: YTN; PAM sequence: TTC
  source 1..20: mol_type = other DNA
tgcccaatcttttattctaa

SEQ ID NO: 44366 - DNA, 20 bp, synthetic construct
  misc_feature 1..20: note = Description of Artificial Sequence: Synthetic oligonucleotide
  misc_feature 1..20: note = Target: SCN10A; (-) strand; PAM type: YTN; PAM sequence: CTT
  source 1..20: mol_type = other DNA
ctgcccaatcttttattcta

SEQ ID NO: 44367 - DNA, 20 bp, synthetic construct
  misc_feature 1..20: note = Description of Artificial Sequence: Synthetic oligonucleotide
  misc_feature 1..20: note = Target: SCN10A; (-) strand; PAM type: YTN; PAM sequence: CTC
  source 1..20: mol_type = other DNA
ttctgcccaatcttttattc

SEQ ID NO: 44368 - DNA, 20 bp, synthetic construct
  misc_feature 1..20: note = Description of Artificial Sequence: Synthetic oligonucleotide
  misc_feature 1..20: note = Target: SCN10A; (-) strand; PAM type: YTN; PAM sequence: TTC
  source 1..20: mol_type = other DNA
tcttctgcccaatcttttat

SEQ ID NO: 44369 - DNA, 20 bp, synthetic construct
  misc_feature 1..20: note = Description of Artificial Sequence: Synthetic oligonucleotide
  misc_feature 1..20: note = Target: SCN10A; (-) strand; PAM type: YTN; PAM sequence: CTT
  source 1..20: mol_type = other DNA
ctcttctgcccaatctttta

SEQ ID NO: 44370 - DNA, 20 bp, synthetic construct
  misc_feature 1..20: note = Description of Artificial Sequence: Synthetic oligonucleotide
  misc_feature 1..20: note = Target: SCN10A; (-) strand; PAM type: YTN; PAM sequence: CTC
  source 1..20: mol_type = other DNA
ttctcttctgcccaatcttt

SEQ ID NO: 44371 - DNA, 20 bp, synthetic construct
  misc_feature 1..20: note = Description of Artificial Sequence: Synthetic oligonucleotide
  misc_feature 1..20: note = Target: SCN10A; (-) strand; PAM type: YTN; PAM sequence: TTC
  source 1..20: mol_type = other DNA
cctcttctcttctgcccaat

SEQ ID NO: 44372 - DNA, 20 bp, synthetic construct
  misc_feature 1..20: note = Description of Artificial Sequence: Synthetic oligonucleotide
  misc_feature 1..20: note = Target: SCN10A; (-) strand; PAM type: YTN; PAM sequence: TTT
  source 1..20: mol_type = other DNA
ccctcttctcttctgcccaa

SEQ ID NO: 44373 - DNA, 20 bp, synthetic construct
  misc_feature 1..20: note = Description of Artificial Sequence: Synthetic oligonucleotide
  misc_feature 1..20: note = Target: SCN10A; (-) strand; PAM type: YTN; PAM sequence: CTT
  source 1..20: mol_type = other DNA
tccctcttctcttctgccca

SEQ ID NO: 44374 - DNA, 20 bp, synthetic construct
  misc_feature 1..20: note = Description of Artificial Sequence: Synthetic oligonucleotide
  misc_feature 1..20: note = Target: SCN10A; (-) strand; PAM type: YTN; PAM sequence: TTC
  source 1..20: mol_type = other DNA
tttccctcttctcttctgcc

SEQ ID NO: 44375 - DNA, 20 bp, synthetic construct
  misc_feature 1..20: note = Description of Artificial Sequence: Synthetic oligonucleotide
  misc_feature 1..20: note = Target: SCN10A; (-) strand; PAM type: YTN; PAM sequence: CTT
  source 1..20: mol_type = other DNA
ctttccctcttctcttctgc

SEQ ID NO: 44376 - DNA, 20 bp, synthetic construct
  misc_feature 1..20: note = Description of Artificial Sequence: Synthetic oligonucleotide
  misc_feature 1..20: note = Target: SCN10A; (-) strand; PAM type: YTN; PAM sequence: TTC
  source 1..20: mol_type = other DNA
ttctttccctcttctcttct

SEQ ID NO: 44377 - DNA, 20 bp, synthetic construct
  misc_feature 1..20: note = Description of Artificial Sequence: Synthetic oligonucleotide
  misc_feature 1..20: note = Target: SCN10A; (-) strand; PAM type: YTN; PAM sequence: TTC
  source 1..20: mol_type = other DNA
ccattcttctttccctcttc

SEQ ID NO: 44378 - DNA, 20 bp, synthetic construct
  misc_feature 1..20: note = Description of Artificial Sequence: Synthetic oligonucleotide
  misc_feature 1..20: note = Target: SCN10A; (-) strand; PAM type: YTN; PAM sequence: TTC
  source 1..20: mol_type = other DNA
catccatccattcccattct

SEQ ID NO: 44379 - DNA, 20 bp, synthetic construct
  misc_feature 1..20: note = Description of Artificial Sequence: Synthetic oligonucleotide
  misc_feature 1..20: note = Target: SCN10A; (-) strand; PAM type: YTN; PAM sequence: CTT
  source 1..20: mol_type = other DNA
ccatccatccattcccattc

SEQ ID NO: 44380 - DNA, 20 bp, synthetic construct
  misc_feature 1..20: note = Description of Artificial Sequence: Synthetic oligonucleotide
  misc_feature 1..20: note = Target: SCN10A; (-) strand; PAM type: YTN; PAM sequence: CTC
  source 1..20: mol_type = other DNA
cccttccatccatccattcc

SEQ ID NO: 44381 - DNA, 20 bp, synthetic construct
  misc_feature 1..20: note = Description of Artificial Sequence: Synthetic oligonucleotide
  misc_feature 1..20: note = Target: SCN10A; (-) strand; PAM type: YTN; PAM sequence: TTC
  source 1..20: mol_type = other DNA
atcagtcctccccttccatc

SEQ ID NO: 44382 - DNA, 20 bp, synthetic construct
  misc_feature 1..20: note = Description of Artificial Sequence: Synthetic oligonucleotide
  misc_feature 1..20: note = Target: SCN10A; (-) strand; PAM type: YTN; PAM sequence: CTT
  source 1..20: mol_type = other DNA
catcagtcctccccttccat

SEQ ID NO: 44383 - DNA, 20 bp, synthetic construct
  misc_feature 1..20: note = Description of Artificial Sequence: Synthetic oligonucleotide
  misc_feature 1..20: note = Target: SCN10A; (-) strand; PAM type: YTN; PAM sequence: CTG
  source 1..20: mol_type = other DNA
tacatcttcatcagtcctcc

SEQ ID NO: 44384 - DNA, 20 bp, synthetic construct
  misc_feature 1..20: note = Description of Artificial Sequence: Synthetic oligonucleotide
  misc_feature 1..20: note = Target: SCN10A; (-) strand; PAM type: YTN; PAM sequence: TTC
  source 1..20: mol_type = other DNA
cagctgtacatcttcatcag

SEQ ID NO: 44385 - DNA, 20 bp, synthetic construct
  misc_feature 1..20: note = Description of Artificial Sequence: Synthetic oligonucleotide
  misc_feature 1..20: note = Target: SCN10A; (-) strand; PAM type: YTN; PAM sequence: CTT
  source 1..20: mol_type = other DNA
ccagctgtacatcttcatca

SEQ ID NO: 44386 - DNA, 20 bp, synthetic construct
  misc_feature 1..20: note = Description of Artificial Sequence: Synthetic oligonucleotide
  misc_feature 1..20: note = Target: SCN10A; (-) strand; PAM type: YTN; PAM sequence: TTC
  source 1..20: mol_type = other DNA
ttccagctgtacatcttcat

SEQ ID NO: 44387 - DNA, 20 bp, synthetic construct
  misc_feature 1..20: note = Description of Artificial Sequence: Synthetic oligonucleotide
  misc_feature 1..20: note = Target: SCN10A; (-) strand; PAM type: YTN; PAM sequence: TTT
  source 1..20: mol_type = other DNA
cttccagctgtacatcttca

SEQ ID NO: 44388 - DNA, 20 bp, synthetic construct
  misc_feature 1..20: note = Description of Artificial Sequence: Synthetic oligonucleotide
  misc_feature 1..20: note = Target: SCN10A; (-) strand; PAM type: YTN; PAM sequence: TTA
  source 1..20: mol_type = other DNA
tttcttccagctgtacatct

SEQ ID NO: 44389 - DNA, 20 bp, synthetic construct
  misc_feature 1..20: note = Description of Artificial Sequence: Synthetic oligonucleotide
  misc_feature 1..20: note = Target: SCN10A; (-) strand; PAM type: YTN; PAM sequence: TTT
  source 1..20: mol_type = other DNA
atttcttccagctgtacatc

SEQ ID NO: 44390 - DNA, 20 bp, synthetic construct
  misc_feature 1..20: note = Description of Artificial Sequence: Synthetic oligonucleotide
  misc_feature 1..20: note = Target: SCN10A; (-) strand; PAM type: YTN; PAM sequence: CTT
  source 1..20: mol_type = other DNA
tatttcttccagctgtacat

SEQ ID NO: 44391 - DNA, 20 bp, synthetic construct
  misc_feature 1..20: note = Description of Artificial Sequence: Synthetic oligonucleotide
  misc_feature 1..20: note = Target: SCN10A; (-) strand; PAM type: YTN; PAM sequence: CTC
  source 1..20: mol_type = other DNA
ccaaacatccatccatcttt

SEQ ID NO: 44392 - DNA, 20 bp, synthetic construct
  misc_feature 1..20: note = Description of Artificial Sequence: Synthetic oligonucleotide
  misc_feature 1..20: note = Target: SCN10A; (-) strand; PAM type: YTN; PAM sequence: TTC
  source 1..20: mol_type = other DNA
ctcccaaacatccatccatc

SEQ ID NO: 44393 - DNA, 20 bp, synthetic construct
  misc_feature 1..20: note = Description of Artificial Sequence: Synthetic oligonucleotide
  misc_feature 1..20: note = Target: SCN10A; (-) strand; PAM type: YTN; PAM sequence: CTT
  source 1..20: mol_type = other DNA
cctcccaaacatccatccat

SEQ ID NO: 44394 - DNA, 20 bp, synthetic construct
  misc_feature 1..20: note = Description of Artificial Sequence: Synthetic oligonucleotide
  misc_feature 1..20: note = Target: SCN10A; (-) strand; PAM type: YTN; PAM sequence: TTC
  source 1..20: mol_type = other DNA
cttcctcccaaacatccatc

SEQ ID NO: 44395 - DNA, 20 bp, synthetic construct
  misc_feature 1..20: note = Description of Artificial Sequence: Synthetic oligonucleotide
  misc_feature 1..20: note = Target: SCN10A; (-) strand; PAM type: YTN; PAM sequence: TTT
  source 1..20: mol_type = other DNA
ccttcctcccaaacatccat

SEQ ID NO: 44396 - DNA, 20 bp, synthetic construct
  misc_feature 1..20: note = Description of Artificial Sequence: Synthetic oligonucleotide
  misc_feature 1..20: note = Target: SCN10A; (-) strand; PAM type: YTN; PAM sequence: TTT
  source 1..20: mol_type = other DNA
tccttcctcccaaacatcca

SEQ ID NO: 44397 - DNA, 20 bp, synthetic construct
  misc_feature 1..20: note = Description of Artificial Sequence: Synthetic oligonucleotide
  misc_feature 1..20: note = Target: SCN10A; (-) strand; PAM type: YTN; PAM sequence: TTT
  source 1..20: mol_type = other DNA
ttccttcctcccaaacatcc

SEQ ID NO: 44398 - DNA, 20 bp, synthetic construct
  misc_feature 1..20: note = Description of Artificial Sequence: Synthetic oligonucleotide
  misc_feature 1..20: note = Target: SCN10A; (-) strand; PAM type: YTN; PAM sequence: CTT
  source 1..20: mol_type = other DNA
tttccttcctcccaaacatc

SEQ ID NO: 44399 - DNA, 20 bp, synthetic construct
  misc_feature 1..20: note = Description of Artificial Sequence: Synthetic oligonucleotide
  misc_feature 1..20: note = Target: SCN10A; (-) strand; PAM type: YTN; PAM sequence: TTC
  source 1..20: mol_type = other DNA
ctttttccttcctcccaaac

SEQ ID NO: 44400 - DNA, 20 bp, synthetic construct
  misc_feature 1..20: note = Description of Artificial Sequence: Synthetic oligonucleotide
  misc_feature 1..20: note = Target: SCN10A; (-) strand; PAM type: YTN; PAM sequence: CTT
  source 1..20: mol_type = other DNA
cctttttccttcctcccaaa

SEQ ID NO: 44401 - DNA, 20 bp, synthetic construct
  misc_feature 1..20: note = Description of Artificial Sequence: Synthetic oligonucleotide
  misc_feature 1..20: note = Target: SCN10A; (-) strand; PAM type: YTN; PAM sequence: TTC
  source 1..20: mol_type = other DNA
agtcttcctttttccttcct

SEQ ID NO: 44402 - DNA, 20 bp, synthetic construct
  misc_feature 1..20: note = Description of Artificial Sequence: Synthetic oligonucleotide
  misc_feature 1..20: note = Target: SCN10A; (-) strand; PAM type: YTN; PAM sequence: TTG
  source 1..20: mol_type = other DNA
tatccaaccattcagtcttc

SEQ ID NO: 44403 - DNA, 20 bp, synthetic construct
  misc_feature 1..20: note = Description of Artificial Sequence: Synthetic oligonucleotide
  misc_feature 1..20: note = Target: SCN10A; (-) strand; PAM type: YTN; PAM sequence: TTT
  source 1..20: mol_type = other DNA
gtatccaaccattcagtctt

SEQ ID NO: 44404 - DNA, 20 bp, synthetic construct
  misc_feature 1..20: note = Description of Artificial Sequence: Synthetic oligonucleotide
  misc_feature 1..20: note = Target: SCN10A; (-) strand; PAM type: YTN; PAM sequence: TTT
  source 1..20: mol_type = other DNA
tgtatccaaccattcagtct

SEQ ID NO: 44405 - DNA, 20 bp, synthetic construct
  misc_feature 1..20: note = Description of Artificial Sequence: Synthetic oligonucleotide
  misc_feature 1..20: note = Target: SCN10A; (-) strand; PAM type: YTN; PAM sequence: CTT
  source 1..20: mol_type = other DNA
ttgtatccaaccattcagtc

SEQ ID NO: 44406 - DNA, 20 bp, synthetic construct
  misc_feature 1..20: note = Description of Artificial Sequence: Synthetic oligonucleotide
  misc_feature 1..20: note = Target: SCN10A; (-) strand; PAM type: YTN; PAM sequence: TTC
  source 1..20: mol_type = other DNA
accttttgtatccaaccatt

SEQ ID NO: 44407 - DNA, 20 bp, synthetic construct
  misc_feature 1..20: note = Description of Artificial Sequence: Synthetic oligonucleotide
  misc_feature 1..20: note = Target: SCN10A; (-) strand; PAM type: YTN; PAM sequence: TTT
  source 1..20: mol_type = other DNA
caccttttgtatccaaccat

SEQ ID NO: 44408 - DNA, 20 bp, synthetic construct
  misc_feature 1..20: note = Description of Artificial Sequence: Synthetic oligonucleotide
  misc_feature 1..20: note = Target: SCN10A; (-) strand; PAM type: YTN; PAM sequence: TTC
  source 1..20: mol_type = other DNA
catacatttcaccttttgta

SEQ ID NO: 44409 - DNA, 20 bp, synthetic construct
  misc_feature 1..20: note = Description of Artificial Sequence: Synthetic oligonucleotide
  misc_feature 1..20: note = Target: SCN10A; (-) strand; PAM type: YTN; PAM sequence: CTT
  source 1..20: mol_type = other DNA
ccatacatttcaccttttgt

SEQ ID NO: 44410 - DNA, 20 bp, synthetic construct
  misc_feature 1..20: note = Description of Artificial Sequence: Synthetic oligonucleotide
  misc_feature 1..20: note = Target: SCN10A; (-) strand; PAM type: YTN; PAM sequence: TTC
  source 1..20: mol_type = other DNA
cttccatacatttcaccttt

SEQ ID NO: 44411 - DNA, 20 bp, synthetic construct
  misc_feature 1..20: note = Description of Artificial Sequence: Synthetic oligonucleotide
  misc_feature 1..20: note = Target: SCN10A; (-) strand; PAM type: YTN; PAM sequence: CTT
  source 1..20: mol_type = other DNA
ccttccatacatttcacctt

SEQ ID NO: 44412 - DNA, 20 bp, synthetic construct
  misc_feature 1..20: note = Description of Artificial Sequence: Synthetic oligonucleotide
  misc_feature 1..20: note = Target: SCN10A; (-) strand; PAM type: YTN; PAM sequence: TTC
  source 1..20: mol_type = other DNA
caaccatccatccttccttc

SEQ ID NO: 44413 - DNA, 20 bp, synthetic construct
  misc_feature 1..20: note = Description of Artificial Sequence: Synthetic oligonucleotide
  misc_feature 1..20: note = Target: SCN10A; (-) strand; PAM type: YTN; PAM sequence: CTT
  source 1..20: mol_type = other DNA
ccaaccatccatccttcctt

SEQ ID NO: 44414 - DNA, 20 bp, synthetic construct
  misc_feature 1..20: note = Description of Artificial Sequence: Synthetic oligonucleotide
  misc_feature 1..20: note = Target: SCN10A; (-) strand; PAM type: YTN; PAM sequence: TTC
  source 1..20: mol_type = other DNA
cttccaaccatccatccttc

SEQ ID NO: 44415 - DNA, 20 bp, synthetic construct
  misc_feature 1..20: note = Description of Artificial Sequence: Synthetic oligonucleotide
  misc_feature 1..20: note = Target: SCN10A; (-) strand; PAM type: YTN; PAM sequence: CTT
  source 1..20: mol_type = other DNA
ccttccaaccatccatcctt

SEQ ID NO: 44416 - DNA, 20 bp, synthetic construct
  misc_feature 1..20: note = Description of Artificial Sequence: Synthetic oligonucleotide
  misc_feature 1..20: note = Target: SCN10A; (-) strand; PAM type: YTN; PAM sequence: TTC
  source 1..20: mol_type = other DNA
ttccttccaaccatccatcc

SEQ ID NO: 44417 - DNA, 20 bp, synthetic construct
  misc_feature 1..20: note = Description of Artificial Sequence: Synthetic oligonucleotide
  misc_feature 1..20: note = Target: SCN10A; (-) strand; PAM type: YTN; PAM sequence: CTG
  source 1..20: mol_type = other DNA
attcttccttccaaccatcc

SEQ ID NO: 44418 - DNA, 20 bp, synthetic construct
  misc_feature 1..20: note = Description of Artificial Sequence: Synthetic oligonucleotide
  misc_feature 1..20: note = Target: SCN10A; (-) strand; PAM type: YTN; PAM sequence: CTA
  source 1..20: mol_type = other DNA
ctgattcttccttccaacca

SEQ ID NO: 44419 - DNA, 20 bp, synthetic construct
  misc_feature 1..20: note = Description of Artificial Sequence: Synthetic oligonucleotide
  misc_feature 1..20: note = Target: SCN10A; (-) strand; PAM type: YTN; PAM sequence: TTC
  source 1..20: mol_type = other DNA
ctactgattcttccttccaa

SEQ ID NO: 44420 - DNA, 20 bp, synthetic construct
  misc_feature 1..20: note = Description of Artificial Sequence: Synthetic oligonucleotide
  misc_feature 1..20: note = Target: SCN10A; (-) strand; PAM type: YTN; PAM sequence: CTT
  source 1..20: mol_type = other DNA
cctactgattcttccttcca

SEQ ID NO: 44421 - DNA, 20 bp, synthetic construct
  misc_feature 1..20: note = Description of Artificial Sequence: Synthetic oligonucleotide
  misc_feature 1..20: note = Target: SCN10A; (-) strand; PAM type: YTN; PAM sequence: TTC
  source 1..20: mol_type = other DNA
atccatcttcctactgattc

SEQ ID NO: 44422 - DNA, 20 bp, synthetic construct
  misc_feature 1..20: note = Description of Artificial Sequence: Synthetic oligonucleotide
  misc_feature 1..20: note = Target: SCN10A; (-) strand; PAM type: YTN; PAM sequence: TTT
  source 1..20: mol_type = other DNA
catccatcttcctactgatt

SEQ ID NO: 44423 - DNA, 20 bp, synthetic construct
  misc_feature 1..20: note = Description of Artificial Sequence: Synthetic oligonucleotide
  misc_feature 1..20: note = Target: SCN10A; (-) strand; PAM type: YTN; PAM sequence: CTC
  source 1..20: mol_type = other DNA
atttcatccatcttcctact

SEQ ID NO: 44424 - DNA, 20 bp, synthetic construct
  misc_feature 1..20: note = Description of Artificial Sequence: Synthetic oligonucleotide
  misc_feature 1..20: note = Target: SCN10A; (-) strand; PAM type: YTN; PAM sequence: TTA
  source 1..20: mol_type = other DNA
aacggtcatgcactcatttc

SEQ ID NO: 44425 - DNA, 20 bp, synthetic construct
  misc_feature 1..20: note = Description of Artificial Sequence: Synthetic oligonucleotide
  misc_feature 1..20: note = Target: SCN10A; (-) strand; PAM type: YTN; PAM sequence: CTT
  source 1..20: mol_type = other DNA
aaacggtcatgcactcattt

SEQ ID NO: 44426 - DNA, 20 bp, synthetic construct
  misc_feature 1..20: note = Description of Artificial Sequence: Synthetic oligonucleotide
  misc_feature 1..20: note = Target: SCN10A; (-) strand; PAM type: YTN; PAM sequence: CTA
  source 1..20: mol_type = other DNA
atcaccttaaacggtcatgc

SEQ ID NO: 44427 - DNA, 20 bp, synthetic construct
  misc_feature 1..20: note = Description of Artificial Sequence: Synthetic oligonucleotide
  misc_feature 1..20: note = Target: SCN10A; (-) strand; PAM type: YTN; PAM sequence: CTC
  source 1..20: mol_type = other DNA
agtcctaatcaccttaaacg

SEQ ID NO: 44428 - DNA, 20 bp, synthetic construct
  misc_feature 1..20: note = Description of Artificial Sequence: Synthetic oligonucleotide
  misc_feature 1..20: note = Target: SCN10A; (-) strand; PAM type: YTN; PAM sequence: CTC
  source 1..20: mol_type = other DNA
accagtctcagtcctaatca

SEQ ID NO: 44429 - DNA, 20 bp, synthetic construct
  misc_feature 1..20: note = Description of Artificial Sequence: Synthetic oligonucleotide
  misc_feature 1..20: note = Target: SCN10A; (-) strand; PAM type: YTN; PAM sequence: TTG
  source 1..20: mol_type = other DNA
atctcaccagtctcagtcct

SEQ ID NO: 44430 - DNA, 20 bp, synthetic construct
  misc_feature 1..20: note = Description of Artificial Sequence: Synthetic oligonucleotide
  misc_feature 1..20: note = Target: SCN10A; (-) strand; PAM type: YTN; PAM sequence: TTA
  source 1..20: mol_type = other DNA
tgttgatctcaccagtctca

SEQ ID NO: 44431 - DNA, 20 bp, synthetic construct
  misc_feature 1..20: note = Description of Artificial Sequence: Synthetic oligonucleotide
  misc_feature 1..20: note = Target: SCN10A; (-) strand; PAM type: YTN; PAM sequence: CTT
  source 1..20: mol_type = other DNA
atgttgatctcaccagtctc

SEQ ID NO: 44432 - DNA, 20 bp, synthetic construct
  misc_feature 1..20: note = Description of Artificial Sequence: Synthetic oligonucleotide
  misc_feature 1..20: note = Target: SCN10A; (-) strand; PAM type: YTN; PAM sequence: CTG
  source 1..20: mol_type = other DNA
cttatgttgatctcaccagt

SEQ ID NO: 44433 - DNA, 20 bp, synthetic construct
  misc_feature 1..20: note = Description of Artificial Sequence: Synthetic oligonucleotide
  misc_feature 1..20: note = Target: SCN10A; (-) strand; PAM type: YTN; PAM sequence: CTC
  source 1..20: mol_type = other DNA
ctgcttatgttgatctcacc

SEQ ID NO: 44434 - DNA, 20 bp, synthetic construct
  misc_feature 1..20: note = Description of Artificial Sequence: Synthetic oligonucleotide
  misc_feature 1..20: note = Target: SCN10A; (-) strand; PAM type: YTN; PAM sequence: TTG
  source 1..20: mol_type = other DNA
ggggcacagtcactcctgct

SEQ ID NO: 44435 - DNA, 20 bp, synthetic construct
  misc_feature 1..20: note = Description of Artificial Sequence: Synthetic oligonucleotide
  misc_feature 1..20: note = Target: SCN10A; (-) strand; PAM type: YTN; PAM sequence: TTT
  source 1..20: mol_type = other DNA
gggggcacagtcactcctgc

SEQ ID NO: 44436 - DNA, 20 bp, synthetic construct
  misc_feature 1..20: note = Description of Artificial Sequence: Synthetic oligonucleotide
  misc_feature 1..20: note = Target: SCN10A; (-) strand; PAM type: YTN; PAM sequence: CTT
  source 1..20: mol_type = other DNA
tgggggcacagtcactcctg

SEQ ID NO: 44437 - DNA, 20 bp, synthetic construct
  misc_feature 1..20: note = Description of Artificial Sequence: Synthetic oligonucleotide
  misc_feature 1..20: note = Target: SCN10A; (-) strand; PAM type: YTN; PAM sequence: TTC
  source 1..20: mol_type = other DNA
cggtgtcccacccctttggg

SEQ ID NO: 44438 - DNA, 20 bp, synthetic construct
  misc_feature 1..20: note = Description of Artificial Sequence: Synthetic oligonucleotide
  misc_feature 1..20: note = Target: SCN10A; (-) strand; PAM type: YTN; PAM sequence: TTA
  source 1..20: mol_type = other DNA
ttccggtgtcccaccccttt

SEQ ID NO: 44439 - DNA, 20 bp, synthetic construct
  misc_feature 1..20: note = Description of Artificial Sequence: Synthetic oligonucleotide
  misc_feature 1..20: note = Target: SCN10A; (-) strand; PAM type: YTN; PAM sequence: TTT
  source 1..20: mol_type = other DNA
attccggtgtcccacccctt

SEQ ID NO: 44440 - DNA, 20 bp, synthetic construct
  misc_feature 1..20: note = Description of Artificial Sequence: Synthetic oligonucleotide
  misc_feature 1..20: note = Target: SCN10A; (-) strand; PAM type: YTN; PAM sequence: TTA
  source 1..20: mol_type = other DNA
tttattccggtgtcccaccc

SEQ ID NO: 44441 - DNA, 20 bp, synthetic construct
  misc_feature 1..20: note = Description of Artificial Sequence: Synthetic oligonucleotide
  misc_feature 1..20: note = Target: SCN10A; (-) strand; PAM type: YTN; PAM sequence: TTC
  source 1..20: mol_type = other DNA
ataaatgaaaggaaaattat

SEQ ID NO: 44442 - DNA, 20 bp, synthetic construct
  misc_feature 1..20: note = Description of Artificial Sequence: Synthetic oligonucleotide
  misc_feature 1..20: note = Target: SCN10A; (-) strand; PAM type: YTN; PAM sequence: TTA
  source 1..20: mol_type = other DNA
ttcataaatgaaaggaaaat

SEQ ID NO: 44443 - DNA, 20 bp, synthetic construct
  misc_feature 1..20: note = Description of Artificial Sequence: Synthetic oligonucleotide
  misc_feature 1..20: note = Target: SCN10A; (-) strand; PAM type: YTN; PAM sequence: CTG
  source 1..20: mol_type = other DNA
tgcatatgaaataattattc

SEQ ID NO: 44444 - DNA, 20 bp, synthetic construct
  misc_feature 1..20: note = Description of Artificial Sequence: Synthetic oligonucleotide
  misc_feature 1..20: note = Target: SCN10A; (-) strand; PAM type: YTN; PAM sequence: TTC
  source 1..20: mol_type = other DNA
tgtgcatatgaaataattat

SEQ ID NO: 44445 - DNA, 20 bp, synthetic construct
  misc_feature 1..20: note = Description of Artificial Sequence: Synthetic oligonucleotide
  misc_feature 1..20: note = Target: SCN10A; (-) strand; PAM type: YTN; PAM sequence: CTG
  source 1..20: mol_type = other DNA
agtcatgggtgataattctg

SEQ ID NO: 44446 - DNA, 20 bp, synthetic construct
  misc_feature 1..20: note = Description of Artificial Sequence: Synthetic oligonucleotide
  misc_feature 1..20: note = Target: SCN10A; (-) strand; PAM type: YTN; PAM sequence: CTG
  source 1..20: mol_type = other DNA
aaatctgagtcatgggtgat

SEQ ID NO: 44447 - DNA, 20 bp, synthetic construct
  misc_feature 1..20: note = Description of Artificial Sequence: Synthetic oligonucleotide
  misc_feature 1..20: note = Target: SCN10A; (-) strand; PAM type: YTN; PAM sequence: CTG
  source 1..20: mol_type = other DNA
tgaggcctgaaatctgagtc

SEQ ID NO: 44448 - DNA, 20 bp, synthetic construct
  misc_feature 1..20: note = Description of Artificial Sequence: Synthetic oligonucleotide
  misc_feature 1..20: note = Target: SCN10A; (-) strand; PAM type: YTN; PAM sequence: TTA
  source 1..20: mol_type = other DNA
gctgtgaggcctgaaatctg

SEQ ID NO: 44449 - DNA, 20 bp, synthetic construct
  misc_feature 1..20: note = Description of Artificial Sequence: Synthetic oligonucleotide
  misc_feature 1..20: note = Target: SCN10A; (-) strand; PAM type: YTN; PAM sequence: CTG
  source 1..20: mol_type = other DNA
taccacaaggattagctgtg

SEQ ID NO: 44450 - DNA, 20 bp, synthetic construct
  misc_feature 1..20: note = Description of Artificial Sequence: Synthetic oligonucleotide
  misc_feature 1..20: note = Target: SCN10A; (-) strand; PAM type: YTN; PAM sequence: TTC
  source 1..20: mol_type = other DNA
aggccactgtaccacaagga

SEQ ID NO: 44451 - DNA, 20 bp, synthetic construct
  misc_feature 1..20: note = Description of Artificial Sequence: Synthetic oligonucleotide
  misc_feature 1..20: note = Target: SCN10A; (-) strand; PAM type: YTN; PAM sequence: CTT
  source 1..20: mol_type = other DNA
caggccactgtaccacaagg

SEQ ID NO: 44452 - DNA, 20 bp, synthetic construct
  misc_feature 1..20: note = Description of Artificial Sequence: Synthetic oligonucleotide
  misc_feature 1..20: note = Target: SCN10A; (-) strand; PAM type: YTN; PAM sequence: CTA
  source 1..20: mol_type = other DNA
gcagcttcaggccactgtac

SEQ ID NO: 44453 - DNA, 20 bp, synthetic construct
  misc_feature 1..20: note = Description of Artificial Sequence: Synthetic oligonucleotide
  misc_feature 1..20: note = Target: SCN10A; (-) strand; PAM type: YTN; PAM sequence: CTG
  source 1..20: mol_type = other DNA
atgccaatgcactagcagct

SEQ ID NO: 44454 - DNA, 20 bp, synthetic construct
  misc_feature 1..20: note = Description of Artificial Sequence: Synthetic oligonucleotide
  misc_feature 1..20: note = Target: SCN10A; (-) strand; PAM type: YTN; PAM sequence: TTC
  source 1..20: mol_type = other DNA
cctgatgccaatgcactagc

SEQ ID NO: 44455 - DNA, 20 bp, synthetic construct
  misc_feature 1..20: note = Description of Artificial Sequence: Synthetic oligonucleotide
  misc_feature 1..20: note = Target: SCN10A; (-) strand; PAM type: YTN; PAM sequence: CTT
  source 1..20: mol_type = other DNA
ccctgatgccaatgcactag

SEQ ID NO: 44456 - DNA, 20 bp, synthetic construct
  misc_feature 1..20: note = Description of Artificial Sequence: Synthetic oligonucleotide
  misc_feature 1..20: note = Target: SCN10A; (-) strand; PAM type: YTN; PAM sequence: TTC
  source 1..20: mol_type = other DNA
ttccctgatgccaatgcact

SEQ ID NO: 44457 - DNA, 20 bp, synthetic construct
  misc_feature 1..20: note = Description of Artificial Sequence: Synthetic oligonucleotide
  misc_feature 1..20: note = Target: SCN10A; (-) strand; PAM type: YTN; PAM sequence: CTT
  source 1..20: mol_type = other DNA
cttccctgatgccaatgcac

SEQ ID NO: 44458 - DNA, 20 bp, synthetic construct
  misc_feature 1..20: note = Description of Artificial Sequence: Synthetic oligonucleotide
  misc_feature 1..20: note = Target: SCN10A; (-) strand; PAM type: YTN; PAM sequence: CTC
  source 1..20: mol_type = other DNA
ttcttccctgatgccaatgc

SEQ ID NO: 44459 - DNA, 20 bp, synthetic construct
  misc_feature 1..20: note = Description of Artificial Sequence: Synthetic oligonucleotide
  misc_feature 1..20: note = Target: SCN10A; (-) strand; PAM type: YTN; PAM sequence: TTC
  source 1..20: mol_type = other DNA
tcttcttccctgatgccaat

SEQ ID NO: 44460 - DNA, 20 bp, synthetic construct
  misc_feature 1..20: note = Description of Artificial Sequence: Synthetic oligonucleotide
  misc_feature 1..20: note = Target: SCN10A; (-) strand; PAM type: YTN; PAM sequence: TTC
  source 1..20: mol_type = other DNA
aattctcttcttccctgatg

SEQ ID NO: 44461 - DNA, 20 bp, synthetic construct
  misc_feature 1..20: note = Description of Artificial Sequence: Synthetic oligonucleotide
  misc_feature 1..20: note = Target: SCN10A; (-) strand; PAM type: YTN; PAM sequence: CTG
  source 1..20: mol_type = other DNA
tgcattcaattctcttcttc

SEQ ID NO: 44462 - DNA, 20 bp, synthetic construct
  misc_feature 1..20: note = Description of Artificial Sequence: Synthetic oligonucleotide
  misc_feature 1..20: note = Target: SCN10A; (-) strand; PAM type: YTN; PAM sequence: CTC
  source 1..20: mol_type = other DNA
catagcaggcctgtgcattc

SEQ ID NO: 44463 - DNA, 20 bp, synthetic construct
  misc_feature 1..20: note = Description of Artificial Sequence: Synthetic oligonucleotide
  misc_feature 1..20: note = Target: SCN10A; (-) strand; PAM type: YTN; PAM sequence: CTG
  source 1..20: mol_type = other DNA
gcaggtcctccatagcaggc

SEQ ID NO: 44464 - DNA, 20 bp, synthetic construct
  misc_feature 1..20: note = Description of Artificial Sequence: Synthetic oligonucleotide
  misc_feature 1..20: note = Target: SCN10A; (-) strand; PAM type: YTN; PAM sequence: CTG
  source 1..20: mol_type = other DNA
tgctggcaggtcctccatag

SEQ ID NO: 44465 - DNA, 20 bp, synthetic construct
  misc_feature 1..20: note = Description of Artificial Sequence: Synthetic oligonucleotide
  misc_feature 1..20: note = Target: SCN10A; (-) strand; PAM type: YTN; PAM sequence: CTC
  source 1..20: mol_type = other DNA
ctgtgctggcaggtcctcca

SEQ ID NO: 44466 - DNA, 20 bp, synthetic construct
  misc_feature 1..20: note = Description of Artificial Sequence: Synthetic oligonucleotide
  misc_feature 1..20: note = Target: SCN10A; (-) strand; PAM type: YTN; PAM sequence: CTG
  source 1..20: mol_type = other DNA
tccagcctcctgtgctggca

SEQ ID NO: 44467 - DNA, 20 bp, synthetic construct
  misc_feature 1..20: note = Description of Artificial Sequence: Synthetic oligonucleotide
  misc_feature 1..20: note = Target: SCN10A; (-) strand; PAM type: YTN; PAM sequence: TTC
  source 1..20: mol_type = other DNA
tgtccagcctcctgtgctgg

SEQ ID NO: 44468 - DNA, 20 bp, synthetic construct
  misc_feature 1..20: note = Description of Artificial Sequence: Synthetic oligonucleotide
  misc_feature 1..20: note = Target: SCN10A; (-) strand; PAM type: YTN; PAM sequence: TTC
  source 1..20: mol_type = other DNA
agcacagaacattctgtcca

SEQ ID NO: 44469 - DNA, 20 bp, synthetic construct
  misc_feature 1..20: note = Description of Artificial Sequence: Synthetic oligonucleotide
  misc_feature 1..20: note = Target: SCN10A; (-) strand; PAM type: YTN; PAM sequence: CTG
  source 1..20: mol_type = other DNA
gatgaggttcagcacagaac

SEQ ID NO: 44470 - DNA, 20 bp, synthetic construct
  misc_feature 1..20: note = Description of Artificial Sequence: Synthetic oligonucleotide
  misc_feature 1..20: note = Target: SCN10A; (-) strand; PAM type: YTN; PAM sequence: CTG
  source 1..20: mol_type = other DNA
aagctggatgaggttcagca

SEQ ID NO: 44471 - DNA, 20 bp, synthetic construct
  misc_feature 1..20: note = Description of Artificial Sequence: Synthetic oligonucleotide
  misc_feature 1..20: note = Target: SCN10A; (-) strand; PAM type: YTN; PAM sequence: CTC
  source 1..20: mol_type = other DNA
ctgaagctggatgaggttca

SEQ ID NO: 44472 - DNA, 20 bp, synthetic construct
  misc_feature 1..20: note = Description of Artificial Sequence: Synthetic oligonucleotide
  misc_feature 1..20: note = Target: SCN10A; (-) strand; PAM type: YTN; PAM sequence: TTG
  source 1..20: mol_type = other DNA
cctcctgaagctggatgagg

SEQ ID NO: 44473 - DNA, 20 bp, synthetic construct
  misc_feature 1..20: note = Description of Artificial Sequence: Synthetic oligonucleotide
  misc_feature 1..20: note = Target: SCN10A; (-) strand; PAM type: YTN; PAM sequence: CTT
  source 1..20: mol_type = other DNA
gcctcctgaagctggatgag

SEQ ID NO: 44474 - DNA, 20 bp, synthetic construct
  misc_feature 1..20: note = Description of Artificial Sequence: Synthetic oligonucleotide
  misc_feature 1..20: note = Target: SCN10A; (-) strand; PAM type: YTN; PAM sequence: TTG
  source 1..20: mol_type = other DNA
gtgcttgcctcctgaagctg

SEQ ID NO: 44475 - DNA, 20 bp, synthetic construct
  misc_feature 1..20: note = Description of Artificial Sequence: Synthetic oligonucleotide
  misc_feature 1..20: note = Target: SCN10A; (-) strand; PAM type: YTN; PAM sequence: TTT
  source 1..20: mol_type = other DNA
ggtgcttgcctcctgaagct

SEQ ID NO: 44476 - DNA, 20 bp, synthetic construct
  misc_feature 1..20: note = Description of Artificial Sequence: Synthetic oligonucleotide
  misc_feature 1..20: note = Target: SCN10A; (-) strand; PAM type: YTN; PAM sequence: CTG
  source 1..20: mol_type = other DNA
tatttggtgcttgcctcctg

SEQ ID NO: 44477 - DNA, 20 bp, synthetic construct
  misc_feature 1..20: note = Description of Artificial Sequence: Synthetic oligonucleotide
  misc_feature 1..20: note = Target: SCN10A; (-) strand; PAM type: YTN; PAM sequence: CTG
  source 1..20: mol_type = other DNA
cccagcagaggtgtcaggaa

SEQ ID NO: 44478 - DNA, 20 bp, synthetic construct
  misc_feature 1..20: note = Description of Artificial Sequence: Synthetic oligonucleotide
  misc_feature 1..20: note = Target: SCN10A; (-) strand; PAM type: YTN; PAM sequence: CTG
  source 1..20: mol_type = other DNA
ccagcagcaaggtctgccca

SEQ ID NO: 44479 - DNA, 20 bp, synthetic construct
  misc_feature 1..20: note = Description of Artificial Sequence: Synthetic oligonucleotide
  misc_feature 1..20: note = Target: SCN10A; (-) strand; PAM type: YTN; PAM sequence: CTC
  source 1..20: mol_type = other DNA
aagcagctgccagcagcaag

SEQ ID NO: 44480 - DNA, 20 bp, synthetic construct
  misc_feature 1..20: note = Description of Artificial Sequence: Synthetic oligonucleotide
  misc_feature 1..20: note = Target: SCN10A; (-) strand; PAM type: YTN; PAM sequence: CTG
  source 1..20: mol_type = other DNA
ccccactcaagcagctgcca

SEQ ID NO: 44481 - DNA, 20 bp, synthetic construct
  misc_feature 1..20: note = Description of Artificial Sequence: Synthetic oligonucleotide
  misc_feature 1..20: note = Target: SCN10A; (-) strand; PAM type: YTN; PAM sequence: CTG
  source 1..20: mol_type = other DNA
cctgccccactcaagcagct

SEQ ID NO: 44482 - DNA, 20 bp, synthetic construct
  misc_feature 1..20: note = Description of Artificial Sequence: Synthetic oligonucleotide
  misc_feature 1..20: note = Target: SCN10A; (-) strand; PAM type: YTN; PAM sequence: CTC
  source 1..20: mol_type = other DNA
tgcctgccccactcaagcag

SEQ ID NO: 44483 - DNA, 20 bp, synthetic construct
  misc_feature 1..20: note = Description of Artificial Sequence: Synthetic oligonucleotide
  misc_feature 1..20: note = Target: SCN10A; (-) strand; PAM type: YTN; PAM sequence: TTG
  source 1..20: mol_type = other DNA
gtctctgcctgccccactca

SEQ ID NO: 44484 - DNA, 20 bp, synthetic construct
  misc_feature 1..20: note = Description of Artificial Sequence: Synthetic oligonucleotide
  misc_feature 1..20: note = Target: SCN10A; (-) strand; PAM type: YTN; PAM sequence: CTG
  source 1..20: mol_type = other DNA
tgttggtctctgcctgcccc

SEQ ID NO: 44485 - DNA, 20 bp, synthetic construct
  misc_feature 1..20: note = Description of Artificial Sequence: Synthetic oligonucleotide
  misc_feature 1..20: note = Target: SCN10A; (-) strand; PAM type: YTN; PAM sequence: CTG
  source 1..20: mol_type = other DNA
caagcagggtgaggcatgtg

SEQ ID NO: 44486 - DNA, 20 bp, synthetic construct
  misc_feature 1..20: note = Description of Artificial Sequence: Synthetic oligonucleotide
  misc_feature 1..20: note = Target: SCN10A; (-) strand; PAM type: YTN; PAM sequence: TTC
  source 1..20: mol_type = other DNA
tgcaagcagggtgaggcatg

SEQ ID NO: 44487 - DNA, 20 bp, synthetic construct
  misc_feature 1..20: note = Description of Artificial Sequence: Synthetic oligonucleotide
  misc_feature 1..20: note = Target: SCN10A; (-) strand; PAM type: YTN; PAM sequence: TTT
  source 1..20: mol_type = other DNA
ctgcaagcagggtgaggcat

SEQ ID NO: 44488 - DNA, 20 bp, synthetic construct
  misc_feature 1..20: note = Description of Artificial Sequence: Synthetic oligonucleotide
  misc_feature 1..20: note = Target: SCN10A; (-) strand; PAM type: YTN; PAM sequence: CTG
  source 1..20: mol_type = other DNA
agggtttctgcaagcagggt

SEQ ID NO: 44489 - DNA, 20 bp, synthetic construct
  misc_feature 1..20: note = Description of Artificial Sequence: Synthetic oligonucleotide
  misc_feature 1..20: note = Target: SCN10A; (-) strand; PAM type: YTN; PAM sequence: CTG
  source 1..20: mol_type = other DNA
ccgcatagctgagggtttct

SEQ ID NO: 44490 - DNA, 20 bp, synthetic construct
  misc_feature 1..20: note = Description of Artificial Sequence: Synthetic oligonucleotide
  misc_feature 1..20: note = Target: SCN10A; (-) strand; PAM type: YTN; PAM sequence: TTC
  source 1..20: mol_type = other DNA
actgccgcatagctgagggt

SEQ ID NO: 44491 - DNA, 20 bp, synthetic construct
  misc_feature 1..20: note = Description of Artificial Sequence: Synthetic oligonucleotide
  misc_feature 1..20: note = Target: SCN10A; (-) strand; PAM type: YTN; PAM sequence: CTG
  source 1..20: mol_type = other DNA
ttcactgccgcatagctgag

SEQ ID NO: 44492 - DNA, 20 bp, synthetic construct
  misc_feature 1..20: note = Description of Artificial Sequence: Synthetic oligonucleotide
  misc_feature 1..20: note = Target: SCN10A; (-) strand; PAM type: YTN; PAM sequence: TTA
  source 1..20: mol_type = other DNA
tctgttcactgccgcatagc

SEQ ID NO: 44493 - DNA, 20 bp, synthetic construct
  misc_feature 1..20: note = Description of Artificial Sequence: Synthetic oligonucleotide
  misc_feature 1..20: note = Target: SCN10A; (-) strand; PAM type: YTN; PAM sequence: CTG
  source 1..20: mol_type = other DNA
agttatctgttcactgccgc

SEQ ID NO: 44494 - DNA, 20 bp, synthetic construct
  misc_feature 1..20: note = Description of Artificial Sequence: Synthetic oligonucleotide
  misc_feature 1..20: note = Target: SCN10A; (-) strand; PAM type: YTN; PAM sequence: TTA
  source 1..20: mol_type = other DNA
actgagttatctgttcactg

SEQ ID NO: 44495 - DNA, 20 bp, synthetic construct
  misc_feature 1..20: note = Description of Artificial Sequence: Synthetic oligonucleotide
  misc_feature 1..20: note = Target: SCN10A; (-) strand; PAM type: YTN; PAM sequence: TTG
  source 1..20: mol_type = other DNA
cagcatggttaactgagtta

SEQ ID NO: 44496 - DNA, 20 bp, synthetic construct
  misc_feature 1..20: note = Description of Artificial Sequence: Synthetic oligonucleotide
  misc_feature 1..20: note = Target: SCN10A; (-) strand; PAM type: YTN; PAM sequence: TTT
  source 1..20: mol_type = other DNA
gcagcatggttaactgagtt

SEQ ID NO: 44497 - DNA, 20 bp, synthetic construct
  misc_feature 1..20: note = Description of Artificial Sequence: Synthetic oligonucleotide
  misc_feature 1..20: note = Target: SCN10A; (-) strand; PAM type: YTN; PAM sequence: CTT
  source 1..20: mol_type = other DNA
tgcagcatggttaactgagt

SEQ ID NO: 44498 - DNA, 20 bp, synthetic construct
  misc_feature 1..20: note = Description of Artificial Sequence: Synthetic oligonucleotide
  misc_feature 1..20: note = Target: SCN10A; (-) strand; PAM type: YTN; PAM sequence: TTG
  source 1..20: mol_type = other DNA
ctttgcagcatggttaactg

SEQ ID NO: 44499 - DNA, 20 bp, synthetic construct
  misc_feature 1..20: note = Description of Artificial Sequence: Synthetic oligonucleotide
  misc_feature 1..20: note = Target: SCN10A; (-) strand; PAM type: YTN; PAM sequence: TTT
  source 1..20: mol_type = other DNA
gctttgcagcatggttaact

SEQ ID NO: 44500 - DNA, 20 bp, synthetic construct
  misc_feature 1..20: note = Description of Artificial Sequence: Synthetic oligonucleotide
  misc_feature 1..20: note = Target: SCN10A; (-) strand; PAM type: YTN; PAM sequence: CTT
  source 1..20: mol_type = other DNA
tgctttgcagcatggttaac

SEQ ID NO: 44501 - DNA, 20 bp, synthetic construct
  misc_feature 1..20: note = Description of Artificial Sequence: Synthetic oligonucleotide
  misc_feature 1..20: note = Target: SCN10A; (-) strand; PAM type: YTN; PAM sequence: TTC
  source 1..20: mol_type = other DNA
tttgctttgcagcatggtta

SEQ ID NO: 44502 - DNA, 20 bp, synthetic construct
  misc_feature 1..20: note = Description of Artificial Sequence: Synthetic oligonucleotide
  misc_feature 1..20: note = Target: SCN10A; (-) strand; PAM type: YTN; PAM sequence: CTT
  source 1..20: mol_type = other DNA
ctttgctttgcagcatggtt

SEQ ID NO: 44503 - DNA, 20 bp, synthetic construct
  misc_feature 1..20: note = Description of Artificial Sequence: Synthetic oligonucleotide
  misc_feature 1..20: note = Target: SCN10A; (-) strand; PAM type: YTN; PAM sequence: CTA
  source 1..20: mol_type = other DNA
ccttctttgctttgcagcat

SEQ ID NO: 44504 - DNA, 20 bp, synthetic construct
  misc_feature 1..20: note = Description of Artificial Sequence: Synthetic oligonucleotide
  misc_feature 1..20: note = Target: SCN10A; (-) strand; PAM type: YTN; PAM sequence: CTA
  source 1..20: mol_type = other DNA
ggccactaccttctttgctt

SEQ ID NO: 44505 - DNA, 20 bp, synthetic construct
  misc_feature 1..20: note = Description of Artificial Sequence: Synthetic oligonucleotide
  misc_feature 1..20: note = Target: SCN10A; (-) strand; PAM type: YTN; PAM sequence: CTG
  source 1..20: mol_type = other DNA
tctaggccactaccttcttt

SEQ ID NO: 44506 - DNA, 20 bp, synthetic construct
  misc_feature 1..20: note = Description of Artificial Sequence: Synthetic oligonucleotide
  misc_feature 1..20: note = Target: SCN10A; (-) strand; PAM type: YTN; PAM sequence: CTA
  source 1..20: mol_type = other DNA
tcactgtctaggccactacc

SEQ ID NO: 44507 - DNA, 20 bp, synthetic construct
  misc_feature 1..20: note = Description of Artificial Sequence: Synthetic oligonucleotide
  misc_feature 1..20: note = Target: SCN10A; (-) strand; PAM type: YTN; PAM sequence: TTG
  source 1..20: mol_type = other DNA
cactatcactgtctaggcca

SEQ ID NO: 44508 - DNA, 20 bp, synthetic construct
  misc_feature 1..20: note = Description of Artificial Sequence: Synthetic oligonucleotide
  misc_feature 1..20: note = Target: SCN10A; (-) strand; PAM type: YTN; PAM sequence: TTA
  source 1..20: mol_type = other DNA
accaccacattgcactatca

SEQ ID NO: 44509 - DNA, 20 bp, synthetic construct
  misc_feature 1..20: note = Description of Artificial Sequence: Synthetic oligonucleotide
  misc_feature 1..20: note = Target: SCN10A; (-) strand; PAM type: YTN; PAM sequence: CTT
  source 1..20: mol_type = other DNA
aaccaccacattgcactatc

SEQ ID NO: 44510 - DNA, 20 bp, synthetic construct
  misc_feature 1..20: note = Description of Artificial Sequence: Synthetic oligonucleotide
  misc_feature 1..20: note = Target: SCN10A; (-) strand; PAM type: YTN; PAM sequence: CTC
  source 1..20: mol_type = other DNA
atcttaaccaccacattgca

SEQ ID NO: 44511 - DNA, 20 bp, synthetic construct
  misc_feature 1..20: note = Description of Artificial Sequence: Synthetic oligonucleotide
  misc_feature 1..20: note = Target: SCN10A; (-) strand; PAM type: YTN; PAM sequence: TTC
  source 1..20: mol_type = other DNA
ctcatcttaaccaccacatt

SEQ ID NO: 44512 - DNA, 20 bp, synthetic construct
  misc_feature 1..20: note = Description of Artificial Sequence: Synthetic oligonucleotide
  misc_feature 1..20: note = Target: SCN10A; (-) strand; PAM type: YTN; PAM sequence: CTT
  source 1..20: mol_type = other DNA
cctcatcttaaccaccacat

SEQ ID NO: 44513 - DNA, 20 bp, synthetic construct
  misc_feature 1..20: note = Description of Artificial Sequence: Synthetic oligonucleotide
  misc_feature 1..20: note = Target: SCN10A; (-) strand; PAM type: YTN; PAM sequence: CTC
  source 1..20: mol_type = other DNA
ttcctcatcttaaccaccac

SEQ ID NO: 44514 - DNA, 20 bp, synthetic construct
  misc_feature 1..20: note = Description of Artificial Sequence: Synthetic oligonucleotide
  misc_feature 1..20: note = Target: SCN10A; (-) strand; PAM type: YTN; PAM sequence: CTC
  source 1..20: mol_type = other DNA
agtcatctcttcctcatctt

SEQ ID NO: 44515 - DNA, 20 bp, synthetic construct
  misc_feature 1..20: note = Description of Artificial Sequence: Synthetic oligonucleotide
  misc_feature 1..20: note = Target: SCN10A; (-) strand; PAM type: YTN; PAM sequence: TTC
  source 1..20: mol_type = other DNA
ctcagtcatctcttcctcat

SEQ ID NO: 44516 - DNA, 20 bp, synthetic construct
  misc_feature 1..20: note = Description of Artificial Sequence: Synthetic oligonucleotide
  misc_feature 1..20: note = Target: SCN10A; (-) strand; PAM type: YTN; PAM sequence: CTC
  source 1..20: mol_type = other DNA
acacatcagacatgtgattc

SEQ ID NO: 44517 - DNA, 20 bp, synthetic construct
  misc_feature 1..20: note = Description of Artificial Sequence: Synthetic oligonucleotide
  misc_feature 1..20: note = Target: SCN10A; (-) strand; PAM type: YTN; PAM sequence: TTC
  source 1..20: mol_type = other DNA
tcacacatcagacatgtgat

SEQ ID NO: 44518 - DNA, 20 bp, synthetic construct
  misc_feature 1..20: note = Description of Artificial Sequence: Synthetic oligonucleotide
  misc_feature 1..20: note = Target: SCN10A; (-) strand; PAM type: YTN; PAM sequence: CTT
  source 1..20: mol_type = other DNA
ctcacacatcagacatgtga

SEQ ID NO: 44519 - DNA, 20 bp, synthetic construct
  misc_feature 1..20: note = Description of Artificial Sequence: Synthetic oligonucleotide
  misc_feature 1..20: note = Target: SCN10A; (-) strand; PAM type: YTN; PAM sequence: CTG
  source 1..20: mol_type = other DNA
tgtgcttctcacacatcaga

SEQ ID NO: 44520 - DNA, 20 bp, synthetic construct
  misc_feature 1..20: note = Description of Artificial Sequence: Synthetic oligonucleotide
  misc_feature 1..20: note = Target: SCN10A; (-) strand; PAM type: YTN; PAM sequence: TTG
  source 1..20: mol_type = other DNA
actgtgtgcttctcacacat

SEQ ID NO: 44521 - DNA, 20 bp, synthetic construct
  misc_feature 1..20: note = Description of Artificial Sequence: Synthetic oligonucleotide
  misc_feature 1..20: note = Target: SCN10A; (-) strand; PAM type: YTN; PAM sequence: TTA
  source 1..20: mol_type = other DNA
gagaattgactgtgtgcttc

SEQ ID NO: 44522 - DNA, 20 bp, synthetic construct
  misc_feature 1..20: note = Description of Artificial Sequence: Synthetic oligonucleotide
  misc_feature 1..20: note = Target: SCN10A; (-) strand; PAM type: YTN; PAM sequence: CTG
  source 1..20: mol_type = other DNA
cattagagaattgactgtgt

SEQ ID NO: 44523 - DNA, 20 bp, synthetic construct
  misc_feature 1..20: note = Description of Artificial Sequence: Synthetic oligonucleotide
  misc_feature 1..20: note = Target: SCN10A; (-) strand; PAM type: YTN; PAM sequence: CTG
  source 1..20: mol_type = other DNA
tggccagtaatccctgcatt

SEQ ID NO: 44524 - DNA, 20 bp, synthetic construct
  misc_feature 1..20: note = Description of Artificial Sequence: Synthetic oligonucleotide
  misc_feature 1..20: note = Target: SCN10A; (-) strand; PAM type: YTN; PAM sequence: CTC
  source 1..20: mol_type = other DNA
atggtaacctgtggccagta

SEQ ID NO: 44525 - DNA, 20 bp, synthetic construct
  misc_feature 1..20: note = Description of Artificial Sequence: Synthetic oligonucleotide
  misc_feature 1..20: note = Target: SCN10A; (-) strand; PAM type: YTN; PAM sequence: TTC
  source 1..20: mol_type = other DNA
acactcatggtaacctgtgg

SEQ ID NO: 44526 - DNA, 20 bp, synthetic construct
  misc_feature 1..20: note = Description of Artificial Sequence: Synthetic oligonucleotide
  misc_feature 1..20: note = Target: SCN10A; (-) strand; PAM type: YTN; PAM sequence: TTC
  source 1..20: mol_type = other DNA
atgtgttcacactcatggta

SEQ ID NO: 44527 - DNA, 20 bp, synthetic construct
  misc_feature 1..20: note = Description of Artificial Sequence: Synthetic oligonucleotide
  misc_feature 1..20: note = Target: SCN10A; (-) strand; PAM type: YTN; PAM sequence: CTG
  source 1..20: mol_type = other DNA
gagttcatgtgttcacactc

SEQ ID NO: 44528 - DNA, 20 bp, synthetic construct
  misc_feature 1..20: note = Description of Artificial Sequence: Synthetic oligonucleotide
  misc_feature 1..20: note = Target: SCN10A; (-) strand; PAM type: YTN; PAM sequence: TTG
  source 1..20: mol_type = other DNA
gagaggtaatgagctggagt

SEQ ID NO: 44529 - DNA, 20 bp, synthetic construct
  misc_feature 1..20: note = Description of Artificial Sequence: Synthetic oligonucleotide
  misc_feature 1..20: note = Target: SCN10A; (-) strand; PAM type: YTN; PAM sequence: TTT
  source 1..20: mol_type = other DNA
ggagaggtaatgagctggag

SEQ ID NO: 44530 - DNA, 20 bp, synthetic construct
  misc_feature 1..20: note = Description of Artificial Sequence: Synthetic oligonucleotide
  misc_feature 1..20: note = Target: SCN10A; (-) strand; PAM type: YTN; PAM sequence: TTG
  source 1..20: mol_type = other DNA
aaaagaacagagggcgcatt

SEQ ID NO: 44531 - DNA, 20 bp, synthetic construct
  misc_feature 1..20: note = Description of Artificial Sequence: Synthetic oligonucleotide
  misc_feature 1..20: note = Target: SCN10A; (-) strand; PAM type: YTN; PAM sequence: CTC
  source 1..20: mol_type = other DNA
cccagtggcattgaaaagaa

SEQ ID NO: 44532 - DNA, 20 bp, synthetic construct
  misc_feature 1..20: note = Description of Artificial Sequence: Synthetic oligonucleotide
  misc_feature 1..20: note = Target: SCN10A; (-) strand; PAM type: YTN; PAM sequence: CTC
  source 1..20: mol_type = other DNA
ctccccagtggcattgaaaa

SEQ ID NO: 44533 - DNA, 20 bp, synthetic construct
  misc_feature 1..20: note = Description of Artificial Sequence: Synthetic oligonucleotide
  misc_feature 1..20: note = Target: SCN10A; (-) strand; PAM type: YTN; PAM sequence: CTG
  source 1..20: mol_type = other DNA
cctcctccccagtggcattg

SEQ ID NO: 44534 - DNA, 20 bp, synthetic construct
  misc_feature 1..20: note = Description of Artificial Sequence: Synthetic oligonucleotide
  misc_feature 1..20: note = Target: SCN10A; (-) strand; PAM type: YTN; PAM sequence: CTG
  source 1..20: mol_type = other DNA
ctgcctcctccccagtggca

SEQ ID NO: 44535 - DNA, 20 bp, synthetic construct
  misc_feature 1..20: note = Description of Artificial Sequence: Synthetic oligonucleotide
  misc_feature 1..20: note = Target: SCN10A; (-) strand; PAM type: YTN; PAM sequence: TTA
  source 1..20: mol_type = other DNA
tactgctgcctcctccccag

SEQ ID NO: 44536 - DNA, 20 bp, synthetic construct
  misc_feature 1..20: note = Description of Artificial Sequence: Synthetic oligonucleotide
  misc_feature 1..20: note = Target: SCN10A; (-) strand; PAM type: YTN; PAM sequence: CTT
  source 1..20: mol_type = other DNA
atactgctgcctcctcccca

SEQ ID NO: 44537 - DNA, 20 bp, synthetic construct
  misc_feature 1..20: note = Description of Artificial Sequence: Synthetic oligonucleotide
  misc_feature 1..20: note = Target: SCN10A; (-) strand; PAM type: YTN; PAM sequence: CTG
  source 1..20: mol_type = other DNA
agcttatactgctgcctcct

SEQ ID NO: 44538 - DNA, 20 bp, synthetic construct
  misc_feature 1..20: note = Description of Artificial Sequence: Synthetic oligonucleotide
  misc_feature 1..20: note = Target: SCN10A; (-) strand; PAM type: YTN; PAM sequence: TTA
  source 1..20: mol_type = other DNA
gaaccactgagcttatactg

SEQ ID NO: 44539 - DNA, 20 bp, synthetic construct
  misc_feature 1..20: note = Description of Artificial Sequence: Synthetic oligonucleotide
  misc_feature 1..20: note = Target: SCN10A; (-) strand; PAM type: YTN; PAM sequence: CTT
  source 1..20: mol_type = other DNA
agaaccactgagcttatact

SEQ ID NO: 44540 - DNA, 20 bp, synthetic construct
  misc_feature 1..20: note = Description of Artificial Sequence: Synthetic oligonucleotide
  misc_feature 1..20: note = Target: SCN10A; (-) strand; PAM type: YTN; PAM sequence: TTC
  source 1..20: mol_type = other DNA
caaggtgcagccatggctta

SEQ ID NO: 44541 - DNA, 20 bp, synthetic construct
  misc_feature 1..20: note = Description of Artificial Sequence: Synthetic oligonucleotide
  misc_feature 1..20: note = Target: SCN10A; (-) strand; PAM type: YTN; PAM sequence: TTT
  source 1..20: mol_type = other DNA
ccaaggtgcagccatggctt

SEQ ID NO: 44542 - DNA, 20 bp, synthetic construct
  misc_feature 1..20: note = Description of Artificial Sequence: Synthetic oligonucleotide
  misc_feature 1..20: note = Target: SCN10A; (-) strand; PAM type: YTN; PAM sequence: CTC
  source 1..20: mol_type = other DNA
ccaggcatttccaaggtgca

SEQ ID NO: 44543 - DNA, 20 bp, synthetic construct
  misc_feature 1..20: note = Description of Artificial Sequence: Synthetic oligonucleotide
  misc_feature 1..20: note = Target: SCN10A; (-) strand; PAM type: YTN; PAM sequence: TTA
  source 1..20: mol_type = other DNA
taaatgctcccaggcatttc

SEQ ID NO: 44544 - DNA, 20 bp, synthetic construct
  misc_feature 1..20: note = Description of Artificial Sequence: Synthetic oligonucleotide
  misc_feature 1..20: note = Target: SCN10A; (-) strand; PAM type: YTN; PAM sequence: TTT
  source 1..20: mol_type = other DNA
ataaatgctcccaggcattt

SEQ ID NO: 44545 - DNA, 20 bp, synthetic construct
  misc_feature 1..20: note = Description of Artificial Sequence: Synthetic oligonucleotide
  misc_feature 1..20: note = Target: SCN10A; (-) strand; PAM type: YTN; PAM sequence: TTT
  source 1..20: mol_type = other DNA
tataaatgctcccaggcatt

SEQ ID NO: 44546 - DNA, 20 bp, synthetic construct
  misc_feature 1..20: note = Description of Artificial Sequence: Synthetic oligonucleotide
  misc_feature 1..20: note = Target: SCN10A; (-) strand; PAM type: YTN; PAM sequence: CTG
  source 1..20: mol_type = other DNA
tattttataaatgctcccag

SEQ ID NO: 44547 - DNA, 20 bp, synthetic construct
  misc_feature 1..20: note = Description of Artificial Sequence: Synthetic oligonucleotide
  misc_feature 1..20: note = Target: SCN10A; (-) strand; PAM type: YTN; PAM sequence: TTG
  source 1..20: mol_type = other DNA
ggtggtgcccaggcacctgt

SEQ ID NO: 44548 - DNA, 20 bp, synthetic construct
  misc_feature 1..20: note = Description of Artificial Sequence: Synthetic oligonucleotide
  misc_feature 1..20: note = Target: SCN10A; (-) strand; PAM type: YTN; PAM sequence: CTT
  source 1..20: mol_type = other DNA
gggtggtgcccaggcacctg

SEQ ID NO: 44549 - DNA, 20 bp, synthetic construct
  misc_feature 1..20: note = Description of Artificial Sequence: Synthetic oligonucleotide
  misc_feature 1..20: note = Target: SCN10A; (-) strand; PAM type: YTN; PAM sequence: TTG
  source 1..20: mol_type = other DNA
gtcttgggtggtgcccaggc

SEQ ID NO: 44550 - DNA, 20 bp, synthetic construct
  misc_feature 1..20: note = Description of Artificial Sequence: Synthetic oligonucleotide
  misc_feature 1..20: note = Target: SCN10A; (-) strand; PAM type: YTN; PAM sequence: TTA
  source 1..20: mol_type = other DNA
ttggtcttgggtggtgccca

SEQ ID NO: 44551 - DNA, 20 bp, synthetic construct
  misc_feature 1..20: note = Description of Artificial Sequence: Synthetic oligonucleotide
  misc_feature 1..20: note = Target: SCN10A; (-) strand; PAM type: YTN; PAM sequence: CTT
  source 1..20: mol_type = other DNA
attggtcttgggtggtgccc

SEQ ID NO: 44552 - DNA, 20 bp, synthetic construct
  misc_feature 1..20: note = Description of Artificial Sequence: Synthetic oligonucleotide
  misc_feature 1..20: note = Target: SCN10A; (-) strand; PAM type: YTN; PAM sequence: CTG
  source 1..20: mol_type = other DNA
atcttattggtcttgggtgg

SEQ ID NO: 44553 - DNA, 20 bp, synthetic construct
  misc_feature 1..20: note = Description of Artificial Sequence: Synthetic oligonucleotide
  misc_feature 1..20: note = Target: SCN10A; (-) strand; PAM type: YTN; PAM sequence: TTC
  source 1..20: mol_type = other DNA
tgatcttattggtcttgggt

SEQ ID NO: 44554 - DNA, 20 bp, synthetic construct
  misc_feature 1..20: note = Description of Artificial Sequence: Synthetic oligonucleotide
  misc_feature 1..20: note = Target: SCN10A; (-) strand; PAM type: YTN; PAM sequence: CTA
  source 1..20: mol_type = other DNA
ccccagagattctgatctta

SEQ ID NO: 44555 - DNA, 20 bp, synthetic construct
  misc_feature 1..20: note = Description of Artificial Sequence: Synthetic oligonucleotide
  misc_feature 1..20: note = Target: SCN10A; (-) strand; PAM type: YTN; PAM sequence: CTA
  source 1..20: mol_type = other DNA
tgaaatatgcagtgaccgac

SEQ ID NO: 44556 - DNA, 20 bp, synthetic construct
  misc_feature 1..20: note = Description of Artificial Sequence: Synthetic oligonucleotide
  misc_feature 1..20: note = Target: SCN10A; (-) strand; PAM type: YTN; PAM sequence: CTG
  source 1..20: mol_type = other DNA
gggagctatgaaatatgcag

SEQ ID NO: 44557 - DNA, 20 bp, synthetic construct
  misc_feature 1..20: note = Description of Artificial Sequence: Synthetic oligonucleotide
  misc_feature 1..20: note = Target: SCN10A; (-) strand; PAM type: YTN; PAM sequence: TTG
  source 1..20: mol_type = other DNA
agaatcacctggggagctat

SEQ ID NO: 44558 - DNA, 20 bp, synthetic construct
  misc_feature 1..20: note = Description of Artificial Sequence: Synthetic oligonucleotide
  misc_feature 1..20: note = Target: SCN10A; (-) strand; PAM type: YTN; PAM sequence: CTT
  source 1..20: mol_type = other DNA
gagaatcacctggggagcta

SEQ ID NO: 44559 - DNA, 20 bp, synthetic construct
  misc_feature 1..20: note = Description of Artificial Sequence: Synthetic oligonucleotide
  misc_feature 1..20: note = Target: SCN10A; (-) strand; PAM type: YTN; PAM sequence: CTG
  source 1..20: mol_type = other DNA
cacttgagaatcacctgggg

SEQ ID NO: 44560 - DNA, 20 bp, synthetic construct
  misc_feature 1..20: note = Description of Artificial Sequence: Synthetic oligonucleotide
  misc_feature 1..20: note = Target: SCN10A; (-) strand; PAM type: YTN; PAM sequence: CTG
  source 1..20: mol_type = other DNA
gctgcacttgagaatcacct

SEQ ID NO: 44561 - DNA, 20 bp, synthetic construct
  misc_feature 1..20: note = Description of Artificial Sequence: Synthetic oligonucleotide
  misc_feature 1..20: note = Target: SCN10A; (-) strand; PAM type: YTN; PAM sequence: CTC
  source 1..20: mol_type = other DNA
acacctggctgcacttgaga

SEQ ID NO: 44562 - DNA, 20 bp, synthetic construct
  misc_feature 1..20: note = Description of Artificial Sequence: Synthetic oligonucleotide
  misc_feature 1..20: note = Target: SCN10A; (-) strand; PAM type: YTN; PAM sequence: CTG
  source 1..20: mol_type = other DNA
tggtcctcacacctggctgc

SEQ ID NO: 44563 - DNA, 20 bp, synthetic construct
  misc_feature 1..20: note = Description of Artificial Sequence: Synthetic oligonucleotide
  misc_feature 1..20: note = Target: SCN10A; (-) strand; PAM type: YTN; PAM sequence: TTC
  source 1..20: mol_type = other DNA
tgtggtcctcacacctggct

SEQ ID NO: 44564 - DNA, 20 bp, synthetic construct
  misc_feature 1..20: note = Description of Artificial Sequence: Synthetic oligonucleotide
  misc_feature 1..20: note = Target: SCN10A; (-) strand; PAM type: YTN; PAM sequence: CTG
  source 1..20: mol_type = other DNA
cggttctgtggtcctcacac

SEQ ID NO: 44565 - DNA, 20 bp, synthetic construct
  misc_feature 1..20: note = Description of Artificial Sequence: Synthetic oligonucleotide
  misc_feature 1..20: note = Target: SCN10A; (-) strand; PAM type: YTN; PAM sequence: TTC
  source 1..20: mol_type = other DNA
ccacctgcggttctgtggtc

SEQ ID NO: 44566 - DNA, 20 bp, synthetic construct
  misc_feature 1..20: note = Description of Artificial Sequence: Synthetic oligonucleotide
  misc_feature 1..20: note = Target: SCN10A; (-) strand; PAM type: YTN; PAM sequence: CTT
  source 1..20: mol_type = other DNA
cccacctgcggttctgtggt

SEQ ID NO: 44567 - DNA, 20 bp, synthetic construct
  misc_feature 1..20: note = Description of Artificial Sequence: Synthetic oligonucleotide
  misc_feature 1..20: note = Target: SCN10A; (-) strand; PAM type: YTN; PAM sequence: CTG
  source 1..20: mol_type = other DNA
tgagcacagagaatcttccc

SEQ ID NO: 44568 - DNA, 20 bp, synthetic construct
  misc_feature 1..20: note = Description of Artificial Sequence: Synthetic oligonucleotide
  misc_feature 1..20: note = Target: SCN10A; (-) strand; PAM type: YTN; PAM sequence: TTG
  source 1..20: mol_type = other DNA
gggagccatgaactgtgagc

SEQ ID NO: 44569 - DNA, 20 bp, synthetic construct
  misc_feature 1..20: note = Description of Artificial Sequence: Synthetic oligonucleotide
  misc_feature 1..20: note = Target: SCN10A; (-) strand; PAM type: YTN; PAM sequence: CTT
  source 1..20: mol_type = other DNA
ggggagccatgaactgtgag

SEQ ID NO: 44570 - DNA, 20 bp, synthetic construct
  misc_feature 1..20: note = Description of Artificial Sequence: Synthetic oligonucleotide
  misc_feature 1..20: note = Target: SCN10A; (-) strand; PAM type: YTN; PAM sequence: CTG
  source 1..20: mol_type = other DNA
gaccttggggagccatgaac

SEQ ID NO: 44571 - DNA, 20 bp, synthetic construct
  misc_feature 1..20: note = Description of Artificial Sequence: Synthetic oligonucleotide
  misc_feature 1..20: note = Target: SCN10A; (-) strand; PAM type: YTN; PAM sequence: TTC
  source 1..20: mol_type = other DNA
tggaccttggggagccatga

SEQ ID NO: 44572 - DNA, 20 bp, synthetic construct
  misc_feature 1..20: note = Description of Artificial Sequence: Synthetic oligonucleotide
  misc_feature 1..20: note = Target: SCN10A; (-) strand; PAM type: YTN; PAM sequence: CTT
  source 1..20: mol_type = other DNA
ctggaccttggggagccatg

SEQ ID NO: 44573 - DNA, 20 bp, synthetic construct
  misc_feature 1..20: note = Description of Artificial Sequence: Synthetic oligonucleotide
  misc_feature 1..20: note = Target: SCN10A; (-) strand; PAM type: YTN; PAM sequence: CTG
  source 1..20: mol_type = other DNA
catccatagatgggtcttct

SEQ ID NO: 44574 - DNA, 20 bp, synthetic construct
  misc_feature 1..20: note = Description of Artificial Sequence: Synthetic oligonucleotide
  misc_feature 1..20: note = Target: SCN10A; (-) strand; PAM type: YTN; PAM sequence: TTA
  source 1..20: mol_type = other DNA
tggccctgcatccatagatg

SEQ ID NO: 44575 - DNA, 20 bp, synthetic construct
  misc_feature 1..20: note = Description of Artificial Sequence: Synthetic oligonucleotide
  misc_feature 1..20: note = Target: SCN10A; (-) strand; PAM type: YTN; PAM sequence: CTT
  source 1..20: mol_type = other DNA
atggccctgcatccatagat

SEQ ID NO: 44576 - DNA, 20 bp, synthetic construct
  misc_feature 1..20: note = Description of Artificial Sequence: Synthetic oligonucleotide
  misc_feature 1..20: note = Target: SCN10A; (-) strand; PAM type: YTN; PAM sequence: CTC
  source 1..20: mol_type = other DNA
agaggtcttatggccctgca

SEQ ID NO: 44577 - DNA, 20 bp, synthetic construct
  misc_feature 1..20: note = Description of Artificial Sequence: Synthetic oligonucleotide
  misc_feature 1..20: note = Target: SCN10A; (-) strand; PAM type: YTN; PAM sequence: CTC
  source 1..20: mol_type = other DNA
tcagaggtcttatggccctg

SEQ ID NO: 44578 - DNA, 20 bp, synthetic construct
  misc_feature 1..20: note = Description of Artificial Sequence: Synthetic oligonucleotide
  misc_feature 1..20: note = Target: SCN10A; (-) strand; PAM type: YTN; PAM sequence: TTA
  source 1..20: mol_type = other DNA
catccaaagtgagatgacac

SEQ ID NO: 44579 - DNA, 20 bp, synthetic construct
  misc_feature 1..20: note = Description of Artificial Sequence: Synthetic oligonucleotide
  misc_feature 1..20: note = Target: SCN10A; (-) strand; PAM type: YTN; PAM sequence: TTT
  source 1..20: mol_type = other DNA
acatccaaagtgagatgaca

SEQ ID NO: 44580 - DNA, 20 bp, synthetic construct
  misc_feature 1..20: note = Description of Artificial Sequence: Synthetic oligonucleotide
  misc_feature 1..20: note = Target: SCN10A; (-) strand; PAM type: YTN; PAM sequence: TTT
  source 1..20: mol_type = other DNA
tacatccaaagtgagatgac

SEQ ID NO: 44581 - DNA, 20 bp, synthetic construct
  misc_feature 1..20: note = Description of Artificial Sequence: Synthetic oligonucleotide
  misc_feature 1..20: note = Target: SCN10A; (-) strand; PAM type: YTN; PAM sequence: TTT
  source 1..20: mol_type = other DNA
ttacatccaaagtgagatga

SEQ ID NO: 44582 - DNA, 20 bp, synthetic construct
  misc_feature 1..20: note = Description of Artificial Sequence: Synthetic oligonucleotide
  misc_feature 1..20: note = Target: SCN10A; (-) strand; PAM type: YTN; PAM sequence: CTG
  source 1..20: mol_type = other DNA
catttttacatccaaagtga

SEQ ID NO: 44583 - DNA, 20 bp, synthetic construct
  misc_feature 1..20: note = Description of Artificial Sequence: Synthetic oligonucleotide
  misc_feature 1..20: note = Target: SCN10A; (-) strand; PAM type: YTN; PAM sequence: CTC
  source 1..20: mol_type = other DNA
tgcatttttacatccaaagt

SEQ ID NO: 44584 - DNA, 20 bp, synthetic construct
  misc_feature 1..20: note = Description of Artificial Sequence: Synthetic oligonucleotide
  misc_feature 1..20: note = Target: SCN10A; (-) strand; PAM type: YTN; PAM sequence: CTG
  source 1..20: mol_type = other DNA
caatcctctgcatttttaca

SEQ ID NO: 44585 - DNA, 20 bp, synthetic construct
  misc_feature 1..20: note = Description of Artificial Sequence: Synthetic oligonucleotide
  misc_feature 1..20: note = Target: SCN10A; (-) strand; PAM type: YTN; PAM sequence: TTC
  source 1..20: mol_type = other DNA
agaaagatccctgcaatcct

SEQ ID NO: 44586 - DNA, 20 bp, synthetic construct
  misc_feature 1..20: note = Description of Artificial Sequence: Synthetic oligonucleotide
  misc_feature 1..20: note = Target: SCN10A; (-) strand; PAM type: YTN; PAM sequence: CTC
  source 1..20: mol_type = other DNA
cattcagaaagatccctgca

SEQ ID NO: 44587 - DNA, 20 bp, synthetic construct
  misc_feature 1..20: note = Description of Artificial Sequence: Synthetic oligonucleotide
  misc_feature 1..20: note = Target: SCN10A; (-) strand; PAM type: YTN; PAM sequence: TTA
  source 1..20: mol_type = other DNA
ggtctccattcagaaagatc

SEQ ID NO: 44588 - DNA, 20 bp, synthetic construct
  misc_feature 1..20: note = Description of Artificial Sequence: Synthetic oligonucleotide
  misc_feature 1..20: note = Target: SCN10A; (-) strand; PAM type: YTN; PAM sequence: TTA
  source 1..20: mol_type = other DNA
ttaggtctccattcagaaag

SEQ ID NO: 44589 - DNA, 20 bp, synthetic construct
  misc_feature 1..20: note = Description of Artificial Sequence: Synthetic oligonucleotide
  misc_feature 1..20: note = Target: SCN10A; (-) strand; PAM type: YTN; PAM sequence: TTA
  source 1..20: mol_type = other DNA
ggtgagttattaggtctcca

SEQ ID NO: 44590 - DNA, 20 bp, synthetic construct
  misc_feature 1..20: note = Description of Artificial Sequence: Synthetic oligonucleotide
  misc_feature 1..20: note = Target: SCN10A; (-) strand; PAM type: YTN; PAM sequence: CTG
  source 1..20: mol_type = other DNA
ttaggtgagttattaggtct

SEQ ID NO: 44591 - DNA, 20 bp, synthetic construct
  misc_feature 1..20: note = Description of Artificial Sequence: Synthetic oligonucleotide
  misc_feature 1..20: note = Target: SCN10A; (-) strand; PAM type: YTN; PAM sequence: CTG
  source 1..20: mol_type = other DNA
tgacacaatagtgactgtta

SEQ ID NO: 44592 - DNA, 20 bp, synthetic construct
  misc_feature 1..20: note = Description of Artificial Sequence: Synthetic oligonucleotide
  misc_feature 1..20: note = Target: SCN10A; (-) strand; PAM type: YTN; PAM sequence: CTG
  source 1..20: mol_type = other DNA
acacccatgagtggtaaagt

SEQ ID NO: 44593 - DNA, 20 bp, synthetic construct
  misc_feature 1..20: note = Description of Artificial Sequence: Synthetic oligonucleotide
  misc_feature 1..20: note = Target: SCN10A; (-) strand; PAM type: YTN; PAM sequence: CTG
  source 1..20: mol_type = other DNA
agaatagccctgacacccat

SEQ ID NO: 44594 - DNA, 20 bp, synthetic construct
  misc_feature 1..20: note = Description of Artificial Sequence: Synthetic oligonucleotide
  misc_feature 1..20: note = Target: SCN10A; (-) strand; PAM type: YTN; PAM sequence: TTA
  source 1..20: mol_type = other DNA
gtgaggagtctgagaatagc

SEQ ID NO: 44595 - DNA, 20 bp, synthetic construct
  misc_feature 1..20: note = Description of Artificial Sequence: Synthetic oligonucleotide
  misc_feature 1..20: note = Target: SCN10A; (-) strand; PAM type: YTN; PAM sequence: TTT
  source 1..20: mol_type = other DNA
agtgaggagtctgagaatag

SEQ ID NO: 44596 - DNA, 20 bp, synthetic construct
  misc_feature 1..20: note = Description of Artificial Sequence: Synthetic oligonucleotide
  misc_feature 1..20: note = Target: SCN10A; (-) strand; PAM type: YTN; PAM sequence: TTG
  source 1..20: mol_type = other DNA
agcatttagtgaggagtctg

SEQ ID NO: 44597 - DNA, 20 bp, synthetic construct
  misc_feature 1..20: note = Description of Artificial Sequence: Synthetic oligonucleotide
  misc_feature 1..20: note = Target: SCN10A; (-) strand; PAM type: YTN; PAM sequence: TTT
  source 1..20: mol_type = other DNA
gagcatttagtgaggagtct

SEQ ID NO: 44598 - DNA, 20 bp, synthetic construct
  misc_feature 1..20: note = Description of Artificial Sequence: Synthetic oligonucleotide
  misc_feature 1..20: note = Target: SCN10A; (-) strand; PAM type: YTN; PAM sequence: TTT
  source 1..20: mol_type = other DNA
tgagcatttagtgaggagtc

SEQ ID NO: 44599 - DNA, 20 bp, synthetic construct
  misc_feature 1..20: note = Description of Artificial Sequence: Synthetic oligonucleotide
  misc_feature 1..20: note = Target: SCN10A; (-) strand; PAM type: YTN; PAM sequence: CTC
  source 1..20: mol_type = other DNA
caaagaaaagttttgagcat

SEQ ID NO: 44600 - DNA, 20 bp, synthetic construct
  misc_feature 1..20: note = Description of Artificial Sequence: Synthetic oligonucleotide
  misc_feature 1..20: note = Target: SCN10A; (-) strand; PAM type: YTN; PAM sequence: CTA
  source 1..20: mol_type = other DNA
ctccaaagaaaagttttgag

SEQ ID NO: 44601 - DNA, 20 bp, synthetic construct
  misc_feature 1..20: note = Description of Artificial Sequence: Synthetic oligonucleotide
  misc_feature 1..20: note = Target: SCN10A; (-) strand; PAM type: YTN; PAM sequence: CTC
  source 1..20: mol_type = other DNA
aagggctactccaaagaaaa

SEQ ID NO: 44602 - DNA, 20 bp, synthetic construct
  misc_feature 1..20: note = Description of Artificial Sequence: Synthetic oligonucleotide
  misc_feature 1..20: note = Target: SCN10A; (-) strand; PAM type: YTN; PAM sequence: CTG
  source 1..20: mol_type = other DNA
gccctcaagggctactccaa

SEQ ID NO: 44603 - DNA, 20 bp, synthetic construct
  misc_feature 1..20: note = Description of Artificial Sequence: Synthetic oligonucleotide
  misc_feature 1..20: note = Target: SCN10A; (-) strand; PAM type: YTN; PAM sequence: CTC
  source 1..20: mol_type = other DNA
agagacctggccctcaaggg

SEQ ID NO: 44604 - DNA, 20 bp, synthetic construct
  misc_feature 1..20: note = Description of Artificial Sequence: Synthetic oligonucleotide
  misc_feature 1..20: note = Target: SCN10A; (-) strand; PAM type: YTN; PAM sequence: CTA
  source 1..20: mol_type = other DNA
gggcaaaggaagctcagaga

SEQ ID NO: 44605 - DNA, 20 bp, synthetic construct
  misc_feature 1..20: note = Description of Artificial Sequence: Synthetic oligonucleotide
  misc_feature 1..20: note = Target: SCN10A; (-) strand; PAM type: YTN; PAM sequence: CTA
  source 1..20: mol_type = other DNA
cagctagggcaaaggaagct

SEQ ID NO: 44606 - DNA, 20 bp, synthetic construct
  misc_feature 1..20: note = Description of Artificial Sequence: Synthetic oligonucleotide
  misc_feature 1..20: note = Target: SCN10A; (-) strand; PAM type: YTN; PAM sequence: CTG
  source 1..20: mol_type = other DNA
gctacagctagggcaaagga

SEQ ID NO: 44607 - DNA, 20 bp, synthetic construct
  misc_feature 1..20: note = Description of Artificial Sequence: Synthetic oligonucleotide
  misc_feature 1..20: note = Target: SCN10A; (-) strand; PAM type: YTN; PAM sequence: CTC
  source 1..20: mol_type = other DNA
ctggctacagctagggcaaa

SEQ ID NO: 44608 - DNA, 20 bp, synthetic construct
  misc_feature 1..20: note = Description of Artificial Sequence: Synthetic oligonucleotide
  misc_feature 1..20: note = Target: SCN10A; (-) strand; PAM type: YTN; PAM sequence: CTG
  source 1..20: mol_type = other DNA
actcctggctacagctaggg

SEQ ID NO: 44609 - DNA, 20 bp, synthetic construct
  misc_feature 1..20: note = Description of Artificial Sequence: Synthetic oligonucleotide
  misc_feature 1..20: note = Target: SCN10A; (-) strand; PAM type: YTN; PAM sequence: CTC
  source 1..20: mol_type = other DNA
tgactcctggctacagctag

SEQ ID NO: 44610 - DNA, 20 bp, synthetic construct
  misc_feature 1..20: note = Description of Artificial Sequence: Synthetic oligonucleotide
  misc_feature 1..20: note = Target: SCN10A; (-) strand; PAM type: YTN; PAM sequence: CTC
  source 1..20: mol_type = other DNA
ccctctgactcctggctaca

SEQ ID NO: 44611 - DNA, 20 bp, synthetic construct
  misc_feature 1..20: note = Description of Artificial Sequence: Synthetic oligonucleotide
  misc_feature 1..20: note = Target: SCN10A; (-) strand; PAM type: YTN; PAM sequence: TTG
  source 1..20: mol_type = other DNA
gggtcctcccctctgactcc

SEQ ID NO: 44612 - DNA, 20 bp, synthetic construct
  misc_feature 1..20: note = Description of Artificial Sequence: Synthetic oligonucleotide
  misc_feature 1..20: note = Target: SCN10A; (-) strand; PAM type: YTN; PAM sequence: TTT
  source 1..20: mol_type = other DNA
ggggtcctcccctctgactc

SEQ ID NO: 44613 - DNA, 20 bp, synthetic construct
  misc_feature 1..20: note = Description of Artificial Sequence: Synthetic oligonucleotide
  misc_feature 1..20: note = Target: SCN10A; (-) strand; PAM type: YTN; PAM sequence: CTC
  source 1..20: mol_type = other DNA
agtgggaacacgtggggttt

SEQ ID NO: 44614 - DNA, 20 bp, synthetic construct
  misc_feature 1..20: note = Description of Artificial Sequence: Synthetic oligonucleotide
  misc_feature 1..20: note = Target: SCN10A; (-) strand; PAM type: YTN; PAM sequence: TTG
  source 1..20: mol_type = other DNA
tgaatgtgagtggctcagtg

SEQ ID NO: 44615 - DNA, 20 bp, synthetic construct
  misc_feature 1..20: note = Description of Artificial Sequence: Synthetic oligonucleotide
  misc_feature 1..20: note = Target: SCN10A; (-) strand; PAM type: YTN; PAM sequence: CTC
  source 1..20: mol_type = other DNA
attgtgaatgtgagtggctc

SEQ ID NO: 44616 - DNA, 20 bp, synthetic construct
  misc_feature 1..20: note = Description of Artificial Sequence: Synthetic oligonucleotide
  misc_feature 1..20: note = Target: SCN10A; (-) strand; PAM type: YTN; PAM sequence: TTC
  source 1..20: mol_type = other DNA
ctcattgtgaatgtgagtgg

SEQ ID NO: 44617 - DNA, 20 bp, synthetic construct
  misc_feature 1..20: note = Description of Artificial Sequence: Synthetic oligonucleotide
  misc_feature 1..20: note = Target: SCN10A; (-) strand; PAM type: YTN; PAM sequence: CTT
  source 1..20: mol_type = other DNA
cctcattgtgaatgtgagtg

SEQ ID NO: 44618 - DNA, 20 bp, synthetic construct
  misc_feature 1..20: note = Description of Artificial Sequence: Synthetic oligonucleotide
  misc_feature 1..20: note = Target: SCN10A; (-) strand; PAM type: YTN; PAM sequence: CTG
  source 1..20: mol_type = other DNA
gacttcctcattgtgaatgt

SEQ ID NO: 44619 - DNA, 20 bp, synthetic construct
  misc_feature 1..20: note = Description of Artificial Sequence: Synthetic oligonucleotide
  misc_feature 1..20: note = Target: SCN10A; (-) strand; PAM type: YTN; PAM sequence: CTG
  source 1..20: mol_type = other DNA
gctggacttcctcattgtga

SEQ ID NO: 44620 - DNA, 20 bp, synthetic construct
  misc_feature 1..20: note = Description of Artificial Sequence: Synthetic oligonucleotide
  misc_feature 1..20: note = Target: SCN10A; (-) strand; PAM type: YTN; PAM sequence: CTG
  source 1..20: mol_type = other DNA
gtgctggctggacttcctca

SEQ ID NO: 44621 - DNA, 20 bp, synthetic construct
  misc_feature 1..20: note = Description of Artificial Sequence: Synthetic oligonucleotide
  misc_feature 1..20: note = Target: SCN10A; (-) strand; PAM type: YTN; PAM sequence: TTC
  source 1..20: mol_type = other DNA
accaatgcctggtgctggct

SEQ ID NO: 44622 - DNA, 20 bp, synthetic construct
  misc_feature 1..20: note = Description of Artificial Sequence: Synthetic oligonucleotide
  misc_feature 1..20: note = Target: SCN10A; (-) strand; PAM type: YTN; PAM sequence: CTT
  source 1..20: mol_type = other DNA
caccaatgcctggtgctggc

SEQ ID NO: 44623 - DNA, 20 bp, synthetic construct
  misc_feature 1..20: note = Description of Artificial Sequence: Synthetic oligonucleotide
  misc_feature 1..20: note = Target: SCN10A; (-) strand; PAM type: YTN; PAM sequence: TTC
  source 1..20: mol_type = other DNA
aaaaagtacttcaccaatgc

SEQ ID NO: 44624 - DNA, 20 bp, synthetic construct
  misc_feature 1..20: note = Description of Artificial Sequence: Synthetic oligonucleotide
  misc_feature 1..20: note = Target: SCN10A; (-) strand; PAM type: YTN; PAM sequence: CTT
  source 1..20: mol_type = other DNA
caaaaagtacttcaccaatg

SEQ ID NO: 44625 - DNA, 20 bp, synthetic construct
  misc_feature 1..20: note = Description of Artificial Sequence: Synthetic oligonucleotide
  misc_feature 1..20: note = Target: SCN10A; (-) strand; PAM type: YTN; PAM sequence: CTA
  source 1..20: mol_type = other DNA
tggcttcaaaaagtacttca

SEQ ID NO: 44626 - DNA, 20 bp, synthetic construct
  misc_feature 1..20: note = Description of Artificial Sequence: Synthetic oligonucleotide
  misc_feature 1..20: note = Target: SCN10A; (-) strand; PAM type: YTN; PAM sequence: TTA
  source 1..20: mol_type = other DNA
agtgggtggcctatggcttc

SEQ ID NO: 44627 - DNA, 20 bp, synthetic construct
  misc_feature 1..20: note = Description of Artificial Sequence: Synthetic oligonucleotide
  misc_feature 1..20: note = Target: SCN10A; (-) strand; PAM type: YTN; PAM sequence: CTT
  source 1..20: mol_type = other DNA
aagtgggtggcctatggctt

SEQ ID NO: 44628 - DNA, 20 bp, synthetic construct
  misc_feature 1..20: note = Description of Artificial Sequence: Synthetic oligonucleotide
  misc_feature 1..20: note = Target: SCN10A; (-) strand; PAM type: YTN; PAM sequence: CTG
  source 1..20: mol_type = other DNA
cttaagtgggtggcctatgg

SEQ ID NO: 44629 - DNA, 20 bp, synthetic construct
  misc_feature 1..20: note = Description of Artificial Sequence: Synthetic oligonucleotide
  misc_feature 1..20: note = Target: SCN10A; (-) strand; PAM type: YTN; PAM sequence: TTC
  source 1..20: mol_type = other DNA
gagatgctgcttaagtgggt

SEQ ID NO: 44630 - DNA, 20 bp, synthetic construct
  misc_feature 1..20: note = Description of Artificial Sequence: Synthetic oligonucleotide
  misc_feature 1..20: note = Target: SCN10A; (-) strand; PAM type: YTN; PAM sequence: TTG
  source 1..20: mol_type = other DNA
tgttcgagatgctgcttaag

SEQ ID NO: 44631 - DNA, 20 bp, synthetic construct
  misc_feature 1..20: note = Description of Artificial Sequence: Synthetic oligonucleotide
  misc_feature 1..20: note = Target: SCN10A; (-) strand; PAM type: YTN; PAM sequence: TTT
  source 1..20: mol_type = other DNA
gtgttcgagatgctgcttaa

SEQ ID NO: 44632 - DNA, 20 bp, synthetic construct
  misc_feature 1..20: note = Description of Artificial Sequence: Synthetic oligonucleotide
  misc_feature 1..20: note = Target: SCN10A; (-) strand; PAM type: YTN; PAM sequence: CTT
  source 1..20: mol_type = other DNA
tgtgttcgagatgctgctta

SEQ ID NO: 44633 - DNA, 20 bp, synthetic construct
  misc_feature 1..20: note = Description of Artificial Sequence: Synthetic oligonucleotide
  misc_feature 1..20: note = Target: SCN10A; (-) strand; PAM type: YTN; PAM sequence: TTA
  source 1..20: mol_type = other DNA
tctttgtgttcgagatgctg

SEQ ID NO: 44634 - DNA, 20 bp, synthetic construct
  misc_feature 1..20: note = Description of Artificial Sequence: Synthetic oligonucleotide
  misc_feature 1..20: note = Target: SCN10A; (-) strand; PAM type: YTN; PAM sequence: TTT
  source 1..20: mol_type = other DNA
atctttgtgttcgagatgct

SEQ ID NO: 44635 - DNA, 20 bp, synthetic construct
  misc_feature 1..20: note = Description of Artificial Sequence: Synthetic oligonucleotide
  misc_feature 1..20: note = Target: SCN10A; (-) strand; PAM type: YTN; PAM sequence: CTT
  source 1..20: mol_type = other DNA
tatctttgtgttcgagatgc

SEQ ID NO: 44636 - DNA, 20 bp, synthetic construct
  misc_feature 1..20: note = Description of Artificial Sequence: Synthetic oligonucleotide
  misc_feature 1..20: note = Target: SCN10A; (-) strand; PAM type: YTN; PAM sequence: TTC
  source 1..20: mol_type = other DNA
acctttatctttgtgttcga

SEQ ID NO: 44637 - DNA, 20 bp, synthetic construct
  misc_feature 1..20: note = Description of Artificial Sequence: Synthetic oligonucleotide
  misc_feature 1..20: note = Target: SCN10A; (-) strand; PAM type: YTN; PAM sequence: CTT
  source 1..20: mol_type = other DNA
cacctttatctttgtgttcg

SEQ ID NO: 44638 - DNA, 20 bp, synthetic construct
  misc_feature 1..20: note = Description of Artificial Sequence: Synthetic oligonucleotide
  misc_feature 1..20: note = Target: SCN10A; (-) strand; PAM type: YTN; PAM sequence: CTG
  source 1..20: mol_type = other DNA
acagggtcttcacctttatc

SEQ ID NO: 44639 - DNA, 20 bp, synthetic construct
  misc_feature 1..20: note = Description of Artificial Sequence: Synthetic oligonucleotide
  misc_feature 1..20: note = Target: SCN10A; (-) strand; PAM type: YTN; PAM sequence: CTG
  source 1..20: mol_type = other DNA
gagtacactgacagggtctt

SEQ ID NO: 44640 - DNA, 20 bp, synthetic construct
  misc_feature 1..20: note = Description of Artificial Sequence: Synthetic oligonucleotide
  misc_feature 1..20: note = Target: SCN10A; (-) strand; PAM type: YTN; PAM sequence: TTG
  source 1..20: mol_type = other DNA
ctggagtacactgacagggt

SEQ ID NO: 44641 - DNA, 20 bp, synthetic construct
  misc_feature 1..20: note = Description of Artificial Sequence: Synthetic oligonucleotide
  misc_feature 1..20: note = Target: SCN10A; (-) strand; PAM type: YTN; PAM sequence: TTT
  source 1..20: mol_type = other DNA
gctggagtacactgacaggg

SEQ ID NO: 44642 - DNA, 20 bp, synthetic construct
  misc_feature 1..20: note = Description of Artificial Sequence: Synthetic oligonucleotide
  misc_feature 1..20: note = Target: SCN10A; (-) strand; PAM type: YTN; PAM sequence: CTT
  source 1..20: mol_type = other DNA
tgctggagtacactgacagg

SEQ ID NO: 44643 - DNA, 20 bp, synthetic construct
  misc_feature 1..20: note = Description of Artificial Sequence: Synthetic oligonucleotide
  misc_feature 1..20: note = Target: SCN10A; (-) strand; PAM type: YTN; PAM sequence: CTG
  source 1..20: mol_type = other DNA
gaccagaagcccacggtgaa

SEQ ID NO: 44644 - DNA, 20 bp, synthetic construct
  misc_feature 1..20: note = Description of Artificial Sequence: Synthetic oligonucleotide
  misc_feature 1..20: note = Target: SCN10A; (-) strand; PAM type: YTN; PAM sequence: TTA
  source 1..20: mol_type = other DNA
cctggaccagaagcccacgg

SEQ ID NO: 44645 - DNA, 20 bp, synthetic construct
  misc_feature 1..20: note = Description of Artificial Sequence: Synthetic oligonucleotide
  misc_feature 1..20: note = Target: SCN10A; (-) strand; PAM type: YTN; PAM sequence: CTA
  source 1..20: mol_type = other DNA
ttacctggaccagaagccca

SEQ ID NO: 44646 - DNA, 20 bp, synthetic construct
  misc_feature 1..20: note = Description of Artificial Sequence: Synthetic oligonucleotide
  misc_feature 1..20: note = Target: SCN10A; (-) strand; PAM type: YTN; PAM sequence: TTG
  source 1..20: mol_type = other DNA
aagactattacctggaccag

SEQ ID NO: 44647 - DNA, 20 bp, synthetic construct
  misc_feature 1..20: note = Description of Artificial Sequence: Synthetic oligonucleotide
  misc_feature 1..20: note = Target: SCN10A; (-) strand; PAM type: YTN; PAM sequence: TTT
  source 1..20: mol_type = other DNA
gaagactattacctggacca

SEQ ID NO: 44648 - DNA, 20 bp, synthetic construct
  misc_feature 1..20: note = Description of Artificial Sequence: Synthetic oligonucleotide
  misc_feature 1..20: note = Target: SCN10A; (-) strand; PAM type: YTN; PAM sequence: CTT
  source 1..20: mol_type = other DNA
tgaagactattacctggacc

SEQ ID NO: 44649 - DNA, 20 bp, synthetic construct
  misc_feature 1..20: note = Description of Artificial Sequence: Synthetic oligonucleotide
  misc_feature 1..20: note = Target: SCN10A; (-) strand; PAM type: YTN; PAM sequence: TTC
  source 1..20: mol_type = other DNA
caggcctttgaagactatta

SEQ ID NO: 44650 - DNA, 20 bp, synthetic construct
  misc_feature 1..20: note = Description of Artificial Sequence: Synthetic oligonucleotide
  misc_feature 1..20: note = Target: SCN10A; (-) strand; PAM type: YTN; PAM sequence: CTT
  source 1..20: mol_type = other DNA
ccaggcctttgaagactatt

SEQ ID NO: 44651 - DNA, 20 bp, synthetic construct
  misc_feature 1..20: note = Description of Artificial Sequence: Synthetic oligonucleotide
  misc_feature 1..20: note = Target: SCN10A; (-) strand; PAM type: YTN; PAM sequence: TTC
  source 1..20: mol_type = other DNA
cttccaggcctttgaagact

SEQ ID NO: 44652 - DNA, 20 bp, synthetic construct
  misc_feature 1..20: note = Description of Artificial Sequence: Synthetic oligonucleotide
  misc_feature 1..20: note = Target: SCN10A; (-) strand; PAM type: YTN; PAM sequence: CTT
  source 1..20: mol_type = other DNA
ccttccaggcctttgaagac

SEQ ID NO: 44653 - DNA, 20 bp, synthetic construct
  misc_feature 1..20: note = Description of Artificial Sequence: Synthetic oligonucleotide
  misc_feature 1..20: note = Target: SCN10A; (-) strand; PAM type: YTN; PAM sequence: TTC
  source 1..20: mol_type = other DNA
ttccttccaggcctttgaag

SEQ ID NO: 44654 - DNA, 20 bp, synthetic construct
  misc_feature 1..20: note = Description of Artificial Sequence: Synthetic oligonucleotide
  misc_feature 1..20: note = Target: SCN10A; (-) strand; PAM type: YTN; PAM sequence: TTT
  source 1..20: mol_type = other DNA
cttccttccaggcctttgaa

SEQ ID NO: 44655 - DNA, 20 bp, synthetic construct
  misc_feature 1..20: note = Description of Artificial Sequence: Synthetic oligonucleotide
  misc_feature 1..20: note = Target: SCN10A; (-) strand; PAM type: YTN; PAM sequence: CTT
  source 1..20: mol_type = other DNA
tcttccttccaggcctttga

SEQ ID NO: 44656 - DNA, 20 bp, synthetic construct
  misc_feature 1..20: note = Description of Artificial Sequence: Synthetic oligonucleotide
  misc_feature 1..20: note = Target: SCN10A; (-) strand; PAM type: YTN; PAM sequence: CTG
  source 1..20: mol_type = other DNA
catcctttcttccttccagg

SEQ ID NO: 44657 - DNA, 20 bp, synthetic construct
  misc_feature 1..20: note = Description of Artificial Sequence: Synthetic oligonucleotide
  misc_feature 1..20: note = Target: SCN10A; (-) strand; PAM type: YTN; PAM sequence: TTC
  source 1..20: mol_type = other DNA
tgcatcctttcttccttcca

SEQ ID NO: 44658 - DNA, 20 bp, synthetic construct
  misc_feature 1..20: note = Description of Artificial Sequence: Synthetic oligonucleotide
  misc_feature 1..20: note = Target: SCN10A; (-) strand; PAM type: YTN; PAM sequence: CTG
  source 1..20: mol_type = other DNA
ccattctgcatcctttcttc

SEQ ID NO: 44659 - DNA, 20 bp, synthetic construct
  misc_feature 1..20: note = Description of Artificial Sequence: Synthetic oligonucleotide
  misc_feature 1..20: note = Target: SCN10A; (-) strand; PAM type: YTN; PAM sequence: CTG
  source 1..20: mol_type = other DNA
tgggtccaggcagcctgcca

SEQ ID NO: 44660 - DNA, 20 bp, synthetic construct
  misc_feature 1..20: note = Description of Artificial Sequence: Synthetic oligonucleotide
  misc_feature 1..20: note = Target: SCN10A; (-) strand; PAM type: YTN; PAM sequence: CTG
  source 1..20: mol_type = other DNA
ggccccagtgctgtgggtcc

SEQ ID NO: 44661 - DNA, 20 bp, synthetic construct
  misc_feature 1..20: note = Description of Artificial Sequence: Synthetic oligonucleotide
  misc_feature 1..20: note = Target: SCN10A; (-) strand; PAM type: YTN; PAM sequence: CTA
  source 1..20: mol_type = other DNA
tcagtctgggccccagtgct

SEQ ID NO: 44662 - DNA, 20 bp, synthetic construct
  misc_feature 1..20: note = Description of Artificial Sequence: Synthetic oligonucleotide
  misc_feature 1..20: note = Target: SCN10A; (-) strand; PAM type: YTN; PAM sequence: TTC
  source 1..20: mol_type = other DNA
cctatcagtctgggccccag

SEQ ID NO: 44663 - DNA, 20 bp, synthetic construct
  misc_feature 1..20: note = Description of Artificial Sequence: Synthetic oligonucleotide
  misc_feature 1..20: note = Target: SCN10A; (-) strand; PAM type: YTN; PAM sequence: CTT
  source 1..20: mol_type = other DNA
ccctatcagtctgggcccca

SEQ ID NO: 44664 - DNA, 20 bp, synthetic construct
  misc_feature 1..20: note = Description of Artificial Sequence: Synthetic oligonucleotide
  misc_feature 1..20: note = Target: SCN10A; (-) strand; PAM type: YTN; PAM sequence: CTG
  source 1..20: mol_type = other DNA
ggtccttccctatcagtctg

SEQ ID NO: 44665 - DNA, 20 bp, synthetic construct
  misc_feature 1..20: note = Description of Artificial Sequence: Synthetic oligonucleotide
  misc_feature 1..20: note = Target: SCN10A; (-) strand; PAM type: YTN; PAM sequence: CTG
  source 1..20: mol_type = other DNA
gctgggtccttccctatcag

SEQ ID NO: 44666 - DNA, 20 bp, synthetic construct
  misc_feature 1..20: note = Description of Artificial Sequence: Synthetic oligonucleotide
  misc_feature 1..20: note = Target: SCN10A; (-) strand; PAM type: YTN; PAM sequence: CTG
  source 1..20: mol_type = other DNA
tggtcagggctggctgggtc

SEQ ID NO: 44667 - DNA, 20 bp, synthetic construct
  misc_feature 1..20: note = Description of Artificial Sequence: Synthetic oligonucleotide
  misc_feature 1..20: note = Target: SCN10A; (-) strand; PAM type: YTN; PAM sequence: TTC
  source 1..20: mol_type = other DNA
cagggactgtggtcagggct

SEQ ID NO: 44668 - DNA, 20 bp, synthetic construct
  misc_feature 1..20: note = Description of Artificial Sequence: Synthetic oligonucleotide
  misc_feature 1..20: note = Target: SCN10A; (-) strand; PAM type: YTN; PAM sequence: CTT
  source 1..20: mol_type = other DNA
ccagggactgtggtcagggc

SEQ ID NO: 44669 - DNA, 20 bp, synthetic construct
  misc_feature 1..20: note = Description of Artificial Sequence: Synthetic oligonucleotide
  misc_feature 1..20: note = Target: SCN10A; (-) strand; PAM type: YTN; PAM sequence: CTA
  source 1..20: mol_type = other DNA
ccaaatccccttccagggac

SEQ ID NO: 44670 - DNA, 20 bp, synthetic construct
  misc_feature 1..20: note = Description of Artificial Sequence: Synthetic oligonucleotide
  misc_feature 1..20: note = Target: SCN10A; (-) strand; PAM type: YTN; PAM sequence: CTG
  source 1..20: mol_type = other DNA
actaccaaatccccttccag

SEQ ID NO: 44671 - DNA, 20 bp, synthetic construct
  misc_feature 1..20: note = Description of Artificial Sequence: Synthetic oligonucleotide
  misc_feature 1..20: note = Target: SCN10A; (-) strand; PAM type: YTN; PAM sequence: CTG
  source 1..20: mol_type = other DNA
gcaagctgactaccaaatcc

SEQ ID NO: 44672 - DNA, 20 bp, synthetic construct
  misc_feature 1..20: note = Description of Artificial Sequence: Synthetic oligonucleotide
  misc_feature 1..20: note = Target: SCN10A; (-) strand; PAM type: YTN; PAM sequence: CTA
  source 1..20: mol_type = other DNA
ctggcaagctgactaccaaa

SEQ ID NO: 44673 - DNA, 20 bp, synthetic construct
  misc_feature 1..20: note = Description of Artificial Sequence: Synthetic oligonucleotide
  misc_feature 1..20: note = Target: SCN10A; (-) strand; PAM type: YTN; PAM sequence: CTC
  source 1..20: mol_type = other DNA
cccacagcaaacaaaatgct

SEQ ID NO: 44674 - DNA, 20 bp, synthetic construct
  misc_feature 1..20: note = Description of Artificial Sequence: Synthetic oligonucleotide
  misc_feature 1..20: note = Target: SCN10A; (-) strand; PAM type: YTN; PAM sequence: TTA
  source 1..20: mol_type = other DNA
cctccccacagcaaacaaaa

SEQ ID NO: 44675 - DNA, 20 bp, synthetic construct
  misc_feature 1..20: note = Description of Artificial Sequence: Synthetic oligonucleotide
  misc_feature 1..20: note = Target: SCN10A; (-) strand; PAM type: YTN; PAM sequence: TTT
  source 1..20: mol_type = other DNA
acctccccacagcaaacaaa

SEQ ID NO: 44676 - DNA, 20 bp, synthetic construct
  misc_feature 1..20: note = Description of Artificial Sequence: Synthetic oligonucleotide
  misc_feature 1..20: note = Target: SCN10A; (-) strand; PAM type: YTN; PAM sequence: CTT
  source 1..20: mol_type = other DNA
tacctccccacagcaaacaa

SEQ ID NO: 44677 - DNA, 20 bp, synthetic construct
  misc_feature 1..20: note = Description of Artificial Sequence: Synthetic oligonucleotide
  misc_feature 1..20: note = Target: SCN10A; (-) strand; PAM type: YTN; PAM sequence: CTA
  source 1..20: mol_type = other DNA
tcccactttacctccccaca

SEQ ID NO: 44678 - DNA, 20 bp, synthetic construct
  misc_feature 1..20: note = Description of Artificial Sequence: Synthetic oligonucleotide
  misc_feature 1..20: note = Target: SCN10A; (-) strand; PAM type: YTN; PAM sequence: CTC
  source 1..20: mol_type = other DNA
cactatcccactttacctcc

SEQ ID NO: 44679 - DNA, 20 bp, synthetic construct
  misc_feature 1..20: note = Description of Artificial Sequence: Synthetic oligonucleotide
  misc_feature 1..20: note = Target: SCN10A; (-) strand; PAM type: YTN; PAM sequence: CTC
  source 1..20: mol_type = other DNA
ctccactatcccactttacc

SEQ ID NO: 44680 - DNA, 20 bp, synthetic construct
  misc_feature 1..20: note = Description of Artificial Sequence: Synthetic oligonucleotide
  misc_feature 1..20: note = Target: SCN10A; (-) strand; PAM type: YTN; PAM sequence: CTC
  source 1..20: mol_type = other DNA
acagtacctcctccactatc

SEQ ID NO: 44681 - DNA, 20 bp, synthetic construct
  misc_feature 1..20: note = Description of Artificial Sequence: Synthetic oligonucleotide
  misc_feature 1..20: note = Target: SCN10A; (-) strand; PAM type: YTN; PAM sequence: TTG
  source 1..20: mol_type = other DNA
gatctcacagtacctcctcc

SEQ ID NO: 44682 - DNA, 20 bp, synthetic construct
  misc_feature 1..20: note = Description of Artificial Sequence: Synthetic oligonucleotide
  misc_feature 1..20: note = Target: SCN10A; (-) strand; PAM type: YTN; PAM sequence: TTT
  source 1..20: mol_type = other DNA
ggatctcacagtacctcctc

SEQ ID NO: 44683 - DNA, 20 bp, synthetic construct
  misc_feature 1..20: note = Description of Artificial Sequence: Synthetic oligonucleotide
  misc_feature 1..20: note = Target: SCN10A; (-) strand; PAM type: YTN; PAM sequence: CTT
  source 1..20: mol_type = other DNA
tggatctcacagtacctcct

SEQ ID NO: 44684 - DNA, 20 bp, synthetic construct
  misc_feature 1..20: note = Description of Artificial Sequence: Synthetic oligonucleotide
  misc_feature 1..20: note = Target: SCN10A; (-) strand; PAM type: YTN; PAM sequence: CTG
  source 1..20: mol_type = other DNA
aagaagtcatgctttggatc

SEQ ID NO: 44685 - DNA, 20 bp, synthetic construct
  misc_feature 1..20: note = Description of Artificial Sequence: Synthetic oligonucleotide
  misc_feature 1..20: note = Target: SCN10A; (-) strand; PAM type: YTN; PAM sequence: TTG
  source 1..20: mol_type = other DNA
gccctgaagaagtcatgctt

SEQ ID NO: 44686 - DNA, 20 bp, synthetic construct
  misc_feature 1..20: note = Description of Artificial Sequence: Synthetic oligonucleotide
  misc_feature 1..20: note = Target: SCN10A; (-) strand; PAM type: YTN; PAM sequence: TTG
  source 1..20: mol_type = other DNA
tccccattggccctgaagaa

SEQ ID NO: 44687 - DNA, 20 bp, synthetic construct
  misc_feature 1..20: note = Description of Artificial Sequence: Synthetic oligonucleotide
  misc_feature 1..20: note = Target: SCN10A; (-) strand; PAM type: YTN; PAM sequence: TTT
  source 1..20: mol_type = other DNA
gtccccattggccctgaaga

SEQ ID NO: 44688 - DNA, 20 bp, synthetic construct
  misc_feature 1..20: note = Description of Artificial Sequence: Synthetic oligonucleotide
  misc_feature 1..20: note = Target: SCN10A; (-) strand; PAM type: YTN; PAM sequence: CTG
  source 1..20: mol_type = other DNA
tttgtccccattggccctga

SEQ ID NO: 44689 - DNA, 20 bp, synthetic construct
  misc_feature 1..20: note = Description of Artificial Sequence: Synthetic oligonucleotide
  misc_feature 1..20: note = Target: SCN10A; (-) strand; PAM type: YTN; PAM sequence: CTG
  source 1..20: mol_type = other DNA
caagtatcagcagggctgtt

SEQ ID NO: 44690 - DNA, 20 bp, synthetic construct
  misc_feature 1..20: note = Description of Artificial Sequence: Synthetic oligonucleotide
  misc_feature 1..20: note = Target: SCN10A; (-) strand; PAM type: YTN; PAM sequence: TTC
  source 1..20: mol_type = other DNA
agcatccctgcaagtatcag

SEQ ID NO: 44691 - DNA, 20 bp, synthetic construct
  misc_feature 1..20: note = Description of Artificial Sequence: Synthetic oligonucleotide
  misc_feature 1..20: note = Target: SCN10A; (-) strand; PAM type: YTN; PAM sequence: TTG
  source 1..20: mol_type = other DNA
cattcagcatccctgcaagt

SEQ ID NO: 44692 - DNA, 20 bp, synthetic construct
  misc_feature 1..20: note = Description of Artificial Sequence: Synthetic oligonucleotide
  misc_feature 1..20: note = Target: SCN10A; (-) strand; PAM type: YTN; PAM sequence: CTT
  source 1..20: mol_type = other DNA
gcattcagcatccctgcaag

SEQ ID NO: 44693 - DNA, 20 bp, synthetic construct
  misc_feature 1..20: note = Description of Artificial Sequence: Synthetic oligonucleotide
  misc_feature 1..20: note = Target: SCN10A; (-) strand; PAM type: YTN; PAM sequence: CTC
  source 1..20: mol_type = other DNA
ccttgcattcagcatccctg

SEQ ID NO: 44694 - DNA, 20 bp, synthetic construct
  misc_feature 1..20: note = Description of Artificial Sequence: Synthetic oligonucleotide
  misc_feature 1..20: note = Target: SCN10A; (-) strand; PAM type: YTN; PAM sequence: TTC
  source 1..20: mol_type = other DNA
tcccttgcattcagcatccc

SEQ ID NO: 44695 - DNA, 20 bp, synthetic construct
  misc_feature 1..20: note = Description of Artificial Sequence: Synthetic oligonucleotide
  misc_feature 1..20: note = Target: SCN10A; (-) strand; PAM type: YTN; PAM sequence: TTT
  source 1..20: mol_type = other DNA
ctcccttgcattcagcatcc

SEQ ID NO: 44696 - DNA, 20 bp, synthetic construct
  misc_feature 1..20: note = Description of Artificial Sequence: Synthetic oligonucleotide
  misc_feature 1..20: note = Target: SCN10A; (-) strand; PAM type: YTN; PAM sequence: CTT
  source 1..20: mol_type = other DNA
tctcccttgcattcagcatc

SEQ ID NO: 44697 - DNA, 20 bp, synthetic construct
  misc_feature 1..20: note = Description of Artificial Sequence: Synthetic oligonucleotide
  misc_feature 1..20: note = Target: SCN10A; (-) strand; PAM type: YTN; PAM sequence: TTC
  source 1..20: mol_type = other DNA
tttctcccttgcattcagca

SEQ ID NO: 44698 - DNA, 20 bp, synthetic construct
  misc_feature 1..20: note = Description of Artificial Sequence: Synthetic oligonucleotide
  misc_feature 1..20: note = Target: SCN10A; (-) strand; PAM type: YTN; PAM sequence: TTT
  source 1..20: mol_type = other DNA
ctttctcccttgcattcagc

SEQ ID NO: 44699 - DNA, 20 bp, synthetic construct
  misc_feature 1..20: note = Description of Artificial Sequence: Synthetic oligonucleotide
  misc_feature 1..20: note = Target: SCN10A; (-) strand; PAM type: YTN; PAM sequence: TTT
  source 1..20: mol_type = other DNA
tctttctcccttgcattcag

SEQ ID NO: 44700 - DNA, 20 bp, synthetic construct
  misc_feature 1..20: note = Description of Artificial Sequence: Synthetic oligonucleotide
  misc_feature 1..20: note = Target: SCN10A; (-) strand; PAM type: YTN; PAM sequence: TTG
  source 1..20: mol_type = other DNA
agaaggttttctttctccct

SEQ ID NO: 44701 - DNA, 20 bp, synthetic construct
  misc_feature 1..20: note = Description of Artificial Sequence: Synthetic oligonucleotide
  misc_feature 1..20: note = Target: SCN10A; (-) strand; PAM type: YTN; PAM sequence: TTT
  source 1..20: mol_type = other DNA
gagaaggttttctttctccc

SEQ ID NO: 44702 - DNA, 20 bp, synthetic construct
  misc_feature 1..20: note = Description of Artificial Sequence: Synthetic oligonucleotide
  misc_feature 1..20: note = Target: SCN10A; (-) strand; PAM type: YTN; PAM sequence: TTC
  source 1..20: mol_type = other DNA
caaaatccaatttgagaagg

SEQ ID NO: 44703 - DNA, 20 bp, synthetic construct
  misc_feature 1..20: note = Description of Artificial Sequence: Synthetic oligonucleotide
  misc_feature 1..20: note = Target: SCN10A; (-) strand; PAM type: YTN; PAM sequence: CTT
  source 1..20: mol_type = other DNA
ccaaaatccaatttgagaag

SEQ ID NO: 44704 - DNA, 20 bp, synthetic construct
  misc_feature 1..20: note = Description of Artificial Sequence: Synthetic oligonucleotide
  misc_feature 1..20: note = Target: SCN10A; (-) strand; PAM type: YTN; PAM sequence: TTC
  source 1..20: mol_type = other DNA
acttccaaaatccaatttga

SEQ ID NO: 44705 - DNA, 20 bp, synthetic construct
  misc_feature 1..20: note = Description of Artificial Sequence: Synthetic oligonucleotide
  misc_feature 1..20: note = Target: SCN10A; (-) strand; PAM type: YTN; PAM sequence: TTG
  source 1..20: mol_type = other DNA
gttcacttccaaaatccaat

SEQ ID NO: 44706 - DNA, 20 bp, synthetic construct
  misc_feature 1..20: note = Description of Artificial Sequence: Synthetic oligonucleotide
  misc_feature 1..20: note = Target: SCN10A; (-) strand; PAM type: YTN; PAM sequence: TTT
  source 1..20: mol_type = other DNA
ggttcacttccaaaatccaa

SEQ ID NO: 44707 - DNA, 20 bp, synthetic construct
  misc_feature 1..20: note = Description of Artificial Sequence: Synthetic oligonucleotide
  misc_feature 1..20: note = Target: SCN10A; (-) strand; PAM type: YTN; PAM sequence: CTT
  source 1..20: mol_type = other DNA
tggttcacttccaaaatcca

SEQ ID NO: 44708 - DNA, 20 bp, synthetic construct
  misc_feature 1..20: note = Description of Artificial Sequence: Synthetic oligonucleotide
  misc_feature 1..20: note = Target: SCN10A; (-) strand; PAM type: YTN; PAM sequence: TTA
  source 1..20: mol_type = other DNA
gcatccctttggttcacttc

SEQ ID NO: 44709 - DNA, 20 bp, synthetic construct
  misc_feature 1..20: note = Description of Artificial Sequence: Synthetic oligonucleotide
  misc_feature 1..20: note = Target: SCN10A; (-) strand; PAM type: YTN; PAM sequence: CTG
  source 1..20: mol_type = other DNA
ttagcatccctttggttcac

SEQ ID NO: 44710 - DNA, 20 bp, synthetic construct
  misc_feature 1..20: note = Description of Artificial Sequence: Synthetic oligonucleotide
  misc_feature 1..20: note = Target: SCN10A; (-) strand; PAM type: YTN; PAM sequence: TTA
  source 1..20: mol_type = other DNA
aacaaagtcactgttagcat

SEQ ID NO: 44711 - DNA, 20 bp, synthetic construct
  misc_feature 1..20: note = Description of Artificial Sequence: Synthetic oligonucleotide
  misc_feature 1..20: note = Target: SCN10A; (-) strand; PAM type: YTN; PAM sequence: TTT
  source 1..20: mol_type = other DNA
aaacaaagtcactgttagca

SEQ ID NO: 44712 - DNA, 20 bp, synthetic construct
  misc_feature 1..20: note = Description of Artificial Sequence: Synthetic oligonucleotide
  misc_feature 1..20: note = Target: SCN10A; (-) strand; PAM type: YTN; PAM sequence: TTT
  source 1..20: mol_type = other DNA
taaacaaagtcactgttagc

SEQ ID NO: 44713 - DNA, 20 bp, synthetic construct
  misc_feature 1..20: note = Description of Artificial Sequence: Synthetic oligonucleotide
  misc_feature 1..20: note = Target: SCN10A; (-) strand; PAM type: YTN; PAM sequence: TTT
  source 1..20: mol_type = other DNA
ttaaacaaagtcactgttag

SEQ ID NO: 44714 - DNA, 20 bp, synthetic construct
  misc_feature 1..20: note = Description of Artificial Sequence: Synthetic oligonucleotide
  misc_feature 1..20: note = Target: SCN10A; (-) strand; PAM type: YTN; PAM sequence: TTA
  source 1..20: mol_type = other DNA
tttttaaacaaagtcactgt

SEQ ID NO: 44715 - DNA, 20 bp, synthetic construct
  misc_feature 1..20: note = Description of Artificial Sequence: Synthetic oligonucleotide
  misc_feature 1..20: note = Target: SCN10A; (-) strand; PAM type: YTN; PAM sequence: TTT
  source 1..20: mol_type = other DNA
atttttaaacaaagtcactg

SEQ ID NO: 44716 - DNA, 20 bp, synthetic construct
  misc_feature 1..20: note = Description of Artificial Sequence: Synthetic oligonucleotide
  misc_feature 1..20: note = Target: SCN10A; (-) strand; PAM type: YTN; PAM sequence: TTT
  source 1..20: mol_type = other DNA
tatttttaaacaaagtcact

SEQ ID NO: 44717 - DNA, 20 bp, synthetic construct
  misc_feature 1..20: note = Description of Artificial Sequence: Synthetic oligonucleotide
  misc_feature 1..20: note = Target: SCN10A; (-) strand; PAM type: YTN; PAM sequence: CTT
  source 1..20: mol_type = other DNA
ttatttttaaacaaagtcac

SEQ ID NO: 44718 - DNA, 20 bp, synthetic construct
  misc_feature 1..20: note = Description of Artificial Sequence: Synthetic oligonucleotide
  misc_feature 1..20: note = Target: SCN10A; (-) strand; PAM type: YTN; PAM sequence: TTG
  source 1..20: mol_type = other DNA
atgcttttatttttaaacaa

SEQ ID NO: 44719 - DNA, 20 bp, synthetic construct
  misc_feature 1..20: note = Description of Artificial Sequence: Synthetic oligonucleotide
  misc_feature 1..20: note = Target: SCN10A; (-) strand; PAM type: YTN; PAM sequence: CTG
  source 1..20: mol_type = other DNA
tgaacatccgttgatgcttt

SEQ ID NO: 44720 - DNA, 20 bp, synthetic construct
  misc_feature 1..20: note = Description of Artificial Sequence: Synthetic oligonucleotide
  misc_feature 1..20: note = Target: SCN10A; (-) strand; PAM type: YTN; PAM sequence: CTG
  source 1..20: mol_type = other DNA
cctgtgaacatccgttgatg

SEQ ID NO: 44721 - DNA, 20 bp, synthetic construct
  misc_feature 1..20: note = Description of Artificial Sequence: Synthetic oligonucleotide
  misc_feature 1..20: note = Target: SCN10A; (-) strand; PAM type: YTN; PAM sequence: TTG
  source 1..20: mol_type = other DNA
taaactgcctgtgaacatcc

SEQ ID NO: 44722 - DNA, 20 bp, synthetic construct
  misc_feature 1..20: note = Description of Artificial Sequence: Synthetic oligonucleotide
  misc_feature 1..20: note = Target: SCN10A; (-) strand; PAM type: YTN; PAM sequence: TTT
  source 1..20: mol_type = other DNA
gtaaactgcctgtgaacatc

SEQ ID NO: 44723 - DNA, 20 bp, synthetic construct
  misc_feature 1..20: note = Description of Artificial Sequence: Synthetic oligonucleotide
  misc_feature 1..20: note = Target: SCN10A; (-) strand; PAM type: YTN; PAM sequence: TTT
  source 1..20: mol_type = other DNA
tgtaaactgcctgtgaacat

SEQ ID NO: 44724 - DNA, 20 bp, synthetic construct
  misc_feature 1..20: note = Description of Artificial Sequence: Synthetic oligonucleotide
  misc_feature 1..20: note = Target: SCN10A; (-) strand; PAM type: YTN; PAM sequence: TTT
  source 1..20: mol_type = other DNA
ttgtaaactgcctgtgaaca

SEQ ID NO: 44725 - DNA, 20 bp, synthetic construct
  misc_feature 1..20: note = Description of Artificial Sequence: Synthetic oligonucleotide
  misc_feature 1..20: note = Target: SCN10A; (-) strand; PAM type: YTN; PAM sequence: TTC
  source 1..20: mol_type = other DNA
atttttgtaaactgcctgtg

SEQ ID NO: 44726 - DNA, 20 bp, synthetic construct
  misc_feature 1..20: note = Description of Artificial Sequence: Synthetic oligonucleotide
  misc_feature 1..20: note = Target: SCN10A; (-) strand; PAM type: YTN; PAM sequence: TTT
  source 1..20: mol_type = other DNA
catttttgtaaactgcctgt

SEQ ID NO: 44727 - DNA, 20 bp, synthetic construct
  misc_feature 1..20: note = Description of Artificial Sequence: Synthetic oligonucleotide
  misc_feature 1..20: note = Target: SCN10A; (-) strand; PAM type: YTN; PAM sequence: CTT
  source 1..20: mol_type = other DNA
tcatttttgtaaactgcctg

SEQ ID NO: 44728 - DNA, 20 bp, synthetic construct
  misc_feature 1..20: note = Description of Artificial Sequence: Synthetic oligonucleotide
  misc_feature 1..20: note = Target: SCN10A; (-) strand; PAM type: YTN; PAM sequence: TTA
  source 1..20: mol_type = other DNA
ctttcatttttgtaaactgc

SEQ ID NO: 44729 - DNA, 20 bp, synthetic construct
  misc_feature 1..20: note = Description of Artificial Sequence: Synthetic oligonucleotide
  misc_feature 1..20: note = Target: SCN10A; (-) strand; PAM type: YTN; PAM sequence: CTT
  source 1..20: mol_type = other DNA
actttcatttttgtaaactg

SEQ ID NO: 44730 - DNA, 20 bp, synthetic construct
  misc_feature 1..20: note = Description of Artificial Sequence: Synthetic oligonucleotide
  misc_feature 1..20: note = Target: SCN10A; (-) strand; PAM type: YTN; PAM sequence: TTC
  source 1..20: mol_type = other DNA
ttactttcatttttgtaaac

SEQ ID NO: 44731 - DNA, 20 bp, synthetic construct
  misc_feature 1..20: note = Description of Artificial Sequence: Synthetic oligonucleotide
  misc_feature 1..20: note = Target: SCN10A; (-) strand; PAM type: YTN; PAM sequence: TTG
  source 1..20: mol_type = other DNA
gcgattcttactttcatttt

SEQ ID NO: 44732 - DNA, 20 bp, synthetic construct
  misc_feature 1..20: note = Description of Artificial Sequence: Synthetic oligonucleotide
  misc_feature 1..20: note = Target: SCN10A; (-) strand; PAM type: YTN; PAM sequence: TTC
  source 1..20: mol_type = other DNA
agaggtgtgttggcgattct

SEQ ID NO: 44733 - DNA, 20 bp, synthetic construct
  misc_feature 1..20: note = Description of Artificial Sequence: Synthetic oligonucleotide
  misc_feature 1..20: note = Target: SCN10A; (-) strand; PAM type: YTN; PAM sequence: TTT
  source 1..20: mol_type = other DNA
cagaggtgtgttggcgattc

SEQ ID NO: 44734 - DNA, 20 bp, synthetic construct
  misc_feature 1..20: note = Description of Artificial Sequence: Synthetic oligonucleotide
  misc_feature 1..20: note = Target: SCN10A; (-) strand; PAM type: YTN; PAM sequence: TTT
  source 1..20: mol_type = other DNA
tcagaggtgtgttggcgatt

SEQ ID NO: 44735 - DNA, 20 bp, synthetic construct
  misc_feature 1..20: note = Description of Artificial Sequence: Synthetic oligonucleotide
  misc_feature 1..20: note = Target: SCN10A; (-) strand; PAM type: YTN; PAM sequence: TTT
  source 1..20: mol_type = other DNA
ttcagaggtgtgttggcgat

SEQ ID NO: 44736 - DNA, 20 bp, synthetic construct
  misc_feature 1..20: note = Description of Artificial Sequence: Synthetic oligonucleotide
  misc_feature 1..20: note = Target: SCN10A; (-) strand; PAM type: YTN; PAM sequence: CTT
  source 1..20: mol_type = other DNA
tttcagaggtgtgttggcga

SEQ ID NO: 44737 - DNA, 20 bp, synthetic construct
  misc_feature 1..20: note = Description of Artificial Sequence: Synthetic oligonucleotide
  misc_feature 1..20: note = Target: SCN10A; (-) strand; PAM type: YTN; PAM sequence: TTC
  source 1..20: mol_type = other DNA
tttttcagaggtgtgttggc

SEQ ID NO: 44738 - DNA, 20 bp, synthetic construct
  misc_feature 1..20: note = Description of Artificial Sequence: Synthetic oligonucleotide
  misc_feature 1..20: note = Target: SCN10A; (-) strand; PAM type: YTN; PAM sequence: TTA
  source 1..20: mol_type = other DNA
ccagtgagatagaacattct

SEQ ID NO: 44739 - DNA, 20 bp, synthetic construct
  misc_feature 1..20: note = Description of Artificial Sequence: Synthetic oligonucleotide
  misc_feature 1..20: note = Target: SCN10A; (-) strand; PAM type: YTN; PAM sequence: TTG
  source 1..20: mol_type = other DNA
attaccagtgagatagaaca

SEQ ID NO: 44740 - DNA, 20 bp, synthetic construct
  misc_feature 1..20: note = Description of Artificial Sequence: Synthetic oligonucleotide
  misc_feature 1..20: note = Target: SCN10A; (-) strand; PAM type: YTN; PAM sequence: CTT
  source 1..20: mol_type = other DNA
gattaccagtgagatagaac

SEQ ID NO: 44741 - DNA, 20 bp, synthetic construct
  misc_feature 1..20: note = Description of Artificial Sequence: Synthetic oligonucleotide
  misc_feature 1..20: note = Target: SCN10A; (-) strand; PAM type: YTN; PAM sequence: TTC
  source 1..20: mol_type = other DNA
cttgattaccagtgagatag

SEQ ID NO: 44742 - DNA, 20 bp, synthetic construct
  misc_feature 1..20: note = Description of Artificial Sequence: Synthetic oligonucleotide
  misc_feature 1..20: note = Target: SCN10A; (-) strand; PAM type: YTN; PAM sequence: TTT
  source 1..20: mol_type = other DNA
ccttgattaccagtgagata

SEQ ID NO: 44743 - DNA, 20 bp, synthetic construct
  misc_feature 1..20: note = Description of Artificial Sequence: Synthetic oligonucleotide
  misc_feature 1..20: note = Target: SCN10A; (-) strand; PAM type: YTN; PAM sequence: TTG
  source 1..20: mol_type = other DNA
aatttccttgattaccagtg

SEQ ID NO: 44744 - DNA, 20 bp, synthetic construct
  misc_feature 1..20: note = Description of Artificial Sequence: Synthetic oligonucleotide
  misc_feature 1..20: note = Target: SCN10A; (-) strand; PAM type: YTN; PAM sequence: TTT
  source 1..20: mol_type = other DNA
gaatttccttgattaccagt

SEQ ID NO: 44745 - DNA, 20 bp, synthetic construct
  misc_feature 1..20: note = Description of Artificial Sequence: Synthetic oligonucleotide
  misc_feature 1..20: note = Target: SCN10A; (-) strand; PAM type: YTN; PAM sequence: TTA
  source 1..20: mol_type = other DNA
atttgaatttccttgattac

SEQ ID NO: 44746 - DNA, 20 bp, synthetic construct
  misc_feature 1..20: note = Description of Artificial Sequence: Synthetic oligonucleotide
  misc_feature 1..20: note = Target: SCN10A; (-) strand; PAM type: YTN; PAM sequence: TTT
  source 1..20: mol_type = other DNA
aatttgaatttccttgatta

SEQ ID NO: 44747 - DNA, 20 bp, synthetic construct
  misc_feature 1..20: note = Description of Artificial Sequence: Synthetic oligonucleotide
  misc_feature 1..20: note = Target: SCN10A; (-) strand; PAM type: YTN; PAM sequence: TTT
  source 1..20: mol_type = other DNA
taatttgaatttccttgatt

SEQ ID NO: 44748 - DNA, 20 bp, synthetic construct
  misc_feature 1..20: note = Description of Artificial Sequence: Synthetic oligonucleotide
  misc_feature 1..20: note = Target: SCN10A; (-) strand; PAM type: YTN; PAM sequence: CTT
  source 1..20: mol_type = other DNA
ttaatttgaatttccttgat

SEQ ID NO: 44749 - DNA, 20 bp, synthetic construct
  misc_feature 1..20: note = Description of Artificial Sequence: Synthetic oligonucleotide
  misc_feature 1..20: note = Target: SCN10A; (-) strand; PAM type: YTN; PAM sequence: TTC
  source 1..20: mol_type = other DNA
ttttaatttgaatttccttg

SEQ ID NO: 44750 - DNA, 20 bp, synthetic construct
  misc_feature 1..20: note = Description of Artificial Sequence: Synthetic oligonucleotide
  misc_feature 1..20: note = Target: SCN10A; (-) strand; PAM type: YTN; PAM sequence: CTT
  source 1..20: mol_type = other DNA
cttttaatttgaatttcctt

SEQ ID NO: 44751 - DNA, 20 bp, synthetic construct
  misc_feature 1..20: note = Description of Artificial Sequence: Synthetic oligonucleotide
  misc_feature 1..20: note = Target: SCN10A; (-) strand; PAM type: YTN; PAM sequence: CTG
  source 1..20: mol_type = other DNA
ataaaagaaaaacagcatct

SEQ ID NO: 44752 - DNA, 20 bp, synthetic construct
  misc_feature 1..20: note = Description of Artificial Sequence: Synthetic oligonucleotide
  misc_feature 1..20: note = Target: SCN10A; (-) strand; PAM type: YTN; PAM sequence: CTC
  source 1..20: mol_type = other DNA
caccagtctgataaaagaaa

SEQ ID NO: 44753 - DNA, 20 bp, synthetic construct
  misc_feature 1..20: note = Description of Artificial Sequence: Synthetic oligonucleotide
  misc_feature 1..20: note = Target: SCN10A; (-) strand; PAM type: YTN; PAM sequence: TTC
  source 1..20: mol_type = other DNA
catctccaccagtctgataa

SEQ ID NO: 44754 - DNA, 20 bp, synthetic construct
  misc_feature 1..20: note = Description of Artificial Sequence: Synthetic oligonucleotide
  misc_feature 1..20: note = Target: SCN10A; (-) strand; PAM type: YTN; PAM sequence: TTT
  source 1..20: mol_type = other DNA
ccatctccaccagtctgata

SEQ ID NO: 44755 - DNA, 20 bp, synthetic construct
  misc_feature 1..20: note = Description of Artificial Sequence: Synthetic oligonucleotide
  misc_feature 1..20: note = Target: SCN10A; (-) strand; PAM type: YTN; PAM sequence: TTT
  source 1..20: mol_type = other DNA
tccatctccaccagtctgat

SEQ ID NO: 44756 - DNA, 20 bp, synthetic construct
  misc_feature 1..20: note = Description of Artificial Sequence: Synthetic oligonucleotide
  misc_feature 1..20: note = Target: SCN10A; (-) strand; PAM type: YTN; PAM sequence: CTT
  source 1..20: mol_type = other DNA
ttccatctccaccagtctga

SEQ ID NO: 44757 - DNA, 20 bp, synthetic construct
  misc_feature 1..20: note = Description of Artificial Sequence: Synthetic oligonucleotide
  misc_feature 1..20: note = Target: SCN10A; (-) strand; PAM type: YTN; PAM sequence: TTC
  source 1..20: mol_type = other DNA
ttttccatctccaccagtct

SEQ ID NO: 44758 - DNA, 20 bp, synthetic construct
  misc_feature 1..20: note = Description of Artificial Sequence: Synthetic oligonucleotide
  misc_feature 1..20: note = Target: SCN10A; (-) strand; PAM type: YTN; PAM sequence: CTA
  source 1..20: mol_type = other DNA
ttcttttccatctccaccag

SEQ ID NO: 44759 - DNA, 20 bp, synthetic construct
  misc_feature 1..20: note = Description of Artificial Sequence: Synthetic oligonucleotide
  misc_feature 1..20: note = Target: SCN10A; (-) strand; PAM type: YTN; PAM sequence: TTC
  source 1..20: mol_type = other DNA
ccctattcttttccatctcc

SEQ ID NO: 44760 - DNA, 20 bp, synthetic construct
  misc_feature 1..20: note = Description of Artificial Sequence: Synthetic oligonucleotide
  misc_feature 1..20: note = Target: SCN10A; (-) strand; PAM type: YTN; PAM sequence: TTT
  source 1..20: mol_type = other DNA
cccctattcttttccatctc

SEQ ID NO: 44761 - DNA, 20 bp, synthetic construct
  misc_feature 1..20: note = Description of Artificial Sequence: Synthetic oligonucleotide
  misc_feature 1..20: note = Target: SCN10A; (-) strand; PAM type: YTN; PAM sequence: CTA
  source 1..20: mol_type = other DNA
gggtttcccctattcttttc

SEQ ID NO: 44762 - DNA, 20 bp, synthetic construct
  misc_feature 1..20: note = Description of Artificial Sequence: Synthetic oligonucleotide
  misc_feature 1..20: note = Target: SCN10A; (-) strand; PAM type: YTN; PAM sequence: CTC
  source 1..20: mol_type = other DNA
aaaaaaaaaaaaaaaaaaaa

SEQ ID NO: 44763 - DNA, 20 bp, synthetic construct
  misc_feature 1..20: note = Description of Artificial Sequence: Synthetic oligonucleotide
  misc_feature 1..20: note = Target: SCN10A; (-) strand; PAM type: YTN; PAM sequence: CTC
  source 1..20: mol_type = other DNA
cgtctcaaaaaaaaaaaaaa

SEQ ID NO: 44764 - DNA, 20 bp, synthetic construct
  misc_feature 1..20: note = Description of Artificial Sequence: Synthetic oligonucleotide
  misc_feature 1..20: note = Target: SCN10A; (-) strand; PAM type: YTN; PAM sequence: CTG
  source 1..20: mol_type = other DNA
ggcgacagagcgagactccg

SEQ ID NO: 44765 - DNA, 20 bp, synthetic construct
  misc_feature 1..20: note = Description of Artificial Sequence: Synthetic oligonucleotide
  misc_feature 1..20: note = Target: SCN10A; (-) strand; PAM type: YTN; PAM sequence: CTC
  source 1..20: mol_type = other DNA
cagcctgggcgacagagcga

SEQ ID NO: 44766 - DNA, 20 bp, synthetic construct
  misc_feature 1..20: note = Description of Artificial Sequence: Synthetic oligonucleotide
  misc_feature 1..20: note = Target: SCN10A; (-) strand; PAM type: YTN; PAM sequence: CTG
  source 1..20: mol_type = other DNA
cactccagcctgggcgacag

SEQ ID NO: 44767 - DNA, 20 bp, synthetic construct
  misc_feature 1..20: note = Description of Artificial Sequence: Synthetic oligonucleotide
  misc_feature 1..20: note = Target: SCN10A; (-) strand; PAM type: YTN; PAM sequence: CTA
  source 1..20: mol_type = other DNA
ctgcactccagcctgggcga

SEQ ID NO: 44768 - DNA, 20 bp, synthetic construct
  misc_feature 1..20: note = Description of Artificial Sequence: Synthetic oligonucleotide
  misc_feature 1..20: note = Target: SCN10A; (-) strand; PAM type: YTN; PAM sequence: TTG
  source 1..20: mol_type = other DNA
cagtgagccgagatcccgct

SEQ ID NO: 44769 - DNA, 20 bp, synthetic construct
  misc_feature 1..20: note = Description of Artificial Sequence: Synthetic oligonucleotide
  misc_feature 1..20: note = Target: SCN10A; (-) strand; PAM type: YTN; PAM sequence: CTT
  source 1..20: mol_type = other DNA
gcagtgagccgagatcccgc

SEQ ID NO: 44770 - DNA, 20 bp, synthetic construct
  misc_feature 1..20: note = Description of Artificial Sequence: Synthetic oligonucleotide
  misc_feature 1..20: note = Target: SCN10A; (-) strand; PAM type: YTN; PAM sequence: CTG
  source 1..20: mol_type = other DNA
ggaggcagagcttgcagtga

SEQ ID NO: 44771 - DNA, 20 bp, synthetic construct
  misc_feature 1..20: note = Description of Artificial Sequence: Synthetic oligonucleotide
  misc_feature 1..20: note = Target: SCN10A; (-) strand; PAM type: YTN; PAM sequence: CTG
  source 1..20: mol_type = other DNA
aggcaggagaatggcgtgaa

SEQ ID NO: 44772 - DNA, 20 bp, synthetic construct
  misc_feature 1..20: note = Description of Artificial Sequence: Synthetic oligonucleotide
  misc_feature 1..20: note = Target: SCN10A; (-) strand; PAM type: YTN; PAM sequence: TTG
  source 1..20: mol_type = other DNA
ggaggctgaggcaggagaat

SEQ ID NO: 44773 - DNA, 20 bp, synthetic construct
  misc_feature 1..20: note = Description of Artificial Sequence: Synthetic oligonucleotide
  misc_feature 1..20: note = Target: SCN10A; (-) strand; PAM type: YTN; PAM sequence: CTT
  source 1..20: mol_type = other DNA
gggaggctgaggcaggagaa

SEQ ID NO: 44774 - DNA, 20 bp, synthetic construct
  misc_feature 1..20: note = Description of Artificial Sequence: Synthetic oligonucleotide
  misc_feature 1..20: note = Target: SCN10A; (-) strand; PAM type: YTN; PAM sequence: CTA
  source 1..20: mol_type = other DNA
cttgggaggctgaggcagga

SEQ ID NO: 44775 - DNA, 20 bp, synthetic construct
  misc_feature 1..20: note = Description of Artificial Sequence: Synthetic oligonucleotide
  misc_feature 1..20: note = Target: SCN10A; (-) strand; PAM type: YTN; PAM sequence: CTG
  source 1..20: mol_type = other DNA
tagtcccagctacttgggag

SEQ ID NO: 44776 - DNA, 20 bp, synthetic construct
  misc_feature 1..20: note = Description of Artificial Sequence: Synthetic oligonucleotide
  misc_feature 1..20: note = Target: SCN10A; (-) strand; PAM type: YTN; PAM sequence: TTA
  source 1..20: mol_type = other DNA
gccgggcgtagtggcgggcg

SEQ ID NO: 44777 - DNA, 20 bp, synthetic construct
  misc_feature 1..20: note = Description of Artificial Sequence: Synthetic oligonucleotide
  misc_feature 1..20: note = Target: SCN10A; (-) strand; PAM type: YTN; PAM sequence: CTA
  source 1..20: mol_type = other DNA
aaaatacaaaaaattagccg

SEQ ID NO: 44778 - DNA, 20 bp, synthetic construct
  misc_feature 1..20: note = Description of Artificial Sequence: Synthetic oligonucleotide
  misc_feature 1..20: note = Target: SCN10A; (-) strand; PAM type: YTN; PAM sequence: CTA
  source 1..20: mol_type = other DNA
ctaaaaatacaaaaaattag

SEQ ID NO: 44779 - DNA, 20 bp, synthetic construct
  misc_feature 1..20: note = Description of Artificial Sequence: Synthetic oligonucleotide
  misc_feature 1..20: note = Target: SCN10A; (-) strand; PAM type: YTN; PAM sequence: CTC
  source 1..20: mol_type = other DNA
tactaaaaatacaaaaaatt

SEQ ID NO: 44780 - DNA, 20 bp, synthetic construct
  misc_feature 1..20: note = Description of Artificial Sequence: Synthetic oligonucleotide
  misc_feature 1..20: note = Target: SCN10A; (-) strand; PAM type: YTN; PAM sequence: CTA
  source 1..20: mol_type = other DNA
aaacggtgaaaccccgtctc

SEQ ID NO: 44781 - DNA, 20 bp, synthetic construct
  misc_feature 1..20: note = Description of Artificial Sequence: Synthetic oligonucleotide
  misc_feature 1..20: note = Target: SCN10A; (-) strand; PAM type: YTN; PAM sequence: CTG
  source 1..20: mol_type = other DNA
aggcgggcggatcatgaggt

SEQ ID NO: 44782 - DNA, 20 bp, synthetic construct
  misc_feature 1..20: note = Description of Artificial Sequence: Synthetic oligonucleotide
  misc_feature 1..20: note = Target: SCN10A; (-) strand; PAM type: YTN; PAM sequence: TTG
  source 1..20: mol_type = other DNA
ggaggctgaggcgggcggat

SEQ ID NO: 44783 - DNA, 20 bp, synthetic construct
  misc_feature 1..20: note = Description of Artificial Sequence: Synthetic oligonucleotide
  misc_feature 1..20: note = Target: SCN10A; (-) strand; PAM type: YTN; PAM sequence: TTT
  source 1..20: mol_type = other DNA
gggaggctgaggcgggcgga

SEQ ID NO: 44784 - DNA, 20 bp, synthetic construct
  misc_feature 1..20: note = Description of Artificial Sequence: Synthetic oligonucleotide
  misc_feature 1..20: note = Target: SCN10A; (-) strand; PAM type: YTN; PAM sequence: CTT
  source 1..20: mol_type = other DNA
tgggaggctgaggcgggcgg

SEQ ID NO: 44785 - DNA, 20 bp, synthetic construct
  misc_feature 1..20: note = Description of Artificial Sequence: Synthetic oligonucleotide
  misc_feature 1..20: note = Target: SCN10A; (-) strand; PAM type: YTN; PAM sequence: CTG
  source 1..20: mol_type = other DNA
taatcccagcactttgggag

SEQ ID NO: 44786 - DNA, 20 bp, synthetic construct
  misc_feature 1..20: note = Description of Artificial Sequence: Synthetic oligonucleotide
  misc_feature 1..20: note = Target: SCN10A; (-) strand; PAM type: YTN; PAM sequence: CTC
  source 1..20: mol_type = other DNA
acgcctgtaatcccagcact

SEQ ID NO: 44787 - DNA, 20 bp, synthetic construct
  misc_feature 1..20: note = Description of Artificial Sequence: Synthetic oligonucleotide
  misc_feature 1..20: note = Target: SCN10A; (-) strand; PAM type: YTN; PAM sequence: TTG
  source 1..20: mol_type = other DNA
taagagtggccgggcgcggt

SEQ ID NO: 44788 - DNA, 20 bp, synthetic construct
  misc_feature 1..20: note = Description of Artificial Sequence: Synthetic oligonucleotide
  misc_feature 1..20: note = Target: SCN10A; (-) strand; PAM type: YTN; PAM sequence: CTT
  source 1..20: mol_type = other DNA
gtaagagtggccgggcgcgg

SEQ ID NO: 44789 - DNA, 20 bp, synthetic construct
  misc_feature 1..20: note = Description of Artificial Sequence: Synthetic oligonucleotide
  misc_feature 1..20: note = Target: SCN10A; (-) strand; PAM type: YTN; PAM sequence: CTG
  source 1..20: mol_type = other DNA
ccagtcacttgtaagagtgg

SEQ ID NO: 44790 - DNA, 20 bp, synthetic construct
  misc_feature 1..20: note = Description of Artificial Sequence: Synthetic oligonucleotide
  misc_feature 1..20: note = Target: SCN10A; (-) strand; PAM type: YTN; PAM sequence: CTC
  source 1..20: mol_type = other DNA
ctgccagtcacttgtaagag

SEQ ID NO: 44791 - DNA, 20 bp, synthetic construct
  misc_feature 1..20: note = Description of Artificial Sequence: Synthetic oligonucleotide
  misc_feature 1..20: note = Target: SCN10A; (-) strand; PAM type: YTN; PAM sequence: TTC
  source 1..20: mol_type = other DNA
actcctgccagtcacttgta

SEQ ID NO: 44792 - DNA, 20 bp, synthetic construct
  misc_feature 1..20: note = Description of Artificial Sequence: Synthetic oligonucleotide
  misc_feature 1..20: note = Target: SCN10A; (-) strand; PAM type: YTN; PAM sequence: TTT
  source 1..20: mol_type = other DNA
cactcctgccagtcacttgt

SEQ ID NO: 44793 - DNA, 20 bp, synthetic construct
  misc_feature 1..20: note = Description of Artificial Sequence: Synthetic oligonucleotide
  misc_feature 1..20: note = Target: SCN10A; (-) strand; PAM type: YTN; PAM sequence: TTT
  source 1..20: mol_type = other DNA
tcactcctgccagtcacttg

SEQ ID NO: 44794 - DNA, 20 bp, synthetic construct
  misc_feature 1..20: note = Description of Artificial Sequence: Synthetic oligonucleotide
  misc_feature 1..20: note = Target: SCN10A; (-) strand; PAM type: YTN; PAM sequence: CTG
  source 1..20: mol_type = other DNA
gccaggttttcactcctgcc

SEQ ID NO: 44795 - DNA, 20 bp, synthetic construct
  misc_feature 1..20: note = Description of Artificial Sequence: Synthetic oligonucleotide
  misc_feature 1..20: note = Target: SCN10A; (-) strand; PAM type: YTN; PAM sequence: TTC
  source 1..20: mol_type = other DNA
acacaggactggccaggttt

SEQ ID NO: 44796 - DNA, 20 bp, synthetic construct
  misc_feature 1..20: note = Description of Artificial Sequence: Synthetic oligonucleotide
  misc_feature 1..20: note = Target: SCN10A; (-) strand; PAM type: YTN; PAM sequence: CTT
  source 1..20: mol_type = other DNA
cacacaggactggccaggtt

SEQ ID NO: 44797 - DNA, 20 bp, synthetic construct
  misc_feature 1..20: note = Description of Artificial Sequence: Synthetic oligonucleotide
  misc_feature 1..20: note = Target: SCN10A; (-) strand; PAM type: YTN; PAM sequence: TTG
  source 1..20: mol_type = other DNA
gcttcacacaggactggcca

SEQ ID NO: 44798 - DNA, 20 bp, synthetic construct
  misc_feature 1..20: note = Description of Artificial Sequence: Synthetic oligonucleotide
  misc_feature 1..20: note = Target: SCN10A; (-) strand; PAM type: YTN; PAM sequence: TTT
  source 1..20: mol_type = other DNA
ggcttcacacaggactggcc

SEQ ID NO: 44799 - DNA, 20 bp, synthetic construct
  misc_feature 1..20: note = Description of Artificial Sequence: Synthetic oligonucleotide
  misc_feature 1..20: note = Target: SCN10A; (-) strand; PAM type: YTN; PAM sequence: TTG
  source 1..20: mol_type = other DNA
ccaatttggcttcacacagg

SEQ ID NO: 44800 - DNA, 20 bp, synthetic construct
  misc_feature 1..20: note = Description of Artificial Sequence: Synthetic oligonucleotide
  misc_feature 1..20: note = Target: SCN10A; (-) strand; PAM type: YTN; PAM sequence: CTG
  source 1..20: mol_type = other DNA
agtcacattgccaatttggc

SEQ ID NO: 44801 - DNA, 20 bp, synthetic construct
  misc_feature 1..20: note = Description of Artificial Sequence: Synthetic oligonucleotide
  misc_feature 1..20: note = Target: SCN10A; (-) strand; PAM type: YTN; PAM sequence: CTC
  source 1..20: mol_type = other DNA
tgagtcacattgccaatttg

SEQ ID NO: 44802 - DNA, 20 bp, synthetic construct
  misc_feature 1..20: note = Description of Artificial Sequence: Synthetic oligonucleotide
  misc_feature 1..20: note = Target: SCN10A; (-) strand; PAM type: YTN; PAM sequence: CTG
  source 1..20: mol_type = other DNA
aaacctctgagtcacattgc

SEQ ID NO: 44803 - DNA, 20 bp, synthetic construct
  misc_feature 1..20: note = Description of Artificial Sequence: Synthetic oligonucleotide
  misc_feature 1..20: note = Target: SCN10A; (-) strand; PAM type: YTN; PAM sequence: TTC
  source 1..20: mol_type = other DNA
ctgaaacctctgagtcacat

SEQ ID NO: 44804 - DNA, 20 bp, synthetic construct
  misc_feature 1..20: note = Description of Artificial Sequence: Synthetic oligonucleotide
  misc_feature 1..20: note = Target: SCN10A; (-) strand; PAM type: YTN; PAM sequence: CTA
  source 1..20: mol_type = other DNA
ggttcctgaaacctctgagt

SEQ ID NO: 44805 - DNA, 20 bp, synthetic construct
  misc_feature 1..20: note = Description of Artificial Sequence: Synthetic oligonucleotide
  misc_feature 1..20: note = Target: SCN10A; (-) strand; PAM type: YTN; PAM sequence: TTG
  source 1..20: mol_type = other DNA
ctaggttcctgaaacctctg

SEQ ID NO: 44806 - DNA, 20 bp, synthetic construct
  misc_feature 1..20: note = Description of Artificial Sequence: Synthetic oligonucleotide
  misc_feature 1..20: note = Target: SCN10A; (-) strand; PAM type: YTN; PAM sequence: TTG
  source 1..20: mol_type = other DNA
aaggaggaattgctaggttc

SEQ ID NO: 44807 - DNA, 20 bp, synthetic construct
  misc_feature 1..20: note = Description of Artificial Sequence: Synthetic oligonucleotide
  misc_feature 1..20: note = Target: SCN10A; (-) strand; PAM type: YTN; PAM sequence: CTT
  source 1..20: mol_type = other DNA
gaaggaggaattgctaggtt

SEQ ID NO: 44808 - DNA, 20 bp, synthetic construct
  misc_feature 1..20: note = Description of Artificial Sequence: Synthetic oligonucleotide
  misc_feature 1..20: note = Target: SCN10A; (-) strand; PAM type: YTN; PAM sequence: TTA
  source 1..20: mol_type = other DNA
gtgcttgaaggaggaattgc

SEQ ID NO: 44809 - DNA, 20 bp, synthetic construct
  misc_feature 1..20: note = Description of Artificial Sequence: Synthetic oligonucleotide
  misc_feature 1..20: note = Target: SCN10A; (-) strand; PAM type: YTN; PAM sequence: TTA
  source 1..20: mol_type = other DNA
ggattagtgcttgaaggagg

SEQ ID NO: 44810 - DNA, 20 bp, synthetic construct
  misc_feature 1..20: note = Description of Artificial Sequence: Synthetic oligonucleotide
  misc_feature 1..20: note = Target: SCN10A; (-) strand; PAM type: YTN; PAM sequence: CTT
  source 1..20: mol_type = other DNA
aggattagtgcttgaaggag

SEQ ID NO: 44811 - DNA, 20 bp, synthetic construct
  misc_feature 1..20: note = Description of Artificial Sequence: Synthetic oligonucleotide
  misc_feature 1..20: note = Target: SCN10A; (-) strand; PAM type: YTN; PAM sequence: CTC
  source 1..20: mol_type = other DNA
cagtgtccttaggattagtg

SEQ ID NO: 44812 - DNA, 20 bp, synthetic construct
  misc_feature 1..20: note = Description of Artificial Sequence: Synthetic oligonucleotide
  misc_feature 1..20: note = Target: SCN10A; (-) strand; PAM type: YTN; PAM sequence: CTG
  source 1..20: mol_type = other DNA
agtgggcaccaacagcctcc

SEQ ID NO: 44813 - DNA, 20 bp, synthetic construct
  misc_feature 1..20: note = Description of Artificial Sequence: Synthetic oligonucleotide
  misc_feature 1..20: note = Target: SCN10A; (-) strand; PAM type: YTN; PAM sequence: TTA
  source 1..20: mol_type = other DNA
aagaggacctgagtgggcac

SEQ ID NO: 44814 - DNA, 20 bp, synthetic construct
  misc_feature 1..20: note = Description of Artificial Sequence: Synthetic oligonucleotide
  misc_feature 1..20: note = Target: SCN10A; (-) strand; PAM type: YTN; PAM sequence: CTT
  source 1..20: mol_type = other DNA
aaagaggacctgagtgggca

SEQ ID NO: 44815 - DNA, 20 bp, synthetic construct
  misc_feature 1..20: note = Description of Artificial Sequence: Synthetic oligonucleotide
  misc_feature 1..20: note = Target: SCN10A; (-) strand; PAM type: YTN; PAM sequence: CTG
  source 1..20: mol_type = other DNA
gccccttaaagaggacctga

SEQ ID NO: 44816 - DNA, 20 bp, synthetic construct
  misc_feature 1..20: note = Description of Artificial Sequence: Synthetic oligonucleotide
  misc_feature 1..20: note = Target: SCN10A; (-) strand; PAM type: YTN; PAM sequence: CTC
  source 1..20: mol_type = other DNA
ccagcagatgaaggataggg

SEQ ID NO: 44817 - DNA, 20 bp, synthetic construct
  misc_feature 1..20: note = Description of Artificial Sequence: Synthetic oligonucleotide
  misc_feature 1..20: note = Target: SCN10A; (-) strand; PAM type: YTN; PAM sequence: TTA
  source 1..20: mol_type = other DNA
gcagccgacactcccagcag

SEQ ID NO: 44818 - DNA, 20 bp, synthetic construct
  misc_feature 1..20: note = Description of Artificial Sequence: Synthetic oligonucleotide
  misc_feature 1..20: note = Target: SCN10A; (-) strand; PAM type: YTN; PAM sequence: CTA
  source 1..20: mol_type = other DNA
ttagcagccgacactcccag

SEQ ID NO: 44819 - DNA, 20 bp, synthetic construct
  misc_feature 1..20: note = Description of Artificial Sequence: Synthetic oligonucleotide
  misc_feature 1..20: note = Target: SCN10A; (-) strand; PAM type: YTN; PAM sequence: CTG
  source 1..20: mol_type = other DNA
catccatgaactattagcag

SEQ ID NO: 44820 - DNA, 20 bp, synthetic construct
  misc_feature 1..20: note = Description of Artificial Sequence: Synthetic oligonucleotide
  misc_feature 1..20: note = Target: SCN10A; (-) strand; PAM type: YTN; PAM sequence: CTC
  source 1..20: mol_type = other DNA
cagcccagcgaagccatcag

SEQ ID NO: 44821 - DNA, 20 bp, synthetic construct
  misc_feature 1..20: note = Description of Artificial Sequence: Synthetic oligonucleotide
  misc_feature 1..20: note = Target: SCN10A; (-) strand; PAM type: YTN; PAM sequence: TTC
  source 1..20: mol_type = other DNA
ctccagcccagcgaagccat

SEQ ID NO: 44822 - DNA, 20 bp, synthetic construct
  misc_feature 1..20: note = Description of Artificial Sequence: Synthetic oligonucleotide
  misc_feature 1..20: note = Target: SCN10A; (-) strand; PAM type: YTN; PAM sequence: TTT
  source 1..20: mol_type = other DNA
cctccagcccagcgaagcca

SEQ ID NO: 44823 - DNA, 20 bp, synthetic construct
  misc_feature 1..20: note = Description of Artificial Sequence: Synthetic oligonucleotide
  misc_feature 1..20: note = Target: SCN10A; (-) strand; PAM type: YTN; PAM sequence: TTC
  source 1..20: mol_type = other DNA
ccaaggtggacacagtttcc

SEQ ID NO: 44824 - DNA, 20 bp, synthetic construct
  misc_feature 1..20: note = Description of Artificial Sequence: Synthetic oligonucleotide
  misc_feature 1..20: note = Target: SCN10A; (-) strand; PAM type: YTN; PAM sequence: TTT
  source 1..20: mol_type = other DNA
cccaaggtggacacagtttc

SEQ ID NO: 44825 - DNA, 20 bp, synthetic construct
  misc_feature 1..20: note = Description of Artificial Sequence: Synthetic oligonucleotide
  misc_feature 1..20: note = Target: SCN10A; (-) strand; PAM type: YTN; PAM sequence: CTG
  source 1..20: mol_type = other DNA
ccccagcggggaggataagc

SEQ ID NO: 44826 - DNA, 20 bp, synthetic construct
  misc_feature 1..20: note = Description of Artificial Sequence: Synthetic oligonucleotide
  misc_feature 1..20: note = Target: SCN10A; (-) strand; PAM type: YTN; PAM sequence: CTG
  source 1..20: mol_type = other DNA
agggctgccccagcggggag

SEQ ID NO: 44827 - DNA, 20 bp, synthetic construct
  misc_feature 1..20: note = Description of Artificial Sequence: Synthetic oligonucleotide
  misc_feature 1..20: note = Target: SCN10A; (-) strand; PAM type: YTN; PAM sequence: CTG
  source 1..20: mol_type = other DNA
gctgagggctgccccagcgg

SEQ ID NO: 44828 - DNA, 20 bp, synthetic construct
  misc_feature 1..20: note = Description of Artificial Sequence: Synthetic oligonucleotide
  misc_feature 1..20: note = Target: SCN10A; (-) strand; PAM type: YTN; PAM sequence: CTG
  source 1..20: mol_type = other DNA
tccctggctgagggctgccc

SEQ ID NO: 44829 - DNA, 20 bp, synthetic construct
  misc_feature 1..20: note = Description of Artificial Sequence: Synthetic oligonucleotide
  misc_feature 1..20: note = Target: SCN10A; (-) strand; PAM type: YTN; PAM sequence: CTG
  source 1..20: mol_type = other DNA
tcactgtccctggctgaggg

SEQ ID NO: 44830 - DNA, 20 bp, synthetic construct
  misc_feature 1..20: note = Description of Artificial Sequence: Synthetic oligonucleotide
  misc_feature 1..20: note = Target: SCN10A; (-) strand; PAM type: YTN; PAM sequence: TTG
  source 1..20: mol_type = other DNA
taaatccccctgtcactgtc

SEQ ID NO: 44831 - DNA, 20 bp, synthetic construct
  misc_feature 1..20: note = Description of Artificial Sequence: Synthetic oligonucleotide
  misc_feature 1..20: note = Target: SCN10A; (-) strand; PAM type: YTN; PAM sequence: CTT
  source 1..20: mol_type = other DNA
gtaaatccccctgtcactgt

SEQ ID NO: 44832 - DNA, 20 bp, synthetic construct
  misc_feature 1..20: note = Description of Artificial Sequence: Synthetic oligonucleotide
  misc_feature 1..20: note = Target: SCN10A; (-) strand; PAM type: YTN; PAM sequence: TTG
  source 1..20: mol_type = other DNA
aggcaaagaagacagccttg

SEQ ID NO: 44833 - DNA, 20 bp, synthetic construct
  misc_feature 1..20: note = Description of Artificial Sequence: Synthetic oligonucleotide
  misc_feature 1..20: note = Target: SCN10A; (-) strand; PAM type: YTN; PAM sequence: CTT
  source 1..20: mol_type = other DNA
gaggcaaagaagacagcctt

SEQ ID NO: 44834 - DNA, 20 bp, synthetic construct
  misc_feature 1..20: note = Description of Artificial Sequence: Synthetic oligonucleotide
  misc_feature 1..20: note = Target: SCN10A; (-) strand; PAM type: YTN; PAM sequence: CTG
  source 1..20: mol_type = other DNA
tcccaccttgaggcaaagaa

SEQ ID NO: 44835 - DNA, 20 bp, synthetic construct
  misc_feature 1..20: note = Description of Artificial Sequence: Synthetic oligonucleotide
  misc_feature 1..20: note = Target: SCN10A; (-) strand; PAM type: YTN; PAM sequence: CTG
  source 1..20: mol_type = other DNA
aagcacaaaggacaccaaag

SEQ ID NO: 44836 - DNA, 20 bp, synthetic construct
  misc_feature 1..20: note = Description of Artificial Sequence: Synthetic oligonucleotide
  misc_feature 1..20: note = Target: SCN10A; (-) strand; PAM type: YTN; PAM sequence: CTG
  source 1..20: mol_type = other DNA
atcccatggaaagccctgaa

SEQ ID NO: 44837 - DNA, 20 bp, synthetic construct
  misc_feature 1..20: note = Description of Artificial Sequence: Synthetic oligonucleotide
  misc_feature 1..20: note = Target: SCN10A; (-) strand; PAM type: YTN; PAM sequence: TTC
  source 1..20: mol_type = other DNA
agctgatcccatggaaagcc

SEQ ID NO: 44838 - DNA, 20 bp, synthetic construct
  misc_feature 1..20: note = Description of Artificial Sequence: Synthetic oligonucleotide
  misc_feature 1..20: note = Target: SCN10A; (-) strand; PAM type: YTN; PAM sequence: CTT
  source 1..20: mol_type = other DNA
cagctgatcccatggaaagc

SEQ ID NO: 44839 - DNA, 20 bp, synthetic construct
  misc_feature 1..20: note = Description of Artificial Sequence: Synthetic oligonucleotide
  misc_feature 1..20: note = Target: SCN10A; (-) strand; PAM type: YTN; PAM sequence: TTG
  source 1..20: mol_type = other DNA
aaatccggcttcagctgatc

SEQ ID NO: 44840 - DNA, 20 bp, synthetic construct
  misc_feature 1..20: note = Description of Artificial Sequence: Synthetic oligonucleotide
  misc_feature 1..20: note = Target: SCN10A; (-) strand; PAM type: YTN; PAM sequence: TTC
  source 1..20: mol_type = other DNA
agttgaaatccggcttcagc

SEQ ID NO: 44841 - DNA, 20 bp, synthetic construct
  misc_feature 1..20: note = Description of Artificial Sequence: Synthetic oligonucleotide
  misc_feature 1..20: note = Target: SCN10A; (-) strand; PAM type: YTN; PAM sequence: CTG
  source 1..20: mol_type = other DNA
agaaaagatgtgggttcagt

SEQ ID NO: 44842 - DNA, 20 bp, synthetic construct
  misc_feature 1..20: note = Description of Artificial Sequence: Synthetic oligonucleotide
  misc_feature 1..20: note = Target: SCN10A; (-) strand; PAM type: YTN; PAM sequence: CTA
  source 1..20: mol_type = other DNA
gacacagaatcggaagctga

SEQ ID NO: 44843 - DNA, 20 bp, synthetic construct
  misc_feature 1..20: note = Description of Artificial Sequence: Synthetic oligonucleotide
  misc_feature 1..20: note = Target: SCN10A; (-) strand; PAM type: YTN; PAM sequence: CTC
  source 1..20: mol_type = other DNA
gtcctagacacagaatcgga

SEQ ID NO: 44844 - DNA, 20 bp, synthetic construct
  misc_feature 1..20: note = Description of Artificial Sequence: Synthetic oligonucleotide
  misc_feature 1..20: note = Target: SCN10A; (-) strand; PAM type: YTN; PAM sequence: TTA
  source 1..20: mol_type = other DNA
gtcctcgtcctagacacaga

SEQ ID NO: 44845 - DNA, 20 bp, synthetic construct
  misc_feature 1..20: note = Description of Artificial Sequence: Synthetic oligonucleotide
  misc_feature 1..20: note = Target: SCN10A; (-) strand; PAM type: YTN; PAM sequence: CTT
  source 1..20: mol_type = other DNA
agtcctcgtcctagacacag

SEQ ID NO: 44846 - DNA, 20 bp, synthetic construct
  misc_feature 1..20: note = Description of Artificial Sequence: Synthetic oligonucleotide
  misc_feature 1..20: note = Target: SCN10A; (-) strand; PAM type: YTN; PAM sequence: CTC
  source 1..20: mol_type = other DNA
ccatcttagtcctcgtccta

SEQ ID NO: 44847 - DNA, 20 bp, synthetic construct
  misc_feature 1..20: note = Description of Artificial Sequence: Synthetic oligonucleotide
  misc_feature 1..20: note = Target: SCN10A; (-) strand; PAM type: YTN; PAM sequence: TTG
  source 1..20: mol_type = other DNA
gataatctcccatcttagtc

SEQ ID NO: 44848 - DNA, 20 bp, synthetic construct
  misc_feature 1..20: note = Description of Artificial Sequence: Synthetic oligonucleotide
  misc_feature 1..20: note = Target: SCN10A; (-) strand; PAM type: YTN; PAM sequence: TTA
  source 1..20: mol_type = other DNA
gagacgttggataatctccc

SEQ ID NO: 44849 - DNA, 20 bp, synthetic construct
  misc_feature 1..20: note = Description of Artificial Sequence: Synthetic oligonucleotide
  misc_feature 1..20: note = Target: SCN10A; (-) strand; PAM type: YTN; PAM sequence: CTT
  source 1..20: mol_type = other DNA
agagacgttggataatctcc

SEQ ID NO: 44850 - DNA, 20 bp, synthetic construct
  misc_feature 1..20: note = Description of Artificial Sequence: Synthetic oligonucleotide
  misc_feature 1..20: note = Target: SCN10A; (-) strand; PAM type: YTN; PAM sequence: CTC
  source 1..20: mol_type = other DNA
ccttagagacgttggataat

SEQ ID NO: 44851 - DNA, 20 bp, synthetic construct
  misc_feature 1..20: note = Description of Artificial Sequence: Synthetic oligonucleotide
  misc_feature 1..20: note = Target: SCN10A; (-) strand; PAM type: YTN; PAM sequence: CTG
  source 1..20: mol_type = other DNA
tgtgtactcccttagagacg

SEQ ID NO: 44852 - DNA, 20 bp, synthetic construct
  misc_feature 1..20: note = Description of Artificial Sequence: Synthetic oligonucleotide
  misc_feature 1..20: note = Target: SCN10A; (-) strand; PAM type: YTN; PAM sequence: TTC
  source 1..20: mol_type = other DNA
cctgtgtgtactcccttaga

SEQ ID NO: 44853 - DNA, 20 bp, synthetic construct
  misc_feature 1..20: note = Description of Artificial Sequence: Synthetic oligonucleotide
  misc_feature 1..20: note = Target: SCN10A; (-) strand; PAM type: YTN; PAM sequence: TTG
  source 1..20: mol_type = other DNA
aatattccctgtgtgtactc

SEQ ID NO: 44854 - DNA, 20 bp, synthetic construct
  misc_feature 1..20: note = Description of Artificial Sequence: Synthetic oligonucleotide
  misc_feature 1..20: note = Target: SCN10A; (-) strand; PAM type: YTN; PAM sequence: CTA
  source 1..20: mol_type = other DNA
atacacattgaatattccct

SEQ ID NO: 44855 - DNA, 20 bp, synthetic construct
  misc_feature 1..20: note = Description of Artificial Sequence: Synthetic oligonucleotide
  misc_feature 1..20: note = Target: SCN10A; (-) strand; PAM type: YTN; PAM sequence: TTC
  source 1..20: mol_type = other DNA
taatacacattgaatattcc

SEQ ID NO: 44856 - DNA, 20 bp, synthetic construct
  misc_feature 1..20: note = Description of Artificial Sequence: Synthetic oligonucleotide
  misc_feature 1..20: note = Target: SCN10A; (-) strand; PAM type: YTN; PAM sequence: CTT
  source 1..20: mol_type = other DNA
ctaatacacattgaatattc

SEQ ID NO: 44857 - DNA, 20 bp, synthetic construct
  misc_feature 1..20: note = Description of Artificial Sequence: Synthetic oligonucleotide
  misc_feature 1..20: note = Target: SCN10A; (-) strand; PAM type: YTN; PAM sequence: TTA
  source 1..20: mol_type = other DNA
cttctaatacacattgaata

SEQ ID NO: 44858 - DNA, 20 bp, synthetic construct
  misc_feature 1..20: note = Description of Artificial Sequence: Synthetic oligonucleotide
  misc_feature 1..20: note = Target: SCN10A; (-) strand; PAM type: YTN; PAM sequence: TTT
  source 1..20: mol_type = other DNA
acttctaatacacattgaat

SEQ ID NO: 44859 - DNA, 20 bp, synthetic construct
  misc_feature 1..20: note = Description of Artificial Sequence: Synthetic oligonucleotide
  misc_feature 1..20: note = Target: SCN10A; (-) strand; PAM type: YTN; PAM sequence: CTA
  source 1..20: mol_type = other DNA
tgtttacttctaatacacat

SEQ ID NO: 44860 - DNA, 20 bp, synthetic construct
  misc_feature 1..20: note = Description of Artificial Sequence: Synthetic oligonucleotide
  misc_feature 1..20: note = Target: SCN10A; (-) strand; PAM type: YTN; PAM sequence: CTC
  source 1..20: mol_type = other DNA
tatgtttacttctaatacac

SEQ ID NO: 44861 - DNA, 20 bp, synthetic construct
  misc_feature 1..20: note = Description of Artificial Sequence: Synthetic oligonucleotide
  misc_feature 1..20: note = Target: SCN10A; (-) strand; PAM type: YTN; PAM sequence: CTC
  source 1..20: mol_type = other DNA
aaccaatctctatgtttact

SEQ ID NO: 44862 - DNA, 20 bp, synthetic construct
  misc_feature 1..20: note = Description of Artificial Sequence: Synthetic oligonucleotide
  misc_feature 1..20: note = Target: SCN10A; (-) strand; PAM type: YTN; PAM sequence: TTA
  source 1..20: mol_type = other DNA
ctcaaccaatctctatgttt

SEQ ID NO: 44863 - DNA, 20 bp, synthetic construct
  misc_feature 1..20: note = Description of Artificial Sequence: Synthetic oligonucleotide
  misc_feature 1..20: note = Target: SCN10A; (-) strand; PAM type: YTN; PAM sequence: TTT
  source 1..20: mol_type = other DNA
actcaaccaatctctatgtt

SEQ ID NO: 44864 - DNA, 20 bp, synthetic construct
  misc_feature 1..20: note = Description of Artificial Sequence: Synthetic oligonucleotide
  misc_feature 1..20: note = Target: SCN10A; (-) strand; PAM type: YTN; PAM sequence: TTA
  source 1..20: mol_type = other DNA
taatttactcaaccaatctc

SEQ ID NO: 44865 - DNA, 20 bp, synthetic construct
  misc_feature 1..20: note = Description of Artificial Sequence: Synthetic oligonucleotide
  misc_feature 1..20: note = Target: SCN10A; (-) strand; PAM type: YTN; PAM sequence: TTT
  source 1..20: mol_type = other DNA
ataatttactcaaccaatct

SEQ ID NO: 44866 - DNA, 20 bp, synthetic construct
  misc_feature 1..20: note = Description of Artificial Sequence: Synthetic oligonucleotide
  misc_feature 1..20: note = Target: SCN10A; (-) strand; PAM type: YTN; PAM sequence: CTT
  source 1..20: mol_type = other DNA
tataatttactcaaccaatc

SEQ ID NO: 44867 - DNA, 20 bp, synthetic construct
  misc_feature 1..20: note = Description of Artificial Sequence: Synthetic oligonucleotide
  misc_feature 1..20: note = Target: SCN10A; (-) strand; PAM type: YTN; PAM sequence: TTC
  source 1..20: mol_type = other DNA
ctttataatttactcaacca

SEQ ID NO: 44868 - DNA, 20 bp, synthetic construct
  misc_feature 1..20: note = Description of Artificial Sequence: Synthetic oligonucleotide
  misc_feature 1..20: note = Target: SCN10A; (-) strand; PAM type: YTN; PAM sequence: CTA
  source 1..20: mol_type = other DNA
taacatattcctttataatt

SEQ ID NO: 44869 - DNA, 20 bp, synthetic construct
  misc_feature 1..20: note = Description of Artificial Sequence: Synthetic oligonucleotide
  misc_feature 1..20: note = Target: SCN10A; (-) strand; PAM type: YTN; PAM sequence: TTA
  source 1..20: mol_type = other DNA
atggctataacatattcctt

SEQ ID NO: 44870 - DNA, 20 bp, synthetic construct
  misc_feature 1..20: note = Description of Artificial Sequence: Synthetic oligonucleotide
  misc_feature 1..20: note = Target: SCN10A; (-) strand; PAM type: YTN; PAM sequence: TTT
  source 1..20: mol_type = other DNA
aatggctataacatattcct

SEQ ID NO: 44871 - DNA, 20 bp, synthetic construct
  misc_feature 1..20: note = Description of Artificial Sequence: Synthetic oligonucleotide
  misc_feature 1..20: note = Target: SCN10A; (-) strand; PAM type: YTN; PAM sequence: CTC
  source 1..20: mol_type = other DNA
atttaatggctataacatat

SEQ ID NO: 44872 - DNA, 20 bp, synthetic construct
  misc_feature 1..20: note = Description of Artificial Sequence: Synthetic oligonucleotide
  misc_feature 1..20: note = Target: SCN10A; (-) strand; PAM type: YTN; PAM sequence: TTA
  source 1..20: mol_type = other DNA
tctcatttaatggctataac

SEQ ID NO: 44873 - DNA, 20 bp, synthetic construct
  misc_feature 1..20: note = Description of Artificial Sequence: Synthetic oligonucleotide
  misc_feature 1..20: note = Target: SCN10A; (-) strand; PAM type: YTN; PAM sequence: CTC
  source 1..20: mol_type = other DNA
atattatctcatttaatggc

SEQ ID NO: 44874 - DNA, 20 bp, synthetic construct
  misc_feature 1..20: note = Description of Artificial Sequence: Synthetic oligonucleotide
  misc_feature 1..20: note = Target: SCN10A; (-) strand; PAM type: YTN; PAM sequence: CTC
  source 1..20: mol_type = other DNA
agtaaatagtctcatattat

SEQ ID NO: 44875 - DNA, 20 bp, synthetic construct
  misc_feature 1..20: note = Description of Artificial Sequence: Synthetic oligonucleotide
  misc_feature 1..20: note = Target: SCN10A; (-) strand; PAM type: YTN; PAM sequence: TTC
  source 1..20: mol_type = other DNA
tcagtaaatagtctcatatt

SEQ ID NO: 44876 - DNA, 20 bp, synthetic construct
  misc_feature 1..20: note = Description of Artificial Sequence: Synthetic oligonucleotide
  misc_feature 1..20: note = Target: SCN10A; (-) strand; PAM type: YTN; PAM sequence: TTT
  source 1..20: mol_type = other DNA
ctcagtaaatagtctcatat

SEQ ID NO: 44877 - DNA, 20 bp, synthetic construct
  misc_feature 1..20: note = Description of Artificial Sequence: Synthetic oligonucleotide
  misc_feature 1..20: note = Target: SCN10A; (-) strand; PAM type: YTN; PAM sequence: TTT
  source 1..20: mol_type = other DNA
tctcagtaaatagtctcata

SEQ ID NO: 44878 - DNA, 20 bp, synthetic construct
  misc_feature 1..20: note = Description of Artificial Sequence: Synthetic oligonucleotide
  misc_feature 1..20: note = Target: SCN10A; (-) strand; PAM type: YTN; PAM sequence: TTT
  source 1..20: mol_type = other DNA
ttctcagtaaatagtctcat

SEQ ID NO: 44879 - DNA, 20 bp, synthetic construct
  misc_feature 1..20: note = Description of Artificial Sequence: Synthetic oligonucleotide
  misc_feature 1..20: note = Target: SCN10A; (-) strand; PAM type: YTN; PAM sequence: CTC
  source 1..20: mol_type = other DNA
agtacatttttctcagtaaa

SEQ ID NO: 44880 - DNA, 20 bp, synthetic construct
  misc_feature 1..20: note = Description of Artificial Sequence: Synthetic oligonucleotide
  misc_feature 1..20: note = Target: SCN10A; (-) strand; PAM type: YTN; PAM sequence: CTA
  source 1..20: mol_type = other DNA
taacctcagtacatttttct

SEQ ID NO: 44881 - DNA, 20 bp, synthetic construct
  misc_feature 1..20: note = Description of Artificial Sequence: Synthetic oligonucleotide
  misc_feature 1..20: note = Target: SCN10A; (-) strand; PAM type: YTN; PAM sequence: TTC
  source 1..20: mol_type = other DNA
tataacctcagtacattttt

SEQ ID NO: 44882 - DNA, 20 bp, synthetic construct
  misc_feature 1..20: note = Description of Artificial Sequence: Synthetic oligonucleotide
  misc_feature 1..20: note = Target: SCN10A; (-) strand; PAM type: YTN; PAM sequence: TTA
  source 1..20: mol_type = other DNA
tgcattctataacctcagta

SEQ ID NO: 44883 - DNA, 20 bp, synthetic construct
  misc_feature 1..20: note = Description of Artificial Sequence: Synthetic oligonucleotide
  misc_feature 1..20: note = Target: SCN10A; (-) strand; PAM type: YTN; PAM sequence: TTT
  source 1..20: mol_type = other DNA
atgcattctataacctcagt

SEQ ID NO: 44884 - DNA, 20 bp, synthetic construct
  misc_feature 1..20: note = Description of Artificial Sequence: Synthetic oligonucleotide
  misc_feature 1..20: note = Target: SCN10A; (-) strand; PAM type: YTN; PAM sequence: TTA
  source 1..20: mol_type = other DNA
caaaaataaaaccacattta

SEQ ID NO: 44885 - DNA, 20 bp, synthetic construct
  misc_feature 1..20: note = Description of Artificial Sequence: Synthetic oligonucleotide
  misc_feature 1..20: note = Target: SCN10A; (-) strand; PAM type: YTN; PAM sequence: TTA
  source 1..20: mol_type = other DNA
tgcataaaatatacacatat

SEQ ID NO: 44886 - DNA, 20 bp, synthetic construct
  misc_feature 1..20: note = Description of Artificial Sequence: Synthetic oligonucleotide
  misc_feature 1..20: note = Target: SCN10A; (-) strand; PAM type: YTN; PAM sequence: CTT
  source 1..20: mol_type = other DNA
atgcataaaatatacacata

SEQ ID NO: 44887 - DNA, 20 bp, synthetic construct
  misc_feature 1..20: note = Description of Artificial Sequence: Synthetic oligonucleotide
  misc_feature 1..20: note = Target: SCN10A; (-) strand; PAM type: YTN; PAM sequence: TTG
  source 1..20: mol_type = other DNA
cttatgcataaaatatacac

SEQ ID NO: 44888 - DNA, 20 bp, synthetic construct
  misc_feature 1..20: note = Description of Artificial Sequence: Synthetic oligonucleotide
  misc_feature 1..20: note = Target: SCN10A; (-) strand; PAM type: YTN; PAM sequence: CTT
  source 1..20: mol_type = other DNA
gcttatgcataaaatataca

SEQ ID NO: 44889 - DNA, 20 bp, synthetic construct
  misc_feature 1..20: note = Description of Artificial Sequence: Synthetic oligonucleotide
  misc_feature 1..20: note = Target: SCN10A; (-) strand; PAM type: YTN; PAM sequence: CTC
  source 1..20: mol_type = other DNA
atcttgcttatgcataaaat

SEQ ID NO: 44890 - DNA, 20 bp, synthetic construct
  misc_feature 1..20: note = Description of Artificial Sequence: Synthetic oligonucleotide
  misc_feature 1..20: note = Target: SCN10A; (-) strand; PAM type: YTN; PAM sequence: TTC
  source 1..20: mol_type = other DNA
tcatcttgcttatgcataaa

SEQ ID NO: 44891 - DNA, 20 bp, synthetic construct
  misc_feature 1..20: note = Description of Artificial Sequence: Synthetic oligonucleotide
  misc_feature 1..20: note = Target: SCN10A; (-) strand; PAM type: YTN; PAM sequence: TTT
  source 1..20: mol_type = other DNA
ctcatcttgcttatgcataa

SEQ ID NO: 44892 - DNA, 20 bp, synthetic construct
  misc_feature 1..20: note = Description of Artificial Sequence: Synthetic oligonucleotide
  misc_feature 1..20: note = Target: SCN10A; (-) strand; PAM type: YTN; PAM sequence: CTT
  source 1..20: mol_type = other DNA
tctcatcttgcttatgcata

SEQ ID NO: 44893 - DNA, 20 bp, synthetic construct
  misc_feature 1..20: note = Description of Artificial Sequence: Synthetic oligonucleotide
  misc_feature 1..20: note = Target: SCN10A; (-) strand; PAM type: YTN; PAM sequence: CTC
  source 1..20: mol_type = other DNA
tttctcatcttgcttatgca

SEQ ID NO: 44894 - DNA, 20 bp, synthetic construct
  misc_feature 1..20: note = Description of Artificial Sequence: Synthetic oligonucleotide
  misc_feature 1..20: note = Target: SCN10A; (-) strand; PAM type: YTN; PAM sequence: CTG
  source 1..20: mol_type = other DNA
gtatacctctttctcatctt

SEQ ID NO: 44895 - DNA, 20 bp, synthetic construct
  misc_feature 1..20: note = Description of Artificial Sequence: Synthetic oligonucleotide
  misc_feature 1..20: note = Target: SCN10A; (-) strand; PAM type: YTN; PAM sequence: TTG
  source 1..20: mol_type = other DNA
aaaacatgctggtatacctc

SEQ ID NO: 44896 - DNA, 20 bp, synthetic construct
  misc_feature 1..20: note = Description of Artificial Sequence: Synthetic oligonucleotide
  misc_feature 1..20: note = Target: SCN10A; (-) strand; PAM type: YTN; PAM sequence: CTT
  source 1..20: mol_type = other DNA
gaaaacatgctggtatacct

SEQ ID NO: 44897 - DNA, 20 bp, synthetic construct
  misc_feature 1..20: note = Description of Artificial Sequence: Synthetic oligonucleotide
  misc_feature 1..20: note = Target: SCN10A; (-) strand; PAM type: YTN; PAM sequence: CTC
  source 1..20: mol_type = other DNA
acttgaaaacatgctggtat

SEQ ID NO: 44898 - DNA, 20 bp, synthetic construct
  misc_feature 1..20: note = Description of Artificial Sequence: Synthetic oligonucleotide
  misc_feature 1..20: note = Target: SCN10A; (-) strand; PAM type: YTN; PAM sequence: CTC
  source 1..20: mol_type = other DNA
aaagagaaactcacttgaaa

SEQ ID NO: 44899 - DNA, 20 bp, synthetic construct
  misc_feature 1..20: note = Description of Artificial Sequence: Synthetic oligonucleotide
  misc_feature 1..20: note = Target: SCN10A; (-) strand; PAM type: YTN; PAM sequence: CTA
  source 1..20: mol_type = other DNA
tcactcaaagagaaactcac

SEQ ID NO: 44900 - DNA, 20 bp, synthetic construct
  misc_feature 1..20: note = Description of Artificial Sequence: Synthetic oligonucleotide
  misc_feature 1..20: note = Target: SCN10A; (-) strand; PAM type: YTN; PAM sequence: TTC
  source 1..20: mol_type = other DNA
cctatcactcaaagagaaac

SEQ ID NO: 44901 - DNA, 20 bp, synthetic construct
  misc_feature 1..20: note = Description of Artificial Sequence: Synthetic oligonucleotide
  misc_feature 1..20: note = Target: SCN10A; (-) strand; PAM type: YTN; PAM sequence: TTT
  source 1..20: mol_type = other DNA
ccctatcactcaaagagaaa

SEQ ID NO: 44902 - DNA, 20 bp, synthetic construct
  misc_feature 1..20: note = Description of Artificial Sequence: Synthetic oligonucleotide
  misc_feature 1..20: note = Target: SCN10A; (-) strand; PAM type: YTN; PAM sequence: TTA
  source 1..20: mol_type = other DNA
tagaaaaaggtaaagaaaaa

SEQ ID NO: 44903 - DNA, 20 bp, synthetic construct
  misc_feature 1..20: note = Description of Artificial Sequence: Synthetic oligonucleotide
  misc_feature 1..20: note = Target: SCN10A; (-) strand; PAM type: YTN; PAM sequence: TTG
  source 1..20: mol_type = other DNA
gaaattatagaaaaaggtaa

SEQ ID NO: 44904 - DNA, 20 bp, synthetic construct
  misc_feature 1..20: note = Description of Artificial Sequence: Synthetic oligonucleotide
  misc_feature 1..20: note = Target: SCN10A; (-) strand; PAM type: YTN; PAM sequence: CTT
  source 1..20: mol_type = other DNA
ggaaattatagaaaaaggta

SEQ ID NO: 44905 - DNA, 20 bp, synthetic construct
  misc_feature 1..20: note = Description of Artificial Sequence: Synthetic oligonucleotide
  misc_feature 1..20: note = Target: SCN10A; (-) strand; PAM type: YTN; PAM sequence: CTG
  source 1..20: mol_type = other DNA
acaaagtaaagtaccaaaaa

SEQ ID NO: 44906 - DNA, 20 bp, synthetic construct
  misc_feature 1..20: note = Description of Artificial Sequence: Synthetic oligonucleotide
  misc_feature 1..20: note = Target: SCN10A; (-) strand; PAM type: YTN; PAM sequence: TTC
  source 1..20: mol_type = other DNA
atctgacaaagtaaagtacc

SEQ ID NO: 44907 - DNA, 20 bp, synthetic construct
  misc_feature 1..20: note = Description of Artificial Sequence: Synthetic oligonucleotide
  misc_feature 1..20: note = Target: SCN10A; (-) strand; PAM type: YTN; PAM sequence: TTT
  source 1..20: mol_type = other DNA
catctgacaaagtaaagtac

SEQ ID NO: 44908 - DNA, 20 bp, synthetic construct
  misc_feature 1..20: note = Description of Artificial Sequence: Synthetic oligonucleotide
  misc_feature 1..20: note = Target: SCN10A; (-) strand; PAM type: YTN; PAM sequence: TTT
  source 1..20: mol_type = other DNA
tcatctgacaaagtaaagta

SEQ ID NO: 44909 - DNA, 20 bp, synthetic construct
  misc_feature 1..20: note = Description of Artificial Sequence: Synthetic oligonucleotide
  misc_feature 1..20: note = Target: SCN10A; (-) strand; PAM type: YTN; PAM sequence: TTA
  source 1..20: mol_type = other DNA
aaaataacatgcattttcat

SEQ ID NO: 44910 - DNA, 20 bp, synthetic construct
  misc_feature 1..20: note = Description of Artificial Sequence: Synthetic oligonucleotide
  misc_feature 1..20: note = Target: SCN10A; (-) strand; PAM type: YTN; PAM sequence: TTT
  source 1..20: mol_type = other DNA
aaaaataacatgcattttca

SEQ ID NO: 44911 - DNA, 20 bp, synthetic construct
  misc_feature 1..20: note = Description of Artificial Sequence: Synthetic oligonucleotide
  misc_feature 1..20: note = Target: SCN10A; (-) strand; PAM type: YTN; PAM sequence: TTT
  source 1..20: mol_type = other DNA
taaaaataacatgcattttc

SEQ ID NO: 44912 - DNA, 20 bp, synthetic construct
  misc_feature 1..20: note = Description of Artificial Sequence: Synthetic oligonucleotide
  misc_feature 1..20: note = Target: SCN10A; (-) strand; PAM type: YTN; PAM sequence: CTT
  source 1..20: mol_type = other DNA
ttaaaaataacatgcatttt

SEQ ID NO: 44913 - DNA, 20 bp, synthetic construct
  misc_feature 1..20: note = Description of Artificial Sequence: Synthetic oligonucleotide
  misc_feature 1..20: note = Target: SCN10A; (-) strand; PAM type: YTN; PAM sequence: TTG
  source 1..20: mol_type = other DNA
agtaccttttaaaaataaca

SEQ ID NO: 44914 - DNA, 20 bp, synthetic construct
  misc_feature 1..20: note = Description of Artificial Sequence: Synthetic oligonucleotide
  misc_feature 1..20: note = Target: SCN10A; (-) strand; PAM type: YTN; PAM sequence: TTT
  source 1..20: mol_type = other DNA
gagtaccttttaaaaataac

SEQ ID NO: 44915 - DNA, 20 bp, synthetic construct
  misc_feature 1..20: note = Description of Artificial Sequence: Synthetic oligonucleotide
  misc_feature 1..20: note = Target: SCN10A; (-) strand; PAM type: YTN; PAM sequence: CTT
  source 1..20: mol_type = other DNA
tgagtaccttttaaaaataa

SEQ ID NO: 44916 - DNA, 20 bp, synthetic construct
  misc_feature 1..20: note = Description of Artificial Sequence: Synthetic oligonucleotide
  misc_feature 1..20: note = Target: SCN10A; (-) strand; PAM type: YTN; PAM sequence: TTC
  source 1..20: mol_type = other DNA
actttgagtaccttttaaaa

SEQ ID NO: 44917 - DNA, 20 bp, synthetic construct
  misc_feature 1..20: note = Description of Artificial Sequence: Synthetic oligonucleotide
  misc_feature 1..20: note = Target: SCN10A; (-) strand; PAM type: YTN; PAM sequence: TTT
  source 1..20: mol_type = other DNA
cactttgagtaccttttaaa

SEQ ID NO: 44918 - DNA, 20 bp, synthetic construct
  misc_feature 1..20: note = Description of Artificial Sequence: Synthetic oligonucleotide
  misc_feature 1..20: note = Target: SCN10A; (-) strand; PAM type: YTN; PAM sequence: CTT
  source 1..20: mol_type = other DNA
tcactttgagtaccttttaa

SEQ ID NO: 44919 - DNA, 20 bp, synthetic construct
  misc_feature 1..20: note = Description of Artificial Sequence: Synthetic oligonucleotide
  misc_feature 1..20: note = Target: SCN10A; (-) strand; PAM type: YTN; PAM sequence: TTA
  source 1..20: mol_type = other DNA
ggctttcactttgagtacct

SEQ ID NO: 44920 - DNA, 20 bp, synthetic construct
  misc_feature 1..20: note = Description of Artificial Sequence: Synthetic oligonucleotide
  misc_feature 1..20: note = Target: SCN10A; (-) strand; PAM type: YTN; PAM sequence: TTT
  source 1..20: mol_type = other DNA
aggctttcactttgagtacc

SEQ ID NO: 44921 - DNA, 20 bp, synthetic construct
  misc_feature 1..20: note = Description of Artificial Sequence: Synthetic oligonucleotide
  misc_feature 1..20: note = Target: SCN10A; (-) strand; PAM type: YTN; PAM sequence: CTT
  source 1..20: mol_type = other DNA
taggctttcactttgagtac

SEQ ID NO: 44922 - DNA, 20 bp, synthetic construct
  misc_feature 1..20: note = Description of Artificial Sequence: Synthetic oligonucleotide
  misc_feature 1..20: note = Target: SCN10A; (-) strand; PAM type: YTN; PAM sequence: TTC
  source 1..20: mol_type = other DNA
tttaggctttcactttgagt

SEQ ID NO: 44923 - DNA, 20 bp, synthetic construct
  misc_feature 1..20: note = Description of Artificial Sequence: Synthetic oligonucleotide
  misc_feature 1..20: note = Target: SCN10A; (-) strand; PAM type: YTN; PAM sequence: CTT
  source 1..20: mol_type = other DNA
ctttaggctttcactttgag

SEQ ID NO: 44924 - DNA, 20 bp, synthetic construct
  misc_feature 1..20: note = Description of Artificial Sequence: Synthetic oligonucleotide
  misc_feature 1..20: note = Target: SCN10A; (-) strand; PAM type: YTN; PAM sequence: TTA
  source 1..20: mol_type = other DNA
gccttctttaggctttcact

SEQ ID NO: 44925 - DNA, 20 bp, synthetic construct
  misc_feature 1..20: note = Description of Artificial Sequence: Synthetic oligonucleotide
  misc_feature 1..20: note = Target: SCN10A; (-) strand; PAM type: YTN; PAM sequence: TTT
  source 1..20: mol_type = other DNA
agccttctttaggctttcac

SEQ ID NO: 44926 - DNA, 20 bp, synthetic construct
  misc_feature 1..20: note = Description of Artificial Sequence: Synthetic oligonucleotide
  misc_feature 1..20: note = Target: SCN10A; (-) strand; PAM type: YTN; PAM sequence: CTG
  source 1..20: mol_type = other DNA
gcaccaaatttagccttctt

SEQ ID NO: 44927 - DNA, 20 bp, synthetic construct
  misc_feature 1..20: note = Description of Artificial Sequence: Synthetic oligonucleotide
  misc_feature 1..20: note = Target: SCN10A; (-) strand; PAM type: YTN; PAM sequence: CTG
  source 1..20: mol_type = other DNA
aacaggctggcaccaaattt

SEQ ID NO: 44928 - DNA, 20 bp, synthetic construct
  misc_feature 1..20: note = Description of Artificial Sequence: Synthetic oligonucleotide
  misc_feature 1..20: note = Target: SCN10A; (-) strand; PAM type: YTN; PAM sequence: CTG
  source 1..20: mol_type = other DNA
ggactgaacaggctggcacc

SEQ ID NO: 44929 - DNA, 20 bp, synthetic construct
  misc_feature 1..20: note = Description of Artificial Sequence: Synthetic oligonucleotide
  misc_feature 1..20: note = Target: SCN10A; (-) strand; PAM type: YTN; PAM sequence: TTC
  source 1..20: mol_type = other DNA
ccctgggactgaacaggctg

SEQ ID NO: 44930 - DNA, 20 bp, synthetic construct
  misc_feature 1..20: note = Description of Artificial Sequence: Synthetic oligonucleotide
  misc_feature 1..20: note = Target: SCN10A; (-) strand; PAM type: YTN; PAM sequence: CTT
  source 1..20: mol_type = other DNA
cccctgggactgaacaggct

SEQ ID NO: 44931 - DNA, 20 bp, synthetic construct
  misc_feature 1..20: note = Description of Artificial Sequence: Synthetic oligonucleotide
  misc_feature 1..20: note = Target: SCN10A; (-) strand; PAM type: YTN; PAM sequence: CTC
  source 1..20: mol_type = other DNA
cttcccctgggactgaacag

SEQ ID NO: 44932 - DNA, 20 bp, synthetic construct
  misc_feature 1..20: note = Description of Artificial Sequence: Synthetic oligonucleotide
  misc_feature 1..20: note = Target: SCN10A; (-) strand; PAM type: YTN; PAM sequence: CTC
  source 1..20: mol_type = other DNA
ccatctccttcccctgggac

SEQ ID NO: 44933 - DNA, 20 bp, synthetic construct
  misc_feature 1..20: note = Description of Artificial Sequence: Synthetic oligonucleotide
  misc_feature 1..20: note = Target: SCN10A; (-) strand; PAM type: YTN; PAM sequence: TTC
  source 1..20: mol_type = other DNA
cctcccatctccttcccctg

SEQ ID NO: 44934 - DNA, 20 bp, synthetic construct
  misc_feature 1..20: note = Description of Artificial Sequence: Synthetic oligonucleotide
  misc_feature 1..20: note = Target: SCN10A; (-) strand; PAM type: YTN; PAM sequence: CTT
  source 1..20: mol_type = other DNA
ccctcccatctccttcccct

SEQ ID NO: 44935 - DNA, 20 bp, synthetic construct
  misc_feature 1..20: note = Description of Artificial Sequence: Synthetic oligonucleotide
  misc_feature 1..20: note = Target: SCN10A; (-) strand; PAM type: YTN; PAM sequence: CTC
  source 1..20: mol_type = other DNA
ccttccctcccatctccttc

SEQ ID NO: 44936 - DNA, 20 bp, synthetic construct
  misc_feature 1..20: note = Description of Artificial Sequence: Synthetic oligonucleotide
  misc_feature 1..20: note = Target: SCN10A; (-) strand; PAM type: YTN; PAM sequence: CTC
  source 1..20: mol_type = other DNA
tcccttccctcccatctcct

SEQ ID NO: 44937 - DNA, 20 bp, synthetic construct
  misc_feature 1..20: note = Description of Artificial Sequence: Synthetic oligonucleotide
  misc_feature 1..20: note = Target: SCN10A; (-) strand; PAM type: YTN; PAM sequence: CTG
  source 1..20: mol_type = other DNA
cagctctcccttccctccca

SEQ ID NO: 44938 - DNA, 20 bp, synthetic construct
  misc_feature 1..20: note = Description of Artificial Sequence: Synthetic oligonucleotide
  misc_feature 1..20: note = Target: SCN10A; (-) strand; PAM type: YTN; PAM sequence: CTG
  source 1..20: mol_type = other DNA
cgccagcccagcccgccccc

SEQ ID NO: 44939 - DNA, 20 bp, synthetic construct
  misc_feature 1..20: note = Description of Artificial Sequence: Synthetic oligonucleotide
  misc_feature 1..20: note = Target: SCN10A; (-) strand; PAM type: YTN; PAM sequence: CTG
  source 1..20: mol_type = other DNA
cagcactgcgccagcccagc

SEQ ID NO: 44940 - DNA, 20 bp, synthetic construct
  misc_feature 1..20: note = Description of Artificial Sequence: Synthetic oligonucleotide
  misc_feature 1..20: note = Target: SCN10A; (-) strand; PAM type: YTN; PAM sequence: CTC
  source 1..20: mol_type = other DNA
agacctgcagcactgcgcca

SEQ ID NO: 44941 - DNA, 20 bp, synthetic construct
  misc_feature 1..20: note = Description of Artificial Sequence: Synthetic oligonucleotide
  misc_feature 1..20: note = Target: SCN10A; (-) strand; PAM type: YTN; PAM sequence: TTC
  source 1..20: mol_type = other DNA
ccaggaggaagctcagacct

SEQ ID NO: 44942 - DNA, 20 bp, synthetic construct
  misc_feature 1..20: note = Description of Artificial Sequence: Synthetic oligonucleotide
  misc_feature 1..20: note = Target: SCN10A; (-) strand; PAM type: YTN; PAM sequence: TTC
  source 1..20: mol_type = other DNA
acaccccggtccacccccca

SEQ ID NO: 44943 - DNA, 20 bp, synthetic construct
  misc_feature 1..20: note = Description of Artificial Sequence: Synthetic oligonucleotide
  misc_feature 1..20: note = Target: SCN10A; (-) strand; PAM type: YTN; PAM sequence: CTT
  source 1..20: mol_type = other DNA
cacaccccggtccacccccc

SEQ ID NO: 44944 - DNA, 20 bp, synthetic construct
  misc_feature 1..20: note = Description of Artificial Sequence: Synthetic oligonucleotide
  misc_feature 1..20: note = Target: SCN10A; (-) strand; PAM type: YTN; PAM sequence: CTC
  source 1..20: mol_type = other DNA
ttcacaccccggtccacccc

SEQ ID NO: 44945 - DNA, 20 bp, synthetic construct
  misc_feature 1..20: note = Description of Artificial Sequence: Synthetic oligonucleotide
  misc_feature 1..20: note = Target: SCN10A; (-) strand; PAM type: YTN; PAM sequence: TTC
  source 1..20: mol_type = other DNA
tcttcacaccccggtccacc

SEQ ID NO: 44946 - DNA, 20 bp, synthetic construct
  misc_feature 1..20: note = Description of Artificial Sequence: Synthetic oligonucleotide
  misc_feature 1..20: note = Target: SCN10A; (-) strand; PAM type: YTN; PAM sequence: CTT
  source 1..20: mol_type = other DNA
ctcttcacaccccggtccac

SEQ ID NO: 44947 - DNA, 20 bp, synthetic construct
  misc_feature 1..20: note = Description of Artificial Sequence: Synthetic oligonucleotide
  misc_feature 1..20: note = Target: SCN10A; (-) strand; PAM type: YTN; PAM sequence: CTA
  source 1..20: mol_type = other DNA
gcccccttctcttcacaccc

SEQ ID NO: 44948 - DNA, 20 bp, synthetic construct
  misc_feature 1..20: note = Description of Artificial Sequence: Synthetic oligonucleotide
  misc_feature 1..20: note = Target: SCN10A; (-) strand; PAM type: YTN; PAM sequence: CTC
  source 1..20: mol_type = other DNA
tagcccccttctcttcacac

SEQ ID NO: 44949 - DNA, 20 bp, synthetic construct
  misc_feature 1..20: note = Description of Artificial Sequence: Synthetic oligonucleotide
  misc_feature 1..20: note = Target: SCN10A; (-) strand; PAM type: YTN; PAM sequence: CTC
  source 1..20: mol_type = other DNA
tctagcccccttctcttcac

SEQ ID NO: 44950 - DNA, 20 bp, synthetic construct
  misc_feature 1..20: note = Description of Artificial Sequence: Synthetic oligonucleotide
  misc_feature 1..20: note = Target: SCN10A; (-) strand; PAM type: YTN; PAM sequence: CTC
  source 1..20: mol_type = other DNA
tctctagcccccttctcttc

SEQ ID NO: 44951 - DNA, 20 bp, synthetic construct
  misc_feature 1..20: note = Description of Artificial Sequence: Synthetic oligonucleotide
  misc_feature 1..20: note = Target: SCN10A; (-) strand; PAM type: YTN; PAM sequence: TTC
  source 1..20: mol_type = other DNA
tctctctagcccccttctct

SEQ ID NO: 44952 - DNA, 20 bp, synthetic construct
  misc_feature 1..20: note = Description of Artificial Sequence: Synthetic oligonucleotide
  misc_feature 1..20: note = Target: SCN10A; (-) strand; PAM type: YTN; PAM sequence: CTT
  source 1..20: mol_type = other DNA
ctctctctagcccccttctc

SEQ ID NO: 44953 - DNA, 20 bp, synthetic construct
  misc_feature 1..20: note = Description of Artificial Sequence: Synthetic oligonucleotide
  misc_feature 1..20: note = Target: SCN10A; (-) strand; PAM type: YTN; PAM sequence: CTC
  source 1..20: mol_type = other DNA
ccttctctctctagccccct

SEQ ID NO: 44954 - DNA, 20 bp, synthetic construct
  misc_feature 1..20: note = Description of Artificial Sequence: Synthetic oligonucleotide
  misc_feature 1..20: note = Target: SCN10A; (-) strand; PAM type: YTN; PAM sequence: CTC
  source 1..20: mol_type = other DNA
cctcccttctctctctagcc

SEQ ID NO: 44955 - DNA, 20 bp, synthetic construct
  misc_feature 1..20: note = Description of Artificial Sequence: Synthetic oligonucleotide
  misc_feature 1..20: note = Target: SCN10A; (-) strand; PAM type: YTN; PAM sequence: TTG
  source 1..20: mol_type = other DNA
ctccctcccttctctctcta

SEQ ID NO: 44956 - DNA, 20 bp, synthetic construct
  misc_feature 1..20: note = Description of Artificial Sequence: Synthetic oligonucleotide
  misc_feature 1..20: note = Target: SCN10A; (-) strand; PAM type: YTN; PAM sequence: CTT
  source 1..20: mol_type = other DNA
gctccctcccttctctctct

SEQ ID NO: 44957 - DNA, 20 bp, synthetic construct
  misc_feature 1..20: note = Description of Artificial Sequence: Synthetic oligonucleotide
  misc_feature 1..20: note = Target: SCN10A; (-) strand; PAM type: YTN; PAM sequence: CTC
  source 1..20: mol_type = other DNA
ccttgctccctcccttctct

SEQ ID NO: 44958 - DNA, 20 bp, synthetic construct
  misc_feature 1..20: note = Description of Artificial Sequence: Synthetic oligonucleotide
  misc_feature 1..20: note = Target: SCN10A; (-) strand; PAM type: YTN; PAM sequence: CTC
  source 1..20: mol_type = other DNA
tcccttgctccctcccttct

SEQ ID NO: 44959 - DNA, 20 bp, synthetic construct
  misc_feature 1..20: note = Description of Artificial Sequence: Synthetic oligonucleotide
  misc_feature 1..20: note = Target: SCN10A; (-) strand; PAM type: YTN; PAM sequence: CTG
  source 1..20: mol_type = other DNA
ctctcccttgctccctccct

SEQ ID NO: 44960 - DNA, 20 bp, synthetic construct
  misc_feature 1..20: note = Description of Artificial Sequence: Synthetic oligonucleotide
  misc_feature 1..20: note = Target: SCN10A; (-) strand; PAM type: YTN; PAM sequence: CTC
  source 1..20: mol_type = other DNA
tgctctcccttgctccctcc

SEQ ID NO: 44961 - DNA, 20 bp, synthetic construct
  misc_feature 1..20: note = Description of Artificial Sequence: Synthetic oligonucleotide
  misc_feature 1..20: note = Target: SCN10A; (-) strand; PAM type: YTN; PAM sequence: TTC
  source 1..20: mol_type = other DNA
tctgctctcccttgctccct

SEQ ID NO: 44962 - DNA, 20 bp, synthetic construct
  misc_feature 1..20: note = Description of Artificial Sequence: Synthetic oligonucleotide
  misc_feature 1..20: note = Target: SCN10A; (-) strand; PAM type: YTN; PAM sequence: CTT
  source 1..20: mol_type = other DNA
ctctgctctcccttgctccc

SEQ ID NO: 44963 - DNA, 20 bp, synthetic construct
  misc_feature 1..20: note = Description of Artificial Sequence: Synthetic oligonucleotide
  misc_feature 1..20: note = Target: SCN10A; (-) strand; PAM type: YTN; PAM sequence: TTG
  source 1..20: mol_type = other DNA
cttctctgctctcccttgct

SEQ ID NO: 44964 - DNA, 20 bp, synthetic construct
  misc_feature 1..20: note = Description of Artificial Sequence: Synthetic oligonucleotide
  misc_feature 1..20: note = Target: SCN10A; (-) strand; PAM type: YTN; PAM sequence: TTT
  source 1..20: mol_type = other DNA
gcttctctgctctcccttgc

SEQ ID NO: 44965 - DNA, 20 bp, synthetic construct
  misc_feature 1..20: note = Description of Artificial Sequence: Synthetic oligonucleotide
  misc_feature 1..20: note = Target: SCN10A; (-) strand; PAM type: YTN; PAM sequence: TTT
  source 1..20: mol_type = other DNA
tgcttctctgctctcccttg

SEQ ID NO: 44966 - DNA, 20 bp, synthetic construct
  misc_feature 1..20: note = Description of Artificial Sequence: Synthetic oligonucleotide
  misc_feature 1..20: note = Target: SCN10A; (-) strand; PAM type: YTN; PAM sequence: CTC
  source 1..20: mol_type = other DNA
attttgcttctctgctctcc

SEQ ID NO: 44967 - DNA, 20 bp, synthetic construct
  misc_feature 1..20: note = Description of Artificial Sequence: Synthetic oligonucleotide
  misc_feature 1..20: note = Target: SCN10A; (-) strand; PAM type: YTN; PAM sequence: CTC
  source 1..20: mol_type = other DNA
ctcattttgcttctctgctc

SEQ ID NO: 44968 - DNA, 20 bp, synthetic construct
  misc_feature 1..20: note = Description of Artificial Sequence: Synthetic oligonucleotide
  misc_feature 1..20: note = Target: SCN10A; (-) strand; PAM type: YTN; PAM sequence: CTC
  source 1..20: mol_type = other DNA
tcctcattttgcttctctgc

SEQ ID NO: 44969 - DNA, 20 bp, synthetic construct
  misc_feature 1..20: note = Description of Artificial Sequence: Synthetic oligonucleotide
  misc_feature 1..20: note = Target: SCN10A; (-) strand; PAM type: YTN; PAM sequence: TTC
  source 1..20: mol_type = other DNA
tctcctcattttgcttctct

SEQ ID NO: 44970 - DNA, 20 bp, synthetic construct
  misc_feature 1..20: note = Description of Artificial Sequence: Synthetic oligonucleotide
  misc_feature 1..20: note = Target: SCN10A; (-) strand; PAM type: YTN; PAM sequence: CTT
  source 1..20: mol_type = other DNA
ctctcctcattttgcttctc

SEQ ID NO: 44971 - DNA, 20 bp, synthetic construct
  misc_feature 1..20: note = Description of Artificial Sequence: Synthetic oligonucleotide
  misc_feature 1..20: note = Target: SCN10A; (-) strand; PAM type: YTN; PAM sequence: TTG
  source 1..20: mol_type = other DNA
tgggccttctctcctcattt

SEQ ID NO: 44972 - DNA, 20 bp, synthetic construct
  misc_feature 1..20: note = Description of Artificial Sequence: Synthetic oligonucleotide
  misc_feature 1..20: note = Target: SCN10A; (-) strand; PAM type: YTN; PAM sequence: CTT
  source 1..20: mol_type = other DNA
gtgggccttctctcctcatt

SEQ ID NO: 44973 - DNA, 20 bp, synthetic construct
  misc_feature 1..20: note = Description of Artificial Sequence: Synthetic oligonucleotide
  misc_feature 1..20: note = Target: SCN10A; (-) strand; PAM type: YTN; PAM sequence: TTG
  source 1..20: mol_type = other DNA
gcttgtgggccttctctcct

SEQ ID NO: 44974 - DNA, 20 bp, synthetic construct
  misc_feature 1..20: note = Description of Artificial Sequence: Synthetic oligonucleotide
  misc_feature 1..20: note = Target: SCN10A; (-) strand; PAM type: YTN; PAM sequence: CTA
  source 1..20: mol_type = other DNA
cgtcattggcttgtgggcct

SEQ ID NO: 44975 - DNA, 20 bp, synthetic construct
  misc_feature 1..20: note = Description of Artificial Sequence: Synthetic oligonucleotide
  misc_feature 1..20: note = Target: SCN10A; (-) strand; PAM type: YTN; PAM sequence: CTC
  source 1..20: mol_type = other DNA
actacgtcattggcttgtgg

SEQ ID NO: 44976 - DNA, 20 bp, synthetic construct
  misc_feature 1..20: note = Description of Artificial Sequence: Synthetic oligonucleotide
  misc_feature 1..20: note = Target: SCN10A; (-) strand; PAM type: YTN; PAM sequence: CTC
  source 1..20: mol_type = other DNA
ctcactacgtcattggcttg

SEQ ID NO: 44977 - DNA, 20 bp, synthetic construct
  misc_feature 1..20: note = Description of Artificial Sequence: Synthetic oligonucleotide
  misc_feature 1..20: note = Target: SCN10A; (-) strand; PAM type: YTN; PAM sequence: CTC
  source 1..20: mol_type = other DNA
tcctcactacgtcattggct

SEQ ID NO: 44978 - DNA, 20 bp, synthetic construct
  misc_feature 1..20: note = Description of Artificial Sequence: Synthetic oligonucleotide
  misc_feature 1..20: note = Target: SCN10A; (-) strand; PAM type: YTN; PAM sequence: TTG
  source 1..20: mol_type = other DNA
gccaggtgctctcctcacta

SEQ ID NO: 44979 - DNA, 20 bp, synthetic construct
  misc_feature 1..20: note = Description of Artificial Sequence: Synthetic oligonucleotide
  misc_feature 1..20: note = Target: SCN10A; (-) strand; PAM type: YTN; PAM sequence: CTG
  source 1..20: mol_type = other DNA
ttggccaggtgctctcctca

SEQ ID NO: 44980 - DNA, 20 bp, synthetic construct
  misc_feature 1..20: note = Description of Artificial Sequence: Synthetic oligonucleotide
  misc_feature 1..20: note = Target: SCN10A; (-) strand; PAM type: YTN; PAM sequence: TTA
  source 1..20: mol_type = other DNA
aagtaataaccacatgtgct

SEQ ID NO: 44981 - DNA, 20 bp, synthetic construct
  misc_feature 1..20: note = Description of Artificial Sequence: Synthetic oligonucleotide
  misc_feature 1..20: note = Target: SCN10A; (-) strand; PAM type: YTN; PAM sequence: CTG
  source 1..20: mol_type = other DNA
gattaaagtaataaccacat

SEQ ID NO: 44982 - DNA, 20 bp, synthetic construct
  misc_feature 1..20: note = Description of Artificial Sequence: Synthetic oligonucleotide
  misc_feature 1..20: note = Target: SCN10A; (-) strand; PAM type: YTN; PAM sequence: CTG
  source 1..20: mol_type = other DNA
ctggattaaagtaataacca

SEQ ID NO: 44983 - DNA, 20 bp, synthetic construct
  misc_feature 1..20: note = Description of Artificial Sequence: Synthetic oligonucleotide
  misc_feature 1..20: note = Target: SCN10A; (-) strand; PAM type: YTN; PAM sequence: TTC
  source 1..20: mol_type = other DNA
cagtcctgctggattaaagt

SEQ ID NO: 44984 - DNA, 20 bp, synthetic construct
  misc_feature 1..20: note = Description of Artificial Sequence: Synthetic oligonucleotide
  misc_feature 1..20: note = Target: SCN10A; (-) strand; PAM type: YTN; PAM sequence: CTT
  source 1..20: mol_type = other DNA
ccagtcctgctggattaaag

SEQ ID NO: 44985 - DNA, 20 bp, synthetic construct
  misc_feature 1..20: note = Description of Artificial Sequence: Synthetic oligonucleotide
  misc_feature 1..20: note = Target: SCN10A; (-) strand; PAM type: YTN; PAM sequence: CTC
  source 1..20: mol_type = other DNA
cttccagtcctgctggatta

SEQ ID NO: 44986 - DNA, 20 bp, synthetic construct
  misc_feature 1..20: note = Description of Artificial Sequence: Synthetic oligonucleotide
  misc_feature 1..20: note = Target: SCN10A; (-) strand; PAM type: YTN; PAM sequence: TTC
  source 1..20: mol_type = other DNA
tccttccagtcctgctggat

SEQ ID NO: 44987 - DNA, 20 bp, synthetic construct
  misc_feature 1..20: note = Description of Artificial Sequence: Synthetic oligonucleotide
  misc_feature 1..20: note = Target: SCN10A; (-) strand; PAM type: YTN; PAM sequence: CTT
  source 1..20: mol_type = other DNA
ctccttccagtcctgctgga

SEQ ID NO: 44988 - DNA, 20 bp, synthetic construct
  misc_feature 1..20: note = Description of Artificial Sequence: Synthetic oligonucleotide
  misc_feature 1..20: note = Target: SCN10A; (-) strand; PAM type: YTN; PAM sequence: CTC
  source 1..20: mol_type = other DNA
ttctccttccagtcctgctg

SEQ ID NO: 44989 - DNA, 20 bp, synthetic construct
  misc_feature 1..20: note = Description of Artificial Sequence: Synthetic oligonucleotide
  misc_feature 1..20: note = Target: SCN10A; (-) strand; PAM type: YTN; PAM sequence: CTA
  source 1..20: mol_type = other DNA
tgctcttctccttccagtcc

SEQ ID NO: 44990 - DNA, 20 bp, synthetic construct
  misc_feature 1..20: note = Description of Artificial Sequence: Synthetic oligonucleotide
  misc_feature 1..20: note = Target: SCN10A; (-) strand; PAM type: YTN; PAM sequence: CTC
  source 1..20: mol_type = other DNA
cacacctatgctcttctcct

SEQ ID NO: 44991 - DNA, 20 bp, synthetic construct
  misc_feature 1..20: note = Description of Artificial Sequence: Synthetic oligonucleotide
  misc_feature 1..20: note = Target: SCN10A; (-) strand; PAM type: YTN; PAM sequence: TTC
  source 1..20: mol_type = other DNA
tccacacctatgctcttctc

SEQ ID NO: 44992 - DNA, 20 bp, synthetic construct
  misc_feature 1..20: note = Description of Artificial Sequence: Synthetic oligonucleotide
  misc_feature 1..20: note = Target: SCN10A; (-) strand; PAM type: YTN; PAM sequence: TTT
  source 1..20: mol_type = other DNA
ctccacacctatgctcttct

SEQ ID NO: 44993 - DNA, 20 bp, synthetic construct
  misc_feature 1..20: note = Description of Artificial Sequence: Synthetic oligonucleotide
  misc_feature 1..20: note = Target: SCN10A; (-) strand; PAM type: YTN; PAM sequence: CTT
  source 1..20: mol_type = other DNA
tctccacacctatgctcttc

SEQ ID NO: 44994 - DNA, 20 bp, synthetic construct
  misc_feature 1..20: note = Description of Artificial Sequence: Synthetic oligonucleotide
  misc_feature 1..20: note = Target: SCN10A; (-) strand; PAM type: YTN; PAM sequence: CTG
  source 1..20: mol_type = other DNA
ggcagtgctttctccacacc

SEQ ID NO: 44995 - DNA, 20 bp, synthetic construct
  misc_feature 1..20: note = Description of Artificial Sequence: Synthetic oligonucleotide
  misc_feature 1..20: note = Target: SCN10A; (-) strand; PAM type: YTN; PAM sequence: TTG
  source 1..20: mol_type = other DNA
caggggcaagagagggctgg

SEQ ID NO: 44996 - DNA, 20 bp, synthetic construct
  misc_feature 1..20: note = Description of Artificial Sequence: Synthetic oligonucleotide
  misc_feature 1..20: note = Target: SCN10A; (-) strand; PAM type: YTN; PAM sequence: CTC
  source 1..20: mol_type = other DNA
agcacagtgtagaggccaaa

SEQ ID NO: 44997 - DNA, 20 bp, synthetic construct
  misc_feature 1..20: note = Description of Artificial Sequence: Synthetic oligonucleotide
  misc_feature 1..20: note = Target: SCN10A; (-) strand; PAM type: YTN; PAM sequence: TTG
  source 1..20: mol_type = other DNA
tccacacggacctcagcaca

SEQ ID NO: 44998 - DNA, 20 bp, synthetic construct
  misc_feature 1..20: note = Description of Artificial Sequence: Synthetic oligonucleotide
  misc_feature 1..20: note = Target: SCN10A; (-) strand; PAM type: YTN; PAM sequence: CTG
  source 1..20: mol_type = other DNA
gcacagggcagtgattgtcc

SEQ ID NO: 44999 - DNA, 20 bp, synthetic construct
  misc_feature 1..20: note = Description of Artificial Sequence: Synthetic oligonucleotide
  misc_feature 1..20: note = Target: SCN10A; (-) strand; PAM type: YTN; PAM sequence: CTG
  source 1..20: mol_type = other DNA
caggtgcccagtgccctggc

SEQ ID NO: 45000 - DNA, 20 bp, synthetic construct
  misc_feature 1..20: note = Description of Artificial Sequence: Synthetic oligonucleotide
  misc_feature 1..20: note = Target: SCN10A; (-) strand; PAM type: YTN; PAM sequence: CTG
  source 1..20: mol_type = other DNA
tgtgacagcggctgcaggtg

SEQ ID NO: 45001 - DNA, 20 bp, synthetic construct
  misc_feature 1..20: note = Description of Artificial Sequence: Synthetic oligonucleotide
  misc_feature 1..20: note = Target: SCN10A; (-) strand; PAM type: YTN; PAM sequence: CTG
  source 1..20: mol_type = other DNA
ggtggagggggaactgtgtg

SEQ ID NO: 45002 - DNA, 20 bp, synthetic construct
  misc_feature 1..20: note = Description of Artificial Sequence: Synthetic oligonucleotide
  misc_feature 1..20: note = Target: SCN10A; (-) strand; PAM type: YTN; PAM sequence: CTG
  source 1..20: mol_type = other DNA
ccatcctgggtggaggggga

SEQ ID NO: 45003 - DNA, 20 bp, synthetic construct
  misc_feature 1..20: note = Description of Artificial Sequence: Synthetic oligonucleotide
  misc_feature 1..20: note = Target: SCN10A; (-) strand; PAM type: YTN; PAM sequence: CTG
  source 1..20: mol_type = other DNA
gtctgccatcctgggtggag

SEQ ID NO: 45004 - DNA, 20 bp, synthetic construct
  misc_feature 1..20: note = Description of Artificial Sequence: Synthetic oligonucleotide
  misc_feature 1..20: note = Target: SCN10A; (-) strand; PAM type: YTN; PAM sequence: TTC
  source 1..20: mol_type = other DNA
ggggcagggactggtctgcc

SEQ ID NO: 45005 - DNA, 20 bp, synthetic construct
  misc_feature 1..20: note = Description of Artificial Sequence: Synthetic oligonucleotide
  misc_feature 1..20: note = Target: SCN10A; (-) strand; PAM type: YTN; PAM sequence: TTT
  source 1..20: mol_type = other DNA
cggggcagggactggtctgc

SEQ ID NO: 45006 - DNA, 20 bp, synthetic construct
  misc_feature 1..20: note = Description of Artificial Sequence: Synthetic oligonucleotide
  misc_feature 1..20: note = Target: SCN10A; (-) strand; PAM type: YTN; PAM sequence: CTA
  source 1..20: mol_type = other DNA
gggtggcaatgacgcaaagc

SEQ ID NO: 45007 - DNA, 20 bp, synthetic construct
  misc_feature 1..20: note = Description of Artificial Sequence: Synthetic oligonucleotide
  misc_feature 1..20: note = Target: SCN10A; (-) strand; PAM type: YTN; PAM sequence: CTG
  source 1..20: mol_type = other DNA
agaggtgggaggaaaactag

SEQ ID NO: 45008 - DNA, 20 bp, synthetic construct
  misc_feature 1..20: note = Description of Artificial Sequence: Synthetic oligonucleotide
  misc_feature 1..20: note = Target: SCN10A; (-) strand; PAM type: YTN; PAM sequence: TTA
  source 1..20: mol_type = other DNA
gggaggagcacaggtgcggg

SEQ ID NO: 45009 - DNA, 20 bp, synthetic construct
  misc_feature 1..20: note = Description of Artificial Sequence: Synthetic oligonucleotide
  misc_feature 1..20: note = Target: SCN10A; (-) strand; PAM type: YTN; PAM sequence: TTT
  source 1..20: mol_type = other DNA
agggaggagcacaggtgcgg

SEQ ID NO: 45010 - DNA, 20 bp, synthetic construct
  misc_feature 1..20: note = Description of Artificial Sequence: Synthetic oligonucleotide
  misc_feature 1..20: note = Target: SCN10A; (-) strand; PAM type: YTN; PAM sequence: CTT
  source 1..20: mol_type = other DNA
tagggaggagcacaggtgcg

SEQ ID NO: 45011 - DNA, 20 bp, synthetic construct
  misc_feature 1..20: note = Description of Artificial Sequence: Synthetic oligonucleotide
  misc_feature 1..20: note = Target: SCN10A; (-) strand; PAM type: YTN; PAM sequence: CTC
  source 1..20: mol_type = other DNA
agctttagggaggagcacag

SEQ ID NO: 45012 - DNA, 20 bp, synthetic construct
  misc_feature 1..20: note = Description of Artificial Sequence: Synthetic oligonucleotide
  misc_feature 1..20: note = Target: SCN10A; (-) strand; PAM type: YTN; PAM sequence: CTC
  source 1..20: mol_type = other DNA
ggtgcatggcctcagcttta

SEQ ID NO: 45013 - DNA, 20 bp, synthetic construct
  misc_feature 1..20: note = Description of Artificial Sequence: Synthetic oligonucleotide
  misc_feature 1..20: note = Target: SCN10A; (-) strand; PAM type: YTN; PAM sequence: CTG
  source 1..20: mol_type = other DNA
ctcggtgcatggcctcagct

SEQ ID NO: 45014 - DNA, 20 bp, synthetic construct
  misc_feature 1..20: note = Description of Artificial Sequence: Synthetic oligonucleotide
  misc_feature 1..20: note = Target: SCN10A; (-) strand; PAM type: YTN; PAM sequence: TTG
  source 1..20: mol_type = other DNA
tccaggaagggtgacaaaac

SEQ ID NO: 45015 - DNA, 20 bp, synthetic construct
  misc_feature 1..20: note = Description of Artificial Sequence: Synthetic oligonucleotide
  misc_feature 1..20: note = Target: SCN10A; (-) strand; PAM type: YTN; PAM sequence: CTA
  source 1..20: mol_type = other DNA
aatgccagattgtccaggaa

SEQ ID NO: 45016 - DNA, 20 bp, synthetic construct
  misc_feature 1..20: note = Description of Artificial Sequence: Synthetic oligonucleotide
  misc_feature 1..20: note = Target: SCN10A; (-) strand; PAM type: YTN; PAM sequence: CTC
  source 1..20: mol_type = other DNA
catctaaatgccagattgtc

SEQ ID NO: 45017 - DNA, 20 bp, synthetic construct
  misc_feature 1..20: note = Description of Artificial Sequence: Synthetic oligonucleotide
  misc_feature 1..20: note = Target: SCN10A; (-) strand; PAM type: YTN; PAM sequence: CTA
  source 1..20: mol_type = other DNA
ggcctccatctaaatgccag

SEQ ID NO: 45018 - DNA, 20 bp, synthetic construct
  misc_feature 1..20: note = Description of Artificial Sequence: Synthetic oligonucleotide
  misc_feature 1..20: note = Target: SCN10A; (-) strand; PAM type: YTN; PAM sequence: CTA
  source 1..20: mol_type = other DNA
aatatctaggcctccatcta

SEQ ID NO: 45019 - DNA, 20 bp, synthetic construct
  misc_feature 1..20: note = Description of Artificial Sequence: Synthetic oligonucleotide
  misc_feature 1..20: note = Target: SCN10A; (-) strand; PAM type: YTN; PAM sequence: CTA
  source 1..20: mol_type = other DNA
ctaaatatctaggcctccat

SEQ ID NO: 45020 - DNA, 20 bp, synthetic construct
  misc_feature 1..20: note = Description of Artificial Sequence: Synthetic oligonucleotide
  misc_feature 1..20: note = Target: SCN10A; (-) strand; PAM type: YTN; PAM sequence: CTA
  source 1..20: mol_type = other DNA
aaaacaacctactaaatatc

SEQ ID NO: 45021 - DNA, 20 bp, synthetic construct
  misc_feature 1..20: note = Description of Artificial Sequence: Synthetic oligonucleotide
  misc_feature 1..20: note = Target: SCN10A; (-) strand; PAM type: YTN; PAM sequence: CTC
  source 1..20: mol_type = other DNA
taaaaacaacctactaaata

SEQ ID NO: 45022 - DNA, 20 bp, synthetic construct
  misc_feature 1..20: note = Description of Artificial Sequence: Synthetic oligonucleotide
  misc_feature 1..20: note = Target: SCN10A; (-) strand; PAM type: YTN; PAM sequence: CTC
  source 1..20: mol_type = other DNA
tctaaaaacaacctactaaa

SEQ ID NO: 45023 - DNA, 20 bp, synthetic construct
  misc_feature 1..20: note = Description of Artificial Sequence: Synthetic oligonucleotide
  misc_feature 1..20: note = Target: SCN10A; (-) strand; PAM type: YTN; PAM sequence: TTA
  source 1..20: mol_type = other DNA
ctctctaaaaacaacctact

SEQ ID NO: 45024 - DNA, 20 bp, synthetic construct
  misc_feature 1..20: note = Description of Artificial Sequence: Synthetic oligonucleotide
  misc_feature 1..20: note = Target: SCN10A; (-) strand; PAM type: YTN; PAM sequence: TTT
  source 1..20: mol_type = other DNA
actctctaaaaacaacctac

SEQ ID NO: 45025 - DNA, 20 bp, synthetic construct
  misc_feature 1..20: note = Description of Artificial Sequence: Synthetic oligonucleotide
  misc_feature 1..20: note = Target: SCN10A; (-) strand; PAM type: YTN; PAM sequence: CTC
  source 1..20: mol_type = other DNA
atgtgtcatttactctctaa

SEQ ID NO: 45026 - DNA, 20 bp, synthetic construct
  misc_feature 1..20: note = Description of Artificial Sequence: Synthetic oligonucleotide
  misc_feature 1..20: note = Target: SCN10A; (-) strand; PAM type: YTN; PAM sequence: TTG
  source 1..20: mol_type = other DNA
cgcctcatgtgtcatttact

SEQ ID NO: 45027 - DNA, 20 bp, synthetic construct
  misc_feature 1..20: note = Description of Artificial Sequence: Synthetic oligonucleotide
  misc_feature 1..20: note = Target: SCN10A; (-) strand; PAM type: YTN; PAM sequence: CTT
  source 1..20: mol_type = other DNA
gcgcctcatgtgtcatttac

SEQ ID NO: 45028 - DNA, 20 bp, synthetic construct
  misc_feature 1..20: note = Description of Artificial Sequence: Synthetic oligonucleotide
  misc_feature 1..20: note = Target: SCN10A; (-) strand; PAM type: YTN; PAM sequence: CTC
  source 1..20: mol_type = other DNA
atcttgcgcctcatgtgtca

SEQ ID NO: 45029 - DNA, 20 bp, synthetic construct
  misc_feature 1..20: note = Description of Artificial Sequence: Synthetic oligonucleotide
  misc_feature 1..20: note = Target: SCN10A; (-) strand; PAM type: YTN; PAM sequence: TTC
  source 1..20: mol_type = other DNA
actcatcttgcgcctcatgt

SEQ ID NO: 45030 - DNA, 20 bp, synthetic construct
  misc_feature 1..20: note = Description of Artificial Sequence: Synthetic oligonucleotide
  misc_feature 1..20: note = Target: SCN10A; (-) strand; PAM type: YTN; PAM sequence: TTT
  source 1..20: mol_type = other DNA
cactcatcttgcgcctcatg

SEQ ID NO: 45031 - DNA, 20 bp, synthetic construct
  misc_feature 1..20: note = Description of Artificial Sequence: Synthetic oligonucleotide
  misc_feature 1..20: note = Target: SCN10A; (-) strand; PAM type: YTN; PAM sequence: TTT
  source 1..20: mol_type = other DNA
tcactcatcttgcgcctcat

SEQ ID NO: 45032 - DNA, 20 bp, synthetic construct
  misc_feature 1..20: note = Description of Artificial Sequence: Synthetic oligonucleotide
  misc_feature 1..20: note = Target: SCN10A; (-) strand; PAM type: YTN; PAM sequence: CTG
  source 1..20: mol_type = other DNA
cagtgttttcactcatcttg

SEQ ID NO: 45033 - DNA, 20 bp, synthetic construct
  misc_feature 1..20: note = Description of Artificial Sequence: Synthetic oligonucleotide
  misc_feature 1..20: note = Target: SCN10A; (-) strand; PAM type: YTN; PAM sequence: TTC
  source 1..20: mol_type = other DNA
acggctgcagtgttttcact

SEQ ID NO: 45034 - DNA, 20 bp, synthetic construct
  misc_feature 1..20: note = Description of Artificial Sequence: Synthetic oligonucleotide
  misc_feature 1..20: note = Target: SCN10A; (-) strand; PAM type: YTN; PAM sequence: TTC
  source 1..20: mol_type = other DNA
cgattcacggctgcagtgtt

SEQ ID NO: 45035 - DNA, 20 bp, synthetic construct
  misc_feature 1..20: note = Description of Artificial Sequence: Synthetic oligonucleotide
  misc_feature 1..20: note = Target: SCN10A; (-) strand; PAM type: YTN; PAM sequence: CTT
  source 1..20: mol_type = other DNA
ccgattcacggctgcagtgt

SEQ ID NO: 45036 - DNA, 20 bp, synthetic construct
  misc_feature 1..20: note = Description of Artificial Sequence: Synthetic oligonucleotide
  misc_feature 1..20: note = Target: SCN10A; (-) strand; PAM type: YTN; PAM sequence: CTC
  source 1..20: mol_type = other DNA
ttccgattcacggctgcagt

SEQ ID NO: 45037 - DNA, 20 bp, synthetic construct
  misc_feature 1..20: note = Description of Artificial Sequence: Synthetic oligonucleotide
  misc_feature 1..20: note = Target: SCN10A; (-) strand; PAM type: YTN; PAM sequence: CTA
  source 1..20: mol_type = other DNA
cagtcccgctcttccgattc

SEQ ID NO: 45038 - DNA, 20 bp, synthetic construct
  misc_feature 1..20: note = Description of Artificial Sequence: Synthetic oligonucleotide
  misc_feature 1..20: note = Target: SCN10A; (-) strand; PAM type: YTN; PAM sequence: CTA
  source 1..20: mol_type = other DNA
ggactacagtcccgctcttc

SEQ ID NO: 45039 - DNA, 20 bp, synthetic construct
  misc_feature 1..20: note = Description of Artificial Sequence: Synthetic oligonucleotide
  misc_feature 1..20: note = Target: SCN10A; (-) strand; PAM type: YTN; PAM sequence: TTG
  source 1..20: mol_type = other DNA
aagggctaggactacagtcc

SEQ ID NO: 45040 - DNA, 20 bp, synthetic construct
  misc_feature 1..20: note = Description of Artificial Sequence: Synthetic oligonucleotide
  misc_feature 1..20: note = Target: SCN10A; (-) strand; PAM type: YTN; PAM sequence: TTA
  source 1..20: mol_type = other DNA
gttgaagggctaggactaca

SEQ ID NO: 45041 - DNA, 20 bp, synthetic construct
  misc_feature 1..20: note = Description of Artificial Sequence: Synthetic oligonucleotide
  misc_feature 1..20: note = Target: SCN10A; (-) strand; PAM type: YTN; PAM sequence: CTA
  source 1..20: mol_type = other DNA
attagttgaagggctaggac

SEQ ID NO: 45042 - DNA, 20 bp, synthetic construct
  misc_feature 1..20: note = Description of Artificial Sequence: Synthetic oligonucleotide
  misc_feature 1..20: note = Target: SCN10A; (-) strand; PAM type: YTN; PAM sequence: TTC
  source 1..20: mol_type = other DNA
agggtggcagctaattagtt

SEQ ID NO: 45043 - DNA, 20 bp, synthetic construct
  misc_feature 1..20: note = Description of Artificial Sequence: Synthetic oligonucleotide
  misc_feature 1..20: note = Target: SCN10A; (-) strand; PAM type: YTN; PAM sequence: CTG
  source 1..20: mol_type = other DNA
ggaatagagagttcagggtg

SEQ ID NO: 45044 - DNA, 20 bp, synthetic construct
  misc_feature 1..20: note = Description of Artificial Sequence: Synthetic oligonucleotide
  misc_feature 1..20: note = Target: SCN10A; (-) strand; PAM type: YTN; PAM sequence: TTG
  source 1..20: mol_type = other DNA
aagggctgggaatagagagt

SEQ ID NO: 45045 - DNA, 20 bp, synthetic construct
  misc_feature 1..20: note = Description of Artificial Sequence: Synthetic oligonucleotide
  misc_feature 1..20: note = Target: SCN10A; (-) strand; PAM type: YTN; PAM sequence: TTA
  source 1..20: mol_type = other DNA
gttgaagggctgggaataga

SEQ ID NO: 45046 - DNA, 20 bp, synthetic construct
  misc_feature 1..20: note = Description of Artificial Sequence: Synthetic oligonucleotide
  misc_feature 1..20: note = Target: SCN10A; (-) strand; PAM type: YTN; PAM sequence: TTC
  source 1..20: mol_type = other DNA
aggtaattagttgaagggct

SEQ ID NO: 45047 - DNA, 20 bp, synthetic construct
  misc_feature 1..20: note = Description of Artificial Sequence: Synthetic oligonucleotide
  misc_feature 1..20: note = Target: SCN10A; (-) strand; PAM type: YTN; PAM sequence: CTT
  source 1..20: mol_type = other DNA
caggtaattagttgaagggc

SEQ ID NO: 45048 - DNA, 20 bp, synthetic construct
  misc_feature 1..20: note = Description of Artificial Sequence: Synthetic oligonucleotide
  misc_feature 1..20: note = Target: SCN10A; (-) strand; PAM type: YTN; PAM sequence: CTA
  source 1..20: mol_type = other DNA
aatgaggaagtcaaagccca

SEQ ID NO: 45049 - DNA, 20 bp, synthetic construct
  misc_feature 1..20: note = Description of Artificial Sequence: Synthetic oligonucleotide
  misc_feature 1..20: note = Target: SCN10A; (-) strand; PAM type: YTN; PAM sequence: TTC
  source 1..20: mol_type = other DNA
taaatgaggaagtcaaagcc

SEQ ID NO: 45050 - DNA, 20 bp, synthetic construct
  misc_feature 1..20: note = Description of Artificial Sequence: Synthetic oligonucleotide
  misc_feature 1..20: note = Target: SCN10A; (-) strand; PAM type: YTN; PAM sequence: TTT
  source 1..20: mol_type = other DNA
ctaaatgaggaagtcaaagc

SEQ ID NO: 45051 - DNA, 20 bp, synthetic construct
  misc_feature 1..20: note = Description of Artificial Sequence: Synthetic oligonucleotide
  misc_feature 1..20: note = Target: SCN10A; (-) strand; PAM type: YTN; PAM sequence: TTT
  source 1..20: mol_type = other DNA
tctaaatgaggaagtcaaag

SEQ ID NO: 45052 - DNA, 20 bp, synthetic construct
  misc_feature 1..20: note = Description of Artificial Sequence: Synthetic oligonucleotide
  misc_feature 1..20: note = Target: SCN10A; (-) strand; PAM type: YTN; PAM sequence: TTG
  source 1..20: mol_type = other DNA
cattttctaaatgaggaagt

SEQ ID NO: 45053 - DNA, 20 bp, synthetic construct
  misc_feature 1..20: note = Description of Artificial Sequence: Synthetic oligonucleotide
  misc_feature 1..20: note = Target: SCN10A; (-) strand; PAM type: YTN; PAM sequence: TTT
  source 1..20: mol_type = other DNA
gcattttctaaatgaggaag

SEQ ID NO: 45054 - DNA, 20 bp, synthetic construct
  misc_feature 1..20: note = Description of Artificial Sequence: Synthetic oligonucleotide
  misc_feature 1..20: note = Target: SCN10A; (-) strand; PAM type: YTN; PAM sequence: TTG
  source 1..20: mol_type = other DNA
tttgcattttctaaatgagg

SEQ ID NO: 45055 - DNA, 20 bp, synthetic construct
  misc_feature 1..20: note = Description of Artificial Sequence: Synthetic oligonucleotide
  misc_feature 1..20: note = Target: SCN10A; (-) strand; PAM type: YTN; PAM sequence: CTC
  source 1..20: mol_type = other DNA
agttgtttgcattttctaaa

SEQ ID NO: 45056 - DNA, 20 bp, synthetic construct
  misc_feature 1..20: note = Description of Artificial Sequence: Synthetic oligonucleotide
  misc_feature 1..20: note = Target: SCN10A; (-) strand; PAM type: YTN; PAM sequence: TTA
  source 1..20: mol_type = other DNA
acatcctcagttgtttgcat

SEQ ID NO: 45057 - DNA, 20 bp, synthetic construct
  misc_feature 1..20: note = Description of Artificial Sequence: Synthetic oligonucleotide
  misc_feature 1..20: note = Target: SCN10A; (-) strand; PAM type: YTN; PAM sequence: CTT
  source 1..20: mol_type = other DNA
aacatcctcagttgtttgca

SEQ ID NO: 45058 - DNA, 20 bp, synthetic construct
  misc_feature 1..20: note = Description of Artificial Sequence: Synthetic oligonucleotide
  misc_feature 1..20: note = Target: SCN10A; (-) strand; PAM type: YTN; PAM sequence: CTC
  source 1..20: mol_type = other DNA
cgccaatagaccaaggtaga

SEQ ID NO: 45059 - DNA, 20 bp, synthetic construct
  misc_feature 1..20: note = Description of Artificial Sequence: Synthetic oligonucleotide
  misc_feature 1..20: note = Target: SCN10A; (-) strand; PAM type: YTN; PAM sequence: CTA
  source 1..20: mol_type = other DNA
ctccgccaatagaccaaggt

SEQ ID NO: 45060 - DNA, 20 bp, synthetic construct
  misc_feature 1..20: note = Description of Artificial Sequence: Synthetic oligonucleotide
  misc_feature 1..20: note = Target: SCN10A; (-) strand; PAM type: YTN; PAM sequence: CTC
  source 1..20: mol_type = other DNA
aactactccgccaatagacc

SEQ ID NO: 45061 - DNA, 20 bp, synthetic construct
  misc_feature 1..20: note = Description of Artificial Sequence: Synthetic oligonucleotide
  misc_feature 1..20: note = Target: SCN10A; (-) strand; PAM type: YTN; PAM sequence: TTA
  source 1..20: mol_type = other DNA
cacaatctcaactactccgc

SEQ ID NO: 45062 - DNA, 20 bp, synthetic construct
  misc_feature 1..20: note = Description of Artificial Sequence: Synthetic oligonucleotide
  misc_feature 1..20: note = Target: SCN10A; (-) strand; PAM type: YTN; PAM sequence: CTT
  source 1..20: mol_type = other DNA
acacaatctcaactactccg

SEQ ID NO: 45063 - DNA, 20 bp, synthetic construct
  misc_feature 1..20: note = Description of Artificial Sequence: Synthetic oligonucleotide
  misc_feature 1..20: note = Target: SCN10A; (-) strand; PAM type: YTN; PAM sequence: CTC
  source 1..20: mol_type = other DNA
cttacacaatctcaactact

SEQ ID NO: 45064 - DNA, 20 bp, synthetic construct
  misc_feature 1..20: note = Description of Artificial Sequence: Synthetic oligonucleotide
  misc_feature 1..20: note = Target: SCN10A; (-) strand; PAM type: YTN; PAM sequence: TTA
  source 1..20: mol_type = other DNA
agctccttacacaatctcaa

SEQ ID NO: 45065 - DNA, 20 bp, synthetic construct
  misc_feature 1..20: note = Description of Artificial Sequence: Synthetic oligonucleotide
  misc_feature 1..20: note = Target: SCN10A; (-) strand; PAM type: YTN; PAM sequence: CTT
  source 1..20: mol_type = other DNA
aagctccttacacaatctca

SEQ ID NO: 45066 - DNA, 20 bp, synthetic construct
  misc_feature 1..20: note = Description of Artificial Sequence: Synthetic oligonucleotide
  misc_feature 1..20: note = Target: SCN10A; (-) strand; PAM type: YTN; PAM sequence: CTG
  source 1..20: mol_type = other DNA
tggcttaagctccttacaca

SEQ ID NO: 45067 - DNA, 20 bp, synthetic construct
  misc_feature 1..20: note = Description of Artificial Sequence: Synthetic oligonucleotide
  misc_feature 1..20: note = Target: SCN10A; (-) strand; PAM type: YTN; PAM sequence: CTG
  source 1..20: mol_type = other DNA
tactgtggcttaagctcctt

SEQ ID NO: 45068 - DNA, 20 bp, synthetic construct
  misc_feature 1..20: note = Description of Artificial Sequence: Synthetic oligonucleotide
  misc_feature 1..20: note = Target: SCN10A; (-) strand; PAM type: YTN; PAM sequence: CTC
  source 1..20: mol_type = other DNA
tgtactgtggcttaagctcc

SEQ ID NO: 45069 - DNA, 20 bp, synthetic construct
  misc_feature 1..20: note = Description of Artificial Sequence: Synthetic oligonucleotide
  misc_feature 1..20: note = Target: SCN10A; (-) strand; PAM type: YTN; PAM sequence: CTC
  source 1..20: mol_type = other DNA
tctgtactgtggcttaagct

SEQ ID NO: 45070 - DNA, 20 bp, synthetic construct
  misc_feature 1..20: note = Description of Artificial Sequence: Synthetic oligonucleotide
  misc_feature 1..20: note = Target: SCN10A; (-) strand; PAM type: YTN; PAM sequence: TTC
  source 1..20: mol_type = other DNA
tctctgtactgtggcttaag

SEQ ID NO: 45071 - DNA, 20 bp, synthetic construct
  misc_feature 1..20: note = Description of Artificial Sequence: Synthetic oligonucleotide
  misc_feature 1..20: note = Target: SCN10A; (-) strand; PAM type: YTN; PAM sequence: TTG
  source 1..20: mol_type = other DNA
tagagcaaagaaggaaggtt

SEQ ID NO: 45072 - DNA, 20 bp, synthetic construct
  misc_feature 1..20: note = Description of Artificial Sequence: Synthetic oligonucleotide
  misc_feature 1..20: note = Target: SCN10A; (-) strand; PAM type: YTN; PAM sequence: TTT
  source 1..20: mol_type = other DNA
gtagagcaaagaaggaaggt

SEQ ID NO: 45073 - DNA, 20 bp, synthetic construct
  misc_feature 1..20: note = Description of Artificial Sequence: Synthetic oligonucleotide
  misc_feature 1..20: note = Target: SCN10A; (-) strand; PAM type: YTN; PAM sequence: CTT
  source 1..20: mol_type = other DNA
tgtagagcaaagaaggaagg

SEQ ID NO: 45074 - DNA, 20 bp, synthetic construct
  misc_feature 1..20: note = Description of Artificial Sequence: Synthetic oligonucleotide
  misc_feature 1..20: note = Target: SCN10A; (-) strand; PAM type: YTN; PAM sequence: CTG
  source 1..20: mol_type = other DNA
ggctttgtagagcaaagaag

SEQ ID NO: 45075 - DNA, 20 bp, synthetic construct
  misc_feature 1..20: note = Description of Artificial Sequence: Synthetic oligonucleotide
  misc_feature 1..20: note = Target: SCN10A; (-) strand; PAM type: YTN; PAM sequence: CTG
  source 1..20: mol_type = other DNA
aatactgggctttgtagagc

SEQ ID NO: 45076 - DNA, 20 bp, synthetic construct
  misc_feature 1..20: note = Description of Artificial Sequence: Synthetic oligonucleotide
  misc_feature 1..20: note = Target: SCN10A; (-) strand; PAM type: YTN; PAM sequence: CTG
  source 1..20: mol_type = other DNA
gctgaatactgggctttgta

SEQ ID NO: 45077 - DNA, 20 bp, synthetic construct
  misc_feature 1..20: note = Description of Artificial Sequence: Synthetic oligonucleotide
  misc_feature 1..20: note = Target: SCN10A; (-) strand; PAM type: YTN; PAM sequence: CTA
  source 1..20: mol_type = other DNA
aggccctggctgaatactgg

SEQ ID NO: 45078 - DNA, 20 bp, synthetic construct
  misc_feature 1..20: note = Description of Artificial Sequence: Synthetic oligonucleotide
  misc_feature 1..20: note = Target: SCN10A; (-) strand; PAM type: YTN; PAM sequence: CTC
  source 1..20: mol_type = other DNA
taaggccctggctgaatact

SEQ ID NO: 45079 - DNA, 20 bp, synthetic construct
  misc_feature 1..20: note = Description of Artificial Sequence: Synthetic oligonucleotide
  misc_feature 1..20: note = Target: SCN10A; (-) strand; PAM type: YTN; PAM sequence: TTG
  source 1..20: mol_type = other DNA
ggagacatctctaaggccct

SEQ ID NO: 45080 - DNA, 20 bp, synthetic construct
  misc_feature 1..20: note = Description of Artificial Sequence: Synthetic oligonucleotide
  misc_feature 1..20: note = Target: SCN10A; (-) strand; PAM type: YTN; PAM sequence: TTC
  source 1..20: mol_type = other DNA
agagttgggagacatctcta

SEQ ID NO: 45081 - DNA, 20 bp, synthetic construct
  misc_feature 1..20: note = Description of Artificial Sequence: Synthetic oligonucleotide
  misc_feature 1..20: note = Target: SCN10A; (-) strand; PAM type: YTN; PAM sequence: TTA
  source 1..20: mol_type = other DNA
tgggaatagagattcagagt

SEQ ID NO: 45082 - DNA, 20 bp, synthetic construct
  misc_feature 1..20: note = Description of Artificial Sequence: Synthetic oligonucleotide
  misc_feature 1..20: note = Target: SCN10A; (-) strand; PAM type: YTN; PAM sequence: CTT
  source 1..20: mol_type = other DNA
atgggaatagagattcagag

SEQ ID NO: 45083 - DNA, 20 bp, synthetic construct
  misc_feature 1..20: note = Description of Artificial Sequence: Synthetic oligonucleotide
  misc_feature 1..20: note = Target: SCN10A; (-) strand; PAM type: YTN; PAM sequence: TTG
  source 1..20: mol_type = other DNA
aataacaaggccttatggga

SEQ ID NO: 45084 - DNA, 20 bp, synthetic construct
  misc_feature 1..20: note = Description of Artificial Sequence: Synthetic oligonucleotide
  misc_feature 1..20: note = Target: SCN10A; (-) strand; PAM type: YTN; PAM sequence: TTT
  source 1..20: mol_type = other DNA
gaataacaaggccttatggg

SEQ ID NO: 45085 - DNA, 20 bp, synthetic construct
  misc_feature 1..20: note = Description of Artificial Sequence: Synthetic oligonucleotide
  misc_feature 1..20: note = Target: SCN10A; (-) strand; PAM type: YTN; PAM sequence: CTT
  source 1..20: mol_type = other DNA
tgaataacaaggccttatgg

SEQ ID NO: 45086 - DNA, 20 bp, synthetic construct
  misc_feature 1..20: note = Description of Artificial Sequence: Synthetic oligonucleotide
  misc_feature 1..20: note = Target: SCN10A; (-) strand; PAM type: YTN; PAM sequence: CTC
  source 1..20: mol_type = other DNA
agtgacccacactttgaata

SEQ ID NO: 45087 - DNA, 20 bp, synthetic construct
  misc_feature 1..20: note = Description of Artificial Sequence: Synthetic oligonucleotide
  misc_feature 1..20: note = Target: SCN10A; (-) strand; PAM type: YTN; PAM sequence: CTG
  source 1..20: mol_type = other DNA
ccctcagtgacccacacttt

SEQ ID NO: 45088 - DNA, 20 bp, synthetic construct
  misc_feature 1..20: note = Description of Artificial Sequence: Synthetic oligonucleotide
  misc_feature 1..20: note = Target: SCN10A; (-) strand; PAM type: YTN; PAM sequence: TTG
  source 1..20: mol_type = other DNA
cactgccctcagtgacccac

SEQ ID NO: 45089 - DNA, 20 bp, synthetic construct
  misc_feature 1..20: note = Description of Artificial Sequence: Synthetic oligonucleotide
  misc_feature 1..20: note = Target: SCN10A; (-) strand; PAM type: YTN; PAM sequence: CTT
  source 1..20: mol_type = other DNA
gcactgccctcagtgaccca

SEQ ID NO: 45090 - DNA, 20 bp, synthetic construct
  misc_feature 1..20: note = Description of Artificial Sequence: Synthetic oligonucleotide
  misc_feature 1..20: note = Target: SCN10A; (-) strand; PAM type: YTN; PAM sequence: CTC
  source 1..20: mol_type = other DNA
ccaggtgatgcttgcactgc

SEQ ID NO: 45091 - DNA, 20 bp, synthetic construct
  misc_feature 1..20: note = Description of Artificial Sequence: Synthetic oligonucleotide
  misc_feature 1..20: note = Target: SCN10A; (-) strand; PAM type: YTN; PAM sequence: CTA
  source 1..20: mol_type = other DNA
acaagctcccaggtgatgct

SEQ ID NO: 45092 - DNA, 20 bp, synthetic construct
  misc_feature 1..20: note = Description of Artificial Sequence: Synthetic oligonucleotide
  misc_feature 1..20: note = Target: SCN10A; (-) strand; PAM type: YTN; PAM sequence: TTC
  source 1..20: mol_type = other DNA
taacaagctcccaggtgatg

SEQ ID NO: 45093 - DNA, 20 bp, synthetic construct
  misc_feature 1..20: note = Description of Artificial Sequence: Synthetic oligonucleotide
  misc_feature 1..20: note = Target: SCN10A; (-) strand; PAM type: YTN; PAM sequence: TTT
  source 1..20: mol_type = other DNA
ctaacaagctcccaggtgat

SEQ ID NO: 45094 - DNA, 20 bp, synthetic construct
  misc_feature 1..20: note = Description of Artificial Sequence: Synthetic oligonucleotide
  misc_feature 1..20: note = Target: SCN10A; (-) strand; PAM type: YTN; PAM sequence: TTG
  source 1..20: mol_type = other DNA
catttctaacaagctcccag

SEQ ID NO: 45095 - DNA, 20 bp, synthetic construct
  misc_feature 1..20: note = Description of Artificial Sequence: Synthetic oligonucleotide
  misc_feature 1..20: note = Target: SCN10A; (-) strand; PAM type: YTN; PAM sequence: TTT
  source 1..20: mol_type = other DNA
gcatttctaacaagctccca

SEQ ID NO: 45096 - DNA, 20 bp, synthetic construct
  misc_feature 1..20: note = Description of Artificial Sequence: Synthetic oligonucleotide
  misc_feature 1..20: note = Target: SCN10A; (-) strand; PAM type: YTN; PAM sequence: CTG
  source 1..20: mol_type = other DNA
agaatttgcatttctaacaa

SEQ ID NO: 45097 - DNA, 20 bp, synthetic construct
  misc_feature 1..20: note = Description of Artificial Sequence: Synthetic oligonucleotide
  misc_feature 1..20: note = Target: SCN10A; (-) strand; PAM type: YTN; PAM sequence: CTG
  source 1..20: mol_type = other DNA
tggcagggcctgagaatttg

SEQ ID NO: 45098 - DNA, 20 bp, synthetic construct
  misc_feature 1..20: note = Description of Artificial Sequence: Synthetic oligonucleotide
  misc_feature 1..20: note = Target: SCN10A; (-) strand; PAM type: YTN; PAM sequence: TTC
  source 1..20: mol_type = other DNA
cataaatctgtggcagggcc

SEQ ID NO: 45099 - DNA, 20 bp, synthetic construct
  misc_feature 1..20: note = Description of Artificial Sequence: Synthetic oligonucleotide
  misc_feature 1..20: note = Target: SCN10A; (-) strand; PAM type: YTN; PAM sequence: CTC
  source 1..20: mol_type = other DNA
attccataaatctgtggcag

SEQ ID NO: 45100 - DNA, 20 bp, synthetic construct
  misc_feature 1..20: note = Description of Artificial Sequence: Synthetic oligonucleotide
  misc_feature 1..20: note = Target: SCN10A; (-) strand; PAM type: YTN; PAM sequence: TTC
  source 1..20: mol_type = other DNA
tcattccataaatctgtggc

SEQ ID NO: 45101 - DNA, 20 bp, synthetic construct
  misc_feature 1..20: note = Description of Artificial Sequence: Synthetic oligonucleotide
  misc_feature 1..20: note = Target: SCN10A; (-) strand; PAM type: YTN; PAM sequence: TTC
  source 1..20: mol_type = other DNA
aaatgcagattctcattcca

SEQ ID NO: 45102 - DNA, 20 bp, synthetic construct
  misc_feature 1..20: note = Description of Artificial Sequence: Synthetic oligonucleotide
  misc_feature 1..20: note = Target: SCN10A; (-) strand; PAM type: YTN; PAM sequence: TTG
  source 1..20: mol_type = other DNA
ttcaaatgcagattctcatt

SEQ ID NO: 45103 - DNA, 20 bp, synthetic construct
  misc_feature 1..20: note = Description of Artificial Sequence: Synthetic oligonucleotide
  misc_feature 1..20: note = Target: SCN10A; (-) strand; PAM type: YTN; PAM sequence: CTT
  source 1..20: mol_type = other DNA
gttcaaatgcagattctcat

SEQ ID NO: 45104 - DNA, 20 bp, synthetic construct
  misc_feature 1..20: note = Description of Artificial Sequence: Synthetic oligonucleotide
  misc_feature 1..20: note = Target: SCN10A; (-) strand; PAM type: YTN; PAM sequence: CTC
  source 1..20: mol_type = other DNA
ccaggagcttgttcaaatgc

SEQ ID NO: 45105 - DNA, 20 bp, synthetic construct
  misc_feature 1..20: note = Description of Artificial Sequence: Synthetic oligonucleotide
  misc_feature 1..20: note = Target: SCN10A; (-) strand; PAM type: YTN; PAM sequence: TTA
  source 1..20: mol_type = other DNA
atctcccaggagcttgttca

SEQ ID NO: 45106 - DNA, 20 bp, synthetic construct
  misc_feature 1..20: note = Description of Artificial Sequence: Synthetic oligonucleotide
  misc_feature 1..20: note = Target: SCN10A; (-) strand; PAM type: YTN; PAM sequence: TTT
  source 1..20: mol_type = other DNA
aatctcccaggagcttgttc

SEQ ID NO: 45107 - DNA, 20 bp, synthetic construct
  misc_feature 1..20: note = Description of Artificial Sequence: Synthetic oligonucleotide
  misc_feature 1..20: note = Target: SCN10A; (-) strand; PAM type: YTN; PAM sequence: CTC
  source 1..20: mol_type = other DNA
aaaatttaatctcccaggag

SEQ ID NO: 45108 - DNA, 20 bp, synthetic construct
  misc_feature 1..20: note = Description of Artificial Sequence: Synthetic oligonucleotide
  misc_feature 1..20: note = Target: SCN10A; (-) strand; PAM type: YTN; PAM sequence: TTC
  source 1..20: mol_type = other DNA
tcaaaatttaatctcccagg

SEQ ID NO: 45109 - DNA, 20 bp, synthetic construct
  misc_feature 1..20: note = Description of Artificial Sequence: Synthetic oligonucleotide
  misc_feature 1..20: note = Target: SCN10A; (-) strand; PAM type: YTN; PAM sequence: CTT
  source 1..20: mol_type = other DNA
ctcaaaatttaatctcccag

SEQ ID NO: 45110 - DNA, 20 bp, synthetic construct
  misc_feature 1..20: note = Description of Artificial Sequence: Synthetic oligonucleotide
  misc_feature 1..20: note = Target: SCN10A; (-) strand; PAM type: YTN; PAM sequence: TTA
  source 1..20: mol_type = other DNA
caatagcacttctcaaaatt

SEQ ID NO: 45111 - DNA, 20 bp, synthetic construct
  misc_feature 1..20: note = Description of Artificial Sequence: Synthetic oligonucleotide
  misc_feature 1..20: note = Target: SCN10A; (-) strand; PAM type: YTN; PAM sequence: CTC
  source 1..20: mol_type = other DNA
acagaaaatcattacaatag

SEQ ID NO: 45112 - DNA, 20 bp, synthetic construct
  misc_feature 1..20: note = Description of Artificial Sequence: Synthetic oligonucleotide
  misc_feature 1..20: note = Target: SCN10A; (-) strand; PAM type: YTN; PAM sequence: TTA
  source 1..20: mol_type = other DNA
aagctcacagaaaatcatta

SEQ ID NO: 45113 - DNA, 20 bp, synthetic construct
  misc_feature 1..20: note = Description of Artificial Sequence: Synthetic oligonucleotide
  misc_feature 1..20: note = Target: SCN10A; (-) strand; PAM type: YTN; PAM sequence: TTT
  source 1..20: mol_type = other DNA
aaagctcacagaaaatcatt

SEQ ID NO: 45114 - DNA, 20 bp, synthetic construct
  misc_feature 1..20: note = Description of Artificial Sequence: Synthetic oligonucleotide
  misc_feature 1..20: note = Target: SCN10A; (-) strand; PAM type: YTN; PAM sequence: CTT
  source 1..20: mol_type = other DNA
taaagctcacagaaaatcat

SEQ ID NO: 45115 - DNA, 20 bp, synthetic construct
  misc_feature 1..20: note = Description of Artificial Sequence: Synthetic oligonucleotide
  misc_feature 1..20: note = Target: SCN10A; (-) strand; PAM type: YTN; PAM sequence: CTC
  source 1..20: mol_type = other DNA
ctttaaagctcacagaaaat

SEQ ID NO: 45116 - DNA, 20 bp, synthetic construct
  misc_feature 1..20: note = Description of Artificial Sequence: Synthetic oligonucleotide
  misc_feature 1..20: note = Target: SCN10A; (-) strand; PAM type: YTN; PAM sequence: TTA
  source 1..20: mol_type = other DNA
ctcctttaaagctcacagaa

SEQ ID NO: 45117 - DNA, 20 bp, synthetic construct
  misc_feature 1..20: note = Description of Artificial Sequence: Synthetic oligonucleotide
  misc_feature 1..20: note = Target: SCN10A; (-) strand; PAM type: YTN; PAM sequence: CTA
  source 1..20: mol_type = other DNA
attactcctttaaagctcac

SEQ ID NO: 45118 - DNA, 20 bp, synthetic construct
  misc_feature 1..20: note = Description of Artificial Sequence: Synthetic oligonucleotide
  misc_feature 1..20: note = Target: SCN10A; (-) strand; PAM type: YTN; PAM sequence: CTA
  source 1..20: mol_type = other DNA
ctaattactcctttaaagct

SEQ ID NO: 45119 - DNA, 20 bp, synthetic construct
  misc_feature 1..20: note = Description of Artificial Sequence: Synthetic oligonucleotide
  misc_feature 1..20: note = Target: SCN10A; (-) strand; PAM type: YTN; PAM sequence: TTC
  source 1..20: mol_type = other DNA
caaatgctactaattactcc

SEQ ID NO: 45120 - DNA, 20 bp, synthetic construct
  misc_feature 1..20: note = Description of Artificial Sequence: Synthetic oligonucleotide
  misc_feature 1..20: note = Target: SCN10A; (-) strand; PAM type: YTN; PAM sequence: CTT
  source 1..20: mol_type = other DNA
ccaaatgctactaattactc

SEQ ID NO: 45121 - DNA, 20 bp, synthetic construct
  misc_feature 1..20: note = Description of Artificial Sequence: Synthetic oligonucleotide
  misc_feature 1..20: note = Target: SCN10A; (-) strand; PAM type: YTN; PAM sequence: TTA
  source 1..20: mol_type = other DNA
tcaaaccacttccaaatgct

SEQ ID NO: 45122 - DNA, 20 bp, synthetic construct
  misc_feature 1..20: note = Description of Artificial Sequence: Synthetic oligonucleotide
  misc_feature 1..20: note = Target: SCN10A; (-) strand; PAM type: YTN; PAM sequence: CTT
  source 1..20: mol_type = other DNA
atcaaaccacttccaaatgc

SEQ ID NO: 45123 - DNA, 20 bp, synthetic construct
  misc_feature 1..20: note = Description of Artificial Sequence: Synthetic oligonucleotide
  misc_feature 1..20: note = Target: SCN10A; (-) strand; PAM type: YTN; PAM sequence: TTC
  source 1..20: mol_type = other DNA
cttatcaaaccacttccaaa

SEQ ID NO: 45124 - DNA, 20 bp, synthetic construct
  misc_feature 1..20: note = Description of Artificial Sequence: Synthetic oligonucleotide
  misc_feature 1..20: note = Target: SCN10A; (-) strand; PAM type: YTN; PAM sequence: TTT
  source 1..20: mol_type = other DNA
ccttatcaaaccacttccaa

SEQ ID NO: 45125 - DNA, 20 bp, synthetic construct
  misc_feature 1..20: note = Description of Artificial Sequence: Synthetic oligonucleotide
  misc_feature 1..20: note = Target: SCN10A; (-) strand; PAM type: YTN; PAM sequence: CTT
  source 1..20: mol_type = other DNA
tccttatcaaaccacttcca

SEQ ID NO: 45126 - DNA, 20 bp, synthetic construct
  misc_feature 1..20: note = Description of Artificial Sequence: Synthetic oligonucleotide
  misc_feature 1..20: note = Target: SCN10A; (-) strand; PAM type: YTN; PAM sequence: CTA
  source 1..20: mol_type = other DNA
tctttccttatcaaaccact

SEQ ID NO: 45127 - DNA, 20 bp, synthetic construct
  misc_feature 1..20: note = Description of Artificial Sequence: Synthetic oligonucleotide
  misc_feature 1..20: note = Target: SCN10A; (-) strand; PAM type: YTN; PAM sequence: CTA
  source 1..20: mol_type = other DNA
caatacaaaaaggactatct

SEQ ID NO: 45128 - DNA, 20 bp, synthetic construct
  misc_feature 1..20: note = Description of Artificial Sequence: Synthetic oligonucleotide
  misc_feature 1..20: note = Target: SCN10A; (-) strand; PAM type: YTN; PAM sequence: CTG
  source 1..20: mol_type = other DNA
aaggcctacaatacaaaaag

SEQ ID NO: 45129 - DNA, 20 bp, synthetic construct
  misc_feature 1..20: note = Description of Artificial Sequence: Synthetic oligonucleotide
  misc_feature 1..20: note = Target: SCN10A; (-) strand; PAM type: YTN; PAM sequence: CTC
  source 1..20: mol_type = other DNA
tgaaggcctacaatacaaaa

SEQ ID NO: 45130 - DNA, 20 bp, synthetic construct
  misc_feature 1..20: note = Description of Artificial Sequence: Synthetic oligonucleotide
  misc_feature 1..20: note = Target: SCN10A; (-) strand; PAM type: YTN; PAM sequence: TTC
  source 1..20: mol_type = other DNA
tctgaaggcctacaatacaa

SEQ ID NO: 45131 - DNA, 20 bp, synthetic construct
  misc_feature 1..20: note = Description of Artificial Sequence: Synthetic oligonucleotide
  misc_feature 1..20: note = Target: SCN10A; (-) strand; PAM type: YTN; PAM sequence: CTT
  source 1..20: mol_type = other DNA
ctctgaaggcctacaataca

SEQ ID NO: 45132 - DNA, 20 bp, synthetic construct
  misc_feature 1..20: note = Description of Artificial Sequence: Synthetic oligonucleotide
  misc_feature 1..20: note = Target: SCN10A; (-) strand; PAM type: YTN; PAM sequence: CTC
  source 1..20: mol_type = other DNA
cccaacacacggccttctct

SEQ ID NO: 45133 - DNA, 20 bp, synthetic construct
  misc_feature 1..20: note = Description of Artificial Sequence: Synthetic oligonucleotide
  misc_feature 1..20: note = Target: SCN10A; (-) strand; PAM type: YTN; PAM sequence: CTG
  source 1..20: mol_type = other DNA
acctccccaacacacggcct

SEQ ID NO: 45134 - DNA, 20 bp, synthetic construct
  misc_feature 1..20: note = Description of Artificial Sequence: Synthetic oligonucleotide
  misc_feature 1..20: note = Target: SCN10A; (-) strand; PAM type: YTN; PAM sequence: CTC
  source 1..20: mol_type = other DNA
tgacctccccaacacacggc

SEQ ID NO: 45135 - DNA, 20 bp, synthetic construct
  misc_feature 1..20: note = Description of Artificial Sequence: Synthetic oligonucleotide
  misc_feature 1..20: note = Target: SCN10A; (-) strand; PAM type: YTN; PAM sequence: TTC
  source 1..20: mol_type = other DNA
ccaccctctgacctccccaa

SEQ ID NO: 45136 - DNA, 20 bp, synthetic construct
  misc_feature 1..20: note = Description of Artificial Sequence: Synthetic oligonucleotide
  misc_feature 1..20: note = Target: SCN10A; (-) strand; PAM type: YTN; PAM sequence: CTT
  source 1..20: mol_type = other DNA
cccaccctctgacctcccca

SEQ ID NO: 45137 - DNA, 20 bp, synthetic construct
  misc_feature 1..20: note = Description of Artificial Sequence: Synthetic oligonucleotide
  misc_feature 1..20: note = Target: SCN10A; (-) strand; PAM type: YTN; PAM sequence: CTG
  source 1..20: mol_type = other DNA
gcttcccaccctctgacctc

SEQ ID NO: 45138 - DNA, 20 bp, synthetic construct
  misc_feature 1..20: note = Description of Artificial Sequence: Synthetic oligonucleotide
  misc_feature 1..20: note = Target: SCN10A; (-) strand; PAM type: YTN; PAM sequence: TTA
  source 1..20: mol_type = other DNA
atcccgaagcccctggcttc

SEQ ID NO: 45139 - DNA, 20 bp, synthetic construct
  misc_feature 1..20: note = Description of Artificial Sequence: Synthetic oligonucleotide
  misc_feature 1..20: note = Target: SCN10A; (-) strand; PAM type: YTN; PAM sequence: TTT
  source 1..20: mol_type = other DNA
aatcccgaagcccctggctt

SEQ ID NO: 45140 - DNA, 20 bp, synthetic construct
  misc_feature 1..20: note = Description of Artificial Sequence: Synthetic oligonucleotide
  misc_feature 1..20: note = Target: SCN10A; (-) strand; PAM type: YTN; PAM sequence: TTA
  source 1..20: mol_type = other DNA
tttaatcccgaagcccctgg

SEQ ID NO: 45141 - DNA, 20 bp, synthetic construct
  misc_feature 1..20: note = Description of Artificial Sequence: Synthetic oligonucleotide
  misc_feature 1..20: note = Target: SCN10A; (-) strand; PAM type: YTN; PAM sequence: CTT
  source 1..20: mol_type = other DNA
atttaatcccgaagcccctg

SEQ ID NO: 45142 - DNA, 20 bp, synthetic construct
  misc_feature 1..20: note = Description of Artificial Sequence: Synthetic oligonucleotide
  misc_feature 1..20: note = Target: SCN10A; (-) strand; PAM type: YTN; PAM sequence: TTG
  source 1..20: mol_type = other DNA
cccttatttaatcccgaagc

SEQ ID NO: 45143 - DNA, 20 bp, synthetic construct
  misc_feature 1..20: note = Description of Artificial Sequence: Synthetic oligonucleotide
  misc_feature 1..20: note = Target: SCN10A; (-) strand; PAM type: YTN; PAM sequence: TTT
  source 1..20: mol_type = other DNA
gcccttatttaatcccgaag

SEQ ID NO: 45144 - DNA, 20 bp, synthetic construct
  misc_feature 1..20: note = Description of Artificial Sequence: Synthetic oligonucleotide
  misc_feature 1..20: note = Target: SCN10A; (-) strand; PAM type: YTN; PAM sequence: CTT
  source 1..20: mol_type = other DNA
tgcccttatttaatcccgaa

SEQ ID NO: 45145 - DNA, 20 bp, synthetic construct
  misc_feature 1..20: note = Description of Artificial Sequence: Synthetic oligonucleotide
  misc_feature 1..20: note = Target: SCN10A; (-) strand; PAM type: YTN; PAM sequence: TTG
  source 1..20: mol_type = other DNA
tcagtagcaaaacccagctt

SEQ ID NO: 45146 - DNA, 20 bp, synthetic construct
  misc_feature 1..20: note = Description of Artificial Sequence: Synthetic oligonucleotide
  misc_feature 1..20: note = Target: SCN10A; (-) strand; PAM type: YTN; PAM sequence: CTT
  source 1..20: mol_type = other DNA
gtcagtagcaaaacccagct

SEQ ID NO: 45147 - DNA, 20 bp, synthetic construct
  misc_feature 1..20: note = Description of Artificial Sequence: Synthetic oligonucleotide
  misc_feature 1..20: note = Target: SCN10A; (-) strand; PAM type: YTN; PAM sequence: TTG
  source 1..20: mol_type = other DNA
tccaaggtcacccaacttgt

SEQ ID NO: 45148 - DNA, 20 bp, synthetic construct
  misc_feature 1..20: note = Description of Artificial Sequence: Synthetic oligonucleotide
  misc_feature 1..20: note = Target: SCN10A; (-) strand; PAM type: YTN; PAM sequence: CTT
  source 1..20: mol_type = other DNA
gtccaaggtcacccaacttg

SEQ ID NO: 45149 - DNA, 20 bp, synthetic construct
  misc_feature 1..20: note = Description of Artificial Sequence: Synthetic oligonucleotide
  misc_feature 1..20: note = Target: SCN10A; (-) strand; PAM type: YTN; PAM sequence: TTA
  source 1..20: mol_type = other DNA
aaaggcttgtccaaggtcac

SEQ ID NO: 45150 - DNA, 20 bp, synthetic construct
  misc_feature 1..20: note = Description of Artificial Sequence: Synthetic oligonucleotide
  misc_feature 1..20: note = Target: SCN10A; (-) strand; PAM type: YTN; PAM sequence: TTT
  source 1..20: mol_type = other DNA
aaaaggcttgtccaaggtca

SEQ ID NO: 45151 - DNA, 20 bp, synthetic construct
  misc_feature 1..20: note = Description of Artificial Sequence: Synthetic oligonucleotide
  misc_feature 1..20: note = Target: SCN10A; (-) strand; PAM type: YTN; PAM sequence: CTC
  source 1..20: mol_type = other DNA
aaaatgtttaaaaggcttgt

SEQ ID NO: 45152 - DNA, 20 bp, synthetic construct
  misc_feature 1..20: note = Description of Artificial Sequence: Synthetic oligonucleotide
  misc_feature 1..20: note = Target: SCN10A; (-) strand; PAM type: YTN; PAM sequence: CTG
  source 1..20: mol_type = other DNA
acactcaaaatgtttaaaag

SEQ ID NO: 45153 - DNA, 20 bp, synthetic construct
  misc_feature 1..20: note = Description of Artificial Sequence: Synthetic oligonucleotide
  misc_feature 1..20: note = Target: SCN10A; (-) strand; PAM type: YTN; PAM sequence: CTA
  source 1..20: mol_type = other DNA
tatagatggggaaactgaca

SEQ ID NO: 45154 - DNA, 20 bp, synthetic construct
  misc_feature 1..20: note = Description of Artificial Sequence: Synthetic oligonucleotide
  misc_feature 1..20: note = Target: SCN10A; (-) strand; PAM type: YTN; PAM sequence: CTC
  source 1..20: mol_type = other DNA
ccactatatagatggggaaa

SEQ ID NO: 45155 - DNA, 20 bp, synthetic construct
  misc_feature 1..20: note = Description of Artificial Sequence: Synthetic oligonucleotide
  misc_feature 1..20: note = Target: SCN10A; (-) strand; PAM type: YTN; PAM sequence: TTG
  source 1..20: mol_type = other DNA
agtgagtgagtgtatgcctc

SEQ ID NO: 45156 - DNA, 20 bp, synthetic construct
  misc_feature 1..20: note = Description of Artificial Sequence: Synthetic oligonucleotide
  misc_feature 1..20: note = Target: SCN10A; (-) strand; PAM type: YTN; PAM sequence: TTT
  source 1..20: mol_type = other DNA
gagtgagtgagtgtatgcct

SEQ ID NO: 45157 - DNA, 20 bp, synthetic construct
  misc_feature 1..20: note = Description of Artificial Sequence: Synthetic oligonucleotide
  misc_feature 1..20: note = Target: SCN10A; (-) strand; PAM type: YTN; PAM sequence: CTG
  source 1..20: mol_type = other DNA
caagcatttgagtgagtgag

SEQ ID NO: 45158 - DNA, 20 bp, synthetic construct
  misc_feature 1..20: note = Description of Artificial Sequence: Synthetic oligonucleotide
  misc_feature 1..20: note = Target: SCN10A; (-) strand; PAM type: YTN; PAM sequence: CTG
  source 1..20: mol_type = other DNA
gctgcaagcatttgagtgag

SEQ ID NO: 45159 - DNA, 20 bp, synthetic construct
  misc_feature 1..20: note = Description of Artificial Sequence: Synthetic oligonucleotide
  misc_feature 1..20: note = Target: SCN10A; (-) strand; PAM type: YTN; PAM sequence: CTG
  source 1..20: mol_type = other DNA
ccaaacctggctgcaagcat

SEQ ID NO: 45160 - DNA, 20 bp, synthetic construct
  misc_feature 1..20: note = Description of Artificial Sequence: Synthetic oligonucleotide
  misc_feature 1..20: note = Target: SCN10A; (-) strand; PAM type: YTN; PAM sequence: TTC
  source 1..20: mol_type = other DNA
aaggtgcccgtgccatggcc

SEQ ID NO: 45161 - DNA, 20 bp, synthetic construct
  misc_feature 1..20: note = Description of Artificial Sequence: Synthetic oligonucleotide
  misc_feature 1..20: note = Target: SCN10A; (-) strand; PAM type: YTN; PAM sequence: TTA
  source 1..20: mol_type = other DNA
gcagcagagcatgggaggtg

SEQ ID NO: 45162 - DNA, 20 bp, synthetic construct
  misc_feature 1..20: note = Description of Artificial Sequence: Synthetic oligonucleotide
  misc_feature 1..20: note = Target: SCN10A; (-) strand; PAM type: YTN; PAM sequence: CTT
  source 1..20: mol_type = other DNA
agcagcagagcatgggaggt

SEQ ID NO: 45163 - DNA, 20 bp, synthetic construct
  misc_feature 1..20: note = Description of Artificial Sequence: Synthetic oligonucleotide
  misc_feature 1..20: note = Target: SCN10A; (-) strand; PAM type: YTN; PAM sequence: CTC
  source 1..20: mol_type = other DNA
ttagcagcagagcatgggag

SEQ ID NO: 45164 - DNA, 20 bp, synthetic construct
  misc_feature 1..20: note = Description of Artificial Sequence: Synthetic oligonucleotide
  misc_feature 1..20: note = Target: SCN10A; (-) strand; PAM type: YTN; PAM sequence: CTG
  source 1..20: mol_type = other DNA
cagcccagggcgagggcccc

SEQ ID NO: 45165 - DNA, 20 bp, synthetic construct
  misc_feature 1..20: note = Description of Artificial Sequence: Synthetic oligonucleotide
  misc_feature 1..20: note = Target: SCN10A; (-) strand; PAM type: YTN; PAM sequence: CTA
  source 1..20: mol_type = other DNA
gaaggagagctgcagcccag

SEQ ID NO: 45166 - DNA, 20 bp, synthetic construct
  misc_feature 1..20: note = Description of Artificial Sequence: Synthetic oligonucleotide
  misc_feature 1..20: note = Target: SCN10A; (-) strand; PAM type: YTN; PAM sequence: TTG
  source 1..20: mol_type = other DNA
tcactagaaggagagctgca

SEQ ID NO: 45167 - DNA, 20 bp, synthetic construct
  misc_feature 1..20: note = Description of Artificial Sequence: Synthetic oligonucleotide
  misc_feature 1..20: note = Target: SCN10A; (-) strand; PAM type: YTN; PAM sequence: CTT
  source 1..20: mol_type = other DNA
gtcactagaaggagagctgc

SEQ ID NO: 45168 - DNA, 20 bp, synthetic construct
  misc_feature 1..20: note = Description of Artificial Sequence: Synthetic oligonucleotide
  misc_feature 1..20: note = Target: SCN10A; (-) strand; PAM type: YTN; PAM sequence: CTG
  source 1..20: mol_type = other DNA
aaagtccccaaccttgtcac

SEQ ID NO: 45169 - DNA, 20 bp, synthetic construct
  misc_feature 1..20: note = Description of Artificial Sequence: Synthetic oligonucleotide
  misc_feature 1..20: note = Target: SCN10A; (-) strand; PAM type: YTN; PAM sequence: CTG
  source 1..20: mol_type = other DNA
agctgaaagtccccaacctt

SEQ ID NO: 45170 - DNA, 20 bp, synthetic construct
  misc_feature 1..20: note = Description of Artificial Sequence: Synthetic oligonucleotide
  misc_feature 1..20: note = Target: SCN10A; (-) strand; PAM type: YTN; PAM sequence: CTA
  source 1..20: mol_type = other DNA
ctgagctgaaagtccccaac

SEQ ID NO: 45171 - DNA, 20 bp, synthetic construct
  misc_feature 1..20: note = Description of Artificial Sequence: Synthetic oligonucleotide
  misc_feature 1..20: note = Target: SCN10A; (-) strand; PAM type: YTN; PAM sequence: CTG
  source 1..20: mol_type = other DNA
actactgagctgaaagtccc

SEQ ID NO: 45172 - DNA, 20 bp, synthetic construct
  misc_feature 1..20: note = Description of Artificial Sequence: Synthetic oligonucleotide
  misc_feature 1..20: note = Target: SCN10A; (-) strand; PAM type: YTN; PAM sequence: CTC
  source 1..20: mol_type = other DNA
ctgactactgagctgaaagt

SEQ ID NO: 45173 - DNA, 20 bp, synthetic construct
  misc_feature 1..20: note = Description of Artificial Sequence: Synthetic oligonucleotide
  misc_feature 1..20: note = Target: SCN10A; (-) strand; PAM type: YTN; PAM sequence: TTC
  source 1..20: mol_type = other DNA
tcctgactactgagctgaaa

SEQ ID NO: 45174 - DNA, 20 bp, synthetic construct
  misc_feature 1..20: note = Description of Artificial Sequence: Synthetic oligonucleotide
  misc_feature 1..20: note = Target: SCN10A; (-) strand; PAM type: YTN; PAM sequence: CTG
  source 1..20: mol_type = other DNA
catcagtgggttctcctgac

SEQ ID NO: 45175 - DNA, 20 bp, synthetic construct
  misc_feature 1..20: note = Description of Artificial Sequence: Synthetic oligonucleotide
  misc_feature 1..20: note = Target: SCN10A; (-) strand; PAM type: YTN; PAM sequence: CTG
  source 1..20: mol_type = other DNA
gagctgcatcagtgggttct

SEQ ID NO: 45176 - DNA, 20 bp, synthetic construct
  misc_feature 1..20: note = Description of Artificial Sequence: Synthetic oligonucleotide
  misc_feature 1..20: note = Target: SCN10A; (-) strand; PAM type: YTN; PAM sequence: CTA
  source 1..20: mol_type = other DNA
caatccaaaggccctggagc

SEQ ID NO: 45177 - DNA, 20 bp, synthetic construct
  misc_feature 1..20: note = Description of Artificial Sequence: Synthetic oligonucleotide
  misc_feature 1..20: note = Target: SCN10A; (-) strand; PAM type: YTN; PAM sequence: CTC
  source 1..20: mol_type = other DNA
ctacaatccaaaggccctgg

SEQ ID NO: 45178 - DNA, 20 bp, synthetic construct
  misc_feature 1..20: note = Description of Artificial Sequence: Synthetic oligonucleotide
  misc_feature 1..20: note = Target: SCN10A; (-) strand; PAM type: YTN; PAM sequence: CTC
  source 1..20: mol_type = other DNA
cagataggaatctcctacaa

SEQ ID NO: 45179 - DNA, 20 bp, synthetic construct
  misc_feature 1..20: note = Description of Artificial Sequence: Synthetic oligonucleotide
  misc_feature 1..20: note = Target: SCN10A; (-) strand; PAM type: YTN; PAM sequence: CTG
  source 1..20: mol_type = other DNA
cccccaaatcctccagatag

SEQ ID NO: 45180 - DNA, 20 bp, synthetic construct
  misc_feature 1..20: note = Description of Artificial Sequence: Synthetic oligonucleotide
  misc_feature 1..20: note = Target: SCN10A; (-) strand; PAM type: YTN; PAM sequence: CTG
  source 1..20: mol_type = other DNA
gtaaggggaggcatagtccc

SEQ ID NO: 45181 - DNA, 20 bp, synthetic construct
  misc_feature 1..20: note = Description of Artificial Sequence: Synthetic oligonucleotide
  misc_feature 1..20: note = Target: SCN10A; (-) strand; PAM type: YTN; PAM sequence: CTC
  source 1..20: mol_type = other DNA
tggtaaggggaggcatagtc

SEQ ID NO: 45182 - DNA, 20 bp, synthetic construct
  misc_feature 1..20: note = Description of Artificial Sequence: Synthetic oligonucleotide
  misc_feature 1..20: note = Target: SCN10A; (-) strand; PAM type: YTN; PAM sequence: CTC
  source 1..20: mol_type = other DNA
agcagtggatctctggtaag

SEQ ID NO: 45183 - DNA, 20 bp, synthetic construct
  misc_feature 1..20: note = Description of Artificial Sequence: Synthetic oligonucleotide
  misc_feature 1..20: note = Target: SCN10A; (-) strand; PAM type: YTN; PAM sequence: CTG
  source 1..20: mol_type = other DNA
ctcagcagtggatctctggt

SEQ ID NO: 45184 - DNA, 20 bp, synthetic construct
  misc_feature 1..20: note = Description of Artificial Sequence: Synthetic oligonucleotide
  misc_feature 1..20: note = Target: SCN10A; (-) strand; PAM type: YTN; PAM sequence: TTC
  source 1..20: mol_type = other DNA
atgatcctgctcagcagtgg

SEQ ID NO: 45185 - DNA, 20 bp, synthetic construct
  misc_feature 1..20: note = Description of Artificial Sequence: Synthetic oligonucleotide
  misc_feature 1..20: note = Target: SCN10A; (-) strand; PAM type: YTN; PAM sequence: CTT
  source 1..20: mol_type = other DNA
catgatcctgctcagcagtg

SEQ ID NO: 45186 - DNA, 20 bp, synthetic construct
  misc_feature 1..20: note = Description of Artificial Sequence: Synthetic oligonucleotide
  misc_feature 1..20: note = Target: SCN10A; (-) strand; PAM type: YTN; PAM sequence: TTC
  source 1..20: mol_type = other DNA
atcatcttcatgatcctgct

SEQ ID NO: 45187 - DNA, 20 bp, synthetic construct
  misc_feature 1..20: note = Description of Artificial Sequence: Synthetic oligonucleotide
  misc_feature 1..20: note = Target: SCN10A; (-) strand; PAM type: YTN; PAM sequence: CTT
  source 1..20: mol_type = other DNA
catcatcttcatgatcctgc

SEQ ID NO: 45188 - DNA, 20 bp, synthetic construct
  misc_feature 1..20: note = Description of Artificial Sequence: Synthetic oligonucleotide
  misc_feature 1..20: note = Target: SCN10A; (-) strand; PAM type: YTN; PAM sequence: TTG
  source 1..20: mol_type = other DNA
agagcttcatcatcttcatg

SEQ ID NO: 45189 - DNA, 20 bp, synthetic construct
  misc_feature 1..20: note = Description of Artificial Sequence: Synthetic oligonucleotide
  misc_feature 1..20: note = Target: SCN10A; (-) strand; PAM type: YTN; PAM sequence: TTT
  source 1..20: mol_type = other DNA
gagagcttcatcatcttcat

SEQ ID NO: 45190 - DNA, 20 bp, synthetic construct
  misc_feature 1..20: note = Description of Artificial Sequence: Synthetic oligonucleotide
  misc_feature 1..20: note = Target: SCN10A; (-) strand; PAM type: YTN; PAM sequence: CTG
  source 1..20: mol_type = other DNA
gtttgagagcttcatcatct

SEQ ID NO: 45191 - DNA, 20 bp, synthetic construct
  misc_feature 1..20: note = Description of Artificial Sequence: Synthetic oligonucleotide
  misc_feature 1..20: note = Target: SCN10A; (-) strand; PAM type: YTN; PAM sequence: CTA
  source 1..20: mol_type = other DNA
ccgtatcgtggagcacagct

SEQ ID NO: 45192 - DNA, 20 bp, synthetic construct
  misc_feature 1..20: note = Description of Artificial Sequence: Synthetic oligonucleotide
  misc_feature 1..20: note = Target: SCN10A; (-) strand; PAM type: YTN; PAM sequence: TTG
  source 1..20: mol_type = other DNA
ctaccgtatcgtggagcaca

SEQ ID NO: 45193 - DNA, 20 bp, synthetic construct
  misc_feature 1..20: note = Description of Artificial Sequence: Synthetic oligonucleotide
  misc_feature 1..20: note = Target: SCN10A; (-) strand; PAM type: YTN; PAM sequence: CTT
  source 1..20: mol_type = other DNA
gctaccgtatcgtggagcac

SEQ ID NO: 45194 - DNA, 20 bp, synthetic construct
  misc_feature 1..20: note = Description of Artificial Sequence: Synthetic oligonucleotide
  misc_feature 1..20: note = Target: SCN10A; (-) strand; PAM type: YTN; PAM sequence: CTG
  source 1..20: mol_type = other DNA
gcaggtgcgcaagacttgct

SEQ ID NO: 45195 - DNA, 20 bp, synthetic construct
  misc_feature 1..20: note = Description of Artificial Sequence: Synthetic oligonucleotide
  misc_feature 1..20: note = Target: SCN10A; (-) strand; PAM type: YTN; PAM sequence: CTG
  source 1..20: mol_type = other DNA
gataccaccaagagtccatg

SEQ ID NO: 45196 - DNA, 20 bp, synthetic construct
  misc_feature 1..20: note = Description of Artificial Sequence: Synthetic oligonucleotide
  misc_feature 1..20: note = Target: SCN10A; (-) strand; PAM type: YTN; PAM sequence: CTG
  source 1..20: mol_type = other DNA
caaactggataccaccaaga

SEQ ID NO: 45197 - DNA, 20 bp, synthetic construct
  misc_feature 1..20: note = Description of Artificial Sequence: Synthetic oligonucleotide
  misc_feature 1..20: note = Target: SCN10A; (-) strand; PAM type: YTN; PAM sequence: CTG
  source 1..20: mol_type = other DNA
ctgcaaactggataccacca

SEQ ID NO: 45198 - DNA, 20 bp, synthetic construct
  misc_feature 1..20: note = Description of Artificial Sequence: Synthetic oligonucleotide
  misc_feature 1..20: note = Target: SCN10A; (-) strand; PAM type: YTN; PAM sequence: CTG
  source 1..20: mol_type = other DNA
tccctgctgcaaactggata

SEQ ID NO: 45199 - DNA, 20 bp, synthetic construct
  misc_feature 1..20: note = Description of Artificial Sequence: Synthetic oligonucleotide
  misc_feature 1..20: note = Target: SCN10A; (-) strand; PAM type: YTN; PAM sequence: TTC
  source 1..20: mol_type = other DNA
gccactgtccctgctgcaaa

SEQ ID NO: 45200 - DNA, 20 bp, synthetic construct
  misc_feature 1..20: note = Description of Artificial Sequence: Synthetic oligonucleotide
  misc_feature 1..20: note = Target: SCN10A; (-) strand; PAM type: YTN; PAM sequence: CTC
  source 1..20: mol_type = other DNA
cccacaggatgcattcgcca

SEQ ID NO: 45201 - DNA, 20 bp, synthetic construct
  misc_feature 1..20: note = Description of Artificial Sequence: Synthetic oligonucleotide
  misc_feature 1..20: note = Target: SCN10A; (-) strand; PAM type: YTN; PAM sequence: CTC
  source 1..20: mol_type = other DNA
tccccacaggatgcattcgc

SEQ ID NO: 45202 - DNA, 20 bp, synthetic construct
  misc_feature 1..20: note = Description of Artificial Sequence: Synthetic oligonucleotide
  misc_feature 1..20: note = Target: SCN10A; (-) strand; PAM type: YTN; PAM sequence: CTG
  source 1..20: mol_type = other DNA
gccatcacccaccatcagtc

SEQ ID NO: 45203 - DNA, 20 bp, synthetic construct
  misc_feature 1..20: note = Description of Artificial Sequence: Synthetic oligonucleotide
  misc_feature 1..20: note = Target: SCN10A; (-) strand; PAM type: YTN; PAM sequence: TTG
  source 1..20: mol_type = other DNA
cccactggccatcacccacc

SEQ ID NO: 45204 - DNA, 20 bp, synthetic construct
  misc_feature 1..20: note = Description of Artificial Sequence: Synthetic oligonucleotide
  misc_feature 1..20: note = Target: SCN10A; (-) strand; PAM type: YTN; PAM sequence: TTT
  source 1..20: mol_type = other DNA
gcccactggccatcacccac

SEQ ID NO: 45205 - DNA, 20 bp, synthetic construct
  misc_feature 1..20: note = Description of Artificial Sequence: Synthetic oligonucleotide
  misc_feature 1..20: note = Target: SCN10A; (-) strand; PAM type: YTN; PAM sequence: CTT
  source 1..20: mol_type = other DNA
tgcccactggccatcaccca

SEQ ID NO: 45206 - DNA, 20 bp, synthetic construct
  misc_feature 1..20: note = Description of Artificial Sequence: Synthetic oligonucleotide
  misc_feature 1..20: note = Target: SCN10A; (-) strand; PAM type: YTN; PAM sequence: TTA
  source 1..20: mol_type = other DNA
tcccctttgcccactggcca

SEQ ID NO: 45207 - DNA, 20 bp, synthetic construct
  misc_feature 1..20: note = Description of Artificial Sequence: Synthetic oligonucleotide
  misc_feature 1..20: note = Target: SCN10A; (-) strand; PAM type: YTN; PAM sequence: CTG
  source 1..20: mol_type = other DNA
cagcaggagcagaaattatc

SEQ ID NO: 45208 - DNA, 20 bp, synthetic construct
  misc_feature 1..20: note = Description of Artificial Sequence: Synthetic oligonucleotide
  misc_feature 1..20: note = Target: SCN10A; (-) strand; PAM type: YTN; PAM sequence: CTC
  source 1..20: mol_type = other DNA
tgcagcaggagcagaaatta

SEQ ID NO: 45209 - DNA, 20 bp, synthetic construct
  misc_feature 1..20: note = Description of Artificial Sequence: Synthetic oligonucleotide
  misc_feature 1..20: note = Target: SCN10A; (-) strand; PAM type: YTN; PAM sequence: TTC
  source 1..20: mol_type = other DNA
tctgcagcaggagcagaaat

SEQ ID NO: 45210 - DNA, 20 bp, synthetic construct
  misc_feature 1..20: note = Description of Artificial Sequence: Synthetic oligonucleotide
  misc_feature 1..20: note = Target: SCN10A; (-) strand; PAM type: YTN; PAM sequence: TTT
  source 1..20: mol_type = other DNA
ctctgcagcaggagcagaaa

SEQ ID NO: 45211 - DNA, 20 bp, synthetic construct
  misc_feature 1..20: note = Description of Artificial Sequence: Synthetic oligonucleotide
  misc_feature 1..20: note = Target: SCN10A; (-) strand; PAM type: YTN; PAM sequence: CTA
  source 1..20: mol_type = other DNA
gcagaatggtttctctgcag

SEQ ID NO: 45212 - DNA, 20 bp, synthetic construct
  misc_feature 1..20: note = Description of Artificial Sequence: Synthetic oligonucleotide
  misc_feature 1..20: note = Target: SCN10A; (-) strand; PAM type: YTN; PAM sequence: TTC
  source 1..20: mol_type = other DNA
ctagcagaatggtttctctg

SEQ ID NO: 45213 - DNA, 20 bp, synthetic construct
  misc_feature 1..20: note = Description of Artificial Sequence: Synthetic oligonucleotide
  misc_feature 1..20: note = Target: SCN10A; (-) strand; PAM type: YTN; PAM sequence: TTT
  source 1..20: mol_type = other DNA
cctagcagaatggtttctct

SEQ ID NO: 45214 - DNA, 20 bp, synthetic construct
  misc_feature 1..20: note = Description of Artificial Sequence: Synthetic oligonucleotide
  misc_feature 1..20: note = Target: SCN10A; (-) strand; PAM type: YTN; PAM sequence: TTC
  source 1..20: mol_type = other DNA
caagggcatgacaagtgggt

SEQ ID NO: 45215 - DNA, 20 bp, synthetic construct
  misc_feature 1..20: note = Description of Artificial Sequence: Synthetic oligonucleotide
  misc_feature 1..20: note = Target: SCN10A; (-) strand; PAM type: YTN; PAM sequence: TTT
  source 1..20: mol_type = other DNA
ccaagggcatgacaagtggg

SEQ ID NO: 45216 - DNA, 20 bp, synthetic construct
  misc_feature 1..20: note = Description of Artificial Sequence: Synthetic oligonucleotide
  misc_feature 1..20: note = Target: SCN10A; (-) strand; PAM type: YTN; PAM sequence: TTT
  source 1..20: mol_type = other DNA
tccaagggcatgacaagtgg

SEQ ID NO: 45217 - DNA, 20 bp, synthetic construct
  misc_feature 1..20: note = Description of Artificial Sequence: Synthetic oligonucleotide
  misc_feature 1..20: note = Target: SCN10A; (-) strand; PAM type: YTN; PAM sequence: TTT
  source 1..20: mol_type = other DNA
ttccaagggcatgacaagtg

SEQ ID NO: 45218 - DNA, 20 bp, synthetic construct
  misc_feature 1..20: note = Description of Artificial Sequence: Synthetic oligonucleotide
  misc_feature 1..20: note = Target: SCN10A; (-) strand; PAM type: YTN; PAM sequence: TTT
  source 1..20: mol_type = other DNA
tttccaagggcatgacaagt

SEQ ID NO: 45219 - DNA, 20 bp, synthetic construct
  misc_feature 1..20: note = Description of Artificial Sequence: Synthetic oligonucleotide
  misc_feature 1..20: note = Target: SCN10A; (-) strand; PAM type: YTN; PAM sequence: TTT
  source 1..20: mol_type = other DNA
ttttccaagggcatgacaag

SEQ ID NO: 45220 - DNA, 20 bp, synthetic construct
  misc_feature 1..20: note = Description of Artificial Sequence: Synthetic oligonucleotide
  misc_feature 1..20: note = Target: SCN10A; (-) strand; PAM type: YTN; PAM sequence: TTC
  source 1..20: mol_type = other DNA
caggaaagaatttttttcca

SEQ ID NO: 45221 - DNA, 20 bp, synthetic construct
  misc_feature 1..20: note = Description of Artificial Sequence: Synthetic oligonucleotide
  misc_feature 1..20: note = Target: SCN10A; (-) strand; PAM type: YTN; PAM sequence: TTC
  source 1..20: mol_type = other DNA
acccatattccaggaaagaa

SEQ ID NO: 45222 - DNA, 20 bp, synthetic construct
  misc_feature 1..20: note = Description of Artificial Sequence: Synthetic oligonucleotide
  misc_feature 1..20: note = Target: SCN10A; (-) strand; PAM type: YTN; PAM sequence: CTT
  source 1..20: mol_type = other DNA
cacccatattccaggaaaga

SEQ ID NO: 45223 - DNA, 20 bp, synthetic construct
  misc_feature 1..20: note = Description of Artificial Sequence: Synthetic oligonucleotide
  misc_feature 1..20: note = Target: SCN10A; (-) strand; PAM type: YTN; PAM sequence: CTC
  source 1..20: mol_type = other DNA
ttcacccatattccaggaaa

SEQ ID NO: 45224 - DNA, 20 bp, synthetic construct
  misc_feature 1..20: note = Description of Artificial Sequence: Synthetic oligonucleotide
  misc_feature 1..20: note = Target: SCN10A; (-) strand; PAM type: YTN; PAM sequence: CTG
  source 1..20: mol_type = other DNA
gaagggacccctcttcaccc

SEQ ID NO: 45225 - DNA, 20 bp, synthetic construct
  misc_feature 1..20: note = Description of Artificial Sequence: Synthetic oligonucleotide
  misc_feature 1..20: note = Target: SCN10A; (-) strand; PAM type: YTN; PAM sequence: CTC
  source 1..20: mol_type = other DNA
cctggaagggacccctcttc

SEQ ID NO: 45226 - DNA, 20 bp, synthetic construct
  misc_feature 1..20: note = Description of Artificial Sequence: Synthetic oligonucleotide
  misc_feature 1..20: note = Target: SCN10A; (-) strand; PAM type: YTN; PAM sequence: TTG
  source 1..20: mol_type = other DNA
agggactccctggaagggac

SEQ ID NO: 45227 - DNA, 20 bp, synthetic construct
  misc_feature 1..20: note = Description of Artificial Sequence: Synthetic oligonucleotide
  misc_feature 1..20: note = Target: SCN10A; (-) strand; PAM type: YTN; PAM sequence: CTG
  source 1..20: mol_type = other DNA
gattgagggactccctggaa

SEQ ID NO: 45228 - DNA, 20 bp, synthetic construct
  misc_feature 1..20: note = Description of Artificial Sequence: Synthetic oligonucleotide
  misc_feature 1..20: note = Target: SCN10A; (-) strand; PAM type: YTN; PAM sequence: TTG
  source 1..20: mol_type = other DNA
gtctggattgagggactccc

SEQ ID NO: 45229 - DNA, 20 bp, synthetic construct
  misc_feature 1..20: note = Description of Artificial Sequence: Synthetic oligonucleotide
  misc_feature 1..20: note = Target: SCN10A; (-) strand; PAM type: YTN; PAM sequence: CTG
  source 1..20: mol_type = other DNA
ttggtctggattgagggact

SEQ ID NO: 45230 - DNA, 20 bp, synthetic construct
  misc_feature 1..20: note = Description of Artificial Sequence: Synthetic oligonucleotide
  misc_feature 1..20: note = Target: SCN10A; (-) strand; PAM type: YTN; PAM sequence: CTG
  source 1..20: mol_type = other DNA
atgatggagaggaacacctg

SEQ ID NO: 45231 - DNA, 20 bp, synthetic construct
  misc_feature 1..20: note = Description of Artificial Sequence: Synthetic oligonucleotide
  misc_feature 1..20: note = Target: SCN10A; (-) strand; PAM type: YTN; PAM sequence: CTA
  source 1..20: mol_type = other DNA
ggaaaaacatcagagtgggc

SEQ ID NO: 45232 - DNA, 20 bp, synthetic construct
  misc_feature 1..20: note = Description of Artificial Sequence: Synthetic oligonucleotide
  misc_feature 1..20: note = Target: SCN10A; (-) strand; PAM type: YTN; PAM sequence: CTG
  source 1..20: mol_type = other DNA
taagaaggatatggctagga

SEQ ID NO: 45233 - DNA, 20 bp, synthetic construct
  misc_feature 1..20: note = Description of Artificial Sequence: Synthetic oligonucleotide
  misc_feature 1..20: note = Target: SCN10A; (-) strand; PAM type: YTN; PAM sequence: CTG
  source 1..20: mol_type = other DNA
gtgtcatctgtaagaaggat

SEQ ID NO: 45234 - DNA, 20 bp, synthetic construct
  misc_feature 1..20: note = Description of Artificial Sequence: Synthetic oligonucleotide
  misc_feature 1..20: note = Target: SCN10A; (-) strand; PAM type: YTN; PAM sequence: TTC
  source 1..20: mol_type = other DNA
caggtataggtgggcagaag

SEQ ID NO: 45235 - DNA, 20 bp, synthetic construct
  misc_feature 1..20: note = Description of Artificial Sequence: Synthetic oligonucleotide
  misc_feature 1..20: note = Target: SCN10A; (-) strand; PAM type: YTN; PAM sequence: TTT
  source 1..20: mol_type = other DNA
ccaggtataggtgggcagaa

SEQ ID NO: 45236 - DNA, 20 bp, synthetic construct
  misc_feature 1..20: note = Description of Artificial Sequence: Synthetic oligonucleotide
  misc_feature 1..20: note = Target: SCN10A; (-) strand; PAM type: YTN; PAM sequence: TTT
  source 1..20: mol_type = other DNA
tccaggtataggtgggcaga

SEQ ID NO: 45237 - DNA, 20 bp, synthetic construct
  misc_feature 1..20: note = Description of Artificial Sequence: Synthetic oligonucleotide
  misc_feature 1..20: note = Target: SCN10A; (-) strand; PAM type: YTN; PAM sequence: CTG
  source 1..20: mol_type = other DNA
ttttccaggtataggtgggc

SEQ ID NO: 45238 - DNA, 20 bp, synthetic construct
  misc_feature 1..20: note = Description of Artificial Sequence: Synthetic oligonucleotide
  misc_feature 1..20: note = Target: SCN10A; (-) strand; PAM type: YTN; PAM sequence: TTG
  source 1..20: mol_type = other DNA
tctgttttccaggtataggt

SEQ ID NO: 45239 - DNA, 20 bp, synthetic construct
  misc_feature 1..20: note = Description of Artificial Sequence: Synthetic oligonucleotide
  misc_feature 1..20: note = Target: SCN10A; (-) strand; PAM type: YTN; PAM sequence: CTT
  source 1..20: mol_type = other DNA
gtctgttttccaggtatagg

SEQ ID NO: 45240 - DNA, 20 bp, synthetic construct
  misc_feature 1..20: note = Description of Artificial Sequence: Synthetic oligonucleotide
  misc_feature 1..20: note = Target: SCN10A; (-) strand; PAM type: YTN; PAM sequence: CTC
  source 1..20: mol_type = other DNA
atacgccgtagcttgtctgt

SEQ ID NO: 45241 - DNA, 20 bp, synthetic construct
  misc_feature 1..20: note = Description of Artificial Sequence: Synthetic oligonucleotide
  misc_feature 1..20: note = Target: SCN10A; (-) strand; PAM type: YTN; PAM sequence: CTC
  source 1..20: mol_type = other DNA
aggcacccccaggctcatac

SEQ ID NO: 45242 - DNA, 20 bp, synthetic construct
  misc_feature 1..20: note = Description of Artificial Sequence: Synthetic oligonucleotide
  misc_feature 1..20: note = Target: SCN10A; (-) strand; PAM type: YTN; PAM sequence: TTG
  source 1..20: mol_type = other DNA
gagcatatccccctcaggca

SEQ ID NO: 45243 - DNA, 20 bp, synthetic construct
  misc_feature 1..20: note = Description of Artificial Sequence: Synthetic oligonucleotide
  misc_feature 1..20: note = Target: SCN10A; (-) strand; PAM type: YTN; PAM sequence: CTT
  source 1..20: mol_type = other DNA
ggagcatatccccctcaggc

SEQ ID NO: 45244 - DNA, 20 bp, synthetic construct
  misc_feature 1..20: note = Description of Artificial Sequence: Synthetic oligonucleotide
  misc_feature 1..20: note = Target: SCN10A; (-) strand; PAM type: YTN; PAM sequence: TTG
  source 1..20: mol_type = other DNA
ggcttggagcatatccccct

SEQ ID NO: 45245 - DNA, 20 bp, synthetic construct
  misc_feature 1..20: note = Description of Artificial Sequence: Synthetic oligonucleotide
  misc_feature 1..20: note = Target: SCN10A; (-) strand; PAM type: YTN; PAM sequence: CTT
  source 1..20: mol_type = other DNA
gggcttggagcatatccccc

SEQ ID NO: 45246 - DNA, 20 bp, synthetic construct
  misc_feature 1..20: note = Description of Artificial Sequence: Synthetic oligonucleotide
  misc_feature 1..20: note = Target: SCN10A; (-) strand; PAM type: YTN; PAM sequence: TTC
  source 1..20: mol_type = other DNA
agcttgggcttggagcatat

SEQ ID NO: 45247 - DNA, 20 bp, synthetic construct
  misc_feature 1..20: note = Description of Artificial Sequence: Synthetic oligonucleotide
  misc_feature 1..20: note = Target: SCN10A; (-) strand; PAM type: YTN; PAM sequence: CTC
  source 1..20: mol_type = other DNA
agttcagcttgggcttggag

SEQ ID NO: 45248 - DNA, 20 bp, synthetic construct
  misc_feature 1..20: note = Description of Artificial Sequence: Synthetic oligonucleotide
  misc_feature 1..20: note = Target: SCN10A; (-) strand; PAM type: YTN; PAM sequence: CTG
  source 1..20: mol_type = other DNA
gacccaatccccatcccagc

SEQ ID NO: 45249 - DNA, 20 bp, synthetic construct
  misc_feature 1..20: note = Description of Artificial Sequence: Synthetic oligonucleotide
  misc_feature 1..20: note = Target: SCN10A; (-) strand; PAM type: YTN; PAM sequence: CTG
  source 1..20: mol_type = other DNA
ggctggacccaatccccatc

SEQ ID NO: 45250 - DNA, 20 bp, synthetic construct
  misc_feature 1..20: note = Description of Artificial Sequence: Synthetic oligonucleotide
  misc_feature 1..20: note = Target: SCN10A; (-) strand; PAM type: YTN; PAM sequence: CTG
  source 1..20: mol_type = other DNA
agctgggctggacccaatcc

SEQ ID NO: 45251 - DNA, 20 bp, synthetic construct
  misc_feature 1..20: note = Description of Artificial Sequence: Synthetic oligonucleotide
  misc_feature 1..20: note = Target: SCN10A; (-) strand; PAM type: YTN; PAM sequence: CTG
  source 1..20: mol_type = other DNA
ggctgagctgggctggaccc

SEQ ID NO: 45252 - DNA, 20 bp, synthetic construct
  misc_feature 1..20: note = Description of Artificial Sequence: Synthetic oligonucleotide
  misc_feature 1..20: note = Target: SCN10A; (-) strand; PAM type: YTN; PAM sequence: CTG
  source 1..20: mol_type = other DNA
ggctgggctgagctgggctg

SEQ ID NO: 45253 - DNA, 20 bp, synthetic construct
  misc_feature 1..20: note = Description of Artificial Sequence: Synthetic oligonucleotide
  misc_feature 1..20: note = Target: SCN10A; (-) strand; PAM type: YTN; PAM sequence: TTG
  source 1..20: mol_type = other DNA
accctgggctgggctgagct

SEQ ID NO: 45254 - DNA, 20 bp, synthetic construct
  misc_feature 1..20: note = Description of Artificial Sequence: Synthetic oligonucleotide
  misc_feature 1..20: note = Target: SCN10A; (-) strand; PAM type: YTN; PAM sequence: TTT
  source 1..20: mol_type = other DNA
gaccctgggctgggctgagc

SEQ ID NO: 45255 - DNA, 20 bp, synthetic construct
  misc_feature 1..20: note = Description of Artificial Sequence: Synthetic oligonucleotide
  misc_feature 1..20: note = Target: SCN10A; (-) strand; PAM type: YTN; PAM sequence: TTA
  source 1..20: mol_type = other DNA
tttgaccctgggctgggctg

SEQ ID NO: 45256 - DNA, 20 bp, synthetic construct
  misc_feature 1..20: note = Description of Artificial Sequence: Synthetic oligonucleotide
  misc_feature 1..20: note = Target: SCN10A; (-) strand; PAM type: YTN; PAM sequence: TTT
  source 1..20: mol_type = other DNA
atttgaccctgggctgggct

SEQ ID NO: 45257 - DNA, 20 bp, synthetic construct
  misc_feature 1..20: note = Description of Artificial Sequence: Synthetic oligonucleotide
  misc_feature 1..20: note = Target: SCN10A; (-) strand; PAM type: YTN; PAM sequence: TTT
  source 1..20: mol_type = other DNA
tatttgaccctgggctgggc

SEQ ID NO: 45258 - DNA, 20 bp, synthetic construct
  misc_feature 1..20: note = Description of Artificial Sequence: Synthetic oligonucleotide
  misc_feature 1..20: note = Target: SCN10A; (-) strand; PAM type: YTN; PAM sequence: TTA
  source 1..20: mol_type = other DNA
atagttttatttgaccctgg

SEQ ID NO: 45259 - DNA, 20 bp, synthetic construct
  misc_feature 1..20: note = Description of Artificial Sequence: Synthetic oligonucleotide
  misc_feature 1..20: note = Target: SCN10A; (-) strand; PAM type: YTN; PAM sequence: TTA
  source 1..20: mol_type = other DNA
ttaatagttttatttgaccc

SEQ ID NO: 45260 - DNA, 20 bp, synthetic construct
  misc_feature 1..20: note = Description of Artificial Sequence: Synthetic oligonucleotide
  misc_feature 1..20: note = Target: SCN10A; (-) strand; PAM type: YTN; PAM sequence: TTT
  source 1..20: mol_type = other DNA
attaatagttttatttgacc

SEQ ID NO: 45261 - DNA, 20 bp, synthetic construct
  misc_feature 1..20: note = Description of Artificial Sequence: Synthetic oligonucleotide
  misc_feature 1..20: note = Target: SCN10A; (-) strand; PAM type: YTN; PAM sequence: TTT
  source 1..20: mol_type = other DNA
tattaatagttttatttgac

SEQ ID NO: 45262 - DNA, 20 bp, synthetic construct
  misc_feature 1..20: note = Description of Artificial Sequence: Synthetic oligonucleotide
  misc_feature 1..20: note = Target: SCN10A; (-) strand; PAM type: YTN; PAM sequence: TTT
  source 1..20: mol_type = other DNA
ttattaatagttttatttga

SEQ ID NO: 45263 - DNA, 20 bp, synthetic construct
  misc_feature 1..20: note = Description of Artificial Sequence: Synthetic oligonucleotide
  misc_feature 1..20: note = Target: SCN10A; (-) strand; PAM type: YTN; PAM sequence: TTG
  source 1..20: mol_type = other DNA
agtttttattaatagtttta

SEQ ID NO: 45264 - DNA, 20 bp, synthetic construct
  misc_feature 1..20: note = Description of Artificial Sequence: Synthetic oligonucleotide
  misc_feature 1..20: note = Target: SCN10A; (-) strand; PAM type: YTN; PAM sequence: CTT
  source 1..20: mol_type = other DNA
gagtttttattaatagtttt

SEQ ID NO: 45265 - DNA, 20 bp, synthetic construct
  misc_feature 1..20: note = Description of Artificial Sequence: Synthetic oligonucleotide
  misc_feature 1..20: note = Target: SCN10A; (-) strand; PAM type: YTN; PAM sequence: TTA
  source 1..20: mol_type = other DNA
aatacttgagtttttattaa

SEQ ID NO: 45266 - DNA, 20 bp, synthetic construct
  misc_feature 1..20: note = Description of Artificial Sequence: Synthetic oligonucleotide
  misc_feature 1..20: note = Target: SCN10A; (-) strand; PAM type: YTN; PAM sequence: TTT
  source 1..20: mol_type = other DNA
aaatacttgagtttttatta

SEQ ID NO: 45267 - DNA, 20 bp, synthetic construct
  misc_feature 1..20: note = Description of Artificial Sequence: Synthetic oligonucleotide
  misc_feature 1..20: note = Target: SCN10A; (-) strand; PAM type: YTN; PAM sequence: TTT
  source 1..20: mol_type = other DNA
taaatacttgagtttttatt

SEQ ID NO: 45268 - DNA, 20 bp, synthetic construct
  misc_feature 1..20: note = Description of Artificial Sequence: Synthetic oligonucleotide
  misc_feature 1..20: note = Target: SCN10A; (-) strand; PAM type: YTN; PAM sequence: TTT
  source 1..20: mol_type = other DNA
ttaaatacttgagtttttat

SEQ ID NO: 45269 - DNA, 20 bp, synthetic construct
  misc_feature 1..20: note = Description of Artificial Sequence: Synthetic oligonucleotide
  misc_feature 1..20: note = Target: SCN10A; (-) strand; PAM type: YTN; PAM sequence: TTT
  source 1..20: mol_type = other DNA
tttaaatacttgagttttta

SEQ ID NO: 45270 - DNA, 20 bp, synthetic construct
  misc_feature 1..20: note = Description of Artificial Sequence: Synthetic oligonucleotide
  misc_feature 1..20: note = Target: SCN10A; (-) strand; PAM type: YTN; PAM sequence: CTA
  source 1..20: mol_type = other DNA
aaaatacaaagaaaaatttt

SEQ ID NO: 45271 - DNA, 20 bp, synthetic construct
  misc_feature 1..20: note = Description of Artificial Sequence: Synthetic oligonucleotide
  misc_feature 1..20: note = Target: SCN10A; (-) strand; PAM type: YTN; PAM sequence: TTC
  source 1..20: mol_type = other DNA
taaaaatacaaagaaaaatt

SEQ ID NO: 45272 - DNA, 20 bp, synthetic construct
  misc_feature 1..20: note = Description of Artificial Sequence: Synthetic oligonucleotide
  misc_feature 1..20: note = Target: SCN10A; (-) strand; PAM type: YTN; PAM sequence: TTT
  source 1..20: mol_type = other DNA
ctaaaaatacaaagaaaaat

SEQ ID NO: 45273 - DNA, 20 bp, synthetic construct
  misc_feature 1..20: note = Description of Artificial Sequence: Synthetic oligonucleotide
  misc_feature 1..20: note = Target: SCN10A; (-) strand; PAM type: YTN; PAM sequence: CTT
  source 1..20: mol_type = other DNA
tctaaaaatacaaagaaaaa

SEQ ID NO: 45274 - DNA, 20 bp, synthetic construct
  misc_feature 1..20: note = Description of Artificial Sequence: Synthetic oligonucleotide
  misc_feature 1..20: note = Target: SCN10A; (-) strand; PAM type: YTN; PAM sequence: CTC
  source 1..20: mol_type = other DNA
aatgctttctaaaaatacaa

SEQ ID NO: 45275 - DNA, 20 bp, synthetic construct
  misc_feature 1..20: note = Description of Artificial Sequence: Synthetic oligonucleotide
  misc_feature 1..20: note = Target: SCN10A; (-) strand; PAM type: YTN; PAM sequence: TTG
  source 1..20: mol_type = other DNA
tggcctcaatgctttctaaa

SEQ ID NO: 45276 - DNA, 20 bp, synthetic construct
  misc_feature 1..20: note = Description of Artificial Sequence: Synthetic oligonucleotide
  misc_feature 1..20: note = Target: SCN10A; (-) strand; PAM type: YTN; PAM sequence: CTA
  source 1..20: mol_type = other DNA
taaagggaattgtggcctca

SEQ ID NO: 45277 - DNA, 20 bp, synthetic construct
  misc_feature 1..20: note = Description of Artificial Sequence: Synthetic oligonucleotide
  misc_feature 1..20: note = Target: SCN10A; (-) strand; PAM type: YTN; PAM sequence: TTC
  source 1..20: mol_type = other DNA
tataaagggaattgtggcct

SEQ ID NO: 45278 - DNA, 20 bp, synthetic construct
  misc_feature 1..20: note = Description of Artificial Sequence: Synthetic oligonucleotide
  misc_feature 1..20: note = Target: SCN10A; (-) strand; PAM type: YTN; PAM sequence: TTG
  source 1..20: mol_type = other DNA
tgcaatgaatgaatcaagag

SEQ ID NO: 45279 - DNA, 20 bp, synthetic construct
  misc_feature 1..20: note = Description of Artificial Sequence: Synthetic oligonucleotide
  misc_feature 1..20: note = Target: SCN10A; (-) strand; PAM type: YTN; PAM sequence: TTT
  source 1..20: mol_type = other DNA
gtgcaatgaatgaatcaaga

SEQ ID NO: 45280 - DNA, 20 bp, synthetic construct
  misc_feature 1..20: note = Description of Artificial Sequence: Synthetic oligonucleotide
  misc_feature 1..20: note = Target: SCN10A; (-) strand; PAM type: YTN; PAM sequence: CTC
  source 1..20: mol_type = other DNA
aataaatatttgtgcaatga

SEQ ID NO: 45281 - DNA, 20 bp, synthetic construct
  misc_feature 1..20: note = Description of Artificial Sequence: Synthetic oligonucleotide
  misc_feature 1..20: note = Target: SCN10A; (-) strand; PAM type: YTN; PAM sequence: TTC
  source 1..20: mol_type = other DNA
tcaataaatatttgtgcaat

SEQ ID NO: 45282 - DNA, 20 bp, synthetic construct
  misc_feature 1..20: note = Description of Artificial Sequence: Synthetic oligonucleotide
  misc_feature 1..20: note = Target: SCN10A; (-) strand; PAM type: YTN; PAM sequence: TTA
  source 1..20: mol_type = other DNA
cattctcaataaatatttgt

SEQ ID NO: 45283 - DNA, 20 bp, synthetic construct
  misc_feature 1..20: note = Description of Artificial Sequence: Synthetic oligonucleotide
  misc_feature 1..20: note = Target: SCN10A; (-) strand; PAM type: YTN; PAM sequence: TTA
  source 1..20: mol_type = other DNA
gaacagtgaggcacattaca

SEQ ID NO: 45284 - DNA, 20 bp, synthetic construct
  misc_feature 1..20: note = Description of Artificial Sequence: Synthetic oligonucleotide
  misc_feature 1..20: note = Target: SCN10A; (-) strand; PAM type: YTN; PAM sequence: TTT
  source 1..20: mol_type = other DNA
agaacagtgaggcacattac

SEQ ID NO: 45285 - DNA, 20 bp, synthetic construct
  misc_feature 1..20: note = Description of Artificial Sequence: Synthetic oligonucleotide
  misc_feature 1..20: note = Target: SCN10A; (-) strand; PAM type: YTN; PAM sequence: CTC
  source 1..20: mol_type = other DNA
agtgtttagaacagtgaggc

SEQ ID NO: 45286 - DNA, 20 bp, synthetic construct
  misc_feature 1..20: note = Description of Artificial Sequence: Synthetic oligonucleotide
  misc_feature 1..20: note = Target: SCN10A; (-) strand; PAM type: YTN; PAM sequence: CTC
  source 1..20: mol_type = other DNA
tcagtgtttagaacagtgag

SEQ ID NO: 45287 - DNA, 20 bp, synthetic construct
  misc_feature 1..20: note = Description of Artificial Sequence: Synthetic oligonucleotide
  misc_feature 1..20: note = Target: SCN10A; (-) strand; PAM type: YTN; PAM sequence: TTC
  source 1..20: mol_type = other DNA
ctctcagtgtttagaacagt

SEQ ID NO: 45288 - DNA, 20 bp, synthetic construct
  misc_feature 1..20: note = Description of Artificial Sequence: Synthetic oligonucleotide
  misc_feature 1..20: note = Target: SCN10A; (-) strand; PAM type: YTN; PAM sequence: TTT
  source 1..20: mol_type = other DNA
cctctcagtgtttagaacag

SEQ ID NO: 45289 - DNA, 20 bp, synthetic construct
  misc_feature 1..20: note = Description of Artificial Sequence: Synthetic oligonucleotide
  misc_feature 1..20: note = Target: SCN10A; (-) strand; PAM type: YTN; PAM sequence: CTT
  source 1..20: mol_type = other DNA
tcctctcagtgtttagaaca

SEQ ID NO: 45290 - DNA, 20 bp, synthetic construct
  misc_feature 1..20: note = Description of Artificial Sequence: Synthetic oligonucleotide
  misc_feature 1..20: note = Target: SCN10A; (-) strand; PAM type: YTN; PAM sequence: TTA
  source 1..20: mol_type = other DNA
gtcatctttcctctcagtgt

SEQ ID NO: 45291 - DNA, 20 bp, synthetic construct
  misc_feature 1..20: note = Description of Artificial Sequence: Synthetic oligonucleotide
  misc_feature 1..20: note = Target: SCN10A; (-) strand; PAM type: YTN; PAM sequence: CTT
  source 1..20: mol_type = other DNA
agtcatctttcctctcagtg

SEQ ID NO: 45292 - DNA, 20 bp, synthetic construct
  misc_feature 1..20: note = Description of Artificial Sequence: Synthetic oligonucleotide
  misc_feature 1..20: note = Target: SCN10A; (-) strand; PAM type: YTN; PAM sequence: CTG
  source 1..20: mol_type = other DNA
tgtcttagtcatctttcctc

SEQ ID NO: 45293 - DNA, 20 bp, synthetic construct
  misc_feature 1..20: note = Description of Artificial Sequence: Synthetic oligonucleotide
  misc_feature 1..20: note = Target: SCN10A; (-) strand; PAM type: YTN; PAM sequence: CTC
  source 1..20: mol_type = other DNA
aaaagcagaacctgtgtctt

SEQ ID NO: 45294 - DNA, 20 bp, synthetic construct
  misc_feature 1..20: note = Description of Artificial Sequence: Synthetic oligonucleotide
  misc_feature 1..20: note = Target: SCN10A; (-) strand; PAM type: YTN; PAM sequence: CTC
  source 1..20: mol_type = other DNA
tcaaaagcagaacctgtgtc

SEQ ID NO: 45295 - DNA, 20 bp, synthetic construct
  misc_feature 1..20: note = Description of Artificial Sequence: Synthetic oligonucleotide
  misc_feature 1..20: note = Target: SCN10A; (-) strand; PAM type: YTN; PAM sequence: TTA
  source 1..20: mol_type = other DNA
gctctcaaaagcagaacctg

SEQ ID NO: 45296 - DNA, 20 bp, synthetic construct
  misc_feature 1..20: note = Description of Artificial Sequence: Synthetic oligonucleotide
  misc_feature 1..20: note = Target: SCN10A; (-) strand; PAM type: YTN; PAM sequence: TTT
  source 1..20: mol_type = other DNA
agctctcaaaagcagaacct

SEQ ID NO: 45297 - DNA, 20 bp, synthetic construct
  misc_feature 1..20: note = Description of Artificial Sequence: Synthetic oligonucleotide
  misc_feature 1..20: note = Target: SCN10A; (-) strand; PAM type: YTN; PAM sequence: TTG
  source 1..20: mol_type = other DNA
tttagctctcaaaagcagaa

SEQ ID NO: 45298 - DNA, 20 bp, synthetic construct
  misc_feature 1..20: note = Description of Artificial Sequence: Synthetic oligonucleotide
  misc_feature 1..20: note = Target: SCN10A; (-) strand; PAM type: YTN; PAM sequence: TTT
  source 1..20: mol_type = other DNA
gtttagctctcaaaagcaga

SEQ ID NO: 45299 - DNA, 20 bp, synthetic construct
  misc_feature 1..20: note = Description of Artificial Sequence: Synthetic oligonucleotide
  misc_feature 1..20: note = Target: SCN10A; (-) strand; PAM type: YTN; PAM sequence: TTT
  source 1..20: mol_type = other DNA
tgtttagctctcaaaagcag

SEQ ID NO: 45300 - DNA, 20 bp, synthetic construct
  misc_feature 1..20: note = Description of Artificial Sequence: Synthetic oligonucleotide
  misc_feature 1..20: note = Target: SCN10A; (-) strand; PAM type: YTN; PAM sequence: CTT
  source 1..20: mol_type = other DNA
ttgtttagctctcaaaagca

SEQ ID NO: 45301 - DNA, 20 bp, synthetic construct
  misc_feature 1..20: note = Description of Artificial Sequence: Synthetic oligonucleotide
  misc_feature 1..20: note = Target: SCN10A; (-) strand; PAM type: YTN; PAM sequence: CTC
  source 1..20: mol_type = other DNA
aatcttttgtttagctctca

SEQ ID NO: 45302 - DNA, 20 bp, synthetic construct
  misc_feature 1..20: note = Description of Artificial Sequence: Synthetic oligonucleotide
  misc_feature 1..20: note = Target: SCN10A; (-) strand; PAM type: YTN; PAM sequence: TTC
  source 1..20: mol_type = other DNA
cctcaatcttttgtttagct

SEQ ID NO: 45303 - DNA, 20 bp, synthetic construct
  misc_feature 1..20: note = Description of Artificial Sequence: Synthetic oligonucleotide
  misc_feature 1..20: note = Target: SCN10A; (-) strand; PAM type: YTN; PAM sequence: CTT
  source 1..20: mol_type = other DNA
ccctcaatcttttgtttagc

SEQ ID NO: 45304 - DNA, 20 bp, synthetic construct
  misc_feature 1..20: note = Description of Artificial Sequence: Synthetic oligonucleotide
  misc_feature 1..20: note = Target: SCN10A; (-) strand; PAM type: YTN; PAM sequence: CTG
  source 1..20: mol_type = other DNA
cttccctcaatcttttgttt

SEQ ID NO: 45305 - DNA, 20 bp, synthetic construct
  misc_feature 1..20: note = Description of Artificial Sequence: Synthetic oligonucleotide
  misc_feature 1..20: note = Target: SCN10A; (-) strand; PAM type: YTN; PAM sequence: TTG
  source 1..20: mol_type = other DNA
gaccatgaaggacccagagg

SEQ ID NO: 45306 - DNA, 20 bp, synthetic construct
  misc_feature 1..20: note = Description of Artificial Sequence: Synthetic oligonucleotide
  misc_feature 1..20: note = Target: SCN10A; (-) strand; PAM type: YTN; PAM sequence: TTT
  source 1..20: mol_type = other DNA
ggaccatgaaggacccagag

SEQ ID NO: 45307 - DNA, 20 bp, synthetic construct
  misc_feature 1..20: note = Description of Artificial Sequence: Synthetic oligonucleotide
  misc_feature 1..20: note = Target: SCN10A; (-) strand; PAM type: YTN; PAM sequence: TTG
  source 1..20: mol_type = other DNA
atttggaccatgaaggaccc

SEQ ID NO: 45308 - DNA, 20 bp, synthetic construct
  misc_feature 1..20: note = Description of Artificial Sequence: Synthetic oligonucleotide
  misc_feature 1..20: note = Target: SCN10A; (-) strand; PAM type: YTN; PAM sequence: CTT
  source 1..20: mol_type = other DNA
gatttggaccatgaaggacc

SEQ ID NO: 45309 - DNA, 20 bp, synthetic construct
  misc_feature 1..20: note = Description of Artificial Sequence: Synthetic oligonucleotide
  misc_feature 1..20: note = Target: SCN10A; (-) strand; PAM type: YTN; PAM sequence: CTC
  source 1..20: mol_type = other DNA
ttgatttggaccatgaagga

SEQ ID NO: 45310 - DNA, 20 bp, synthetic construct
  misc_feature 1..20: note = Description of Artificial Sequence: Synthetic oligonucleotide
  misc_feature 1..20: note = Target: SCN10A; (-) strand; PAM type: YTN; PAM sequence: CTG
  source 1..20: mol_type = other DNA
aaaactcttgatttggacca

SEQ ID NO: 45311 - DNA, 20 bp, synthetic construct
  misc_feature 1..20: note = Description of Artificial Sequence: Synthetic oligonucleotide
  misc_feature 1..20: note = Target: SCN10A; (-) strand; PAM type: YTN; PAM sequence: TTG
  source 1..20: mol_type = other DNA
aaagggggaaacgtagtcac

SEQ ID NO: 45312 - DNA, 20 bp, synthetic construct
  misc_feature 1..20: note = Description of Artificial Sequence: Synthetic oligonucleotide
  misc_feature 1..20: note = Target: SCN10A; (-) strand; PAM type: YTN; PAM sequence: TTG
  source 1..20: mol_type = other DNA
agttgaaagggggaaacgta

SEQ ID NO: 45313 - DNA, 20 bp, synthetic construct
  misc_feature 1..20: note = Description of Artificial Sequence: Synthetic oligonucleotide
  misc_feature 1..20: note = Target: SCN10A; (-) strand; PAM type: YTN; PAM sequence: CTT
  source 1..20: mol_type = other DNA
gagttgaaagggggaaacgt

SEQ ID NO: 45314 - DNA, 20 bp, synthetic construct
  misc_feature 1..20: note = Description of Artificial Sequence: Synthetic oligonucleotide
  misc_feature 1..20: note = Target: SCN10A; (-) strand; PAM type: YTN; PAM sequence: CTC
  source 1..20: mol_type = other DNA
ttgagttgaaagggggaaac

SEQ ID NO: 45315 - DNA, 20 bp, synthetic construct
  misc_feature 1..20: note = Description of Artificial Sequence: Synthetic oligonucleotide
  misc_feature 1..20: note = Target: SCN10A; (-) strand; PAM type: YTN; PAM sequence: CTA
  source 1..20: mol_type = other DNA
aaccagccctcttgagttga

SEQ ID NO: 45316 - DNA, 20 bp, synthetic construct
  misc_feature 1..20: note = Description of Artificial Sequence: Synthetic oligonucleotide
  misc_feature 1..20: note = Target: SCN10A; (-) strand; PAM type: YTN; PAM sequence: TTC
  source 1..20: mol_type = other DNA
taaaccagccctcttgagtt

SEQ ID NO: 45317 - DNA, 20 bp, synthetic construct
  misc_feature 1..20: note = Description of Artificial Sequence: Synthetic oligonucleotide
  misc_feature 1..20: note = Target: SCN10A; (-) strand; PAM type: YTN; PAM sequence: CTC
  source 1..20: mol_type = other DNA
cgtgagttctaaaccagccc

SEQ ID NO: 45318 - DNA, 20 bp, synthetic construct
  misc_feature 1..20: note = Description of Artificial Sequence: Synthetic oligonucleotide
  misc_feature 1..20: note = Target: SCN10A; (-) strand; PAM type: YTN; PAM sequence: CTC
  source 1..20: mol_type = other DNA
aaaaacccctccgtgagttc

SEQ ID NO: 45319 - DNA, 20 bp, synthetic construct
  misc_feature 1..20: note = Description of Artificial Sequence: Synthetic oligonucleotide
  misc_feature 1..20: note = Target: SCN10A; (-) strand; PAM type: YTN; PAM sequence: TTA
  source 1..20: mol_type = other DNA
ccctcaaaaacccctccgtg

SEQ ID NO: 45320 - DNA, 20 bp, synthetic construct
  misc_feature 1..20: note = Description of Artificial Sequence: Synthetic oligonucleotide
  misc_feature 1..20: note = Target: SCN10A; (-) strand; PAM type: YTN; PAM sequence: TTT
  source 1..20: mol_type = other DNA
accctcaaaaacccctccgt

SEQ ID NO: 45321 - DNA, 20 bp, synthetic construct
  misc_feature 1..20: note = Description of Artificial Sequence: Synthetic oligonucleotide
  misc_feature 1..20: note = Target: SCN10A; (-) strand; PAM type: YTN; PAM sequence: CTT
  source 1..20: mol_type = other DNA
taccctcaaaaacccctccg

SEQ ID NO: 45322 - DNA, 20 bp, synthetic construct
  misc_feature 1..20: note = Description of Artificial Sequence: Synthetic oligonucleotide
  misc_feature 1..20: note = Target: SCN10A; (-) strand; PAM type: YTN; PAM sequence: CTC
  source 1..20: mol_type = other DNA
tttaccctcaaaaacccctc

SEQ ID NO: 45323 - DNA, 20 bp, synthetic construct
  misc_feature 1..20: note = Description of Artificial Sequence: Synthetic oligonucleotide
  misc_feature 1..20: note = Target: SCN10A; (-) strand; PAM type: YTN; PAM sequence: TTC
  source 1..20: mol_type = other DNA
ctctttaccctcaaaaaccc

SEQ ID NO: 45324 - DNA, 20 bp, synthetic construct
  misc_feature 1..20: note = Description of Artificial Sequence: Synthetic oligonucleotide
  misc_feature 1..20: note = Target: SCN10A; (-) strand; PAM type: YTN; PAM sequence: CTT
  source 1..20: mol_type = other DNA
cctctttaccctcaaaaacc

SEQ ID NO: 45325 - DNA, 20 bp, synthetic construct
  misc_feature 1..20: note = Description of Artificial Sequence: Synthetic oligonucleotide
  misc_feature 1..20: note = Target: SCN10A; (-) strand; PAM type: YTN; PAM sequence: CTA
  source 1..20: mol_type = other DNA
cggagagacgtgggccttcc

SEQ ID NO: 45326 - DNA, 20 bp, synthetic construct
  misc_feature 1..20: note = Description of Artificial Sequence: Synthetic oligonucleotide
  misc_feature 1..20: note = Target: SCN10A; (-) strand; PAM type: YTN; PAM sequence: CTA
  source 1..20: mol_type = other DNA
tcagacactacggagagacg

SEQ ID NO: 45327 - DNA, 20 bp, synthetic construct
  misc_feature 1..20: note = Description of Artificial Sequence: Synthetic oligonucleotide
  misc_feature 1..20: note = Target: SCN10A; (-) strand; PAM type: YTN; PAM sequence: CTC
  source 1..20: mol_type = other DNA
atgccctatcagacactacg

SEQ ID NO: 45328 - DNA, 20 bp, synthetic construct
  misc_feature 1..20: note = Description of Artificial Sequence: Synthetic oligonucleotide
  misc_feature 1..20: note = Target: SCN10A; (-) strand; PAM type: YTN; PAM sequence: CTG
  source 1..20: mol_type = other DNA
catctcatgccctatcagac

SEQ ID NO: 45329 - DNA, 20 bp, synthetic construct
  misc_feature 1..20: note = Description of Artificial Sequence: Synthetic oligonucleotide
  misc_feature 1..20: note = Target: SCN10A; (-) strand; PAM type: YTN; PAM sequence: CTG
  source 1..20: mol_type = other DNA
gccgtggtatctgcatctca

SEQ ID NO: 45330 - DNA, 20 bp, synthetic construct
  misc_feature 1..20: note = Description of Artificial Sequence: Synthetic oligonucleotide
  misc_feature 1..20: note = Target: SCN10A; (-) strand; PAM type: YTN; PAM sequence: TTG
  source 1..20: mol_type = other DNA
agggcgcccgcatcagacac

SEQ ID NO: 45331 - DNA, 20 bp, synthetic construct
  misc_feature 1..20: note = Description of Artificial Sequence: Synthetic oligonucleotide
  misc_feature 1..20: note = Target: SCN10A; (-) strand; PAM type: YTN; PAM sequence: CTT
  source 1..20: mol_type = other DNA
gagggcgcccgcatcagaca

SEQ ID NO: 45332 - DNA, 20 bp, synthetic construct
  misc_feature 1..20: note = Description of Artificial Sequence: Synthetic oligonucleotide
  misc_feature 1..20: note = Target: SCN10A; (-) strand; PAM type: YTN; PAM sequence: CTC
  source 1..20: mol_type = other DNA
ccaggcttgagggcgcccgc

SEQ ID NO: 45333 - DNA, 20 bp, synthetic construct
  misc_feature 1..20: note = Description of Artificial Sequence: Synthetic oligonucleotide
  misc_feature 1..20: note = Target: SCN10A; (-) strand; PAM type: YTN; PAM sequence: CTC
  source 1..20: mol_type = other DNA
actcccaggcttgagggcgc

SEQ ID NO: 45334 - DNA, 20 bp, synthetic construct
  misc_feature 1..20: note = Description of Artificial Sequence: Synthetic oligonucleotide
  misc_feature 1..20: note = Target: SCN10A; (-) strand; PAM type: YTN; PAM sequence: CTG
  source 1..20: mol_type = other DNA
cctcactcccaggcttgagg

SEQ ID NO: 45335 - DNA, 20 bp, synthetic construct
  misc_feature 1..20: note = Description of Artificial Sequence: Synthetic oligonucleotide
  misc_feature 1..20: note = Target: SCN10A; (-) strand; PAM type: YTN; PAM sequence: TTG
  source 1..20: mol_type = other DNA
ctgcctcactcccaggcttg

SEQ ID NO: 45336 - DNA, 20 bp, synthetic construct
  misc_feature 1..20: note = Description of Artificial Sequence: Synthetic oligonucleotide
  misc_feature 1..20: note = Target: SCN10A; (-) strand; PAM type: YTN; PAM sequence: CTT
  source 1..20: mol_type = other DNA
gctgcctcactcccaggctt

SEQ ID NO: 45337 - DNA, 20 bp, synthetic construct
  misc_feature 1..20: note = Description of Artificial Sequence: Synthetic oligonucleotide
  misc_feature 1..20: note = Target: SCN10A; (-) strand; PAM type: YTN; PAM sequence: CTG
  source 1..20: mol_type = other DNA
tgcccacttgctgcctcact

SEQ ID NO: 45338 - DNA, 20 bp, synthetic construct
  misc_feature 1..20: note = Description of Artificial Sequence: Synthetic oligonucleotide
  misc_feature 1..20: note = Target: SCN10A; (-) strand; PAM type: YTN; PAM sequence: CTG
  source 1..20: mol_type = other DNA
ggatccacagaagacaaaca

SEQ ID NO: 45339 - DNA, 20 bp, synthetic construct
  misc_feature 1..20: note = Description of Artificial Sequence: Synthetic oligonucleotide
  misc_feature 1..20: note = Target: SCN10A; (-) strand; PAM type: YTN; PAM sequence: CTC
  source 1..20: mol_type = other DNA
acctgggatccacagaagac

SEQ ID NO: 45340 - DNA, 20 bp, synthetic construct
  misc_feature 1..20: note = Description of Artificial Sequence: Synthetic oligonucleotide
  misc_feature 1..20: note = Target: SCN10A; (-) strand; PAM type: YTN; PAM sequence: TTG
  source 1..20: mol_type = other DNA
agcgaacactcacctgggat

SEQ ID NO: 45341 - DNA, 20 bp, synthetic construct
  misc_feature 1..20: note = Description of Artificial Sequence: Synthetic oligonucleotide
  misc_feature 1..20: note = Target: SCN10A; (-) strand; PAM type: YTN; PAM sequence: TTA
  source 1..20: mol_type = other DNA
gggccagaatccagttgagc

SEQ ID NO: 45342 - DNA, 20 bp, synthetic construct
  misc_feature 1..20: note = Description of Artificial Sequence: Synthetic oligonucleotide
  misc_feature 1..20: note = Target: SCN10A; (-) strand; PAM type: YTN; PAM sequence: TTA
  source 1..20: mol_type = other DNA
attagggccagaatccagtt

SEQ ID NO: 45343 - DNA, 20 bp, synthetic construct
  misc_feature 1..20: note = Description of Artificial Sequence: Synthetic oligonucleotide
  misc_feature 1..20: note = Target: SCN10A; (-) strand; PAM type: YTN; PAM sequence: CTG
  source 1..20: mol_type = other DNA
atgttaattagggccagaat

SEQ ID NO: 45344 - DNA, 20 bp, synthetic construct
  misc_feature 1..20: note = Description of Artificial Sequence: Synthetic oligonucleotide
  misc_feature 1..20: note = Target: SCN10A; (-) strand; PAM type: YTN; PAM sequence: CTC
  source 1..20: mol_type = other DNA
acactgatgttaattagggc

SEQ ID NO: 45345 - DNA, 20 bp, synthetic construct
  misc_feature 1..20: note = Description of Artificial Sequence: Synthetic oligonucleotide
  misc_feature 1..20: note = Target: SCN10A; (-) strand; PAM type: YTN; PAM sequence: TTC
  source 1..20: mol_type = other DNA
acagaaggtgaagggacagc

SEQ ID NO: 45346 - DNA, 20 bp, synthetic construct
  misc_feature 1..20: note = Description of Artificial Sequence: Synthetic oligonucleotide
  misc_feature 1..20: note = Target: SCN10A; (-) strand; PAM type: YTN; PAM sequence: CTT
  source 1..20: mol_type = other DNA
cacagaaggtgaagggacag

SEQ ID NO: 45347 - DNA, 20 bp, synthetic construct
  misc_feature 1..20: note = Description of Artificial Sequence: Synthetic oligonucleotide
  misc_feature 1..20: note = Target: SCN10A; (-) strand; PAM type: YTN; PAM sequence: CTG
  source 1..20: mol_type = other DNA
cttcacagaaggtgaaggga

SEQ ID NO: 45348 - DNA, 20 bp, synthetic construct
  misc_feature 1..20: note = Description of Artificial Sequence: Synthetic oligonucleotide
  misc_feature 1..20: note = Target: SCN10A; (-) strand; PAM type: YTN; PAM sequence: CTG
  source 1..20: mol_type = other DNA
gaagaaccagatgactgctt

SEQ ID NO: 45349 - DNA, 20 bp, synthetic construct
  misc_feature 1..20: note = Description of Artificial Sequence: Synthetic oligonucleotide
  misc_feature 1..20: note = Target: SCN10A; (-) strand; PAM type: YTN; PAM sequence: CTG
  source 1..20: mol_type = other DNA
gcagatgacctggaagaacc

SEQ ID NO: 45350 - DNA, 20 bp, synthetic construct
  misc_feature 1..20: note = Description of Artificial Sequence: Synthetic oligonucleotide
  misc_feature 1..20: note = Target: SCN10A; (-) strand; PAM type: YTN; PAM sequence: CTG
  source 1..20: mol_type = other DNA
agctggcagatgacctggaa

SEQ ID NO: 45351 - DNA, 20 bp, synthetic construct
  misc_feature 1..20: note = Description of Artificial Sequence: Synthetic oligonucleotide
  misc_feature 1..20: note = Target: SCN10A; (-) strand; PAM type: YTN; PAM sequence: CTG
  source 1..20: mol_type = other DNA
aggaagatccctgagctggc

SEQ ID NO: 45352 - DNA, 20 bp, synthetic construct
  misc_feature 1..20: note = Description of Artificial Sequence: Synthetic oligonucleotide
  misc_feature 1..20: note = Target: SCN10A; (-) strand; PAM type: YTN; PAM sequence: CTG
  source 1..20: mol_type = other DNA
aggaaatcctgaggaagatc

SEQ ID NO: 45353 - DNA, 20 bp, synthetic construct
  misc_feature 1..20: note = Description of Artificial Sequence: Synthetic oligonucleotide
  misc_feature 1..20: note = Target: SCN10A; (-) strand; PAM type: YTN; PAM sequence: CTA
  source 1..20: mol_type = other DNA
gatcctgaggaaatcctgag

SEQ ID NO: 45354 - DNA, 20 bp, synthetic construct
  misc_feature 1..20: note = Description of Artificial Sequence: Synthetic oligonucleotide
  misc_feature 1..20: note = Target: SCN10A; (-) strand; PAM type: YTN; PAM sequence: CTG
  source 1..20: mol_type = other DNA
cctagatcctgaggaaatcc

SEQ ID NO: 45355 - DNA, 20 bp, synthetic construct
  misc_feature 1..20: note = Description of Artificial Sequence: Synthetic oligonucleotide
  misc_feature 1..20: note = Target: SCN10A; (-) strand; PAM type: YTN; PAM sequence: CTG
  source 1..20: mol_type = other DNA
agggcagcacggtggactgc

SEQ ID NO: 45356 - DNA, 20 bp, synthetic construct
  misc_feature 1..20: note = Description of Artificial Sequence: Synthetic oligonucleotide
  misc_feature 1..20: note = Target: SCN10A; (-) strand; PAM type: YTN; PAM sequence: CTC
  source 1..20: mol_type = other DNA
tgagggcagcacggtggact

SEQ ID NO: 45357 - DNA, 20 bp, synthetic construct
  misc_feature 1..20: note = Description of Artificial Sequence: Synthetic oligonucleotide
  misc_feature 1..20: note = Target: SCN10A; (-) strand; PAM type: YTN; PAM sequence: CTC
  source 1..20: mol_type = other DNA
ctctgagggcagcacggtgg

SEQ ID NO: 45358 - DNA, 20 bp, synthetic construct
  misc_feature 1..20: note = Description of Artificial Sequence: Synthetic oligonucleotide
  misc_feature 1..20: note = Target: SCN10A; (-) strand; PAM type: YTN; PAM sequence: CTG
  source 1..20: mol_type = other DNA
cagggagtggacgacacaag

SEQ ID NO: 45359 - DNA, 20 bp, synthetic construct
  misc_feature 1..20: note = Description of Artificial Sequence: Synthetic oligonucleotide
  misc_feature 1..20: note = Target: SCN10A; (-) strand; PAM type: YTN; PAM sequence: CTC
  source 1..20: mol_type = other DNA
ccctgcagggagtggacgac

SEQ ID NO: 45360 - DNA, 20 bp, synthetic construct
  misc_feature 1..20: note = Description of Artificial Sequence: Synthetic oligonucleotide
  misc_feature 1..20: note = Target: SCN10A; (-) strand; PAM type: YTN; PAM sequence: TTC
  source 1..20: mol_type = other DNA
tcccctgcagggagtggacg

SEQ ID NO: 45361 - DNA, 20 bp, synthetic construct
  misc_feature 1..20: note = Description of Artificial Sequence: Synthetic oligonucleotide
  misc_feature 1..20: note = Target: SCN10A; (-) strand; PAM type: YTN; PAM sequence: CTT
  source 1..20: mol_type = other DNA
ctcccctgcagggagtggac

SEQ ID NO: 45362 - DNA, 20 bp, synthetic construct
  misc_feature 1..20: note = Description of Artificial Sequence: Synthetic oligonucleotide
  misc_feature 1..20: note = Target: SCN10A; (-) strand; PAM type: YTN; PAM sequence: CTG
  source 1..20: mol_type = other DNA
ggcttctcccctgcagggag

SEQ ID NO: 45363 - DNA, 20 bp, synthetic construct
  misc_feature 1..20: note = Description of Artificial Sequence: Synthetic oligonucleotide
  misc_feature 1..20: note = Target: SCN10A; (-) strand; PAM type: YTN; PAM sequence: CTG
  source 1..20: mol_type = other DNA
ccctgggcttctcccctgca

SEQ ID NO: 45364 - DNA, 20 bp, synthetic construct
  misc_feature 1..20: note = Description of Artificial Sequence: Synthetic oligonucleotide
  misc_feature 1..20: note = Target: SCN10A; (-) strand; PAM type: YTN; PAM sequence: TTC
  source 1..20: mol_type = other DNA
actgccctgggcttctcccc

SEQ ID NO: 45365 - DNA, 20 bp, synthetic construct
  misc_feature 1..20: note = Description of Artificial Sequence: Synthetic oligonucleotide
  misc_feature 1..20: note = Target: SCN10A; (-) strand; PAM type: YTN; PAM sequence: TTC
  source 1..20: mol_type = other DNA
cccgggccccgcggagagac

SEQ ID NO: 45366 - DNA, 20 bp, synthetic construct
  misc_feature 1..20: note = Description of Artificial Sequence: Synthetic oligonucleotide
  misc_feature 1..20: note = Target: SCN10A; (-) strand; PAM type: YTN; PAM sequence: CTG
  source 1..20: mol_type = other DNA
cagtgaccgtgtgcaattcc

SEQ ID NO: 45367 - DNA, 20 bp, synthetic construct
  misc_feature 1..20: note = Description of Artificial Sequence: Synthetic oligonucleotide
  misc_feature 1..20: note = Target: SCN10A; (-) strand; PAM type: YTN; PAM sequence: TTG
  source 1..20: mol_type = other DNA
aacctgcagtgaccgtgtgc

SEQ ID NO: 45368 - DNA, 20 bp, synthetic construct
  misc_feature 1..20: note = Description of Artificial Sequence: Synthetic oligonucleotide
  misc_feature 1..20: note = Target: SCN10A; (-) strand; PAM type: YTN; PAM sequence: CTG
  source 1..20: mol_type = other DNA
gcgaggcaccaaacatgggt

SEQ ID NO: 45369 - DNA, 20 bp, synthetic construct
  misc_feature 1..20: note = Description of Artificial Sequence: Synthetic oligonucleotide
  misc_feature 1..20: note = Target: SCN10A; (-) strand; PAM type: YTN; PAM sequence: CTC
  source 1..20: mol_type = other DNA
agctggcgaggcaccaaaca

SEQ ID NO: 45370 - DNA, 20 bp, synthetic construct
  misc_feature 1..20: note = Description of Artificial Sequence: Synthetic oligonucleotide
  misc_feature 1..20: note = Target: SCN10A; (-) strand; PAM type: YTN; PAM sequence: TTC
  source 1..20: mol_type = other DNA
caggcctcagctggcgaggc

SEQ ID NO: 45371 - DNA, 20 bp, synthetic construct
  misc_feature 1..20: note = Description of Artificial Sequence: Synthetic oligonucleotide
  misc_feature 1..20: note = Target: SCN10A; (-) strand; PAM type: YTN; PAM sequence: CTC
  source 1..20: mol_type = other DNA
cagggagaagagcagtgttc

SEQ ID NO: 45372 - DNA, 20 bp, synthetic construct
  misc_feature 1..20: note = Description of Artificial Sequence: Synthetic oligonucleotide
  misc_feature 1..20: note = Target: SCN10A; (-) strand; PAM type: YTN; PAM sequence: CTG
  source 1..20: mol_type = other DNA
gggctccagggagaagagca

SEQ ID NO: 45373 - DNA, 20 bp, synthetic construct
  misc_feature 1..20: note = Description of Artificial Sequence: Synthetic oligonucleotide
  misc_feature 1..20: note = Target: SCN10A; (-) strand; PAM type: YTN; PAM sequence: CTC
  source 1..20: mol_type = other DNA
tggggctccagggagaagag

SEQ ID NO: 45374 - DNA, 20 bp, synthetic construct
  misc_feature 1..20: note = Description of Artificial Sequence: Synthetic oligonucleotide
  misc_feature 1..20: note = Target: SCN10A; (-) strand; PAM type: YTN; PAM sequence: CTA
  source 1..20: mol_type = other DNA
agcctctggggctccaggga

SEQ ID NO: 45375 - DNA, 20 bp, synthetic construct
  misc_feature 1..20: note = Description of Artificial Sequence: Synthetic oligonucleotide
  misc_feature 1..20: note = Target: SCN10A; (-) strand; PAM type: YTN; PAM sequence: CTC
  source 1..20: mol_type = other DNA
acacagctaagcctctgggg

SEQ ID NO: 45376 - DNA, 20 bp, synthetic construct
  misc_feature 1..20: note = Description of Artificial Sequence: Synthetic oligonucleotide
  misc_feature 1..20: note = Target: SCN10A; (-) strand; PAM type: YTN; PAM sequence: TTA
  source 1..20: mol_type = other DNA
cagtctcacacagctaagcc

SEQ ID NO: 45377 - DNA, 20 bp, synthetic construct
  misc_feature 1..20: note = Description of Artificial Sequence: Synthetic oligonucleotide
  misc_feature 1..20: note = Target: SCN10A; (-) strand; PAM type: YTN; PAM sequence: TTT
  source 1..20: mol_type = other DNA
acagtctcacacagctaagc

SEQ ID NO: 45378 - DNA, 20 bp, synthetic construct
  misc_feature 1..20: note = Description of Artificial Sequence: Synthetic oligonucleotide
  misc_feature 1..20: note = Target: SCN10A; (-) strand; PAM type: YTN; PAM sequence: CTC
  source 1..20: mol_type = other DNA
catcaggggccccgaaggtt

SEQ ID NO: 45379 - DNA, 20 bp, synthetic construct
  misc_feature 1..20: note = Description of Artificial Sequence: Synthetic oligonucleotide
  misc_feature 1..20: note = Target: SCN10A; (-) strand; PAM type: YTN; PAM sequence: TTG
  source 1..20: mol_type = other DNA
ccagcactccatcaggggcc

SEQ ID NO: 45380 - DNA, 20 bp, synthetic construct
  misc_feature 1..20: note = Description of Artificial Sequence: Synthetic oligonucleotide
  misc_feature 1..20: note = Target: SCN10A; (-) strand; PAM type: YTN; PAM sequence: CTC
  source 1..20: mol_type = other DNA
gggccattgccagcactcca

SEQ ID NO: 45381 - DNA, 20 bp, synthetic construct
  misc_feature 1..20: note = Description of Artificial Sequence: Synthetic oligonucleotide
  misc_feature 1..20: note = Target: SCN10A; (-) strand; PAM type: YTN; PAM sequence: TTA
  source 1..20: mol_type = other DNA
cggtgtctcgggccattgcc

SEQ ID NO: 45382 - DNA, 20 bp, synthetic construct
  misc_feature 1..20: note = Description of Artificial Sequence: Synthetic oligonucleotide
  misc_feature 1..20: note = Target: SCN10A; (-) strand; PAM type: YTN; PAM sequence: TTA
  source 1..20: mol_type = other DNA
tgggtgtaattacggtgtct

SEQ ID NO: 45383 - DNA, 20 bp, synthetic construct
  misc_feature 1..20: note = Description of Artificial Sequence: Synthetic oligonucleotide
  misc_feature 1..20: note = Target: SCN10A; (-) strand; PAM type: YTN; PAM sequence: CTG
  source 1..20: mol_type = other DNA
agagtcgttatgggtgtaat

SEQ ID NO: 45384 - DNA, 20 bp, synthetic construct
  misc_feature 1..20: note = Description of Artificial Sequence: Synthetic oligonucleotide
  misc_feature 1..20: note = Target: SCN10A; (-) strand; PAM type: YTN; PAM sequence: TTC
  source 1..20: mol_type = other DNA
aagcccagtgaatgctgaga

SEQ ID NO: 45385 - DNA, 20 bp, synthetic construct
  misc_feature 1..20: note = Description of Artificial Sequence: Synthetic oligonucleotide
  misc_feature 1..20: note = Target: SCN10A; (-) strand; PAM type: YTN; PAM sequence: TTA
  source 1..20: mol_type = other DNA
aatattcaagcccagtgaat

SEQ ID NO: 45386 - DNA, 20 bp, synthetic construct
  misc_feature 1..20: note = Description of Artificial Sequence: Synthetic oligonucleotide
  misc_feature 1..20: note = Target: SCN10A; (-) strand; PAM type: YTN; PAM sequence: CTC
  source 1..20: mol_type = other DNA
catgattaaatattcaagcc

SEQ ID NO: 45387 - DNA, 20 bp, synthetic construct
  misc_feature 1..20: note = Description of Artificial Sequence: Synthetic oligonucleotide
  misc_feature 1..20: note = Target: SCN10A; (-) strand; PAM type: YTN; PAM sequence: TTA
  source 1..20: mol_type = other DNA
ctccatgattaaatattcaa

SEQ ID NO: 45388 - DNA, 20 bp, synthetic construct
  misc_feature 1..20: note = Description of Artificial Sequence: Synthetic oligonucleotide
  misc_feature 1..20: note = Target: SCN10A; (-) strand; PAM type: YTN; PAM sequence: CTG
  source 1..20: mol_type = other DNA
cagcattactccatgattaa

SEQ ID NO: 45389 - DNA, 20 bp, synthetic construct
  misc_feature 1..20: note = Description of Artificial Sequence: Synthetic oligonucleotide
  misc_feature 1..20: note = Target: SCN10A; (-) strand; PAM type: YTN; PAM sequence: CTG
  source 1..20: mol_type = other DNA
ccaggagggcagcaggcccc

SEQ ID NO: 45390 - DNA, 20 bp, synthetic construct
  misc_feature 1..20: note = Description of Artificial Sequence: Synthetic oligonucleotide
  misc_feature 1..20: note = Target: SCN10A; (-) strand; PAM type: YTN; PAM sequence: CTG
  source 1..20: mol_type = other DNA
gagctgccaggagggcagca

SEQ ID NO: 45391 - DNA, 20 bp, synthetic construct
  misc_feature 1..20: note = Description of Artificial Sequence: Synthetic oligonucleotide
  misc_feature 1..20: note = Target: SCN10A; (-) strand; PAM type: YTN; PAM sequence: TTA
  source 1..20: mol_type = other DNA
tagggctggagctgccagga

SEQ ID NO: 45392 - DNA, 20 bp, synthetic construct
  misc_feature 1..20: note = Description of Artificial Sequence: Synthetic oligonucleotide
  misc_feature 1..20: note = Target: SCN10A; (-) strand; PAM type: YTN; PAM sequence: CTG
  source 1..20: mol_type = other DNA
gagacattatagggctggag

SEQ ID NO: 45393 - DNA, 20 bp, synthetic construct
  misc_feature 1..20: note = Description of Artificial Sequence: Synthetic oligonucleotide
  misc_feature 1..20: note = Target: SCN10A; (-) strand; PAM type: YTN; PAM sequence: TTC
  source 1..20: mol_type = other DNA
atctggagacattatagggc

SEQ ID NO: 45394 - DNA, 20 bp, synthetic construct
  misc_feature 1..20: note = Description of Artificial Sequence: Synthetic oligonucleotide
  misc_feature 1..20: note = Target: SCN10A; (-) strand; PAM type: YTN; PAM sequence: TTG
  source 1..20: mol_type = other DNA
aattcatctggagacattat

SEQ ID NO: 45395 - DNA, 20 bp, synthetic construct
  misc_feature 1..20: note = Description of Artificial Sequence: Synthetic oligonucleotide
  misc_feature 1..20: note = Target: SCN10A; (-) strand; PAM type: YTN; PAM sequence: CTA
  source 1..20: mol_type = other DNA
attgaattcatctggagaca

SEQ ID NO: 45396 - DNA, 20 bp, synthetic construct
  misc_feature 1..20: note = Description of Artificial Sequence: Synthetic oligonucleotide
  misc_feature 1..20: note = Target: SCN10A; (-) strand; PAM type: YTN; PAM sequence: TTC
  source 1..20: mol_type = other DNA
aacccctaattgaattcatc

SEQ ID NO: 45397 - DNA, 20 bp, synthetic construct
  misc_feature 1..20: note = Description of Artificial Sequence: Synthetic oligonucleotide
  misc_feature 1..20: note = Target: SCN10A; (-) strand; PAM type: YTN; PAM sequence: CTT
  source 1..20: mol_type = other DNA
caacccctaattgaattcat

SEQ ID NO: 45398 - DNA, 20 bp, synthetic construct
  misc_feature 1..20: note = Description of Artificial Sequence: Synthetic oligonucleotide
  misc_feature 1..20: note = Target: SCN10A; (-) strand; PAM type: YTN; PAM sequence: CTA
  source 1..20: mol_type = other DNA
atatgagagcaacttcaacc

SEQ ID NO: 45399 - DNA, 20 bp, synthetic construct
  misc_feature 1..20: note = Description of Artificial Sequence: Synthetic oligonucleotide
  misc_feature 1..20: note = Target: SCN10A; (-) strand; PAM type: YTN; PAM sequence: TTA
  source 1..20: mol_type = other DNA
ctaatatgagagcaacttca

SEQ ID NO: 45400 - DNA, 20 bp, synthetic construct
  misc_feature 1..20: note = Description of Artificial Sequence: Synthetic oligonucleotide
  misc_feature 1..20: note = Target: SCN10A; (-) strand; PAM type: YTN; PAM sequence: TTT
  source 1..20: mol_type = other DNA
actaatatgagagcaacttc

SEQ ID NO: 45401 - DNA, 20 bp, synthetic construct
  misc_feature 1..20: note = Description of Artificial Sequence: Synthetic oligonucleotide
  misc_feature 1..20: note = Target: SCN10A; (-) strand; PAM type: YTN; PAM sequence: CTA
  source 1..20: mol_type = other DNA
tcaggtttactaatatgaga

SEQ ID NO: 45402 - DNA, 20 bp, synthetic construct
  misc_feature 1..20: note = Description of Artificial Sequence: Synthetic oligonucleotide
  misc_feature 1..20: note = Target: SCN10A; (-) strand; PAM type: YTN; PAM sequence: TTA
  source 1..20: mol_type = other DNA
gcaaagctatcaggtttact

SEQ ID NO: 45403 - DNA, 20 bp, synthetic construct
  misc_feature 1..20: note = Description of Artificial Sequence: Synthetic oligonucleotide
  misc_feature 1..20: note = Target: SCN10A; (-) strand; PAM type: YTN; PAM sequence: TTG
  source 1..20: mol_type = other DNA
ggtccattagcaaagctatc

SEQ ID NO: 45404 - DNA, 20 bp, synthetic construct
  misc_feature 1..20: note = Description of Artificial Sequence: Synthetic oligonucleotide
  misc_feature 1..20: note = Target: SCN10A; (-) strand; PAM type: YTN; PAM sequence: TTT
  source 1..20: mol_type = other DNA
gggtccattagcaaagctat

SEQ ID NO: 45405 - DNA, 20 bp, synthetic construct
  misc_feature 1..20: note = Description of Artificial Sequence: Synthetic oligonucleotide
  misc_feature 1..20: note = Target: SCN10A; (-) strand; PAM type: YTN; PAM sequence: CTG
  source 1..20: mol_type = other DNA
acagcgacaaatggggaccc

SEQ ID NO: 45406 - DNA, 20 bp, synthetic construct
  misc_feature 1..20: note = Description of Artificial Sequence: Synthetic oligonucleotide
  misc_feature 1..20: note = Target: SCN10A; (-) strand; PAM type: YTN; PAM sequence: CTA
  source 1..20: mol_type = other DNA
ggcaggaggggcctgacagc

SEQ ID NO: 45407 - DNA, 20 bp, synthetic construct
  misc_feature 1..20: note = Description of Artificial Sequence: Synthetic oligonucleotide
  misc_feature 1..20: note = Target: SCN10A; (-) strand; PAM type: YTN; PAM sequence: TTG
  source 1..20: mol_type = other DNA
tccatgaccccggctaggca

SEQ ID NO: 45408 - DNA, 20 bp, synthetic construct
  misc_feature 1..20: note = Description of Artificial Sequence: Synthetic oligonucleotide
  misc_feature 1..20: note = Target: SCN10A; (-) strand; PAM type: YTN; PAM sequence: CTT
  source 1..20: mol_type = other DNA
gtccatgaccccggctaggc

SEQ ID NO: 45409 - DNA, 20 bp, synthetic construct
  misc_feature 1..20: note = Description of Artificial Sequence: Synthetic oligonucleotide
  misc_feature 1..20: note = Target: SCN10A; (-) strand; PAM type: YTN; PAM sequence: TTC
  source 1..20: mol_type = other DNA
ttgtccatgaccccggctag

SEQ ID NO: 45410 - DNA, 20 bp, synthetic construct
  misc_feature 1..20: note = Description of Artificial Sequence: Synthetic oligonucleotide
  misc_feature 1..20: note = Target: SCN10A; (-) strand; PAM type: YTN; PAM sequence: TTT
  source 1..20: mol_type = other DNA
cttgtccatgaccccggcta

SEQ ID NO: 45411 - DNA, 20 bp, synthetic construct
  misc_feature 1..20: note = Description of Artificial Sequence: Synthetic oligonucleotide
  misc_feature 1..20: note = Target: SCN10A; (-) strand; PAM type: YTN; PAM sequence: TTT
  source 1..20: mol_type = other DNA
tcttgtccatgaccccggct

SEQ ID NO: 45412 - DNA, 20 bp, synthetic construct
  misc_feature 1..20: note = Description of Artificial Sequence: Synthetic oligonucleotide
  misc_feature 1..20: note = Target: SCN10A; (-) strand; PAM type: YTN; PAM sequence: TTG
  source 1..20: mol_type = other DNA
ttttcttgtccatgaccccg

SEQ ID NO: 45413 - DNA, 20 bp, synthetic construct
  misc_feature 1..20: note = Description of Artificial Sequence: Synthetic oligonucleotide
  misc_feature 1..20: note = Target: SCN10A; (-) strand; PAM type: YTN; PAM sequence: TTT
  source 1..20: mol_type = other DNA
gttttcttgtccatgacccc

SEQ ID NO: 45414 - DNA, 20 bp, synthetic construct
  misc_feature 1..20: note = Description of Artificial Sequence: Synthetic oligonucleotide
  misc_feature 1..20: note = Target: SCN10A; (-) strand; PAM type: YTN; PAM sequence: TTT
  source 1..20: mol_type = other DNA
tgttttcttgtccatgaccc

SEQ ID NO: 45415 - DNA, 20 bp, synthetic construct
  misc_feature 1..20: note = Description of Artificial Sequence: Synthetic oligonucleotide
  misc_feature 1..20: note = Target: SCN10A; (-) strand; PAM type: YTN; PAM sequence: TTT
  source 1..20: mol_type = other DNA
ttgttttcttgtccatgacc

SEQ ID NO: 45416 - DNA, 20 bp, synthetic construct
  misc_feature 1..20: note = Description of Artificial Sequence: Synthetic oligonucleotide
  misc_feature 1..20: note = Target: SCN10A; (-) strand; PAM type: YTN; PAM sequence: TTG
  source 1..20: mol_type = other DNA
tttttgttttcttgtccatg

SEQ ID NO: 45417 - DNA, 20 bp, synthetic construct
  misc_feature 1..20: note = Description of Artificial Sequence: Synthetic oligonucleotide
  misc_feature 1..20: note = Target: SCN10A; (-) strand; PAM type: YTN; PAM sequence: TTT
  source 1..20: mol_type = other DNA
gtttttgttttcttgtccat

SEQ ID NO: 45418 - DNA, 20 bp, synthetic construct
  misc_feature 1..20: note = Description of Artificial Sequence: Synthetic oligonucleotide
  misc_feature 1..20: note = Target: SCN10A; (-) strand; PAM type: YTN; PAM sequence: TTT
  source 1..20: mol_type = other DNA
tgtttttgttttcttgtcca

SEQ ID NO: 45419 - DNA, 20 bp, synthetic construct
  misc_feature 1..20: note = Description of Artificial Sequence: Synthetic oligonucleotide
  misc_feature 1..20: note = Target: SCN10A; (-) strand; PAM type: YTN; PAM sequence: TTT
  source 1..20: mol_type = other DNA
ttgtttttgttttcttgtcc

SEQ ID NO: 45420 - DNA, 20 bp, synthetic construct
  misc_feature 1..20: note = Description of Artificial Sequence: Synthetic oligonucleotide
  misc_feature 1..20: note = Target: SCN10A; (-) strand; PAM type: YTN; PAM sequence: TTT
  source 1..20: mol_type = other DNA
tttgtttttgttttcttgtc

SEQ ID NO: 45421 - DNA, 20 bp, synthetic construct
  misc_feature 1..20: note = Description of Artificial Sequence: Synthetic oligonucleotide
  misc_feature 1..20: note = Target: SCN10A; (-) strand; PAM type: YTN; PAM sequence: TTG
  source 1..20: mol_type = other DNA
gttttttgtttttgttttct

SEQ ID NO: 45422 - DNA, 20 bp, synthetic construct
  misc_feature 1..20: note = Description of Artificial Sequence: Synthetic oligonucleotide
  misc_feature 1..20: note = Target: SCN10A; (-) strand; PAM type: YTN; PAM sequence: CTG
  source 1..20: mol_type = other DNA
ggtgttggttttttgttttt

SEQ ID NO: 45423 - DNA, 20 bp, synthetic construct
  misc_feature 1..20: note = Description of Artificial Sequence: Synthetic oligonucleotide
  misc_feature 1..20: note = Target: SCN10A; (-) strand; PAM type: YTN; PAM sequence: TTC
  source 1..20: mol_type = other DNA
tgggtgttggttttttgttt

SEQ ID NO: 45424 - DNA, 20 bp, synthetic construct
  misc_feature 1..20: note = Description of Artificial Sequence: Synthetic oligonucleotide
  misc_feature 1..20: note = Target: SCN10A; (-) strand; PAM type: YTN; PAM sequence: CTT
  source 1..20: mol_type = other DNA
ctgggtgttggttttttgtt

SEQ ID NO: 45425 - DNA, 20 bp, synthetic construct
  misc_feature 1..20: note = Description of Artificial Sequence: Synthetic oligonucleotide
  misc_feature 1..20: note = Target: SCN10A; (-) strand; PAM type: YTN; PAM sequence: TTC
  source 1..20: mol_type = other DNA
agtacacaacttctgggtgt

SEQ ID NO: 45426 - DNA, 20 bp, synthetic construct
  misc_feature 1..20: note = Description of Artificial Sequence: Synthetic oligonucleotide
  misc_feature 1..20: note = Target: SCN10A; (-) strand; PAM type: YTN; PAM sequence: TTT
  source 1..20: mol_type = other DNA
cagtacacaacttctgggtg

SEQ ID NO: 45427 - DNA, 20 bp, synthetic construct
  misc_feature 1..20: note = Description of Artificial Sequence: Synthetic oligonucleotide
  misc_feature 1..20: note = Target: SCN10A; (-) strand; PAM type: YTN; PAM sequence: TTT
  source 1..20: mol_type = other DNA
tcagtacacaacttctgggt

SEQ ID NO: 45428 - DNA, 20 bp, synthetic construct
  misc_feature 1..20: note = Description of Artificial Sequence: Synthetic oligonucleotide
  misc_feature 1..20: note = Target: SCN10A; (-) strand; PAM type: YTN; PAM sequence: CTC
  source 1..20: mol_type = other DNA
aatgttttcagtacacaact

SEQ ID NO: 45429 - DNA, 20 bp, synthetic construct
  misc_feature 1..20: note = Description of Artificial Sequence: Synthetic oligonucleotide
  misc_feature 1..20: note = Target: SCN10A; (-) strand; PAM type: YTN; PAM sequence: CTA
  source 1..20: mol_type = other DNA
ctcaatgttttcagtacaca

SEQ ID NO: 45430 - DNA, 20 bp, synthetic construct
  misc_feature 1..20: note = Description of Artificial Sequence: Synthetic oligonucleotide
  misc_feature 1..20: note = Target: SCN10A; (-) strand; PAM type: YTN; PAM sequence: TTG
  source 1..20: mol_type = other DNA
tccctactcaatgttttcag

SEQ ID NO: 45431 - DNA, 20 bp, synthetic construct
  misc_feature 1..20: note = Description of Artificial Sequence: Synthetic oligonucleotide
  misc_feature 1..20: note = Target: SCN10A; (-) strand; PAM type: YTN; PAM sequence: CTA
  source 1..20: mol_type = other DNA
gttgtccctactcaatgttt

SEQ ID NO: 45432 - DNA, 20 bp, synthetic construct
  misc_feature 1..20: note = Description of Artificial Sequence: Synthetic oligonucleotide
  misc_feature 1..20: note = Target: SCN10A; (-) strand; PAM type: YTN; PAM sequence: CTG
  source 1..20: mol_type = other DNA
gctagttgtccctactcaat

SEQ ID NO: 45433 - DNA, 20 bp, synthetic construct
  misc_feature 1..20: note = Description of Artificial Sequence: Synthetic oligonucleotide
  misc_feature 1..20: note = Target: SCN10A; (-) strand; PAM type: YTN; PAM sequence: CTC
  source 1..20: mol_type = other DNA
ccctggctagttgtccctac

SEQ ID NO: 45434 - DNA, 20 bp, synthetic construct
  misc_feature 1..20: note = Description of Artificial Sequence: Synthetic oligonucleotide
  misc_feature 1..20: note = Target: SCN10A; (-) strand; PAM type: YTN; PAM sequence: TTC
  source 1..20: mol_type = other DNA
caaggactcccctggctagt

SEQ ID NO: 45435 - DNA, 20 bp, synthetic construct
  misc_feature 1..20: note = Description of Artificial Sequence: Synthetic oligonucleotide
  misc_feature 1..20: note = Target: SCN10A; (-) strand; PAM type: YTN; PAM sequence: TTC
  source 1..20: mol_type = other DNA
ccaaatgttccaaggactcc

SEQ ID NO: 45436 - DNA, 20 bp, synthetic construct
  misc_feature 1..20: note = Description of Artificial Sequence: Synthetic oligonucleotide
  misc_feature 1..20: note = Target: SCN10A; (-) strand; PAM type: YTN; PAM sequence: CTT
  source 1..20: mol_type = other DNA
cccaaatgttccaaggactc

SEQ ID NO: 45437 - DNA, 20 bp, synthetic construct
  misc_feature 1..20: note = Description of Artificial Sequence: Synthetic oligonucleotide
  misc_feature 1..20: note = Target: SCN10A; (-) strand; PAM type: YTN; PAM sequence: TTC
  source 1..20: mol_type = other DNA
ttcccaaatgttccaaggac

SEQ ID NO: 45438 - DNA, 20 bp, synthetic construct
  misc_feature 1..20: note = Description of Artificial Sequence: Synthetic oligonucleotide
  misc_feature 1..20: note = Target: SCN10A; (-) strand; PAM type: YTN; PAM sequence: CTT
  source 1..20: mol_type = other DNA
cttcccaaatgttccaagga

SEQ ID NO: 45439 - DNA, 20 bp, synthetic construct
  misc_feature 1..20: note = Description of Artificial Sequence: Synthetic oligonucleotide
  misc_feature 1..20: note = Target: SCN10A; (-) strand; PAM type: YTN; PAM sequence: CTG
  source 1..20: mol_type = other DNA
cacgtggatgtcatgcttct

SEQ ID NO: 45440 - DNA, 20 bp, synthetic construct
  misc_feature 1..20: note = Description of Artificial Sequence: Synthetic oligonucleotide
  misc_feature 1..20: note = Target: SCN10A; (-) strand; PAM type: YTN; PAM sequence: TTC
  source 1..20: mol_type = other DNA
tgcacgtggatgtcatgctt

SEQ ID NO: 45441 - DNA, 20 bp, synthetic construct
  misc_feature 1..20: note = Description of Artificial Sequence: Synthetic oligonucleotide
  misc_feature 1..20: note = Target: SCN10A; (-) strand; PAM type: YTN; PAM sequence: CTG
  source 1..20: mol_type = other DNA
tcacattctgcacgtggatg

SEQ ID NO: 45442 - DNA, 20 bp, synthetic construct
  misc_feature 1..20: note = Description of Artificial Sequence: Synthetic oligonucleotide
  misc_feature 1..20: note = Target: SCN10A; (-) strand; PAM type: YTN; PAM sequence: CTG
  source 1..20: mol_type = other DNA
ggtgagggctgtcacattct

SEQ ID NO: 45443 - DNA, 20 bp, synthetic construct
  misc_feature 1..20: note = Description of Artificial Sequence: Synthetic oligonucleotide
  misc_feature 1..20: note = Target: SCN10A; (-) strand; PAM type: YTN; PAM sequence: TTC
  source 1..20: mol_type = other DNA
ccactgggtgagggctgtca

SEQ ID NO: 45444 - DNA, 20 bp, synthetic construct
  misc_feature 1..20: note = Description of Artificial Sequence: Synthetic oligonucleotide
  misc_feature 1..20: note = Target: SCN10A; (-) strand; PAM type: YTN; PAM sequence: TTG
  source 1..20: mol_type = other DNA
gttcccactgggtgagggct

SEQ ID NO: 45445 - DNA, 20 bp, synthetic construct
  misc_feature 1..20: note = Description of Artificial Sequence: Synthetic oligonucleotide
  misc_feature 1..20: note = Target: SCN10A; (-) strand; PAM type: YTN; PAM sequence: CTT
  source 1..20: mol_type = other DNA
ggttcccactgggtgagggc

SEQ ID NO: 45446 - DNA, 20 bp, synthetic construct
  misc_feature 1..20: note = Description of Artificial Sequence: Synthetic oligonucleotide
  misc_feature 1..20: note = Target: SCN10A; (-) strand; PAM type: YTN; PAM sequence: CTG
  source 1..20: mol_type = other DNA
tgggtgaacagaagccgctt

SEQ ID NO: 45447 - DNA, 20 bp, synthetic construct
  misc_feature 1..20: note = Description of Artificial Sequence: Synthetic oligonucleotide
  misc_feature 1..20: note = Target: SCN10A; (-) strand; PAM type: YTN; PAM sequence: TTG
  source 1..20: mol_type = other DNA
ggggctgtgggtgaacagaa

SEQ ID NO: 45448 - DNA, 20 bp, synthetic construct
  misc_feature 1..20: note = Description of Artificial Sequence: Synthetic oligonucleotide
  misc_feature 1..20: note = Target: SCN10A; (-) strand; PAM type: YTN; PAM sequence: TTT
  source 1..20: mol_type = other DNA
gggggctgtgggtgaacaga

SEQ ID NO: 45449 - DNA, 20 bp, synthetic construct
  misc_feature 1..20: note = Description of Artificial Sequence: Synthetic oligonucleotide
  misc_feature 1..20: note = Target: SCN10A; (-) strand; PAM type: YTN; PAM sequence: CTG
  source 1..20: mol_type = other DNA
ggacgggatttgggggctgt

SEQ ID NO: 45450 - DNA, 20 bp, synthetic construct
  misc_feature 1..20: note = Description of Artificial Sequence: Synthetic oligonucleotide
  misc_feature 1..20: note = Target: SCN10A; (-) strand; PAM type: YTN; PAM sequence: CTG
  source 1..20: mol_type = other DNA
accacagcagggtaagataa

SEQ ID NO: 45451 - DNA, 20 bp, synthetic construct
  misc_feature 1..20: note = Description of Artificial Sequence: Synthetic oligonucleotide
  misc_feature 1..20: note = Target: SCN10A; (-) strand; PAM type: YTN; PAM sequence: CTA
  source 1..20: mol_type = other DNA
ggcaaggctgaccacagcag

SEQ ID NO: 45452 - DNA, 20 bp, synthetic construct
  misc_feature 1..20: note = Description of Artificial Sequence: Synthetic oligonucleotide
  misc_feature 1..20: note = Target: SCN10A; (-) strand; PAM type: YTN; PAM sequence: CTG
  source 1..20: mol_type = other DNA
tgtgccctaggcaaggctga

SEQ ID NO: 45453 - DNA, 20 bp, synthetic construct
  misc_feature 1..20: note = Description of Artificial Sequence: Synthetic oligonucleotide
  misc_feature 1..20: note = Target: SCN10A; (-) strand; PAM type: YTN; PAM sequence: CTG
  source 1..20: mol_type = other DNA
gctgtgtgccctaggcaagg

SEQ ID NO: 45454 - DNA, 20 bp, synthetic construct
  misc_feature 1..20: note = Description of Artificial Sequence: Synthetic oligonucleotide
  misc_feature 1..20: note = Target: SCN10A; (-) strand; PAM type: YTN; PAM sequence: CTA
  source 1..20: mol_type = other DNA
ctggctgtgtgccctaggca

SEQ ID NO: 45455 - DNA, 20 bp, synthetic construct
  misc_feature 1..20: note = Description of Artificial Sequence: Synthetic oligonucleotide
  misc_feature 1..20: note = Target: SCN10A; (-) strand; PAM type: YTN; PAM sequence: TTG
  source 1..20: mol_type = other DNA
aagaatgtcagctactggct

SEQ ID NO: 45456 - DNA, 20 bp, synthetic construct
  misc_feature 1..20: note = Description of Artificial Sequence: Synthetic oligonucleotide
  misc_feature 1..20: note = Target: SCN10A; (-) strand; PAM type: YTN; PAM sequence: CTT
  source 1..20: mol_type = other DNA
gaagaatgtcagctactggc

SEQ ID NO: 45457 - DNA, 20 bp, synthetic construct
  misc_feature 1..20: note = Description of Artificial Sequence: Synthetic oligonucleotide
  misc_feature 1..20: note = Target: SCN10A; (-) strand; PAM type: YTN; PAM sequence: TTC
  source 1..20: mol_type = other DNA
agcttgaagaatgtcagcta

SEQ ID NO: 45458 - DNA, 20 bp, synthetic construct
  misc_feature 1..20: note = Description of Artificial Sequence: Synthetic oligonucleotide
  misc_feature 1..20: note = Target: SCN10A; (-) strand; PAM type: YTN; PAM sequence: CTT
  source 1..20: mol_type = other DNA
cagcttgaagaatgtcagct

SEQ ID NO: 45459 - DNA, 20 bp, synthetic construct
  misc_feature 1..20: note = Description of Artificial Sequence: Synthetic oligonucleotide
  misc_feature 1..20: note = Target: SCN10A; (-) strand; PAM type: YTN; PAM sequence: TTA
  source 1..20: mol_type = other DNA
tcaagcccttcagcttgaag

SEQ ID NO: 45460 - DNA, 20 bp, synthetic construct
  misc_feature 1..20: note = Description of Artificial Sequence: Synthetic oligonucleotide
  misc_feature 1..20: note = Target: SCN10A; (-) strand; PAM type: YTN; PAM sequence: TTC
  source 1..20: mol_type = other DNA
atccccaaagttatcaagcc

SEQ ID NO: 45461 - DNA, 20 bp, synthetic construct
  misc_feature 1..20: note = Description of Artificial Sequence: Synthetic oligonucleotide
  misc_feature 1..20: note = Target: SCN10A; (-) strand; PAM type: YTN; PAM sequence: CTC
  source 1..20: mol_type = other DNA
aacagagataaggaagtcat

SEQ ID NO: 45462 - DNA, 20 bp, synthetic construct
  misc_feature 1..20: note = Description of Artificial Sequence: Synthetic oligonucleotide
  misc_feature 1..20: note = Target: SCN10A; (-) strand; PAM type: YTN; PAM sequence: CTG
  source 1..20: mol_type = other DNA
ggctcaacagagataaggaa

SEQ ID NO: 45463 - DNA, 20 bp, synthetic construct
  misc_feature 1..20: note = Description of Artificial Sequence: Synthetic oligonucleotide
  misc_feature 1..20: note = Target: SCN10A; (-) strand; PAM type: YTN; PAM sequence: TTG
  source 1..20: mol_type = other DNA
tgacaggcactgggctcaac

SEQ ID NO: 45464 - DNA, 20 bp, synthetic construct
  misc_feature 1..20: note = Description of Artificial Sequence: Synthetic oligonucleotide
  misc_feature 1..20: note = Target: SCN10A; (-) strand; PAM type: YTN; PAM sequence: TTT
  source 1..20: mol_type = other DNA
gtgacaggcactgggctcaa

SEQ ID NO: 45465 - DNA, 20 bp, synthetic construct
  misc_feature 1..20: note = Description of Artificial Sequence: Synthetic oligonucleotide
  misc_feature 1..20: note = Target: SCN10A; (-) strand; PAM type: YTN; PAM sequence: CTT
  source 1..20: mol_type = other DNA
tgtgacaggcactgggctca

SEQ ID NO: 45466 - DNA, 20 bp, synthetic construct
  misc_feature 1..20: note = Description of Artificial Sequence: Synthetic oligonucleotide
  misc_feature 1..20: note = Target: SCN10A; (-) strand; PAM type: YTN; PAM sequence: CTG
  source 1..20: mol_type = other DNA
actttgtgacaggcactggg

SEQ ID NO: 45467 - DNA, 20 bp, synthetic construct
  misc_feature 1..20: note = Description of Artificial Sequence: Synthetic oligonucleotide
  misc_feature 1..20: note = Target: SCN10A; (-) strand; PAM type: YTN; PAM sequence: CTG
  source 1..20: mol_type = other DNA
agtgctgactttgtgacagg

SEQ ID NO: 45468 - DNA, 20 bp, synthetic construct
  misc_feature 1..20: note = Description of Artificial Sequence: Synthetic oligonucleotide
  misc_feature 1..20: note = Target: SCN10A; (-) strand; PAM type: YTN; PAM sequence: CTA
  source 1..20: mol_type = other DNA
gccactgagtgctgactttg

SEQ ID NO: 45469 - DNA, 20 bp, synthetic construct
  misc_feature 1..20: note = Description of Artificial Sequence: Synthetic oligonucleotide
  misc_feature 1..20: note = Target: SCN10A; (-) strand; PAM type: YTN; PAM sequence: TTG
  source 1..20: mol_type = other DNA
acacctagccactgagtgct

SEQ ID NO: 45470 - DNA, 20 bp, synthetic construct
  misc_feature 1..20: note = Description of Artificial Sequence: Synthetic oligonucleotide
  misc_feature 1..20: note = Target: SCN10A; (-) strand; PAM type: YTN; PAM sequence: TTT
  source 1..20: mol_type = other DNA
gacacctagccactgagtgc

SEQ ID NO: 45471 - DNA, 20 bp, synthetic construct
  misc_feature 1..20: note = Description of Artificial Sequence: Synthetic oligonucleotide
  misc_feature 1..20: note = Target: SCN10A; (-) strand; PAM type: YTN; PAM sequence: TTA
  source 1..20: mol_type = other DNA
atttgacacctagccactga

SEQ ID NO: 45472 - DNA, 20 bp, synthetic construct
  misc_feature 1..20: note = Description of Artificial Sequence: Synthetic oligonucleotide
  misc_feature 1..20: note = Target: SCN10A; (-) strand; PAM type: YTN; PAM sequence: TTT
  source 1..20: mol_type = other DNA
aatttgacacctagccactg

SEQ ID NO: 45473 - DNA, 20 bp, synthetic construct
  misc_feature 1..20: note = Description of Artificial Sequence: Synthetic oligonucleotide
  misc_feature 1..20: note = Target: SCN10A; (-) strand; PAM type: YTN; PAM sequence: TTC
  source 1..20: mol_type = other DNA
aagaatttaatttgacacct

SEQ ID NO: 45474 - DNA, 20 bp, synthetic construct
  misc_feature 1..20: note = Description of Artificial Sequence: Synthetic oligonucleotide
  misc_feature 1..20: note = Target: SCN10A; (-) strand; PAM type: YTN; PAM sequence: TTC
  source 1..20: mol_type = other DNA
aattcaagaatttaatttga

SEQ ID NO: 45475 - DNA, 20 bp, synthetic construct
  misc_feature 1..20: note = Description of Artificial Sequence: Synthetic oligonucleotide
  misc_feature 1..20: note = Target: SCN10A; (-) strand; PAM type: YTN; PAM sequence: CTT
  source 1..20: mol_type = other DNA
caattcaagaatttaatttg

SEQ ID NO: 45476 - DNA, 20 bp, synthetic construct
  misc_feature 1..20: note = Description of Artificial Sequence: Synthetic oligonucleotide
  misc_feature 1..20: note = Target: SCN10A; (-) strand; PAM type: YTN; PAM sequence: CTG
  source 1..20: mol_type = other DNA
ccttcaattcaagaatttaa

SEQ ID NO: 45477 - DNA, 20 bp, synthetic construct
  misc_feature 1..20: note = Description of Artificial Sequence: Synthetic oligonucleotide
  misc_feature 1..20: note = Target: SCN10A; (-) strand; PAM type: YTN; PAM sequence: TTA
  source 1..20: mol_type = other DNA
ataacactgccttcaattca

SEQ ID NO: 45478 - DNA, 20 bp, synthetic construct
  misc_feature 1..20: note = Description of Artificial Sequence: Synthetic oligonucleotide
  misc_feature 1..20: note = Target: SCN10A; (-) strand; PAM type: YTN; PAM sequence: TTT
  source 1..20: mol_type = other DNA
aataacactgccttcaattc

SEQ ID NO: 45479 - DNA, 20 bp, synthetic construct
  misc_feature 1..20: note = Description of Artificial Sequence: Synthetic oligonucleotide
  misc_feature 1..20: note = Target: SCN10A; (-) strand; PAM type: YTN; PAM sequence: CTT
  source 1..20: mol_type = other DNA
taataacactgccttcaatt

SEQ ID NO: 45480 - DNA, 20 bp, synthetic construct
  misc_feature 1..20: note = Description of Artificial Sequence: Synthetic oligonucleotide
  misc_feature 1..20: note = Target: SCN10A; (-) strand; PAM type: YTN; PAM sequence: TTA
  source 1..20: mol_type = other DNA
gcatctttaataacactgcc

SEQ ID NO: 45481 - DNA, 20 bp, synthetic construct
  misc_feature 1..20: note = Description of Artificial Sequence: Synthetic oligonucleotide
  misc_feature 1..20: note = Target: SCN10A; (-) strand; PAM type: YTN; PAM sequence: TTT
  source 1..20: mol_type = other DNA
agcatctttaataacactgc

SEQ ID NO: 45482 - DNA, 20 bp, synthetic construct
  misc_feature 1..20: note = Description of Artificial Sequence: Synthetic oligonucleotide
  misc_feature 1..20: note = Target: SCN10A; (-) strand; PAM type: YTN; PAM sequence: CTA
  source 1..20: mol_type = other DNA
taaaagtttagcatctttaa

SEQ ID NO: 45483 - DNA, 20 bp, synthetic construct
  misc_feature 1..20: note = Description of Artificial Sequence: Synthetic oligonucleotide
  misc_feature 1..20: note = Target: SCN10A; (-) strand; PAM type: YTN; PAM sequence: CTA
  source 1..20: mol_type = other DNA
tagggaaagaggcatctata

SEQ ID NO: 45484 - DNA, 20 bp, synthetic construct
  misc_feature 1..20: note = Description of Artificial Sequence: Synthetic oligonucleotide
  misc_feature 1..20: note = Target: SCN10A; (-) strand; PAM type: YTN; PAM sequence: TTG
  source 1..20: mol_type = other DNA
aaggaaacaagctataggga

SEQ ID NO: 45485 - DNA, 20 bp, synthetic construct
  misc_feature 1..20: note = Description of Artificial Sequence: Synthetic oligonucleotide
  misc_feature 1..20: note = Target: SCN10A; (-) strand; PAM type: YTN; PAM sequence: CTT
  source 1..20: mol_type = other DNA
gaaggaaacaagctataggg

SEQ ID NO: 45486 - DNA, 20 bp, synthetic construct
  misc_feature 1..20: note = Description of Artificial Sequence: Synthetic oligonucleotide
  misc_feature 1..20: note = Target: SCN10A; (-) strand; PAM type: YTN; PAM sequence: TTA
  source 1..20: mol_type = other DNA
caaatcttgaaggaaacaag

SEQ ID NO: 45487 - DNA, 20 bp, synthetic construct
  misc_feature 1..20: note = Description of Artificial Sequence: Synthetic oligonucleotide
  misc_feature 1..20: note = Target: SCN10A; (-) strand; PAM type: YTN; PAM sequence: CTT
  source 1..20: mol_type = other DNA
acaaatcttgaaggaaacaa

SEQ ID NO: 45488 - DNA, 20 bp, synthetic construct
  misc_feature 1..20: note = Description of Artificial Sequence: Synthetic oligonucleotide
  misc_feature 1..20: note = Target: SCN10A; (-) strand; PAM type: YTN; PAM sequence: TTC
  source 1..20: mol_type = other DNA
acttacaaatcttgaaggaa

SEQ ID NO: 45489 - DNA, 20 bp, synthetic construct
  misc_feature 1..20: note = Description of Artificial Sequence: Synthetic oligonucleotide
  misc_feature 1..20: note = Target: SCN10A; (-) strand; PAM type: YTN; PAM sequence: TTT
  source 1..20: mol_type = other DNA
cacttacaaatcttgaagga

SEQ ID NO: 45490 - DNA, 20 bp, synthetic construct
  misc_feature 1..20: note = Description of Artificial Sequence: Synthetic oligonucleotide
  misc_feature 1..20: note = Target: SCN10A; (-) strand; PAM type: YTN; PAM sequence: TTA
  source 1..20: mol_type = other DNA
tacaaggtaaaaataaatgt

SEQ ID NO: 45491 - DNA, 20 bp, synthetic construct
  misc_feature 1..20: note = Description of Artificial Sequence: Synthetic oligonucleotide
  misc_feature 1..20: note = Target: SCN10A; (-) strand; PAM type: YTN; PAM sequence: CTT
  source 1..20: mol_type = other DNA
atacaaggtaaaaataaatg

SEQ ID NO: 45492 - DNA, 20 bp, synthetic construct
  misc_feature 1..20: note = Description of Artificial Sequence: Synthetic oligonucleotide
  misc_feature 1..20: note = Target: SCN10A; (-) strand; PAM type: YTN; PAM sequence: TTG
  source 1..20: mol_type = other DNA
tcttatacaaggtaaaaata

SEQ ID NO: 45493 - DNA, 20 bp, synthetic construct
  misc_feature 1..20: note = Description of Artificial Sequence: Synthetic oligonucleotide
  misc_feature 1..20: note = Target: SCN10A; (-) strand; PAM type: YTN; PAM sequence: TTA
  source 1..20: mol_type = other DNA
ggattgtcttatacaaggta

SEQ ID NO: 45494 - DNA, 20 bp, synthetic construct
  misc_feature 1..20: note = Description of Artificial Sequence: Synthetic oligonucleotide
  misc_feature 1..20: note = Target: SCN10A; (-) strand; PAM type: YTN; PAM sequence: TTT
  source 1..20: mol_type = other DNA
aggattgtcttatacaaggt

SEQ ID NO: 45495 - DNA, 20 bp, synthetic construct
  misc_feature 1..20: note = Description of Artificial Sequence: Synthetic oligonucleotide
  misc_feature 1..20: note = Target: SCN10A; (-) strand; PAM type: YTN; PAM sequence: TTA
  source 1..20: mol_type = other DNA
gaggtttaggattgtcttat

SEQ ID NO: 45496 - DNA, 20 bp, synthetic construct
  misc_feature 1..20: note = Description of Artificial Sequence: Synthetic oligonucleotide
  misc_feature 1..20: note = Target: SCN10A; (-) strand; PAM type: YTN; PAM sequence: CTG
  source 1..20: mol_type = other DNA
gaagattagaggtttaggat

SEQ ID NO: 45497 - DNA, 20 bp, synthetic construct
  misc_feature 1..20: note = Description of Artificial Sequence: Synthetic oligonucleotide
  misc_feature 1..20: note = Target: SCN10A; (-) strand; PAM type: YTN; PAM sequence: CTG
  source 1..20: mol_type = other DNA
agctggaagattagaggttt

SEQ ID NO: 45498 - DNA, 20 bp, synthetic construct
  misc_feature 1..20: note = Description of Artificial Sequence: Synthetic oligonucleotide
  misc_feature 1..20: note = Target: SCN10A; (-) strand; PAM type: YTN; PAM sequence: CTC
  source 1..20: mol_type = other DNA
acagagactgagctggaaga

SEQ ID NO: 45499 - DNA, 20 bp, synthetic construct
  misc_feature 1..20: note = Description of Artificial Sequence: Synthetic oligonucleotide
  misc_feature 1..20: note = Target: SCN10A; (-) strand; PAM type: YTN; PAM sequence: CTA
  source 1..20: mol_type = other DNA
taggtgagtagtgaagtgac

SEQ ID NO: 45500 - DNA, 20 bp, synthetic construct
  misc_feature 1..20: note = Description of Artificial Sequence: Synthetic oligonucleotide
  misc_feature 1..20: note = Target: SCN10A; (-) strand; PAM type: YTN; PAM sequence: CTC
  source 1..20: mol_type = other DNA
tataggtgagtagtgaagtg

SEQ ID NO: 45501 - DNA, 20 bp, synthetic construct
  misc_feature 1..20: note = Description of Artificial Sequence: Synthetic oligonucleotide
  misc_feature 1..20: note = Target: SCN10A; (-) strand; PAM type: YTN; PAM sequence: CTC
  source 1..20: mol_type = other DNA
tctataggtgagtagtgaag

SEQ ID NO: 45502 - DNA, 20 bp, synthetic construct
  misc_feature 1..20: note = Description of Artificial Sequence: Synthetic oligonucleotide
  misc_feature 1..20: note = Target: SCN10A; (-) strand; PAM type: YTN; PAM sequence: CTA
  source 1..20: mol_type = other DNA
gggagaggctctctataggt

SEQ ID NO: 45503 - DNA, 20 bp, synthetic construct
  misc_feature 1..20: note = Description of Artificial Sequence: Synthetic oligonucleotide
  misc_feature 1..20: note = Target: SCN10A; (-) strand; PAM type: YTN; PAM sequence: CTG
  source 1..20: mol_type = other DNA
gggctagggagaggctctct

SEQ ID NO: 45504 - DNA, 20 bp, synthetic construct
  misc_feature 1..20: note = Description of Artificial Sequence: Synthetic oligonucleotide
  misc_feature 1..20: note = Target: SCN10A; (-) strand; PAM type: YTN; PAM sequence: CTA
  source 1..20: mol_type = other DNA
ggcaaaagtagcctggggct

SEQ ID NO: 45505 - DNA, 20 bp, synthetic construct
  misc_feature 1..20: note = Description of Artificial Sequence: Synthetic oligonucleotide
  misc_feature 1..20: note = Target: SCN10A; (-) strand; PAM type: YTN; PAM sequence: CTC
  source 1..20: mol_type = other DNA
taggcaaaagtagcctgggg

SEQ ID NO: 45506 - DNA, 20 bp, synthetic construct
  misc_feature 1..20: note = Description of Artificial Sequence: Synthetic oligonucleotide
  misc_feature 1..20: note = Target: SCN10A; (-) strand; PAM type: YTN; PAM sequence: TTC
  source 1..20: mol_type = other DNA
tctaggcaaaagtagcctgg

SEQ ID NO: 45507 - DNA, 20 bp, synthetic construct
  misc_feature 1..20: note = Description of Artificial Sequence: Synthetic oligonucleotide
  misc_feature 1..20: note = Target: SCN10A; (-) strand; PAM type: YTN; PAM sequence: TTT
  source 1..20: mol_type = other DNA
ctctaggcaaaagtagcctg

SEQ ID NO: 45508 - DNA, 20 bp, synthetic construct
  misc_feature 1..20: note = Description of Artificial Sequence: Synthetic oligonucleotide
  misc_feature 1..20: note = Target: SCN10A; (-) strand; PAM type: YTN; PAM sequence: TTT
  source 1..20: mol_type = other DNA
tctctaggcaaaagtagcct

SEQ ID NO: 45509 - DNA, 20 bp, synthetic construct
  misc_feature 1..20: note = Description of Artificial Sequence: Synthetic oligonucleotide
  misc_feature 1..20: note = Target: SCN10A; (-) strand; PAM type: YTN; PAM sequence: TTG
  source 1..20: mol_type = other DNA
tccacatcattttctctagg

SEQ ID NO: 45510 - DNA, 20 bp, synthetic construct
  misc_feature 1..20: note = Description of Artificial Sequence: Synthetic oligonucleotide
  misc_feature 1..20: note = Target: SCN10A; (-) strand; PAM type: YTN; PAM sequence: TTT
  source 1..20: mol_type = other DNA
gtccacatcattttctctag

SEQ ID NO: 45511 - DNA, 20 bp, synthetic construct
  misc_feature 1..20: note = Description of Artificial Sequence: Synthetic oligonucleotide
  misc_feature 1..20: note = Target: SCN10A; (-) strand; PAM type: YTN; PAM sequence: TTT
  source 1..20: mol_type = other DNA
tgtccacatcattttctcta

SEQ ID NO: 45512 - DNA, 20 bp, synthetic construct
  misc_feature 1..20: note = Description of Artificial Sequence: Synthetic oligonucleotide
  misc_feature 1..20: note = Target: SCN10A; (-) strand; PAM type: YTN; PAM sequence: CTT
  source 1..20: mol_type = other DNA
ttgtccacatcattttctct

SEQ ID NO: 45513 - DNA, 20 bp, synthetic construct
  misc_feature 1..20: note = Description of Artificial Sequence: Synthetic oligonucleotide
  misc_feature 1..20: note = Target: SCN10A; (-) strand; PAM type: YTN; PAM sequence: TTC
  source 1..20: mol_type = other DNA
ttttgtccacatcattttct

SEQ ID NO: 45514 - DNA, 20 bp, synthetic construct
  misc_feature 1..20: note = Description of Artificial Sequence: Synthetic oligonucleotide
  misc_feature 1..20: note = Target: SCN10A; (-) strand; PAM type: YTN; PAM sequence: TTT
  source 1..20: mol_type = other DNA
cttttgtccacatcattttc

SEQ ID NO: 45515 - DNA, 20 bp, synthetic construct
  misc_feature 1..20: note = Description of Artificial Sequence: Synthetic oligonucleotide
  misc_feature 1..20: note = Target: SCN10A; (-) strand; PAM type: YTN; PAM sequence: CTT
  source 1..20: mol_type = other DNA
tcttttgtccacatcatttt

SEQ ID NO: 45516 - DNA, 20 bp, synthetic construct
  misc_feature 1..20: note = Description of Artificial Sequence: Synthetic oligonucleotide
  misc_feature 1..20: note = Target: SCN10A; (-) strand; PAM type: YTN; PAM sequence: CTC
  source 1..20: mol_type = other DNA
ccccactttcttttgtccac

SEQ ID NO: 45517 - DNA, 20 bp, synthetic construct
  misc_feature 1..20: note = Description of Artificial Sequence: Synthetic oligonucleotide
  misc_feature 1..20: note = Target: SCN10A; (-) strand; PAM type: YTN; PAM sequence: TTC
  source 1..20: mol_type = other DNA
tcccccactttcttttgtcc

SEQ ID NO: 45518 - DNA, 20 bp, synthetic construct
  misc_feature 1..20: note = Description of Artificial Sequence: Synthetic oligonucleotide
  misc_feature 1..20: note = Target: SCN10A; (-) strand; PAM type: YTN; PAM sequence: TTG
  source 1..20: mol_type = other DNA
tgattctcccccactttctt

SEQ ID NO: 45519 - DNA, 20 bp, synthetic construct
  misc_feature 1..20: note = Description of Artificial Sequence: Synthetic oligonucleotide
  misc_feature 1..20: note = Target: SCN10A; (-) strand; PAM type: YTN; PAM sequence: CTT
  source 1..20: mol_type = other DNA
gtgattctcccccactttct

SEQ ID NO: 45520 - DNA, 20 bp, synthetic construct
  misc_feature 1..20: note = Description of Artificial Sequence: Synthetic oligonucleotide
  misc_feature 1..20: note = Target: SCN10A; (-) strand; PAM type: YTN; PAM sequence: TTC
  source 1..20: mol_type = other DNA
ccttgtgattctcccccact

SEQ ID NO: 45521 - DNA, 20 bp, synthetic construct
  misc_feature 1..20: note = Description of Artificial Sequence: Synthetic oligonucleotide
  misc_feature 1..20: note = Target: SCN10A; (-) strand; PAM type: YTN; PAM sequence: TTT
  source 1..20: mol_type = other DNA
cccttgtgattctcccccac

SEQ ID NO: 45522 - DNA, 20 bp, synthetic construct
  misc_feature 1..20: note = Description of Artificial Sequence: Synthetic oligonucleotide
  misc_feature 1..20: note = Target: SCN10A; (-) strand; PAM type: YTN; PAM sequence: TTT
  source 1..20: mol_type = other DNA
tcccttgtgattctccccca

SEQ ID NO: 45523 - DNA, 20 bp, synthetic construct
  misc_feature 1..20: note = Description of Artificial Sequence: Synthetic oligonucleotide
  misc_feature 1..20: note = Target: SCN10A; (-) strand; PAM type: YTN; PAM sequence: CTC
  source 1..20: mol_type = other DNA
acagatgaagaagttttccc

SEQ ID NO: 45524 - DNA, 20 bp, synthetic construct
  misc_feature 1..20: note = Description of Artificial Sequence: Synthetic oligonucleotide
  misc_feature 1..20: note = Target: SCN10A; (-) strand; PAM type: YTN; PAM sequence: TTG
  source 1..20: mol_type = other DNA
gaggtgctcacagatgaaga

SEQ ID NO: 45525 - DNA, 20 bp, synthetic construct
  misc_feature 1..20: note = Description of Artificial Sequence: Synthetic oligonucleotide
  misc_feature 1..20: note = Target: SCN10A; (-) strand; PAM type: YTN; PAM sequence: TTC
  source 1..20: mol_type = other DNA
agagccagcaaataagagtt

SEQ ID NO: 45526 - DNA, 20 bp, synthetic construct
  misc_feature 1..20: note = Description of Artificial Sequence: Synthetic oligonucleotide
  misc_feature 1..20: note = Target: SCN10A; (-) strand; PAM type: YTN; PAM sequence: TTT
  source 1..20: mol_type = other DNA
cagagccagcaaataagagt

SEQ ID NO: 45527 - DNA, 20 bp, synthetic construct
  misc_feature 1..20: note = Description of Artificial Sequence: Synthetic oligonucleotide
  misc_feature 1..20: note = Target: SCN10A; (-) strand; PAM type: YTN; PAM sequence: CTT
  source 1..20: mol_type = other DNA
tcagagccagcaaataagag

SEQ ID NO: 45528 - DNA, 20 bp, synthetic construct
  misc_feature 1..20: note = Description of Artificial Sequence: Synthetic oligonucleotide
  misc_feature 1..20: note = Target: SCN10A; (-) strand; PAM type: YTN; PAM sequence: CTG
  source 1..20: mol_type = other DNA
agacaaagtaagtgcccagg

SEQ ID NO: 45529 - DNA, 20 bp, synthetic construct
  misc_feature 1..20: note = Description of Artificial Sequence: Synthetic oligonucleotide
  misc_feature 1..20: note = Target: SCN10A; (-) strand; PAM type: YTN; PAM sequence: CTG
  source 1..20: mol_type = other DNA
cctgagacaaagtaagtgcc

SEQ ID NO: 45530 - DNA, 20 bp, synthetic construct
  misc_feature 1..20: note = Description of Artificial Sequence: Synthetic oligonucleotide
  misc_feature 1..20: note = Target: SCN10A; (-) strand; PAM type: YTN; PAM sequence: TTA
  source 1..20: mol_type = other DNA
ggtcctgcctgagacaaagt

SEQ ID NO: 45531 - DNA, 20 bp, synthetic construct
  misc_feature 1..20: note = Description of Artificial Sequence: Synthetic oligonucleotide
  misc_feature 1..20: note = Target: SCN10A; (-) strand; PAM type: YTN; PAM sequence: TTT
  source 1..20: mol_type = other DNA
aggtcctgcctgagacaaag

SEQ ID NO: 45532 - DNA, 20 bp, synthetic construct
  misc_feature 1..20: note = Description of Artificial Sequence: Synthetic oligonucleotide
  misc_feature 1..20: note = Target: SCN10A; (-) strand; PAM type: YTN; PAM sequence: TTG
  source 1..20: mol_type = other DNA
tcaaatgtttaggtcctgcc

SEQ ID NO: 45533 - DNA, 20 bp, synthetic construct
  misc_feature 1..20: note = Description of Artificial Sequence: Synthetic oligonucleotide
  misc_feature 1..20: note = Target: SCN10A; (-) strand; PAM type: YTN; PAM sequence: CTT
  source 1..20: mol_type = other DNA
gtcaaatgtttaggtcctgc

SEQ ID NO: 45534 - DNA, 20 bp, synthetic construct
  misc_feature 1..20: note = Description of Artificial Sequence: Synthetic oligonucleotide
  misc_feature 1..20: note = Target: SCN10A; (-) strand; PAM type: YTN; PAM sequence: CTG
  source 1..20: mol_type = other DNA
cttgtcaaatgtttaggtcc

SEQ ID NO: 45535 - DNA, 20 bp, synthetic construct
  misc_feature 1..20: note = Description of Artificial Sequence: Synthetic oligonucleotide
  misc_feature 1..20: note = Target: SCN10A; (-) strand; PAM type: YTN; PAM sequence: TTA
  source 1..20: mol_type = other DNA
aatgagatgctgcttgtcaa

SEQ ID NO: 45536 - DNA, 20 bp, synthetic construct
  misc_feature 1..20: note = Description of Artificial Sequence: Synthetic oligonucleotide
  misc_feature 1..20: note = Target: SCN10A; (-) strand; PAM type: YTN; PAM sequence: CTT
  source 1..20: mol_type = other DNA
aaatgagatgctgcttgtca

SEQ ID NO: 45537 - DNA, 20 bp, synthetic construct
  misc_feature 1..20: note = Description of Artificial Sequence: Synthetic oligonucleotide
  misc_feature 1..20: note = Target: SCN10A; (-) strand; PAM type: YTN; PAM sequence: TTG
  source 1..20: mol_type = other DNA
aagcttaaatgagatgctgc

SEQ ID NO: 45538 - DNA, 20 bp, synthetic construct
  misc_feature 1..20: note = Description of Artificial Sequence: Synthetic oligonucleotide
  misc_feature 1..20: note = Target: SCN10A; (-) strand; PAM type: YTN; PAM sequence: TTT
  source 1..20: mol_type = other DNA
gaagcttaaatgagatgctg

SEQ ID NO: 45539 - DNA, 20 bp, synthetic construct
  misc_feature 1..20: note = Description of Artificial Sequence: Synthetic oligonucleotide
  misc_feature 1..20: note = Target: SCN10A; (-) strand; PAM type: YTN; PAM sequence: TTT
  source 1..20: mol_type = other DNA
tgaagcttaaatgagatgct

SEQ ID NO: 45540 - DNA, 20 bp, synthetic construct
  misc_feature 1..20: note = Description of Artificial Sequence: Synthetic oligonucleotide
  misc_feature 1..20: note = Target: SCN10A; (-) strand; PAM type: YTN; PAM sequence: TTA
  source 1..20: mol_type = other DNA
ttttgaagcttaaatgagat

SEQ ID NO: 45541 - DNA, 20 bp, synthetic construct
  misc_feature 1..20: note = Description of Artificial Sequence: Synthetic oligonucleotide
  misc_feature 1..20: note = Target: SCN10A; (-) strand; PAM type: YTN; PAM sequence: TTG
  source 1..20: mol_type = other DNA
gtaggattattttgaagctt

SEQ ID NO: 45542 - DNA, 20 bp, synthetic construct
  misc_feature 1..20: note = Description of Artificial Sequence: Synthetic oligonucleotide
  misc_feature 1..20: note = Target: SCN10A; (-) strand; PAM type: YTN; PAM sequence: CTT
  source 1..20: mol_type = other DNA
ggtaggattattttgaagct

SEQ ID NO: 45543 - DNA, 20 bp, synthetic construct
  misc_feature 1..20: note = Description of Artificial Sequence: Synthetic oligonucleotide
  misc_feature 1..20: note = Target: SCN10A; (-) strand; PAM type: YTN; PAM sequence: CTA
  source 1..20: mol_type = other DNA
cttggtaggattattttgaa

SEQ ID NO: 45544 - DNA, 20 bp, synthetic construct
  misc_feature 1..20: note = Description of Artificial Sequence: Synthetic oligonucleotide
  misc_feature 1..20: note = Target: SCN10A; (-) strand; PAM type: YTN; PAM sequence: CTG
  source 1..20: mol_type = other DNA
aatggtaatgcctacttggt

SEQ ID NO: 45545 - DNA, 20 bp, synthetic construct
  misc_feature 1..20: note = Description of Artificial Sequence: Synthetic oligonucleotide
  misc_feature 1..20: note = Target: SCN10A; (-) strand; PAM type: YTN; PAM sequence: CTA
  source 1..20: mol_type = other DNA
tgaaactgaatggtaatgcc

SEQ ID NO: 45546 - DNA, 20 bp, synthetic construct
  misc_feature 1..20: note = Description of Artificial Sequence: Synthetic oligonucleotide
  misc_feature 1..20: note = Target: SCN10A; (-) strand; PAM type: YTN; PAM sequence: TTC
  source 1..20: mol_type = other DNA
atctatgaaactgaatggta

SEQ ID NO: 45547 - DNA, 20 bp, synthetic construct
  misc_feature 1..20: note = Description of Artificial Sequence: Synthetic oligonucleotide
  misc_feature 1..20: note = Target: SCN10A; (-) strand; PAM type: YTN; PAM sequence: TTA
  source 1..20: mol_type = other DNA
ttcatctatgaaactgaatg

SEQ ID NO: 45548 - DNA, 20 bp, synthetic construct
  misc_feature 1..20: note = Description of Artificial Sequence: Synthetic oligonucleotide
  misc_feature 1..20: note = Target: SCN10A; (-) strand; PAM type: YTN; PAM sequence: TTT
  source 1..20: mol_type = other DNA
attcatctatgaaactgaat

SEQ ID NO: 45549 - DNA, 20 bp, synthetic construct
  misc_feature 1..20: note = Description of Artificial Sequence: Synthetic oligonucleotide
  misc_feature 1..20: note = Target: SCN10A; (-) strand; PAM type: YTN; PAM sequence: CTG
  source 1..20: mol_type = other DNA
agccgccatttattcatcta

SEQ ID NO: 45550 - DNA, 20 bp, synthetic construct
  misc_feature 1..20: note = Description of Artificial Sequence: Synthetic oligonucleotide
  misc_feature 1..20: note = Target: SCN10A; (-) strand; PAM type: YTN; PAM sequence: CTC
  source 1..20: mol_type = other DNA
tgagccgccatttattcatc

SEQ ID NO: 45551 - DNA, 20 bp, synthetic construct
  misc_feature 1..20: note = Description of Artificial Sequence: Synthetic oligonucleotide
  misc_feature 1..20: note = Target: SCN10A; (-) strand; PAM type: YTN; PAM sequence: CTC
  source 1..20: mol_type = other DNA
tctgagccgccatttattca

SEQ ID NO: 45552 - DNA, 20 bp, synthetic construct
  misc_feature 1..20: note = Description of Artificial Sequence: Synthetic oligonucleotide
  misc_feature 1..20: note = Target: SCN10A; (-) strand; PAM type: YTN; PAM sequence: TTC
  source 1..20: mol_type = other DNA
ccaaacctctctgagccgcc

SEQ ID NO: 45553 - DNA, 20 bp, synthetic construct
  misc_feature 1..20: note = Description of Artificial Sequence: Synthetic oligonucleotide
  misc_feature 1..20: note = Target: SCN10A; (-) strand; PAM type: YTN; PAM sequence: CTA
  source 1..20: mol_type = other DNA
agatcagttcccaaacctct

SEQ ID NO: 45554 - DNA, 20 bp, synthetic construct
  misc_feature 1..20: note = Description of Artificial Sequence: Synthetic oligonucleotide
  misc_feature 1..20: note = Target: SCN10A; (-) strand; PAM type: YTN; PAM sequence: CTG
  source 1..20: mol_type = other DNA
tgggacctaagatcagttcc

SEQ ID NO: 45555 - DNA, 20 bp, synthetic construct
  misc_feature 1..20: note = Description of Artificial Sequence: Synthetic oligonucleotide
  misc_feature 1..20: note = Target: SCN10A; (-) strand; PAM type: YTN; PAM sequence: CTC
  source 1..20: mol_type = other DNA
cacaagctgtgggacctaag

SEQ ID NO: 45556 - DNA, 20 bp, synthetic construct
  misc_feature 1..20: note = Description of Artificial Sequence: Synthetic oligonucleotide
  misc_feature 1..20: note = Target: SCN10A; (-) strand; PAM type: YTN; PAM sequence: CTA
  source 1..20: mol_type = other DNA
ggtatagaaagaaagagtga

SEQ ID NO: 45557 - DNA, 20 bp, synthetic construct
  misc_feature 1..20: note = Description of Artificial Sequence: Synthetic oligonucleotide
  misc_feature 1..20: note = Target: SCN10A; (-) strand; PAM type: YTN; PAM sequence: TTC
  source 1..20: mol_type = other DNA
taggtatagaaagaaagagt

SEQ ID NO: 45558 - DNA, 20 bp, synthetic construct
  misc_feature 1..20: note = Description of Artificial Sequence: Synthetic oligonucleotide
  misc_feature 1..20: note = Target: SCN10A; (-) strand; PAM type: YTN; PAM sequence: CTC
  source 1..20: mol_type = other DNA
cagggtggttctaggtatag

SEQ ID NO: 45559 - DNA, 20 bp, synthetic construct
  misc_feature 1..20: note = Description of Artificial Sequence: Synthetic oligonucleotide
  misc_feature 1..20: note = Target: SCN10A; (-) strand; PAM type: YTN; PAM sequence: CTC
  source 1..20: mol_type = other DNA
actccagggtggttctaggt

SEQ ID NO: 45560 - DNA, 20 bp, synthetic construct
  misc_feature 1..20: note = Description of Artificial Sequence: Synthetic oligonucleotide
  misc_feature 1..20: note = Target: SCN10A; (-) strand; PAM type: YTN; PAM sequence: TTG
  source 1..20: mol_type = other DNA
ccacaatctcactccagggt

SEQ ID NO: 45561 - DNA, 20 bp, synthetic construct
  misc_feature 1..20: note = Description of Artificial Sequence: Synthetic oligonucleotide
  misc_feature 1..20: note = Target: SCN10A; (-) strand; PAM type: YTN; PAM sequence: TTC
  source 1..20: mol_type = other DNA
accatataccattgccacaa

SEQ ID NO: 45562 - DNA, 20 bp, synthetic construct
  misc_feature 1..20: note = Description of Artificial Sequence: Synthetic oligonucleotide
  misc_feature 1..20: note = Target: SCN10A; (-) strand; PAM type: YTN; PAM sequence: TTT
  source 1..20: mol_type = other DNA
caccatataccattgccaca

SEQ ID NO: 45563 - DNA, 20 bp, synthetic construct
  misc_feature 1..20: note = Description of Artificial Sequence: Synthetic oligonucleotide
  misc_feature 1..20: note = Target: SCN10A; (-) strand; PAM type: YTN; PAM sequence: CTT
  source 1..20: mol_type = other DNA
tcaccatataccattgccac

SEQ ID NO: 45564 - DNA, 20 bp, synthetic construct
  misc_feature 1..20: note = Description of Artificial Sequence: Synthetic oligonucleotide
  misc_feature 1..20: note = Target: SCN10A; (-) strand; PAM type: YTN; PAM sequence: TTC
  source 1..20: mol_type = other DNA
aactttcaccatataccatt

SEQ ID NO: 45565 - DNA, 20 bp, synthetic construct
  misc_feature 1..20: note = Description of Artificial Sequence: Synthetic oligonucleotide
  misc_feature 1..20: note = Target: SCN10A; (-) strand; PAM type: YTN; PAM sequence: TTT
  source 1..20: mol_type = other DNA
caactttcaccatataccat

SEQ ID NO: 45566 - DNA, 20 bp, synthetic construct
  misc_feature 1..20: note = Description of Artificial Sequence: Synthetic oligonucleotide
  misc_feature 1..20: note = Target: SCN10A; (-) strand; PAM type: YTN; PAM sequence: CTA
  source 1..20: mol_type = other DNA
atccgcacaatttcaacttt

SEQ ID NO: 45567 - DNA, 20 bp, synthetic construct
  misc_feature 1..20: note = Description of Artificial Sequence: Synthetic oligonucleotide
  misc_feature 1..20: note = Target: SCN10A; (-) strand; PAM type: YTN; PAM sequence: CTC
  source 1..20: mol_type = other DNA
cggctaatccgcacaatttc

SEQ ID NO: 45568 - DNA, 20 bp, synthetic construct
  misc_feature 1..20: note = Description of Artificial Sequence: Synthetic oligonucleotide
  misc_feature 1..20: note = Target: SCN10A; (-) strand; PAM type: YTN; PAM sequence: CTC
  source 1..20: mol_type = other DNA
ccaacctccggctaatccgc

SEQ ID NO: 45569 - DNA, 20 bp, synthetic construct
  misc_feature 1..20: note = Description of Artificial Sequence: Synthetic oligonucleotide
  misc_feature 1..20: note = Target: SCN10A; (-) strand; PAM type: YTN; PAM sequence: TTA
  source 1..20: mol_type = other DNA
aagtccctcccaacctccgg

SEQ ID NO: 45570 - DNA, 20 bp, synthetic construct
  misc_feature 1..20: note = Description of Artificial Sequence: Synthetic oligonucleotide
  misc_feature 1..20: note = Target: SCN10A; (-) strand; PAM type: YTN; PAM sequence: TTT
  source 1..20: mol_type = other DNA
aaagtccctcccaacctccg

SEQ ID NO: 45571 - DNA, 20 bp, synthetic construct
  misc_feature 1..20: note = Description of Artificial Sequence: Synthetic oligonucleotide
  misc_feature 1..20: note = Target: SCN10A; (-) strand; PAM type: YTN; PAM sequence: TTT
  source 1..20: mol_type = other DNA
taaagtccctcccaacctcc

SEQ ID NO: 45572 - DNA, 20 bp, synthetic construct
  misc_feature 1..20: note = Description of Artificial Sequence: Synthetic oligonucleotide
  misc_feature 1..20: note = Target: SCN10A; (-) strand; PAM type: YTN; PAM sequence: TTT
  source 1..20: mol_type = other DNA
ttaaagtccctcccaacctc

SEQ ID NO: 45573 - DNA, 20 bp, synthetic construct
  misc_feature 1..20: note = Description of Artificial Sequence: Synthetic oligonucleotide
  misc_feature 1..20: note = Target: SCN10A; (-) strand; PAM type: YTN; PAM sequence: CTG
  source 1..20: mol_type = other DNA
ggaatttttaaagtccctcc

SEQ ID NO: 45574 - DNA, 20 bp, synthetic construct
  misc_feature 1..20: note = Description of Artificial Sequence: Synthetic oligonucleotide
  misc_feature 1..20: note = Target: SCN10A; (-) strand; PAM type: YTN; PAM sequence: TTA
  source 1..20: mol_type = other DNA
tcctgggaatttttaaagtc

SEQ ID NO: 45575 - DNA, 20 bp, synthetic construct
  misc_feature 1..20: note = Description of Artificial Sequence: Synthetic oligonucleotide
  misc_feature 1..20: note = Target: SCN10A; (-) strand; PAM type: YTN; PAM sequence: CTT
  source 1..20: mol_type = other DNA
atcctgggaatttttaaagt

SEQ ID NO: 45576 - DNA, 20 bp, synthetic construct
  misc_feature 1..20: note = Description of Artificial Sequence: Synthetic oligonucleotide
  misc_feature 1..20: note = Target: SCN10A; (-) strand; PAM type: YTN; PAM sequence: TTC
  source 1..20: mol_type = other DNA
ttatcctgggaatttttaaa

SEQ ID NO: 45577 - DNA, 20 bp, synthetic construct
  misc_feature 1..20: note = Description of Artificial Sequence: Synthetic oligonucleotide
  misc_feature 1..20: note = Target: SCN10A; (-) strand; PAM type: YTN; PAM sequence: TTT
  source 1..20: mol_type = other DNA
cttatcctgggaatttttaa

SEQ ID NO: 45578 - DNA, 20 bp, synthetic construct
  misc_feature 1..20: note = Description of Artificial Sequence: Synthetic oligonucleotide
  misc_feature 1..20: note = Target: SCN10A; (-) strand; PAM type: YTN; PAM sequence: CTC
  source 1..20: mol_type = other DNA
atttcttatcctgggaattt

SEQ ID NO: 45579 - DNA, 20 bp, synthetic construct
  misc_feature 1..20: note = Description of Artificial Sequence: Synthetic oligonucleotide
  misc_feature 1..20: note = Target: SCN10A; (-) strand; PAM type: YTN; PAM sequence: CTC
  source 1..20: mol_type = other DNA
aatcacataacctcatttct

SEQ ID NO: 45580 - DNA, 20 bp, synthetic construct
  misc_feature 1..20: note = Description of Artificial Sequence: Synthetic oligonucleotide
  misc_feature 1..20: note = Target: SCN10A; (-) strand; PAM type: YTN; PAM sequence: CTG
  source 1..20: mol_type = other DNA
cactcaatcacataacctca

SEQ ID NO: 45581 - DNA, 20 bp, synthetic construct
  misc_feature 1..20: note = Description of Artificial Sequence: Synthetic oligonucleotide
  misc_feature 1..20: note = Target: SCN10A; (-) strand; PAM type: YTN; PAM sequence: TTC
  source 1..20: mol_type = other DNA
cagactgcactcaatcacat

SEQ ID NO: 45582 - DNA, 20 bp, synthetic construct
  misc_feature 1..20: note = Description of Artificial Sequence: Synthetic oligonucleotide
  misc_feature 1..20: note = Target: SCN10A; (-) strand; PAM type: YTN; PAM sequence: CTG
  source 1..20: mol_type = other DNA
gagggtggcggtgaaggtgg

SEQ ID NO: 45583 - DNA, 20 bp, synthetic construct
  misc_feature 1..20: note = Description of Artificial Sequence: Synthetic oligonucleotide
  misc_feature 1..20: note = Target: SCN10A; (-) strand; PAM type: YTN; PAM sequence: CTG
  source 1..20: mol_type = other DNA
gtagaggctggagggtggcg

SEQ ID NO: 45584 - DNA, 20 bp, synthetic construct
  misc_feature 1..20: note = Description of Artificial Sequence: Synthetic oligonucleotide
  misc_feature 1..20: note = Target: SCN10A; (-) strand; PAM type: YTN; PAM sequence: CTG
  source 1..20: mol_type = other DNA
agcagtgggctggtagaggc

SEQ ID NO: 45585 - DNA, 20 bp, synthetic construct
  misc_feature 1..20: note = Description of Artificial Sequence: Synthetic oligonucleotide
  misc_feature 1..20: note = Target: SCN10A; (-) strand; PAM type: YTN; PAM sequence: TTG
  source 1..20: mol_type = other DNA
gacagccagccagacactga

SEQ ID NO: 45586 - DNA, 20 bp, synthetic construct
  misc_feature 1..20: note = Description of Artificial Sequence: Synthetic oligonucleotide
  misc_feature 1..20: note = Target: SCN10A; (-) strand; PAM type: YTN; PAM sequence: CTG
  source 1..20: mol_type = other DNA
gagaggttggacagccagcc

SEQ ID NO: 45587 - DNA, 20 bp, synthetic construct
  misc_feature 1..20: note = Description of Artificial Sequence: Synthetic oligonucleotide
  misc_feature 1..20: note = Target: SCN10A; (-) strand; PAM type: YTN; PAM sequence: TTC
  source 1..20: mol_type = other DNA
ctggagaggttggacagcca

SEQ ID NO: 45588 - DNA, 20 bp, synthetic construct
  misc_feature 1..20: note = Description of Artificial Sequence: Synthetic oligonucleotide
  misc_feature 1..20: note = Target: SCN10A; (-) strand; PAM type: YTN; PAM sequence: CTT
  source 1..20: mol_type = other DNA
cctggagaggttggacagcc

SEQ ID NO: 45589 - DNA, 20 bp, synthetic construct
  misc_feature 1..20: note = Description of Artificial Sequence: Synthetic oligonucleotide
  misc_feature 1..20: note = Target: SCN10A; (-) strand; PAM type: YTN; PAM sequence: CTG
  source 1..20: mol_type = other DNA
aggtaggtatgtcagcttcc

SEQ ID NO: 45590 - DNA, 20 bp, synthetic construct
  misc_feature 1..20: note = Description of Artificial Sequence: Synthetic oligonucleotide
  misc_feature 1..20: note = Target: SCN10A; (-) strand; PAM type: YTN; PAM sequence: CTG
  source 1..20: mol_type = other DNA
ctgaggtaggtatgtcagct

SEQ ID NO: 45591 - DNA, 20 bp, synthetic construct
  misc_feature 1..20: note = Description of Artificial Sequence: Synthetic oligonucleotide
  misc_feature 1..20: note = Target: SCN10A; (-) strand; PAM type: YTN; PAM sequence: CTC
  source 1..20: mol_type = other DNA
aggtccctgctgaggtaggt

SEQ ID NO: 45592 - DNA, 20 bp, synthetic construct
  misc_feature 1..20: note = Description of Artificial Sequence: Synthetic oligonucleotide
  misc_feature 1..20: note = Target: SCN10A; (-) strand; PAM type: YTN; PAM sequence: TTC
  source 1..20: mol_type = other DNA
ctcaggtccctgctgaggta

SEQ ID NO: 45593 - DNA, 20 bp, synthetic construct
  misc_feature 1..20: note = Description of Artificial Sequence: Synthetic oligonucleotide
  misc_feature 1..20: note = Target: SCN10A; (-) strand; PAM type: YTN; PAM sequence: CTG
  source 1..20: mol_type = other DNA
ttcctcaggtccctgctgag

SEQ ID NO: 45594 - DNA, 20 bp, synthetic construct
  misc_feature 1..20: note = Description of Artificial Sequence: Synthetic oligonucleotide
  misc_feature 1..20: note = Target: SCN10A; (-) strand; PAM type: YTN; PAM sequence: CTG
  source 1..20: mol_type = other DNA
ggtgagacgtggaaagatga

SEQ ID NO: 45595 - DNA, 20 bp, synthetic construct
  misc_feature 1..20: note = Description of Artificial Sequence: Synthetic oligonucleotide
  misc_feature 1..20: note = Target: SCN10A; (-) strand; PAM type: YTN; PAM sequence: CTC
  source 1..20: mol_type = other DNA
catccctgggtgagacgtgg

SEQ ID NO: 45596 - DNA, 20 bp, synthetic construct
  misc_feature 1..20: note = Description of Artificial Sequence: Synthetic oligonucleotide
  misc_feature 1..20: note = Target: SCN10A; (-) strand; PAM type: YTN; PAM sequence: CTG
  source 1..20: mol_type = other DNA
gctccatccctgggtgagac

SEQ ID NO: 45597 - DNA, 20 bp, synthetic construct
  misc_feature 1..20: note = Description of Artificial Sequence: Synthetic oligonucleotide
  misc_feature 1..20: note = Target: SCN10A; (-) strand; PAM type: YTN; PAM sequence: CTG
  source 1..20: mol_type = other DNA
aggacctggctccatccctg

SEQ ID NO: 45598 - DNA, 20 bp, synthetic construct
  misc_feature 1..20: note = Description of Artificial Sequence: Synthetic oligonucleotide
  misc_feature 1..20: note = Target: SCN10A; (-) strand; PAM type: YTN; PAM sequence: TTC
  source 1..20: mol_type = other DNA
tgaggacctggctccatccc

SEQ ID NO: 45599 - DNA, 20 bp, synthetic construct
  misc_feature 1..20: note = Description of Artificial Sequence: Synthetic oligonucleotide
  misc_feature 1..20: note = Target: SCN10A; (-) strand; PAM type: YTN; PAM sequence: CTT
  source 1..20: mol_type = other DNA
ctgaggacctggctccatcc

SEQ ID NO: 45600 - DNA, 20 bp, synthetic construct
  misc_feature 1..20: note = Description of Artificial Sequence: Synthetic oligonucleotide
  misc_feature 1..20: note = Target: SCN10A; (-) strand; PAM type: YTN; PAM sequence: CTG
  source 1..20: mol_type = other DNA
gaacatcttctgaggacctg

SEQ ID NO: 45601 - DNA, 20 bp, synthetic construct
  misc_feature 1..20: note = Description of Artificial Sequence: Synthetic oligonucleotide
  misc_feature 1..20: note = Target: SCN10A; (-) strand; PAM type: YTN; PAM sequence: CTG
  source 1..20: mol_type = other DNA
acacccaggagcccaggcac

SEQ ID NO: 45602 - DNA, 20 bp, synthetic construct
  misc_feature 1..20: note = Description of Artificial Sequence: Synthetic oligonucleotide
  misc_feature 1..20: note = Target: SCN10A; (-) strand; PAM type: YTN; PAM sequence: CTG
  source 1..20: mol_type = other DNA
cagcaagtcgagaggtgtgg

SEQ ID NO: 45603 - DNA, 20 bp, synthetic construct
  misc_feature 1..20: note = Description of Artificial Sequence: Synthetic oligonucleotide
  misc_feature 1..20: note = Target: SCN10A; (-) strand; PAM type: YTN; PAM sequence: CTA
  source 1..20: mol_type = other DNA
gcaggagcagctgcagcaag

SEQ ID NO: 45604 - DNA, 20 bp, synthetic construct
  misc_feature 1..20: note = Description of Artificial Sequence: Synthetic oligonucleotide
  misc_feature 1..20: note = Target: SCN10A; (-) strand; PAM type: YTN; PAM sequence: CTC
  source 1..20: mol_type = other DNA
actagcaggagcagctgcag

SEQ ID NO: 45605 - DNA, 20 bp, synthetic construct
  misc_feature 1..20: note = Description of Artificial Sequence: Synthetic oligonucleotide
  misc_feature 1..20: note = Target: SCN10A; (-) strand; PAM type: YTN; PAM sequence: CTC
  source 1..20: mol_type = other DNA
tcactagcaggagcagctgc

SEQ ID NO: 45606 - DNA, 20 bp, synthetic construct
  misc_feature 1..20: note = Description of Artificial Sequence: Synthetic oligonucleotide
  misc_feature 1..20: note = Target: SCN10A; (-) strand; PAM type: YTN; PAM sequence: CTC
  source 1..20: mol_type = other DNA
tctcactagcaggagcagct

SEQ ID NO: 45607 - DNA, 20 bp, synthetic construct
  misc_feature 1..20: note = Description of Artificial Sequence: Synthetic oligonucleotide
  misc_feature 1..20: note = Target: SCN10A; (-) strand; PAM type: YTN; PAM sequence: TTG
  source 1..20: mol_type = other DNA
ggaccctctctcactagcag

SEQ ID NO: 45608 - DNA, 20 bp, synthetic construct
  misc_feature 1..20: note = Description of Artificial Sequence: Synthetic oligonucleotide
  misc_feature 1..20: note = Target: SCN10A; (-) strand; PAM type: YTN; PAM sequence: CTA
  source 1..20: mol_type = other DNA
agggtggggccaggcaccca

SEQ ID NO: 45609 - DNA, 20 bp, synthetic construct
  misc_feature 1..20: note = Description of Artificial Sequence: Synthetic oligonucleotide
  misc_feature 1..20: note = Target: SCN10A; (-) strand; PAM type: YTN; PAM sequence: CTG
  source 1..20: mol_type = other DNA
gtcatctaagggtggggcca

SEQ ID NO: 45610 - DNA, 20 bp, synthetic construct
  misc_feature 1..20: note = Description of Artificial Sequence: Synthetic oligonucleotide
  misc_feature 1..20: note = Target: SCN10A; (-) strand; PAM type: YTN; PAM sequence: TTA
  source 1..20: mol_type = other DNA
gaactggtcatctaagggtg

SEQ ID NO: 45611 - DNA, 20 bp, synthetic construct
  misc_feature 1..20: note = Description of Artificial Sequence: Synthetic oligonucleotide
  misc_feature 1..20: note = Target: SCN10A; (-) strand; PAM type: YTN; PAM sequence: TTT
  source 1..20: mol_type = other DNA
agaactggtcatctaagggt

SEQ ID NO: 45612 - DNA, 20 bp, synthetic construct
  misc_feature 1..20: note = Description of Artificial Sequence: Synthetic oligonucleotide
  misc_feature 1..20: note = Target: SCN10A; (-) strand; PAM type: YTN; PAM sequence: TTC
  source 1..20: mol_type = other DNA
aaatttagaactggtcatct

SEQ ID NO: 45613 - DNA, 20 bp, synthetic construct
  misc_feature 1..20: note = Description of Artificial Sequence: Synthetic oligonucleotide
  misc_feature 1..20: note = Target: SCN10A; (-) strand; PAM type: YTN; PAM sequence: CTT
  source 1..20: mol_type = other DNA
caaatttagaactggtcatc

SEQ ID NO: 45614 - DNA, 20 bp, synthetic construct
  misc_feature 1..20: note = Description of Artificial Sequence: Synthetic oligonucleotide
  misc_feature 1..20: note = Target: SCN10A; (-) strand; PAM type: YTN; PAM sequence: CTG
  source 1..20: mol_type = other DNA
tgatgtgcaagatcccttca

SEQ ID NO: 45615 - DNA, 20 bp, synthetic construct
  misc_feature 1..20: note = Description of Artificial Sequence: Synthetic oligonucleotide
  misc_feature 1..20: note = Target: SCN10A; (-) strand; PAM type: YTN; PAM sequence: CTG
  source 1..20: mol_type = other DNA
gcagcctgtgatgtgcaaga

SEQ ID NO: 45616 - DNA, 20 bp, synthetic construct
  misc_feature 1..20: note = Description of Artificial Sequence: Synthetic oligonucleotide
  misc_feature 1..20: note = Target: SCN10A; (-) strand; PAM type: YTN; PAM sequence: CTC
  source 1..20: mol_type = other DNA
tggcagcctgtgatgtgcaa

SEQ ID NO: 45617 - DNA, 20 bp, synthetic construct
  misc_feature 1..20: note = Description of Artificial Sequence: Synthetic oligonucleotide
  misc_feature 1..20: note = Target: SCN10A; (-) strand; PAM type: YTN; PAM sequence: TTG
  source 1..20: mol_type = other DNA
gctctggcagcctgtgatgt

SEQ ID NO: 45618 - DNA, 20 bp, synthetic construct
  misc_feature 1..20: note = Description of Artificial Sequence: Synthetic oligonucleotide
  misc_feature 1..20: note = Target: SCN10A; (-) strand; PAM type: YTN; PAM sequence: CTT
  source 1..20: mol_type = other DNA
ggctctggcagcctgtgatg

SEQ ID NO: 45619 - DNA, 20 bp, synthetic construct
  misc_feature 1..20: note = Description of Artificial Sequence: Synthetic oligonucleotide
  misc_feature 1..20: note = Target: SCN10A; (-) strand; PAM type: YTN; PAM sequence: CTC
  source 1..20: mol_type = other DNA
ttggctctggcagcctgtga

SEQ ID NO: 45620 - DNA, 20 bp, synthetic construct
  misc_feature 1..20: note = Description of Artificial Sequence: Synthetic oligonucleotide
  misc_feature 1..20: note = Target: SCN10A; (-) strand; PAM type: YTN; PAM sequence: TTG
  source 1..20: mol_type = other DNA
catatatgaaactcttggct

SEQ ID NO: 45621 - DNA, 20 bp, synthetic construct
  misc_feature 1..20: note = Description of Artificial Sequence: Synthetic oligonucleotide
  misc_feature 1..20: note = Target: SCN10A; (-) strand; PAM type: YTN; PAM sequence: TTC
  source 1..20: mol_type = other DNA
acacacgtgtatgtatatat

SEQ ID NO: 45622 - DNA, 20 bp, synthetic construct
  misc_feature 1..20: note = Description of Artificial Sequence: Synthetic oligonucleotide
  misc_feature 1..20: note = Target: SCN10A; (-) strand; PAM type: YTN; PAM sequence: CTT
  source 1..20: mol_type = other DNA
cacacacgtgtatgtatata

SEQ ID NO: 45623 - DNA, 20 bp, synthetic construct
  misc_feature 1..20: note = Description of Artificial Sequence: Synthetic oligonucleotide
  misc_feature 1..20: note = Target: SCN10A; (-) strand; PAM type: YTN; PAM sequence: CTC
  source 1..20: mol_type = other DNA
acttcacacacgtgtatgta

SEQ ID NO: 45624 - DNA, 20 bp, synthetic construct
  misc_feature 1..20: note = Description of Artificial Sequence: Synthetic oligonucleotide
  misc_feature 1..20: note = Target: SCN10A; (-) strand; PAM type: YTN; PAM sequence: TTC
  source 1..20: mol_type = other DNA
atgctcacttcacacacgtg

SEQ ID NO: 45625 - DNA, 20 bp, synthetic construct
  misc_feature 1..20: note = Description of Artificial Sequence: Synthetic oligonucleotide
  misc_feature 1..20: note = Target: SCN10A; (-) strand; PAM type: YTN; PAM sequence: CTT
  source 1..20: mol_type = other DNA
catgctcacttcacacacgt

SEQ ID NO: 45626 - DNA, 20 bp, synthetic construct
  misc_feature 1..20: note = Description of Artificial Sequence: Synthetic oligonucleotide
  misc_feature 1..20: note = Target: SCN10A; (-) strand; PAM type: YTN; PAM sequence: CTA
  source 1..20: mol_type = other DNA
tagtcttcatgctcacttca

SEQ ID NO: 45627 - DNA, 20 bp, synthetic construct
  misc_feature 1..20: note = Description of Artificial Sequence: Synthetic oligonucleotide
  misc_feature 1..20: note = Target: SCN10A; (-) strand; PAM type: YTN; PAM sequence: CTA
  source 1..20: mol_type = other DNA
gctatagtcttcatgctcac

SEQ ID NO: 45628 - DNA, 20 bp, synthetic construct
  misc_feature 1..20: note = Description of Artificial Sequence: Synthetic oligonucleotide
  misc_feature 1..20: note = Target: SCN10A; (-) strand; PAM type: YTN; PAM sequence: CTA
  source 1..20: mol_type = other DNA
tctagctatagtcttcatgc

SEQ ID NO: 45629 - DNA, 20 bp, synthetic construct
  misc_feature 1..20: note = Description of Artificial Sequence: Synthetic oligonucleotide
  misc_feature 1..20: note = Target: SCN10A; (-) strand; PAM type: YTN; PAM sequence: TTA
  source 1..20: mol_type = other DNA
atggagcccaaggataaaac

SEQ ID NO: 45630 - DNA, 20 bp, synthetic construct
  misc_feature 1..20: note = Description of Artificial Sequence: Synthetic oligonucleotide
  misc_feature 1..20: note = Target: SCN10A; (-) strand; PAM type: YTN; PAM sequence: TTA
  source 1..20: mol_type = other DNA
taattaatggagcccaagga

SEQ ID NO: 45631 - DNA, 20 bp, synthetic construct
  misc_feature 1..20: note = Description of Artificial Sequence: Synthetic oligonucleotide
  misc_feature 1..20: note = Target: SCN10A; (-) strand; PAM type: YTN; PAM sequence: CTT
  source 1..20: mol_type = other DNA
ataattaatggagcccaagg

SEQ ID NO: 45632 - DNA, 20 bp, synthetic construct
  misc_feature 1..20: note = Description of Artificial Sequence: Synthetic oligonucleotide
  misc_feature 1..20: note = Target: SCN10A; (-) strand; PAM type: YTN; PAM sequence: CTA
  source 1..20: mol_type = other DNA
aggtcacacatcttataatt

SEQ ID NO: 45633 - DNA, 20 bp, synthetic construct
  misc_feature 1..20: note = Description of Artificial Sequence: Synthetic oligonucleotide
  misc_feature 1..20: note = Target: SCN10A; (-) strand; PAM type: YTN; PAM sequence: TTG
  source 1..20: mol_type = other DNA
cctaaggtcacacatcttat

SEQ ID NO: 45634 - DNA, 20 bp, synthetic construct
  misc_feature 1..20: note = Description of Artificial Sequence: Synthetic oligonucleotide
  misc_feature 1..20: note = Target: SCN10A; (-) strand; PAM type: YTN; PAM sequence: CTT
  source 1..20: mol_type = other DNA
gcctaaggtcacacatctta

SEQ ID NO: 45635 - DNA, 20 bp, synthetic construct
  misc_feature 1..20: note = Description of Artificial Sequence: Synthetic oligonucleotide
  misc_feature 1..20: note = Target: SCN10A; (-) strand; PAM type: YTN; PAM sequence: TTA
  source 1..20: mol_type = other DNA
aacaacttgcctaaggtcac

SEQ ID NO: 45636 - DNA, 20 bp, synthetic construct
  misc_feature 1..20: note = Description of Artificial Sequence: Synthetic oligonucleotide
  misc_feature 1..20: note = Target: SCN10A; (-) strand; PAM type: YTN; PAM sequence: TTA
  source 1..20: mol_type = other DNA
gagaggttaaacaacttgcc

SEQ ID NO: 45637 - DNA, 20 bp, synthetic construct
  misc_feature 1..20: note = Description of Artificial Sequence: Synthetic oligonucleotide
  misc_feature 1..20: note = Target: SCN10A; (-) strand; PAM type: YTN; PAM sequence: CTG
  source 1..20: mol_type = other DNA
ggaaaaatgaagattagaga

SEQ ID NO: 45638 - DNA, 20 bp, synthetic construct
  misc_feature 1..20: note = Description of Artificial Sequence: Synthetic oligonucleotide
  misc_feature 1..20: note = Target: SCN10A; (-) strand; PAM type: YTN; PAM sequence: TTG
  source 1..20: mol_type = other DNA
aagctgggaaaaatgaagat

SEQ ID NO: 45639 - DNA, 20 bp, synthetic construct
  misc_feature 1..20: note = Description of Artificial Sequence: Synthetic oligonucleotide
  misc_feature 1..20: note = Target: SCN10A; (-) strand; PAM type: YTN; PAM sequence: TTT
  source 1..20: mol_type = other DNA
gaagctgggaaaaatgaaga

SEQ ID NO: 45640 - DNA, 20 bp, synthetic construct
  misc_feature 1..20: note = Description of Artificial Sequence: Synthetic oligonucleotide
  misc_feature 1..20: note = Target: SCN10A; (-) strand; PAM type: YTN; PAM sequence: TTT
  source 1..20: mol_type = other DNA
tgaagctgggaaaaatgaag

SEQ ID NO: 45641 - DNA, 20 bp, synthetic construct
  misc_feature 1..20: note = Description of Artificial Sequence: Synthetic oligonucleotide
  misc_feature 1..20: note = Target: SCN10A; (-) strand; PAM type: YTN; PAM sequence: TTC
  source 1..20: mol_type = other DNA
aattttgaagctgggaaaaa

SEQ ID NO: 45642 - DNA, 20 bp, synthetic construct
  misc_feature 1..20: note = Description of Artificial Sequence: Synthetic oligonucleotide
  misc_feature 1..20: note = Target: SCN10A; (-) strand; PAM type: YTN; PAM sequence: TTT
  source 1..20: mol_type = other DNA
caattttgaagctgggaaaa

SEQ ID NO: 45643 - DNA, 20 bp, synthetic construct
  misc_feature 1..20: note = Description of Artificial Sequence: Synthetic oligonucleotide
  misc_feature 1..20: note = Target: SCN10A; (-) strand; PAM type: YTN; PAM sequence: TTT
  source 1..20: mol_type = other DNA
tcaattttgaagctgggaaa

SEQ ID NO: 45644 - DNA, 20 bp, synthetic construct
  misc_feature 1..20: note = Description of Artificial Sequence: Synthetic oligonucleotide
  misc_feature 1..20: note = Target: SCN10A; (-) strand; PAM type: YTN; PAM sequence: CTT
  source 1..20: mol_type = other DNA
ttcaattttgaagctgggaa

SEQ ID NO: 45645 - DNA, 20 bp, synthetic construct
  misc_feature 1..20: note = Description of Artificial Sequence: Synthetic oligonucleotide
  misc_feature 1..20: note = Target: SCN10A; (-) strand; PAM type: YTN; PAM sequence: CTA
  source 1..20: mol_type = other DNA
gccttttcaattttgaagct

SEQ ID NO: 45646 - DNA, 20 bp, synthetic construct
  misc_feature 1..20: note = Description of Artificial Sequence: Synthetic oligonucleotide
  misc_feature 1..20: note = Target: SCN10A; (-) strand; PAM type: YTN; PAM sequence: CTG
  source 1..20: mol_type = other DNA
aatgatgcagatctagcctt

SEQ ID NO: 45647 - DNA, 20 bp, synthetic construct
  misc_feature 1..20: note = Description of Artificial Sequence: Synthetic oligonucleotide
  misc_feature 1..20: note = Target: SCN10A; (-) strand; PAM type: YTN; PAM sequence: TTA
  source 1..20: mol_type = other DNA
gtcatcaaaacagctgaatg

SEQ ID NO: 45648 - DNA, 20 bp, synthetic construct
  misc_feature 1..20: note = Description of Artificial Sequence: Synthetic oligonucleotide
  misc_feature 1..20: note = Target: SCN10A; (-) strand; PAM type: YTN; PAM sequence: TTT
  source 1..20: mol_type = other DNA
agtcatcaaaacagctgaat

SEQ ID NO: 45649 - DNA, 20 bp, synthetic construct
  misc_feature 1..20: note = Description of Artificial Sequence: Synthetic oligonucleotide
  misc_feature 1..20: note = Target: SCN10A; (-) strand; PAM type: YTN; PAM sequence: CTA
  source 1..20: mol_type = other DNA
acatatttagtcatcaaaac

SEQ ID NO: 45650 - DNA, 20 bp, synthetic construct
  misc_feature 1..20: note = Description of Artificial Sequence: Synthetic oligonucleotide
  misc_feature 1..20: note = Target: SCN10A; (-) strand; PAM type: YTN; PAM sequence: TTA
  source 1..20: mol_type = other DNA
caagcgctaacatatttagt

SEQ ID NO: 45651 - DNA, 20 bp, synthetic construct
  misc_feature 1..20: note = Description of Artificial Sequence: Synthetic oligonucleotide
  misc_feature 1..20: note = Target: SCN10A; (-) strand; PAM type: YTN; PAM sequence: TTT
  source 1..20: mol_type = other DNA
acaagcgctaacatatttag

SEQ ID NO: 45652 - DNA, 20 bp, synthetic construct
  misc_feature 1..20: note = Description of Artificial Sequence: Synthetic oligonucleotide
  misc_feature 1..20: note = Target: SCN10A; (-) strand; PAM type: YTN; PAM sequence: TTT
  source 1..20: mol_type = other DNA
tacaagcgctaacatattta

SEQ ID NO: 45653 - DNA, 20 bp, synthetic construct
  misc_feature 1..20: note = Description of Artificial Sequence: Synthetic oligonucleotide
  misc_feature 1..20: note = Target: SCN10A; (-) strand; PAM type: YTN; PAM sequence: TTC
  source 1..20: mol_type = other DNA
gtgcaaagtgttttacaagc

SEQ ID NO: 45654 - DNA, 20 bp, synthetic construct
  misc_feature 1..20: note = Description of Artificial Sequence: Synthetic oligonucleotide
  misc_feature 1..20: note = Target: SCN10A; (-) strand; PAM type: YTN; PAM sequence: CTT
  source 1..20: mol_type = other DNA
cgtgcaaagtgttttacaag

SEQ ID NO: 45655 - DNA, 20 bp, synthetic construct
  misc_feature 1..20: note = Description of Artificial Sequence: Synthetic oligonucleotide
  misc_feature 1..20: note = Target: SCN10A; (-) strand; PAM type: YTN; PAM sequence: TTG
  source 1..20: mol_type = other DNA
agccaagcacttcgtgcaaa

SEQ ID NO: 45656 - DNA, 20 bp, synthetic construct
  misc_feature 1..20: note = Description of Artificial Sequence: Synthetic oligonucleotide
  misc_feature 1..20: note = Target: SCN10A; (-) strand; PAM type: YTN; PAM sequence: CTA
  source 1..20: mol_type = other DNA
ttgagccaagcacttcgtgc

SEQ ID NO: 45657 - DNA, 20 bp, synthetic construct
  misc_feature 1..20: note = Description of Artificial Sequence: Synthetic oligonucleotide
  misc_feature 1..20: note = Target: SCN10A; (-) strand; PAM type: YTN; PAM sequence: CTA
  source 1..20: mol_type = other DNA
aaatctattgagccaagcac

SEQ ID NO: 45658 - DNA, 20 bp, synthetic construct
  misc_feature 1..20: note = Description of Artificial Sequence: Synthetic oligonucleotide
  misc_feature 1..20: note = Target: SCN10A; (-) strand; PAM type: YTN; PAM sequence: CTG
  source 1..20: mol_type = other DNA
gacaaataacaatggtcatg

SEQ ID NO: 45659 - DNA, 20 bp, synthetic construct
  misc_feature 1..20: note = Description of Artificial Sequence: Synthetic oligonucleotide
  misc_feature 1..20: note = Target: SCN10A; (-) strand; PAM type: YTN; PAM sequence: CTC
  source 1..20: mol_type = other DNA
tggacaaataacaatggtca

SEQ ID NO: 45660 - DNA, 20 bp, synthetic construct
  misc_feature 1..20: note = Description of Artificial Sequence: Synthetic oligonucleotide
  misc_feature 1..20: note = Target: SCN10A; (-) strand; PAM type: YTN; PAM sequence: TTG
  source 1..20: mol_type = other DNA
acctctggacaaataacaat

SEQ ID NO: 45661 - DNA, 20 bp, synthetic construct
  misc_feature 1..20: note = Description of Artificial Sequence: Synthetic oligonucleotide
  misc_feature 1..20: note = Target: SCN10A; (-) strand; PAM type: YTN; PAM sequence: TTT
  source 1..20: mol_type = other DNA
gacctctggacaaataacaa

SEQ ID NO: 45662 - DNA, 20 bp, synthetic construct
  misc_feature 1..20: note = Description of Artificial Sequence: Synthetic oligonucleotide
  misc_feature 1..20: note = Target: SCN10A; (-) strand; PAM type: YTN; PAM sequence: TTT
  source 1..20: mol_type = other DNA
tgacctctggacaaataaca

SEQ ID NO: 45663 - DNA, 20 bp, synthetic construct
  misc_feature 1..20: note = Description of Artificial Sequence: Synthetic oligonucleotide
  misc_feature 1..20: note = Target: SCN10A; (-) strand; PAM type: YTN; PAM sequence: CTA
  source 1..20: mol_type = other DNA
caattttgacctctggacaa

SEQ ID NO: 45664 - DNA, 20 bp, synthetic construct
  misc_feature 1..20: note = Description of Artificial Sequence: Synthetic oligonucleotide
  misc_feature 1..20: note = Target: SCN10A; (-) strand; PAM type: YTN; PAM sequence: TTC
  source 1..20: mol_type = other DNA
cctacaattttgacctctgg

SEQ ID NO: 45665 - DNA, 20 bp, synthetic construct
  misc_feature 1..20: note = Description of Artificial Sequence: Synthetic oligonucleotide
  misc_feature 1..20: note = Target: SCN10A; (-) strand; PAM type: YTN; PAM sequence: CTC
  source 1..20: mol_type = other DNA
caggtggccaagttccctac

SEQ ID NO: 45666 - DNA, 20 bp, synthetic construct
  misc_feature 1..20: note = Description of Artificial Sequence: Synthetic oligonucleotide
  misc_feature 1..20: note = Target: SCN10A; (-) strand; PAM type: YTN; PAM sequence: TTA
  source 1..20: mol_type = other DNA
gggagctccaggtggccaag

SEQ ID NO: 45667 - DNA, 20 bp, synthetic construct
  misc_feature 1..20: note = Description of Artificial Sequence: Synthetic oligonucleotide
  misc_feature 1..20: note = Target: SCN10A; (-) strand; PAM type: YTN; PAM sequence: CTT
  source 1..20: mol_type = other DNA
agggagctccaggtggccaa

SEQ ID NO: 45668 - DNA, 20 bp, synthetic construct
  misc_feature 1..20: note = Description of Artificial Sequence: Synthetic oligonucleotide
  misc_feature 1..20: note = Target: SCN10A; (-) strand; PAM type: YTN; PAM sequence: CTC
  source 1..20: mol_type = other DNA
ttagggagctccaggtggcc

SEQ ID NO: 45669 - DNA, 20 bp, synthetic construct
  misc_feature 1..20: note = Description of Artificial Sequence: Synthetic oligonucleotide
  misc_feature 1..20: note = Target: SCN10A; (-) strand; PAM type: YTN; PAM sequence: TTG
  source 1..20: mol_type = other DNA
gggctcttagggagctccag

SEQ ID NO: 45670 - DNA, 20 bp, synthetic construct
  misc_feature 1..20: note = Description of Artificial Sequence: Synthetic oligonucleotide
  misc_feature 1..20: note = Target: SCN10A; (-) strand; PAM type: YTN; PAM sequence: TTT
  source 1..20: mol_type = other DNA
ggggctcttagggagctcca

SEQ ID NO: 45671 - DNA, 20 bp, synthetic construct
  misc_feature 1..20: note = Description of Artificial Sequence: Synthetic oligonucleotide
  misc_feature 1..20: note = Target: SCN10A; (-) strand; PAM type: YTN; PAM sequence: CTT
  source 1..20: mol_type = other DNA
tggggctcttagggagctcc

SEQ ID NO: 45672 - DNA, 20 bp, synthetic construct
  misc_feature 1..20: note = Description of Artificial Sequence: Synthetic oligonucleotide
  misc_feature 1..20: note = Target: SCN10A; (-) strand; PAM type: YTN; PAM sequence: TTA
  source 1..20: mol_type = other DNA
ctttggggctcttagggagc

SEQ ID NO: 45673 - DNA, 20 bp, synthetic construct
  misc_feature 1..20: note = Description of Artificial Sequence: Synthetic oligonucleotide
  misc_feature 1..20: note = Target: SCN10A; (-) strand; PAM type: YTN; PAM sequence: TTC
  source 1..20: mol_type = other DNA
agttactttggggctcttag

SEQ ID NO: 45674 - DNA, 20 bp, synthetic construct
  misc_feature 1..20: note = Description of Artificial Sequence: Synthetic oligonucleotide
  misc_feature 1..20: note = Target: SCN10A; (-) strand; PAM type: YTN; PAM sequence: TTT
  source 1..20: mol_type = other DNA
cagttactttggggctctta

SEQ ID NO: 45675 - DNA, 20 bp, synthetic construct
  misc_feature 1..20: note = Description of Artificial Sequence: Synthetic oligonucleotide
  misc_feature 1..20: note = Target: SCN10A; (-) strand; PAM type: YTN; PAM sequence: TTT
  source 1..20: mol_type = other DNA
tcagttactttggggctctt

SEQ ID NO: 45676 - DNA, 20 bp, synthetic construct
  misc_feature 1..20: note = Description of Artificial Sequence: Synthetic oligonucleotide
  misc_feature 1..20: note = Target: SCN10A; (-) strand; PAM type: YTN; PAM sequence: CTC
  source 1..20: mol_type = other DNA
agaagcattttcagttactt

SEQ ID NO: 45677 - DNA, 20 bp, synthetic construct
  misc_feature 1..20: note = Description of Artificial Sequence: Synthetic oligonucleotide
  misc_feature 1..20: note = Target: SCN10A; (-) strand; PAM type: YTN; PAM sequence: CTG
  source 1..20: mol_type = other DNA
ccactcagaagcattttcag

SEQ ID NO: 45678 - DNA, 20 bp, synthetic construct
  misc_feature 1..20: note = Description of Artificial Sequence: Synthetic oligonucleotide
  misc_feature 1..20: note = Target: SCN10A; (-) strand; PAM type: YTN; PAM sequence: CTG
  source 1..20: mol_type = other DNA
tctgccactcagaagcattt

SEQ ID NO: 45679 - DNA, 20 bp, synthetic construct
  misc_feature 1..20: note = Description of Artificial Sequence: Synthetic oligonucleotide
  misc_feature 1..20: note = Target: SCN10A; (-) strand; PAM type: YTN; PAM sequence: CTG
  source 1..20: mol_type = other DNA
tgacagctgtctgccactca

SEQ ID NO: 45680 - DNA, 20 bp, synthetic construct
  misc_feature 1..20: note = Description of Artificial Sequence: Synthetic oligonucleotide
  misc_feature 1..20: note = Target: SCN10A; (-) strand; PAM type: YTN; PAM sequence: CTC
  source 1..20: mol_type = other DNA
tgtgacagctgtctgccact

SEQ ID NO: 45681 - DNA, 20 bp, synthetic construct
  misc_feature 1..20: note = Description of Artificial Sequence: Synthetic oligonucleotide
  misc_feature 1..20: note = Target: SCN10A; (-) strand; PAM type: YTN; PAM sequence: CTA
  source 1..20: mol_type = other DNA
ggtaacagcagagagcatga

SEQ ID NO: 45682 - DNA, 20 bp, synthetic construct
  misc_feature 1..20: note = Description of Artificial Sequence: Synthetic oligonucleotide
  misc_feature 1..20: note = Target: SCN10A; (-) strand; PAM type: YTN; PAM sequence: TTG
  source 1..20: mol_type = other DNA
tctaggtaacagcagagagc

SEQ ID NO: 45683 - DNA, 20 bp, synthetic construct
  misc_feature 1..20: note = Description of Artificial Sequence: Synthetic oligonucleotide
  misc_feature 1..20: note = Target: SCN10A; (-) strand; PAM type: YTN; PAM sequence: TTT
  source 1..20: mol_type = other DNA
gtctaggtaacagcagagag

SEQ ID NO: 45684 - DNA, 20 bp, synthetic construct
  misc_feature 1..20: note = Description of Artificial Sequence: Synthetic oligonucleotide
  misc_feature 1..20: note = Target: SCN10A; (-) strand; PAM type: YTN; PAM sequence: CTT
  source 1..20: mol_type = other DNA
tgtctaggtaacagcagaga

SEQ ID NO: 45685 - DNA, 20 bp, synthetic construct
  misc_feature 1..20: note = Description of Artificial Sequence: Synthetic oligonucleotide
  misc_feature 1..20: note = Target: SCN10A; (-) strand; PAM type: YTN; PAM sequence: TTA
  source 1..20: mol_type = other DNA
catgcctttgtctaggtaac

SEQ ID NO: 45686 - DNA, 20 bp, synthetic construct
  misc_feature 1..20: note = Description of Artificial Sequence: Synthetic oligonucleotide
  misc_feature 1..20: note = Target: SCN10A; (-) strand; PAM type: YTN; PAM sequence: TTT
  source 1..20: mol_type = other DNA
acatgcctttgtctaggtaa

SEQ ID NO: 45687 - DNA, 20 bp, synthetic construct
  misc_feature 1..20: note = Description of Artificial Sequence: Synthetic oligonucleotide
  misc_feature 1..20: note = Target: SCN10A; (-) strand; PAM type: YTN; PAM sequence: TTT
  source 1..20: mol_type = other DNA
tacatgcctttgtctaggta

SEQ ID NO: 45688 - DNA, 20 bp, synthetic construct
  misc_feature 1..20: note = Description of Artificial Sequence: Synthetic oligonucleotide
  misc_feature 1..20: note = Target: SCN10A; (-) strand; PAM type: YTN; PAM sequence: CTG
  source 1..20: mol_type = other DNA
ccatattttacatgcctttg

SEQ ID NO: 45689 - DNA, 20 bp, synthetic construct
  misc_feature 1..20: note = Description of Artificial Sequence: Synthetic oligonucleotide
  misc_feature 1..20: note = Target: SCN10A; (-) strand; PAM type: YTN; PAM sequence: TTA
  source 1..20: mol_type = other DNA
tcagctgccatattttacat

SEQ ID NO: 45690 - DNA, 20 bp, synthetic construct
  misc_feature 1..20: note = Description of Artificial Sequence: Synthetic oligonucleotide
  misc_feature 1..20: note = Target: SCN10A; (-) strand; PAM type: YTN; PAM sequence: CTG
  source 1..20: mol_type = other DNA
ttatcagctgccatatttta

SEQ ID NO: 45691 - DNA, 20 bp, synthetic construct
  misc_feature 1..20: note = Description of Artificial Sequence: Synthetic oligonucleotide
  misc_feature 1..20: note = Target: SCN10A; (-) strand; PAM type: YTN; PAM sequence: CTG
  source 1..20: mol_type = other DNA
ctgttatcagctgccatatt

SEQ ID NO: 45692 - DNA, 20 bp, synthetic construct
  misc_feature 1..20: note = Description of Artificial Sequence: Synthetic oligonucleotide
  misc_feature 1..20: note = Target: SCN10A; (-) strand; PAM type: YTN; PAM sequence: TTC
  source 1..20: mol_type = other DNA
cagcagctgctgttatcagc

SEQ ID NO: 45693 - DNA, 20 bp, synthetic construct
  misc_feature 1..20: note = Description of Artificial Sequence: Synthetic oligonucleotide
  misc_feature 1..20: note = Target: SCN10A; (-) strand; PAM type: YTN; PAM sequence: TTG
  source 1..20: mol_type = other DNA
tgttccagcagctgctgtta

SEQ ID NO: 45694 - DNA, 20 bp, synthetic construct
  misc_feature 1..20: note = Description of Artificial Sequence: Synthetic oligonucleotide
  misc_feature 1..20: note = Target: SCN10A; (-) strand; PAM type: YTN; PAM sequence: CTT
  source 1..20: mol_type = other DNA
gtgttccagcagctgctgtt

SEQ ID NO: 45695 - DNA, 20 bp, synthetic construct
  misc_feature 1..20: note = Description of Artificial Sequence: Synthetic oligonucleotide
  misc_feature 1..20: note = Target: SCN10A; (-) strand; PAM type: YTN; PAM sequence: CTG
  source 1..20: mol_type = other DNA
cagtcgtcacttgtgttcca

SEQ ID NO: 45696 - DNA, 20 bp, synthetic construct
  misc_feature 1..20: note = Description of Artificial Sequence: Synthetic oligonucleotide
  misc_feature 1..20: note = Target: SCN10A; (-) strand; PAM type: YTN; PAM sequence: TTC
  source 1..20: mol_type = other DNA
cctgcagtcgtcacttgtgt

SEQ ID NO: 45697 - DNA, 20 bp, synthetic construct
  misc_feature 1..20: note = Description of Artificial Sequence: Synthetic oligonucleotide
  misc_feature 1..20: note = Target: SCN10A; (-) strand; PAM type: YTN; PAM sequence: CTT
  source 1..20: mol_type = other DNA
ccctgcagtcgtcacttgtg

SEQ ID NO: 45698 - DNA, 20 bp, synthetic construct
  misc_feature 1..20: note = Description of Artificial Sequence: Synthetic oligonucleotide
  misc_feature 1..20: note = Target: SCN10A; (-) strand; PAM type: YTN; PAM sequence: TTC
  source 1..20: mol_type = other DNA
ttccctgcagtcgtcacttg

SEQ ID NO: 45699 - DNA, 20 bp, synthetic construct
  misc_feature 1..20: note = Description of Artificial Sequence: Synthetic oligonucleotide
  misc_feature 1..20: note = Target: SCN10A; (-) strand; PAM type: YTN; PAM sequence: CTT
  source 1..20: mol_type = other DNA
cttccctgcagtcgtcactt

SEQ ID NO: 45700 - DNA, 20 bp, synthetic construct
  misc_feature 1..20: note = Description of Artificial Sequence: Synthetic oligonucleotide
  misc_feature 1..20: note = Target: SCN10A; (-) strand; PAM type: YTN; PAM sequence: CTC
  source 1..20: mol_type = other DNA
ccatagccttcttccctgca

SEQ ID NO: 45701 - DNA, 20 bp, synthetic construct
  misc_feature 1..20: note = Description of Artificial Sequence: Synthetic oligonucleotide
  misc_feature 1..20: note = Target: SCN10A; (-) strand; PAM type: YTN; PAM sequence: CTC
  source 1..20: mol_type = other DNA
tcccatagccttcttccctg

SEQ ID NO: 45702 - DNA, 20 bp, synthetic construct
  misc_feature 1..20: note = Description of Artificial Sequence: Synthetic oligonucleotide
  misc_feature 1..20: note = Target: SCN10A; (-) strand; PAM type: YTN; PAM sequence: CTG
  source 1..20: mol_type = other DNA
tagctctcccatagccttct

SEQ ID NO: 45703 - DNA, 20 bp, synthetic construct
  misc_feature 1..20: note = Description of Artificial Sequence: Synthetic oligonucleotide
  misc_feature 1..20: note = Target: SCN10A; (-) strand; PAM type: YTN; PAM sequence: TTG
  source 1..20: mol_type = other DNA
agtctgtagctctcccatag

SEQ ID NO: 45704 - DNA, 20 bp, synthetic construct
  misc_feature 1..20: note = Description of Artificial Sequence: Synthetic oligonucleotide
  misc_feature 1..20: note = Target: SCN10A; (-) strand; PAM type: YTN; PAM sequence: TTT
  source 1..20: mol_type = other DNA
gagtctgtagctctcccata

SEQ ID NO: 45705 - DNA, 20 bp, synthetic construct
  misc_feature 1..20: note = Description of Artificial Sequence: Synthetic oligonucleotide
  misc_feature 1..20: note = Target: SCN10A; (-) strand; PAM type: YTN; PAM sequence: CTT
  source 1..20: mol_type = other DNA
tgagtctgtagctctcccat

SEQ ID NO: 45706 - DNA, 20 bp, synthetic construct
  misc_feature 1..20: note = Description of Artificial Sequence: Synthetic oligonucleotide
  misc_feature 1..20: note = Target: SCN10A; (-) strand; PAM type: YTN; PAM sequence: CTG
  source 1..20: mol_type = other DNA
tgctttgagtctgtagctct

SEQ ID NO: 45707 - DNA, 20 bp, synthetic construct
  misc_feature 1..20: note = Description of Artificial Sequence: Synthetic oligonucleotide
  misc_feature 1..20: note = Target: SCN10A; (-) strand; PAM type: YTN; PAM sequence: CTA
  source 1..20: mol_type = other DNA
agtggtccagaaaagctgtg

SEQ ID NO: 45708 - DNA, 20 bp, synthetic construct
  misc_feature 1..20: note = Description of Artificial Sequence: Synthetic oligonucleotide
  misc_feature 1..20: note = Target: SCN10A; (-) strand; PAM type: YTN; PAM sequence: TTA
  source 1..20: mol_type = other DNA
ctaagtggtccagaaaagct

SEQ ID NO: 45709 - DNA, 20 bp, synthetic construct
  misc_feature 1..20: note = Description of Artificial Sequence: Synthetic oligonucleotide
  misc_feature 1..20: note = Target: SCN10A; (-) strand; PAM type: YTN; PAM sequence: CTG
  source 1..20: mol_type = other DNA
gccaggttactaagtggtcc

SEQ ID NO: 45710 - DNA, 20 bp, synthetic construct
  misc_feature 1..20: note = Description of Artificial Sequence: Synthetic oligonucleotide
  misc_feature 1..20: note = Target: SCN10A; (-) strand; PAM type: YTN; PAM sequence: CTG
  source 1..20: mol_type = other DNA
ctggccaggttactaagtgg

SEQ ID NO: 45711 - DNA, 20 bp, synthetic construct
  misc_feature 1..20: note = Description of Artificial Sequence: Synthetic oligonucleotide
  misc_feature 1..20: note = Target: SCN10A; (-) strand; PAM type: YTN; PAM sequence: CTC
  source 1..20: mol_type = other DNA
aggaacatgcagggctgctg

SEQ ID NO: 45712 - DNA, 20 bp, synthetic construct
  misc_feature 1..20: note = Description of Artificial Sequence: Synthetic oligonucleotide
  misc_feature 1..20: note = Target: SCN10A; (-) strand; PAM type: YTN; PAM sequence: CTG
  source 1..20: mol_type = other DNA
tgaggcctcaggaacatgca

SEQ ID NO: 45713 - DNA, 20 bp, synthetic construct
  misc_feature 1..20: note = Description of Artificial Sequence: Synthetic oligonucleotide
  misc_feature 1..20: note = Target: SCN10A; (-) strand; PAM type: YTN; PAM sequence: CTG
  source 1..20: mol_type = other DNA
cccaacgtgggaaggcaggg

SEQ ID NO: 45714 - DNA, 20 bp, synthetic construct
  misc_feature 1..20: note = Description of Artificial Sequence: Synthetic oligonucleotide
  misc_feature 1..20: note = Target: SCN10A; (-) strand; PAM type: YTN; PAM sequence: CTC
  source 1..20: mol_type = other DNA
tgcccaacgtgggaaggcag

SEQ ID NO: 45715 - DNA, 20 bp, synthetic construct
  misc_feature 1..20: note = Description of Artificial Sequence: Synthetic oligonucleotide
  misc_feature 1..20: note = Target: SCN10A; (-) strand; PAM type: YTN; PAM sequence: TTC
  source 1..20: mol_type = other DNA
acctctgcccaacgtgggaa

SEQ ID NO: 45716 - DNA, 20 bp, synthetic construct
  misc_feature 1..20: note = Description of Artificial Sequence: Synthetic oligonucleotide
  misc_feature 1..20: note = Target: SCN10A; (-) strand; PAM type: YTN; PAM sequence: CTC
  source 1..20: mol_type = other DNA
agggcattcacctctgccca

SEQ ID NO: 45717 - DNA, 20 bp, synthetic construct
  misc_feature 1..20: note = Description of Artificial Sequence: Synthetic oligonucleotide
  misc_feature 1..20: note = Target: SCN10A; (-) strand; PAM type: YTN; PAM sequence: CTC
  source 1..20: mol_type = other DNA
agtaactcagggcattcacc

SEQ ID NO: 45718 - DNA, 20 bp, synthetic construct
  misc_feature 1..20: note = Description of Artificial Sequence: Synthetic oligonucleotide
  misc_feature 1..20: note = Target: SCN10A; (-) strand; PAM type: YTN; PAM sequence: TTC
  source 1..20: mol_type = other DNA
tcagtaactcagggcattca

SEQ ID NO: 45719 - DNA, 20 bp, synthetic construct
  misc_feature 1..20: note = Description of Artificial Sequence: Synthetic oligonucleotide
  misc_feature 1..20: note = Target: SCN10A; (-) strand; PAM type: YTN; PAM sequence: CTT
  source 1..20: mol_type = other DNA
ctcagtaactcagggcattc

SEQ ID NO: 45720 - DNA, 20 bp, synthetic construct
  misc_feature 1..20: note = Description of Artificial Sequence: Synthetic oligonucleotide
  misc_feature 1..20: note = Target: SCN10A; (-) strand; PAM type: YTN; PAM sequence: CTC
  source 1..20: mol_type = other DNA
ttctcagtaactcagggcat

SEQ ID NO: 45721 - DNA, 20 bp, synthetic construct
  misc_feature 1..20: note = Description of Artificial Sequence: Synthetic oligonucleotide
  misc_feature 1..20: note = Target: SCN10A; (-) strand; PAM type: YTN; PAM sequence: CTA
  source 1..20: mol_type = other DNA
acctcttctcagtaactcag

SEQ ID NO: 45722 - DNA, 20 bp, synthetic construct
  misc_feature 1..20: note = Description of Artificial Sequence: Synthetic oligonucleotide
  misc_feature 1..20: note = Target: SCN10A; (-) strand; PAM type: YTN; PAM sequence: CTC
  source 1..20: mol_type = other DNA
gctaacctcttctcagtaac

SEQ ID NO: 45723 - DNA, 20 bp, synthetic construct
  misc_feature 1..20: note = Description of Artificial Sequence: Synthetic oligonucleotide
  misc_feature 1..20: note = Target: SCN10A; (-) strand; PAM type: YTN; PAM sequence: CTG
  source 1..20: mol_type = other DNA
gtatatcaaccctcgctaac

SEQ ID NO: 45724 - DNA, 20 bp, synthetic construct
  misc_feature 1..20: note = Description of Artificial Sequence: Synthetic oligonucleotide
  misc_feature 1..20: note = Target: SCN10A; (-) strand; PAM type: YTN; PAM sequence: TTA
  source 1..20: mol_type = other DNA
agctggtatatcaaccctcg

SEQ ID NO: 45725 - DNA, 20 bp, synthetic construct
  misc_feature 1..20: note = Description of Artificial Sequence: Synthetic oligonucleotide
  misc_feature 1..20: note = Target: SCN10A; (-) strand; PAM type: YTN; PAM sequence: CTT
  source 1..20: mol_type = other DNA
aagctggtatatcaaccctc

SEQ ID NO: 45726 - DNA, 20 bp, synthetic construct
  misc_feature 1..20: note = Description of Artificial Sequence: Synthetic oligonucleotide
  misc_feature 1..20: note = Target: SCN10A; (-) strand; PAM type: YTN; PAM sequence: CTA
  source 1..20: mol_type = other DNA
ccttaagctggtatatcaac

SEQ ID NO: 45727 - DNA, 20 bp, synthetic construct
  misc_feature 1..20: note = Description of Artificial Sequence: Synthetic oligonucleotide
  misc_feature 1..20: note = Target: SCN10A; (-) strand; PAM type: YTN; PAM sequence: TTA
  source 1..20: mol_type = other DNA
ctaccttaagctggtatatc

SEQ ID NO: 45728 - DNA, 20 bp, synthetic construct
  misc_feature 1..20: note = Description of Artificial Sequence: Synthetic oligonucleotide
  misc_feature 1..20: note = Target: SCN10A; (-) strand; PAM type: YTN; PAM sequence: CTT
  source 1..20: mol_type = other DNA
actaccttaagctggtatat

SEQ ID NO: 45729 - DNA, 20 bp, synthetic construct
  misc_feature 1..20: note = Description of Artificial Sequence: Synthetic oligonucleotide
  misc_feature 1..20: note = Target: SCN10A; (-) strand; PAM type: YTN; PAM sequence: TTC
  source 1..20: mol_type = other DNA
cttactaccttaagctggta

SEQ ID NO: 45730 - DNA, 20 bp, synthetic construct
  misc_feature 1..20: note = Description of Artificial Sequence: Synthetic oligonucleotide
  misc_feature 1..20: note = Target: SCN10A; (-) strand; PAM type: YTN; PAM sequence: CTA
  source 1..20: mol_type = other DNA
ttccttactaccttaagctg

SEQ ID NO: 45731 - DNA, 20 bp, synthetic construct
  misc_feature 1..20: note = Description of Artificial Sequence: Synthetic oligonucleotide
  misc_feature 1..20: note = Target: SCN10A; (-) strand; PAM type: YTN; PAM sequence: TTG
  source 1..20: mol_type = other DNA
gcactattccttactacctt

SEQ ID NO: 45732 - DNA, 20 bp, synthetic construct
  misc_feature 1..20: note = Description of Artificial Sequence: Synthetic oligonucleotide
  misc_feature 1..20: note = Target: SCN10A; (-) strand; PAM type: YTN; PAM sequence: CTT
  source 1..20: mol_type = other DNA
ggcactattccttactacct

SEQ ID NO: 45733 - DNA, 20 bp, synthetic construct
  misc_feature 1..20: note = Description of Artificial Sequence: Synthetic oligonucleotide
  misc_feature 1..20: note = Target: SCN10A; (-) strand; PAM type: YTN; PAM sequence: TTA
  source 1..20: mol_type = other DNA
aatacttggcactattcctt

SEQ ID NO: 45734 - DNA, 20 bp, synthetic construct
  misc_feature 1..20: note = Description of Artificial Sequence: Synthetic oligonucleotide
  misc_feature 1..20: note = Target: SCN10A; (-) strand; PAM type: YTN; PAM sequence: TTT
  source 1..20: mol_type = other DNA
aaatacttggcactattcct

SEQ ID NO: 45735 - DNA, 20 bp, synthetic construct
  misc_feature 1..20: note = Description of Artificial Sequence: Synthetic oligonucleotide
  misc_feature 1..20: note = Target: SCN10A; (-) strand; PAM type: YTN; PAM sequence: TTT
  source 1..20: mol_type = other DNA
taaatacttggcactattcc

SEQ ID NO: 45736 - DNA, 20 bp, synthetic construct
  misc_feature 1..20: note = Description of Artificial Sequence: Synthetic oligonucleotide
  misc_feature 1..20: note = Target: SCN10A; (-) strand; PAM type: YTN; PAM sequence: TTT
  source 1..20: mol_type = other DNA
ttaaatacttggcactattc

SEQ ID NO: 45737 - DNA, 20 bp, synthetic construct
  misc_feature 1..20: note = Description of Artificial Sequence: Synthetic oligonucleotide
  misc_feature 1..20: note = Target: SCN10A; (-) strand; PAM type: YTN; PAM sequence: TTG
  source 1..20: mol_type = other DNA
ataatatatatttttaaata

SEQ ID NO: 45738 - DNA, 20 bp, synthetic construct
  misc_feature 1..20: note = Description of Artificial Sequence: Synthetic oligonucleotide
  misc_feature 1..20: note = Target: SCN10A; (-) strand; PAM type: YTN; PAM sequence: TTT
  source 1..20: mol_type = other DNA
gataatatatatttttaaat

SEQ ID NO: 45739 - DNA, 20 bp, synthetic construct
  misc_feature 1..20: note = Description of Artificial Sequence: Synthetic oligonucleotide
  misc_feature 1..20: note = Target: SCN10A; (-) strand; PAM type: YTN; PAM sequence: TTG
  source 1..20: mol_type = other DNA
agccatttgataatatatat

SEQ ID NO: 45740 - DNA, 20 bp, synthetic construct
  misc_feature 1..20: note = Description of Artificial Sequence: Synthetic oligonucleotide
  misc_feature 1..20: note = Target: SCN10A; (-) strand; PAM type: YTN; PAM sequence: TTT
  source 1..20: mol_type = other DNA
gagccatttgataatatata

SEQ ID NO: 45741 - DNA, 20 bp, synthetic construct
  misc_feature 1..20: note = Description of Artificial Sequence: Synthetic oligonucleotide
  misc_feature 1..20: note = Target: SCN10A; (-) strand; PAM type: YTN; PAM sequence: TTA
  source 1..20: mol_type = other DNA
aagcacatttgagccatttg

SEQ ID NO: 45742 - DNA, 20 bp, synthetic construct
  misc_feature 1..20: note = Description of Artificial Sequence: Synthetic oligonucleotide
  misc_feature 1..20: note = Target: SCN10A; (-) strand; PAM type: YTN; PAM sequence: TTT
  source 1..20: mol_type = other DNA
aaagcacatttgagccattt

SEQ ID NO: 45743 - DNA, 20 bp, synthetic construct
  misc_feature 1..20: note = Description of Artificial Sequence: Synthetic oligonucleotide
  misc_feature 1..20: note = Target: SCN10A; (-) strand; PAM type: YTN; PAM sequence: CTA
  source 1..20: mol_type = other DNA
atttaaagcacatttgagcc

SEQ ID NO: 45744 - DNA, 20 bp, synthetic construct
  misc_feature 1..20: note = Description of Artificial Sequence: Synthetic oligonucleotide
  misc_feature 1..20: note = Target: SCN10A; (-) strand; PAM type: YTN; PAM sequence: TTG
  source 1..20: mol_type = other DNA
gcaccaactaatttaaagca

SEQ ID NO: 45745 - DNA, 20 bp, synthetic construct
  misc_feature 1..20: note = Description of Artificial Sequence: Synthetic oligonucleotide
  misc_feature 1..20: note = Target: SCN10A; (-) strand; PAM type: YTN; PAM sequence: TTT
  source 1..20: mol_type = other DNA
ggcaccaactaatttaaagc

SEQ ID NO: 45746 - DNA, 20 bp, synthetic construct
  misc_feature 1..20: note = Description of Artificial Sequence: Synthetic oligonucleotide
  misc_feature 1..20: note = Target: SCN10A; (-) strand; PAM type: YTN; PAM sequence: TTT
  source 1..20: mol_type = other DNA
tggcaccaactaatttaaag

SEQ ID NO: 45747 - DNA, 20 bp, synthetic construct
  misc_feature 1..20: note = Description of Artificial Sequence: Synthetic oligonucleotide
  misc_feature 1..20: note = Target: SCN10A; (-) strand; PAM type: YTN; PAM sequence: CTT
  source 1..20: mol_type = other DNA
ttggcaccaactaatttaaa

SEQ ID NO: 45748 - DNA, 20 bp, synthetic construct
  misc_feature 1..20: note = Description of Artificial Sequence: Synthetic oligonucleotide
  misc_feature 1..20: note = Target: SCN10A; (-) strand; PAM type: YTN; PAM sequence: CTC
  source 1..20: mol_type = other DNA
cttttggcaccaactaattt

SEQ ID NO: 45749 - DNA, 20 bp, synthetic construct
  misc_feature 1..20: note = Description of Artificial Sequence: Synthetic oligonucleotide
  misc_feature 1..20: note = Target: SCN10A; (-) strand; PAM type: YTN; PAM sequence: TTC
  source 1..20: mol_type = other DNA
cccacaagtggtatcacagg

SEQ ID NO: 45750 - DNA, 20 bp, synthetic construct
  misc_feature 1..20: note = Description of Artificial Sequence: Synthetic oligonucleotide
  misc_feature 1..20: note = Target: SCN10A; (-) strand; PAM type: YTN; PAM sequence: TTT
  source 1..20: mol_type = other DNA
ccccacaagtggtatcacag

SEQ ID NO: 45751 - DNA, 20 bp, synthetic construct
  misc_feature 1..20: note = Description of Artificial Sequence: Synthetic oligonucleotide
  misc_feature 1..20: note = Target: SCN10A; (-) strand; PAM type: YTN; PAM sequence: TTT
  source 1..20: mol_type = other DNA
tccccacaagtggtatcaca

SEQ ID NO: 45752 - DNA, 20 bp, synthetic construct
  misc_feature 1..20: note = Description of Artificial Sequence: Synthetic oligonucleotide
  misc_feature 1..20: note = Target: SCN10A; (-) strand; PAM type: YTN; PAM sequence: CTT
  source 1..20: mol_type = other DNA
ttccccacaagtggtatcac

SEQ ID NO: 45753 - DNA, 20 bp, synthetic construct
  misc_feature 1..20: note = Description of Artificial Sequence: Synthetic oligonucleotide
  misc_feature 1..20: note = Target: SCN10A; (-) strand; PAM type: YTN; PAM sequence: TTA
  source 1..20: mol_type = other DNA
gccagcttttccccacaagt

SEQ ID NO: 45754 - DNA, 20 bp, synthetic construct
  misc_feature 1..20: note = Description of Artificial Sequence: Synthetic oligonucleotide
  misc_feature 1..20: note = Target: SCN10A; (-) strand; PAM type: YTN; PAM sequence: TTT
  source 1..20: mol_type = other DNA
agccagcttttccccacaag

SEQ ID NO: 45755 - DNA, 20 bp, synthetic construct
  misc_feature 1..20: note = Description of Artificial Sequence: Synthetic oligonucleotide
  misc_feature 1..20: note = Target: SCN10A; (-) strand; PAM type: YTN; PAM sequence: CTC
  source 1..20: mol_type = other DNA
atttagccagcttttcccca

SEQ ID NO: 45756 - DNA, 20 bp, synthetic construct
  misc_feature 1..20: note = Description of Artificial Sequence: Synthetic oligonucleotide
  misc_feature 1..20: note = Target: SCN10A; (-) strand; PAM type: YTN; PAM sequence: TTA
  source 1..20: mol_type = other DNA
tgtgactcatttagccagct

SEQ ID NO: 45757 - DNA, 20 bp, synthetic construct
  misc_feature 1..20: note = Description of Artificial Sequence: Synthetic oligonucleotide
  misc_feature 1..20: note = Target: SCN10A; (-) strand; PAM type: YTN; PAM sequence: CTT
  source 1..20: mol_type = other DNA
atgtgactcatttagccagc

SEQ ID NO: 45758 - DNA, 20 bp, synthetic construct
  misc_feature 1..20: note = Description of Artificial Sequence: Synthetic oligonucleotide
  misc_feature 1..20: note = Target: SCN10A; (-) strand; PAM type: YTN; PAM sequence: TTC
  source 1..20: mol_type = other DNA
ttatgtgactcatttagcca

SEQ ID NO: 45759 - DNA, 20 bp, synthetic construct
  misc_feature 1..20: note = Description of Artificial Sequence: Synthetic oligonucleotide
  misc_feature 1..20: note = Target: SCN10A; (-) strand; PAM type: YTN; PAM sequence: CTG
  source 1..20: mol_type = other DNA
attcttatgtgactcattta

SEQ ID NO: 45760 - DNA, 20 bp, synthetic construct
  misc_feature 1..20: note = Description of Artificial Sequence: Synthetic oligonucleotide
  misc_feature 1..20: note = Target: SCN10A; (-) strand; PAM type: YTN; PAM sequence: CTA
  source 1..20: mol_type = other DNA
agaagtcctgattcttatgt

SEQ ID NO: 45761 - DNA, 20 bp, synthetic construct
  misc_feature 1..20: note = Description of Artificial Sequence: Synthetic oligonucleotide
  misc_feature 1..20: note = Target: SCN10A; (-) strand; PAM type: YTN; PAM sequence: TTA
  source 1..20: mol_type = other DNA
ccagcatcctaagaagtcct

SEQ ID NO: 45762 - DNA, 20 bp, synthetic construct
  misc_feature 1..20: note = Description of Artificial Sequence: Synthetic oligonucleotide
  misc_feature 1..20: note = Target: SCN10A; (-) strand; PAM type: YTN; PAM sequence: TTT
  source 1..20: mol_type = other DNA
accagcatcctaagaagtcc

SEQ ID NO: 45763 - DNA, 20 bp, synthetic construct
  misc_feature 1..20: note = Description of Artificial Sequence: Synthetic oligonucleotide
  misc_feature 1..20: note = Target: SCN10A; (-) strand; PAM type: YTN; PAM sequence: CTT
  source 1..20: mol_type = other DNA
taccagcatcctaagaagtc

SEQ ID NO: 45764 - DNA, 20 bp, synthetic construct
  misc_feature 1..20: note = Description of Artificial Sequence: Synthetic oligonucleotide
  misc_feature 1..20: note = Target: SCN10A; (-) strand; PAM type: YTN; PAM sequence: CTA
  source 1..20: mol_type = other DNA
atctttaccagcatcctaag

SEQ ID NO: 45765 - DNA, 20 bp, synthetic construct
  misc_feature 1..20: note = Description of Artificial Sequence: Synthetic oligonucleotide
  misc_feature 1..20: note = Target: SCN10A; (-) strand; PAM type: YTN; PAM sequence: CTC
  source 1..20: mol_type = other DNA
atctaatctttaccagcatc

SEQ ID NO: 45766 - DNA, 20 bp, synthetic construct
  misc_feature 1..20: note = Description of Artificial Sequence: Synthetic oligonucleotide
  misc_feature 1..20: note = Target: SCN10A; (-) strand; PAM type: YTN; PAM sequence: TTG
  source 1..20: mol_type = other DNA
tccaagagcaaggctcatct

SEQ ID NO: 45767 - DNA, 20 bp, synthetic construct
  misc_feature 1..20: note = Description of Artificial Sequence: Synthetic oligonucleotide
  misc_feature 1..20: note = Target: SCN10A; (-) strand; PAM type: YTN; PAM sequence: CTA
  source 1..20: mol_type = other DNA
agaacaggatgttgtccaag

SEQ ID NO: 45768 - DNA, 20 bp, synthetic construct
  misc_feature 1..20: note = Description of Artificial Sequence: Synthetic oligonucleotide
  misc_feature 1..20: note = Target: SCN10A; (-) strand; PAM type: YTN; PAM sequence: CTC
  source 1..20: mol_type = other DNA
taagaacaggatgttgtcca

SEQ ID NO: 45769 - DNA, 20 bp, synthetic construct
  misc_feature 1..20: note = Description of Artificial Sequence: Synthetic oligonucleotide
  misc_feature 1..20: note = Target: SCN10A; (-) strand; PAM type: YTN; PAM sequence: TTC
  source 1..20: mol_type = other DNA
tctaagaacaggatgttgtc

SEQ ID NO: 45770 - DNA, 20 bp, synthetic construct
  misc_feature 1..20: note = Description of Artificial Sequence: Synthetic oligonucleotide
  misc_feature 1..20: note = Target: SCN10A; (-) strand; PAM type: YTN; PAM sequence: TTT
  source 1..20: mol_type = other DNA
ctctaagaacaggatgttgt

SEQ ID NO: 45771 - DNA, 20 bp, synthetic construct
  misc_feature 1..20: note = Description of Artificial Sequence: Synthetic oligonucleotide
  misc_feature 1..20: note = Target: SCN10A; (-) strand; PAM type: YTN; PAM sequence: CTA
  source 1..20: mol_type = other DNA
atgagatttctctaagaaca

SEQ ID NO: 45772 - DNA, 20 bp, synthetic construct
  misc_feature 1..20: note = Description of Artificial Sequence: Synthetic oligonucleotide
  misc_feature 1..20: note = Target: SCN10A; (-) strand; PAM type: YTN; PAM sequence: CTG
  source 1..20: mol_type = other DNA
tgcatgagatgctaatgaga

SEQ ID NO: 45773 - DNA, 20 bp, synthetic construct
  misc_feature 1..20: note = Description of Artificial Sequence: Synthetic oligonucleotide
  misc_feature 1..20: note = Target: SCN10A; (-) strand; PAM type: YTN; PAM sequence: CTC
  source 1..20: mol_type = other DNA
tgtgcatgagatgctaatga

SEQ ID NO: 45774 - DNA, 20 bp, synthetic construct
  misc_feature 1..20: note = Description of Artificial Sequence: Synthetic oligonucleotide
  misc_feature 1..20: note = Target: SCN10A; (-) strand; PAM type: YTN; PAM sequence: CTG
  source 1..20: mol_type = other DNA
cccaacccaggctctgtgca

SEQ ID NO: 45775 - DNA, 20 bp, synthetic construct
  misc_feature 1..20: note = Description of Artificial Sequence: Synthetic oligonucleotide
  misc_feature 1..20: note = Target: SCN10A; (-) strand; PAM type: YTN; PAM sequence: CTC
  source 1..20: mol_type = other DNA
tgcccaacccaggctctgtg

SEQ ID NO: 45776 - DNA, 20 bp, synthetic construct
  misc_feature 1..20: note = Description of Artificial Sequence: Synthetic oligonucleotide
  misc_feature 1..20: note = Target: SCN10A; (-) strand; PAM type: YTN; PAM sequence: CTG
  source 1..20: mol_type = other DNA
tcccatgcgctctgcccaac

SEQ ID NO: 45777 - DNA, 20 bp, synthetic construct
  misc_feature 1..20: note = Description of Artificial Sequence: Synthetic oligonucleotide
  misc_feature 1..20: note = Target: SCN10A; (-) strand; PAM type: YTN; PAM sequence: TTC
  source 1..20: mol_type = other DNA
acacagctgtcccatgcgct

SEQ ID NO: 45778 - DNA, 20 bp, synthetic construct
  misc_feature 1..20: note = Description of Artificial Sequence: Synthetic oligonucleotide
  misc_feature 1..20: note = Target: SCN10A; (-) strand; PAM type: YTN; PAM sequence: TTT
  source 1..20: mol_type = other DNA
cacacagctgtcccatgcgc

SEQ ID NO: 45779 - DNA, 20 bp, synthetic construct
  misc_feature 1..20: note = Description of Artificial Sequence: Synthetic oligonucleotide
  misc_feature 1..20: note = Target: SCN10A; (-) strand; PAM type: YTN; PAM sequence: CTT
  source 1..20: mol_type = other DNA
tcacacagctgtcccatgcg

SEQ ID NO: 45780 - DNA, 20 bp, synthetic construct
  misc_feature 1..20: note = Description of Artificial Sequence: Synthetic oligonucleotide
  misc_feature 1..20: note = Target: SCN10A; (-) strand; PAM type: YTN; PAM sequence: TTG
  source 1..20: mol_type = other DNA
tctttcacacagctgtccca

SEQ ID NO: 45781 - DNA, 20 bp, synthetic construct
  misc_feature 1..20: note = Description of Artificial Sequence: Synthetic oligonucleotide
  misc_feature 1..20: note = Target: SCN10A; (-) strand; PAM type: YTN; PAM sequence: TTG
  source 1..20: mol_type = other DNA
gggattgtctttcacacagc

SEQ ID NO: 45782 - DNA, 20 bp, synthetic construct
  misc_feature 1..20: note = Description of Artificial Sequence: Synthetic oligonucleotide
  misc_feature 1..20: note = Target: SCN10A; (-) strand; PAM type: YTN; PAM sequence: CTT
  source 1..20: mol_type = other DNA
ggggattgtctttcacacag

SEQ ID NO: 45783 - DNA, 20 bp, synthetic construct
  misc_feature 1..20: note = Description of Artificial Sequence: Synthetic oligonucleotide
  misc_feature 1..20: note = Target: SCN10A; (-) strand; PAM type: YTN; PAM sequence: TTG
  source 1..20: mol_type = other DNA
aggtgcttggggattgtctt

SEQ ID NO: 45784 - DNA, 20 bp, synthetic construct
  misc_feature 1..20: note = Description of Artificial Sequence: Synthetic oligonucleotide
  misc_feature 1..20: note = Target: SCN10A; (-) strand; PAM type: YTN; PAM sequence: CTT
  source 1..20: mol_type = other DNA
gaggtgcttggggattgtct

SEQ ID NO: 45785 - DNA, 20 bp, synthetic construct
  misc_feature 1..20: note = Description of Artificial Sequence: Synthetic oligonucleotide
  misc_feature 1..20: note = Target: SCN10A; (-) strand; PAM type: YTN; PAM sequence: TTC
  source 1..20: mol_type = other DNA
cccaggcagacaaacaggga

SEQ ID NO: 45786 - DNA, 20 bp, synthetic construct
  misc_feature 1..20: note = Description of Artificial Sequence: Synthetic oligonucleotide
  misc_feature 1..20: note = Target: SCN10A; (-) strand; PAM type: YTN; PAM sequence: CTG
  source 1..20: mol_type = other DNA
gaagaaaaagtcagaattcc

SEQ ID NO: 45787 - DNA, 20 bp, synthetic construct
  misc_feature 1..20: note = Description of Artificial Sequence: Synthetic oligonucleotide
  misc_feature 1..20: note = Target: SCN10A; (-) strand; PAM type: YTN; PAM sequence: TTG
  source 1..20: mol_type = other DNA
agcagggcctggaagaaaaa

SEQ ID NO: 45788 - DNA, 20 bp, synthetic construct
  misc_feature 1..20: note = Description of Artificial Sequence: Synthetic oligonucleotide
  misc_feature 1..20: note = Target: SCN10A; (-) strand; PAM type: YTN; PAM sequence: TTT
  source 1..20: mol_type = other DNA
gagcagggcctggaagaaaa

SEQ ID NO: 45789 - DNA, 20 bp, synthetic construct
  misc_feature 1..20: note = Description of Artificial Sequence: Synthetic oligonucleotide
  misc_feature 1..20: note = Target: SCN10A; (-) strand; PAM type: YTN; PAM sequence: TTG
  source 1..20: mol_type = other DNA
gcgtttgagcagggcctgga

SEQ ID NO: 45790 - DNA, 20 bp, synthetic construct
  misc_feature 1..20: note = Description of Artificial Sequence: Synthetic oligonucleotide
  misc_feature 1..20: note = Target: SCN10A; (-) strand; PAM type: YTN; PAM sequence: TTC
  source 1..20: mol_type = other DNA
cagaggagttggcgtttgag

SEQ ID NO: 45791 - DNA, 20 bp, synthetic construct
  misc_feature 1..20: note = Description of Artificial Sequence: Synthetic oligonucleotide
  misc_feature 1..20: note = Target: SCN10A; (-) strand; PAM type: YTN; PAM sequence: TTT
  source 1..20: mol_type = other DNA
ccagaggagttggcgtttga

SEQ ID NO: 45792 - DNA, 20 bp, synthetic construct
  misc_feature 1..20: note = Description of Artificial Sequence: Synthetic oligonucleotide
  misc_feature 1..20: note = Target: SCN10A; (-) strand; PAM type: YTN; PAM sequence: CTT
  source 1..20: mol_type = other DNA
tccagaggagttggcgtttg

SEQ ID NO: 45793 - DNA, 20 bp, synthetic construct
  misc_feature 1..20: note = Description of Artificial Sequence: Synthetic oligonucleotide
  misc_feature 1..20: note = Target: SCN10A; (-) strand; PAM type: YTN; PAM sequence: TTA
  source 1..20: mol_type = other DNA
aaccatgccaagctttccag

SEQ ID NO: 45794 - DNA, 20 bp, synthetic construct
  misc_feature 1..20: note = Description of Artificial Sequence: Synthetic oligonucleotide
  misc_feature 1..20: note = Target: SCN10A; (-) strand; PAM type: YTN; PAM sequence: TTT
  source 1..20: mol_type = other DNA
aaaccatgccaagctttcca

SEQ ID NO: 45795 - DNA, 20 bp, synthetic construct
  misc_feature 1..20: note = Description of Artificial Sequence: Synthetic oligonucleotide
  misc_feature 1..20: note = Target: SCN10A; (-) strand; PAM type: YTN; PAM sequence: TTG
  source 1..20: mol_type = other DNA
acataaagaagtttaaacca

SEQ ID NO: 45796 - DNA, 20 bp, synthetic construct
  misc_feature 1..20: note = Description of Artificial Sequence: Synthetic oligonucleotide
  misc_feature 1..20: note = Target: SCN10A; (-) strand; PAM type: YTN; PAM sequence: CTT
  source 1..20: mol_type = other DNA
gacataaagaagtttaaacc

SEQ ID NO: 45797 - DNA, 20 bp, synthetic construct
  misc_feature 1..20: note = Description of Artificial Sequence: Synthetic oligonucleotide
  misc_feature 1..20: note = Target: SCN10A; (-) strand; PAM type: YTN; PAM sequence: TTG
  source 1..20: mol_type = other DNA
agtgacaaagggcaaaaggg

SEQ ID NO: 45798 - DNA, 20 bp, synthetic construct
  misc_feature 1..20: note = Description of Artificial Sequence: Synthetic oligonucleotide
  misc_feature 1..20: note = Target: SCN10A; (-) strand; PAM type: YTN; PAM sequence: CTT
  source 1..20: mol_type = other DNA
gagtgacaaagggcaaaagg

SEQ ID NO: 45799 - DNA, 20 bp, synthetic construct
  misc_feature 1..20: note = Description of Artificial Sequence: Synthetic oligonucleotide
  misc_feature 1..20: note = Target: SCN10A; (-) strand; PAM type: YTN; PAM sequence: TTC
  source 1..20: mol_type = other DNA
agggcttgagtgacaaaggg

SEQ ID NO: 45800 - DNA, 20 bp, synthetic construct
  misc_feature 1..20: note = Description of Artificial Sequence: Synthetic oligonucleotide
  misc_feature 1..20: note = Target: SCN10A; (-) strand; PAM type: YTN; PAM sequence: CTT
  source 1..20: mol_type = other DNA
cagggcttgagtgacaaagg

SEQ ID NO: 45801 - DNA, 20 bp, synthetic construct
  misc_feature 1..20: note = Description of Artificial Sequence: Synthetic oligonucleotide
  misc_feature 1..20: note = Target: SCN10A; (-) strand; PAM type: YTN; PAM sequence: TTA
  source 1..20: mol_type = other DNA
tccccaagggacagccacag

SEQ ID NO: 45802 - DNA, 20 bp, synthetic construct
  misc_feature 1..20: note = Description of Artificial Sequence: Synthetic oligonucleotide
  misc_feature 1..20: note = Target: SCN10A; (-) strand; PAM type: YTN; PAM sequence: TTC
  source 1..20: mol_type = other DNA
cagcaggaagtgatccccaa

SEQ ID NO: 45803 - DNA, 20 bp, synthetic construct
  misc_feature 1..20: note = Description of Artificial Sequence: Synthetic oligonucleotide
  misc_feature 1..20: note = Target: SCN10A; (-) strand; PAM type: YTN; PAM sequence: CTT
  source 1..20: mol_type = other DNA
ccagcaggaagtgatcccca

SEQ ID NO: 45804 - DNA, 20 bp, synthetic construct
  misc_feature 1..20: note = Description of Artificial Sequence: Synthetic oligonucleotide
  misc_feature 1..20: note = Target: SCN10A; (-) strand; PAM type: YTN; PAM sequence: CTC
  source 1..20: mol_type = other DNA
agagcttccagcaggaagtg

SEQ ID NO: 45805 - DNA, 20 bp, synthetic construct
  misc_feature 1..20: note = Description of Artificial Sequence: Synthetic oligonucleotide
  misc_feature 1..20: note = Target: SCN10A; (-) strand; PAM type: YTN; PAM sequence: TTG
  source 1..20: mol_type = other DNA
gaggatgatggtggggaaga

SEQ ID NO: 45806 - DNA, 20 bp, synthetic construct
  misc_feature 1..20: note = Description of Artificial Sequence: Synthetic oligonucleotide
  misc_feature 1..20: note = Target: SCN10A; (-) strand; PAM type: YTN; PAM sequence: CTT
  source 1..20: mol_type = other DNA
ggaggatgatggtggggaag

SEQ ID NO: 45807 - DNA, 20 bp, synthetic construct
  misc_feature 1..20: note = Description of Artificial Sequence: Synthetic oligonucleotide
  misc_feature 1..20: note = Target: SCN10A; (-) strand; PAM type: YTN; PAM sequence: TTG
  source 1..20: mol_type = other DNA
atgacttggaggatgatggt

SEQ ID NO: 45808 - DNA, 20 bp, synthetic construct
  misc_feature 1..20: note = Description of Artificial Sequence: Synthetic oligonucleotide
  misc_feature 1..20: note = Target: SCN10A; (-) strand; PAM type: YTN; PAM sequence: CTT
  source 1..20: mol_type = other DNA
gatgacttggaggatgatgg

SEQ ID NO: 45809 - DNA, 20 bp, synthetic construct
  misc_feature 1..20: note = Description of Artificial Sequence: Synthetic oligonucleotide
  misc_feature 1..20: note = Target: SCN10A; (-) strand; PAM type: YTN; PAM sequence: CTG
  source 1..20: mol_type = other DNA
atcttgatgacttggaggat

SEQ ID NO: 45810 - DNA, 20 bp, synthetic construct
  misc_feature 1..20: note = Description of Artificial Sequence: Synthetic oligonucleotide
  misc_feature 1..20: note = Target: SCN10A; (-) strand; PAM type: YTN; PAM sequence: CTG
  source 1..20: mol_type = other DNA
agggtgaatctgatcttgat

SEQ ID NO: 45811 - DNA, 20 bp, synthetic construct
  misc_feature 1..20: note = Description of Artificial Sequence: Synthetic oligonucleotide
  misc_feature 1..20: note = Target: SCN10A; (-) strand; PAM type: YTN; PAM sequence: TTG
  source 1..20: mol_type = other DNA
ctgagggtgaatctgatctt

SEQ ID NO: 45812 - DNA, 20 bp, synthetic construct
  misc_feature 1..20: note = Description of Artificial Sequence: Synthetic oligonucleotide
  misc_feature 1..20: note = Target: SCN10A; (-) strand; PAM type: YTN; PAM sequence: CTG
  source 1..20: mol_type = other DNA
tgcccattgctgagggtgaa

SEQ ID NO: 45813 - DNA, 20 bp, synthetic construct
  misc_feature 1..20: note = Description of Artificial Sequence: Synthetic oligonucleotide
  misc_feature 1..20: note = Target: SCN10A; (-) strand; PAM type: YTN; PAM sequence: CTC
  source 1..20: mol_type = other DNA
tgtgcccattgctgagggtg

SEQ ID NO: 45814 - DNA, 20 bp, synthetic construct
  misc_feature 1..20: note = Description of Artificial Sequence: Synthetic oligonucleotide
  misc_feature 1..20: note = Target: SCN10A; (-) strand; PAM type: YTN; PAM sequence: CTG
  source 1..20: mol_type = other DNA
tgtgggtctctgtgcccatt

SEQ ID NO: 45815 - DNA, 20 bp, synthetic construct
  misc_feature 1..20: note = Description of Artificial Sequence: Synthetic oligonucleotide
  misc_feature 1..20: note = Target: SCN10A; (-) strand; PAM type: YTN; PAM sequence: CTA
  source 1..20: mol_type = other DNA
atccgactgtgtgggtctct

SEQ ID NO: 45816 - DNA, 20 bp, synthetic construct
  misc_feature 1..20: note = Description of Artificial Sequence: Synthetic oligonucleotide
  misc_feature 1..20: note = Target: SCN10A; (-) strand; PAM type: YTN; PAM sequence: TTC
  source 1..20: mol_type = other DNA
atcgctaatccgactgtgtg

SEQ ID NO: 45817 - DNA, 20 bp, synthetic construct
  misc_feature 1..20: note = Description of Artificial Sequence: Synthetic oligonucleotide
  misc_feature 1..20: note = Target: SCN10A; (-) strand; PAM type: YTN; PAM sequence: CTT
  source 1..20: mol_type = other DNA
catcgctaatccgactgtgt

SEQ ID NO: 45818 - DNA, 20 bp, synthetic construct
  misc_feature 1..20: note = Description of Artificial Sequence: Synthetic oligonucleotide
  misc_feature 1..20: note = Target: SCN10A; (-) strand; PAM type: YTN; PAM sequence: CTC
  source 1..20: mol_type = other DNA
ccagaggccccagggatgag

SEQ ID NO: 45819 - DNA, 20 bp, synthetic construct
  misc_feature 1..20: note = Description of Artificial Sequence: Synthetic oligonucleotide
  misc_feature 1..20: note = Target: SCN10A; (-) strand; PAM type: YTN; PAM sequence: CTC
  source 1..20: mol_type = other DNA
caagctcccagaggccccag

SEQ ID NO: 45820 - DNA, 20 bp, synthetic construct
  misc_feature 1..20: note = Description of Artificial Sequence: Synthetic oligonucleotide
  misc_feature 1..20: note = Target: SCN10A; (-) strand; PAM type: YTN; PAM sequence: CTG
  source 1..20: mol_type = other DNA
gagggctccaagctcccaga

SEQ ID NO: 45821 - DNA, 20 bp, synthetic construct
  misc_feature 1..20: note = Description of Artificial Sequence: Synthetic oligonucleotide
  misc_feature 1..20: note = Target: SCN10A; (-) strand; PAM type: YTN; PAM sequence: CTC
  source 1..20: mol_type = other DNA
tggagggctccaagctccca

SEQ ID NO: 45822 - DNA, 20 bp, synthetic construct
  misc_feature 1..20: note = Description of Artificial Sequence: Synthetic oligonucleotide
  misc_feature 1..20: note = Target: SCN10A; (-) strand; PAM type: YTN; PAM sequence: CTG
  source 1..20: mol_type = other DNA
ccagggggagctctggaggg

SEQ ID NO: 45823 - DNA, 20 bp, synthetic construct
  misc_feature 1..20: note = Description of Artificial Sequence: Synthetic oligonucleotide
  misc_feature 1..20: note = Target: SCN10A; (-) strand; PAM type: YTN; PAM sequence: CTG
  source 1..20: mol_type = other DNA
ccaacactgccagggggagc

SEQ ID NO: 45824 - DNA, 20 bp, synthetic construct
  misc_feature 1..20: note = Description of Artificial Sequence: Synthetic oligonucleotide
  misc_feature 1..20: note = Target: SCN10A; (-) strand; PAM type: YTN; PAM sequence: TTG
  source 1..20: mol_type = other DNA
ctgccaacactgccaggggg

SEQ ID NO: 45825 - DNA, 20 bp, synthetic construct
  misc_feature 1..20: note = Description of Artificial Sequence: Synthetic oligonucleotide
  misc_feature 1..20: note = Target: SCN10A; (-) strand; PAM type: YTN; PAM sequence: CTG
  source 1..20: mol_type = other DNA
agaaccacattgctgccaac

SEQ ID NO: 45826 - DNA, 20 bp, synthetic construct
  misc_feature 1..20: note = Description of Artificial Sequence: Synthetic oligonucleotide
  misc_feature 1..20: note = Target: SCN10A; (-) strand; PAM type: YTN; PAM sequence: CTC
  source 1..20: mol_type = other DNA
caaggctgagaaccacattg

SEQ ID NO: 45827 - DNA, 20 bp, synthetic construct
  misc_feature 1..20: note = Description of Artificial Sequence: Synthetic oligonucleotide
  misc_feature 1..20: note = Target: SCN10A; (-) strand; PAM type: YTN; PAM sequence: CTC
  source 1..20: mol_type = other DNA
cagctccaaggctgagaacc

SEQ ID NO: 45828 - DNA, 20 bp, synthetic construct
  misc_feature 1..20: note = Description of Artificial Sequence: Synthetic oligonucleotide
  misc_feature 1..20: note = Target: SCN10A; (-) strand; PAM type: YTN; PAM sequence: CTC
  source 1..20: mol_type = other DNA
tccagctccaaggctgagaa

SEQ ID NO: 45829 - DNA, 20 bp, synthetic construct
  misc_feature 1..20: note = Description of Artificial Sequence: Synthetic oligonucleotide
  misc_feature 1..20: note = Target: SCN10A; (-) strand; PAM type: YTN; PAM sequence: CTC
  source 1..20: mol_type = other DNA
ccactctccagctccaaggc

SEQ ID NO: 45830 - DNA, 20 bp, synthetic construct
  misc_feature 1..20: note = Description of Artificial Sequence: Synthetic oligonucleotide
  misc_feature 1..20: note = Target: SCN10A; (-) strand; PAM type: YTN; PAM sequence: CTG
  source 1..20: mol_type = other DNA
gtggtgaaactcccactctc

SEQ ID NO: 45831 - DNA, 20 bp, synthetic construct
  misc_feature 1..20: note = Description of Artificial Sequence: Synthetic oligonucleotide
  misc_feature 1..20: note = Target: SCN10A; (-) strand; PAM type: YTN; PAM sequence: CTG
  source 1..20: mol_type = other DNA
agctggtggtgaaactccca

SEQ ID NO: 45832 - DNA, 20 bp, synthetic construct
  misc_feature 1..20: note = Description of Artificial Sequence: Synthetic oligonucleotide
  misc_feature 1..20: note = Target: SCN10A; (-) strand; PAM type: YTN; PAM sequence: TTC
  source 1..20: mol_type = other DNA
ccccagcccaaggcagagcc

SEQ ID NO: 45833 - DNA, 20 bp, synthetic construct
  misc_feature 1..20: note = Description of Artificial Sequence: Synthetic oligonucleotide
  misc_feature 1..20: note = Target: SCN10A; (-) strand; PAM type: YTN; PAM sequence: CTG
  source 1..20: mol_type = other DNA
cccattcccccagcccaagg

SEQ ID NO: 45834 - DNA, 20 bp, synthetic construct
  misc_feature 1..20: note = Description of Artificial Sequence: Synthetic oligonucleotide
  misc_feature 1..20: note = Target: SCN10A; (-) strand; PAM type: YTN; PAM sequence: TTC
  source 1..20: mol_type = other DNA
agcaggtcctgcccattccc

SEQ ID NO: 45835 - DNA, 20 bp, synthetic construct
  misc_feature 1..20: note = Description of Artificial Sequence: Synthetic oligonucleotide
  misc_feature 1..20: note = Target: SCN10A; (-) strand; PAM type: YTN; PAM sequence: CTT
  source 1..20: mol_type = other DNA
cagcaggtcctgcccattcc

SEQ ID NO: 45836 - DNA, 20 bp, synthetic construct
  misc_feature 1..20: note = Description of Artificial Sequence: Synthetic oligonucleotide
  misc_feature 1..20: note = Target: SCN10A; (-) strand; PAM type: YTN; PAM sequence: TTC
  source 1..20: mol_type = other DNA
ttcagcaggtcctgcccatt

SEQ ID NO: 45837 - DNA, 20 bp, synthetic construct
  misc_feature 1..20: note = Description of Artificial Sequence: Synthetic oligonucleotide
  misc_feature 1..20: note = Target: SCN10A; (-) strand; PAM type: YTN; PAM sequence: CTT
  source 1..20: mol_type = other DNA
cttcagcaggtcctgcccat

SEQ ID NO: 45838 - DNA, 20 bp, synthetic construct
  misc_feature 1..20: note = Description of Artificial Sequence: Synthetic oligonucleotide
  misc_feature 1..20: note = Target: SCN10A; (-) strand; PAM type: YTN; PAM sequence: TTG
  source 1..20: mol_type = other DNA
cagcttcttcagcaggtcct

SEQ ID NO: 45839 - DNA, 20 bp, synthetic construct
  misc_feature 1..20: note = Description of Artificial Sequence: Synthetic oligonucleotide
  misc_feature 1..20: note = Target: SCN10A; (-) strand; PAM type: YTN; PAM sequence: TTT
  source 1..20: mol_type = other DNA
gcagcttcttcagcaggtcc

SEQ ID NO: 45840 - DNA, 20 bp, synthetic construct
  misc_feature 1..20: note = Description of Artificial Sequence: Synthetic oligonucleotide
  misc_feature 1..20: note = Target: SCN10A; (-) strand; PAM type: YTN; PAM sequence: CTT
  source 1..20: mol_type = other DNA
tgcagcttcttcagcaggtc

SEQ ID NO: 45841 - DNA, 20 bp, synthetic construct
  misc_feature 1..20: note = Description of Artificial Sequence: Synthetic oligonucleotide
  misc_feature 1..20: note = Target: SCN10A; (-) strand; PAM type: YTN; PAM sequence: CTC
  source 1..20: mol_type = other DNA
tttgcagcttcttcagcagg

SEQ ID NO: 45842 - DNA, 20 bp, synthetic construct
  misc_feature 1..20: note = Description of Artificial Sequence: Synthetic oligonucleotide
  misc_feature 1..20: note = Target: SCN10A; (-) strand; PAM type: YTN; PAM sequence: TTG
  source 1..20: mol_type = other DNA
gccatcgtaccaaacaggct

SEQ ID NO: 45843 - DNA, 20 bp, synthetic construct
  misc_feature 1..20: note = Description of Artificial Sequence: Synthetic oligonucleotide
  misc_feature 1..20: note = Target: SCN10A; (-) strand; PAM type: YTN; PAM sequence: TTT
  source 1..20: mol_type = other DNA
ggccatcgtaccaaacaggc

SEQ ID NO: 45844 - DNA, 20 bp, synthetic construct
  misc_feature 1..20: note = Description of Artificial Sequence: Synthetic oligonucleotide
  misc_feature 1..20: note = Target: SCN10A; (-) strand; PAM type: YTN; PAM sequence: CTT
  source 1..20: mol_type = other DNA
tggccatcgtaccaaacagg

SEQ ID NO: 45845 - DNA, 20 bp, synthetic construct
  misc_feature 1..20: note = Description of Artificial Sequence: Synthetic oligonucleotide
  misc_feature 1..20: note = Target: SCN10A; (-) strand; PAM type: YTN; PAM sequence: CTG
  source 1..20: mol_type = other DNA
gcacggatccaggtctttgg

SEQ ID NO: 45846 - DNA, 20 bp, synthetic construct
  misc_feature 1..20: note = Description of Artificial Sequence: Synthetic oligonucleotide
  misc_feature 1..20: note = Target: SCN10A; (-) strand; PAM type: YTN; PAM sequence: CTG
  source 1..20: mol_type = other DNA
caggtggccctggcacggat

SEQ ID NO: 45847 - DNA, 20 bp, synthetic construct
  misc_feature 1..20: note = Description of Artificial Sequence: Synthetic oligonucleotide
  misc_feature 1..20: note = Target: SCN10A; (-) strand; PAM type: YTN; PAM sequence: CTC
  source 1..20: mol_type = other DNA
acagccccggaggacgatgg

SEQ ID NO: 45848 - DNA, 20 bp, synthetic construct
  misc_feature 1..20: note = Description of Artificial Sequence: Synthetic oligonucleotide
  misc_feature 1..20: note = Target: SCN10A; (-) strand; PAM type: YTN; PAM sequence: CTG
  source 1..20: mol_type = other DNA
acaacctcacagccccggag

SEQ ID NO: 45849 - DNA, 20 bp, synthetic construct
  misc_feature 1..20: note = Description of Artificial Sequence: Synthetic oligonucleotide
  misc_feature 1..20: note = Target: SCN10A; (-) strand; PAM type: YTN; PAM sequence: TTC
  source 1..20: mol_type = other DNA
agtgctgacaacctcacagc

SEQ ID NO: 45850 - DNA, 20 bp, synthetic construct
  misc_feature 1..20: note = Description of Artificial Sequence: Synthetic oligonucleotide
  misc_feature 1..20: note = Target: SCN10A; (-) strand; PAM type: YTN; PAM sequence: TTT
  source 1..20: mol_type = other DNA
cagtgctgacaacctcacag

SEQ ID NO: 45851 - DNA, 20 bp, synthetic construct
  misc_feature 1..20: note = Description of Artificial Sequence: Synthetic oligonucleotide
  misc_feature 1..20: note = Target: SCN10A; (-) strand; PAM type: YTN; PAM sequence: CTT
  source 1..20: mol_type = other DNA
tcagtgctgacaacctcaca

SEQ ID NO: 45852 - DNA, 20 bp, synthetic construct
  misc_feature 1..20: note = Description of Artificial Sequence: Synthetic oligonucleotide
  misc_feature 1..20: note = Target: SCN10A; (-) strand; PAM type: YTN; PAM sequence: CTC
  source 1..20: mol_type = other DNA
tttcagtgctgacaacctca

SEQ ID NO: 45853 - DNA, 20 bp, synthetic construct
  misc_feature 1..20: note = Description of Artificial Sequence: Synthetic oligonucleotide
  misc_feature 1..20: note = Target: SCN10A; (-) strand; PAM type: YTN; PAM sequence: TTG
  source 1..20: mol_type = other DNA
aactctttcagtgctgacaa

SEQ ID NO: 45854 - DNA, 20 bp, synthetic construct
  misc_feature 1..20: note = Description of Artificial Sequence: Synthetic oligonucleotide
  misc_feature 1..20: note = Target: SCN10A; (-) strand; PAM type: YTN; PAM sequence: CTA
  source 1..20: mol_type = other DNA
ttgaactctttcagtgctga

SEQ ID NO: 45855 - DNA, 20 bp, synthetic construct
  misc_feature 1..20: note = Description of Artificial Sequence: Synthetic oligonucleotide
  misc_feature 1..20: note = Target: SCN10A; (-) strand; PAM type: YTN; PAM sequence: CTG
  source 1..20: mol_type = other DNA
ctattgaactctttcagtgc

SEQ ID NO: 45856 - DNA, 20 bp, synthetic construct
  misc_feature 1..20: note = Description of Artificial Sequence: Synthetic oligonucleotide
  misc_feature 1..20: note = Target: SCN10A; (-) strand; PAM type: YTN; PAM sequence: TTC
  source 1..20: mol_type = other DNA
atcgccctgctattgaactc

SEQ ID NO: 45857 - DNA, 20 bp, synthetic construct
  misc_feature 1..20: note = Description of Artificial Sequence: Synthetic oligonucleotide
  misc_feature 1..20: note = Target: SCN10A; (-) strand; PAM type: YTN; PAM sequence: CTG
  source 1..20: mol_type = other DNA
ttcatcgccctgctattgaa

SEQ ID NO: 45858 - DNA, 20 bp, synthetic construct
  misc_feature 1..20: note = Description of Artificial Sequence: Synthetic oligonucleotide
  misc_feature 1..20: note = Target: SCN10A; (-) strand; PAM type: YTN; PAM sequence: TTA
  source 1..20: mol_type = other DNA
acctgttcatcgccctgcta

SEQ ID NO: 45859 - DNA, 20 bp, synthetic construct
  misc_feature 1..20: note = Description of Artificial Sequence: Synthetic oligonucleotide
  misc_feature 1..20: note = Target: SCN10A; (-) strand; PAM type: YTN; PAM sequence: CTT
  source 1..20: mol_type = other DNA
aacctgttcatcgccctgct

SEQ ID NO: 45860 - DNA, 20 bp, synthetic construct
  misc_feature 1..20: note = Description of Artificial Sequence: Synthetic oligonucleotide
  misc_feature 1..20: note = Target: SCN10A; (-) strand; PAM type: YTN; PAM sequence: TTC
  source 1..20: mol_type = other DNA
aggtgcttaacctgttcatc

SEQ ID NO: 45861 - DNA, 20 bp, synthetic construct
  misc_feature 1..20: note = Description of Artificial Sequence: Synthetic oligonucleotide
  misc_feature 1..20: note = Target: SCN10A; (-) strand; PAM type: YTN; PAM sequence: CTT
  source 1..20: mol_type = other DNA
caggtgcttaacctgttcat

SEQ ID NO: 45862 - DNA, 20 bp, synthetic construct
  misc_feature 1..20: note = Description of Artificial Sequence: Synthetic oligonucleotide
  misc_feature 1..20: note = Target: SCN10A; (-) strand; PAM type: YTN; PAM sequence: CTC
  source 1..20: mol_type = other DNA
ttcaggtgcttaacctgttc

SEQ ID NO: 45863 - DNA, 20 bp, synthetic construct
  misc_feature 1..20: note = Description of Artificial Sequence: Synthetic oligonucleotide
  misc_feature 1..20: note = Target: SCN10A; (-) strand; PAM type: YTN; PAM sequence: TTC
  source 1..20: mol_type = other DNA
tcttcaggtgcttaacctgt

SEQ ID NO: 45864 - DNA, 20 bp, synthetic construct
  misc_feature 1..20: note = Description of Artificial Sequence: Synthetic oligonucleotide
  misc_feature 1..20: note = Target: SCN10A; (-) strand; PAM type: YTN; PAM sequence: CTT
  source 1..20: mol_type = other DNA
ctcttcaggtgcttaacctg

SEQ ID NO: 45865 - DNA, 20 bp, synthetic construct
  misc_feature 1..20: note = Description of Artificial Sequence: Synthetic oligonucleotide
  misc_feature 1..20: note = Target: SCN10A; (-) strand; PAM type: YTN; PAM sequence: TTC
  source 1..20: mol_type = other DNA
cttctcttcaggtgcttaac

SEQ ID NO: 45866 - DNA, 20 bp, synthetic construct
  misc_feature 1..20: note = Description of Artificial Sequence: Synthetic oligonucleotide
  misc_feature 1..20: note = Target: SCN10A; (-) strand; PAM type: YTN; PAM sequence: TTC
  source 1..20: mol_type = other DNA
cattccttctcttcaggtgc

SEQ ID NO: 45867 - DNA, 20 bp, synthetic construct
  misc_feature 1..20: note = Description of Artificial Sequence: Synthetic oligonucleotide
  misc_feature 1..20: note = Target: SCN10A; (-) strand; PAM type: YTN; PAM sequence: CTT
  source 1..20: mol_type = other DNA
ccattccttctcttcaggtg

SEQ ID NO: 45868 - DNA, 20 bp, synthetic construct
  misc_feature 1..20: note = Description of Artificial Sequence: Synthetic oligonucleotide
  misc_feature 1..20: note = Target: SCN10A; (-) strand; PAM type: YTN; PAM sequence: TTC
  source 1..20: mol_type = other DNA
ccttccattccttctcttca

SEQ ID NO: 45869 - DNA, 20 bp, synthetic construct
  misc_feature 1..20: note = Description of Artificial Sequence: Synthetic oligonucleotide
  misc_feature 1..20: note = Target: SCN10A; (-) strand; PAM type: YTN; PAM sequence: CTT
  source 1..20: mol_type = other DNA
cccttccattccttctcttc

SEQ ID NO: 45870 - DNA, 20 bp, synthetic construct
  misc_feature 1..20: note = Description of Artificial Sequence: Synthetic oligonucleotide
  misc_feature 1..20: note = Target: SCN10A; (-) strand; PAM type: YTN; PAM sequence: TTG
  source 1..20: mol_type = other DNA
atcaatcttcccttccattc

SEQ ID NO: 45871 - DNA, 20 bp, synthetic construct
  misc_feature 1..20: note = Description of Artificial Sequence: Synthetic oligonucleotide
  misc_feature 1..20: note = Target: SCN10A; (-) strand; PAM type: YTN; PAM sequence: TTA
  source 1..20: mol_type = other DNA
gagattgatcaatcttccct

SEQ ID NO: 45872 - DNA, 20 bp, synthetic construct
  misc_feature 1..20: note = Description of Artificial Sequence: Synthetic oligonucleotide
  misc_feature 1..20: note = Target: SCN10A; (-) strand; PAM type: YTN; PAM sequence: CTT
  source 1..20: mol_type = other DNA
agagattgatcaatcttccc

SEQ ID NO: 45873 - DNA, 20 bp, synthetic construct
  misc_feature 1..20: note = Description of Artificial Sequence: Synthetic oligonucleotide
  misc_feature 1..20: note = Target: SCN10A; (-) strand; PAM type: YTN; PAM sequence: CTC
  source 1..20: mol_type = other DNA
agcttagagattgatcaatc

SEQ ID NO: 45874 - DNA, 20 bp, synthetic construct
  misc_feature 1..20: note = Description of Artificial Sequence: Synthetic oligonucleotide
  misc_feature 1..20: note = Target: SCN10A; (-) strand; PAM type: YTN; PAM sequence: CTA
  source 1..20: mol_type = other DNA
acccggtaggccaatgtggg

SEQ ID NO: 45875 - DNA, 20 bp, synthetic construct
  misc_feature 1..20: note = Description of Artificial Sequence: Synthetic oligonucleotide
  misc_feature 1..20: note = Target: SCN10A; (-) strand; PAM type: YTN; PAM sequence: CTG
  source 1..20: mol_type = other DNA
ctaacccggtaggccaatgt

SEQ ID NO: 45876 - DNA, 20 bp, synthetic construct
  misc_feature 1..20: note = Description of Artificial Sequence: Synthetic oligonucleotide
  misc_feature 1..20: note = Target: SCN10A; (-) strand; PAM type: YTN; PAM sequence: TTG
  source 1..20: mol_type = other DNA
ccagccagctgctaacccgg

SEQ ID NO: 45877 - DNA, 20 bp, synthetic construct
  misc_feature 1..20: note = Description of Artificial Sequence: Synthetic oligonucleotide
  misc_feature 1..20: note = Target: SCN10A; (-) strand; PAM type: YTN; PAM sequence: CTT
  source 1..20: mol_type = other DNA
gccagccagctgctaacccg

SEQ ID NO: 45878 - DNA, 20 bp, synthetic construct
  misc_feature 1..20: note = Description of Artificial Sequence: Synthetic oligonucleotide
  misc_feature 1..20: note = Target: SCN10A; (-) strand; PAM type: YTN; PAM sequence: CTG
  source 1..20: mol_type = other DNA
tcttgccagccagctgctaa

SEQ ID NO: 45879 - DNA, 20 bp, synthetic construct
  misc_feature 1..20: note = Description of Artificial Sequence: Synthetic oligonucleotide
  misc_feature 1..20: note = Target: SCN10A; (-) strand; PAM type: YTN; PAM sequence: TTC
  source 1..20: mol_type = other DNA
ccccaaaagggacagcatcc

SEQ ID NO: 45880 - DNA, 20 bp, synthetic construct
  misc_feature 1..20: note = Description of Artificial Sequence: Synthetic oligonucleotide
  misc_feature 1..20: note = Target: SCN10A; (-) strand; PAM type: YTN; PAM sequence: CTC
  source 1..20: mol_type = other DNA
agaaagtccattcccccaaa

SEQ ID NO: 45881 - DNA, 20 bp, synthetic construct
  misc_feature 1..20: note = Description of Artificial Sequence: Synthetic oligonucleotide
  misc_feature 1..20: note = Target: SCN10A; (-) strand; PAM type: YTN; PAM sequence: CTC
  source 1..20: mol_type = other DNA
tcagaaagtccattccccca

SEQ ID NO: 45882 - DNA, 20 bp, synthetic construct
  misc_feature 1..20: note = Description of Artificial Sequence: Synthetic oligonucleotide
  misc_feature 1..20: note = Target: SCN10A; (-) strand; PAM type: YTN; PAM sequence: CTG
  source 1..20: mol_type = other DNA
ctctcagaaagtccattccc

SEQ ID NO: 45883 - DNA, 20 bp, synthetic construct
  misc_feature 1..20: note = Description of Artificial Sequence: Synthetic oligonucleotide
  misc_feature 1..20: note = Target: SCN10A; (-) strand; PAM type: YTN; PAM sequence: CTC
  source 1..20: mol_type = other DNA
aactgctctcagaaagtcca

SEQ ID NO: 45884 - DNA, 20 bp, synthetic construct
  misc_feature 1..20: note = Description of Artificial Sequence: Synthetic oligonucleotide
  misc_feature 1..20: note = Target: SCN10A; (-) strand; PAM type: YTN; PAM sequence: TTC
  source 1..20: mol_type = other DNA
cctcaactgctctcagaaag

SEQ ID NO: 45885 - DNA, 20 bp, synthetic construct
  misc_feature 1..20: note = Description of Artificial Sequence: Synthetic oligonucleotide
  misc_feature 1..20: note = Target: SCN10A; (-) strand; PAM type: YTN; PAM sequence: TTT
  source 1..20: mol_type = other DNA
ccctcaactgctctcagaaa

SEQ ID NO: 45886 - DNA, 20 bp, synthetic construct
  misc_feature 1..20: note = Description of Artificial Sequence: Synthetic oligonucleotide
  misc_feature 1..20: note = Target: SCN10A; (-) strand; PAM type: YTN; PAM sequence: CTT
  source 1..20: mol_type = other DNA
tccctcaactgctctcagaa

SEQ ID NO: 45887 - DNA, 20 bp, synthetic construct
  misc_feature 1..20: note = Description of Artificial Sequence: Synthetic oligonucleotide
  misc_feature 1..20: note = Target: SCN10A; (-) strand; PAM type: YTN; PAM sequence: CTC
  source 1..20: mol_type = other DNA
caggacatccccaaactttc

SEQ ID NO: 45888 - DNA, 20 bp, synthetic construct
  misc_feature 1..20: note = Description of Artificial Sequence: Synthetic oligonucleotide
  misc_feature 1..20: note = Target: SCN10A; (-) strand; PAM type: YTN; PAM sequence: CTG
  source 1..20: mol_type = other DNA
aggcgggtcactccaggaca

SEQ ID NO: 45889 - DNA, 20 bp, synthetic construct
  misc_feature 1..20: note = Description of Artificial Sequence: Synthetic oligonucleotide
  misc_feature 1..20: note = Target: SCN10A; (-) strand; PAM type: YTN; PAM sequence: CTC
  source 1..20: mol_type = other DNA
gtccactgaggcgggtcact

SEQ ID NO: 45890 - DNA, 20 bp, synthetic construct
  misc_feature 1..20: note = Description of Artificial Sequence: Synthetic oligonucleotide
  misc_feature 1..20: note = Target: SCN10A; (-) strand; PAM type: YTN; PAM sequence: TTC
  source 1..20: mol_type = other DNA
caagcctcgtccactgaggc

SEQ ID NO: 45891 - DNA, 20 bp, synthetic construct
  misc_feature 1..20: note = Description of Artificial Sequence: Synthetic oligonucleotide
  misc_feature 1..20: note = Target: SCN10A; (-) strand; PAM type: YTN; PAM sequence: CTT
  source 1..20: mol_type = other DNA
ccaagcctcgtccactgagg

SEQ ID NO: 45892 - DNA, 20 bp, synthetic construct
  misc_feature 1..20: note = Description of Artificial Sequence: Synthetic oligonucleotide
  misc_feature 1..20: note = Target: SCN10A; (-) strand; PAM type: YTN; PAM sequence: TTA
  source 1..20: mol_type = other DNA
tggtggaaaatatgcttcca

SEQ ID NO: 45893 - DNA, 20 bp, synthetic construct
  misc_feature 1..20: note = Description of Artificial Sequence: Synthetic oligonucleotide
  misc_feature 1..20: note = Target: SCN10A; (-) strand; PAM type: YTN; PAM sequence: TTT
  source 1..20: mol_type = other DNA
atggtggaaaatatgcttcc

SEQ ID NO: 45894 - DNA, 20 bp, synthetic construct
  misc_feature 1..20: note = Description of Artificial Sequence: Synthetic oligonucleotide
  misc_feature 1..20: note = Target: SCN10A; (-) strand; PAM type: YTN; PAM sequence: CTT
  source 1..20: mol_type = other DNA
tatggtggaaaatatgcttc

SEQ ID NO: 45895 - DNA, 20 bp, synthetic construct
  misc_feature 1..20: note = Description of Artificial Sequence: Synthetic oligonucleotide
  misc_feature 1..20: note = Target: SCN10A; (-) strand; PAM type: YTN; PAM sequence: CTC
  source 1..20: mol_type = other DNA
ctttatggtggaaaatatgc

SEQ ID NO: 45896 - DNA, 20 bp, synthetic construct
  misc_feature 1..20: note = Description of Artificial Sequence: Synthetic oligonucleotide
  misc_feature 1..20: note = Target: SCN10A; (-) strand; PAM type: YTN; PAM sequence: CTC
  source 1..20: mol_type = other DNA
ctcctttatggtggaaaata

SEQ ID NO: 45897 - DNA, 20 bp, synthetic construct
  misc_feature 1..20: note = Description of Artificial Sequence: Synthetic oligonucleotide
  misc_feature 1..20: note = Target: SCN10A; (-) strand; PAM type: YTN; PAM sequence: CTC
  source 1..20: mol_type = other DNA
agcggggggctcctccttta

SEQ ID NO: 45898 - DNA, 20 bp, synthetic construct
  misc_feature 1..20: note = Description of Artificial Sequence: Synthetic oligonucleotide
  misc_feature 1..20: note = Target: SCN10A; (-) strand; PAM type: YTN; PAM sequence: CTG
  source 1..20: mol_type = other DNA
ctcagcggggggctcctcct

SEQ ID NO: 45899 - DNA, 20 bp, synthetic construct
  misc_feature 1..20: note = Description of Artificial Sequence: Synthetic oligonucleotide
  misc_feature 1..20: note = Target: SCN10A; (-) strand; PAM type: YTN; PAM sequence: CTC
  source 1..20: mol_type = other DNA
tgctcagcggggggctcctc

SEQ ID NO: 45900 - DNA, 20 bp, synthetic construct
  misc_feature 1..20: note = Description of Artificial Sequence: Synthetic oligonucleotide
  misc_feature 1..20: note = Target: SCN10A; (-) strand; PAM type: YTN; PAM sequence: CTA
  source 1..20: mol_type = other DNA
aatgtccctctgctcagcgg

SEQ ID NO: 45901 - DNA, 20 bp, synthetic construct
  misc_feature 1..20: note = Description of Artificial Sequence: Synthetic oligonucleotide
  misc_feature 1..20: note = Target: SCN10A; (-) strand; PAM type: YTN; PAM sequence: TTG
  source 1..20: mol_type = other DNA
tccctaaatgtccctctgct

SEQ ID NO: 45902 - DNA, 20 bp, synthetic construct
  misc_feature 1..20: note = Description of Artificial Sequence: Synthetic oligonucleotide
  misc_feature 1..20: note = Target: SCN10A; (-) strand; PAM type: YTN; PAM sequence: CTG
  source 1..20: mol_type = other DNA
ttgtccctaaatgtccctct

SEQ ID NO: 45903 - DNA, 20 bp, synthetic construct
  misc_feature 1..20: note = Description of Artificial Sequence: Synthetic oligonucleotide
  misc_feature 1..20: note = Target: SCN10A; (-) strand; PAM type: YTN; PAM sequence: CTC
  source 1..20: mol_type = other DNA
tgttgtccctaaatgtccct

SEQ ID NO: 45904 - DNA, 20 bp, synthetic construct
  misc_feature 1..20: note = Description of Artificial Sequence: Synthetic oligonucleotide
  misc_feature 1..20: note = Target: SCN10A; (-) strand; PAM type: YTN; PAM sequence: CTC
  source 1..20: mol_type = other DNA
tctgttgtccctaaatgtcc

SEQ ID NO: 45905 - DNA, 20 bp, synthetic construct
  misc_feature 1..20: note = Description of Artificial Sequence: Synthetic oligonucleotide
  misc_feature 1..20: note = Target: SCN10A; (-) strand; PAM type: YTN; PAM sequence: TTC
  source 1..20: mol_type = other DNA
tctctgttgtccctaaatgt

SEQ ID NO: 45906 - DNA, 20 bp, synthetic construct
  misc_feature 1..20: note = Description of Artificial Sequence: Synthetic oligonucleotide
  misc_feature 1..20: note = Target: SCN10A; (-) strand; PAM type: YTN; PAM sequence: CTT
  source 1..20: mol_type = other DNA
ctctctgttgtccctaaatg

SEQ ID NO: 45907 - DNA, 20 bp, synthetic construct
  misc_feature 1..20: note = Description of Artificial Sequence: Synthetic oligonucleotide
  misc_feature 1..20: note = Target: SCN10A; (-) strand; PAM type: YTN; PAM sequence: CTG
  source 1..20: mol_type = other DNA
gtgccttctctctgttgtcc

SEQ ID NO: 45908 - DNA, 20 bp, synthetic construct
  misc_feature 1..20: note = Description of Artificial Sequence: Synthetic oligonucleotide
  misc_feature 1..20: note = Target: SCN10A; (-) strand; PAM type: YTN; PAM sequence: TTG
  source 1..20: mol_type = other DNA
caggaagggctggtgccttc

SEQ ID NO: 45909 - DNA, 20 bp, synthetic construct
  misc_feature 1..20: note = Description of Artificial Sequence: Synthetic oligonucleotide
  misc_feature 1..20: note = Target: SCN10A; (-) strand; PAM type: YTN; PAM sequence: TTG
  source 1..20: mol_type = other DNA
gcacatgagggtggttgcag

SEQ ID NO: 45910 - DNA, 20 bp, synthetic construct
  misc_feature 1..20: note = Description of Artificial Sequence: Synthetic oligonucleotide
  misc_feature 1..20: note = Target: SCN10A; (-) strand; PAM type: YTN; PAM sequence: TTT
  source 1..20: mol_type = other DNA
ggcacatgagggtggttgca

SEQ ID NO: 45911 - DNA, 20 bp, synthetic construct
  misc_feature 1..20: note = Description of Artificial Sequence: Synthetic oligonucleotide
  misc_feature 1..20: note = Target: SCN10A; (-) strand; PAM type: YTN; PAM sequence: CTT
  source 1..20: mol_type = other DNA
tggcacatgagggtggttgc

SEQ ID NO: 45912 - DNA, 20 bp, synthetic construct
  misc_feature 1..20: note = Description of Artificial Sequence: Synthetic oligonucleotide
  misc_feature 1..20: note = Target: SCN10A; (-) strand; PAM type: YTN; PAM sequence: TTC
  source 1..20: mol_type = other DNA
cagagtcaggaacagagccc

SEQ ID NO: 45913 - DNA, 20 bp, synthetic construct
  misc_feature 1..20: note = Description of Artificial Sequence: Synthetic oligonucleotide
  misc_feature 1..20: note = Target: SCN10A; (-) strand; PAM type: YTN; PAM sequence: CTG
  source 1..20: mol_type = other DNA
gaagcagcaagatgtgccca

SEQ ID NO: 45914 - DNA, 20 bp, synthetic construct
  misc_feature 1..20: note = Description of Artificial Sequence: Synthetic oligonucleotide
  misc_feature 1..20: note = Target: SCN10A; (-) strand; PAM type: YTN; PAM sequence: CTC
  source 1..20: mol_type = other DNA
aagtgaagaactggaagcag

SEQ ID NO: 45915 - DNA, 20 bp, synthetic construct
  misc_feature 1..20: note = Description of Artificial Sequence: Synthetic oligonucleotide
  misc_feature 1..20: note = Target: SCN10A; (-) strand; PAM type: YTN; PAM sequence: CTC
  source 1..20: mol_type = other DNA
tcaagtgaagaactggaagc

SEQ ID NO: 45916 - DNA, 20 bp, synthetic construct
  misc_feature 1..20: note = Description of Artificial Sequence: Synthetic oligonucleotide
  misc_feature 1..20: note = Target: SCN10A; (-) strand; PAM type: YTN; PAM sequence: CTG
  source 1..20: mol_type = other DNA
ctctcaagtgaagaactgga

SEQ ID NO: 45917 - DNA, 20 bp, synthetic construct
  misc_feature 1..20: note = Description of Artificial Sequence: Synthetic oligonucleotide
  misc_feature 1..20: note = Target: SCN10A; (-) strand; PAM type: YTN; PAM sequence: TTC
  source 1..20: mol_type = other DNA
atctgctctcaagtgaagaa

SEQ ID NO: 45918 - DNA, 20 bp, synthetic construct
  misc_feature 1..20: note = Description of Artificial Sequence: Synthetic oligonucleotide
  misc_feature 1..20: note = Target: SCN10A; (-) strand; PAM type: YTN; PAM sequence: CTT
  source 1..20: mol_type = other DNA
catctgctctcaagtgaaga

SEQ ID NO: 45919 - DNA, 20 bp, synthetic construct
  misc_feature 1..20: note = Description of Artificial Sequence: Synthetic oligonucleotide
  misc_feature 1..20: note = Target: SCN10A; (-) strand; PAM type: YTN; PAM sequence: CTC
  source 1..20: mol_type = other DNA
ttcatctgctctcaagtgaa

SEQ ID NO: 45920 - DNA, 20 bp, synthetic construct
  misc_feature 1..20: note = Description of Artificial Sequence: Synthetic oligonucleotide
  misc_feature 1..20: note = Target: SCN10A; (-) strand; PAM type: YTN; PAM sequence: TTC
  source 1..20: mol_type = other DNA
acaaccgctcttcatctgct

SEQ ID NO: 45921 - DNA, 20 bp, synthetic construct
  misc_feature 1..20: note = Description of Artificial Sequence: Synthetic oligonucleotide
  misc_feature 1..20: note = Target: SCN10A; (-) strand; PAM type: YTN; PAM sequence: CTT
  source 1..20: mol_type = other DNA
cacaaccgctcttcatctgc

SEQ ID NO: 45922 - DNA, 20 bp, synthetic construct
  misc_feature 1..20: note = Description of Artificial Sequence: Synthetic oligonucleotide
  misc_feature 1..20: note = Target: SCN10A; (-) strand; PAM type: YTN; PAM sequence: TTG
  source 1..20: mol_type = other DNA
tcttcacaaccgctcttcat

SEQ ID NO: 45923 - DNA, 20 bp, synthetic construct
  misc_feature 1..20: note = Description of Artificial Sequence: Synthetic oligonucleotide
  misc_feature 1..20: note = Target: SCN10A; (-) strand; PAM type: YTN; PAM sequence: TTT
  source 1..20: mol_type = other DNA
gtcttcacaaccgctcttca

SEQ ID NO: 45924 - DNA, 20 bp, synthetic construct
  misc_feature 1..20: note = Description of Artificial Sequence: Synthetic oligonucleotide
  misc_feature 1..20: note = Target: SCN10A; (-) strand; PAM type: YTN; PAM sequence: TTT
  source 1..20: mol_type = other DNA
tgtcttcacaaccgctcttc

SEQ ID NO: 45925 - DNA, 20 bp, synthetic construct
  misc_feature 1..20: note = Description of Artificial Sequence: Synthetic oligonucleotide
  misc_feature 1..20: note = Target: SCN10A; (-) strand; PAM type: YTN; PAM sequence: CTC
  source 1..20: mol_type = other DNA
atatcattttgtcttcacaa

SEQ ID NO: 45926 - DNA, 20 bp, synthetic construct
  misc_feature 1..20: note = Description of Artificial Sequence: Synthetic oligonucleotide
  misc_feature 1..20: note = Target: SCN10A; (-) strand; PAM type: YTN; PAM sequence: TTC
  source 1..20: mol_type = other DNA
tcatatcattttgtcttcac

SEQ ID NO: 45927 - DNA, 20 bp, synthetic construct
  misc_feature 1..20: note = Description of Artificial Sequence: Synthetic oligonucleotide
  misc_feature 1..20: note = Target: SCN10A; (-) strand; PAM type: YTN; PAM sequence: TTT
  source 1..20: mol_type = other DNA
ctcatatcattttgtcttca

SEQ ID NO: 45928 - DNA, 20 bp, synthetic construct
  misc_feature 1..20: note = Description of Artificial Sequence: Synthetic oligonucleotide
  misc_feature 1..20: note = Target: SCN10A; (-) strand; PAM type: YTN; PAM sequence: TTA
  source 1..20: mol_type = other DNA
catttctcatatcattttgt

SEQ ID NO: 45929 - DNA, 20 bp, synthetic construct
  misc_feature 1..20: note = Description of Artificial Sequence: Synthetic oligonucleotide
  misc_feature 1..20: note = Target: SCN10A; (-) strand; PAM type: YTN; PAM sequence: TTT
  source 1..20: mol_type = other DNA
acatttctcatatcattttg

SEQ ID NO: 45930 - DNA, 20 bp, synthetic construct
  misc_feature 1..20: note = Description of Artificial Sequence: Synthetic oligonucleotide
  misc_feature 1..20: note = Target: SCN10A; (-) strand; PAM type: YTN; PAM sequence: TTT
  source 1..20: mol_type = other DNA
tacatttctcatatcatttt

SEQ ID NO: 45931 - DNA, 20 bp, synthetic construct
  misc_feature 1..20: note = Description of Artificial Sequence: Synthetic oligonucleotide
  misc_feature 1..20: note = Target: SCN10A; (-) strand; PAM type: YTN; PAM sequence: CTT
  source 1..20: mol_type = other DNA
ttacatttctcatatcattt

SEQ ID NO: 45932 - DNA, 20 bp, synthetic construct
  misc_feature 1..20: note = Description of Artificial Sequence: Synthetic oligonucleotide
  misc_feature 1..20: note = Target: SCN10A; (-) strand; PAM type: YTN; PAM sequence: CTG
  source 1..20: mol_type = other DNA
agcacttttacatttctcat

SEQ ID NO: 45933 - DNA, 20 bp, synthetic construct
  misc_feature 1..20: note = Description of Artificial Sequence: Synthetic oligonucleotide
  misc_feature 1..20: note = Target: SCN10A; (-) strand; PAM type: YTN; PAM sequence: CTC
  source 1..20: mol_type = other DNA
tgagcacttttacatttctc

SEQ ID NO: 45934 - DNA, 20 bp, synthetic construct
  misc_feature 1..20: note = Description of Artificial Sequence: Synthetic oligonucleotide
  misc_feature 1..20: note = Target: SCN10A; (-) strand; PAM type: YTN; PAM sequence: TTA
  source 1..20: mol_type = other DNA
cccctctgagcacttttaca

SEQ ID NO: 45935 - DNA, 20 bp, synthetic construct
  misc_feature 1..20: note = Description of Artificial Sequence: Synthetic oligonucleotide
  misc_feature 1..20: note = Target: SCN10A; (-) strand; PAM type: YTN; PAM sequence: TTT
  source 1..20: mol_type = other DNA
acccctctgagcacttttac

SEQ ID NO: 45936 - DNA, 20 bp, synthetic construct
  misc_feature 1..20: note = Description of Artificial Sequence: Synthetic oligonucleotide
  misc_feature 1..20: note = Target: SCN10A; (-) strand; PAM type: YTN; PAM sequence: CTC
  source 1..20: mol_type = other DNA
agacaggaagtttacccctc

SEQ ID NO: 45937 - DNA, 20 bp, synthetic construct
  misc_feature 1..20: note = Description of Artificial Sequence: Synthetic oligonucleotide
  misc_feature 1..20: note = Target: SCN10A; (-) strand; PAM type: YTN; PAM sequence: CTC
  source 1..20: mol_type = other DNA
accctcagacaggaagttta

SEQ ID NO: 45938 - DNA, 20 bp, synthetic construct
  misc_feature 1..20: note = Description of Artificial Sequence: Synthetic oligonucleotide
  misc_feature 1..20: note = Target: SCN10A; (-) strand; PAM type: YTN; PAM sequence: CTG
  source 1..20: mol_type = other DNA
cagagccacagatgcccctc

SEQ ID NO: 45939 - DNA, 20 bp, synthetic construct
  misc_feature 1..20: note = Description of Artificial Sequence: Synthetic oligonucleotide
  misc_feature 1..20: note = Target: SCN10A; (-) strand; PAM type: YTN; PAM sequence: CTG
  source 1..20: mol_type = other DNA
agcccaccatccctgcagag

SEQ ID NO: 45940 - DNA, 20 bp, synthetic construct
  misc_feature 1..20: note = Description of Artificial Sequence: Synthetic oligonucleotide
  misc_feature 1..20: note = Target: SCN10A; (-) strand; PAM type: YTN; PAM sequence: TTC
  source 1..20: mol_type = other DNA
caggctgagcccaccatccc

SEQ ID NO: 45941 - DNA, 20 bp, synthetic construct
  misc_feature 1..20: note = Description of Artificial Sequence: Synthetic oligonucleotide
  misc_feature 1..20: note = Target: SCN10A; (-) strand; PAM type: YTN; PAM sequence: CTT
  source 1..20: mol_type = other DNA
ccaggctgagcccaccatcc

SEQ ID NO: 45942 - DNA, 20 bp, synthetic construct
  misc_feature 1..20: note = Description of Artificial Sequence: Synthetic oligonucleotide
  misc_feature 1..20: note = Target: SCN10A; (-) strand; PAM type: YTN; PAM sequence: TTC
  source 1..20: mol_type = other DNA
ttccaggctgagcccaccat

SEQ ID NO: 45943 - DNA, 20 bp, synthetic construct
  misc_feature 1..20: note = Description of Artificial Sequence: Synthetic oligonucleotide
  misc_feature 1..20: note = Target: SCN10A; (-) strand; PAM type: YTN; PAM sequence: CTG
  source 1..20: mol_type = other DNA
ttcttccaggctgagcccac

SEQ ID NO: 45944 - DNA, 20 bp, synthetic construct
  misc_feature 1..20: note = Description of Artificial Sequence: Synthetic oligonucleotide
  misc_feature 1..20: note = Target: SCN10A; (-) strand; PAM type: YTN; PAM sequence: CTC
  source 1..20: mol_type = other DNA
tgttcttccaggctgagccc

SEQ ID NO: 45945 - DNA, 20 bp, synthetic construct
  misc_feature 1..20: note = Description of Artificial Sequence: Synthetic oligonucleotide
  misc_feature 1..20: note = Target: SCN10A; (-) strand; PAM type: YTN; PAM sequence: CTG
  source 1..20: mol_type = other DNA
catcccagaaactctgttct

SEQ ID NO: 45946 - DNA, 20 bp, synthetic construct
  misc_feature 1..20: note = Description of Artificial Sequence: Synthetic oligonucleotide
  misc_feature 1..20: note = Target: SCN10A; (-) strand; PAM type: YTN; PAM sequence: CTG
  source 1..20: mol_type = other DNA
cctgcatcccagaaactctg

SEQ ID NO: 45947 - DNA, 20 bp, synthetic construct
  misc_feature 1..20: note = Description of Artificial Sequence: Synthetic oligonucleotide
  misc_feature 1..20: note = Target: SCN10A; (-) strand; PAM type: YTN; PAM sequence: CTC
  source 1..20: mol_type = other DNA
tgcctgcatcccagaaactc

SEQ ID NO: 45948 - DNA, 20 bp, synthetic construct
  misc_feature 1..20: note = Description of Artificial Sequence: Synthetic oligonucleotide
  misc_feature 1..20: note = Target: SCN10A; (-) strand; PAM type: YTN; PAM sequence: CTG
  source 1..20: mol_type = other DNA
agccagggatgcctctgcct

SEQ ID NO: 45949 - DNA, 20 bp, synthetic construct
  misc_feature 1..20: note = Description of Artificial Sequence: Synthetic oligonucleotide
  misc_feature 1..20: note = Target: SCN10A; (-) strand; PAM type: YTN; PAM sequence: CTG
  source 1..20: mol_type = other DNA
gtgcctgagccagggatgcc

SEQ ID NO: 45950 - DNA, 20 bp, synthetic construct
  misc_feature 1..20: note = Description of Artificial Sequence: Synthetic oligonucleotide
  misc_feature 1..20: note = Target: SCN10A; (-) strand; PAM type: YTN; PAM sequence: TTC
  source 1..20: mol_type = other DNA
caccctggtgcctgagccag

SEQ ID NO: 45951 - DNA, 20 bp, synthetic construct
  misc_feature 1..20: note = Description of Artificial Sequence: Synthetic oligonucleotide
  misc_feature 1..20: note = Target: SCN10A; (-) strand; PAM type: YTN; PAM sequence: TTT
  source 1..20: mol_type = other DNA
ccaccctggtgcctgagcca

SEQ ID NO: 45952 - DNA, 20 bp, synthetic construct
  misc_feature 1..20: note = Description of Artificial Sequence: Synthetic oligonucleotide
  misc_feature 1..20: note = Target: SCN10A; (-) strand; PAM type: YTN; PAM sequence: TTT
  source 1..20: mol_type = other DNA
tccaccctggtgcctgagcc

SEQ ID NO: 45953 - DNA, 20 bp, synthetic construct
  misc_feature 1..20: note = Description of Artificial Sequence: Synthetic oligonucleotide
  misc_feature 1..20: note = Target: SCN10A; (-) strand; PAM type: YTN; PAM sequence: CTT
  source 1..20: mol_type = other DNA
ttccaccctggtgcctgagc

SEQ ID NO: 45954 - DNA, 20 bp, synthetic construct
  misc_feature 1..20: note = Description of Artificial Sequence: Synthetic oligonucleotide
  misc_feature 1..20: note = Target: SCN10A; (-) strand; PAM type: YTN; PAM sequence: TTA
  source 1..20: mol_type = other DNA
gtcttttccaccctggtgcc

SEQ ID NO: 45955 - DNA, 20 bp, synthetic construct
  misc_feature 1..20: note = Description of Artificial Sequence: Synthetic oligonucleotide
  misc_feature 1..20: note = Target: SCN10A; (-) strand; PAM type: YTN; PAM sequence: TTT
  source 1..20: mol_type = other DNA
agtcttttccaccctggtgc

SEQ ID NO: 45956 - DNA, 20 bp, synthetic construct
  misc_feature 1..20: note = Description of Artificial Sequence: Synthetic oligonucleotide
  misc_feature 1..20: note = Target: SCN10A; (-) strand; PAM type: YTN; PAM sequence: CTT
  source 1..20: mol_type = other DNA
tagtcttttccaccctggtg

SEQ ID NO: 45957 - DNA, 20 bp, synthetic construct
  misc_feature 1..20: note = Description of Artificial Sequence: Synthetic oligonucleotide
  misc_feature 1..20: note = Target: SCN10A; (-) strand; PAM type: YTN; PAM sequence: CTC
  source 1..20: mol_type = other DNA
tttagtcttttccaccctgg

SEQ ID NO: 45958 - DNA, 20 bp, synthetic construct
  misc_feature 1..20: note = Description of Artificial Sequence: Synthetic oligonucleotide
  misc_feature 1..20: note = Target: SCN10A; (-) strand; PAM type: YTN; PAM sequence: CTA
  source 1..20: mol_type = other DNA
aaccaagaaaagggaagcaa

SEQ ID NO: 45959 - DNA, 20 bp, synthetic construct
  misc_feature 1..20: note = Description of Artificial Sequence: Synthetic oligonucleotide
  misc_feature 1..20: note = Target: SCN10A; (-) strand; PAM type: YTN; PAM sequence: TTA
  source 1..20: mol_type = other DNA
tagacagaagaaagctaaac

SEQ ID NO: 45960 - DNA, 20 bp, synthetic construct
  misc_feature 1..20: note = Description of Artificial Sequence: Synthetic oligonucleotide
  misc_feature 1..20: note = Target: SCN10A; (-) strand; PAM type: YTN; PAM sequence: TTT
  source 1..20: mol_type = other DNA
atagacagaagaaagctaaa

SEQ ID NO: 45961 - DNA, 20 bp, synthetic construct
  misc_feature 1..20: note = Description of Artificial Sequence: Synthetic oligonucleotide
  misc_feature 1..20: note = Target: SCN10A; (-) strand; PAM type: YTN; PAM sequence: TTT
  source 1..20: mol_type = other DNA
tatagacagaagaaagctaa

SEQ ID NO: 45962 - DNA, 20 bp, synthetic construct
  misc_feature 1..20: note = Description of Artificial Sequence: Synthetic oligonucleotide
  misc_feature 1..20: note = Target: SCN10A; (-) strand; PAM type: YTN; PAM sequence: CTC
  source 1..20: mol_type = other DNA
atgagttttatagacagaag

SEQ ID NO: 45963 - DNA, 20 bp, synthetic construct
  misc_feature 1..20: note = Description of Artificial Sequence: Synthetic oligonucleotide
  misc_feature 1..20: note = Target: SCN10A; (-) strand; PAM type: YTN; PAM sequence: TTC
  source 1..20: mol_type = other DNA
ctcatgagttttatagacag

SEQ ID NO: 45964 - DNA, 20 bp, synthetic construct
  misc_feature 1..20: note = Description of Artificial Sequence: Synthetic oligonucleotide
  misc_feature 1..20: note = Target: SCN10A; (-) strand; PAM type: YTN; PAM sequence: TTT
  source 1..20: mol_type = other DNA
cctcatgagttttatagaca

SEQ ID NO: 45965 - DNA, 20 bp, synthetic construct
  misc_feature 1..20: note = Description of Artificial Sequence: Synthetic oligonucleotide
  misc_feature 1..20: note = Target: SCN10A; (-) strand; PAM type: YTN; PAM sequence: CTT
  source 1..20: mol_type = other DNA
tcctcatgagttttatagac

SEQ ID NO: 45966 - DNA, 20 bp, synthetic construct
  misc_feature 1..20: note = Description of Artificial Sequence: Synthetic oligonucleotide
  misc_feature 1..20: note = Target: SCN10A; (-) strand; PAM type: YTN; PAM sequence: TTC
  source 1..20: mol_type = other DNA
tttcctcatgagttttatag

SEQ ID NO: 45967 - DNA, 20 bp, synthetic construct
  misc_feature 1..20: note = Description of Artificial Sequence: Synthetic oligonucleotide
  misc_feature 1..20: note = Target: SCN10A; (-) strand; PAM type: YTN; PAM sequence: TTG
  source 1..20: mol_type = other DNA
ggttctttcctcatgagttt

SEQ ID NO: 45968 - DNA, 20 bp, synthetic construct
  misc_feature 1..20: note = Description of Artificial Sequence: Synthetic oligonucleotide
  misc_feature 1..20: note = Target: SCN10A; (-) strand; PAM type: YTN; PAM sequence: CTT
  source 1..20: mol_type = other DNA
gggttctttcctcatgagtt

SEQ ID NO: 45969 - DNA, 20 bp, synthetic construct
  misc_feature 1..20: note = Description of Artificial Sequence: Synthetic oligonucleotide
  misc_feature 1..20: note = Target: SCN10A; (-) strand; PAM type: YTN; PAM sequence: CTG
  source 1..20: mol_type = other DNA
gacatcaaccaacttgggtt

SEQ ID NO: 45970 - DNA, 20 bp, synthetic construct
  misc_feature 1..20: note = Description of Artificial Sequence: Synthetic oligonucleotide
  misc_feature 1..20: note = Target: SCN10A; (-) strand; PAM type: YTN; PAM sequence: TTG
  source 1..20: mol_type = other DNA
ccctggacatcaaccaactt

SEQ ID NO: 45971 - DNA, 20 bp, synthetic construct
  misc_feature 1..20: note = Description of Artificial Sequence: Synthetic oligonucleotide
  misc_feature 1..20: note = Target: SCN10A; (-) strand; PAM type: YTN; PAM sequence: TTA
  source 1..20: mol_type = other DNA
ttgccctggacatcaaccaa

SEQ ID NO: 45972 - DNA, 20 bp, synthetic construct
  misc_feature 1..20: note = Description of Artificial Sequence: Synthetic oligonucleotide
  misc_feature 1..20: note = Target: SCN10A; (-) strand; PAM type: YTN; PAM sequence: CTT
  source 1..20: mol_type = other DNA
attgccctggacatcaacca

SEQ ID NO: 45973 - DNA, 20 bp, synthetic construct
  misc_feature 1..20: note = Description of Artificial Sequence: Synthetic oligonucleotide
  misc_feature 1..20: note = Target: SCN10A; (-) strand; PAM type: YTN; PAM sequence: TTC
  source 1..20: mol_type = other DNA
ttattgccctggacatcaac

SEQ ID NO: 45974 - DNA, 20 bp, synthetic construct
  misc_feature 1..20: note = Description of Artificial Sequence: Synthetic oligonucleotide
  misc_feature 1..20: note = Target: SCN10A; (-) strand; PAM type: YTN; PAM sequence: TTT
  source 1..20: mol_type = other DNA
cttattgccctggacatcaa

SEQ ID NO: 45975 - DNA, 20 bp, synthetic construct
  misc_feature 1..20: note = Description of Artificial Sequence: Synthetic oligonucleotide
  misc_feature 1..20: note = Target: SCN10A; (-) strand; PAM type: YTN; PAM sequence: CTT
  source 1..20: mol_type = other DNA
tcttattgccctggacatca

SEQ ID NO: 45976 - DNA, 20 bp, synthetic construct
  misc_feature 1..20: note = Description of Artificial Sequence: Synthetic oligonucleotide
  misc_feature 1..20: note = Target: SCN10A; (-) strand; PAM type: YTN; PAM sequence: TTC
  source 1..20: mol_type = other DNA
cagaagcccctttcttattg

SEQ ID NO: 45977 - DNA, 20 bp, synthetic construct
  misc_feature 1..20: note = Description of Artificial Sequence: Synthetic oligonucleotide
  misc_feature 1..20: note = Target: SCN10A; (-) strand; PAM type: YTN; PAM sequence: CTT
  source 1..20: mol_type = other DNA
ccagaagcccctttcttatt

SEQ ID NO: 45978 - DNA, 20 bp, synthetic construct
  misc_feature 1..20: note = Description of Artificial Sequence: Synthetic oligonucleotide
  misc_feature 1..20: note = Target: SCN10A; (-) strand; PAM type: YTN; PAM sequence: TTG
  source 1..20: mol_type = other DNA
tgtgggaggatgcagtcttc

SEQ ID NO: 45979 - DNA, 20 bp, synthetic construct
  misc_feature 1..20: note = Description of Artificial Sequence: Synthetic oligonucleotide
  misc_feature 1..20: note = Target: SCN10A; (-) strand; PAM type: YTN; PAM sequence: CTG
  source 1..20: mol_type = other DNA
gttgtgtgggaggatgcagt

SEQ ID NO: 45980 - DNA, 20 bp, synthetic construct
  misc_feature 1..20: note = Description of Artificial Sequence: Synthetic oligonucleotide
  misc_feature 1..20: note = Target: SCN10A; (-) strand; PAM type: YTN; PAM sequence: CTG
  source 1..20: mol_type = other DNA
actggttgtgtgggaggatg

SEQ ID NO: 45981 - DNA, 20 bp, synthetic construct
  misc_feature 1..20: note = Description of Artificial Sequence: Synthetic oligonucleotide
  misc_feature 1..20: note = Target: SCN10A; (-) strand; PAM type: YTN; PAM sequence: CTG
  source 1..20: mol_type = other DNA
ggactgactggttgtgtggg

SEQ ID NO: 45982 - DNA, 20 bp, synthetic construct
  misc_feature 1..20: note = Description of Artificial Sequence: Synthetic oligonucleotide
  misc_feature 1..20: note = Target: SCN10A; (-) strand; PAM type: YTN; PAM sequence: CTC
  source 1..20: mol_type = other DNA
ctgggactgactggttgtgt

SEQ ID NO: 45983 - DNA, 20 bp, synthetic construct
  misc_feature 1..20: note = Description of Artificial Sequence: Synthetic oligonucleotide
  misc_feature 1..20: note = Target: SCN10A; (-) strand; PAM type: YTN; PAM sequence: TTG
  source 1..20: mol_type = other DNA
ccctcctgggactgactggt

SEQ ID NO: 45984 - DNA, 20 bp, synthetic construct
  misc_feature 1..20: note = Description of Artificial Sequence: Synthetic oligonucleotide
  misc_feature 1..20: note = Target: SCN10A; (-) strand; PAM type: YTN; PAM sequence: CTT
  source 1..20: mol_type = other DNA
gccctcctgggactgactgg

SEQ ID NO: 45985 - DNA, 20 bp, synthetic construct
  misc_feature 1..20: note = Description of Artificial Sequence: Synthetic oligonucleotide
  misc_feature 1..20: note = Target: SCN10A; (-) strand; PAM type: YTN; PAM sequence: CTG
  source 1..20: mol_type = other DNA
gtcatggtggggtccttgcc

SEQ ID NO: 45986 - DNA, 20 bp, synthetic construct
  misc_feature 1..20: note = Description of Artificial Sequence: Synthetic oligonucleotide
  misc_feature 1..20: note = Target: SCN10A; (-) strand; PAM type: YTN; PAM sequence: CTC
  source 1..20: mol_type = other DNA
tggtcatggtggggtccttg

SEQ ID NO: 45987 - DNA, 20 bp, synthetic construct
  misc_feature 1..20: note = Description of Artificial Sequence: Synthetic oligonucleotide
  misc_feature 1..20: note = Target: SCN10A; (-) strand; PAM type: YTN; PAM sequence: CTC
  source 1..20: mol_type = other DNA
cacccactctggtcatggtg

SEQ ID NO: 45988 - DNA, 20 bp, synthetic construct
  misc_feature 1..20: note = Description of Artificial Sequence: Synthetic oligonucleotide
  misc_feature 1..20: note = Target: SCN10A; (-) strand; PAM type: YTN; PAM sequence: TTG
  source 1..20: mol_type = other DNA
tctccacccactctggtcat

SEQ ID NO: 45989 - DNA, 20 bp, synthetic construct
  misc_feature 1..20: note = Description of Artificial Sequence: Synthetic oligonucleotide
  misc_feature 1..20: note = Target: SCN10A; (-) strand; PAM type: YTN; PAM sequence: CTT
  source 1..20: mol_type = other DNA
gtctccacccactctggtca

SEQ ID NO: 45990 - DNA, 20 bp, synthetic construct
  misc_feature 1..20: note = Description of Artificial Sequence: Synthetic oligonucleotide
  misc_feature 1..20: note = Target: SCN10A; (-) strand; PAM type: YTN; PAM sequence: CTC
  source 1..20: mol_type = other DNA
agcttgtctccacccactct

SEQ ID NO: 45991 - DNA, 20 bp, synthetic construct
  misc_feature 1..20: note = Description of Artificial Sequence: Synthetic oligonucleotide
  misc_feature 1..20: note = Target: SCN10A; (-) strand; PAM type: YTN; PAM sequence: CTG
  source 1..20: mol_type = other DNA
ccctcagcttgtctccaccc

SEQ ID NO: 45992 - DNA, 20 bp, synthetic construct
  misc_feature 1..20: note = Description of Artificial Sequence: Synthetic oligonucleotide
  misc_feature 1..20: note = Target: SCN10A; (-) strand; PAM type: YTN; PAM sequence: CTG
  source 1..20: mol_type = other DNA
gccccctgccctcagcttgt

SEQ ID NO: 45993 - DNA, 20 bp, synthetic construct
  misc_feature 1..20: note = Description of Artificial Sequence: Synthetic oligonucleotide
  misc_feature 1..20: note = Target: SCN10A; (-) strand; PAM type: YTN; PAM sequence: CTC
  source 1..20: mol_type = other DNA
cgccccagcctggccccctg

SEQ ID NO: 45994 - DNA, 20 bp, synthetic construct
  misc_feature 1..20: note = Description of Artificial Sequence: Synthetic oligonucleotide
  misc_feature 1..20: note = Target: SCN10A; (-) strand; PAM type: YTN; PAM sequence: TTC
  source 1..20: mol_type = other DNA
tccgccccagcctggccccc

SEQ ID NO: 45995 - DNA, 20 bp, synthetic construct
  misc_feature 1..20: note = Description of Artificial Sequence: Synthetic oligonucleotide
  misc_feature 1..20: note = Target: SCN10A; (-) strand; PAM type: YTN; PAM sequence: CTT
  source 1..20: mol_type = other DNA
ctccgccccagcctggcccc

SEQ ID NO: 45996 - DNA, 20 bp, synthetic construct
  misc_feature 1..20: note = Description of Artificial Sequence: Synthetic oligonucleotide
  misc_feature 1..20: note = Target: SCN10A; (-) strand; PAM type: YTN; PAM sequence: TTG
  source 1..20: mol_type = other DNA
ccaataagccccaatacccc

SEQ ID NO: 45997 - DNA, 20 bp, synthetic construct
  misc_feature 1..20: note = Description of Artificial Sequence: Synthetic oligonucleotide
  misc_feature 1..20: note = Target: SCN10A; (-) strand; PAM type: YTN; PAM sequence: CTT
  source 1..20: mol_type = other DNA
gccaataagccccaataccc

SEQ ID NO: 45998 - DNA, 20 bp, synthetic construct
  misc_feature 1..20: note = Description of Artificial Sequence: Synthetic oligonucleotide
  misc_feature 1..20: note = Target: SCN10A; (-) strand; PAM type: YTN; PAM sequence: CTC
  source 1..20: mol_type = other DNA
acttgccaataagccccaat

SEQ ID NO: 45999 - DNA, 20 bp, synthetic construct
  misc_feature 1..20: note = Description of Artificial Sequence: Synthetic oligonucleotide
  misc_feature 1..20: note = Target: SCN10A; (-) strand; PAM type: YTN; PAM sequence: CTG
  source 1..20: mol_type = other DNA
gagactcacttgccaataag

SEQ ID NO: 46000 - DNA, 20 bp, synthetic construct
  misc_feature 1..20: note = Description of Artificial Sequence: Synthetic oligonucleotide
  misc_feature 1..20: note = Target: SCN10A; (-) strand; PAM type: YTN; PAM sequence: CTC
  source 1..20: mol_type = other DNA
tggagactcacttgccaata

SEQ ID NO: 46001 - DNA, 20 bp, synthetic construct
  misc_feature 1..20: note = Description of Artificial Sequence: Synthetic oligonucleotide
  misc_feature 1..20: note = Target: SCN10A; (-) strand; PAM type: YTN; PAM sequence: TTG
  source 1..20: mol_type = other DNA
gaggaagcccctctggagac

SEQ ID NO: 46002 - DNA, 20 bp, synthetic construct
  misc_feature 1..20: note = Description of Artificial Sequence: Synthetic oligonucleotide
  misc_feature 1..20: note = Target: SCN10A; (-) strand; PAM type: YTN; PAM sequence: TTT
  source 1..20: mol_type = other DNA
ggaggaagcccctctggaga

SEQ ID NO: 46003 - DNA, 20 bp, synthetic construct
  misc_feature 1..20: note = Description of Artificial Sequence: Synthetic oligonucleotide
  misc_feature 1..20: note = Target: SCN10A; (-) strand; PAM type: YTN; PAM sequence: CTC
  source 1..20: mol_type = other DNA
catgtttggaggaagcccct

SEQ ID NO: 46004 - DNA, 20 bp, synthetic construct
  misc_feature 1..20: note = Description of Artificial Sequence: Synthetic oligonucleotide
  misc_feature 1..20: note = Target: SCN10A; (-) strand; PAM type: YTN; PAM sequence: CTA
  source 1..20: mol_type = other DNA
ctccatgtttggaggaagcc

SEQ ID NO: 46005 - DNA, 20 bp, synthetic construct
  misc_feature 1..20: note = Description of Artificial Sequence: Synthetic oligonucleotide
  misc_feature 1..20: note = Target: SCN10A; (-) strand; PAM type: YTN; PAM sequence: CTG
  source 1..20: mol_type = other DNA
cagggagggggcacaatggg

SEQ ID NO: 46006 - DNA, 20 bp, synthetic construct
  misc_feature 1..20: note = Description of Artificial Sequence: Synthetic oligonucleotide
  misc_feature 1..20: note = Target: SCN10A; (-) strand; PAM type: YTN; PAM sequence: CTG
  source 1..20: mol_type = other DNA
ggagcagggggagaggctgc

SEQ ID NO: 46007 - DNA, 20 bp, synthetic construct
  misc_feature 1..20: note = Description of Artificial Sequence: Synthetic oligonucleotide
  misc_feature 1..20: note = Target: SCN10A; (-) strand; PAM type: YTN; PAM sequence: CTA
  source 1..20: mol_type = other DNA
gctgggagcagggggagagg

SEQ ID NO: 46008 - DNA, 20 bp, synthetic construct
  misc_feature 1..20: note = Description of Artificial Sequence: Synthetic oligonucleotide
  misc_feature 1..20: note = Target: SCN10A; (-) strand; PAM type: YTN; PAM sequence: CTG
  source 1..20: mol_type = other DNA
cacaggtcctagctgggagc

SEQ ID NO: 46009 - DNA, 20 bp, synthetic construct
  misc_feature 1..20: note = Description of Artificial Sequence: Synthetic oligonucleotide
  misc_feature 1..20: note = Target: SCN10A; (-) strand; PAM type: YTN; PAM sequence: CTC
  source 1..20: mol_type = other DNA
caagctgcacaggtcctagc

SEQ ID NO: 46010 - DNA, 20 bp, synthetic construct
  misc_feature 1..20: note = Description of Artificial Sequence: Synthetic oligonucleotide
  misc_feature 1..20: note = Target: SCN10A; (-) strand; PAM type: YTN; PAM sequence: TTC
  source 1..20: mol_type = other DNA
tccaagctgcacaggtccta

SEQ ID NO: 46011 - DNA, 20 bp, synthetic construct
  misc_feature 1..20: note = Description of Artificial Sequence: Synthetic oligonucleotide
  misc_feature 1..20: note = Target: SCN10A; (-) strand; PAM type: YTN; PAM sequence: TTT
  source 1..20: mol_type = other DNA
ctccaagctgcacaggtcct

SEQ ID NO: 46012 - DNA, 20 bp, synthetic construct
  misc_feature 1..20: note = Description of Artificial Sequence: Synthetic oligonucleotide
  misc_feature 1..20: note = Target: SCN10A; (-) strand; PAM type: YTN; PAM sequence: CTG
  source 1..20: mol_type = other DNA
atttctccaagctgcacagg

SEQ ID NO: 46013 - DNA, 20 bp, synthetic construct
  misc_feature 1..20: note = Description of Artificial Sequence: Synthetic oligonucleotide
  misc_feature 1..20: note = Target: SCN10A; (-) strand; PAM type: YTN; PAM sequence: CTG
  source 1..20: mol_type = other DNA
actgatttctccaagctgca

SEQ ID NO: 46014 - DNA, 20 bp, synthetic construct
  misc_feature 1..20: note = Description of Artificial Sequence: Synthetic oligonucleotide
  misc_feature 1..20: note = Target: SCN10A; (-) strand; PAM type: YTN; PAM sequence: TTC
  source 1..20: mol_type = other DNA
agggaagtaagagctgactg

SEQ ID NO: 46015 - DNA, 20 bp, synthetic construct
  misc_feature 1..20: note = Description of Artificial Sequence: Synthetic oligonucleotide
  misc_feature 1..20: note = Target: SCN10A; (-) strand; PAM type: YTN; PAM sequence: TTA
  source 1..20: mol_type = other DNA
ttcagggaagtaagagctga

SEQ ID NO: 46016 - DNA, 20 bp, synthetic construct
  misc_feature 1..20: note = Description of Artificial Sequence: Synthetic oligonucleotide
  misc_feature 1..20: note = Target: SCN10A; (-) strand; PAM type: YTN; PAM sequence: TTT
  source 1..20: mol_type = other DNA
attcagggaagtaagagctg

SEQ ID NO: 46017 - DNA, 20 bp, synthetic construct
  misc_feature 1..20: note = Description of Artificial Sequence: Synthetic oligonucleotide
  misc_feature 1..20: note = Target: SCN10A; (-) strand; PAM type: YTN; PAM sequence: TTT
  source 1..20: mol_type = other DNA
tattcagggaagtaagagct

SEQ ID NO: 46018 - DNA, 20 bp, synthetic construct
  misc_feature 1..20: note = Description of Artificial Sequence: Synthetic oligonucleotide
  misc_feature 1..20: note = Target: SCN10A; (-) strand; PAM type: YTN; PAM sequence: TTT
  source 1..20: mol_type = other DNA
ttattcagggaagtaagagc

SEQ ID NO: 46019 - DNA, 20 bp, synthetic construct
  misc_feature 1..20: note = Description of Artificial Sequence: Synthetic oligonucleotide
  misc_feature 1..20: note = Target: SCN10A; (-) strand; PAM type: YTN; PAM sequence: CTC
  source 1..20: mol_type = other DNA
agaaaacatttttattcagg

SEQ ID NO: 46020 - DNA, 20 bp, synthetic construct
  misc_feature 1..20: note = Description of Artificial Sequence: Synthetic oligonucleotide
  misc_feature 1..20: note = Target: SCN10A; (-) strand; PAM type: YTN; PAM sequence: CTG
  source 1..20: mol_type = other DNA
agggggctcagaaaacattt

SEQ ID NO: 46021 - DNA, 20 bp, synthetic construct
  misc_feature 1..20: note = Description of Artificial Sequence: Synthetic oligonucleotide
  misc_feature 1..20: note = Target: SCN10A; (-) strand; PAM type: YTN; PAM sequence: TTC
  source 1..20: mol_type = other DNA
cccaatctgagggggctcag

SEQ ID NO: 46022 - DNA, 20 bp, synthetic construct
  misc_feature 1..20: note = Description of Artificial Sequence: Synthetic oligonucleotide
  misc_feature 1..20: note = Target: SCN10A; (-) strand; PAM type: YTN; PAM sequence: CTT
  source 1..20: mol_type = other DNA
ccccaatctgagggggctca

SEQ ID NO: 46023 - DNA, 20 bp, synthetic construct
  misc_feature 1..20: note = Description of Artificial Sequence: Synthetic oligonucleotide
  misc_feature 1..20: note = Target: SCN10A; (-) strand; PAM type: YTN; PAM sequence: TTA
  source 1..20: mol_type = other DNA
aaggaaaaatgtccttcccc

SEQ ID NO: 46024 - DNA, 20 bp, synthetic construct
  misc_feature 1..20: note = Description of Artificial Sequence: Synthetic oligonucleotide
  misc_feature 1..20: note = Target: SCN10A; (-) strand; PAM type: YTN; PAM sequence: CTG
  source 1..20: mol_type = other DNA
ttaaaggaaaaatgtccttc

SEQ ID NO: 46025 - DNA, 20 bp, synthetic construct
  misc_feature 1..20: note = Description of Artificial Sequence: Synthetic oligonucleotide
  misc_feature 1..20: note = Target: SCN10A; (-) strand; PAM type: YTN; PAM sequence: TTA
  source 1..20: mol_type = other DNA
gctgttaaaggaaaaatgtc

SEQ ID NO: 46026 - DNA, 20 bp, synthetic construct
  misc_feature 1..20: note = Description of Artificial Sequence: Synthetic oligonucleotide
  misc_feature 1..20: note = Target: SCN10A; (-) strand; PAM type: YTN; PAM sequence: CTA
  source 1..20: mol_type = other DNA
ttagctgttaaaggaaaaat

SEQ ID NO: 46027 - DNA, 20 bp, synthetic construct
  misc_feature 1..20: note = Description of Artificial Sequence: Synthetic oligonucleotide
  misc_feature 1..20: note = Target: SCN10A; (-) strand; PAM type: YTN; PAM sequence: CTC
  source 1..20: mol_type = other DNA
aataaacggtgtctattagc

SEQ ID NO: 46028 - DNA, 20 bp, synthetic construct
  misc_feature 1..20: note = Description of Artificial Sequence: Synthetic oligonucleotide
  misc_feature 1..20: note = Target: SCN10A; (-) strand; PAM type: YTN; PAM sequence: CTG
  source 1..20: mol_type = other DNA
aggcaggaactcaataaacg

SEQ ID NO: 46029 - DNA, 20 bp, synthetic construct
  misc_feature 1..20: note = Description of Artificial Sequence: Synthetic oligonucleotide
  misc_feature 1..20: note = Target: SCN10A; (-) strand; PAM type: YTN; PAM sequence: CTG
  source 1..20: mol_type = other DNA
ggctgaggcaggaactcaat

SEQ ID NO: 46030 - DNA, 20 bp, synthetic construct
  misc_feature 1..20: note = Description of Artificial Sequence: Synthetic oligonucleotide
  misc_feature 1..20: note = Target: SCN10A; (-) strand; PAM type: YTN; PAM sequence: CTA
  source 1..20: mol_type = other DNA
atgcaatgtctgggctgagg

SEQ ID NO: 46031 - DNA, 20 bp, synthetic construct
  misc_feature 1..20: note = Description of Artificial Sequence: Synthetic oligonucleotide
  misc_feature 1..20: note = Target: SCN10A; (-) strand; PAM type: YTN; PAM sequence: TTG
  source 1..20: mol_type = other DNA
cctaatgcaatgtctgggct

SEQ ID NO: 46032 - DNA, 20 bp, synthetic construct
  misc_feature 1..20: note = Description of Artificial Sequence: Synthetic oligonucleotide
  misc_feature 1..20: note = Target: SCN10A; (-) strand; PAM type: YTN; PAM sequence: TTA
  source 1..20: mol_type = other DNA
aatgacaggagatgacatat

SEQ ID NO: 46033 - DNA, 20 bp, synthetic construct
  misc_feature 1..20: note = Description of Artificial Sequence: Synthetic oligonucleotide
  misc_feature 1..20: note = Target: SCN10A; (-) strand; PAM type: YTN; PAM sequence: CTG
  source 1..20: mol_type = other DNA
ggagaattaaatgacaggag

SEQ ID NO: 46034 - DNA, 20 bp, synthetic construct
  misc_feature 1..20: note = Description of Artificial Sequence: Synthetic oligonucleotide
  misc_feature 1..20: note = Target: SCN10A; (-) strand; PAM type: YTN; PAM sequence: TTA
  source 1..20: mol_type = other DNA
ctgggagaattaaatgacag

SEQ ID NO: 46035 - DNA, 20 bp, synthetic construct
  misc_feature 1..20: note = Description of Artificial Sequence: Synthetic oligonucleotide
  misc_feature 1..20: note = Target: SCN10A; (-) strand; PAM type: YTN; PAM sequence: TTT
  source 1..20: mol_type = other DNA
actgggagaattaaatgaca

SEQ ID NO: 46036 - DNA, 20 bp, synthetic construct
  misc_feature 1..20: note = Description of Artificial Sequence: Synthetic oligonucleotide
  misc_feature 1..20: note = Target: SCN10A; (-) strand; PAM type: YTN; PAM sequence: CTC
  source 1..20: mol_type = other DNA
atgggtttactgggagaatt

SEQ ID NO: 46037 - DNA, 20 bp, synthetic construct
  misc_feature 1..20: note = Description of Artificial Sequence: Synthetic oligonucleotide
  misc_feature 1..20: note = Target: SCN10A; (-) strand; PAM type: YTN; PAM sequence: TTA
  source 1..20: mol_type = other DNA
ctcatgggtttactgggaga

SEQ ID NO: 46038 - DNA, 20 bp, synthetic construct
  misc_feature 1..20: note = Description of Artificial Sequence: Synthetic oligonucleotide
  misc_feature 1..20: note = Target: SCN10A; (-) strand; PAM type: YTN; PAM sequence: CTT
  source 1..20: mol_type = other DNA
actcatgggtttactgggag

SEQ ID NO: 46039 - DNA, 20 bp, synthetic construct
  misc_feature 1..20: note = Description of Artificial Sequence: Synthetic oligonucleotide
  misc_feature 1..20: note = Target: SCN10A; (-) strand; PAM type: YTN; PAM sequence: TTA
  source 1..20: mol_type = other DNA
aaatcaagaaaataatgctt

SEQ ID NO: 46040 - DNA, 20 bp, synthetic construct
  misc_feature 1..20: note = Description of Artificial Sequence: Synthetic oligonucleotide
  misc_feature 1..20: note = Target: SCN10A; (-) strand; PAM type: YTN; PAM sequence: CTT
  source 1..20: mol_type = other DNA
aaaatcaagaaaataatgct

SEQ ID NO: 46041 - DNA, 20 bp, synthetic construct
  misc_feature 1..20: note = Description of Artificial Sequence: Synthetic oligonucleotide
  misc_feature 1..20: note = Target: SCN10A; (-) strand; PAM type: YTN; PAM sequence: TTC
  source 1..20: mol_type = other DNA
cttaaaatcaagaaaataat

SEQ ID NO: 46042 - DNA, 20 bp, synthetic construct
  misc_feature 1..20: note = Description of Artificial Sequence: Synthetic oligonucleotide
  misc_feature 1..20: note = Target: SCN10A; (-) strand; PAM type: YTN; PAM sequence: TTT
  source 1..20: mol_type = other DNA
ccttaaaatcaagaaaataa

SEQ ID NO: 46043 - DNA, 20 bp, synthetic construct
  misc_feature 1..20: note = Description of Artificial Sequence: Synthetic oligonucleotide
  misc_feature 1..20: note = Target: SCN10A; (-) strand; PAM type: YTN; PAM sequence: CTA
  source 1..20: mol_type = other DNA
atttccttaaaatcaagaaa

SEQ ID NO: 46044 - DNA, 20 bp, synthetic construct
  misc_feature 1..20: note = Description of Artificial Sequence: Synthetic oligonucleotide
  misc_feature 1..20: note = Target: SCN10A; (-) strand; PAM type: YTN; PAM sequence: CTC
  source 1..20: mol_type = other DNA
aagatctaatttccttaaaa

SEQ ID NO: 46045 - DNA, 20 bp, synthetic construct
  misc_feature 1..20: note = Description of Artificial Sequence: Synthetic oligonucleotide
  misc_feature 1..20: note = Target: SCN10A; (-) strand; PAM type: YTN; PAM sequence: CTC
  source 1..20: mol_type = other DNA
ctcaagatctaatttcctta

SEQ ID NO: 46046 - DNA, 20 bp, synthetic construct
  misc_feature 1..20: note = Description of Artificial Sequence: Synthetic oligonucleotide
  misc_feature 1..20: note = Target: SCN10A; (-) strand; PAM type: YTN; PAM sequence: TTA
  source 1..20: mol_type = other DNA
atctcctcaagatctaattt

SEQ ID NO: 46047 - DNA, 20 bp, synthetic construct
  misc_feature 1..20: note = Description of Artificial Sequence: Synthetic oligonucleotide
  misc_feature 1..20: note = Target: SCN10A; (-) strand; PAM type: YTN; PAM sequence: CTT
  source 1..20: mol_type = other DNA
aatctcctcaagatctaatt

SEQ ID NO: 46048 - DNA, 20 bp, synthetic construct
  misc_feature 1..20: note = Description of Artificial Sequence: Synthetic oligonucleotide
  misc_feature 1..20: note = Target: SCN10A; (-) strand; PAM type: YTN; PAM sequence: CTA
  source 1..20: mol_type = other DNA
ggtgggtgaccccaggcaag

SEQ ID NO: 46049 - DNA, 20 bp, synthetic construct
  misc_feature 1..20: note = Description of Artificial Sequence: Synthetic oligonucleotide
  misc_feature 1..20: note = Target: SCN10A; (-) strand; PAM type: YTN; PAM sequence: TTA
  source 1..20: mol_type = other DNA
ctaggtgggtgaccccaggc

SEQ ID NO: 46050 - DNA, 20 bp, synthetic construct
  misc_feature 1..20: note = Description of Artificial Sequence: Synthetic oligonucleotide
  misc_feature 1..20: note = Target: SCN10A; (-) strand; PAM type: YTN; PAM sequence: TTT
  source 1..20: mol_type = other DNA
actaggtgggtgaccccagg

SEQ ID NO: 46051 - DNA, 20 bp, synthetic construct
  misc_feature 1..20: note = Description of Artificial Sequence: Synthetic oligonucleotide
  misc_feature 1..20: note = Target: SCN10A; (-) strand; PAM type: YTN; PAM sequence: CTC
  source 1..20: mol_type = other DNA
caccatttactaggtgggtg

SEQ ID NO: 46052 - DNA, 20 bp, synthetic construct
  misc_feature 1..20: note = Description of Artificial Sequence: Synthetic oligonucleotide
  misc_feature 1..20: note = Target: SCN10A; (-) strand; PAM type: YTN; PAM sequence: CTG
  source 1..20: mol_type = other DNA
ctccaccatttactaggtgg

SEQ ID NO: 46053 - DNA, 20 bp, synthetic construct
  misc_feature 1..20: note = Description of Artificial Sequence: Synthetic oligonucleotide
  misc_feature 1..20: note = Target: SCN10A; (-) strand; PAM type: YTN; PAM sequence: CTC
  source 1..20: mol_type = other DNA
tgctccaccatttactaggt

SEQ ID NO: 46054 - DNA, 20 bp, synthetic construct
  misc_feature 1..20: note = Description of Artificial Sequence: Synthetic oligonucleotide
  misc_feature 1..20: note = Target: SCN10A; (-) strand; PAM type: YTN; PAM sequence: CTG
  source 1..20: mol_type = other DNA
gtgtagaatctctgctccac

SEQ ID NO: 46055 - DNA, 20 bp, synthetic construct
  misc_feature 1..20: note = Description of Artificial Sequence: Synthetic oligonucleotide
  misc_feature 1..20: note = Target: SCN10A; (-) strand; PAM type: YTN; PAM sequence: TTA
  source 1..20: mol_type = other DNA
gaaaagaaagacctggtgta

SEQ ID NO: 46056 - DNA, 20 bp, synthetic construct
  misc_feature 1..20: note = Description of Artificial Sequence: Synthetic oligonucleotide
  misc_feature 1..20: note = Target: SCN10A; (-) strand; PAM type: YTN; PAM sequence: TTG
  source 1..20: mol_type = other DNA
caggaatgagaacatatgat

SEQ ID NO: 46057 - DNA, 20 bp, synthetic construct
  misc_feature 1..20: note = Description of Artificial Sequence: Synthetic oligonucleotide
  misc_feature 1..20: note = Target: SCN10A; (-) strand; PAM type: YTN; PAM sequence: CTT
  source 1..20: mol_type = other DNA
gcaggaatgagaacatatga

SEQ ID NO: 46058 - DNA, 20 bp, synthetic construct
  misc_feature 1..20: note = Description of Artificial Sequence: Synthetic oligonucleotide
  misc_feature 1..20: note = Target: SCN10A; (-) strand; PAM type: YTN; PAM sequence: CTG
  source 1..20: mol_type = other DNA
acttgcaggaatgagaacat

SEQ ID NO: 46059 - DNA, 20 bp, synthetic construct
  misc_feature 1..20: note = Description of Artificial Sequence: Synthetic oligonucleotide
  misc_feature 1..20: note = Target: SCN10A; (-) strand; PAM type: YTN; PAM sequence: TTG
  source 1..20: mol_type = other DNA
ggaggcagtctgacttgcag

SEQ ID NO: 46060 - DNA, 20 bp, synthetic construct
  misc_feature 1..20: note = Description of Artificial Sequence: Synthetic oligonucleotide
  misc_feature 1..20: note = Target: SCN10A; (-) strand; PAM type: YTN; PAM sequence: CTT
  source 1..20: mol_type = other DNA
gggaggcagtctgacttgca

SEQ ID NO: 46061 - DNA, 20 bp, synthetic construct
  misc_feature 1..20: note = Description of Artificial Sequence: Synthetic oligonucleotide
  misc_feature 1..20: note = Target: SCN10A; (-) strand; PAM type: YTN; PAM sequence: TTA
  source 1..20: mol_type = other DNA
caagaagtgtgccttgggag

SEQ ID NO: 46062 - DNA, 20 bp, synthetic construct
  misc_feature 1..20: note = Description of Artificial Sequence: Synthetic oligonucleotide
  misc_feature 1..20: note = Target: SCN10A; (-) strand; PAM type: YTN; PAM sequence: TTC
  source 1..20: mol_type = other DNA
attacaagaagtgtgccttg

SEQ ID NO: 46063 - DNA, 20 bp, synthetic construct
  misc_feature 1..20: note = Description of Artificial Sequence: Synthetic oligonucleotide
  misc_feature 1..20: note = Target: SCN10A; (-) strand; PAM type: YTN; PAM sequence: TTC
  source 1..20: mol_type = other DNA
atgtgggattcattacaaga

SEQ ID NO: 46064 - DNA, 20 bp, synthetic construct
  misc_feature 1..20: note = Description of Artificial Sequence: Synthetic oligonucleotide
  misc_feature 1..20: note = Target: SCN10A; (-) strand; PAM type: YTN; PAM sequence: TTC
  source 1..20: mol_type = other DNA
aaattcatgtgggattcatt

SEQ ID NO: 46065 - DNA, 20 bp, synthetic construct
  misc_feature 1..20: note = Description of Artificial Sequence: Synthetic oligonucleotide
  misc_feature 1..20: note = Target: SCN10A; (-) strand; PAM type: YTN; PAM sequence: TTT
  source 1..20: mol_type = other DNA
caaattcatgtgggattcat

SEQ ID NO: 46066 - DNA, 20 bp, synthetic construct
  misc_feature 1..20: note = Description of Artificial Sequence: Synthetic oligonucleotide
  misc_feature 1..20: note = Target: SCN10A; (-) strand; PAM type: YTN; PAM sequence: TTT
  source 1..20: mol_type = other DNA
tcaaattcatgtgggattca

SEQ ID NO: 46067 - DNA, 20 bp, synthetic construct
  misc_feature 1..20: note = Description of Artificial Sequence: Synthetic oligonucleotide
  misc_feature 1..20: note = Target: SCN10A; (-) strand; PAM type: YTN; PAM sequence: CTT
  source 1..20: mol_type = other DNA
ttcaaattcatgtgggattc

SEQ ID NO: 46068 - DNA, 20 bp, synthetic construct
  misc_feature 1..20: note = Description of Artificial Sequence: Synthetic oligonucleotide
  misc_feature 1..20: note = Target: SCN10A; (-) strand; PAM type: YTN; PAM sequence: TTC
  source 1..20: mol_type = other DNA
aaacttttcaaattcatgtg

SEQ ID NO: 46069 - DNA, 20 bp, synthetic construct
  misc_feature 1..20: note = Description of Artificial Sequence: Synthetic oligonucleotide
  misc_feature 1..20: note = Target: SCN10A; (-) strand; PAM type: YTN; PAM sequence: CTT
  source 1..20: mol_type = other DNA
caaacttttcaaattcatgt

SEQ ID NO: 46070 - DNA, 20 bp, synthetic construct
  misc_feature 1..20: note = Description of Artificial Sequence: Synthetic oligonucleotide
  misc_feature 1..20: note = Target: SCN10A; (-) strand; PAM type: YTN; PAM sequence: TTG
  source 1..20: mol_type = other DNA
aaaagtcttcaaacttttca

SEQ ID NO: 46071 - DNA, 20 bp, synthetic construct
  misc_feature 1..20: note = Description of Artificial Sequence: Synthetic oligonucleotide
  misc_feature 1..20: note = Target: SCN10A; (-) strand; PAM type: YTN; PAM sequence: CTG
  source 1..20: mol_type = other DNA
gttgaaaagtcttcaaactt

SEQ ID NO: 46072 - DNA, 20 bp, synthetic construct
  misc_feature 1..20: note = Description of Artificial Sequence: Synthetic oligonucleotide
  misc_feature 1..20: note = Target: SCN10A; (-) strand; PAM type: YTN; PAM sequence: CTC
  source 1..20: mol_type = other DNA
tggttgaaaagtcttcaaac

SEQ ID NO: 46073 - DNA, 20 bp, synthetic construct
  misc_feature 1..20: note = Description of Artificial Sequence: Synthetic oligonucleotide
  misc_feature 1..20: note = Target: SCN10A; (-) strand; PAM type: YTN; PAM sequence: TTC
  source 1..20: mol_type = other DNA
tctggttgaaaagtcttcaa

SEQ ID NO: 46074 - DNA, 20 bp, synthetic construct
  misc_feature 1..20: note = Description of Artificial Sequence: Synthetic oligonucleotide
  misc_feature 1..20: note = Target: SCN10A; (-) strand; PAM type: YTN; PAM sequence: CTT
  source 1..20: mol_type = other DNA
ctctggttgaaaagtcttca

SEQ ID NO: 46075 - DNA, 20 bp, synthetic construct
  misc_feature 1..20: note = Description of Artificial Sequence: Synthetic oligonucleotide
  misc_feature 1..20: note = Target: SCN10A; (-) strand; PAM type: YTN; PAM sequence: TTG
  source 1..20: mol_type = other DNA
tacttctctggttgaaaagt

SEQ ID NO: 46076 - DNA, 20 bp, synthetic construct
  misc_feature 1..20: note = Description of Artificial Sequence: Synthetic oligonucleotide
  misc_feature 1..20: note = Target: SCN10A; (-) strand; PAM type: YTN; PAM sequence: TTA
  source 1..20: mol_type = other DNA
tgcccagattgtacttctct

SEQ ID NO: 46077 - DNA, 20 bp, synthetic construct
  misc_feature 1..20: note = Description of Artificial Sequence: Synthetic oligonucleotide
  misc_feature 1..20: note = Target: SCN10A; (-) strand; PAM type: YTN; PAM sequence: TTT
  source 1..20: mol_type = other DNA
atgcccagattgtacttctc

SEQ ID NO: 46078 - DNA, 20 bp, synthetic construct
  misc_feature 1..20: note = Description of Artificial Sequence: Synthetic oligonucleotide
  misc_feature 1..20: note = Target: SCN10A; (-) strand; PAM type: YTN; PAM sequence: TTT
  source 1..20: mol_type = other DNA
tatgcccagattgtacttct

SEQ ID NO: 46079 - DNA, 20 bp, synthetic construct
  misc_feature 1..20: note = Description of Artificial Sequence: Synthetic oligonucleotide
  misc_feature 1..20: note = Target: SCN10A; (-) strand; PAM type: YTN; PAM sequence: TTT
  source 1..20: mol_type = other DNA
ttatgcccagattgtacttc

SEQ ID NO: 46080 - DNA, 20 bp, synthetic construct
  misc_feature 1..20: note = Description of Artificial Sequence: Synthetic oligonucleotide
  misc_feature 1..20: note = Target: SCN10A; (-) strand; PAM type: YTN; PAM sequence: CTG
  source 1..20: mol_type = other DNA
catttttatgcccagattgt

SEQ ID NO: 46081 - DNA, 20 bp, synthetic construct
  misc_feature 1..20: note = Description of Artificial Sequence: Synthetic oligonucleotide
  misc_feature 1..20: note = Target: SCN10A; (-) strand; PAM type: YTN; PAM sequence: TTG
  source 1..20: mol_type = other DNA
atctgcatttttatgcccag

SEQ ID NO: 46082 - DNA, 20 bp, synthetic construct
  misc_feature 1..20: note = Description of Artificial Sequence: Synthetic oligonucleotide
  misc_feature 1..20: note = Target: SCN10A; (-) strand; PAM type: YTN; PAM sequence: TTT
  source 1..20: mol_type = other DNA
gatctgcatttttatgccca

SEQ ID NO: 46083 - DNA, 20 bp, synthetic construct
  misc_feature 1..20: note = Description of Artificial Sequence: Synthetic oligonucleotide
  misc_feature 1..20: note = Target: SCN10A; (-) strand; PAM type: YTN; PAM sequence: CTT
  source 1..20: mol_type = other DNA
tgatctgcatttttatgccc

SEQ ID NO: 46084 - DNA, 20 bp, synthetic construct
  misc_feature 1..20: note = Description of Artificial Sequence: Synthetic oligonucleotide
  misc_feature 1..20: note = Target: SCN10A; (-) strand; PAM type: YTN; PAM sequence: CTG
  source 1..20: mol_type = other DNA
aaaaagctttgatctgcatt

SEQ ID NO: 46085 - DNA, 20 bp, synthetic construct
  misc_feature 1..20: note = Description of Artificial Sequence: Synthetic oligonucleotide
  misc_feature 1..20: note = Target: SCN10A; (-) strand; PAM type: YTN; PAM sequence: TTA
  source 1..20: mol_type = other DNA
tctgaaaaagctttgatctg

SEQ ID NO: 46086 - DNA, 20 bp, synthetic construct
  misc_feature 1..20: note = Description of Artificial Sequence: Synthetic oligonucleotide
  misc_feature 1..20: note = Target: SCN10A; (-) strand; PAM type: YTN; PAM sequence: CTG
  source 1..20: mol_type = other DNA
ggttatctgaaaaagctttg

SEQ ID NO: 46087 - DNA, 20 bp, synthetic construct
  misc_feature 1..20: note = Description of Artificial Sequence: Synthetic oligonucleotide
  misc_feature 1..20: note = Target: SCN10A; (-) strand; PAM type: YTN; PAM sequence: TTC
  source 1..20: mol_type = other DNA
tgggttatctgaaaaagctt

SEQ ID NO: 46088 - DNA, 20 bp, synthetic construct
  misc_feature 1..20: note = Description of Artificial Sequence: Synthetic oligonucleotide
  misc_feature 1..20: note = Target: SCN10A; (-) strand; PAM type: YTN; PAM sequence: CTT
  source 1..20: mol_type = other DNA
ctgggttatctgaaaaagct

SEQ ID NO: 46089 - DNA, 20 bp, synthetic construct
  misc_feature 1..20: note = Description of Artificial Sequence: Synthetic oligonucleotide
  misc_feature 1..20: note = Target: SCN10A; (-) strand; PAM type: YTN; PAM sequence: CTG
  source 1..20: mol_type = other DNA
gggaaaggagaaggcttctg

SEQ ID NO: 46090 - DNA, 20 bp, synthetic construct
  misc_feature 1..20: note = Description of Artificial Sequence: Synthetic oligonucleotide
  misc_feature 1..20: note = Target: SCN10A; (-) strand; PAM type: YTN; PAM sequence: CTC
  source 1..20: mol_type = other DNA
ctggggaaaggagaaggctt

SEQ ID NO: 46091 - DNA, 20 bp, synthetic construct
  misc_feature 1..20: note = Description of Artificial Sequence: Synthetic oligonucleotide
  misc_feature 1..20: note = Target: SCN10A; (-) strand; PAM type: YTN; PAM sequence: CTG
  source 1..20: mol_type = other DNA
tctcctggggaaaggagaag

SEQ ID NO: 46092 - DNA, 20 bp, synthetic construct
  misc_feature 1..20: note = Description of Artificial Sequence: Synthetic oligonucleotide
  misc_feature 1..20: note = Target: SCN10A; (-) strand; PAM type: YTN; PAM sequence: CTG
  source 1..20: mol_type = other DNA
ggggcactgtctcctgggga

SEQ ID NO: 46093 - DNA, 20 bp, synthetic construct
  misc_feature 1..20: note = Description of Artificial Sequence: Synthetic oligonucleotide
  misc_feature 1..20: note = Target: SCN10A; (-) strand; PAM type: YTN; PAM sequence: CTG
  source 1..20: mol_type = other DNA
ctgggggcactgtctcctgg

SEQ ID NO: 46094 - DNA, 20 bp, synthetic construct
  misc_feature 1..20: note = Description of Artificial Sequence: Synthetic oligonucleotide
  misc_feature 1..20: note = Target: SCN10A; (-) strand; PAM type: YTN; PAM sequence: CTG
  source 1..20: mol_type = other DNA
gtggtgagtggtgaaccctg

SEQ ID NO: 46095 - DNA, 20 bp, synthetic construct
  misc_feature 1..20: note = Description of Artificial Sequence: Synthetic oligonucleotide
  misc_feature 1..20: note = Target: SCN10A; (-) strand; PAM type: YTN; PAM sequence: CTA
  source 1..20: mol_type = other DNA
gggaacctggtggtgagtgg

SEQ ID NO: 46096 - DNA, 20 bp, synthetic construct
  misc_feature 1..20: note = Description of Artificial Sequence: Synthetic oligonucleotide
  misc_feature 1..20: note = Target: SCN10A; (-) strand; PAM type: YTN; PAM sequence: TTG
  source 1..20: mol_type = other DNA
acggtgatggtgctagggaa

SEQ ID NO: 46097 - DNA, 20 bp, synthetic construct
  misc_feature 1..20: note = Description of Artificial Sequence: Synthetic oligonucleotide
  misc_feature 1..20: note = Target: SCN10A; (-) strand; PAM type: YTN; PAM sequence: CTT
  source 1..20: mol_type = other DNA
gacggtgatggtgctaggga

SEQ ID NO: 46098 - DNA, 20 bp, synthetic construct
  misc_feature 1..20: note = Description of Artificial Sequence: Synthetic oligonucleotide
  misc_feature 1..20: note = Target: SCN10A; (-) strand; PAM type: YTN; PAM sequence: TTC
  source 1..20: mol_type = other DNA
ttgacggtgatggtgctagg

SEQ ID NO: 46099 - DNA, 20 bp, synthetic construct
  misc_feature 1..20: note = Description of Artificial Sequence: Synthetic oligonucleotide
  misc_feature 1..20: note = Target: SCN10A; (-) strand; PAM type: YTN; PAM sequence: TTT
  source 1..20: mol_type = other DNA
cttgacggtgatggtgctag

SEQ ID NO: 46100 - DNA, 20 bp, synthetic construct
  misc_feature 1..20: note = Description of Artificial Sequence: Synthetic oligonucleotide
  misc_feature 1..20: note = Target: SCN10A; (-) strand; PAM type: YTN; PAM sequence: TTT
  source 1..20: mol_type = other DNA
tcttgacggtgatggtgcta

SEQ ID NO: 46101 - DNA, 20 bp, synthetic construct
  misc_feature 1..20: note = Description of Artificial Sequence: Synthetic oligonucleotide
  misc_feature 1..20: note = Target: SCN10A; (-) strand; PAM type: YTN; PAM sequence: CTT
  source 1..20: mol_type = other DNA
ttcttgacggtgatggtgct

SEQ ID NO: 46102 - DNA, 20 bp, synthetic construct
  misc_feature 1..20: note = Description of Artificial Sequence: Synthetic oligonucleotide
  misc_feature 1..20: note = Target: SCN10A; (-) strand; PAM type: YTN; PAM sequence: CTC
  source 1..20: mol_type = other DNA
atccttttcttgacggtgat

SEQ ID NO: 46103 - DNA, 20 bp, synthetic construct
  misc_feature 1..20: note = Description of Artificial Sequence: Synthetic oligonucleotide
  misc_feature 1..20: note = Target: SCN10A; (-) strand; PAM type: YTN; PAM sequence: TTG
  source 1..20: mol_type = other DNA
gccaaaaatccatatgcctc

SEQ ID NO: 46104 - DNA, 20 bp, synthetic construct
  misc_feature 1..20: note = Description of Artificial Sequence: Synthetic oligonucleotide
  misc_feature 1..20: note = Target: SCN10A; (-) strand; PAM type: YTN; PAM sequence: CTG
  source 1..20: mol_type = other DNA
catggaagttggccaaaaat

SEQ ID NO: 46105 - DNA, 20 bp, synthetic construct
  misc_feature 1..20: note = Description of Artificial Sequence: Synthetic oligonucleotide
  misc_feature 1..20: note = Target: SCN10A; (-) strand; PAM type: YTN; PAM sequence: TTG
  source 1..20: mol_type = other DNA
agaacatgtgggcctgcatg

SEQ ID NO: 46106 - DNA, 20 bp, synthetic construct
  misc_feature 1..20: note = Description of Artificial Sequence: Synthetic oligonucleotide
  misc_feature 1..20: note = Target: SCN10A; (-) strand; PAM type: YTN; PAM sequence: CTG
  source 1..20: mol_type = other DNA
tggagagtggattgagaaca

SEQ ID NO: 46107 - DNA, 20 bp, synthetic construct
  misc_feature 1..20: note = Description of Artificial Sequence: Synthetic oligonucleotide
  misc_feature 1..20: note = Target: SCN10A; (-) strand; PAM type: YTN; PAM sequence: CTC
  source 1..20: mol_type = other DNA
tgtggagagtggattgagaa

SEQ ID NO: 46108 - DNA, 20 bp, synthetic construct
  misc_feature 1..20: note = Description of Artificial Sequence: Synthetic oligonucleotide
  misc_feature 1..20: note = Target: SCN10A; (-) strand; PAM type: YTN; PAM sequence: TTC
  source 1..20: mol_type = other DNA
cgtatcctctgtggagagtg

SEQ ID NO: 46109 - DNA, 20 bp, synthetic construct
  misc_feature 1..20: note = Description of Artificial Sequence: Synthetic oligonucleotide
  misc_feature 1..20: note = Target: SCN10A; (-) strand; PAM type: YTN; PAM sequence: CTT
  source 1..20: mol_type = other DNA
ccgtatcctctgtggagagt

SEQ ID NO: 46110 - DNA, 20 bp, synthetic construct
  misc_feature 1..20: note = Description of Artificial Sequence: Synthetic oligonucleotide
  misc_feature 1..20: note = Target: SCN10A; (-) strand; PAM type: YTN; PAM sequence: TTG
  source 1..20: mol_type = other DNA
tcttccgtatcctctgtgga

SEQ ID NO: 46111 - DNA, 20 bp, synthetic construct
  misc_feature 1..20: note = Description of Artificial Sequence: Synthetic oligonucleotide
  misc_feature 1..20: note = Target: SCN10A; (-) strand; PAM type: YTN; PAM sequence: CTC
  source 1..20: mol_type = other DNA
attgtcttccgtatcctctg

SEQ ID NO: 46112 - DNA, 20 bp, synthetic construct
  misc_feature 1..20: note = Description of Artificial Sequence: Synthetic oligonucleotide
  misc_feature 1..20: note = Target: SCN10A; (-) strand; PAM type: YTN; PAM sequence: TTC
  source 1..20: mol_type = other DNA
ctcattgtcttccgtatcct

SEQ ID NO: 46113 - DNA, 20 bp, synthetic construct
  misc_feature 1..20: note = Description of Artificial Sequence: Synthetic oligonucleotide
  misc_feature 1..20: note = Target: SCN10A; (-) strand; PAM type: YTN; PAM sequence: TTT
  source 1..20: mol_type = other DNA
cctcattgtcttccgtatcc

SEQ ID NO: 46114 - DNA, 20 bp, synthetic construct
  misc_feature 1..20: note = Description of Artificial Sequence: Synthetic oligonucleotide
  misc_feature 1..20: note = Target: SCN10A; (-) strand; PAM type: YTN; PAM sequence: CTT
  source 1..20: mol_type = other DNA
tcctcattgtcttccgtatc

SEQ ID NO: 46115 - DNA, 20 bp, synthetic construct
  misc_feature 1..20: note = Description of Artificial Sequence: Synthetic oligonucleotide
  misc_feature 1..20: note = Target: SCN10A; (-) strand; PAM type: YTN; PAM sequence: CTC
  source 1..20: mol_type = other DNA
tttcctcattgtcttccgta

SEQ ID NO: 46116 - DNA, 20 bp, synthetic construct
  misc_feature 1..20: note = Description of Artificial Sequence: Synthetic oligonucleotide
  misc_feature 1..20: note = Target: SCN10A; (-) strand; PAM type: YTN; PAM sequence: TTC
  source 1..20: mol_type = other DNA
cactctttcctcattgtctt

SEQ ID NO: 46117 - DNA, 20 bp, synthetic construct
  misc_feature 1..20: note = Description of Artificial Sequence: Synthetic oligonucleotide
  misc_feature 1..20: note = Target: SCN10A; (-) strand; PAM type: YTN; PAM sequence: CTT
  source 1..20: mol_type = other DNA
ccactctttcctcattgtct

SEQ ID NO: 46118 - DNA, 20 bp, synthetic construct
  misc_feature 1..20: note = Description of Artificial Sequence: Synthetic oligonucleotide
  misc_feature 1..20: note = Target: SCN10A; (-) strand; PAM type: YTN; PAM sequence: TTC
  source 1..20: mol_type = other DNA
ttccactctttcctcattgt

SEQ ID NO: 46119 - DNA, 20 bp, synthetic construct
  misc_feature 1..20: note = Description of Artificial Sequence: Synthetic oligonucleotide
  misc_feature 1..20: note = Target: SCN10A; (-) strand; PAM type: YTN; PAM sequence: CTT
  source 1..20: mol_type = other DNA
cttccactctttcctcattg

SEQ ID NO: 46120 - DNA, 20 bp, synthetic construct
  misc_feature 1..20: note = Description of Artificial Sequence: Synthetic oligonucleotide
  misc_feature 1..20: note = Target: SCN10A; (-) strand; PAM type: YTN; PAM sequence: CTG
  source 1..20: mol_type = other DNA
gcacatgcacgacttcttcc

SEQ ID NO: 46121 - DNA, 20 bp, synthetic construct
  misc_feature 1..20: note = Description of Artificial Sequence: Synthetic oligonucleotide
  misc_feature 1..20: note = Target: SCN10A; (-) strand; PAM type: YTN; PAM sequence: CTG
  source 1..20: mol_type = other DNA
gccccgctggcacatgcacg

SEQ ID NO: 46122 - DNA, 20 bp, synthetic construct
  misc_feature 1..20: note = Description of Artificial Sequence: Synthetic oligonucleotide
  misc_feature 1..20: note = Target: SCN10A; (-) strand; PAM type: YTN; PAM sequence: CTC
  source 1..20: mol_type = other DNA
cgcgccccatgaagactggc

SEQ ID NO: 46123 - DNA, 20 bp, synthetic construct
  misc_feature 1..20: note = Description of Artificial Sequence: Synthetic oligonucleotide
  misc_feature 1..20: note = Target: SCN10A; (-) strand; PAM type: YTN; PAM sequence: CTA
  source 1..20: mol_type = other DNA
ccgtaacaaccgaaaaaata

SEQ ID NO: 46124 - DNA, 20 bp, synthetic construct
  misc_feature 1..20: note = Description of Artificial Sequence: Synthetic oligonucleotide
  misc_feature 1..20: note = Target: SCN10A; (-) strand; PAM type: YTN; PAM sequence: CTA
  source 1..20: mol_type = other DNA
ggggaaaactaccgtaacaa

SEQ ID NO: 46125 - DNA, 20 bp, synthetic construct
  misc_feature 1..20: note = Description of Artificial Sequence: Synthetic oligonucleotide
  misc_feature 1..20: note = Target: SCN10A; (-) strand; PAM type: YTN; PAM sequence: CTC
  source 1..20: mol_type = other DNA
ctaggggaaaactaccgtaa

SEQ ID NO: 46126 - DNA, 20 bp, synthetic construct
  misc_feature 1..20: note = Description of Artificial Sequence: Synthetic oligonucleotide
  misc_feature 1..20: note = Target: SCN10A; (-) strand; PAM type: YTN; PAM sequence: TTG
  source 1..20: mol_type = other DNA
gcaagcagctcctaggggaa

SEQ ID NO: 46127 - DNA, 20 bp, synthetic construct
  misc_feature 1..20: note = Description of Artificial Sequence: Synthetic oligonucleotide
  misc_feature 1..20: note = Target: SCN10A; (-) strand; PAM type: YTN; PAM sequence: CTG
  source 1..20: mol_type = other DNA
gttggcaagcagctcctagg

SEQ ID NO: 46128 - DNA, 20 bp, synthetic construct
  misc_feature 1..20: note = Description of Artificial Sequence: Synthetic oligonucleotide
  misc_feature 1..20: note = Target: SCN10A; (-) strand; PAM type: YTN; PAM sequence: CTC
  source 1..20: mol_type = other DNA
tggttggcaagcagctccta

SEQ ID NO: 46129 - DNA, 20 bp, synthetic construct
  misc_feature 1..20: note = Description of Artificial Sequence: Synthetic oligonucleotide
  misc_feature 1..20: note = Target: SCN10A; (-) strand; PAM type: YTN; PAM sequence: TTG
  source 1..20: mol_type = other DNA
ctctggttggcaagcagctc

SEQ ID NO: 46130 - DNA, 20 bp, synthetic construct
  misc_feature 1..20: note = Description of Artificial Sequence: Synthetic oligonucleotide
  misc_feature 1..20: note = Target: SCN10A; (-) strand; PAM type: YTN; PAM sequence: TTT
  source 1..20: mol_type = other DNA
gctctggttggcaagcagct

SEQ ID NO: 46131 - DNA, 20 bp, synthetic construct
  misc_feature 1..20: note = Description of Artificial Sequence: Synthetic oligonucleotide
  misc_feature 1..20: note = Target: SCN10A; (-) strand; PAM type: YTN; PAM sequence: CTT
  source 1..20: mol_type = other DNA
tgctctggttggcaagcagc

SEQ ID NO: 46132 - DNA, 20 bp, synthetic construct
  misc_feature 1..20: note = Description of Artificial Sequence: Synthetic oligonucleotide
  misc_feature 1..20: note = Target: SCN10A; (-) strand; PAM type: YTN; PAM sequence: TTG
  source 1..20: mol_type = other DNA
tctttgctctggttggcaag

SEQ ID NO: 46133 - DNA, 20 bp, synthetic construct
  misc_feature 1..20: note = Description of Artificial Sequence: Synthetic oligonucleotide
  misc_feature 1..20: note = Target: SCN10A; (-) strand; PAM type: YTN; PAM sequence: TTT
  source 1..20: mol_type = other DNA
gtctttgctctggttggcaa

SEQ ID NO: 46134 - DNA, 20 bp, synthetic construct
  misc_feature 1..20: note = Description of Artificial Sequence: Synthetic oligonucleotide
  misc_feature 1..20: note = Target: SCN10A; (-) strand; PAM type: YTN; PAM sequence: CTT
  source 1..20: mol_type = other DNA
tgtctttgctctggttggca

SEQ ID NO: 46135 - DNA, 20 bp, synthetic construct
  misc_feature 1..20: note = Description of Artificial Sequence: Synthetic oligonucleotide
  misc_feature 1..20: note = Target: SCN10A; (-) strand; PAM type: YTN; PAM sequence: TTG
  source 1..20: mol_type = other DNA
tctttgtctttgctctggtt

SEQ ID NO: 46136 - DNA, 20 bp, synthetic construct
  misc_feature 1..20: note = Description of Artificial Sequence: Synthetic oligonucleotide
  misc_feature 1..20: note = Target: SCN10A; (-) strand; PAM type: YTN; PAM sequence: CTG
  source 1..20: mol_type = other DNA
gccatcattgtctttgtctt

SEQ ID NO: 46137 - DNA, 20 bp, synthetic construct
  misc_feature 1..20: note = Description of Artificial Sequence: Synthetic oligonucleotide
  misc_feature 1..20: note = Target: SCN10A; (-) strand; PAM type: YTN; PAM sequence: CTC
  source 1..20: mol_type = other DNA
accatcatcctggccatcat

SEQ ID NO: 46138 - DNA, 20 bp, synthetic construct
  misc_feature 1..20: note = Description of Artificial Sequence: Synthetic oligonucleotide
  misc_feature 1..20: note = Target: SCN10A; (-) strand; PAM type: YTN; PAM sequence: CTG
  source 1..20: mol_type = other DNA
gggaacctcaccatcatcct

SEQ ID NO: 46139 - DNA, 20 bp, synthetic construct
  misc_feature 1..20: note = Description of Artificial Sequence: Synthetic oligonucleotide
  misc_feature 1..20: note = Target: SCN10A; (-) strand; PAM type: YTN; PAM sequence: CTC
  source 1..20: mol_type = other DNA
agtgggggcactggggaacc

SEQ ID NO: 46140 - DNA, 20 bp, synthetic construct
  misc_feature 1..20: note = Description of Artificial Sequence: Synthetic oligonucleotide
  misc_feature 1..20: note = Target: SCN10A; (-) strand; PAM type: YTN; PAM sequence: CTC
  source 1..20: mol_type = other DNA
atcaagatcatcggaaactc

SEQ ID NO: 46141 - DNA, 20 bp, synthetic construct
  misc_feature 1..20: note = Description of Artificial Sequence: Synthetic oligonucleotide
  misc_feature 1..20: note = Target: SCN10A; (-) strand; PAM type: YTN; PAM sequence: TTA
  source 1..20: mol_type = other DNA
aacacactcatcaagatcat

SEQ ID NO: 46142 - DNA, 20 bp, synthetic construct
  misc_feature 1..20: note = Description of Artificial Sequence: Synthetic oligonucleotide
  misc_feature 1..20: note = Target: SCN10A; (-) strand; PAM type: YTN; PAM sequence: CTT
  source 1..20: mol_type = other DNA
aaacacactcatcaagatca

SEQ ID NO: 46143 - DNA, 20 bp, synthetic construct
  misc_feature 1..20: note = Description of Artificial Sequence: Synthetic oligonucleotide
  misc_feature 1..20: note = Target: SCN10A; (-) strand; PAM type: YTN; PAM sequence: CTG
  source 1..20: mol_type = other DNA
gcccaccttaaacacactca

SEQ ID NO: 46144 - DNA, 20 bp, synthetic construct
  misc_feature 1..20: note = Description of Artificial Sequence: Synthetic oligonucleotide
  misc_feature 1..20: note = Target: SCN10A; (-) strand; PAM type: YTN; PAM sequence: CTG
  source 1..20: mol_type = other DNA
gccaaatcctggcccacctt

SEQ ID NO: 46145 - DNA, 20 bp, synthetic construct
  misc_feature 1..20: note = Description of Artificial Sequence: Synthetic oligonucleotide
  misc_feature 1..20: note = Target: SCN10A; (-) strand; PAM type: YTN; PAM sequence: TTC
  source 1..20: mol_type = other DNA
aagctggccaaatcctggcc

SEQ ID NO: 46146 - DNA, 20 bp, synthetic construct
  misc_feature 1..20: note = Description of Artificial Sequence: Synthetic oligonucleotide
  misc_feature 1..20: note = Target: SCN10A; (-) strand; PAM type: YTN; PAM sequence: CTG
  source 1..20: mol_type = other DNA
cgcgtattcaagctggccaa

SEQ ID NO: 46147 - DNA, 20 bp, synthetic construct
  misc_feature 1..20: note = Description of Artificial Sequence: Synthetic oligonucleotide
  misc_feature 1..20: note = Target: SCN10A; (-) strand; PAM type: YTN; PAM sequence: CTG
  source 1..20: mol_type = other DNA
cagctgcgcgtattcaagct

SEQ ID NO: 46148 - DNA, 20 bp, synthetic construct
  misc_feature 1..20: note = Description of Artificial Sequence: Synthetic oligonucleotide
  misc_feature 1..20: note = Target: SCN10A; (-) strand; PAM type: YTN; PAM sequence: CTC
  source 1..20: mol_type = other DNA
tgcagctgcgcgtattcaag

SEQ ID NO: 46149 - DNA, 20 bp, synthetic construct
  misc_feature 1..20: note = Description of Artificial Sequence: Synthetic oligonucleotide
  misc_feature 1..20: note = Target: SCN10A; (-) strand; PAM type: YTN; PAM sequence: TTC
  source 1..20: mol_type = other DNA
tctgcagctgcgcgtattca

SEQ ID NO: 46150 - DNA, 20 bp, synthetic construct
  misc_feature 1..20: note = Description of Artificial Sequence: Synthetic oligonucleotide
  misc_feature 1..20: note = Target: SCN10A; (-) strand; PAM type: YTN; PAM sequence: TTT
  source 1..20: mol_type = other DNA
ctctgcagctgcgcgtattc

SEQ ID NO: 46151 - DNA, 20 bp, synthetic construct
  misc_feature 1..20: note = Description of Artificial Sequence: Synthetic oligonucleotide
  misc_feature 1..20: note = Target: SCN10A; (-) strand; PAM type: YTN; PAM sequence: CTG
  source 1..20: mol_type = other DNA
tttctctgcagctgcgcgta

SEQ ID NO: 46152 - DNA, 20 bp, synthetic construct
  misc_feature 1..20: note = Description of Artificial Sequence: Synthetic oligonucleotide
  misc_feature 1..20: note = Target: SCN10A; (-) strand; PAM type: YTN; PAM sequence: CTC
  source 1..20: mol_type = other DNA
tgtttctctgcagctgcgcg

SEQ ID NO: 46153 - DNA, 20 bp, synthetic construct
  misc_feature 1..20: note = Description of Artificial Sequence: Synthetic oligonucleotide
  misc_feature 1..20: note = Target: SCN10A; (-) strand; PAM type: YTN; PAM sequence: CTG
  source 1..20: mol_type = other DNA
acggtctctgtttctctgca

SEQ ID NO: 46154 - DNA, 20 bp, synthetic construct
  misc_feature 1..20: note = Description of Artificial Sequence: Synthetic oligonucleotide
  misc_feature 1..20: note = Target: SCN10A; (-) strand; PAM type: YTN; PAM sequence: CTA
  source 1..20: mol_type = other DNA
ccaaaacctgacggtctctg

SEQ ID NO: 46155 - DNA, 20 bp, synthetic construct
  misc_feature 1..20: note = Description of Artificial Sequence: Synthetic oligonucleotide
  misc_feature 1..20: note = Target: SCN10A; (-) strand; PAM type: YTN; PAM sequence: TTA
  source 1..20: mol_type = other DNA
gatgaaaggtaatgagcaca

SEQ ID NO: 46156 - DNA, 20 bp, synthetic construct
  misc_feature 1..20: note = Description of Artificial Sequence: Synthetic oligonucleotide
  misc_feature 1..20: note = Target: SCN10A; (-) strand; PAM type: YTN; PAM sequence: TTT
  source 1..20: mol_type = other DNA
agatgaaaggtaatgagcac

SEQ ID NO: 46157 - DNA, 20 bp, synthetic construct
  misc_feature 1..20: note = Description of Artificial Sequence: Synthetic oligonucleotide
  misc_feature 1..20: note = Target: SCN10A; (-) strand; PAM type: YTN; PAM sequence: CTT
  source 1..20: mol_type = other DNA
tagatgaaaggtaatgagca

SEQ ID NO: 46158 - DNA, 20 bp, synthetic construct
  misc_feature 1..20: note = Description of Artificial Sequence: Synthetic oligonucleotide
  misc_feature 1..20: note = Target: SCN10A; (-) strand; PAM type: YTN; PAM sequence: TTC
  source 1..20: mol_type = other DNA
caggcaaaactttagatgaa

SEQ ID NO: 46159 - DNA, 20 bp, synthetic construct
  misc_feature 1..20: note = Description of Artificial Sequence: Synthetic oligonucleotide
  misc_feature 1..20: note = Target: SCN10A; (-) strand; PAM type: YTN; PAM sequence: TTT
  source 1..20: mol_type = other DNA
ccaggcaaaactttagatga

SEQ ID NO: 46160 - DNA, 20 bp, synthetic construct
  misc_feature 1..20: note = Description of Artificial Sequence: Synthetic oligonucleotide
  misc_feature 1..20: note = Target: SCN10A; (-) strand; PAM type: YTN; PAM sequence: TTG
  source 1..20: mol_type = other DNA
gtttccaggcaaaactttag

SEQ ID NO: 46161 - DNA, 20 bp, synthetic construct
  misc_feature 1..20: note = Description of Artificial Sequence: Synthetic oligonucleotide
  misc_feature 1..20: note = Target: SCN10A; (-) strand; PAM type: YTN; PAM sequence: TTT
  source 1..20: mol_type = other DNA
ggtttccaggcaaaacttta

SEQ ID NO: 46162 - DNA, 20 bp, synthetic construct
  misc_feature 1..20: note = Description of Artificial Sequence: Synthetic oligonucleotide
  misc_feature 1..20: note = Target: SCN10A; (-) strand; PAM type: YTN; PAM sequence: CTT
  source 1..20: mol_type = other DNA
tggtttccaggcaaaacttt

SEQ ID NO: 46163 - DNA, 20 bp, synthetic construct
  misc_feature 1..20: note = Description of Artificial Sequence: Synthetic oligonucleotide
  misc_feature 1..20: note = Target: SCN10A; (-) strand; PAM type: YTN; PAM sequence: TTC
  source 1..20: mol_type = other DNA
ccagatctttggtttccagg

SEQ ID NO: 46164 - DNA, 20 bp, synthetic construct
  misc_feature 1..20: note = Description of Artificial Sequence: Synthetic oligonucleotide
  misc_feature 1..20: note = Target: SCN10A; (-) strand; PAM type: YTN; PAM sequence: TTT
  source 1..20: mol_type = other DNA
cccagatctttggtttccag

SEQ ID NO: 46165 - DNA, 20 bp, synthetic construct
  misc_feature 1..20: note = Description of Artificial Sequence: Synthetic oligonucleotide
  misc_feature 1..20: note = Target: SCN10A; (-) strand; PAM type: YTN; PAM sequence: TTT
  source 1..20: mol_type = other DNA
tcccagatctttggtttcca

SEQ ID NO: 46166 - DNA, 20 bp, synthetic construct
  misc_feature 1..20: note = Description of Artificial Sequence: Synthetic oligonucleotide
  misc_feature 1..20: note = Target: SCN10A; (-) strand; PAM type: YTN; PAM sequence: TTT
  source 1..20: mol_type = other DNA
ttcccagatctttggtttcc

SEQ ID NO: 46167 - DNA, 20 bp, synthetic construct
  misc_feature 1..20: note = Description of Artificial Sequence: Synthetic oligonucleotide
  misc_feature 1..20: note = Target: SCN10A; (-) strand; PAM type: YTN; PAM sequence: TTG
  source 1..20: mol_type = other DNA
tgtttttcccagatctttgg

SEQ ID NO: 46168 - DNA, 20 bp, synthetic construct
  misc_feature 1..20: note = Description of Artificial Sequence: Synthetic oligonucleotide
  misc_feature 1..20: note = Target: SCN10A; (-) strand; PAM type: YTN; PAM sequence: CTT
  source 1..20: mol_type = other DNA
gtgtttttcccagatctttg

SEQ ID NO: 46169 - DNA, 20 bp, synthetic construct
  misc_feature 1..20: note = Description of Artificial Sequence: Synthetic oligonucleotide
  misc_feature 1..20: note = Target: SCN10A; (-) strand; PAM type: YTN; PAM sequence: TTA
  source 1..20: mol_type = other DNA
atgggatgagaggccttgtg

SEQ ID NO: 46170 - DNA, 20 bp, synthetic construct
  misc_feature 1..20: note = Description of Artificial Sequence: Synthetic oligonucleotide
  misc_feature 1..20: note = Target: SCN10A; (-) strand; PAM type: YTN; PAM sequence: TTT
  source 1..20: mol_type = other DNA
aatgggatgagaggccttgt

SEQ ID NO: 46171 - DNA, 20 bp, synthetic construct
  misc_feature 1..20: note = Description of Artificial Sequence: Synthetic oligonucleotide
  misc_feature 1..20: note = Target: SCN10A; (-) strand; PAM type: YTN; PAM sequence: CTG
  source 1..20: mol_type = other DNA
gtttaatgggatgagaggcc

SEQ ID NO: 46172 - DNA, 20 bp, synthetic construct
  misc_feature 1..20: note = Description of Artificial Sequence: Synthetic oligonucleotide
  misc_feature 1..20: note = Target: SCN10A; (-) strand; PAM type: YTN; PAM sequence: CTC
  source 1..20: mol_type = other DNA
caaaagcagtgtccagaaaa

SEQ ID NO: 46173 - DNA, 20 bp, synthetic construct
  misc_feature 1..20: note = Description of Artificial Sequence: Synthetic oligonucleotide
  misc_feature 1..20: note = Target: SCN10A; (-) strand; PAM type: YTN; PAM sequence: TTA
  source 1..20: mol_type = other DNA
tagcataggaagaaaggtct

SEQ ID NO: 46174 - DNA, 20 bp, synthetic construct
  misc_feature 1..20: note = Description of Artificial Sequence: Synthetic oligonucleotide
  misc_feature 1..20: note = Target: SCN10A; (-) strand; PAM type: YTN; PAM sequence: TTT
  source 1..20: mol_type = other DNA
atagcataggaagaaaggtc

SEQ ID NO: 46175 - DNA, 20 bp, synthetic construct
  misc_feature 1..20: note = Description of Artificial Sequence: Synthetic oligonucleotide
  misc_feature 1..20: note = Target: SCN10A; (-) strand; PAM type: YTN; PAM sequence: TTG
  source 1..20: mol_type = other DNA
agtaatttatagcataggaa

SEQ ID NO: 46176 - DNA, 20 bp, synthetic construct
  misc_feature 1..20: note = Description of Artificial Sequence: Synthetic oligonucleotide
  misc_feature 1..20: note = Target: SCN10A; (-) strand; PAM type: YTN; PAM sequence: TTT
  source 1..20: mol_type = other DNA
gagtaatttatagcatagga

SEQ ID NO: 46177 - DNA, 20 bp, synthetic construct
  misc_feature 1..20: note = Description of Artificial Sequence: Synthetic oligonucleotide
  misc_feature 1..20: note = Target: SCN10A; (-) strand; PAM type: YTN; PAM sequence: TTT
  source 1..20: mol_type = other DNA
tgagtaatttatagcatagg

SEQ ID NO: 46178 - DNA, 20 bp, synthetic construct
  misc_feature 1..20: note = Description of Artificial Sequence: Synthetic oligonucleotide
  misc_feature 1..20: note = Target: SCN10A; (-) strand; PAM type: YTN; PAM sequence: TTT
  source 1..20: mol_type = other DNA
ttgagtaatttatagcatag

SEQ ID NO: 46179 - DNA, 20 bp, synthetic construct
  misc_feature 1..20: note = Description of Artificial Sequence: Synthetic oligonucleotide
  misc_feature 1..20: note = Target: SCN10A; (-) strand; PAM type: YTN; PAM sequence: TTA
  source 1..20: mol_type = other DNA
tgaaccatagaaggcagatc

SEQ ID NO: 46180 - DNA, 20 bp, synthetic construct
  misc_feature 1..20: note = Description of Artificial Sequence: Synthetic oligonucleotide
  misc_feature 1..20: note = Target: SCN10A; (-) strand; PAM type: YTN; PAM sequence: CTT
  source 1..20: mol_type = other DNA
atgaaccatagaaggcagat

SEQ ID NO: 46181 - DNA, 20 bp, synthetic construct
  misc_feature 1..20: note = Description of Artificial Sequence: Synthetic oligonucleotide
  misc_feature 1..20: note = Target: SCN10A; (-) strand; PAM type: YTN; PAM sequence: TTG
  source 1..20: mol_type = other DNA
atacttatgaaccatagaag

SEQ ID NO: 46182 - DNA, 20 bp, synthetic construct
  misc_feature 1..20: note = Description of Artificial Sequence: Synthetic oligonucleotide
  misc_feature 1..20: note = Target: SCN10A; (-) strand; PAM type: YTN; PAM sequence: CTC
  source 1..20: mol_type = other DNA
agccacagtcaatgaagcac

SEQ ID NO: 46183 - DNA, 20 bp, synthetic construct
  misc_feature 1..20: note = Description of Artificial Sequence: Synthetic oligonucleotide
  misc_feature 1..20: note = Target: SCN10A; (-) strand; PAM type: YTN; PAM sequence: CTG
  source 1..20: mol_type = other DNA
actcagccacagtcaatgaa

SEQ ID NO: 46184 - DNA, 20 bp, synthetic construct
  misc_feature 1..20: note = Description of Artificial Sequence: Synthetic oligonucleotide
  misc_feature 1..20: note = Target: SCN10A; (-) strand; PAM type: YTN; PAM sequence: CTA
  source 1..20: mol_type = other DNA
tagaacagagtacagatcgc

SEQ ID NO: 46185 - DNA, 20 bp, synthetic construct
  misc_feature 1..20: note = Description of Artificial Sequence: Synthetic oligonucleotide
  misc_feature 1..20: note = Target: SCN10A; (-) strand; PAM type: YTN; PAM sequence: CTG
  source 1..20: mol_type = other DNA
tggctatagaacagagtaca

SEQ ID NO: 46186 - DNA, 20 bp, synthetic construct
  misc_feature 1..20: note = Description of Artificial Sequence: Synthetic oligonucleotide
  misc_feature 1..20: note = Target: SCN10A; (-) strand; PAM type: YTN; PAM sequence: TTC
  source 1..20: mol_type = other DNA
aggagggatcaggcctgtgg

SEQ ID NO: 46187 - DNA, 20 bp, synthetic construct
  misc_feature 1..20: note = Description of Artificial Sequence: Synthetic oligonucleotide
  misc_feature 1..20: note = Target: SCN10A; (-) strand; PAM type: YTN; PAM sequence: CTC
  source 1..20: mol_type = other DNA
cacagaagaggcccatattc

SEQ ID NO: 46188 - DNA, 20 bp, synthetic construct
  misc_feature 1..20: note = Description of Artificial Sequence: Synthetic oligonucleotide
  misc_feature 1..20: note = Target: SCN10A; (-) strand; PAM type: YTN; PAM sequence: TTG
  source 1..20: mol_type = other DNA
tgagccccatcacacccacc

SEQ ID NO: 46189 - DNA, 20 bp, synthetic construct
  misc_feature 1..20: note = Description of Artificial Sequence: Synthetic oligonucleotide
  misc_feature 1..20: note = Target: SCN10A; (-) strand; PAM type: YTN; PAM sequence: TTT
  source 1..20: mol_type = other DNA
gtgagccccatcacacccac

SEQ ID NO: 46190 - DNA, 20 bp, synthetic construct
  misc_feature 1..20: note = Description of Artificial Sequence: Synthetic oligonucleotide
  misc_feature 1..20: note = Target: SCN10A; (-) strand; PAM type: YTN; PAM sequence: TTA
  source 1..20: mol_type = other DNA
tttgtgagccccatcacacc

SEQ ID NO: 46191 - DNA, 20 bp, synthetic construct
  misc_feature 1..20: note = Description of Artificial Sequence: Synthetic oligonucleotide
  misc_feature 1..20: note = Target: SCN10A; (-) strand; PAM type: YTN; PAM sequence: CTT
  source 1..20: mol_type = other DNA
atttgtgagccccatcacac

SEQ ID NO: 46192 - DNA, 20 bp, synthetic construct
  misc_feature 1..20: note = Description of Artificial Sequence: Synthetic oligonucleotide
  misc_feature 1..20: note = Target: SCN10A; (-) strand; PAM type: YTN; PAM sequence: CTC
  source 1..20: mol_type = other DNA
acttatttgtgagccccatc

SEQ ID NO: 46193 - DNA, 20 bp, synthetic construct
  misc_feature 1..20: note = Description of Artificial Sequence: Synthetic oligonucleotide
  misc_feature 1..20: note = Target: SCN10A; (-) strand; PAM type: YTN; PAM sequence: TTC
  source 1..20: mol_type = other DNA
tcacttatttgtgagcccca

SEQ ID NO: 46194 - DNA, 20 bp, synthetic construct
  misc_feature 1..20: note = Description of Artificial Sequence: Synthetic oligonucleotide
  misc_feature 1..20: note = Target: SCN10A; (-) strand; PAM type: YTN; PAM sequence: TTG
  source 1..20: mol_type = other DNA
ttctcacttatttgtgagcc

SEQ ID NO: 46195 - DNA, 20 bp, synthetic construct
  misc_feature 1..20: note = Description of Artificial Sequence: Synthetic oligonucleotide
  misc_feature 1..20: note = Target: SCN10A; (-) strand; PAM type: YTN; PAM sequence: CTT
  source 1..20: mol_type = other DNA
gttctcacttatttgtgagc

SEQ ID NO: 46196 - DNA, 20 bp, synthetic construct
  misc_feature 1..20: note = Description of Artificial Sequence: Synthetic oligonucleotide
  misc_feature 1..20: note = Target: SCN10A; (-) strand; PAM type: YTN; PAM sequence: TTC
  source 1..20: mol_type = other DNA
agtcataaataagcttgttc

SEQ ID NO: 46197 - DNA, 20 bp, synthetic construct
  misc_feature 1..20: note = Description of Artificial Sequence: Synthetic oligonucleotide
  misc_feature 1..20: note = Target: SCN10A; (-) strand; PAM type: YTN; PAM sequence: CTT
  source 1..20: mol_type = other DNA
cagtcataaataagcttgtt

SEQ ID NO: 46198 - DNA, 20 bp, synthetic construct
  misc_feature 1..20: note = Description of Artificial Sequence: Synthetic oligonucleotide
  misc_feature 1..20: note = Target: SCN10A; (-) strand; PAM type: YTN; PAM sequence: CTC
  source 1..20: mol_type = other DNA
ttcagtcataaataagcttg

SEQ ID NO: 46199 - DNA, 20 bp, synthetic construct
  misc_feature 1..20: note = Description of Artificial Sequence: Synthetic oligonucleotide
  misc_feature 1..20: note = Target: SCN10A; (-) strand; PAM type: YTN; PAM sequence: CTC
  source 1..20: mol_type = other DNA
tcttcagtcataaataagct

SEQ ID NO: 46200 - DNA, 20 bp, synthetic construct
  misc_feature 1..20: note = Description of Artificial Sequence: Synthetic oligonucleotide
  misc_feature 1..20: note = Target: SCN10A; (-) strand; PAM type: YTN; PAM sequence: CTG
  source 1..20: mol_type = other DNA
gtctctcttcagtcataaat

SEQ ID NO: 46201 - DNA, 20 bp, synthetic construct
  misc_feature 1..20: note = Description of Artificial Sequence: Synthetic oligonucleotide
  misc_feature 1..20: note = Target: SCN10A; (-) strand; PAM type: YTN; PAM sequence: CTA
  source 1..20: mol_type = other DNA
cccgaaggaggctggtctct

SEQ ID NO: 46202 - DNA, 20 bp, synthetic construct
  misc_feature 1..20: note = Description of Artificial Sequence: Synthetic oligonucleotide
  misc_feature 1..20: note = Target: SCN10A; (-) strand; PAM type: YTN; PAM sequence: CTA
  source 1..20: mol_type = other DNA
tcgaatgcagtgggtcatcc

SEQ ID NO: 46203 - DNA, 20 bp, synthetic construct
  misc_feature 1..20: note = Description of Artificial Sequence: Synthetic oligonucleotide
  misc_feature 1..20: note = Target: SCN10A; (-) strand; PAM type: YTN; PAM sequence: TTG
  source 1..20: mol_type = other DNA
ccaatacctatcgaatgcag

SEQ ID NO: 46204 - DNA, 20 bp, synthetic construct
  misc_feature 1..20: note = Description of Artificial Sequence: Synthetic oligonucleotide
  misc_feature 1..20: note = Target: SCN10A; (-) strand; PAM type: YTN; PAM sequence: TTT
  source 1..20: mol_type = other DNA
gccaatacctatcgaatgca

SEQ ID NO: 46205 - DNA, 20 bp, synthetic construct
  misc_feature 1..20: note = Description of Artificial Sequence: Synthetic oligonucleotide
  misc_feature 1..20: note = Target: SCN10A; (-) strand; PAM type: YTN; PAM sequence: TTT
  source 1..20: mol_type = other DNA
tgccaatacctatcgaatgc

SEQ ID NO: 46206 - DNA, 20 bp, synthetic construct
  misc_feature 1..20: note = Description of Artificial Sequence: Synthetic oligonucleotide
  misc_feature 1..20: note = Target: SCN10A; (-) strand; PAM type: YTN; PAM sequence: CTA
  source 1..20: mol_type = other DNA
agagatgttttgccaatacc

SEQ ID NO: 46207 - DNA, 20 bp, synthetic construct
  misc_feature 1..20: note = Description of Artificial Sequence: Synthetic oligonucleotide
  misc_feature 1..20: note = Target: SCN10A; (-) strand; PAM type: YTN; PAM sequence: CTG
  source 1..20: mol_type = other DNA
ccccaagatgagaaatgccc

SEQ ID NO: 46208 - DNA, 20 bp, synthetic construct
  misc_feature 1..20: note = Description of Artificial Sequence: Synthetic oligonucleotide
  misc_feature 1..20: note = Target: SCN10A; (-) strand; PAM type: YTN; PAM sequence: TTG
  source 1..20: mol_type = other DNA
tccactgccccaagatgaga

SEQ ID NO: 46209 - DNA, 20 bp, synthetic construct
  misc_feature 1..20: note = Description of Artificial Sequence: Synthetic oligonucleotide
  misc_feature 1..20: note = Target: SCN10A; (-) strand; PAM type: YTN; PAM sequence: CTG
  source 1..20: mol_type = other DNA
gtgggagcaacagatgttgt

SEQ ID NO: 46210 - DNA, 20 bp, synthetic construct
  misc_feature 1..20: note = Description of Artificial Sequence: Synthetic oligonucleotide
  misc_feature 1..20: note = Target: SCN10A; (-) strand; PAM type: YTN; PAM sequence: TTC
  source 1..20: mol_type = other DNA
aaagctggtgggagcaacag

SEQ ID NO: 46211 - DNA, 20 bp, synthetic construct
  misc_feature 1..20: note = Description of Artificial Sequence: Synthetic oligonucleotide
  misc_feature 1..20: note = Target: SCN10A; (-) strand; PAM type: YTN; PAM sequence: TTT
  source 1..20: mol_type = other DNA
caaagctggtgggagcaaca

SEQ ID NO: 46212 - DNA, 20 bp, synthetic construct
  misc_feature 1..20: note = Description of Artificial Sequence: Synthetic oligonucleotide
  misc_feature 1..20: note = Target: SCN10A; (-) strand; PAM type: YTN; PAM sequence: TTG
  source 1..20: mol_type = other DNA
cagtttcaaagctggtggga

SEQ ID NO: 46213 - DNA, 20 bp, synthetic construct
  misc_feature 1..20: note = Description of Artificial Sequence: Synthetic oligonucleotide
  misc_feature 1..20: note = Target: SCN10A; (-) strand; PAM type: YTN; PAM sequence: TTT
  source 1..20: mol_type = other DNA
gcagtttcaaagctggtggg

SEQ ID NO: 46214 - DNA, 20 bp, synthetic construct
  misc_feature 1..20: note = Description of Artificial Sequence: Synthetic oligonucleotide
  misc_feature 1..20: note = Target: SCN10A; (-) strand; PAM type: YTN; PAM sequence: CTG
  source 1..20: mol_type = other DNA
agtccatgaaatcatggaca

SEQ ID NO: 46215 - DNA, 20 bp, synthetic construct
  misc_feature 1..20: note = Description of Artificial Sequence: Synthetic oligonucleotide
  misc_feature 1..20: note = Target: SCN10A; (-) strand; PAM type: YTN; PAM sequence: TTA
  source 1..20: mol_type = other DNA
tgaatgctgagtccatgaaa

SEQ ID NO: 46216 - DNA, 20 bp, synthetic construct
  misc_feature 1..20: note = Description of Artificial Sequence: Synthetic oligonucleotide
  misc_feature 1..20: note = Target: SCN10A; (-) strand; PAM type: YTN; PAM sequence: CTT
  source 1..20: mol_type = other DNA
atgaatgctgagtccatgaa

SEQ ID NO: 46217 - DNA, 20 bp, synthetic construct
  misc_feature 1..20: note = Description of Artificial Sequence: Synthetic oligonucleotide
  misc_feature 1..20: note = Target: SCN10A; (-) strand; PAM type: YTN; PAM sequence: TTA
  source 1..20: mol_type = other DNA
aatcaacttatgaatgctga

SEQ ID NO: 46218 - DNA, 20 bp, synthetic construct
  misc_feature 1..20: note = Description of Artificial Sequence: Synthetic oligonucleotide
  misc_feature 1..20: note = Target: SCN10A; (-) strand; PAM type: YTN; PAM sequence: TTG
  source 1..20: mol_type = other DNA
gtcaattaaatcaacttatg

SEQ ID NO: 46219 - DNA, 20 bp, synthetic construct
  misc_feature 1..20: note = Description of Artificial Sequence: Synthetic oligonucleotide
  misc_feature 1..20: note = Target: SCN10A; (-) strand; PAM type: YTN; PAM sequence: TTC
  source 1..20: mol_type = other DNA
gttggtcaattaaatcaact

SEQ ID NO: 46220 - DNA, 20 bp, synthetic construct
  misc_feature 1..20: note = Description of Artificial Sequence: Synthetic oligonucleotide
  misc_feature 1..20: note = Target: SCN10A; (-) strand; PAM type: YTN; PAM sequence: CTG
  source 1..20: mol_type = other DNA
gggggtaggttcgttggtca

SEQ ID NO: 46221 - DNA, 20 bp, synthetic construct
  misc_feature 1..20: note = Description of Artificial Sequence: Synthetic oligonucleotide
  misc_feature 1..20: note = Target: SCN10A; (-) strand; PAM type: YTN; PAM sequence: TTC
  source 1..20: mol_type = other DNA
tggggggtaggttcgttggt

SEQ ID NO: 46222 - DNA, 20 bp, synthetic construct
  misc_feature 1..20: note = Description of Artificial Sequence: Synthetic oligonucleotide
  misc_feature 1..20: note = Target: SCN10A; (-) strand; PAM type: YTN; PAM sequence: CTG
  source 1..20: mol_type = other DNA
gagttctggggggtaggttc

SEQ ID NO: 46223 - DNA, 20 bp, synthetic construct
  misc_feature 1..20: note = Description of Artificial Sequence: Synthetic oligonucleotide
  misc_feature 1..20: note = Target: SCN10A; (-) strand; PAM type: YTN; PAM sequence: CTG
  source 1..20: mol_type = other DNA
cacggctggagttctggggg

SEQ ID NO: 46224 - DNA, 20 bp, synthetic construct
  misc_feature 1..20: note = Description of Artificial Sequence: Synthetic oligonucleotide
  misc_feature 1..20: note = Target: SCN10A; (-) strand; PAM type: YTN; PAM sequence: CTG
  source 1..20: mol_type = other DNA
ccatgcacctgcacggctgg

SEQ ID NO: 46225 - DNA, 20 bp, synthetic construct
  misc_feature 1..20: note = Description of Artificial Sequence: Synthetic oligonucleotide
  misc_feature 1..20: note = Target: SCN10A; (-) strand; PAM type: YTN; PAM sequence: CTA
  source 1..20: mol_type = other DNA
gcacactgccatgcacctgc

SEQ ID NO: 46226 - DNA, 20 bp, synthetic construct
  misc_feature 1..20: note = Description of Artificial Sequence: Synthetic oligonucleotide
  misc_feature 1..20: note = Target: SCN10A; (-) strand; PAM type: YTN; PAM sequence: CTC
  source 1..20: mol_type = other DNA
ataggctagcacactgccat

SEQ ID NO: 46227 - DNA, 20 bp, synthetic construct
  misc_feature 1..20: note = Description of Artificial Sequence: Synthetic oligonucleotide
  misc_feature 1..20: note = Target: SCN10A; (-) strand; PAM type: YTN; PAM sequence: TTC
  source 1..20: mol_type = other DNA
atacacctcataggctagca

SEQ ID NO: 46228 - DNA, 20 bp, synthetic construct
  misc_feature 1..20: note = Description of Artificial Sequence: Synthetic oligonucleotide
  misc_feature 1..20: note = Target: SCN10A; (-) strand; PAM type: YTN; PAM sequence: CTT
  source 1..20: mol_type = other DNA
catacacctcataggctagc

SEQ ID NO: 46229 - DNA, 20 bp, synthetic construct
  misc_feature 1..20: note = Description of Artificial Sequence: Synthetic oligonucleotide
  misc_feature 1..20: note = Target: SCN10A; (-) strand; PAM type: YTN; PAM sequence: CTC
  source 1..20: mol_type = other DNA
ttcatacacctcataggcta

SEQ ID NO: 46230 - DNA, 20 bp, synthetic construct
  misc_feature 1..20: note = Description of Artificial Sequence: Synthetic oligonucleotide
  misc_feature 1..20: note = Target: SCN10A; (-) strand; PAM type: YTN; PAM sequence: CTC
  source 1..20: mol_type = other DNA
tcttcatacacctcataggc

SEQ ID NO: 46231 - DNA, 20 bp, synthetic construct
  misc_feature 1..20: note = Description of Artificial Sequence: Synthetic oligonucleotide
  misc_feature 1..20: note = Target: SCN10A; (-) strand; PAM type: YTN; PAM sequence: TTC
  source 1..20: mol_type = other DNA
catgagagcaagagcccaca

SEQ ID NO: 46232 - DNA, 20 bp, synthetic construct
  misc_feature 1..20: note = Description of Artificial Sequence: Synthetic oligonucleotide
  misc_feature 1..20: note = Target: SCN10A; (-) strand; PAM type: YTN; PAM sequence: TTG
  source 1..20: mol_type = other DNA
gttccatgagagcaagagcc

SEQ ID NO: 46233 - DNA, 20 bp, synthetic construct
  misc_feature 1..20: note = Description of Artificial Sequence: Synthetic oligonucleotide
  misc_feature 1..20: note = Target: SCN10A; (-) strand; PAM type: YTN; PAM sequence: CTA
  source 1..20: mol_type = other DNA
aaccattggttccatgagag

SEQ ID NO: 46234 - DNA, 20 bp, synthetic construct
  misc_feature 1..20: note = Description of Artificial Sequence: Synthetic oligonucleotide
  misc_feature 1..20: note = Target: SCN10A; (-) strand; PAM type: YTN; PAM sequence: CTC
  source 1..20: mol_type = other DNA
agtaactaaaccattggttc

SEQ ID NO: 46235 - DNA, 20 bp, synthetic construct
  misc_feature 1..20: note = Description of Artificial Sequence: Synthetic oligonucleotide
  misc_feature 1..20: note = Target: SCN10A; (-) strand; PAM type: YTN; PAM sequence: TTC
  source 1..20: mol_type = other DNA
tcagtaactaaaccattggt

SEQ ID NO: 46236 - DNA, 20 bp, synthetic construct
  misc_feature 1..20: note = Description of Artificial Sequence: Synthetic oligonucleotide
  misc_feature 1..20: note = Target: SCN10A; (-) strand; PAM type: YTN; PAM sequence: TTT
  source 1..20: mol_type = other DNA
ctcagtaactaaaccattgg

SEQ ID NO: 46237 - DNA, 20 bp, synthetic construct
  misc_feature 1..20: note = Description of Artificial Sequence: Synthetic oligonucleotide
  misc_feature 1..20: note = Target: SCN10A; (-) strand; PAM type: YTN; PAM sequence: TTT
  source 1..20: mol_type = other DNA
tctcagtaactaaaccattg

SEQ ID NO: 46238 - DNA, 20 bp, synthetic construct
  misc_feature 1..20: note = Description of Artificial Sequence: Synthetic oligonucleotide
  misc_feature 1..20: note = Target: SCN10A; (-) strand; PAM type: YTN; PAM sequence: CTT
  source 1..20: mol_type = other DNA
ttctcagtaactaaaccatt

SEQ ID NO: 46239 - DNA, 20 bp, synthetic construct
  misc_feature 1..20: note = Description of Artificial Sequence: Synthetic oligonucleotide
  misc_feature 1..20: note = Target: SCN10A; (-) strand; PAM type: YTN; PAM sequence: TTC
  source 1..20: mol_type = other DNA
atcttttctcagtaactaaa

SEQ ID NO: 46240 - DNA, 20 bp, synthetic construct
  misc_feature 1..20: note = Description of Artificial Sequence: Synthetic oligonucleotide
  misc_feature 1..20: note = Target: SCN10A; (-) strand; PAM type: YTN; PAM sequence: CTT
  source 1..20: mol_type = other DNA
catcttttctcagtaactaa

SEQ ID NO: 46241 - DNA, 20 bp, synthetic construct
  misc_feature 1..20: note = Description of Artificial Sequence: Synthetic oligonucleotide
  misc_feature 1..20: note = Target: SCN10A; (-) strand; PAM type: YTN; PAM sequence: TTG
  source 1..20: mol_type = other DNA
agacttcatcttttctcagt

SEQ ID NO: 46242 - DNA, 20 bp, synthetic construct
  misc_feature 1..20: note = Description of Artificial Sequence: Synthetic oligonucleotide
  misc_feature 1..20: note = Target: SCN10A; (-) strand; PAM type: YTN; PAM sequence: TTT
  source 1..20: mol_type = other DNA
gagacttcatcttttctcag

SEQ ID NO: 46243 - DNA, 20 bp, synthetic construct
  misc_feature 1..20: note = Description of Artificial Sequence: Synthetic oligonucleotide
  misc_feature 1..20: note = Target: SCN10A; (-) strand; PAM type: YTN; PAM sequence: TTT
  source 1..20: mol_type = other DNA
tgagacttcatcttttctca

SEQ ID NO: 46244 - DNA, 20 bp, synthetic construct
  misc_feature 1..20: note = Description of Artificial Sequence: Synthetic oligonucleotide
  misc_feature 1..20: note = Target: SCN10A; (-) strand; PAM type: YTN; PAM sequence: CTT
  source 1..20: mol_type = other DNA
ttgagacttcatcttttctc

SEQ ID NO: 46245 - DNA, 20 bp, synthetic construct
  misc_feature 1..20: note = Description of Artificial Sequence: Synthetic oligonucleotide
  misc_feature 1..20: note = Target: SCN10A; (-) strand; PAM type: YTN; PAM sequence: TTA
  source 1..20: mol_type = other DNA
cagtgaagacttttgagact

SEQ ID NO: 46246 - DNA, 20 bp, synthetic construct
  misc_feature 1..20: note = Description of Artificial Sequence: Synthetic oligonucleotide
  misc_feature 1..20: note = Target: SCN10A; (-) strand; PAM type: YTN; PAM sequence: TTT
  source 1..20: mol_type = other DNA
acagtgaagacttttgagac

SEQ ID NO: 46247 - DNA, 20 bp, synthetic construct
  misc_feature 1..20: note = Description of Artificial Sequence: Synthetic oligonucleotide
  misc_feature 1..20: note = Target: SCN10A; (-) strand; PAM type: YTN; PAM sequence: TTG
  source 1..20: mol_type = other DNA
agtttacagtgaagactttt

SEQ ID NO: 46248 - DNA, 20 bp, synthetic construct
  misc_feature 1..20: note = Description of Artificial Sequence: Synthetic oligonucleotide
  misc_feature 1..20: note = Target: SCN10A; (-) strand; PAM type: YTN; PAM sequence: TTT
  source 1..20: mol_type = other DNA
gagtttacagtgaagacttt

SEQ ID NO: 46249 - DNA, 20 bp, synthetic construct
  misc_feature 1..20: note = Description of Artificial Sequence: Synthetic oligonucleotide
  misc_feature 1..20: note = Target: SCN10A; (-) strand; PAM type: YTN; PAM sequence: TTA
  source 1..20: mol_type = other DNA
gcatatttgagtttacagtg

SEQ ID NO: 46250 - DNA, 20 bp, synthetic construct
  misc_feature 1..20: note = Description of Artificial Sequence: Synthetic oligonucleotide
  misc_feature 1..20: note = Target: SCN10A; (-) strand; PAM type: YTN; PAM sequence: CTT
  source 1..20: mol_type = other DNA
agcatatttgagtttacagt

SEQ ID NO: 46251 - DNA, 20 bp, synthetic construct
  misc_feature 1..20: note = Description of Artificial Sequence: Synthetic oligonucleotide
  misc_feature 1..20: note = Target: SCN10A; (-) strand; PAM type: YTN; PAM sequence: TTG
  source 1..20: mol_type = other DNA
tgggacttagcatatttgag

SEQ ID NO: 46252 - DNA, 20 bp, synthetic construct
  misc_feature 1..20: note = Description of Artificial Sequence: Synthetic oligonucleotide
  misc_feature 1..20: note = Target: SCN10A; (-) strand; PAM type: YTN; PAM sequence: CTT
  source 1..20: mol_type = other DNA
gtgggacttagcatatttga

SEQ ID NO: 46253 - DNA, 20 bp, synthetic construct
  misc_feature 1..20: note = Description of Artificial Sequence: Synthetic oligonucleotide
  misc_feature 1..20: note = Target: SCN10A; (-) strand; PAM type: YTN; PAM sequence: CTG
  source 1..20: mol_type = other DNA
tcttgtgggacttagcatat

SEQ ID NO: 46254 - DNA, 20 bp, synthetic construct
  misc_feature 1..20: note = Description of Artificial Sequence: Synthetic oligonucleotide
  misc_feature 1..20: note = Target: SCN10A; (-) strand; PAM type: YTN; PAM sequence: TTG
  source 1..20: mol_type = other DNA
ctgtcttgtgggacttagca

SEQ ID NO: 46255 - DNA, 20 bp, synthetic construct
  misc_feature 1..20: note = Description of Artificial Sequence: Synthetic oligonucleotide
  misc_feature 1..20: note = Target: SCN10A; (-) strand; PAM type: YTN; PAM sequence: TTT
  source 1..20: mol_type = other DNA
gctgtcttgtgggacttagc

SEQ ID NO: 46256 - DNA, 20 bp, synthetic construct
  misc_feature 1..20: note = Description of Artificial Sequence: Synthetic oligonucleotide
  misc_feature 1..20: note = Target: SCN10A; (-) strand; PAM type: YTN; PAM sequence: TTT
  source 1..20: mol_type = other DNA
tgctgtcttgtgggacttag

SEQ ID NO: 46257 - DNA, 20 bp, synthetic construct
  misc_feature 1..20: note = Description of Artificial Sequence: Synthetic oligonucleotide
  misc_feature 1..20: note = Target: SCN10A; (-) strand; PAM type: YTN; PAM sequence: TTG
  source 1..20: mol_type = other DNA
atgattttgctgtcttgtgg

SEQ ID NO: 46258 - DNA, 20 bp, synthetic construct
  misc_feature 1..20: note = Description of Artificial Sequence: Synthetic oligonucleotide
  misc_feature 1..20: note = Target: SCN10A; (-) strand; PAM type: YTN; PAM sequence: CTT
  source 1..20: mol_type = other DNA
gatgattttgctgtcttgtg

SEQ ID NO: 46259 - DNA, 20 bp, synthetic construct
  misc_feature 1..20: note = Description of Artificial Sequence: Synthetic oligonucleotide
  misc_feature 1..20: note = Target: SCN10A; (-) strand; PAM type: YTN; PAM sequence: TTA
  source 1..20: mol_type = other DNA
tgcttgatgattttgctgtc

SEQ ID NO: 46260 - DNA, 20 bp, synthetic construct
  misc_feature 1..20: note = Description of Artificial Sequence: Synthetic oligonucleotide
  misc_feature 1..20: note = Target: SCN10A; (-) strand; PAM type: YTN; PAM sequence: TTT
  source 1..20: mol_type = other DNA
atgcttgatgattttgctgt

SEQ ID NO: 46261 - DNA, 20 bp, synthetic construct
  misc_feature 1..20: note = Description of Artificial Sequence: Synthetic oligonucleotide
  misc_feature 1..20: note = Target: SCN10A; (-) strand; PAM type: YTN; PAM sequence: TTT
  source 1..20: mol_type = other DNA
tatgcttgatgattttgctg

SEQ ID NO: 46262 - DNA, 20 bp, synthetic construct
  misc_feature 1..20: note = Description of Artificial Sequence: Synthetic oligonucleotide
  misc_feature 1..20: note = Target: SCN10A; (-) strand; PAM type: YTN; PAM sequence: TTT
  source 1..20: mol_type = other DNA
ttatgcttgatgattttgct

SEQ ID NO: 46263 - DNA, 20 bp, synthetic construct
  misc_feature 1..20: note = Description of Artificial Sequence: Synthetic oligonucleotide
  misc_feature 1..20: note = Target: SCN10A; (-) strand; PAM type: YTN; PAM sequence: TTA
  source 1..20: mol_type = other DNA
aaacacatacatttttatgc

SEQ ID NO: 46264 - DNA, 20 bp, synthetic construct
  misc_feature 1..20: note = Description of Artificial Sequence: Synthetic oligonucleotide
  misc_feature 1..20: note = Target: SCN10A; (-) strand; PAM type: YTN; PAM sequence: TTT
  source 1..20: mol_type = other DNA
aaaacacatacatttttatg

SEQ ID NO: 46265 - DNA, 20 bp, synthetic construct
  misc_feature 1..20: note = Description of Artificial Sequence: Synthetic oligonucleotide
  misc_feature 1..20: note = Target: SCN10A; (-) strand; PAM type: YTN; PAM sequence: TTT
  source 1..20: mol_type = other DNA
taaaacacatacatttttat

SEQ ID NO: 46266 - DNA, 20 bp, synthetic construct
  misc_feature 1..20: note = Description of Artificial Sequence: Synthetic oligonucleotide
  misc_feature 1..20: note = Target: SCN10A; (-) strand; PAM type: YTN; PAM sequence: TTA
  source 1..20: mol_type = other DNA
gagaaccatacaaatatatt

SEQ ID NO: 46267 - DNA, 20 bp, synthetic construct
  misc_feature 1..20: note = Description of Artificial Sequence: Synthetic oligonucleotide
  misc_feature 1..20: note = Target: SCN10A; (-) strand; PAM type: YTN; PAM sequence: CTG
  source 1..20: mol_type = other DNA
acaaattagagaaccataca

SEQ ID NO: 46268 - DNA, 20 bp, synthetic construct
  misc_feature 1..20: note = Description of Artificial Sequence: Synthetic oligonucleotide
  misc_feature 1..20: note = Target: SCN10A; (-) strand; PAM type: YTN; PAM sequence: TTC
  source 1..20: mol_type = other DNA
ctgacaaattagagaaccat

SEQ ID NO: 46269 - DNA, 20 bp, synthetic construct
  misc_feature 1..20: note = Description of Artificial Sequence: Synthetic oligonucleotide
  misc_feature 1..20: note = Target: SCN10A; (-) strand; PAM type: YTN; PAM sequence: TTT
  source 1..20: mol_type = other DNA
cctgacaaattagagaacca

SEQ ID NO: 46270 - DNA, 20 bp, synthetic construct
  misc_feature 1..20: note = Description of Artificial Sequence: Synthetic oligonucleotide
  misc_feature 1..20: note = Target: SCN10A; (-) strand; PAM type: YTN; PAM sequence: TTT
  source 1..20: mol_type = other DNA
tcctgacaaattagagaacc

SEQ ID NO: 46271 - DNA, 20 bp, synthetic construct
  misc_feature 1..20: note = Description of Artificial Sequence: Synthetic oligonucleotide
  misc_feature 1..20: note = Target: SCN10A; (-) strand; PAM type: YTN; PAM sequence: TTT
  source 1..20: mol_type = other DNA
ttcctgacaaattagagaac

SEQ ID NO: 46272 - DNA, 20 bp, synthetic construct
  misc_feature 1..20: note = Description of Artificial Sequence: Synthetic oligonucleotide
  misc_feature 1..20: note = Target: SCN10A; (-) strand; PAM type: YTN; PAM sequence: TTT
  source 1..20: mol_type = other DNA
tttcctgacaaattagagaa

SEQ ID NO: 46273 - DNA, 20 bp, synthetic construct
  misc_feature 1..20: note = Description of Artificial Sequence: Synthetic oligonucleotide
  misc_feature 1..20: note = Target: SCN10A; (-) strand; PAM type: YTN; PAM sequence: TTT
  source 1..20: mol_type = other DNA
ttttcctgacaaattagaga

SEQ ID NO: 46274 - DNA, 20 bp, synthetic construct
  misc_feature 1..20: note = Description of Artificial Sequence: Synthetic oligonucleotide
  misc_feature 1..20: note = Target: SCN10A; (-) strand; PAM type: YTN; PAM sequence: TTT
  source 1..20: mol_type = other DNA
tttttcctgacaaattagag

SEQ ID NO: 46275 - DNA, 20 bp, synthetic construct
  misc_feature 1..20: note = Description of Artificial Sequence: Synthetic oligonucleotide
  misc_feature 1..20: note = Target: SCN10A; (-) strand; PAM type: YTN; PAM sequence: CTC
  source 1..20: mol_type = other DNA
agattttttttcctgacaaa

SEQ ID NO: 46276 - DNA, 20 bp, synthetic construct
  misc_feature 1..20: note = Description of Artificial Sequence: Synthetic oligonucleotide
  misc_feature 1..20: note = Target: SCN10A; (-) strand; PAM type: YTN; PAM sequence: TTG
  source 1..20: mol_type = other DNA
agctcagattttttttcctg

SEQ ID NO: 46277 - DNA, 20 bp, synthetic construct
  misc_feature 1..20: note = Description of Artificial Sequence: Synthetic oligonucleotide
  misc_feature 1..20: note = Target: SCN10A; (-) strand; PAM type: YTN; PAM sequence: CTG
  source 1..20: mol_type = other DNA
acagttgagctcagattttt

SEQ ID NO: 46278 - DNA, 20 bp, synthetic construct
  misc_feature 1..20: note = Description of Artificial Sequence: Synthetic oligonucleotide
  misc_feature 1..20: note = Target: SCN10A; (-) strand; PAM type: YTN; PAM sequence: CTG
  source 1..20: mol_type = other DNA
acagactgacagttgagctc

SEQ ID NO: 46279 - DNA, 20 bp, synthetic construct
  misc_feature 1..20: note = Description of Artificial Sequence: Synthetic oligonucleotide
  misc_feature 1..20: note = Target: SCN10A; (-) strand; PAM type: YTN; PAM sequence: TTG
  source 1..20: mol_type = other DNA
actgacagactgacagttga

SEQ ID NO: 46280 - DNA, 20 bp, synthetic construct
  misc_feature 1..20: note = Description of Artificial Sequence: Synthetic oligonucleotide
  misc_feature 1..20: note = Target: SCN10A; (-) strand; PAM type: YTN; PAM sequence: CTT
  source 1..20: mol_type = other DNA
gactgacagactgacagttg

SEQ ID NO: 46281 - DNA, 20 bp, synthetic construct
  misc_feature 1..20: note = Description of Artificial Sequence: Synthetic oligonucleotide
  misc_feature 1..20: note = Target: SCN10A; (-) strand; PAM type: YTN; PAM sequence: CTC
  source 1..20: mol_type = other DNA
cataaacacaccttgactga

SEQ ID NO: 46282 - DNA, 20 bp, synthetic construct
  misc_feature 1..20: note = Description of Artificial Sequence: Synthetic oligonucleotide
  misc_feature 1..20: note = Target: SCN10A; (-) strand; PAM type: YTN; PAM sequence: TTA
  source 1..20: mol_type = other DNA
gtaggtgctccataaacaca

SEQ ID NO: 46283 - DNA, 20 bp, synthetic construct
  misc_feature 1..20: note = Description of Artificial Sequence: Synthetic oligonucleotide
  misc_feature 1..20: note = Target: SCN10A; (-) strand; PAM type: YTN; PAM sequence: CTT
  source 1..20: mol_type = other DNA
agtaggtgctccataaacac

SEQ ID NO: 46284 - DNA, 20 bp, synthetic construct
  misc_feature 1..20: note = Description of Artificial Sequence: Synthetic oligonucleotide
  misc_feature 1..20: note = Target: SCN10A; (-) strand; PAM type: YTN; PAM sequence: CTC
  source 1..20: mol_type = other DNA
ttagtaggtgctccataaac

SEQ ID NO: 46285 - DNA, 20 bp, synthetic construct
  misc_feature 1..20: note = Description of Artificial Sequence: Synthetic oligonucleotide
  misc_feature 1..20: note = Target: SCN10A; (-) strand; PAM type: YTN; PAM sequence: CTG
  source 1..20: mol_type = other DNA
gctcttagtaggtgctccat

SEQ ID NO: 46286 - DNA, 20 bp, synthetic construct
  misc_feature 1..20: note = Description of Artificial Sequence: Synthetic oligonucleotide
  misc_feature 1..20: note = Target: SCN10A; (-) strand; PAM type: YTN; PAM sequence: CTA
  source 1..20: mol_type = other DNA
agccacagcctggctcttag

SEQ ID NO: 46287 - DNA, 20 bp, synthetic construct
  misc_feature 1..20: note = Description of Artificial Sequence: Synthetic oligonucleotide
  misc_feature 1..20: note = Target: SCN10A; (-) strand; PAM type: YTN; PAM sequence: CTA
  source 1..20: mol_type = other DNA
gcacctaagccacagcctgg

SEQ ID NO: 46288 - DNA, 20 bp, synthetic construct
  misc_feature 1..20: note = Description of Artificial Sequence: Synthetic oligonucleotide
  misc_feature 1..20: note = Target: SCN10A; (-) strand; PAM type: YTN; PAM sequence: TTG
  source 1..20: mol_type = other DNA
catcctagcacctaagccac

SEQ ID NO: 46289 - DNA, 20 bp, synthetic construct
  misc_feature 1..20: note = Description of Artificial Sequence: Synthetic oligonucleotide
  misc_feature 1..20: note = Target: SCN10A; (-) strand; PAM type: YTN; PAM sequence: TTC
  source 1..20: mol_type = other DNA
agcattgcatcctagcacct

SEQ ID NO: 46290 - DNA, 20 bp, synthetic construct
  misc_feature 1..20: note = Description of Artificial Sequence: Synthetic oligonucleotide
  misc_feature 1..20: note = Target: SCN10A; (-) strand; PAM type: YTN; PAM sequence: TTG
  source 1..20: mol_type = other DNA
tgttcagcattgcatcctag

SEQ ID NO: 46291 - DNA, 20 bp, synthetic construct
  misc_feature 1..20: note = Description of Artificial Sequence: Synthetic oligonucleotide
  misc_feature 1..20: note = Target: SCN10A; (-) strand; PAM type: YTN; PAM sequence: CTG
  source 1..20: mol_type = other DNA
ttgtgttcagcattgcatcc

SEQ ID NO: 46292 - DNA, 20 bp, synthetic construct
  misc_feature 1..20: note = Description of Artificial Sequence: Synthetic oligonucleotide
  misc_feature 1..20: note = Target: SCN10A; (-) strand; PAM type: YTN; PAM sequence: CTA
  source 1..20: mol_type = other DNA
cactgttgtgttcagcattg

SEQ ID NO: 46293 - DNA, 20 bp, synthetic construct
  misc_feature 1..20: note = Description of Artificial Sequence: Synthetic oligonucleotide
  misc_feature 1..20: note = Target: SCN10A; (-) strand; PAM type: YTN; PAM sequence: TTG
  source 1..20: mol_type = other DNA
tagctacactgttgtgttca

SEQ ID NO: 46294 - DNA, 20 bp, synthetic construct
  misc_feature 1..20: note = Description of Artificial Sequence: Synthetic oligonucleotide
  misc_feature 1..20: note = Target: SCN10A; (-) strand; PAM type: YTN; PAM sequence: CTC
  source 1..20: mol_type = other DNA
acggatatgggtgataaaat

SEQ ID NO: 46295 - DNA, 20 bp, synthetic construct
  misc_feature 1..20: note = Description of Artificial Sequence: Synthetic oligonucleotide
  misc_feature 1..20: note = Target: SCN10A; (-) strand; PAM type: YTN; PAM sequence: TTA
  source 1..20: mol_type = other DNA
ctcacggatatgggtgataa

SEQ ID NO: 46296 - DNA, 20 bp, synthetic construct
  misc_feature 1..20: note = Description of Artificial Sequence: Synthetic oligonucleotide
  misc_feature 1..20: note = Target: SCN10A; (-) strand; PAM type: YTN; PAM sequence: TTT
  source 1..20: mol_type = other DNA
actcacggatatgggtgata

SEQ ID NO: 46297 - DNA, 20 bp, synthetic construct
  misc_feature 1..20: note = Description of Artificial Sequence: Synthetic oligonucleotide
  misc_feature 1..20: note = Target: SCN10A; (-) strand; PAM type: YTN; PAM sequence: CTC
  source 1..20: mol_type = other DNA
ccgtgggatttactcacgga

SEQ ID NO: 46298 - DNA, 20 bp, synthetic construct
  misc_feature 1..20: note = Description of Artificial Sequence: Synthetic oligonucleotide
  misc_feature 1..20: note = Target: SCN10A; (-) strand; PAM type: YTN; PAM sequence: CTC
  source 1..20: mol_type = other DNA
ctcccgtgggatttactcac

SEQ ID NO: 46299 - DNA, 20 bp, synthetic construct
  misc_feature 1..20: note = Description of Artificial Sequence: Synthetic oligonucleotide
  misc_feature 1..20: note = Target: SCN10A; (-) strand; PAM type: YTN; PAM sequence: TTA
  source 1..20: mol_type = other DNA
aacctcctcccgtgggattt

SEQ ID NO: 46300 - DNA, 20 bp, synthetic construct
  misc_feature 1..20: note = Description of Artificial Sequence: Synthetic oligonucleotide
  misc_feature 1..20: note = Target: SCN10A; (-) strand; PAM type: YTN; PAM sequence: CTG
  source 1..20: mol_type = other DNA
tataacaggattaaacctcc

SEQ ID NO: 46301 - DNA, 20 bp, synthetic construct
  misc_feature 1..20: note = Description of Artificial Sequence: Synthetic oligonucleotide
  misc_feature 1..20: note = Target: SCN10A; (-) strand; PAM type: YTN; PAM sequence: TTA
  source 1..20: mol_type = other DNA
ctgtataacaggattaaacc

SEQ ID NO: 46302 - DNA, 20 bp, synthetic construct
  misc_feature 1..20: note = Description of Artificial Sequence: Synthetic oligonucleotide
  misc_feature 1..20: note = Target: SCN10A; (-) strand; PAM type: YTN; PAM sequence: CTT
  source 1..20: mol_type = other DNA
actgtataacaggattaaac

SEQ ID NO: 46303 - DNA, 20 bp, synthetic construct
  misc_feature 1..20: note = Description of Artificial Sequence: Synthetic oligonucleotide
  misc_feature 1..20: note = Target: SCN10A; (-) strand; PAM type: YTN; PAM sequence: CTC
  source 1..20: mol_type = other DNA
ccccatcacataaagaggtg

SEQ ID NO: 46304 - DNA, 20 bp, synthetic construct
  misc_feature 1..20: note = Description of Artificial Sequence: Synthetic oligonucleotide
  misc_feature 1..20: note = Target: SCN10A; (-) strand; PAM type: YTN; PAM sequence: CTC
  source 1..20: mol_type = other DNA
tcccccatcacataaagagg

SEQ ID NO: 46305 - DNA, 20 bp, synthetic construct
  misc_feature 1..20: note = Description of Artificial Sequence: Synthetic oligonucleotide
  misc_feature 1..20: note = Target: SCN10A; (-) strand; PAM type: YTN; PAM sequence: TTG
  source 1..20: mol_type = other DNA
ggtgtaaggtgaacgtggac

SEQ ID NO: 46306 - DNA, 20 bp, synthetic construct
  misc_feature 1..20: note = Description of Artificial Sequence: Synthetic oligonucleotide
  misc_feature 1..20: note = Target: SCN10A; (-) strand; PAM type: YTN; PAM sequence: TTC
  source 1..20: mol_type = other DNA
cagattgggtgtaaggtgaa

SEQ ID NO: 46307 - DNA, 20 bp, synthetic construct
  misc_feature 1..20: note = Description of Artificial Sequence: Synthetic oligonucleotide
  misc_feature 1..20: note = Target: SCN10A; (-) strand; PAM type: YTN; PAM sequence: CTT
  source 1..20: mol_type = other DNA
ccagattgggtgtaaggtga

SEQ ID NO: 46308 - DNA, 20 bp, synthetic construct
  misc_feature 1..20: note = Description of Artificial Sequence: Synthetic oligonucleotide
  misc_feature 1..20: note = Target: SCN10A; (-) strand; PAM type: YTN; PAM sequence: TTC
  source 1..20: mol_type = other DNA
ccatatgaggagagtaactt

SEQ ID NO: 46309 - DNA, 20 bp, synthetic construct
  misc_feature 1..20: note = Description of Artificial Sequence: Synthetic oligonucleotide
  misc_feature 1..20: note = Target: SCN10A; (-) strand; PAM type: YTN; PAM sequence: CTT
  source 1..20: mol_type = other DNA
cccatatgaggagagtaact

SEQ ID NO: 46310 - DNA, 20 bp, synthetic construct
  misc_feature 1..20: note = Description of Artificial Sequence: Synthetic oligonucleotide
  misc_feature 1..20: note = Target: SCN10A; (-) strand; PAM type: YTN; PAM sequence: CTG
  source 1..20: mol_type = other DNA
cttcccatatgaggagagta

SEQ ID NO: 46311 - DNA, 20 bp, synthetic construct
  misc_feature 1..20: note = Description of Artificial Sequence: Synthetic oligonucleotide
  misc_feature 1..20: note = Target: SCN10A; (-) strand; PAM type: YTN; PAM sequence: CTC
  source 1..20: mol_type = other DNA
tgcttcccatatgaggagag

SEQ ID NO: 46312 - DNA, 20 bp, synthetic construct
  misc_feature 1..20: note = Description of Artificial Sequence: Synthetic oligonucleotide
  misc_feature 1..20: note = Target: SCN10A; (-) strand; PAM type: YTN; PAM sequence: TTA
  source 1..20: mol_type = other DNA
agctctgcttcccatatgag

SEQ ID NO: 46313 - DNA, 20 bp, synthetic construct
  misc_feature 1..20: note = Description of Artificial Sequence: Synthetic oligonucleotide
  misc_feature 1..20: note = Target: SCN10A; (-) strand; PAM type: YTN; PAM sequence: TTT
  source 1..20: mol_type = other DNA
aagctctgcttcccatatga

SEQ ID NO: 46314 - DNA, 20 bp, synthetic construct
  misc_feature 1..20: note = Description of Artificial Sequence: Synthetic oligonucleotide
  misc_feature 1..20: note = Target: SCN10A; (-) strand; PAM type: YTN; PAM sequence: TTT
  source 1..20: mol_type = other DNA
taagctctgcttcccatatg

SEQ ID NO: 46315 - DNA, 20 bp, synthetic construct
  misc_feature 1..20: note = Description of Artificial Sequence: Synthetic oligonucleotide
  misc_feature 1..20: note = Target: SCN10A; (-) strand; PAM type: YTN; PAM sequence: TTG
  source 1..20: mol_type = other DNA
ttttaagctctgcttcccat

SEQ ID NO: 46316 - DNA, 20 bp, synthetic construct
  misc_feature 1..20: note = Description of Artificial Sequence: Synthetic oligonucleotide
  misc_feature 1..20: note = Target: SCN10A; (-) strand; PAM type: YTN; PAM sequence: TTG
  source 1..20: mol_type = other DNA
ttgttttaagctctgcttcc

SEQ ID NO: 46317 - DNA, 20 bp, synthetic construct
  misc_feature 1..20: note = Description of Artificial Sequence: Synthetic oligonucleotide
  misc_feature 1..20: note = Target: SCN10A; (-) strand; PAM type: YTN; PAM sequence: CTG
  source 1..20: mol_type = other DNA
tgaccagtccacagagttgt

SEQ ID NO: 46318 - DNA, 20 bp, synthetic construct
  misc_feature 1..20: note = Description of Artificial Sequence: Synthetic oligonucleotide
  misc_feature 1..20: note = Target: SCN10A; (-) strand; PAM type: YTN; PAM sequence: CTC
  source 1..20: mol_type = other DNA
tgtgaccagtccacagagtt

SEQ ID NO: 46319 - DNA, 20 bp, synthetic construct
  misc_feature 1..20: note = Description of Artificial Sequence: Synthetic oligonucleotide
  misc_feature 1..20: note = Target: SCN10A; (-) strand; PAM type: YTN; PAM sequence: CTG
  source 1..20: mol_type = other DNA
cctctgtgaccagtccacag

SEQ ID NO: 46320 - DNA, 20 bp, synthetic construct
  misc_feature 1..20: note = Description of Artificial Sequence: Synthetic oligonucleotide
  misc_feature 1..20: note = Target: SCN10A; (-) strand; PAM type: YTN; PAM sequence: TTA
  source 1..20: mol_type = other DNA
tcagctgcctctgtgaccag

SEQ ID NO: 46321 - DNA, 20 bp, synthetic construct
  misc_feature 1..20: note = Description of Artificial Sequence: Synthetic oligonucleotide
  misc_feature 1..20: note = Target: SCN10A; (-) strand; PAM type: YTN; PAM sequence: TTT
  source 1..20: mol_type = other DNA
atcagctgcctctgtgacca

SEQ ID NO: 46322 - DNA, 20 bp, synthetic construct
  misc_feature 1..20: note = Description of Artificial Sequence: Synthetic oligonucleotide
  misc_feature 1..20: note = Target: SCN10A; (-) strand; PAM type: YTN; PAM sequence: TTG
  source 1..20: mol_type = other DNA
tgtttatcagctgcctctgt

SEQ ID NO: 46323 - DNA, 20 bp, synthetic construct
  misc_feature 1..20: note = Description of Artificial Sequence: Synthetic oligonucleotide
  misc_feature 1..20: note = Target: SCN10A; (-) strand; PAM type: YTN; PAM sequence: TTT
  source 1..20: mol_type = other DNA
gtgtttatcagctgcctctg

SEQ ID NO: 46324 - DNA, 20 bp, synthetic construct
  misc_feature 1..20: note = Description of Artificial Sequence: Synthetic oligonucleotide
  misc_feature 1..20: note = Target: SCN10A; (-) strand; PAM type: YTN; PAM sequence: TTA
  source 1..20: mol_type = other DNA
tttgtgtttatcagctgcct

SEQ ID NO: 46325 - DNA, 20 bp, synthetic construct
  misc_feature 1..20: note = Description of Artificial Sequence: Synthetic oligonucleotide
  misc_feature 1..20: note = Target: SCN10A; (-) strand; PAM type: YTN; PAM sequence: TTT
  source 1..20: mol_type = other DNA
atttgtgtttatcagctgcc

SEQ ID NO: 46326 - DNA, 20 bp, synthetic construct
  misc_feature 1..20: note = Description of Artificial Sequence: Synthetic oligonucleotide
  misc_feature 1..20: note = Target: SCN10A; (-) strand; PAM type: YTN; PAM sequence: TTT
  source 1..20: mol_type = other DNA
tatttgtgtttatcagctgc

SEQ ID NO: 46327 - DNA, 20 bp, synthetic construct
  misc_feature 1..20: note = Description of Artificial Sequence: Synthetic oligonucleotide
  misc_feature 1..20: note = Target: SCN10A; (-) strand; PAM type: YTN; PAM sequence: TTT
  source 1..20: mol_type = other DNA
ttatttgtgtttatcagctg

SEQ ID NO: 46328 - DNA, 20 bp, synthetic construct
  misc_feature 1..20: note = Description of Artificial Sequence: Synthetic oligonucleotide
  misc_feature 1..20: note = Target: SCN10A; (-) strand; PAM type: YTN; PAM sequence: CTC
  source 1..20: mol_type = other DNA
agtttttatttgtgtttatc

SEQ ID NO: 46329 - DNA, 20 bp, synthetic construct
  misc_feature 1..20: note = Description of Artificial Sequence: Synthetic oligonucleotide
  misc_feature 1..20: note = Target: SCN10A; (-) strand; PAM type: YTN; PAM sequence: CTA
  source 1..20: mol_type = other DNA
atgctcagtttttatttgtg

SEQ ID NO: 46330 - DNA, 20 bp, synthetic construct
  misc_feature 1..20: note = Description of Artificial Sequence: Synthetic oligonucleotide
  misc_feature 1..20: note = Target: SCN10A; (-) strand; PAM type: YTN; PAM sequence: TTA
  source 1..20: mol_type = other DNA
ctaatgctcagtttttattt

SEQ ID NO: 46331 - DNA, 20 bp, synthetic construct
  misc_feature 1..20: note = Description of Artificial Sequence: Synthetic oligonucleotide
  misc_feature 1..20: note = Target: SCN10A; (-) strand; PAM type: YTN; PAM sequence: CTA
  source 1..20: mol_type = other DNA
gttactaatgctcagttttt

SEQ ID NO: 46332 - DNA, 20 bp, synthetic construct
  misc_feature 1..20: note = Description of Artificial Sequence: Synthetic oligonucleotide
  misc_feature 1..20: note = Target: SCN10A; (-) strand; PAM type: YTN; PAM sequence: CTC
  source 1..20: mol_type = other DNA
cccatactagttactaatgc

SEQ ID NO: 46333 - DNA, 20 bp, synthetic construct
  misc_feature 1..20: note = Description of Artificial Sequence: Synthetic oligonucleotide
  misc_feature 1..20: note = Target: SCN10A; (-) strand; PAM type: YTN; PAM sequence: CTG
  source 1..20: mol_type = other DNA
ctccccatactagttactaa

SEQ ID NO: 46334 - DNA, 20 bp, synthetic construct
  misc_feature 1..20: note = Description of Artificial Sequence: Synthetic oligonucleotide
  misc_feature 1..20: note = Target: SCN10A; (-) strand; PAM type: YTN; PAM sequence: TTC
  source 1..20: mol_type = other DNA
ctgctccccatactagttac

SEQ ID NO: 46335 - DNA, 20 bp, synthetic construct
  misc_feature 1..20: note = Description of Artificial Sequence: Synthetic oligonucleotide
  misc_feature 1..20: note = Target: SCN10A; (-) strand; PAM type: YTN; PAM sequence: TTT
  source 1..20: mol_type = other DNA
cctgctccccatactagtta

SEQ ID NO: 46336 - DNA, 20 bp, synthetic construct
  misc_feature 1..20: note = Description of Artificial Sequence: Synthetic oligonucleotide
  misc_feature 1..20: note = Target: SCN10A; (-) strand; PAM type: YTN; PAM sequence: CTA
  source 1..20: mol_type = other DNA
cgtttcctgctccccatact

SEQ ID NO: 46337 - DNA, 20 bp, synthetic construct
  misc_feature 1..20: note = Description of Artificial Sequence: Synthetic oligonucleotide
  misc_feature 1..20: note = Target: SCN10A; (-) strand; PAM type: YTN; PAM sequence: TTC
  source 1..20: mol_type = other DNA
ggcaggccatggactacgtt

SEQ ID NO: 46338 - DNA, 20 bp, synthetic construct
  misc_feature 1..20: note = Description of Artificial Sequence: Synthetic oligonucleotide
  misc_feature 1..20: note = Target: SCN10A; (-) strand; PAM type: YTN; PAM sequence: CTT
  source 1..20: mol_type = other DNA
cggcaggccatggactacgt

SEQ ID NO: 46339 - DNA, 20 bp, synthetic construct
  misc_feature 1..20: note = Description of Artificial Sequence: Synthetic oligonucleotide
  misc_feature 1..20: note = Target: SCN10A; (-) strand; PAM type: YTN; PAM sequence: TTA
  source 1..20: mol_type = other DNA
caaccttcggcaggccatgg

SEQ ID NO: 46340 - DNA, 20 bp, synthetic construct
  misc_feature 1..20: note = Description of Artificial Sequence: Synthetic oligonucleotide
  misc_feature 1..20: note = Target: SCN10A; (-) strand; PAM type: YTN; PAM sequence: CTT
  source 1..20: mol_type = other DNA
acaaccttcggcaggccatg

SEQ ID NO: 46341 - DNA, 20 bp, synthetic construct
  misc_feature 1..20: note = Description of Artificial Sequence: Synthetic oligonucleotide
  misc_feature 1..20: note = Target: SCN10A; (-) strand; PAM type: YTN; PAM sequence: CTA
  source 1..20: mol_type = other DNA
ggcttacaaccttcggcagg

SEQ ID NO: 46342 - DNA, 20 bp, synthetic construct
  misc_feature 1..20: note = Description of Artificial Sequence: Synthetic oligonucleotide
  misc_feature 1..20: note = Target: SCN10A; (-) strand; PAM type: YTN; PAM sequence: CTG
  source 1..20: mol_type = other DNA
ctaggcttacaaccttcggc

SEQ ID NO: 46343 - DNA, 20 bp, synthetic construct
  misc_feature 1..20: note = Description of Artificial Sequence: Synthetic oligonucleotide
  misc_feature 1..20: note = Target: SCN10A; (-) strand; PAM type: YTN; PAM sequence: TTC
  source 1..20: mol_type = other DNA
ctgctaggcttacaaccttc

SEQ ID NO: 46344 - DNA, 20 bp, synthetic construct
  misc_feature 1..20: note = Description of Artificial Sequence: Synthetic oligonucleotide
  misc_feature 1..20: note = Target: SCN10A; (-) strand; PAM type: YTN; PAM sequence: TTA
  source 1..20: mol_type = other DNA
aagcagggagaaattcctgc

SEQ ID NO: 46345 - DNA, 20 bp, synthetic construct
  misc_feature 1..20: note = Description of Artificial Sequence: Synthetic oligonucleotide
  misc_feature 1..20: note = Target: SCN10A; (-) strand; PAM type: YTN; PAM sequence: CTT
  source 1..20: mol_type = other DNA
aaagcagggagaaattcctg

SEQ ID NO: 46346 - DNA, 20 bp, synthetic construct
  misc_feature 1..20: note = Description of Artificial Sequence: Synthetic oligonucleotide
  misc_feature 1..20: note = Target: SCN10A; (-) strand; PAM type: YTN; PAM sequence: CTA
  source 1..20: mol_type = other DNA
gtcttaaagcagggagaaat

SEQ ID NO: 46347 - DNA, 20 bp, synthetic construct
  misc_feature 1..20: note = Description of Artificial Sequence: Synthetic oligonucleotide
  misc_feature 1..20: note = Target: SCN10A; (-) strand; PAM type: YTN; PAM sequence: TTG
  source 1..20: mol_type = other DNA
ggatctagtcttaaagcagg

SEQ ID NO: 46348 - DNA, 20 bp, synthetic construct
  misc_feature 1..20: note = Description of Artificial Sequence: Synthetic oligonucleotide
  misc_feature 1..20: note = Target: SCN10A; (-) strand; PAM type: YTN; PAM sequence: TTT
  source 1..20: mol_type = other DNA
gggatctagtcttaaagcag

SEQ ID NO: 46349 - DNA, 20 bp, synthetic construct
  misc_feature 1..20: note = Description of Artificial Sequence: Synthetic oligonucleotide
  misc_feature 1..20: note = Target: SCN10A; (-) strand; PAM type: YTN; PAM sequence: CTT
  source 1..20: mol_type = other DNA
tgggatctagtcttaaagca

SEQ ID NO: 46350 - DNA, 20 bp, synthetic construct
  misc_feature 1..20: note = Description of Artificial Sequence: Synthetic oligonucleotide
  misc_feature 1..20: note = Target: SCN10A; (-) strand; PAM type: YTN; PAM sequence: CTC
  source 1..20: mol_type = other DNA
tttgggatctagtcttaaag

SEQ ID NO: 46351 - DNA, 20 bp, synthetic construct
  misc_feature 1..20: note = Description of Artificial Sequence: Synthetic oligonucleotide
  misc_feature 1..20: note = Target: SCN10A; (-) strand; PAM type: YTN; PAM sequence: TTA
  source 1..20: mol_type = other DNA
catgaagggtatagctcttt

SEQ ID NO: 46352 - DNA, 20 bp, synthetic construct
  misc_feature 1..20: note = Description of Artificial Sequence: Synthetic oligonucleotide
  misc_feature 1..20: note = Target: SCN10A; (-) strand; PAM type: YTN; PAM sequence: CTT
  source 1..20: mol_type = other DNA
acatgaagggtatagctctt

SEQ ID NO: 46353 - DNA, 20 bp, synthetic construct
  misc_feature 1..20: note = Description of Artificial Sequence: Synthetic oligonucleotide
  misc_feature 1..20: note = Target: SCN10A; (-) strand; PAM type: YTN; PAM sequence: TTC
  source 1..20: mol_type = other DNA
atccttacatgaagggtata

SEQ ID NO: 46354 - DNA, 20 bp, synthetic construct
  misc_feature 1..20: note = Description of Artificial Sequence: Synthetic oligonucleotide
  misc_feature 1..20: note = Target: SCN10A; (-) strand; PAM type: YTN; PAM sequence: TTG
  source 1..20: mol_type = other DNA
tggttcatccttacatgaag

SEQ ID NO: 46355 - DNA, 20 bp, synthetic construct
  misc_feature 1..20: note = Description of Artificial Sequence: Synthetic oligonucleotide
  misc_feature 1..20: note = Target: SCN10A; (-) strand; PAM type: YTN; PAM sequence: TTT
  source 1..20: mol_type = other DNA
gtggttcatccttacatgaa

SEQ ID NO: 46356 - DNA, 20 bp, synthetic construct
  misc_feature 1..20: note = Description of Artificial Sequence: Synthetic oligonucleotide
  misc_feature 1..20: note = Target: SCN10A; (-) strand; PAM type: YTN; PAM sequence: TTG
  source 1..20: mol_type = other DNA
tttgtggttcatccttacat

SEQ ID NO: 46357 - DNA, 20 bp, synthetic construct
  misc_feature 1..20: note = Description of Artificial Sequence: Synthetic oligonucleotide
  misc_feature 1..20: note = Target: SCN10A; (-) strand; PAM type: YTN; PAM sequence: CTG
  source 1..20: mol_type = other DNA
ggattgtttgtggttcatcc

SEQ ID NO: 46358 - DNA, 20 bp, synthetic construct
  misc_feature 1..20: note = Description of Artificial Sequence: Synthetic oligonucleotide
  misc_feature 1..20: note = Target: SCN10A; (-) strand; PAM type: YTN; PAM sequence: CTC
  source 1..20: mol_type = other DNA
ctgggattgtttgtggttca

SEQ ID NO: 46359 - DNA, 20 bp, synthetic construct
  misc_feature 1..20: note = Description of Artificial Sequence: Synthetic oligonucleotide
  misc_feature 1..20: note = Target: SCN10A; (-) strand; PAM type: YTN; PAM sequence: TTC
  source 1..20: mol_type = other DNA
tcctgggattgtttgtggtt

SEQ ID NO: 46360 - DNA, 20 bp, synthetic construct
  misc_feature 1..20: note = Description of Artificial Sequence: Synthetic oligonucleotide
  misc_feature 1..20: note = Target: SCN10A; (-) strand; PAM type: YTN; PAM sequence: TTG
  source 1..20: mol_type = other DNA
cattctcctgggattgtttg

SEQ ID NO: 46361 - DNA, 20 bp, synthetic construct
  misc_feature 1..20: note = Description of Artificial Sequence: Synthetic oligonucleotide
  misc_feature 1..20: note = Target: SCN10A; (-) strand; PAM type: YTN; PAM sequence: CTT
  source 1..20: mol_type = other DNA
gcattctcctgggattgttt

SEQ ID NO: 46362 - DNA, 20 bp, synthetic construct
  misc_feature 1..20: note = Description of Artificial Sequence: Synthetic oligonucleotide
  misc_feature 1..20: note = Target: SCN10A; (-) strand; PAM type: YTN; PAM sequence: TTC
  source 1..20: mol_type = other DNA
cttgcattctcctgggattg

SEQ ID NO: 46363 - DNA, 20 bp, synthetic construct
  misc_feature 1..20: note = Description of Artificial Sequence: Synthetic oligonucleotide
  misc_feature 1..20: note = Target: SCN10A; (-) strand; PAM type: YTN; PAM sequence: TTT
  source 1..20: mol_type = other DNA
ccttgcattctcctgggatt

SEQ ID NO: 46364 - DNA, 20 bp, synthetic construct
  misc_feature 1..20: note = Description of Artificial Sequence: Synthetic oligonucleotide
  misc_feature 1..20: note = Target: SCN10A; (-) strand; PAM type: YTN; PAM sequence: TTT
  source 1..20: mol_type = other DNA
tccttgcattctcctgggat

SEQ ID NO: 46365 - DNA, 20 bp, synthetic construct
  misc_feature 1..20: note = Description of Artificial Sequence: Synthetic oligonucleotide
  misc_feature 1..20: note = Target: SCN10A; (-) strand; PAM type: YTN; PAM sequence: TTC
  source 1..20: mol_type = other DNA
aattttccttgcattctcct

SEQ ID NO: 46366 - DNA, 20 bp, synthetic construct
  misc_feature 1..20: note = Description of Artificial Sequence: Synthetic oligonucleotide
  misc_feature 1..20: note = Target: SCN10A; (-) strand; PAM type: YTN; PAM sequence: CTA
  source 1..20: mol_type = other DNA
acaccagccattcaattttc

SEQ ID NO: 46367 - DNA, 20 bp, synthetic construct
  misc_feature 1..20: note = Description of Artificial Sequence: Synthetic oligonucleotide
  misc_feature 1..20: note = Target: SCN10A; (-) strand; PAM type: YTN; PAM sequence: CTG
  source 1..20: mol_type = other DNA
gtacctaacaccagccattc

SEQ ID NO: 46368 - DNA, 20 bp, synthetic construct
  misc_feature 1..20: note = Description of Artificial Sequence: Synthetic oligonucleotide
  misc_feature 1..20: note = Target: SCN10A; (-) strand; PAM type: YTN; PAM sequence: CTG
  source 1..20: mol_type = other DNA
tagctggtacctaacaccag

SEQ ID NO: 46369 - DNA, 20 bp, synthetic construct
  misc_feature 1..20: note = Description of Artificial Sequence: Synthetic oligonucleotide
  misc_feature 1..20: note = Target: SCN10A; (-) strand; PAM type: YTN; PAM sequence: CTC
  source 1..20: mol_type = other DNA
ctgtagctggtacctaacac

SEQ ID NO: 46370 - DNA, 20 bp, synthetic construct
  misc_feature 1..20: note = Description of Artificial Sequence: Synthetic oligonucleotide
  misc_feature 1..20: note = Target: SCN10A; (-) strand; PAM type: YTN; PAM sequence: TTC
  source 1..20: mol_type = other DNA
ctcctgtagctggtacctaa

SEQ ID NO: 46371 - DNA, 20 bp, synthetic construct
  misc_feature 1..20: note = Description of Artificial Sequence: Synthetic oligonucleotide
  misc_feature 1..20: note = Target: SCN10A; (-) strand; PAM type: YTN; PAM sequence: TTT
  source 1..20: mol_type = other DNA
cctcctgtagctggtaccta

SEQ ID NO: 46372 - DNA, 20 bp, synthetic construct
  misc_feature 1..20: note = Description of Artificial Sequence: Synthetic oligonucleotide
  misc_feature 1..20: note = Target: SCN10A; (-) strand; PAM type: YTN; PAM sequence: TTT
  source 1..20: mol_type = other DNA
tcctcctgtagctggtacct

SEQ ID NO: 46373 - DNA, 20 bp, synthetic construct
  misc_feature 1..20: note = Description of Artificial Sequence: Synthetic oligonucleotide
  misc_feature 1..20: note = Target: SCN10A; (-) strand; PAM type: YTN; PAM sequence: CTC
  source 1..20: mol_type = other DNA
agcgtcaattttcctcctgt

SEQ ID NO: 46374 - DNA, 20 bp, synthetic construct
  misc_feature 1..20: note = Description of Artificial Sequence: Synthetic oligonucleotide
  misc_feature 1..20: note = Target: SCN10A; (-) strand; PAM type: YTN; PAM sequence: TTC
  source 1..20: mol_type = other DNA
aaatgctcagcgtcaatttt

SEQ ID NO: 46375 - DNA, 20 bp, synthetic construct
  misc_feature 1..20: note = Description of Artificial Sequence: Synthetic oligonucleotide
  misc_feature 1..20: note = Target: SCN10A; (-) strand; PAM type: YTN; PAM sequence: TTT
  source 1..20: mol_type = other DNA
caaatgctcagcgtcaattt

SEQ ID NO: 46376 - DNA, 20 bp, synthetic construct
  misc_feature 1..20: note = Description of Artificial Sequence: Synthetic oligonucleotide
  misc_feature 1..20: note = Target: SCN10A; (-) strand; PAM type: YTN; PAM sequence: TTG
  source 1..20: mol_type = other DNA
tttcaaatgctcagcgtcaa

SEQ ID NO: 46377 - DNA, 20 bp, synthetic construct
  misc_feature 1..20: note = Description of Artificial Sequence: Synthetic oligonucleotide
  misc_feature 1..20: note = Target: SCN10A; (-) strand; PAM type: YTN; PAM sequence: TTG
  source 1..20: mol_type = other DNA
ttgtttcaaatgctcagcgt

SEQ ID NO: 46378 - DNA, 20 bp, synthetic construct
  misc_feature 1..20: note = Description of Artificial Sequence: Synthetic oligonucleotide
  misc_feature 1..20: note = Target: SCN10A; (-) strand; PAM type: YTN; PAM sequence: TTT
  source 1..20: mol_type = other DNA
gttgtttcaaatgctcagcg

SEQ ID NO: 46379 - DNA, 20 bp, synthetic construct
  misc_feature 1..20: note = Description of Artificial Sequence: Synthetic oligonucleotide
  misc_feature 1..20: note = Target: SCN10A; (-) strand; PAM type: YTN; PAM sequence: CTT
  source 1..20: mol_type = other DNA
tgttgtttcaaatgctcagc

SEQ ID NO: 46380 - DNA, 20 bp, synthetic construct
  misc_feature 1..20: note = Description of Artificial Sequence: Synthetic oligonucleotide
  misc_feature 1..20: note = Target: SCN10A; (-) strand; PAM type: YTN; PAM sequence: CTA
  source 1..20: mol_type = other DNA
tatgagcaccactttgttgt

SEQ ID NO: 46381 - DNA, 20 bp, synthetic construct
  misc_feature 1..20: note = Description of Artificial Sequence: Synthetic oligonucleotide
  misc_feature 1..20: note = Target: SCN10A; (-) strand; PAM type: YTN; PAM sequence: TTC
  source 1..20: mol_type = other DNA
cagataaaatcctatatgag

SEQ ID NO: 46382 - DNA, 20 bp, synthetic construct
  misc_feature 1..20: note = Description of Artificial Sequence: Synthetic oligonucleotide
  misc_feature 1..20: note = Target: SCN10A; (-) strand; PAM type: YTN; PAM sequence: CTA
  source 1..20: mol_type = other DNA
ggtagtgtgaattccagata

SEQ ID NO: 46383 - DNA, 20 bp, synthetic construct
  misc_feature 1..20: note = Description of Artificial Sequence: Synthetic oligonucleotide
  misc_feature 1..20: note = Target: SCN10A; (-) strand; PAM type: YTN; PAM sequence: TTA
  source 1..20: mol_type = other DNA
aaatacctaggtagtgtgaa

SEQ ID NO: 46384 - DNA, 20 bp, synthetic construct
  misc_feature 1..20: note = Description of Artificial Sequence: Synthetic oligonucleotide
  misc_feature 1..20: note = Target: SCN10A; (-) strand; PAM type: YTN; PAM sequence: CTT
  source 1..20: mol_type = other DNA
aaaatacctaggtagtgtga

SEQ ID NO: 46385 - DNA, 20 bp, synthetic construct
  misc_feature 1..20: note = Description of Artificial Sequence: Synthetic oligonucleotide
  misc_feature 1..20: note = Target: SCN10A; (-) strand; PAM type: YTN; PAM sequence: CTC
  source 1..20: mol_type = other DNA
aacttaaaatacctaggtag

SEQ ID NO: 46386 - DNA, 20 bp, synthetic construct
  misc_feature 1..20: note = Description of Artificial Sequence: Synthetic oligonucleotide
  misc_feature 1..20: note = Target: SCN10A; (-) strand; PAM type: YTN; PAM sequence: TTC
  source 1..20: mol_type = other DNA
tcaacttaaaatacctaggt

SEQ ID NO: 46387 - DNA, 20 bp, synthetic construct
  misc_feature 1..20: note = Description of Artificial Sequence: Synthetic oligonucleotide
  misc_feature 1..20: note = Target: SCN10A; (-) strand; PAM type: YTN; PAM sequence: TTA
  source 1..20: mol_type = other DNA
aattctcaacttaaaatacc

SEQ ID NO: 46388 - DNA, 20 bp, synthetic construct
  misc_feature 1..20: note = Description of Artificial Sequence: Synthetic oligonucleotide
  misc_feature 1..20: note = Target: SCN10A; (-) strand; PAM type: YTN; PAM sequence: CTA
  source 1..20: mol_type = other DNA
aattaaattctcaacttaaa

SEQ ID NO: 46389 - DNA, 20 bp, synthetic construct
  misc_feature 1..20: note = Description of Artificial Sequence: Synthetic oligonucleotide
  misc_feature 1..20: note = Target: SCN10A; (-) strand; PAM type: YTN; PAM sequence: CTC
  source 1..20: mol_type = other DNA
taaattaaattctcaactta

SEQ ID NO: 46390 - DNA, 20 bp, synthetic construct
  misc_feature 1..20: note = Description of Artificial Sequence: Synthetic oligonucleotide
  misc_feature 1..20: note = Target: SCN10A; (-) strand; PAM type: YTN; PAM sequence: TTG
  source 1..20: mol_type = other DNA
ctctaaattaaattctcaac

SEQ ID NO: 46391 - DNA, 20 bp, synthetic construct
  misc_feature 1..20: note = Description of Artificial Sequence: Synthetic oligonucleotide
  misc_feature 1..20: note = Target: SCN10A; (-) strand; PAM type: YTN; PAM sequence: TTG
  source 1..20: mol_type = other DNA
tagaattgctctaaattaaa

SEQ ID NO: 46392 - DNA, 20 bp, synthetic construct
  misc_feature 1..20: note = Description of Artificial Sequence: Synthetic oligonucleotide
  misc_feature 1..20: note = Target: SCN10A; (-) strand; PAM type: YTN; PAM sequence: TTT
  source 1..20: mol_type = other DNA
gtagaattgctctaaattaa

SEQ ID NO: 46393 - DNA, 20 bp, synthetic construct
  misc_feature 1..20: note = Description of Artificial Sequence: Synthetic oligonucleotide
  misc_feature 1..20: note = Target: SCN10A; (-) strand; PAM type: YTN; PAM sequence: CTT
  source 1..20: mol_type = other DNA
tgtagaattgctctaaatta

SEQ ID NO: 46394 - DNA, 20 bp, synthetic construct
  misc_feature 1..20: note = Description of Artificial Sequence: Synthetic oligonucleotide
  misc_feature 1..20: note = Target: SCN10A; (-) strand; PAM type: YTN; PAM sequence: CTG
  source 1..20: mol_type = other DNA
cagagcactttgtagaattg

SEQ ID NO: 46395 - DNA, 20 bp, synthetic construct
  misc_feature 1..20: note = Description of Artificial Sequence: Synthetic oligonucleotide
  misc_feature 1..20: note = Target: SCN10A; (-) strand; PAM type: YTN; PAM sequence: TTC
  source 1..20: mol_type = other DNA
tgcagagcactttgtagaat

SEQ ID NO: 46396 - DNA, 20 bp, synthetic construct
  misc_feature 1..20: note = Description of Artificial Sequence: Synthetic oligonucleotide
  misc_feature 1..20: note = Target: SCN10A; (-) strand; PAM type: YTN; PAM sequence: TTA
  source 1..20: mol_type = other DNA
attctgcagagcactttgta

SEQ ID NO: 46397 - DNA, 20 bp, synthetic construct
  misc_feature 1..20: note = Description of Artificial Sequence: Synthetic oligonucleotide
  misc_feature 1..20: note = Target: SCN10A; (-) strand; PAM type: YTN; PAM sequence: TTT
  source 1..20: mol_type = other DNA
aattctgcagagcactttgt

SEQ ID NO: 46398 - DNA, 20 bp, synthetic construct
  misc_feature 1..20: note = Description of Artificial Sequence: Synthetic oligonucleotide
  misc_feature 1..20: note = Target: SCN10A; (-) strand; PAM type: YTN; PAM sequence: TTG
  source 1..20: mol_type = other DNA
catttaattctgcagagcac

SEQ ID NO: 46399 - DNA, 20 bp, synthetic construct
  misc_feature 1..20: note = Description of Artificial Sequence: Synthetic oligonucleotide
  misc_feature 1..20: note = Target: SCN10A; (-) strand; PAM type: YTN; PAM sequence: TTT
  source 1..20: mol_type = other DNA
gcatttaattctgcagagca

SEQ ID NO: 46400 - DNA, 20 bp, synthetic construct
  misc_feature 1..20: note = Description of Artificial Sequence: Synthetic oligonucleotide
  misc_feature 1..20: note = Target: SCN10A; (-) strand; PAM type: YTN; PAM sequence: CTC
  source 1..20: mol_type = other DNA
cagaggtatttgcatttaat

SEQ ID NO: 46401 - DNA, 20 bp, synthetic construct
  misc_feature 1..20: note = Description of Artificial Sequence: Synthetic oligonucleotide
  misc_feature 1..20: note = Target: SCN10A; (-) strand; PAM type: YTN; PAM sequence: TTC
  source 1..20: mol_type = other DNA
ctccagaggtatttgcattt

SEQ ID NO: 46402 - DNA, 20 bp, synthetic construct
  misc_feature 1..20: note = Description of Artificial Sequence: Synthetic oligonucleotide
  misc_feature 1..20: note = Target: SCN10A; (-) strand; PAM type: YTN; PAM sequence: CTG
  source 1..20: mol_type = other DNA
agataaaggcaggttcctcc

SEQ ID NO: 46403 - DNA, 20 bp, synthetic construct
  misc_feature 1..20: note = Description of Artificial Sequence: Synthetic oligonucleotide
  misc_feature 1..20: note = Target: SCN10A; (-) strand; PAM type: YTN; PAM sequence: TTG
  source 1..20: mol_type = other DNA
aaacctgagataaaggcagg

SEQ ID NO: 46404 - DNA, 20 bp, synthetic construct
  misc_feature 1..20: note = Description of Artificial Sequence: Synthetic oligonucleotide
  misc_feature 1..20: note = Target: SCN10A; (-) strand; PAM type: YTN; PAM sequence: TTT
  source 1..20: mol_type = other DNA
gaaacctgagataaaggcag

SEQ ID NO: 46405 - DNA, 20 bp, synthetic construct
  misc_feature 1..20: note = Description of Artificial Sequence: Synthetic oligonucleotide
  misc_feature 1..20: note = Target: SCN10A; (-) strand; PAM type: YTN; PAM sequence: TTG
  source 1..20: mol_type = other DNA
agggaatagtttgaaacctg

SEQ ID NO: 46406 - DNA, 20 bp, synthetic construct
  misc_feature 1..20: note = Description of Artificial Sequence: Synthetic oligonucleotide
  misc_feature 1..20: note = Target: SCN10A; (-) strand; PAM type: YTN; PAM sequence: TTT
  source 1..20: mol_type = other DNA
gagggaatagtttgaaacct

SEQ ID NO: 46407 - DNA, 20 bp, synthetic construct
  misc_feature 1..20: note = Description of Artificial Sequence: Synthetic oligonucleotide
  misc_feature 1..20: note = Target: SCN10A; (-) strand; PAM type: YTN; PAM sequence: TTT
  source 1..20: mol_type = other DNA
tgagggaatagtttgaaacc

SEQ ID NO: 46408 - DNA, 20 bp, synthetic construct
  misc_feature 1..20: note = Description of Artificial Sequence: Synthetic oligonucleotide
  misc_feature 1..20: note = Target: SCN10A; (-) strand; PAM type: YTN; PAM sequence: TTT
  source 1..20: mol_type = other DNA
ttgagggaatagtttgaaac

SEQ ID NO: 46409 - DNA, 20 bp, synthetic construct
  misc_feature 1..20: note = Description of Artificial Sequence: Synthetic oligonucleotide
  misc_feature 1..20: note = Target: SCN10A; (-) strand; PAM type: YTN; PAM sequence: TTA
  source 1..20: mol_type = other DNA
aacaatttttgagggaatag

SEQ ID NO: 46410 - DNA, 20 bp, synthetic construct
  misc_feature 1..20: note = Description of Artificial Sequence: Synthetic oligonucleotide
  misc_feature 1..20: note = Target: SCN10A; (-) strand; PAM type: YTN; PAM sequence: CTT
  source 1..20: mol_type = other DNA
aaacaatttttgagggaata

SEQ ID NO: 46411 - DNA, 20 bp, synthetic construct
  misc_feature 1..20: note = Description of Artificial Sequence: Synthetic oligonucleotide
  misc_feature 1..20: note = Target: SCN10A; (-) strand; PAM type: YTN; PAM sequence: CTC
  source 1..20: mol_type = other DNA
ttaaacaatttttgagggaa

SEQ ID NO: 46412 - DNA, 20 bp, synthetic construct
  misc_feature 1..20: note = Description of Artificial Sequence: Synthetic oligonucleotide
  misc_feature 1..20: note = Target: SCN10A; (-) strand; PAM type: YTN; PAM sequence: CTG
  source 1..20: mol_type = other DNA
caactcttaaacaatttttg

SEQ ID NO: 46413 - DNA, 20 bp, synthetic construct
  misc_feature 1..20: note = Description of Artificial Sequence: Synthetic oligonucleotide
  misc_feature 1..20: note = Target: SCN10A; (-) strand; PAM type: YTN; PAM sequence: TTA
  source 1..20: mol_type = other DNA
ctgcaactcttaaacaattt

SEQ ID NO: 46414 - DNA, 20 bp, synthetic construct
  misc_feature 1..20: note = Description of Artificial Sequence: Synthetic oligonucleotide
  misc_feature 1..20: note = Target: SCN10A; (-) strand; PAM type: YTN; PAM sequence: TTT
  source 1..20: mol_type = other DNA
actgcaactcttaaacaatt

SEQ ID NO: 46415 - DNA, 20 bp, synthetic construct
  misc_feature 1..20: note = Description of Artificial Sequence: Synthetic oligonucleotide
  misc_feature 1..20: note = Target: SCN10A; (-) strand; PAM type: YTN; PAM sequence: TTT
  source 1..20: mol_type = other DNA
tactgcaactcttaaacaat

SEQ ID NO: 46416 - DNA, 20 bp, synthetic construct
  misc_feature 1..20: note = Description of Artificial Sequence: Synthetic oligonucleotide
  misc_feature 1..20: note = Target: SCN10A; (-) strand; PAM type: YTN; PAM sequence: TTT
  source 1..20: mol_type = other DNA
ttactgcaactcttaaacaa

SEQ ID NO: 46417 - DNA, 20 bp, synthetic construct
  misc_feature 1..20: note = Description of Artificial Sequence: Synthetic oligonucleotide
  misc_feature 1..20: note = Target: SCN10A; (-) strand; PAM type: YTN; PAM sequence: TTT
  source 1..20: mol_type = other DNA
tttactgcaactcttaaaca

SEQ ID NO: 46418 - DNA, 20 bp, synthetic construct
  misc_feature 1..20: note = Description of Artificial Sequence: Synthetic oligonucleotide
  misc_feature 1..20: note = Target: SCN10A; (-) strand; PAM type: YTN; PAM sequence: TTT
  source 1..20: mol_type = other DNA
ttttactgcaactcttaaac

SEQ ID NO: 46419 - DNA, 20 bp, synthetic construct
  misc_feature 1..20: note = Description of Artificial Sequence: Synthetic oligonucleotide
  misc_feature 1..20: note = Target: SCN10A; (-) strand; PAM type: YTN; PAM sequence: TTG
  source 1..20: mol_type = other DNA
tttttttactgcaactctta

SEQ ID NO: 46420 - DNA, 20 bp, synthetic construct
  misc_feature 1..20: note = Description of Artificial Sequence: Synthetic oligonucleotide
  misc_feature 1..20: note = Target: SCN10A; (-) strand; PAM type: YTN; PAM sequence: TTT
  source 1..20: mol_type = other DNA
gtttttttactgcaactctt

SEQ ID NO: 46421 - DNA, 20 bp, synthetic construct
  misc_feature 1..20: note = Description of Artificial Sequence: Synthetic oligonucleotide
  misc_feature 1..20: note = Target: SCN10A; (-) strand; PAM type: YTN; PAM sequence: TTG
  source 1..20: mol_type = other DNA
tttgtttttttactgcaact

SEQ ID NO: 46422 - DNA, 20 bp, synthetic construct
  misc_feature 1..20: note = Description of Artificial Sequence: Synthetic oligonucleotide
  misc_feature 1..20: note = Target: SCN10A; (-) strand; PAM type: YTN; PAM sequence: TTT
  source 1..20: mol_type = other DNA
gtttgtttttttactgcaac

SEQ ID NO: 46423 - DNA, 20 bp, synthetic construct
  misc_feature 1..20: note = Description of Artificial Sequence: Synthetic oligonucleotide
  misc_feature 1..20: note = Target: SCN10A; (-) strand; PAM type: YTN; PAM sequence: TTT
  source 1..20: mol_type = other DNA
tgtttgtttttttactgcaa

SEQ ID NO: 46424 - DNA, 20 bp, synthetic construct
  misc_feature 1..20: note = Description of Artificial Sequence: Synthetic oligonucleotide
  misc_feature 1..20: note = Target: SCN10A; (-) strand; PAM type: YTN; PAM sequence: TTT
  source 1..20: mol_type = other DNA
ttgtttgtttttttactgca

SEQ ID NO: 46425 - DNA, 20 bp, synthetic construct
  misc_feature 1..20: note = Description of Artificial Sequence: Synthetic oligonucleotide
  misc_feature 1..20: note = Target: SCN10A; (-) strand; PAM type: YTN; PAM sequence: CTG
  source 1..20: mol_type = other DNA
tttttgtttgtttttttact

SEQ ID NO: 46426 - DNA, 20 bp, synthetic construct
  misc_feature 1..20: note = Description of Artificial Sequence: Synthetic oligonucleotide
  misc_feature 1..20: note = Target: SCN10A; (-) strand; PAM type: YTN; PAM sequence: TTC
  source 1..20: mol_type = other DNA
tgtttttgtttgttttttta

SEQ ID NO: 46427 - DNA, 20 bp, synthetic construct
  misc_feature 1..20: note = Description of Artificial Sequence: Synthetic oligonucleotide
  misc_feature 1..20: note = Target: SCN10A; (-) strand; PAM type: YTN; PAM sequence: CTT
  source 1..20: mol_type = other DNA
ctgtttttgtttgttttttt

SEQ ID NO: 46428 - DNA, 20 bp, synthetic construct
  misc_feature 1..20: note = Description of Artificial Sequence: Synthetic oligonucleotide
  misc_feature 1..20: note = Target: SCN10A; (-) strand; PAM type: YTN; PAM sequence: TTC
  source 1..20: mol_type = other DNA
cttctgtttttgtttgtttt

SEQ ID NO: 46429 - DNA, 20 bp, synthetic construct
  misc_feature 1..20: note = Description of Artificial Sequence: Synthetic oligonucleotide
  misc_feature 1..20: note = Target: SCN10A; (-) strand; PAM type: YTN; PAM sequence: CTC
  source 1..20: mol_type = other DNA
attccttctgtttttgtttg

SEQ ID NO: 46430 - DNA, 20 bp, synthetic construct
  misc_feature 1..20: note = Description of Artificial Sequence: Synthetic oligonucleotide
  misc_feature 1..20: note = Target: SCN10A; (-) strand; PAM type: YTN; PAM sequence: TTG
  source 1..20: mol_type = other DNA
atgactcattccttctgttt

SEQ ID NO: 46431 - DNA, 20 bp, synthetic construct
  misc_feature 1..20: note = Description of Artificial Sequence: Synthetic oligonucleotide
  misc_feature 1..20: note = Target: SCN10A; (-) strand; PAM type: YTN; PAM sequence: CTT
  source 1..20: mol_type = other DNA
gatgactcattccttctgtt

SEQ ID NO: 46432 - DNA, 20 bp, synthetic construct
  misc_feature 1..20: note = Description of Artificial Sequence: Synthetic oligonucleotide
  misc_feature 1..20: note = Target: SCN10A; (-) strand; PAM type: YTN; PAM sequence: CTC
  source 1..20: mol_type = other DNA
ttgatgactcattccttctg

SEQ ID NO: 46433 - DNA, 20 bp, synthetic construct
  misc_feature 1..20: note = Description of Artificial Sequence: Synthetic oligonucleotide
  misc_feature 1..20: note = Target: SCN10A; (-) strand; PAM type: YTN; PAM sequence: TTC
  source 1..20: mol_type = other DNA
actcttgatgactcattcct

SEQ ID NO: 46434 - DNA, 20 bp, synthetic construct
  misc_feature 1..20: note = Description of Artificial Sequence: Synthetic oligonucleotide
  misc_feature 1..20: note = Target: SCN10A; (-) strand; PAM type: YTN; PAM sequence: CTC
  source 1..20: mol_type = other DNA
attcactcttgatgactcat

SEQ ID NO: 46435 - DNA, 20 bp, synthetic construct
  misc_feature 1..20: note = Description of Artificial Sequence: Synthetic oligonucleotide
  misc_feature 1..20: note = Target: SCN10A; (-) strand; PAM type: YTN; PAM sequence: TTC
  source 1..20: mol_type = other DNA
aagatctcattcactcttga

SEQ ID NO: 46436 - DNA, 20 bp, synthetic construct
  misc_feature 1..20: note = Description of Artificial Sequence: Synthetic oligonucleotide
  misc_feature 1..20: note = Target: SCN10A; (-) strand; PAM type: YTN; PAM sequence: CTT
  source 1..20: mol_type = other DNA
caagatctcattcactcttg

SEQ ID NO: 46437 - DNA, 20 bp, synthetic construct
  misc_feature 1..20: note = Description of Artificial Sequence: Synthetic oligonucleotide
  misc_feature 1..20: note = Target: SCN10A; (-) strand; PAM type: YTN; PAM sequence: TTC
  source 1..20: mol_type = other DNA
ttcaagatctcattcactct

SEQ ID NO: 46438 - DNA, 20 bp, synthetic construct
  misc_feature 1..20: note = Description of Artificial Sequence: Synthetic oligonucleotide
  misc_feature 1..20: note = Target: SCN10A; (-) strand; PAM type: YTN; PAM sequence: TTT
  source 1..20: mol_type = other DNA
cttcaagatctcattcactc

SEQ ID NO: 46439 - DNA, 20 bp, synthetic construct
  misc_feature 1..20: note = Description of Artificial Sequence: Synthetic oligonucleotide
  misc_feature 1..20: note = Target: SCN10A; (-) strand; PAM type: YTN; PAM sequence: CTG
  source 1..20: mol_type = other DNA
tggtttcttcaagatctcat

SEQ ID NO: 46440 - DNA, 20 bp, synthetic construct
  misc_feature 1..20: note = Description of Artificial Sequence: Synthetic oligonucleotide
  misc_feature 1..20: note = Target: SCN10A; (-) strand; PAM type: YTN; PAM sequence: TTC
  source 1..20: mol_type = other DNA
cacatctgtggtttcttcaa

SEQ ID NO: 46441 - DNA, 20 bp, synthetic construct
  misc_feature 1..20: note = Description of Artificial Sequence: Synthetic oligonucleotide
  misc_feature 1..20: note = Target: SCN10A; (-) strand; PAM type: YTN; PAM sequence: TTT
  source 1..20: mol_type = other DNA
ccacatctgtggtttcttca

SEQ ID NO: 46442 - DNA, 20 bp, synthetic construct
  misc_feature 1..20: note = Description of Artificial Sequence: Synthetic oligonucleotide
  misc_feature 1..20: note = Target: SCN10A; (-) strand; PAM type: YTN; PAM sequence: CTA
  source 1..20: mol_type = other DNA
tttccacatctgtggtttct

SEQ ID NO: 46443 - DNA, 20 bp, synthetic construct
  misc_feature 1..20: note = Description of Artificial Sequence: Synthetic oligonucleotide
  misc_feature 1..20: note = Target: SCN10A; (-) strand; PAM type: YTN; PAM sequence: CTG
  source 1..20: mol_type = other DNA
aagaaatggaatgactattt

SEQ ID NO: 46444 - DNA, 20 bp, synthetic construct
  misc_feature 1..20: note = Description of Artificial Sequence: Synthetic oligonucleotide
  misc_feature 1..20: note = Target: SCN10A; (-) strand; PAM type: YTN; PAM sequence: CTA
  source 1..20: mol_type = other DNA
tcatctgaagaaatggaatg

SEQ ID NO: 46445 - DNA, 20 bp, synthetic construct
  misc_feature 1..20: note = Description of Artificial Sequence: Synthetic oligonucleotide
  misc_feature 1..20: note = Target: SCN10A; (-) strand; PAM type: YTN; PAM sequence: TTC
  source 1..20: mol_type = other DNA
tatcatctgaagaaatggaa

SEQ ID NO: 46446 - DNA, 20 bp, synthetic construct
  misc_feature 1..20: note = Description of Artificial Sequence: Synthetic oligonucleotide
  misc_feature 1..20: note = Target: SCN10A; (-) strand; PAM type: YTN; PAM sequence: CTA
  source 1..20: mol_type = other DNA
ataattctatcatctgaaga

SEQ ID NO: 46447 - DNA, 20 bp, synthetic construct
  misc_feature 1..20: note = Description of Artificial Sequence: Synthetic oligonucleotide
  misc_feature 1..20: note = Target: SCN10A; (-) strand; PAM type: YTN; PAM sequence: CTG
  source 1..20: mol_type = other DNA
actaataattctatcatctg

SEQ ID NO: 46448 - DNA, 20 bp, synthetic construct
  misc_feature 1..20: note = Description of Artificial Sequence: Synthetic oligonucleotide
  misc_feature 1..20: note = Target: SCN10A; (-) strand; PAM type: YTN; PAM sequence: CTC
  source 1..20: mol_type = other DNA
tgactaataattctatcatc

SEQ ID NO: 46449 - DNA, 20 bp, synthetic construct
  misc_feature 1..20: note = Description of Artificial Sequence: Synthetic oligonucleotide
  misc_feature 1..20: note = Target: SCN10A; (-) strand; PAM type: YTN; PAM sequence: TTA
  source 1..20: mol_type = other DNA
tctctgactaataattctat

SEQ ID NO: 46450 - DNA, 20 bp, synthetic construct
  misc_feature 1..20: note = Description of Artificial Sequence: Synthetic oligonucleotide
  misc_feature 1..20: note = Target: SCN10A; (-) strand; PAM type: YTN; PAM sequence: CTG
  source 1..20: mol_type = other DNA
ttatctctgactaataattc

SEQ ID NO: 46451 - DNA, 20 bp, synthetic construct
  misc_feature 1..20: note = Description of Artificial Sequence: Synthetic oligonucleotide
  misc_feature 1..20: note = Target: SCN10A; (-) strand; PAM type: YTN; PAM sequence: TTA
  source 1..20: mol_type = other DNA
tactgttatctctgactaat

SEQ ID NO: 46452 - DNA, 20 bp, synthetic construct
  misc_feature 1..20: note = Description of Artificial Sequence: Synthetic oligonucleotide
  misc_feature 1..20: note = Target: SCN10A; (-) strand; PAM type: YTN; PAM sequence: CTA
  source 1..20: mol_type = other DNA
attatactgttatctctgac

SEQ ID NO: 46453 - DNA, 20 bp, synthetic construct
  misc_feature 1..20: note = Description of Artificial Sequence: Synthetic oligonucleotide
  misc_feature 1..20: note = Target: SCN10A; (-) strand; PAM type: YTN; PAM sequence: TTA
  source 1..20: mol_type = other DNA
tatctaattatactgttatc

SEQ ID NO: 46454 - DNA, 20 bp, synthetic construct
  misc_feature 1..20: note = Description of Artificial Sequence: Synthetic oligonucleotide
  misc_feature 1..20: note = Target: SCN10A; (-) strand; PAM type: YTN; PAM sequence: TTA
  source 1..20: mol_type = other DNA
acatattatatctaattata

SEQ ID NO: 46455 - DNA, 20 bp, synthetic construct
  misc_feature 1..20: note = Description of Artificial Sequence: Synthetic oligonucleotide
  misc_feature 1..20: note = Target: SCN10A; (-) strand; PAM type: YTN; PAM sequence: TTT
  source 1..20: mol_type = other DNA
aacatattatatctaattat

SEQ ID NO: 46456 - DNA, 20 bp, synthetic construct
  misc_feature 1..20: note = Description of Artificial Sequence: Synthetic oligonucleotide
  misc_feature 1..20: note = Target: SCN10A; (-) strand; PAM type: YTN; PAM sequence: CTT
  source 1..20: mol_type = other DNA
taacatattatatctaatta

SEQ ID NO: 46457 - DNA, 20 bp, synthetic construct
  misc_feature 1..20: note = Description of Artificial Sequence: Synthetic oligonucleotide
  misc_feature 1..20: note = Target: SCN10A; (-) strand; PAM type: YTN; PAM sequence: TTC
  source 1..20: mol_type = other DNA
tttaacatattatatctaat

SEQ ID NO: 46458 - DNA, 20 bp, synthetic construct
  misc_feature 1..20: note = Description of Artificial Sequence: Synthetic oligonucleotide
  misc_feature 1..20: note = Target: SCN10A; (-) strand; PAM type: YTN; PAM sequence: TTT
  source 1..20: mol_type = other DNA
ctttaacatattatatctaa

SEQ ID NO: 46459 - DNA, 20 bp, synthetic construct
  misc_feature 1..20: note = Description of Artificial Sequence: Synthetic oligonucleotide
  misc_feature 1..20: note = Target: SCN10A; (-) strand; PAM type: YTN; PAM sequence: TTA
  source 1..20: mol_type = other DNA
tttctttaacatattatatc

SEQ ID NO: 46460 - DNA, 20 bp, synthetic construct
  misc_feature 1..20: note = Description of Artificial Sequence: Synthetic oligonucleotide
  misc_feature 1..20: note = Target: SCN10A; (-) strand; PAM type: YTN; PAM sequence: TTT
  source 1..20: mol_type = other DNA
atttctttaacatattatat

SEQ ID NO: 46461 - DNA, 20 bp, synthetic construct
  misc_feature 1..20: note = Description of Artificial Sequence: Synthetic oligonucleotide
  misc_feature 1..20: note = Target: SCN10A; (-) strand; PAM type: YTN; PAM sequence: TTT
  source 1..20: mol_type = other DNA
tatttctttaacatattata

SEQ ID NO: 46462 - DNA, 20 bp, synthetic construct
  misc_feature 1..20: note = Description of Artificial Sequence: Synthetic oligonucleotide
  misc_feature 1..20: note = Target: SCN10A; (-) strand; PAM type: YTN; PAM sequence: TTA
  source 1..20: mol_type = other DNA
ttttatttctttaacatatt

SEQ ID NO: 46463 - DNA, 20 bp, synthetic construct
  misc_feature 1..20: note = Description of Artificial Sequence: Synthetic oligonucleotide
  misc_feature 1..20: note = Target: SCN10A; (-) strand; PAM type: YTN; PAM sequence: TTA
  source 1..20: mol_type = other DNA
ttattttatttctttaacat

SEQ ID NO: 46464 - DNA, 20 bp, synthetic construct
  misc_feature 1..20: note = Description of Artificial Sequence: Synthetic oligonucleotide
  misc_feature 1..20: note = Target: SCN10A; (-) strand; PAM type: YTN; PAM sequence: TTC
  source 1..20: mol_type = other DNA
aagttattattttatttctt

SEQ ID NO: 46465 - DNA, 20 bp, synthetic construct
  misc_feature 1..20: note = Description of Artificial Sequence: Synthetic oligonucleotide
  misc_feature 1..20: note = Target: SCN10A; (-) strand; PAM type: YTN; PAM sequence: TTT
  source 1..20: mol_type = other DNA
caagttattattttatttct

SEQ ID NO: 46466 - DNA, 20 bp, synthetic construct
  misc_feature 1..20: note = Description of Artificial Sequence: Synthetic oligonucleotide
  misc_feature 1..20: note = Target: SCN10A; (-) strand; PAM type: YTN; PAM sequence: CTG
  source 1..20: mol_type = other DNA
cacatagtttcaagttatta

SEQ ID NO: 46467 - DNA, 20 bp, synthetic construct
  misc_feature 1..20: note = Description of Artificial Sequence: Synthetic oligonucleotide
  misc_feature 1..20: note = Target: SCN10A; (-) strand; PAM type: YTN; PAM sequence: CTC
  source 1..20: mol_type = other DNA
tgcacatagtttcaagttat

SEQ ID NO: 46468 - DNA, 20 bp, synthetic construct
  misc_feature 1..20: note = Description of Artificial Sequence: Synthetic oligonucleotide
  misc_feature 1..20: note = Target: SCN10A; (-) strand; PAM type: YTN; PAM sequence: TTC
  source 1..20: mol_type = other DNA
tctgcacatagtttcaagtt

SEQ ID NO: 46469 - DNA, 20 bp, synthetic construct
  misc_feature 1..20: note = Description of Artificial Sequence: Synthetic oligonucleotide
  misc_feature 1..20: note = Target: SCN10A; (-) strand; PAM type: YTN; PAM sequence: TTA
  source 1..20: mol_type = other DNA
ttctctgcacatagtttcaa

SEQ ID NO: 46470 - DNA, 20 bp, synthetic construct
  misc_feature 1..20: note = Description of Artificial Sequence: Synthetic oligonucleotide
  misc_feature 1..20: note = Target: SCN10A; (-) strand; PAM type: YTN; PAM sequence: TTT
  source 1..20: mol_type = other DNA
attctctgcacatagtttca

SEQ ID NO: 46471 - DNA, 20 bp, synthetic construct
  misc_feature 1..20: note = Description of Artificial Sequence: Synthetic oligonucleotide
  misc_feature 1..20: note = Target: SCN10A; (-) strand; PAM type: YTN; PAM sequence: TTT
  source 1..20: mol_type = other DNA
tattctctgcacatagtttc

SEQ ID NO: 46472 - DNA, 20 bp, synthetic construct
  misc_feature 1..20: note = Description of Artificial Sequence: Synthetic oligonucleotide
  misc_feature 1..20: note = Target: SCN10A; (-) strand; PAM type: YTN; PAM sequence: TTT
  source 1..20: mol_type = other DNA
ttattctctgcacatagttt

SEQ ID NO: 46473 - DNA, 20 bp, synthetic construct
  misc_feature 1..20: note = Description of Artificial Sequence: Synthetic oligonucleotide
  misc_feature 1..20: note = Target: SCN10A; (-) strand; PAM type: YTN; PAM sequence: TTT
  source 1..20: mol_type = other DNA
tttattctctgcacatagtt

SEQ ID NO: 46474 - DNA, 20 bp, synthetic construct
  misc_feature 1..20: note = Description of Artificial Sequence: Synthetic oligonucleotide
  misc_feature 1..20: note = Target: SCN10A; (-) strand; PAM type: YTN; PAM sequence: TTT
  source 1..20: mol_type = other DNA
ttttattctctgcacatagt

SEQ ID NO: 46475 - DNA, 20 bp, synthetic construct
  misc_feature 1..20: note = Description of Artificial Sequence: Synthetic oligonucleotide
  misc_feature 1..20: note = Target: SCN10A; (-) strand; PAM type: YTN; PAM sequence: CTA
  source 1..20: mol_type = other DNA
tagtttttttattctctgca

SEQ ID NO: 46476 - DNA, 20 bp, synthetic construct
  misc_feature 1..20: note = Description of Artificial Sequence: Synthetic oligonucleotide
  misc_feature 1..20: note = Target: SCN10A; (-) strand; PAM type: YTN; PAM sequence: TTA
  source 1..20: mol_type = other DNA
tctatagtttttttattctc

SEQ ID NO: 46477 - DNA, 20 bp, synthetic construct
  misc_feature 1..20: note = Description of Artificial Sequence: Synthetic oligonucleotide
  misc_feature 1..20: note = Target: SCN10A; (-) strand; PAM type: YTN; PAM sequence: TTG
  source 1..20: mol_type = other DNA
ttatctatagtttttttatt

SEQ ID NO: 46478 - DNA, 20 bp, synthetic construct
  misc_feature 1..20: note = Description of Artificial Sequence: Synthetic oligonucleotide
  misc_feature 1..20: note = Target: SCN10A; (-) strand; PAM type: YTN; PAM sequence: TTA
  source 1..20: mol_type = other DNA
ttgttatctatagttttttt

SEQ ID NO: 46479 - DNA, 20 bp, synthetic construct
  misc_feature 1..20: note = Description of Artificial Sequence: Synthetic oligonucleotide
  misc_feature 1..20: note = Target: SCN10A; (-) strand; PAM type: YTN; PAM sequence: TTG
  source 1..20: mol_type = other DNA
ttattgttatctatagtttt

SEQ ID NO: 46480 - DNA, 20 bp, synthetic construct
  misc_feature 1..20: note = Description of Artificial Sequence: Synthetic oligonucleotide
  misc_feature 1..20: note = Target: SCN10A; (-) strand; PAM type: YTN; PAM sequence: CTT
  source 1..20: mol_type = other DNA
gttattgttatctatagttt

SEQ ID NO: 46481 - DNA, 20 bp, synthetic construct
  misc_feature 1..20: note = Description of Artificial Sequence: Synthetic oligonucleotide
  misc_feature 1..20: note = Target: SCN10A; (-) strand; PAM type: YTN; PAM sequence: TTC
  source 1..20: mol_type = other DNA
acaacttgttattgttatct

SEQ ID NO: 46482 - DNA, 20 bp, synthetic construct
  misc_feature 1..20: note = Description of Artificial Sequence: Synthetic oligonucleotide
  misc_feature 1..20: note = Target: SCN10A; (-) strand; PAM type: YTN; PAM sequence: TTT
  source 1..20: mol_type = other DNA
cacaacttgttattgttatc

SEQ ID NO: 46483 - DNA, 20 bp, synthetic construct
  misc_feature 1..20: note = Description of Artificial Sequence: Synthetic oligonucleotide
  misc_feature 1..20: note = Target: SCN10A; (-) strand; PAM type: YTN; PAM sequence: TTT
  source 1..20: mol_type = other DNA
tcacaacttgttattgttat

SEQ ID NO: 46484 - DNA, 20 bp, synthetic construct
  misc_feature 1..20: note = Description of Artificial Sequence: Synthetic oligonucleotide
  misc_feature 1..20: note = Target: SCN10A; (-) strand; PAM type: YTN; PAM sequence: TTT
  source 1..20: mol_type = other DNA
ttcacaacttgttattgtta

SEQ ID NO: 46485 - DNA, 20 bp, synthetic construct
  misc_feature 1..20: note = Description of Artificial Sequence: Synthetic oligonucleotide
  misc_feature 1..20: note = Target: SCN10A; (-) strand; PAM type: YTN; PAM sequence: CTA
  source 1..20: mol_type = other DNA
agagtgtatttttcacaact

SEQ ID NO: 46486 - DNA, 20 bp, synthetic construct
  misc_feature 1..20: note = Description of Artificial Sequence: Synthetic oligonucleotide
  misc_feature 1..20: note = Target: SCN10A; (-) strand; PAM type: YTN; PAM sequence: TTC
  source 1..20: mol_type = other DNA
taagagtgtatttttcacaa

SEQ ID NO: 46487 - DNA, 20 bp, synthetic construct
  misc_feature 1..20: note = Description of Artificial Sequence: Synthetic oligonucleotide
  misc_feature 1..20: note = Target: SCN10A; (-) strand; PAM type: YTN; PAM sequence: TTT
  source 1..20: mol_type = other DNA
ctaagagtgtatttttcaca

SEQ ID NO: 46488 - DNA, 20 bp, synthetic construct
  misc_feature 1..20: note = Description of Artificial Sequence: Synthetic oligonucleotide
  misc_feature 1..20: note = Target: SCN10A; (-) strand; PAM type: YTN; PAM sequence: TTC
  source 1..20: mol_type = other DNA
atttctaagagtgtattttt

SEQ ID NO: 46489 - DNA, 20 bp, synthetic construct
  misc_feature 1..20: note = Description of Artificial Sequence: Synthetic oligonucleotide
  misc_feature 1..20: note = Target: SCN10A; (-) strand; PAM type: YTN; PAM sequence: TTT
  source 1..20: mol_type = other DNA
catttctaagagtgtatttt

SEQ ID NO: 46490 - DNA, 20 bp, synthetic construct
  misc_feature 1..20: note = Description of Artificial Sequence: Synthetic oligonucleotide
  misc_feature 1..20: note = Target: SCN10A; (-) strand; PAM type: YTN; PAM sequence: TTT
  source 1..20: mol_type = other DNA
tcatttctaagagtgtattt

SEQ ID NO: 46491 - DNA, 20 bp, synthetic construct
  misc_feature 1..20: note = Description of Artificial Sequence: Synthetic oligonucleotide
  misc_feature 1..20: note = Target: SCN10A; (-) strand; PAM type: YTN; PAM sequence: TTT
  source 1..20: mol_type = other DNA
ttcatttctaagagtgtatt

SEQ ID NO: 46492 - DNA, 20 bp, synthetic construct
  misc_feature 1..20: note = Description of Artificial Sequence: Synthetic oligonucleotide
  misc_feature 1..20: note = Target: SCN10A; (-) strand; PAM type: YTN; PAM sequence: TTA
  source 1..20: mol_type = other DNA
tatttttcatttctaagagt

SEQ ID NO: 46493 - DNA, 20 bp, synthetic construct
  misc_feature 1..20: note = Description of Artificial Sequence: Synthetic oligonucleotide
  misc_feature 1..20: note = Target: SCN10A; (-) strand; PAM type: YTN; PAM sequence: TTA
  source 1..20: mol_type = other DNA
agtattatatttttcatttc

SEQ ID NO: 46494 - DNA, 20 bp, synthetic construct
  misc_feature 1..20: note = Description of Artificial Sequence: Synthetic oligonucleotide
  misc_feature 1..20: note = Target: SCN10A; (-) strand; PAM type: YTN; PAM sequence: TTT
  source 1..20: mol_type = other DNA
aagtattatatttttcattt

SEQ ID NO: 46495 - DNA, 20 bp, synthetic construct
  misc_feature 1..20: note = Description of Artificial Sequence: Synthetic oligonucleotide
  misc_feature 1..20: note = Target: SCN10A; (-) strand; PAM type: YTN; PAM sequence: TTT
  source 1..20: mol_type = other DNA
taagtattatatttttcatt

SEQ ID NO: 46496 - DNA, 20 bp, synthetic construct
  misc_feature 1..20: note = Description of Artificial Sequence: Synthetic oligonucleotide
  misc_feature 1..20: note = Target: SCN10A; (-) strand; PAM type: YTN; PAM sequence: TTA
  source 1..20: mol_type = other DNA
attttaagtattatattttt

SEQ ID NO: 46497 - DNA, 20 bp, synthetic construct
  misc_feature 1..20: note = Description of Artificial Sequence: Synthetic oligonucleotide
  misc_feature 1..20: note = Target: SCN10A; (-) strand; PAM type: YTN; PAM sequence: TTT
  source 1..20: mol_type = other DNA
aattttaagtattatatttt

SEQ ID NO: 46498 - DNA, 20 bp, synthetic construct
  misc_feature 1..20: note = Description of Artificial Sequence: Synthetic oligonucleotide
  misc_feature 1..20: note = Target: SCN10A; (-) strand; PAM type: YTN; PAM sequence: TTT
  source 1..20: mol_type = other DNA
taattttaagtattatattt

SEQ ID NO: 46499 - DNA, 20 bp, synthetic construct
  misc_feature 1..20: note = Description of Artificial Sequence: Synthetic oligonucleotide
  misc_feature 1..20: note = Target: SCN10A; (-) strand; PAM type: YTN; PAM sequence: TTT
  source 1..20: mol_type = other DNA
ttaattttaagtattatatt

SEQ ID NO: 46500 - DNA, 20 bp, synthetic construct
  misc_feature 1..20: note = Description of Artificial Sequence: Synthetic oligonucleotide
  misc_feature 1..20: note = Target: SCN10A; (-) strand; PAM type: YTN; PAM sequence: TTC
  source 1..20: mol_type = other DNA
ataatatttttaattttaag

SEQ ID NO: 46501 - DNA, 20 bp, synthetic construct
  misc_feature 1..20: note = Description of Artificial Sequence: Synthetic oligonucleotide
  misc_feature 1..20: note = Target: SCN10A; (-) strand; PAM type: YTN; PAM sequence: CTT
  source 1..20: mol_type = other DNA
cataatatttttaattttaa

SEQ ID NO: 46502 - DNA, 20 bp, synthetic construct
  misc_feature 1..20: note = Description of Artificial Sequence: Synthetic oligonucleotide
  misc_feature 1..20: note = Target: SCN10A; (-) strand; PAM type: YTN; PAM sequence: TTC
  source 1..20: mol_type = other DNA
ttcataatatttttaatttt

SEQ ID NO: 46503 - DNA, 20 bp, synthetic construct
  misc_feature 1..20: note = Description of Artificial Sequence: Synthetic oligonucleotide
  misc_feature 1..20: note = Target: SCN10A; (-) strand; PAM type: YTN; PAM sequence: CTT
  source 1..20: mol_type = other DNA
cttcataatatttttaattt

SEQ ID NO: 46504 - DNA, 20 bp, synthetic construct
  misc_feature 1..20: note = Description of Artificial Sequence: Synthetic oligonucleotide
  misc_feature 1..20: note = Target: SCN10A; (-) strand; PAM type: YTN; PAM sequence: CTG
  source 1..20: mol_type = other DNA
atgcaaaccttcttcataat

SEQ ID NO: 46505 - DNA, 20 bp, synthetic construct
  misc_feature 1..20: note = Description of Artificial Sequence: Synthetic oligonucleotide
  misc_feature 1..20: note = Target: SCN10A; (-) strand; PAM type: YTN; PAM sequence: CTG
  source 1..20: mol_type = other DNA
tgtcaaatctgatgcaaacc

SEQ ID NO: 46506 - DNA, 20 bp, synthetic construct
  misc_feature 1..20: note = Description of Artificial Sequence: Synthetic oligonucleotide
  misc_feature 1..20: note = Target: SCN10A; (-) strand; PAM type: YTN; PAM sequence: CTC
  source 1..20: mol_type = other DNA
ccaaactgtgtcaaatctga

SEQ ID NO: 46507 - DNA, 20 bp, synthetic construct
  misc_feature 1..20: note = Description of Artificial Sequence: Synthetic oligonucleotide
  misc_feature 1..20: note = Target: SCN10A; (-) strand; PAM type: YTN; PAM sequence: CTC
  source 1..20: mol_type = other DNA
tcccaaactgtgtcaaatct

SEQ ID NO: 46508 - DNA, 20 bp, synthetic construct
  misc_feature 1..20: note = Description of Artificial Sequence: Synthetic oligonucleotide
  misc_feature 1..20: note = Target: SCN10A; (-) strand; PAM type: YTN; PAM sequence: TTC
  source 1..20: mol_type = other DNA
tctcccaaactgtgtcaaat

SEQ ID NO: 46509 - DNA, 20 bp, synthetic construct
  misc_feature 1..20: note = Description of Artificial Sequence: Synthetic oligonucleotide
  misc_feature 1..20: note = Target: SCN10A; (-) strand; PAM type: YTN; PAM sequence: CTA
  source 1..20: mol_type = other DNA
attctctcccaaactgtgtc

SEQ ID NO: 46510 - DNA, 20 bp, synthetic construct
  misc_feature 1..20: note = Description of Artificial Sequence: Synthetic oligonucleotide
  misc_feature 1..20: note = Target: SCN10A; (-) strand; PAM type: YTN; PAM sequence: TTC
  source 1..20: mol_type = other DNA
actaattctctcccaaactg

SEQ ID NO: 46511 - DNA, 20 bp, synthetic construct
  misc_feature 1..20: note = Description of Artificial Sequence: Synthetic oligonucleotide
  misc_feature 1..20: note = Target: SCN10A; (-) strand; PAM type: YTN; PAM sequence: CTC
  source 1..20: mol_type = other DNA
agttcactaattctctccca

SEQ ID NO: 46512 - DNA, 20 bp, synthetic construct
  misc_feature 1..20: note = Description of Artificial Sequence: Synthetic oligonucleotide
  misc_feature 1..20: note = Target: SCN10A; (-) strand; PAM type: YTN; PAM sequence: CTG
  source 1..20: mol_type = other DNA
atatatcctcagttcactaa

SEQ ID NO: 46513 - DNA, 20 bp, synthetic construct
  misc_feature 1..20: note = Description of Artificial Sequence: Synthetic oligonucleotide
  misc_feature 1..20: note = Target: SCN10A; (-) strand; PAM type: YTN; PAM sequence: TTC
  source 1..20: mol_type = other DNA
tgatatatcctcagttcact

SEQ ID NO: 46514 - DNA, 20 bp, synthetic construct
  misc_feature 1..20: note = Description of Artificial Sequence: Synthetic oligonucleotide
  misc_feature 1..20: note = Target: SCN10A; (-) strand; PAM type: YTN; PAM sequence: TTA
  source 1..20: mol_type = other DNA
ttctgatatatcctcagttc

SEQ ID NO: 46515 - DNA, 20 bp, synthetic construct
  misc_feature 1..20: note = Description of Artificial Sequence: Synthetic oligonucleotide
  misc_feature 1..20: note = Target: SCN10A; (-) strand; PAM type: YTN; PAM sequence: TTT
  source 1..20: mol_type = other DNA
attctgatatatcctcagtt

SEQ ID NO: 46516 - DNA, 20 bp, synthetic construct
  misc_feature 1..20: note = Description of Artificial Sequence: Synthetic oligonucleotide
  misc_feature 1..20: note = Target: SCN10A; (-) strand; PAM type: YTN; PAM sequence: CTG
  source 1..20: mol_type = other DNA
aataatttattctgatatat

SEQ ID NO: 46517 - DNA, 20 bp, synthetic construct
  misc_feature 1..20: note = Description of Artificial Sequence: Synthetic oligonucleotide
  misc_feature 1..20: note = Target: SCN10A; (-) strand; PAM type: YTN; PAM sequence: TTC
  source 1..20: mol_type = other DNA
tgaataatttattctgatat

SEQ ID NO: 46518 - DNA, 20 bp, synthetic construct
  misc_feature 1..20: note = Description of Artificial Sequence: Synthetic oligonucleotide
  misc_feature 1..20: note = Target: SCN10A; (-) strand; PAM type: YTN; PAM sequence: TTA
  source 1..20: mol_type = other DNA
cattctgaataatttattct

SEQ ID NO: 46519 - DNA, 20 bp, synthetic construct
  misc_feature 1..20: note = Description of Artificial Sequence: Synthetic oligonucleotide
  misc_feature 1..20: note = Target: SCN10A; (-) strand; PAM type: YTN; PAM sequence: CTA
  source 1..20: mol_type = other DNA
ggttacattctgaataattt

SEQ ID NO: 46520 - DNA, 20 bp, synthetic construct
  misc_feature 1..20: note = Description of Artificial Sequence: Synthetic oligonucleotide
  misc_feature 1..20: note = Target: SCN10A; (-) strand; PAM type: YTN; PAM sequence: CTC
  source 1..20: mol_type = other DNA
taggttacattctgaataat

SEQ ID NO: 46521 - DNA, 20 bp, synthetic construct
  misc_feature 1..20: note = Description of Artificial Sequence: Synthetic oligonucleotide
  misc_feature 1..20: note = Target: SCN10A; (-) strand; PAM type: YTN; PAM sequence: CTC
  source 1..20: mol_type = other DNA
tctaggttacattctgaata

SEQ ID NO: 46522 - DNA, 20 bp, synthetic construct
  misc_feature 1..20: note = Description of Artificial Sequence: Synthetic oligonucleotide
  misc_feature 1..20: note = Target: SCN10A; (-) strand; PAM type: YTN; PAM sequence: TTA
  source 1..20: mol_type = other DNA
tgtctctctaggttacattc

SEQ ID NO: 46523 - DNA, 20 bp, synthetic construct
  misc_feature 1..20: note = Description of Artificial Sequence: Synthetic oligonucleotide
  misc_feature 1..20: note = Target: SCN10A; (-) strand; PAM type: YTN; PAM sequence: CTT
  source 1..20: mol_type = other DNA
atgtctctctaggttacatt

SEQ ID NO: 46524 - DNA, 20 bp, synthetic construct
  misc_feature 1..20: note = Description of Artificial Sequence: Synthetic oligonucleotide
  misc_feature 1..20: note = Target: SCN10A; (-) strand; PAM type: YTN; PAM sequence: TTC
  source 1..20: mol_type = other DNA
atcttatgtctctctaggtt

SEQ ID NO: 46525 - DNA, 20 bp, synthetic construct
  misc_feature 1..20: note = Description of Artificial Sequence: Synthetic oligonucleotide
  misc_feature 1..20: note = Target: SCN10A; (-) strand; PAM type: YTN; PAM sequence: TTT
  source 1..20: mol_type = other DNA
catcttatgtctctctaggt

SEQ ID NO: 46526 - DNA, 20 bp, synthetic construct
  misc_feature 1..20: note = Description of Artificial Sequence: Synthetic oligonucleotide
  misc_feature 1..20: note = Target: SCN10A; (-) strand; PAM type: YTN; PAM sequence: TTT
  source 1..20: mol_type = other DNA
tcatcttatgtctctctagg

SEQ ID NO: 46527 - DNA, 20 bp, synthetic construct
  misc_feature 1..20: note = Description of Artificial Sequence: Synthetic oligonucleotide
  misc_feature 1..20: note = Target: SCN10A; (-) strand; PAM type: YTN; PAM sequence: TTT
  source 1..20: mol_type = other DNA
ttcatcttatgtctctctag

SEQ ID NO: 46528 - DNA, 20 bp, synthetic construct
  misc_feature 1..20: note = Description of Artificial Sequence: Synthetic oligonucleotide
  misc_feature 1..20: note = Target: SCN10A; (-) strand; PAM type: YTN; PAM sequence: TTA
  source 1..20: mol_type = other DNA
tttttcatcttatgtctctc

SEQ ID NO: 46529 - DNA, 20 bp, synthetic construct
  misc_feature 1..20: note = Description of Artificial Sequence: Synthetic oligonucleotide
  misc_feature 1..20: note = Target: SCN10A; (-) strand; PAM type: YTN; PAM sequence: TTG
  source 1..20: mol_type = other DNA
ttatttttcatcttatgtct

SEQ ID NO: 46530 - DNA, 20 bp, synthetic construct
  misc_feature 1..20: note = Description of Artificial Sequence: Synthetic oligonucleotide
  misc_feature 1..20: note = Target: SCN10A; (-) strand; PAM type: YTN; PAM sequence: TTT
  source 1..20: mol_type = other DNA
gttatttttcatcttatgtc

SEQ ID NO: 46531 - DNA, 20 bp, synthetic construct
  misc_feature 1..20: note = Description of Artificial Sequence: Synthetic oligonucleotide
  misc_feature 1..20: note = Target: SCN10A; (-) strand; PAM type: YTN; PAM sequence: TTT
  source 1..20: mol_type = other DNA
tgttatttttcatcttatgt

SEQ ID NO: 46532 - DNA, 20 bp, synthetic construct
  misc_feature 1..20: note = Description of Artificial Sequence: Synthetic oligonucleotide
  misc_feature 1..20: note = Target: SCN10A; (-) strand; PAM type: YTN; PAM sequence: CTA
  source 1..20: mol_type = other DNA
ttttgttatttttcatctta

SEQ ID NO: 46533 - DNA, 20 bp, synthetic construct
  misc_feature 1..20: note = Description of Artificial Sequence: Synthetic oligonucleotide
  misc_feature 1..20: note = Target: SCN10A; (-) strand; PAM type: YTN; PAM sequence: TTA
  source 1..20: mol_type = other DNA
cactattttgttatttttca

SEQ ID NO: 46534 - DNA, 20 bp, synthetic construct
  misc_feature 1..20: note = Description of Artificial Sequence: Synthetic oligonucleotide
  misc_feature 1..20: note = Target: SCN10A; (-) strand; PAM type: YTN; PAM sequence: CTT
  source 1..20: mol_type = other DNA
acactattttgttatttttc

SEQ ID NO: 46535 - DNA, 20 bp, synthetic construct
  misc_feature 1..20: note = Description of Artificial Sequence: Synthetic oligonucleotide
  misc_feature 1..20: note = Target: SCN10A; (-) strand; PAM type: YTN; PAM sequence: CTC
  source 1..20: mol_type = other DNA
ttacactattttgttatttt

SEQ ID NO: 46536 - DNA, 20 bp, synthetic construct
  misc_feature 1..20: note = Description of Artificial Sequence: Synthetic oligonucleotide
  misc_feature 1..20: note = Target: SCN10A; (-) strand; PAM type: YTN; PAM sequence: CTA
  source 1..20: mol_type = other DNA
tgtctcttacactattttgt

SEQ ID NO: 46537 - DNA, 20 bp, synthetic construct
  misc_feature 1..20: note = Description of Artificial Sequence: Synthetic oligonucleotide
  misc_feature 1..20: note = Target: SCN10A; (-) strand; PAM type: YTN; PAM sequence: CTC
  source 1..20: mol_type = other DNA
tatgtctcttacactatttt

SEQ ID NO: 46538 - DNA, 20 bp, synthetic construct
  misc_feature 1..20: note = Description of Artificial Sequence: Synthetic oligonucleotide
  misc_feature 1..20: note = Target: SCN10A; (-) strand; PAM type: YTN; PAM sequence: CTA
  source 1..20: mol_type = other DNA
tcctctatgtctcttacact

SEQ ID NO: 46539 - DNA, 20 bp, synthetic construct
  misc_feature 1..20: note = Description of Artificial Sequence: Synthetic oligonucleotide
  misc_feature 1..20: note = Target: SCN10A; (-) strand; PAM type: YTN; PAM sequence: TTC
  source 1..20: mol_type = other DNA
tatcctctatgtctcttaca

SEQ ID NO: 46540 - DNA, 20 bp, synthetic construct
  misc_feature 1..20: note = Description of Artificial Sequence: Synthetic oligonucleotide
  misc_feature 1..20: note = Target: SCN10A; (-) strand; PAM type: YTN; PAM sequence: CTC
  source 1..20: mol_type = other DNA
attctatcctctatgtctct

SEQ ID NO: 46541 - DNA, 20 bp, synthetic construct
  misc_feature 1..20: note = Description of Artificial Sequence: Synthetic oligonucleotide
  misc_feature 1..20: note = Target: SCN10A; (-) strand; PAM type: YTN; PAM sequence: CTC
  source 1..20: mol_type = other DNA
tcattctatcctctatgtct

SEQ ID NO: 46542 - DNA, 20 bp, synthetic construct
  misc_feature 1..20: note = Description of Artificial Sequence: Synthetic oligonucleotide
  misc_feature 1..20: note = Target: SCN10A; (-) strand; PAM type: YTN; PAM sequence: CTC
  source 1..20: mol_type = other DNA
tctcattctatcctctatgt

SEQ ID NO: 46543 - DNA, 20 bp, synthetic construct
  misc_feature 1..20: note = Description of Artificial Sequence: Synthetic oligonucleotide
  misc_feature 1..20: note = Target: SCN10A; (-) strand; PAM type: YTN; PAM sequence: TTA
  source 1..20: mol_type = other DNA
aactctctcattctatcctc

SEQ ID NO: 46544 - DNA, 20 bp, synthetic construct
  misc_feature 1..20: note = Description of Artificial Sequence: Synthetic oligonucleotide
  misc_feature 1..20: note = Target: SCN10A; (-) strand; PAM type: YTN; PAM sequence: TTA
  source 1..20: mol_type = other DNA
gatagatgttaaactctctc

SEQ ID NO: 46545 - DNA, 20 bp, synthetic construct
  misc_feature 1..20: note = Description of Artificial Sequence: Synthetic oligonucleotide
  misc_feature 1..20: note = Target: SCN10A; (-) strand; PAM type: YTN; PAM sequence: TTG
  source 1..20: mol_type = other DNA
gttagatagatgttaaactc

SEQ ID NO: 46546 - DNA, 20 bp, synthetic construct
  misc_feature 1..20: note = Description of Artificial Sequence: Synthetic oligonucleotide
  misc_feature 1..20: note = Target: SCN10A; (-) strand; PAM type: YTN; PAM sequence: TTT
  source 1..20: mol_type = other DNA
ggttagatagatgttaaact

SEQ ID NO: 46547 - DNA, 20 bp, synthetic construct
  misc_feature 1..20: note = Description of Artificial Sequence: Synthetic oligonucleotide
  misc_feature 1..20: note = Target: SCN10A; (-) strand; PAM type: YTN; PAM sequence: CTT
  source 1..20: mol_type = other DNA
tggttagatagatgttaaac

SEQ ID NO: 46548 - DNA, 20 bp, synthetic construct
  misc_feature 1..20: note = Description of Artificial Sequence: Synthetic oligonucleotide
  misc_feature 1..20: note = Target: SCN10A; (-) strand; PAM type: YTN; PAM sequence: CTG
  source 1..20: mol_type = other DNA
gactttggttagatagatgt

SEQ ID NO: 46549 - DNA, 20 bp, synthetic construct
  misc_feature 1..20: note = Description of Artificial Sequence: Synthetic oligonucleotide
  misc_feature 1..20: note = Target: SCN10A; (-) strand; PAM type: YTN; PAM sequence: TTC
  source 1..20: mol_type = other DNA
tggactttggttagatagat

SEQ ID NO: 46550 - DNA, 20 bp, synthetic construct
  misc_feature 1..20: note = Description of Artificial Sequence: Synthetic oligonucleotide
  misc_feature 1..20: note = Target: SCN10A; (-) strand; PAM type: YTN; PAM sequence: CTT
  source 1..20: mol_type = other DNA
ctggactttggttagataga

SEQ ID NO: 46551 - DNA, 20 bp, synthetic construct
  misc_feature 1..20: note = Description of Artificial Sequence: Synthetic oligonucleotide
  misc_feature 1..20: note = Target: SCN10A; (-) strand; PAM type: YTN; PAM sequence: CTC
  source 1..20: mol_type = other DNA
cttctggactttggttagat

SEQ ID NO: 46552 - DNA, 20 bp, synthetic construct
  misc_feature 1..20: note = Description of Artificial Sequence: Synthetic oligonucleotide
  misc_feature 1..20: note = Target: SCN10A; (-) strand; PAM type: YTN; PAM sequence: TTC
  source 1..20: mol_type = other DNA
tccttctggactttggttag

SEQ ID NO: 46553 - DNA, 20 bp, synthetic construct
  misc_feature 1..20: note = Description of Artificial Sequence: Synthetic oligonucleotide
  misc_feature 1..20: note = Target: SCN10A; (-) strand; PAM type: YTN; PAM sequence: TTT
  source 1..20: mol_type = other DNA
ctccttctggactttggtta

SEQ ID NO: 46554 - DNA, 20 bp, synthetic construct
  misc_feature 1..20: note = Description of Artificial Sequence: Synthetic oligonucleotide
  misc_feature 1..20: note = Target: SCN10A; (-) strand; PAM type: YTN; PAM sequence: TTT
  source 1..20: mol_type = other DNA
tctccttctggactttggtt

SEQ ID NO: 46555 - DNA, 20 bp, synthetic construct
  misc_feature 1..20: note = Description of Artificial Sequence: Synthetic oligonucleotide
  misc_feature 1..20: note = Target: SCN10A; (-) strand; PAM type: YTN; PAM sequence: TTT
  source 1..20: mol_type = other DNA
ttctccttctggactttggt

SEQ ID NO: 46556 - DNA, 20 bp, synthetic construct
  misc_feature 1..20: note = Description of Artificial Sequence: Synthetic oligonucleotide
  misc_feature 1..20: note = Target: SCN10A; (-) strand; PAM type: YTN; PAM sequence: TTT
  source 1..20: mol_type = other DNA
tttctccttctggactttgg

SEQ ID NO: 46557 - DNA, 20 bp, synthetic construct
  misc_feature 1..20: note = Description of Artificial Sequence: Synthetic oligonucleotide
  misc_feature 1..20: note = Target: SCN10A; (-) strand; PAM type: YTN; PAM sequence: CTA
  source 1..20: mol_type = other DNA
ttttttctccttctggactt

SEQ ID NO: 46558 - DNA, 20 bp, synthetic construct
  misc_feature 1..20: note = Description of Artificial Sequence: Synthetic oligonucleotide
  misc_feature 1..20: note = Target: SCN10A; (-) strand; PAM type: YTN; PAM sequence: TTC
  source 1..20: mol_type = other DNA
tattttttctccttctggac

SEQ ID NO: 46559 - DNA, 20 bp, synthetic construct
  misc_feature 1..20: note = Description of Artificial Sequence: Synthetic oligonucleotide
  misc_feature 1..20: note = Target: SCN10A; (-) strand; PAM type: YTN; PAM sequence: CTC
  source 1..20: mol_type = other DNA
cacgccattctattttttct

SEQ ID NO: 46560 - DNA, 20 bp, synthetic construct
  misc_feature 1..20: note = Description of Artificial Sequence: Synthetic oligonucleotide
  misc_feature 1..20: note = Target: SCN10A; (-) strand; PAM type: YTN; PAM sequence: TTC
  source 1..20: mol_type = other DNA
ccagacatgatgtgggcagt

SEQ ID NO: 46561 - DNA, 20 bp, synthetic construct
  misc_feature 1..20: note = Description of Artificial Sequence: Synthetic oligonucleotide
  misc_feature 1..20: note = Target: SCN10A; (-) strand; PAM type: YTN; PAM sequence: CTG
  source 1..20: mol_type = other DNA
gaaagttcccagacatgatg

SEQ ID NO: 46562 - DNA, 20 bp, synthetic construct
  misc_feature 1..20: note = Description of Artificial Sequence: Synthetic oligonucleotide
  misc_feature 1..20: note = Target: SCN10A; (-) strand; PAM type: YTN; PAM sequence: TTC
  source 1..20: mol_type = other DNA
tggaaagttcccagacatga

SEQ ID NO: 46563 - DNA, 20 bp, synthetic construct
  misc_feature 1..20: note = Description of Artificial Sequence: Synthetic oligonucleotide
  misc_feature 1..20: note = Target: SCN10A; (-) strand; PAM type: YTN; PAM sequence: TTC
  source 1..20: mol_type = other DNA
aattctggaaagttcccaga

SEQ ID NO: 46564 - DNA, 20 bp, synthetic construct
  misc_feature 1..20: note = Description of Artificial Sequence: Synthetic oligonucleotide
  misc_feature 1..20: note = Target: SCN10A; (-) strand; PAM type: YTN; PAM sequence: CTT
  source 1..20: mol_type = other DNA
caattctggaaagttcccag

SEQ ID NO: 46565 - DNA, 20 bp, synthetic construct
  misc_feature 1..20: note = Description of Artificial Sequence: Synthetic oligonucleotide
  misc_feature 1..20: note = Target: SCN10A; (-) strand; PAM type: YTN; PAM sequence: TTC
  source 1..20: mol_type = other DNA
ttcaattctggaaagttccc

SEQ ID NO: 46566 - DNA, 20 bp, synthetic construct
  misc_feature 1..20: note = Description of Artificial Sequence: Synthetic oligonucleotide
  misc_feature 1..20: note = Target: SCN10A; (-) strand; PAM type: YTN; PAM sequence: TTT
  source 1..20: mol_type = other DNA
cttcaattctggaaagttcc

SEQ ID NO: 46567 - DNA, 20 bp, synthetic construct
  misc_feature 1..20: note = Description of Artificial Sequence: Synthetic oligonucleotide
  misc_feature 1..20: note = Target: SCN10A; (-) strand; PAM type: YTN; PAM sequence: TTT
  source 1..20: mol_type = other DNA
tcttcaattctggaaagttc

SEQ ID NO: 46568 - DNA, 20 bp, synthetic construct
  misc_feature 1..20: note = Description of Artificial Sequence: Synthetic oligonucleotide
  misc_feature 1..20: note = Target: SCN10A; (-) strand; PAM type: YTN; PAM sequence: TTG
  source 1..20: mol_type = other DNA
taattttcttcaattctgga

SEQ ID NO: 46569 - DNA, 20 bp, synthetic construct
  misc_feature 1..20: note = Description of Artificial Sequence: Synthetic oligonucleotide
  misc_feature 1..20: note = Target: SCN10A; (-) strand; PAM type: YTN; PAM sequence: TTT
  source 1..20: mol_type = other DNA
gtaattttcttcaattctgg

SEQ ID NO: 46570 - DNA, 20 bp, synthetic construct
  misc_feature 1..20: note = Description of Artificial Sequence: Synthetic oligonucleotide
  misc_feature 1..20: note = Target: SCN10A; (-) strand; PAM type: YTN; PAM sequence: TTT
  source 1..20: mol_type = other DNA
tgtaattttcttcaattctg

SEQ ID NO: 46571 - DNA, 20 bp, synthetic construct
  misc_feature 1..20: note = Description of Artificial Sequence: Synthetic oligonucleotide
  misc_feature 1..20: note = Target: SCN10A; (-) strand; PAM type: YTN; PAM sequence: TTA
  source 1..20: mol_type = other DNA
gttttgtaattttcttcaat

SEQ ID NO: 46572 - DNA, 20 bp, synthetic construct
  misc_feature 1..20: note = Description of Artificial Sequence: Synthetic oligonucleotide
  misc_feature 1..20: note = Target: SCN10A; (-) strand; PAM type: YTN; PAM sequence: TTT
  source 1..20: mol_type = other DNA
agttttgtaattttcttcaa

SEQ ID NO: 46573 - DNA, 20 bp, synthetic construct
  misc_feature 1..20: note = Description of Artificial Sequence: Synthetic oligonucleotide
  misc_feature 1..20: note = Target: SCN10A; (-) strand; PAM type: YTN; PAM sequence: CTT
  source 1..20: mol_type = other DNA
tagttttgtaattttcttca

SEQ ID NO: 46574 - DNA, 20 bp, synthetic construct
  misc_feature 1..20: note = Description of Artificial Sequence: Synthetic oligonucleotide
  misc_feature 1..20: note = Target: SCN10A; (-) strand; PAM type: YTN; PAM sequence: TTG
  source 1..20: mol_type = other DNA
aatctttagttttgtaattt

SEQ ID NO: 46575 - DNA, 20 bp, synthetic construct
  misc_feature 1..20: note = Description of Artificial Sequence: Synthetic oligonucleotide
  misc_feature 1..20: note = Target: SCN10A; (-) strand; PAM type: YTN; PAM sequence: CTT
  source 1..20: mol_type = other DNA
gaatctttagttttgtaatt

SEQ ID NO: 46576 - DNA, 20 bp, synthetic construct
  misc_feature 1..20: note = Description of Artificial Sequence: Synthetic oligonucleotide
  misc_feature 1..20: note = Target: SCN10A; (-) strand; PAM type: YTN; PAM sequence: TTC
  source 1..20: mol_type = other DNA
ttgaatctttagttttgtaa

SEQ ID NO: 46577 - DNA, 20 bp, synthetic construct
  misc_feature 1..20: note = Description of Artificial Sequence: Synthetic oligonucleotide
  misc_feature 1..20: note = Target: SCN10A; (-) strand; PAM type: YTN; PAM sequence: CTT
  source 1..20: mol_type = other DNA
cttgaatctttagttttgta

SEQ ID NO: 46578 - DNA, 20 bp, synthetic construct
  misc_feature 1..20: note = Description of Artificial Sequence: Synthetic oligonucleotide
  misc_feature 1..20: note = Target: SCN10A; (-) strand; PAM type: YTN; PAM sequence: CTG
  source 1..20: mol_type = other DNA
acttcttgaatctttagttt

SEQ ID NO: 46579 - DNA, 20 bp, synthetic construct
  misc_feature 1..20: note = Description of Artificial Sequence: Synthetic oligonucleotide
  misc_feature 1..20: note = Target: SCN10A; (-) strand; PAM type: YTN; PAM sequence: TTA
  source 1..20: mol_type = other DNA
agatatactgacttcttgaa

SEQ ID NO: 46580 - DNA, 20 bp, synthetic construct
  misc_feature 1..20: note = Description of Artificial Sequence: Synthetic oligonucleotide
  misc_feature 1..20: note = Target: SCN10A; (-) strand; PAM type: YTN; PAM sequence: CTT
  source 1..20: mol_type = other DNA
aagatatactgacttcttga

SEQ ID NO: 46581 - DNA, 20 bp, synthetic construct
  misc_feature 1..20: note = Description of Artificial Sequence: Synthetic oligonucleotide
  misc_feature 1..20: note = Target: SCN10A; (-) strand; PAM type: YTN; PAM sequence: TTA
  source 1..20: mol_type = other DNA
taatgcttaagatatactga

SEQ ID NO: 46582 - DNA, 20 bp, synthetic construct
  misc_feature 1..20: note = Description of Artificial Sequence: Synthetic oligonucleotide
  misc_feature 1..20: note = Target: SCN10A; (-) strand; PAM type: YTN; PAM sequence: TTT
  source 1..20: mol_type = other DNA
ataatgcttaagatatactg

SEQ ID NO: 46583 - DNA, 20 bp, synthetic construct
  misc_feature 1..20: note = Description of Artificial Sequence: Synthetic oligonucleotide
  misc_feature 1..20: note = Target: SCN10A; (-) strand; PAM type: YTN; PAM sequence: TTC
  source 1..20: mol_type = other DNA
catttataatgcttaagata

SEQ ID NO: 46584 - DNA, 20 bp, synthetic construct
  misc_feature 1..20: note = Description of Artificial Sequence: Synthetic oligonucleotide
  misc_feature 1..20: note = Target: SCN10A; (-) strand; PAM type: YTN; PAM sequence: TTT
  source 1..20: mol_type = other DNA
ccatttataatgcttaagat

SEQ ID NO: 46585 - DNA, 20 bp, synthetic construct
  misc_feature 1..20: note = Description of Artificial Sequence: Synthetic oligonucleotide
  misc_feature 1..20: note = Target: SCN10A; (-) strand; PAM type: YTN; PAM sequence: CTT
  source 1..20: mol_type = other DNA
tccatttataatgcttaaga

SEQ ID NO: 46586 - DNA, 20 bp, synthetic construct
  misc_feature 1..20: note = Description of Artificial Sequence: Synthetic oligonucleotide
  misc_feature 1..20: note = Target: SCN10A; (-) strand; PAM type: YTN; PAM sequence: TTC
  source 1..20: mol_type = other DNA
tttccatttataatgcttaa

SEQ ID NO: 46587 - DNA, 20 bp, synthetic construct
  misc_feature 1..20: note = Description of Artificial Sequence: Synthetic oligonucleotide
  misc_feature 1..20: note = Target: SCN10A; (-) strand; PAM type: YTN; PAM sequence: CTT
  source 1..20: mol_type = other DNA
ctttccatttataatgctta

SEQ ID NO: 46588 - DNA, 20 bp, synthetic construct
  misc_feature 1..20: note = Description of Artificial Sequence: Synthetic oligonucleotide
  misc_feature 1..20: note = Target: SCN10A; (-) strand; PAM type: YTN; PAM sequence: CTA
  source 1..20: mol_type = other DNA
ggtgtggacttctttccatt

SEQ ID NO: 46589 - DNA, 20 bp, synthetic construct
  misc_feature 1..20: note = Description of Artificial Sequence: Synthetic oligonucleotide
  misc_feature 1..20: note = Target: SCN10A; (-) strand; PAM type: YTN; PAM sequence: CTG
  source 1..20: mol_type = other DNA
taatatgtctaggtgtggac

SEQ ID NO: 46590 - DNA, 20 bp, synthetic construct
  misc_feature 1..20: note = Description of Artificial Sequence: Synthetic oligonucleotide
  misc_feature 1..20: note = Target: SCN10A; (-) strand; PAM type: YTN; PAM sequence: TTC
  source 1..20: mol_type = other DNA
actgtaatatgtctaggtgt

SEQ ID NO: 46591 - DNA, 20 bp, synthetic construct
  misc_feature 1..20: note = Description of Artificial Sequence: Synthetic oligonucleotide
  misc_feature 1..20: note = Target: SCN10A; (-) strand; PAM type: YTN; PAM sequence: TTT
  source 1..20: mol_type = other DNA
cactgtaatatgtctaggtg

SEQ ID NO: 46592 - DNA, 20 bp, synthetic construct
  misc_feature 1..20: note = Description of Artificial Sequence: Synthetic oligonucleotide
  misc_feature 1..20: note = Target: SCN10A; (-) strand; PAM type: YTN; PAM sequence: CTG
  source 1..20: mol_type = other DNA
cagtttcactgtaatatgtc

SEQ ID NO: 46593 - DNA, 20 bp, synthetic construct
  misc_feature 1..20: note = Description of Artificial Sequence: Synthetic oligonucleotide
  misc_feature 1..20: note = Target: SCN10A; (-) strand; PAM type: YTN; PAM sequence: TTC
  source 1..20: mol_type = other DNA
tgcagtttcactgtaatatg

SEQ ID NO: 46594 - DNA, 20 bp, synthetic construct
  misc_feature 1..20: note = Description of Artificial Sequence: Synthetic oligonucleotide
  misc_feature 1..20: note = Target: SCN10A; (-) strand; PAM type: YTN; PAM sequence: TTG
  source 1..20: mol_type = other DNA
gtgttctgcagtttcactgt

SEQ ID NO: 46595 - DNA, 20 bp, synthetic construct
  misc_feature 1..20: note = Description of Artificial Sequence: Synthetic oligonucleotide
  misc_feature 1..20: note = Target: SCN10A; (-) strand; PAM type: YTN; PAM sequence: TTT
  source 1..20: mol_type = other DNA
ggtgttctgcagtttcactg

SEQ ID NO: 46596 - DNA, 20 bp, synthetic construct
  misc_feature 1..20: note = Description of Artificial Sequence: Synthetic oligonucleotide
  misc_feature 1..20: note = Target: SCN10A; (-) strand; PAM type: YTN; PAM sequence: CTT
  source 1..20: mol_type = other DNA
tggtgttctgcagtttcact

SEQ ID NO: 46597 - DNA, 20 bp, synthetic construct
  misc_feature 1..20: note = Description of Artificial Sequence: Synthetic oligonucleotide
  misc_feature 1..20: note = Target: SCN10A; (-) strand; PAM type: YTN; PAM sequence: CTA
  source 1..20: mol_type = other DNA
tccatctttggtgttctgca

SEQ ID NO: 46598 - DNA, 20 bp, synthetic construct
  misc_feature 1..20: note = Description of Artificial Sequence: Synthetic oligonucleotide
  misc_feature 1..20: note = Target: SCN10A; (-) strand; PAM type: YTN; PAM sequence: TTC
  source 1..20: mol_type = other DNA
tatccatctttggtgttctg

SEQ ID NO: 46599 - DNA, 20 bp, synthetic construct
  misc_feature 1..20: note = Description of Artificial Sequence: Synthetic oligonucleotide
  misc_feature 1..20: note = Target: SCN10A; (-) strand; PAM type: YTN; PAM sequence: CTT
  source 1..20: mol_type = other DNA
ctatccatctttggtgttct

SEQ ID NO: 46600 - DNA, 20 bp, synthetic construct
  misc_feature 1..20: note = Description of Artificial Sequence: Synthetic oligonucleotide
  misc_feature 1..20: note = Target: SCN10A; (-) strand; PAM type: YTN; PAM sequence: TTA
  source 1..20: mol_type = other DNA
aatcttctatccatctttgg

SEQ ID NO: 46601 - DNA, 20 bp, synthetic construct
  misc_feature 1..20: note = Description of Artificial Sequence: Synthetic oligonucleotide
  misc_feature 1..20: note = Target: SCN10A; (-) strand; PAM type: YTN; PAM sequence: TTT
  source 1..20: mol_type = other DNA
aaatcttctatccatctttg

SEQ ID NO: 46602 - DNA, 20 bp, synthetic construct
  misc_feature 1..20: note = Description of Artificial Sequence: Synthetic oligonucleotide
  misc_feature 1..20: note = Target: SCN10A; (-) strand; PAM type: YTN; PAM sequence: TTT
  source 1..20: mol_type = other DNA
taaatcttctatccatcttt

SEQ ID NO: 46603 - DNA, 20 bp, synthetic construct
  misc_feature 1..20: note = Description of Artificial Sequence: Synthetic oligonucleotide
  misc_feature 1..20: note = Target: SCN10A; (-) strand; PAM type: YTN; PAM sequence: TTT
  source 1..20: mol_type = other DNA
ttaaatcttctatccatctt

SEQ ID NO: 46604 - DNA, 20 bp, synthetic construct
  misc_feature 1..20: note = Description of Artificial Sequence: Synthetic oligonucleotide
  misc_feature 1..20: note = Target: SCN10A; (-) strand; PAM type: YTN; PAM sequence: CTT
  source 1..20: mol_type = other DNA
tttaaatcttctatccatct

SEQ ID NO: 46605 - DNA, 20 bp, synthetic construct
  misc_feature 1..20: note = Description of Artificial Sequence: Synthetic oligonucleotide
  misc_feature 1..20: note = Target: SCN10A; (-) strand; PAM type: YTN; PAM sequence: CTG
  source 1..20: mol_type = other DNA
gatgctttttaaatcttcta

SEQ ID NO: 46606 - DNA, 20 bp, synthetic construct
  misc_feature 1..20: note = Description of Artificial Sequence: Synthetic oligonucleotide
  misc_feature 1..20: note = Target: SCN10A; (-) strand; PAM type: YTN; PAM sequence: TTC
  source 1..20: mol_type = other DNA
tggatgctttttaaatcttc

SEQ ID NO: 46607 - DNA, 20 bp, synthetic construct
  misc_feature 1..20: note = Description of Artificial Sequence: Synthetic oligonucleotide
  misc_feature 1..20: note = Target: SCN10A; (-) strand; PAM type: YTN; PAM sequence: TTT
  source 1..20: mol_type = other DNA
ctggatgctttttaaatctt

SEQ ID NO: 46608 - DNA, 20 bp, synthetic construct
  misc_feature 1..20: note = Description of Artificial Sequence: Synthetic oligonucleotide
  misc_feature 1..20: note = Target: SCN10A; (-) strand; PAM type: YTN; PAM sequence: CTT
  source 1..20: mol_type = other DNA
tctggatgctttttaaatct

SEQ ID NO: 46609 - DNA, 20 bp, synthetic construct
  misc_feature 1..20: note = Description of Artificial Sequence: Synthetic oligonucleotide
  misc_feature 1..20: note = Target: SCN10A; (-) strand; PAM type: YTN; PAM sequence: TTC
  source 1..20: mol_type = other DNA
ctttctggatgctttttaaa

SEQ ID NO: 46610 - DNA, 20 bp, synthetic construct
  misc_feature 1..20: note = Description of Artificial Sequence: Synthetic oligonucleotide
  misc_feature 1..20: note = Target: SCN10A; (-) strand; PAM type: YTN; PAM sequence: CTT
  source 1..20: mol_type = other DNA
cctttctggatgctttttaa

SEQ ID NO: 46611 - DNA, 20 bp, synthetic construct
  misc_feature 1..20: note = Description of Artificial Sequence: Synthetic oligonucleotide
  misc_feature 1..20: note = Target: SCN10A; (-) strand; PAM type: YTN; PAM sequence: TTC
  source 1..20: mol_type = other DNA
cttcctttctggatgctttt

SEQ ID NO: 46612 - DNA, 20 bp, synthetic construct
  misc_feature 1..20: note = Description of Artificial Sequence: Synthetic oligonucleotide
  misc_feature 1..20: note = Target: SCN10A; (-) strand; PAM type: YTN; PAM sequence: TTA
  source 1..20: mol_type = other DNA
ttccttcctttctggatgct

SEQ ID NO: 46613 - DNA, 20 bp, synthetic construct
  misc_feature 1..20: note = Description of Artificial Sequence: Synthetic oligonucleotide
  misc_feature 1..20: note = Target: SCN10A; (-) strand; PAM type: YTN; PAM sequence: CTG
  source 1..20: mol_type = other DNA
ttattccttcctttctggat

SEQ ID NO: 46614 - DNA, 20 bp, synthetic construct
  misc_feature 1..20: note = Description of Artificial Sequence: Synthetic oligonucleotide
  misc_feature 1..20: note = Target: SCN10A; (-) strand; PAM type: YTN; PAM sequence: TTA
  source 1..20: mol_type = other DNA
actgttattccttcctttct

SEQ ID NO: 46615 - DNA, 20 bp, synthetic construct
  misc_feature 1..20: note = Description of Artificial Sequence: Synthetic oligonucleotide
  misc_feature 1..20: note = Target: SCN10A; (-) strand; PAM type: YTN; PAM sequence: TTT
  source 1..20: mol_type = other DNA
aactgttattccttcctttc

SEQ ID NO: 46616 - DNA, 20 bp, synthetic construct
  misc_feature 1..20: note = Description of Artificial Sequence: Synthetic oligonucleotide
  misc_feature 1..20: note = Target: SCN10A; (-) strand; PAM type: YTN; PAM sequence: TTC
  source 1..20: mol_type = other DNA
aatttaactgttattccttc

SEQ ID NO: 46617 - DNA, 20 bp, synthetic construct
  misc_feature 1..20: note = Description of Artificial Sequence: Synthetic oligonucleotide
  misc_feature 1..20: note = Target: SCN10A; (-) strand; PAM type: YTN; PAM sequence: TTT
  source 1..20: mol_type = other DNA
caatttaactgttattcctt

SEQ ID NO: 46618 - DNA, 20 bp, synthetic construct
  misc_feature 1..20: note = Description of Artificial Sequence: Synthetic oligonucleotide
  misc_feature 1..20: note = Target: SCN10A; (-) strand; PAM type: YTN; PAM sequence: CTT
  source 1..20: mol_type = other DNA
tcaatttaactgttattcct

SEQ ID NO: 46619 - DNA, 20 bp, synthetic construct
  misc_feature 1..20: note = Description of Artificial Sequence: Synthetic oligonucleotide
  misc_feature 1..20: note = Target: SCN10A; (-) strand; PAM type: YTN; PAM sequence: CTA
  source 1..20: mol_type = other DNA
atgagcagtcagctttcaat

SEQ ID NO: 46620 - DNA, 20 bp, synthetic construct
  misc_feature 1..20: note = Description of Artificial Sequence: Synthetic oligonucleotide
  misc_feature 1..20: note = Target: SCN10A; (-) strand; PAM type: YTN; PAM sequence: TTG
  source 1..20: mol_type = other DNA
ctaatgagcagtcagctttc

SEQ ID NO: 46621 - DNA, 20 bp, synthetic construct
  misc_feature 1..20: note = Description of Artificial Sequence: Synthetic oligonucleotide
  misc_feature 1..20: note = Target: SCN10A; (-) strand; PAM type: YTN; PAM sequence: TTG
  source 1..20: mol_type = other DNA
ttgctaatgagcagtcagct

SEQ ID NO: 46622 - DNA, 20 bp, synthetic construct
  misc_feature 1..20: note = Description of Artificial Sequence: Synthetic oligonucleotide
  misc_feature 1..20: note = Target: SCN10A; (-) strand; PAM type: YTN; PAM sequence: CTC
  source 1..20: mol_type = other DNA
cattgttgctaatgagcagt

SEQ ID NO: 46623 - DNA, 20 bp, synthetic construct
  misc_feature 1..20: note = Description of Artificial Sequence: Synthetic oligonucleotide
  misc_feature 1..20: note = Target: SCN10A; (-) strand; PAM type: YTN; PAM sequence: TTA
  source 1..20: mol_type = other DNA
gcctccattgttgctaatga

SEQ ID NO: 46624 - DNA, 20 bp, synthetic construct
  misc_feature 1..20: note = Description of Artificial Sequence: Synthetic oligonucleotide
  misc_feature 1..20: note = Target: SCN10A; (-) strand; PAM type: YTN; PAM sequence: TTC
  source 1..20: mol_type = other DNA
caacaattagcctccattgt

SEQ ID NO: 46625 - DNA, 20 bp, synthetic construct
  misc_feature 1..20: note = Description of Artificial Sequence: Synthetic oligonucleotide
  misc_feature 1..20: note = Target: SCN10A; (-) strand; PAM type: YTN; PAM sequence: TTC
  source 1..20: mol_type = other DNA
agtgaagatagtattccaac

SEQ ID NO: 46626 - DNA, 20 bp, synthetic construct
  misc_feature 1..20: note = Description of Artificial Sequence: Synthetic oligonucleotide
  misc_feature 1..20: note = Target: SCN10A; (-) strand; PAM type: YTN; PAM sequence: CTT
  source 1..20: mol_type = other DNA
cagtgaagatagtattccaa

SEQ ID NO: 46627 - DNA, 20 bp, synthetic construct
  misc_feature 1..20: note = Description of Artificial Sequence: Synthetic oligonucleotide
  misc_feature 1..20: note = Target: SCN10A; (-) strand; PAM type: YTN; PAM sequence: TTC
  source 1..20: mol_type = other DNA
cttcagtgaagatagtattc

SEQ ID NO: 46628 - DNA, 20 bp, synthetic construct
  misc_feature 1..20: note = Description of Artificial Sequence: Synthetic oligonucleotide
  misc_feature 1..20: note = Target: SCN10A; (-) strand; PAM type: YTN; PAM sequence: CTT
  source 1..20: mol_type = other DNA
ccttcagtgaagatagtatt

SEQ ID NO: 46629 - DNA, 20 bp, synthetic construct
  misc_feature 1..20: note = Description of Artificial Sequence: Synthetic oligonucleotide
  misc_feature 1..20: note = Target: SCN10A; (-) strand; PAM type: YTN; PAM sequence: TTA
  source 1..20: mol_type = other DNA
tcttccttcagtgaagatag

SEQ ID NO: 46630 - DNA, 20 bp, synthetic construct
  misc_feature 1..20: note = Description of Artificial Sequence: Synthetic oligonucleotide
  misc_feature 1..20: note = Target: SCN10A; (-) strand; PAM type: YTN; PAM sequence: TTT
  source 1..20: mol_type = other DNA
atcttccttcagtgaagata

SEQ ID NO: 46631 - DNA, 20 bp, synthetic construct
  misc_feature 1..20: note = Description of Artificial Sequence: Synthetic oligonucleotide
  misc_feature 1..20: note = Target: SCN10A; (-) strand; PAM type: YTN; PAM sequence: CTT
  source 1..20: mol_type = other DNA
tatcttccttcagtgaagat

SEQ ID NO: 46632 - DNA, 20 bp, synthetic construct
  misc_feature 1..20: note = Description of Artificial Sequence: Synthetic oligonucleotide
  misc_feature 1..20: note = Target: SCN10A; (-) strand; PAM type: YTN; PAM sequence: TTG
  source 1..20: mol_type = other DNA
atactttatcttccttcagt

SEQ ID NO: 46633 - DNA, 20 bp, synthetic construct
  misc_feature 1..20: note = Description of Artificial Sequence: Synthetic oligonucleotide
  misc_feature 1..20: note = Target: SCN10A; (-) strand; PAM type: YTN; PAM sequence: CTA
  source 1..20: mol_type = other DNA
gttgatactttatcttcctt

SEQ ID NO: 46634 - DNA, 20 bp, synthetic construct
  misc_feature 1..20: note = Description of Artificial Sequence: Synthetic oligonucleotide
  misc_feature 1..20: note = Target: SCN10A; (-) strand; PAM type: YTN; PAM sequence: TTC
  source 1..20: mol_type = other DNA
tagttgatactttatcttcc

SEQ ID NO: 46635 - DNA, 20 bp, synthetic construct
  misc_feature 1..20: note = Description of Artificial Sequence: Synthetic oligonucleotide
  misc_feature 1..20: note = Target: SCN10A; (-) strand; PAM type: YTN; PAM sequence: TTA
  source 1..20: mol_type = other DNA
tgaatgtaaaattctagttg

SEQ ID NO: 46636 - DNA, 20 bp, synthetic construct
  misc_feature 1..20: note = Description of Artificial Sequence: Synthetic oligonucleotide
  misc_feature 1..20: note = Target: SCN10A; (-) strand; PAM type: YTN; PAM sequence: CTT
  source 1..20: mol_type = other DNA
atgaatgtaaaattctagtt

SEQ ID NO: 46637 - DNA, 20 bp, synthetic construct
  misc_feature 1..20: note = Description of Artificial Sequence: Synthetic oligonucleotide
  misc_feature 1..20: note = Target: SCN10A; (-) strand; PAM type: YTN; PAM sequence: TTC
  source 1..20: mol_type = other DNA
ttatgaatgtaaaattctag

SEQ ID NO: 46638 - DNA, 20 bp, synthetic construct
  misc_feature 1..20: note = Description of Artificial Sequence: Synthetic oligonucleotide
  misc_feature 1..20: note = Target: SCN10A; (-) strand; PAM type: YTN; PAM sequence: TTT
  source 1..20: mol_type = other DNA
cttatgaatgtaaaattcta

SEQ ID NO: 46639 - DNA, 20 bp, synthetic construct
  misc_feature 1..20: note = Description of Artificial Sequence: Synthetic oligonucleotide
  misc_feature 1..20: note = Target: SCN10A; (-) strand; PAM type: YTN; PAM sequence: TTG
  source 1..20: mol_type = other DNA
agagacatttcttatgaatg

SEQ ID NO: 46640 - DNA, 20 bp, synthetic construct
  misc_feature 1..20: note = Description of Artificial Sequence: Synthetic oligonucleotide
  misc_feature 1..20: note = Target: SCN10A; (-) strand; PAM type: YTN; PAM sequence: TTT
  source 1..20: mol_type = other DNA
gagagacatttcttatgaat

SEQ ID NO: 46641 - DNA, 20 bp, synthetic construct
  misc_feature 1..20: note = Description of Artificial Sequence: Synthetic oligonucleotide
  misc_feature 1..20: note = Target: SCN10A; (-) strand; PAM type: YTN; PAM sequence: CTT
  source 1..20: mol_type = other DNA
tgagagacatttcttatgaa

SEQ ID NO: 46642 - DNA, 20 bp, synthetic construct
  misc_feature 1..20: note = Description of Artificial Sequence: Synthetic oligonucleotide
  misc_feature 1..20: note = Target: SCN10A; (-) strand; PAM type: YTN; PAM sequence: TTG
  source 1..20: mol_type = other DNA
cccgtgtctttgagagacat

SEQ ID NO: 46643 - DNA, 20 bp, synthetic construct
  misc_feature 1..20: note = Description of Artificial Sequence: Synthetic oligonucleotide
  misc_feature 1..20: note = Target: SCN10A; (-) strand; PAM type: YTN; PAM sequence: TTT
  source 1..20: mol_type = other DNA
gcccgtgtctttgagagaca

SEQ ID NO: 46644 - DNA, 20 bp, synthetic construct
  misc_feature 1..20: note = Description of Artificial Sequence: Synthetic oligonucleotide
  misc_feature 1..20: note = Target: SCN10A; (-) strand; PAM type: YTN; PAM sequence: TTC
  source 1..20: mol_type = other DNA
agtttgcccgtgtctttgag

SEQ ID NO: 46645 - DNA, 20 bp, synthetic construct
  misc_feature 1..20: note = Description of Artificial Sequence: Synthetic oligonucleotide
  misc_feature 1..20: note = Target: SCN10A; (-) strand; PAM type: YTN; PAM sequence: CTT
  source 1..20: mol_type = other DNA
cagtttgcccgtgtctttga

SEQ ID NO: 46646 - DNA, 20 bp, synthetic construct
  misc_feature 1..20: note = Description of Artificial Sequence: Synthetic oligonucleotide
  misc_feature 1..20: note = Target: SCN10A; (-) strand; PAM type: YTN; PAM sequence: CTC
  source 1..20: mol_type = other DNA
ttcagtttgcccgtgtcttt

SEQ ID NO: 46647 - DNA, 20 bp, synthetic construct
  misc_feature 1..20: note = Description of Artificial Sequence: Synthetic oligonucleotide
  misc_feature 1..20: note = Target: SCN10A; (-) strand; PAM type: YTN; PAM sequence: TTG
  source 1..20: mol_type = other DNA
ctcttcagtttgcccgtgtc

SEQ ID NO: 46648 - DNA, 20 bp, synthetic construct
  misc_feature 1..20: note = Description of Artificial Sequence: Synthetic oligonucleotide
  misc_feature 1..20: note = Target: SCN10A; (-) strand; PAM type: YTN; PAM sequence: TTT
  source 1..20: mol_type = other DNA
gctcttcagtttgcccgtgt

SEQ ID NO: 46649 - DNA, 20 bp, synthetic construct
  misc_feature 1..20: note = Description of Artificial Sequence: Synthetic oligonucleotide
  misc_feature 1..20: note = Target: SCN10A; (-) strand; PAM type: YTN; PAM sequence: CTG
  source 1..20: mol_type = other DNA
aaatttgctcttcagtttgc

SEQ ID NO: 46650 - DNA, 20 bp, synthetic construct
  misc_feature 1..20: note = Description of Artificial Sequence: Synthetic oligonucleotide
  misc_feature 1..20: note = Target: SCN10A; (-) strand; PAM type: YTN; PAM sequence: TTA
  source 1..20: mol_type = other DNA
tctgaaatttgctcttcagt

SEQ ID NO: 46651 - DNA, 20 bp, synthetic construct
  misc_feature 1..20: note = Description of Artificial Sequence: Synthetic oligonucleotide
  misc_feature 1..20: note = Target: SCN10A; (-) strand; PAM type: YTN; PAM sequence: TTT
  source 1..20: mol_type = other DNA
atctgaaatttgctcttcag

SEQ ID NO: 46652 - DNA, 20 bp, synthetic construct
  misc_feature 1..20: note = Description of Artificial Sequence: Synthetic oligonucleotide
  misc_feature 1..20: note = Target: SCN10A; (-) strand; PAM type: YTN; PAM sequence: TTG
  source 1..20: mol_type = other DNA
tttatctgaaatttgctctt

SEQ ID NO: 46653 - DNA, 20 bp, synthetic construct
  misc_feature 1..20: note = Description of Artificial Sequence: Synthetic oligonucleotide
  misc_feature 1..20: note = Target: SCN10A; (-) strand; PAM type: YTN; PAM sequence: TTT
  source 1..20: mol_type = other DNA
gtttatctgaaatttgctct

SEQ ID NO: 46654 - DNA, 20 bp, synthetic construct
  misc_feature 1..20: note = Description of Artificial Sequence: Synthetic oligonucleotide
  misc_feature 1..20: note = Target: SCN10A; (-) strand; PAM type: YTN; PAM sequence: CTT
  source 1..20: mol_type = other DNA
tgtttatctgaaatttgctc

SEQ ID NO: 46655 - DNA, 20 bp, synthetic construct
  misc_feature 1..20: note = Description of Artificial Sequence: Synthetic oligonucleotide
  misc_feature 1..20: note = Target: SCN10A; (-) strand; PAM type: YTN; PAM sequence: CTC
  source 1..20: mol_type = other DNA
tttgtttatctgaaatttgc

SEQ ID NO: 46656 - DNA, 20 bp, synthetic construct
  misc_feature 1..20: note = Description of Artificial Sequence: Synthetic oligonucleotide
  misc_feature 1..20: note = Target: SCN10A; (-) strand; PAM type: YTN; PAM sequence: CTG
  source 1..20: mol_type = other DNA
gccataacctctttgtttat

SEQ ID NO: 46657 - DNA, 20 bp, synthetic construct
  misc_feature 1..20: note = Description of Artificial Sequence: Synthetic oligonucleotide
  misc_feature 1..20: note = Target: SCN10A; (-) strand; PAM type: YTN; PAM sequence: TTC
  source 1..20: mol_type = other DNA
tggccataacctctttgttt

SEQ ID NO: 46658 - DNA, 20 bp, synthetic construct
  misc_feature 1..20: note = Description of Artificial Sequence: Synthetic oligonucleotide
  misc_feature 1..20: note = Target: SCN10A; (-) strand; PAM type: YTN; PAM sequence: CTT
  source 1..20: mol_type = other DNA
ctggccataacctctttgtt

SEQ ID NO: 46659 - DNA, 20 bp, synthetic construct
  misc_feature 1..20: note = Description of Artificial Sequence: Synthetic oligonucleotide
  misc_feature 1..20: note = Target: SCN10A; (-) strand; PAM type: YTN; PAM sequence: TTA
  source 1..20: mol_type = other DNA
gtaagtgccttctggccata

SEQ ID NO: 46660 - DNA, 20 bp, synthetic construct
  misc_feature 1..20: note = Description of Artificial Sequence: Synthetic oligonucleotide
  misc_feature 1..20: note = Target: SCN10A; (-) strand; PAM type: YTN; PAM sequence: TTT
  source 1..20: mol_type = other DNA
agtaagtgccttctggccat

SEQ ID NO: 46661 - DNA, 20 bp, synthetic construct
  misc_feature 1..20: note = Description of Artificial Sequence: Synthetic oligonucleotide
  misc_feature 1..20: note = Target: SCN10A; (-) strand; PAM type: YTN; PAM sequence: TTT
  source 1..20: mol_type = other DNA
tagtaagtgccttctggcca

SEQ ID NO: 46662 - DNA, 20 bp, synthetic construct
  misc_feature 1..20: note = Description of Artificial Sequence: Synthetic oligonucleotide
  misc_feature 1..20: note = Target: SCN10A; (-) strand; PAM type: YTN; PAM sequence: CTT
  source 1..20: mol_type = other DNA
ttagtaagtgccttctggcc

SEQ ID NO: 46663 - DNA, 20 bp, synthetic construct
  misc_feature 1..20: note = Description of Artificial Sequence: Synthetic oligonucleotide
  misc_feature 1..20: note = Target: SCN10A; (-) strand; PAM type: YTN; PAM sequence: TTC
  source 1..20: mol_type = other DNA
ttttagtaagtgccttctgg

SEQ ID NO: 46664 - DNA, 20 bp, synthetic construct
  misc_feature 1..20: note = Description of Artificial Sequence: Synthetic oligonucleotide
  misc_feature 1..20: note = Target: SCN10A; (-) strand; PAM type: YTN; PAM sequence: TTT
  source 1..20: mol_type = other DNA
cttttagtaagtgccttctg

SEQ ID NO: 46665 - DNA, 20 bp, synthetic construct
  misc_feature 1..20: note = Description of Artificial Sequence: Synthetic oligonucleotide
  misc_feature 1..20: note = Target: SCN10A; (-) strand; PAM type: YTN; PAM sequence: TTA
  source 1..20: mol_type = other DNA
gaatttcttttagtaagtgc

SEQ ID NO: 46666 - DNA, 20 bp, synthetic construct
  misc_feature 1..20: note = Description of Artificial Sequence: Synthetic oligonucleotide
  misc_feature 1..20: note = Target: SCN10A; (-) strand; PAM type: YTN; PAM sequence: TTT
  source 1..20: mol_type = other DNA
agaatttcttttagtaagtg

SEQ ID NO: 46667 - DNA, 20 bp, synthetic construct
  misc_feature 1..20: note = Description of Artificial Sequence: Synthetic oligonucleotide
  misc_feature 1..20: note = Target: SCN10A; (-) strand; PAM type: YTN; PAM sequence: CTT
  source 1..20: mol_type = other DNA
tagaatttcttttagtaagt

SEQ ID NO: 46668 - DNA, 20 bp, synthetic construct
  misc_feature 1..20: note = Description of Artificial Sequence: Synthetic oligonucleotide
  misc_feature 1..20: note = Target: SCN10A; (-) strand; PAM type: YTN; PAM sequence: CTC
  source 1..20: mol_type = other DNA
ctttagaatttcttttagta

SEQ ID NO: 46669 - DNA, 20 bp, synthetic construct
  misc_feature 1..20: note = Description of Artificial Sequence: Synthetic oligonucleotide
  misc_feature 1..20: note = Target: SCN10A; (-) strand; PAM type: YTN; PAM sequence: CTG
  source 1..20: mol_type = other DNA
aagtacctcctttagaattt

SEQ ID NO: 46670 - DNA, 20 bp, synthetic construct
  misc_feature 1..20: note = Description of Artificial Sequence: Synthetic oligonucleotide
  misc_feature 1..20: note = Target: SCN10A; (-) strand; PAM type: YTN; PAM sequence: CTA
  source 1..20: mol_type = other DNA
cctgaagtacctcctttaga

SEQ ID NO: 46671 - DNA, 20 bp, synthetic construct
  misc_feature 1..20: note = Description of Artificial Sequence: Synthetic oligonucleotide
  misc_feature 1..20: note = Target: SCN10A; (-) strand; PAM type: YTN; PAM sequence: CTA
  source 1..20: mol_type = other DNA
tctacctgaagtacctcctt

SEQ ID NO: 46672 - DNA, 20 bp, synthetic construct
  misc_feature 1..20: note = Description of Artificial Sequence: Synthetic oligonucleotide
  misc_feature 1..20: note = Target: SCN10A; (-) strand; PAM type: YTN; PAM sequence: TTC
  source 1..20: mol_type = other DNA
tatctacctgaagtacctcc

SEQ ID NO: 46673 - DNA, 20 bp, synthetic construct
  misc_feature 1..20: note = Description of Artificial Sequence: Synthetic oligonucleotide
  misc_feature 1..20: note = Target: SCN10A; (-) strand; PAM type: YTN; PAM sequence: TTT
  source 1..20: mol_type = other DNA
ctatctacctgaagtacctc

SEQ ID NO: 46674 - DNA, 20 bp, synthetic construct
  misc_feature 1..20: note = Description of Artificial Sequence: Synthetic oligonucleotide
  misc_feature 1..20: note = Target: SCN10A; (-) strand; PAM type: YTN; PAM sequence: CTT
  source 1..20: mol_type = other DNA
tctatctacctgaagtacct

SEQ ID NO: 46675 - DNA, 20 bp, synthetic construct
  misc_feature 1..20: note = Description of Artificial Sequence: Synthetic oligonucleotide
  misc_feature 1..20: note = Target: SCN10A; (-) strand; PAM type: YTN; PAM sequence: CTG
  source 1..20: mol_type = other DNA
ggatcactttctatctacct

SEQ ID NO: 46676 - DNA, 20 bp, synthetic construct
  misc_feature 1..20: note = Description of Artificial Sequence: Synthetic oligonucleotide
  misc_feature 1..20: note = Target: SCN10A; (-) strand; PAM type: YTN; PAM sequence: TTC
  source 1..20: mol_type = other DNA
tgggatcactttctatctac

SEQ ID NO: 46677 - DNA, 20 bp, synthetic construct
  misc_feature 1..20: note = Description of Artificial Sequence: Synthetic oligonucleotide
  misc_feature 1..20: note = Target: SCN10A; (-) strand; PAM type: YTN; PAM sequence: CTT
  source 1..20: mol_type = other DNA
ctgggatcactttctatcta

SEQ ID NO: 46678 - DNA, 20 bp, synthetic construct
  misc_feature 1..20: note = Description of Artificial Sequence: Synthetic oligonucleotide
  misc_feature 1..20: note = Target: SCN10A; (-) strand; PAM type: YTN; PAM sequence: TTA
  source 1..20: mol_type = other DNA
cttctgggatcactttctat

SEQ ID NO: 46679 - DNA, 20 bp, synthetic construct
  misc_feature 1..20: note = Description of Artificial Sequence: Synthetic oligonucleotide
  misc_feature 1..20: note = Target: SCN10A; (-) strand; PAM type: YTN; PAM sequence: TTA
  source 1..20: mol_type = other DNA
catattacttctgggatcac

SEQ ID NO: 46680 - DNA, 20 bp, synthetic construct
  misc_feature 1..20: note = Description of Artificial Sequence: Synthetic oligonucleotide
  misc_feature 1..20: note = Target: SCN10A; (-) strand; PAM type: YTN; PAM sequence: TTA
  source 1..20: mol_type = other DNA
cacattacatattacttctg

SEQ ID NO: 46681 - DNA, 20 bp, synthetic construct
  misc_feature 1..20: note = Description of Artificial Sequence: Synthetic oligonucleotide
  misc_feature 1..20: note = Target: SCN10A; (-) strand; PAM type: YTN; PAM sequence: TTG
  source 1..20: mol_type = other DNA
tatattacacattacatatt

SEQ ID NO: 46682 - DNA, 20 bp, synthetic construct
  misc_feature 1..20: note = Description of Artificial Sequence: Synthetic oligonucleotide
  misc_feature 1..20: note = Target: SCN10A; (-) strand; PAM type: YTN; PAM sequence: CTT
  source 1..20: mol_type = other DNA
gtatattacacattacatat

SEQ ID NO: 46683 - DNA, 20 bp, synthetic construct
  misc_feature 1..20: note = Description of Artificial Sequence: Synthetic oligonucleotide
  misc_feature 1..20: note = Target: SCN10A; (-) strand; PAM type: YTN; PAM sequence: TTC
  source 1..20: mol_type = other DNA
ttgtatattacacattacat

SEQ ID NO: 46684 - DNA, 20 bp, synthetic construct
  misc_feature 1..20: note = Description of Artificial Sequence: Synthetic oligonucleotide
  misc_feature 1..20: note = Target: SCN10A; (-) strand; PAM type: YTN; PAM sequence: TTC
  source 1..20: mol_type = other DNA
acattcttgtatattacaca

SEQ ID NO: 46685 - DNA, 20 bp, synthetic construct
  misc_feature 1..20: note = Description of Artificial Sequence: Synthetic oligonucleotide
  misc_feature 1..20: note = Target: SCN10A; (-) strand; PAM type: YTN; PAM sequence: TTT
  source 1..20: mol_type = other DNA
cacattcttgtatattacac

SEQ ID NO: 46686 - DNA, 20 bp, synthetic construct
  misc_feature 1..20: note = Description of Artificial Sequence: Synthetic oligonucleotide
  misc_feature 1..20: note = Target: SCN10A; (-) strand; PAM type: YTN; PAM sequence: TTG
  source 1..20: mol_type = other DNA
gagcacagtttcacattctt

SEQ ID NO: 46687 - DNA, 20 bp, synthetic construct
  misc_feature 1..20: note = Description of Artificial Sequence: Synthetic oligonucleotide
  misc_feature 1..20: note = Target: SCN10A; (-) strand; PAM type: YTN; PAM sequence: TTT
  source 1..20: mol_type = other DNA
ggagcacagtttcacattct

SEQ ID NO: 46688 - DNA, 20 bp, synthetic construct
  misc_feature 1..20: note = Description of Artificial Sequence: Synthetic oligonucleotide
  misc_feature 1..20: note = Target: SCN10A; (-) strand; PAM type: YTN; PAM sequence: CTT
  source 1..20: mol_type = other DNA
tggagcacagtttcacattc

SEQ ID NO: 46689 - DNA, 20 bp, synthetic construct
  misc_feature 1..20: note = Description of Artificial Sequence: Synthetic oligonucleotide
  misc_feature 1..20: note = Target: SCN10A; (-) strand; PAM type: YTN; PAM sequence: TTC
  source 1..20: mol_type = other DNA
aaccctttggagcacagttt

SEQ ID NO: 46690 - DNA, 20 bp, synthetic construct
  misc_feature 1..20: note = Description of Artificial Sequence: Synthetic oligonucleotide
  misc_feature 1..20: note = Target: SCN10A; (-) strand; PAM type: YTN; PAM sequence: CTT
  source 1..20: mol_type = other DNA
caaccctttggagcacagtt

SEQ ID NO: 46691 - DNA, 20 bp, synthetic construct
  misc_feature 1..20: note = Description of Artificial Sequence: Synthetic oligonucleotide
  misc_feature 1..20: note = Target: SCN10A; (-) strand; PAM type: YTN; PAM sequence: TTC
  source 1..20: mol_type = other DNA
ttcaaccctttggagcacag

SEQ ID NO: 46692 - DNA, 20 bp, synthetic construct
  misc_feature 1..20: note = Description of Artificial Sequence: Synthetic oligonucleotide
  misc_feature 1..20: note = Target: SCN10A; (-) strand; PAM type: YTN; PAM sequence: TTT
  source 1..20: mol_type = other DNA
cttcaaccctttggagcaca

SEQ ID NO: 46693 - DNA, 20 bp, synthetic construct
  misc_feature 1..20: note = Description of Artificial Sequence: Synthetic oligonucleotide
  misc_feature 1..20: note = Target: SCN10A; (-) strand; PAM type: YTN; PAM sequence: TTG
  source 1..20: mol_type = other DNA
atttcttcaaccctttggag

SEQ ID NO: 46694 - DNA, 20 bp, synthetic construct
  misc_feature 1..20: note = Description of Artificial Sequence: Synthetic oligonucleotide
  misc_feature 1..20: note = Target: SCN10A; (-) strand; PAM type: YTN; PAM sequence: TTA
  source 1..20: mol_type = other DNA
ttgatttcttcaaccctttg

SEQ ID NO: 46695 - DNA, 20 bp, synthetic construct
  misc_feature 1..20: note = Description of Artificial Sequence: Synthetic oligonucleotide
  misc_feature 1..20: note = Target: SCN10A; (-) strand; PAM type: YTN; PAM sequence: TTA
  source 1..20: mol_type = other DNA
gttattgatttcttcaaccc

SEQ ID NO: 46696 - DNA, 20 bp, synthetic construct
  misc_feature 1..20: note = Description of Artificial Sequence: Synthetic oligonucleotide
  misc_feature 1..20: note = Target: SCN10A; (-) strand; PAM type: YTN; PAM sequence: TTT
  source 1..20: mol_type = other DNA
agttattgatttcttcaacc

SEQ ID NO: 46697 - DNA, 20 bp, synthetic construct
  misc_feature 1..20: note = Description of Artificial Sequence: Synthetic oligonucleotide
  misc_feature 1..20: note = Target: SCN10A; (-) strand; PAM type: YTN; PAM sequence: CTA
  source 1..20: mol_type = other DNA
aaaatttagttattgatttc

SEQ ID NO: 46698 - DNA, 20 bp, synthetic construct
  misc_feature 1..20: note = Description of Artificial Sequence: Synthetic oligonucleotide
  misc_feature 1..20: note = Target: SCN10A; (-) strand; PAM type: YTN; PAM sequence: CTG
  source 1..20: mol_type = other DNA
taagcctaaaaatttagtta

SEQ ID NO: 46699 - DNA, 20 bp, synthetic construct
  misc_feature 1..20: note = Description of Artificial Sequence: Synthetic oligonucleotide
  misc_feature 1..20: note = Target: SCN10A; (-) strand; PAM type: YTN; PAM sequence: CTG
  source 1..20: mol_type = other DNA
gtatcctgtaagcctaaaaa

SEQ ID NO: 46700 - DNA, 20 bp, synthetic construct
  misc_feature 1..20: note = Description of Artificial Sequence: Synthetic oligonucleotide
  misc_feature 1..20: note = Target: SCN10A; (-) strand; PAM type: YTN; PAM sequence: TTA
  source 1..20: mol_type = other DNA
tctggtatcctgtaagccta

SEQ ID NO: 46701 - DNA, 20 bp, synthetic construct
  misc_feature 1..20: note = Description of Artificial Sequence: Synthetic oligonucleotide
  misc_feature 1..20: note = Target: SCN10A; (-) strand; PAM type: YTN; PAM sequence: CTT
  source 1..20: mol_type = other DNA
atctggtatcctgtaagcct

SEQ ID NO: 46702 - DNA, 20 bp, synthetic construct
  misc_feature 1..20: note = Description of Artificial Sequence: Synthetic oligonucleotide
  misc_feature 1..20: note = Target: SCN10A; (-) strand; PAM type: YTN; PAM sequence: TTC
  source 1..20: mol_type = other DNA
ttatctggtatcctgtaagc

SEQ ID NO: 46703 - DNA, 20 bp, synthetic construct
  misc_feature 1..20: note = Description of Artificial Sequence: Synthetic oligonucleotide
  misc_feature 1..20: note = Target: SCN10A; (-) strand; PAM type: YTN; PAM sequence: TTT
  source 1..20: mol_type = other DNA
cttatctggtatcctgtaag

SEQ ID NO: 46704 - DNA, 20 bp, synthetic construct
  misc_feature 1..20: note = Description of Artificial Sequence: Synthetic oligonucleotide
  misc_feature 1..20: note = Target: SCN10A; (-) strand; PAM type: YTN; PAM sequence: TTA
  source 1..20: mol_type = other DNA
tttcttatctggtatcctgt

SEQ ID NO: 46705 - DNA, 20 bp, synthetic construct
  misc_feature 1..20: note = Description of Artificial Sequence: Synthetic oligonucleotide
  misc_feature 1..20: note = Target: SCN10A; (-) strand; PAM type: YTN; PAM sequence: TTC
  source 1..20: mol_type = other DNA
agtgagttatttcttatctg

SEQ ID NO: 46706 - DNA, 20 bp, synthetic construct
  misc_feature 1..20: note = Description of Artificial Sequence: Synthetic oligonucleotide
  misc_feature 1..20: note = Target: SCN10A; (-) strand; PAM type: YTN; PAM sequence: TTT
  source 1..20: mol_type = other DNA
cagtgagttatttcttatct

SEQ ID NO: 46707 - DNA, 20 bp, synthetic construct
  misc_feature 1..20: note = Description of Artificial Sequence: Synthetic oligonucleotide
  misc_feature 1..20: note = Target: SCN10A; (-) strand; PAM type: YTN; PAM sequence: TTT
  source 1..20: mol_type = other DNA
tcagtgagttatttcttatc

SEQ ID NO: 46708 - DNA, 20 bp, synthetic construct
  misc_feature 1..20: note = Description of Artificial Sequence: Synthetic oligonucleotide
  misc_feature 1..20: note = Target: SCN10A; (-) strand; PAM type: YTN; PAM sequence: TTC
  source 1..20: mol_type = other DNA
agattttcagtgagttattt

SEQ ID NO: 46709 - DNA, 20 bp, synthetic construct
  misc_feature 1..20: note = Description of Artificial Sequence: Synthetic oligonucleotide
  misc_feature 1..20: note = Target: SCN10A; (-) strand; PAM type: YTN; PAM sequence: TTT
  source 1..20: mol_type = other DNA
cagattttcagtgagttatt

SEQ ID NO: 46710 - DNA, 20 bp, synthetic construct
  misc_feature 1..20: note = Description of Artificial Sequence: Synthetic oligonucleotide
  misc_feature 1..20: note = Target: SCN10A; (-) strand; PAM type: YTN; PAM sequence: TTG
  source 1..20: mol_type = other DNA
agtttcagattttcagtgag

SEQ ID NO: 46711 - DNA, 20 bp, synthetic construct
  misc_feature 1..20: note = Description of Artificial Sequence: Synthetic oligonucleotide
  misc_feature 1..20: note = Target: SCN10A; (-) strand; PAM type: YTN; PAM sequence: TTT
  source 1..20: mol_type = other DNA
gagtttcagattttcagtga

SEQ ID NO: 46712 - DNA, 20 bp, synthetic construct
  misc_feature 1..20: note = Description of Artificial Sequence: Synthetic oligonucleotide
  misc_feature 1..20: note = Target: SCN10A; (-) strand; PAM type: YTN; PAM sequence: TTG
  source 1..20: mol_type = other DNA
gaacacagtttgagtttcag

SEQ ID NO: 46713 - DNA, 20 bp, synthetic construct
  misc_feature 1..20: note = Description of Artificial Sequence: Synthetic oligonucleotide
  misc_feature 1..20: note = Target: SCN10A; (-) strand; PAM type: YTN; PAM sequence: TTT
  source 1..20: mol_type = other DNA
ggaacacagtttgagtttca

SEQ ID NO: 46714 - DNA, 20 bp, synthetic construct
  misc_feature 1..20: note = Description of Artificial Sequence: Synthetic oligonucleotide
  misc_feature 1..20: note = Target: SCN10A; (-) strand; PAM type: YTN; PAM sequence: CTT
  source 1..20: mol_type = other DNA
tggaacacagtttgagtttc

SEQ ID NO: 46715 - DNA, 20 bp, synthetic construct
  misc_feature 1..20: note = Description of Artificial Sequence: Synthetic oligonucleotide
  misc_feature 1..20: note = Target: SCN10A; (-) strand; PAM type: YTN; PAM sequence: CTC
  source 1..20: mol_type = other DNA
tttggaacacagtttgagtt

SEQ ID NO: 46716 - DNA, 20 bp, synthetic construct
  misc_feature 1..20: note = Description of Artificial Sequence: Synthetic oligonucleotide
  misc_feature 1..20: note = Target: SCN10A; (-) strand; PAM type: YTN; PAM sequence: TTA
  source 1..20: mol_type = other DNA
ctctttggaacacagtttga

SEQ ID NO: 46717 - DNA, 20 bp, synthetic construct
  misc_feature 1..20: note = Description of Artificial Sequence: Synthetic oligonucleotide
  misc_feature 1..20: note = Target: SCN10A; (-) strand; PAM type: YTN; PAM sequence: CTT
  source 1..20: mol_type = other DNA
actctttggaacacagtttg

SEQ ID NO: 46718 - DNA, 20 bp, synthetic construct
  misc_feature 1..20: note = Description of Artificial Sequence: Synthetic oligonucleotide
  misc_feature 1..20: note = Target: SCN10A; (-) strand; PAM type: YTN; PAM sequence: TTC
  source 1..20: mol_type = other DNA
ttactctttggaacacagtt

SEQ ID NO: 46719 - DNA, 20 bp, synthetic construct
  misc_feature 1..20: note = Description of Artificial Sequence: Synthetic oligonucleotide
  misc_feature 1..20: note = Target: SCN10A; (-) strand; PAM type: YTN; PAM sequence: TTT
  source 1..20: mol_type = other DNA
cttactctttggaacacagt

SEQ ID NO: 46720 - DNA, 20 bp, synthetic construct
  misc_feature 1..20: note = Description of Artificial Sequence: Synthetic oligonucleotide
  misc_feature 1..20: note = Target: SCN10A; (-) strand; PAM type: YTN; PAM sequence: CTG
  source 1..20: mol_type = other DNA
atttcttactctttggaaca

SEQ ID NO: 46721 - DNA, 20 bp, synthetic construct
  misc_feature 1..20: note = Description of Artificial Sequence: Synthetic oligonucleotide
  misc_feature 1..20: note = Target: SCN10A; (-) strand; PAM type: YTN; PAM sequence: TTA
  source 1..20: mol_type = other DNA
ctgatttcttactctttgga

SEQ ID NO: 46722 - DNA, 20 bp, synthetic construct
  misc_feature 1..20: note = Description of Artificial Sequence: Synthetic oligonucleotide
  misc_feature 1..20: note = Target: SCN10A; (-) strand; PAM type: YTN; PAM sequence: TTG
  source 1..20: mol_type = other DNA
taagttactgatttcttact

SEQ ID NO: 46723 - DNA, 20 bp, synthetic construct
  misc_feature 1..20: note = Description of Artificial Sequence: Synthetic oligonucleotide
  misc_feature 1..20: note = Target: SCN10A; (-) strand; PAM type: YTN; PAM sequence: TTT
  source 1..20: mol_type = other DNA
gtaagttactgatttcttac

SEQ ID NO: 46724 - DNA, 20 bp, synthetic construct
  misc_feature 1..20: note = Description of Artificial Sequence: Synthetic oligonucleotide
  misc_feature 1..20: note = Target: SCN10A; (-) strand; PAM type: YTN; PAM sequence: TTT
  source 1..20: mol_type = other DNA
tgtaagttactgatttctta

SEQ ID NO: 46725 - DNA, 20 bp, synthetic construct
  misc_feature 1..20: note = Description of Artificial Sequence: Synthetic oligonucleotide
  misc_feature 1..20: note = Target: SCN10A; (-) strand; PAM type: YTN; PAM sequence: TTT
  source 1..20: mol_type = other DNA
ttgtaagttactgatttctt

SEQ ID NO: 46726 - DNA, 20 bp, synthetic construct
  misc_feature 1..20: note = Description of Artificial Sequence: Synthetic oligonucleotide
  misc_feature 1..20: note = Target: SCN10A; (-) strand; PAM type: YTN; PAM sequence: CTC
  source 1..20: mol_type = other DNA
aagaatttttgtaagttact

SEQ ID NO: 46727 - DNA, 20 bp, synthetic construct
  misc_feature 1..20: note = Description of Artificial Sequence: Synthetic oligonucleotide
  misc_feature 1..20: note = Target: SCN10A; (-) strand; PAM type: YTN; PAM sequence: CTA
  source 1..20: mol_type = other DNA
aaaactcaagaatttttgta

SEQ ID NO: 46728 - DNA, 20 bp, synthetic construct
  misc_feature 1..20: note = Description of Artificial Sequence: Synthetic oligonucleotide
  misc_feature 1..20: note = Target: SCN10A; (-) strand; PAM type: YTN; PAM sequence: CTA
  source 1..20: mol_type = other DNA
tcctaaaaactcaagaattt

SEQ ID NO: 46729 - DNA, 20 bp, synthetic construct
  misc_feature 1..20: note = Description of Artificial Sequence: Synthetic oligonucleotide
  misc_feature 1..20: note = Target: SCN10A; (-) strand; PAM type: YTN; PAM sequence: CTG
  source 1..20: mol_type = other DNA
ctatcctaaaaactcaagaa

SEQ ID NO: 46730 - DNA, 20 bp, synthetic construct
  misc_feature 1..20: note = Description of Artificial Sequence: Synthetic oligonucleotide
  misc_feature 1..20: note = Target: SCN10A; (-) strand; PAM type: YTN; PAM sequence: CTA
  source 1..20: mol_type = other DNA
tctgctatcctaaaaactca

SEQ ID NO: 46731 - DNA, 20 bp, synthetic construct
  misc_feature 1..20: note = Description of Artificial Sequence: Synthetic oligonucleotide
  misc_feature 1..20: note = Target: SCN10A; (-) strand; PAM type: YTN; PAM sequence: TTA
  source 1..20: mol_type = other DNA
cctatctgctatcctaaaaa

SEQ ID NO: 46732 - DNA, 20 bp, synthetic construct
  misc_feature 1..20: note = Description of Artificial Sequence: Synthetic oligonucleotide
  misc_feature 1..20: note = Target: SCN10A; (-) strand; PAM type: YTN; PAM sequence: TTT
  source 1..20: mol_type = other DNA
acctatctgctatcctaaaa

SEQ ID NO: 46733 - DNA, 20 bp, synthetic construct
  misc_feature 1..20: note = Description of Artificial Sequence: Synthetic oligonucleotide
  misc_feature 1..20: note = Target: SCN10A; (-) strand; PAM type: YTN; PAM sequence: CTT
  source 1..20: mol_type = other DNA
tacctatctgctatcctaaa

SEQ ID NO: 46734 - DNA, 20 bp, synthetic construct
  misc_feature 1..20: note = Description of Artificial Sequence: Synthetic oligonucleotide
  misc_feature 1..20: note = Target: SCN10A; (-) strand; PAM type: YTN; PAM sequence: TTC
  source 1..20: mol_type = other DNA
tttacctatctgctatccta

SEQ ID NO: 46735 - DNA, 20 bp, synthetic construct
  misc_feature 1..20: note = Description of Artificial Sequence: Synthetic oligonucleotide
  misc_feature 1..20: note = Target: SCN10A; (-) strand; PAM type: YTN; PAM sequence: TTT
  source 1..20: mol_type = other DNA
ctttacctatctgctatcct

SEQ ID NO: 46736 - DNA, 20 bp, synthetic construct
  misc_feature 1..20: note = Description of Artificial Sequence: Synthetic oligonucleotide
  misc_feature 1..20: note = Target: SCN10A; (-) strand; PAM type: YTN; PAM sequence: TTG
  source 1..20: mol_type = other DNA
tttctttacctatctgctat

SEQ ID NO: 46737 - DNA, 20 bp, synthetic construct
  misc_feature 1..20: note = Description of Artificial Sequence: Synthetic oligonucleotide
  misc_feature 1..20: note = Target: SCN10A; (-) strand; PAM type: YTN; PAM sequence: CTC
  source 1..20: mol_type = other DNA
agcaagttgtttctttacct

SEQ ID NO: 46738 - DNA, 20 bp, synthetic construct
  misc_feature 1..20: note = Description of Artificial Sequence: Synthetic oligonucleotide
  misc_feature 1..20: note = Target: SCN10A; (-) strand; PAM type: YTN; PAM sequence: TTC
  source 1..20: mol_type = other DNA
agtgtctcagcaagttgttt

SEQ ID NO: 46739 - DNA, 20 bp, synthetic construct
  misc_feature 1..20: note = Description of Artificial Sequence: Synthetic oligonucleotide
  misc_feature 1..20: note = Target: SCN10A; (-) strand; PAM type: YTN; PAM sequence: TTT
  source 1..20: mol_type = other DNA
cagtgtctcagcaagttgtt

SEQ ID NO: 46740 - DNA, 20 bp, synthetic construct
  misc_feature 1..20: note = Description of Artificial Sequence: Synthetic oligonucleotide
  misc_feature 1..20: note = Target: SCN10A; (-) strand; PAM type: YTN; PAM sequence: TTC
  source 1..20: mol_type = other DNA
atcatcacacaaggggaggg

SEQ ID NO: 46741 - DNA, 20 bp, synthetic construct
  misc_feature 1..20: note = Description of Artificial Sequence: Synthetic oligonucleotide
  misc_feature 1..20: note = Target: SCN10A; (-) strand; PAM type: YTN; PAM sequence: TTT
  source 1..20: mol_type = other DNA
catcatcacacaaggggagg

SEQ ID NO: 46742 - DNA, 20 bp, synthetic construct
  misc_feature 1..20: note = Description of Artificial Sequence: Synthetic oligonucleotide
  misc_feature 1..20: note = Target: SCN10A; (-) strand; PAM type: YTN; PAM sequence: TTT
  source 1..20: mol_type = other DNA
tcatcatcacacaaggggag

SEQ ID NO: 46743 - DNA, 20 bp, synthetic construct
  misc_feature 1..20: note = Description of Artificial Sequence: Synthetic oligonucleotide
  misc_feature 1..20: note = Target: SCN10A; (-) strand; PAM type: YTN; PAM sequence: TTT
  source 1..20: mol_type = other DNA
ttcatcatcacacaagggga

SEQ ID NO: 46744 - DNA, 20 bp, synthetic construct
  misc_feature 1..20: note = Description of Artificial Sequence: Synthetic oligonucleotide
  misc_feature 1..20: note = Target: SCN10A; (-) strand; PAM type: YTN; PAM sequence: TTT
  source 1..20: mol_type = other DNA
tttcatcatcacacaagggg

SEQ ID NO: 46745 - DNA, 20 bp, synthetic construct
  misc_feature 1..20: note = Description of Artificial Sequence: Synthetic oligonucleotide
  misc_feature 1..20: note = Target: SCN10A; (-) strand; PAM type: YTN; PAM sequence: CTG
  source 1..20: mol_type = other DNA
ttttttcatcatcacacaag

SEQ ID NO: 46746 - DNA, 20 bp, synthetic construct
  misc_feature 1..20: note = Description of Artificial Sequence: Synthetic oligonucleotide
  misc_feature 1..20: note = Target: SCN10A; (-) strand; PAM type: YTN; PAM sequence: TTC
  source 1..20: mol_type = other DNA
agcctgttttttcatcatca

SEQ ID NO: 46747 - DNA, 20 bp, synthetic construct
  misc_feature 1..20: note = Description of Artificial Sequence: Synthetic oligonucleotide
  misc_feature 1..20: note = Target: SCN10A; (-) strand; PAM type: YTN; PAM sequence: TTT
  source 1..20: mol_type = other DNA
cagcctgttttttcatcatc

SEQ ID NO: 46748 - DNA, 20 bp, synthetic construct
  misc_feature 1..20: note = Description of Artificial Sequence: Synthetic oligonucleotide
  misc_feature 1..20: note = Target: SCN10A; (-) strand; PAM type: YTN; PAM sequence: TTG
  source 1..20: mol_type = other DNA
atttcagcctgttttttcat

SEQ ID NO: 46749 - DNA, 20 bp, synthetic construct
  misc_feature 1..20: note = Description of Artificial Sequence: Synthetic oligonucleotide
  misc_feature 1..20: note = Target: SCN10A; (-) strand; PAM type: YTN; PAM sequence: TTC
  source 1..20: mol_type = other DNA
caattgatttcagcctgttt

SEQ ID NO: 46750 - DNA, 20 bp, synthetic construct
  misc_feature 1..20: note = Description of Artificial Sequence: Synthetic oligonucleotide
  misc_feature 1..20: note = Target: SCN10A; (-) strand; PAM type: YTN; PAM sequence: CTG
  source 1..20: mol_type = other DNA
gttccaattgatttcagcct

SEQ ID NO: 46751 - DNA, 20 bp, synthetic construct
  misc_feature 1..20: note = Description of Artificial Sequence: Synthetic oligonucleotide
  misc_feature 1..20: note = Target: SCN10A; (-) strand; PAM type: YTN; PAM sequence: CTC
  source 1..20: mol_type = other DNA
cagtcggccatcctggttcc

SEQ ID NO: 46752 - DNA, 20 bp, synthetic construct
  misc_feature 1..20: note = Description of Artificial Sequence: Synthetic oligonucleotide
  misc_feature 1..20: note = Target: SCN10A; (-) strand; PAM type: YTN; PAM sequence: CTG
  source 1..20: mol_type = other DNA
cacaaactccagtcggccat

SEQ ID NO: 46753 - DNA, 20 bp, synthetic construct
  misc_feature 1..20: note = Description of Artificial Sequence: Synthetic oligonucleotide
  misc_feature 1..20: note = Target: SCN10A; (-) strand; PAM type: YTN; PAM sequence: TTC
  source 1..20: mol_type = other DNA
tgcacaaactccagtcggcc

SEQ ID NO: 46754 - DNA, 20 bp, synthetic construct
  misc_feature 1..20: note = Description of Artificial Sequence: Synthetic oligonucleotide
  misc_feature 1..20: note = Target: SCN10A; (-) strand; PAM type: YTN; PAM sequence: CTC
  source 1..20: mol_type = other DNA
attctgcacaaactccagtc

SEQ ID NO: 46755 - DNA, 20 bp, synthetic construct
  misc_feature 1..20: note = Description of Artificial Sequence: Synthetic oligonucleotide
  misc_feature 1..20: note = Target: SCN10A; (-) strand; PAM type: YTN; PAM sequence: TTC
  source 1..20: mol_type = other DNA
agtccatgacgtcagcaagc

SEQ ID NO: 46756 - DNA, 20 bp, synthetic construct
  misc_feature 1..20: note = Description of Artificial Sequence: Synthetic oligonucleotide
  misc_feature 1..20: note = Target: SCN10A; (-) strand; PAM type: YTN; PAM sequence: TTA
  source 1..20: mol_type = other DNA
gtatgcaatatgaagtggaa

SEQ ID NO: 46757 - DNA, 20 bp, synthetic construct
  misc_feature 1..20: note = Description of Artificial Sequence: Synthetic oligonucleotide
  misc_feature 1..20: note = Target: SCN10A; (-) strand; PAM type: YTN; PAM sequence: CTG
  source 1..20: mol_type = other DNA
gggggagttagtatgcaata

SEQ ID NO: 46758 - DNA, 20 bp, synthetic construct
  misc_feature 1..20: note = Description of Artificial Sequence: Synthetic oligonucleotide
  misc_feature 1..20: note = Target: SCN10A; (-) strand; PAM type: YTN; PAM sequence: TTG
  source 1..20: mol_type = other DNA
catatgcaaatctgggggga

SEQ ID NO: 46759 - DNA, 20 bp, synthetic construct
  misc_feature 1..20: note = Description of Artificial Sequence: Synthetic oligonucleotide
  misc_feature 1..20: note = Target: SCN10A; (-) strand; PAM type: YTN; PAM sequence: CTC
  source 1..20: mol_type = other DNA
atgggttgcatatgcaaatc

SEQ ID NO: 46760 - DNA, 20 bp, synthetic construct
  misc_feature 1..20: note = Description of Artificial Sequence: Synthetic oligonucleotide
  misc_feature 1..20: note = Target: SCN10A; (-) strand; PAM type: YTN; PAM sequence: TTA
  source 1..20: mol_type = other DNA
ctcatgggttgcatatgcaa

SEQ ID NO: 46761 - DNA, 20 bp, synthetic construct
  misc_feature 1..20: note = Description of Artificial Sequence: Synthetic oligonucleotide
  misc_feature 1..20: note = Target: SCN10A; (-) strand; PAM type: YTN; PAM sequence: CTT
  source 1..20: mol_type = other DNA
actcatgggttgcatatgca

SEQ ID NO: 46762 - DNA, 20 bp, synthetic construct
  misc_feature 1..20: note = Description of Artificial Sequence: Synthetic oligonucleotide
  misc_feature 1..20: note = Target: SCN10A; (-) strand; PAM type: YTN; PAM sequence: TTC
  source 1..20: mol_type = other DNA
atgcttactcatgggttgca

SEQ ID NO: 46763 - DNA, 20 bp, synthetic construct
  misc_feature 1..20: note = Description of Artificial Sequence: Synthetic oligonucleotide
  misc_feature 1..20: note = Target: SCN10A; (-) strand; PAM type: YTN; PAM sequence: CTT
  source 1..20: mol_type = other DNA
catgcttactcatgggttgc

SEQ ID NO: 46764 - DNA, 20 bp, synthetic construct
  misc_feature 1..20: note = Description of Artificial Sequence: Synthetic oligonucleotide
  misc_feature 1..20: note = Target: SCN10A; (-) strand; PAM type: YTN; PAM sequence: CTC
  source 1..20: mol_type = other DNA
ttcatgcttactcatgggtt

SEQ ID NO: 46765 - DNA, 20 bp, synthetic construct
  misc_feature 1..20: note = Description of Artificial Sequence: Synthetic oligonucleotide
  misc_feature 1..20: note = Target: SCN10A; (-) strand; PAM type: YTN; PAM sequence: TTA
  source 1..20: mol_type = other DNA
tctcttcatgcttactcatg

SEQ ID NO: 46766 - DNA, 20 bp, synthetic construct
  misc_feature 1..20: note = Description of Artificial Sequence: Synthetic oligonucleotide
  misc_feature 1..20: note = Target: SCN10A; (-) strand; PAM type: YTN; PAM sequence: CTG
  source 1..20: mol_type = other DNA
cacagttatctcttcatgct

SEQ ID NO: 46767 - DNA, 20 bp, synthetic construct
  misc_feature 1..20: note = Description of Artificial Sequence: Synthetic oligonucleotide
  misc_feature 1..20: note = Target: SCN10A; (-) strand; PAM type: YTN; PAM sequence: TTG
  source 1..20: mol_type = other DNA
gagagtccatgggcctgcac

SEQ ID NO: 46768 - DNA, 20 bp, synthetic construct
  misc_feature 1..20: note = Description of Artificial Sequence: Synthetic oligonucleotide
  misc_feature 1..20: note = Target: SCN10A; (-) strand; PAM type: YTN; PAM sequence: TTT
  source 1..20: mol_type = other DNA
ggagagtccatgggcctgca

SEQ ID NO: 46769 - DNA, 20 bp, synthetic construct
  misc_feature 1..20: note = Description of Artificial Sequence: Synthetic oligonucleotide
  misc_feature 1..20: note = Target: SCN10A; (-) strand; PAM type: YTN; PAM sequence: TTG
  source 1..20: mol_type = other DNA
gtggaaggaaaggggaggtt

SEQ ID NO: 46770 - DNA, 20 bp, synthetic construct
  misc_feature 1..20: note = Description of Artificial Sequence: Synthetic oligonucleotide
  misc_feature 1..20: note = Target: SCN10A; (-) strand; PAM type: YTN; PAM sequence: TTG
  source 1..20: mol_type = other DNA
caggtgattggtggaaggaa

SEQ ID NO: 46771 - DNA, 20 bp, synthetic construct
  misc_feature 1..20: note = Description of Artificial Sequence: Synthetic oligonucleotide
  misc_feature 1..20: note = Target: SCN10A; (-) strand; PAM type: YTN; PAM sequence: TTT
  source 1..20: mol_type = other DNA
gcaggtgattggtggaagga

SEQ ID NO: 46772 - DNA, 20 bp, synthetic construct
  misc_feature 1..20: note = Description of Artificial Sequence: Synthetic oligonucleotide
  misc_feature 1..20: note = Target: SCN10A; (-) strand; PAM type: YTN; PAM sequence: TTA
  source 1..20: mol_type = other DNA
gtgggtggataccgggattt

SEQ ID NO: 46773 - DNA, 20 bp, synthetic construct
  misc_feature 1..20: note = Description of Artificial Sequence: Synthetic oligonucleotide
  misc_feature 1..20: note = Target: SCN10A; (-) strand; PAM type: YTN; PAM sequence: TTT
  source 1..20: mol_type = other DNA
agtgggtggataccgggatt

SEQ ID NO: 46774 - DNA, 20 bp, synthetic construct
  misc_feature 1..20: note = Description of Artificial Sequence: Synthetic oligonucleotide
  misc_feature 1..20: note = Target: SCN10A; (-) strand; PAM type: YTN; PAM sequence: TTA
  source 1..20: mol_type = other DNA
gaaaatgtttagtgggtgga

SEQ ID NO: 46775 - DNA, 20 bp, synthetic construct
  misc_feature 1..20: note = Description of Artificial Sequence: Synthetic oligonucleotide
  misc_feature 1..20: note = Target: SCN10A; (-) strand; PAM type: YTN; PAM sequence: TTA
  source 1..20: mol_type = other DNA
ttagaaaatgtttagtgggt

SEQ ID NO: 46776 - DNA, 20 bp, synthetic construct
  misc_feature 1..20: note = Description of Artificial Sequence: Synthetic oligonucleotide
  misc_feature 1..20: note = Target: SCN10A; (-) strand; PAM type: YTN; PAM sequence: TTT
  source 1..20: mol_type = other DNA
attagaaaatgtttagtggg

SEQ ID NO: 46777 - DNA, 20 bp, synthetic construct
  misc_feature 1..20: note = Description of Artificial Sequence: Synthetic oligonucleotide
  misc_feature 1..20: note = Target: SCN10A; (-) strand; PAM type: YTN; PAM sequence: TTT
  source 1..20: mol_type = other DNA
tattagaaaatgtttagtgg

SEQ ID NO: 46778 - DNA, 20 bp, synthetic construct
  misc_feature 1..20: note = Description of Artificial Sequence: Synthetic oligonucleotide
  misc_feature 1..20: note = Target: SCN10A; (-) strand; PAM type: YTN; PAM sequence: TTT
  source 1..20: mol_type = other DNA
ttattagaaaatgtttagtg

SEQ ID NO: 46779 - DNA, 20 bp, synthetic construct
  misc_feature 1..20: note = Description of Artificial Sequence: Synthetic oligonucleotide
  misc_feature 1..20: note = Target: SCN10A; (-) strand; PAM type: YTN; PAM sequence: TTC
  source 1..20: mol_type = other DNA
aaggcagtatttttattaga

SEQ ID NO: 46780 - DNA, 20 bp, synthetic construct
  misc_feature 1..20: note = Description of Artificial Sequence: Synthetic oligonucleotide
  misc_feature 1..20: note = Target: SCN10A; (-) strand; PAM type: YTN; PAM sequence: CTT
  source 1..20: mol_type = other DNA
caaggcagtatttttattag

SEQ ID NO: 46781 - DNA, 20 bp, synthetic construct
  misc_feature 1..20: note = Description of Artificial Sequence: Synthetic oligonucleotide
  misc_feature 1..20: note = Target: SCN10A; (-) strand; PAM type: YTN; PAM sequence: CTG
  source 1..20: mol_type = other DNA
tcttcaaggcagtattttta

SEQ ID NO: 46782 - DNA, 20 bp, synthetic construct
  misc_feature 1..20: note = Description of Artificial Sequence: Synthetic oligonucleotide
  misc_feature 1..20: note = Target: SCN10A; (-) strand; PAM type: YTN; PAM sequence: CTG
  source 1..20: mol_type = other DNA
tgctgtcttcaaggcagtat

SEQ ID NO: 46783 - DNA, 20 bp, synthetic construct
  misc_feature 1..20: note = Description of Artificial Sequence: Synthetic oligonucleotide
  misc_feature 1..20: note = Target: SCN10A; (-) strand; PAM type: YTN; PAM sequence: CTC
  source 1..20: mol_type = other DNA
cctgtgctgtcttcaaggca

SEQ ID NO: 46784 - DNA, 20 bp, synthetic construct
  misc_feature 1..20: note = Description of Artificial Sequence: Synthetic oligonucleotide
  misc_feature 1..20: note = Target: SCN10A; (-) strand; PAM type: YTN; PAM sequence: CTG
  source 1..20: mol_type = other DNA
tctccctgtgctgtcttcaa

SEQ ID NO: 46785 - DNA, 20 bp, synthetic construct
  misc_feature 1..20: note = Description of Artificial Sequence: Synthetic oligonucleotide
  misc_feature 1..20: note = Target: SCN10A; (-) strand; PAM type: YTN; PAM sequence: CTC
  source 1..20: mol_type = other DNA
agatctgtctccctgtgctg

SEQ ID NO: 46786 - DNA, 20 bp, synthetic construct
  misc_feature 1..20: note = Description of Artificial Sequence: Synthetic oligonucleotide
  misc_feature 1..20: note = Target: SCN10A; (-) strand; PAM type: YTN; PAM sequence: CTG
  source 1..20: mol_type = other DNA
gcaagaagacaggaggtcaa

SEQ ID NO: 46787 - DNA, 20 bp, synthetic construct
  misc_feature 1..20: note = Description of Artificial Sequence: Synthetic oligonucleotide
  misc_feature 1..20: note = Target: SCN10A; (-) strand; PAM type: YTN; PAM sequence: CTG
  source 1..20: mol_type = other DNA
gctggcaagaagacaggagg

SEQ ID NO: 46788 - DNA, 20 bp, synthetic construct
  misc_feature 1..20: note = Description of Artificial Sequence: Synthetic oligonucleotide
  misc_feature 1..20: note = Target: SCN10A; (-) strand; PAM type: YTN; PAM sequence: CTG
  source 1..20: mol_type = other DNA
caagctggctggcaagaaga

SEQ ID NO: 46789 - DNA, 20 bp, synthetic construct
  misc_feature 1..20: note = Description of Artificial Sequence: Synthetic oligonucleotide
  misc_feature 1..20: note = Target: SCN10A; (-) strand; PAM type: YTN; PAM sequence: TTA
  source 1..20: mol_type = other DNA
atactgcaagctggctggca

SEQ ID NO: 46790 - DNA, 20 bp, synthetic construct
  misc_feature 1..20: note = Description of Artificial Sequence: Synthetic oligonucleotide
  misc_feature 1..20: note = Target: SCN10A; (-) strand; PAM type: YTN; PAM sequence: CTT
  source 1..20: mol_type = other DNA
aatactgcaagctggctggc

SEQ ID NO: 46791 - DNA, 20 bp, synthetic construct
  misc_feature 1..20: note = Description of Artificial Sequence: Synthetic oligonucleotide
  misc_feature 1..20: note = Target: SCN10A; (-) strand; PAM type: YTN; PAM sequence: TTG
  source 1..20: mol_type = other DNA
agaaaagaaaagcttaatac

SEQ ID NO: 46792 - DNA, 20 bp, synthetic construct
  misc_feature 1..20: note = Description of Artificial Sequence: Synthetic oligonucleotide
  misc_feature 1..20: note = Target: SCN10A; (-) strand; PAM type: YTN; PAM sequence: TTT
  source 1..20: mol_type = other DNA
gagaaaagaaaagcttaata

SEQ ID NO: 46793 - DNA, 20 bp, synthetic construct
  misc_feature 1..20: note = Description of Artificial Sequence: Synthetic oligonucleotide
  misc_feature 1..20: note = Target: SCN10A; (-) strand; PAM type: YTN; PAM sequence: TTT
  source 1..20: mol_type = other DNA
tgagaaaagaaaagcttaat

SEQ ID NO: 46794 - DNA, 20 bp, synthetic construct
  misc_feature 1..20: note = Description of Artificial Sequence: Synthetic oligonucleotide
  misc_feature 1..20: note = Target: SCN10A; (-) strand; PAM type: YTN; PAM sequence: CTT
  source 1..20: mol_type = other DNA
ttgagaaaagaaaagcttaa

SEQ ID NO: 46795 - DNA, 20 bp, synthetic construct
  misc_feature 1..20: note = Description of Artificial Sequence: Synthetic oligonucleotide
  misc_feature 1..20: note = Target: SCN10A; (-) strand; PAM type: YTN; PAM sequence: TTG
  source 1..20: mol_type = other DNA
gaagccaagacgaggacacc

SEQ ID NO: 46796 - DNA, 20 bp, synthetic construct
  misc_feature 1..20: note = Description of Artificial Sequence: Synthetic oligonucleotide
  misc_feature 1..20: note = Target: SCN10A; (-) strand; PAM type: YTN; PAM sequence: TTT
  source 1..20: mol_type = other DNA
ggaagccaagacgaggacac

SEQ ID NO: 46797 - DNA, 20 bp, synthetic construct
  misc_feature 1..20: note = Description of Artificial Sequence: Synthetic oligonucleotide
  misc_feature 1..20: note = Target: SCN10A; (-) strand; PAM type: YTN; PAM sequence: CTT
  source 1..20: mol_type = other DNA
tggaagccaagacgaggaca

SEQ ID NO: 46798 - DNA, 20 bp, synthetic construct
  misc_feature 1..20: note = Description of Artificial Sequence: Synthetic oligonucleotide
  misc_feature 1..20: note = Target: SCN10A; (-) strand; PAM type: YTN; PAM sequence: CTA
  source 1..20: mol_type = other DNA
tgactttggaagccaagacg

SEQ ID NO: 46799 - DNA, 20 bp, synthetic construct
  misc_feature 1..20: note = Description of Artificial Sequence: Synthetic oligonucleotide
  misc_feature 1..20: note = Target: SCN10A; (-) strand; PAM type: YTN; PAM sequence: CTA
  source 1..20: mol_type = other DNA
gaagccaatactatgacttt

SEQ ID NO: 46800 - DNA, 20 bp, synthetic construct
  misc_feature 1..20: note = Description of Artificial Sequence: Synthetic oligonucleotide
  misc_feature 1..20: note = Target: SCN10A; (-) strand; PAM type: YTN; PAM sequence: CTC
  source 1..20: mol_type = other DNA
tagaagccaatactatgact

SEQ ID NO: 46801 - DNA, 20 bp, synthetic construct
  misc_feature 1..20: note = Description of Artificial Sequence: Synthetic oligonucleotide
  misc_feature 1..20: note = Target: SCN10A; (-) strand; PAM type: YTN; PAM sequence: CTG
  source 1..20: mol_type = other DNA
cccaatgctctagaagccaa

SEQ ID NO: 46802 - DNA, 20 bp, synthetic construct
  misc_feature 1..20: note = Description of Artificial Sequence: Synthetic oligonucleotide
  misc_feature 1..20: note = Target: SCN10A; (-) strand; PAM type: YTN; PAM sequence: CTC
  source 1..20: mol_type = other DNA
actgcccaatgctctagaag

SEQ ID NO: 46803 - DNA, 20 bp, synthetic construct
  misc_feature 1..20: note = Description of Artificial Sequence: Synthetic oligonucleotide
  misc_feature 1..20: note = Target: SCN10A; (-) strand; PAM type: YTN; PAM sequence: TTA
  source 1..20: mol_type = other DNA
tagagccagtgggggctcac

SEQ ID NO: 46804 - DNA, 20 bp, synthetic construct
  misc_feature 1..20: note = Description of Artificial Sequence: Synthetic oligonucleotide
  misc_feature 1..20: note = Target: SCN10A; (-) strand; PAM type: YTN; PAM sequence: TTG
  source 1..20: mol_type = other DNA
ttatagagccagtgggggct

SEQ ID NO: 46805 - DNA, 20 bp, synthetic construct
  misc_feature 1..20: note = Description of Artificial Sequence: Synthetic oligonucleotide
  misc_feature 1..20: note = Target: SCN10A; (-) strand; PAM type: YTN; PAM sequence: TTT
  source 1..20: mol_type = other DNA
gttatagagccagtgggggc

SEQ ID NO: 46806 - DNA, 20 bp, synthetic construct
  misc_feature 1..20: note = Description of Artificial Sequence: Synthetic oligonucleotide
  misc_feature 1..20: note = Target: SCN10A; (-) strand; PAM type: YTN; PAM sequence: CTT
  source 1..20: mol_type = other DNA
tgttatagagccagtggggg

SEQ ID NO: 46807 - DNA, 20 bp, synthetic construct
  misc_feature 1..20: note = Description of Artificial Sequence: Synthetic oligonucleotide
  misc_feature 1..20: note = Target: SCN10A; (-) strand; PAM type: YTN; PAM sequence: TTA
  source 1..20: mol_type = other DNA
tacctttgttatagagccag

SEQ ID NO: 46808 - DNA, 20 bp, synthetic construct
  misc_feature 1..20: note = Description of Artificial Sequence: Synthetic oligonucleotide
  misc_feature 1..20: note = Target: SCN10A; (-) strand; PAM type: YTN; PAM sequence: TTT
  source 1..20: mol_type = other DNA
atacctttgttatagagcca

SEQ ID NO: 46809 - DNA, 20 bp, synthetic construct
  misc_feature 1..20: note = Description of Artificial Sequence: Synthetic oligonucleotide
  misc_feature 1..20: note = Target: SCN10A; (-) strand; PAM type: YTN; PAM sequence: CTT
  source 1..20: mol_type = other DNA
tatacctttgttatagagcc

SEQ ID NO: 46810 - DNA, 20 bp, synthetic construct
  misc_feature 1..20: note = Description of Artificial Sequence: Synthetic oligonucleotide
  misc_feature 1..20: note = Target: SCN10A; (-) strand; PAM type: YTN; PAM sequence: CTC
  source 1..20: mol_type = other DNA
tttatacctttgttatagag

SEQ ID NO: 46811 - DNA, 20 bp, synthetic construct
  misc_feature 1..20: note = Description of Artificial Sequence: Synthetic oligonucleotide
  misc_feature 1..20: note = Target: SCN10A; (-) strand; PAM type: YTN; PAM sequence: TTG
  source 1..20: mol_type = other DNA
ctctttatacctttgttata

SEQ ID NO: 46812 - DNA, 20 bp, synthetic construct
  misc_feature 1..20: note = Description of Artificial Sequence: Synthetic oligonucleotide
  misc_feature 1..20: note = Target: SCN10A; (-) strand; PAM type: YTN; PAM sequence: CTT
  source 1..20: mol_type = other DNA
gctctttatacctttgttat

SEQ ID NO: 46813 - DNA, 20 bp, synthetic construct
  misc_feature 1..20: note = Description of Artificial Sequence: Synthetic oligonucleotide
  misc_feature 1..20: note = Target: SCN10A; (-) strand; PAM type: YTN; PAM sequence: TTC
  source 1..20: mol_type = other DNA
ttgctctttatacctttgtt

SEQ ID NO: 46814 - DNA, 20 bp, synthetic construct
  misc_feature 1..20: note = Description of Artificial Sequence: Synthetic oligonucleotide
  misc_feature 1..20: note = Target: SCN10A; (-) strand; PAM type: YTN; PAM sequence: TTT
  source 1..20: mol_type = other DNA
cttgctctttatacctttgt

SEQ ID NO: 46815 - DNA, 20 bp, synthetic construct
  misc_feature 1..20: note = Description of Artificial Sequence: Synthetic oligonucleotide
  misc_feature 1..20: note = Target: SCN10A; (-) strand; PAM type: YTN; PAM sequence: CTT
  source 1..20: mol_type = other DNA
tcttgctctttatacctttg

SEQ ID NO: 46816 - DNA, 20 bp, synthetic construct
  misc_feature 1..20: note = Description of Artificial Sequence: Synthetic oligonucleotide
  misc_feature 1..20: note = Target: SCN10A; (-) strand; PAM type: YTN; PAM sequence: TTA
  source 1..20: mol_type = other DNA
gcactttcttgctctttata

SEQ ID NO: 46817 - DNA, 20 bp, synthetic construct
  misc_feature 1..20: note = Description of Artificial Sequence: Synthetic oligonucleotide
  misc_feature 1..20: note = Target: SCN10A; (-) strand; PAM type: YTN; PAM sequence: CTT
  source 1..20: mol_type = other DNA
agcactttcttgctctttat

SEQ ID NO: 46818 - DNA, 20 bp, synthetic construct
  misc_feature 1..20: note = Description of Artificial Sequence: Synthetic oligonucleotide
  misc_feature 1..20: note = Target: SCN10A; (-) strand; PAM type: YTN; PAM sequence: CTC
  source 1..20: mol_type = other DNA
atgcttagcactttcttgct

SEQ ID NO: 46819 - DNA, 20 bp, synthetic construct
  misc_feature 1..20: note = Description of Artificial Sequence: Synthetic oligonucleotide
  misc_feature 1..20: note = Target: SCN10A; (-) strand; PAM type: YTN; PAM sequence: CTC
  source 1..20: mol_type = other DNA
tcatgcttagcactttcttg

SEQ ID NO: 46820 - DNA, 20 bp, synthetic construct
  misc_feature 1..20: note = Description of Artificial Sequence: Synthetic oligonucleotide
  misc_feature 1..20: note = Target: SCN10A; (-) strand; PAM type: YTN; PAM sequence: TTC
  source 1..20: mol_type = other DNA
actctcatgcttagcacttt

SEQ ID NO: 46821 - DNA, 20 bp, synthetic construct
  misc_feature 1..20: note = Description of Artificial Sequence: Synthetic oligonucleotide
  misc_feature 1..20: note = Target: SCN10A; (-) strand; PAM type: YTN; PAM sequence: TTA
  source 1..20: mol_type = other DNA
gattcactctcatgcttagc

SEQ ID NO: 46822 - DNA, 20 bp, synthetic construct
  misc_feature 1..20: note = Description of Artificial Sequence: Synthetic oligonucleotide
  misc_feature 1..20: note = Target: SCN10A; (-) strand; PAM type: YTN; PAM sequence: TTT
  source 1..20: mol_type = other DNA
agattcactctcatgcttag

SEQ ID NO: 46823 - DNA, 20 bp, synthetic construct
  misc_feature 1..20: note = Description of Artificial Sequence: Synthetic oligonucleotide
  misc_feature 1..20: note = Target: SCN10A; (-) strand; PAM type: YTN; PAM sequence: TTA
  source 1..20: mol_type = other DNA
tttagattcactctcatgct

SEQ ID NO: 46824 - DNA, 20 bp, synthetic construct
  misc_feature 1..20: note = Description of Artificial Sequence: Synthetic oligonucleotide
  misc_feature 1..20: note = Target: SCN10A; (-) strand; PAM type: YTN; PAM sequence: TTT
  source 1..20: mol_type = other DNA
atttagattcactctcatgc

SEQ ID NO: 46825 - DNA, 20 bp, synthetic construct
  misc_feature 1..20: note = Description of Artificial Sequence: Synthetic oligonucleotide
  misc_feature 1..20: note = Target: SCN10A; (-) strand; PAM type: YTN; PAM sequence: CTC
  source 1..20: mol_type = other DNA
aatgtttatttagattcact

SEQ ID NO: 46826 - DNA, 20 bp, synthetic construct
  misc_feature 1..20: note = Description of Artificial Sequence: Synthetic oligonucleotide
  misc_feature 1..20: note = Target: SCN10A; (-) strand; PAM type: YTN; PAM sequence: TTG
  source 1..20: mol_type = other DNA
tgtccactcaatgtttattt

SEQ ID NO: 46827 - DNA, 20 bp, synthetic construct
  misc_feature 1..20: note = Description of Artificial Sequence: Synthetic oligonucleotide
  misc_feature 1..20: note = Target: SCN10A; (-) strand; PAM type: YTN; PAM sequence: TTG
  source 1..20: mol_type = other DNA
ttgtgtccactcaatgttta

SEQ ID NO: 46828 - DNA, 20 bp, synthetic construct
  misc_feature 1..20: note = Description of Artificial Sequence: Synthetic oligonucleotide
  misc_feature 1..20: note = Target: SCN10A; (-) strand; PAM type: YTN; PAM sequence: TTG
  source 1..20: mol_type = other DNA
ttgttgtgtccactcaatgt

SEQ ID NO: 46829 - DNA, 20 bp, synthetic construct
  misc_feature 1..20: note = Description of Artificial Sequence: Synthetic oligonucleotide
  misc_feature 1..20: note = Target: SCN10A; (-) strand; PAM type: YTN; PAM sequence: CTC
  source 1..20: mol_type = other DNA
acaagacattgttgttgtgt

SEQ ID NO: 46830 - DNA, 20 bp, synthetic construct
  misc_feature 1..20: note = Description of Artificial Sequence: Synthetic oligonucleotide
  misc_feature 1..20: note = Target: SCN10A; (-) strand; PAM type: YTN; PAM sequence: TTC
  source 1..20: mol_type = other DNA
cacatctcacaagacattgt

SEQ ID NO: 46831 - DNA, 20 bp, synthetic construct
  misc_feature 1..20: note = Description of Artificial Sequence: Synthetic oligonucleotide
  misc_feature 1..20: note = Target: SCN10A; (-) strand; PAM type: YTN; PAM sequence: CTT
  source 1..20: mol_type = other DNA
ccacatctcacaagacattg

SEQ ID NO: 46832 - DNA, 20 bp, synthetic construct
  misc_feature 1..20: note = Description of Artificial Sequence: Synthetic oligonucleotide
  misc_feature 1..20: note = Target: SCN10A; (-) strand; PAM type: YTN; PAM sequence: CTC
  source 1..20: mol_type = other DNA
ttccacatctcacaagacat

SEQ ID NO: 46833 - DNA, 20 bp, synthetic construct
  misc_feature 1..20: note = Description of Artificial Sequence: Synthetic oligonucleotide
  misc_feature 1..20: note = Target: SCN10A; (-) strand; PAM type: YTN; PAM sequence: CTA
  source 1..20: mol_type = other DNA
tatgaccagtctcttccaca

SEQ ID NO: 46834 - DNA, 20 bp, synthetic construct
  misc_feature 1..20: note = Description of Artificial Sequence: Synthetic oligonucleotide
  misc_feature 1..20: note = Target: SCN10A; (-) strand; PAM type: YTN; PAM sequence: CTG
  source 1..20: mol_type = other DNA
ggaggagaaaagtgaatgga

SEQ ID NO: 46835 - DNA, 20 bp, synthetic construct
  misc_feature 1..20: note = Description of Artificial Sequence: Synthetic oligonucleotide
  misc_feature 1..20: note = Target: SCN10A; (-) strand; PAM type: YTN; PAM sequence: TTG
  source 1..20: mol_type = other DNA
tgtctgggaggagaaaagtg

SEQ ID NO: 46836 - DNA, 20 bp, synthetic construct
  misc_feature 1..20: note = Description of Artificial Sequence: Synthetic oligonucleotide
  misc_feature 1..20: note = Target: SCN10A; (-) strand; PAM type: YTN; PAM sequence: TTC
  source 1..20: mol_type = other DNA
cgttgtgtctgggaggagaa

SEQ ID NO: 46837 - DNA, 20 bp, synthetic construct
  misc_feature 1..20: note = Description of Artificial Sequence: Synthetic oligonucleotide
  misc_feature 1..20: note = Target: SCN10A; (-) strand; PAM type: YTN; PAM sequence: CTT
  source 1..20: mol_type = other DNA
ccgttgtgtctgggaggaga

SEQ ID NO: 46838 - DNA, 20 bp, synthetic construct
  misc_feature 1..20: note = Description of Artificial Sequence: Synthetic oligonucleotide
  misc_feature 1..20: note = Target: SCN10A; (-) strand; PAM type: YTN; PAM sequence: CTG
  source 1..20: mol_type = other DNA
gaaaacagtcttccgttgtg

SEQ ID NO: 46839 - DNA, 20 bp, synthetic construct
  misc_feature 1..20: note = Description of Artificial Sequence: Synthetic oligonucleotide
  misc_feature 1..20: note = Target: SCN10A; (-) strand; PAM type: YTN; PAM sequence: TTG
  source 1..20: mol_type = other DNA
caagcaaaactggaaaacag

SEQ ID NO: 46840 - DNA, 20 bp, synthetic construct
  misc_feature 1..20: note = Description of Artificial Sequence: Synthetic oligonucleotide
  misc_feature 1..20: note = Target: SCN10A; (-) strand; PAM type: YTN; PAM sequence: TTT
  source 1..20: mol_type = other DNA
gcaagcaaaactggaaaaca

SEQ ID NO: 46841 - DNA, 20 bp, synthetic construct
  misc_feature 1..20: note = Description of Artificial Sequence: Synthetic oligonucleotide
  misc_feature 1..20: note = Target: SCN10A; (-) strand; PAM type: YTN; PAM sequence: CTA
  source 1..20: mol_type = other DNA
tttgcaagcaaaactggaaa

SEQ ID NO: 46842 - DNA, 20 bp, synthetic construct
  misc_feature 1..20: note = Description of Artificial Sequence: Synthetic oligonucleotide
  misc_feature 1..20: note = Target: SCN10A; (-) strand; PAM type: YTN; PAM sequence: CTA
  source 1..20: mol_type = other DNA
acatgaccccaactatttgc

SEQ ID NO: 46843 - DNA, 20 bp, synthetic construct
  misc_feature 1..20: note = Description of Artificial Sequence: Synthetic oligonucleotide
  misc_feature 1..20: note = Target: SCN10A; (-) strand; PAM type: YTN; PAM sequence: TTC
  source 1..20: mol_type = other DNA
caccagacagaacccactaa

SEQ ID NO: 46844 - DNA, 20 bp, synthetic construct
  misc_feature 1..20: note = Description of Artificial Sequence: Synthetic oligonucleotide
  misc_feature 1..20: note = Target: SCN10A; (-) strand; PAM type: YTN; PAM sequence: CTC
  source 1..20: mol_type = other DNA
cattccaccagacagaaccc

SEQ ID NO: 46845 - DNA, 20 bp, synthetic construct
  misc_feature 1..20: note = Description of Artificial Sequence: Synthetic oligonucleotide
  misc_feature 1..20: note = Target: SCN10A; (-) strand; PAM type: YTN; PAM sequence: CTC
  source 1..20: mol_type = other DNA
catctccattccaccagaca

SEQ ID NO: 46846 - DNA, 20 bp, synthetic construct
  misc_feature 1..20: note = Description of Artificial Sequence: Synthetic oligonucleotide
  misc_feature 1..20: note = Target: SCN10A; (-) strand; PAM type: YTN; PAM sequence: CTG
  source 1..20: mol_type = other DNA
tctccatctccattccacca

SEQ ID NO: 46847 - DNA, 20 bp, synthetic construct
  misc_feature 1..20: note = Description of Artificial Sequence: Synthetic oligonucleotide
  misc_feature 1..20: note = Target: SCN10A; (-) strand; PAM type: YTN; PAM sequence: TTC
  source 1..20: mol_type = other DNA
tgtctccatctccattccac

SEQ ID NO: 46848 - DNA, 20 bp, synthetic construct
  misc_feature 1..20: note = Description of Artificial Sequence: Synthetic oligonucleotide
  misc_feature 1..20: note = Target: SCN10A; (-) strand; PAM type: YTN; PAM sequence: CTT
  source 1..20: mol_type = other DNA
ctgtctccatctccattcca

SEQ ID NO: 46849 - DNA, 20 bp, synthetic construct
  misc_feature 1..20: note = Description of Artificial Sequence: Synthetic oligonucleotide
  misc_feature 1..20: note = Target: SCN10A; (-) strand; PAM type: YTN; PAM sequence: TTA
  source 1..20: mol_type = other DNA
cttctgtctccatctccatt

SEQ ID NO: 46850 - DNA, 20 bp, synthetic construct
  misc_feature 1..20: note = Description of Artificial Sequence: Synthetic oligonucleotide
  misc_feature 1..20: note = Target: SCN10A; (-) strand; PAM type: YTN; PAM sequence: CTA
  source 1..20: mol_type = other DNA
aaagtcatgtatattacttc

SEQ ID NO: 46851 - DNA, 20 bp, synthetic construct
  misc_feature 1..20: note = Description of Artificial Sequence: Synthetic oligonucleotide
  misc_feature 1..20: note = Target: SCN10A; (-) strand; PAM type: YTN; PAM sequence: CTA
  source 1..20: mol_type = other DNA
tgcctaaaagtcatgtatat

SEQ ID NO: 46852 - DNA, 20 bp, synthetic construct
  misc_feature 1..20: note = Description of Artificial Sequence: Synthetic oligonucleotide
  misc_feature 1..20: note = Target: SCN10A; (-) strand; PAM type: YTN; PAM sequence: TTA
  source 1..20: mol_type = other DNA
aggctatgcctaaaagtcat

SEQ ID NO: 46853 - DNA, 20 bp, synthetic construct
  misc_feature 1..20: note = Description of Artificial Sequence: Synthetic oligonucleotide
  misc_feature 1..20: note = Target: SCN10A; (-) strand; PAM type: YTN; PAM sequence: TTT
  source 1..20: mol_type = other DNA
aaggctatgcctaaaagtca

SEQ ID NO: 46854 - DNA, 20 bp, synthetic construct
  misc_feature 1..20: note = Description of Artificial Sequence: Synthetic oligonucleotide
  misc_feature 1..20: note = Target: SCN10A; (-) strand; PAM type: YTN; PAM sequence: TTC
  source 1..20: mol_type = other DNA
agggggtttaaggctatgcc

SEQ ID NO: 46855 - DNA, 20 bp, synthetic construct
  misc_feature 1..20: note = Description of Artificial Sequence: Synthetic oligonucleotide
  misc_feature 1..20: note = Target: SCN10A; (-) strand; PAM type: YTN; PAM sequence: TTA
  source 1..20: mol_type = other DNA
tggtgaacatgaaagggaaa

SEQ ID NO: 46856 - DNA, 20 bp, synthetic construct
  misc_feature 1..20: note = Description of Artificial Sequence: Synthetic oligonucleotide
  misc_feature 1..20: note = Target: SCN10A; (-) strand; PAM type: YTN; PAM sequence: TTT
  source 1..20: mol_type = other DNA
atggtgaacatgaaagggaa

SEQ ID NO: 46857 - DNA, 20 bp, synthetic construct
  misc_feature 1..20: note = Description of Artificial Sequence: Synthetic oligonucleotide
  misc_feature 1..20: note = Target: SCN10A; (-) strand; PAM type: YTN; PAM sequence: CTT
  source 1..20: mol_type = other DNA
tatggtgaacatgaaaggga

SEQ ID NO: 46858 - DNA, 20 bp, synthetic construct
  misc_feature 1..20: note = Description of Artificial Sequence: Synthetic oligonucleotide
  misc_feature 1..20: note = Target: SCN10A; (-) strand; PAM type: YTN; PAM sequence: TTA
  source 1..20: mol_type = other DNA
gtgacctttatggtgaacat

SEQ ID NO: 46859 - DNA, 20 bp, synthetic construct
  misc_feature 1..20: note = Description of Artificial Sequence: Synthetic oligonucleotide
  misc_feature 1..20: note = Target: SCN10A; (-) strand; PAM type: YTN; PAM sequence: TTC
  source 1..20: mol_type = other DNA
agttagtgacctttatggtg

SEQ ID NO: 46860 - DNA, 20 bp, synthetic construct
  misc_feature 1..20: note = Description of Artificial Sequence: Synthetic oligonucleotide
  misc_feature 1..20: note = Target: SCN10A; (-) strand; PAM type: YTN; PAM sequence: CTT
  source 1..20: mol_type = other DNA
cagttagtgacctttatggt

SEQ ID NO: 46861 - DNA, 20 bp, synthetic construct
  misc_feature 1..20: note = Description of Artificial Sequence: Synthetic oligonucleotide
  misc_feature 1..20: note = Target: SCN10A; (-) strand; PAM type: YTN; PAM sequence: TTA
  source 1..20: mol_type = other DNA
tcccatatcgtgatgtcacc

SEQ ID NO: 46862 - DNA, 20 bp, synthetic construct
  misc_feature 1..20: note = Description of Artificial Sequence: Synthetic oligonucleotide
  misc_feature 1..20: note = Target: SCN10A; (-) strand; PAM type: YTN; PAM sequence: CTA
  source 1..20: mol_type = other DNA
ggattatcccatatcgtgat

SEQ ID NO: 46863 - DNA, 20 bp, synthetic construct
  misc_feature 1..20: note = Description of Artificial Sequence: Synthetic oligonucleotide
  misc_feature 1..20: note = Target: SCN10A; (-) strand; PAM type: YTN; PAM sequence: CTC
  source 1..20: mol_type = other DNA
aaggatctaggattatccca

SEQ ID NO: 46864 - DNA, 20 bp, synthetic construct
  misc_feature 1..20: note = Description of Artificial Sequence: Synthetic oligonucleotide
  misc_feature 1..20: note = Target: SCN10A; (-) strand; PAM type: YTN; PAM sequence: TTC
  source 1..20: mol_type = other DNA
aagtagcgcctcaaggatct

SEQ ID NO: 46865 - DNA, 20 bp, synthetic construct
  misc_feature 1..20: note = Description of Artificial Sequence: Synthetic oligonucleotide
  misc_feature 1..20: note = Target: SCN10A; (-) strand; PAM type: YTN; PAM sequence: CTT
  source 1..20: mol_type = other DNA
caagtagcgcctcaaggatc

SEQ ID NO: 46866 - DNA, 20 bp, synthetic construct
  misc_feature 1..20: note = Description of Artificial Sequence: Synthetic oligonucleotide
  misc_feature 1..20: note = Target: SCN10A; (-) strand; PAM type: YTN; PAM sequence: CTA
  source 1..20: mol_type = other DNA
cttcaagtagcgcctcaagg

SEQ ID NO: 46867 - DNA, 20 bp, synthetic construct
  misc_feature 1..20: note = Description of Artificial Sequence: Synthetic oligonucleotide
  misc_feature 1..20: note = Target: SCN10A; (-) strand; PAM type: YTN; PAM sequence: CTG
  source 1..20: mol_type = other DNA
ggagtgtctacttcaagtag

SEQ ID NO: 46868 - DNA, 20 bp, synthetic construct
  misc_feature 1..20: note = Description of Artificial Sequence: Synthetic oligonucleotide
  misc_feature 1..20: note = Target: SCN10A; (-) strand; PAM type: YTN; PAM sequence: CTC
  source 1..20: mol_type = other DNA
ctgggagtgtctacttcaag

SEQ ID NO: 46869 - DNA, 20 bp, synthetic construct
  misc_feature 1..20: note = Description of Artificial Sequence: Synthetic oligonucleotide
  misc_feature 1..20: note = Target: SCN10A; (-) strand; PAM type: YTN; PAM sequence: CTC
  source 1..20: mol_type = other DNA
tcctgggagtgtctacttca

SEQ ID NO: 46870 - DNA, 20 bp, synthetic construct
  misc_feature 1..20: note = Description of Artificial Sequence: Synthetic oligonucleotide
  misc_feature 1..20: note = Target: SCN10A; (-) strand; PAM type: YTN; PAM sequence: TTG
  source 1..20: mol_type = other DNA
ggaagctctcctgggagtgt

SEQ ID NO: 46871 - DNA, 20 bp, synthetic construct
  misc_feature 1..20: note = Description of Artificial Sequence: Synthetic oligonucleotide
  misc_feature 1..20: note = Target: SCN10A; (-) strand; PAM type: YTN; PAM sequence: TTG
  source 1..20: mol_type = other DNA
ttgggaagctctcctgggag

SEQ ID NO: 46872 - DNA, 20 bp, synthetic construct
  misc_feature 1..20: note = Description of Artificial Sequence: Synthetic oligonucleotide
  misc_feature 1..20: note = Target: SCN10A; (-) strand; PAM type: YTN; PAM sequence: CTT
  source 1..20: mol_type = other DNA
gttgggaagctctcctggga

SEQ ID NO: 46873 - DNA, 20 bp, synthetic construct
  misc_feature 1..20: note = Description of Artificial Sequence: Synthetic oligonucleotide
  misc_feature 1..20: note = Target: SCN10A; (-) strand; PAM type: YTN; PAM sequence: TTC
  source 1..20: mol_type = other DNA
agtgcttgttgggaagctct

SEQ ID NO: 46874 - DNA, 20 bp, synthetic construct
  misc_feature 1..20: note = Description of Artificial Sequence: Synthetic oligonucleotide
  misc_feature 1..20: note = Target: SCN10A; (-) strand; PAM type: YTN; PAM sequence: CTC
  source 1..20: mol_type = other DNA
acagcacattcagtgcttgt

SEQ ID NO: 46875 - DNA, 20 bp, synthetic construct
  misc_feature 1..20: note = Description of Artificial Sequence: Synthetic oligonucleotide
  misc_feature 1..20: note = Target: SCN10A; (-) strand; PAM type: YTN; PAM sequence: TTA
  source 1..20: mol_type = other DNA
acataatagagatgtatgtc

SEQ ID NO: 46876 - DNA, 20 bp, synthetic construct
  misc_feature 1..20: note = Description of Artificial Sequence: Synthetic oligonucleotide
  misc_feature 1..20: note = Target: SCN10A; (-) strand; PAM type: YTN; PAM sequence: CTG
  source 1..20: mol_type = other DNA
tgagttaacataatagagat

SEQ ID NO: 46877 - DNA, 20 bp, synthetic construct
  misc_feature 1..20: note = Description of Artificial Sequence: Synthetic oligonucleotide
  misc_feature 1..20: note = Target: SCN10A; (-) strand; PAM type: YTN; PAM sequence: CTA
  source 1..20: mol_type = other DNA
aatctgtgagttaacataat

SEQ ID NO: 46878 - DNA, 20 bp, synthetic construct
  misc_feature 1..20: note = Description of Artificial Sequence: Synthetic oligonucleotide
  misc_feature 1..20: note = Target: SCN10A; (-) strand; PAM type: YTN; PAM sequence: CTC
  source 1..20: mol_type = other DNA
taaatctgtgagttaacata

SEQ ID NO: 46879 - DNA, 20 bp, synthetic construct
  misc_feature 1..20: note = Description of Artificial Sequence: Synthetic oligonucleotide
  misc_feature 1..20: note = Target: SCN10A; (-) strand; PAM type: YTN; PAM sequence: CTG
  source 1..20: mol_type = other DNA
cagtgataccctctaaatct

SEQ ID NO: 46880 - DNA, 20 bp, synthetic construct
  misc_feature 1..20: note = Description of Artificial Sequence: Synthetic oligonucleotide
  misc_feature 1..20: note = Target: SCN10A; (-) strand; PAM type: YTN; PAM sequence: CTA
  source 1..20: mol_type = other DNA
gctgcagtgataccctctaa

SEQ ID NO: 46881 - DNA, 20 bp, synthetic construct
  misc_feature 1..20: note = Description of Artificial Sequence: Synthetic oligonucleotide
  misc_feature 1..20: note = Target: SCN10A; (-) strand; PAM type: YTN; PAM sequence: CTC
  source 1..20: mol_type = other DNA
aagataagtacaactagctg

SEQ ID NO: 46882 - DNA, 20 bp, synthetic construct
  misc_feature 1..20: note = Description of Artificial Sequence: Synthetic oligonucleotide
  misc_feature 1..20: note = Target: SCN10A; (-) strand; PAM type: YTN; PAM sequence: TTA
  source 1..20: mol_type = other DNA
ctcaagataagtacaactag

SEQ ID NO: 46883 - DNA, 20 bp, synthetic construct
  misc_feature 1..20: note = Description of Artificial Sequence: Synthetic oligonucleotide
  misc_feature 1..20: note = Target: SCN10A; (-) strand; PAM type: YTN; PAM sequence: CTC
  source 1..20: mol_type = other DNA
cattactcaagataagtaca

SEQ ID NO: 46884 - DNA, 20 bp, synthetic construct
  misc_feature 1..20: note = Description of Artificial Sequence: Synthetic oligonucleotide
  misc_feature 1..20: note = Target: SCN10A; (-) strand; PAM type: YTN; PAM sequence: TTC
  source 1..20: mol_type = other DNA
tccattactcaagataagta

SEQ ID NO: 46885 - DNA, 20 bp, synthetic construct
  misc_feature 1..20: note = Description of Artificial Sequence: Synthetic oligonucleotide
  misc_feature 1..20: note = Target: SCN10A; (-) strand; PAM type: YTN; PAM sequence: TTT
  source 1..20: mol_type = other DNA
ctccattactcaagataagt

SEQ ID NO: 46886 - DNA, 20 bp, synthetic construct
  misc_feature 1..20: note = Description of Artificial Sequence: Synthetic oligonucleotide
  misc_feature 1..20: note = Target: SCN10A; (-) strand; PAM type: YTN; PAM sequence: TTC
  source 1..20: mol_type = other DNA
aatgaagcaatttctccatt

SEQ ID NO: 46887 - DNA, 20 bp, synthetic construct
  misc_feature 1..20: note = Description of Artificial Sequence: Synthetic oligonucleotide
  misc_feature 1..20: note = Target: SCN10A; (-) strand; PAM type: YTN; PAM sequence: TTT
  source 1..20: mol_type = other DNA
caatgaagcaatttctccat

SEQ ID NO: 46888 - DNA, 20 bp, synthetic construct
  misc_feature 1..20: note = Description of Artificial Sequence: Synthetic oligonucleotide
  misc_feature 1..20: note = Target: SCN10A; (-) strand; PAM type: YTN; PAM sequence: TTT
  source 1..20: mol_type = other DNA
tcaatgaagcaatttctcca

SEQ ID NO: 46889 - DNA, 20 bp, synthetic construct
  misc_feature 1..20: note = Description of Artificial Sequence: Synthetic oligonucleotide
  misc_feature 1..20: note = Target: SCN10A; (-) strand; PAM type: YTN; PAM sequence: TTT
  source 1..20: mol_type = other DNA
ttcaatgaagcaatttctcc

SEQ ID NO: 46890 - DNA, 20 bp, synthetic construct
  misc_feature 1..20: note = Description of Artificial Sequence: Synthetic oligonucleotide
  misc_feature 1..20: note = Target: SCN10A; (-) strand; PAM type: YTN; PAM sequence: TTT
  source 1..20: mol_type = other DNA
tttcaatgaagcaatttctc

SEQ ID NO: 46891 - DNA, 20 bp, synthetic construct
  misc_feature 1..20: note = Description of Artificial Sequence: Synthetic oligonucleotide
  misc_feature 1..20: note = Target: SCN10A; (-) strand; PAM type: YTN; PAM sequence: CTT
  source 1..20: mol_type = other DNA
ttttcaatgaagcaatttct

SEQ ID NO: 46892 - DNA, 20 bp, synthetic construct
  misc_feature 1..20: note = Description of Artificial Sequence: Synthetic oligonucleotide
  misc_feature 1..20: note = Target: SCN10A; (-) strand; PAM type: YTN; PAM sequence: TTG
  source 1..20: mol_type = other DNA
aaaaggcaataccttttttc

SEQ ID NO: 46893 - DNA, 20 bp, synthetic construct
  misc_feature 1..20: note = Description of Artificial Sequence: Synthetic oligonucleotide
  misc_feature 1..20: note = Target: SCN10A; (-) strand; PAM type: YTN; PAM sequence: TTT
  source 1..20: mol_type = other DNA
gaaaaggcaatacctttttt

SEQ ID NO: 46894 - DNA, 20 bp, synthetic construct
  misc_feature 1..20: note = Description of Artificial Sequence: Synthetic oligonucleotide
  misc_feature 1..20: note = Target: SCN10A; (-) strand; PAM type: YTN; PAM sequence: TTT
  source 1..20: mol_type = other DNA
tgaaaaggcaataccttttt

SEQ ID NO: 46895 - DNA, 20 bp, synthetic construct
  misc_feature 1..20: note = Description of Artificial Sequence: Synthetic oligonucleotide
  misc_feature 1..20: note = Target: SCN10A; (-) strand; PAM type: YTN; PAM sequence: CTT
  source 1..20: mol_type = other DNA
ttgaaaaggcaatacctttt

SEQ ID NO: 46896 - DNA, 20 bp, synthetic construct
  misc_feature 1..20: note = Description of Artificial Sequence: Synthetic oligonucleotide
  misc_feature 1..20: note = Target: SCN10A; (-) strand; PAM type: YTN; PAM sequence: TTG
  source 1..20: mol_type = other DNA
atgcttttgaaaaggcaata

SEQ ID NO: 46897 - DNA, 20 bp, synthetic construct
  misc_feature 1..20: note = Description of Artificial Sequence: Synthetic oligonucleotide
  misc_feature 1..20: note = Target: SCN10A; (-) strand; PAM type: YTN; PAM sequence: TTA
  source 1..20: mol_type = other DNA
agccagtgccacatagttga

SEQ ID NO: 46898 - DNA, 20 bp, synthetic construct
  misc_feature 1..20: note = Description of Artificial Sequence: Synthetic oligonucleotide
  misc_feature 1..20: note = Target: SCN10A; (-) strand; PAM type: YTN; PAM sequence: TTG
  source 1..20: mol_type = other DNA
cccaccacatgatcattaag

SEQ ID NO: 46899 - DNA, 20 bp, synthetic construct
  misc_feature 1..20: note = Description of Artificial Sequence: Synthetic oligonucleotide
  misc_feature 1..20: note = Target: SCN10A; (-) strand; PAM type: YTN; PAM sequence: TTG
  source 1..20: mol_type = other DNA
ttgcccaccacatgatcatt

SEQ ID NO: 46900 - DNA, 20 bp, synthetic construct
  misc_feature 1..20: note = Description of Artificial Sequence: Synthetic oligonucleotide
  misc_feature 1..20: note = Target: SCN10A; (-) strand; PAM type: YTN; PAM sequence: CTT
  source 1..20: mol_type = other DNA
gttgcccaccacatgatcat

SEQ ID NO: 46901 - DNA, 20 bp, synthetic construct
  misc_feature 1..20: note = Description of Artificial Sequence: Synthetic oligonucleotide
  misc_feature 1..20: note = Target: SCN10A; (-) strand; PAM type: YTN; PAM sequence: TTC
  source 1..20: mol_type = other DNA
cttgttgcccaccacatgat

SEQ ID NO: 46902 - DNA, 20 bp, synthetic construct
  misc_feature 1..20: note = Description of Artificial Sequence: Synthetic oligonucleotide
  misc_feature 1..20: note = Target: SCN10A; (-) strand; PAM type: YTN; PAM sequence: CTT
  source 1..20: mol_type = other DNA
ccttgttgcccaccacatga

SEQ ID NO: 46903 - DNA, 20 bp, synthetic construct
  misc_feature 1..20: note = Description of Artificial Sequence: Synthetic oligonucleotide
  misc_feature 1..20: note = Target: SCN10A; (-) strand; PAM type: YTN; PAM sequence: CTA
  source 1..20: mol_type = other DNA
tcagcttccttgttgcccac

SEQ ID NO: 46904 - DNA, 20 bp, synthetic construct
  misc_feature 1..20: note = Description of Artificial Sequence: Synthetic oligonucleotide
  misc_feature 1..20: note = Target: SCN10A; (-) strand; PAM type: YTN; PAM sequence: CTC
  source 1..20: mol_type = other DNA
ctatcagcttccttgttgcc

SEQ ID NO: 46905 - DNA, 20 bp, synthetic construct
  misc_feature 1..20: note = Description of Artificial Sequence: Synthetic oligonucleotide
  misc_feature 1..20: note = Target: SCN10A; (-) strand; PAM type: YTN; PAM sequence: TTC
  source 1..20: mol_type = other DNA
tcctatcagcttccttgttg

SEQ ID NO: 46906 - DNA, 20 bp, synthetic construct
  misc_feature 1..20: note = Description of Artificial Sequence: Synthetic oligonucleotide
  misc_feature 1..20: note = Target: SCN10A; (-) strand; PAM type: YTN; PAM sequence: CTT
  source 1..20: mol_type = other DNA
ctcctatcagcttccttgtt

SEQ ID NO: 46907 - DNA, 20 bp, synthetic construct
  misc_feature 1..20: note = Description of Artificial Sequence: Synthetic oligonucleotide
  misc_feature 1..20: note = Target: SCN10A; (-) strand; PAM type: YTN; PAM sequence: TTC
  source 1..20: mol_type = other DNA
caagccttctcctatcagct

SEQ ID NO: 46908 - DNA, 20 bp, synthetic construct
  misc_feature 1..20: note = Description of Artificial Sequence: Synthetic oligonucleotide
  misc_feature 1..20: note = Target: SCN10A; (-) strand; PAM type: YTN; PAM sequence: TTG
  source 1..20: mol_type = other DNA
acattccaagccttctccta

SEQ ID NO: 46909 - DNA, 20 bp, synthetic construct
  misc_feature 1..20: note = Description of Artificial Sequence: Synthetic oligonucleotide
  misc_feature 1..20: note = Target: SCN10A; (-) strand; PAM type: YTN; PAM sequence: CTG
  source 1..20: mol_type = other DNA
aataacatagattgacattc

SEQ ID NO: 46910 - DNA, 20 bp, synthetic construct
  misc_feature 1..20: note = Description of Artificial Sequence: Synthetic oligonucleotide
  misc_feature 1..20: note = Target: SCN10A; (-) strand; PAM type: YTN; PAM sequence: TTG
  source 1..20: mol_type = other DNA
tcactgaataacatagattg

SEQ ID NO: 46911 - DNA, 20 bp, synthetic construct
  misc_feature 1..20: note = Description of Artificial Sequence: Synthetic oligonucleotide
  misc_feature 1..20: note = Target: SCN10A; (-) strand; PAM type: YTN; PAM sequence: TTT
  source 1..20: mol_type = other DNA
gtcactgaataacatagatt

SEQ ID NO: 46912 - DNA, 20 bp, synthetic construct
  misc_feature 1..20: note = Description of Artificial Sequence: Synthetic oligonucleotide
  misc_feature 1..20: note = Target: SCN10A; (-) strand; PAM type: YTN; PAM sequence: TTT
  source 1..20: mol_type = other DNA
tgtcactgaataacatagat

SEQ ID NO: 46913 - DNA, 20 bp, synthetic construct
  misc_feature 1..20: note = Description of Artificial Sequence: Synthetic oligonucleotide
  misc_feature 1..20: note = Target: SCN10A; (-) strand; PAM type: YTN; PAM sequence: TTT
  source 1..20: mol_type = other DNA
ttgtcactgaataacataga

SEQ ID NO: 46914 - DNA, 20 bp, synthetic construct
  misc_feature 1..20: note = Description of Artificial Sequence: Synthetic oligonucleotide
  misc_feature 1..20: note = Target: SCN10A; (-) strand; PAM type: YTN; PAM sequence: TTG
  source 1..20: mol_type = other DNA
ccagcaatatttttgtcact

SEQ ID NO: 46915 - DNA, 20 bp, synthetic construct
  misc_feature 1..20: note = Description of Artificial Sequence: Synthetic oligonucleotide
  misc_feature 1..20: note = Target: SCN10A; (-) strand; PAM type: YTN; PAM sequence: TTT
  source 1..20: mol_type = other DNA
gccagcaatatttttgtcac

SEQ ID NO: 46916 - DNA, 20 bp, synthetic construct
  misc_feature 1..20: note = Description of Artificial Sequence: Synthetic oligonucleotide
  misc_feature 1..20: note = Target: SCN10A; (-) strand; PAM type: YTN; PAM sequence: TTT
  source 1..20: mol_type = other DNA
tgccagcaatatttttgtca

SEQ ID NO: 46917 - DNA, 20 bp, synthetic construct
  misc_feature 1..20: note = Description of Artificial Sequence: Synthetic oligonucleotide
  misc_feature 1..20: note = Target: SCN10A; (-) strand; PAM type: YTN; PAM sequence: TTT
  source 1..20: mol_type = other DNA
ttgccagcaatatttttgtc

SEQ ID NO: 46918 - DNA, 20 bp, synthetic construct
  misc_feature 1..20: note = Description of Artificial Sequence: Synthetic oligonucleotide
  misc_feature 1..20: note = Target: SCN10A; (-) strand; PAM type: YTN; PAM sequence: CTC
  source 1..20: mol_type = other DNA
aaaatttttgccagcaatat

SEQ ID NO: 46919 - DNA, 20 bp, synthetic construct
  misc_feature 1..20: note = Description of Artificial Sequence: Synthetic oligonucleotide
  misc_feature 1..20: note = Target: SCN10A; (-) strand; PAM type: YTN; PAM sequence: CTG
  source 1..20: mol_type = other DNA
cctcaaaatttttgccagca

SEQ ID NO: 46920 - DNA, 20 bp, synthetic construct
  misc_feature 1..20: note = Description of Artificial Sequence: Synthetic oligonucleotide
  misc_feature 1..20: note = Target: SCN10A; (-) strand; PAM type: YTN; PAM sequence: CTC
  source 1..20: mol_type = other DNA
tgcctcaaaatttttgccag

SEQ ID NO: 46921 - DNA, 20 bp, synthetic construct
  misc_feature 1..20: note = Description of Artificial Sequence: Synthetic oligonucleotide
  misc_feature 1..20: note = Target: SCN10A; (-) strand; PAM type: YTN; PAM sequence: CTC
  source 1..20: mol_type = other DNA
gtgctctgcctcaaaatttt

SEQ ID NO: 46922 - DNA, 20 bp, synthetic construct
  misc_feature 1..20: note = Description of Artificial Sequence: Synthetic oligonucleotide
  misc_feature 1..20: note = Target: SCN10A; (-) strand; PAM type: YTN; PAM sequence: TTC
  source 1..20: mol_type = other DNA
atgaggctcgtgctctgcct

SEQ ID NO: 46923 - DNA, 20 bp, synthetic construct
  misc_feature 1..20: note = Description of Artificial Sequence: Synthetic oligonucleotide
  misc_feature 1..20: note = Target: SCN10A; (-) strand; PAM type: YTN; PAM sequence: CTG
  source 1..20: mol_type = other DNA
gttcatgaggctcgtgctct

SEQ ID NO: 46924 - DNA, 20 bp, synthetic construct
  misc_feature 1..20: note = Description of Artificial Sequence: Synthetic oligonucleotide
  misc_feature 1..20: note = Target: SCN10A; (-) strand; PAM type: YTN; PAM sequence: TTG
  source 1..20: mol_type = other DNA
ctggttcatgaggctcgtgc

SEQ ID NO: 46925 - DNA, 20 bp, synthetic construct
  misc_feature 1..20: note = Description of Artificial Sequence: Synthetic oligonucleotide
  misc_feature 1..20: note = Target: SCN10A; (-) strand; PAM type: YTN; PAM sequence: CTA
  source 1..20: mol_type = other DNA
gggttgctggttcatgaggc

SEQ ID NO: 46926 - DNA, 20 bp, synthetic construct
  misc_feature 1..20: note = Description of Artificial Sequence: Synthetic oligonucleotide
  misc_feature 1..20: note = Target: SCN10A; (-) strand; PAM type: YTN; PAM sequence: TTC
  source 1..20: mol_type = other DNA
ccctagggttgctggttcat

SEQ ID NO: 46927 - DNA, 20 bp, synthetic construct
  misc_feature 1..20: note = Description of Artificial Sequence: Synthetic oligonucleotide
  misc_feature 1..20: note = Target: SCN10A; (-) strand; PAM type: YTN; PAM sequence: CTT
  source 1..20: mol_type = other DNA
cccctagggttgctggttca

SEQ ID NO: 46928 - DNA, 20 bp, synthetic construct
  misc_feature 1..20: note = Description of Artificial Sequence: Synthetic oligonucleotide
  misc_feature 1..20: note = Target: SCN10A; (-) strand; PAM type: YTN; PAM sequence: TTA
  source 1..20: mol_type = other DNA
ataaacccttcccctagggt

SEQ ID NO: 46929 - DNA, 20 bp, synthetic construct
  misc_feature 1..20: note = Description of Artificial Sequence: Synthetic oligonucleotide
  misc_feature 1..20: note = Target: SCN10A; (-) strand; PAM type: YTN; PAM sequence: TTT
  source 1..20: mol_type = other DNA
aataaacccttcccctaggg

SEQ ID NO: 46930 - DNA, 20 bp, synthetic construct
  misc_feature 1..20: note = Description of Artificial Sequence: Synthetic oligonucleotide
  misc_feature 1..20: note = Target: SCN10A; (-) strand; PAM type: YTN; PAM sequence: CTA
  source 1..20: mol_type = other DNA
aggtttaataaacccttccc

SEQ ID NO: 46931 - DNA, 20 bp, synthetic construct
  misc_feature 1..20: note = Description of Artificial Sequence: Synthetic oligonucleotide
  misc_feature 1..20: note = Target: SCN10A; (-) strand; PAM type: YTN; PAM sequence: CTG
  source 1..20: mol_type = other DNA
acccacaatactaaggttta

SEQ ID NO: 46932 - DNA, 20 bp, synthetic construct
  misc_feature 1..20: note = Description of Artificial Sequence: Synthetic oligonucleotide
  misc_feature 1..20: note = Target: SCN10A; (-) strand; PAM type: YTN; PAM sequence: TTA
  source 1..20: mol_type = other DNA
caactgacccacaatactaa

SEQ ID NO: 46933 - DNA, 20 bp, synthetic construct
  misc_feature 1..20: note = Description of Artificial Sequence: Synthetic oligonucleotide
  misc_feature 1..20: note = Target: SCN10A; (-) strand; PAM type: YTN; PAM sequence: TTG
  source 1..20: mol_type = other DNA
accaacatagccaattacaa

SEQ ID NO: 46934 - DNA, 20 bp, synthetic construct
  misc_feature 1..20: note = Description of Artificial Sequence: Synthetic oligonucleotide
  misc_feature 1..20: note = Target: SCN10A; (-) strand; PAM type: YTN; PAM sequence: CTT
  source 1..20: mol_type = other DNA
gaccaacatagccaattaca

SEQ ID NO: 46935 - DNA, 20 bp, synthetic construct
  misc_feature 1..20: note = Description of Artificial Sequence: Synthetic oligonucleotide
  misc_feature 1..20: note = Target: SCN10A; (-) strand; PAM type: YTN; PAM sequence: CTG
  source 1..20: mol_type = other DNA
tcttgaccaacatagccaat

SEQ ID NO: 46936 - DNA, 20 bp, synthetic construct
  misc_feature 1..20: note = Description of Artificial Sequence: Synthetic oligonucleotide
  misc_feature 1..20: note = Target: SCN10A; (-) strand; PAM type: YTN; PAM sequence: TTG
  source 1..20: mol_type = other DNA
tactgtcttgaccaacatag

SEQ ID NO: 46937 - DNA, 20 bp, synthetic construct
  misc_feature 1..20: note = Description of Artificial Sequence: Synthetic oligonucleotide
  misc_feature 1..20: note = Target: SCN10A; (-) strand; PAM type: YTN; PAM sequence: CTT
  source 1..20: mol_type = other DNA
gtactgtcttgaccaacata

SEQ ID NO: 46938 - DNA, 20 bp, synthetic construct
  misc_feature 1..20: note = Description of Artificial Sequence: Synthetic oligonucleotide
  misc_feature 1..20: note = Target: SCN10A; (-) strand; PAM type: YTN; PAM sequence: TTC
  source 1..20: mol_type = other DNA
ttgtactgtcttgaccaaca

SEQ ID NO: 46939 - DNA, 20 bp, synthetic construct
  misc_feature 1..20: note = Description of Artificial Sequence: Synthetic oligonucleotide
  misc_feature 1..20: note = Target: SCN10A; (-) strand; PAM type: YTN; PAM sequence: TTT
  source 1..20: mol_type = other DNA
cttgtactgtcttgaccaac

SEQ ID NO: 46940 - DNA, 20 bp, synthetic construct
  misc_feature 1..20: note = Description of Artificial Sequence: Synthetic oligonucleotide
  misc_feature 1..20: note = Target: SCN10A; (-) strand; PAM type: YTN; PAM sequence: CTT
  source 1..20: mol_type = other DNA
tcttgtactgtcttgaccaa

SEQ ID NO: 46941 - DNA, 20 bp, synthetic construct
  misc_feature 1..20: note = Description of Artificial Sequence: Synthetic oligonucleotide
  misc_feature 1..20: note = Target: SCN10A; (-) strand; PAM type: YTN; PAM sequence: CTC
  source 1..20: mol_type = other DNA
tttcttgtactgtcttgacc

SEQ ID NO: 46942 - DNA, 20 bp, synthetic construct
  misc_feature 1..20: note = Description of Artificial Sequence: Synthetic oligonucleotide
  misc_feature 1..20: note = Target: SCN10A; (-) strand; PAM type: YTN; PAM sequence: CTA
  source 1..20: mol_type = other DNA
atctctttcttgtactgtct

SEQ ID NO: 46943 - DNA, 20 bp, synthetic construct
  misc_feature 1..20: note = Description of Artificial Sequence: Synthetic oligonucleotide
  misc_feature 1..20: note = Target: SCN10A; (-) strand; PAM type: YTN; PAM sequence: CTG
  source 1..20: mol_type = other DNA
agctaatctctttcttgtac

SEQ ID NO: 46944 - DNA, 20 bp, synthetic construct
  misc_feature 1..20: note = Description of Artificial Sequence: Synthetic oligonucleotide
  misc_feature 1..20: note = Target: SCN10A; (-) strand; PAM type: YTN; PAM sequence: TTC
  source 1..20: mol_type = other DNA
ctgagctaatctctttcttg

SEQ ID NO: 46945 - DNA, 20 bp, synthetic construct
  misc_feature 1..20: note = Description of Artificial Sequence: Synthetic oligonucleotide
  misc_feature 1..20: note = Target: SCN10A; (-) strand; PAM type: YTN; PAM sequence: TTT
  source 1..20: mol_type = other DNA
cctgagctaatctctttctt

SEQ ID NO: 46946 - DNA, 20 bp, synthetic construct
  misc_feature 1..20: note = Description of Artificial Sequence: Synthetic oligonucleotide
  misc_feature 1..20: note = Target: SCN10A; (-) strand; PAM type: YTN; PAM sequence: CTT
  source 1..20: mol_type = other DNA
tcctgagctaatctctttct

SEQ ID NO: 46947 - DNA, 20 bp, synthetic construct
  misc_feature 1..20: note = Description of Artificial Sequence: Synthetic oligonucleotide
  misc_feature 1..20: note = Target: SCN10A; (-) strand; PAM type: YTN; PAM sequence: CTA
  source 1..20: mol_type = other DNA
aatctttcctgagctaatct

SEQ ID NO: 46948 - DNA, 20 bp, synthetic construct
  misc_feature 1..20: note = Description of Artificial Sequence: Synthetic oligonucleotide
  misc_feature 1..20: note = Target: SCN10A; (-) strand; PAM type: YTN; PAM sequence: TTA
  source 1..20: mol_type = other DNA
taaaccagctaaatctttcc

SEQ ID NO: 46949 - DNA, 20 bp, synthetic construct
  misc_feature 1..20: note = Description of Artificial Sequence: Synthetic oligonucleotide
  misc_feature 1..20: note = Target: SCN10A; (-) strand; PAM type: YTN; PAM sequence: CTT
  source 1..20: mol_type = other DNA
ataaaccagctaaatctttc

SEQ ID NO: 46950 - DNA, 20 bp, synthetic construct
  misc_feature 1..20: note = Description of Artificial Sequence: Synthetic oligonucleotide
  misc_feature 1..20: note = Target: SCN10A; (-) strand; PAM type: YTN; PAM sequence: TTC
  source 1..20: mol_type = other DNA
ttataaaccagctaaatctt

SEQ ID NO: 46951 - DNA, 20 bp, synthetic construct
  misc_feature 1..20: note = Description of Artificial Sequence: Synthetic oligonucleotide
  misc_feature 1..20: note = Target: SCN10A; (-) strand; PAM type: YTN; PAM sequence: TTA
  source 1..20: mol_type = other DNA
ttcttataaaccagctaaat

SEQ ID NO: 46952 - DNA, 20 bp, synthetic construct
  misc_feature 1..20: note = Description of Artificial Sequence: Synthetic oligonucleotide
  misc_feature 1..20: note = Target: SCN10A; (-) strand; PAM type: YTN; PAM sequence: TTT
  source 1..20: mol_type = other DNA
attcttataaaccagctaaa

SEQ ID NO: 46953 - DNA, 20 bp, synthetic construct
  misc_feature 1..20: note = Description of Artificial Sequence: Synthetic oligonucleotide
  misc_feature 1..20: note = Target: SCN10A; (-) strand; PAM type: YTN; PAM sequence: TTT
  source 1..20: mol_type = other DNA
tattcttataaaccagctaa

SEQ ID NO: 46954 - DNA, 20 bp, synthetic construct
  misc_feature 1..20: note = Description of Artificial Sequence: Synthetic oligonucleotide
  misc_feature 1..20: note = Target: SCN10A; (-) strand; PAM type: YTN; PAM sequence: CTT
  source 1..20: mol_type = other DNA
ttattcttataaaccagcta

SEQ ID NO: 46955 - DNA, 20 bp, synthetic construct
  misc_feature 1..20: note = Description of Artificial Sequence: Synthetic oligonucleotide
  misc_feature 1..20: note = Target: SCN10A; (-) strand; PAM type: YTN; PAM sequence: TTC
  source 1..20: mol_type = other DNA
ttttattcttataaaccagc

SEQ ID NO: 46956 - DNA, 20 bp, synthetic construct
  misc_feature 1..20: note = Description of Artificial Sequence: Synthetic oligonucleotide
  misc_feature 1..20: note = Target: SCN10A; (-) strand; PAM type: YTN; PAM sequence: TTT
  source 1..20: mol_type = other DNA
cttttattcttataaaccag

SEQ ID NO: 46957 - DNA, 20 bp, synthetic construct
  misc_feature 1..20: note = Description of Artificial Sequence: Synthetic oligonucleotide
  misc_feature 1..20: note = Target: SCN10A; (-) strand; PAM type: YTN; PAM sequence: TTT
  source 1..20: mol_type = other DNA
tcttttattcttataaacca

SEQ ID NO: 46958 - DNA, 20 bp, synthetic construct
  misc_feature 1..20: note = Description of Artificial Sequence: Synthetic oligonucleotide
  misc_feature 1..20: note = Target: SCN10A; (-) strand; PAM type: YTN; PAM sequence: TTA
  source 1..20: mol_type = other DNA
tattttcttttattcttata

SEQ ID NO: 46959 - DNA, 20 bp, synthetic construct
  misc_feature 1..20: note = Description of Artificial Sequence: Synthetic oligonucleotide
  misc_feature 1..20: note = Target: SCN10A; (-) strand; PAM type: YTN; PAM sequence: CTG
  source 1..20: mol_type = other DNA
gattatattttcttttattc

SEQ ID NO: 46960 - DNA, 20 bp, synthetic construct
  misc_feature 1..20: note = Description of Artificial Sequence: Synthetic oligonucleotide
  misc_feature 1..20: note = Target: SCN10A; (-) strand; PAM type: YTN; PAM sequence: TTC
  source 1..20: mol_type = other DNA
tggattatattttcttttat

SEQ ID NO: 46961 - DNA, 20 bp, synthetic construct
  misc_feature 1..20: note = Description of Artificial Sequence: Synthetic oligonucleotide
  misc_feature 1..20: note = Target: SCN10A; (-) strand; PAM type: YTN; PAM sequence: CTT
  source 1..20: mol_type = other DNA
ctggattatattttctttta

SEQ ID NO: 46962 - DNA, 20 bp, synthetic construct
  misc_feature 1..20: note = Description of Artificial Sequence: Synthetic oligonucleotide
  misc_feature 1..20: note = Target: SCN10A; (-) strand; PAM type: YTN; PAM sequence: CTA
  source 1..20: mol_type = other DNA
aacttctggattatattttc

SEQ ID NO: 46963 - DNA, 20 bp, synthetic construct
  misc_feature 1..20: note = Description of Artificial Sequence: Synthetic oligonucleotide
  misc_feature 1..20: note = Target: SCN10A; (-) strand; PAM type: YTN; PAM sequence: CTC
  source 1..20: mol_type = other DNA
taaacttctggattatattt

SEQ ID NO: 46964 - DNA, 20 bp, synthetic construct
  misc_feature 1..20: note = Description of Artificial Sequence: Synthetic oligonucleotide
  misc_feature 1..20: note = Target: SCN10A; (-) strand; PAM type: YTN; PAM sequence: CTA
  source 1..20: mol_type = other DNA
aatcgtcaaggctctaaact

SEQ ID NO: 46965 - DNA, 20 bp, synthetic construct
  misc_feature 1..20: note = Description of Artificial Sequence: Synthetic oligonucleotide
  misc_feature 1..20: note = Target: SCN10A; (-) strand; PAM type: YTN; PAM sequence: TTC
  source 1..20: mol_type = other DNA
cctaaatcgtcaaggctcta

SEQ ID NO: 46966 - DNA, 20 bp, synthetic construct
  misc_feature 1..20: note = Description of Artificial Sequence: Synthetic oligonucleotide
  misc_feature 1..20: note = Target: SCN10A; (-) strand; PAM type: YTN; PAM sequence: CTA
  source 1..20: mol_type = other DNA
gaagcagtacagttccctaa

SEQ ID NO: 46967 - DNA, 20 bp, synthetic construct
  misc_feature 1..20: note = Description of Artificial Sequence: Synthetic oligonucleotide
  misc_feature 1..20: note = Target: SCN10A; (-) strand; PAM type: YTN; PAM sequence: CTG
  source 1..20: mol_type = other DNA
gaatctagaagcagtacagt

SEQ ID NO: 46968 - DNA, 20 bp, synthetic construct
  misc_feature 1..20: note = Description of Artificial Sequence: Synthetic oligonucleotide
  misc_feature 1..20: note = Target: SCN10A; (-) strand; PAM type: YTN; PAM sequence: CTG
  source 1..20: mol_type = other DNA
cctggaatctagaagcagta

SEQ ID NO: 46969 - DNA, 20 bp, synthetic construct
  misc_feature 1..20: note = Description of Artificial Sequence: Synthetic oligonucleotide
  misc_feature 1..20: note = Target: SCN10A; (-) strand; PAM type: YTN; PAM sequence: CTC
  source 1..20: mol_type = other DNA
actgcctggaatctagaagc

SEQ ID NO: 46970 - DNA, 20 bp, synthetic construct
  misc_feature 1..20: note = Description of Artificial Sequence: Synthetic oligonucleotide
  misc_feature 1..20: note = Target: SCN10A; (-) strand; PAM type: YTN; PAM sequence: TTG
  source 1..20: mol_type = other DNA
ctcactgcctggaatctaga

SEQ ID NO: 46971 - DNA, 20 bp, synthetic construct
  misc_feature 1..20: note = Description of Artificial Sequence: Synthetic oligonucleotide
  misc_feature 1..20: note = Target: SCN10A; (-) strand; PAM type: YTN; PAM sequence: TTA
  source 1..20: mol_type = other DNA
atcccattgctcactgcctg

SEQ ID NO: 46972 - DNA, 20 bp, synthetic construct
  misc_feature 1..20: note = Description of Artificial Sequence: Synthetic oligonucleotide
  misc_feature 1..20: note = Target: SCN10A; (-) strand; PAM type: YTN; PAM sequence: CTT
  source 1..20: mol_type = other DNA
aatcccattgctcactgcct

SEQ ID NO: 46973 - DNA, 20 bp, synthetic construct
  misc_feature 1..20: note = Description of Artificial Sequence: Synthetic oligonucleotide
  misc_feature 1..20: note = Target: SCN10A; (-) strand; PAM type: YTN; PAM sequence: TTG
  source 1..20: mol_type = other DNA
aagacttaatcccattgctc

SEQ ID NO: 46974 - DNA, 20 bp, synthetic construct
  misc_feature 1..20: note = Description of Artificial Sequence: Synthetic oligonucleotide
  misc_feature 1..20: note = Target: SCN10A; (-) strand; PAM type: YTN; PAM sequence: TTT
  source 1..20: mol_type = other DNA
gaagacttaatcccattgct

SEQ ID NO: 46975 - DNA, 20 bp, synthetic construct
  misc_feature 1..20: note = Description of Artificial Sequence: Synthetic oligonucleotide
  misc_feature 1..20: note = Target: SCN10A; (-) strand; PAM type: YTN; PAM sequence: TTC
  source 1..20: mol_type = other DNA
aacatttgaagacttaatcc

SEQ ID NO: 46976 - DNA, 20 bp, synthetic construct
  misc_feature 1..20: note = Description of Artificial Sequence: Synthetic oligonucleotide
  misc_feature 1..20: note = Target: SCN10A; (-) strand; PAM type: YTN; PAM sequence: CTT
  source 1..20: mol_type = other DNA
caacatttgaagacttaatc

SEQ ID NO: 46977 - DNA, 20 bp, synthetic construct
  misc_feature 1..20: note = Description of Artificial Sequence: Synthetic oligonucleotide
  misc_feature 1..20: note = Target: SCN10A; (-) strand; PAM type: YTN; PAM sequence: CTA
  source 1..20: mol_type = other DNA
gtcttcaacatttgaagact

SEQ ID NO: 46978 - DNA, 20 bp, synthetic construct
  misc_feature 1..20: note = Description of Artificial Sequence: Synthetic oligonucleotide
  misc_feature 1..20: note = Target: SCN10A; (-) strand; PAM type: YTN; PAM sequence: TTA
  source 1..20: mol_type = other DNA
actagtcttcaacatttgaa

SEQ ID NO: 46979 - DNA, 20 bp, synthetic construct
  misc_feature 1..20: note = Description of Artificial Sequence: Synthetic oligonucleotide
  misc_feature 1..20: note = Target: SCN10A; (-) strand; PAM type: YTN; PAM sequence: TTT
  source 1..20: mol_type = other DNA
aactagtcttcaacatttga

SEQ ID NO: 46980 - DNA, 20 bp, synthetic construct
  misc_feature 1..20: note = Description of Artificial Sequence: Synthetic oligonucleotide
  misc_feature 1..20: note = Target: SCN10A; (-) strand; PAM type: YTN; PAM sequence: TTG
  source 1..20: mol_type = other DNA
gaaaatttaactagtcttca

SEQ ID NO: 46981 - DNA, 20 bp, synthetic construct
  misc_feature 1..20: note = Description of Artificial Sequence: Synthetic oligonucleotide
  misc_feature 1..20: note = Target: SCN10A; (-) strand; PAM type: YTN; PAM sequence: TTA
  source 1..20: mol_type = other DNA
attggaaaatttaactagtc

SEQ ID NO: 46982 - DNA, 20 bp, synthetic construct
  misc_feature 1..20: note = Description of Artificial Sequence: Synthetic oligonucleotide
  misc_feature 1..20: note = Target: SCN10A; (-) strand; PAM type: YTN; PAM sequence: TTT
  source 1..20: mol_type = other DNA
aattggaaaatttaactagt

SEQ ID NO: 46983 - DNA, 20 bp, synthetic construct
  misc_feature 1..20: note = Description of Artificial Sequence: Synthetic oligonucleotide
  misc_feature 1..20: note = Target: SCN10A; (-) strand; PAM type: YTN; PAM sequence: TTC
  source 1..20: mol_type = other DNA
atttaattggaaaatttaac

SEQ ID NO: 46984 - DNA, 20 bp, synthetic construct
  misc_feature 1..20: note = Description of Artificial Sequence: Synthetic oligonucleotide
  misc_feature 1..20: note = Target: SCN10A; (-) strand; PAM type: YTN; PAM sequence: TTT
  source 1..20: mol_type = other DNA
catttaattggaaaatttaa

SEQ ID NO: 46985 - DNA, 20 bp, synthetic construct
  misc_feature 1..20: note = Description of Artificial Sequence: Synthetic oligonucleotide
  misc_feature 1..20: note = Target: SCN10A; (-) strand; PAM type: YTN; PAM sequence: TTG
  source 1..20: mol_type = other DNA
tttcatttaattggaaaatt

SEQ ID NO: 46986 - DNA, 20 bp, synthetic construct
  misc_feature 1..20: note = Description of Artificial Sequence: Synthetic oligonucleotide
  misc_feature 1..20: note = Target: SCN10A; (-) strand; PAM type: YTN; PAM sequence: CTA
  source 1..20: mol_type = other DNA
agagttgtttcatttaattg

SEQ ID NO: 46987 - DNA, 20 bp, synthetic construct
  misc_feature 1..20: note = Description of Artificial Sequence: Synthetic oligonucleotide
  misc_feature 1..20: note = Target: SCN10A; (-) strand; PAM type: YTN; PAM sequence: TTG
  source 1..20: mol_type = other DNA
ctaagagttgtttcatttaa

SEQ ID NO: 46988 - DNA, 20 bp, synthetic construct
  misc_feature 1..20: note = Description of Artificial Sequence: Synthetic oligonucleotide
  misc_feature 1..20: note = Target: SCN10A; (-) strand; PAM type: YTN; PAM sequence: TTT
  source 1..20: mol_type = other DNA
gctaagagttgtttcattta

SEQ ID NO: 46989 - DNA, 20 bp, synthetic construct
  misc_feature 1..20: note = Description of Artificial Sequence: Synthetic oligonucleotide
  misc_feature 1..20: note = Target: SCN10A; (-) strand; PAM type: YTN; PAM sequence: CTT
  source 1..20: mol_type = other DNA
tgctaagagttgtttcattt

SEQ ID NO: 46990 - DNA, 20 bp, synthetic construct
  misc_feature 1..20: note = Description of Artificial Sequence: Synthetic oligonucleotide
  misc_feature 1..20: note = Target: SCN10A; (-) strand; PAM type: YTN; PAM sequence: CTA
  source 1..20: mol_type = other DNA
caagctttgctaagagttgt

SEQ ID NO: 46991 - DNA, 20 bp, synthetic construct
  misc_feature 1..20: note = Description of Artificial Sequence: Synthetic oligonucleotide
  misc_feature 1..20: note = Target: SCN10A; (-) strand; PAM type: YTN; PAM sequence: TTA
  source 1..20: mol_type = other DNA
ctacaagctttgctaagagt

SEQ ID NO: 46992 - DNA, 20 bp, synthetic construct
  misc_feature 1..20: note = Description of Artificial Sequence: Synthetic oligonucleotide
  misc_feature 1..20: note = Target: SCN10A; (-) strand; PAM type: YTN; PAM sequence: CTA
  source 1..20: mol_type = other DNA
caccattactacaagctttg

SEQ ID NO: 46993 - DNA, 20 bp, synthetic construct
  misc_feature 1..20: note = Description of Artificial Sequence: Synthetic oligonucleotide
  misc_feature 1..20: note = Target: SCN10A; (-) strand; PAM type: YTN; PAM sequence: TTG
  source 1..20: mol_type = other DNA
cacaagaaacagtggctaca

SEQ ID NO: 46994 - DNA, 20 bp, synthetic construct
  misc_feature 1..20: note = Description of Artificial Sequence: Synthetic oligonucleotide
  misc_feature 1..20: note = Target: SCN10A; (-) strand; PAM type: YTN; PAM sequence: CTT
  source 1..20: mol_type = other DNA
gcacaagaaacagtggctac

SEQ ID NO: 46995 - DNA, 20 bp, synthetic construct
  misc_feature 1..20: note = Description of Artificial Sequence: Synthetic oligonucleotide
  misc_feature 1..20: note = Target: SCN10A; (-) strand; PAM type: YTN; PAM sequence: CTC
  source 1..20: mol_type = other DNA
ttgcacaagaaacagtggct

SEQ ID NO: 46996 - DNA, 20 bp, synthetic construct
  misc_feature 1..20: note = Description of Artificial Sequence: Synthetic oligonucleotide
  misc_feature 1..20: note = Target: SCN10A; (-) strand; PAM type: YTN; PAM sequence: TTC
  source 1..20: mol_type = other DNA
tcttgcacaagaaacagtgg

SEQ ID NO: 46997 - DNA, 20 bp, synthetic construct
  misc_feature 1..20: note = Description of Artificial Sequence: Synthetic oligonucleotide
  misc_feature 1..20: note = Target: SCN10A; (-) strand; PAM type: YTN; PAM sequence: TTT
  source 1..20: mol_type = other DNA
ctcttgcacaagaaacagtg

SEQ ID NO: 46998 - DNA, 20 bp, synthetic construct
  misc_feature 1..20: note = Description of Artificial Sequence: Synthetic oligonucleotide
  misc_feature 1..20: note = Target: SCN10A; (-) strand; PAM type: YTN; PAM sequence: CTT
  source 1..20: mol_type = other DNA
tctcttgcacaagaaacagt

SEQ ID NO: 46999 - DNA, 20 bp, synthetic construct
  misc_feature 1..20: note = Description of Artificial Sequence: Synthetic oligonucleotide
  misc_feature 1..20: note = Target: SCN10A; (-) strand; PAM type: YTN; PAM sequence: TTC
  source 1..20: mol_type = other DNA
cccatgcctttctcttgcac

SEQ ID NO: 47000 - DNA, 20 bp, synthetic construct
  misc_feature 1..20: note = Description of Artificial Sequence: Synthetic oligonucleotide
  misc_feature 1..20: note = Target: SCN10A; (-) strand; PAM type: YTN; PAM sequence: TTT
  source 1..20: mol_type = other DNA
ccccatgcctttctcttgca

SEQ ID NO: 47001 - DNA, 20 bp, synthetic construct
  misc_feature 1..20: note = Description of Artificial Sequence: Synthetic oligonucleotide
  misc_feature 1..20: note = Target: SCN10A; (-) strand; PAM type: YTN; PAM sequence: CTT
  source 1..20: mol_type = other DNA
tccccatgcctttctcttgc

SEQ ID NO: 47002 - DNA, 20 bp, synthetic construct
  misc_feature 1..20: note = Description of Artificial Sequence: Synthetic oligonucleotide
  misc_feature 1..20: note = Target: SCN10A; (-) strand; PAM type: YTN; PAM sequence: TTC
  source 1..20: mol_type = other DNA
ctttccccatgcctttctct

SEQ ID NO: 47003 - DNA, 20 bp, synthetic construct
  misc_feature 1..20: note = Description of Artificial Sequence: Synthetic oligonucleotide
  misc_feature 1..20: note = Target: SCN10A; (-) strand; PAM type: YTN; PAM sequence: TTT
  source 1..20: mol_type = other DNA
cctttccccatgcctttctc

SEQ ID NO: 47004 - DNA, 20 bp, synthetic construct
  misc_feature 1..20: note = Description of Artificial Sequence: Synthetic oligonucleotide
  misc_feature 1..20: note = Target: SCN10A; (-) strand; PAM type: YTN; PAM sequence: CTT
  source 1..20: mol_type = other DNA
tcctttccccatgcctttct

SEQ ID NO: 47005 - DNA, 20 bp, synthetic construct
  misc_feature 1..20: note = Description of Artificial Sequence: Synthetic oligonucleotide
  misc_feature 1..20: note = Target: SCN10A; (-) strand; PAM type: YTN; PAM sequence: TTG
  source 1..20: mol_type = other DNA
ctttcctttccccatgcctt

SEQ ID NO: 47006 - DNA, 20 bp, synthetic construct
  misc_feature 1..20: note = Description of Artificial Sequence: Synthetic oligonucleotide
  misc_feature 1..20: note = Target: SCN10A; (-) strand; PAM type: YTN; PAM sequence: TTT
  source 1..20: mol_type = other DNA
gctttcctttccccatgcct

SEQ ID NO: 47007 - DNA, 20 bp, synthetic construct
  misc_feature 1..20: note = Description of Artificial Sequence: Synthetic oligonucleotide
  misc_feature 1..20: note = Target: SCN10A; (-) strand; PAM type: YTN; PAM sequence: CTT
  source 1..20: mol_type = other DNA
tgctttcctttccccatgcc

SEQ ID NO: 47008 - DNA, 20 bp, synthetic construct
  misc_feature 1..20: note = Description of Artificial Sequence: Synthetic oligonucleotide
  misc_feature 1..20: note = Target: SCN10A; (-) strand; PAM type: YTN; PAM sequence: TTC
  source 1..20: mol_type = other DNA
tttgctttcctttccccatg

SEQ ID NO: 47009 - DNA, 20 bp, synthetic construct
  misc_feature 1..20: note = Description of Artificial Sequence: Synthetic oligonucleotide
  misc_feature 1..20: note = Target: SCN10A; (-) strand; PAM type: YTN; PAM sequence: TTT
  source 1..20: mol_type = other DNA
ctttgctttcctttccccat

SEQ ID NO: 47010 - DNA, 20 bp, synthetic construct
  misc_feature 1..20: note = Description of Artificial Sequence: Synthetic oligonucleotide
  misc_feature 1..20: note = Target: SCN10A; (-) strand; PAM type: YTN; PAM sequence: TTA
  source 1..20: mol_type = other DNA
tttctttgctttcctttccc

SEQ ID NO: 47011 - DNA, 20 bp, synthetic construct
  misc_feature 1..20: note = Description of Artificial Sequence: Synthetic oligonucleotide
  misc_feature 1..20: note = Target: SCN10A; (-) strand; PAM type: YTN; PAM sequence: TTT
  source 1..20: mol_type = other DNA
atttctttgctttcctttcc

SEQ ID NO: 47012 - DNA, 20 bp, synthetic construct
  misc_feature 1..20: note = Description of Artificial Sequence: Synthetic oligonucleotide
  misc_feature 1..20: note = Target: SCN10A; (-) strand; PAM type: YTN; PAM sequence: CTT
  source 1..20: mol_type = other DNA
tatttctttgctttcctttc

SEQ ID NO: 47013 - DNA, 20 bp, synthetic construct
  misc_feature 1..20: note = Description of Artificial Sequence: Synthetic oligonucleotide
  misc_feature 1..20: note = Target: SCN10A; (-) strand; PAM type: YTN; PAM sequence: TTC
  source 1..20: mol_type = other DNA
tttatttctttgctttcctt

SEQ ID NO: 47014 - DNA, 20 bp, synthetic construct
  misc_feature 1..20: note = Description of Artificial Sequence: Synthetic oligonucleotide
  misc_feature 1..20: note = Target: SCN10A; (-) strand; PAM type: YTN; PAM sequence: TTG
  source 1..20: mol_type = other DNA
ttctttatttctttgctttc

SEQ ID NO: 47015 - DNA, 20 bp, synthetic construct
  misc_feature 1..20: note = Description of Artificial Sequence: Synthetic oligonucleotide
  misc_feature 1..20: note = Target: SCN10A; (-) strand; PAM type: YTN; PAM sequence: CTC
  source 1..20: mol_type = other DNA
aattgttctttatttctttg

SEQ ID NO: 47016 - DNA, 20 bp, synthetic construct
  misc_feature 1..20: note = Description of Artificial Sequence: Synthetic oligonucleotide
  misc_feature 1..20: note = Target: SCN10A; (-) strand; PAM type: YTN; PAM sequence: TTC
  source 1..20: mol_type = other DNA
tcaattgttctttatttctt

SEQ ID NO: 47017 - DNA, 20 bp, synthetic construct
  misc_feature 1..20: note = Description of Artificial Sequence: Synthetic oligonucleotide
  misc_feature 1..20: note = Target: SCN10A; (-) strand; PAM type: YTN; PAM sequence: TTG
  source 1..20: mol_type = other DNA
acaaagttctcaattgttct

SEQ ID NO: 47018 - DNA, 20 bp, synthetic construct
  misc_feature 1..20: note = Description of Artificial Sequence: Synthetic oligonucleotide
  misc_feature 1..20: note = Target: SCN10A; (-) strand; PAM type: YTN; PAM sequence: TTT
  source 1..20: mol_type = other DNA
gacaaagttctcaattgttc

SEQ ID NO: 47019 - DNA, 20 bp, synthetic construct
  misc_feature 1..20: note = Description of Artificial Sequence: Synthetic oligonucleotide
  misc_feature 1..20: note = Target: SCN10A; (-) strand; PAM type: YTN; PAM sequence: CTT
  source 1..20: mol_type = other DNA
tgacaaagttctcaattgtt

SEQ ID NO: 47020 - DNA, 20 bp, synthetic construct
  misc_feature 1..20: note = Description of Artificial Sequence: Synthetic oligonucleotide
  misc_feature 1..20: note = Target: SCN10A; (-) strand; PAM type: YTN; PAM sequence: TTC
  source 1..20: mol_type = other DNA
tttgacaaagttctcaattg

SEQ ID NO: 47021 - DNA, 20 bp, synthetic construct
  misc_feature 1..20: note = Description of Artificial Sequence: Synthetic oligonucleotide
  misc_feature 1..20: note = Target: SCN10A; (-) strand; PAM type: YTN; PAM sequence: TTT
  source 1..20: mol_type = other DNA
ctttgacaaagttctcaatt

SEQ ID NO: 47022 - DNA, 20 bp, synthetic construct
  misc_feature 1..20: note = Description of Artificial Sequence: Synthetic oligonucleotide
  misc_feature 1..20: note = Target: SCN10A; (-) strand; PAM type: YTN; PAM sequence: CTT
  source 1..20: mol_type = other DNA
tctttgacaaagttctcaat

SEQ ID NO: 47023 - DNA, 20 bp, synthetic construct
  misc_feature 1..20: note = Description of Artificial Sequence: Synthetic oligonucleotide
  misc_feature 1..20: note = Target: SCN10A; (-) strand; PAM type: YTN; PAM sequence: TTG
  source 1..20: mol_type = other DNA
ccacacaaagtgctttcttt

SEQ ID NO: 47024 - DNA, 20 bp, synthetic construct
  misc_feature 1..20: note = Description of Artificial Sequence: Synthetic oligonucleotide
  misc_feature 1..20: note = Target: SCN10A; (-) strand; PAM type: YTN; PAM sequence: CTC
  source 1..20: mol_type = other DNA
attgccacacaaagtgcttt

SEQ ID NO: 47025 - DNA, 20 bp, synthetic construct
  misc_feature 1..20: note = Description of Artificial Sequence: Synthetic oligonucleotide
  misc_feature 1..20: note = Target: SCN10A; (-) strand; PAM type: YTN; PAM sequence: CTC
  source 1..20: mol_type = other DNA
tcattgccacacaaagtgct

SEQ ID NO: 47026 - DNA, 20 bp, synthetic construct
  misc_feature 1..20: note = Description of Artificial Sequence: Synthetic oligonucleotide
  misc_feature 1..20: note = Target: SCN10A; (-) strand; PAM type: YTN; PAM sequence: TTC
  source 1..20: mol_type = other DNA
agacctctcattgccacaca

SEQ ID NO: 47027 - DNA, 20 bp, synthetic construct
  misc_feature 1..20: note = Description of Artificial Sequence: Synthetic oligonucleotide
  misc_feature 1..20: note = Target: SCN10A; (-) strand; PAM type: YTN; PAM sequence: CTT
  source 1..20: mol_type = other DNA
cagacctctcattgccacac

SEQ ID NO: 47028 - DNA, 20 bp, synthetic construct
  misc_feature 1..20: note = Description of Artificial Sequence: Synthetic oligonucleotide
  misc_feature 1..20: note = Target: SCN10A; (-) strand; PAM type: YTN; PAM sequence: TTA
  source 1..20: mol_type = other DNA
gatggcttcagacctctcat

SEQ ID NO: 47029 - DNA, 20 bp, synthetic construct
  misc_feature 1..20: note = Description of Artificial Sequence: Synthetic oligonucleotide
  misc_feature 1..20: note = Target: SCN10A; (-) strand; PAM type: YTN; PAM sequence: CTT
  source 1..20: mol_type = other DNA
agatggcttcagacctctca

SEQ ID NO: 47030 - DNA, 20 bp, synthetic construct
  misc_feature 1..20: note = Description of Artificial Sequence: Synthetic oligonucleotide
  misc_feature 1..20: note = Target: SCN10A; (-) strand; PAM type: YTN; PAM sequence: TTC
  source 1..20: mol_type = other DNA
aaaaacttagatggcttcag

SEQ ID NO: 47031 - DNA, 20 bp, synthetic construct
  misc_feature 1..20: note = Description of Artificial Sequence: Synthetic oligonucleotide
  misc_feature 1..20: note = Target: SCN10A; (-) strand; PAM type: YTN; PAM sequence: CTT
  source 1..20: mol_type = other DNA
caaaaacttagatggcttca

SEQ ID NO: 47032 - DNA, 20 bp, synthetic construct
  misc_feature 1..20: note = Description of Artificial Sequence: Synthetic oligonucleotide
  misc_feature 1..20: note = Target: SCN10A; (-) strand; PAM type: YTN; PAM sequence: TTA
  source 1..20: mol_type = other DNA
cttcaaaaacttagatggct

SEQ ID NO: 47033 - DNA, 20 bp, synthetic construct
  misc_feature 1..20: note = Description of Artificial Sequence: Synthetic oligonucleotide
  misc_feature 1..20: note = Target: SCN10A; (-) strand; PAM type: YTN; PAM sequence: TTC
  source 1..20: mol_type = other DNA
acaatacaattacttcaaaa

SEQ ID NO: 47034 - DNA, 20 bp, synthetic construct
  misc_feature 1..20: note = Description of Artificial Sequence: Synthetic oligonucleotide
  misc_feature 1..20: note = Target: SCN10A; (-) strand; PAM type: YTN; PAM sequence: TTT
  source 1..20: mol_type = other DNA
cacaatacaattacttcaaa

SEQ ID NO: 47035 - DNA, 20 bp, synthetic construct
  misc_feature 1..20: note = Description of Artificial Sequence: Synthetic oligonucleotide
  misc_feature 1..20: note = Target: SCN10A; (-) strand; PAM type: YTN; PAM sequence: TTA
  source 1..20: mol_type = other DNA
tttcacaatacaattacttc

SEQ ID NO: 47036 - DNA, 20 bp, synthetic construct
  misc_feature 1..20: note = Description of Artificial Sequence: Synthetic oligonucleotide
  misc_feature 1..20: note = Target: SCN10A; (-) strand; PAM type: YTN; PAM sequence: TTT
  source 1..20: mol_type = other DNA
atttcacaatacaattactt

SEQ ID NO: 47037 - DNA, 20 bp, synthetic construct
  misc_feature 1..20: note = Description of Artificial Sequence: Synthetic oligonucleotide
  misc_feature 1..20: note = Target: SCN10A; (-) strand; PAM type: YTN; PAM sequence: TTG
  source 1..20: mol_type = other DNA
atttatttcacaatacaatt

SEQ ID NO: 47038 - DNA, 20 bp, synthetic construct
  misc_feature 1..20: note = Description of Artificial Sequence: Synthetic oligonucleotide
  misc_feature 1..20: note = Target: SCN10A; (-) strand; PAM type: YTN; PAM sequence: TTT
  source 1..20: mol_type = other DNA
gatttatttcacaatacaat

SEQ ID NO: 47039 - DNA, 20 bp, synthetic construct
  misc_feature 1..20: note = Description of Artificial Sequence: Synthetic oligonucleotide
  misc_feature 1..20: note = Target: SCN10A; (-) strand; PAM type: YTN; PAM sequence: TTT
  source 1..20: mol_type = other DNA
tgatttatttcacaatacaa

SEQ ID NO: 47040 - DNA, 20 bp, synthetic construct
  misc_feature 1..20: note = Description of Artificial Sequence: Synthetic oligonucleotide
  misc_feature 1..20: note = Target: SCN10A; (-) strand; PAM type: YTN; PAM sequence: TTC
  source 1..20: mol_type = other DNA
agtcagggattttgatttat

SEQ ID NO: 47041 - DNA, 20 bp, synthetic construct
  misc_feature 1..20: note = Description of Artificial Sequence: Synthetic oligonucleotide
  misc_feature 1..20: note = Target: SCN10A; (-) strand; PAM type: YTN; PAM sequence: TTT
  source 1..20: mol_type = other DNA
cagtcagggattttgattta

SEQ ID NO: 47042 - DNA, 20 bp, synthetic construct
  misc_feature 1..20: note = Description of Artificial Sequence: Synthetic oligonucleotide
  misc_feature 1..20: note = Target: SCN10A; (-) strand; PAM type: YTN; PAM sequence: TTT
  source 1..20: mol_type = other DNA
tcagtcagggattttgattt

SEQ ID NO: 47043 - DNA, 20 bp, synthetic construct
  misc_feature 1..20: note = Description of Artificial Sequence: Synthetic oligonucleotide
  misc_feature 1..20: note = Target: SCN10A; (-) strand; PAM type: YTN; PAM sequence: TTT
  source 1..20: mol_type = other DNA
ttcagtcagggattttgatt

SEQ ID NO: 47044 - DNA, 20 bp, synthetic construct
  misc_feature 1..20: note = Description of Artificial Sequence: Synthetic oligonucleotide
  misc_feature 1..20: note = Target: SCN10A; (-) strand; PAM type: YTN; PAM sequence: CTT
  source 1..20: mol_type = other DNA
tttcagtcagggattttgat

SEQ ID NO: 47045 - DNA, 20 bp, synthetic construct
  misc_feature 1..20: note = Description of Artificial Sequence: Synthetic oligonucleotide
  misc_feature 1..20: note = Target: SCN10A; (-) strand; PAM type: YTN; PAM sequence: TTA
  source 1..20: mol_type = other DNA
aacagtgaaaggctttttca

SEQ ID NO: 47046 - DNA, 20 bp, synthetic construct
  misc_feature 1..20: note = Description of Artificial Sequence: Synthetic oligonucleotide
  misc_feature 1..20: note = Target: SCN10A; (-) strand; PAM type: YTN; PAM sequence: TTT
  source 1..20: mol_type = other DNA
aaacagtgaaaggctttttc

SEQ ID NO: 47047 - DNA, 20 bp, synthetic construct
  misc_feature 1..20: note = Description of Artificial Sequence: Synthetic oligonucleotide
  misc_feature 1..20: note = Target: SCN10A; (-) strand; PAM type: YTN; PAM sequence: TTA
  source 1..20: mol_type = other DNA
aggtttaaacagtgaaaggc

SEQ ID NO: 47048 - DNA, 20 bp, synthetic construct
  misc_feature 1..20: note = Description of Artificial Sequence: Synthetic oligonucleotide
  misc_feature 1..20: note = Target: SCN10A; (-) strand; PAM type: YTN; PAM sequence: TTT
  source 1..20: mol_type = other DNA
aaggtttaaacagtgaaagg

SEQ ID NO: 47049 - DNA, 20 bp, synthetic construct
  misc_feature 1..20: note = Description of Artificial Sequence: Synthetic oligonucleotide
  misc_feature 1..20: note = Target: SCN10A; (-) strand; PAM type: YTN; PAM sequence: TTT
  source 1..20: mol_type = other DNA
taaggtttaaacagtgaaag

SEQ ID NO: 47050 - DNA, 20 bp, synthetic construct
  misc_feature 1..20: note = Description of Artificial Sequence: Synthetic oligonucleotide
  misc_feature 1..20: note = Target: SCN10A; (-) strand; PAM type: YTN; PAM sequence: TTG
  source 1..20: mol_type = other DNA
ttttaaggtttaaacagtga

SEQ ID NO: 47051 - DNA, 20 bp, synthetic construct
  misc_feature 1..20: note = Description of Artificial Sequence: Synthetic oligonucleotide
  misc_feature 1..20: note = Target: SCN10A; (-) strand; PAM type: YTN; PAM sequence: TTT
  source 1..20: mol_type = other DNA
gttttaaggtttaaacagtg

SEQ ID NO: 47052 - DNA, 20 bp, synthetic construct
  misc_feature 1..20: note = Description of Artificial Sequence: Synthetic oligonucleotide
  misc_feature 1..20: note = Target: SCN10A; (-) strand; PAM type: YTN; PAM sequence: TTG
  source 1..20: mol_type = other DNA
tgggaaaatggaaagccaag

SEQ ID NO: 47053 - DNA, 20 bp, synthetic construct
  misc_feature 1..20: note = Description of Artificial Sequence: Synthetic oligonucleotide
  misc_feature 1..20: note = Target: SCN10A; (-) strand; PAM type: YTN; PAM sequence: CTT
  source 1..20: mol_type = other DNA
gtgggaaaatggaaagccaa

SEQ ID NO: 47054 - DNA, 20 bp, synthetic construct
  misc_feature 1..20: note = Description of Artificial Sequence: Synthetic oligonucleotide
  misc_feature 1..20: note = Target: SCN10A; (-) strand; PAM type: YTN; PAM sequence: CTG
  source 1..20: mol_type = other DNA
cttgtgggaaaatggaaagc

SEQ ID NO: 47055 - DNA, 20 bp, synthetic construct
  misc_feature 1..20: note = Description of Artificial Sequence: Synthetic oligonucleotide
  misc_feature 1..20: note = Target: SCN10A; (-) strand; PAM type: YTN; PAM sequence: CTC
  source 1..20: mol_type = other DNA
ctgcttgtgggaaaatggaa

SEQ ID NO: 47056 - DNA, 20 bp, synthetic construct
  misc_feature 1..20: note = Description of Artificial Sequence: Synthetic oligonucleotide
  misc_feature 1..20: note = Target: SCN10A; (-) strand; PAM type: YTN; PAM sequence: TTG
  source 1..20: mol_type = other DNA
cctcctgcttgtgggaaaat

SEQ ID NO: 47057 - DNA, 20 bp, synthetic construct
  misc_feature 1..20: note = Description of Artificial Sequence: Synthetic oligonucleotide
  misc_feature 1..20: note = Target: SCN10A; (-) strand; PAM type: YTN; PAM sequence: TTT
  source 1..20: mol_type = other DNA
gcctcctgcttgtgggaaaa

SEQ ID NO: 47058 - DNA, 20 bp, synthetic construct
  misc_feature 1..20: note = Description of Artificial Sequence: Synthetic oligonucleotide
  misc_feature 1..20: note = Target: SCN10A; (-) strand; PAM type: YTN; PAM sequence: TTC
  source 1..20: mol_type = other DNA
aaagtttgcctcctgcttgt

SEQ ID NO: 47059 - DNA, 20 bp, synthetic construct
  misc_feature 1..20: note = Description of Artificial Sequence: Synthetic oligonucleotide
  misc_feature 1..20: note = Target: SCN10A; (-) strand; PAM type: YTN; PAM sequence: CTT
  source 1..20: mol_type = other DNA
caaagtttgcctcctgcttg

SEQ ID NO: 47060 - DNA, 20 bp, synthetic construct
  misc_feature 1..20: note = Description of Artificial Sequence: Synthetic oligonucleotide
  misc_feature 1..20: note = Target: SCN10A; (-) strand; PAM type: YTN; PAM sequence: CTG
  source 1..20: mol_type = other DNA
aaggaggccaatataacttc

SEQ ID NO: 47061 - DNA, 20 bp, synthetic construct
  misc_feature 1..20: note = Description of Artificial Sequence: Synthetic oligonucleotide
  misc_feature 1..20: note = Target: SCN10A; (-) strand; PAM type: YTN; PAM sequence: TTG
  source 1..20: mol_type = other DNA
ccatgcctgaaggaggccaa

SEQ ID NO: 47062 - DNA, 20 bp, synthetic construct
  misc_feature 1..20: note = Description of Artificial Sequence: Synthetic oligonucleotide
  misc_feature 1..20: note = Target: SCN10A; (-) strand; PAM type: YTN; PAM sequence: TTT
  source 1..20: mol_type = other DNA
gccatgcctgaaggaggcca

SEQ ID NO: 47063 - DNA, 20 bp, synthetic construct
  misc_feature 1..20: note = Description of Artificial Sequence: Synthetic oligonucleotide
  misc_feature 1..20: note = Target: SCN10A; (-) strand; PAM type: YTN; PAM sequence: CTT
  source 1..20: mol_type = other DNA
tgccatgcctgaaggaggcc

SEQ ID NO: 47064 - DNA, 20 bp, synthetic construct
  misc_feature 1..20: note = Description of Artificial Sequence: Synthetic oligonucleotide
  misc_feature 1..20: note = Target: SCN10A; (-) strand; PAM type: YTN; PAM sequence: CTC
  source 1..20: mol_type = other DNA
caagaagtgactttgccatg

SEQ ID NO: 47065 - DNA, 20 bp, synthetic construct
  misc_feature 1..20: note = Description of Artificial Sequence: Synthetic oligonucleotide
  misc_feature 1..20: note = Target: SCN10A; (-) strand; PAM type: YTN; PAM sequence: CTA
  source 1..20: mol_type = other DNA
ggtgggactccaagaagtga

SEQ ID NO: 47066 - DNA, 20 bp, synthetic construct
  misc_feature 1..20: note = Description of Artificial Sequence: Synthetic oligonucleotide
  misc_feature 1..20: note = Target: SCN10A; (-) strand; PAM type: YTN; PAM sequence: CTC
  source 1..20: mol_type = other DNA
taggtgggactccaagaagt

SEQ ID NO: 47067 - DNA, 20 bp, synthetic construct
  misc_feature 1..20: note = Description of Artificial Sequence: Synthetic oligonucleotide
  misc_feature 1..20: note = Target: SCN10A; (-) strand; PAM type: YTN; PAM sequence: CTA
  source 1..20: mol_type = other DNA
atgcaagccagacagctcta

SEQ ID NO: 47068 - DNA, 20 bp, synthetic construct
  misc_feature 1..20: note = Description of Artificial Sequence: Synthetic oligonucleotide
  misc_feature 1..20: note = Target: SCN10A; (-) strand; PAM type: YTN; PAM sequence: CTC
  source 1..20: mol_type = other DNA
gtatcatagcctaatgcaag

SEQ ID NO: 47069 - DNA, 20 bp, synthetic construct
  misc_feature 1..20: note = Description of Artificial Sequence: Synthetic oligonucleotide
  misc_feature 1..20: note = Target: SCN10A; (-) strand; PAM type: YTN; PAM sequence: CTC
  source 1..20: mol_type = other DNA
actcgtatcatagcctaatg

SEQ ID NO: 47070 - DNA, 20 bp, synthetic construct
  misc_feature 1..20: note = Description of Artificial Sequence: Synthetic oligonucleotide
  misc_feature 1..20: note = Target: SCN10A; (-) strand; PAM type: YTN; PAM sequence: TTC
  source 1..20: mol_type = other DNA
tcactcgtatcatagcctaa

SEQ ID NO: 47071 - DNA, 20 bp, synthetic construct
  misc_feature 1..20: note = Description of Artificial Sequence: Synthetic oligonucleotide
  misc_feature 1..20: note = Target: SCN10A; (-) strand; PAM type: YTN; PAM sequence: TTT
  source 1..20: mol_type = other DNA
ctcactcgtatcatagccta

SEQ ID NO: 47072 - DNA, 20 bp, synthetic construct
  misc_feature 1..20: note = Description of Artificial Sequence: Synthetic oligonucleotide
  misc_feature 1..20: note = Target: SCN10A; (-) strand; PAM type: YTN; PAM sequence: TTA
  source 1..20: mol_type = other DNA
tttctcactcgtatcatagc

SEQ ID NO: 47073 - DNA, 20 bp, synthetic construct
  misc_feature 1..20: note = Description of Artificial Sequence: Synthetic oligonucleotide
  misc_feature 1..20: note = Target: SCN10A; (-) strand; PAM type: YTN; PAM sequence: TTT
  source 1..20: mol_type = other DNA
atttctcactcgtatcatag

SEQ ID NO: 47074 - DNA, 20 bp, synthetic construct
  misc_feature 1..20: note = Description of Artificial Sequence: Synthetic oligonucleotide
  misc_feature 1..20: note = Target: SCN10A; (-) strand; PAM type: YTN; PAM sequence: CTG
  source 1..20: mol_type = other DNA
accccaataaaggtttattt

SEQ ID NO: 47075 - DNA, 20 bp, synthetic construct
  misc_feature 1..20: note = Description of Artificial Sequence: Synthetic oligonucleotide
  misc_feature 1..20: note = Target: SCN10A; (-) strand; PAM type: YTN; PAM sequence: CTG
  source 1..20: mol_type = other DNA
agtaactgaccccaataaag

SEQ ID NO: 47076 - DNA, 20 bp, synthetic construct
  misc_feature 1..20: note = Description of Artificial Sequence: Synthetic oligonucleotide
  misc_feature 1..20: note = Target: SCN10A; (-) strand; PAM type: YTN; PAM sequence: CTA
  source 1..20: mol_type = other DNA
aaactgagtaactgacccca

SEQ ID NO: 47077 - DNA, 20 bp, synthetic construct
  misc_feature 1..20: note = Description of Artificial Sequence: Synthetic oligonucleotide
  misc_feature 1..20: note = Target: SCN10A; (-) strand; PAM type: YTN; PAM sequence: CTC
  source 1..20: mol_type = other DNA
taaaactgagtaactgaccc

SEQ ID NO: 47078 - DNA, 20 bp, synthetic construct
  misc_feature 1..20: note = Description of Artificial Sequence: Synthetic oligonucleotide
  misc_feature 1..20: note = Target: SCN10A; (-) strand; PAM type: YTN; PAM sequence: TTA
  source 1..20: mol_type = other DNA
tacagacaatctctaaaact

SEQ ID NO: 47079 - DNA, 20 bp, synthetic construct
  misc_feature 1..20: note = Description of Artificial Sequence: Synthetic oligonucleotide
  misc_feature 1..20: note = Target: SCN10A; (-) strand; PAM type: YTN; PAM sequence: CTA
  source 1..20: mol_type = other DNA
ttatacagacaatctctaaa

SEQ ID NO: 47080 - DNA, 20 bp, synthetic construct
  misc_feature 1..20: note = Description of Artificial Sequence: Synthetic oligonucleotide
  misc_feature 1..20: note = Target: SCN10A; (-) strand; PAM type: YTN; PAM sequence: CTA
  source 1..20: mol_type = other DNA
cctattatacagacaatctc

SEQ ID NO: 47081 - DNA, 20 bp, synthetic construct
  misc_feature 1..20: note = Description of Artificial Sequence: Synthetic oligonucleotide
  misc_feature 1..20: note = Target: SCN10A; (-) strand; PAM type: YTN; PAM sequence: TTA
  source 1..20: mol_type = other DNA
atcaatgaaaaataaagcta

SEQ ID NO: 47082 - DNA, 20 bp, synthetic construct
  misc_feature 1..20: note = Description of Artificial Sequence: Synthetic oligonucleotide
  misc_feature 1..20: note = Target: SCN10A; (-) strand; PAM type: YTN; PAM sequence: TTA
  source 1..20: mol_type = other DNA
ttaatcaatgaaaaataaag

SEQ ID NO: 47083 - DNA, 20 bp, synthetic construct
  misc_feature 1..20: note = Description of Artificial Sequence: Synthetic oligonucleotide
  misc_feature 1..20: note = Target: SCN10A; (-) strand; PAM type: YTN; PAM sequence: TTT
  source 1..20: mol_type = other DNA
attaatcaatgaaaaataaa

SEQ ID NO: 47084 - DNA, 20 bp, synthetic construct
  misc_feature 1..20: note = Description of Artificial Sequence: Synthetic oligonucleotide
  misc_feature 1..20: note = Target: SCN10A; (-) strand; PAM type: YTN; PAM sequence: TTT
  source 1..20: mol_type = other DNA
tattaatcaatgaaaaataa

SEQ ID NO: 47085 - DNA, 20 bp, synthetic construct
  misc_feature 1..20: note = Description of Artificial Sequence: Synthetic oligonucleotide
  misc_feature 1..20: note = Target: SCN10A; (-) strand; PAM type: YTN; PAM sequence: TTT
  source 1..20: mol_type = other DNA
ttattaatcaatgaaaaata

SEQ ID NO: 47086 - DNA, 20 bp, synthetic construct
  misc_feature 1..20: note = Description of Artificial Sequence: Synthetic oligonucleotide
  misc_feature 1..20: note = Target: SCN10A; (-) strand; PAM type: YTN; PAM sequence: TTA
  source 1..20: mol_type = other DNA
taaaaatttttattaatcaa

SEQ ID NO: 47087 - DNA, 20 bp, synthetic construct
  misc_feature 1..20: note = Description of Artificial Sequence: Synthetic oligonucleotide
  misc_feature 1..20: note = Target: SCN10A; (-) strand; PAM type: YTN; PAM sequence: TTT
  source 1..20: mol_type = other DNA
ataaaaatttttattaatca

SEQ ID NO: 47088 - DNA, 20 bp, synthetic construct
  misc_feature 1..20: note = Description of Artificial Sequence: Synthetic oligonucleotide
  misc_feature 1..20: note = Target: SCN10A; (-) strand; PAM type: YTN; PAM sequence: TTG
  source 1..20: mol_type = other DNA
tttataaaaatttttattaa

SEQ ID NO: 47089 - DNA, 20 bp, synthetic construct
  misc_feature 1..20: note = Description of Artificial Sequence: Synthetic oligonucleotide
  misc_feature 1..20: note = Target: SCN10A; (-) strand; PAM type: YTN; PAM sequence: CTT
  source 1..20: mol_type = other DNA
gtttataaaaatttttatta

SEQ ID NO: 47090 - DNA, 20 bp, synthetic construct
  misc_feature 1..20: note = Description of Artificial Sequence: Synthetic oligonucleotide
  misc_feature 1..20: note = Target: SCN10A; (-) strand; PAM type: YTN; PAM sequence: TTA
  source 1..20: mol_type = other DNA
tcttgtttataaaaattttt

SEQ ID NO: 47091 - DNA, 20 bp, synthetic construct
  misc_feature 1..20: note = Description of Artificial Sequence: Synthetic oligonucleotide
  misc_feature 1..20: note = Target: SCN10A; (-) strand; PAM type: YTN; PAM sequence: TTT
  source 1..20: mol_type = other DNA
atcttgtttataaaaatttt

SEQ ID NO: 47092 - DNA, 20 bp, synthetic construct
  misc_feature 1..20: note = Description of Artificial Sequence: Synthetic oligonucleotide
  misc_feature 1..20: note = Target: SCN10A; (-) strand; PAM type: YTN; PAM sequence: TTT
  source 1..20: mol_type = other DNA
tatcttgtttataaaaattt

SEQ ID NO: 47093 - DNA, 20 bp, synthetic construct
  misc_feature 1..20: note = Description of Artificial Sequence: Synthetic oligonucleotide
  misc_feature 1..20: note = Target: SCN10A; (-) strand; PAM type: YTN; PAM sequence: TTA
  source 1..20: mol_type = other DNA
attttatcttgtttataaaa

SEQ ID NO: 47094 - DNA, 20 bp, synthetic construct
  misc_feature 1..20: note = Description of Artificial Sequence: Synthetic oligonucleotide
  misc_feature 1..20: note = Target: SCN10A; (-) strand; PAM type: YTN; PAM sequence: TTT
  source 1..20: mol_type = other DNA
aattttatcttgtttataaa

SEQ ID NO: 47095 - DNA, 20 bp, synthetic construct
  misc_feature 1..20: note = Description of Artificial Sequence: Synthetic oligonucleotide
  misc_feature 1..20: note = Target: SCN10A; (-) strand; PAM type: YTN; PAM sequence: TTT
  source 1..20: mol_type = other DNA
taattttatcttgtttataa

SEQ ID NO: 47096 - DNA, 20 bp, synthetic construct
  misc_feature 1..20: note = Description of Artificial Sequence: Synthetic oligonucleotide
  misc_feature 1..20: note = Target: SCN10A; (-) strand; PAM type: YTN; PAM sequence: TTG
  source 1..20: mol_type = other DNA
taatgataagtattttaatt

SEQ ID NO: 47097 - DNA, 20 bp, synthetic construct
  misc_feature 1..20: note = Description of Artificial Sequence: Synthetic oligonucleotide
  misc_feature 1..20: note = Target: SCN10A; (-) strand; PAM type: YTN; PAM sequence: TTA
  source 1..20: mol_type = other DNA
ttgtaatgataagtatttta

SEQ ID NO: 47098 - DNA, 20 bp, synthetic construct
  misc_feature 1..20: note = Description of Artificial Sequence: Synthetic oligonucleotide
  misc_feature 1..20: note = Target: SCN10A; (-) strand; PAM type: YTN; PAM sequence: TTT
  source 1..20: mol_type = other DNA
attgtaatgataagtatttt

SEQ ID NO: 47099 - DNA, 20 bp, synthetic construct
  misc_feature 1..20: note = Description of Artificial Sequence: Synthetic oligonucleotide
  misc_feature 1..20: note = Target: SCN10A; (-) strand; PAM type: YTN; PAM sequence: TTC
  source 1..20: mol_type = other DNA
ccaatttattgtaatgataa

SEQ ID NO: 47100 - DNA, 20 bp, synthetic construct
  misc_feature 1..20: note = Description of Artificial Sequence: Synthetic oligonucleotide
  misc_feature 1..20: note = Target: SCN10A; (-) strand; PAM type: YTN; PAM sequence: TTT
  source 1..20: mol_type = other DNA
cccaatttattgtaatgata

SEQ ID NO: 47101 - DNA, 20 bp, synthetic construct
  misc_feature 1..20: note = Description of Artificial Sequence: Synthetic oligonucleotide
  misc_feature 1..20: note = Target: SCN10A; (-) strand; PAM type: YTN; PAM sequence: CTT
  source 1..20: mol_type = other DNA
tcccaatttattgtaatgat

SEQ ID NO: 47102 - DNA, 20 bp, synthetic construct
  misc_feature 1..20: note = Description of Artificial Sequence: Synthetic oligonucleotide
  misc_feature 1..20: note = Target: SCN10A; (-) strand; PAM type: YTN; PAM sequence: TTC
  source 1..20: mol_type = other DNA
cagatatcctttcccaattt

SEQ ID NO: 47103 - DNA, 20 bp, synthetic construct
  misc_feature 1..20: note = Description of Artificial Sequence: Synthetic oligonucleotide
  misc_feature 1..20: note = Target: SCN10A; (-) strand; PAM type: YTN; PAM sequence: TTC
  source 1..20: mol_type = other DNA
attccagatatcctttccca

SEQ ID NO: 47104 - DNA, 20 bp, synthetic construct
  misc_feature 1..20: note = Description of Artificial Sequence: Synthetic oligonucleotide
  misc_feature 1..20: note = Target: SCN10A; (-) strand; PAM type: YTN; PAM sequence: TTT
  source 1..20: mol_type = other DNA
cattccagatatcctttccc

SEQ ID NO: 47105 - DNA, 20 bp, synthetic construct
  misc_feature 1..20: note = Description of Artificial Sequence: Synthetic oligonucleotide
  misc_feature 1..20: note = Target: SCN10A; (-) strand; PAM type: YTN; PAM sequence: TTT
  source 1..20: mol_type = other DNA
tcattccagatatcctttcc

SEQ ID NO: 47106 - DNA, 20 bp, synthetic construct
  misc_feature 1..20: note = Description of Artificial Sequence: Synthetic oligonucleotide
  misc_feature 1..20: note = Target: SCN10A; (-) strand; PAM type: YTN; PAM sequence: CTT
  source 1..20: mol_type = other DNA
ttcattccagatatcctttc

SEQ ID NO: 47107 - DNA, 20 bp, synthetic construct
  misc_feature 1..20: note = Description of Artificial Sequence: Synthetic oligonucleotide
  misc_feature 1..20: note = Target: SCN10A; (-) strand; PAM type: YTN; PAM sequence: CTC
  source 1..20: mol_type = other DNA
caagacaacttttcattcca

SEQ ID NO: 47108 - DNA, 20 bp, synthetic construct
  misc_feature 1..20: note = Description of Artificial Sequence: Synthetic oligonucleotide
  misc_feature 1..20: note = Target: SCN10A; (-) strand; PAM type: YTN; PAM sequence: TTC
  source 1..20: mol_type = other DNA
ctccaagacaacttttcatt

SEQ ID NO: 47109 - DNA, 20 bp, synthetic construct
  misc_feature 1..20: note = Description of Artificial Sequence: Synthetic oligonucleotide
  misc_feature 1..20: note = Target: SCN10A; (-) strand; PAM type: YTN; PAM sequence: CTT
  source 1..20: mol_type = other DNA
cctccaagacaacttttcat

SEQ ID NO: 47110 - DNA, 20 bp, synthetic construct
  misc_feature 1..20: note = Description of Artificial Sequence: Synthetic oligonucleotide
  misc_feature 1..20: note = Target: SCN10A; (-) strand; PAM type: YTN; PAM sequence: TTA
  source 1..20: mol_type = other DNA
accttcctccaagacaactt

SEQ ID NO: 47111 - DNA, 20 bp, synthetic construct
  misc_feature 1..20: note = Description of Artificial Sequence: Synthetic oligonucleotide
  misc_feature 1..20: note = Target: SCN10A; (-) strand; PAM type: YTN; PAM sequence: TTT
  source 1..20: mol_type = other DNA
aaccttcctccaagacaact

SEQ ID NO: 47112 - DNA, 20 bp, synthetic construct
  misc_feature 1..20: note = Description of Artificial Sequence: Synthetic oligonucleotide
  misc_feature 1..20: note = Target: SCN10A; (-) strand; PAM type: YTN; PAM sequence: CTT
  source 1..20: mol_type = other DNA
taaccttcctccaagacaac

SEQ ID NO: 47113 - DNA, 20 bp, synthetic construct
  misc_feature 1..20: note = Description of Artificial Sequence: Synthetic oligonucleotide
  misc_feature 1..20: note = Target: SCN10A; (-) strand; PAM type: YTN; PAM sequence: CTA
  source 1..20: mol_type = other DNA
aaatctttaaccttcctcca

SEQ ID NO: 47114 - DNA, 20 bp, synthetic construct
  misc_feature 1..20: note = Description of Artificial Sequence: Synthetic oligonucleotide
  misc_feature 1..20: note = Target: SCN10A; (-) strand; PAM type: YTN; PAM sequence: TTA
  source 1..20: mol_type = other DNA
gctaaaatctttaaccttcc

SEQ ID NO: 47115 - DNA, 20 bp, synthetic construct
  misc_feature 1..20: note = Description of Artificial Sequence: Synthetic oligonucleotide
  misc_feature 1..20: note = Target: SCN10A; (-) strand; PAM type: YTN; PAM sequence: TTA
  source 1..20: mol_type = other DNA
atcaaagccaaaagttagct

SEQ ID NO: 47116 - DNA, 20 bp, synthetic construct
  misc_feature 1..20: note = Description of Artificial Sequence: Synthetic oligonucleotide
  misc_feature 1..20: note = Target: SCN10A; (-) strand; PAM type: YTN; PAM sequence: CTT
  source 1..20: mol_type = other DNA
aatcaaagccaaaagttagc

SEQ ID NO: 47117 - DNA, 20 bp, synthetic construct
  misc_feature 1..20: note = Description of Artificial Sequence: Synthetic oligonucleotide
  misc_feature 1..20: note = Target: SCN10A; (-) strand; PAM type: YTN; PAM sequence: TTA
  source 1..20: mol_type = other DNA
acttaatcaaagccaaaagt

SEQ ID NO: 47118 - DNA, 20 bp, synthetic construct
  misc_feature 1..20: note = Description of Artificial Sequence: Synthetic oligonucleotide
  misc_feature 1..20: note = Target: SCN10A; (-) strand; PAM type: YTN; PAM sequence: TTA
  source 1..20: mol_type = other DNA
gttaacttaatcaaagccaa

SEQ ID NO: 47119 - DNA, 20 bp, synthetic construct
  misc_feature 1..20: note = Description of Artificial Sequence: Synthetic oligonucleotide
  misc_feature 1..20: note = Target: SCN10A; (-) strand; PAM type: YTN; PAM sequence: CTC
  source 1..20: mol_type = other DNA
cattagttaacttaatcaaa

SEQ ID NO: 47120 - DNA, 20 bp, synthetic construct
  misc_feature 1..20: note = Description of Artificial Sequence: Synthetic oligonucleotide
  misc_feature 1..20: note = Target: SCN10A; (-) strand; PAM type: YTN; PAM sequence: CTC
  source 1..20: mol_type = other DNA
tccattagttaacttaatca

SEQ ID NO: 47121 - DNA, 20 bp, synthetic construct
  misc_feature 1..20: note = Description of Artificial Sequence: Synthetic oligonucleotide
  misc_feature 1..20: note = Target: SCN10A; (-) strand; PAM type: YTN; PAM sequence: TTA
  source 1..20: mol_type = other DNA
actctccattagttaactta

SEQ ID NO: 47122 - DNA, 20 bp, synthetic construct
  misc_feature 1..20: note = Description of Artificial Sequence: Synthetic oligonucleotide
  misc_feature 1..20: note = Target: SCN10A; (-) strand; PAM type: YTN; PAM sequence: TTA
  source 1..20: mol_type = other DNA
cagcataaattaactctcca

SEQ ID NO: 47123 - DNA, 20 bp, synthetic construct
  misc_feature 1..20: note = Description of Artificial Sequence: Synthetic oligonucleotide
  misc_feature 1..20: note = Target: SCN10A; (-) strand; PAM type: YTN; PAM sequence: CTG
  source 1..20: mol_type = other DNA
cagaaattacagcataaatt

SEQ ID NO: 47124 - DNA, 20 bp, synthetic construct
  misc_feature 1..20: note = Description of Artificial Sequence: Synthetic oligonucleotide
  misc_feature 1..20: note = Target: SCN10A; (-) strand; PAM type: YTN; PAM sequence: TTG
  source 1..20: mol_type = other DNA
agcccaggaggtcgtggctg

SEQ ID NO: 47125 - DNA, 20 bp, synthetic construct
  misc_feature 1..20: note = Description of Artificial Sequence: Synthetic oligonucleotide
  misc_feature 1..20: note = Target: SCN10A; (-) strand; PAM type: YTN; PAM sequence: CTT
  source 1..20: mol_type = other DNA
gagcccaggaggtcgtggct

SEQ ID NO: 47126 - DNA, 20 bp, synthetic construct
  misc_feature 1..20: note = Description of Artificial Sequence: Synthetic oligonucleotide
  misc_feature 1..20: note = Target: SCN10A; (-) strand; PAM type: YTN; PAM sequence: CTG
  source 1..20: mol_type = other DNA
aggtgggaggatgacttgag

SEQ ID NO: 47127 - DNA, 20 bp, synthetic construct
  misc_feature 1..20: note = Description of Artificial Sequence: Synthetic oligonucleotide
  misc_feature 1..20: note = Target: SCN10A; (-) strand; PAM type: YTN; PAM sequence: TTG
  source 1..20: mol_type = other DNA
ggaggctgaggtgggaggat

SEQ ID NO: 47128 - DNA, 20 bp, synthetic construct
  misc_feature 1..20: note = Description of Artificial Sequence: Synthetic oligonucleotide
  misc_feature 1..20: note = Target: SCN10A; (-) strand; PAM type: YTN; PAM sequence: TTT
  source 1..20: mol_type = other DNA
gggaggctgaggtgggagga

SEQ ID NO: 47129 - DNA, 20 bp, synthetic construct
  misc_feature 1..20: note = Description of Artificial Sequence: Synthetic oligonucleotide
  misc_feature 1..20: note = Target: SCN10A; (-) strand; PAM type: YTN; PAM sequence: CTA
  source 1..20: mol_type = other DNA
tttgggaggctgaggtggga

SEQ ID NO: 47130 - DNA, 20 bp, synthetic construct
  misc_feature 1..20: note = Description of Artificial Sequence: Synthetic oligonucleotide
  misc_feature 1..20: note = Target: SCN10A; (-) strand; PAM type: YTN; PAM sequence: CTC
  source 1..20: mol_type = other DNA
agctatttgggaggctgagg

SEQ ID NO: 47131 - DNA, 20 bp, synthetic construct
  misc_feature 1..20: note = Description of Artificial Sequence: Synthetic oligonucleotide
  misc_feature 1..20: note = Target: SCN10A; (-) strand; PAM type: YTN; PAM sequence: CTG
  source 1..20: mol_type = other DNA
tagtctcagctatttgggag

SEQ ID NO: 47132 - DNA, 20 bp, synthetic construct
  misc_feature 1..20: note = Description of Artificial Sequence: Synthetic oligonucleotide
  misc_feature 1..20: note = Target: SCN10A; (-) strand; PAM type: YTN; PAM sequence: CTG
  source 1..20: mol_type = other DNA
ggcatgatggcacgtgtctg

SEQ ID NO: 47133 - DNA, 20 bp, synthetic construct
  misc_feature 1..20: note = Description of Artificial Sequence: Synthetic oligonucleotide
  misc_feature 1..20: note = Target: SCN10A; (-) strand; PAM type: YTN; PAM sequence: TTA
  source 1..20: mol_type = other DNA
gctgggcatgatggcacgtg

SEQ ID NO: 47134 - DNA, 20 bp, synthetic construct
  misc_feature 1..20: note = Description of Artificial Sequence: Synthetic oligonucleotide
  misc_feature 1..20: note = Target: SCN10A; (-) strand; PAM type: YTN; PAM sequence: TTA
  source 1..20: mol_type = other DNA
aaaaagaaaaggaaagaaat

SEQ ID NO: 47135 - DNA, 20 bp, synthetic construct
  misc_feature 1..20: note = Description of Artificial Sequence: Synthetic oligonucleotide
  misc_feature 1..20: note = Target: SCN10A; (-) strand; PAM type: YTN; PAM sequence: TTT
  source 1..20: mol_type = other DNA
aaaaaagaaaaggaaagaaa

SEQ ID NO: 47136 - DNA, 20 bp, synthetic construct
  misc_feature 1..20: note = Description of Artificial Sequence: Synthetic oligonucleotide
  misc_feature 1..20: note = Target: SCN10A; (-) strand; PAM type: YTN; PAM sequence: TTA
  source 1..20: mol_type = other DNA
aatttaaaaaagaaaaggaa

SEQ ID NO: 47137 - DNA, 20 bp, synthetic construct
  misc_feature 1..20: note = Description of Artificial Sequence: Synthetic oligonucleotide
  misc_feature 1..20: note = Target: SCN10A; (-) strand; PAM type: YTN; PAM sequence: TTT
  source 1..20: mol_type = other DNA
aaatttaaaaaagaaaagga

SEQ ID NO: 47138 - DNA, 20 bp, synthetic construct
  misc_feature 1..20: note = Description of Artificial Sequence: Synthetic oligonucleotide
  misc_feature 1..20: note = Target: SCN10A; (-) strand; PAM type: YTN; PAM sequence: TTT
  source 1..20: mol_type = other DNA
taaatttaaaaaagaaaagg

SEQ ID NO: 47139 - DNA, 20 bp, synthetic construct
  misc_feature 1..20: note = Description of Artificial Sequence: Synthetic oligonucleotide
  misc_feature 1..20: note = Target: SCN10A; (-) strand; PAM type: YTN; PAM sequence: CTC
  source 1..20: mol_type = other DNA
aaaaataaataaataaataa

SEQ ID NO: 47140 - DNA, 20 bp, synthetic construct
  misc_feature 1..20: note = Description of Artificial Sequence: Synthetic oligonucleotide
  misc_feature 1..20: note = Target: SCN10A; (-) strand; PAM type: YTN; PAM sequence: CTC
  source 1..20: mol_type = other DNA
catctcaaaaataaataaat

SEQ ID NO: 47141 - DNA, 20 bp, synthetic construct
  misc_feature 1..20: note = Description of Artificial Sequence: Synthetic oligonucleotide
  misc_feature 1..20: note = Target: SCN10A; (-) strand; PAM type: YTN; PAM sequence: CTG
  source 1..20: mol_type = other DNA
ggcaacaagggcaaaactcc

SEQ ID NO: 47142 - DNA, 20 bp, synthetic construct
  misc_feature 1..20: note = Description of Artificial Sequence: Synthetic oligonucleotide
  misc_feature 1..20: note = Target: SCN10A; (-) strand; PAM type: YTN; PAM sequence: CTC
  source 1..20: mol_type = other DNA
cagcctgggcaacaagggca

SEQ ID NO: 47143 - DNA, 20 bp, synthetic construct
  misc_feature 1..20: note = Description of Artificial Sequence: Synthetic oligonucleotide
  misc_feature 1..20: note = Target: SCN10A; (-) strand; PAM type: YTN; PAM sequence: TTG
  source 1..20: mol_type = other DNA
cactccagcctgggcaacaa

SEQ ID NO: 47144 - DNA, 20 bp, synthetic construct
  misc_feature 1..20: note = Description of Artificial Sequence: Synthetic oligonucleotide
  misc_feature 1..20: note = Target: SCN10A; (-) strand; PAM type: YTN; PAM sequence: TTG
  source 1..20: mol_type = other DNA
caccattgcactccagcctg

SEQ ID NO: 47145 - DNA, 20 bp, synthetic construct
  misc_feature 1..20: note = Description of Artificial Sequence: Synthetic oligonucleotide
  misc_feature 1..20: note = Target: SCN10A; (-) strand; PAM type: YTN; PAM sequence: CTG
  source 1..20: mol_type = other DNA
agattgcaccattgcactcc

SEQ ID NO: 47146 - DNA, 20 bp, synthetic construct
  misc_feature 1..20: note = Description of Artificial Sequence: Synthetic oligonucleotide
  misc_feature 1..20: note = Target: SCN10A; (-) strand; PAM type: YTN; PAM sequence: TTG
  source 1..20: mol_type = other DNA
cggtgagctgagattgcacc

SEQ ID NO: 47147 - DNA, 20 bp, synthetic construct
  misc_feature 1..20: note = Description of Artificial Sequence: Synthetic oligonucleotide
  misc_feature 1..20: note = Target: SCN10A; (-) strand; PAM type: YTN; PAM sequence: TTG
  source 1..20: mol_type = other DNA
aacccgggaggcggaggttg

SEQ ID NO: 47148 - DNA, 20 bp, synthetic construct
  misc_feature 1..20: note = Description of Artificial Sequence: Synthetic oligonucleotide
  misc_feature 1..20: note = Target: SCN10A; (-) strand; PAM type: YTN; PAM sequence: CTT
  source 1..20: mol_type = other DNA
gaacccgggaggcggaggtt

SEQ ID NO: 47149 - DNA, 20 bp, synthetic construct
  misc_feature 1..20: note = Description of Artificial Sequence: Synthetic oligonucleotide
  misc_feature 1..20: note = Target: SCN10A; (-) strand; PAM type: YTN; PAM sequence: TTG
  source 1..20: mol_type = other DNA
cttgaacccgggaggcggag

SEQ ID NO: 47150 - DNA, 20 bp, synthetic construct
  misc_feature 1..20: note = Description of Artificial Sequence: Synthetic oligonucleotide
  misc_feature 1..20: note = Target: SCN10A; (-) strand; PAM type: YTN; PAM sequence: CTG
  source 1..20: mol_type = other DNA
agggaggagaattgcttgaa

SEQ ID NO: 47151 - DNA, 20 bp, synthetic construct
  misc_feature 1..20: note = Description of Artificial Sequence: Synthetic oligonucleotide
  misc_feature 1..20: note = Target: SCN10A; (-) strand; PAM type: YTN; PAM sequence: TTG
  source 1..20: mol_type = other DNA
ggaggctgagggaggagaat

SEQ ID NO: 47152 - DNA, 20 bp, synthetic construct
  misc_feature 1..20: note = Description of Artificial Sequence: Synthetic oligonucleotide
  misc_feature 1..20: note = Target: SCN10A; (-) strand; PAM type: YTN; PAM sequence: CTT
  source 1..20: mol_type = other DNA
gggaggctgagggaggagaa

SEQ ID NO: 47153 - DNA, 20 bp, synthetic construct
  misc_feature 1..20: note = Description of Artificial Sequence: Synthetic oligonucleotide
  misc_feature 1..20: note = Target: SCN10A; (-) strand; PAM type: YTN; PAM sequence: CTA
  source 1..20: mol_type = other DNA
cttgggaggctgagggagga

SEQ ID NO: 47154 - DNA, 20 bp, synthetic construct
  misc_feature 1..20: note = Description of Artificial Sequence: Synthetic oligonucleotide
  misc_feature 1..20: note = Target: SCN10A; (-) strand; PAM type: YTN; PAM sequence: TTA
  source 1..20: mol_type = other DNA
atcccagctacttgggaggc

SEQ ID NO: 47155 - DNA, 20 bp, synthetic construct
  misc_feature 1..20: note = Description of Artificial Sequence: Synthetic oligonucleotide
  misc_feature 1..20: note = Target: SCN10A; (-) strand; PAM type: YTN; PAM sequence: TTT
  source 1..20: mol_type = other DNA
aatcccagctacttgggagg

SEQ ID NO: 47156 - DNA, 20 bp, synthetic construct
  misc_feature 1..20: note = Description of Artificial Sequence: Synthetic oligonucleotide
  misc_feature 1..20: note = Target: SCN10A; (-) strand; PAM type: YTN; PAM sequence: TTT
  source 1..20: mol_type = other DNA
taatcccagctacttgggag

SEQ ID NO: 47157 - DNA, 20 bp, synthetic construct
  misc_feature 1..20: note = Description of Artificial Sequence: Synthetic oligonucleotide
  misc_feature 1..20: note = Target: SCN10A; (-) strand; PAM type: YTN; PAM sequence: CTT
  source 1..20: mol_type = other DNA
ttaatcccagctacttggga

SEQ ID NO: 47158 - DNA, 20 bp, synthetic construct
  misc_feature 1..20: note = Description of Artificial Sequence: Synthetic oligonucleotide
  misc_feature 1..20: note = Target: SCN10A; (-) strand; PAM type: YTN; PAM sequence: TTA
  source 1..20: mol_type = other DNA
gccaggtgtgatggtgcata

SEQ ID NO: 47159 - DNA, 20 bp, synthetic construct
  misc_feature 1..20: note = Description of Artificial Sequence: Synthetic oligonucleotide
  misc_feature 1..20: note = Target: SCN10A; (-) strand; PAM type: YTN; PAM sequence: CTA
  source 1..20: mol_type = other DNA
ccaaaaatacaaaattagcc

SEQ ID NO: 47160 - DNA, 20 bp, synthetic construct
  misc_feature 1..20: note = Description of Artificial Sequence: Synthetic oligonucleotide
  misc_feature 1..20: note = Target: SCN10A; (-) strand; PAM type: YTN; PAM sequence: CTC
  source 1..20: mol_type = other DNA
taccaaaaatacaaaattag

SEQ ID NO: 47161 - DNA, 20 bp, synthetic construct
  misc_feature 1..20: note = Description of Artificial Sequence: Synthetic oligonucleotide
  misc_feature 1..20: note = Target: SCN10A; (-) strand; PAM type: YTN; PAM sequence: CTG
  source 1..20: mol_type = other DNA
accaacatggagaagaccca

SEQ ID NO: 47162 - DNA, 20 bp, synthetic construct
  misc_feature 1..20: note = Description of Artificial Sequence: Synthetic oligonucleotide
  misc_feature 1..20: note = Target: SCN10A; (-) strand; PAM type: YTN; PAM sequence: TTC
  source 1..20: mol_type = other DNA
gagaccagcctgaccaacat

SEQ ID NO: 47163 - DNA, 20 bp, synthetic construct
  misc_feature 1..20: note = Description of Artificial Sequence: Synthetic oligonucleotide
  misc_feature 1..20: note = Target: SCN10A; (-) strand; PAM type: YTN; PAM sequence: CTG
  source 1..20: mol_type = other DNA
aggtcgggagttcgagacca

SEQ ID NO: 47164 - DNA, 20 bp, synthetic construct
  misc_feature 1..20: note = Description of Artificial Sequence: Synthetic oligonucleotide
  misc_feature 1..20: note = Target: SCN10A; (-) strand; PAM type: YTN; PAM sequence: TTG
  source 1..20: mol_type = other DNA
gaggcgcaggcaggcggatc

SEQ ID NO: 47165 - DNA, 20 bp, synthetic construct
  misc_feature 1..20: note = Description of Artificial Sequence: Synthetic oligonucleotide
  misc_feature 1..20: note = Target: SCN10A; (-) strand; PAM type: YTN; PAM sequence: CTG
  source 1..20: mol_type = other DNA
ttggaggcgcaggcaggcgg

SEQ ID NO: 47166 - DNA, 20 bp, synthetic construct
  misc_feature 1..20: note = Description of Artificial Sequence: Synthetic oligonucleotide
  misc_feature 1..20: note = Target: SCN10A; (-) strand; PAM type: YTN; PAM sequence: CTG
  source 1..20: mol_type = other DNA
taatcccagcactgttggag

SEQ ID NO: 47167 - DNA, 20 bp, synthetic construct
  misc_feature 1..20: note = Description of Artificial Sequence: Synthetic oligonucleotide
  misc_feature 1..20: note = Target: SCN10A; (-) strand; PAM type: YTN; PAM sequence: TTA
  source 1..20: mol_type = other DNA
atgcctgtaatcccagcact

SEQ ID NO: 47168 - DNA, 20 bp, synthetic construct
  misc_feature 1..20: note = Description of Artificial Sequence: Synthetic oligonucleotide
  misc_feature 1..20: note = Target: SCN10A; (-) strand; PAM type: YTN; PAM sequence: TTG
  source 1..20: mol_type = other DNA
aaaacaataaaaagaaggcc

SEQ ID NO: 47169 - DNA, 20 bp, synthetic construct
  misc_feature 1..20: note = Description of Artificial Sequence: Synthetic oligonucleotide
  misc_feature 1..20: note = Target: SCN10A; (-) strand; PAM type: YTN; PAM sequence: CTC
  source 1..20: mol_type = other DNA
attgaaaacaataaaaagaa

SEQ ID NO: 47170 - DNA, 20 bp, synthetic construct
  misc_feature 1..20: note = Description of Artificial Sequence: Synthetic oligonucleotide
  misc_feature 1..20: note = Target: SCN10A; (-) strand; PAM type: YTN; PAM sequence: CTC
  source 1..20: mol_type = other DNA
cgtctcattgaaaacaataa

SEQ ID NO: 47171 - DNA, 20 bp, synthetic construct
  misc_feature 1..20: note = Description of Artificial Sequence: Synthetic oligonucleotide
  misc_feature 1..20: note = Target: SCN10A; (-) strand; PAM type: YTN; PAM sequence: CTG
  source 1..20: mol_type = other DNA
ggcaacagagcgagactccg

SEQ ID NO: 47172 - DNA, 20 bp, synthetic construct
  misc_feature 1..20: note = Description of Artificial Sequence: Synthetic oligonucleotide
  misc_feature 1..20: note = Target: SCN10A; (-) strand; PAM type: YTN; PAM sequence: CTC
  source 1..20: mol_type = other DNA
cagcctgggcaacagagcga

SEQ ID NO: 47173 - DNA, 20 bp, synthetic construct
  misc_feature 1..20: note = Description of Artificial Sequence: Synthetic oligonucleotide
  misc_feature 1..20: note = Target: SCN10A; (-) strand; PAM type: YTN; PAM sequence: CTG
  source 1..20: mol_type = other DNA
cactccagcctgggcaacag

SEQ ID NO: 47174 - DNA, 20 bp, synthetic construct
  misc_feature 1..20: note = Description of Artificial Sequence: Synthetic oligonucleotide
  misc_feature 1..20: note = Target: SCN10A; (-) strand; PAM type: YTN; PAM sequence: CTG
  source 1..20: mol_type = other DNA
agatcatgccactgcactcc

SEQ ID NO: 47175 - DNA, 20 bp, synthetic construct
  misc_feature 1..20: note = Description of Artificial Sequence: Synthetic oligonucleotide
  misc_feature 1..20: note = Target: SCN10A; (-) strand; PAM type: YTN; PAM sequence: TTG
  source 1..20: mol_type = other DNA
cagtgagctgagatcatgcc

SEQ ID NO: 47176 - DNA, 20 bp, synthetic construct
  misc_feature 1..20: note = Description of Artificial Sequence: Synthetic oligonucleotide
  misc_feature 1..20: note = Target: SCN10A; (-) strand; PAM type: YTN; PAM sequence: TTG
  source 1..20: mol_type = other DNA
aatcccagagacagaggttg

SEQ ID NO: 47177 - DNA, 20 bp, synthetic construct
  misc_feature 1..20: note = Description of Artificial Sequence: Synthetic oligonucleotide
  misc_feature 1..20: note = Target: SCN10A; (-) strand; PAM type: YTN; PAM sequence: CTT
  source 1..20: mol_type = other DNA
gaatcccagagacagaggtt

SEQ ID NO: 47178 - DNA, 20 bp, synthetic construct
  misc_feature 1..20: note = Description of Artificial Sequence: Synthetic oligonucleotide
  misc_feature 1..20: note = Target: SCN10A; (-) strand; PAM type: YTN; PAM sequence: TTG
  source 1..20: mol_type = other DNA
cttgaatcccagagacagag

SEQ ID NO: 47179 - DNA, 20 bp, synthetic construct
  misc_feature 1..20: note = Description of Artificial Sequence: Synthetic oligonucleotide
  misc_feature 1..20: note = Target: SCN10A; (-) strand; PAM type: YTN; PAM sequence: CTC
  source 1..20: mol_type = other DNA
aggagggtgaggcatgagaa

SEQ ID NO: 47180 - DNA, 20 bp, synthetic construct
  misc_feature 1..20: note = Description of Artificial Sequence: Synthetic oligonucleotide
  misc_feature 1..20: note = Target: SCN10A; (-) strand; PAM type: YTN; PAM sequence: CTA
  source 1..20: mol_type = other DNA
ctcaggagggtgaggcatga

SEQ ID NO: 47181 - DNA, 20 bp, synthetic construct
  misc_feature 1..20: note = Description of Artificial Sequence: Synthetic oligonucleotide
  misc_feature 1..20: note = Target: SCN10A; (-) strand; PAM type: YTN; PAM sequence: CTG
  source 1..20: mol_type = other DNA
taatcccagctactcaggag

SEQ ID NO: 47182 - DNA, 20 bp, synthetic construct
  misc_feature 1..20: note = Description of Artificial Sequence: Synthetic oligonucleotide
  misc_feature 1..20: note = Target: SCN10A; (-) strand; PAM type: YTN; PAM sequence: CTG
  source 1..20: mol_type = other DNA
ggtgtggtggcacacacctg

SEQ ID NO: 47183 - DNA, 20 bp, synthetic construct
  misc_feature 1..20: note = Description of Artificial Sequence: Synthetic oligonucleotide
  misc_feature 1..20: note = Target: SCN10A; (-) strand; PAM type: YTN; PAM sequence: TTA
  source 1..20: mol_type = other DNA
gctgggtgtggtggcacaca

SEQ ID NO: 47184 - DNA, 20 bp, synthetic construct
  misc_feature 1..20: note = Description of Artificial Sequence: Synthetic oligonucleotide
  misc_feature 1..20: note = Target: SCN10A; (-) strand; PAM type: YTN; PAM sequence: CTA
  source 1..20: mol_type = other DNA
aaaatatataaattagctgg

SEQ ID NO: 47185 - DNA, 20 bp, synthetic construct
  misc_feature 1..20: note = Description of Artificial Sequence: Synthetic oligonucleotide
  misc_feature 1..20: note = Target: SCN10A; (-) strand; PAM type: YTN; PAM sequence: CTA
  source 1..20: mol_type = other DNA
ctaaaaatatataaattagc

SEQ ID NO: 47186 - DNA, 20 bp, synthetic construct
  misc_feature 1..20: note = Description of Artificial Sequence: Synthetic oligonucleotide
  misc_feature 1..20: note = Target: SCN10A; (-) strand; PAM type: YTN; PAM sequence: CTC
  source 1..20: mol_type = other DNA
tactaaaaatatataaatta

SEQ ID NO: 47187 - DNA, 20 bp, synthetic construct
  misc_feature 1..20: note = Description of Artificial Sequence: Synthetic oligonucleotide
  misc_feature 1..20: note = Target: SCN10A; (-) strand; PAM type: YTN; PAM sequence: CTG
  source 1..20: mol_type = other DNA
gccaacaggagaaaacccca

SEQ ID NO: 47188 - DNA, 20 bp, synthetic construct
  misc_feature 1..20: note = Description of Artificial Sequence: Synthetic oligonucleotide
  misc_feature 1..20: note = Target: SCN10A; (-) strand; PAM type: YTN; PAM sequence: TTG
  source 1..20: mol_type = other DNA
gagaccagcctggccaacag

SEQ ID NO: 47189 - DNA, 20 bp, synthetic construct
  misc_feature 1..20: note = Description of Artificial Sequence: Synthetic oligonucleotide
  misc_feature 1..20: note = Target: SCN10A; (-) strand; PAM type: YTN; PAM sequence: TTG
  source 1..20: mol_type = other DNA
aggacaggagttggagacca

SEQ ID NO: 47190 - DNA, 20 bp, synthetic construct
  misc_feature 1..20: note = Description of Artificial Sequence: Synthetic oligonucleotide
  misc_feature 1..20: note = Target: SCN10A; (-) strand; PAM type: YTN; PAM sequence: CTT
  source 1..20: mol_type = other DNA
gaggacaggagttggagacc

SEQ ID NO: 47191 - DNA, 20 bp, synthetic construct
  misc_feature 1..20: note = Description of Artificial Sequence: Synthetic oligonucleotide
  misc_feature 1..20: note = Target: SCN10A; (-) strand; PAM type: YTN; PAM sequence: TTG
  source 1..20: mol_type = other DNA
cttgaggacaggagttggag

SEQ ID NO: 47192 - DNA, 20 bp, synthetic construct
  misc_feature 1..20: note = Description of Artificial Sequence: Synthetic oligonucleotide
  misc_feature 1..20: note = Target: SCN10A; (-) strand; PAM type: YTN; PAM sequence: TTG
  source 1..20: mol_type = other DNA
ggaggccaaggtgggaggat

SEQ ID NO: 47193 - DNA, 20 bp, synthetic construct
  misc_feature 1..20: note = Description of Artificial Sequence: Synthetic oligonucleotide
  misc_feature 1..20: note = Target: SCN10A; (-) strand; PAM type: YTN; PAM sequence: TTT
  source 1..20: mol_type = other DNA
gggaggccaaggtgggagga

SEQ ID NO: 47194 - DNA, 20 bp, synthetic construct
  misc_feature 1..20: note = Description of Artificial Sequence: Synthetic oligonucleotide
  misc_feature 1..20: note = Target: SCN10A; (-) strand; PAM type: YTN; PAM sequence: TTT
  source 1..20: mol_type = other DNA
tgggaggccaaggtgggagg

SEQ ID NO: 47195 - DNA, 20 bp, synthetic construct
  misc_feature 1..20: note = Description of Artificial Sequence: Synthetic oligonucleotide
  misc_feature 1..20: note = Target: SCN10A; (-) strand; PAM type: YTN; PAM sequence: CTG
  source 1..20: mol_type = other DNA
taatcccagaattttgggag

SEQ ID NO: 47196 - DNA, 20 bp, synthetic construct
  misc_feature 1..20: note = Description of Artificial Sequence: Synthetic oligonucleotide
  misc_feature 1..20: note = Target: SCN10A; (-) strand; PAM type: YTN; PAM sequence: CTC
  source 1..20: mol_type = other DNA
acgcctgtaatcccagaatt

SEQ ID NO: 47197 - DNA, 20 bp, synthetic construct
  misc_feature 1..20: note = Description of Artificial Sequence: Synthetic oligonucleotide
  misc_feature 1..20: note = Target: SCN10A; (-) strand; PAM type: YTN; PAM sequence: TTA
  source 1..20: mol_type = other DNA
aagccaagggggccaggtgg

SEQ ID NO: 47198 - DNA, 20 bp, synthetic construct
  misc_feature 1..20: note = Description of Artificial Sequence: Synthetic oligonucleotide
  misc_feature 1..20: note = Target: SCN10A; (-) strand; PAM type: YTN; PAM sequence: TTT
  source 1..20: mol_type = other DNA
aaagccaagggggccaggtg

SEQ ID NO: 47199 - DNA, 20 bp, synthetic construct
  misc_feature 1..20: note = Description of Artificial Sequence: Synthetic oligonucleotide
  misc_feature 1..20: note = Target: SCN10A; (-) strand; PAM type: YTN; PAM sequence: TTT
  source 1..20: mol_type = other DNA
taaagccaagggggccaggt

SEQ ID NO: 47200 - DNA, 20 bp, synthetic construct
  misc_feature 1..20: note = Description of Artificial Sequence: Synthetic oligonucleotide
  misc_feature 1..20: note = Target: SCN10A; (-) strand; PAM type: YTN; PAM sequence: TTT
  source 1..20: mol_type = other DNA
ttaaagccaagggggccagg

SEQ ID NO: 47201 - DNA, 20 bp, synthetic construct
  misc_feature 1..20: note = Description of Artificial Sequence: Synthetic oligonucleotide
  misc_feature 1..20: note = Target: SCN10A; (-) strand; PAM type: YTN; PAM sequence: TTT
  source 1..20: mol_type = other DNA
tttaaagccaagggggccag

SEQ ID NO: 47202 - DNA, 20 bp, synthetic construct
  misc_feature 1..20: note = Description of Artificial Sequence: Synthetic oligonucleotide
  misc_feature 1..20: note = Target: SCN10A; (-) strand; PAM type: YTN; PAM sequence: TTT
  source 1..20: mol_type = other DNA
ttttaaagccaagggggcca

SEQ ID NO: 47203 - DNA, 20 bp, synthetic construct
  misc_feature 1..20: note = Description of Artificial Sequence: Synthetic oligonucleotide
  misc_feature 1..20: note = Target: SCN10A; (-) strand; PAM type: YTN; PAM sequence: TTT
  source 1..20: mol_type = other DNA
tttttaaagccaagggggcc

SEQ ID NO: 47204 - DNA, 20 bp, synthetic construct
  misc_feature 1..20: note = Description of Artificial Sequence: Synthetic oligonucleotide
  misc_feature 1..20: note = Target: SCN10A; (-) strand; PAM type: YTN; PAM sequence: TTT
  source 1..20: mol_type = other DNA
ttttttaaagccaagggggc

SEQ ID NO: 47205 - DNA, 20 bp, synthetic construct
  misc_feature 1..20: note = Description of Artificial Sequence: Synthetic oligonucleotide
  misc_feature 1..20: note = Target: SCN10A; (-) strand; PAM type: YTN; PAM sequence: TTT
  source 1..20: mol_type = other DNA
tttttttaaagccaaggggg

SEQ ID NO: 47206 - DNA, 20 bp, synthetic construct
  misc_feature 1..20: note = Description of Artificial Sequence: Synthetic oligonucleotide
  misc_feature 1..20: note = Target: SCN10A; (-) strand; PAM type: YTN; PAM sequence: TTA
  source 1..20: mol_type = other DNA
tgccattttttttttaaagc

SEQ ID NO: 47207 - DNA, 20 bp, synthetic construct
  misc_feature 1..20: note = Description of Artificial Sequence: Synthetic oligonucleotide
  misc_feature 1..20: note = Target: SCN10A; (-) strand; PAM type: YTN; PAM sequence: TTC
  source 1..20: mol_type = other DNA
caagattatgccattttttt

SEQ ID NO: 47208 - DNA, 20 bp, synthetic construct
  misc_feature 1..20: note = Description of Artificial Sequence: Synthetic oligonucleotide
  misc_feature 1..20: note = Target: SCN10A; (-) strand; PAM type: YTN; PAM sequence: TTG
  source 1..20: mol_type = other DNA
gtatcaaggttccaagatta

SEQ ID NO: 47209 - DNA, 20 bp, synthetic construct
  misc_feature 1..20: note = Description of Artificial Sequence: Synthetic oligonucleotide
  misc_feature 1..20: note = Target: SCN10A; (-) strand; PAM type: YTN; PAM sequence: TTT
  source 1..20: mol_type = other DNA
ggtatcaaggttccaagatt

SEQ ID NO: 47210 - DNA, 20 bp, synthetic construct
  misc_feature 1..20: note = Description of Artificial Sequence: Synthetic oligonucleotide
  misc_feature 1..20: note = Target: SCN10A; (-) strand; PAM type: YTN; PAM sequence: TTT
  source 1..20: mol_type = other DNA
tggtatcaaggttccaagat

SEQ ID NO: 47211 - DNA, 20 bp, synthetic construct
  misc_feature 1..20: note = Description of Artificial Sequence: Synthetic oligonucleotide
  misc_feature 1..20: note = Target: SCN10A; (-) strand; PAM type: YTN; PAM sequence: TTG
  source 1..20: mol_type = other DNA
ccaggttttggtatcaaggt

SEQ ID NO: 47212 - DNA, 20 bp, synthetic construct
  misc_feature 1..20: note = Description of Artificial Sequence: Synthetic oligonucleotide
  misc_feature 1..20: note = Target: SCN10A; (-) strand; PAM type: YTN; PAM sequence: CTT
  source 1..20: mol_type = other DNA
gccaggttttggtatcaagg

SEQ ID NO: 47213 - DNA, 20 bp, synthetic construct
  misc_feature 1..20: note = Description of Artificial Sequence: Synthetic oligonucleotide
  misc_feature 1..20: note = Target: SCN10A; (-) strand; PAM type: YTN; PAM sequence: TTG
  source 1..20: mol_type = other DNA
tccttgccaggttttggtat

SEQ ID NO: 47214 - DNA, 20 bp, synthetic construct
  misc_feature 1..20: note = Description of Artificial Sequence: Synthetic oligonucleotide
  misc_feature 1..20: note = Target: SCN10A; (-) strand; PAM type: YTN; PAM sequence: TTC
  source 1..20: mol_type = other DNA
attgtccttgccaggttttg

SEQ ID NO: 47215 - DNA, 20 bp, synthetic construct
  misc_feature 1..20: note = Description of Artificial Sequence: Synthetic oligonucleotide
  misc_feature 1..20: note = Target: SCN10A; (-) strand; PAM type: YTN; PAM sequence: TTT
  source 1..20: mol_type = other DNA
cattgtccttgccaggtttt

SEQ ID NO: 47216 - DNA, 20 bp, synthetic construct
  misc_feature 1..20: note = Description of Artificial Sequence: Synthetic oligonucleotide
  misc_feature 1..20: note = Target: SCN10A; (-) strand; PAM type: YTN; PAM sequence: CTT
  source 1..20: mol_type = other DNA
tcattgtccttgccaggttt

SEQ ID NO: 47217 - DNA, 20 bp, synthetic construct
  misc_feature 1..20: note = Description of Artificial Sequence: Synthetic oligonucleotide
  misc_feature 1..20: note = Target: SCN10A; (-) strand; PAM type: YTN; PAM sequence: CTG
  source 1..20: mol_type = other DNA
actttcattgtccttgccag

SEQ ID NO: 47218 - DNA, 20 bp, synthetic construct
  misc_feature 1..20: note = Description of Artificial Sequence: Synthetic oligonucleotide
  misc_feature 1..20: note = Target: SCN10A; (-) strand; PAM type: YTN; PAM sequence: TTC
  source 1..20: mol_type = other DNA
ctgactttcattgtccttgc

SEQ ID NO: 47219 - DNA, 20 bp, synthetic construct
  misc_feature 1..20: note = Description of Artificial Sequence: Synthetic oligonucleotide
  misc_feature 1..20: note = Target: SCN10A; (-) strand; PAM type: YTN; PAM sequence: TTT
  source 1..20: mol_type = other DNA
cctgactttcattgtccttg

SEQ ID NO: 47220 - DNA, 20 bp, synthetic construct
  misc_feature 1..20: note = Description of Artificial Sequence: Synthetic oligonucleotide
  misc_feature 1..20: note = Target: SCN10A; (-) strand; PAM type: YTN; PAM sequence: TTT
  source 1..20: mol_type = other DNA
tcctgactttcattgtcctt

SEQ ID NO: 47221 - DNA, 20 bp, synthetic construct
  misc_feature 1..20: note = Description of Artificial Sequence: Synthetic oligonucleotide
  misc_feature 1..20: note = Target: SCN10A; (-) strand; PAM type: YTN; PAM sequence: CTA
  source 1..20: mol_type = other DNA
taattttcctgactttcatt

SEQ ID NO: 47222 - DNA, 20 bp, synthetic construct
  misc_feature 1..20: note = Description of Artificial Sequence: Synthetic oligonucleotide
  misc_feature 1..20: note = Target: SCN10A; (-) strand; PAM type: YTN; PAM sequence: TTG
  source 1..20: mol_type = other DNA
atctataattttcctgactt

SEQ ID NO: 47223 - DNA, 20 bp, synthetic construct
  misc_feature 1..20: note = Description of Artificial Sequence: Synthetic oligonucleotide
  misc_feature 1..20: note = Target: SCN10A; (-) strand; PAM type: YTN; PAM sequence: TTT
  source 1..20: mol_type = other DNA
gatctataattttcctgact

SEQ ID NO: 47224 - DNA, 20 bp, synthetic construct
  misc_feature 1..20: note = Description of Artificial Sequence: Synthetic oligonucleotide
  misc_feature 1..20: note = Target: SCN10A; (-) strand; PAM type: YTN; PAM sequence: TTA
  source 1..20: mol_type = other DNA
tccatatcaatgagtaatat

SEQ ID NO: 47225 - DNA, 20 bp, synthetic construct
  misc_feature 1..20: note = Description of Artificial Sequence: Synthetic oligonucleotide
  misc_feature 1..20: note = Target: SCN10A; (-) strand; PAM type: YTN; PAM sequence: TTT
  source 1..20: mol_type = other DNA
atccatatcaatgagtaata

SEQ ID NO: 47226 - DNA, 20 bp, synthetic construct
  misc_feature 1..20: note = Description of Artificial Sequence: Synthetic oligonucleotide
  misc_feature 1..20: note = Target: SCN10A; (-) strand; PAM type: YTN; PAM sequence: TTT
  source 1..20: mol_type = other DNA
tatccatatcaatgagtaat

SEQ ID NO: 47227 - DNA, 20 bp, synthetic construct
  misc_feature 1..20: note = Description of Artificial Sequence: Synthetic oligonucleotide
  misc_feature 1..20: note = Target: SCN10A; (-) strand; PAM type: YTN; PAM sequence: TTT
  source 1..20: mol_type = other DNA
ttatccatatcaatgagtaa

SEQ ID NO: 47228 - DNA, 20 bp, synthetic construct
  misc_feature 1..20: note = Description of Artificial Sequence: Synthetic oligonucleotide
  misc_feature 1..20: note = Target: SCN10A; (-) strand; PAM type: YTN; PAM sequence: TTT
  source 1..20: mol_type = other DNA
tttatccatatcaatgagta

SEQ ID NO: 47229 - DNA, 20 bp, synthetic construct
  misc_feature 1..20: note = Description of Artificial Sequence: Synthetic oligonucleotide
  misc_feature 1..20: note = Target: SCN10A; (-) strand; PAM type: YTN; PAM sequence: TTT
  source 1..20: mol_type = other DNA
ttttatccatatcaatgagt

SEQ ID NO: 47230 - DNA, 20 bp, synthetic construct
  misc_feature 1..20: note = Description of Artificial Sequence: Synthetic oligonucleotide
  misc_feature 1..20: note = Target: SCN10A; (-) strand; PAM type: YTN; PAM sequence: TTA
  source 1..20: mol_type = other DNA
agatttttttatccatatca

SEQ ID NO: 47231 - DNA, 20 bp, synthetic construct
  misc_feature 1..20: note = Description of Artificial Sequence: Synthetic oligonucleotide
  misc_feature 1..20: note = Target: SCN10A; (-) strand; PAM type: YTN; PAM sequence: CTT
  source 1..20: mol_type = other DNA
aagatttttttatccatatc

SEQ ID NO: 47232 - DNA, 20 bp, synthetic construct
  misc_feature 1..20: note = Description of Artificial Sequence: Synthetic oligonucleotide
  misc_feature 1..20: note = Target: SCN10A; (-) strand; PAM type: YTN; PAM sequence: TTG
  source 1..20: mol_type = other DNA
cttaagatttttttatccat

SEQ ID NO: 47233 - DNA, 20 bp, synthetic construct
  misc_feature 1..20: note = Description of Artificial Sequence: Synthetic oligonucleotide
  misc_feature 1..20: note = Target: SCN10A; (-) strand; PAM type: YTN; PAM sequence: TTT
  source 1..20: mol_type = other DNA
gcttaagatttttttatcca

SEQ ID NO: 47234 - DNA, 20 bp, synthetic construct
  misc_feature 1..20: note = Description of Artificial Sequence: Synthetic oligonucleotide
  misc_feature 1..20: note = Target: SCN10A; (-) strand; PAM type: YTN; PAM sequence: CTA
  source 1..20: mol_type = other DNA
aaaatttgcttaagattttt

SEQ ID NO: 47235 - DNA, 20 bp, synthetic construct
  misc_feature 1..20: note = Description of Artificial Sequence: Synthetic oligonucleotide
  misc_feature 1..20: note = Target: SCN10A; (-) strand; PAM type: YTN; PAM sequence: TTG
  source 1..20: mol_type = other DNA
ctaaaaatttgcttaagatt

SEQ ID NO: 47236 - DNA, 20 bp, synthetic construct
  misc_feature 1..20: note = Description of Artificial Sequence: Synthetic oligonucleotide
  misc_feature 1..20: note = Target: SCN10A; (-) strand; PAM type: YTN; PAM sequence: TTT
  source 1..20: mol_type = other DNA
gctaaaaatttgcttaagat

SEQ ID NO: 47237 - DNA, 20 bp, synthetic construct
  misc_feature 1..20: note = Description of Artificial Sequence: Synthetic oligonucleotide
  misc_feature 1..20: note = Target: SCN10A; (-) strand; PAM type: YTN; PAM sequence: TTA
  source 1..20: mol_type = other DNA
gtttgctaaaaatttgctta

SEQ ID NO: 47238 - DNA, 20 bp, synthetic construct
  misc_feature 1..20: note = Description of Artificial Sequence: Synthetic oligonucleotide
  misc_feature 1..20: note = Target: SCN10A; (-) strand; PAM type: YTN; PAM sequence: TTT
  source 1..20: mol_type = other DNA
agtttgctaaaaatttgctt

SEQ ID NO: 47239 - DNA, 20 bp, synthetic construct
  misc_feature 1..20: note = Description of Artificial Sequence: Synthetic oligonucleotide
  misc_feature 1..20: note = Target: SCN10A; (-) strand; PAM type: YTN; PAM sequence: TTG
  source 1..20: mol_type = other DNA
gaagatttagtttgctaaaa

SEQ ID NO: 47240 - DNA, 20 bp, synthetic construct
  misc_feature 1..20: note = Description of Artificial Sequence: Synthetic oligonucleotide
  misc_feature 1..20: note = Target: SCN10A; (-) strand; PAM type: YTN; PAM sequence: TTA
  source 1..20: mol_type = other DNA
atacattggaagatttagtt

SEQ ID NO: 47241 - DNA, 20 bp, synthetic construct
  misc_feature 1..20: note = Description of Artificial Sequence: Synthetic oligonucleotide
  misc_feature 1..20: note = Target: SCN10A; (-) strand; PAM type: YTN; PAM sequence: TTT
  source 1..20: mol_type = other DNA
aatacattggaagatttagt

SEQ ID NO: 47242 - DNA, 20 bp, synthetic construct
  misc_feature 1..20: note = Description of Artificial Sequence: Synthetic oligonucleotide
  misc_feature 1..20: note = Target: SCN10A; (-) strand; PAM type: YTN; PAM sequence: TTT
  source 1..20: mol_type = other DNA
taatacattggaagatttag

SEQ ID NO: 47243 - DNA, 20 bp, synthetic construct
  misc_feature 1..20: note = Description of Artificial Sequence: Synthetic oligonucleotide
  misc_feature 1..20: note = Target: SCN10A; (-) strand; PAM type: YTN; PAM sequence: TTT
  source 1..20: mol_type = other DNA
ttaatacattggaagattta

SEQ ID NO: 47244 - DNA, 20 bp, synthetic construct
  misc_feature 1..20: note = Description of Artificial Sequence: Synthetic oligonucleotide
  misc_feature 1..20: note = Target: SCN10A; (-) strand; PAM type: YTN; PAM sequence: TTT
  source 1..20: mol_type = other DNA
tttaatacattggaagattt

SEQ ID NO: 47245 - DNA, 20 bp, synthetic construct
  misc_feature 1..20: note = Description of Artificial Sequence: Synthetic oligonucleotide
  misc_feature 1..20: note = Target: SCN10A; (-) strand; PAM type: YTN; PAM sequence: TTG
  source 1..20: mol_type = other DNA
atcgtgatgcattttttaat

SEQ ID NO: 47246 - DNA, 20 bp, synthetic construct
  misc_feature 1..20: note = Description of Artificial Sequence: Synthetic oligonucleotide
  misc_feature 1..20: note = Target: SCN10A; (-) strand; PAM type: YTN; PAM sequence: CTT
  source 1..20: mol_type = other DNA
gatcgtgatgcattttttaa

SEQ ID NO: 47247 - DNA, 20 bp, synthetic construct
  misc_feature 1..20: note = Description of Artificial Sequence: Synthetic oligonucleotide
  misc_feature 1..20: note = Target: SCN10A; (-) strand; PAM type: YTN; PAM sequence: CTA
  source 1..20: mol_type = other DNA
gcttgatcgtgatgcatttt

SEQ ID NO: 47248 - DNA, 20 bp, synthetic construct
  misc_feature 1..20: note = Description of Artificial Sequence: Synthetic oligonucleotide
  misc_feature 1..20: note = Target: SCN10A; (-) strand; PAM type: YTN; PAM sequence: CTC
  source 1..20: mol_type = other DNA
aaacctagcttgatcgtgat

SEQ ID NO: 47249 - DNA, 20 bp, synthetic construct
  misc_feature 1..20: note = Description of Artificial Sequence: Synthetic oligonucleotide
  misc_feature 1..20: note = Target: SCN10A; (-) strand; PAM type: YTN; PAM sequence: TTC
  source 1..20: mol_type = other DNA
ccagctcaaacctagcttga

SEQ ID NO: 47250 - DNA, 20 bp, synthetic construct
  misc_feature 1..20: note = Description of Artificial Sequence: Synthetic oligonucleotide
  misc_feature 1..20: note = Target: SCN10A; (-) strand; PAM type: YTN; PAM sequence: TTA
  source 1..20: mol_type = other DNA
cattcccagctcaaacctag

SEQ ID NO: 47251 - DNA, 20 bp, synthetic construct
  misc_feature 1..20: note = Description of Artificial Sequence: Synthetic oligonucleotide
  misc_feature 1..20: note = Target: SCN10A; (-) strand; PAM type: YTN; PAM sequence: TTT
  source 1..20: mol_type = other DNA
acattcccagctcaaaccta

SEQ ID NO: 47252 - DNA, 20 bp, synthetic construct
  misc_feature 1..20: note = Description of Artificial Sequence: Synthetic oligonucleotide
  misc_feature 1..20: note = Target: SCN10A; (-) strand; PAM type: YTN; PAM sequence: CTT
  source 1..20: mol_type = other DNA
tacattcccagctcaaacct

SEQ ID NO: 47253 - DNA, 20 bp, synthetic construct
  misc_feature 1..20: note = Description of Artificial Sequence: Synthetic oligonucleotide
  misc_feature 1..20: note = Target: SCN10A; (-) strand; PAM type: YTN; PAM sequence: TTA
  source 1..20: mol_type = other DNA
aatcaactttacattcccag

SEQ ID NO: 47254 - DNA, 20 bp, synthetic construct
  misc_feature 1..20: note = Description of Artificial Sequence: Synthetic oligonucleotide
  misc_feature 1..20: note = Target: SCN10A; (-) strand; PAM type: YTN; PAM sequence: CTA
  source 1..20: mol_type = other DNA
atgttaaatcaactttacat

SEQ ID NO: 47255 - DNA, 20 bp, synthetic construct
  misc_feature 1..20: note = Description of Artificial Sequence: Synthetic oligonucleotide
  misc_feature 1..20: note = Target: SCN10A; (-) strand; PAM type: YTN; PAM sequence: TTC
  source 1..20: mol_type = other DNA
taatgttaaatcaactttac

SEQ ID NO: 47256 - DNA, 20 bp, synthetic construct
  misc_feature 1..20: note = Description of Artificial Sequence: Synthetic oligonucleotide
  misc_feature 1..20: note = Target: SCN10A; (-) strand; PAM type: YTN; PAM sequence: TTT
  source 1..20: mol_type = other DNA
ctaatgttaaatcaacttta

SEQ ID NO: 47257 - DNA, 20 bp, synthetic construct
  misc_feature 1..20: note = Description of Artificial Sequence: Synthetic oligonucleotide
  misc_feature 1..20: note = Target: SCN10A; (-) strand; PAM type: YTN; PAM sequence: TTT
  source 1..20: mol_type = other DNA
tctaatgttaaatcaacttt

SEQ ID NO: 47258 - DNA, 20 bp, synthetic construct
  misc_feature 1..20: note = Description of Artificial Sequence: Synthetic oligonucleotide
  misc_feature 1..20: note = Target: SCN10A; (-) strand; PAM type: YTN; PAM sequence: TTG
  source 1..20: mol_type = other DNA
attttctaatgttaaatcaa

SEQ ID NO: 47259 - DNA, 20 bp, synthetic construct
  misc_feature 1..20: note = Description of Artificial Sequence: Synthetic oligonucleotide
  misc_feature 1..20: note = Target: SCN10A; (-) strand; PAM type: YTN; PAM sequence: TTA
  source 1..20: mol_type = other DNA
attgattttctaatgttaaa

SEQ ID NO: 47260 - DNA, 20 bp, synthetic construct
  misc_feature 1..20: note = Description of Artificial Sequence: Synthetic oligonucleotide
  misc_feature 1..20: note = Target: SCN10A; (-) strand; PAM type: YTN; PAM sequence: TTA
  source 1..20: mol_type = other DNA
tattaattgattttctaatg

SEQ ID NO: 47261 - DNA, 20 bp, synthetic construct
  misc_feature 1..20: note = Description of Artificial Sequence: Synthetic oligonucleotide
  misc_feature 1..20: note = Target: SCN10A; (-) strand; PAM type: YTN; PAM sequence: TTA
  source 1..20: mol_type = other DNA
aagtggtgaattatattaat

SEQ ID NO: 47262 - DNA, 20 bp, synthetic construct
  misc_feature 1..20: note = Description of Artificial Sequence: Synthetic oligonucleotide
  misc_feature 1..20: note = Target: SCN10A; (-) strand; PAM type: YTN; PAM sequence: CTG
  source 1..20: mol_type = other DNA
ttaaagtggtgaattatatt

SEQ ID NO: 47263 - DNA, 20 bp, synthetic construct
  misc_feature 1..20: note = Description of Artificial Sequence: Synthetic oligonucleotide
  misc_feature 1..20: note = Target: SCN10A; (-) strand; PAM type: YTN; PAM sequence: TTC
  source 1..20: mol_type = other DNA
aatctgttaaagtggtgaat

SEQ ID NO: 47264 - DNA, 20 bp, synthetic construct
  misc_feature 1..20: note = Description of Artificial Sequence: Synthetic oligonucleotide
  misc_feature 1..20: note = Target: SCN10A; (-) strand; PAM type: YTN; PAM sequence: CTT
  source 1..20: mol_type = other DNA
caatctgttaaagtggtgaa

SEQ ID NO: 47265 - DNA, 20 bp, synthetic construct
  misc_feature 1..20: note = Description of Artificial Sequence: Synthetic oligonucleotide
  misc_feature 1..20: note = Target: SCN10A; (-) strand; PAM type: YTN; PAM sequence: CTC
  source 1..20: mol_type = other DNA
cttcaatctgttaaagtggt

SEQ ID NO: 47266 - DNA, 20 bp, synthetic construct
  misc_feature 1..20: note = Description of Artificial Sequence: Synthetic oligonucleotide
  misc_feature 1..20: note = Target: SCN10A; (-) strand; PAM type: YTN; PAM sequence: TTC
  source 1..20: mol_type = other DNA
tccttcaatctgttaaagtg

SEQ ID NO: 47267 - DNA, 20 bp, synthetic construct
  misc_feature 1..20: note = Description of Artificial Sequence: Synthetic oligonucleotide
  misc_feature 1..20: note = Target: SCN10A; (-) strand; PAM type: YTN; PAM sequence: TTT
  source 1..20: mol_type = other DNA
ctccttcaatctgttaaagt

SEQ ID NO: 47268 - DNA, 20 bp, synthetic construct
  misc_feature 1..20: note = Description of Artificial Sequence: Synthetic oligonucleotide
  misc_feature 1..20: note = Target: SCN10A; (-) strand; PAM type: YTN; PAM sequence: TTT
  source 1..20: mol_type = other DNA
tctccttcaatctgttaaag

SEQ ID NO: 47269 - DNA, 20 bp, synthetic construct
  misc_feature 1..20: note = Description of Artificial Sequence: Synthetic oligonucleotide
  misc_feature 1..20: note = Target: SCN10A; (-) strand; PAM type: YTN; PAM sequence: TTG
  source 1..20: mol_type = other DNA
agataatcatgtattttctc

SEQ ID NO: 47270 - DNA, 20 bp, synthetic construct
  misc_feature 1..20: note = Description of Artificial Sequence: Synthetic oligonucleotide
  misc_feature 1..20: note = Target: SCN10A; (-) strand; PAM type: YTN; PAM sequence: CTA
  source 1..20: mol_type = other DNA
catgtattgagataatcatg

SEQ ID NO: 47271 - DNA, 20 bp, synthetic construct
  misc_feature 1..20: note = Description of Artificial Sequence: Synthetic oligonucleotide
  misc_feature 1..20: note = Target: SCN10A; (-) strand; PAM type: YTN; PAM sequence: TTC
  source 1..20: mol_type = other DNA
tacatgtattgagataatca

SEQ ID NO: 47272 - DNA, 20 bp, synthetic construct
  misc_feature 1..20: note = Description of Artificial Sequence: Synthetic oligonucleotide
  misc_feature 1..20: note = Target: SCN10A; (-) strand; PAM type: YTN; PAM sequence: TTA
  source 1..20: mol_type = other DNA
ttctacatgtattgagataa

SEQ ID NO: 47273 - DNA, 20 bp, synthetic construct
  misc_feature 1..20: note = Description of Artificial Sequence: Synthetic oligonucleotide
  misc_feature 1..20: note = Target: SCN10A; (-) strand; PAM type: YTN; PAM sequence: TTA
  source 1..20: mol_type = other DNA
tcagacaattattctacatg

SEQ ID NO: 47274 - DNA, 20 bp, synthetic construct
  misc_feature 1..20: note = Description of Artificial Sequence: Synthetic oligonucleotide
  misc_feature 1..20: note = Target: SCN10A; (-) strand; PAM type: YTN; PAM sequence: TTT
  source 1..20: mol_type = other DNA
atcagacaattattctacat

SEQ ID NO: 47275 - DNA, 20 bp, synthetic construct
  misc_feature 1..20: note = Description of Artificial Sequence: Synthetic oligonucleotide
  misc_feature 1..20: note = Target: SCN10A; (-) strand; PAM type: YTN; PAM sequence: TTT
  source 1..20: mol_type = other DNA
tatcagacaattattctaca

SEQ ID NO: 47276 - DNA, 20 bp, synthetic construct
  misc_feature 1..20: note = Description of Artificial Sequence: Synthetic oligonucleotide
  misc_feature 1..20: note = Target: SCN10A; (-) strand; PAM type: YTN; PAM sequence: TTA
  source 1..20: mol_type = other DNA
attttatcagacaattattc

SEQ ID NO: 47277 - DNA, 20 bp, synthetic construct
  misc_feature 1..20: note = Description of Artificial Sequence: Synthetic oligonucleotide
  misc_feature 1..20: note = Target: SCN10A; (-) strand; PAM type: YTN; PAM sequence: TTT
  source 1..20: mol_type = other DNA
aattttatcagacaattatt

SEQ ID NO: 47278 - DNA, 20 bp, synthetic construct
  misc_feature 1..20: note = Description of Artificial Sequence: Synthetic oligonucleotide
  misc_feature 1..20: note = Target: SCN10A; (-) strand; PAM type: YTN; PAM sequence: TTA
  source 1..20: mol_type = other DNA
tcatgaatggatgtttaatt

SEQ ID NO: 47279 - DNA, 20 bp, synthetic construct
  misc_feature 1..20: note = Description of Artificial Sequence: Synthetic oligonucleotide
  misc_feature 1..20: note = Target: SCN10A; (-) strand; PAM type: YTN; PAM sequence: TTT
  source 1..20: mol_type = other DNA
atcatgaatggatgtttaat

SEQ ID NO: 47280 - DNA, 20 bp, synthetic construct
  misc_feature 1..20: note = Description of Artificial Sequence: Synthetic oligonucleotide
  misc_feature 1..20: note = Target: SCN10A; (-) strand; PAM type: YTN; PAM sequence: TTA
  source 1..20: mol_type = other DNA
tcaagaatatttatcatgaa

SEQ ID NO: 47281 - DNA, 20 bp, synthetic construct
  misc_feature 1..20: note = Description of Artificial Sequence: Synthetic oligonucleotide
  misc_feature 1..20: note = Target: SCN10A; (-) strand; PAM type: YTN; PAM sequence: TTT
  source 1..20: mol_type = other DNA
atcaagaatatttatcatga

SEQ ID NO: 47282 - DNA, 20 bp, synthetic construct
  misc_feature 1..20: note = Description of Artificial Sequence: Synthetic oligonucleotide
  misc_feature 1..20: note = Target: SCN10A; (-) strand; PAM type: YTN; PAM sequence: TTT
  source 1..20: mol_type = other DNA
tatcaagaatatttatcatg

SEQ ID NO: 47283 - DNA, 20 bp, synthetic construct
  misc_feature 1..20: note = Description of Artificial Sequence: Synthetic oligonucleotide
  misc_feature 1..20: note = Target: SCN10A; (-) strand; PAM type: YTN; PAM sequence: CTT
  source 1..20: mol_type = other DNA
ttatcaagaatatttatcat

SEQ ID NO: 47284 - DNA, 20 bp, synthetic construct
  misc_feature 1..20: note = Description of Artificial Sequence: Synthetic oligonucleotide
  misc_feature 1..20: note = Target: SCN10A; (-) strand; PAM type: YTN; PAM sequence: CTC
  source 1..20: mol_type = other DNA
ttttatcaagaatatttatc

SEQ ID NO: 47285 - DNA, 20 bp, synthetic construct
  misc_feature 1..20: note = Description of Artificial Sequence: Synthetic oligonucleotide
  misc_feature 1..20: note = Target: SCN10A; (-) strand; PAM type: YTN; PAM sequence: TTC
  source 1..20: mol_type = other DNA
tcttttatcaagaatattta

SEQ ID NO: 47286 - DNA, 20 bp, synthetic construct
  misc_feature 1..20: note = Description of Artificial Sequence: Synthetic oligonucleotide
  misc_feature 1..20: note = Target: SCN10A; (-) strand; PAM type: YTN; PAM sequence: TTC
  source 1..20: mol_type = other DNA
aggaagttctcttttatcaa

SEQ ID NO: 47287 - DNA, 20 bp, synthetic construct
  misc_feature 1..20: note = Description of Artificial Sequence: Synthetic oligonucleotide
  misc_feature 1..20: note = Target: SCN10A; (-) strand; PAM type: YTN; PAM sequence: TTA
  source 1..20: mol_type = other DNA
tcagttcaggaagttctctt

SEQ ID NO: 47288 - DNA, 20 bp, synthetic construct
  misc_feature 1..20: note = Description of Artificial Sequence: Synthetic oligonucleotide
  misc_feature 1..20: note = Target: SCN10A; (-) strand; PAM type: YTN; PAM sequence: TTT
  source 1..20: mol_type = other DNA
atcagttcaggaagttctct

SEQ ID NO: 47289 - DNA, 20 bp, synthetic construct
  misc_feature 1..20: note = Description of Artificial Sequence: Synthetic oligonucleotide
  misc_feature 1..20: note = Target: SCN10A; (-) strand; PAM type: YTN; PAM sequence: CTT
  source 1..20: mol_type = other DNA
tatcagttcaggaagttctc

SEQ ID NO: 47290 - DNA, 20 bp, synthetic construct
  misc_feature 1..20: note = Description of Artificial Sequence: Synthetic oligonucleotide
  misc_feature 1..20: note = Target: SCN10A; (-) strand; PAM type: YTN; PAM sequence: TTA
  source 1..20: mol_type = other DNA
aagataagaaatctttatca

SEQ ID NO: 47291 - DNA, 20 bp, synthetic construct
  misc_feature 1..20: note = Description of Artificial Sequence: Synthetic oligonucleotide
  misc_feature 1..20: note = Target: SCN10A; (-) strand; PAM type: YTN; PAM sequence: TTT
  source 1..20: mol_type = other DNA
aaagataagaaatctttatc

SEQ ID NO: 47292 - DNA, 20 bp, synthetic construct
  misc_feature 1..20: note = Description of Artificial Sequence: Synthetic oligonucleotide
  misc_feature 1..20: note = Target: SCN10A; (-) strand; PAM type: YTN; PAM sequence: TTT
  source 1..20: mol_type = other DNA
taaagataagaaatctttat

SEQ ID NO: 47293 - DNA, 20 bp, synthetic construct
  misc_feature 1..20: note = Description of Artificial Sequence: Synthetic oligonucleotide
  misc_feature 1..20: note = Target: SCN10A; (-) strand; PAM type: YTN; PAM sequence: TTT
  source 1..20: mol_type = other DNA
ttaaagataagaaatcttta

SEQ ID NO: 47294 - DNA, 20 bp, synthetic construct
  misc_feature 1..20: note = Description of Artificial Sequence: Synthetic oligonucleotide
  misc_feature 1..20: note = Target: SCN10A; (-) strand; PAM type: YTN; PAM sequence: TTT
  source 1..20: mol_type = other DNA
tttaaagataagaaatcttt

SEQ ID NO: 47295 - DNA, 20 bp, synthetic construct
  misc_feature 1..20: note = Description of Artificial Sequence: Synthetic oligonucleotide
  misc_feature 1..20: note = Target: SCN10A; (-) strand; PAM type: YTN; PAM sequence: TTT
  source 1..20: mol_type = other DNA
ttttaaagataagaaatctt

SEQ ID NO: 47296 - DNA, 20 bp, synthetic construct
  misc_feature 1..20: note = Description of Artificial Sequence: Synthetic oligonucleotide
  misc_feature 1..20: note = Target: SCN10A; (-) strand; PAM type: YTN; PAM sequence: CTT
  source 1..20: mol_type = other DNA
tttttaaagataagaaatct

SEQ ID NO: 47297 - DNA, 20 bp, synthetic construct
  misc_feature 1..20: note = Description of Artificial Sequence: Synthetic oligonucleotide
  misc_feature 1..20: note = Target: SCN10A; (-) strand; PAM type: YTN; PAM sequence: TTG
  source 1..20: mol_type = other DNA
tggcaggctttttttaaaga

SEQ ID NO: 47298 - DNA, 20 bp, synthetic construct
  misc_feature 1..20: note = Description of Artificial Sequence: Synthetic oligonucleotide
  misc_feature 1..20: note = Target: SCN10A; (-) strand; PAM type: YTN; PAM sequence: CTA
  source 1..20: mol_type = other DNA
acaattgtggcaggcttttt

SEQ ID NO: 47299 - DNA, 20 bp, synthetic construct
  misc_feature 1..20: note = Description of Artificial Sequence: Synthetic oligonucleotide
  misc_feature 1..20: note = Target: SCN10A; (-) strand; PAM type: YTN; PAM sequence: CTC
  source 1..20: mol_type = other DNA
taacaattgtggcaggcttt

SEQ ID NO: 47300 - DNA, 20 bp, synthetic construct
  misc_feature 1..20: note = Description of Artificial Sequence: Synthetic oligonucleotide
  misc_feature 1..20: note = Target: SCN10A; (-) strand; PAM type: YTN; PAM sequence: TTC
  source 1..20: mol_type = other DNA
accacctctaacaattgtgg

SEQ ID NO: 47301 - DNA, 20 bp, synthetic construct
  misc_feature 1..20: note = Description of Artificial Sequence: Synthetic oligonucleotide
  misc_feature 1..20: note = Target: SCN10A; (-) strand; PAM type: YTN; PAM sequence: TTT
  source 1..20: mol_type = other DNA
caccacctctaacaattgtg

SEQ ID NO: 47302 - DNA, 20 bp, synthetic construct
  misc_feature 1..20: note = Description of Artificial Sequence: Synthetic oligonucleotide
  misc_feature 1..20: note = Target: SCN10A; (-) strand; PAM type: YTN; PAM sequence: TTC
  source 1..20: mol_type = other DNA
aatatttcaccacctctaac

SEQ ID NO: 47303 - DNA, 20 bp, synthetic construct
  misc_feature 1..20: note = Description of Artificial Sequence: Synthetic oligonucleotide
  misc_feature 1..20: note = Target: SCN10A; (-) strand; PAM type: YTN; PAM sequence: TTT
  source 1..20: mol_type = other DNA
caatatttcaccacctctaa

SEQ ID NO: 47304 - DNA, 20 bp, synthetic construct
  misc_feature 1..20: note = Description of Artificial Sequence: Synthetic oligonucleotide
  misc_feature 1..20: note = Target: SCN10A; (-) strand; PAM type: YTN; PAM sequence: CTT
  source 1..20: mol_type = other DNA
tcaatatttcaccacctcta

SEQ ID NO: 47305 - DNA, 20 bp, synthetic construct
  misc_feature 1..20: note = Description of Artificial Sequence: Synthetic oligonucleotide
  misc_feature 1..20: note = Target: SCN10A; (-) strand; PAM type: YTN; PAM sequence: CTG
  source 1..20: mol_type = other DNA
atcccaaaaagaatcctttc

SEQ ID NO: 47306 - DNA, 20 bp, synthetic construct
  misc_feature 1..20: note = Description of Artificial Sequence: Synthetic oligonucleotide
  misc_feature 1..20: note = Target: SCN10A; (-) strand; PAM type: YTN; PAM sequence: TTC
  source 1..20: mol_type = other DNA
tgatcccaaaaagaatcctt

SEQ ID NO: 47307 - DNA, 20 bp, synthetic construct
  misc_feature 1..20: note = Description of Artificial Sequence: Synthetic oligonucleotide
  misc_feature 1..20: note = Target: SCN10A; (-) strand; PAM type: YTN; PAM sequence: TTT
  source 1..20: mol_type = other DNA
ctgatcccaaaaagaatcct

SEQ ID NO: 47308 - DNA, 20 bp, synthetic construct
  misc_feature 1..20: note = Description of Artificial Sequence: Synthetic oligonucleotide
  misc_feature 1..20: note = Target: SCN10A; (-) strand; PAM type: YTN; PAM sequence: TTT
  source 1..20: mol_type = other DNA
tctgatcccaaaaagaatcc

SEQ ID NO: 47309 - DNA, 20 bp, synthetic construct
  misc_feature 1..20: note = Description of Artificial Sequence: Synthetic oligonucleotide
  misc_feature 1..20: note = Target: SCN10A; (-) strand; PAM type: YTN; PAM sequence: TTA
  source 1..20: mol_type = other DNA
tcaattttctgatcccaaaa

SEQ ID NO: 47310 - DNA, 20 bp, synthetic construct
  misc_feature 1..20: note = Description of Artificial Sequence: Synthetic oligonucleotide
  misc_feature 1..20: note = Target: SCN10A; (-) strand; PAM type: YTN; PAM sequence: TTT
  source 1..20: mol_type = other DNA
atcaattttctgatcccaaa

SEQ ID NO: 47311 - DNA, 20 bp, synthetic construct
  misc_feature 1..20: note = Description of Artificial Sequence: Synthetic oligonucleotide
  misc_feature 1..20: note = Target: SCN10A; (-) strand; PAM type: YTN; PAM sequence: CTT
  source 1..20: mol_type = other DNA
tatcaattttctgatcccaa

SEQ ID NO: 47312 - DNA, 20 bp, synthetic construct
  misc_feature 1..20: note = Description of Artificial Sequence: Synthetic oligonucleotide
  misc_feature 1..20: note = Target: SCN10A; (-) strand; PAM type: YTN; PAM sequence: TTA
  source 1..20: mol_type = other DNA
ataacaggtatctttatcaa

SEQ ID NO: 47313 - DNA, 20 bp, synthetic construct
  misc_feature 1..20: note = Description of Artificial Sequence: Synthetic oligonucleotide
  misc_feature 1..20: note = Target: SCN10A; (-) strand; PAM type: YTN; PAM sequence: TTG
  source 1..20: mol_type = other DNA
aaaagaagtgttaataacag

SEQ ID NO: 47314 - DNA, 20 bp, synthetic construct
  misc_feature 1..20: note = Description of Artificial Sequence: Synthetic oligonucleotide
  misc_feature 1..20: note = Target: SCN10A; (-) strand; PAM type: YTN; PAM sequence: CTG
  source 1..20: mol_type = other DNA
ttgaaaagaagtgttaataa

SEQ ID NO: 47315 - DNA, 20 bp, synthetic construct
  misc_feature 1..20: note = Description of Artificial Sequence: Synthetic oligonucleotide
  misc_feature 1..20: note = Target: SCN10A; (-) strand; PAM type: YTN; PAM sequence: TTA
  source 1..20: mol_type = other DNA
ggacatccagtacactgttg

SEQ ID NO: 47316 - DNA, 20 bp, synthetic construct
  misc_feature 1..20: note = Description of Artificial Sequence: Synthetic oligonucleotide
  misc_feature 1..20: note = Target: SCN10A; (-) strand; PAM type: YTN; PAM sequence: CTA
  source 1..20: mol_type = other DNA
gttaggacatccagtacact

SEQ ID NO: 47317 - DNA, 20 bp, synthetic construct
  misc_feature 1..20: note = Description of Artificial Sequence: Synthetic oligonucleotide
  misc_feature 1..20: note = Target: SCN10A; (-) strand; PAM type: YTN; PAM sequence: CTG
  source 1..20: mol_type = other DNA
tgctagttaggacatccagt

SEQ ID NO: 47318 - DNA, 20 bp, synthetic construct
  misc_feature 1..20: note = Description of Artificial Sequence: Synthetic oligonucleotide
  misc_feature 1..20: note = Target: SCN10A; (-) strand; PAM type: YTN; PAM sequence: CTA
  source 1..20: mol_type = other DNA
gatcactgtgctagttagga

SEQ ID NO: 47319 - DNA, 20 bp, synthetic construct
  misc_feature 1..20: note = Description of Artificial Sequence: Synthetic oligonucleotide
  misc_feature 1..20: note = Target: SCN10A; (-) strand; PAM type: YTN; PAM sequence: TTA
  source 1..20: mol_type = other DNA
ctagatcactgtgctagtta

SEQ ID NO: 47320 - DNA, 20 bp, synthetic construct
  misc_feature 1..20: note = Description of Artificial Sequence: Synthetic oligonucleotide
  misc_feature 1..20: note = Target: SCN10A; (-) strand; PAM type: YTN; PAM sequence: TTT
  source 1..20: mol_type = other DNA
actagatcactgtgctagtt

SEQ ID NO: 47321 - DNA, 20 bp, synthetic construct
  misc_feature 1..20: note = Description of Artificial Sequence: Synthetic oligonucleotide
  misc_feature 1..20: note = Target: SCN10A; (-) strand; PAM type: YTN; PAM sequence: TTT
  source 1..20: mol_type = other DNA
tactagatcactgtgctagt

SEQ ID NO: 47322 - DNA, 20 bp, synthetic construct
  misc_feature 1..20: note = Description of Artificial Sequence: Synthetic oligonucleotide
  misc_feature 1..20: note = Target: SCN10A; (-) strand; PAM type: YTN; PAM sequence: TTT
  source 1..20: mol_type = other DNA
ttactagatcactgtgctag

SEQ ID NO: 47323 - DNA, 20 bp, synthetic construct
  misc_feature 1..20: note = Description of Artificial Sequence: Synthetic oligonucleotide
  misc_feature 1..20: note = Target: SCN10A; (-) strand; PAM type: YTN; PAM sequence: CTT
  source 1..20: mol_type = other DNA
tttactagatcactgtgcta

SEQ ID NO: 47324 - DNA, 20 bp, synthetic construct
  misc_feature 1..20: note = Description of Artificial Sequence: Synthetic oligonucleotide
  misc_feature 1..20: note = Target: SCN10A; (-) strand; PAM type: YTN; PAM sequence: TTC
  source 1..20: mol_type = other DNA
tttttactagatcactgtgc

SEQ ID NO: 47325 - DNA, 20 bp, synthetic construct
  misc_feature 1..20: note = Description of Artificial Sequence: Synthetic oligonucleotide
  misc_feature 1..20: note = Target: SCN10A; (-) strand; PAM type: YTN; PAM sequence: TTA
  source 1..20: mol_type = other DNA
ggttctttttactagatcac

SEQ ID NO: 47326 - DNA, 20 bp, synthetic construct
  misc_feature 1..20: note = Description of Artificial Sequence: Synthetic oligonucleotide
  misc_feature 1..20: note = Target: SCN10A; (-) strand; PAM type: YTN; PAM sequence: TTA
  source 1..20: mol_type = other DNA
tgccattaggttctttttac

SEQ ID NO: 47327 - DNA, 20 bp, synthetic construct
  misc_feature 1..20: note = Description of Artificial Sequence: Synthetic oligonucleotide
  misc_feature 1..20: note = Target: SCN10A; (-) strand; PAM type: YTN; PAM sequence: CTT
  source 1..20: mol_type = other DNA
atgccattaggttcttttta

SEQ ID NO: 47328 - DNA, 20 bp, synthetic construct
  misc_feature 1..20: note = Description of Artificial Sequence: Synthetic oligonucleotide
  misc_feature 1..20: note = Target: SCN10A; (-) strand; PAM type: YTN; PAM sequence: CTA
  source 1..20: mol_type = other DNA
atccttatgccattaggttc

SEQ ID NO: 47329 - DNA, 20 bp, synthetic construct
  misc_feature 1..20: note = Description of Artificial Sequence: Synthetic oligonucleotide
  misc_feature 1..20: note = Target: SCN10A; (-) strand; PAM type: YTN; PAM sequence: TTC
  source 1..20: mol_type = other DNA
taatccttatgccattaggt

SEQ ID NO: 47330 - DNA, 20 bp, synthetic construct
  misc_feature 1..20: note = Description of Artificial Sequence: Synthetic oligonucleotide
  misc_feature 1..20: note = Target: SCN10A; (-) strand; PAM type: YTN; PAM sequence: TTT
  source 1..20: mol_type = other DNA
ctaatccttatgccattagg

SEQ ID NO: 47331 - DNA, 20 bp, synthetic construct
  misc_feature 1..20: note = Description of Artificial Sequence: Synthetic oligonucleotide
  misc_feature 1..20: note = Target: SCN10A; (-) strand; PAM type: YTN; PAM sequence: TTT
  source 1..20: mol_type = other DNA
tctaatccttatgccattag

SEQ ID NO: 47332 - DNA, 20 bp, synthetic construct
  misc_feature 1..20: note = Description of Artificial Sequence: Synthetic oligonucleotide
  misc_feature 1..20: note = Target: SCN10A; (-) strand; PAM type: YTN; PAM sequence: CTT
  source 1..20: mol_type = other DNA
ttctaatccttatgccatta

SEQ ID NO: 47333 - DNA, 20 bp, synthetic construct
  misc_feature 1..20: note = Description of Artificial Sequence: Synthetic oligonucleotide
  misc_feature 1..20: note = Target: SCN10A; (-) strand; PAM type: YTN; PAM sequence: TTC
  source 1..20: mol_type = other DNA
ttttctaatccttatgccat

SEQ ID NO: 47334 - DNA, 20 bp, synthetic construct
  misc_feature 1..20: note = Description of Artificial Sequence: Synthetic oligonucleotide
  misc_feature 1..20: note = Target: SCN10A; (-) strand; PAM type: YTN; PAM sequence: CTT
  source 1..20: mol_type = other DNA
cttttctaatccttatgcca

SEQ ID NO: 47335 - DNA, 20 bp, synthetic construct
  misc_feature 1..20: note = Description of Artificial Sequence: Synthetic oligonucleotide
  misc_feature 1..20: note = Target: SCN10A; (-) strand; PAM type: YTN; PAM sequence: TTC
  source 1..20: mol_type = other DNA
ttcttttctaatccttatgc

SEQ ID NO: 47336 - DNA, 20 bp, synthetic construct
  misc_feature 1..20: note = Description of Artificial Sequence: Synthetic oligonucleotide
  misc_feature 1..20: note = Target: SCN10A; (-) strand; PAM type: YTN; PAM sequence: TTT
  source 1..20: mol_type = other DNA
cttcttttctaatccttatg

SEQ ID NO: 47337 - DNA, 20 bp, synthetic construct
  misc_feature 1..20: note = Description of Artificial Sequence: Synthetic oligonucleotide
  misc_feature 1..20: note = Target: SCN10A; (-) strand; PAM type: YTN; PAM sequence: CTA
  source 1..20: mol_type = other DNA
atttcttcttttctaatcct

SEQ ID NO: 47338 - DNA, 20 bp, synthetic construct
  misc_feature 1..20: note = Description of Artificial Sequence: Synthetic oligonucleotide
  misc_feature 1..20: note = Target: SCN10A; (-) strand; PAM type: YTN; PAM sequence: TTA
  source 1..20: mol_type = other DNA
caggcatgagccacccacgc

SEQ ID NO: 47339 - DNA, 20 bp, synthetic construct
  misc_feature 1..20: note = Description of Artificial Sequence: Synthetic oligonucleotide
  misc_feature 1..20: note = Target: SCN10A; (-) strand; PAM type: YTN; PAM sequence: CTG
  source 1..20: mol_type = other DNA
ggattacaggcatgagccac

SEQ ID NO: 47340 - DNA, 20 bp, synthetic construct
  misc_feature 1..20: note = Description of Artificial Sequence: Synthetic oligonucleotide
  misc_feature 1..20: note = Target: SCN10A; (-) strand; PAM type: YTN; PAM sequence: CTA
  source 1..20: mol_type = other DNA
aagtgctgggattacaggca

SEQ ID NO: 47341 - DNA, 20 bp, synthetic construct
  misc_feature 1..20: note = Description of Artificial Sequence: Synthetic oligonucleotide
  misc_feature 1..20: note = Target: SCN10A; (-) strand; PAM type: YTN; PAM sequence: CTC
  source 1..20: mol_type = other DNA
ctaaagtgctgggattacag

SEQ ID NO: 47342 - DNA, 20 bp, synthetic construct
  misc_feature 1..20: note = Description of Artificial Sequence: Synthetic oligonucleotide
  misc_feature 1..20: note = Target: SCN10A; (-) strand; PAM type: YTN; PAM sequence: TTG
  source 1..20: mol_type = other DNA
gcctcctaaagtgctgggat

SEQ ID NO: 47343 - DNA, 20 bp, synthetic construct
  misc_feature 1..20: note = Description of Artificial Sequence: Synthetic oligonucleotide
  misc_feature 1..20: note = Target: SCN10A; (-) strand; PAM type: YTN; PAM sequence: CTT
  source 1..20: mol_type = other DNA
ggcctcctaaagtgctggga

SEQ ID NO: 47344 - DNA, 20 bp, synthetic construct
  misc_feature 1..20: note = Description of Artificial Sequence: Synthetic oligonucleotide
  misc_feature 1..20: note = Target: SCN10A; (-) strand; PAM type: YTN; PAM sequence: CTG
  source 1..20: mol_type = other DNA
ccttggcctcctaaagtgct

SEQ ID NO: 47345 - DNA, 20 bp, synthetic construct
  misc_feature 1..20: note = Description of Artificial Sequence: Synthetic oligonucleotide
  misc_feature 1..20: note = Target: SCN10A; (-) strand; PAM type: YTN; PAM sequence: CTG
  source 1..20: mol_type = other DNA
cctgccttggcctcctaaag

SEQ ID NO: 47346 - DNA, 20 bp, synthetic construct
  misc_feature 1..20: note = Description of Artificial Sequence: Synthetic oligonucleotide
  misc_feature 1..20: note = Target: SCN10A; (-) strand; PAM type: YTN; PAM sequence: CTC
  source 1..20: mol_type = other DNA
atgatctgcctgccttggcc

SEQ ID NO: 47347 - DNA, 20 bp, synthetic construct
  misc_feature 1..20: note = Description of Artificial Sequence: Synthetic oligonucleotide
  misc_feature 1..20: note = Target: SCN10A; (-) strand; PAM type: YTN; PAM sequence: CTG
  source 1..20: mol_type = other DNA
acctcatgatctgcctgcct

SEQ ID NO: 47348 - DNA, 20 bp, synthetic construct
  misc_feature 1..20: note = Description of Artificial Sequence: Synthetic oligonucleotide
  misc_feature 1..20: note = Target: SCN10A; (-) strand; PAM type: YTN; PAM sequence: CTC
  source 1..20: mol_type = other DNA
ctgacctcatgatctgcctg

SEQ ID NO: 47349 - DNA, 20 bp, synthetic construct
  misc_feature 1..20: note = Description of Artificial Sequence: Synthetic oligonucleotide
  misc_feature 1..20: note = Target: SCN10A; (-) strand; PAM type: YTN; PAM sequence: CTC
  source 1..20: mol_type = other DNA
gatctcctgacctcatgatc

SEQ ID NO: 47350 - DNA, 20 bp, synthetic construct
  misc_feature 1..20: note = Description of Artificial Sequence: Synthetic oligonucleotide
  misc_feature 1..20: note = Target: SCN10A; (-) strand; PAM type: YTN; PAM sequence: TTA
  source 1..20: mol_type = other DNA
gccaggatggtctcgatctc

SEQ ID NO: 47351 - DNA, 20 bp, synthetic construct
  misc_feature 1..20: note = Description of Artificial Sequence: Synthetic oligonucleotide
  misc_feature 1..20: note = Target: SCN10A; (-) strand; PAM type: YTN; PAM sequence: TTC
  source 1..20: mol_type = other DNA
accgtgttagccaggatggt

SEQ ID NO: 47352 - DNA, 20 bp, synthetic construct
  misc_feature 1..20: note = Description of Artificial Sequence: Synthetic oligonucleotide
  misc_feature 1..20: note = Target: SCN10A; (-) strand; PAM type: YTN; PAM sequence: TTT
  source 1..20: mol_type = other DNA
caccgtgttagccaggatgg

SEQ ID NO: 47353 - DNA, 20 bp, synthetic construct
  misc_feature 1..20: note = Description of Artificial Sequence: Synthetic oligonucleotide
  misc_feature 1..20: note = Target: SCN10A; (-) strand; PAM type: YTN; PAM sequence: TTA
  source 1..20: mol_type = other DNA
gtagagacggggtttcaccg

SEQ ID NO: 47354 - DNA, 20 bp, synthetic construct
  misc_feature 1..20: note = Description of Artificial Sequence: Synthetic oligonucleotide
  misc_feature 1..20: note = Target: SCN10A; (-) strand; PAM type: YTN; PAM sequence: TTT
  source 1..20: mol_type = other DNA
agtagagacggggtttcacc

SEQ ID NO: 47355 - DNA, 20 bp, synthetic construct
  misc_feature 1..20: note = Description of Artificial Sequence: Synthetic oligonucleotide
  misc_feature 1..20: note = Target: SCN10A; (-) strand; PAM type: YTN; PAM sequence: TTT
  source 1..20: mol_type = other DNA
tagtagagacggggtttcac

SEQ ID NO: 47356 - DNA, 20 bp, synthetic construct
  misc_feature 1..20: note = Description of Artificial Sequence: Synthetic oligonucleotide
  misc_feature 1..20: note = Target: SCN10A; (-) strand; PAM type: YTN; PAM sequence: TTT
  source 1..20: mol_type = other DNA
ttagtagagacggggtttca

SEQ ID NO: 47357 - DNA, 20 bp, synthetic construct
  misc_feature 1..20: note = Description of Artificial Sequence: Synthetic oligonucleotide
  misc_feature 1..20: note = Target: SCN10A; (-) strand; PAM type: YTN; PAM sequence: TTG
  source 1..20: mol_type = other DNA
tatttttagtagagacgggg

SEQ ID NO: 47358 - DNA, 20 bp, synthetic construct
  misc_feature 1..20: note = Description of Artificial Sequence: Synthetic oligonucleotide
  misc_feature 1..20: note = Target: SCN10A; (-) strand; PAM type: YTN; PAM sequence: TTT
  source 1..20: mol_type = other DNA
gtatttttagtagagacggg

SEQ ID NO: 47359 - DNA, 20 bp, synthetic construct
  misc_feature 1..20: note = Description of Artificial Sequence: Synthetic oligonucleotide
  misc_feature 1..20: note = Target: SCN10A; (-) strand; PAM type: YTN; PAM sequence: CTT
  source 1..20: mol_type = other DNA
tgtatttttagtagagacgg

SEQ ID NO: 47360 - DNA, 20 bp, synthetic construct
  misc_feature 1..20: note = Description of Artificial Sequence: Synthetic oligonucleotide
  misc_feature 1..20: note = Target: SCN10A; (-) strand; PAM type: YTN; PAM sequence: TTC
  source 1..20: mol_type = other DNA
tttgtatttttagtagagac

SEQ ID NO: 47361 - DNA, 20 bp, synthetic construct
  misc_feature 1..20: note = Description of Artificial Sequence: Synthetic oligonucleotide
  misc_feature 1..20: note = Target: SCN10A; (-) strand; PAM type: YTN; PAM sequence: CTA
  source 1..20: mol_type = other DNA
attctttgtatttttagtag

SEQ ID NO: 47362 - DNA, 20 bp, synthetic construct
  misc_feature 1..20: note = Description of Artificial Sequence: Synthetic oligonucleotide
  misc_feature 1..20: note = Target: SCN10A; (-) strand; PAM type: YTN; PAM sequence: CTG
  source 1..20: mol_type = other DNA
gctaattctttgtattttta

SEQ ID NO: 47363 - DNA, 20 bp, synthetic construct
  misc_feature 1..20: note = Description of Artificial Sequence: Synthetic oligonucleotide
  misc_feature 1..20: note = Target: SCN10A; (-) strand; PAM type: YTN; PAM sequence: CTA
  source 1..20: mol_type = other DNA
caggcacccaccaccatgcc

SEQ ID NO: 47364 - DNA, 20 bp, synthetic construct
  misc_feature 1..20: note = Description of Artificial Sequence: Synthetic oligonucleotide
  misc_feature 1..20: note = Target: SCN10A; (-) strand; PAM type: YTN; PAM sequence: CTG
  source 1..20: mol_type = other DNA
ggactacaggcacccaccac

SEQ ID NO: 47365 - DNA, 20 bp, synthetic construct
  misc_feature 1..20: note = Description of Artificial Sequence: Synthetic oligonucleotide
  misc_feature 1..20: note = Target: SCN10A; (-) strand; PAM type: YTN; PAM sequence: CTG
  source 1..20: mol_type = other DNA
agtagctgggactacaggca

SEQ ID NO: 47366 - DNA, 20 bp, synthetic construct
  misc_feature 1..20: note = Description of Artificial Sequence: Synthetic oligonucleotide
  misc_feature 1..20: note = Target: SCN10A; (-) strand; PAM type: YTN; PAM sequence: CTC
  source 1..20: mol_type = other DNA
ctgagtagctgggactacag

SEQ ID NO: 47367 - DNA, 20 bp, synthetic construct
  misc_feature 1..20: note = Description of Artificial Sequence: Synthetic oligonucleotide
  misc_feature 1..20: note = Target: SCN10A; (-) strand; PAM type: YTN; PAM sequence: CTC
  source 1..20: mol_type = other DNA
agcctcctgagtagctggga

SEQ ID NO: 47368 - DNA, 20 bp, synthetic construct
  misc_feature 1..20: note = Description of Artificial Sequence: Synthetic oligonucleotide
  misc_feature 1..20: note = Target: SCN10A; (-) strand; PAM type: YTN; PAM sequence: CTG
  source 1..20: mol_type = other DNA
cctcagcctcctgagtagct

SEQ ID NO: 47369 - DNA, 20 bp, synthetic construct
  misc_feature 1..20: note = Description of Artificial Sequence: Synthetic oligonucleotide
  misc_feature 1..20: note = Target: SCN10A; (-) strand; PAM type: YTN; PAM sequence: CTC
  source 1..20: mol_type = other DNA
ctgcctcagcctcctgagta

SEQ ID NO: 47370 - DNA, 20 bp, synthetic construct
  misc_feature 1..20: note = Description of Artificial Sequence: Synthetic oligonucleotide
  misc_feature 1..20: note = Target: SCN10A; (-) strand; PAM type: YTN; PAM sequence: TTC
  source 1..20: mol_type = other DNA
tcctgcctcagcctcctgag

SEQ ID NO: 47371 - DNA, 20 bp, synthetic construct
  misc_feature 1..20: note = Description of Artificial Sequence: Synthetic oligonucleotide
  misc_feature 1..20: note = Target: SCN10A; (-) strand; PAM type: YTN; PAM sequence: TTC
  source 1..20: mol_type = other DNA
acgccattctcctgcctcag

SEQ ID NO: 47372 - DNA, 20 bp, synthetic construct
  misc_feature 1..20: note = Description of Artificial Sequence: Synthetic oligonucleotide
  misc_feature 1..20: note = Target: SCN10A; (-) strand; PAM type: YTN; PAM sequence: CTC
  source 1..20: mol_type = other DNA
ccgggttcacgccattctcc

SEQ ID NO: 47373 - DNA, 20 bp, synthetic construct
  misc_feature 1..20: note = Description of Artificial Sequence: Synthetic oligonucleotide
  misc_feature 1..20: note = Target: SCN10A; (-) strand; PAM type: YTN; PAM sequence: CTC
  source 1..20: mol_type = other DNA
cacctcccgggttcacgcca

SEQ ID NO: 47374 - DNA, 20 bp, synthetic construct
  misc_feature 1..20: note = Description of Artificial Sequence: Synthetic oligonucleotide
  misc_feature 1..20: note = Target: SCN10A; (-) strand; PAM type: YTN; PAM sequence: TTG
  source 1..20: mol_type = other DNA
ccagctccacctcccgggtt

SEQ ID NO: 47375 - DNA, 20 bp, synthetic construct
  misc_feature 1..20: note = Description of Artificial Sequence: Synthetic oligonucleotide
  misc_feature 1..20: note = Target: SCN10A; (-) strand; PAM type: YTN; PAM sequence: CTC
  source 1..20: mol_type = other DNA
attgccagctccacctcccg

SEQ ID NO: 47376 - DNA, 20 bp, synthetic construct
  misc_feature 1..20: note = Description of Artificial Sequence: Synthetic oligonucleotide
  misc_feature 1..20: note = Target: SCN10A; (-) strand; PAM type: YTN; PAM sequence: CTC
  source 1..20: mol_type = other DNA
ggctcattgccagctccacc

SEQ ID NO: 47377 - DNA, 20 bp, synthetic construct
  misc_feature 1..20: note = Description of Artificial Sequence: Synthetic oligonucleotide
  misc_feature 1..20: note = Target: SCN10A; (-) strand; PAM type: YTN; PAM sequence: CTA
  source 1..20: mol_type = other DNA
gagtgcagtggcgtgatctc

SEQ ID NO: 47378 - DNA, 20 bp, synthetic construct
  misc_feature 1..20: note = Description of Artificial Sequence: Synthetic oligonucleotide
  misc_feature 1..20: note = Target: SCN10A; (-) strand; PAM type: YTN; PAM sequence: CTG
  source 1..20: mol_type = other DNA
tcacccaggctagagtgcag

SEQ ID NO: 47379 - DNA, 20 bp, synthetic construct
  misc_feature 1..20: note = Description of Artificial Sequence: Synthetic oligonucleotide
  misc_feature 1..20: note = Target: SCN10A; (-) strand; PAM type: YTN; PAM sequence: CTC
  source 1..20: mol_type = other DNA
tgtcacccaggctagagtgc

SEQ ID NO: 47380 - DNA, 20 bp, synthetic construct
  misc_feature 1..20: note = Description of Artificial Sequence: Synthetic oligonucleotide
  misc_feature 1..20: note = Target: SCN10A; (-) strand; PAM type: YTN; PAM sequence: CTC
  source 1..20: mol_type = other DNA
gctctgtcacccaggctaga

SEQ ID NO: 47381 - DNA, 20 bp, synthetic construct
  misc_feature 1..20: note = Description of Artificial Sequence: Synthetic oligonucleotide
  misc_feature 1..20: note = Target: SCN10A; (-) strand; PAM type: YTN; PAM sequence: TTG
  source 1..20: mol_type = other DNA
agacagagtctcgctctgtc

SEQ ID NO: 47382 - DNA, 20 bp, synthetic construct
  misc_feature 1..20: note = Description of Artificial Sequence: Synthetic oligonucleotide
  misc_feature 1..20: note = Target: SCN10A; (-) strand; PAM type: YTN; PAM sequence: TTT
  source 1..20: mol_type = other DNA
gagacagagtctcgctctgt

SEQ ID NO: 47383 - DNA, 20 bp, synthetic construct
  misc_feature 1..20: note = Description of Artificial Sequence: Synthetic oligonucleotide
  misc_feature 1..20: note = Target: SCN10A; (-) strand; PAM type: YTN; PAM sequence: TTT
  source 1..20: mol_type = other DNA
tgagacagagtctcgctctg

SEQ ID NO: 47384 - DNA, 20 bp, synthetic construct
  misc_feature 1..20: note = Description of Artificial Sequence: Synthetic oligonucleotide
  misc_feature 1..20: note = Target: SCN10A; (-) strand; PAM type: YTN; PAM sequence: TTT
  source 1..20: mol_type = other DNA
ttgagacagagtctcgctct

SEQ ID NO: 47385 - DNA, 20 bp, synthetic construct
  misc_feature 1..20: note = Description of Artificial Sequence: Synthetic oligonucleotide
  misc_feature 1..20: note = Target: SCN10A; (-) strand; PAM type: YTN; PAM sequence: TTT
  source 1..20: mol_type = other DNA
tttgagacagagtctcgctc

SEQ ID NO: 47386 - DNA, 20 bp, synthetic construct
  misc_feature 1..20: note = Description of Artificial Sequence: Synthetic oligonucleotide
  misc_feature 1..20: note = Target: SCN10A; (-) strand; PAM type: YTN; PAM sequence: TTT
  source 1..20: mol_type = other DNA
ttttgagacagagtctcgct

SEQ ID NO: 47387 - DNA, 20 bp, synthetic construct
  misc_feature 1..20: note = Description of Artificial Sequence: Synthetic oligonucleotide
  misc_feature 1..20: note = Target: SCN10A; (-) strand; PAM type: YTN; PAM sequence: TTT
  source 1..20: mol_type = other DNA
tttttgagacagagtctcgc

SEQ ID NO: 47388 - DNA, 20 bp, synthetic construct
  misc_feature 1..20: note = Description of Artificial Sequence: Synthetic oligonucleotide
  misc_feature 1..20: note = Target: SCN10A; (-) strand; PAM type: YTN; PAM sequence: TTT
  source 1..20: mol_type = other DNA
ttttttgagacagagtctcg

SEQ ID NO: 47389 - DNA, 20 bp, synthetic construct
  misc_feature 1..20: note = Description of Artificial Sequence: Synthetic oligonucleotide
  misc_feature 1..20: note = Target: SCN10A; (-) strand; PAM type: YTN; PAM sequence: TTT
  source 1..20: mol_type = other DNA
tttttttgagacagagtctc

SEQ ID NO: 47390 - DNA, 20 bp, synthetic construct
  misc_feature 1..20: note = Description of Artificial Sequence: Synthetic oligonucleotide
  misc_feature 1..20: note = Target: SCN10A; (-) strand; PAM type: YTN; PAM sequence: TTT
  source 1..20: mol_type = other DNA
ttttttttgagacagagtct

SEQ ID NO: 47391 - DNA, 20 bp, synthetic construct
  misc_feature 1..20: note = Description of Artificial Sequence: Synthetic oligonucleotide
  misc_feature 1..20: note = Target: SCN10A; (-) strand; PAM type: YTN; PAM sequence: TTT
  source 1..20: mol_type = other DNA
tttttttttgagacagagtc

SEQ ID NO: 47392 - DNA, 20 bp, synthetic construct
  misc_feature 1..20: note = Description of Artificial Sequence: Synthetic oligonucleotide
  misc_feature 1..20: note = Target: SCN10A; (-) strand; PAM type: YTN; PAM sequence: TTT
  source 1..20: mol_type = other DNA
ttttttttttgagacagagt

SEQ ID NO: 47393 - DNA, 20 bp, synthetic construct
  misc_feature 1..20: note = Description of Artificial Sequence: Synthetic oligonucleotide
  misc_feature 1..20: note = Target: SCN10A; (-) strand; PAM type: YTN; PAM sequence: TTT
  source 1..20: mol_type = other DNA
tttttttttttgagacagag

SEQ ID NO: 47394 - DNA, 20 bp, synthetic construct
  misc_feature 1..20: note = Description of Artificial Sequence: Synthetic oligonucleotide
  misc_feature 1..20: note = Target: SCN10A; (-) strand; PAM type: YTN; PAM sequence: TTT
  source 1..20: mol_type = other DNA
ttttttttttttgagacaga

SEQ ID NO: 47395 - DNA, 20 bp, synthetic construct
  misc_feature 1..20: note = Description of Artificial Sequence: Synthetic oligonucleotide
  misc_feature 1..20: note = Target: SCN10A; (-) strand; PAM type: YTN; PAM sequence: TTT
  source 1..20: mol_type = other DNA
tttttttttttttgagacag

SEQ ID NO: 47396 - DNA, 20 bp, synthetic construct
  misc_feature 1..20: note = Description of Artificial Sequence: Synthetic oligonucleotide
  misc_feature 1..20: note = Target: SCN10A; (-) strand; PAM type: YTN; PAM sequence: TTT
  source 1..20: mol_type = other DNA
ttttttttttttttgagaca

SEQ ID NO: 47397 - DNA, 20 bp, synthetic construct
  misc_feature 1..20: note = Description of Artificial Sequence: Synthetic oligonucleotide
  misc_feature 1..20: note = Target: SCN10A; (-) strand; PAM type: YTN; PAM sequence: TTT
  source 1..20: mol_type = other DNA
tttttttttttttttgagac

SEQ ID NO: 47398 - DNA, 20 bp, synthetic construct
  misc_feature 1..20: note = Description of Artificial Sequence: Synthetic oligonucleotide
  misc_feature 1..20: note = Target: SCN10A; (-) strand; PAM type: YTN; PAM sequence: TTT
  source 1..20: mol_type = other DNA
ttttttttttttttttgaga

SEQ ID NO: 47399 - DNA, 20 bp, synthetic construct
  misc_feature 1..20: note = Description of Artificial Sequence: Synthetic oligonucleotide
  misc_feature 1..20: note = Target: SCN10A; (-) strand; PAM type: YTN; PAM sequence: TTT
  source 1..20: mol_type = other DNA
tttttttttttttttttgag

SEQ ID NO: 47400 - DNA, 20 bp, synthetic construct
  misc_feature 1..20: note = Description of Artificial Sequence: Synthetic oligonucleotide
  misc_feature 1..20: note = Target: SCN10A; (-) strand; PAM type: YTN; PAM sequence: CTT
  source 1..20: mol_type = other DNA
ttttttttttttttttttga

SEQ ID NO: 47401 - DNA, 20 bp, synthetic construct
  misc_feature 1..20: note = Description of Artificial Sequence: Synthetic oligonucleotide
  misc_feature 1..20: note = Target: SCN10A; (-) strand; PAM type: YTN; PAM sequence: TTC
  source 1..20: mol_type = other DNA
tttttttttttttttttttt

SEQ ID NO: 47402 - DNA, 20 bp, synthetic construct
  misc_feature 1..20: note = Description of Artificial Sequence: Synthetic oligonucleotide
  misc_feature 1..20: note = Target: SCN10A; (-) strand; PAM type: YTN; PAM sequence: TTT
  source 1..20: mol_type = other DNA
cttttttttttttttttttt

SEQ ID NO: 47403 - DNA, 20 bp, synthetic construct
  misc_feature 1..20: note = Description of Artificial Sequence: Synthetic oligonucleotide
  misc_feature 1..20: note = Target: SCN10A; (-) strand; PAM type: YTN; PAM sequence: CTT
  source 1..20: mol_type = other DNA
tctttttttttttttttttt

SEQ ID NO: 47404 - DNA, 20 bp, synthetic construct
  misc_feature 1..20: note = Description of Artificial Sequence: Synthetic oligonucleotide
  misc_feature 1..20: note = Target: SCN10A; (-) strand; PAM type: YTN; PAM sequence: TTC
  source 1..20: mol_type = other DNA
tttctttttttttttttttt

SEQ ID NO: 47405 - DNA, 20 bp, synthetic construct
  misc_feature 1..20: note = Description of Artificial Sequence: Synthetic oligonucleotide
  misc_feature 1..20: note = Target: SCN10A; (-) strand; PAM type: YTN; PAM sequence: TTT
  source 1..20: mol_type = other DNA
ctttcttttttttttttttt

SEQ ID NO: 47406 - DNA, 20 bp, synthetic construct
  misc_feature 1..20: note = Description of Artificial Sequence: Synthetic oligonucleotide
  misc_feature 1..20: note = Target: SCN10A; (-) strand; PAM type: YTN; PAM sequence: TTT
  source 1..20: mol_type = other DNA
tctttctttttttttttttt

SEQ ID NO: 47407 - DNA, 20 bp, synthetic construct
  misc_feature 1..20: note = Description of Artificial Sequence: Synthetic oligonucleotide
  misc_feature 1..20: note = Target: SCN10A; (-) strand; PAM type: YTN; PAM sequence: CTT
  source 1..20: mol_type = other DNA
ttctttcttttttttttttt

SEQ ID NO: 47408 - DNA, 20 bp, synthetic construct
  misc_feature 1..20: note = Description of Artificial Sequence: Synthetic oligonucleotide
  misc_feature 1..20: note = Target: SCN10A; (-) strand; PAM type: YTN; PAM sequence: TTC
  source 1..20: mol_type = other DNA
ttttctttcttttttttttt

SEQ ID NO: 47409 - DNA, 20 bp, synthetic construct
  misc_feature 1..20: note = Description of Artificial Sequence: Synthetic oligonucleotide
  misc_feature 1..20: note = Target: SCN10A; (-) strand; PAM type: YTN; PAM sequence: CTT
  source 1..20: mol_type = other DNA
cttttctttctttttttttt

SEQ ID NO: 47410 - DNA, 20 bp, synthetic construct
  misc_feature 1..20: note = Description of Artificial Sequence: Synthetic oligonucleotide
  misc_feature 1..20: note = Target: SCN10A; (-) strand; PAM type: YTN; PAM sequence: TTC
  source 1..20: mol_type = other DNA
ttcttttctttctttttttt

SEQ ID NO: 47411 - DNA, 20 bp, synthetic construct
  misc_feature 1..20: note = Description of Artificial Sequence: Synthetic oligonucleotide
  misc_feature 1..20: note = Target: SCN10A; (-) strand; PAM type: YTN; PAM sequence: TTT
  source 1..20: mol_type = other DNA
cttcttttctttcttttttt

SEQ ID NO: 47412 - DNA, 20 bp, synthetic construct
  misc_feature 1..20: note = Description of Artificial Sequence: Synthetic oligonucleotide
  misc_feature 1..20: note = Target: SCN10A; (-) strand; PAM type: YTN; PAM sequence: TTA
  source 1..20: mol_type = other DNA
atttcttcttttctttcttt

SEQ ID NO: 47413 - DNA, 20 bp, synthetic construct
  misc_feature 1..20: note = Description of Artificial Sequence: Synthetic oligonucleotide
  misc_feature 1..20: note = Target: SCN10A; (-) strand; PAM type: YTN; PAM sequence: TTT
  source 1..20: mol_type = other DNA
aatttcttcttttctttctt

SEQ ID NO: 47414 - DNA, 20 bp, synthetic construct
  misc_feature 1..20: note = Description of Artificial Sequence: Synthetic oligonucleotide
  misc_feature 1..20: note = Target: SCN10A; (-) strand; PAM type: YTN; PAM sequence: CTA
  source 1..20: mol_type = other DNA
acataatcacatcatgtgaa

SEQ ID NO: 47415 - DNA, 20 bp, synthetic construct
  misc_feature 1..20: note = Description of Artificial Sequence: Synthetic oligonucleotide
  misc_feature 1..20: note = Target: SCN10A; (-) strand; PAM type: YTN; PAM sequence: TTC
  source 1..20: mol_type = other DNA
taacataatcacatcatgtg

SEQ ID NO: 47416 - DNA, 20 bp, synthetic construct
  misc_feature 1..20: note = Description of Artificial Sequence: Synthetic oligonucleotide
  misc_feature 1..20: note = Target: SCN10A; (-) strand; PAM type: YTN; PAM sequence: TTT
  source 1..20: mol_type = other DNA
ctaacataatcacatcatgt

SEQ ID NO: 47417 - DNA, 20 bp, synthetic construct
  misc_feature 1..20: note = Description of Artificial Sequence: Synthetic oligonucleotide
  misc_feature 1..20: note = Target: SCN10A; (-) strand; PAM type: YTN; PAM sequence: TTT
  source 1..20: mol_type = other DNA
tctaacataatcacatcatg

SEQ ID NO: 47418 - DNA, 20 bp, synthetic construct
  misc_feature 1..20: note = Description of Artificial Sequence: Synthetic oligonucleotide
  misc_feature 1..20: note = Target: SCN10A; (-) strand; PAM type: YTN; PAM sequence: TTA
  source 1..20: mol_type = other DNA
aattttctaacataatcaca

SEQ ID NO: 47419 - DNA, 20 bp, synthetic construct
  misc_feature 1..20: note = Description of Artificial Sequence: Synthetic oligonucleotide
  misc_feature 1..20: note = Target: SCN10A; (-) strand; PAM type: YTN; PAM sequence: TTT
  source 1..20: mol_type = other DNA
aaattttctaacataatcac

SEQ ID NO: 47420 - DNA, 20 bp, synthetic construct
  misc_feature 1..20: note = Description of Artificial Sequence: Synthetic oligonucleotide
  misc_feature 1..20: note = Target: SCN10A; (-) strand; PAM type: YTN; PAM sequence: TTT
  source 1..20: mol_type = other DNA
taaattttctaacataatca

SEQ ID NO: 47421 - DNA, 20 bp, synthetic construct
  misc_feature 1..20: note = Description of Artificial Sequence: Synthetic oligonucleotide
  misc_feature 1..20: note = Target: SCN10A; (-) strand; PAM type: YTN; PAM sequence: CTA
  source 1..20: mol_type = other DNA
tacaatgttttaaattttct

SEQ ID NO: 47422 - DNA, 20 bp, synthetic construct
  misc_feature 1..20: note = Description of Artificial Sequence: Synthetic oligonucleotide
  misc_feature 1..20: note = Target: SCN10A; (-) strand; PAM type: YTN; PAM sequence: TTA
  source 1..20: mol_type = other DNA
tctatacaatgttttaaatt

SEQ ID NO: 47423 - DNA, 20 bp, synthetic construct
  misc_feature 1..20: note = Description of Artificial Sequence: Synthetic oligonucleotide
  misc_feature 1..20: note = Target: SCN10A; (-) strand; PAM type: YTN; PAM sequence: TTT
  source 1..20: mol_type = other DNA
atctatacaatgttttaaat

SEQ ID NO: 47424 - DNA, 20 bp, synthetic construct
  misc_feature 1..20: note = Description of Artificial Sequence: Synthetic oligonucleotide
  misc_feature 1..20: note = Target: SCN10A; (-) strand; PAM type: YTN; PAM sequence: CTA
  source 1..20: mol_type = other DNA
ataatttatctatacaatgt

SEQ ID NO: 47425 - DNA, 20 bp, synthetic construct
  misc_feature 1..20: note = Description of Artificial Sequence: Synthetic oligonucleotide
  misc_feature 1..20: note = Target: SCN10A; (-) strand; PAM type: YTN; PAM sequence: TTC
  source 1..20: mol_type = other DNA
taataatttatctatacaat

SEQ ID NO: 47426 - DNA, 20 bp, synthetic construct
  misc_feature 1..20: note = Description of Artificial Sequence: Synthetic oligonucleotide
  misc_feature 1..20: note = Target: SCN10A; (-) strand; PAM type: YTN; PAM sequence: TTA
  source 1..20: mol_type = other DNA
attctaataatttatctata

SEQ ID NO: 47427 - DNA, 20 bp, synthetic construct
  misc_feature 1..20: note = Description of Artificial Sequence: Synthetic oligonucleotide
  misc_feature 1..20: note = Target: SCN10A; (-) strand; PAM type: YTN; PAM sequence: TTA
  source 1..20: mol_type = other DNA
ttaattctaataatttatct

SEQ ID NO: 47428 - DNA, 20 bp, synthetic construct
  misc_feature 1..20: note = Description of Artificial Sequence: Synthetic oligonucleotide
  misc_feature 1..20: note = Target: SCN10A; (-) strand; PAM type: YTN; PAM sequence: CTT
  source 1..20: mol_type = other DNA
attaattctaataatttatc

SEQ ID NO: 47429 - DNA, 20 bp, synthetic construct
  misc_feature 1..20: note = Description of Artificial Sequence: Synthetic oligonucleotide
  misc_feature 1..20: note = Target: SCN10A; (-) strand; PAM type: YTN; PAM sequence: CTC
  source 1..20: mol_type = other DNA
ttattaattctaataattta

SEQ ID NO: 47430 - DNA, 20 bp, synthetic construct
  misc_feature 1..20: note = Description of Artificial Sequence: Synthetic oligonucleotide
  misc_feature 1..20: note = Target: SCN10A; (-) strand; PAM type: YTN; PAM sequence: CTA
  source 1..20: mol_type = other DNA
gaaatgtctcttattaattc

SEQ ID NO: 47431 - DNA, 20 bp, synthetic construct
  misc_feature 1..20: note = Description of Artificial Sequence: Synthetic oligonucleotide
  misc_feature 1..20: note = Target: SCN10A; (-) strand; PAM type: YTN; PAM sequence: TTG
  source 1..20: mol_type = other DNA
tatctagaaatgtctcttat

SEQ ID NO: 47432 - DNA, 20 bp, synthetic construct
  misc_feature 1..20: note = Description of Artificial Sequence: Synthetic oligonucleotide
  misc_feature 1..20: note = Target: SCN10A; (-) strand; PAM type: YTN; PAM sequence: TTT
  source 1..20: mol_type = other DNA
gtatctagaaatgtctctta

SEQ ID NO: 47433 - DNA, 20 bp, synthetic construct
  misc_feature 1..20: note = Description of Artificial Sequence: Synthetic oligonucleotide
  misc_feature 1..20: note = Target: SCN10A; (-) strand; PAM type: YTN; PAM sequence: TTT
  source 1..20: mol_type = other DNA
tgtatctagaaatgtctctt

SEQ ID NO: 47434 - DNA, 20 bp, synthetic construct
  misc_feature 1..20: note = Description of Artificial Sequence: Synthetic oligonucleotide
  misc_feature 1..20: note = Target: SCN10A; (-) strand; PAM type: YTN; PAM sequence: TTT
  source 1..20: mol_type = other DNA
ttgtatctagaaatgtctct

SEQ ID NO: 47435 - DNA, 20 bp, synthetic construct
  misc_feature 1..20: note = Description of Artificial Sequence: Synthetic oligonucleotide
  misc_feature 1..20: note = Target: SCN10A; (-) strand; PAM type: YTN; PAM sequence: TTA
  source 1..20: mol_type = other DNA
acatttttgtatctagaaat

SEQ ID NO: 47436 - DNA, 20 bp, synthetic construct
  misc_feature 1..20: note = Description of Artificial Sequence: Synthetic oligonucleotide
  misc_feature 1..20: note = Target: SCN10A; (-) strand; PAM type: YTN; PAM sequence: TTT
  source 1..20: mol_type = other DNA
aacatttttgtatctagaaa

SEQ ID NO: 47437 - DNA, 20 bp, synthetic construct
  misc_feature 1..20: note = Description of Artificial Sequence: Synthetic oligonucleotide
  misc_feature 1..20: note = Target: SCN10A; (-) strand; PAM type: YTN; PAM sequence: TTG
  source 1..20: mol_type = other DNA
atatttaacatttttgtatc

SEQ ID NO: 47438 - DNA, 20 bp, synthetic construct
  misc_feature 1..20: note = Description of Artificial Sequence: Synthetic oligonucleotide
  misc_feature 1..20: note = Target: SCN10A; (-) strand; PAM type: YTN; PAM sequence: TTT
  source 1..20: mol_type = other DNA
gatatttaacatttttgtat

SEQ ID NO: 47439 - DNA, 20 bp, synthetic construct
  misc_feature 1..20: note = Description of Artificial Sequence: Synthetic oligonucleotide
  misc_feature 1..20: note = Target: SCN10A; (-) strand; PAM type: YTN; PAM sequence: TTT
  source 1..20: mol_type = other DNA
tgatatttaacatttttgta

SEQ ID NO: 47440 - DNA, 20 bp, synthetic construct
  misc_feature 1..20: note = Description of Artificial Sequence: Synthetic oligonucleotide
  misc_feature 1..20: note = Target: SCN10A; (-) strand; PAM type: YTN; PAM sequence: CTA
  source 1..20: mol_type = other DNA
gcattttgatatttaacatt

SEQ ID NO: 47441 - DNA, 20 bp, synthetic construct
  misc_feature 1..20: note = Description of Artificial Sequence: Synthetic oligonucleotide
  misc_feature 1..20: note = Target: SCN10A; (-) strand; PAM type: YTN; PAM sequence: TTG
  source 1..20: mol_type = other DNA
gctagcattttgatatttaa

SEQ ID NO: 47442 - DNA, 20 bp, synthetic construct
  misc_feature 1..20: note = Description of Artificial Sequence: Synthetic oligonucleotide
  misc_feature 1..20: note = Target: SCN10A; (-) strand; PAM type: YTN; PAM sequence: TTT
  source 1..20: mol_type = other DNA
ggctagcattttgatattta

SEQ ID NO: 47443 - DNA, 20 bp, synthetic construct
  misc_feature 1..20: note = Description of Artificial Sequence: Synthetic oligonucleotide
  misc_feature 1..20: note = Target: SCN10A; (-) strand; PAM type: YTN; PAM sequence: TTT
  source 1..20: mol_type = other DNA
tggctagcattttgatattt

SEQ ID NO: 47444 - DNA, 20 bp, synthetic construct
  misc_feature 1..20: note = Description of Artificial Sequence: Synthetic oligonucleotide
  misc_feature 1..20: note = Target: SCN10A; (-) strand; PAM type: YTN; PAM sequence: TTT
  source 1..20: mol_type = other DNA
ttggctagcattttgatatt

SEQ ID NO: 47445 - DNA, 20 bp, synthetic construct
  misc_feature 1..20: note = Description of Artificial Sequence: Synthetic oligonucleotide
  misc_feature 1..20: note = Target: SCN10A; (-) strand; PAM type: YTN; PAM sequence: CTG
  source 1..20: mol_type = other DNA
gcatttttggctagcatttt

SEQ ID NO: 47446 - DNA, 20 bp, synthetic construct
  misc_feature 1..20: note = Description of Artificial Sequence: Synthetic oligonucleotide
  misc_feature 1..20: note = Target: SCN10A; (-) strand; PAM type: YTN; PAM sequence: TTC
  source 1..20: mol_type = other DNA
tggcatttttggctagcatt

SEQ ID NO: 47447 - DNA, 20 bp, synthetic construct
  misc_feature 1..20: note = Description of Artificial Sequence: Synthetic oligonucleotide
  misc_feature 1..20: note = Target: SCN10A; (-) strand; PAM type: YTN; PAM sequence: TTT
  source 1..20: mol_type = other DNA
ctggcatttttggctagcat

SEQ ID NO: 47448 - DNA, 20 bp, synthetic construct
  misc_feature 1..20: note = Description of Artificial Sequence: Synthetic oligonucleotide
  misc_feature 1..20: note = Target: SCN10A; (-) strand; PAM type: YTN; PAM sequence: TTT
  source 1..20: mol_type = other DNA
tctggcatttttggctagca

SEQ ID NO: 47449 - DNA, 20 bp, synthetic construct
  misc_feature 1..20: note = Description of Artificial Sequence: Synthetic oligonucleotide
  misc_feature 1..20: note = Target: SCN10A; (-) strand; PAM type: YTN; PAM sequence: CTT
  source 1..20: mol_type = other DNA
ttctggcatttttggctagc

SEQ ID NO: 47450 - DNA, 20 bp, synthetic construct
  misc_feature 1..20: note = Description of Artificial Sequence: Synthetic oligonucleotide
  misc_feature 1..20: note = Target: SCN10A; (-) strand; PAM type: YTN; PAM sequence: TTC
  source 1..20: mol_type = other DNA
ttttctggcatttttggcta

SEQ ID NO: 47451 - DNA, 20 bp, synthetic construct
  misc_feature 1..20: note = Description of Artificial Sequence: Synthetic oligonucleotide
  misc_feature 1..20: note = Target: SCN10A; (-) strand; PAM type: YTN; PAM sequence: TTA
  source 1..20: mol_type = other DNA
aatgttcttttctggcattt

SEQ ID NO: 47452 - DNA, 20 bp, synthetic construct
  misc_feature 1..20: note = Description of Artificial Sequence: Synthetic oligonucleotide
  misc_feature 1..20: note = Target: SCN10A; (-) strand; PAM type: YTN; PAM sequence: CTT
  source 1..20: mol_type = other DNA
aaatgttcttttctggcatt

SEQ ID NO: 47453 - DNA, 20 bp, synthetic construct
  misc_feature 1..20: note = Description of Artificial Sequence: Synthetic oligonucleotide
  misc_feature 1..20: note = Target: SCN10A; (-) strand; PAM type: YTN; PAM sequence: TTC
  source 1..20: mol_type = other DNA
ttaaatgttcttttctggca

SEQ ID NO: 47454 - DNA, 20 bp, synthetic construct
  misc_feature 1..20: note = Description of Artificial Sequence: Synthetic oligonucleotide
  misc_feature 1..20: note = Target: SCN10A; (-) strand; PAM type: YTN; PAM sequence: CTT
  source 1..20: mol_type = other DNA
cttaaatgttcttttctggc

SEQ ID NO: 47455 - DNA, 20 bp, synthetic construct
  misc_feature 1..20: note = Description of Artificial Sequence: Synthetic oligonucleotide
  misc_feature 1..20: note = Target: SCN10A; (-) strand; PAM type: YTN; PAM sequence: TTG
  source 1..20: mol_type = other DNA
catatcttcttaaatgttct

SEQ ID NO: 47456 - DNA, 20 bp, synthetic construct
  misc_feature 1..20: note = Description of Artificial Sequence: Synthetic oligonucleotide
  misc_feature 1..20: note = Target: SCN10A; (-) strand; PAM type: YTN; PAM sequence: CTT
  source 1..20: mol_type = other DNA
gcatatcttcttaaatgttc

SEQ ID NO: 47457 - DNA, 20 bp, synthetic construct
  misc_feature 1..20: note = Description of Artificial Sequence: Synthetic oligonucleotide
  misc_feature 1..20: note = Target: SCN10A; (-) strand; PAM type: YTN; PAM sequence: CTC
  source 1..20: mol_type = other DNA
cataggatcttgcatatctt

SEQ ID NO: 47458 - DNA, 20 bp, synthetic construct
  misc_feature 1..20: note = Description of Artificial Sequence: Synthetic oligonucleotide
  misc_feature 1..20: note = Target: SCN10A; (-) strand; PAM type: YTN; PAM sequence: TTC
  source 1..20: mol_type = other DNA
tccataggatcttgcatatc

SEQ ID NO: 47459 - DNA, 20 bp, synthetic construct
  misc_feature 1..20: note = Description of Artificial Sequence: Synthetic oligonucleotide
  misc_feature 1..20: note = Target: SCN10A; (-) strand; PAM type: YTN; PAM sequence: TTT
  source 1..20: mol_type = other DNA
ctccataggatcttgcatat

SEQ ID NO: 47460 - DNA, 20 bp, synthetic construct
  misc_feature 1..20: note = Description of Artificial Sequence: Synthetic oligonucleotide
  misc_feature 1..20: note = Target: SCN10A; (-) strand; PAM type: YTN; PAM sequence: TTT
  source 1..20: mol_type = other DNA
tctccataggatcttgcata

SEQ ID NO: 47461 - DNA, 20 bp, synthetic construct
  misc_feature 1..20: note = Description of Artificial Sequence: Synthetic oligonucleotide
  misc_feature 1..20: note = Target: SCN10A; (-) strand; PAM type: YTN; PAM sequence: TTA
  source 1..20: mol_type = other DNA
taattttctccataggatct

SEQ ID NO: 47462 - DNA, 20 bp, synthetic construct
  misc_feature 1..20: note = Description of Artificial Sequence: Synthetic oligonucleotide
  misc_feature 1..20: note = Target: SCN10A; (-) strand; PAM type: YTN; PAM sequence: TTT
  source 1..20: mol_type = other DNA
ataattttctccataggatc

SEQ ID NO: 47463 - DNA, 20 bp, synthetic construct
  misc_feature 1..20: note = Description of Artificial Sequence: Synthetic oligonucleotide
  misc_feature 1..20: note = Target: SCN10A; (-) strand; PAM type: YTN; PAM sequence: TTT
  source 1..20: mol_type = other DNA
tataattttctccataggat

SEQ ID NO: 47464 - DNA, 20 bp, synthetic construct
  misc_feature 1..20: note = Description of Artificial Sequence: Synthetic oligonucleotide
  misc_feature 1..20: note = Target: SCN10A; (-) strand; PAM type: YTN; PAM sequence: TTT
  source 1..20: mol_type = other DNA
ttataattttctccatagga

SEQ ID NO: 47465 - DNA, 20 bp, synthetic construct
  misc_feature 1..20: note = Description of Artificial Sequence: Synthetic oligonucleotide
  misc_feature 1..20: note = Target: SCN10A; (-) strand; PAM type: YTN; PAM sequence: TTC
  source 1..20: mol_type = other DNA
catgaggtttttataatttt

SEQ ID NO: 47466 - DNA, 20 bp, synthetic construct
  misc_feature 1..20: note = Description of Artificial Sequence: Synthetic oligonucleotide
  misc_feature 1..20: note = Target: SCN10A; (-) strand; PAM type: YTN; PAM sequence: TTT
  source 1..20: mol_type = other DNA
ccatgaggtttttataattt

SEQ ID NO: 47467 - DNA, 20 bp, synthetic construct
  misc_feature 1..20: note = Description of Artificial Sequence: Synthetic oligonucleotide
  misc_feature 1..20: note = Target: SCN10A; (-) strand; PAM type: YTN; PAM sequence: TTA
  source 1..20: mol_type = other DNA
aaaatgtttccatgaggttt

SEQ ID NO: 47468 - DNA, 20 bp, synthetic construct
  misc_feature 1..20: note = Description of Artificial Sequence: Synthetic oligonucleotide
  misc_feature 1..20: note = Target: SCN10A; (-) strand; PAM type: YTN; PAM sequence: TTT
  source 1..20: mol_type = other DNA
aaaaatgtttccatgaggtt

SEQ ID NO: 47469 - DNA, 20 bp, synthetic construct
  misc_feature 1..20: note = Description of Artificial Sequence: Synthetic oligonucleotide
  misc_feature 1..20: note = Target: SCN10A; (-) strand; PAM type: YTN; PAM sequence: TTC
  source 1..20: mol_type = other DNA
aataaagtttaaaaatgttt

SEQ ID NO: 47470 - DNA, 20 bp, synthetic construct
  misc_feature 1..20: note = Description of Artificial Sequence: Synthetic oligonucleotide
  misc_feature 1..20: note = Target: SCN10A; (-) strand; PAM type: YTN; PAM sequence: TTT
  source 1..20: mol_type = other DNA
caataaagtttaaaaatgtt

SEQ ID NO: 47471 - DNA, 20 bp, synthetic construct
  misc_feature 1..20: note = Description of Artificial Sequence: Synthetic oligonucleotide
  misc_feature 1..20: note = Target: SCN10A; (-) strand; PAM type: YTN; PAM sequence: CTT
  source 1..20: mol_type = other DNA
tcaataaagtttaaaaatgt

SEQ ID NO: 47472 - DNA, 20 bp, synthetic construct
  misc_feature 1..20: note = Description of Artificial Sequence: Synthetic oligonucleotide
  misc_feature 1..20: note = Target: SCN10A; (-) strand; PAM type: YTN; PAM sequence: CTG
  source 1..20: mol_type = other DNA
tataccagtctttcaataaa

SEQ ID NO: 47473 - DNA, 20 bp, synthetic construct
  misc_feature 1..20: note = Description of Artificial Sequence: Synthetic oligonucleotide
  misc_feature 1..20: note = Target: SCN10A; (-) strand; PAM type: YTN; PAM sequence: CTA
  source 1..20: mol_type = other DNA
tgaagatagtatacgctgta

SEQ ID NO: 47474 - DNA, 20 bp, synthetic construct
  misc_feature 1..20: note = Description of Artificial Sequence: Synthetic oligonucleotide
  misc_feature 1..20: note = Target: SCN10A; (-) strand; PAM type: YTN; PAM sequence: CTG
  source 1..20: mol_type = other DNA
atctatgaagatagtatacg

SEQ ID NO: 47475 - DNA, 20 bp, synthetic construct
  misc_feature 1..20: note = Description of Artificial Sequence: Synthetic oligonucleotide
  misc_feature 1..20: note = Target: SCN10A; (-) strand; PAM type: YTN; PAM sequence: TTC
  source 1..20: mol_type = other DNA
tgatctatgaagatagtata

SEQ ID NO: 47476 - DNA, 20 bp, synthetic construct
  misc_feature 1..20: note = Description of Artificial Sequence: Synthetic oligonucleotide
  misc_feature 1..20: note = Target: SCN10A; (-) strand; PAM type: YTN; PAM sequence: CTT
  source 1..20: mol_type = other DNA
ctgatctatgaagatagtat

SEQ ID NO: 47477 - DNA, 20 bp, synthetic construct
  misc_feature 1..20: note = Description of Artificial Sequence: Synthetic oligonucleotide
  misc_feature 1..20: note = Target: SCN10A; (-) strand; PAM type: YTN; PAM sequence: TTC
  source 1..20: mol_type = other DNA
agtcttctgatctatgaaga

SEQ ID NO: 47478 - DNA, 20 bp, synthetic construct
  misc_feature 1..20: note = Description of Artificial Sequence: Synthetic oligonucleotide
  misc_feature 1..20: note = Target: SCN10A; (-) strand; PAM type: YTN; PAM sequence: TTA
  source 1..20: mol_type = other DNA
cataattcagtcttctgatc

SEQ ID NO: 47479 - DNA, 20 bp, synthetic construct
  misc_feature 1..20: note = Description of Artificial Sequence: Synthetic oligonucleotide
  misc_feature 1..20: note = Target: SCN10A; (-) strand; PAM type: YTN; PAM sequence: TTT
  source 1..20: mol_type = other DNA
acataattcagtcttctgat

SEQ ID NO: 47480 - DNA, 20 bp, synthetic construct
  misc_feature 1..20: note = Description of Artificial Sequence: Synthetic oligonucleotide
  misc_feature 1..20: note = Target: SCN10A; (-) strand; PAM type: YTN; PAM sequence: CTT
  source 1..20: mol_type = other DNA
tacataattcagtcttctga

SEQ ID NO: 47481 - DNA, 20 bp, synthetic construct
  misc_feature 1..20: note = Description of Artificial Sequence: Synthetic oligonucleotide
  misc_feature 1..20: note = Target: SCN10A; (-) strand; PAM type: YTN; PAM sequence: TTA
  source 1..20: mol_type = other DNA
taatctttacataattcagt

SEQ ID NO: 47482 - DNA, 20 bp, synthetic construct
  misc_feature 1..20: note = Description of Artificial Sequence: Synthetic oligonucleotide
  misc_feature 1..20: note = Target: SCN10A; (-) strand; PAM type: YTN; PAM sequence: CTT
  source 1..20: mol_type = other DNA
ataatctttacataattcag

SEQ ID NO: 47483 - DNA, 20 bp, synthetic construct
  misc_feature 1..20: note = Description of Artificial Sequence: Synthetic oligonucleotide
  misc_feature 1..20: note = Target: SCN10A; (-) strand; PAM type: YTN; PAM sequence: TTG
  source 1..20: mol_type = other DNA
ggaagacttataatctttac

SEQ ID NO: 47484 - DNA, 20 bp, synthetic construct
  misc_feature 1..20: note = Description of Artificial Sequence: Synthetic oligonucleotide
  misc_feature 1..20: note = Target: SCN10A; (-) strand; PAM type: YTN; PAM sequence: TTT
  source 1..20: mol_type = other DNA
gggaagacttataatcttta

SEQ ID NO: 47485 - DNA, 20 bp, synthetic construct
  misc_feature 1..20: note = Description of Artificial Sequence: Synthetic oligonucleotide
  misc_feature 1..20: note = Target: SCN10A; (-) strand; PAM type: YTN; PAM sequence: TTG
  source 1..20: mol_type = other DNA
ataggtcaatttgggaagac

SEQ ID NO: 47486 - DNA, 20 bp, synthetic construct
  misc_feature 1..20: note = Description of Artificial Sequence: Synthetic oligonucleotide
  misc_feature 1..20: note = Target: SCN10A; (-) strand; PAM type: YTN; PAM sequence: CTG
  source 1..20: mol_type = other DNA
taattgataggtcaatttgg

SEQ ID NO: 47487 - DNA, 20 bp, synthetic construct
  misc_feature 1..20: note = Description of Artificial Sequence: Synthetic oligonucleotide
  misc_feature 1..20: note = Target: SCN10A; (-) strand; PAM type: YTN; PAM sequence: CTG
  source 1..20: mol_type = other DNA
ctgtaattgataggtcaatt

SEQ ID NO: 47488 - DNA, 20 bp, synthetic construct
  misc_feature 1..20: note = Description of Artificial Sequence: Synthetic oligonucleotide
  misc_feature 1..20: note = Target: SCN10A; (-) strand; PAM type: YTN; PAM sequence: TTA
  source 1..20: mol_type = other DNA
gggactgctgtaattgatag

SEQ ID NO: 47489 - DNA, 20 bp, synthetic construct
  misc_feature 1..20: note = Description of Artificial Sequence: Synthetic oligonucleotide
  misc_feature 1..20: note = Target: SCN10A; (-) strand; PAM type: YTN; PAM sequence: TTC
  source 1..20: mol_type = other DNA
ccattagggactgctgtaat

SEQ ID NO: 47490 - DNA, 20 bp, synthetic construct
  misc_feature 1..20: note = Description of Artificial Sequence: Synthetic oligonucleotide
  misc_feature 1..20: note = Target: SCN10A; (-) strand; PAM type: YTN; PAM sequence: TTT
  source 1..20: mol_type = other DNA
cccattagggactgctgtaa

SEQ ID NO: 47491 - DNA, 20 bp, synthetic construct
  misc_feature 1..20: note = Description of Artificial Sequence: Synthetic oligonucleotide
  misc_feature 1..20: note = Target: SCN10A; (-) strand; PAM type: YTN; PAM sequence: TTT
  source 1..20: mol_type = other DNA
tcccattagggactgctgta

SEQ ID NO: 47492 - DNA, 20 bp, synthetic construct
  misc_feature 1..20: note = Description of Artificial Sequence: Synthetic oligonucleotide
  misc_feature 1..20: note = Target: SCN10A; (-) strand; PAM type: YTN; PAM sequence: TTT
  source 1..20: mol_type = other DNA
ttcccattagggactgctgt

SEQ ID NO: 47493 - DNA, 20 bp, synthetic construct
  misc_feature 1..20: note = Description of Artificial Sequence: Synthetic oligonucleotide
  misc_feature 1..20: note = Target: SCN10A; (-) strand; PAM type: YTN; PAM sequence: TTG
  source 1..20: mol_type = other DNA
tttttcccattagggactgc

SEQ ID NO: 47494 - DNA, 20 bp, synthetic construct
  misc_feature 1..20: note = Description of Artificial Sequence: Synthetic oligonucleotide
  misc_feature 1..20: note = Target: SCN10A; (-) strand; PAM type: YTN; PAM sequence: CTA
  source 1..20: mol_type = other DNA
ttgtttttcccattagggac

SEQ ID NO: 47495 - DNA, 20 bp, synthetic construct
  misc_feature 1..20: note = Description of Artificial Sequence: Synthetic oligonucleotide
  misc_feature 1..20: note = Target: SCN10A; (-) strand; PAM type: YTN; PAM sequence: CTG
  source 1..20: mol_type = other DNA
ctattgtttttcccattagg

SEQ ID NO: 47496 - DNA, 20 bp, synthetic construct
  misc_feature 1..20: note = Description of Artificial Sequence: Synthetic oligonucleotide
  misc_feature 1..20: note = Target: SCN10A; (-) strand; PAM type: YTN; PAM sequence: TTA
  source 1..20: mol_type = other DNA
catacccacatacacacaaa

SEQ ID NO: 47497 - DNA, 20 bp, synthetic construct
  misc_feature 1..20: note = Description of Artificial Sequence: Synthetic oligonucleotide
  misc_feature 1..20: note = Target: SCN10A; (-) strand; PAM type: YTN; PAM sequence: TTG
  source 1..20: mol_type = other DNA
ccaagttacatacccacata

SEQ ID NO: 47498 - DNA, 20 bp, synthetic construct
  misc_feature 1..20: note = Description of Artificial Sequence: Synthetic oligonucleotide
  misc_feature 1..20: note = Target: SCN10A; (-) strand; PAM type: YTN; PAM sequence: CTT
  source 1..20: mol_type = other DNA
gccaagttacatacccacat

SEQ ID NO: 47499 - DNA, 20 bp, synthetic construct
  misc_feature 1..20: note = Description of Artificial Sequence: Synthetic oligonucleotide
  misc_feature 1..20: note = Target: SCN10A; (-) strand; PAM type: YTN; PAM sequence: TTA
  source 1..20: mol_type = other DNA
tcttgccaagttacataccc

SEQ ID NO: 47500 - DNA, 20 bp, synthetic construct
  misc_feature 1..20: note = Description of Artificial Sequence: Synthetic oligonucleotide
  misc_feature 1..20: note = Target: SCN10A; (-) strand; PAM type: YTN; PAM sequence: TTA
  source 1..20: mol_type = other DNA
gaattatcttgccaagttac

SEQ ID NO: 47501 - DNA, 20 bp, synthetic construct
  misc_feature 1..20: note = Description of Artificial Sequence: Synthetic oligonucleotide
  misc_feature 1..20: note = Target: SCN10A; (-) strand; PAM type: YTN; PAM sequence: TTT
  source 1..20: mol_type = other DNA
agaattatcttgccaagtta

SEQ ID NO: 47502 - DNA, 20 bp, synthetic construct
  misc_feature 1..20: note = Description of Artificial Sequence: Synthetic oligonucleotide
  misc_feature 1..20: note = Target: SCN10A; (-) strand; PAM type: YTN; PAM sequence: CTT
  source 1..20: mol_type = other DNA
tagaattatcttgccaagtt

SEQ ID NO: 47503 - DNA, 20 bp, synthetic construct
  misc_feature 1..20: note = Description of Artificial Sequence: Synthetic oligonucleotide
  misc_feature 1..20: note = Target: SCN10A; (-) strand; PAM type: YTN; PAM sequence: TTC
  source 1..20: mol_type = other DNA
actttagaattatcttgcca

SEQ ID NO: 47504 - DNA, 20 bp, synthetic construct
  misc_feature 1..20: note = Description of Artificial Sequence: Synthetic oligonucleotide
  misc_feature 1..20: note = Target: SCN10A; (-) strand; PAM type: YTN; PAM sequence: TTC
  source 1..20: mol_type = other DNA
atattcactttagaattatc

SEQ ID NO: 47505 - DNA, 20 bp, synthetic construct
  misc_feature 1..20: note = Description of Artificial Sequence: Synthetic oligonucleotide
  misc_feature 1..20: note = Target: SCN10A; (-) strand; PAM type: YTN; PAM sequence: TTT
  source 1..20: mol_type = other DNA
catattcactttagaattat

SEQ ID NO: 47506 - DNA, 20 bp, synthetic construct
  misc_feature 1..20: note = Description of Artificial Sequence: Synthetic oligonucleotide
  misc_feature 1..20: note = Target: SCN10A; (-) strand; PAM type: YTN; PAM sequence: CTT
  source 1..20: mol_type = other DNA
tcatattcactttagaatta

SEQ ID NO: 47507 - DNA, 20 bp, synthetic construct
  misc_feature 1..20: note = Description of Artificial Sequence: Synthetic oligonucleotide
  misc_feature 1..20: note = Target: SCN10A; (-) strand; PAM type: YTN; PAM sequence: CTG
  source 1..20: mol_type = other DNA
cacactttcatattcacttt

SEQ ID NO: 47508 - DNA, 20 bp, synthetic construct
  misc_feature 1..20: note = Description of Artificial Sequence: Synthetic oligonucleotide
  misc_feature 1..20: note = Target: SCN10A; (-) strand; PAM type: YTN; PAM sequence: TTG
  source 1..20: mol_type = other DNA
gcctgcacactttcatattc

SEQ ID NO: 47509 - DNA, 20 bp, synthetic construct
  misc_feature 1..20: note = Description of Artificial Sequence: Synthetic oligonucleotide
  misc_feature 1..20: note = Target: SCN10A; (-) strand; PAM type: YTN; PAM sequence: CTT
  source 1..20: mol_type = other DNA
ggcctgcacactttcatatt

SEQ ID NO: 47510 - DNA, 20 bp, synthetic construct
  misc_feature 1..20: note = Description of Artificial Sequence: Synthetic oligonucleotide
  misc_feature 1..20: note = Target: SCN10A; (-) strand; PAM type: YTN; PAM sequence: TTC
  source 1..20: mol_type = other DNA
aagaatatcttggcctgcac

SEQ ID NO: 47511 - DNA, 20 bp, synthetic construct
  misc_feature 1..20: note = Description of Artificial Sequence: Synthetic oligonucleotide
  misc_feature 1..20: note = Target: SCN10A; (-) strand; PAM type: YTN; PAM sequence: CTT
  source 1..20: mol_type = other DNA
caagaatatcttggcctgca

SEQ ID NO: 47512 - DNA, 20 bp, synthetic construct
  misc_feature 1..20: note = Description of Artificial Sequence: Synthetic oligonucleotide
  misc_feature 1..20: note = Target: SCN10A; (-) strand; PAM type: YTN; PAM sequence: TTA
  source 1..20: mol_type = other DNA
cttcaagaatatcttggcct

SEQ ID NO: 47513 - DNA, 20 bp, synthetic construct
  misc_feature 1..20: note = Description of Artificial Sequence: Synthetic oligonucleotide
  misc_feature 1..20: note = Target: SCN10A; (-) strand; PAM type: YTN; PAM sequence: TTT
  source 1..20: mol_type = other DNA
acttcaagaatatcttggcc

SEQ ID NO: 47514 - DNA, 20 bp, synthetic construct
  misc_feature 1..20: note = Description of Artificial Sequence: Synthetic oligonucleotide
  misc_feature 1..20: note = Target: SCN10A; (-) strand; PAM type: YTN; PAM sequence: CTA
  source 1..20: mol_type = other DNA
atttacttcaagaatatctt

SEQ ID NO: 47515 - DNA, 20 bp, synthetic construct
  misc_feature 1..20: note = Description of Artificial Sequence: Synthetic oligonucleotide
  misc_feature 1..20: note = Target: SCN10A; (-) strand; PAM type: YTN; PAM sequence: CTG
  source 1..20: mol_type = other DNA
taaatcaagtaatccaccta

SEQ ID NO: 47516 - DNA, 20 bp, synthetic construct
  misc_feature 1..20: note = Description of Artificial Sequence: Synthetic oligonucleotide
  misc_feature 1..20: note = Target: SCN10A; (-) strand; PAM type: YTN; PAM sequence: CTG
  source 1..20: mol_type = other DNA
tgtctgtaaatcaagtaatc

SEQ ID NO: 47517 - DNA, 20 bp, synthetic construct
  misc_feature 1..20: note = Description of Artificial Sequence: Synthetic oligonucleotide
  misc_feature 1..20: note = Target: SCN10A; (-) strand; PAM type: YTN; PAM sequence: TTA
  source 1..20: mol_type = other DNA
aatatatctgtgtctgtaaa

SEQ ID NO: 47518 - DNA, 20 bp, synthetic construct
  misc_feature 1..20: note = Description of Artificial Sequence: Synthetic oligonucleotide
  misc_feature 1..20: note = Target: SCN10A; (-) strand; PAM type: YTN; PAM sequence: TTT
  source 1..20: mol_type = other DNA
aaatatatctgtgtctgtaa

SEQ ID NO: 47519 - DNA, 20 bp, synthetic construct
  misc_feature 1..20: note = Description of Artificial Sequence: Synthetic oligonucleotide
  misc_feature 1..20: note = Target: SCN10A; (-) strand; PAM type: YTN; PAM sequence: CTT
  source 1..20: mol_type = other DNA
taaatatatctgtgtctgta

SEQ ID NO: 47520 - DNA, 20 bp, synthetic construct
  misc_feature 1..20: note = Description of Artificial Sequence: Synthetic oligonucleotide
  misc_feature 1..20: note = Target: SCN10A; (-) strand; PAM type: YTN; PAM sequence: TTA
  source 1..20: mol_type = other DNA
tggcagctttaaatatatct

SEQ ID NO: 47521 - DNA, 20 bp, synthetic construct
  misc_feature 1..20: note = Description of Artificial Sequence: Synthetic oligonucleotide
  misc_feature 1..20: note = Target: SCN10A; (-) strand; PAM type: YTN; PAM sequence: TTA
  source 1..20: mol_type = other DNA
attatggcagctttaaatat

SEQ ID NO: 47522 - DNA, 20 bp, synthetic construct
  misc_feature 1..20: note = Description of Artificial Sequence: Synthetic oligonucleotide
  misc_feature 1..20: note = Target: SCN10A; (-) strand; PAM type: YTN; PAM sequence: CTT
  source 1..20: mol_type = other DNA
aattatggcagctttaaata

SEQ ID NO: 47523 - DNA, 20 bp, synthetic construct
  misc_feature 1..20: note = Description of Artificial Sequence: Synthetic oligonucleotide
  misc_feature 1..20: note = Target: SCN10A; (-) strand; PAM type: YTN; PAM sequence: CTG
  source 1..20: mol_type = other DNA
gcaccaatatcagtcttaat

SEQ ID NO: 47524 - DNA, 20 bp, synthetic construct
  misc_feature 1..20: note = Description of Artificial Sequence: Synthetic oligonucleotide
  misc_feature 1..20: note = Target: SCN10A; (-) strand; PAM type: YTN; PAM sequence: CTA
  source 1..20: mol_type = other DNA
tcctggcaccaatatcagtc

SEQ ID NO: 47525 - DNA, 20 bp, synthetic construct
  misc_feature 1..20: note = Description of Artificial Sequence: Synthetic oligonucleotide
  misc_feature 1..20: note = Target: SCN10A; (-) strand; PAM type: YTN; PAM sequence: TTG
  source 1..20: mol_type = other DNA
gtctatcctggcaccaatat

SEQ ID NO: 47526 - DNA, 20 bp, synthetic construct
  misc_feature 1..20: note = Description of Artificial Sequence: Synthetic oligonucleotide
  misc_feature 1..20: note = Target: SCN10A; (-) strand; PAM type: YTN; PAM sequence: TTA
  source 1..20: mol_type = other DNA
gtccattggtctatcctggc

SEQ ID NO: 47527 - DNA, 20 bp, synthetic construct
  misc_feature 1..20: note = Description of Artificial Sequence: Synthetic oligonucleotide
  misc_feature 1..20: note = Target: SCN10A; (-) strand; PAM type: YTN; PAM sequence: CTG
  source 1..20: mol_type = other DNA
ttagtccattggtctatcct

SEQ ID NO: 47528 - DNA, 20 bp, synthetic construct
  misc_feature 1..20: note = Description of Artificial Sequence: Synthetic oligonucleotide
  misc_feature 1..20: note = Target: SCN10A; (-) strand; PAM type: YTN; PAM sequence: CTC
  source 1..20: mol_type = other DNA
tgttagtccattggtctatc

SEQ ID NO: 47529 - DNA, 20 bp, synthetic construct
  misc_feature 1..20: note = Description of Artificial Sequence: Synthetic oligonucleotide
  misc_feature 1..20: note = Target: SCN10A; (-) strand; PAM type: YTN; PAM sequence: TTG
  source 1..20: mol_type = other DNA
ctctgttagtccattggtct

SEQ ID NO: 47530 - DNA, 20 bp, synthetic construct
  misc_feature 1..20: note = Description of Artificial Sequence: Synthetic oligonucleotide
  misc_feature 1..20: note = Target: SCN10A; (-) strand; PAM type: YTN; PAM sequence: TTT
  source 1..20: mol_type = other DNA
gctctgttagtccattggtc

SEQ ID NO: 47531 - DNA, 20 bp, synthetic construct
  misc_feature 1..20: note = Description of Artificial Sequence: Synthetic oligonucleotide
  misc_feature 1..20: note = Target: SCN10A; (-) strand; PAM type: YTN; PAM sequence: CTC
  source 1..20: mol_type = other DNA
catttgctctgttagtccat

SEQ ID NO: 47532 - DNA, 20 bp, synthetic construct
  misc_feature 1..20: note = Description of Artificial Sequence: Synthetic oligonucleotide
  misc_feature 1..20: note = Target: SCN10A; (-) strand; PAM type: YTN; PAM sequence: TTG
  source 1..20: mol_type = other DNA
ctccatttgctctgttagtc

SEQ ID NO: 47533 - DNA, 20 bp, synthetic construct
  misc_feature 1..20: note = Description of Artificial Sequence: Synthetic oligonucleotide
  misc_feature 1..20: note = Target: SCN10A; (-) strand; PAM type: YTN; PAM sequence: CTT
  source 1..20: mol_type = other DNA
gctccatttgctctgttagt

SEQ ID NO: 47534 - DNA, 20 bp, synthetic construct
  misc_feature 1..20: note = Description of Artificial Sequence: Synthetic oligonucleotide
  misc_feature 1..20: note = Target: SCN10A; (-) strand; PAM type: YTN; PAM sequence: TTA
  source 1..20: mol_type = other DNA
aagccttgctccatttgctc

SEQ ID NO: 47535 - DNA, 20 bp, synthetic construct
  misc_feature 1..20: note = Description of Artificial Sequence: Synthetic oligonucleotide
  misc_feature 1..20: note = Target: SCN10A; (-) strand; PAM type: YTN; PAM sequence: CTT
  source 1..20: mol_type = other DNA
aaagccttgctccatttgct

SEQ ID NO: 47536 - DNA, 20 bp, synthetic construct
  misc_feature 1..20: note = Description of Artificial Sequence: Synthetic oligonucleotide
  misc_feature 1..20: note = Target: SCN10A; (-) strand; PAM type: YTN; PAM sequence: CTC
  source 1..20: mol_type = other DNA
ccgtcacttaaagccttgct

SEQ ID NO: 47537 - DNA, 20 bp, synthetic construct
  misc_feature 1..20: note = Description of Artificial Sequence: Synthetic oligonucleotide
  misc_feature 1..20: note = Target: SCN10A; (-) strand; PAM type: YTN; PAM sequence: CTC
  source 1..20: mol_type = other DNA
ctcccgtcacttaaagcctt

SEQ ID NO: 47538 - DNA, 20 bp, synthetic construct
  misc_feature 1..20: note = Description of Artificial Sequence: Synthetic oligonucleotide
  misc_feature 1..20: note = Target: SCN10A; (-) strand; PAM type: YTN; PAM sequence: TTC
  source 1..20: mol_type = other DNA
tcctcccgtcacttaaagcc

SEQ ID NO: 47539 - DNA, 20 bp, synthetic construct
  misc_feature 1..20: note = Description of Artificial Sequence: Synthetic oligonucleotide
  misc_feature 1..20: note = Target: SCN10A; (-) strand; PAM type: YTN; PAM sequence: CTT
  source 1..20: mol_type = other DNA
ctcctcccgtcacttaaagc

SEQ ID NO: 47540 - DNA, 20 bp, synthetic construct
  misc_feature 1..20: note = Description of Artificial Sequence: Synthetic oligonucleotide
  misc_feature 1..20: note = Target: SCN10A; (-) strand; PAM type: YTN; PAM sequence: TTG
  source 1..20: mol_type = other DNA
cttctcctcccgtcacttaa

SEQ ID NO: 47541 - DNA, 20 bp, synthetic construct
  misc_feature 1..20: note = Description of Artificial Sequence: Synthetic oligonucleotide
  misc_feature 1..20: note = Target: SCN10A; (-) strand; PAM type: YTN; PAM sequence: CTC
  source 1..20: mol_type = other DNA
ccaaaatagcattgcttctc

SEQ ID NO: 47542 - DNA, 20 bp, synthetic construct
  misc_feature 1..20: note = Description of Artificial Sequence: Synthetic oligonucleotide
  misc_feature 1..20: note = Target: SCN10A; (-) strand; PAM type: YTN; PAM sequence: CTC
  source 1..20: mol_type = other DNA
tcccaaaatagcattgcttc

SEQ ID NO: 47543 - DNA, 20 bp, synthetic construct
  misc_feature 1..20: note = Description of Artificial Sequence: Synthetic oligonucleotide
  misc_feature 1..20: note = Target: SCN10A; (-) strand; PAM type: YTN; PAM sequence: TTC
  source 1..20: mol_type = other DNA
tctcccaaaatagcattgct

SEQ ID NO: 47544 - DNA, 20 bp, synthetic construct
  misc_feature 1..20: note = Description of Artificial Sequence: Synthetic oligonucleotide
  misc_feature 1..20: note = Target: SCN10A; (-) strand; PAM type: YTN; PAM sequence: CTT
  source 1..20: mol_type = other DNA
ctctcccaaaatagcattgc

SEQ ID NO: 47545 - DNA, 20 bp, synthetic construct
  misc_feature 1..20: note = Description of Artificial Sequence: Synthetic oligonucleotide
  misc_feature 1..20: note = Target: SCN10A; (-) strand; PAM type: YTN; PAM sequence: TTC
  source 1..20: mol_type = other DNA
cttctctcccaaaatagcat

SEQ ID NO: 47546 - DNA, 20 bp, synthetic construct
  misc_feature 1..20: note = Description of Artificial Sequence: Synthetic oligonucleotide
  misc_feature 1..20: note = Target: SCN10A; (-) strand; PAM type: YTN; PAM sequence: CTT
  source 1..20: mol_type = other DNA
ccttctctcccaaaatagca

SEQ ID NO: 47547 - DNA, 20 bp, synthetic construct
  misc_feature 1..20: note = Description of Artificial Sequence: Synthetic oligonucleotide
  misc_feature 1..20: note = Target: SCN10A; (-) strand; PAM type: YTN; PAM sequence: CTG
  source 1..20: mol_type = other DNA
tcttccttctctcccaaaat

SEQ ID NO: 47548 - DNA, 20 bp, synthetic construct
  misc_feature 1..20: note = Description of Artificial Sequence: Synthetic oligonucleotide
  misc_feature 1..20: note = Target: SCN10A; (-) strand; PAM type: YTN; PAM sequence: TTG
  source 1..20: mol_type = other DNA
aaggaaggaaagaaagagag

SEQ ID NO: 47549 - DNA, 20 bp, synthetic construct
  misc_feature 1..20: note = Description of Artificial Sequence: Synthetic oligonucleotide
  misc_feature 1..20: note = Target: SCN10A; (-) strand; PAM type: YTN; PAM sequence: TTG
  source 1..20: mol_type = other DNA
attgaaggaaggaaagaaag

SEQ ID NO: 47550 - DNA, 20 bp, synthetic construct
  misc_feature 1..20: note = Description of Artificial Sequence: Synthetic oligonucleotide
  misc_feature 1..20: note = Target: SCN10A; (-) strand; PAM type: YTN; PAM sequence: TTG
  source 1..20: mol_type = other DNA
attgattgaaggaaggaaag

SEQ ID NO: 47551 - DNA, 20 bp, synthetic construct
  misc_feature 1..20: note = Description of Artificial Sequence: Synthetic oligonucleotide
  misc_feature 1..20: note = Target: SCN10A; (-) strand; PAM type: YTN; PAM sequence: CTG
  source 1..20: mol_type = other DNA
ttgattgattgaaggaagga

SEQ ID NO: 47552 - DNA, 20 bp, synthetic construct
  misc_feature 1..20: note = Description of Artificial Sequence: Synthetic oligonucleotide
  misc_feature 1..20: note = Target: SCN10A; (-) strand; PAM type: YTN; PAM sequence: CTC
  source 1..20: mol_type = other DNA
aataaacacctgttgattga

SEQ ID NO: 47553 - DNA, 20 bp, synthetic construct
  misc_feature 1..20: note = Description of Artificial Sequence: Synthetic oligonucleotide
  misc_feature 1..20: note = Target: SCN10A; (-) strand; PAM type: YTN; PAM sequence: CTA
  source 1..20: mol_type = other DNA
gcacaaggcccagcacatac

SEQ ID NO: 47554 - DNA, 20 bp, synthetic construct
  misc_feature 1..20: note = Description of Artificial Sequence: Synthetic oligonucleotide
  misc_feature 1..20: note = Target: SCN10A; (-) strand; PAM type: YTN; PAM sequence: TTA
  source 1..20: mol_type = other DNA
tcccaagggcctagcacaag

SEQ ID NO: 47555 - DNA, 20 bp, synthetic construct
  misc_feature 1..20: note = Description of Artificial Sequence: Synthetic oligonucleotide
  misc_feature 1..20: note = Target: SCN10A; (-) strand; PAM type: YTN; PAM sequence: TTT
  source 1..20: mol_type = other DNA
atcccaagggcctagcacaa

SEQ ID NO: 47556 - DNA, 20 bp, synthetic construct
  misc_feature 1..20: note = Description of Artificial Sequence: Synthetic oligonucleotide
  misc_feature 1..20: note = Target: SCN10A; (-) strand; PAM type: YTN; PAM sequence: TTT
  source 1..20: mol_type = other DNA
tatcccaagggcctagcaca

SEQ ID NO: 47557 - DNA, 20 bp, synthetic construct
  misc_feature 1..20: note = Description of Artificial Sequence: Synthetic oligonucleotide
  misc_feature 1..20: note = Target: SCN10A; (-) strand; PAM type: YTN; PAM sequence: CTA
  source 1..20: mol_type = other DNA
ccgttttatcccaagggcct

SEQ ID NO: 47558 - DNA, 20 bp, synthetic construct
  misc_feature 1..20: note = Description of Artificial Sequence: Synthetic oligonucleotide
  misc_feature 1..20: note = Target: SCN10A; (-) strand; PAM type: YTN; PAM sequence: TTG
  source 1..20: mol_type = other DNA
tctaccgttttatcccaagg

SEQ ID NO: 47559 - DNA, 20 bp, synthetic construct
  misc_feature 1..20: note = Description of Artificial Sequence: Synthetic oligonucleotide
  misc_feature 1..20: note = Target: SCN10A; (-) strand; PAM type: YTN; PAM sequence: CTT
  source 1..20: mol_type = other DNA
gtctaccgttttatcccaag

SEQ ID NO: 47560 - DNA, 20 bp, synthetic construct
  misc_feature 1..20: note = Description of Artificial Sequence: Synthetic oligonucleotide
  misc_feature 1..20: note = Target: SCN10A; (-) strand; PAM type: YTN; PAM sequence: TTC
  source 1..20: mol_type = other DNA
ttgtctaccgttttatccca

SEQ ID NO: 47561 - DNA, 20 bp, synthetic construct
  misc_feature 1..20: note = Description of Artificial Sequence: Synthetic oligonucleotide
  misc_feature 1..20: note = Target: SCN10A; (-) strand; PAM type: YTN; PAM sequence: TTT
  source 1..20: mol_type = other DNA
cttgtctaccgttttatccc

SEQ ID NO: 47562 - DNA, 20 bp, synthetic construct
  misc_feature 1..20: note = Description of Artificial Sequence: Synthetic oligonucleotide
  misc_feature 1..20: note = Target: SCN10A; (-) strand; PAM type: YTN; PAM sequence: CTA
  source 1..20: mol_type = other DNA
tcccatgaggcaaaaaccag

SEQ ID NO: 47563 - DNA, 20 bp, synthetic construct
  misc_feature 1..20: note = Description of Artificial Sequence: Synthetic oligonucleotide
  misc_feature 1..20: note = Target: SCN10A; (-) strand; PAM type: YTN; PAM sequence: CTG
  source 1..20: mol_type = other DNA
ctatcccatgaggcaaaaac

SEQ ID NO: 47564 - DNA, 20 bp, synthetic construct
  misc_feature 1..20: note = Description of Artificial Sequence: Synthetic oligonucleotide
  misc_feature 1..20: note = Target: SCN10A; (-) strand; PAM type: YTN; PAM sequence: TTG
  source 1..20: mol_type = other DNA
tcctgctatcccatgaggca

SEQ ID NO: 47565 - DNA, 20 bp, synthetic construct
  misc_feature 1..20: note = Description of Artificial Sequence: Synthetic oligonucleotide
  misc_feature 1..20: note = Target: SCN10A; (-) strand; PAM type: YTN; PAM sequence: TTA
  source 1..20: mol_type = other DNA
caattgtcctgctatcccat

SEQ ID NO: 47566 - DNA, 20 bp, synthetic construct
  misc_feature 1..20: note = Description of Artificial Sequence: Synthetic oligonucleotide
  misc_feature 1..20: note = Target: SCN10A; (-) strand; PAM type: YTN; PAM sequence: TTT
  source 1..20: mol_type = other DNA
acaattgtcctgctatccca

SEQ ID NO: 47567 - DNA, 20 bp, synthetic construct
  misc_feature 1..20: note = Description of Artificial Sequence: Synthetic oligonucleotide
  misc_feature 1..20: note = Target: SCN10A; (-) strand; PAM type: YTN; PAM sequence: CTG
  source 1..20: mol_type = other DNA
gcatttacaattgtcctgct

SEQ ID NO: 47568 - DNA, 20 bp, synthetic construct
  misc_feature 1..20: note = Description of Artificial Sequence: Synthetic oligonucleotide
  misc_feature 1..20: note = Target: SCN10A; (-) strand; PAM type: YTN; PAM sequence: TTA
  source 1..20: mol_type = other DNA
acctggcatttacaattgtc

SEQ ID NO: 47569 - DNA, 20 bp, synthetic construct
  misc_feature 1..20: note = Description of Artificial Sequence: Synthetic oligonucleotide
  misc_feature 1..20: note = Target: SCN10A; (-) strand; PAM type: YTN; PAM sequence: TTC
  source 1..20: mol_type = other DNA
atcaaattaacctggcattt

SEQ ID NO: 47570 - DNA, 20 bp, synthetic construct
  misc_feature 1..20: note = Description of Artificial Sequence: Synthetic oligonucleotide
  misc_feature 1..20: note = Target: SCN10A; (-) strand; PAM type: YTN; PAM sequence: CTT
  source 1..20: mol_type = other DNA
catcaaattaacctggcatt

SEQ ID NO: 47571 - DNA, 20 bp, synthetic construct
  misc_feature 1..20: note = Description of Artificial Sequence: Synthetic oligonucleotide
  misc_feature 1..20: note = Target: SCN10A; (-) strand; PAM type: YTN; PAM sequence: TTC
  source 1..20: mol_type = other DNA
cttcatcaaattaacctggc

SEQ ID NO: 47572 - DNA, 20 bp, synthetic construct
  misc_feature 1..20: note = Description of Artificial Sequence: Synthetic oligonucleotide
  misc_feature 1..20: note = Target: SCN10A; (-) strand; PAM type: YTN; PAM sequence: TTG
  source 1..20: mol_type = other DNA
gattccttcatcaaattaac

SEQ ID NO: 47573 - DNA, 20 bp, synthetic construct
  misc_feature 1..20: note = Description of Artificial Sequence: Synthetic oligonucleotide
  misc_feature 1..20: note = Target: SCN10A; (-) strand; PAM type: YTN; PAM sequence: CTA
  source 1..20: mol_type = other DNA
aagttggattccttcatcaa

SEQ ID NO: 47574 - DNA, 20 bp, synthetic construct
  misc_feature 1..20: note = Description of Artificial Sequence: Synthetic oligonucleotide
  misc_feature 1..20: note = Target: SCN10A; (-) strand; PAM type: YTN; PAM sequence: CTA
  source 1..20: mol_type = other DNA
tctaaagttggattccttca

SEQ ID NO: 47575 - DNA, 20 bp, synthetic construct
  misc_feature 1..20: note = Description of Artificial Sequence: Synthetic oligonucleotide
  misc_feature 1..20: note = Target: SCN10A; (-) strand; PAM type: YTN; PAM sequence: CTC
  source 1..20: mol_type = other DNA
cccaaccacactatctaaag

SEQ ID NO: 47576 - DNA, 20 bp, synthetic construct
  misc_feature 1..20: note = Description of Artificial Sequence: Synthetic oligonucleotide
  misc_feature 1..20: note = Target: SCN10A; (-) strand; PAM type: YTN; PAM sequence: TTA
  source 1..20: mol_type = other DNA
gaggggacctccccaaccac

SEQ ID NO: 47577 - DNA, 20 bp, synthetic construct
  misc_feature 1..20: note = Description of Artificial Sequence: Synthetic oligonucleotide
  misc_feature 1..20: note = Target: SCN10A; (-) strand; PAM type: YTN; PAM sequence: CTT
  source 1..20: mol_type = other DNA
agaggggacctccccaacca

SEQ ID NO: 47578 - DNA, 20 bp, synthetic construct
  misc_feature 1..20: note = Description of Artificial Sequence: Synthetic oligonucleotide
  misc_feature 1..20: note = Target: SCN10A; (-) strand; PAM type: YTN; PAM sequence: CTC
  source 1..20: mol_type = other DNA
cttagaggggacctccccaa

SEQ ID NO: 47579 - DNA, 20 bp, synthetic construct
  misc_feature 1..20: note = Description of Artificial Sequence: Synthetic oligonucleotide
  misc_feature 1..20: note = Target: SCN10A; (-) strand; PAM type: YTN; PAM sequence: TTG
  source 1..20: mol_type = other DNA
tcacctccttagaggggacc

SEQ ID NO: 47580 - DNA, 20 bp, synthetic construct
  misc_feature 1..20: note = Description of Artificial Sequence: Synthetic oligonucleotide
  misc_feature 1..20: note = Target: SCN10A; (-) strand; PAM type: YTN; PAM sequence: CTT
  source 1..20: mol_type = other DNA
gtcacctccttagaggggac

SEQ ID NO: 47581 - DNA, 20 bp, synthetic construct
  misc_feature 1..20: note = Description of Artificial Sequence: Synthetic oligonucleotide
  misc_feature 1..20: note = Target: SCN10A; (-) strand; PAM type: YTN; PAM sequence: TTC
  source 1..20: mol_type = other DNA
aatgcacttgtcacctcctt

SEQ ID NO: 47582 - DNA, 20 bp, synthetic construct
  misc_feature 1..20: note = Description of Artificial Sequence: Synthetic oligonucleotide
  misc_feature 1..20: note = Target: SCN10A; (-) strand; PAM type: YTN; PAM sequence: CTG
  source 1..20: mol_type = other DNA
tgttcaatgcacttgtcacc

SEQ ID NO: 47583 - DNA, 20 bp, synthetic construct
  misc_feature 1..20: note = Description of Artificial Sequence: Synthetic oligonucleotide
  misc_feature 1..20: note = Target: SCN10A; (-) strand; PAM type: YTN; PAM sequence: CTC
  source 1..20: mol_type = other DNA
tgtgttcaatgcacttgtca

SEQ ID NO: 47584 - DNA, 20 bp, synthetic construct
  misc_feature 1..20: note = Description of Artificial Sequence: Synthetic oligonucleotide
  misc_feature 1..20: note = Target: SCN10A; (-) strand; PAM type: YTN; PAM sequence: CTC
  source 1..20: mol_type = other DNA
aaactctgtgttcaatgcac

SEQ ID NO: 47585 - DNA, 20 bp, synthetic construct
  misc_feature 1..20: note = Description of Artificial Sequence: Synthetic oligonucleotide
  misc_feature 1..20: note = Target: SCN10A; (-) strand; PAM type: YTN; PAM sequence: TTC
  source 1..20: mol_type = other DNA
tcaaactctgtgttcaatgc

SEQ ID NO: 47586 - DNA, 20 bp, synthetic construct
  misc_feature 1..20: note = Description of Artificial Sequence: Synthetic oligonucleotide
  misc_feature 1..20: note = Target: SCN10A; (-) strand; PAM type: YTN; PAM sequence: TTA
  source 1..20: mol_type = other DNA
ttctcaaactctgtgttcaa

SEQ ID NO: 47587 - DNA, 20 bp, synthetic construct
  misc_feature 1..20: note = Description of Artificial Sequence: Synthetic oligonucleotide
  misc_feature 1..20: note = Target: SCN10A; (-) strand; PAM type: YTN; PAM sequence: CTT
  source 1..20: mol_type = other DNA
attctcaaactctgtgttca

SEQ ID NO: 47588 - DNA, 20 bp, synthetic construct
  misc_feature 1..20: note = Description of Artificial Sequence: Synthetic oligonucleotide
  misc_feature 1..20: note = Target: SCN10A; (-) strand; PAM type: YTN; PAM sequence: CTC
  source 1..20: mol_type = other DNA
acttattctcaaactctgtg

SEQ ID NO: 47589 - DNA, 20 bp, synthetic construct
  misc_feature 1..20: note = Description of Artificial Sequence: Synthetic oligonucleotide
  misc_feature 1..20: note = Target: SCN10A; (-) strand; PAM type: YTN; PAM sequence: TTA
  source 1..20: mol_type = other DNA
gctcacttattctcaaactc

SEQ ID NO: 47590 - DNA, 20 bp, synthetic construct
  misc_feature 1..20: note = Description of Artificial Sequence: Synthetic oligonucleotide
  misc_feature 1..20: note = Target: SCN10A; (-) strand; PAM type: YTN; PAM sequence: CTT
  source 1..20: mol_type = other DNA
agctcacttattctcaaact

SEQ ID NO: 47591 - DNA, 20 bp, synthetic construct
  misc_feature 1..20: note = Description of Artificial Sequence: Synthetic oligonucleotide
  misc_feature 1..20: note = Target: SCN10A; (-) strand; PAM type: YTN; PAM sequence: TTC
  source 1..20: mol_type = other DNA
acttagctcacttattctca

SEQ ID NO: 47592 - DNA, 20 bp, synthetic construct
  misc_feature 1..20: note = Description of Artificial Sequence: Synthetic oligonucleotide
  misc_feature 1..20: note = Target: SCN10A; (-) strand; PAM type: YTN; PAM sequence: CTT
  source 1..20: mol_type = other DNA
cacttagctcacttattctc

SEQ ID NO: 47593 - DNA, 20 bp, synthetic construct
  misc_feature 1..20: note = Description of Artificial Sequence: Synthetic oligonucleotide
  misc_feature 1..20: note = Target: SCN10A; (-) strand; PAM type: YTN; PAM sequence: TTA
  source 1..20: mol_type = other DNA
gtcttcacttagctcactta

SEQ ID NO: 47594 - DNA, 20 bp, synthetic construct
  misc_feature 1..20: note = Description of Artificial Sequence: Synthetic oligonucleotide
  misc_feature 1..20: note = Target: SCN10A; (-) strand; PAM type: YTN; PAM sequence: TTT
  source 1..20: mol_type = other DNA
agtcttcacttagctcactt

SEQ ID NO: 47595 - DNA, 20 bp, synthetic construct
  misc_feature 1..20: note = Description of Artificial Sequence: Synthetic oligonucleotide
  misc_feature 1..20: note = Target: SCN10A; (-) strand; PAM type: YTN; PAM sequence: CTT
  source 1..20: mol_type = other DNA
tagtcttcacttagctcact

SEQ ID NO: 47596 - DNA, 20 bp, synthetic construct
  misc_feature 1..20: note = Description of Artificial Sequence: Synthetic oligonucleotide
  misc_feature 1..20: note = Target: SCN10A; (-) strand; PAM type: YTN; PAM sequence: TTC
  source 1..20: mol_type = other DNA
ctttagtcttcacttagctc

SEQ ID NO: 47597 - DNA, 20 bp, synthetic construct
  misc_feature 1..20: note = Description of Artificial Sequence: Synthetic oligonucleotide
  misc_feature 1..20: note = Target: SCN10A; (-) strand; PAM type: YTN; PAM sequence: TTT
  source 1..20: mol_type = other DNA
cctttagtcttcacttagct

SEQ ID NO: 47598 - DNA, 20 bp, synthetic construct
  misc_feature 1..20: note = Description of Artificial Sequence: Synthetic oligonucleotide
  misc_feature 1..20: note = Target: SCN10A; (-) strand; PAM type: YTN; PAM sequence: TTT
  source 1..20: mol_type = other DNA
tcctttagtcttcacttagc

SEQ ID NO: 47599 - DNA, 20 bp, synthetic construct
  misc_feature 1..20: note = Description of Artificial Sequence: Synthetic oligonucleotide
  misc_feature 1..20: note = Target: SCN10A; (-) strand; PAM type: YTN; PAM sequence: CTT
  source 1..20: mol_type = other DNA
ttcctttagtcttcacttag

SEQ ID NO: 47600 - DNA, 20 bp, synthetic construct
  misc_feature 1..20: note = Description of Artificial Sequence: Synthetic oligonucleotide
  misc_feature 1..20: note = Target: SCN10A; (-) strand; PAM type: YTN; PAM sequence: CTG
  source 1..20: mol_type = other DNA
gaatacttttcctttagtct

SEQ ID NO: 47601 - DNA, 20 bp, synthetic construct
  misc_feature 1..20: note = Description of Artificial Sequence: Synthetic oligonucleotide
  misc_feature 1..20: note = Target: SCN10A; (-) strand; PAM type: YTN; PAM sequence: CTG
  source 1..20: mol_type = other DNA
tgcctggaatacttttcctt

SEQ ID NO: 47602 - DNA, 20 bp, synthetic construct
  misc_feature 1..20: note = Description of Artificial Sequence: Synthetic oligonucleotide
  misc_feature 1..20: note = Target: SCN10A; (-) strand; PAM type: YTN; PAM sequence: TTC
  source 1..20: mol_type = other DNA
gctgtgcctggaatactttt

SEQ ID NO: 47603 - DNA, 20 bp, synthetic construct
  misc_feature 1..20: note = Description of Artificial Sequence: Synthetic oligonucleotide
  misc_feature 1..20: note = Target: SCN10A; (-) strand; PAM type: YTN; PAM sequence: TTT
  source 1..20: mol_type = other DNA
cgctgtgcctggaatacttt

SEQ ID NO: 47604 - DNA, 20 bp, synthetic construct
  misc_feature 1..20: note = Description of Artificial Sequence: Synthetic oligonucleotide
  misc_feature 1..20: note = Target: SCN10A; (-) strand; PAM type: YTN; PAM sequence: TTT
  source 1..20: mol_type = other DNA
tcgctgtgcctggaatactt

SEQ ID NO: 47605 - DNA, 20 bp, synthetic construct
  misc_feature 1..20: note = Description of Artificial Sequence: Synthetic oligonucleotide
  misc_feature 1..20: note = Target: SCN10A; (-) strand; PAM type: YTN; PAM sequence: TTT
  source 1..20: mol_type = other DNA
ttcgctgtgcctggaatact

SEQ ID NO: 47606 - DNA, 20 bp, synthetic construct
  misc_feature 1..20: note = Description of Artificial Sequence: Synthetic oligonucleotide
  misc_feature 1..20: note = Target: SCN10A; (-) strand; PAM type: YTN; PAM sequence: TTT
  source 1..20: mol_type = other DNA
tttcgctgtgcctggaatac

SEQ ID NO: 47607 - DNA, 20 bp, synthetic construct
  misc_feature 1..20: note = Description of Artificial Sequence: Synthetic oligonucleotide
  misc_feature 1..20: note = Target: SCN10A; (-) strand; PAM type: YTN; PAM sequence: TTT
  source 1..20: mol_type = other DNA
ttttcgctgtgcctggaata

SEQ ID NO: 47608 - DNA, 20 bp, synthetic construct
  misc_feature 1..20: note = Description of Artificial Sequence: Synthetic oligonucleotide
  misc_feature 1..20: note = Target: SCN10A; (-) strand; PAM type: YTN; PAM sequence: TTG
  source 1..20: mol_type = other DNA
aagtttttttcgctgtgcct

SEQ ID NO: 47609 - DNA, 20 bp, synthetic construct
  misc_feature 1..20: note = Description of Artificial Sequence: Synthetic oligonucleotide
  misc_feature 1..20: note = Target: SCN10A; (-) strand; PAM type: YTN; PAM sequence: TTT
  source 1..20: mol_type = other DNA
gaagtttttttcgctgtgcc

SEQ ID NO: 47610 - DNA, 20 bp, synthetic construct
  misc_feature 1..20: note = Description of Artificial Sequence: Synthetic oligonucleotide
  misc_feature 1..20: note = Target: SCN10A; (-) strand; PAM type: YTN; PAM sequence: CTT
  source 1..20: mol_type = other DNA
tgaagtttttttcgctgtgc

SEQ ID NO: 47611 - DNA, 20 bp, synthetic construct
  misc_feature 1..20: note = Description of Artificial Sequence: Synthetic oligonucleotide
  misc_feature 1..20: note = Target: SCN10A; (-) strand; PAM type: YTN; PAM sequence: TTG
  source 1..20: mol_type = other DNA
ggcctttgaagtttttttcg

SEQ ID NO: 47612 - DNA, 20 bp, synthetic construct
  misc_feature 1..20: note = Description of Artificial Sequence: Synthetic oligonucleotide
  misc_feature 1..20: note = Target: SCN10A; (-) strand; PAM type: YTN; PAM sequence: TTT
  source 1..20: mol_type = other DNA
gggcctttgaagtttttttc

SEQ ID NO: 47613 - DNA, 20 bp, synthetic construct
  misc_feature 1..20: note = Description of Artificial Sequence: Synthetic oligonucleotide
  misc_feature 1..20: note = Target: SCN10A; (-) strand; PAM type: YTN; PAM sequence: CTT
  source 1..20: mol_type = other DNA
tgggcctttgaagttttttt

SEQ ID NO: 47614 - DNA, 20 bp, synthetic construct
  misc_feature 1..20: note = Description of Artificial Sequence: Synthetic oligonucleotide
  misc_feature 1..20: note = Target: SCN10A; (-) strand; PAM type: YTN; PAM sequence: TTG
  source 1..20: mol_type = other DNA
gctttgggcctttgaagttt

SEQ ID NO: 47615 - DNA, 20 bp, synthetic construct
  misc_feature 1..20: note = Description of Artificial Sequence: Synthetic oligonucleotide
  misc_feature 1..20: note = Target: SCN10A; (-) strand; PAM type: YTN; PAM sequence: CTT
  source 1..20: mol_type = other DNA
ggctttgggcctttgaagtt

SEQ ID NO: 47616 - DNA, 20 bp, synthetic construct
  misc_feature 1..20: note = Description of Artificial Sequence: Synthetic oligonucleotide
  misc_feature 1..20: note = Target: SCN10A; (-) strand; PAM type: YTN; PAM sequence: TTC
  source 1..20: mol_type = other DNA
ttggctttgggcctttgaag

SEQ ID NO: 47617 - DNA, 20 bp, synthetic construct
  misc_feature 1..20: note = Description of Artificial Sequence: Synthetic oligonucleotide
  misc_feature 1..20: note = Target: SCN10A; (-) strand; PAM type: YTN; PAM sequence: CTT
  source 1..20: mol_type = other DNA
cttggctttgggcctttgaa

SEQ ID NO: 47618 - DNA, 20 bp, synthetic construct
  misc_feature 1..20: note = Description of Artificial Sequence: Synthetic oligonucleotide
  misc_feature 1..20: note = Target: SCN10A; (-) strand; PAM type: YTN; PAM sequence: TTC
  source 1..20: mol_type = other DNA
acacataacagagaacttct

SEQ ID NO: 47619 - DNA, 20 bp, synthetic construct
  misc_feature 1..20: note = Description of Artificial Sequence: Synthetic oligonucleotide
  misc_feature 1..20: note = Target: SCN10A; (-) strand; PAM type: YTN; PAM sequence: CTT
  source 1..20: mol_type = other DNA
cacacataacagagaacttc

SEQ ID NO: 47620 - DNA, 20 bp, synthetic construct
  misc_feature 1..20: note = Description of Artificial Sequence: Synthetic oligonucleotide
  misc_feature 1..20: note = Target: SCN10A; (-) strand; PAM type: YTN; PAM sequence: TTC
  source 1..20: mol_type = other DNA
ttcacacataacagagaact

SEQ ID NO: 47621 - DNA, 20 bp, synthetic construct
  misc_feature 1..20: note = Description of Artificial Sequence: Synthetic oligonucleotide
  misc_feature 1..20: note = Target: SCN10A; (-) strand; PAM type: YTN; PAM sequence: CTT
  source 1..20: mol_type = other DNA
cttcacacataacagagaac

SEQ ID NO: 47622 - DNA, 20 bp, synthetic construct
  misc_feature 1..20: note = Description of Artificial Sequence: Synthetic oligonucleotide
  misc_feature 1..20: note = Target: SCN10A; (-) strand; PAM type: YTN; PAM sequence: CTC
  source 1..20: mol_type = other DNA
ttcttcacacataacagaga

SEQ ID NO: 47623 - DNA, 20 bp, synthetic construct
  misc_feature 1..20: note = Description of Artificial Sequence: Synthetic oligonucleotide
  misc_feature 1..20: note = Target: SCN10A; (-) strand; PAM type: YTN; PAM sequence: CTC
  source 1..20: mol_type = other DNA
tcttcttcacacataacaga

SEQ ID NO: 47624 - DNA, 20 bp, synthetic construct
  misc_feature 1..20: note = Description of Artificial Sequence: Synthetic oligonucleotide
  misc_feature 1..20: note = Target: SCN10A; (-) strand; PAM type: YTN; PAM sequence: CTC
  source 1..20: mol_type = other DNA
tctcttcttcacacataaca

SEQ ID NO: 47625 - DNA, 20 bp, synthetic construct
  misc_feature 1..20: note = Description of Artificial Sequence: Synthetic oligonucleotide
  misc_feature 1..20: note = Target: SCN10A; (-) strand; PAM type: YTN; PAM sequence: CTA
  source 1..20: mol_type = other DNA
ctctctcttcttcacacata

SEQ ID NO: 47626 - DNA, 20 bp, synthetic construct
  misc_feature 1..20: note = Description of Artificial Sequence: Synthetic oligonucleotide
  misc_feature 1..20: note = Target: SCN10A; (-) strand; PAM type: YTN; PAM sequence: CTC
  source 1..20: mol_type = other DNA
cagccaaaaaggcctactct

SEQ ID NO: 47627 - DNA, 20 bp, synthetic construct
  misc_feature 1..20: note = Description of Artificial Sequence: Synthetic oligonucleotide
  misc_feature 1..20: note = Target: SCN10A; (-) strand; PAM type: YTN; PAM sequence: TTG
  source 1..20: mol_type = other DNA
ctccagccaaaaaggcctac

SEQ ID NO: 47628 - DNA, 20 bp, synthetic construct
  misc_feature 1..20: note = Description of Artificial Sequence: Synthetic oligonucleotide
  misc_feature 1..20: note = Target: SCN10A; (-) strand; PAM type: YTN; PAM sequence: TTT
  source 1..20: mol_type = other DNA
gctccagccaaaaaggccta

SEQ ID NO: 47629 - DNA, 20 bp, synthetic construct
  misc_feature 1..20: note = Description of Artificial Sequence: Synthetic oligonucleotide
  misc_feature 1..20: note = Target: SCN10A; (-) strand; PAM type: YTN; PAM sequence: CTT
  source 1..20: mol_type = other DNA
tgctccagccaaaaaggcct

SEQ ID NO: 47630 - DNA, 20 bp, synthetic construct
  misc_feature 1..20: note = Description of Artificial Sequence: Synthetic oligonucleotide
  misc_feature 1..20: note = Target: SCN10A; (-) strand; PAM type: YTN; PAM sequence: TTG
  source 1..20: mol_type = other DNA
cccactttgctccagccaaa

SEQ ID NO: 47631 - DNA, 20 bp, synthetic construct
  misc_feature 1..20: note = Description of Artificial Sequence: Synthetic oligonucleotide
  misc_feature 1..20: note = Target: SCN10A; (-) strand; PAM type: YTN; PAM sequence: CTT
  source 1..20: mol_type = other DNA
gcccactttgctccagccaa

SEQ ID NO: 47632 - DNA, 20 bp, synthetic construct
  misc_feature 1..20: note = Description of Artificial Sequence: Synthetic oligonucleotide
  misc_feature 1..20: note = Target: SCN10A; (-) strand; PAM type: YTN; PAM sequence: CTC
  source 1..20: mol_type = other DNA
cgtcttgcccactttgctcc

SEQ ID NO: 47633 - DNA, 20 bp, synthetic construct
  misc_feature 1..20: note = Description of Artificial Sequence: Synthetic oligonucleotide
  misc_feature 1..20: note = Target: SCN10A; (-) strand; PAM type: YTN; PAM sequence: TTC
  source 1..20: mol_type = other DNA
accagtctccgtcttgccca

SEQ ID NO: 47634 - DNA, 20 bp, synthetic construct
  misc_feature 1..20: note = Description of Artificial Sequence: Synthetic oligonucleotide
  misc_feature 1..20: note = Target: SCN10A; (-) strand; PAM type: YTN; PAM sequence: CTG
  source 1..20: mol_type = other DNA
ccagttcaccagtctccgtc

SEQ ID NO: 47635 - DNA, 20 bp, synthetic construct
  misc_feature 1..20: note = Description of Artificial Sequence: Synthetic oligonucleotide
  misc_feature 1..20: note = Target: SCN10A; (-) strand; PAM type: YTN; PAM sequence: CTG
  source 1..20: mol_type = other DNA
cataatcaggacctgccagt

SEQ ID NO: 47636 - DNA, 20 bp, synthetic construct
  misc_feature 1..20: note = Description of Artificial Sequence: Synthetic oligonucleotide
  misc_feature 1..20: note = Target: SCN10A; (-) strand; PAM type: YTN; PAM sequence: TTC
  source 1..20: mol_type = other DNA
tgcataatcaggacctgcca

SEQ ID NO: 47637 - DNA, 20 bp, synthetic construct
  misc_feature 1..20: note = Description of Artificial Sequence: Synthetic oligonucleotide
  misc_feature 1..20: note = Target: SCN10A; (-) strand; PAM type: YTN; PAM sequence: CTC
  source 1..20: mol_type = other DNA
atgatggtgtacaaagttct

SEQ ID NO: 47638 - DNA, 20 bp, synthetic construct
  misc_feature 1..20: note = Description of Artificial Sequence: Synthetic oligonucleotide
  misc_feature 1..20: note = Target: SCN10A; (-) strand; PAM type: YTN; PAM sequence: CTC
  source 1..20: mol_type = other DNA
ctcatgatggtgtacaaagt

SEQ ID NO: 47639 - DNA, 20 bp, synthetic construct
  misc_feature 1..20: note = Description of Artificial Sequence: Synthetic oligonucleotide
  misc_feature 1..20: note = Target: SCN10A; (-) strand; PAM type: YTN; PAM sequence: CTG
  source 1..20: mol_type = other DNA
agaataaaatccagactcct

SEQ ID NO: 47640 - DNA, 20 bp, synthetic construct
  misc_feature 1..20: note = Description of Artificial Sequence: Synthetic oligonucleotide
  misc_feature 1..20: note = Target: SCN10A; (-) strand; PAM type: YTN; PAM sequence: CTC
  source 1..20: mol_type = other DNA
tgagaataaaatccagactc

SEQ ID NO: 47641 - DNA, 20 bp, synthetic construct
  misc_feature 1..20: note = Description of Artificial Sequence: Synthetic oligonucleotide
  misc_feature 1..20: note = Target: SCN10A; (-) strand; PAM type: YTN; PAM sequence: TTG
  source 1..20: mol_type = other DNA
ctctgagaataaaatccaga

SEQ ID NO: 47642 - DNA, 20 bp, synthetic construct
  misc_feature 1..20: note = Description of Artificial Sequence: Synthetic oligonucleotide
  misc_feature 1..20: note = Target: SCN10A; (-) strand; PAM type: YTN; PAM sequence: TTC
  source 1..20: mol_type = other DNA
ccattgctctgagaataaaa

SEQ ID NO: 47643 - DNA, 20 bp, synthetic construct
  misc_feature 1..20: note = Description of Artificial Sequence: Synthetic oligonucleotide
  misc_feature 1..20: note = Target: SCN10A; (-) strand; PAM type: YTN; PAM sequence: TTT
  source 1..20: mol_type = other DNA
cccattgctctgagaataaa

SEQ ID NO: 47644 - DNA, 20 bp, synthetic construct
  misc_feature 1..20: note = Description of Artificial Sequence: Synthetic oligonucleotide
  misc_feature 1..20: note = Target: SCN10A; (-) strand; PAM type: YTN; PAM sequence: CTG
  source 1..20: mol_type = other DNA
gtttcccattgctctgagaa

SEQ ID NO: 47645 - DNA, 20 bp, synthetic construct
  misc_feature 1..20: note = Description of Artificial Sequence: Synthetic oligonucleotide
  misc_feature 1..20: note = Target: SCN10A; (-) strand; PAM type: YTN; PAM sequence: TTC
  source 1..20: mol_type = other DNA
actggtttcccattgctctg

SEQ ID NO: 47646 - DNA, 20 bp, synthetic construct
  misc_feature 1..20: note = Description of Artificial Sequence: Synthetic oligonucleotide
  misc_feature 1..20: note = Target: SCN10A; (-) strand; PAM type: YTN; PAM sequence: CTT
  source 1..20: mol_type = other DNA
cactggtttcccattgctct

SEQ ID NO: 47647 - DNA, 20 bp, synthetic construct
  misc_feature 1..20: note = Description of Artificial Sequence: Synthetic oligonucleotide
  misc_feature 1..20: note = Target: SCN10A; (-) strand; PAM type: YTN; PAM sequence: TTA
  source 1..20: mol_type = other DNA
caaataacttcactggtttc

SEQ ID NO: 47648 - DNA, 20 bp, synthetic construct
  misc_feature 1..20: note = Description of Artificial Sequence: Synthetic oligonucleotide
  misc_feature 1..20: note = Target: SCN10A; (-) strand; PAM type: YTN; PAM sequence: TTG
  source 1..20: mol_type = other DNA
ttacaaataacttcactggt

SEQ ID NO: 47649 - DNA, 20 bp, synthetic construct
  misc_feature 1..20: note = Description of Artificial Sequence: Synthetic oligonucleotide
  misc_feature 1..20: note = Target: SCN10A; (-) strand; PAM type: YTN; PAM sequence: TTT
  source 1..20: mol_type = other DNA
gttacaaataacttcactgg

SEQ ID NO: 47650 - DNA, 20 bp, synthetic construct
  misc_feature 1..20: note = Description of Artificial Sequence: Synthetic oligonucleotide
  misc_feature 1..20: note = Target: SCN10A; (-) strand; PAM type: YTN; PAM sequence: CTA
  source 1..20: mol_type = other DNA
catttgttacaaataacttc

SEQ ID NO: 47651 - DNA, 20 bp, synthetic construct
  misc_feature 1..20: note = Description of Artificial Sequence: Synthetic oligonucleotide
  misc_feature 1..20: note = Target: SCN10A; (-) strand; PAM type: YTN; PAM sequence: TTA
  source 1..20: mol_type = other DNA
gtacctacatttgttacaaa

SEQ ID NO: 47652 - DNA, 20 bp, synthetic construct
  misc_feature 1..20: note = Description of Artificial Sequence: Synthetic oligonucleotide
  misc_feature 1..20: note = Target: SCN10A; (-) strand; PAM type: YTN; PAM sequence: TTA
  source 1..20: mol_type = other DNA
tgttagtacctacatttgtt

SEQ ID NO: 47653 - DNA, 20 bp, synthetic construct
  misc_feature 1..20: note = Description of Artificial Sequence: Synthetic oligonucleotide
  misc_feature 1..20: note = Target: SCN10A; (-) strand; PAM type: YTN; PAM sequence: CTT
  source 1..20: mol_type = other DNA
atgttagtacctacatttgt

SEQ ID NO: 47654 - DNA, 20 bp, synthetic construct
  misc_feature 1..20: note = Description of Artificial Sequence: Synthetic oligonucleotide
  misc_feature 1..20: note = Target: SCN10A; (-) strand; PAM type: YTN; PAM sequence: TTA
  source 1..20: mol_type = other DNA
ccaacatcttatgttagtac

SEQ ID NO: 47655 - DNA, 20 bp, synthetic construct
  misc_feature 1..20: note = Description of Artificial Sequence: Synthetic oligonucleotide
  misc_feature 1..20: note = Target: SCN10A; (-) strand; PAM type: YTN; PAM sequence: CTA
  source 1..20: mol_type = other DNA
ttaccaacatcttatgttag

SEQ ID NO: 47656 - DNA, 20 bp, synthetic construct
  misc_feature 1..20: note = Description of Artificial Sequence: Synthetic oligonucleotide
  misc_feature 1..20: note = Target: SCN10A; (-) strand; PAM type: YTN; PAM sequence: TTC
  source 1..20: mol_type = other DNA
cctattaccaacatcttatg

SEQ ID NO: 47657 - DNA, 20 bp, synthetic construct
  misc_feature 1..20: note = Description of Artificial Sequence: Synthetic oligonucleotide
  misc_feature 1..20: note = Target: SCN10A; (-) strand; PAM type: YTN; PAM sequence: TTT
  source 1..20: mol_type = other DNA
ccctattaccaacatcttat

SEQ ID NO: 47658 - DNA, 20 bp, synthetic construct
  misc_feature 1..20: note = Description of Artificial Sequence: Synthetic oligonucleotide
  misc_feature 1..20: note = Target: SCN10A; (-) strand; PAM type: YTN; PAM sequence: TTC
  source 1..20: mol_type = other DNA
atataccatcaatcccacaa

SEQ ID NO: 47659 - DNA, 20 bp, synthetic construct
  misc_feature 1..20: note = Description of Artificial Sequence: Synthetic oligonucleotide
  misc_feature 1..20: note = Target: SCN10A; (-) strand; PAM type: YTN; PAM sequence: TTT
  source 1..20: mol_type = other DNA
catataccatcaatcccaca

SEQ ID NO: 47660 - DNA, 20 bp, synthetic construct
  misc_feature 1..20: note = Description of Artificial Sequence: Synthetic oligonucleotide
  misc_feature 1..20: note = Target: SCN10A; (-) strand; PAM type: YTN; PAM sequence: CTT
  source 1..20: mol_type = other DNA
tcatataccatcaatcccac

SEQ ID NO: 47661 - DNA, 20 bp, synthetic construct
  misc_feature 1..20: note = Description of Artificial Sequence: Synthetic oligonucleotide
  misc_feature 1..20: note = Target: SCN10A; (-) strand; PAM type: YTN; PAM sequence: TTG
  source 1..20: mol_type = other DNA
aacagaaagctttcatatac

SEQ ID NO: 47662 - DNA, 20 bp, synthetic construct
  misc_feature 1..20: note = Description of Artificial Sequence: Synthetic oligonucleotide
  misc_feature 1..20: note = Target: SCN10A; (-) strand; PAM type: YTN; PAM sequence: CTG
  source 1..20: mol_type = other DNA
gagcagattgaacagaaagc

SEQ ID NO: 47663 - DNA, 20 bp, synthetic construct
  misc_feature 1..20: note = Description of Artificial Sequence: Synthetic oligonucleotide
  misc_feature 1..20: note = Target: SCN10A; (-) strand; PAM type: YTN; PAM sequence: TTC
  source 1..20: mol_type = other DNA
agaaaactggagcagattga

SEQ ID NO: 47664 - DNA, 20 bp, synthetic construct
  misc_feature 1..20: note = Description of Artificial Sequence: Synthetic oligonucleotide
  misc_feature 1..20: note = Target: SCN10A; (-) strand; PAM type: YTN; PAM sequence: TTT
  source 1..20: mol_type = other DNA
cagaaaactggagcagattg

SEQ ID NO: 47665 - DNA, 20 bp, synthetic construct
  misc_feature 1..20: note = Description of Artificial Sequence: Synthetic oligonucleotide
  misc_feature 1..20: note = Target: SCN10A; (-) strand; PAM type: YTN; PAM sequence: TTT
  source 1..20: mol_type = other DNA
tcagaaaactggagcagatt

SEQ ID NO: 47666 - DNA, 20 bp, synthetic construct
  misc_feature 1..20: note = Description of Artificial Sequence: Synthetic oligonucleotide
  misc_feature 1..20: note = Target: SCN10A; (-) strand; PAM type: YTN; PAM sequence: TTC
  source 1..20: mol_type = other DNA
agttttcagaaaactggagc

SEQ ID NO: 47667 - DNA, 20 bp, synthetic construct
  misc_feature 1..20: note = Description of Artificial Sequence: Synthetic oligonucleotide
  misc_feature 1..20: note = Target: SCN10A; (-) strand; PAM type: YTN; PAM sequence: TTT
  source 1..20: mol_type = other DNA
cagttttcagaaaactggag

SEQ ID NO: 47668 - DNA, 20 bp, synthetic construct
  misc_feature 1..20: note = Description of Artificial Sequence: Synthetic oligonucleotide
  misc_feature 1..20: note = Target: SCN10A; (-) strand; PAM type: YTN; PAM sequence: TTT
  source 1..20: mol_type = other DNA
tcagttttcagaaaactgga

SEQ ID NO: 47669 - DNA, 20 bp, synthetic construct
  misc_feature 1..20: note = Description of Artificial Sequence: Synthetic oligonucleotide
  misc_feature 1..20: note = Target: SCN10A; (-) strand; PAM type: YTN; PAM sequence: TTC
  source 1..20: mol_type = other DNA
aggacagttttcagttttca

SEQ ID NO: 47670 - DNA, 20 bp, synthetic construct
  misc_feature 1..20: note = Description of Artificial Sequence: Synthetic oligonucleotide
  misc_feature 1..20: note = Target: SCN10A; (-) strand; PAM type: YTN; PAM sequence: TTT
  source 1..20: mol_type = other DNA
caggacagttttcagttttc

SEQ ID NO: 47671 - DNA, 20 bp, synthetic construct
  misc_feature 1..20: note = Description of Artificial Sequence: Synthetic oligonucleotide
  misc_feature 1..20: note = Target: SCN10A; (-) strand; PAM type: YTN; PAM sequence: TTT
  source 1..20: mol_type = other DNA
tcaggacagttttcagtttt

SEQ ID NO: 47672 - DNA, 20 bp, synthetic construct
  misc_feature 1..20: note = Description of Artificial Sequence: Synthetic oligonucleotide
  misc_feature 1..20: note = Target: SCN10A; (-) strand; PAM type: YTN; PAM sequence: TTA
  source 1..20: mol_type = other DNA
ttttcaggacagttttcagt

SEQ ID NO: 47673 - DNA, 20 bp, synthetic construct
  misc_feature 1..20: note = Description of Artificial Sequence: Synthetic oligonucleotide
  misc_feature 1..20: note = Target: SCN10A; (-) strand; PAM type: YTN; PAM sequence: TTT
  source 1..20: mol_type = other DNA
attttcaggacagttttcag

SEQ ID NO: 47674 - DNA, 20 bp, synthetic construct
  misc_feature 1..20: note = Description of Artificial Sequence: Synthetic oligonucleotide
  misc_feature 1..20: note = Target: SCN10A; (-) strand; PAM type: YTN; PAM sequence: CTT
  source 1..20: mol_type = other DNA
tattttcaggacagttttca

SEQ ID NO: 47675 - DNA, 20 bp, synthetic construct
  misc_feature 1..20: note = Description of Artificial Sequence: Synthetic oligonucleotide
  misc_feature 1..20: note = Target: SCN10A; (-) strand; PAM type: YTN; PAM sequence: TTA
  source 1..20: mol_type = other DNA
atagactttattttcaggac

SEQ ID NO: 47676 - DNA, 20 bp, synthetic construct
  misc_feature 1..20: note = Description of Artificial Sequence: Synthetic oligonucleotide
  misc_feature 1..20: note = Target: SCN10A; (-) strand; PAM type: YTN; PAM sequence: TTA
  source 1..20: mol_type = other DNA
attaatagactttattttca

SEQ ID NO: 47677 - DNA, 20 bp, synthetic construct
  misc_feature 1..20: note = Description of Artificial Sequence: Synthetic oligonucleotide
  misc_feature 1..20: note = Target: SCN10A; (-) strand; PAM type: YTN; PAM sequence: TTT
  source 1..20: mol_type = other DNA
aattaatagactttattttc

SEQ ID NO: 47678 - DNA, 20 bp, synthetic construct
  misc_feature 1..20: note = Description of Artificial Sequence: Synthetic oligonucleotide
  misc_feature 1..20: note = Target: SCN10A; (-) strand; PAM type: YTN; PAM sequence: TTT
  source 1..20: mol_type = other DNA
taattaatagactttatttt

SEQ ID NO: 47679 - DNA, 20 bp, synthetic construct
  misc_feature 1..20: note = Description of Artificial Sequence: Synthetic oligonucleotide
  misc_feature 1..20: note = Target: SCN10A; (-) strand; PAM type: YTN; PAM sequence: CTG
  source 1..20: mol_type = other DNA
gttttaattaatagacttta

SEQ ID NO: 47680 - DNA, 20 bp, synthetic construct
  misc_feature 1..20: note = Description of Artificial Sequence: Synthetic oligonucleotide
  misc_feature 1..20: note = Target: SCN10A; (-) strand; PAM type: YTN; PAM sequence: TTC
  source 1..20: mol_type = other DNA
ctggttttaattaatagact

SEQ ID NO: 47681 - DNA, 20 bp, synthetic construct
  misc_feature 1..20: note = Description of Artificial Sequence: Synthetic oligonucleotide
  misc_feature 1..20: note = Target: SCN10A; (-) strand; PAM type: YTN; PAM sequence: TTT
  source 1..20: mol_type = other DNA
cctggttttaattaatagac

SEQ ID NO: 47682 - DNA, 20 bp, synthetic construct
  misc_feature 1..20: note = Description of Artificial Sequence: Synthetic oligonucleotide
  misc_feature 1..20: note = Target: SCN10A; (-) strand; PAM type: YTN; PAM sequence: CTG
  source 1..20: mol_type = other DNA
gtcagtttcctggttttaat

SEQ ID NO: 47683 - DNA, 20 bp, synthetic construct
  misc_feature 1..20: note = Description of Artificial Sequence: Synthetic oligonucleotide
  misc_feature 1..20: note = Target: SCN10A; (-) strand; PAM type: YTN; PAM sequence: CTG
  source 1..20: mol_type = other DNA
gagaaaaatcaccgccagct

SEQ ID NO: 47684 - DNA, 20 bp, synthetic construct
  misc_feature 1..20: note = Description of Artificial Sequence: Synthetic oligonucleotide
  misc_feature 1..20: note = Target: SCN10A; (-) strand; PAM type: YTN; PAM sequence: CTG
  source 1..20: mol_type = other DNA
tgagaaatgctggagaaaaa

SEQ ID NO: 47685 - DNA, 20 bp, synthetic construct
  misc_feature 1..20: note = Description of Artificial Sequence: Synthetic oligonucleotide
  misc_feature 1..20: note = Target: SCN10A; (-) strand; PAM type: YTN; PAM sequence: CTG
  source 1..20: mol_type = other DNA
agctgtgagaaatgctggag

SEQ ID NO: 47686 - DNA, 20 bp, synthetic construct
  misc_feature 1..20: note = Description of Artificial Sequence: Synthetic oligonucleotide
  misc_feature 1..20: note = Target: SCN10A; (-) strand; PAM type: YTN; PAM sequence: CTG
  source 1..20: mol_type = other DNA
cacctgagctgtgagaaatg

SEQ ID NO: 47687 - DNA, 20 bp, synthetic construct
  misc_feature 1..20: note = Description of Artificial Sequence: Synthetic oligonucleotide
  misc_feature 1..20: note = Target: SCN10A; (-) strand; PAM type: YTN; PAM sequence: TTG
  source 1..20: mol_type = other DNA
tctgcacctgagctgtgaga

SEQ ID NO: 47688 - DNA, 20 bp, synthetic construct
  misc_feature 1..20: note = Description of Artificial Sequence: Synthetic oligonucleotide
  misc_feature 1..20: note = Target: SCN10A; (-) strand; PAM type: YTN; PAM sequence: CTT
  source 1..20: mol_type = other DNA
gtctgcacctgagctgtgag

SEQ ID NO: 47689 - DNA, 20 bp, synthetic construct
  misc_feature 1..20: note = Description of Artificial Sequence: Synthetic oligonucleotide
  misc_feature 1..20: note = Target: SCN10A; (-) strand; PAM type: YTN; PAM sequence: CTC
  source 1..20: mol_type = other DNA
caccttgtctgcacctgagc

SEQ ID NO: 47690 - DNA, 20 bp, synthetic construct
  misc_feature 1..20: note = Description of Artificial Sequence: Synthetic oligonucleotide
  misc_feature 1..20: note = Target: SCN10A; (-) strand; PAM type: YTN; PAM sequence: CTC
  source 1..20: mol_type = other DNA
tccaccttgtctgcacctga

SEQ ID NO: 47691 - DNA, 20 bp, synthetic construct
  misc_feature 1..20: note = Description of Artificial Sequence: Synthetic oligonucleotide
  misc_feature 1..20: note = Target: SCN10A; (-) strand; PAM type: YTN; PAM sequence: TTC
  source 1..20: mol_type = other DNA
tctccaccttgtctgcacct

SEQ ID NO: 47692 - DNA, 20 bp, synthetic construct
  misc_feature 1..20: note = Description of Artificial Sequence: Synthetic oligonucleotide
  misc_feature 1..20: note = Target: SCN10A; (-) strand; PAM type: YTN; PAM sequence: TTT
  source 1..20: mol_type = other DNA
ctctccaccttgtctgcacc

SEQ ID NO: 47693 - DNA, 20 bp, synthetic construct
  misc_feature 1..20: note = Description of Artificial Sequence: Synthetic oligonucleotide
  misc_feature 1..20: note = Target: SCN10A; (-) strand; PAM type: YTN; PAM sequence: CTA
  source 1..20: mol_type = other DNA
agtcaaatatttctctccac

SEQ ID NO: 47694 - DNA, 20 bp, synthetic construct
  misc_feature 1..20: note = Description of Artificial Sequence: Synthetic oligonucleotide
  misc_feature 1..20: note = Target: SCN10A; (-) strand; PAM type: YTN; PAM sequence: CTC
  source 1..20: mol_type = other DNA
accggagagtctaagtcaaa

SEQ ID NO: 47695 - DNA, 20 bp, synthetic construct
  misc_feature 1..20: note = Description of Artificial Sequence: Synthetic oligonucleotide
  misc_feature 1..20: note = Target: SCN10A; (-) strand; PAM type: YTN; PAM sequence: TTG
  source 1..20: mol_type = other DNA
ccaaaacctcaccggagagt

SEQ ID NO: 47696 - DNA, 20 bp, synthetic construct
  misc_feature 1..20: note = Description of Artificial Sequence: Synthetic oligonucleotide
  misc_feature 1..20: note = Target: SCN10A; (-) strand; PAM type: YTN; PAM sequence: TTT
  source 1..20: mol_type = other DNA
gccaaaacctcaccggagag

SEQ ID NO: 47697 - DNA, 20 bp, synthetic construct
  misc_feature 1..20: note = Description of Artificial Sequence: Synthetic oligonucleotide
  misc_feature 1..20: note = Target: SCN10A; (-) strand; PAM type: YTN; PAM sequence: TTG
  source 1..20: mol_type = other DNA
tgtttgccaaaacctcaccg

SEQ ID NO: 47698 - DNA, 20 bp, synthetic construct
  misc_feature 1..20: note = Description of Artificial Sequence: Synthetic oligonucleotide
  misc_feature 1..20: note = Target: SCN10A; (-) strand; PAM type: YTN; PAM sequence: TTT
  source 1..20: mol_type = other DNA
gtgtttgccaaaacctcacc

SEQ ID NO: 47699 - DNA, 20 bp, synthetic construct
  misc_feature 1..20: note = Description of Artificial Sequence: Synthetic oligonucleotide
  misc_feature 1..20: note = Target: SCN10A; (-) strand; PAM type: YTN; PAM sequence: TTT
  source 1..20: mol_type = other DNA
tgtgtttgccaaaacctcac

SEQ ID NO: 47700 - DNA, 20 bp, synthetic construct
  misc_feature 1..20: note = Description of Artificial Sequence: Synthetic oligonucleotide
  misc_feature 1..20: note = Target: SCN10A; (-) strand; PAM type: YTN; PAM sequence: TTT
  source 1..20: mol_type = other DNA
ttgtgtttgccaaaacctca

SEQ ID NO: 47701 - DNA, 20 bp, synthetic construct
  misc_feature 1..20: note = Description of Artificial Sequence: Synthetic oligonucleotide
  misc_feature 1..20: note = Target: SCN10A; (-) strand; PAM type: YTN; PAM sequence: TTG
  source 1..20: mol_type = other DNA
cgtttttgtgtttgccaaaa

SEQ ID NO: 47702 - DNA, 20 bp, synthetic construct
  misc_feature 1..20: note = Description of Artificial Sequence: Synthetic oligonucleotide
  misc_feature 1..20: note = Target: SCN10A; (-) strand; PAM type: YTN; PAM sequence: TTT
  source 1..20: mol_type = other DNA
gcgtttttgtgtttgccaaa

SEQ ID NO: 47703 - DNA, 20 bp, synthetic construct
  misc_feature 1..20: note = Description of Artificial Sequence: Synthetic oligonucleotide
  misc_feature 1..20: note = Target: SCN10A; (-) strand; PAM type: YTN; PAM sequence: CTT
  source 1..20: mol_type = other DNA
tgcgtttttgtgtttgccaa

SEQ ID NO: 47704 - DNA, 20 bp, synthetic construct
  misc_feature 1..20: note = Description of Artificial Sequence: Synthetic oligonucleotide
  misc_feature 1..20: note = Target: SCN10A; (-) strand; PAM type: YTN; PAM sequence: CTC
  source 1..20: mol_type = other DNA
tttgcgtttttgtgtttgcc

SEQ ID NO: 47705 - DNA, 20 bp, synthetic construct
  misc_feature 1..20: note = Description of Artificial Sequence: Synthetic oligonucleotide
  misc_feature 1..20: note = Target: SCN10A; (-) strand; PAM type: YTN; PAM sequence: CTG
  source 1..20: mol_type = other DNA
cctctttgcgtttttgtgtt

SEQ ID NO: 47706 - DNA, 20 bp, synthetic construct
  misc_feature 1..20: note = Description of Artificial Sequence: Synthetic oligonucleotide
  misc_feature 1..20: note = Target: SCN10A; (-) strand; PAM type: YTN; PAM sequence: CTC
  source 1..20: mol_type = other DNA
tgcctctttgcgtttttgtg

SEQ ID NO: 47707 - DNA, 20 bp, synthetic construct
  misc_feature 1..20: note = Description of Artificial Sequence: Synthetic oligonucleotide
  misc_feature 1..20: note = Target: SCN10A; (-) strand; PAM type: YTN; PAM sequence: TTC
  source 1..20: mol_type = other DNA
cctctgcctctttgcgtttt

SEQ ID NO: 47708 - DNA, 20 bp, synthetic construct
  misc_feature 1..20: note = Description of Artificial Sequence: Synthetic oligonucleotide
  misc_feature 1..20: note = Target: SCN10A; (-) strand; PAM type: YTN; PAM sequence: TTT
  source 1..20: mol_type = other DNA
ccctctgcctctttgcgttt

SEQ ID NO: 47709 - DNA, 20 bp, synthetic construct
  misc_feature 1..20: note = Description of Artificial Sequence: Synthetic oligonucleotide
  misc_feature 1..20: note = Target: SCN10A; (-) strand; PAM type: YTN; PAM sequence: TTT
  source 1..20: mol_type = other DNA
tccctctgcctctttgcgtt

SEQ ID NO: 47710 - DNA, 20 bp, synthetic construct
  misc_feature 1..20: note = Description of Artificial Sequence: Synthetic oligonucleotide
  misc_feature 1..20: note = Target: SCN10A; (-) strand; PAM type: YTN; PAM sequence: CTT
  source 1..20: mol_type = other DNA
ttccctctgcctctttgcgt

SEQ ID NO: 47711 - DNA, 20 bp, synthetic construct
  misc_feature 1..20: note = Description of Artificial Sequence: Synthetic oligonucleotide
  misc_feature 1..20: note = Target: SCN10A; (-) strand; PAM type: YTN; PAM sequence: CTC
  source 1..20: mol_type = other DNA
aatcaccttttccctctgcc

SEQ ID NO: 47712 - DNA, 20 bp, synthetic construct
  misc_feature 1..20: note = Description of Artificial Sequence: Synthetic oligonucleotide
  misc_feature 1..20: note = Target: SCN10A; (-) strand; PAM type: YTN; PAM sequence: TTG
  source 1..20: mol_type = other DNA
aaaacaaactcaatcacctt

SEQ ID NO: 47713 - DNA, 20 bp, synthetic construct
  misc_feature 1..20: note = Description of Artificial Sequence: Synthetic oligonucleotide
  misc_feature 1..20: note = Target: SCN10A; (-) strand; PAM type: YTN; PAM sequence: CTT
  source 1..20: mol_type = other DNA
gaaaacaaactcaatcacct

SEQ ID NO: 47714 - DNA, 20 bp, synthetic construct
  misc_feature 1..20: note = Description of Artificial Sequence: Synthetic oligonucleotide
  misc_feature 1..20: note = Target: SCN10A; (-) strand; PAM type: YTN; PAM sequence: TTA
  source 1..20: mol_type = other DNA
tgcccttgaaaacaaactca

SEQ ID NO: 47715 - DNA, 20 bp, synthetic construct
  misc_feature 1..20: note = Description of Artificial Sequence: Synthetic oligonucleotide
  misc_feature 1..20: note = Target: SCN10A; (-) strand; PAM type: YTN; PAM sequence: TTA
  source 1..20: mol_type = other DNA
ttatgcccttgaaaacaaac

SEQ ID NO: 47716 - DNA, 20 bp, synthetic construct
  misc_feature 1..20: note = Description of Artificial Sequence: Synthetic oligonucleotide
  misc_feature 1..20: note = Target: SCN10A; (-) strand; PAM type: YTN; PAM sequence: TTC
  source 1..20: mol_type = other DNA
acagcccaccaatattatta

SEQ ID NO: 47717 - DNA, 20 bp, synthetic construct
  misc_feature 1..20: note = Description of Artificial Sequence: Synthetic oligonucleotide
  misc_feature 1..20: note = Target: SCN10A; (-) strand; PAM type: YTN; PAM sequence: TTT
  source 1..20: mol_type = other DNA
cacagcccaccaatattatt

SEQ ID NO: 47718 - DNA, 20 bp, synthetic construct
  misc_feature 1..20: note = Description of Artificial Sequence: Synthetic oligonucleotide
  misc_feature 1..20: note = Target: SCN10A; (-) strand; PAM type: YTN; PAM sequence: TTA
  source 1..20: mol_type = other DNA
gatttcacagcccaccaata

SEQ ID NO: 47719 - DNA, 20 bp, synthetic construct
  misc_feature 1..20: note = Description of Artificial Sequence: Synthetic oligonucleotide
  misc_feature 1..20: note = Target: SCN10A; (-) strand; PAM type: YTN; PAM sequence: CTT
  source 1..20: mol_type = other DNA
agatttcacagcccaccaat

SEQ ID NO: 47720 - DNA, 20 bp, synthetic construct
  misc_feature 1..20: note = Description of Artificial Sequence: Synthetic oligonucleotide
  misc_feature 1..20: note = Target: SCN10A; (-) strand; PAM type: YTN; PAM sequence: CTA
  source 1..20: mol_type = other DNA
gcttagatttcacagcccac

SEQ ID NO: 47721 - DNA, 20 bp, synthetic construct
  misc_feature 1..20: note = Description of Artificial Sequence: Synthetic oligonucleotide
  misc_feature 1..20: note = Target: SCN10A; (-) strand; PAM type: YTN; PAM sequence: CTC
  source 1..20: mol_type = other DNA
atgacctagcttagatttca

SEQ ID NO: 47722 - DNA, 20 bp, synthetic construct
  misc_feature 1..20: note = Description of Artificial Sequence: Synthetic oligonucleotide
  misc_feature 1..20: note = Target: SCN10A; (-) strand; PAM type: YTN; PAM sequence: TTC
  source 1..20: mol_type = other DNA
cctcatgacctagcttagat

SEQ ID NO: 47723 - DNA, 20 bp, synthetic construct
  misc_feature 1..20: note = Description of Artificial Sequence: Synthetic oligonucleotide
  misc_feature 1..20: note = Target: SCN10A; (-) strand; PAM type: YTN; PAM sequence: CTT
  source 1..20: mol_type = other DNA
ccctcatgacctagcttaga

SEQ ID NO: 47724 - DNA, 20 bp, synthetic construct
  misc_feature 1..20: note = Description of Artificial Sequence: Synthetic oligonucleotide
  misc_feature 1..20: note = Target: SCN10A; (-) strand; PAM type: YTN; PAM sequence: TTC
  source 1..20: mol_type = other DNA
cacttccctcatgacctagc

SEQ ID NO: 47725 - DNA, 20 bp, synthetic construct
  misc_feature 1..20: note = Description of Artificial Sequence: Synthetic oligonucleotide
  misc_feature 1..20: note = Target: SCN10A; (-) strand; PAM type: YTN; PAM sequence: CTA
  source 1..20: mol_type = other DNA
ttccacttccctcatgacct

SEQ ID NO: 47726 - DNA, 20 bp, synthetic construct
  misc_feature 1..20: note = Description of Artificial Sequence: Synthetic oligonucleotide
  misc_feature 1..20: note = Target: SCN10A; (-) strand; PAM type: YTN; PAM sequence: TTG
  source 1..20: mol_type = other DNA
ggatctattccacttccctc

SEQ ID NO: 47727 - DNA, 20 bp, synthetic construct
  misc_feature 1..20: note = Description of Artificial Sequence: Synthetic oligonucleotide
  misc_feature 1..20: note = Target: SCN10A; (-) strand; PAM type: YTN; PAM sequence: CTT
  source 1..20: mol_type = other DNA
gggatctattccacttccct

SEQ ID NO: 47728 - DNA, 20 bp, synthetic construct
  misc_feature 1..20: note = Description of Artificial Sequence: Synthetic oligonucleotide
  misc_feature 1..20: note = Target: SCN10A; (-) strand; PAM type: YTN; PAM sequence: TTC
  source 1..20: mol_type = other DNA
ttgggatctattccacttcc

SEQ ID NO: 47729 - DNA, 20 bp, synthetic construct
  misc_feature 1..20: note = Description of Artificial Sequence: Synthetic oligonucleotide
  misc_feature 1..20: note = Target: SCN10A; (-) strand; PAM type: YTN; PAM sequence: TTT
  source 1..20: mol_type = other DNA
cttgggatctattccacttc

SEQ ID NO: 47730 - DNA, 20 bp, synthetic construct
  misc_feature 1..20: note = Description of Artificial Sequence: Synthetic oligonucleotide
  misc_feature 1..20: note = Target: SCN10A; (-) strand; PAM type: YTN; PAM sequence: CTT
  source 1..20: mol_type = other DNA
tcttgggatctattccactt

SEQ ID NO: 47731 - DNA, 20 bp, synthetic construct
  misc_feature 1..20: note = Description of Artificial Sequence: Synthetic oligonucleotide
  misc_feature 1..20: note = Target: SCN10A; (-) strand; PAM type: YTN; PAM sequence: CTA
  source 1..20: mol_type = other DNA
cacactttcttgggatctat

SEQ ID NO: 47732 - DNA, 20 bp, synthetic construct
  misc_feature 1..20: note = Description of Artificial Sequence: Synthetic oligonucleotide
  misc_feature 1..20: note = Target: SCN10A; (-) strand; PAM type: YTN; PAM sequence: CTA
  source 1..20: mol_type = other DNA
accacacccaccaactacac

SEQ ID NO: 47733 - DNA, 20 bp, synthetic construct
  misc_feature 1..20: note = Description of Artificial Sequence: Synthetic oligonucleotide
  misc_feature 1..20: note = Target: SCN10A; (-) strand; PAM type: YTN; PAM sequence: TTC
  source 1..20: mol_type = other DNA
cctaaccacacccaccaact

SEQ ID NO: 47734 - DNA, 20 bp, synthetic construct
  misc_feature 1..20: note = Description of Artificial Sequence: Synthetic oligonucleotide
  misc_feature 1..20: note = Target: SCN10A; (-) strand; PAM type: YTN; PAM sequence: CTC
  source 1..20: mol_type = other DNA
aattccctaaccacacccac

SEQ ID NO: 47735 - DNA, 20 bp, synthetic construct
  misc_feature 1..20: note = Description of Artificial Sequence: Synthetic oligonucleotide
  misc_feature 1..20: note = Target: SCN10A; (-) strand; PAM type: YTN; PAM sequence: CTG
  source 1..20: mol_type = other DNA
atcagtgctcaattccctaa

SEQ ID NO: 47736 - DNA, 20 bp, synthetic construct
  misc_feature 1..20: note = Description of Artificial Sequence: Synthetic oligonucleotide
  misc_feature 1..20: note = Target: SCN10A; (-) strand; PAM type: YTN; PAM sequence: TTA
  source 1..20: mol_type = other DNA
acatgctgatcagtgctcaa

SEQ ID NO: 47737 - DNA, 20 bp, synthetic construct
  misc_feature 1..20: note = Description of Artificial Sequence: Synthetic oligonucleotide
  misc_feature 1..20: note = Target: SCN10A; (-) strand; PAM type: YTN; PAM sequence: TTT
  source 1..20: mol_type = other DNA
aacatgctgatcagtgctca

SEQ ID NO: 47738 - DNA, 20 bp, synthetic construct
  misc_feature 1..20: note = Description of Artificial Sequence: Synthetic oligonucleotide
  misc_feature 1..20: note = Target: SCN10A; (-) strand; PAM type: YTN; PAM sequence: CTG
  source 1..20: mol_type = other DNA
atttaacatgctgatcagtg

SEQ ID NO: 47739 - DNA, 20 bp, synthetic construct
  misc_feature 1..20: note = Description of Artificial Sequence: Synthetic oligonucleotide
  misc_feature 1..20: note = Target: SCN10A; (-) strand; PAM type: YTN; PAM sequence: CTC
  source 1..20: mol_type = other DNA
gctgatttaacatgctgatc

SEQ ID NO: 47740 - DNA, 20 bp, synthetic construct
  misc_feature 1..20: note = Description of Artificial Sequence: Synthetic oligonucleotide
  misc_feature 1..20: note = Target: SCN10A; (-) strand; PAM type: YTN; PAM sequence: CTG
  source 1..20: mol_type = other DNA
tccccacctcgctgatttaa

SEQ ID NO: 47741 - DNA, 20 bp, synthetic construct
  misc_feature 1..20: note = Description of Artificial Sequence: Synthetic oligonucleotide
  misc_feature 1..20: note = Target: SCN10A; (-) strand; PAM type: YTN; PAM sequence: CTA
  source 1..20: mol_type = other DNA
ccctgtccccacctcgctga

SEQ ID NO: 47742 - DNA, 20 bp, synthetic construct
  misc_feature 1..20: note = Description of Artificial Sequence: Synthetic oligonucleotide
  misc_feature 1..20: note = Target: SCN10A; (-) strand; PAM type: YTN; PAM sequence: CTG
  source 1..20: mol_type = other DNA
caggggaatgctaccctgtc

SEQ ID NO: 47743 - DNA, 20 bp, synthetic construct
  misc_feature 1..20: note = Description of Artificial Sequence: Synthetic oligonucleotide
  misc_feature 1..20: note = Target: SCN10A; (-) strand; PAM type: YTN; PAM sequence: TTC
  source 1..20: mol_type = other DNA
tgcaggggaatgctaccctg

SEQ ID NO: 47744 - DNA, 20 bp, synthetic construct
  misc_feature 1..20: note = Description of Artificial Sequence: Synthetic oligonucleotide
  misc_feature 1..20: note = Target: SCN10A; (-) strand; PAM type: YTN; PAM sequence: CTA
  source 1..20: mol_type = other DNA
caggattctgcaggggaatg

SEQ ID NO: 47745 - DNA, 20 bp, synthetic construct
  misc_feature 1..20: note = Description of Artificial Sequence: Synthetic oligonucleotide
  misc_feature 1..20: note = Target: SCN10A; (-) strand; PAM type: YTN; PAM sequence: CTG
  source 1..20: mol_type = other DNA
cccctacaggattctgcagg

SEQ ID NO: 47746 - DNA, 20 bp, synthetic construct
  misc_feature 1..20: note = Description of Artificial Sequence: Synthetic oligonucleotide
  misc_feature 1..20: note = Target: SCN10A; (-) strand; PAM type: YTN; PAM sequence: TTC
  source 1..20: mol_type = other DNA
acagtctgcccctacaggat

SEQ ID NO: 47747 - DNA, 20 bp, synthetic construct
  misc_feature 1..20: note = Description of Artificial Sequence: Synthetic oligonucleotide
  misc_feature 1..20: note = Target: SCN10A; (-) strand; PAM type: YTN; PAM sequence: CTT
  source 1..20: mol_type = other DNA
cacagtctgcccctacagga

SEQ ID NO: 47748 - DNA, 20 bp, synthetic construct
  misc_feature 1..20: note = Description of Artificial Sequence: Synthetic oligonucleotide
  misc_feature 1..20: note = Target: SCN10A; (-) strand; PAM type: YTN; PAM sequence: TTA
  source 1..20: mol_type = other DNA
cttcacagtctgcccctaca

SEQ ID NO: 47749 - DNA, 20 bp, synthetic construct
  misc_feature 1..20: note = Description of Artificial Sequence: Synthetic oligonucleotide
  misc_feature 1..20: note = Target: SCN10A; (-) strand; PAM type: YTN; PAM sequence: TTT
  source 1..20: mol_type = other DNA
acttcacagtctgcccctac

SEQ ID NO: 47750 - DNA, 20 bp, synthetic construct
  misc_feature 1..20: note = Description of Artificial Sequence: Synthetic oligonucleotide
  misc_feature 1..20: note = Target: SCN10A; (-) strand; PAM type: YTN; PAM sequence: CTA
  source 1..20: mol_type = other DNA
aagtcccaaacaaccaaaaa

SEQ ID NO: 47751 - DNA, 20 bp, synthetic construct
  misc_feature 1..20: note = Description of Artificial Sequence: Synthetic oligonucleotide
  misc_feature 1..20: note = Target: SCN10A; (-) strand; PAM type: YTN; PAM sequence: CTG
  source 1..20: mol_type = other DNA
atcccacagtctaaagtccc

SEQ ID NO: 47752 - DNA, 20 bp, synthetic construct
  misc_feature 1..20: note = Description of Artificial Sequence: Synthetic oligonucleotide
  misc_feature 1..20: note = Target: SCN10A; (-) strand; PAM type: YTN; PAM sequence: TTC
  source 1..20: mol_type = other DNA
tgatcccacagtctaaagtc

SEQ ID NO: 47753 - DNA, 20 bp, synthetic construct
  misc_feature 1..20: note = Description of Artificial Sequence: Synthetic oligonucleotide
  misc_feature 1..20: note = Target: SCN10A; (-) strand; PAM type: YTN; PAM sequence: TTG
  source 1..20: mol_type = other DNA
ttctgatcccacagtctaaa

SEQ ID NO: 47754 - DNA, 20 bp, synthetic construct
  misc_feature 1..20: note = Description of Artificial Sequence: Synthetic oligonucleotide
  misc_feature 1..20: note = Target: SCN10A; (-) strand; PAM type: YTN; PAM sequence: TTT
  source 1..20: mol_type = other DNA
gttctgatcccacagtctaa

SEQ ID NO: 47755 - DNA, 20 bp, synthetic construct
  misc_feature 1..20: note = Description of Artificial Sequence: Synthetic oligonucleotide
  misc_feature 1..20: note = Target: SCN10A; (-) strand; PAM type: YTN; PAM sequence: TTT
  source 1..20: mol_type = other DNA
tgttctgatcccacagtcta

SEQ ID NO: 47756 - DNA, 20 bp, synthetic construct
  misc_feature 1..20: note = Description of Artificial Sequence: Synthetic oligonucleotide
  misc_feature 1..20: note = Target: SCN10A; (-) strand; PAM type: YTN; PAM sequence: CTT
  source 1..20: mol_type = other DNA
ttgttctgatcccacagtct

SEQ ID NO: 47757 - DNA, 20 bp, synthetic construct
  misc_feature 1..20: note = Description of Artificial Sequence: Synthetic oligonucleotide
  misc_feature 1..20: note = Target: SCN10A; (-) strand; PAM type: YTN; PAM sequence: CTA
  source 1..20: mol_type = other DNA
cttttgttctgatcccacag

SEQ ID NO: 47758 - DNA, 20 bp, synthetic construct
  misc_feature 1..20: note = Description of Artificial Sequence: Synthetic oligonucleotide
  misc_feature 1..20: note = Target: SCN10A; (-) strand; PAM type: YTN; PAM sequence: CTA
  source 1..20: mol_type = other DNA
tgtgctacttttgttctgat

SEQ ID NO: 47759 - DNA, 20 bp, synthetic construct
  misc_feature 1..20: note = Description of Artificial Sequence: Synthetic oligonucleotide
  misc_feature 1..20: note = Target: SCN10A; (-) strand; PAM type: YTN; PAM sequence: TTA
  source 1..20: mol_type = other DNA
aggtctatgtgctacttttg

SEQ ID NO: 47760 - DNA, 20 bp, synthetic construct
  misc_feature 1..20: note = Description of Artificial Sequence: Synthetic oligonucleotide
  misc_feature 1..20: note = Target: SCN10A; (-) strand; PAM type: YTN; PAM sequence: TTT
  source 1..20: mol_type = other DNA
aaggtctatgtgctactttt

SEQ ID NO: 47761 - DNA, 20 bp, synthetic construct
  misc_feature 1..20: note = Description of Artificial Sequence: Synthetic oligonucleotide
  misc_feature 1..20: note = Target: SCN10A; (-) strand; PAM type: YTN; PAM sequence: TTT
  source 1..20: mol_type = other DNA
taaggtctatgtgctacttt

SEQ ID NO: 47762 - DNA, 20 bp, synthetic construct
  misc_feature 1..20: note = Description of Artificial Sequence: Synthetic oligonucleotide
  misc_feature 1..20: note = Target: SCN10A; (-) strand; PAM type: YTN; PAM sequence: TTA
  source 1..20: mol_type = other DNA
gtgttttaaggtctatgtgc

SEQ ID NO: 47763 - DNA, 20 bp, synthetic construct
  misc_feature 1..20: note = Description of Artificial Sequence: Synthetic oligonucleotide
  misc_feature 1..20: note = Target: SCN10A; (-) strand; PAM type: YTN; PAM sequence: CTT
  source 1..20: mol_type = other DNA
agtgttttaaggtctatgtg

SEQ ID NO: 47764 - DNA, 20 bp, synthetic construct
  misc_feature 1..20: note = Description of Artificial Sequence: Synthetic oligonucleotide
  misc_feature 1..20: note = Target: SCN10A; (-) strand; PAM type: YTN; PAM sequence: TTG
  source 1..20: mol_type = other DNA
gggaagcagaagcttagtgt

SEQ ID NO: 47765 - DNA, 20 bp, synthetic construct
  misc_feature 1..20: note = Description of Artificial Sequence: Synthetic oligonucleotide
  misc_feature 1..20: note = Target: SCN10A; (-) strand; PAM type: YTN; PAM sequence: CTT
  source 1..20: mol_type = other DNA
ggggaagcagaagcttagtg

SEQ ID NO: 47766 - DNA, 20 bp, synthetic construct
  misc_feature 1..20: note = Description of Artificial Sequence: Synthetic oligonucleotide
  misc_feature 1..20: note = Target: SCN10A; (-) strand; PAM type: YTN; PAM sequence: CTA
  source 1..20: mol_type = other DNA
cacttggggaagcagaagct

SEQ ID NO: 47767 - DNA, 20 bp, synthetic construct
  misc_feature 1..20: note = Description of Artificial Sequence: Synthetic oligonucleotide
  misc_feature 1..20: note = Target: SCN10A; (-) strand; PAM type: YTN; PAM sequence: CTG
  source 1..20: mol_type = other DNA
ctacacttggggaagcagaa

SEQ ID NO: 47768 - DNA, 20 bp, synthetic construct
  misc_feature 1..20: note = Description of Artificial Sequence: Synthetic oligonucleotide
  misc_feature 1..20: note = Target: SCN10A; (-) strand; PAM type: YTN; PAM sequence: TTC
  source 1..20: mol_type = other DNA
tgctacacttggggaagcag

SEQ ID NO: 47769 - DNA, 20 bp, synthetic construct
  misc_feature 1..20: note = Description of Artificial Sequence: Synthetic oligonucleotide
  misc_feature 1..20: note = Target: SCN10A; (-) strand; PAM type: YTN; PAM sequence: TTT
  source 1..20: mol_type = other DNA
ctgctacacttggggaagca

SEQ ID NO: 47770 - DNA, 20 bp, synthetic construct
  misc_feature 1..20: note = Description of Artificial Sequence: Synthetic oligonucleotide
  misc_feature 1..20: note = Target: SCN10A; (-) strand; PAM type: YTN; PAM sequence: CTC
  source 1..20: mol_type = other DNA
aaaaaaaaaaaaaaaaaaaa

SEQ ID NO: 47771 - DNA, 20 bp, synthetic construct
  misc_feature 1..20: note = Description of Artificial Sequence: Synthetic oligonucleotide
  misc_feature 1..20: note = Target: SCN10A; (-) strand; PAM type: YTN; PAM sequence: CTC
  source 1..20: mol_type = other DNA
cgtctcaaaaaaaaaaaaaa

SEQ ID NO: 47772 - DNA, 20 bp, synthetic construct
  misc_feature 1..20: note = Description of Artificial Sequence: Synthetic oligonucleotide
  misc_feature 1..20: note = Target: SCN10A; (-) strand; PAM type: YTN; PAM sequence: CTA
  source 1..20: mol_type = other DNA
aacagcgggactccgtctca

SEQ ID NO: 47773 - DNA, 20 bp, synthetic construct
  misc_feature 1..20: note = Description of Artificial Sequence: Synthetic oligonucleotide
  misc_feature 1..20: note = Target: SCN10A; (-) strand; PAM type: YTN; PAM sequence: CTG
  source 1..20: mol_type = other DNA
ggctaaacagcgggactccg

SEQ ID NO: 47774 - DNA, 20 bp, synthetic construct
  misc_feature 1..20: note = Description of Artificial Sequence: Synthetic oligonucleotide
  misc_feature 1..20: note = Target: SCN10A; (-) strand; PAM type: YTN; PAM sequence: CTG
  source 1..20: mol_type = other DNA
caatccggcctgggctaaac

SEQ ID NO: 47775 - DNA, 20 bp, synthetic construct
  misc_feature 1..20: note = Description of Artificial Sequence: Synthetic oligonucleotide
  misc_feature 1..20: note = Target: SCN10A; (-) strand; PAM type: YTN; PAM sequence: TTG
  source 1..20: mol_type = other DNA
cgccactgcaatccggcctg

SEQ ID NO: 47776 - DNA, 20 bp, synthetic construct
  misc_feature 1..20: note = Description of Artificial Sequence: Synthetic oligonucleotide
  misc_feature 1..20: note = Target: SCN10A; (-) strand; PAM type: YTN; PAM sequence: TTA
  source 1..20: mol_type = other DNA
cagtgagccgagattgcgcc

SEQ ID NO: 47777 - DNA, 20 bp, synthetic construct
  misc_feature 1..20: note = Description of Artificial Sequence: Synthetic oligonucleotide
  misc_feature 1..20: note = Target: SCN10A; (-) strand; PAM type: YTN; PAM sequence: CTT
  source 1..20: mol_type = other DNA
acagtgagccgagattgcgc

SEQ ID NO: 47778 - DNA, 20 bp, synthetic construct
  misc_feature 1..20: note = Description of Artificial Sequence: Synthetic oligonucleotide
  misc_feature 1..20: note = Target: SCN10A; (-) strand; PAM type: YTN; PAM sequence: CTG
  source 1..20: mol_type = other DNA
ggaggcggagcttacagtga

SEQ ID NO: 47779 - DNA, 20 bp, synthetic construct
  misc_feature 1..20: note = Description of Artificial Sequence: Synthetic oligonucleotide
  misc_feature 1..20: note = Target: SCN10A; (-) strand; PAM type: YTN; PAM sequence: CTG
  source 1..20: mol_type = other DNA
aggcaggagaatggcgtgaa

SEQ ID NO: 47780 - DNA, 20 bp, synthetic construct
  misc_feature 1..20: note = Description of Artificial Sequence: Synthetic oligonucleotide
  misc_feature 1..20: note = Target: SCN10A; (-) strand; PAM type: YTN; PAM sequence: CTC
  source 1..20: mol_type = other DNA
gggaggctgaggcaggagaa

SEQ ID NO: 47781 - DNA, 20 bp, synthetic construct
  misc_feature 1..20: note = Description of Artificial Sequence: Synthetic oligonucleotide
  misc_feature 1..20: note = Target: SCN10A; (-) strand; PAM type: YTN; PAM sequence: CTA
  source 1..20: mol_type = other DNA
ctcgggaggctgaggcagga

SEQ ID NO: 47782 - DNA, 20 bp, synthetic construct
  misc_feature 1..20: note = Description of Artificial Sequence: Synthetic oligonucleotide
  misc_feature 1..20: note = Target: SCN10A; (-) strand; PAM type: YTN; PAM sequence: CTG
  source 1..20: mol_type = other DNA
tagtcccagctactcgggag

SEQ ID NO: 47783 - DNA, 20 bp, synthetic construct
  misc_feature 1..20: note = Description of Artificial Sequence: Synthetic oligonucleotide
  misc_feature 1..20: note = Target: SCN10A; (-) strand; PAM type: YTN; PAM sequence: TTA
  source 1..20: mol_type = other DNA
gccgggcacggtggcgggcg

SEQ ID NO: 47784 - DNA, 20 bp, synthetic construct
  misc_feature 1..20: note = Description of Artificial Sequence: Synthetic oligonucleotide
  misc_feature 1..20: note = Target: SCN10A; (-) strand; PAM type: YTN; PAM sequence: CTA
  source 1..20: mol_type = other DNA
aaaatacaaaaaattagccg

SEQ ID NO: 47785 - DNA, 20 bp, synthetic construct
  misc_feature 1..20: note = Description of Artificial Sequence: Synthetic oligonucleotide
  misc_feature 1..20: note = Target: SCN10A; (-) strand; PAM type: YTN; PAM sequence: CTA
  source 1..20: mol_type = other DNA
ctaaaaatacaaaaaattag

SEQ ID NO: 47786 - DNA, 20 bp, synthetic construct
  misc_feature 1..20: note = Description of Artificial Sequence: Synthetic oligonucleotide
  misc_feature 1..20: note = Target: SCN10A; (-) strand; PAM type: YTN; PAM sequence: CTC
  source 1..20: mol_type = other DNA
tactaaaaatacaaaaaatt

SEQ ID NO: 47787 - DNA, 20 bp, synthetic construct
  misc_feature 1..20: note = Description of Artificial Sequence: Synthetic oligonucleotide
  misc_feature 1..20: note = Target: SCN10A; (-) strand; PAM type: YTN; PAM sequence: CTA
  source 1..20: mol_type = other DNA
acacggtgaaaccccgtctc

SEQ ID NO: 47788 - DNA, 20 bp, synthetic construct
  misc_feature 1..20: note = Description of Artificial Sequence: Synthetic oligonucleotide
  misc_feature 1..20: note = Target: SCN10A; (-) strand; PAM type: YTN; PAM sequence: TTG
  source 1..20: mol_type = other DNA
gctaacacggtgaaaccccg

SEQ ID NO: 47789 - DNA, 20 bp, synthetic construct
  misc_feature 1..20: note = Description of Artificial Sequence: Synthetic oligonucleotide
  misc_feature 1..20: note = Target: SCN10A; (-) strand; PAM type: YTN; PAM sequence: CTT
  source 1..20: mol_type = other DNA
ggctaacacggtgaaacccc

SEQ ID NO: 47790 - DNA, 20 bp, synthetic construct
  misc_feature 1..20: note = Description of Artificial Sequence: Synthetic oligonucleotide
  misc_feature 1..20: note = Target: SCN10A; (-) strand; PAM type: YTN; PAM sequence: TTG
  source 1..20: mol_type = other DNA
ggaggccgaggcaggcggat

SEQ ID NO: 47791 - DNA, 20 bp, synthetic construct
  misc_feature 1..20: note = Description of Artificial Sequence: Synthetic oligonucleotide
  misc_feature 1..20: note = Target: SCN10A; (-) strand; PAM type: YTN; PAM sequence: TTT
  source 1..20: mol_type = other DNA
gggaggccgaggcaggcgga

SEQ ID NO: 47792 - DNA, 20 bp, synthetic construct
  misc_feature 1..20: note = Description of Artificial Sequence: Synthetic oligonucleotide
  misc_feature 1..20: note = Target: SCN10A; (-) strand; PAM type: YTN; PAM sequence: CTT
  source 1..20: mol_type = other DNA
tgggaggccgaggcaggcgg

SEQ ID NO: 47793 - DNA, 20 bp, synthetic construct
  misc_feature 1..20: note = Description of Artificial Sequence: Synthetic oligonucleotide
  misc_feature 1..20: note = Target: SCN10A; (-) strand; PAM type: YTN; PAM sequence: CTG
  source 1..20: mol_type = other DNA
taatcccagcactttgggag

SEQ ID NO: 47794 - DNA, 20 bp, synthetic construct
  misc_feature 1..20: note = Description of Artificial Sequence: Synthetic oligonucleotide
  misc_feature 1..20: note = Target: SCN10A; (-) strand; PAM type: YTN; PAM sequence: CTC
  source 1..20: mol_type = other DNA
acgcctgtaatcccagcact

SEQ ID NO: 47795 - DNA, 20 bp, synthetic construct
  misc_feature 1..20: note = Description of Artificial Sequence: Synthetic oligonucleotide
  misc_feature 1..20: note = Target: SCN10A; (-) strand; PAM type: YTN; PAM sequence: CTG
  source 1..20: mol_type = other DNA
ggcgcggtggctcacgcctg

SEQ ID NO: 47796 - DNA, 20 bp, synthetic construct
  misc_feature 1..20: note = Description of Artificial Sequence: Synthetic oligonucleotide
  misc_feature 1..20: note = Target: SCN10A; (-) strand; PAM type: YTN; PAM sequence: CTA
  source 1..20: mol_type = other DNA
ataaaatacgaggctgggcg

SEQ ID NO: 47797 - DNA, 20 bp, synthetic construct
  misc_feature 1..20: note = Description of Artificial Sequence: Synthetic oligonucleotide
  misc_feature 1..20: note = Target: SCN10A; (-) strand; PAM type: YTN; PAM sequence: TTC
  source 1..20: mol_type = other DNA
taataaaatacgaggctggg

SEQ ID NO: 47798 - DNA, 20 bp, synthetic construct
  misc_feature 1..20: note = Description of Artificial Sequence: Synthetic oligonucleotide
  misc_feature 1..20: note = Target: SCN10A; (-) strand; PAM type: YTN; PAM sequence: TTT
  source 1..20: mol_type = other DNA
ctaataaaatacgaggctgg

SEQ ID NO: 47799 - DNA, 20 bp, synthetic construct
  misc_feature 1..20: note = Description of Artificial Sequence: Synthetic oligonucleotide
  misc_feature 1..20: note = Target: SCN10A; (-) strand; PAM type: YTN; PAM sequence: TTT
  source 1..20: mol_type = other DNA
tctaataaaatacgaggctg

SEQ ID NO: 47800 - DNA, 20 bp, synthetic construct
  misc_feature 1..20: note = Description of Artificial Sequence: Synthetic oligonucleotide
  misc_feature 1..20: note = Target: SCN10A; (-) strand; PAM type: YTN; PAM sequence: TTA
  source 1..20: mol_type = other DNA
gttttctaataaaatacgag

SEQ ID NO: 47801 - DNA, 20 bp, synthetic construct
  misc_feature 1..20: note = Description of Artificial Sequence: Synthetic oligonucleotide
  misc_feature 1..20: note = Target: SCN10A; (-) strand; PAM type: YTN; PAM sequence: CTG
  source 1..20: mol_type = other DNA
gcaggcccacagttagtttt

SEQ ID NO: 47802 - DNA, 20 bp, synthetic construct
  misc_feature 1..20: note = Description of Artificial Sequence: Synthetic oligonucleotide
  misc_feature 1..20: note = Target: SCN10A; (-) strand; PAM type: YTN; PAM sequence: CTA
  source 1..20: mol_type = other DNA
tgcacaatcgtcaagagagc

SEQ ID NO: 47803 - DNA, 20 bp, synthetic construct
  misc_feature 1..20: note = Description of Artificial Sequence: Synthetic oligonucleotide
  misc_feature 1..20: note = Target: SCN10A; (-) strand; PAM type: YTN; PAM sequence: CTA
  source 1..20: mol_type = other DNA
atggtcaatataaggtacct

SEQ ID NO: 47804 - DNA, 20 bp, synthetic construct
  misc_feature 1..20: note = Description of Artificial Sequence: Synthetic oligonucleotide
  misc_feature 1..20: note = Target: SCN10A; (-) strand; PAM type: YTN; PAM sequence: CTA
  source 1..20: mol_type = other DNA
agctaatggtcaatataagg

SEQ ID NO: 47805 - DNA, 20 bp, synthetic construct
  misc_feature 1..20: note = Description of Artificial Sequence: Synthetic oligonucleotide
  misc_feature 1..20: note = Target: SCN10A; (-) strand; PAM type: YTN; PAM sequence: TTG
  source 1..20: mol_type = other DNA
atgtcaagatgtaggcccct

SEQ ID NO: 47806 - DNA, 20 bp, synthetic construct
  misc_feature 1..20: note = Description of Artificial Sequence: Synthetic oligonucleotide
  misc_feature 1..20: note = Target: SCN10A; (-) strand; PAM type: YTN; PAM sequence: CTA
  source 1..20: mol_type = other DNA
gaaattgatgtcaagatgta

SEQ ID NO: 47807 - DNA, 20 bp, synthetic construct
  misc_feature 1..20: note = Description of Artificial Sequence: Synthetic oligonucleotide
  misc_feature 1..20: note = Target: SCN10A; (-) strand; PAM type: YTN; PAM sequence: CTA
  source 1..20: mol_type = other DNA
ggtatctagaaattgatgtc

SEQ ID NO: 47808 - DNA, 20 bp, synthetic construct
  misc_feature 1..20: note = Description of Artificial Sequence: Synthetic oligonucleotide
  misc_feature 1..20: note = Target: SCN10A; (-) strand; PAM type: YTN; PAM sequence: CTC
  source 1..20: mol_type = other DNA
taggtatctagaaattgatg

SEQ ID NO: 47809 - DNA, 20 bp, synthetic construct
  misc_feature 1..20: note = Description of Artificial Sequence: Synthetic oligonucleotide
  misc_feature 1..20: note = Target: SCN10A; (-) strand; PAM type: YTN; PAM sequence: TTC
  source 1..20: mol_type = other DNA
tctaggtatctagaaattga

SEQ ID NO: 47810 - DNA, 20 bp, synthetic construct
  misc_feature 1..20: note = Description of Artificial Sequence: Synthetic oligonucleotide
  misc_feature 1..20: note = Target: SCN10A; (-) strand; PAM type: YTN; PAM sequence: TTT
  source 1..20: mol_type = other DNA
ctctaggtatctagaaattg

SEQ ID NO: 47811 - DNA, 20 bp, synthetic construct
  misc_feature 1..20: note = Description of Artificial Sequence: Synthetic oligonucleotide
  misc_feature 1..20: note = Target: SCN10A; (-) strand; PAM type: YTN; PAM sequence: TTA
  source 1..20: mol_type = other DNA
gaaggacagatttctctagg

SEQ ID NO: 47812 - DNA, 20 bp, synthetic construct
  misc_feature 1..20: note = Description of Artificial Sequence: Synthetic oligonucleotide
  misc_feature 1..20: note = Target: SCN10A; (-) strand; PAM type: YTN; PAM sequence: TTT
  source 1..20: mol_type = other DNA
agaaggacagatttctctag

SEQ ID NO: 47813 - DNA, 20 bp, synthetic construct
  misc_feature 1..20: note = Description of Artificial Sequence: Synthetic oligonucleotide
  misc_feature 1..20: note = Target: SCN10A; (-) strand; PAM type: YTN; PAM sequence: TTT
  source 1..20: mol_type = other DNA
tagaaggacagatttctcta

SEQ ID NO: 47814 - DNA, 20 bp, synthetic construct
  misc_feature 1..20: note = Description of Artificial Sequence: Synthetic oligonucleotide
  misc_feature 1..20: note = Target: SCN10A; (-) strand; PAM type: YTN; PAM sequence: TTT
  source 1..20: mol_type = other DNA
ttagaaggacagatttctct

SEQ ID NO: 47815 - DNA, 20 bp, synthetic construct
  misc_feature 1..20: note = Description of Artificial Sequence: Synthetic oligonucleotide
  misc_feature 1..20: note = Target: SCN10A; (-) strand; PAM type: YTN; PAM sequence: TTA
  source 1..20: mol_type = other DNA
aatcacatttttagaaggac

SEQ ID NO: 47816 - DNA, 20 bp, synthetic construct
  misc_feature 1..20: note = Description of Artificial Sequence: Synthetic oligonucleotide
  misc_feature 1..20: note = Target: SCN10A; (-) strand; PAM type: YTN; PAM sequence: TTA
  source 1..20: mol_type = other DNA
caaggtcagaattaaatcac

SEQ ID NO: 47817 - DNA, 20 bp, synthetic construct
  misc_feature 1..20: note = Description of Artificial Sequence: Synthetic oligonucleotide
  misc_feature 1..20: note = Target: SCN10A; (-) strand; PAM type: YTN; PAM sequence: CTT
  source 1..20: mol_type = other DNA
acaaggtcagaattaaatca

SEQ ID NO: 47818 - DNA, 20 bp, synthetic construct
  misc_feature 1..20: note = Description of Artificial Sequence: Synthetic oligonucleotide
  misc_feature 1..20: note = Target: SCN10A; (-) strand; PAM type: YTN; PAM sequence: TTG
  source 1..20: mol_type = other DNA
aaaatcttacaaggtcagaa

SEQ ID NO: 47819 - DNA, 20 bp, synthetic construct
  misc_feature 1..20: note = Description of Artificial Sequence: Synthetic oligonucleotide
  misc_feature 1..20: note = Target: SCN10A; (-) strand; PAM type: YTN; PAM sequence: CTT
  source 1..20: mol_type = other DNA
gaaaatcttacaaggtcaga

SEQ ID NO: 47820 - DNA, 20 bp, synthetic construct
  misc_feature 1..20: note = Description of Artificial Sequence: Synthetic oligonucleotide
  misc_feature 1..20: note = Target: SCN10A; (-) strand; PAM type: YTN; PAM sequence: TTA
  source 1..20: mol_type = other DNA
tccataacttgaaaatctta

SEQ ID NO: 47821 - DNA, 20 bp, synthetic construct
  misc_feature 1..20: note = Description of Artificial Sequence: Synthetic oligonucleotide
  misc_feature 1..20: note = Target: SCN10A; (-) strand; PAM type: YTN; PAM sequence: TTT
  source 1..20: mol_type = other DNA
atccataacttgaaaatctt

SEQ ID NO: 47822 - DNA, 20 bp, synthetic construct
  misc_feature 1..20: note = Description of Artificial Sequence: Synthetic oligonucleotide
  misc_feature 1..20: note = Target: SCN10A; (-) strand; PAM type: YTN; PAM sequence: CTT
  source 1..20: mol_type = other DNA
tatccataacttgaaaatct

SEQ ID NO: 47823 - DNA, 20 bp, synthetic construct
  misc_feature 1..20: note = Description of Artificial Sequence: Synthetic oligonucleotide
  misc_feature 1..20: note = Target: SCN10A; (-) strand; PAM type: YTN; PAM sequence: CTC
  source 1..20: mol_type = other DNA
tttatccataacttgaaaat

SEQ ID NO: 47824 - DNA, 20 bp, synthetic construct
  misc_feature 1..20: note = Description of Artificial Sequence: Synthetic oligonucleotide
  misc_feature 1..20: note = Target: SCN10A; (-) strand; PAM type: YTN; PAM sequence: CTG
  source 1..20: mol_type = other DNA
gtaggactctttatccataa

SEQ ID NO: 47825 - DNA, 20 bp, synthetic construct
  misc_feature 1..20: note = Description of Artificial Sequence: Synthetic oligonucleotide
  misc_feature 1..20: note = Target: SCN10A; (-) strand; PAM type: YTN; PAM sequence: CTG
  source 1..20: mol_type = other DNA
tcaccatcccagggaggaga

SEQ ID NO: 47826 - DNA, 20 bp, synthetic construct
  misc_feature 1..20: note = Description of Artificial Sequence: Synthetic oligonucleotide
  misc_feature 1..20: note = Target: SCN10A; (-) strand; PAM type: YTN; PAM sequence: CTG
  source 1..20: mol_type = other DNA
atggtactgtcaccatccca

SEQ ID NO: 47827 - DNA, 20 bp, synthetic construct
  misc_feature 1..20: note = Description of Artificial Sequence: Synthetic oligonucleotide
  misc_feature 1..20: note = Target: SCN10A; (-) strand; PAM type: YTN; PAM sequence: CTA
  source 1..20: mol_type = other DNA
agctgatggtactgtcacca

SEQ ID NO: 47828 - DNA, 20 bp, synthetic construct
  misc_feature 1..20: note = Description of Artificial Sequence: Synthetic oligonucleotide
  misc_feature 1..20: note = Target: SCN10A; (-) strand; PAM type: YTN; PAM sequence: CTG
  source 1..20: mol_type = other DNA
cctaagctgatggtactgtc

SEQ ID NO: 47829 - DNA, 20 bp, synthetic construct
  misc_feature 1..20: note = Description of Artificial Sequence: Synthetic oligonucleotide
  misc_feature 1..20: note = Target: SCN10A; (-) strand; PAM type: YTN; PAM sequence: TTG
  source 1..20: mol_type = other DNA
atggcatctgcctaagctga

SEQ ID NO: 47830 - DNA, 20 bp, synthetic construct
  misc_feature 1..20: note = Description of Artificial Sequence: Synthetic oligonucleotide
  misc_feature 1..20: note = Target: SCN10A; (-) strand; PAM type: YTN; PAM sequence: CTG
  source 1..20: mol_type = other DNA
gttgatggcatctgcctaag

SEQ ID NO: 47831 - DNA, 20 bp, synthetic construct
  misc_feature 1..20: note = Description of Artificial Sequence: Synthetic oligonucleotide
  misc_feature 1..20: note = Target: SCN10A; (-) strand; PAM type: YTN; PAM sequence: CTG
  source 1..20: mol_type = other DNA
tgccatgaaacgctggttga

SEQ ID NO: 47832 - DNA, 20 bp, synthetic construct
  misc_feature 1..20: note = Description of Artificial Sequence: Synthetic oligonucleotide
  misc_feature 1..20: note = Target: SCN10A; (-) strand; PAM type: YTN; PAM sequence: CTG
  source 1..20: mol_type = other DNA
agacacagctgtgccatgaa

SEQ ID NO: 47833 - DNA, 20 bp, synthetic construct
  misc_feature 1..20: note = Description of Artificial Sequence: Synthetic oligonucleotide
  misc_feature 1..20: note = Target: SCN10A; (-) strand; PAM type: YTN; PAM sequence: CTA
  source 1..20: mol_type = other DNA
aagaccaaataaagcatgtc

SEQ ID NO: 47834 - DNA, 20 bp, synthetic construct
  misc_feature 1..20: note = Description of Artificial Sequence: Synthetic oligonucleotide
  misc_feature 1..20: note = Target: SCN10A; (-) strand; PAM type: YTN; PAM sequence: CTC
  source 1..20: mol_type = other DNA
taaagaccaaataaagcatg

SEQ ID NO: 47835 - DNA, 20 bp, synthetic construct
  misc_feature 1..20: note = Description of Artificial Sequence: Synthetic oligonucleotide
  misc_feature 1..20: note = Target: SCN10A; (-) strand; PAM type: YTN; PAM sequence: TTA
  source 1..20: mol_type = other DNA
aaaacactctaaagaccaaa

SEQ ID NO: 47836 - DNA, 20 bp, synthetic construct
  misc_feature 1..20: note = Description of Artificial Sequence: Synthetic oligonucleotide
  misc_feature 1..20: note = Target: SCN10A; (-) strand; PAM type: YTN; PAM sequence: TTT
  source 1..20: mol_type = other DNA
aaaaacactctaaagaccaa

SEQ ID NO: 47837 - DNA, 20 bp, synthetic construct
  misc_feature 1..20: note = Description of Artificial Sequence: Synthetic oligonucleotide
  misc_feature 1..20: note = Target: SCN10A; (-) strand; PAM type: YTN; PAM sequence: TTT
  source 1..20: mol_type = other DNA
taaaaacactctaaagacca

SEQ ID NO: 47838 - DNA, 20 bp, synthetic construct
  misc_feature 1..20: note = Description of Artificial Sequence: Synthetic oligonucleotide
  misc_feature 1..20: note = Target: SCN10A; (-) strand; PAM type: YTN; PAM sequence: TTT
  source 1..20: mol_type = other DNA
ttaaaaacactctaaagacc

SEQ ID NO: 47839 - DNA, 20 bp, synthetic construct
  misc_feature 1..20: note = Description of Artificial Sequence: Synthetic oligonucleotide
  misc_feature 1..20: note = Target: SCN10A; (-) strand; PAM type: YTN; PAM sequence: CTA
  source 1..20: mol_type = other DNA
atccagtttttaaaaacact

SEQ ID NO: 47840 - DNA, 20 bp, synthetic construct
  misc_feature 1..20: note = Description of Artificial Sequence: Synthetic oligonucleotide
  misc_feature 1..20: note = Target: SCN10A; (-) strand; PAM type: YTN; PAM sequence: CTA
  source 1..20: mol_type = other DNA
ctaatccagtttttaaaaac

SEQ ID NO: 47841 - DNA, 20 bp, synthetic construct
  misc_feature 1..20: note = Description of Artificial Sequence: Synthetic oligonucleotide
  misc_feature 1..20: note = Target: SCN10A; (-) strand; PAM type: YTN; PAM sequence: TTG
  source 1..20: mol_type = other DNA
gctactaatccagtttttaa

SEQ ID NO: 47842 - DNA, 20 bp, synthetic construct
  misc_feature 1..20: note = Description of Artificial Sequence: Synthetic oligonucleotide
  misc_feature 1..20: note = Target: SCN10A; (-) strand; PAM type: YTN; PAM sequence: TTA
  source 1..20: mol_type = other DNA
atattggctactaatccagt

SEQ ID NO: 47843 - DNA, 20 bp, synthetic construct
  misc_feature 1..20: note = Description of Artificial Sequence: Synthetic oligonucleotide
  misc_feature 1..20: note = Target: SCN10A; (-) strand; PAM type: YTN; PAM sequence: TTT
  source 1..20: mol_type = other DNA
aatattggctactaatccag

SEQ ID NO: 47844 - DNA, 20 bp, synthetic construct
  misc_feature 1..20: note = Description of Artificial Sequence: Synthetic oligonucleotide
  misc_feature 1..20: note = Target: SCN10A; (-) strand; PAM type: YTN; PAM sequence: CTT
  source 1..20: mol_type = other DNA
taatattggctactaatcca

SEQ ID NO: 47845 - DNA, 20 bp, synthetic construct
  misc_feature 1..20: note = Description of Artificial Sequence: Synthetic oligonucleotide
  misc_feature 1..20: note = Target: SCN10A; (-) strand; PAM type: YTN; PAM sequence: TTG
  source 1..20: mol_type = other DNA
tgcaaatgtctttaatattg

SEQ ID NO: 47846 - DNA, 20 bp, synthetic construct
  misc_feature 1..20: note = Description of Artificial Sequence: Synthetic oligonucleotide
  misc_feature 1..20: note = Target: SCN10A; (-) strand; PAM type: YTN; PAM sequence: TTT
  source 1..20: mol_type = other DNA
gtgcaaatgtctttaatatt

SEQ ID NO: 47847 - DNA, 20 bp, synthetic construct
  misc_feature 1..20: note = Description of Artificial Sequence: Synthetic oligonucleotide
  misc_feature 1..20: note = Target: SCN10A; (-) strand; PAM type: YTN; PAM sequence: TTT
  source 1..20: mol_type = other DNA
tgtgcaaatgtctttaatat

SEQ ID NO: 47848 - DNA, 20 bp, synthetic construct
  misc_feature 1..20: note = Description of Artificial Sequence: Synthetic oligonucleotide
  misc_feature 1..20: note = Target: SCN10A; (-) strand; PAM type: YTN; PAM sequence: TTT
  source 1..20: mol_type = other DNA
ttgtgcaaatgtctttaata

SEQ ID NO: 47849 - DNA, 20 bp, synthetic construct
  misc_feature 1..20: note = Description of Artificial Sequence: Synthetic oligonucleotide
  misc_feature 1..20: note = Target: SCN10A; (-) strand; PAM type: YTN; PAM sequence: TTC
  source 1..20: mol_type = other DNA
caaaaaagtcagaaatccag

SEQ ID NO: 47850 - DNA, 20 bp, synthetic construct
  misc_feature 1..20: note = Description of Artificial Sequence: Synthetic oligonucleotide
  misc_feature 1..20: note = Target: SCN10A; (-) strand; PAM type: YTN; PAM sequence: TTT
  source 1..20: mol_type = other DNA
ccaaaaaagtcagaaatcca

SEQ ID NO: 47851 - DNA, 20 bp, synthetic construct
  misc_feature 1..20: note = Description of Artificial Sequence: Synthetic oligonucleotide
  misc_feature 1..20: note = Target: SCN10A; (-) strand; PAM type: YTN; PAM sequence: TTT
  source 1..20: mol_type = other DNA
tccaaaaaagtcagaaatcc

SEQ ID NO: 47852 - DNA, 20 bp, synthetic construct
  misc_feature 1..20: note = Description of Artificial Sequence: Synthetic oligonucleotide
  misc_feature 1..20: note = Target: SCN10A; (-) strand; PAM type: YTN; PAM sequence: CTA
  source 1..20: mol_type = other DNA
attttccaaaaaagtcagaa

SEQ ID NO: 47853 - DNA, 20 bp, synthetic construct
  misc_feature 1..20: note = Description of Artificial Sequence: Synthetic oligonucleotide
  misc_feature 1..20: note = Target: SCN10A; (-) strand; PAM type: YTN; PAM sequence: TTA
  source 1..20: mol_type = other DNA
ctaattttccaaaaaagtca

SEQ ID NO: 47854 - DNA, 20 bp, synthetic construct
  misc_feature 1..20: note = Description of Artificial Sequence: Synthetic oligonucleotide
  misc_feature 1..20: note = Target: SCN10A; (-) strand; PAM type: YTN; PAM sequence: TTG
  source 1..20: mol_type = other DNA
tcagagttactaattttcca

SEQ ID NO: 47855 - DNA, 20 bp, synthetic construct
  misc_feature 1..20: note = Description of Artificial Sequence: Synthetic oligonucleotide
  misc_feature 1..20: note = Target: SCN10A; (-) strand; PAM type: YTN; PAM sequence: TTA
  source 1..20: mol_type = other DNA
ttgtcagagttactaatttt

SEQ ID NO: 47856 - DNA, 20 bp, synthetic construct
  misc_feature 1..20: note = Description of Artificial Sequence: Synthetic oligonucleotide
  misc_feature 1..20: note = Target: SCN10A; (-) strand; PAM type: YTN; PAM sequence: CTG
  source 1..20: mol_type = other DNA
tccattattgtcagagttac

SEQ ID NO: 47857 - DNA, 20 bp, synthetic construct
  misc_feature 1..20: note = Description of Artificial Sequence: Synthetic oligonucleotide
  misc_feature 1..20: note = Target: SCN10A; (-) strand; PAM type: YTN; PAM sequence: CTA
  source 1..20: mol_type = other DNA
tggcctgtccattattgtca

SEQ ID NO: 47858 - DNA, 20 bp, synthetic construct
  misc_feature 1..20: note = Description of Artificial Sequence: Synthetic oligonucleotide
  misc_feature 1..20: note = Target: SCN10A; (-) strand; PAM type: YTN; PAM sequence: CTC
  source 1..20: mol_type = other DNA
aaaaaagaaaggagacacag

SEQ ID NO: 47859 - DNA, 20 bp, synthetic construct
  misc_feature 1..20: note = Description of Artificial Sequence: Synthetic oligonucleotide
  misc_feature 1..20: note = Target: SCN10A; (-) strand; PAM type: YTN; PAM sequence: CTG
  source 1..20: mol_type = other DNA
tctcaaaaaagaaaggagac

SEQ ID NO: 47860 - DNA, 20 bp, synthetic construct
  misc_feature 1..20: note = Description of Artificial Sequence: Synthetic oligonucleotide
  misc_feature 1..20: note = Target: SCN10A; (-) strand; PAM type: YTN; PAM sequence: CTG
  source 1..20: mol_type = other DNA
ggagacagagtaagaacctg

SEQ ID NO: 47861 - DNA, 20 bp, synthetic construct
  misc_feature 1..20: note = Description of Artificial Sequence: Synthetic oligonucleotide
  misc_feature 1..20: note = Target: SCN10A; (-) strand; PAM type: YTN; PAM sequence: CTC
  source 1..20: mol_type = other DNA
cagcctgggagacagagtaa

SEQ ID NO: 47862 - DNA, 20 bp, synthetic construct
  misc_feature 1..20: note = Description of Artificial Sequence: Synthetic oligonucleotide
  misc_feature 1..20: note = Target: SCN10A; (-) strand; PAM type: YTN; PAM sequence: CTG
  source 1..20: mol_type = other DNA
cactccagcctgggagacag

SEQ ID NO: 47863 - DNA, 20 bp, synthetic construct
  misc_feature 1..20: note = Description of Artificial Sequence: Synthetic oligonucleotide
  misc_feature 1..20: note = Target: SCN10A; (-) strand; PAM type: YTN; PAM sequence: CTG
  source 1..20: mol_type = other DNA
cagtgcaccatgatcgtgcc

SEQ ID NO: 47864 - DNA, 20 bp, synthetic construct
  misc_feature 1..20: note = Description of Artificial Sequence: Synthetic oligonucleotide
  misc_feature 1..20: note = Target: SCN10A; (-) strand; PAM type: YTN; PAM sequence: CTG
  source 1..20: mol_type = other DNA
agaccagggaggtggaggct

SEQ ID NO: 47865 - DNA, 20 bp, synthetic construct
  misc_feature 1..20: note = Description of Artificial Sequence: Synthetic oligonucleotide
  misc_feature 1..20: note = Target: SCN10A; (-) strand; PAM type: YTN; PAM sequence: CTG
  source 1..20: mol_type = other DNA
aggtgggaggatcacctgag

SEQ ID NO: 47866 - DNA, 20 bp, synthetic construct
  misc_feature 1..20: note = Description of Artificial Sequence: Synthetic oligonucleotide
  misc_feature 1..20: note = Target: SCN10A; (-) strand; PAM type: YTN; PAM sequence: CTC
  source 1..20: mol_type = other DNA
agaagactgaggtgggagga

SEQ ID NO: 47867 - DNA, 20 bp, synthetic construct
  misc_feature 1..20: note = Description of Artificial Sequence: Synthetic oligonucleotide
  misc_feature 1..20: note = Target: SCN10A; (-) strand; PAM type: YTN; PAM sequence: CTA
  source 1..20: mol_type = other DNA
ctcagaagactgaggtggga

SEQ ID NO: 47868 - DNA, 20 bp, synthetic construct
  misc_feature 1..20: note = Description of Artificial Sequence: Synthetic oligonucleotide
  misc_feature 1..20: note = Target: SCN10A; (-) strand; PAM type: YTN; PAM sequence: CTA
  source 1..20: mol_type = other DNA
gctactcagaagactgaggt

SEQ ID NO: 47869 - DNA, 20 bp, synthetic construct
  misc_feature 1..20: note = Description of Artificial Sequence: Synthetic oligonucleotide
  misc_feature 1..20: note = Target: SCN10A; (-) strand; PAM type: YTN; PAM sequence: TTA
  source 1..20: mol_type = other DNA
tcctagctactcagaagact

SEQ ID NO: 47870 - DNA, 20 bp, synthetic construct
  misc_feature 1..20: note = Description of Artificial Sequence: Synthetic oligonucleotide
  misc_feature 1..20: note = Target: SCN10A; (-) strand; PAM type: YTN; PAM sequence: CTG
  source 1..20: mol_type = other DNA
ttatcctagctactcagaag

SEQ ID NO: 47871 - DNA, 20 bp, synthetic construct
  misc_feature 1..20: note = Description of Artificial Sequence: Synthetic oligonucleotide
  misc_feature 1..20: note = Target: SCN10A; (-) strand; PAM type: YTN; PAM sequence: TTA
  source 1..20: mol_type = other DNA
gccaggcatggtggtgcaca

SEQ ID NO: 47872 - DNA, 20 bp, synthetic construct
  misc_feature 1..20: note = Description of Artificial Sequence: Synthetic oligonucleotide
  misc_feature 1..20: note = Target: SCN10A; (-) strand; PAM type: YTN; PAM sequence: CTA
  source 1..20: mol_type = other DNA
caaaaaatgaaaaaattagc

SEQ ID NO: 47873 - DNA, 20 bp, synthetic construct
  misc_feature 1..20: note = Description of Artificial Sequence: Synthetic oligonucleotide
  misc_feature 1..20: note = Target: SCN10A; (-) strand; PAM type: YTN; PAM sequence: CTC
  source 1..20: mol_type = other DNA
tacaaaaaatgaaaaaatta

SEQ ID NO: 47874 - DNA, 20 bp, synthetic construct
  misc_feature 1..20: note = Description of Artificial Sequence: Synthetic oligonucleotide
  misc_feature 1..20: note = Target: SCN10A; (-) strand; PAM type: YTN; PAM sequence: TTC
  source 1..20: mol_type = other DNA
aagggcaacatggtgaaacc

SEQ ID NO: 47875 - DNA, 20 bp, synthetic construct
  misc_feature 1..20: note = Description of Artificial Sequence: Synthetic oligonucleotide
  misc_feature 1..20: note = Target: SCN10A; (-) strand; PAM type: YTN; PAM sequence: TTG
  source 1..20: mol_type = other DNA
agcccaggagttcaagggca

SEQ ID NO: 47876 - DNA, 20 bp, synthetic construct
  misc_feature 1..20: note = Description of Artificial Sequence: Synthetic oligonucleotide
  misc_feature 1..20: note = Target: SCN10A; (-) strand; PAM type: YTN; PAM sequence: CTT
  source 1..20: mol_type = other DNA
gagcccaggagttcaagggc

SEQ ID NO: 47877 - DNA, 20 bp, synthetic construct
  misc_feature 1..20: note = Description of Artificial Sequence: Synthetic oligonucleotide
  misc_feature 1..20: note = Target: SCN10A; (-) strand; PAM type: YTN; PAM sequence: TTG
  source 1..20: mol_type = other DNA
ggaggccgaggcaggcagat

SEQ ID NO: 47878 - DNA, 20 bp, synthetic construct
  misc_feature 1..20: note = Description of Artificial Sequence: Synthetic oligonucleotide
  misc_feature 1..20: note = Target: SCN10A; (-) strand; PAM type: YTN; PAM sequence: TTT
  source 1..20: mol_type = other DNA
gggaggccgaggcaggcaga

SEQ ID NO: 47879 - DNA, 20 bp, synthetic construct
  misc_feature 1..20: note = Description of Artificial Sequence: Synthetic oligonucleotide
  misc_feature 1..20: note = Target: SCN10A; (-) strand; PAM type: YTN; PAM sequence: CTT
  source 1..20: mol_type = other DNA
tgggaggccgaggcaggcag

SEQ ID NO: 47880 - DNA, 20 bp, synthetic construct
  misc_feature 1..20: note = Description of Artificial Sequence: Synthetic oligonucleotide
  misc_feature 1..20: note = Target: SCN10A; (-) strand; PAM type: YTN; PAM sequence: CTA
  source 1..20: mol_type = other DNA
gtactttgggaggccgaggc

SEQ ID NO: 47881 - DNA, 20 bp, synthetic construct
  misc_feature 1..20: note = Description of Artificial Sequence: Synthetic oligonucleotide
  misc_feature 1..20: note = Target: SCN10A; (-) strand; PAM type: YTN; PAM sequence: CTG
  source 1..20: mol_type = other DNA
taatcctagtactttgggag

SEQ ID NO: 47882 - DNA, 20 bp, synthetic construct
  misc_feature 1..20: note = Description of Artificial Sequence: Synthetic oligonucleotide
  misc_feature 1..20: note = Target: SCN10A; (-) strand; PAM type: YTN; PAM sequence: CTC
  source 1..20: mol_type = other DNA
acacctgtaatcctagtact

SEQ ID NO: 47883 - DNA, 20 bp, synthetic construct
  misc_feature 1..20: note = Description of Artificial Sequence: Synthetic oligonucleotide
  misc_feature 1..20: note = Target: SCN10A; (-) strand; PAM type: YTN; PAM sequence: CTC
  source 1..20: mol_type = other DNA
aggccaggtgcagtggctca

SEQ ID NO: 47884 - DNA, 20 bp, synthetic construct
  misc_feature 1..20: note = Description of Artificial Sequence: Synthetic oligonucleotide
  misc_feature 1..20: note = Target: SCN10A; (-) strand; PAM type: YTN; PAM sequence: TTA
  source 1..20: mol_type = other DNA
catagaaatcaatgtgacca

SEQ ID NO: 47885 - DNA, 20 bp, synthetic construct
  misc_feature 1..20: note = Description of Artificial Sequence: Synthetic oligonucleotide
  misc_feature 1..20: note = Target: SCN10A; (-) strand; PAM type: YTN; PAM sequence: TTT
  source 1..20: mol_type = other DNA
acatagaaatcaatgtgacc

SEQ ID NO: 47886 - DNA, 20 bp, synthetic construct
  misc_feature 1..20: note = Description of Artificial Sequence: Synthetic oligonucleotide
  misc_feature 1..20: note = Target: SCN10A; (-) strand; PAM type: YTN; PAM sequence: CTG
  source 1..20: mol_type = other DNA
ggagggatgtttacatagaa

SEQ ID NO: 47887 - DNA, 20 bp, synthetic construct
  misc_feature 1..20: note = Description of Artificial Sequence: Synthetic oligonucleotide
  misc_feature 1..20: note = Target: SCN10A; (-) strand; PAM type: YTN; PAM sequence: CTC
  source 1..20: mol_type = other DNA
ctgggagggatgtttacata

SEQ ID NO: 47888 - DNA, 20 bp, synthetic construct
  misc_feature 1..20: note = Description of Artificial Sequence: Synthetic oligonucleotide
  misc_feature 1..20: note = Target: SCN10A; (-) strand; PAM type: YTN; PAM sequence: CTA
  source 1..20: mol_type = other DNA
ggcagacccaaagcagtgca

SEQ ID NO: 47889 - DNA, 20 bp, synthetic construct
  misc_feature 1..20: note = Description of Artificial Sequence: Synthetic oligonucleotide
  misc_feature 1..20: note = Target: SCN10A; (-) strand; PAM type: YTN; PAM sequence: TTC
  source 1..20: mol_type = other DNA
acctaggcagacccaaagca

SEQ ID NO: 47890 - DNA, 20 bp, synthetic construct
  misc_feature 1..20: note = Description of Artificial Sequence: Synthetic oligonucleotide
  misc_feature 1..20: note = Target: SCN10A; (-) strand; PAM type: YTN; PAM sequence: TTT
  source 1..20: mol_type = other DNA
cacctaggcagacccaaagc

SEQ ID NO: 47891 - DNA, 20 bp, synthetic construct
  misc_feature 1..20: note = Description of Artificial Sequence: Synthetic oligonucleotide
  misc_feature 1..20: note = Target: SCN10A; (-) strand; PAM type: YTN; PAM sequence: CTC
  source 1..20: mol_type = other DNA
catttcacctaggcagaccc

SEQ ID NO: 47892 - DNA, 20 bp, synthetic construct
  misc_feature 1..20: note = Description of Artificial Sequence: Synthetic oligonucleotide
  misc_feature 1..20: note = Target: SCN10A; (-) strand; PAM type: YTN; PAM sequence: CTC
  source 1..20: mol_type = other DNA
aggtagacaggcaaagatga

SEQ ID NO: 47893 - DNA, 20 bp, synthetic construct
  misc_feature 1..20: note = Description of Artificial Sequence: Synthetic oligonucleotide
  misc_feature 1..20: note = Target: SCN10A; (-) strand; PAM type: YTN; PAM sequence: TTG
  source 1..20: mol_type = other DNA
cctcaggtagacaggcaaag

SEQ ID NO: 47894 - DNA, 20 bp, synthetic construct
  misc_feature 1..20: note = Description of Artificial Sequence: Synthetic oligonucleotide
  misc_feature 1..20: note = Target: SCN10A; (-) strand; PAM type: YTN; PAM sequence: TTT
  source 1..20: mol_type = other DNA
gcctcaggtagacaggcaaa

SEQ ID NO: 47895 - DNA, 20 bp, synthetic construct
  misc_feature 1..20: note = Description of Artificial Sequence: Synthetic oligonucleotide
  misc_feature 1..20: note = Target: SCN10A; (-) strand; PAM type: YTN; PAM sequence: CTG
  source 1..20: mol_type = other DNA
gatatttgcctcaggtagac

SEQ ID NO: 47896 - DNA, 20 bp, synthetic construct
  misc_feature 1..20: note = Description of Artificial Sequence: Synthetic oligonucleotide
  misc_feature 1..20: note = Target: SCN10A; (-) strand; PAM type: YTN; PAM sequence: CTC
  source 1..20: mol_type = other DNA
aaatgcccatgtgcagtgac

SEQ ID NO: 47897 - DNA, 20 bp, synthetic construct
  misc_feature 1..20: note = Description of Artificial Sequence: Synthetic oligonucleotide
  misc_feature 1..20: note = Target: SCN10A; (-) strand; PAM type: YTN; PAM sequence: TTA
  source 1..20: mol_type = other DNA
ggggtggcaaactcaaatgc

SEQ ID NO: 47898 - DNA, 20 bp, synthetic construct
  misc_feature 1..20: note = Description of Artificial Sequence: Synthetic oligonucleotide
  misc_feature 1..20: note = Target: SCN10A; (-) strand; PAM type: YTN; PAM sequence: CTG
  source 1..20: mol_type = other DNA
gattaggggtggcaaactca

SEQ ID NO: 47899 - DNA, 20 bp, synthetic construct
  misc_feature 1..20: note = Description of Artificial Sequence: Synthetic oligonucleotide
  misc_feature 1..20: note = Target: SCN10A; (-) strand; PAM type: YTN; PAM sequence: TTG
  source 1..20: mol_type = other DNA
gcgtacctggattaggggtg

SEQ ID NO: 47900 - DNA, 20 bp, synthetic construct
  misc_feature 1..20: note = Description of Artificial Sequence: Synthetic oligonucleotide
  misc_feature 1..20: note = Target: SCN10A; (-) strand; PAM type: YTN; PAM sequence: CTT
  source 1..20: mol_type = other DNA
ggcgtacctggattaggggt

SEQ ID NO: 47901 - DNA, 20 bp, synthetic construct
  misc_feature 1..20: note = Description of Artificial Sequence: Synthetic oligonucleotide
  misc_feature 1..20: note = Target: SCN10A; (-) strand; PAM type: YTN; PAM sequence: CTG
  source 1..20: mol_type = other DNA
aacttggcgtacctggatta

SEQ ID NO: 47902 - DNA, 20 bp, synthetic construct
  misc_feature 1..20: note = Description of Artificial Sequence: Synthetic oligonucleotide
  misc_feature 1..20: note = Target: SCN10A; (-) strand; PAM type: YTN; PAM sequence: CTG
  source 1..20: mol_type = other DNA
agcccctgaacttggcgtac

SEQ ID NO: 47903 - DNA, 20 bp, synthetic construct
  misc_feature 1..20: note = Description of Artificial Sequence: Synthetic oligonucleotide
  misc_feature 1..20: note = Target: SCN10A; (-) strand; PAM type: YTN; PAM sequence: CTA
  source 1..20: mol_type = other DNA
tcacaggggccagtgagaca

SEQ ID NO: 47904 - DNA, 20 bp, synthetic construct
  misc_feature 1..20: note = Description of Artificial Sequence: Synthetic oligonucleotide
  misc_feature 1..20: note = Target: SCN10A; (-) strand; PAM type: YTN; PAM sequence: TTG
  source 1..20: mol_type = other DNA
ggaccctatcacaggggcca

SEQ ID NO: 47905 - DNA, 20 bp, synthetic construct
  misc_feature 1..20: note = Description of Artificial Sequence: Synthetic oligonucleotide
  misc_feature 1..20: note = Target: SCN10A; (-) strand; PAM type: YTN; PAM sequence: CTT
  source 1..20: mol_type = other DNA
gggaccctatcacaggggcc

SEQ ID NO: 47906 - DNA, 20 bp, synthetic construct
  misc_feature 1..20: note = Description of Artificial Sequence: Synthetic oligonucleotide
  misc_feature 1..20: note = Target: SCN10A; (-) strand; PAM type: YTN; PAM sequence: CTG
  source 1..20: mol_type = other DNA
cttgggaccctatcacaggg

SEQ ID NO: 47907 - DNA, 20 bp, synthetic construct
  misc_feature 1..20: note = Description of Artificial Sequence: Synthetic oligonucleotide
  misc_feature 1..20: note = Target: SCN10A; (-) strand; PAM type: YTN; PAM sequence: CTA
  source 1..20: mol_type = other DNA
ggacagatctgcttgggacc

SEQ ID NO: 47908 - DNA, 20 bp, synthetic construct
  misc_feature 1..20: note = Description of Artificial Sequence: Synthetic oligonucleotide
  misc_feature 1..20: note = Target: SCN10A; (-) strand; PAM type: YTN; PAM sequence: CTC
  source 1..20: mol_type = other DNA
taggacagatctgcttggga

SEQ ID NO: 47909 - DNA, 20 bp, synthetic construct
  misc_feature 1..20: note = Description of Artificial Sequence: Synthetic oligonucleotide
  misc_feature 1..20: note = Target: SCN10A; (-) strand; PAM type: YTN; PAM sequence: TTC
  source 1..20: mol_type = other DNA
aggaggcaacgagactctag

SEQ ID NO: 47910 - DNA, 20 bp, synthetic construct
  misc_feature 1..20: note = Description of Artificial Sequence: Synthetic oligonucleotide
  misc_feature 1..20: note = Target: SCN10A; (-) strand; PAM type: YTN; PAM sequence: TTG
  source 1..20: mol_type = other DNA
aagggggtgcatggttcagg

SEQ ID NO: 47911 - DNA, 20 bp, synthetic construct
  misc_feature 1..20: note = Description of Artificial Sequence: Synthetic oligonucleotide
  misc_feature 1..20: note = Target: SCN10A; (-) strand; PAM type: YTN; PAM sequence: TTG
  source 1..20: mol_type = other DNA
gcatccagaggttgaagggg

SEQ ID NO: 47912 - DNA, 20 bp, synthetic construct
  misc_feature 1..20: note = Description of Artificial Sequence: Synthetic oligonucleotide
  misc_feature 1..20: note = Target: SCN10A; (-) strand; PAM type: YTN; PAM sequence: CTG
  source 1..20: mol_type = other DNA
acaagtgttggcatccagag

SEQ ID NO: 47913 - DNA, 20 bp, synthetic construct
  misc_feature 1..20: note = Description of Artificial Sequence: Synthetic oligonucleotide
  misc_feature 1..20: note = Target: SCN10A; (-) strand; PAM type: YTN; PAM sequence: TTC
  source 1..20: mol_type = other DNA
ccaaggtcctgacaagtgtt

SEQ ID NO: 47914 - DNA, 20 bp, synthetic construct
  misc_feature 1..20: note = Description of Artificial Sequence: Synthetic oligonucleotide
  misc_feature 1..20: note = Target: SCN10A; (-) strand; PAM type: YTN; PAM sequence: CTT
  source 1..20: mol_type = other DNA
cccaaggtcctgacaagtgt

SEQ ID NO: 47915 - DNA, 20 bp, synthetic construct
  misc_feature 1..20: note = Description of Artificial Sequence: Synthetic oligonucleotide
  misc_feature 1..20: note = Target: SCN10A; (-) strand; PAM type: YTN; PAM sequence: TTG
  source 1..20: mol_type = other DNA
aagagaggtgacaaaacaaa

SEQ ID NO: 47916 - DNA, 20 bp, synthetic construct
  misc_feature 1..20: note = Description of Artificial Sequence: Synthetic oligonucleotide
  misc_feature 1..20: note = Target: SCN10A; (-) strand; PAM type: YTN; PAM sequence: CTT
  source 1..20: mol_type = other DNA
gaagagaggtgacaaaacaa

SEQ ID NO: 47917 - DNA, 20 bp, synthetic construct
  misc_feature 1..20: note = Description of Artificial Sequence: Synthetic oligonucleotide
  misc_feature 1..20: note = Target: SCN10A; (-) strand; PAM type: YTN; PAM sequence: CTA
  source 1..20: mol_type = other DNA
gacttgaagagaggtgacaa

SEQ ID NO: 47918 - DNA, 20 bp, synthetic construct
  misc_feature 1..20: note = Description of Artificial Sequence: Synthetic oligonucleotide
  misc_feature 1..20: note = Target: SCN10A; (-) strand; PAM type: YTN; PAM sequence: CTG
  source 1..20: mol_type = other DNA
catctagacttgaagagagg

SEQ ID NO: 47919 - DNA, 20 bp, synthetic construct
  misc_feature 1..20: note = Description of Artificial Sequence: Synthetic oligonucleotide
  misc_feature 1..20: note = Target: SCN10A; (-) strand; PAM type: YTN; PAM sequence: CTG
  source 1..20: mol_type = other DNA
ggagccctgcatctagactt

SEQ ID NO: 47920 - DNA, 20 bp, synthetic construct
  misc_feature 1..20: note = Description of Artificial Sequence: Synthetic oligonucleotide
  misc_feature 1..20: note = Target: SCN10A; (-) strand; PAM type: YTN; PAM sequence: TTA
  source 1..20: mol_type = other DNA
actgggagccctgcatctag

SEQ ID NO: 47921 - DNA, 20 bp, synthetic construct
  misc_feature 1..20: note = Description of Artificial Sequence: Synthetic oligonucleotide
  misc_feature 1..20: note = Target: SCN10A; (-) strand; PAM type: YTN; PAM sequence: CTC
  source 1..20: mol_type = other DNA
agtattaactgggagccctg

SEQ ID NO: 47922 - DNA, 20 bp, synthetic construct
  misc_feature 1..20: note = Description of Artificial Sequence: Synthetic oligonucleotide
  misc_feature 1..20: note = Target: SCN10A; (-) strand; PAM type: YTN; PAM sequence: CTC
  source 1..20: mol_type = other DNA
tcagtattaactgggagccc

SEQ ID NO: 47923 - DNA, 20 bp, synthetic construct
  misc_feature 1..20: note = Description of Artificial Sequence: Synthetic oligonucleotide
  misc_feature 1..20: note = Target: SCN10A; (-) strand; PAM type: YTN; PAM sequence: CTC
  source 1..20: mol_type = other DNA
aggaatctctcagtattaac

SEQ ID NO: 47924 - DNA, 20 bp, synthetic construct
  misc_feature 1..20: note = Description of Artificial Sequence: Synthetic oligonucleotide
  misc_feature 1..20: note = Target: SCN10A; (-) strand; PAM type: YTN; PAM sequence: CTC
  source 1..20: mol_type = other DNA
tcaggaatctctcagtatta

SEQ ID NO: 47925 - DNA, 20 bp, synthetic construct
  misc_feature 1..20: note = Description of Artificial Sequence: Synthetic oligonucleotide
  misc_feature 1..20: note = Target: SCN10A; (-) strand; PAM type: YTN; PAM sequence: CTG
  source 1..20: mol_type = other DNA
ctctcaggaatctctcagta

SEQ ID NO: 47926 - DNA, 20 bp, synthetic construct
  misc_feature 1..20: note = Description of Artificial Sequence: Synthetic oligonucleotide
  misc_feature 1..20: note = Target: SCN10A; (-) strand; PAM type: YTN; PAM sequence: TTA
  source 1..20: mol_type = other DNA
gcgcaggccgcctgctctca

SEQ ID NO: 47927 - DNA, 20 bp, synthetic construct
  misc_feature 1..20: note = Description of Artificial Sequence: Synthetic oligonucleotide
  misc_feature 1..20: note = Target: SCN10A; (-) strand; PAM type: YTN; PAM sequence: TTG
  source 1..20: mol_type = other DNA
ttagcgcaggccgcctgctc

SEQ ID NO: 47928 - DNA, 20 bp, synthetic construct
  misc_feature 1..20: note = Description of Artificial Sequence: Synthetic oligonucleotide
  misc_feature 1..20: note = Target: SCN10A; (-) strand; PAM type: YTN; PAM sequence: CTT
  source 1..20: mol_type = other DNA
gttagcgcaggccgcctgct

SEQ ID NO: 47929 - DNA, 20 bp, synthetic construct
  misc_feature 1..20: note = Description of Artificial Sequence: Synthetic oligonucleotide
  misc_feature 1..20: note = Target: SCN10A; (-) strand; PAM type: YTN; PAM sequence: CTG
  source 1..20: mol_type = other DNA
aagaaatgtcacggcttgtt

SEQ ID NO: 47930 - DNA, 20 bp, synthetic construct
  misc_feature 1..20: note = Description of Artificial Sequence: Synthetic oligonucleotide
  misc_feature 1..20: note = Target: SCN10A; (-) strand; PAM type: YTN; PAM sequence: TTG
  source 1..20: mol_type = other DNA
ggaataggaaagaggcctga

SEQ ID NO: 47931 - DNA, 20 bp, synthetic construct
  misc_feature 1..20: note = Description of Artificial Sequence: Synthetic oligonucleotide
  misc_feature 1..20: note = Target: SCN10A; (-) strand; PAM type: YTN; PAM sequence: CTT
  source 1..20: mol_type = other DNA
gggaataggaaagaggcctg

SEQ ID NO: 47932 - DNA, 20 bp, synthetic construct
  misc_feature 1..20: note = Description of Artificial Sequence: Synthetic oligonucleotide
  misc_feature 1..20: note = Target: SCN10A; (-) strand; PAM type: YTN; PAM sequence: CTC
  source 1..20: mol_type = other DNA
ttgggaataggaaagaggcc

SEQ ID NO: 47933 - DNA, 20 bp, synthetic construct
  misc_feature 1..20: note = Description of Artificial Sequence: Synthetic oligonucleotide
  misc_feature 1..20: note = Target: SCN10A; (-) strand; PAM type: YTN; PAM sequence: CTG
  source 1..20: mol_type = other DNA
actcttgggaataggaaaga

SEQ ID NO: 47934 - DNA, 20 bp, synthetic construct
  misc_feature 1..20: note = Description of Artificial Sequence: Synthetic oligonucleotide
  misc_feature 1..20: note = Target: SCN10A; (-) strand; PAM type: YTN; PAM sequence: CTC
  source 1..20: mol_type = other DNA
actgactcttgggaatagga

SEQ ID NO: 47935 - DNA, 20 bp, synthetic construct
  misc_feature 1..20: note = Description of Artificial Sequence: Synthetic oligonucleotide
  misc_feature 1..20: note = Target: SCN10A; (-) strand; PAM type: YTN; PAM sequence: TTG
  source 1..20: mol_type = other DNA
gcatctcactgactcttggg

SEQ ID NO: 47936 - DNA, 20 bp, synthetic construct
  misc_feature 1..20: note = Description of Artificial Sequence: Synthetic oligonucleotide
  misc_feature 1..20: note = Target: SCN10A; (-) strand; PAM type: YTN; PAM sequence: CTT
  source 1..20: mol_type = other DNA
ggcatctcactgactcttgg

SEQ ID NO: 47937 - DNA, 20 bp, synthetic construct
  misc_feature 1..20: note = Description of Artificial Sequence: Synthetic oligonucleotide
  misc_feature 1..20: note = Target: SCN10A; (-) strand; PAM type: YTN; PAM sequence: CTG
  source 1..20: mol_type = other DNA
gaggaagcttggcatctcac

SEQ ID NO: 47938 - DNA, 20 bp, synthetic construct
  misc_feature 1..20: note = Description of Artificial Sequence: Synthetic oligonucleotide
  misc_feature 1..20: note = Target: SCN10A; (-) strand; PAM type: YTN; PAM sequence: CTC
  source 1..20: mol_type = other DNA
caggccatctggaggaagct

SEQ ID NO: 47939 - DNA, 20 bp, synthetic construct
  misc_feature 1..20: note = Description of Artificial Sequence: Synthetic oligonucleotide
  misc_feature 1..20: note = Target: SCN10A; (-) strand; PAM type: YTN; PAM sequence: CTA
  source 1..20: mol_type = other DNA
ggtctccaggccatctggag

SEQ ID NO: 47940 - DNA, 20 bp, synthetic construct
  misc_feature 1..20: note = Description of Artificial Sequence: Synthetic oligonucleotide
  misc_feature 1..20: note = Target: SCN10A; (-) strand; PAM type: YTN; PAM sequence: TTC
  source 1..20: mol_type = other DNA
ccaggagtgtcgggtcacta

SEQ ID NO: 47941 - DNA, 20 bp, synthetic construct
  misc_feature 1..20: note = Description of Artificial Sequence: Synthetic oligonucleotide
  misc_feature 1..20: note = Target: SCN10A; (-) strand; PAM type: YTN; PAM sequence: CTG
  source 1..20: mol_type = other DNA
tcagattcccaggagtgtcg

SEQ ID NO: 47942 - DNA, 20 bp, synthetic construct
  misc_feature 1..20: note = Description of Artificial Sequence: Synthetic oligonucleotide
  misc_feature 1..20: note = Target: SCN10A; (-) strand; PAM type: YTN; PAM sequence: TTG
  source 1..20: mol_type = other DNA
tcagccaaacctgtcagatt

SEQ ID NO: 47943 - DNA, 20 bp, synthetic construct
  misc_feature 1..20: note = Description of Artificial Sequence: Synthetic oligonucleotide
  misc_feature 1..20: note = Target: SCN10A; (-) strand; PAM type: YTN; PAM sequence: TTT
  source 1..20: mol_type = other DNA
gtcagccaaacctgtcagat

SEQ ID NO: 47944 - DNA, 20 bp, synthetic construct
  misc_feature 1..20: note = Description of Artificial Sequence: Synthetic oligonucleotide
  misc_feature 1..20: note = Target: SCN10A; (-) strand; PAM type: YTN; PAM sequence: TTA
  source 1..20: mol_type = other DNA
tcagagccacaggtttgtca

SEQ ID NO: 47945 - DNA, 20 bp, synthetic construct
  misc_feature 1..20: note = Description of Artificial Sequence: Synthetic oligonucleotide
  misc_feature 1..20: note = Target: SCN10A; (-) strand; PAM type: YTN; PAM sequence: TTT
  source 1..20: mol_type = other DNA
atcagagccacaggtttgtc

SEQ ID NO: 47946 - DNA, 20 bp, synthetic construct
  misc_feature 1..20: note = Description of Artificial Sequence: Synthetic oligonucleotide
  misc_feature 1..20: note = Target: SCN10A; (-) strand; PAM type: YTN; PAM sequence: TTT
  source 1..20: mol_type = other DNA
tatcagagccacaggtttgt

SEQ ID NO: 47947 - DNA, 20 bp, synthetic construct
  misc_feature 1..20: note = Description of Artificial Sequence: Synthetic oligonucleotide
  misc_feature 1..20: note = Target: SCN10A; (-) strand; PAM type: YTN; PAM sequence: CTT
  source 1..20: mol_type = other DNA
ttatcagagccacaggtttg

SEQ ID NO: 47948 - DNA, 20 bp, synthetic construct
  misc_feature 1..20: note = Description of Artificial Sequence: Synthetic oligonucleotide
  misc_feature 1..20: note = Target: SCN10A; (-) strand; PAM type: YTN; PAM sequence: CTA
  source 1..20: mol_type = other DNA
caggagaagtgccacaggcc

SEQ ID NO: 47949 - DNA, 20 bp, synthetic construct
  misc_feature 1..20: note = Description of Artificial Sequence: Synthetic oligonucleotide
  misc_feature 1..20: note = Target: SCN10A; (-) strand; PAM type: YTN; PAM sequence: CTC
  source 1..20: mol_type = other DNA
tacaggagaagtgccacagg

SEQ ID NO: 47950 - DNA, 20 bp, synthetic construct
  misc_feature 1..20: note = Description of Artificial Sequence: Synthetic oligonucleotide
  misc_feature 1..20: note = Target: SCN10A; (-) strand; PAM type: YTN; PAM sequence: CTC
  source 1..20: mol_type = other DNA
caggacgccctctacaggag

SEQ ID NO: 47951 - DNA, 20 bp, synthetic construct
  misc_feature 1..20: note = Description of Artificial Sequence: Synthetic oligonucleotide
  misc_feature 1..20: note = Target: SCN10A; (-) strand; PAM type: YTN; PAM sequence: CTC
  source 1..20: mol_type = other DNA
agctccaggacgccctctac

SEQ ID NO: 47952 - DNA, 20 bp, synthetic construct
  misc_feature 1..20: note = Description of Artificial Sequence: Synthetic oligonucleotide
  misc_feature 1..20: note = Target: SCN10A; (-) strand; PAM type: YTN; PAM sequence: CTA
  source 1..20: mol_type = other DNA
aactcagctccaggacgccc

SEQ ID NO: 47953 - DNA, 20 bp, synthetic construct
  misc_feature 1..20: note = Description of Artificial Sequence: Synthetic oligonucleotide
  misc_feature 1..20: note = Target: SCN10A; (-) strand; PAM type: YTN; PAM sequence: CTC
  source 1..20: mol_type = other DNA
taaactcagctccaggacgc

SEQ ID NO: 47954 - DNA, 20 bp, synthetic construct
  misc_feature 1..20: note = Description of Artificial Sequence: Synthetic oligonucleotide
  misc_feature 1..20: note = Target: SCN10A; (-) strand; PAM type: YTN; PAM sequence: TTC
  source 1..20: mol_type = other DNA
tctaaactcagctccaggac

SEQ ID NO: 47955 - DNA, 20 bp, synthetic construct
  misc_feature 1..20: note = Description of Artificial Sequence: Synthetic oligonucleotide
  misc_feature 1..20: note = Target: SCN10A; (-) strand; PAM type: YTN; PAM sequence: CTT
  source 1..20: mol_type = other DNA
ctctaaactcagctccagga

SEQ ID NO: 47956 - DNA, 20 bp, synthetic construct
  misc_feature 1..20: note = Description of Artificial Sequence: Synthetic oligonucleotide
  misc_feature 1..20: note = Target: SCN10A; (-) strand; PAM type: YTN; PAM sequence: CTC
  source 1..20: mol_type = other DNA
ttctctaaactcagctccag

SEQ ID NO: 47957 - DNA, 20 bp, synthetic construct
  misc_feature 1..20: note = Description of Artificial Sequence: Synthetic oligonucleotide
  misc_feature 1..20: note = Target: SCN10A; (-) strand; PAM type: YTN; PAM sequence: CTC
  source 1..20: mol_type = other DNA
acatgcaatgatggctcttc

SEQ ID NO: 47958 - DNA, 20 bp, synthetic construct
  misc_feature 1..20: note = Description of Artificial Sequence: Synthetic oligonucleotide
  misc_feature 1..20: note = Target: SCN10A; (-) strand; PAM type: YTN; PAM sequence: CTC
  source 1..20: mol_type = other DNA
actcacatgcaatgatggct

SEQ ID NO: 47959 - DNA, 20 bp, synthetic construct
  misc_feature 1..20: note = Description of Artificial Sequence: Synthetic oligonucleotide
  misc_feature 1..20: note = Target: SCN10A; (-) strand; PAM type: YTN; PAM sequence: TTA
  source 1..20: mol_type = other DNA
gtctcactcacatgcaatga

SEQ ID NO: 47960 - DNA, 20 bp, synthetic construct
  misc_feature 1..20: note = Description of Artificial Sequence: Synthetic oligonucleotide
  misc_feature 1..20: note = Target: SCN10A; (-) strand; PAM type: YTN; PAM sequence: CTA
  source 1..20: mol_type = other DNA
ttagtctcactcacatgcaa

SEQ ID NO: 47961 - DNA, 20 bp, synthetic construct
  misc_feature 1..20: note = Description of Artificial Sequence: Synthetic oligonucleotide
  misc_feature 1..20: note = Target: SCN10A; (-) strand; PAM type: YTN; PAM sequence: CTG
  source 1..20: mol_type = other DNA
cctattagtctcactcacat

SEQ ID NO: 47962 - DNA, 20 bp, synthetic construct
  misc_feature 1..20: note = Description of Artificial Sequence: Synthetic oligonucleotide
  misc_feature 1..20: note = Target: SCN10A; (-) strand; PAM type: YTN; PAM sequence: TTC
  source 1..20: mol_type = other DNA
aacctgcctattagtctcac

SEQ ID NO: 47963 - DNA, 20 bp, synthetic construct
  misc_feature 1..20: note = Description of Artificial Sequence: Synthetic oligonucleotide
  misc_feature 1..20: note = Target: SCN10A; (-) strand; PAM type: YTN; PAM sequence: CTT
  source 1..20: mol_type = other DNA
caacctgcctattagtctca

SEQ ID NO: 47964 - DNA, 20 bp, synthetic construct
  misc_feature 1..20: note = Description of Artificial Sequence: Synthetic oligonucleotide
  misc_feature 1..20: note = Target: SCN10A; (-) strand; PAM type: YTN; PAM sequence: CTC
  source 1..20: mol_type = other DNA
aagcaccttcaacctgccta

SEQ ID NO: 47965 - DNA, 20 bp, synthetic construct
  misc_feature 1..20: note = Description of Artificial Sequence: Synthetic oligonucleotide
  misc_feature 1..20: note = Target: SCN10A; (-) strand; PAM type: YTN; PAM sequence: TTG
  source 1..20: mol_type = other DNA
tgcccgaaatcacagcccca

SEQ ID NO: 47966 - DNA, 20 bp, synthetic construct
  misc_feature 1..20: note = Description of Artificial Sequence: Synthetic oligonucleotide
  misc_feature 1..20: note = Target: SCN10A; (-) strand; PAM type: YTN; PAM sequence: CTT
  source 1..20: mol_type = other DNA
gtgcccgaaatcacagcccc

SEQ ID NO: 47967 - DNA, 20 bp, synthetic construct
  misc_feature 1..20: note = Description of Artificial Sequence: Synthetic oligonucleotide
  misc_feature 1..20: note = Target: SCN10A; (-) strand; PAM type: YTN; PAM sequence: TTC
  source 1..20: mol_type = other DNA
ccttgtgcccgaaatcacag

SEQ ID NO: 47968 - DNA, 20 bp, synthetic construct
  misc_feature 1..20: note = Description of Artificial Sequence: Synthetic oligonucleotide
  misc_feature 1..20: note = Target: SCN10A; (-) strand; PAM type: YTN; PAM sequence: CTG
  source 1..20: mol_type = other DNA
attcccttgtgcccgaaatc

SEQ ID NO: 47969 - DNA, 20 bp, synthetic construct
  misc_feature 1..20: note = Description of Artificial Sequence: Synthetic oligonucleotide
  misc_feature 1..20: note = Target: SCN10A; (-) strand; PAM type: YTN; PAM sequence: CTC
  source 1..20: mol_type = other DNA
tgattcccttgtgcccgaaa

SEQ ID NO: 47970 - DNA, 20 bp, synthetic construct
  misc_feature 1..20: note = Description of Artificial Sequence: Synthetic oligonucleotide
  misc_feature 1..20: note = Target: SCN10A; (-) strand; PAM type: YTN; PAM sequence: TTC
  source 1..20: mol_type = other DNA
tctgattcccttgtgcccga

SEQ ID NO: 47971 - DNA, 20 bp, synthetic construct
  misc_feature 1..20: note = Description of Artificial Sequence: Synthetic oligonucleotide
  misc_feature 1..20: note = Target: SCN10A; (-) strand; PAM type: YTN; PAM sequence: CTC
  source 1..20: mol_type = other DNA
aaggaagtcattctctgatt

SEQ ID NO: 47972 - DNA, 20 bp, synthetic construct
  misc_feature 1..20: note = Description of Artificial Sequence: Synthetic oligonucleotide
  misc_feature 1..20: note = Target: SCN10A; (-) strand; PAM type: YTN; PAM sequence: TTC
  source 1..20: mol_type = other DNA
cagcctcaaggaagtcattc

SEQ ID NO: 47973 - DNA, 20 bp, synthetic construct
  misc_feature 1..20: note = Description of Artificial Sequence: Synthetic oligonucleotide
  misc_feature 1..20: note = Target: SCN10A; (-) strand; PAM type: YTN; PAM sequence: CTT
  source 1..20: mol_type = other DNA
ccagcctcaaggaagtcatt

SEQ ID NO: 47974 - DNA, 20 bp, synthetic construct
  misc_feature 1..20: note = Description of Artificial Sequence: Synthetic oligonucleotide
  misc_feature 1..20: note = Target: SCN10A; (-) strand; PAM type: YTN; PAM sequence: CTC
  source 1..20: mol_type = other DNA
cttccagcctcaaggaagtc

SEQ ID NO: 47975 - DNA, 20 bp, synthetic construct
  misc_feature 1..20: note = Description of Artificial Sequence: Synthetic oligonucleotide
  misc_feature 1..20: note = Target: SCN10A; (-) strand; PAM type: YTN; PAM sequence: CTC
  source 1..20: mol_type = other DNA
cagagccccagctccttcca

SEQ ID NO: 47976 - DNA, 20 bp, synthetic construct
  misc_feature 1..20: note = Description of Artificial Sequence: Synthetic oligonucleotide
  misc_feature 1..20: note = Target: SCN10A; (-) strand; PAM type: YTN; PAM sequence: CTG
  source 1..20: mol_type = other DNA
actccagagccccagctcct

SEQ ID NO: 47977 - DNA, 20 bp, synthetic construct
  misc_feature 1..20: note = Description of Artificial Sequence: Synthetic oligonucleotide
  misc_feature 1..20: note = Target: SCN10A; (-) strand; PAM type: YTN; PAM sequence: TTG
  source 1..20: mol_type = other DNA
tctgactccagagccccagc

SEQ ID NO: 47978 - DNA, 20 bp, synthetic construct
  misc_feature 1..20: note = Description of Artificial Sequence: Synthetic oligonucleotide
  misc_feature 1..20: note = Target: SCN10A; (-) strand; PAM type: YTN; PAM sequence: CTC
  source 1..20: mol_type = other DNA
aaatccaggttgtctgactc

SEQ ID NO: 47979 - DNA, 20 bp, synthetic construct
  misc_feature 1..20: note = Description of Artificial Sequence: Synthetic oligonucleotide
  misc_feature 1..20: note = Target: SCN10A; (-) strand; PAM type: YTN; PAM sequence: CTG
  source 1..20: mol_type = other DNA
gatctcaaatccaggttgtc

SEQ ID NO: 47980 - DNA, 20 bp, synthetic construct
  misc_feature 1..20: note = Description of Artificial Sequence: Synthetic oligonucleotide
  misc_feature 1..20: note = Target: SCN10A; (-) strand; PAM type: YTN; PAM sequence: CTG
  source 1..20: mol_type = other DNA
ccaagcaagcgaataagcca

SEQ ID NO: 47981 - DNA, 20 bp, synthetic construct
  misc_feature 1..20: note = Description of Artificial Sequence: Synthetic oligonucleotide
  misc_feature 1..20: note = Target: SCN10A; (-) strand; PAM type: YTN; PAM sequence: CTC
  source 1..20: mol_type = other DNA
ccatctgccaagcaagcgaa

SEQ ID NO: 47982 - DNA, 20 bp, synthetic construct
  misc_feature 1..20: note = Description of Artificial Sequence: Synthetic oligonucleotide
  misc_feature 1..20: note = Target: SCN10A; (-) strand; PAM type: YTN; PAM sequence: TTC
  source 1..20: mol_type = other DNA
catgatgacccgaaagtctc

SEQ ID NO: 47983 - DNA, 20 bp, synthetic construct
  misc_feature 1..20: note = Description of Artificial Sequence: Synthetic oligonucleotide
  misc_feature 1..20: note = Target: SCN10A; (-) strand; PAM type: YTN; PAM sequence: CTC
  source 1..20: mol_type = other DNA
aggggtgggtgaggaaaaag

SEQ ID NO: 47984 - DNA, 20 bp, synthetic construct
  misc_feature 1..20: note = Description of Artificial Sequence: Synthetic oligonucleotide
  misc_feature 1..20: note = Target: SCN10A; (-) strand; PAM type: YTN; PAM sequence: TTA
  source 1..20: mol_type = other DNA
agatcctcaggggtgggtga

SEQ ID NO: 47985 - DNA, 20 bp, synthetic construct
  misc_feature 1..20: note = Description of Artificial Sequence: Synthetic oligonucleotide
  misc_feature 1..20: note = Target: SCN10A; (-) strand; PAM type: YTN; PAM sequence: TTT
  source 1..20: mol_type = other DNA
aagatcctcaggggtgggtg

SEQ ID NO: 47986 - DNA, 20 bp, synthetic construct
  misc_feature 1..20: note = Description of Artificial Sequence: Synthetic oligonucleotide
  misc_feature 1..20: note = Target: SCN10A; (-) strand; PAM type: YTN; PAM sequence: TTT
  source 1..20: mol_type = other DNA
taagatcctcaggggtgggt

SEQ ID NO: 47987 - DNA, 20 bp, synthetic construct
  misc_feature 1..20: note = Description of Artificial Sequence: Synthetic oligonucleotide
  misc_feature 1..20: note = Target: SCN10A; (-) strand; PAM type: YTN; PAM sequence: TTT
  source 1..20: mol_type = other DNA
ttaagatcctcaggggtggg

SEQ ID NO: 47988 - DNA, 20 bp, synthetic construct
  misc_feature 1..20: note = Description of Artificial Sequence: Synthetic oligonucleotide
  misc_feature 1..20: note = Target: SCN10A; (-) strand; PAM type: YTN; PAM sequence: CTG
  source 1..20: mol_type = other DNA
agagatagtcgtttttaaga

SEQ ID NO: 47989 - DNA, 20 bp, synthetic construct
  misc_feature 1..20: note = Description of Artificial Sequence: Synthetic oligonucleotide
  misc_feature 1..20: note = Target: SCN10A; (-) strand; PAM type: YTN; PAM sequence: CTC
  source 1..20: mol_type = other DNA
acaacaaccctgagagatag

SEQ ID NO: 47990 - DNA, 20 bp, synthetic construct
  misc_feature 1..20: note = Description of Artificial Sequence: Synthetic oligonucleotide
  misc_feature 1..20: note = Target: SCN10A; (-) strand; PAM type: YTN; PAM sequence: TTA
  source 1..20: mol_type = other DNA
tgctcacaacaaccctgaga

SEQ ID NO: 47991 - DNA, 20 bp, synthetic construct
  misc_feature 1..20: note = Description of Artificial Sequence: Synthetic oligonucleotide
  misc_feature 1..20: note = Target: SCN10A; (-) strand; PAM type: YTN; PAM sequence: TTT
  source 1..20: mol_type = other DNA
atgctcacaacaaccctgag

SEQ ID NO: 47992 - DNA, 20 bp, synthetic construct
  misc_feature 1..20: note = Description of Artificial Sequence: Synthetic oligonucleotide
  misc_feature 1..20: note = Target: SCN10A; (-) strand; PAM type: YTN; PAM sequence: TTT
  source 1..20: mol_type = other DNA
tatgctcacaacaaccctga

SEQ ID NO: 47993 - DNA, 20 bp, synthetic construct
  misc_feature 1..20: note = Description of Artificial Sequence: Synthetic oligonucleotide
  misc_feature 1..20: note = Target: SCN10A; (-) strand; PAM type: YTN; PAM sequence: CTC
  source 1..20: mol_type = other DNA
attttatgctcacaacaacc

SEQ ID NO: 47994 - DNA, 20 bp, synthetic construct
  misc_feature 1..20: note = Description of Artificial Sequence: Synthetic oligonucleotide
  misc_feature 1..20: note = Target: SCN10A; (-) strand; PAM type: YTN; PAM sequence: TTG
  source 1..20: mol_type = other DNA
aaaaaacgcacctcatttta

SEQ ID NO: 47995 - DNA, 20 bp, synthetic construct
  misc_feature 1..20: note = Description of Artificial Sequence: Synthetic oligonucleotide
  misc_feature 1..20: note = Target: SCN10A; (-) strand; PAM type: YTN; PAM sequence: CTT
  source 1..20: mol_type = other DNA
gaaaaaacgcacctcatttt

SEQ ID NO: 47996 - DNA, 20 bp, synthetic construct
  misc_feature 1..20: note = Description of Artificial Sequence: Synthetic oligonucleotide
  misc_feature 1..20: note = Target: SCN10A; (-) strand; PAM type: YTN; PAM sequence: CTG
  source 1..20: mol_type = other DNA
gacacttgaaaaaacgcacc

SEQ ID NO: 47997 - DNA, 20 bp, synthetic construct
  misc_feature 1..20: note = Description of Artificial Sequence: Synthetic oligonucleotide
  misc_feature 1..20: note = Target: SCN10A; (-) strand; PAM type: YTN; PAM sequence: TTA
  source 1..20: mol_type = other DNA
caatgtgtcaggcatagcac

SEQ ID NO: 47998 - DNA, 20 bp, synthetic construct
  misc_feature 1..20: note = Description of Artificial Sequence: Synthetic oligonucleotide
  misc_feature 1..20: note = Target: SCN10A; (-) strand; PAM type: YTN; PAM sequence: CTT
  source 1..20: mol_type = other DNA
acaatgtgtcaggcatagca

SEQ ID NO: 47999 - DNA, 20 bp, synthetic construct
  misc_feature 1..20: note = Description of Artificial Sequence: Synthetic oligonucleotide
  misc_feature 1..20: note = Target: SCN10A; (-) strand; PAM type: YTN; PAM sequence: CTG
  source 1..20: mol_type = other DNA
agcacttacaatgtgtcagg

SEQ ID NO: 48000 - DNA, 20 bp, synthetic construct
  misc_feature 1..20: note = Description of Artificial Sequence: Synthetic oligonucleotide
  misc_feature 1..20: note = Target: SCN10A; (-) strand; PAM type: YTN; PAM sequence: TTA
  source 1..20: mol_type = other DNA
ctgagcacttacaatgtgtc

SEQ ID NO: 48001 - DNA, 20 bp, synthetic construct
  misc_feature 1..20: note = Description of Artificial Sequence: Synthetic oligonucleotide
  misc_feature 1..20: note = Target: SCN10A; (-) strand; PAM type: YTN; PAM sequence: CTT
  source 1..20: mol_type = other DNA
actgagcacttacaatgtgt

SEQ ID NO: 48002 - DNA, 20 bp, synthetic construct
  misc_feature 1..20: note = Description of Artificial Sequence: Synthetic oligonucleotide
  misc_feature 1..20: note = Target: SCN10A; (-) strand; PAM type: YTN; PAM sequence: CTA
  source 1..20: mol_type = other DNA
atacttactgagcacttaca

SEQ ID NO: 48003 - DNA, 20 bp, synthetic construct
  misc_feature 1..20: note = Description of Artificial Sequence: Synthetic oligonucleotide
  misc_feature 1..20: note = Target: SCN10A; (-) strand; PAM type: YTN; PAM sequence: TTA
  source 1..20: mol_type = other DNA
tcaaataacaataacagcaa

SEQ ID NO: 48004 - DNA, 20 bp, synthetic construct
  misc_feature 1..20: note = Description of Artificial Sequence: Synthetic oligonucleotide
  misc_feature 1..20: note = Target: SCN10A; (-) strand; PAM type: YTN; PAM sequence: CTT
  source 1..20: mol_type = other DNA
atcaaataacaataacagca

SEQ ID NO: 48005 - DNA, 20 bp, synthetic construct
  misc_feature 1..20: note = Description of Artificial Sequence: Synthetic oligonucleotide
  misc_feature 1..20: note = Target: SCN10A; (-) strand; PAM type: YTN; PAM sequence: CTC
  source 1..20: mol_type = other DNA
ttatcaaataacaataacag

SEQ ID NO: 48006 - DNA, 20 bp, synthetic construct
  misc_feature 1..20: note = Description of Artificial Sequence: Synthetic oligonucleotide
  misc_feature 1..20: note = Target: SCN10A; (-) strand; PAM type: YTN; PAM sequence: CTC
  source 1..20: mol_type = other DNA
gtctcttatcaaataacaat

SEQ ID NO: 48007 - DNA, 20 bp, synthetic construct
  misc_feature 1..20: note = Description of Artificial Sequence: Synthetic oligonucleotide
  misc_feature 1..20: note = Target: SCN10A; (-) strand; PAM type: YTN; PAM sequence: CTG
  source 1..20: mol_type = other DNA
tcctcgtctcttatcaaata

SEQ ID NO: 48008 - DNA, 20 bp, synthetic construct
  misc_feature 1..20: note = Description of Artificial Sequence: Synthetic oligonucleotide
  misc_feature 1..20: note = Target: SCN10A; (-) strand; PAM type: YTN; PAM sequence: TTC
  source 1..20: mol_type = other DNA
caagcactgtcctcgtctct

SEQ ID NO: 48009 - DNA, 20 bp, synthetic construct
  misc_feature 1..20: note = Description of Artificial Sequence: Synthetic oligonucleotide
  misc_feature 1..20: note = Target: SCN10A; (-) strand; PAM type: YTN; PAM sequence: CTT
  source 1..20: mol_type = other DNA
ccaagcactgtcctcgtctc

SEQ ID NO: 48010 - DNA, 20 bp, synthetic construct
  misc_feature 1..20: note = Description of Artificial Sequence: Synthetic oligonucleotide
  misc_feature 1..20: note = Target: SCN10A; (-) strand; PAM type: YTN; PAM sequence: CTG
  source 1..20: mol_type = other DNA
caccaagaggggacttccaa

SEQ ID NO: 48011 - DNA, 20 bp, synthetic construct
  misc_feature 1..20: note = Description of Artificial Sequence: Synthetic oligonucleotide
  misc_feature 1..20: note = Target: SCN10A; (-) strand; PAM type: YTN; PAM sequence: TTA
  source 1..20: mol_type = other DNA
tctgcaccaagaggggactt

SEQ ID NO: 48012 - DNA, 20 bp, synthetic construct
  misc_feature 1..20: note = Description of Artificial Sequence: Synthetic oligonucleotide
  misc_feature 1..20: note = Target: SCN10A; (-) strand; PAM type: YTN; PAM sequence: CTT
  source 1..20: mol_type = other DNA
atctgcaccaagaggggact

SEQ ID NO: 48013 - DNA, 20 bp, synthetic construct
  misc_feature 1..20: note = Description of Artificial Sequence: Synthetic oligonucleotide
  misc_feature 1..20: note = Target: SCN10A; (-) strand; PAM type: YTN; PAM sequence: CTC
  source 1..20: mol_type = other DNA
ccttatctgcaccaagaggg

SEQ ID NO: 48014 - DNA, 20 bp, synthetic construct
  misc_feature 1..20: note = Description of Artificial Sequence: Synthetic oligonucleotide
  misc_feature 1..20: note = Target: SCN10A; (-) strand; PAM type: YTN; PAM sequence: TTG
  source 1..20: mol_type = other DNA
gctcccttatctgcaccaag

SEQ ID NO: 48015 - DNA, 20 bp, synthetic construct
  misc_feature 1..20: note = Description of Artificial Sequence: Synthetic oligonucleotide
  misc_feature 1..20: note = Target: SCN10A; (-) strand; PAM type: YTN; PAM sequence: CTT
  source 1..20: mol_type = other DNA
ggctcccttatctgcaccaa

SEQ ID NO: 48016 - DNA, 20 bp, synthetic construct
  misc_feature 1..20: note = Description of Artificial Sequence: Synthetic oligonucleotide
  misc_feature 1..20: note = Target: SCN10A; (-) strand; PAM type: YTN; PAM sequence: CTG
  source 1..20: mol_type = other DNA
ggccttggctcccttatctg

SEQ ID NO: 48017 - DNA, 20 bp, synthetic construct
  misc_feature 1..20: note = Description of Artificial Sequence: Synthetic oligonucleotide
  misc_feature 1..20: note = Target: SCN10A; (-) strand; PAM type: YTN; PAM sequence: TTC
  source 1..20: mol_type = other DNA
tgggccttggctcccttatc

SEQ ID NO: 48018 - DNA, 20 bp, synthetic construct
  misc_feature 1..20: note = Description of Artificial Sequence: Synthetic oligonucleotide
  misc_feature 1..20: note = Target: SCN10A; (-) strand; PAM type: YTN; PAM sequence: TTT
  source 1..20: mol_type = other DNA
ctgggccttggctcccttat

SEQ ID NO: 48019 - DNA, 20 bp, synthetic construct
  misc_feature 1..20: note = Description of Artificial Sequence: Synthetic oligonucleotide
  misc_feature 1..20: note = Target: SCN10A; (-) strand; PAM type: YTN; PAM sequence: CTT
  source 1..20: mol_type = other DNA
tctgggccttggctccctta

SEQ ID NO: 48020 - DNA, 20 bp, synthetic construct
  misc_feature 1..20: note = Description of Artificial Sequence: Synthetic oligonucleotide
  misc_feature 1..20: note = Target: SCN10A; (-) strand; PAM type: YTN; PAM sequence: CTC
  source 1..20: mol_type = other DNA
ctttctgggccttggctccc

SEQ ID NO: 48021 - DNA, 20 bp, synthetic construct
  misc_feature 1..20: note = Description of Artificial Sequence: Synthetic oligonucleotide
  misc_feature 1..20: note = Target: SCN10A; (-) strand; PAM type: YTN; PAM sequence: TTC
  source 1..20: mol_type = other DNA
tcctttctgggccttggctc

SEQ ID NO: 48022 - DNA, 20 bp, synthetic construct
  misc_feature 1..20: note = Description of Artificial Sequence: Synthetic oligonucleotide
  misc_feature 1..20: note = Target: SCN10A; (-) strand; PAM type: YTN; PAM sequence: CTT
  source 1..20: mol_type = other DNA
ctcctttctgggccttggct

SEQ ID NO: 48023 - DNA, 20 bp, synthetic construct
  misc_feature 1..20: note = Description of Artificial Sequence: Synthetic oligonucleotide
  misc_feature 1..20: note = Target: SCN10A; (-) strand; PAM type: YTN; PAM sequence: CTC
  source 1..20: mol_type = other DNA
agagtggggacatgccttct

SEQ ID NO: 48024 - DNA, 20 bp, synthetic construct
  misc_feature 1..20: note = Description of Artificial Sequence: Synthetic oligonucleotide
  misc_feature 1..20: note = Target: SCN10A; (-) strand; PAM type: YTN; PAM sequence: CTG
  source 1..20: mol_type = other DNA
actcagagtggggacatgcc

SEQ ID NO: 48025 - DNA, 20 bp, synthetic construct
  misc_feature 1..20: note = Description of Artificial Sequence: Synthetic oligonucleotide
  misc_feature 1..20: note = Target: SCN10A; (-) strand; PAM type: YTN; PAM sequence: TTC
  source 1..20: mol_type = other DNA
gctgactcagagtggggaca

SEQ ID NO: 48026 - DNA, 20 bp, synthetic construct
  misc_feature 1..20: note = Description of Artificial Sequence: Synthetic oligonucleotide
  misc_feature 1..20: note = Target: SCN10A; (-) strand; PAM type: YTN; PAM sequence: TTT
  source 1..20: mol_type = other DNA
cgctgactcagagtggggac

SEQ ID NO: 48027 - DNA, 20 bp, synthetic construct
  misc_feature 1..20: note = Description of Artificial Sequence: Synthetic oligonucleotide
  misc_feature 1..20: note = Target: SCN10A; (-) strand; PAM type: YTN; PAM sequence: TTT
  source 1..20: mol_type = other DNA
tcgctgactcagagtgggga

SEQ ID NO: 48028 - DNA, 20 bp, synthetic construct
  misc_feature 1..20: note = Description of Artificial Sequence: Synthetic oligonucleotide
  misc_feature 1..20: note = Target: SCN10A; (-) strand; PAM type: YTN; PAM sequence: CTT
  source 1..20: mol_type = other DNA
ttcgctgactcagagtgggg

SEQ ID NO: 48029 - DNA, 20 bp, synthetic construct
  misc_feature 1..20: note = Description of Artificial Sequence: Synthetic oligonucleotide
  misc_feature 1..20: note = Target: SCN10A; (-) strand; PAM type: YTN; PAM sequence: CTG
  source 1..20: mol_type = other DNA
tggccccagcttttcgctga

SEQ ID NO: 48030 - DNA, 20 bp, synthetic construct
  misc_feature 1..20: note = Description of Artificial Sequence: Synthetic oligonucleotide
  misc_feature 1..20: note = Target: SCN10A; (-) strand; PAM type: YTN; PAM sequence: TTG
  source 1..20: mol_type = other DNA
ggtctgtggccccagctttt

SEQ ID NO: 48031 - DNA, 20 bp, synthetic construct
  misc_feature 1..20: note = Description of Artificial Sequence: Synthetic oligonucleotide
  misc_feature 1..20: note = Target: SCN10A; (-) strand; PAM type: YTN; PAM sequence: CTT
  source 1..20: mol_type = other DNA
gggtctgtggccccagcttt

SEQ ID NO: 48032 - DNA, 20 bp, synthetic construct
  misc_feature 1..20: note = Description of Artificial Sequence: Synthetic oligonucleotide
  misc_feature 1..20: note = Target: SCN10A; (-) strand; PAM type: YTN; PAM sequence: CTG
  source 1..20: mol_type = other DNA
gagacttgggtctgtggccc

SEQ ID NO: 48033 - DNA, 20 bp, synthetic construct
  misc_feature 1..20: note = Description of Artificial Sequence: Synthetic oligonucleotide
  misc_feature 1..20: note = Target: SCN10A; (-) strand; PAM type: YTN; PAM sequence: CTG
  source 1..20: mol_type = other DNA
ggcgactggagacttgggtc

SEQ ID NO: 48034 - DNA, 20 bp, synthetic construct
  misc_feature 1..20: note = Description of Artificial Sequence: Synthetic oligonucleotide
  misc_feature 1..20: note = Target: SCN10A; (-) strand; PAM type: YTN; PAM sequence: CTC
  source 1..20: mol_type = other DNA
ctgggcgactggagacttgg

SEQ ID NO: 48035 - DNA, 20 bp, synthetic construct
  misc_feature 1..20: note = Description of Artificial Sequence: Synthetic oligonucleotide
  misc_feature 1..20: note = Target: SCN10A; (-) strand; PAM type: YTN; PAM sequence: CTG
  source 1..20: mol_type = other DNA
actcctgggcgactggagac

SEQ ID NO: 48036 - DNA, 20 bp, synthetic construct
  misc_feature 1..20: note = Description of Artificial Sequence: Synthetic oligonucleotide
  misc_feature 1..20: note = Target: SCN10A; (-) strand; PAM type: YTN; PAM sequence: TTG
  source 1..20: mol_type = other DNA
tgggagggagcagggtctga

SEQ ID NO: 48037 - DNA, 20 bp, synthetic construct
  misc_feature 1..20: note = Description of Artificial Sequence: Synthetic oligonucleotide
  misc_feature 1..20: note = Target: SCN10A; (-) strand; PAM type: YTN; PAM sequence: CTT
  source 1..20: mol_type = other DNA
gtgggagggagcagggtctg

SEQ ID NO: 48038 - DNA, 20 bp, synthetic construct
  misc_feature 1..20: note = Description of Artificial Sequence: Synthetic oligonucleotide
  misc_feature 1..20: note = Target: SCN10A; (-) strand; PAM type: YTN; PAM sequence: CTG
  source 1..20: mol_type = other DNA
tccttgtgggagggagcagg

SEQ ID NO: 48039 - DNA, 20 bp, synthetic construct
  misc_feature 1..20: note = Description of Artificial Sequence: Synthetic oligonucleotide
  misc_feature 1..20: note = Target: SCN10A; (-) strand; PAM type: YTN; PAM sequence: CTC
  source 1..20: mol_type = other DNA
ctgtccttgtgggagggagc

SEQ ID NO: 48040 - DNA, 20 bp, synthetic construct
  misc_feature 1..20: note = Description of Artificial Sequence: Synthetic oligonucleotide
  misc_feature 1..20: note = Target: SCN10A; (-) strand; PAM type: YTN; PAM sequence: CTC
  source 1..20: mol_type = other DNA
tcctgtccttgtgggaggga

SEQ ID NO: 48041 - DNA, 20 bp, synthetic construct
  misc_feature 1..20: note = Description of Artificial Sequence: Synthetic oligonucleotide
  misc_feature 1..20: note = Target: SCN10A; (-) strand; PAM type: YTN; PAM sequence: TTC
  source 1..20: mol_type = other DNA
ctctcctgtccttgtgggag

SEQ ID NO: 48042 - DNA, 20 bp, synthetic construct
  misc_feature 1..20: note = Description of Artificial Sequence: Synthetic oligonucleotide
  misc_feature 1..20: note = Target: SCN10A; (-) strand; PAM type: YTN; PAM sequence: CTT
  source 1..20: mol_type = other DNA
cctctcctgtccttgtggga

SEQ ID NO: 48043 - DNA, 20 bp, synthetic construct
  misc_feature 1..20: note = Description of Artificial Sequence: Synthetic oligonucleotide
  misc_feature 1..20: note = Target: SCN10A; (-) strand; PAM type: YTN; PAM sequence: CTC
  source 1..20: mol_type = other DNA
ccccttcctctcctgtcctt

SEQ ID NO: 48044 - DNA, 20 bp, synthetic construct
  misc_feature 1..20: note = Description of Artificial Sequence: Synthetic oligonucleotide
  misc_feature 1..20: note = Target: SCN10A; (-) strand; PAM type: YTN; PAM sequence: CTG
  source 1..20: mol_type = other DNA
caccagccagctcccccttc

SEQ ID NO: 48045 - DNA, 20 bp, synthetic construct
  misc_feature 1..20: note = Description of Artificial Sequence: Synthetic oligonucleotide
  misc_feature 1..20: note = Target: SCN10A; (-) strand; PAM type: YTN; PAM sequence: CTG
  source 1..20: mol_type = other DNA
gggactgcaccagccagctc

SEQ ID NO: 48046 - DNA, 20 bp, synthetic construct
  misc_feature 1..20: note = Description of Artificial Sequence: Synthetic oligonucleotide
  misc_feature 1..20: note = Target: SCN10A; (-) strand; PAM type: YTN; PAM sequence: CTC
  source 1..20: mol_type = other DNA
tggggactgcaccagccagc

SEQ ID NO: 48047 - DNA, 20 bp, synthetic construct
  misc_feature 1..20: note = Description of Artificial Sequence: Synthetic oligonucleotide
  misc_feature 1..20: note = Target: SCN10A; (-) strand; PAM type: YTN; PAM sequence: CTG
  source 1..20: mol_type = other DNA
tgctctggggactgcaccag

SEQ ID NO: 48048 - DNA, 20 bp, synthetic construct
  misc_feature 1..20: note = Description of Artificial Sequence: Synthetic oligonucleotide
  misc_feature 1..20: note = Target: SCN10A; (-) strand; PAM type: YTN; PAM sequence: TTC
  source 1..20: mol_type = other DNA
agggaagacactgtgctctg

SEQ ID NO: 48049 - DNA, 20 bp, synthetic construct
  misc_feature 1..20: note = Description of Artificial Sequence: Synthetic oligonucleotide
  misc_feature 1..20: note = Target: SCN10A; (-) strand; PAM type: YTN; PAM sequence: CTC
  source 1..20: mol_type = other DNA
ccacccagattcagggaaga

SEQ ID NO: 48050 - DNA, 20 bp, synthetic construct
  misc_feature 1..20: note = Description of Artificial Sequence: Synthetic oligonucleotide
  misc_feature 1..20: note = Target: SCN10A; (-) strand; PAM type: YTN; PAM sequence: TTG
  source 1..20: mol_type = other DNA
gggaaactcccacccagatt

SEQ ID NO: 48051 - DNA, 20 bp, synthetic construct
  misc_feature 1..20: note = Description of Artificial Sequence: Synthetic oligonucleotide
  misc_feature 1..20: note = Target: SCN10A; (-) strand; PAM type: YTN; PAM sequence: CTT
  source 1..20: mol_type = other DNA
ggggaaactcccacccagat

SEQ ID NO: 48052 - DNA, 20 bp, synthetic construct
  misc_feature 1..20: note = Description of Artificial Sequence: Synthetic oligonucleotide
  misc_feature 1..20: note = Target: SCN10A; (-) strand; PAM type: YTN; PAM sequence: TTG
  source 1..20: mol_type = other DNA
atggcttggggaaactccca

SEQ ID NO: 48053 - DNA, 20 bp, synthetic construct
  misc_feature 1..20: note = Description of Artificial Sequence: Synthetic oligonucleotide
  misc_feature 1..20: note = Target: SCN10A; (-) strand; PAM type: YTN; PAM sequence: CTT
  source 1..20: mol_type = other DNA
gatggcttggggaaactccc

SEQ ID NO: 48054 - DNA, 20 bp, synthetic construct
  misc_feature 1..20: note = Description of Artificial Sequence: Synthetic oligonucleotide
  misc_feature 1..20: note = Target: SCN10A; (-) strand; PAM type: YTN; PAM sequence: CTC
  source 1..20: mol_type = other DNA
ttgatggcttggggaaactc

SEQ ID NO: 48055 - DNA, 20 bp, synthetic construct
  misc_feature 1..20: note = Description of Artificial Sequence: Synthetic oligonucleotide
  misc_feature 1..20: note = Target: SCN10A; (-) strand; PAM type: YTN; PAM sequence: TTC
  source 1..20: mol_type = other DNA
tcttgatggcttggggaaac

SEQ ID NO: 48056 - DNA, 20 bp, synthetic construct
  misc_feature 1..20: note = Description of Artificial Sequence: Synthetic oligonucleotide
  misc_feature 1..20: note = Target: SCN10A; (-) strand; PAM type: YTN; PAM sequence: TTT
  source 1..20: mol_type = other DNA
ctcttgatggcttggggaaa

SEQ ID NO: 48057 - DNA, 20 bp, synthetic construct
  misc_feature 1..20: note = Description of Artificial Sequence: Synthetic oligonucleotide
  misc_feature 1..20: note = Target: SCN10A; (-) strand; PAM type: YTN; PAM sequence: TTT
  source 1..20: mol_type = other DNA
tctcttgatggcttggggaa

SEQ ID NO: 48058 - DNA, 20 bp, synthetic construct
  misc_feature 1..20: note = Description of Artificial Sequence: Synthetic oligonucleotide
  misc_feature 1..20: note = Target: SCN10A; (-) strand; PAM type: YTN; PAM sequence: TTT
  source 1..20: mol_type = other DNA
ttctcttgatggcttgggga

SEQ ID NO: 48059 - DNA, 20 bp, synthetic construct
  misc_feature 1..20: note = Description of Artificial Sequence: Synthetic oligonucleotide
  misc_feature 1..20: note = Target: SCN10A; (-) strand; PAM type: YTN; PAM sequence: TTG
  source 1..20: mol_type = other DNA
gtaatgtttttctcttgatg

SEQ ID NO: 48060 - DNA, 20 bp, synthetic construct
  misc_feature 1..20: note = Description of Artificial Sequence: Synthetic oligonucleotide
  misc_feature 1..20: note = Target: SCN10A; (-) strand; PAM type: YTN; PAM sequence: CTT
  source 1..20: mol_type = other DNA
ggtaatgtttttctcttgat

SEQ ID NO: 48061 - DNA, 20 bp, synthetic construct
  misc_feature 1..20: note = Description of Artificial Sequence: Synthetic oligonucleotide
  misc_feature 1..20: note = Target: SCN10A; (-) strand; PAM type: YTN; PAM sequence: TTC
  source 1..20: mol_type = other DNA
cgcttggtaatgtttttctc

SEQ ID NO: 48062 - DNA, 20 bp, synthetic construct
  misc_feature 1..20: note = Description of Artificial Sequence: Synthetic oligonucleotide
  misc_feature 1..20: note = Target: SCN10A; (-) strand; PAM type: YTN; PAM sequence: CTT
  source 1..20: mol_type = other DNA
ccgcttggtaatgtttttct

SEQ ID NO: 48063 - DNA, 20 bp, synthetic construct
  misc_feature 1..20: note = Description of Artificial Sequence: Synthetic oligonucleotide
  misc_feature 1..20: note = Target: SCN10A; (-) strand; PAM type: YTN; PAM sequence: CTG
  source 1..20: mol_type = other DNA
cggagcttccgcttggtaat

SEQ ID NO: 48064 - DNA, 20 bp, synthetic construct
  misc_feature 1..20: note = Description of Artificial Sequence: Synthetic oligonucleotide
  misc_feature 1..20: note = Target: SCN10A; (-) strand; PAM type: YTN; PAM sequence: CTG
  source 1..20: mol_type = other DNA
tgctgcggagcttccgcttg

SEQ ID NO: 48065 - DNA, 20 bp, synthetic construct
  misc_feature 1..20: note = Description of Artificial Sequence: Synthetic oligonucleotide
  misc_feature 1..20: note = Target: SCN10A; (-) strand; PAM type: YTN; PAM sequence: CTG
  source 1..20: mol_type = other DNA
tctgtgctgcggagcttccg

SEQ ID NO: 48066 - DNA, 20 bp, synthetic construct
  misc_feature 1..20: note = Description of Artificial Sequence: Synthetic oligonucleotide
  misc_feature 1..20: note = Target: SCN10A; (-) strand; PAM type: YTN; PAM sequence: CTG
  source 1..20: mol_type = other DNA
ggcgtggccaagaagggaag

SEQ ID NO: 48067 - DNA, 20 bp, synthetic construct
  misc_feature 1..20: note = Description of Artificial Sequence: Synthetic oligonucleotide
  misc_feature 1..20: note = Target: SCN10A; (-) strand; PAM type: YTN; PAM sequence: CTA
  source 1..20: mol_type = other DNA
gagctgggcgtggccaagaa

SEQ ID NO: 48068 - DNA, 20 bp, synthetic construct
  misc_feature 1..20: note = Description of Artificial Sequence: Synthetic oligonucleotide
  misc_feature 1..20: note = Target: SCN10A; (-) strand; PAM type: YTN; PAM sequence: CTG
  source 1..20: mol_type = other DNA
ctagagctgggcgtggccaa

SEQ ID NO: 48069 - DNA, 20 bp, synthetic construct
  misc_feature 1..20: note = Description of Artificial Sequence: Synthetic oligonucleotide
  misc_feature 1..20: note = Target: SCN10A; (-) strand; PAM type: YTN; PAM sequence: CTG
  source 1..20: mol_type = other DNA
tgagtctgctagagctgggc

SEQ ID NO: 48070 - DNA, 20 bp, synthetic construct
  misc_feature 1..20: note = Description of Artificial Sequence: Synthetic oligonucleotide
  misc_feature 1..20: note = Target: SCN10A; (-) strand; PAM type: YTN; PAM sequence: CTG
  source 1..20: mol_type = other DNA
catcatcgtcactgtgagtc

SEQ ID NO: 48071 - DNA, 20 bp, synthetic construct
  misc_feature 1..20: note = Description of Artificial Sequence: Synthetic oligonucleotide
  misc_feature 1..20: note = Target: SCN10A; (-) strand; PAM type: YTN; PAM sequence: TTG
  source 1..20: mol_type = other DNA
actgcatcatcgtcactgtg

SEQ ID NO: 48072 - DNA, 20 bp, synthetic construct
  misc_feature 1..20: note = Description of Artificial Sequence: Synthetic oligonucleotide
  misc_feature 1..20: note = Target: SCN10A; (-) strand; PAM type: YTN; PAM sequence: TTT
  source 1..20: mol_type = other DNA
gactgcatcatcgtcactgt

SEQ ID NO: 48073 - DNA, 20 bp, synthetic construct
  misc_feature 1..20: note = Description of Artificial Sequence: Synthetic oligonucleotide
  misc_feature 1..20: note = Target: SCN10A; (-) strand; PAM type: YTN; PAM sequence: CTT
  source 1..20: mol_type = other DNA
tgactgcatcatcgtcactg

SEQ ID NO: 48074 - DNA, 20 bp, synthetic construct
  misc_feature 1..20: note = Description of Artificial Sequence: Synthetic oligonucleotide
  misc_feature 1..20: note = Target: SCN10A; (-) strand; PAM type: YTN; PAM sequence: TTC
  source 1..20: mol_type = other DNA
cagaagaagtggaatatctt

SEQ ID NO: 48075 - DNA, 20 bp, synthetic construct
  misc_feature 1..20: note = Description of Artificial Sequence: Synthetic oligonucleotide
  misc_feature 1..20: note = Target: SCN10A; (-) strand; PAM type: YTN; PAM sequence: TTT
  source 1..20: mol_type = other DNA
ccagaagaagtggaatatct

SEQ ID NO: 48076 - DNA, 20 bp, synthetic construct
  misc_feature 1..20: note = Description of Artificial Sequence: Synthetic oligonucleotide
  misc_feature 1..20: note = Target: SCN10A; (-) strand; PAM type: YTN; PAM sequence: TTA
  source 1..20: mol_type = other DNA
tttccagaagaagtggaata

SEQ ID NO: 48077 - DNA, 20 bp, synthetic construct
  misc_feature 1..20: note = Description of Artificial Sequence: Synthetic oligonucleotide
  misc_feature 1..20: note = Target: SCN10A; (-) strand; PAM type: YTN; PAM sequence: CTA
  source 1..20: mol_type = other DNA
ttatttccagaagaagtgga

SEQ ID NO: 48078 - DNA, 20 bp, synthetic construct
  misc_feature 1..20: note = Description of Artificial Sequence: Synthetic oligonucleotide
  misc_feature 1..20: note = Target: SCN10A; (-) strand; PAM type: YTN; PAM sequence: TTC
  source 1..20: mol_type = other DNA
gacccatactattatttcca

SEQ ID NO: 48079 - DNA, 20 bp, synthetic construct
  misc_feature 1..20: note = Description of Artificial Sequence: Synthetic oligonucleotide
  misc_feature 1..20: note = Target: SCN10A; (-) strand; PAM type: YTN; PAM sequence: CTT
  source 1..20: mol_type = other DNA
cgacccatactattatttcc

SEQ ID NO: 48080 - DNA, 20 bp, synthetic construct
  misc_feature 1..20: note = Description of Artificial Sequence: Synthetic oligonucleotide
  misc_feature 1..20: note = Target: SCN10A; (-) strand; PAM type: YTN; PAM sequence: TTG
  source 1..20: mol_type = other DNA
ccttcgacccatactattat

SEQ ID NO: 48081 - DNA, 20 bp, synthetic construct
  misc_feature 1..20: note = Description of Artificial Sequence: Synthetic oligonucleotide
  misc_feature 1..20: note = Target: SCN10A; (-) strand; PAM type: YTN; PAM sequence: TTC
  source 1..20: mol_type = other DNA
aaaatcattgccttcgaccc

SEQ ID NO: 48082 - DNA, 20 bp, synthetic construct
  misc_feature 1..20: note = Description of Artificial Sequence: Synthetic oligonucleotide
  misc_feature 1..20: note = Target: SCN10A; (-) strand; PAM type: YTN; PAM sequence: CTT
  source 1..20: mol_type = other DNA
caaaatcattgccttcgacc

SEQ ID NO: 48083 - DNA, 20 bp, synthetic construct
  misc_feature 1..20: note = Description of Artificial Sequence: Synthetic oligonucleotide
  misc_feature 1..20: note = Target: SCN10A; (-) strand; PAM type: YTN; PAM sequence: CTG
  source 1..20: mol_type = other DNA
aaatggtcttcaaaatcatt

SEQ ID NO: 48084 - DNA, 20 bp, synthetic construct
  misc_feature 1..20: note = Description of Artificial Sequence: Synthetic oligonucleotide
  misc_feature 1..20: note = Target: SCN10A; (-) strand; PAM type: YTN; PAM sequence: CTG
  source 1..20: mol_type = other DNA
ctgaaatggtcttcaaaatc

SEQ ID NO: 48085 - DNA, 20 bp, synthetic construct
  misc_feature 1..20: note = Description of Artificial Sequence: Synthetic oligonucleotide
  misc_feature 1..20: note = Target: SCN10A; (-) strand; PAM type: YTN; PAM sequence: TTA
  source 1..20: mol_type = other DNA
ctgctgaaatggtcttcaaa

SEQ ID NO: 48086 - DNA, 20 bp, synthetic construct
  misc_feature 1..20: note = Description of Artificial Sequence: Synthetic oligonucleotide
  misc_feature 1..20: note = Target: SCN10A; (-) strand; PAM type: YTN; PAM sequence: TTT
  source 1..20: mol_type = other DNA
actgctgaaatggtcttcaa

SEQ ID NO: 48087 - DNA, 20 bp, synthetic construct
  misc_feature 1..20: note = Description of Artificial Sequence: Synthetic oligonucleotide
  misc_feature 1..20: note = Target: SCN10A; (-) strand; PAM type: YTN; PAM sequence: TTT
  source 1..20: mol_type = other DNA
tactgctgaaatggtcttca

SEQ ID NO: 48088 - DNA, 20 bp, synthetic construct
  misc_feature 1..20: note = Description of Artificial Sequence: Synthetic oligonucleotide
  misc_feature 1..20: note = Target: SCN10A; (-) strand; PAM type: YTN; PAM sequence: TTT
  source 1..20: mol_type = other DNA
ttactgctgaaatggtcttc

SEQ ID NO: 48089 - DNA, 20 bp, synthetic construct
  misc_feature 1..20: note = Description of Artificial Sequence: Synthetic oligonucleotide
  misc_feature 1..20: note = Target: SCN10A; (-) strand; PAM type: YTN; PAM sequence: TTT
  source 1..20: mol_type = other DNA
tttactgctgaaatggtctt

SEQ ID NO: 48090 - DNA, 20 bp, synthetic construct
  misc_feature 1..20: note = Description of Artificial Sequence: Synthetic oligonucleotide
  misc_feature 1..20: note = Target: SCN10A; (-) strand; PAM type: YTN; PAM sequence: TTA
  source 1..20: mol_type = other DNA
ccatattttttactgctgaa

SEQ ID NO: 48091 - DNA, 20 bp, synthetic construct
  misc_feature 1..20: note = Description of Artificial Sequence: Synthetic oligonucleotide
  misc_feature 1..20: note = Target: SCN10A; (-) strand; PAM type: YTN; PAM sequence: TTT
  source 1..20: mol_type = other DNA
accatattttttactgctga

SEQ ID NO: 48092 - DNA, 20 bp, synthetic construct
  misc_feature 1..20: note = Description of Artificial Sequence: Synthetic oligonucleotide
  misc_feature 1..20: note = Target: SCN10A; (-) strand; PAM type: YTN; PAM sequence: CTT
  source 1..20: mol_type = other DNA
taccatattttttactgctg

SEQ ID NO: 48093 - DNA, 20 bp, synthetic construct
  misc_feature 1..20: note = Description of Artificial Sequence: Synthetic oligonucleotide
  misc_feature 1..20: note = Target: SCN10A; (-) strand; PAM type: YTN; PAM sequence: CTA
  source 1..20: mol_type = other DNA
ggtctttaccatatttttta

SEQ ID NO: 48094 - DNA, 20 bp, synthetic construct
  misc_feature 1..20: note = Description of Artificial Sequence: Synthetic oligonucleotide
  misc_feature 1..20: note = Target: SCN10A; (-) strand; PAM type: YTN; PAM sequence: CTC
  source 1..20: mol_type = other DNA
ctaggtctttaccatatttt

SEQ ID NO: 48095 - DNA, 20 bp, synthetic construct
  misc_feature 1..20: note = Description of Artificial Sequence: Synthetic oligonucleotide
  misc_feature 1..20: note = Target: SCN10A; (-) strand; PAM type: YTN; PAM sequence: TTC
  source 1..20: mol_type = other DNA
cactcctaggtctttaccat

SEQ ID NO: 48096 - DNA, 20 bp, synthetic construct
  misc_feature 1..20: note = Description of Artificial Sequence: Synthetic oligonucleotide
  misc_feature 1..20: note = Target: SCN10A; (-) strand; PAM type: YTN; PAM sequence: TTT
  source 1..20: mol_type = other DNA
ccactcctaggtctttacca

SEQ ID NO: 48097 - DNA, 20 bp, synthetic construct
  misc_feature 1..20: note = Description of Artificial Sequence: Synthetic oligonucleotide
  misc_feature 1..20: note = Target: SCN10A; (-) strand; PAM type: YTN; PAM sequence: TTG
  source 1..20: mol_type = other DNA
tttccactcctaggtcttta

SEQ ID NO: 48098 - DNA, 20 bp, synthetic construct
  misc_feature 1..20: note = Description of Artificial Sequence: Synthetic oligonucleotide
  misc_feature 1..20: note = Target: SCN10A; (-) strand; PAM type: YTN; PAM sequence: CTT
  source 1..20: mol_type = other DNA
gtttccactcctaggtcttt

SEQ ID NO: 48099 - DNA, 20 bp, synthetic construct
  misc_feature 1..20: note = Description of Artificial Sequence: Synthetic oligonucleotide
  misc_feature 1..20: note = Target: SCN10A; (-) strand; PAM type: YTN; PAM sequence: CTG
  source 1..20: mol_type = other DNA
tgatgaaagcttgtttccac

SEQ ID NO: 48100 - DNA, 20 bp, synthetic construct
  misc_feature 1..20: note = Description of Artificial Sequence: Synthetic oligonucleotide
  misc_feature 1..20: note = Target: SCN10A; (-) strand; PAM type: YTN; PAM sequence: CTC
  source 1..20: mol_type = other DNA
cgaccccacagatcccactg

SEQ ID NO: 48101 - DNA, 20 bp, synthetic construct
  misc_feature 1..20: note = Description of Artificial Sequence: Synthetic oligonucleotide
  misc_feature 1..20: note = Target: SCN10A; (-) strand; PAM type: YTN; PAM sequence: TTG
  source 1..20: mol_type = other DNA
cctccgaccccacagatccc

SEQ ID NO: 48102 - DNA, 20 bp, synthetic construct
  misc_feature 1..20: note = Description of Artificial Sequence: Synthetic oligonucleotide
  misc_feature 1..20: note = Target: SCN10A; (-) strand; PAM type: YTN; PAM sequence: TTA
  source 1..20: mol_type = other DNA
tcattgcctccgaccccaca

SEQ ID NO: 48103 - DNA, 20 bp, synthetic construct
  misc_feature 1..20: note = Description of Artificial Sequence: Synthetic oligonucleotide
  misc_feature 1..20: note = Target: SCN10A; (-) strand; PAM type: YTN; PAM sequence: TTT
  source 1..20: mol_type = other DNA
atcattgcctccgaccccac

SEQ ID NO: 48104 - DNA, 20 bp, synthetic construct
  misc_feature 1..20: note = Description of Artificial Sequence: Synthetic oligonucleotide
  misc_feature 1..20: note = Target: SCN10A; (-) strand; PAM type: YTN; PAM sequence: TTT
  source 1..20: mol_type = other DNA
tatcattgcctccgacccca

SEQ ID NO: 48105 - DNA, 20 bp, synthetic construct
  misc_feature 1..20: note = Description of Artificial Sequence: Synthetic oligonucleotide
  misc_feature 1..20: note = Target: SCN10A; (-) strand; PAM type: YTN; PAM sequence: TTT
  source 1..20: mol_type = other DNA
ttatcattgcctccgacccc

SEQ ID NO: 48106 - DNA, 20 bp, synthetic construct
  misc_feature 1..20: note = Description of Artificial Sequence: Synthetic oligonucleotide
  misc_feature 1..20: note = Target: SCN10A; (-) strand; PAM type: YTN; PAM sequence: CTG
  source 1..20: mol_type = other DNA
ccatttttatcattgcctcc

SEQ ID NO: 48107 - DNA, 20 bp, synthetic construct
  misc_feature 1..20: note = Description of Artificial Sequence: Synthetic oligonucleotide
  misc_feature 1..20: note = Target: SCN10A; (-) strand; PAM type: YTN; PAM sequence: TTG
  source 1..20: mol_type = other DNA
ctgccatttttatcattgcc

SEQ ID NO: 48108 - DNA, 20 bp, synthetic construct
  misc_feature 1..20: note = Description of Artificial Sequence: Synthetic oligonucleotide
  misc_feature 1..20: note = Target: SCN10A; (-) strand; PAM type: YTN; PAM sequence: CTT
  source 1..20: mol_type = other DNA
gctgccatttttatcattgc

SEQ ID NO: 48109 - DNA, 20 bp, synthetic construct
  misc_feature 1..20: note = Description of Artificial Sequence: Synthetic oligonucleotide
  misc_feature 1..20: note = Target: SCN10A; (-) strand; PAM type: YTN; PAM sequence: TTC
  source 1..20: mol_type = other DNA
ttgctgccatttttatcatt

SEQ ID NO: 48110 - DNA, 20 bp, synthetic construct
  misc_feature 1..20: note = Description of Artificial Sequence: Synthetic oligonucleotide
  misc_feature 1..20: note = Target: SCN10A; (-) strand; PAM type: YTN; PAM sequence: TTT
  source 1..20: mol_type = other DNA
cttgctgccatttttatcat

SEQ ID NO: 48111 - DNA, 20 bp, synthetic construct
  misc_feature 1..20: note = Description of Artificial Sequence: Synthetic oligonucleotide
  misc_feature 1..20: note = Target: SCN10A; (-) strand; PAM type: YTN; PAM sequence: TTT
  source 1..20: mol_type = other DNA
tcttgctgccatttttatca

SEQ ID NO: 48112 - DNA, 20 bp, synthetic construct
  misc_feature 1..20: note = Description of Artificial Sequence: Synthetic oligonucleotide
  misc_feature 1..20: note = Target: SCN10A; (-) strand; PAM type: YTN; PAM sequence: TTG
  source 1..20: mol_type = other DNA
taaataagacattttcttgc

SEQ ID NO: 48113 - DNA, 20 bp, synthetic construct
  misc_feature 1..20: note = Description of Artificial Sequence: Synthetic oligonucleotide
  misc_feature 1..20: note = Target: SCN10A; (-) strand; PAM type: YTN; PAM sequence: TTT
  source 1..20: mol_type = other DNA
gtaaataagacattttcttg

SEQ ID NO: 48114 - DNA, 20 bp, synthetic construct
  misc_feature 1..20: note = Description of Artificial Sequence: Synthetic oligonucleotide
  misc_feature 1..20: note = Target: SCN10A; (-) strand; PAM type: YTN; PAM sequence: TTT
  source 1..20: mol_type = other DNA
tgtaaataagacattttctt

SEQ ID NO: 48115 - DNA, 20 bp, synthetic construct
  misc_feature 1..20: note = Description of Artificial Sequence: Synthetic oligonucleotide
  misc_feature 1..20: note = Target: SCN10A; (-) strand; PAM type: YTN; PAM sequence: CTA
  source 1..20: mol_type = other DNA
ttttgtaaataagacatttt

SEQ ID NO: 48116 - DNA, 20 bp, synthetic construct
  misc_feature 1..20: note = Description of Artificial Sequence: Synthetic oligonucleotide
  misc_feature 1..20: note = Target: SCN10A; (-) strand; PAM type: YTN; PAM sequence: TTC
  source 1..20: mol_type = other DNA
tattttgtaaataagacatt

SEQ ID NO: 48117 - DNA, 20 bp, synthetic construct
  misc_feature 1..20: note = Description of Artificial Sequence: Synthetic oligonucleotide
  misc_feature 1..20: note = Target: SCN10A; (-) strand; PAM type: YTN; PAM sequence: TTT
  source 1..20: mol_type = other DNA
ctattttgtaaataagacat

SEQ ID NO: 48118 - DNA, 20 bp, synthetic construct
  misc_feature 1..20: note = Description of Artificial Sequence: Synthetic oligonucleotide
  misc_feature 1..20: note = Target: SCN10A; (-) strand; PAM type: YTN; PAM sequence: TTT
  source 1..20: mol_type = other DNA
tctattttgtaaataagaca

SEQ ID NO: 48119 - DNA, 20 bp, synthetic construct
  misc_feature 1..20: note = Description of Artificial Sequence: Synthetic oligonucleotide
  misc_feature 1..20: note = Target: SCN10A; (-) strand; PAM type: YTN; PAM sequence: CTG
  source 1..20: mol_type = other DNA
aacaaaacaaaaggattttc

SEQ ID NO: 48120 - DNA, 20 bp, synthetic construct
  misc_feature 1..20: note = Description of Artificial Sequence: Synthetic oligonucleotide
  misc_feature 1..20: note = Target: SCN10A; (-) strand; PAM type: YTN; PAM sequence: CTC
  source 1..20: mol_type = other DNA
aggagcccacagataacata

SEQ ID NO: 48121 - DNA, 20 bp, synthetic construct
  misc_feature 1..20: note = Description of Artificial Sequence: Synthetic oligonucleotide
  misc_feature 1..20: note = Target: SCN10A; (-) strand; PAM type: YTN; PAM sequence: CTG
  source 1..20: mol_type = other DNA
gccaatcctcaggagcccac

SEQ ID NO: 48122 - DNA, 20 bp, synthetic construct
  misc_feature 1..20: note = Description of Artificial Sequence: Synthetic oligonucleotide
  misc_feature 1..20: note = Target: SCN10A; (-) strand; PAM type: YTN; PAM sequence: TTA
  source 1..20: mol_type = other DNA
ccctggccaatcctcaggag

SEQ ID NO: 48123 - DNA, 20 bp, synthetic construct
  misc_feature 1..20: note = Description of Artificial Sequence: Synthetic oligonucleotide
  misc_feature 1..20: note = Target: SCN10A; (-) strand; PAM type: YTN; PAM sequence: CTG
  source 1..20: mol_type = other DNA
ttaccctggccaatcctcag

SEQ ID NO: 48124 - DNA, 20 bp, synthetic construct
  misc_feature 1..20: note = Description of Artificial Sequence: Synthetic oligonucleotide
  misc_feature 1..20: note = Target: SCN10A; (-) strand; PAM type: YTN; PAM sequence: TTG
  source 1..20: mol_type = other DNA
actgttaccctggccaatcc

SEQ ID NO: 48125 - DNA, 20 bp, synthetic construct
  misc_feature 1..20: note = Description of Artificial Sequence: Synthetic oligonucleotide
  misc_feature 1..20: note = Target: SCN10A; (-) strand; PAM type: YTN; PAM sequence: CTG
  source 1..20: mol_type = other DNA
tcacgttgactgttaccctg

SEQ ID NO: 48126 - DNA, 20 bp, synthetic construct
  misc_feature 1..20: note = Description of Artificial Sequence: Synthetic oligonucleotide
  misc_feature 1..20: note = Target: SCN10A; (-) strand; PAM type: YTN; PAM sequence: TTC
  source 1..20: mol_type = other DNA
tgtcacgttgactgttaccc

SEQ ID NO: 48127 - DNA, 20 bp, synthetic construct
  misc_feature 1..20: note = Description of Artificial Sequence: Synthetic oligonucleotide
  misc_feature 1..20: note = Target: SCN10A; (-) strand; PAM type: YTN; PAM sequence: CTC
  source 1..20: mol_type = other DNA
cattctgtcacgttgactgt

SEQ ID NO: 48128 - DNA, 20 bp, synthetic construct
  misc_feature 1..20: note = Description of Artificial Sequence: Synthetic oligonucleotide
  misc_feature 1..20: note = Target: SCN10A; (-) strand; PAM type: YTN; PAM sequence: CTG
  source 1..20: mol_type = other DNA
agaatggtgcagaaatgtct

SEQ ID NO: 48129 - DNA, 20 bp, synthetic construct
  misc_feature 1..20: note = Description of Artificial Sequence: Synthetic oligonucleotide
  misc_feature 1..20: note = Target: SCN10A; (-) strand; PAM type: YTN; PAM sequence: CTG
  source 1..20: mol_type = other DNA
cagcatgcacagcccctgag

SEQ ID NO: 48130 - DNA, 20 bp, synthetic construct
  misc_feature 1..20: note = Description of Artificial Sequence: Synthetic oligonucleotide
  misc_feature 1..20: note = Target: SCN10A; (-) strand; PAM type: YTN; PAM sequence: TTC
  source 1..20: mol_type = other DNA
acgtggaaaaactgcagcat

SEQ ID NO: 48131 - DNA, 20 bp, synthetic construct
  misc_feature 1..20: note = Description of Artificial Sequence: Synthetic oligonucleotide
  misc_feature 1..20: note = Target: SCN10A; (-) strand; PAM type: YTN; PAM sequence: CTC
  source 1..20: mol_type = other DNA
ccaccaccattcacgtggaa

SEQ ID NO: 48132 - DNA, 20 bp, synthetic construct
  misc_feature 1..20: note = Description of Artificial Sequence: Synthetic oligonucleotide
  misc_feature 1..20: note = Target: SCN10A; (-) strand; PAM type: YTN; PAM sequence: TTC
  source 1..20: mol_type = other DNA
cactcccaccaccattcacg

SEQ ID NO: 48133 - DNA, 20 bp, synthetic construct
  misc_feature 1..20: note = Description of Artificial Sequence: Synthetic oligonucleotide
  misc_feature 1..20: note = Target: SCN10A; (-) strand; PAM type: YTN; PAM sequence: TTA
  source 1..20: mol_type = other DNA
ttccactcccaccaccattc

SEQ ID NO: 48134 - DNA, 20 bp, synthetic construct
  misc_feature 1..20: note = Description of Artificial Sequence: Synthetic oligonucleotide
  misc_feature 1..20: note = Target: SCN10A; (-) strand; PAM type: YTN; PAM sequence: CTT
  source 1..20: mol_type = other DNA
attccactcccaccaccatt

SEQ ID NO: 48135 - DNA, 20 bp, synthetic construct
  misc_feature 1..20: note = Description of Artificial Sequence: Synthetic oligonucleotide
  misc_feature 1..20: note = Target: SCN10A; (-) strand; PAM type: YTN; PAM sequence: CTA
  source 1..20: mol_type = other DNA
tccgcttattccactcccac

SEQ ID NO: 48136 - DNA, 20 bp, synthetic construct
  misc_feature 1..20: note = Description of Artificial Sequence: Synthetic oligonucleotide
  misc_feature 1..20: note = Target: SCN10A; (-) strand; PAM type: YTN; PAM sequence: TTA
  source 1..20: mol_type = other DNA
aagactatccgcttattcca

SEQ ID NO: 48137 - DNA, 20 bp, synthetic construct
  misc_feature 1..20: note = Description of Artificial Sequence: Synthetic oligonucleotide
  misc_feature 1..20: note = Target: SCN10A; (-) strand; PAM type: YTN; PAM sequence: CTT
  source 1..20: mol_type = other DNA
aaagactatccgcttattcc

SEQ ID NO: 48138 - DNA, 20 bp, synthetic construct
  misc_feature 1..20: note = Description of Artificial Sequence: Synthetic oligonucleotide
  misc_feature 1..20: note = Target: SCN10A; (-) strand; PAM type: YTN; PAM sequence: TTA
  source 1..20: mol_type = other DNA
taataatgatcttaaagact

SEQ ID NO: 48139 - DNA, 20 bp, synthetic construct
  misc_feature 1..20: note = Description of Artificial Sequence: Synthetic oligonucleotide
  misc_feature 1..20: note = Target: SCN10A; (-) strand; PAM type: YTN; PAM sequence: CTG
  source 1..20: mol_type = other DNA
acaaaatgatattataataa

SEQ ID NO: 48140 - DNA, 20 bp, synthetic construct
  misc_feature 1..20: note = Description of Artificial Sequence: Synthetic oligonucleotide
  misc_feature 1..20: note = Target: SCN10A; (-) strand; PAM type: YTN; PAM sequence: TTC
  source 1..20: mol_type = other DNA
actgacaaaatgatattata

SEQ ID NO: 48141 - DNA, 20 bp, synthetic construct
  misc_feature 1..20: note = Description of Artificial Sequence: Synthetic oligonucleotide
  misc_feature 1..20: note = Target: SCN10A; (-) strand; PAM type: YTN; PAM sequence: CTT
  source 1..20: mol_type = other DNA
cactgacaaaatgatattat

SEQ ID NO: 48142 - DNA, 20 bp, synthetic construct
  misc_feature 1..20: note = Description of Artificial Sequence: Synthetic oligonucleotide
  misc_feature 1..20: note = Target: SCN10A; (-) strand; PAM type: YTN; PAM sequence: CTC
  source 1..20: mol_type = other DNA
ttcactgacaaaatgatatt

SEQ ID NO: 48143 - DNA, 20 bp, synthetic construct
  misc_feature 1..20: note = Description of Artificial Sequence: Synthetic oligonucleotide
  misc_feature 1..20: note = Target: SCN10A; (-) strand; PAM type: YTN; PAM sequence: CTG
  source 1..20: mol_type = other DNA
actcttcactgacaaaatga

SEQ ID NO: 48144 - DNA, 20 bp, synthetic construct
  misc_feature 1..20: note = Description of Artificial Sequence: Synthetic oligonucleotide
  misc_feature 1..20: note = Target: SCN10A; (-) strand; PAM type: YTN; PAM sequence: CTG
  source 1..20: mol_type = other DNA
aaccagactgactcttcact

SEQ ID NO: 48145 - DNA, 20 bp, synthetic construct
  misc_feature 1..20: note = Description of Artificial Sequence: Synthetic oligonucleotide
  misc_feature 1..20: note = Target: SCN10A; (-) strand; PAM type: YTN; PAM sequence: CTA
  source 1..20: mol_type = other DNA
ctgaaccagactgactcttc

SEQ ID NO: 48146 - DNA, 20 bp, synthetic construct
  misc_feature 1..20: note = Description of Artificial Sequence: Synthetic oligonucleotide
  misc_feature 1..20: note = Target: SCN10A; (-) strand; PAM type: YTN; PAM sequence: TTA
  source 1..20: mol_type = other DNA
actactgaaccagactgact

SEQ ID NO: 48147 - DNA, 20 bp, synthetic construct
  misc_feature 1..20: note = Description of Artificial Sequence: Synthetic oligonucleotide
  misc_feature 1..20: note = Target: SCN10A; (-) strand; PAM type: YTN; PAM sequence: TTT
  source 1..20: mol_type = other DNA
aactactgaaccagactgac

SEQ ID NO: 48148 - DNA, 20 bp, synthetic construct
  misc_feature 1..20: note = Description of Artificial Sequence: Synthetic oligonucleotide
  misc_feature 1..20: note = Target: SCN10A; (-) strand; PAM type: YTN; PAM sequence: TTT
  source 1..20: mol_type = other DNA
taactactgaaccagactga

SEQ ID NO: 48149 - DNA, 20 bp, synthetic construct
  misc_feature 1..20: note = Description of Artificial Sequence: Synthetic oligonucleotide
  misc_feature 1..20: note = Target: SCN10A; (-) strand; PAM type: YTN; PAM sequence: CTG
  source 1..20: mol_type = other DNA
tgatgtcccacaacccacac

SEQ ID NO: 48150 - DNA, 20 bp, synthetic construct
  misc_feature 1..20: note = Description of Artificial Sequence: Synthetic oligonucleotide
  misc_feature 1..20: note = Target: SCN10A; (-) strand; PAM type: YTN; PAM sequence: TTA
  source 1..20: mol_type = other DNA
atccaggtctgtgatgtccc

SEQ ID NO: 48151 - DNA, 20 bp, synthetic construct
  misc_feature 1..20: note = Description of Artificial Sequence: Synthetic oligonucleotide
  misc_feature 1..20: note = Target: SCN10A; (-) strand; PAM type: YTN; PAM sequence: TTT
  source 1..20: mol_type = other DNA
aatccaggtctgtgatgtcc

SEQ ID NO: 48152 - DNA, 20 bp, synthetic construct
  misc_feature 1..20: note = Description of Artificial Sequence: Synthetic oligonucleotide
  misc_feature 1..20: note = Target: SCN10A; (-) strand; PAM type: YTN; PAM sequence: TTT
  source 1..20: mol_type = other DNA
taatccaggtctgtgatgtc

SEQ ID NO: 48153 - DNA, 20 bp, synthetic construct
  misc_feature 1..20: note = Description of Artificial Sequence: Synthetic oligonucleotide
  misc_feature 1..20: note = Target: SCN10A; (-) strand; PAM type: YTN; PAM sequence: CTG
  source 1..20: mol_type = other DNA
ggattttaatccaggtctgt

SEQ ID NO: 48154 - DNA, 20 bp, synthetic construct
  misc_feature 1..20: note = Description of Artificial Sequence: Synthetic oligonucleotide
  misc_feature 1..20: note = Target: SCN10A; (-) strand; PAM type: YTN; PAM sequence: CTG
  source 1..20: mol_type = other DNA
ggctgggattttaatccagg

SEQ ID NO: 48155 - DNA, 20 bp, synthetic construct
  misc_feature 1..20: note = Description of Artificial Sequence: Synthetic oligonucleotide
  misc_feature 1..20: note = Target: SCN10A; (-) strand; PAM type: YTN; PAM sequence: CTA
  source 1..20: mol_type = other DNA
ggaaatgtctgggctgggat

SEQ ID NO: 48156 - DNA, 20 bp, synthetic construct
  misc_feature 1..20: note = Description of Artificial Sequence: Synthetic oligonucleotide
  misc_feature 1..20: note = Target: SCN10A; (-) strand; PAM type: YTN; PAM sequence: TTA
  source 1..20: mol_type = other DNA
cataagctaggaaatgtctg

SEQ ID NO: 48157 - DNA, 20 bp, synthetic construct
  misc_feature 1..20: note = Description of Artificial Sequence: Synthetic oligonucleotide
  misc_feature 1..20: note = Target: SCN10A; (-) strand; PAM type: YTN; PAM sequence: CTT
  source 1..20: mol_type = other DNA
acataagctaggaaatgtct

SEQ ID NO: 48158 - DNA, 20 bp, synthetic construct
  misc_feature 1..20: note = Description of Artificial Sequence: Synthetic oligonucleotide
  misc_feature 1..20: note = Target: SCN10A; (-) strand; PAM type: YTN; PAM sequence: TTG
  source 1..20: mol_type = other DNA
tccaagcttacataagctag

SEQ ID NO: 48159 - DNA, 20 bp, synthetic construct
  misc_feature 1..20: note = Description of Artificial Sequence: Synthetic oligonucleotide
  misc_feature 1..20: note = Target: SCN10A; (-) strand; PAM type: YTN; PAM sequence: TTT
  source 1..20: mol_type = other DNA
gtccaagcttacataagcta

SEQ ID NO: 48160 - DNA, 20 bp, synthetic construct
  misc_feature 1..20: note = Description of Artificial Sequence: Synthetic oligonucleotide
  misc_feature 1..20: note = Target: SCN10A; (-) strand; PAM type: YTN; PAM sequence: TTA
  source 1..20: mol_type = other DNA
tttgtccaagcttacataag

SEQ ID NO: 48161 - DNA, 20 bp, synthetic construct
  misc_feature 1..20: note = Description of Artificial Sequence: Synthetic oligonucleotide
  misc_feature 1..20: note = Target: SCN10A; (-) strand; PAM type: YTN; PAM sequence: TTG
  source 1..20: mol_type = other DNA
aggtacaggaaggatgcatt

SEQ ID NO: 48162 - DNA, 20 bp, synthetic construct
  misc_feature 1..20: note = Description of Artificial Sequence: Synthetic oligonucleotide
  misc_feature 1..20: note = Target: SCN10A; (-) strand; PAM type: YTN; PAM sequence: TTA
  source 1..20: mol_type = other DNA
tacagatgaggaaattgagg

SEQ ID NO: 48163 - DNA, 20 bp, synthetic construct
  misc_feature 1..20: note = Description of Artificial Sequence: Synthetic oligonucleotide
  misc_feature 1..20: note = Target: SCN10A; (-) strand; PAM type: YTN; PAM sequence: TTA
  source 1..20: mol_type = other DNA
tgcccattatacagatgagg

SEQ ID NO: 48164 - DNA, 20 bp, synthetic construct
  misc_feature 1..20: note = Description of Artificial Sequence: Synthetic oligonucleotide
  misc_feature 1..20: note = Target: SCN10A; (-) strand; PAM type: YTN; PAM sequence: TTT
  source 1..20: mol_type = other DNA
atgcccattatacagatgag

SEQ ID NO: 48165 - DNA, 20 bp, synthetic construct
  misc_feature 1..20: note = Description of Artificial Sequence: Synthetic oligonucleotide
  misc_feature 1..20: note = Target: SCN10A; (-) strand; PAM type: YTN; PAM sequence: TTT
  source 1..20: mol_type = other DNA
tatgcccattatacagatga

SEQ ID NO: 48166 - DNA, 20 bp, synthetic construct
  misc_feature 1..20: note = Description of Artificial Sequence: Synthetic oligonucleotide
  misc_feature 1..20: note = Target: SCN10A; (-) strand; PAM type: YTN; PAM sequence: CTC
  source 1..20: mol_type = other DNA
attttatgcccattatacag

SEQ ID NO: 48167 - DNA, 20 bp, synthetic construct
  misc_feature 1..20: note = Description of Artificial Sequence: Synthetic oligonucleotide
  misc_feature 1..20: note = Target: SCN10A; (-) strand; PAM type: YTN; PAM sequence: TTG
  source 1..20: mol_type = other DNA
gctcattttatgcccattat

SEQ ID NO: 48168 - DNA, 20 bp, synthetic construct
  misc_feature 1..20: note = Description of Artificial Sequence: Synthetic oligonucleotide
  misc_feature 1..20: note = Target: SCN10A; (-) strand; PAM type: YTN; PAM sequence: CTG
  source 1..20: mol_type = other DNA
cacatgcattggctcatttt

SEQ ID NO: 48169 - DNA, 20 bp, synthetic construct
  misc_feature 1..20: note = Description of Artificial Sequence: Synthetic oligonucleotide
  misc_feature 1..20: note = Target: SCN10A; (-) strand; PAM type: YTN; PAM sequence: TTA
  source 1..20: mol_type = other DNA
agaactgcacatgcattggc

SEQ ID NO: 48170 - DNA, 20 bp, synthetic construct
  misc_feature 1..20: note = Description of Artificial Sequence: Synthetic oligonucleotide
  misc_feature 1..20: note = Target: SCN10A; (-) strand; PAM type: YTN; PAM sequence: TTG
  source 1..20: mol_type = other DNA
ttaagaactgcacatgcatt

SEQ ID NO: 48171 - DNA, 20 bp, synthetic construct
  misc_feature 1..20: note = Description of Artificial Sequence: Synthetic oligonucleotide
  misc_feature 1..20: note = Target: SCN10A; (-) strand; PAM type: YTN; PAM sequence: TTT
  source 1..20: mol_type = other DNA
gttaagaactgcacatgcat

SEQ ID NO: 48172 - DNA, 20 bp, synthetic construct
  misc_feature 1..20: note = Description of Artificial Sequence: Synthetic oligonucleotide
  misc_feature 1..20: note = Target: SCN10A; (-) strand; PAM type: YTN; PAM sequence: CTT
  source 1..20: mol_type = other DNA
tgttaagaactgcacatgca

SEQ ID NO: 48173 - DNA, 20 bp, synthetic construct
  misc_feature 1..20: note = Description of Artificial Sequence: Synthetic oligonucleotide
  misc_feature 1..20: note = Target: SCN10A; (-) strand; PAM type: YTN; PAM sequence: CTG
  source 1..20: mol_type = other DNA
ccaggccctttgttaagaac

SEQ ID NO: 48174 - DNA, 20 bp, synthetic construct
  misc_feature 1..20: note = Description of Artificial Sequence: Synthetic oligonucleotide
  misc_feature 1..20: note = Target: SCN10A; (-) strand; PAM type: YTN; PAM sequence: CTG
  source 1..20: mol_type = other DNA
tctgccaggccctttgttaa

SEQ ID NO: 48175 - DNA, 20 bp, synthetic construct
  misc_feature 1..20: note = Description of Artificial Sequence: Synthetic oligonucleotide
  misc_feature 1..20: note = Target: SCN10A; (-) strand; PAM type: YTN; PAM sequence: TTA
  source 1..20: mol_type = other DNA
ctgtctgccaggccctttgt

SEQ ID NO: 48176 - DNA, 20 bp, synthetic construct
  misc_feature 1..20: note = Description of Artificial Sequence: Synthetic oligonucleotide
  misc_feature 1..20: note = Target: SCN10A; (-) strand; PAM type: YTN; PAM sequence: TTA
  source 1..20: mol_type = other DNA
tgaatgaattactgtctgcc

SEQ ID NO: 48177 - DNA, 20 bp, synthetic construct
  misc_feature 1..20: note = Description of Artificial Sequence: Synthetic oligonucleotide
  misc_feature 1..20: note = Target: SCN10A; (-) strand; PAM type: YTN; PAM sequence: CTT
  source 1..20: mol_type = other DNA
atgaatgaattactgtctgc

SEQ ID NO: 48178 - DNA, 20 bp, synthetic construct
  misc_feature 1..20: note = Description of Artificial Sequence: Synthetic oligonucleotide
  misc_feature 1..20: note = Target: SCN10A; (-) strand; PAM type: YTN; PAM sequence: TTA
  source 1..20: mol_type = other DNA
cttatgaatgaattactgtc

SEQ ID NO: 48179 - DNA, 20 bp, synthetic construct
  misc_feature 1..20: note = Description of Artificial Sequence: Synthetic oligonucleotide
  misc_feature 1..20: note = Target: SCN10A; (-) strand; PAM type: YTN; PAM sequence: CTG
  source 1..20: mol_type = other DNA
ttacttatgaatgaattact

SEQ ID NO: 48180 - DNA, 20 bp, synthetic construct
  misc_feature 1..20: note = Description of Artificial Sequence: Synthetic oligonucleotide
  misc_feature 1..20: note = Target: SCN10A; (-) strand; PAM type: YTN; PAM sequence: CTA
  source 1..20: mol_type = other DNA
gtcactgttacttatgaatg

SEQ ID NO: 48181 - DNA, 20 bp, synthetic construct
  misc_feature 1..20: note = Description of Artificial Sequence: Synthetic oligonucleotide
  misc_feature 1..20: note = Target: SCN10A; (-) strand; PAM type: YTN; PAM sequence: TTA
  source 1..20: mol_type = other DNA
ctagtcactgttacttatga

SEQ ID NO: 48182 - DNA, 20 bp, synthetic construct
  misc_feature 1..20: note = Description of Artificial Sequence: Synthetic oligonucleotide
  misc_feature 1..20: note = Target: SCN10A; (-) strand; PAM type: YTN; PAM sequence: CTT
  source 1..20: mol_type = other DNA
actagtcactgttacttatg

SEQ ID NO: 48183 - DNA, 20 bp, synthetic construct
  misc_feature 1..20: note = Description of Artificial Sequence: Synthetic oligonucleotide
  misc_feature 1..20: note = Target: SCN10A; (-) strand; PAM type: YTN; PAM sequence: TTC
  source 1..20: mol_type = other DNA
ttactagtcactgttactta

SEQ ID NO: 48184 - DNA, 20 bp, synthetic construct
  misc_feature 1..20: note = Description of Artificial Sequence: Synthetic oligonucleotide
  misc_feature 1..20: note = Target: SCN10A; (-) strand; PAM type: YTN; PAM sequence: TTG
  source 1..20: mol_type = other DNA
ttcttactagtcactgttac

SEQ ID NO: 48185 - DNA, 20 bp, synthetic construct
  misc_feature 1..20: note = Description of Artificial Sequence: Synthetic oligonucleotide
  misc_feature 1..20: note = Target: SCN10A; (-) strand; PAM type: YTN; PAM sequence: TTA
  source 1..20: mol_type = other DNA
gaggcaatgaatcattgttc

SEQ ID NO: 48186 - DNA, 20 bp, synthetic construct
  misc_feature 1..20: note = Description of Artificial Sequence: Synthetic oligonucleotide
  misc_feature 1..20: note = Target: SCN10A; (-) strand; PAM type: YTN; PAM sequence: CTT
  source 1..20: mol_type = other DNA
agaggcaatgaatcattgtt

SEQ ID NO: 48187 - DNA, 20 bp, synthetic construct
  misc_feature 1..20: note = Description of Artificial Sequence: Synthetic oligonucleotide
  misc_feature 1..20: note = Target: SCN10A; (-) strand; PAM type: YTN; PAM sequence: CTA
  source 1..20: mol_type = other DNA
aaagaatcttagaggcaatg

SEQ ID NO: 48188 - DNA, 20 bp, synthetic construct
  misc_feature 1..20: note = Description of Artificial Sequence: Synthetic oligonucleotide
  misc_feature 1..20: note = Target: SCN10A; (-) strand; PAM type: YTN; PAM sequence: TTA
  source 1..20: mol_type = other DNA
gagacacacagagcctaaaa

SEQ ID NO: 48189 - DNA, 20 bp, synthetic construct
  misc_feature 1..20: note = Description of Artificial Sequence: Synthetic oligonucleotide
  misc_feature 1..20: note = Target: SCN10A; (-) strand; PAM type: YTN; PAM sequence: TTA
  source 1..20: mol_type = other DNA
agacaattagagacacacag

SEQ ID NO: 48190 - DNA, 20 bp, synthetic construct
  misc_feature 1..20: note = Description of Artificial Sequence: Synthetic oligonucleotide
  misc_feature 1..20: note = Target: SCN10A; (-) strand; PAM type: YTN; PAM sequence: TTT
  source 1..20: mol_type = other DNA
aagacaattagagacacaca

SEQ ID NO: 48191 - DNA, 20 bp, synthetic construct
  misc_feature 1..20: note = Description of Artificial Sequence: Synthetic oligonucleotide
  misc_feature 1..20: note = Target: SCN10A; (-) strand; PAM type: YTN; PAM sequence: CTA
  source 1..20: mol_type = other DNA
tttaagacaattagagacac

SEQ ID NO: 48192 - DNA, 20 bp, synthetic construct
  misc_feature 1..20: note = Description of Artificial Sequence: Synthetic oligonucleotide
  misc_feature 1..20: note = Target: SCN10A; (-) strand; PAM type: YTN; PAM sequence: CTG
  source 1..20: mol_type = other DNA
tcctatttaagacaattaga

SEQ ID NO: 48193 - DNA, 20 bp, synthetic construct
  misc_feature 1..20: note = Description of Artificial Sequence: Synthetic oligonucleotide
  misc_feature 1..20: note = Target: SCN10A; (-) strand; PAM type: YTN; PAM sequence: TTC
  source 1..20: mol_type = other DNA
tgtcctatttaagacaatta

SEQ ID NO: 48194 - DNA, 20 bp, synthetic construct
  misc_feature 1..20: note = Description of Artificial Sequence: Synthetic oligonucleotide
  misc_feature 1..20: note = Target: SCN10A; (-) strand; PAM type: YTN; PAM sequence: CTC
  source 1..20: mol_type = other DNA
agtgtcagaattctgtccta

SEQ ID NO: 48195 - DNA, 20 bp, synthetic construct
  misc_feature 1..20: note = Description of Artificial Sequence: Synthetic oligonucleotide
  misc_feature 1..20: note = Target: SCN10A; (-) strand; PAM type: YTN; PAM sequence: CTC
  source 1..20: mol_type = other DNA
tcagtgtcagaattctgtcc

SEQ ID NO: 48196 - DNA, 20 bp, synthetic construct
  misc_feature 1..20: note = Description of Artificial Sequence: Synthetic oligonucleotide
  misc_feature 1..20: note = Target: SCN10A; (-) strand; PAM type: YTN; PAM sequence: CTC
  source 1..20: mol_type = other DNA
tctcagtgtcagaattctgt

SEQ ID NO: 48197 - DNA, 20 bp, synthetic construct
  misc_feature 1..20: note = Description of Artificial Sequence: Synthetic oligonucleotide
  misc_feature 1..20: note = Target: SCN10A; (-) strand; PAM type: YTN; PAM sequence: CTG
  source 1..20: mol_type = other DNA
acctctctcagtgtcagaat

SEQ ID NO: 48198 - DNA, 20 bp, synthetic construct
  misc_feature 1..20: note = Description of Artificial Sequence: Synthetic oligonucleotide
  misc_feature 1..20: note = Target: SCN10A; (-) strand; PAM type: YTN; PAM sequence: TTC
  source 1..20: mol_type = other DNA
tgacctctctcagtgtcaga

SEQ ID NO: 48199 - DNA, 20 bp, synthetic construct
  misc_feature 1..20: note = Description of Artificial Sequence: Synthetic oligonucleotide
  misc_feature 1..20: note = Target: SCN10A; (-) strand; PAM type: YTN; PAM sequence: CTG
  source 1..20: mol_type = other DNA
gttctgacctctctcagtgt

SEQ ID NO: 48200 - DNA, 20 bp, synthetic construct
  misc_feature 1..20: note = Description of Artificial Sequence: Synthetic oligonucleotide
  misc_feature 1..20: note = Target: SCN10A; (-) strand; PAM type: YTN; PAM sequence: TTA
  source 1..20: mol_type = other DNA
cccgagcctggttctgacct

SEQ ID NO: 48201 - DNA, 20 bp, synthetic construct
  misc_feature 1..20: note = Description of Artificial Sequence: Synthetic oligonucleotide
  misc_feature 1..20: note = Target: SCN10A; (-) strand; PAM type: YTN; PAM sequence: TTG
  source 1..20: mol_type = other DNA
tgttacccgagcctggttct

SEQ ID NO: 48202 - DNA, 20 bp, synthetic construct
  misc_feature 1..20: note = Description of Artificial Sequence: Synthetic oligonucleotide
  misc_feature 1..20: note = Target: SCN10A; (-) strand; PAM type: YTN; PAM sequence: TTG
  source 1..20: mol_type = other DNA
ttgtgttacccgagcctggt

SEQ ID NO: 48203 - DNA, 20 bp, synthetic construct
  misc_feature 1..20: note = Description of Artificial Sequence: Synthetic oligonucleotide
  misc_feature 1..20: note = Target: SCN10A; (-) strand; PAM type: YTN; PAM sequence: CTG
  source 1..20: mol_type = other DNA
gttgttgtgttacccgagcc

SEQ ID NO: 48204 - DNA, 20 bp, synthetic construct
  misc_feature 1..20: note = Description of Artificial Sequence: Synthetic oligonucleotide
  misc_feature 1..20: note = Target: SCN10A; (-) strand; PAM type: YTN; PAM sequence: CTG
  source 1..20: mol_type = other DNA
ctggttgttgtgttacccga

SEQ ID NO: 48205 - DNA, 20 bp, synthetic construct
  misc_feature 1..20: note = Description of Artificial Sequence: Synthetic oligonucleotide
  misc_feature 1..20: note = Target: SCN10A; (-) strand; PAM type: YTN; PAM sequence: TTC
  source 1..20: mol_type = other DNA
cctgctggttgttgtgttac

SEQ ID NO: 48206 - DNA, 20 bp, synthetic construct
  misc_feature 1..20: note = Description of Artificial Sequence: Synthetic oligonucleotide
  misc_feature 1..20: note = Target: SCN10A; (-) strand; PAM type: YTN; PAM sequence: CTT
  source 1..20: mol_type = other DNA
ccctgctggttgttgtgtta

SEQ ID NO: 48207 - DNA, 20 bp, synthetic construct
  misc_feature 1..20: note = Description of Artificial Sequence: Synthetic oligonucleotide
  misc_feature 1..20: note = Target: SCN10A; (-) strand; PAM type: YTN; PAM sequence: CTC
  source 1..20: mol_type = other DNA
ccttccctgctggttgttgt

SEQ ID NO: 48208 - DNA, 20 bp, synthetic construct
  misc_feature 1..20: note = Description of Artificial Sequence: Synthetic oligonucleotide
  misc_feature 1..20: note = Target: SCN10A; (-) strand; PAM type: YTN; PAM sequence: CTG
  source 1..20: mol_type = other DNA
tctcccttccctgctggttg

SEQ ID NO: 48209 - DNA, 20 bp, synthetic construct
  misc_feature 1..20: note = Description of Artificial Sequence: Synthetic oligonucleotide
  misc_feature 1..20: note = Target: SCN10A; (-) strand; PAM type: YTN; PAM sequence: CTC
  source 1..20: mol_type = other DNA
tgtctcccttccctgctggt

SEQ ID NO: 48210 - DNA, 20 bp, synthetic construct
  misc_feature 1..20: note = Description of Artificial Sequence: Synthetic oligonucleotide
  misc_feature 1..20: note = Target: SCN10A; (-) strand; PAM type: YTN; PAM sequence: TTC
  source 1..20: mol_type = other DNA
tctgtctcccttccctgctg

SEQ ID NO: 48211 - DNA, 20 bp, synthetic construct
  misc_feature 1..20: note = Description of Artificial Sequence: Synthetic oligonucleotide
  misc_feature 1..20: note = Target: SCN10A; (-) strand; PAM type: YTN; PAM sequence: CTT
  source 1..20: mol_type = other DNA
ctctgtctcccttccctgct

SEQ ID NO: 48212 - DNA, 20 bp, synthetic construct
  misc_feature 1..20: note = Description of Artificial Sequence: Synthetic oligonucleotide
  misc_feature 1..20: note = Target: SCN10A; (-) strand; PAM type: YTN; PAM sequence: CTC
  source 1..20: mol_type = other DNA
cttctctgtctcccttccct

SEQ ID NO: 48213 - DNA, 20 bp, synthetic construct
  misc_feature 1..20: note = Description of Artificial Sequence: Synthetic oligonucleotide
  misc_feature 1..20: note = Target: SCN10A; (-) strand; PAM type: YTN; PAM sequence: TTC
  source 1..20: mol_type = other DNA
ctccttctctgtctcccttc

SEQ ID NO: 48214 - DNA, 20 bp, synthetic construct
  misc_feature 1..20: note = Description of Artificial Sequence: Synthetic oligonucleotide
  misc_feature 1..20: note = Target: SCN10A; (-) strand; PAM type: YTN; PAM sequence: TTT
  source 1..20: mol_type = other DNA
cctccttctctgtctccctt

SEQ ID NO: 48215 - DNA, 20 bp, synthetic construct
  misc_feature 1..20: note = Description of Artificial Sequence: Synthetic oligonucleotide
  misc_feature 1..20: note = Target: SCN10A; (-) strand; PAM type: YTN; PAM sequence: CTT
  source 1..20: mol_type = other DNA
tcctccttctctgtctccct

SEQ ID NO: 48216 - DNA, 20 bp, synthetic construct
  misc_feature 1..20: note = Description of Artificial Sequence: Synthetic oligonucleotide
  misc_feature 1..20: note = Target: SCN10A; (-) strand; PAM type: YTN; PAM sequence: TTG
  source 1..20: mol_type = other DNA
ctttcctccttctctgtctc

SEQ ID NO: 48217 - DNA, 20 bp, synthetic construct
  misc_feature 1..20: note = Description of Artificial Sequence: Synthetic oligonucleotide
  misc_feature 1..20: note = Target: SCN10A; (-) strand; PAM type: YTN; PAM sequence: CTG
  source 1..20: mol_type = other DNA
gtcgttgctttcctccttct

SEQ ID NO: 48218 - DNA, 20 bp, synthetic construct
  misc_feature 1..20: note = Description of Artificial Sequence: Synthetic oligonucleotide
  misc_feature 1..20: note = Target: SCN10A; (-) strand; PAM type: YTN; PAM sequence: CTG
  source 1..20: mol_type = other DNA
accctggtcgttgctttcct

SEQ ID NO: 48219 - DNA, 20 bp, synthetic construct
  misc_feature 1..20: note = Description of Artificial Sequence: Synthetic oligonucleotide
  misc_feature 1..20: note = Target: SCN10A; (-) strand; PAM type: YTN; PAM sequence: CTC
  source 1..20: mol_type = other DNA
agataaaaagatatgaagga

SEQ ID NO: 48220 - DNA, 20 bp, synthetic construct
  misc_feature 1..20: note = Description of Artificial Sequence: Synthetic oligonucleotide
  misc_feature 1..20: note = Target: SCN10A; (-) strand; PAM type: YTN; PAM sequence: CTG
  source 1..20: mol_type = other DNA
gtgaggggctcagataaaaa

SEQ ID NO: 48221 - DNA, 20 bp, synthetic construct
  misc_feature 1..20: note = Description of Artificial Sequence: Synthetic oligonucleotide
  misc_feature 1..20: note = Target: SCN10A; (-) strand; PAM type: YTN; PAM sequence: CTC
  source 1..20: mol_type = other DNA
aggctggtgaggggctcaga

SEQ ID NO: 48222 - DNA, 20 bp, synthetic construct
  misc_feature 1..20: note = Description of Artificial Sequence: Synthetic oligonucleotide
  misc_feature 1..20: note = Target: SCN10A; (-) strand; PAM type: YTN; PAM sequence: TTC
  source 1..20: mol_type = other DNA
tcaggctggtgaggggctca

SEQ ID NO: 48223 - DNA, 20 bp, synthetic construct
  misc_feature 1..20: note = Description of Artificial Sequence: Synthetic oligonucleotide
  misc_feature 1..20: note = Target: SCN10A; (-) strand; PAM type: YTN; PAM sequence: TTT
  source 1..20: mol_type = other DNA
ctcaggctggtgaggggctc

SEQ ID NO: 48224 - DNA, 20 bp, synthetic construct
  misc_feature 1..20: note = Description of Artificial Sequence: Synthetic oligonucleotide
  misc_feature 1..20: note = Target: SCN10A; (-) strand; PAM type: YTN; PAM sequence: CTG
  source 1..20: mol_type = other DNA
tttctcaggctggtgagggg

SEQ ID NO: 48225 - DNA, 20 bp, synthetic construct
  misc_feature 1..20: note = Description of Artificial Sequence: Synthetic oligonucleotide
  misc_feature 1..20: note = Target: SCN10A; (-) strand; PAM type: YTN; PAM sequence: TTG
  source 1..20: mol_type = other DNA
tctgtttctcaggctggtga

SEQ ID NO: 48226 - DNA, 20 bp, synthetic construct
  misc_feature 1..20: note = Description of Artificial Sequence: Synthetic oligonucleotide
  misc_feature 1..20: note = Target: SCN10A; (-) strand; PAM type: YTN; PAM sequence: CTC
  source 1..20: mol_type = other DNA
cataagaaggatgcattgtc

SEQ ID NO: 48227 - DNA, 20 bp, synthetic construct
  misc_feature 1..20: note = Description of Artificial Sequence: Synthetic oligonucleotide
  misc_feature 1..20: note = Target: SCN10A; (-) strand; PAM type: YTN; PAM sequence: TTC
  source 1..20: mol_type = other DNA
tccataagaaggatgcattg

SEQ ID NO: 48228 - DNA, 20 bp, synthetic construct
  misc_feature 1..20: note = Description of Artificial Sequence: Synthetic oligonucleotide
  misc_feature 1..20: note = Target: SCN10A; (-) strand; PAM type: YTN; PAM sequence: CTT
  source 1..20: mol_type = other DNA
ctccataagaaggatgcatt

SEQ ID NO: 48229 - DNA, 20 bp, synthetic construct
  misc_feature 1..20: note = Description of Artificial Sequence: Synthetic oligonucleotide
  misc_feature 1..20: note = Target: SCN10A; (-) strand; PAM type: YTN; PAM sequence: TTC
  source 1..20: mol_type = other DNA
ttctccataagaaggatgca

SEQ ID NO: 48230 - DNA, 20 bp, synthetic construct
  misc_feature 1..20: note = Description of Artificial Sequence: Synthetic oligonucleotide
  misc_feature 1..20: note = Target: SCN10A; (-) strand; PAM type: YTN; PAM sequence: TTT
  source 1..20: mol_type = other DNA
cttctccataagaaggatgc

SEQ ID NO: 48231 - DNA, 20 bp, synthetic construct
  misc_feature 1..20: note = Description of Artificial Sequence: Synthetic oligonucleotide
  misc_feature 1..20: note = Target: SCN10A; (-) strand; PAM type: YTN; PAM sequence: TTT
  source 1..20: mol_type = other DNA
tcttctccataagaaggatg

SEQ ID NO: 48232 - DNA, 20 bp, synthetic construct
  misc_feature 1..20: note = Description of Artificial Sequence: Synthetic oligonucleotide
  misc_feature 1..20: note = Target: SCN10A; (-) strand; PAM type: YTN; PAM sequence: CTG
  source 1..20: mol_type = other DNA
ttttcttctccataagaagg

SEQ ID NO: 48233 - DNA, 20 bp, synthetic construct
  misc_feature 1..20: note = Description of Artificial Sequence: Synthetic oligonucleotide
  misc_feature 1..20: note = Target: SCN10A; (-) strand; PAM type: YTN; PAM sequence: CTC
  source 1..20: mol_type = other DNA
agcctgttttcttctccata

SEQ ID NO: 48234 - DNA, 20 bp, synthetic construct
  misc_feature 1..20: note = Description of Artificial Sequence: Synthetic oligonucleotide
  misc_feature 1..20: note = Target: SCN10A; (-) strand; PAM type: YTN; PAM sequence: CTC
  source 1..20: mol_type = other DNA
tcagcctgttttcttctcca

SEQ ID NO: 48235 - DNA, 20 bp, synthetic construct
  misc_feature 1..20: note = Description of Artificial Sequence: Synthetic oligonucleotide
  misc_feature 1..20: note = Target: SCN10A; (-) strand; PAM type: YTN; PAM sequence: TTA
  source 1..20: mol_type = other DNA
aactctcagcctgttttctt

SEQ ID NO: 48236 - DNA, 20 bp, synthetic construct
  misc_feature 1..20: note = Description of Artificial Sequence: Synthetic oligonucleotide
  misc_feature 1..20: note = Target: SCN10A; (-) strand; PAM type: YTN; PAM sequence: CTT
  source 1..20: mol_type = other DNA
aaactctcagcctgttttct

SEQ ID NO: 48237 - DNA, 20 bp, synthetic construct
  misc_feature 1..20: note = Description of Artificial Sequence: Synthetic oligonucleotide
  misc_feature 1..20: note = Target: SCN10A; (-) strand; PAM type: YTN; PAM sequence: TTG
  source 1..20: mol_type = other DNA
tggcatgagaaagtcactta

SEQ ID NO: 48238 - DNA, 20 bp, synthetic construct
  misc_feature 1..20: note = Description of Artificial Sequence: Synthetic oligonucleotide
  misc_feature 1..20: note = Target: SCN10A; (-) strand; PAM type: YTN; PAM sequence: CTT
  source 1..20: mol_type = other DNA
gtggcatgagaaagtcactt

SEQ ID NO: 48239 - DNA, 20 bp, synthetic construct
  misc_feature 1..20: note = Description of Artificial Sequence: Synthetic oligonucleotide
  misc_feature 1..20: note = Target: SCN10A; (-) strand; PAM type: YTN; PAM sequence: TTG
  source 1..20: mol_type = other DNA
aatcagtcttgtggcatgag

SEQ ID NO: 48240 - DNA, 20 bp, synthetic construct
  misc_feature 1..20: note = Description of Artificial Sequence: Synthetic oligonucleotide
  misc_feature 1..20: note = Target: SCN10A; (-) strand; PAM type: YTN; PAM sequence: TTT
  source 1..20: mol_type = other DNA
gaatcagtcttgtggcatga

SEQ ID NO: 48241 - DNA, 20 bp, synthetic construct
  misc_feature 1..20: note = Description of Artificial Sequence: Synthetic oligonucleotide
  misc_feature 1..20: note = Target: SCN10A; (-) strand; PAM type: YTN; PAM sequence: CTT
  source 1..20: mol_type = other DNA
tgaatcagtcttgtggcatg

SEQ ID NO: 48242 - DNA, 20 bp, synthetic construct
  misc_feature 1..20: note = Description of Artificial Sequence: Synthetic oligonucleotide
  misc_feature 1..20: note = Target: SCN10A; (-) strand; PAM type: YTN; PAM sequence: CTC
  source 1..20: mol_type = other DNA
tttgaatcagtcttgtggca

SEQ ID NO: 48243 - DNA, 20 bp, synthetic construct
  misc_feature 1..20: note = Description of Artificial Sequence: Synthetic oligonucleotide
  misc_feature 1..20: note = Target: SCN10A; (-) strand; PAM type: YTN; PAM sequence: CTC
  source 1..20: mol_type = other DNA
catagatactctttgaatca

SEQ ID NO: 48244 - DNA, 20 bp, synthetic construct
  misc_feature 1..20: note = Description of Artificial Sequence: Synthetic oligonucleotide
  misc_feature 1..20: note = Target: SCN10A; (-) strand; PAM type: YTN; PAM sequence: CTA
  source 1..20: mol_type = other DNA
caagggacactccatagata

SEQ ID NO: 48245 - DNA, 20 bp, synthetic construct
  misc_feature 1..20: note = Description of Artificial Sequence: Synthetic oligonucleotide
  misc_feature 1..20: note = Target: SCN10A; (-) strand; PAM type: YTN; PAM sequence: TTG
  source 1..20: mol_type = other DNA
cctacaagggacactccata

SEQ ID NO: 48246 - DNA, 20 bp, synthetic construct
  misc_feature 1..20: note = Description of Artificial Sequence: Synthetic oligonucleotide
  misc_feature 1..20: note = Target: SCN10A; (-) strand; PAM type: YTN; PAM sequence: CTT
  source 1..20: mol_type = other DNA
gcctacaagggacactccat

SEQ ID NO: 48247 - DNA, 20 bp, synthetic construct
  misc_feature 1..20: note = Description of Artificial Sequence: Synthetic oligonucleotide
  misc_feature 1..20: note = Target: SCN10A; (-) strand; PAM type: YTN; PAM sequence: CTG
  source 1..20: mol_type = other DNA
acttgcctacaagggacact

SEQ ID NO: 48248 - DNA, 20 bp, synthetic construct
  misc_feature 1..20: note = Description of Artificial Sequence: Synthetic oligonucleotide
  misc_feature 1..20: note = Target: SCN10A; (-) strand; PAM type: YTN; PAM sequence: CTA
  source 1..20: mol_type = other DNA
ccccccaccacaccacactg

SEQ ID NO: 48249 - DNA, 20 bp, synthetic construct
  misc_feature 1..20: note = Description of Artificial Sequence: Synthetic oligonucleotide
  misc_feature 1..20: note = Target: SCN10A; (-) strand; PAM type: YTN; PAM sequence: CTC
  source 1..20: mol_type = other DNA
aaccctaccccccaccacac

SEQ ID NO: 48250 - DNA, 20 bp, synthetic construct
  misc_feature 1..20: note = Description of Artificial Sequence: Synthetic oligonucleotide
  misc_feature 1..20: note = Target: SCN10A; (-) strand; PAM type: YTN; PAM sequence: CTG
  source 1..20: mol_type = other DNA
gaagacacaagacctcaacc

SEQ ID NO: 48251 - DNA, 20 bp, synthetic construct
  misc_feature 1..20: note = Description of Artificial Sequence: Synthetic oligonucleotide
  misc_feature 1..20: note = Target: SCN10A; (-) strand; PAM type: YTN; PAM sequence: CTC
  source 1..20: mol_type = other DNA
tggaagacacaagacctcaa

SEQ ID NO: 48252 - DNA, 20 bp, synthetic construct
  misc_feature 1..20: note = Description of Artificial Sequence: Synthetic oligonucleotide
  misc_feature 1..20: note = Target: SCN10A; (-) strand; PAM type: YTN; PAM sequence: CTG
  source 1..20: mol_type = other DNA
gtgagggtggatccagggtg

SEQ ID NO: 48253 - DNA, 20 bp, synthetic construct
  misc_feature 1..20: note = Description of Artificial Sequence: Synthetic oligonucleotide
  misc_feature 1..20: note = Target: SCN10A; (-) strand; PAM type: YTN; PAM sequence: TTG
  source 1..20: mol_type = other DNA
tatagctggtgagggtggat

SEQ ID NO: 48254 - DNA, 20 bp, synthetic construct
  misc_feature 1..20: note = Description of Artificial Sequence: Synthetic oligonucleotide
  misc_feature 1..20: note = Target: SCN10A; (-) strand; PAM type: YTN; PAM sequence: CTG
  source 1..20: mol_type = other DNA
cccaaaattgtatagctggt

SEQ ID NO: 48255 - DNA, 20 bp, synthetic construct
  misc_feature 1..20: note = Description of Artificial Sequence: Synthetic oligonucleotide
  misc_feature 1..20: note = Target: SCN10A; (-) strand; PAM type: YTN; PAM sequence: TTA
  source 1..20: mol_type = other DNA
aatatcctgcccaaaattgt

SEQ ID NO: 48256 - DNA, 20 bp, synthetic construct
  misc_feature 1..20: note = Description of Artificial Sequence: Synthetic oligonucleotide
  misc_feature 1..20: note = Target: SCN10A; (-) strand; PAM type: YTN; PAM sequence: CTC
  source 1..20: mol_type = other DNA
agagaggttaaatatcctgc

SEQ ID NO: 48257 - DNA, 20 bp, synthetic construct
  misc_feature 1..20: note = Description of Artificial Sequence: Synthetic oligonucleotide
  misc_feature 1..20: note = Target: SCN10A; (-) strand; PAM type: YTN; PAM sequence: CTA
  source 1..20: mol_type = other DNA
agactcagagaggttaaata

SEQ ID NO: 48258 - DNA, 20 bp, synthetic construct
  misc_feature 1..20: note = Description of Artificial Sequence: Synthetic oligonucleotide
  misc_feature 1..20: note = Target: SCN10A; (-) strand; PAM type: YTN; PAM sequence: CTC
  source 1..20: mol_type = other DNA
acatgacaaaagagagcact

SEQ ID NO: 48259 - DNA, 20 bp, synthetic construct
  misc_feature 1..20: note = Description of Artificial Sequence: Synthetic oligonucleotide
  misc_feature 1..20: note = Target: SCN10A; (-) strand; PAM type: YTN; PAM sequence: TTA
  source 1..20: mol_type = other DNA
acatcaccctcacatgacaa

SEQ ID NO: 48260 - DNA, 20 bp, synthetic construct
  misc_feature 1..20: note = Description of Artificial Sequence: Synthetic oligonucleotide
  misc_feature 1..20: note = Target: SCN10A; (-) strand; PAM type: YTN; PAM sequence: TTA
  source 1..20: mol_type = other DNA
tgaggttaacatcaccctca

SEQ ID NO: 48261 - DNA, 20 bp, synthetic construct
  misc_feature 1..20: note = Description of Artificial Sequence: Synthetic oligonucleotide
  misc_feature 1..20: note = Target: SCN10A; (-) strand; PAM type: YTN; PAM sequence: TTC
  source 1..20: mol_type = other DNA
agtgtcacaacaacattatg

SEQ ID NO: 48262 - DNA, 20 bp, synthetic construct
  misc_feature 1..20: note = Description of Artificial Sequence: Synthetic oligonucleotide
  misc_feature 1..20: note = Target: SCN10A; (-) strand; PAM type: YTN; PAM sequence: TTT
  source 1..20: mol_type = other DNA
cagtgtcacaacaacattat

SEQ ID NO: 48263 - DNA, 20 bp, synthetic construct
  misc_feature 1..20: note = Description of Artificial Sequence: Synthetic oligonucleotide
  misc_feature 1..20: note = Target: SCN10A; (-) strand; PAM type: YTN; PAM sequence: TTA
  source 1..20: mol_type = other DNA
tttcagtgtcacaacaacat

SEQ ID NO: 48264 - DNA, 20 bp, synthetic construct
  misc_feature 1..20: note = Description of Artificial Sequence: Synthetic oligonucleotide
  misc_feature 1..20: note = Target: SCN10A; (-) strand; PAM type: YTN; PAM sequence: TTA
  source 1..20: mol_type = other DNA
tgaatgttatttcagtgtca

SEQ ID NO: 48265 - DNA, 20 bp, synthetic construct
  misc_feature 1..20: note = Description of Artificial Sequence: Synthetic oligonucleotide
  misc_feature 1..20: note = Target: SCN10A; (-) strand; PAM type: YTN; PAM sequence: TTT
  source 1..20: mol_type = other DNA
atgaatgttatttcagtgtc

SEQ ID NO: 48266 - DNA, 20 bp, synthetic construct
  misc_feature 1..20: note = Description of Artificial Sequence: Synthetic oligonucleotide
  misc_feature 1..20: note = Target: SCN10A; (-) strand; PAM type: YTN; PAM sequence: CTT
  source 1..20: mol_type = other DNA
tatgaatgttatttcagtgt

SEQ ID NO: 48267 - DNA, 20 bp, synthetic construct
  misc_feature 1..20: note = Description of Artificial Sequence: Synthetic oligonucleotide
  misc_feature 1..20: note = Target: SCN10A; (-) strand; PAM type: YTN; PAM sequence: CTG
  source 1..20: mol_type = other DNA
caatgagtcaggtgctttat

SEQ ID NO: 48268 - DNA, 20 bp, synthetic construct
  misc_feature 1..20: note = Description of Artificial Sequence: Synthetic oligonucleotide
  misc_feature 1..20: note = Target: SCN10A; (-) strand; PAM type: YTN; PAM sequence: TTG
  source 1..20: mol_type = other DNA
gtgcctgcaatgagtcaggt

SEQ ID NO: 48269 - DNA, 20 bp, synthetic construct
  misc_feature 1..20: note = Description of Artificial Sequence: Synthetic oligonucleotide
  misc_feature 1..20: note = Target: SCN10A; (-) strand; PAM type: YTN; PAM sequence: CTT
  source 1..20: mol_type = other DNA
ggtgcctgcaatgagtcagg

SEQ ID NO: 48270 - DNA, 20 bp, synthetic construct
  misc_feature 1..20: note = Description of Artificial Sequence: Synthetic oligonucleotide
  misc_feature 1..20: note = Target: SCN10A; (-) strand; PAM type: YTN; PAM sequence: TTA
  source 1..20: mol_type = other DNA
aagcaagaaagtcatgtgct

SEQ ID NO: 48271 - DNA, 20 bp, synthetic construct
  misc_feature 1..20: note = Description of Artificial Sequence: Synthetic oligonucleotide
  misc_feature 1..20: note = Target: SCN10A; (-) strand; PAM type: YTN; PAM sequence: TTT
  source 1..20: mol_type = other DNA
aaagcaagaaagtcatgtgc

SEQ ID NO: 48272 - DNA, 20 bp, synthetic construct
  misc_feature 1..20: note = Description of Artificial Sequence: Synthetic oligonucleotide
  misc_feature 1..20: note = Target: SCN10A; (-) strand; PAM type: YTN; PAM sequence: TTT
  source 1..20: mol_type = other DNA
taaagcaagaaagtcatgtg

SEQ ID NO: 48273 - DNA, 20 bp, synthetic construct
  misc_feature 1..20: note = Description of Artificial Sequence: Synthetic oligonucleotide
  misc_feature 1..20: note = Target: SCN10A; (-) strand; PAM type: YTN; PAM sequence: TTT
  source 1..20: mol_type = other DNA
ttaaagcaagaaagtcatgt

SEQ ID NO: 48274 - DNA, 20 bp, synthetic construct
  misc_feature 1..20: note = Description of Artificial Sequence: Synthetic oligonucleotide
  misc_feature 1..20: note = Target: SCN10A; (-) strand; PAM type: YTN; PAM sequence: TTT
  source 1..20: mol_type = other DNA
tttaaagcaagaaagtcatg

SEQ ID NO: 48275 - DNA, 20 bp, synthetic construct
  misc_feature 1..20: note = Description of Artificial Sequence: Synthetic oligonucleotide
  misc_feature 1..20: note = Target: SCN10A; (-) strand; PAM type: YTN; PAM sequence: CTT
  source 1..20: mol_type = other DNA
ttttaaagcaagaaagtcat

SEQ ID NO: 48276 - DNA, 20 bp, synthetic construct
  misc_feature 1..20: note = Description of Artificial Sequence: Synthetic oligonucleotide
  misc_feature 1..20: note = Target: SCN10A; (-) strand; PAM type: YTN; PAM sequence: TTC
  source 1..20: mol_type = other DNA
ccacagtgtcagaggaaagt

SEQ ID NO: 48277 - DNA, 20 bp, synthetic construct
  misc_feature 1..20: note = Description of Artificial Sequence: Synthetic oligonucleotide
  misc_feature 1..20: note = Target: SCN10A; (-) strand; PAM type: YTN; PAM sequence: TTT
  source 1..20: mol_type = other DNA
cccacagtgtcagaggaaag

SEQ ID NO: 48278 - DNA, 20 bp, synthetic construct
  misc_feature 1..20: note = Description of Artificial Sequence: Synthetic oligonucleotide
  misc_feature 1..20: note = Target: SCN10A; (-) strand; PAM type: YTN; PAM sequence: CTT
  source 1..20: mol_type = other DNA
tcccacagtgtcagaggaaa

SEQ ID NO: 48279 - DNA, 20 bp, synthetic construct
  misc_feature 1..20: note = Description of Artificial Sequence: Synthetic oligonucleotide
  misc_feature 1..20: note = Target: SCN10A; (-) strand; PAM type: YTN; PAM sequence: TTA
  source 1..20: mol_type = other DNA
gaaaagtggaagcaagagag

SEQ ID NO: 48280 - DNA, 20 bp, synthetic construct
  misc_feature 1..20: note = Description of Artificial Sequence: Synthetic oligonucleotide
  misc_feature 1..20: note = Target: SCN10A; (-) strand; PAM type: YTN; PAM sequence: CTA
  source 1..20: mol_type = other DNA
cagttagaaaagtggaagca

SEQ ID NO: 48281 - DNA, 20 bp, synthetic construct
  misc_feature 1..20: note = Description of Artificial Sequence: Synthetic oligonucleotide
  misc_feature 1..20: note = Target: SCN10A; (-) strand; PAM type: YTN; PAM sequence: TTC
  source 1..20: mol_type = other DNA
tacagttagaaaagtggaag

SEQ ID NO: 48282 - DNA, 20 bp, synthetic construct
  misc_feature 1..20: note = Description of Artificial Sequence: Synthetic oligonucleotide
  misc_feature 1..20: note = Target: SCN10A; (-) strand; PAM type: YTN; PAM sequence: CTC
  source 1..20: mol_type = other DNA
attctacagttagaaaagtg

SEQ ID NO: 48283 - DNA, 20 bp, synthetic construct
  misc_feature 1..20: note = Description of Artificial Sequence: Synthetic oligonucleotide
  misc_feature 1..20: note = Target: SCN10A; (-) strand; PAM type: YTN; PAM sequence: TTG
  source 1..20: mol_type = other DNA
agcccacaccctcattctac

SEQ ID NO: 48284 - DNA, 20 bp, synthetic construct
  misc_feature 1..20: note = Description of Artificial Sequence: Synthetic oligonucleotide
  misc_feature 1..20: note = Target: SCN10A; (-) strand; PAM type: YTN; PAM sequence: TTT
  source 1..20: mol_type = other DNA
gagcccacaccctcattcta

SEQ ID NO: 48285 - DNA, 20 bp, synthetic construct
  misc_feature 1..20: note = Description of Artificial Sequence: Synthetic oligonucleotide
  misc_feature 1..20: note = Target: SCN10A; (-) strand; PAM type: YTN; PAM sequence: TTA
  source 1..20: mol_type = other DNA
tggaatagacatttgagccc

SEQ ID NO: 48286 - DNA, 20 bp, synthetic construct
  misc_feature 1..20: note = Description of Artificial Sequence: Synthetic oligonucleotide
  misc_feature 1..20: note = Target: SCN10A; (-) strand; PAM type: YTN; PAM sequence: CTT
  source 1..20: mol_type = other DNA
atggaatagacatttgagcc

SEQ ID NO: 48287 - DNA, 20 bp, synthetic construct
  misc_feature 1..20: note = Description of Artificial Sequence: Synthetic oligonucleotide
  misc_feature 1..20: note = Target: SCN10A; (-) strand; PAM type: YTN; PAM sequence: CTA
  source 1..20: mol_type = other DNA
agaccacagagggccttatg

SEQ ID NO: 48288 - DNA, 20 bp, synthetic construct
  misc_feature 1..20: note = Description of Artificial Sequence: Synthetic oligonucleotide
  misc_feature 1..20: note = Target: SCN10A; (-) strand; PAM type: YTN; PAM sequence: TTC
  source 1..20: mol_type = other DNA
ccaagaagtcagcctaagac

SEQ ID NO: 48289 - DNA, 20 bp, synthetic construct
  misc_feature 1..20: note = Description of Artificial Sequence: Synthetic oligonucleotide
  misc_feature 1..20: note = Target: SCN10A; (-) strand; PAM type: YTN; PAM sequence: TTA
  source 1..20: mol_type = other DNA
ttcccaagaagtcagcctaa

SEQ ID NO: 48290 - DNA, 20 bp, synthetic construct
  misc_feature 1..20: note = Description of Artificial Sequence: Synthetic oligonucleotide
  misc_feature 1..20: note = Target: SCN10A; (-) strand; PAM type: YTN; PAM sequence: CTT
  source 1..20: mol_type = other DNA
attcccaagaagtcagccta

SEQ ID NO: 48291 - DNA, 20 bp, synthetic construct
  misc_feature 1..20: note = Description of Artificial Sequence: Synthetic oligonucleotide
  misc_feature 1..20: note = Target: SCN10A; (-) strand; PAM type: YTN; PAM sequence: TTG
  source 1..20: mol_type = other DNA
atatgaaaaggaaaaatgga

SEQ ID NO: 48292 - DNA, 20 bp, synthetic construct
  misc_feature 1..20: note = Description of Artificial Sequence: Synthetic oligonucleotide
  misc_feature 1..20: note = Target: SCN10A; (-) strand; PAM type: YTN; PAM sequence: CTA
  source 1..20: mol_type = other DNA
aagttgatatgaaaaggaaa

SEQ ID NO: 48293 - DNA, 20 bp, synthetic construct
  misc_feature 1..20: note = Description of Artificial Sequence: Synthetic oligonucleotide
  misc_feature 1..20: note = Target: SCN10A; (-) strand; PAM type: YTN; PAM sequence: CTG
  source 1..20: mol_type = other DNA
aggtcacatcctaaagttga

SEQ ID NO: 48294 - DNA, 20 bp, synthetic construct
  misc_feature 1..20: note = Description of Artificial Sequence: Synthetic oligonucleotide
  misc_feature 1..20: note = Target: SCN10A; (-) strand; PAM type: YTN; PAM sequence: CTA
  source 1..20: mol_type = other DNA
ggctgaggtcacatcctaaa

SEQ ID NO: 48295 - DNA, 20 bp, synthetic construct
  misc_feature 1..20: note = Description of Artificial Sequence: Synthetic oligonucleotide
  misc_feature 1..20: note = Target: SCN10A; (-) strand; PAM type: YTN; PAM sequence: TTG
  source 1..20: mol_type = other DNA
gcagcacctaggctgaggtc

SEQ ID NO: 48296 - DNA, 20 bp, synthetic construct
  misc_feature 1..20: note = Description of Artificial Sequence: Synthetic oligonucleotide
  misc_feature 1..20: note = Target: SCN10A; (-) strand; PAM type: YTN; PAM sequence: TTT
  source 1..20: mol_type = other DNA
ggcagcacctaggctgaggt

SEQ ID NO: 48297 - DNA, 20 bp, synthetic construct
  misc_feature 1..20: note = Description of Artificial Sequence: Synthetic oligonucleotide
  misc_feature 1..20: note = Target: SCN10A; (-) strand; PAM type: YTN; PAM sequence: TTT
  source 1..20: mol_type = other DNA
tggcagcacctaggctgagg

SEQ ID NO: 48298 - DNA, 20 bp, synthetic construct
  misc_feature 1..20: note = Description of Artificial Sequence: Synthetic oligonucleotide
  misc_feature 1..20: note = Target: SCN10A; (-) strand; PAM type: YTN; PAM sequence: CTC
  source 1..20: mol_type = other DNA
atgttttggcagcacctagg

SEQ ID NO: 48299 - DNA, 20 bp, synthetic construct
  misc_feature 1..20: note = Description of Artificial Sequence: Synthetic oligonucleotide
  misc_feature 1..20: note = Target: SCN10A; (-) strand; PAM type: YTN; PAM sequence: CTG
  source 1..20: mol_type = other DNA
gaacatggtggaatcagcat

SEQ ID NO: 48300 - DNA, 20 bp, synthetic construct
  misc_feature 1..20: note = Description of Artificial Sequence: Synthetic oligonucleotide
  misc_feature 1..20: note = Target: SCN10A; (-) strand; PAM type: YTN; PAM sequence: TTC
  source 1..20: mol_type = other DNA
tggaacatggtggaatcagc

SEQ ID NO: 48301 - DNA, 20 bp, synthetic construct
  misc_feature 1..20: note = Description of Artificial Sequence: Synthetic oligonucleotide
  misc_feature 1..20: note = Target: SCN10A; (-) strand; PAM type: YTN; PAM sequence: CTG
  source 1..20: mol_type = other DNA
tgaaaggggcagcagtaggt

SEQ ID NO: 48302 - DNA, 20 bp, synthetic construct
  misc_feature 1..20: note = Description of Artificial Sequence: Synthetic oligonucleotide
  misc_feature 1..20: note = Target: SCN10A; (-) strand; PAM type: YTN; PAM sequence: CTC
  source 1..20: mol_type = other DNA
cgccataatccagggctgtg

SEQ ID NO: 48303 - DNA, 20 bp, synthetic construct
  misc_feature 1..20: note = Description of Artificial Sequence: Synthetic oligonucleotide
  misc_feature 1..20: note = Target: SCN10A; (-) strand; PAM type: YTN; PAM sequence: CTC
  source 1..20: mol_type = other DNA
cctccgccataatccagggc

SEQ ID NO: 48304 - DNA, 20 bp, synthetic construct
  misc_feature 1..20: note = Description of Artificial Sequence: Synthetic oligonucleotide
  misc_feature 1..20: note = Target: SCN10A; (-) strand; PAM type: YTN; PAM sequence: CTA
  source 1..20: mol_type = other DNA
gaaaccactccctccgccat

SEQ ID NO: 48305 - DNA, 20 bp, synthetic construct
  misc_feature 1..20: note = Description of Artificial Sequence: Synthetic oligonucleotide
  misc_feature 1..20: note = Target: SCN10A; (-) strand; PAM type: YTN; PAM sequence: TTG
  source 1..20: mol_type = other DNA
tccctagaaaccactccctc

SEQ ID NO: 48306 - DNA, 20 bp, synthetic construct
  misc_feature 1..20: note = Description of Artificial Sequence: Synthetic oligonucleotide
  misc_feature 1..20: note = Target: SCN10A; (-) strand; PAM type: YTN; PAM sequence: CTT
  source 1..20: mol_type = other DNA
gtccctagaaaccactccct

SEQ ID NO: 48307 - DNA, 20 bp, synthetic construct
  misc_feature 1..20: note = Description of Artificial Sequence: Synthetic oligonucleotide
  misc_feature 1..20: note = Target: SCN10A; (-) strand; PAM type: YTN; PAM sequence: CTA
  source 1..20: mol_type = other DNA
cttgtccctagaaaccactc

SEQ ID NO: 48308 - DNA, 20 bp, synthetic construct
  misc_feature 1..20: note = Description of Artificial Sequence: Synthetic oligonucleotide
  misc_feature 1..20: note = Target: SCN10A; (-) strand; PAM type: YTN; PAM sequence: TTA
  source 1..20: mol_type = other DNA
ggtggagggggaaggcccag

SEQ ID NO: 48309 - DNA, 20 bp, synthetic construct
  misc_feature 1..20: note = Description of Artificial Sequence: Synthetic oligonucleotide
  misc_feature 1..20: note = Target: SCN10A; (-) strand; PAM type: YTN; PAM sequence: CTT
  source 1..20: mol_type = other DNA
aggtggagggggaaggccca

SEQ ID NO: 48310 - DNA, 20 bp, synthetic construct
  misc_feature 1..20: note = Description of Artificial Sequence: Synthetic oligonucleotide
  misc_feature 1..20: note = Target: SCN10A; (-) strand; PAM type: YTN; PAM sequence: CTG
  source 1..20: mol_type = other DNA
cagacttaggtggaggggga

SEQ ID NO: 48311 - DNA, 20 bp, synthetic construct
  misc_feature 1..20: note = Description of Artificial Sequence: Synthetic oligonucleotide
  misc_feature 1..20: note = Target: SCN10A; (-) strand; PAM type: YTN; PAM sequence: TTA
  source 1..20: mol_type = other DNA
taggctgcagacttaggtgg

SEQ ID NO: 48312 - DNA, 20 bp, synthetic construct
  misc_feature 1..20: note = Description of Artificial Sequence: Synthetic oligonucleotide
  misc_feature 1..20: note = Target: SCN10A; (-) strand; PAM type: YTN; PAM sequence: CTT
  source 1..20: mol_type = other DNA
ataggctgcagacttaggtg

SEQ ID NO: 48313 - DNA, 20 bp, synthetic construct
  misc_feature 1..20: note = Description of Artificial Sequence: Synthetic oligonucleotide
  misc_feature 1..20: note = Target: SCN10A; (-) strand; PAM type: YTN; PAM sequence: TTC
  source 1..20: mol_type = other DNA
ttataggctgcagacttagg

SEQ ID NO: 48314 - DNA, 20 bp, synthetic construct
  misc_feature 1..20: note = Description of Artificial Sequence: Synthetic oligonucleotide
  misc_feature 1..20: note = Target: SCN10A; (-) strand; PAM type: YTN; PAM sequence: CTT
  source 1..20: mol_type = other DNA
cttataggctgcagacttag

SEQ ID NO: 48315 - DNA, 20 bp, synthetic construct
  misc_feature 1..20: note = Description of Artificial Sequence: Synthetic oligonucleotide
  misc_feature 1..20: note = Target: SCN10A; (-) strand; PAM type: YTN; PAM sequence: TTG
  source 1..20: mol_type = other DNA
gggtccagcttcttataggc

SEQ ID NO: 48316 - DNA, 20 bp, synthetic construct
  misc_feature 1..20: note = Description of Artificial Sequence: Synthetic oligonucleotide
  misc_feature 1..20: note = Target: SCN10A; (-) strand; PAM type: YTN; PAM sequence: TTT
  source 1..20: mol_type = other DNA
ggggtccagcttcttatagg

SEQ ID NO: 48317 - DNA, 20 bp, synthetic construct
  misc_feature 1..20: note = Description of Artificial Sequence: Synthetic oligonucleotide
  misc_feature 1..20: note = Target: SCN10A; (-) strand; PAM type: YTN; PAM sequence: CTT
  source 1..20: mol_type = other DNA
tggggtccagcttcttatag

SEQ ID NO: 48318 - DNA, 20 bp, synthetic construct
  misc_feature 1..20: note = Description of Artificial Sequence: Synthetic oligonucleotide
  misc_feature 1..20: note = Target: SCN10A; (-) strand; PAM type: YTN; PAM sequence: CTG
  source 1..20: mol_type = other DNA
gctttggggtccagcttctt

SEQ ID NO: 48319 - DNA, 20 bp, synthetic construct
  misc_feature 1..20: note = Description of Artificial Sequence: Synthetic oligonucleotide
  misc_feature 1..20: note = Target: SCN10A; (-) strand; PAM type: YTN; PAM sequence: CTG
  source 1..20: mol_type = other DNA
tctggctttggggtccagct

SEQ ID NO: 48320 - DNA, 20 bp, synthetic construct
  misc_feature 1..20: note = Description of Artificial Sequence: Synthetic oligonucleotide
  misc_feature 1..20: note = Target: SCN10A; (-) strand; PAM type: YTN; PAM sequence: TTC
  source 1..20: mol_type = other DNA
accagaactgtctggctttg

SEQ ID NO: 48321 - DNA, 20 bp, synthetic construct
  misc_feature 1..20: note = Description of Artificial Sequence: Synthetic oligonucleotide
  misc_feature 1..20: note = Target: SCN10A; (-) strand; PAM type: YTN; PAM sequence: CTG
  source 1..20: mol_type = other DNA
gattcaccagaactgtctgg

SEQ ID NO: 48322 - DNA, 20 bp, synthetic construct
  misc_feature 1..20: note = Description of Artificial Sequence: Synthetic oligonucleotide
  misc_feature 1..20: note = Target: SCN10A; (-) strand; PAM type: YTN; PAM sequence: CTA
  source 1..20: mol_type = other DNA
ctggattcaccagaactgtc

SEQ ID NO: 48323 - DNA, 20 bp, synthetic construct
  misc_feature 1..20: note = Description of Artificial Sequence: Synthetic oligonucleotide
  misc_feature 1..20: note = Target: SCN10A; (-) strand; PAM type: YTN; PAM sequence: CTG
  source 1..20: mol_type = other DNA
gaggtgacctactggattca

SEQ ID NO: 48324 - DNA, 20 bp, synthetic construct
  misc_feature 1..20: note = Description of Artificial Sequence: Synthetic oligonucleotide
  misc_feature 1..20: note = Target: SCN10A; (-) strand; PAM type: YTN; PAM sequence: TTC
  source 1..20: mol_type = other DNA
atgtccgcagcagggtccac

SEQ ID NO: 48325 - DNA, 20 bp, synthetic construct
  misc_feature 1..20: note = Description of Artificial Sequence: Synthetic oligonucleotide
  misc_feature 1..20: note = Target: SCN10A; (-) strand; PAM type: YTN; PAM sequence: CTT
  source 1..20: mol_type = other DNA
catgtccgcagcagggtcca

SEQ ID NO: 48326 - DNA, 20 bp, synthetic construct
  misc_feature 1..20: note = Description of Artificial Sequence: Synthetic oligonucleotide
  misc_feature 1..20: note = Target: SCN10A; (-) strand; PAM type: YTN; PAM sequence: CTG
  source 1..20: mol_type = other DNA
ccttcatgtccgcagcaggg

SEQ ID NO: 48327 - DNA, 20 bp, synthetic construct
  misc_feature 1..20: note = Description of Artificial Sequence: Synthetic oligonucleotide
  misc_feature 1..20: note = Target: SCN10A; (-) strand; PAM type: YTN; PAM sequence: CTA
  source 1..20: mol_type = other DNA
gaaagggtcagcatcctgcc

SEQ ID NO: 48328 - DNA, 20 bp, synthetic construct
  misc_feature 1..20: note = Description of Artificial Sequence: Synthetic oligonucleotide
  misc_feature 1..20: note = Target: SCN10A; (-) strand; PAM type: YTN; PAM sequence: TTC
  source 1..20: mol_type = other DNA
aaacacacgcacacatgata

SEQ ID NO: 48329 - DNA, 20 bp, synthetic construct
  misc_feature 1..20: note = Description of Artificial Sequence: Synthetic oligonucleotide
  misc_feature 1..20: note = Target: SCN10A; (-) strand; PAM type: YTN; PAM sequence: TTG
  source 1..20: mol_type = other DNA
cgtgtgtgtgtgtgtgtgtg

SEQ ID NO: 48330 - DNA, 20 bp, synthetic construct
  misc_feature 1..20: note = Description of Artificial Sequence: Synthetic oligonucleotide
  misc_feature 1..20: note = Target: SCN10A; (-) strand; PAM type: YTN; PAM sequence: CTT
  source 1..20: mol_type = other DNA
gcgtgtgtgtgtgtgtgtgt

SEQ ID NO: 48331 - DNA, 20 bp, synthetic construct
  misc_feature 1..20: note = Description of Artificial Sequence: Synthetic oligonucleotide
  misc_feature 1..20: note = Target: SCN10A; (-) strand; PAM type: YTN; PAM sequence: CTC
  source 1..20: mol_type = other DNA
acaagacttgcgtgtgtgtg

SEQ ID NO: 48332 - DNA, 20 bp, synthetic construct
  misc_feature 1..20: note = Description of Artificial Sequence: Synthetic oligonucleotide
  misc_feature 1..20: note = Target: SCN10A; (-) strand; PAM type: YTN; PAM sequence: TTA
  source 1..20: mol_type = other DNA
agccacctcacaagacttgc

SEQ ID NO: 48333 - DNA, 20 bp, synthetic construct
  misc_feature 1..20: note = Description of Artificial Sequence: Synthetic oligonucleotide
  misc_feature 1..20: note = Target: SCN10A; (-) strand; PAM type: YTN; PAM sequence: CTG
  source 1..20: mol_type = other DNA
aattaagccacctcacaaga

SEQ ID NO: 48334 - DNA, 20 bp, synthetic construct
  misc_feature 1..20: note = Description of Artificial Sequence: Synthetic oligonucleotide
  misc_feature 1..20: note = Target: SCN10A; (-) strand; PAM type: YTN; PAM sequence: TTA
  source 1..20: mol_type = other DNA
acccctgaattaagccacct

SEQ ID NO: 48335 - DNA, 20 bp, synthetic construct
  misc_feature 1..20: note = Description of Artificial Sequence: Synthetic oligonucleotide
  misc_feature 1..20: note = Target: SCN10A; (-) strand; PAM type: YTN; PAM sequence: CTT
  source 1..20: mol_type = other DNA
aacccctgaattaagccacc

SEQ ID NO: 48336 - DNA, 20 bp, synthetic construct
  misc_feature 1..20: note = Description of Artificial Sequence: Synthetic oligonucleotide
  misc_feature 1..20: note = Target: SCN10A; (-) strand; PAM type: YTN; PAM sequence: TTC
  source 1..20: mol_type = other DNA
ttaacccctgaattaagcca

SEQ ID NO: 48337 - DNA, 20 bp, synthetic construct
  misc_feature 1..20: note = Description of Artificial Sequence: Synthetic oligonucleotide
  misc_feature 1..20: note = Target: SCN10A; (-) strand; PAM type: YTN; PAM sequence: TTT
  source 1..20: mol_type = other DNA
cttaacccctgaattaagcc

SEQ ID NO: 48338 - DNA, 20 bp, synthetic construct
  misc_feature 1..20: note = Description of Artificial Sequence: Synthetic oligonucleotide
  misc_feature 1..20: note = Target: SCN10A; (-) strand; PAM type: YTN; PAM sequence: TTT
  source 1..20: mol_type = other DNA
tcttaacccctgaattaagc

SEQ ID NO: 48339 - DNA, 20 bp, synthetic construct
  misc_feature 1..20: note = Description of Artificial Sequence: Synthetic oligonucleotide
  misc_feature 1..20: note = Target: SCN10A; (-) strand; PAM type: YTN; PAM sequence: CTT
  source 1..20: mol_type = other DNA
ttcttaacccctgaattaag

SEQ ID NO: 48340 - DNA, 20 bp, synthetic construct
  misc_feature 1..20: note = Description of Artificial Sequence: Synthetic oligonucleotide
  misc_feature 1..20: note = Target: SCN10A; (-) strand; PAM type: YTN; PAM sequence: CTG
  source 1..20: mol_type = other DNA
ccaagcccgcttttcttaac

SEQ ID NO: 48341 - DNA, 20 bp, synthetic construct
  misc_feature 1..20: note = Description of Artificial Sequence: Synthetic oligonucleotide
  misc_feature 1..20: note = Target: SCN10A; (-) strand; PAM type: YTN; PAM sequence: TTG
  source 1..20: mol_type = other DNA
aacccagacagaccggctgc

SEQ ID NO: 48342 - DNA, 20 bp, synthetic construct
  misc_feature 1..20: note = Description of Artificial Sequence: Synthetic oligonucleotide
  misc_feature 1..20: note = Target: SCN10A; (-) strand; PAM type: YTN; PAM sequence: TTT
  source 1..20: mol_type = other DNA
gaacccagacagaccggctg

SEQ ID NO: 48343 - DNA, 20 bp, synthetic construct
  misc_feature 1..20: note = Description of Artificial Sequence: Synthetic oligonucleotide
  misc_feature 1..20: note = Target: SCN10A; (-) strand; PAM type: YTN; PAM sequence: TTA
  source 1..20: mol_type = other DNA
gtggccacatcagaatttga

SEQ ID NO: 48344 - DNA, 20 bp, synthetic construct
  misc_feature 1..20: note = Description of Artificial Sequence: Synthetic oligonucleotide
  misc_feature 1..20: note = Target: SCN10A; (-) strand; PAM type: YTN; PAM sequence: TTT
  source 1..20: mol_type = other DNA
agtggccacatcagaatttg

SEQ ID NO: 48345 - DNA, 20 bp, synthetic construct
  misc_feature 1..20: note = Description of Artificial Sequence: Synthetic oligonucleotide
  misc_feature 1..20: note = Target: SCN10A; (-) strand; PAM type: YTN; PAM sequence: TTG
  source 1..20: mol_type = other DNA
agtttagtggccacatcaga

SEQ ID NO: 48346 - DNA, 20 bp, synthetic construct
  misc_feature 1..20: note = Description of Artificial Sequence: Synthetic oligonucleotide
  misc_feature 1..20: note = Target: SCN10A; (-) strand; PAM type: YTN; PAM sequence: TTC
  source 1..20: mol_type = other DNA
ccaagatcatagagttgagt

SEQ ID NO: 48347 - DNA, 20 bp, synthetic construct
  misc_feature 1..20: note = Description of Artificial Sequence: Synthetic oligonucleotide
  misc_feature 1..20: note = Target: SCN10A; (-) strand; PAM type: YTN; PAM sequence: CTT
  source 1..20: mol_type = other DNA
cccaagatcatagagttgag

SEQ ID NO: 48348 - DNA, 20 bp, synthetic construct
  misc_feature 1..20: note = Description of Artificial Sequence: Synthetic oligonucleotide
  misc_feature 1..20: note = Target: SCN10A; (-) strand; PAM type: YTN; PAM sequence: TTA
  source 1..20: mol_type = other DNA
aataatcttcccaagatcat

SEQ ID NO: 48349 - DNA, 20 bp, synthetic construct
  misc_feature 1..20: note = Description of Artificial Sequence: Synthetic oligonucleotide
  misc_feature 1..20: note = Target: SCN10A; (-) strand; PAM type: YTN; PAM sequence: TTC
  source 1..20: mol_type = other DNA
ccagatggaaaaatggagat

SEQ ID NO: 48350 - DNA, 20 bp, synthetic construct
  misc_feature 1..20: note = Description of Artificial Sequence: Synthetic oligonucleotide
  misc_feature 1..20: note = Target: SCN10A; (-) strand; PAM type: YTN; PAM sequence: TTT
  source 1..20: mol_type = other DNA
cccagatggaaaaatggaga

SEQ ID NO: 48351 - DNA, 20 bp, synthetic construct
  misc_feature 1..20: note = Description of Artificial Sequence: Synthetic oligonucleotide
  misc_feature 1..20: note = Target: SCN10A; (-) strand; PAM type: YTN; PAM sequence: CTT
  source 1..20: mol_type = other DNA
tcccagatggaaaaatggag

SEQ ID NO: 48352 - DNA, 20 bp, synthetic construct
  misc_feature 1..20: note = Description of Artificial Sequence: Synthetic oligonucleotide
  misc_feature 1..20: note = Target: SCN10A; (-) strand; PAM type: YTN; PAM sequence: TTC
  source 1..20: mol_type = other DNA
cctttcccagatggaaaaat

SEQ ID NO: 48353 - DNA, 20 bp, synthetic construct
  misc_feature 1..20: note = Description of Artificial Sequence: Synthetic oligonucleotide
  misc_feature 1..20: note = Target: SCN10A; (-) strand; PAM type: YTN; PAM sequence: TTA
  source 1..20: mol_type = other DNA
ttccctttcccagatggaaa

SEQ ID NO: 48354 - DNA, 20 bp, synthetic construct
  misc_feature 1..20: note = Description of Artificial Sequence: Synthetic oligonucleotide
  misc_feature 1..20: note = Target: SCN10A; (-) strand; PAM type: YTN; PAM sequence: TTG
  source 1..20: mol_type = other DNA
ttattccctttcccagatgg

SEQ ID NO: 48355 - DNA, 20 bp, synthetic construct
  misc_feature 1..20: note = Description of Artificial Sequence: Synthetic oligonucleotide
  misc_feature 1..20: note = Target: SCN10A; (-) strand; PAM type: YTN; PAM sequence: CTT
  source 1..20: mol_type = other DNA
gttattccctttcccagatg

SEQ ID NO: 48356 - DNA, 20 bp, synthetic construct
  misc_feature 1..20: note = Description of Artificial Sequence: Synthetic oligonucleotide
  misc_feature 1..20: note = Target: SCN10A; (-) strand; PAM type: YTN; PAM sequence: CTC
  source 1..20: mol_type = other DNA
ttgttattccctttcccaga

SEQ ID NO: 48357 - DNA, 20 bp, synthetic construct
  misc_feature 1..20: note = Description of Artificial Sequence: Synthetic oligonucleotide
  misc_feature 1..20: note = Target: SCN10A; (-) strand; PAM type: YTN; PAM sequence: CTA
  source 1..20: mol_type = other DNA
catggtaggcactcttgtta

SEQ ID NO: 48358 - DNA, 20 bp, synthetic construct
  misc_feature 1..20: note = Description of Artificial Sequence: Synthetic oligonucleotide
  misc_feature 1..20: note = Target: SCN10A; (-) strand; PAM type: YTN; PAM sequence: TTC
  source 1..20: mol_type = other DNA
acaacaaccctacatggtag

SEQ ID NO: 48359 - DNA, 20 bp, synthetic construct
  misc_feature 1..20: note = Description of Artificial Sequence: Synthetic oligonucleotide
  misc_feature 1..20: note = Target: SCN10A; (-) strand; PAM type: YTN; PAM sequence: TTT
  source 1..20: mol_type = other DNA
cacaacaaccctacatggta

SEQ ID NO: 48360 - DNA, 20 bp, synthetic construct
  misc_feature 1..20: note = Description of Artificial Sequence: Synthetic oligonucleotide
  misc_feature 1..20: note = Target: SCN10A; (-) strand; PAM type: YTN; PAM sequence: TTT
  source 1..20: mol_type = other DNA
tcacaacaaccctacatggt

SEQ ID NO: 48361 - DNA, 20 bp, synthetic construct
  misc_feature 1..20: note = Description of Artificial Sequence: Synthetic oligonucleotide
  misc_feature 1..20: note = Target: SCN10A; (-) strand; PAM type: YTN; PAM sequence: TTA
  source 1..20: mol_type = other DNA
ttttcacaacaaccctacat

SEQ ID NO: 48362 - DNA, 20 bp, synthetic construct
  misc_feature 1..20: note = Description of Artificial Sequence: Synthetic oligonucleotide
  misc_feature 1..20: note = Target: SCN10A; (-) strand; PAM type: YTN; PAM sequence: TTT
  source 1..20: mol_type = other DNA
attttcacaacaaccctaca

SEQ ID NO: 48363 - DNA, 20 bp, synthetic construct
  misc_feature 1..20: note = Description of Artificial Sequence: Synthetic oligonucleotide
  misc_feature 1..20: note = Target: SCN10A; (-) strand; PAM type: YTN; PAM sequence: TTT
  source 1..20: mol_type = other DNA
tattttcacaacaaccctac

SEQ ID NO: 48364 - DNA, 20 bp, synthetic construct
  misc_feature 1..20: note = Description of Artificial Sequence: Synthetic oligonucleotide
  misc_feature 1..20: note = Target: SCN10A; (-) strand; PAM type: YTN; PAM sequence: CTC
  source 1..20: mol_type = other DNA
attttattttcacaacaacc

SEQ ID NO: 48365 - DNA, 20 bp, synthetic construct
  misc_feature 1..20: note = Description of Artificial Sequence: Synthetic oligonucleotide
  misc_feature 1..20: note = Target: SCN10A; (-) strand; PAM type: YTN; PAM sequence: TTA
  source 1..20: mol_type = other DNA
tctcattttattttcacaac

SEQ ID NO: 48366 - DNA, 20 bp, synthetic construct
  misc_feature 1..20: note = Description of Artificial Sequence: Synthetic oligonucleotide
  misc_feature 1..20: note = Target: SCN10A; (-) strand; PAM type: YTN; PAM sequence: CTC
  source 1..20: mol_type = other DNA
atggattatctcattttatt

SEQ ID NO: 48367 - DNA, 20 bp, synthetic construct
  misc_feature 1..20: note = Description of Artificial Sequence: Synthetic oligonucleotide
  misc_feature 1..20: note = Target: SCN10A; (-) strand; PAM type: YTN; PAM sequence: TTC
  source 1..20: mol_type = other DNA
tcatggattatctcatttta

SEQ ID NO: 48368 - DNA, 20 bp, synthetic construct
  misc_feature 1..20: note = Description of Artificial Sequence: Synthetic oligonucleotide
  misc_feature 1..20: note = Target: SCN10A; (-) strand; PAM type: YTN; PAM sequence: CTT
  source 1..20: mol_type = other DNA
ctcatggattatctcatttt

SEQ ID NO: 48369 - DNA, 20 bp, synthetic construct
  misc_feature 1..20: note = Description of Artificial Sequence: Synthetic oligonucleotide
  misc_feature 1..20: note = Target: SCN10A; (-) strand; PAM type: YTN; PAM sequence: CTC
  source 1..20: mol_type = other DNA
agatgcttctcatggattat

SEQ ID NO: 48370 - DNA, 20 bp, synthetic construct
  misc_feature 1..20: note = Description of Artificial Sequence: Synthetic oligonucleotide
  misc_feature 1..20: note = Target: SCN10A; (-) strand; PAM type: YTN; PAM sequence: TTG
  source 1..20: mol_type = other DNA
ccccacccacaggaatagta

SEQ ID NO: 48371 - DNA, 20 bp, synthetic construct
  misc_feature 1..20: note = Description of Artificial Sequence: Synthetic oligonucleotide
  misc_feature 1..20: note = Target: SCN10A; (-) strand; PAM type: YTN; PAM sequence: CTT
  source 1..20: mol_type = other DNA
gccccacccacaggaatagt

SEQ ID NO: 48372 - DNA, 20 bp, synthetic construct
  misc_feature 1..20: note = Description of Artificial Sequence: Synthetic oligonucleotide
  misc_feature 1..20: note = Target: SCN10A; (-) strand; PAM type: YTN; PAM sequence: CTC
  source 1..20: mol_type = other DNA
caaccttgccccacccacag

SEQ ID NO: 48373 - DNA, 20 bp, synthetic construct
  misc_feature 1..20: note = Description of Artificial Sequence: Synthetic oligonucleotide
  misc_feature 1..20: note = Target: SCN10A; (-) strand; PAM type: YTN; PAM sequence: CTG
  source 1..20: mol_type = other DNA
ctccaaccttgccccaccca

SEQ ID NO: 48374 - DNA, 20 bp, synthetic construct
  misc_feature 1..20: note = Description of Artificial Sequence: Synthetic oligonucleotide
  misc_feature 1..20: note = Target: SCN10A; (-) strand; PAM type: YTN; PAM sequence: CTC
  source 1..20: mol_type = other DNA
agagggacaacaactgctcc

SEQ ID NO: 48375 - DNA, 20 bp, synthetic construct
  misc_feature 1..20: note = Description of Artificial Sequence: Synthetic oligonucleotide
  misc_feature 1..20: note = Target: SCN10A; (-) strand; PAM type: YTN; PAM sequence: CTG
  source 1..20: mol_type = other DNA
actcagagggacaacaactg

SEQ ID NO: 48376 - DNA, 20 bp, synthetic construct
  misc_feature 1..20: note = Description of Artificial Sequence: Synthetic oligonucleotide
  misc_feature 1..20: note = Target: SCN10A; (-) strand; PAM type: YTN; PAM sequence: CTG
  source 1..20: mol_type = other DNA
gataaagtatctgactcaga

SEQ ID NO: 48377 - DNA, 20 bp, synthetic construct
  misc_feature 1..20: note = Description of Artificial Sequence: Synthetic oligonucleotide
  misc_feature 1..20: note = Target: SCN10A; (-) strand; PAM type: YTN; PAM sequence: CTA
  source 1..20: mol_type = other DNA
tatactggataaagtatctg

SEQ ID NO: 48378 - DNA, 20 bp, synthetic construct
  misc_feature 1..20: note = Description of Artificial Sequence: Synthetic oligonucleotide
  misc_feature 1..20: note = Target: SCN10A; (-) strand; PAM type: YTN; PAM sequence: TTC
  source 1..20: mol_type = other DNA
actatatactggataaagta

SEQ ID NO: 48379 - DNA, 20 bp, synthetic construct
  misc_feature 1..20: note = Description of Artificial Sequence: Synthetic oligonucleotide
  misc_feature 1..20: note = Target: SCN10A; (-) strand; PAM type: YTN; PAM sequence: TTT
  source 1..20: mol_type = other DNA
cactatatactggataaagt

SEQ ID NO: 48380 - DNA, 20 bp, synthetic construct
  misc_feature 1..20: note = Description of Artificial Sequence: Synthetic oligonucleotide
  misc_feature 1..20: note = Target: SCN10A; (-) strand; PAM type: YTN; PAM sequence: CTG
  source 1..20: mol_type = other DNA
gatttcactatatactggat

SEQ ID NO: 48381 - DNA, 20 bp, synthetic construct
  misc_feature 1..20: note = Description of Artificial Sequence: Synthetic oligonucleotide
  misc_feature 1..20: note = Target: SCN10A; (-) strand; PAM type: YTN; PAM sequence: TTA
  source 1..20: mol_type = other DNA
acaagatacaatccatactg

SEQ ID NO: 48382 - DNA, 20 bp, synthetic construct
  misc_feature 1..20: note = Description of Artificial Sequence: Synthetic oligonucleotide
  misc_feature 1..20: note = Target: SCN10A; (-) strand; PAM type: YTN; PAM sequence: CTT
  source 1..20: mol_type = other DNA
aacaagatacaatccatact

SEQ ID NO: 48383 - DNA, 20 bp, synthetic construct
  misc_feature 1..20: note = Description of Artificial Sequence: Synthetic oligonucleotide
  misc_feature 1..20: note = Target: SCN10A; (-) strand; PAM type: YTN; PAM sequence: CTC
  source 1..20: mol_type = other DNA
ttaacaagatacaatccata

SEQ ID NO: 48384 - DNA, 20 bp, synthetic construct
  misc_feature 1..20: note = Description of Artificial Sequence: Synthetic oligonucleotide
  misc_feature 1..20: note = Target: SCN10A; (-) strand; PAM type: YTN; PAM sequence: TTA
  source 1..20: mol_type = other DNA
ctcttaacaagatacaatcc

SEQ ID NO: 48385 - DNA, 20 bp, synthetic construct
  misc_feature 1..20: note = Description of Artificial Sequence: Synthetic oligonucleotide
  misc_feature 1..20: note = Target: SCN10A; (-) strand; PAM type: YTN; PAM sequence: TTT
  source 1..20: mol_type = other DNA
actcttaacaagatacaatc

SEQ ID NO: 48386 - DNA, 20 bp, synthetic construct
  misc_feature 1..20: note = Description of Artificial Sequence: Synthetic oligonucleotide
  misc_feature 1..20: note = Target: SCN10A; (-) strand; PAM type: YTN; PAM sequence: TTA
  source 1..20: mol_type = other DNA
tttactcttaacaagataca

SEQ ID NO: 48387 - DNA, 20 bp, synthetic construct
  misc_feature 1..20: note = Description of Artificial Sequence: Synthetic oligonucleotide
  misc_feature 1..20: note = Target: SCN10A; (-) strand; PAM type: YTN; PAM sequence: TTA
  source 1..20: mol_type = other DNA
gtattatttactcttaacaa

SEQ ID NO: 48388 - DNA, 20 bp, synthetic construct
  misc_feature 1..20: note = Description of Artificial Sequence: Synthetic oligonucleotide
  misc_feature 1..20: note = Target: SCN10A; (-) strand; PAM type: YTN; PAM sequence: TTG
  source 1..20: mol_type = other DNA
ttagtattatttactcttaa

SEQ ID NO: 48389 - DNA, 20 bp, synthetic construct
  misc_feature 1..20: note = Description of Artificial Sequence: Synthetic oligonucleotide
  misc_feature 1..20: note = Target: SCN10A; (-) strand; PAM type: YTN; PAM sequence: CTT
  source 1..20: mol_type = other DNA
gttagtattatttactctta

SEQ ID NO: 48390 - DNA, 20 bp, synthetic construct
  misc_feature 1..20: note = Description of Artificial Sequence: Synthetic oligonucleotide
  misc_feature 1..20: note = Target: SCN10A; (-) strand; PAM type: YTN; PAM sequence: CTC
  source 1..20: mol_type = other DNA
catcacttgttagtattatt

SEQ ID NO: 48391 - DNA, 20 bp, synthetic construct
  misc_feature 1..20: note = Description of Artificial Sequence: Synthetic oligonucleotide
  misc_feature 1..20: note = Target: SCN10A; (-) strand; PAM type: YTN; PAM sequence: TTC
  source 1..20: mol_type = other DNA
ctccatcacttgttagtatt

SEQ ID NO: 48392 - DNA, 20 bp, synthetic construct
  misc_feature 1..20: note = Description of Artificial Sequence: Synthetic oligonucleotide
  misc_feature 1..20: note = Target: SCN10A; (-) strand; PAM type: YTN; PAM sequence: TTT
  source 1..20: mol_type = other DNA
cctccatcacttgttagtat

SEQ ID NO: 48393 - DNA, 20 bp, synthetic construct
  misc_feature 1..20: note = Description of Artificial Sequence: Synthetic oligonucleotide
  misc_feature 1..20: note = Target: SCN10A; (-) strand; PAM type: YTN; PAM sequence: TTT
  source 1..20: mol_type = other DNA
tcctccatcacttgttagta

SEQ ID NO: 48394 - DNA, 20 bp, synthetic construct
  misc_feature 1..20: note = Description of Artificial Sequence: Synthetic oligonucleotide
  misc_feature 1..20: note = Target: SCN10A; (-) strand; PAM type: YTN; PAM sequence: TTA
  source 1..20: mol_type = other DNA
aattttcctccatcacttgt

SEQ ID NO: 48395 - DNA, 20 bp, synthetic construct
  misc_feature 1..20: note = Description of Artificial Sequence: Synthetic oligonucleotide
  misc_feature 1..20: note = Target: SCN10A; (-) strand; PAM type: YTN; PAM sequence: TTT
  source 1..20: mol_type = other DNA
aaattttcctccatcacttg

SEQ ID NO: 48396 - DNA, 20 bp, synthetic construct
  misc_feature 1..20: note = Description of Artificial Sequence: Synthetic oligonucleotide
  misc_feature 1..20: note = Target: SCN10A; (-) strand; PAM type: YTN; PAM sequence: CTT
  source 1..20: mol_type = other DNA
taaattttcctccatcactt

SEQ ID NO: 48397 - DNA, 20 bp, synthetic construct
  misc_feature 1..20: note = Description of Artificial Sequence: Synthetic oligonucleotide
  misc_feature 1..20: note = Target: SCN10A; (-) strand; PAM type: YTN; PAM sequence: CTG
  source 1..20: mol_type = other DNA
ctttaaattttcctccatca

SEQ ID NO: 48398 - DNA, 20 bp, synthetic construct
  misc_feature 1..20: note = Description of Artificial Sequence: Synthetic oligonucleotide
  misc_feature 1..20: note = Target: SCN10A; (-) strand; PAM type: YTN; PAM sequence: TTA
  source 1..20: mol_type = other DNA
gacatcatgctgctttaaat

SEQ ID NO: 48399 - DNA, 20 bp, synthetic construct
  misc_feature 1..20: note = Description of Artificial Sequence: Synthetic oligonucleotide
  misc_feature 1..20: note = Target: SCN10A; (-) strand; PAM type: YTN; PAM sequence: TTT
  source 1..20: mol_type = other DNA
agacatcatgctgctttaaa

SEQ ID NO: 48400 - DNA, 20 bp, synthetic construct
  misc_feature 1..20: note = Description of Artificial Sequence: Synthetic oligonucleotide
  misc_feature 1..20: note = Target: SCN10A; (-) strand; PAM type: YTN; PAM sequence: CTA
  source 1..20: mol_type = other DNA
gtttagacatcatgctgctt

SEQ ID NO: 48401 - DNA, 20 bp, synthetic construct
  misc_feature 1..20: note = Description of Artificial Sequence: Synthetic oligonucleotide
  misc_feature 1..20: note = Target: SCN10A; (-) strand; PAM type: YTN; PAM sequence: TTG
  source 1..20: mol_type = other DNA
gcatctagtttagacatcat

SEQ ID NO: 48402 - DNA, 20 bp, synthetic construct
  misc_feature 1..20: note = Description of Artificial Sequence: Synthetic oligonucleotide
  misc_feature 1..20: note = Target: SCN10A; (-) strand; PAM type: YTN; PAM sequence: TTT
  source 1..20: mol_type = other DNA
ggcatctagtttagacatca

SEQ ID NO: 48403 - DNA, 20 bp, synthetic construct
  misc_feature 1..20: note = Description of Artificial Sequence: Synthetic oligonucleotide
  misc_feature 1..20: note = Target: SCN10A; (-) strand; PAM type: YTN; PAM sequence: CTT
  source 1..20: mol_type = other DNA
tggcatctagtttagacatc

SEQ ID NO: 48404 - DNA, 20 bp, synthetic construct
  misc_feature 1..20: note = Description of Artificial Sequence: Synthetic oligonucleotide
  misc_feature 1..20: note = Target: SCN10A; (-) strand; PAM type: YTN; PAM sequence: TTC
  source 1..20: mol_type = other DNA
tttggcatctagtttagaca

SEQ ID NO: 48405 - DNA, 20 bp, synthetic construct
  misc_feature 1..20: note = Description of Artificial Sequence: Synthetic oligonucleotide
  misc_feature 1..20: note = Target: SCN10A; (-) strand; PAM type: YTN; PAM sequence: TTT
  source 1..20: mol_type = other DNA
ctttggcatctagtttagac

SEQ ID NO: 48406 - DNA, 20 bp, synthetic construct
  misc_feature 1..20: note = Description of Artificial Sequence: Synthetic oligonucleotide
  misc_feature 1..20: note = Target: SCN10A; (-) strand; PAM type: YTN; PAM sequence: TTT
  source 1..20: mol_type = other DNA
tctttggcatctagtttaga

SEQ ID NO: 48407 - DNA, 20 bp, synthetic construct
  misc_feature 1..20: note = Description of Artificial Sequence: Synthetic oligonucleotide
  misc_feature 1..20: note = Target: SCN10A; (-) strand; PAM type: YTN; PAM sequence: CTT
  source 1..20: mol_type = other DNA
ttctttggcatctagtttag

SEQ ID NO: 48408 - DNA, 20 bp, synthetic construct
  misc_feature 1..20: note = Description of Artificial Sequence: Synthetic oligonucleotide
  misc_feature 1..20: note = Target: SCN10A; (-) strand; PAM type: YTN; PAM sequence: TTG
  source 1..20: mol_type = other DNA
taacaaaagcatcaggaagt

SEQ ID NO: 48409 - DNA, 20 bp, synthetic construct
  misc_feature 1..20: note = Description of Artificial Sequence: Synthetic oligonucleotide
  misc_feature 1..20: note = Target: SCN10A; (-) strand; PAM type: YTN; PAM sequence: CTG
  source 1..20: mol_type = other DNA
ttgtaacaaaagcatcagga

SEQ ID NO: 48410 - DNA, 20 bp, synthetic construct
  misc_feature 1..20: note = Description of Artificial Sequence: Synthetic oligonucleotide
  misc_feature 1..20: note = Target: SCN10A; (-) strand; PAM type: YTN; PAM sequence: TTG
  source 1..20: mol_type = other DNA
ctgttgtaacaaaagcatca

SEQ ID NO: 48411 - DNA, 20 bp, synthetic construct
  misc_feature 1..20: note = Description of Artificial Sequence: Synthetic oligonucleotide
  misc_feature 1..20: note = Target: SCN10A; (-) strand; PAM type: YTN; PAM sequence: TTG
  source 1..20: mol_type = other DNA
gggagggaaggggaagacag

SEQ ID NO: 48412 - DNA, 20 bp, synthetic construct
  misc_feature 1..20: note = Description of Artificial Sequence: Synthetic oligonucleotide
  misc_feature 1..20: note = Target: SCN10A; (-) strand; PAM type: YTN; PAM sequence: TTA
  source 1..20: mol_type = other DNA
aggagaaaaagagttgggga

SEQ ID NO: 48413 - DNA, 20 bp, synthetic construct
  misc_feature 1..20: note = Description of Artificial Sequence: Synthetic oligonucleotide
  misc_feature 1..20: note = Target: SCN10A; (-) strand; PAM type: YTN; PAM sequence: CTT
  source 1..20: mol_type = other DNA
aaggagaaaaagagttgggg

SEQ ID NO: 48414 - DNA, 20 bp, synthetic construct
  misc_feature 1..20: note = Description of Artificial Sequence: Synthetic oligonucleotide
  misc_feature 1..20: note = Target: SCN10A; (-) strand; PAM type: YTN; PAM sequence: TTG
  source 1..20: mol_type = other DNA
tcacttaaggagaaaaagag

SEQ ID NO: 48415 - DNA, 20 bp, synthetic construct
  misc_feature 1..20: note = Description of Artificial Sequence: Synthetic oligonucleotide
  misc_feature 1..20: note = Target: SCN10A; (-) strand; PAM type: YTN; PAM sequence: TTC
  source 1..20: mol_type = other DNA
aatgttgtcacttaaggaga

SEQ ID NO: 48416 - DNA, 20 bp, synthetic construct
  misc_feature 1..20: note = Description of Artificial Sequence: Synthetic oligonucleotide
  misc_feature 1..20: note = Target: SCN10A; (-) strand; PAM type: YTN; PAM sequence: TTT
  source 1..20: mol_type = other DNA
caatgttgtcacttaaggag

SEQ ID NO: 48417 - DNA, 20 bp, synthetic construct
  misc_feature 1..20: note = Description of Artificial Sequence: Synthetic oligonucleotide
  misc_feature 1..20: note = Target: SCN10A; (-) strand; PAM type: YTN; PAM sequence: TTT
  source 1..20: mol_type = other DNA
tcaatgttgtcacttaagga

SEQ ID NO: 48418 - DNA, 20 bp, synthetic construct
  misc_feature 1..20: note = Description of Artificial Sequence: Synthetic oligonucleotide
  misc_feature 1..20: note = Target: SCN10A; (-) strand; PAM type: YTN; PAM sequence: TTA
  source 1..20: mol_type = other DNA
acagtagccacgattttcaa

SEQ ID NO: 48419 - DNA, 20 bp, synthetic construct
  misc_feature 1..20: note = Description of Artificial Sequence: Synthetic oligonucleotide
  misc_feature 1..20: note = Target: SCN10A; (-) strand; PAM type: YTN; PAM sequence: TTA
  source 1..20: mol_type = other DNA
tgaccacaattaacagtagc

SEQ ID NO: 48420 - DNA, 20 bp, synthetic construct
  misc_feature 1..20: note = Description of Artificial Sequence: Synthetic oligonucleotide
  misc_feature 1..20: note = Target: SCN10A; (-) strand; PAM type: YTN; PAM sequence: TTT
  source 1..20: mol_type = other DNA
atgaccacaattaacagtag

SEQ ID NO: 48421 - DNA, 20 bp, synthetic construct
  misc_feature 1..20: note = Description of Artificial Sequence: Synthetic oligonucleotide
  misc_feature 1..20: note = Target: SCN10A; (-) strand; PAM type: YTN; PAM sequence: TTT
  source 1..20: mol_type = other DNA
tatgaccacaattaacagta

SEQ ID NO: 48422 - DNA, 20 bp, synthetic construct
  misc_feature 1..20: note = Description of Artificial Sequence: Synthetic oligonucleotide
  misc_feature 1..20: note = Target: SCN10A; (-) strand; PAM type: YTN; PAM sequence: CTT
  source 1..20: mol_type = other DNA
ttatgaccacaattaacagt

SEQ ID NO: 48423 - DNA, 20 bp, synthetic construct
  misc_feature 1..20: note = Description of Artificial Sequence: Synthetic oligonucleotide
  misc_feature 1..20: note = Target: SCN10A; (-) strand; PAM type: YTN; PAM sequence: TTA
  source 1..20: mol_type = other DNA
cttttatgaccacaattaac

SEQ ID NO: 48424 - DNA, 20 bp, synthetic construct
  misc_feature 1..20: note = Description of Artificial Sequence: Synthetic oligonucleotide
  misc_feature 1..20: note = Target: SCN10A; (-) strand; PAM type: YTN; PAM sequence: TTC
  source 1..20: mol_type = other DNA
caatgtaattacttttatga

SEQ ID NO: 48425 - DNA, 20 bp, synthetic construct
  misc_feature 1..20: note = Description of Artificial Sequence: Synthetic oligonucleotide
  misc_feature 1..20: note = Target: SCN10A; (-) strand; PAM type: YTN; PAM sequence: CTT
  source 1..20: mol_type = other DNA
ccaatgtaattacttttatg

SEQ ID NO: 48426 - DNA, 20 bp, synthetic construct
  misc_feature 1..20: note = Description of Artificial Sequence: Synthetic oligonucleotide
  misc_feature 1..20: note = Target: SCN10A; (-) strand; PAM type: YTN; PAM sequence: TTC
  source 1..20: mol_type = other DNA
cttccaatgtaattactttt

SEQ ID NO: 48427 - DNA, 20 bp, synthetic construct
  misc_feature 1..20: note = Description of Artificial Sequence: Synthetic oligonucleotide
  misc_feature 1..20: note = Target: SCN10A; (-) strand; PAM type: YTN; PAM sequence: TTT
  source 1..20: mol_type = other DNA
ccttccaatgtaattacttt

SEQ ID NO: 48428 - DNA, 20 bp, synthetic construct
  misc_feature 1..20: note = Description of Artificial Sequence: Synthetic oligonucleotide
  misc_feature 1..20: note = Target: SCN10A; (-) strand; PAM type: YTN; PAM sequence: CTG
  source 1..20: mol_type = other DNA
tttccttccaatgtaattac

SEQ ID NO: 48429 - DNA, 20 bp, synthetic construct
  misc_feature 1..20: note = Description of Artificial Sequence: Synthetic oligonucleotide
  misc_feature 1..20: note = Target: SCN10A; (-) strand; PAM type: YTN; PAM sequence: TTG
  source 1..20: mol_type = other DNA
tctgtttccttccaatgtaa

SEQ ID NO: 48430 - DNA, 20 bp, synthetic construct
  misc_feature 1..20: note = Description of Artificial Sequence: Synthetic oligonucleotide
  misc_feature 1..20: note = Target: SCN10A; (-) strand; PAM type: YTN; PAM sequence: CTT
  source 1..20: mol_type = other DNA
gtctgtttccttccaatgta

SEQ ID NO: 48431 - DNA, 20 bp, synthetic construct
  misc_feature 1..20: note = Description of Artificial Sequence: Synthetic oligonucleotide
  misc_feature 1..20: note = Target: SCN10A; (-) strand; PAM type: YTN; PAM sequence: TTG
  source 1..20: mol_type = other DNA
gacttgtctgtttccttcca

SEQ ID NO: 48432 - DNA, 20 bp, synthetic construct
  misc_feature 1..20: note = Description of Artificial Sequence: Synthetic oligonucleotide
  misc_feature 1..20: note = Target: SCN10A; (-) strand; PAM type: YTN; PAM sequence: TTT
  source 1..20: mol_type = other DNA
ggacttgtctgtttccttcc

SEQ ID NO: 48433 - DNA, 20 bp, synthetic construct
  misc_feature 1..20: note = Description of Artificial Sequence: Synthetic oligonucleotide
  misc_feature 1..20: note = Target: SCN10A; (-) strand; PAM type: YTN; PAM sequence: CTT
  source 1..20: mol_type = other DNA
tggacttgtctgtttccttc

SEQ ID NO: 48434 - DNA, 20 bp, synthetic construct
  misc_feature 1..20: note = Description of Artificial Sequence: Synthetic oligonucleotide
  misc_feature 1..20: note = Target: SCN10A; (-) strand; PAM type: YTN; PAM sequence: CTA
  source 1..20: mol_type = other DNA
aagacaatctttggacttgt

SEQ ID NO: 48435 - DNA, 20 bp, synthetic construct
  misc_feature 1..20: note = Description of Artificial Sequence: Synthetic oligonucleotide
  misc_feature 1..20: note = Target: SCN10A; (-) strand; PAM type: YTN; PAM sequence: TTA
  source 1..20: mol_type = other DNA
tctaaagacaatctttggac

SEQ ID NO: 48436 - DNA, 20 bp, synthetic construct
  misc_feature 1..20: note = Description of Artificial Sequence: Synthetic oligonucleotide
  misc_feature 1..20: note = Target: SCN10A; (-) strand; PAM type: YTN; PAM sequence: TTT
  source 1..20: mol_type = other DNA
atctaaagacaatctttgga

SEQ ID NO: 48437 - DNA, 20 bp, synthetic construct
  misc_feature 1..20: note = Description of Artificial Sequence: Synthetic oligonucleotide
  misc_feature 1..20: note = Target: SCN10A; (-) strand; PAM type: YTN; PAM sequence: TTT
  source 1..20: mol_type = other DNA
tatctaaagacaatctttgg

SEQ ID NO: 48438 - DNA, 20 bp, synthetic construct
  misc_feature 1..20: note = Description of Artificial Sequence: Synthetic oligonucleotide
  misc_feature 1..20: note = Target: SCN10A; (-) strand; PAM type: YTN; PAM sequence: TTT
  source 1..20: mol_type = other DNA
ttatctaaagacaatctttg

SEQ ID NO: 48439 - DNA, 20 bp, synthetic construct
  misc_feature 1..20: note = Description of Artificial Sequence: Synthetic oligonucleotide
  misc_feature 1..20: note = Target: SCN10A; (-) strand; PAM type: YTN; PAM sequence: TTT
  source 1..20: mol_type = other DNA
tttatctaaagacaatcttt

SEQ ID NO: 48440 - DNA, 20 bp, synthetic construct
  misc_feature 1..20: note = Description of Artificial Sequence: Synthetic oligonucleotide
  misc_feature 1..20: note = Target: SCN10A; (-) strand; PAM type: YTN; PAM sequence: CTT
  source 1..20: mol_type = other DNA
ttttatctaaagacaatctt

SEQ ID NO: 48441 - DNA, 20 bp, synthetic construct
  misc_feature 1..20: note = Description of Artificial Sequence: Synthetic oligonucleotide
  misc_feature 1..20: note = Target: SCN10A; (-) strand; PAM type: YTN; PAM sequence: TTG
  source 1..20: mol_type = other DNA
aaatgaggataaatgtcact

SEQ ID NO: 48442 - DNA, 20 bp, synthetic construct
  misc_feature 1..20: note = Description of Artificial Sequence: Synthetic oligonucleotide
  misc_feature 1..20: note = Target: SCN10A; (-) strand; PAM type: YTN; PAM sequence: CTT
  source 1..20: mol_type = other DNA
gaaatgaggataaatgtcac

SEQ ID NO: 48443 - DNA, 20 bp, synthetic construct
  misc_feature 1..20: note = Description of Artificial Sequence: Synthetic oligonucleotide
  misc_feature 1..20: note = Target: SCN10A; (-) strand; PAM type: YTN; PAM sequence: CTA
  source 1..20: mol_type = other DNA
ccttgaaatgaggataaatg

SEQ ID NO: 48444 - DNA, 20 bp, synthetic construct
  misc_feature 1..20: note = Description of Artificial Sequence: Synthetic oligonucleotide
  misc_feature 1..20: note = Target: SCN10A; (-) strand; PAM type: YTN; PAM sequence: CTC
  source 1..20: mol_type = other DNA
taccttgaaatgaggataaa

SEQ ID NO: 48445 - DNA, 20 bp, synthetic construct
  misc_feature 1..20: note = Description of Artificial Sequence: Synthetic oligonucleotide
  misc_feature 1..20: note = Target: SCN10A; (-) strand; PAM type: YTN; PAM sequence: TTG
  source 1..20: mol_type = other DNA
cctctaccttgaaatgagga

SEQ ID NO: 48446 - DNA, 20 bp, synthetic construct
  misc_feature 1..20: note = Description of Artificial Sequence: Synthetic oligonucleotide
  misc_feature 1..20: note = Target: SCN10A; (-) strand; PAM type: YTN; PAM sequence: CTC
  source 1..20: mol_type = other DNA
agttgcctctaccttgaaat

SEQ ID NO: 48447 - DNA, 20 bp, synthetic construct
  misc_feature 1..20: note = Description of Artificial Sequence: Synthetic oligonucleotide
  misc_feature 1..20: note = Target: SCN10A; (-) strand; PAM type: YTN; PAM sequence: CTG
  source 1..20: mol_type = other DNA
gatctcagttgcctctacct

SEQ ID NO: 48448 - DNA, 20 bp, synthetic construct
  misc_feature 1..20: note = Description of Artificial Sequence: Synthetic oligonucleotide
  misc_feature 1..20: note = Target: SCN10A; (-) strand; PAM type: YTN; PAM sequence: TTC
  source 1..20: mol_type = other DNA
tggatctcagttgcctctac

SEQ ID NO: 48449 - DNA, 20 bp, synthetic construct
  misc_feature 1..20: note = Description of Artificial Sequence: Synthetic oligonucleotide
  misc_feature 1..20: note = Target: SCN10A; (-) strand; PAM type: YTN; PAM sequence: TTT
  source 1..20: mol_type = other DNA
ctggatctcagttgcctcta

SEQ ID NO: 48450 - DNA, 20 bp, synthetic construct
  misc_feature 1..20: note = Description of Artificial Sequence: Synthetic oligonucleotide
  misc_feature 1..20: note = Target: SCN10A; (-) strand; PAM type: YTN; PAM sequence: TTT
  source 1..20: mol_type = other DNA
tctggatctcagttgcctct

SEQ ID NO: 48451 - DNA, 20 bp, synthetic construct
  misc_feature 1..20: note = Description of Artificial Sequence: Synthetic oligonucleotide
  misc_feature 1..20: note = Target: SCN10A; (-) strand; PAM type: YTN; PAM sequence: TTG
  source 1..20: mol_type = other DNA
aattttctggatctcagttg

SEQ ID NO: 48452 - DNA, 20 bp, synthetic construct
  misc_feature 1..20: note = Description of Artificial Sequence: Synthetic oligonucleotide
  misc_feature 1..20: note = Target: SCN10A; (-) strand; PAM type: YTN; PAM sequence: CTT
  source 1..20: mol_type = other DNA
gaattttctggatctcagtt

SEQ ID NO: 48453 - DNA, 20 bp, synthetic construct
  misc_feature 1..20: note = Description of Artificial Sequence: Synthetic oligonucleotide
  misc_feature 1..20: note = Target: SCN10A; (-) strand; PAM type: YTN; PAM sequence: TTA
  source 1..20: mol_type = other DNA
caaaacataggacaaccact

SEQ ID NO: 48454 - DNA, 20 bp, synthetic construct
  misc_feature 1..20: note = Description of Artificial Sequence: Synthetic oligonucleotide
  misc_feature 1..20: note = Target: SCN10A; (-) strand; PAM type: YTN; PAM sequence: TTT
  source 1..20: mol_type = other DNA
acaaaacataggacaaccac

SEQ ID NO: 48455 - DNA, 20 bp, synthetic construct
  misc_feature 1..20: note = Description of Artificial Sequence: Synthetic oligonucleotide
  misc_feature 1..20: note = Target: SCN10A; (-) strand; PAM type: YTN; PAM sequence: CTT
  source 1..20: mol_type = other DNA
tacaaaacataggacaacca

SEQ ID NO: 48456 - DNA, 20 bp, synthetic construct
  misc_feature 1..20: note = Description of Artificial Sequence: Synthetic oligonucleotide
  misc_feature 1..20: note = Target: SCN10A; (-) strand; PAM type: YTN; PAM sequence: TTG
  source 1..20: mol_type = other DNA
ccctttacaaaacataggac

SEQ ID NO: 48457 - DNA, 20 bp, synthetic construct
  misc_feature 1..20: note = Description of Artificial Sequence: Synthetic oligonucleotide
  misc_feature 1..20: note = Target: SCN10A; (-) strand; PAM type: YTN; PAM sequence: CTA
  source 1..20: mol_type = other DNA
gttgccctttacaaaacata

SEQ ID NO: 48458 - DNA, 20 bp, synthetic construct
  misc_feature 1..20: note = Description of Artificial Sequence: Synthetic oligonucleotide
  misc_feature 1..20: note = Target: SCN10A; (-) strand; PAM type: YTN; PAM sequence: CTG
  source 1..20: mol_type = other DNA
gagccagaggcagctagttg

SEQ ID NO: 48459 - DNA, 20 bp, synthetic construct
  misc_feature 1..20: note = Description of Artificial Sequence: Synthetic oligonucleotide
  misc_feature 1..20: note = Target: SCN10A; (-) strand; PAM type: YTN; PAM sequence: TTG
  source 1..20: mol_type = other DNA
ggatgaacaagcacaggaaa

SEQ ID NO: 48460 - DNA, 20 bp, synthetic construct
  misc_feature 1..20: note = Description of Artificial Sequence: Synthetic oligonucleotide
  misc_feature 1..20: note = Target: SCN10A; (-) strand; PAM type: YTN; PAM sequence: TTT
  source 1..20: mol_type = other DNA
gggatgaacaagcacaggaa

SEQ ID NO: 48461 - DNA, 20 bp, synthetic construct
  misc_feature 1..20: note = Description of Artificial Sequence: Synthetic oligonucleotide
  misc_feature 1..20: note = Target: SCN10A; (-) strand; PAM type: YTN; PAM sequence: CTT
  source 1..20: mol_type = other DNA
tgggatgaacaagcacagga

SEQ ID NO: 48462 - DNA, 20 bp, synthetic construct
  misc_feature 1..20: note = Description of Artificial Sequence: Synthetic oligonucleotide
  misc_feature 1..20: note = Target: SCN10A; (-) strand; PAM type: YTN; PAM sequence: CTG
  source 1..20: mol_type = other DNA
gtgggaatggctttgggatg

SEQ ID NO: 48463 - DNA, 20 bp, synthetic construct
  misc_feature 1..20: note = Description of Artificial Sequence: Synthetic oligonucleotide
  misc_feature 1..20: note = Target: SCN10A; (-) strand; PAM type: YTN; PAM sequence: CTG
  source 1..20: mol_type = other DNA
agctggtgggaatggctttg

SEQ ID NO: 48464 - DNA, 20 bp, synthetic construct
  misc_feature 1..20: note = Description of Artificial Sequence: Synthetic oligonucleotide
  misc_feature 1..20: note = Target: SCN10A; (-) strand; PAM type: YTN; PAM sequence: TTC
  source 1..20: mol_type = other DNA
aggaggtcaagtgtgggagg

SEQ ID NO: 48465 - DNA, 20 bp, synthetic construct
  misc_feature 1..20: note = Description of Artificial Sequence: Synthetic oligonucleotide
  misc_feature 1..20: note = Target: SCN10A; (-) strand; PAM type: YTN; PAM sequence: CTG
  source 1..20: mol_type = other DNA
ggttcaggaggtcaagtgtg

SEQ ID NO: 48466 - DNA, 20 bp, synthetic construct
  misc_feature 1..20: note = Description of Artificial Sequence: Synthetic oligonucleotide
  misc_feature 1..20: note = Target: SCN10A; (-) strand; PAM type: YTN; PAM sequence: CTG
  source 1..20: mol_type = other DNA
agagcagagcagcagtgcag

SEQ ID NO: 48467 - DNA, 20 bp, synthetic construct
  misc_feature 1..20: note = Description of Artificial Sequence: Synthetic oligonucleotide
  misc_feature 1..20: note = Target: SCN10A; (-) strand; PAM type: YTN; PAM sequence: TTA
  source 1..20: mol_type = other DNA
gctgagagcagagcagcagt

SEQ ID NO: 48468 - DNA, 20 bp, synthetic construct
  misc_feature 1..20: note = Description of Artificial Sequence: Synthetic oligonucleotide
  misc_feature 1..20: note = Target: SCN10A; (-) strand; PAM type: YTN; PAM sequence: TTG
  source 1..20: mol_type = other DNA
agccagttagctgagagcag

SEQ ID NO: 48469 - DNA, 20 bp, synthetic construct
  misc_feature 1..20: note = Description of Artificial Sequence: Synthetic oligonucleotide
  misc_feature 1..20: note = Target: SCN10A; (-) strand; PAM type: YTN; PAM sequence: TTA
  source 1..20: mol_type = other DNA
gtgtgttgagccagttagct

SEQ ID NO: 48470 - DNA, 20 bp, synthetic construct
  misc_feature 1..20: note = Description of Artificial Sequence: Synthetic oligonucleotide
  misc_feature 1..20: note = Target: SCN10A; (-) strand; PAM type: YTN; PAM sequence: TTG
  source 1..20: mol_type = other DNA
gttagtgtgttgagccagtt

SEQ ID NO: 48471 - DNA, 20 bp, synthetic construct
  misc_feature 1..20: note = Description of Artificial Sequence: Synthetic oligonucleotide
  misc_feature 1..20: note = Target: SCN10A; (-) strand; PAM type: YTN; PAM sequence: TTA
  source 1..20: mol_type = other DNA
ttggttagtgtgttgagcca

SEQ ID NO: 48472 - DNA, 20 bp, synthetic construct
  misc_feature 1..20: note = Description of Artificial Sequence: Synthetic oligonucleotide
  misc_feature 1..20: note = Target: SCN10A; (-) strand; PAM type: YTN; PAM sequence: CTT
  source 1..20: mol_type = other DNA
attggttagtgtgttgagcc

SEQ ID NO: 48473 - DNA, 20 bp, synthetic construct
  misc_feature 1..20: note = Description of Artificial Sequence: Synthetic oligonucleotide
  misc_feature 1..20: note = Target: SCN10A; (-) strand; PAM type: YTN; PAM sequence: TTC
  source 1..20: mol_type = other DNA
gggtggggtggggcatgccc

SEQ ID NO: 48474 - DNA, 20 bp, synthetic construct
  misc_feature 1..20: note = Description of Artificial Sequence: Synthetic oligonucleotide
  misc_feature 1..20: note = Target: SCN10A; (-) strand; PAM type: YTN; PAM sequence: CTG
  source 1..20: mol_type = other DNA
gcgtggtcggggcggggtgg

SEQ ID NO: 48475 - DNA, 20 bp, synthetic construct
  misc_feature 1..20: note = Description of Artificial Sequence: Synthetic oligonucleotide
  misc_feature 1..20: note = Target: SCN10A; (-) strand; PAM type: YTN; PAM sequence: CTC
  source 1..20: mol_type = other DNA
actggcgtggtcggggcggg

SEQ ID NO: 48476 - DNA, 20 bp, synthetic construct
  misc_feature 1..20: note = Description of Artificial Sequence: Synthetic oligonucleotide
  misc_feature 1..20: note = Target: SCN10A; (-) strand; PAM type: YTN; PAM sequence: CTG
  source 1..20: mol_type = other DNA
ccctcactggcgtggtcggg

SEQ ID NO: 48477 - DNA, 20 bp, synthetic construct
  misc_feature 1..20: note = Description of Artificial Sequence: Synthetic oligonucleotide
  misc_feature 1..20: note = Target: SCN10A; (-) strand; PAM type: YTN; PAM sequence: CTG
  source 1..20: mol_type = other DNA
gtactgccctcactggcgtg

SEQ ID NO: 48478 - DNA, 20 bp, synthetic construct
  misc_feature 1..20: note = Description of Artificial Sequence: Synthetic oligonucleotide
  misc_feature 1..20: note = Target: SCN10A; (-) strand; PAM type: YTN; PAM sequence: CTG
  source 1..20: mol_type = other DNA
gctggtactgccctcactgg

SEQ ID NO: 48479 - DNA, 20 bp, synthetic construct
  misc_feature 1..20: note = Description of Artificial Sequence: Synthetic oligonucleotide
  misc_feature 1..20: note = Target: SCN10A; (-) strand; PAM type: YTN; PAM sequence: CTC
  source 1..20: mol_type = other DNA
tggctggtactgccctcact

SEQ ID NO: 48480 - DNA, 20 bp, synthetic construct
  misc_feature 1..20: note = Description of Artificial Sequence: Synthetic oligonucleotide
  misc_feature 1..20: note = Target: SCN10A; (-) strand; PAM type: YTN; PAM sequence: CTC
  source 1..20: mol_type = other DNA
cagataggcaacatcgtgag

SEQ ID NO: 48481 - DNA, 20 bp, synthetic construct
  misc_feature 1..20: note = Description of Artificial Sequence: Synthetic oligonucleotide
  misc_feature 1..20: note = Target: SCN10A; (-) strand; PAM type: YTN; PAM sequence: TTC
  source 1..20: mol_type = other DNA
gaagccatgctccagatagg

SEQ ID NO: 48482 - DNA, 20 bp, synthetic construct
  misc_feature 1..20: note = Description of Artificial Sequence: Synthetic oligonucleotide
  misc_feature 1..20: note = Target: SCN10A; (-) strand; PAM type: YTN; PAM sequence: CTT
  source 1..20: mol_type = other DNA
cgaagccatgctccagatag

SEQ ID NO: 48483 - DNA, 20 bp, synthetic construct
  misc_feature 1..20: note = Description of Artificial Sequence: Synthetic oligonucleotide
  misc_feature 1..20: note = Target: SCN10A; (-) strand; PAM type: YTN; PAM sequence: CTA
  source 1..20: mol_type = other DNA
ccttcgaagccatgctccag

SEQ ID NO: 48484 - DNA, 20 bp, synthetic construct
  misc_feature 1..20: note = Description of Artificial Sequence: Synthetic oligonucleotide
  misc_feature 1..20: note = Target: SCN10A; (-) strand; PAM type: YTN; PAM sequence: TTC
  source 1..20: mol_type = other DNA
atggccatggagcaccatgg

SEQ ID NO: 48485 - DNA, 20 bp, synthetic construct
  misc_feature 1..20: note = Description of Artificial Sequence: Synthetic oligonucleotide
  misc_feature 1..20: note = Target: SCN10A; (-) strand; PAM type: YTN; PAM sequence: CTT
  source 1..20: mol_type = other DNA
catggccatggagcaccatg

SEQ ID NO: 48486 - DNA, 20 bp, synthetic construct
  misc_feature 1..20: note = Description of Artificial Sequence: Synthetic oligonucleotide
  misc_feature 1..20: note = Target: SCN10A; (-) strand; PAM type: YTN; PAM sequence: TTG
  source 1..20: mol_type = other DNA
tgcatcgtggtgaacaccat

SEQ ID NO: 48487 - DNA, 20 bp, synthetic construct
  misc_feature 1..20: note = Description of Artificial Sequence: Synthetic oligonucleotide
  misc_feature 1..20: note = Target: SCN10A; (-) strand; PAM type: YTN; PAM sequence: CTT
  source 1..20: mol_type = other DNA
gtgcatcgtggtgaacacca

SEQ ID NO: 48488 - DNA, 20 bp, synthetic construct
  misc_feature 1..20: note = Description of Artificial Sequence: Synthetic oligonucleotide
  misc_feature 1..20: note = Target: SCN10A; (-) strand; PAM type: YTN; PAM sequence: CTC
  source 1..20: mol_type = other DNA
accatcaccttgtgcatcgt

SEQ ID NO: 48489 - DNA, 20 bp, synthetic construct
  misc_feature 1..20: note = Description of Artificial Sequence: Synthetic oligonucleotide
  misc_feature 1..20: note = Target: SCN10A; (-) strand; PAM type: YTN; PAM sequence: TTG
  source 1..20: mol_type = other DNA
cagagctcaccatcaccttg

SEQ ID NO: 48490 - DNA, 20 bp, synthetic construct
  misc_feature 1..20: note = Description of Artificial Sequence: Synthetic oligonucleotide
  misc_feature 1..20: note = Target: SCN10A; (-) strand; PAM type: YTN; PAM sequence: TTT
  source 1..20: mol_type = other DNA
gcagagctcaccatcacctt

SEQ ID NO: 48491 - DNA, 20 bp, synthetic construct
  misc_feature 1..20: note = Description of Artificial Sequence: Synthetic oligonucleotide
  misc_feature 1..20: note = Target: SCN10A; (-) strand; PAM type: YTN; PAM sequence: CTT
  source 1..20: mol_type = other DNA
tgcagagctcaccatcacct

SEQ ID NO: 48492 - DNA, 20 bp, synthetic construct
  misc_feature 1..20: note = Description of Artificial Sequence: Synthetic oligonucleotide
  misc_feature 1..20: note = Target: SCN10A; (-) strand; PAM type: YTN; PAM sequence: TTG
  source 1..20: mol_type = other DNA
tgacggatccctttgcagag

SEQ ID NO: 48493 - DNA, 20 bp, synthetic construct
  misc_feature 1..20: note = Description of Artificial Sequence: Synthetic oligonucleotide
  misc_feature 1..20: note = Target: SCN10A; (-) strand; PAM type: YTN; PAM sequence: CTT
  source 1..20: mol_type = other DNA
gtgacggatccctttgcaga

SEQ ID NO: 48494 - DNA, 20 bp, synthetic construct
  misc_feature 1..20: note = Description of Artificial Sequence: Synthetic oligonucleotide
  misc_feature 1..20: note = Target: SCN10A; (-) strand; PAM type: YTN; PAM sequence: TTG
  source 1..20: mol_type = other DNA
ggcttgtgacggatcccttt

SEQ ID NO: 48495 - DNA, 20 bp, synthetic construct
  misc_feature 1..20: note = Description of Artificial Sequence: Synthetic oligonucleotide
  misc_feature 1..20: note = Target: SCN10A; (-) strand; PAM type: YTN; PAM sequence: TTT
  source 1..20: mol_type = other DNA
gggcttgtgacggatccctt

SEQ ID NO: 48496 - DNA, 20 bp, synthetic construct
  misc_feature 1..20: note = Description of Artificial Sequence: Synthetic oligonucleotide
  misc_feature 1..20: note = Target: SCN10A; (-) strand; PAM type: YTN; PAM sequence: CTT
  source 1..20: mol_type = other DNA
tgggcttgtgacggatccct

SEQ ID NO: 48497 - DNA, 20 bp, synthetic construct
  misc_feature 1..20: note = Description of Artificial Sequence: Synthetic oligonucleotide
  misc_feature 1..20: note = Target: SCN10A; (-) strand; PAM type: YTN; PAM sequence: CTC
  source 1..20: mol_type = other DNA
tttgggcttgtgacggatcc

SEQ ID NO: 48498 - DNA, 20 bp, synthetic construct
  misc_feature 1..20: note = Description of Artificial Sequence: Synthetic oligonucleotide
  misc_feature 1..20: note = Target: SCN10A; (-) strand; PAM type: YTN; PAM sequence: TTC
  source 1..20: mol_type = other DNA
tctttgggcttgtgacggat

SEQ ID NO: 48499 - DNA, 20 bp, synthetic construct
  misc_feature 1..20: note = Description of Artificial Sequence: Synthetic oligonucleotide
  misc_feature 1..20: note = Target: SCN10A; (-) strand; PAM type: YTN; PAM sequence: CTC
  source 1..20: mol_type = other DNA
aagacaattctctttgggct

SEQ ID NO: 48500 - DNA, 20 bp, synthetic construct
  misc_feature 1..20: note = Description of Artificial Sequence: Synthetic oligonucleotide
  misc_feature 1..20: note = Target: SCN10A; (-) strand; PAM type: YTN; PAM sequence: CTG
  source 1..20: mol_type = other DNA
ccccatgtgggtgaagctca

SEQ ID NO: 48501 - DNA, 20 bp, synthetic construct
  misc_feature 1..20: note = Description of Artificial Sequence: Synthetic oligonucleotide
  misc_feature 1..20: note = Target: SCN10A; (-) strand; PAM type: YTN; PAM sequence: TTG
  source 1..20: mol_type = other DNA
ctgccccatgtgggtgaagc

SEQ ID NO: 48502 - DNA, 20 bp, synthetic construct
  misc_feature 1..20: note = Description of Artificial Sequence: Synthetic oligonucleotide
  misc_feature 1..20: note = Target: SCN10A; (-) strand; PAM type: YTN; PAM sequence: CTG
  source 1..20: mol_type = other DNA
ggattgctgccccatgtggg

SEQ ID NO: 48503 - DNA, 20 bp, synthetic construct
  misc_feature 1..20: note = Description of Artificial Sequence: Synthetic oligonucleotide
  misc_feature 1..20: note = Target: SCN10A; (-) strand; PAM type: YTN; PAM sequence: CTG
  source 1..20: mol_type = other DNA
atctgggattgctgccccat

SEQ ID NO: 48504 - DNA, 20 bp, synthetic construct
  misc_feature 1..20: note = Description of Artificial Sequence: Synthetic oligonucleotide
  misc_feature 1..20: note = Target: SCN10A; (-) strand; PAM type: YTN; PAM sequence: CTC
  source 1..20: mol_type = other DNA
agaagtatctgatctgggat

SEQ ID NO: 48505 - DNA, 20 bp, synthetic construct
  misc_feature 1..20: note = Description of Artificial Sequence: Synthetic oligonucleotide
  misc_feature 1..20: note = Target: SCN10A; (-) strand; PAM type: YTN; PAM sequence: TTG
  source 1..20: mol_type = other DNA
tctcagaagtatctgatctg

SEQ ID NO: 48506 - DNA, 20 bp, synthetic construct
  misc_feature 1..20: note = Description of Artificial Sequence: Synthetic oligonucleotide
  misc_feature 1..20: note = Target: SCN10A; (-) strand; PAM type: YTN; PAM sequence: CTT
  source 1..20: mol_type = other DNA
gtctcagaagtatctgatct

SEQ ID NO: 48507 - DNA, 20 bp, synthetic construct
  misc_feature 1..20: note = Description of Artificial Sequence: Synthetic oligonucleotide
  misc_feature 1..20: note = Target: SCN10A; (-) strand; PAM type: YTN; PAM sequence: TTG
  source 1..20: mol_type = other DNA
accagcttgtctcagaagta

SEQ ID NO: 48508 - DNA, 20 bp, synthetic construct
  misc_feature 1..20: note = Description of Artificial Sequence: Synthetic oligonucleotide
  misc_feature 1..20: note = Target: SCN10A; (-) strand; PAM type: YTN; PAM sequence: CTT
  source 1..20: mol_type = other DNA
gaccagcttgtctcagaagt

SEQ ID NO: 48509 - DNA, 20 bp, synthetic construct
  misc_feature 1..20: note = Description of Artificial Sequence: Synthetic oligonucleotide
  misc_feature 1..20: note = Target: SCN10A; (-) strand; PAM type: YTN; PAM sequence: CTG
  source 1..20: mol_type = other DNA
cttgaccagcttgtctcaga

SEQ ID NO: 48510 - DNA, 20 bp, synthetic construct
  misc_feature 1..20: note = Description of Artificial Sequence: Synthetic oligonucleotide
  misc_feature 1..20: note = Target: SCN10A; (-) strand; PAM type: YTN; PAM sequence: CTG
  source 1..20: mol_type = other DNA
aacagaagtgcccaccctgc

SEQ ID NO: 48511 - DNA, 20 bp, synthetic construct
  misc_feature 1..20: note = Description of Artificial Sequence: Synthetic oligonucleotide
  misc_feature 1..20: note = Target: SCN10A; (-) strand; PAM type: YTN; PAM sequence: CTC
  source 1..20: mol_type = other DNA
gaggagtctgaacagaagtg

SEQ ID NO: 48512 - DNA, 20 bp, synthetic construct
  misc_feature 1..20: note = Description of Artificial Sequence: Synthetic oligonucleotide
  misc_feature 1..20: note = Target: SCN10A; (-) strand; PAM type: YTN; PAM sequence: CTA
  source 1..20: mol_type = other DNA
taatgcagaactcgaggagt

SEQ ID NO: 48513 - DNA, 20 bp, synthetic construct
  misc_feature 1..20: note = Description of Artificial Sequence: Synthetic oligonucleotide
  misc_feature 1..20: note = Target: SCN10A; (-) strand; PAM type: YTN; PAM sequence: TTG
  source 1..20: mol_type = other DNA
accacactataatgcagaac

SEQ ID NO: 48514 - DNA, 20 bp, synthetic construct
  misc_feature 1..20: note = Description of Artificial Sequence: Synthetic oligonucleotide
  misc_feature 1..20: note = Target: SCN10A; (-) strand; PAM type: YTN; PAM sequence: CTG
  source 1..20: mol_type = other DNA
tcattgaccacactataatg

SEQ ID NO: 48515 - DNA, 20 bp, synthetic construct
  misc_feature 1..20: note = Description of Artificial Sequence: Synthetic oligonucleotide
  misc_feature 1..20: note = Target: SCN10A; (-) strand; PAM type: YTN; PAM sequence: CTG
  source 1..20: mol_type = other DNA
acagctgtcattgaccacac

SEQ ID NO: 48516 - DNA, 20 bp, synthetic construct
  misc_feature 1..20: note = Description of Artificial Sequence: Synthetic oligonucleotide
  misc_feature 1..20: note = Target: SCN10A; (-) strand; PAM type: YTN; PAM sequence: TTG
  source 1..20: mol_type = other DNA
gggtccaaggtgacacatgg

SEQ ID NO: 48517 - DNA, 20 bp, synthetic construct
  misc_feature 1..20: note = Description of Artificial Sequence: Synthetic oligonucleotide
  misc_feature 1..20: note = Target: SCN10A; (-) strand; PAM type: YTN; PAM sequence: CTA
  source 1..20: mol_type = other DNA
gaggatgaccgcagaattgg

SEQ ID NO: 48518 - DNA, 20 bp, synthetic construct
  misc_feature 1..20: note = Description of Artificial Sequence: Synthetic oligonucleotide
  misc_feature 1..20: note = Target: SCN10A; (-) strand; PAM type: YTN; PAM sequence: TTA
  source 1..20: mol_type = other DNA
acaacaaggtctagaggatg

SEQ ID NO: 48519 - DNA, 20 bp, synthetic construct
  misc_feature 1..20: note = Description of Artificial Sequence: Synthetic oligonucleotide
  misc_feature 1..20: note = Target: SCN10A; (-) strand; PAM type: YTN; PAM sequence: TTA
  source 1..20: mol_type = other DNA
ttaacaacaaggtctagagg

SEQ ID NO: 48520 - DNA, 20 bp, synthetic construct
  misc_feature 1..20: note = Description of Artificial Sequence: Synthetic oligonucleotide
  misc_feature 1..20: note = Target: SCN10A; (-) strand; PAM type: YTN; PAM sequence: TTA
  source 1..20: mol_type = other DNA
ttattaacaacaaggtctag

SEQ ID NO: 48521 - DNA, 20 bp, synthetic construct
  misc_feature 1..20: note = Description of Artificial Sequence: Synthetic oligonucleotide
  misc_feature 1..20: note = Target: SCN10A; (-) strand; PAM type: YTN; PAM sequence: CTT
  source 1..20: mol_type = other DNA
attattaacaacaaggtcta

SEQ ID NO: 48522 - DNA, 20 bp, synthetic construct
  misc_feature 1..20: note = Description of Artificial Sequence: Synthetic oligonucleotide
  misc_feature 1..20: note = Target: SCN10A; (-) strand; PAM type: YTN; PAM sequence: TTG
  source 1..20: mol_type = other DNA
gaggtggtacttattattaa

SEQ ID NO: 48523 - DNA, 20 bp, synthetic construct
  misc_feature 1..20: note = Description of Artificial Sequence: Synthetic oligonucleotide
  misc_feature 1..20: note = Target: SCN10A; (-) strand; PAM type: YTN; PAM sequence: CTG
  source 1..20: mol_type = other DNA
aagtcaaaatgttggaggtg

SEQ ID NO: 48524 - DNA, 20 bp, synthetic construct
  misc_feature 1..20: note = Description of Artificial Sequence: Synthetic oligonucleotide
  misc_feature 1..20: note = Target: SCN10A; (-) strand; PAM type: YTN; PAM sequence: TTC
  source 1..20: mol_type = other DNA
aaaatataggaaatgaatac

SEQ ID NO: 48525 - DNA, 20 bp, synthetic construct
  misc_feature 1..20: note = Description of Artificial Sequence: Synthetic oligonucleotide
  misc_feature 1..20: note = Target: SCN10A; (-) strand; PAM type: YTN; PAM sequence: CTA
  source 1..20: mol_type = other DNA
aaggagttcaaaatatagga

SEQ ID NO: 48526 - DNA, 20 bp, synthetic construct
  misc_feature 1..20: note = Description of Artificial Sequence: Synthetic oligonucleotide
  misc_feature 1..20: note = Target: SCN10A; (-) strand; PAM type: YTN; PAM sequence: TTG
  source 1..20: mol_type = other DNA
caggactaaaggagttcaaa

SEQ ID NO: 48527 - DNA, 20 bp, synthetic construct
  misc_feature 1..20: note = Description of Artificial Sequence: Synthetic oligonucleotide
  misc_feature 1..20: note = Target: SCN10A; (-) strand; PAM type: YTN; PAM sequence: TTG
  source 1..20: mol_type = other DNA
gagttgcaggactaaaggag

SEQ ID NO: 48528 - DNA, 20 bp, synthetic construct
  misc_feature 1..20: note = Description of Artificial Sequence: Synthetic oligonucleotide
  misc_feature 1..20: note = Target: SCN10A; (-) strand; PAM type: YTN; PAM sequence: TTA
  source 1..20: mol_type = other DNA
attggagttgcaggactaaa

SEQ ID NO: 48529 - DNA, 20 bp, synthetic construct
  misc_feature 1..20: note = Description of Artificial Sequence: Synthetic oligonucleotide
  misc_feature 1..20: note = Target: SCN10A; (-) strand; PAM type: YTN; PAM sequence: CTG
  source 1..20: mol_type = other DNA
gatggggcagatattaattg

SEQ ID NO: 48530 - DNA, 20 bp, synthetic construct
  misc_feature 1..20: note = Description of Artificial Sequence: Synthetic oligonucleotide
  misc_feature 1..20: note = Target: SCN10A; (-) strand; PAM type: YTN; PAM sequence: TTA
  source 1..20: mol_type = other DNA
aaggactggatggggcagat

SEQ ID NO: 48531 - DNA, 20 bp, synthetic construct
  misc_feature 1..20: note = Description of Artificial Sequence: Synthetic oligonucleotide
  misc_feature 1..20: note = Target: SCN10A; (-) strand; PAM type: YTN; PAM sequence: TTT
  source 1..20: mol_type = other DNA
aaaggactggatggggcaga

SEQ ID NO: 48532 - DNA, 20 bp, synthetic construct
  misc_feature 1..20: note = Description of Artificial Sequence: Synthetic oligonucleotide
  misc_feature 1..20: note = Target: SCN10A; (-) strand; PAM type: YTN; PAM sequence: TTG
  source 1..20: mol_type = other DNA
agaagtaaggacatgatata

SEQ ID NO: 48533 - DNA, 20 bp, synthetic construct
  misc_feature 1..20: note = Description of Artificial Sequence: Synthetic oligonucleotide
  misc_feature 1..20: note = Target: SCN10A; (-) strand; PAM type: YTN; PAM sequence: CTG
  source 1..20: mol_type = other DNA
ggcaaattgagaagtaagga

SEQ ID NO: 48534 - DNA, 20 bp, synthetic construct
  misc_feature 1..20: note = Description of Artificial Sequence: Synthetic oligonucleotide
  misc_feature 1..20: note = Target: SCN10A; (-) strand; PAM type: YTN; PAM sequence: CTA
  source 1..20: mol_type = other DNA
agctgggcaaattgagaagt

SEQ ID NO: 48535 - DNA, 20 bp, synthetic construct
  misc_feature 1..20: note = Description of Artificial Sequence: Synthetic oligonucleotide
  misc_feature 1..20: note = Target: SCN10A; (-) strand; PAM type: YTN; PAM sequence: TTA
  source 1..20: mol_type = other DNA
gagagatggatgtgaaatct

SEQ ID NO: 48536 - DNA, 20 bp, synthetic construct
  misc_feature 1..20: note = Description of Artificial Sequence: Synthetic oligonucleotide
  misc_feature 1..20: note = Target: SCN10A; (-) strand; PAM type: YTN; PAM sequence: CTA
  source 1..20: mol_type = other DNA
caagggagtagttagagaga

SEQ ID NO: 48537 - DNA, 20 bp, synthetic construct
  misc_feature 1..20: note = Description of Artificial Sequence: Synthetic oligonucleotide
  misc_feature 1..20: note = Target: SCN10A; (-) strand; PAM type: YTN; PAM sequence: TTG
  source 1..20: mol_type = other DNA
agggtgcctacaagggagta

SEQ ID NO: 48538 - DNA, 20 bp, synthetic construct
  misc_feature 1..20: note = Description of Artificial Sequence: Synthetic oligonucleotide
  misc_feature 1..20: note = Target: SCN10A; (-) strand; PAM type: YTN; PAM sequence: TTG
  source 1..20: mol_type = other DNA
ccaggcaagtacaatgaagg

SEQ ID NO: 48539 - DNA, 20 bp, synthetic construct
  misc_feature 1..20: note = Description of Artificial Sequence: Synthetic oligonucleotide
  misc_feature 1..20: note = Target: SCN10A; (-) strand; PAM type: YTN; PAM sequence: TTT
  source 1..20: mol_type = other DNA
gccaggcaagtacaatgaag

SEQ ID NO: 48540 - DNA, 20 bp, synthetic construct
  misc_feature 1..20: note = Description of Artificial Sequence: Synthetic oligonucleotide
  misc_feature 1..20: note = Target: SCN10A; (-) strand; PAM type: YTN; PAM sequence: TTT
  source 1..20: mol_type = other DNA
tgccaggcaagtacaatgaa

SEQ ID NO: 48541 - DNA, 20 bp, synthetic construct
  misc_feature 1..20: note = Description of Artificial Sequence: Synthetic oligonucleotide
  misc_feature 1..20: note = Target: SCN10A; (-) strand; PAM type: YTN; PAM sequence: TTC
  source 1..20: mol_type = other DNA
aggttttgccaggcaagtac

SEQ ID NO: 48542 - DNA, 20 bp, synthetic construct
  misc_feature 1..20: note = Description of Artificial Sequence: Synthetic oligonucleotide
  misc_feature 1..20: note = Target: SCN10A; (-) strand; PAM type: YTN; PAM sequence: TTC
  source 1..20: mol_type = other DNA
acagttcaggttttgccagg

SEQ ID NO: 48543 - DNA, 20 bp, synthetic construct
  misc_feature 1..20: note = Description of Artificial Sequence: Synthetic oligonucleotide
  misc_feature 1..20: note = Target: SCN10A; (-) strand; PAM type: YTN; PAM sequence: CTA
  source 1..20: mol_type = other DNA
ttcacagttcaggttttgcc

SEQ ID NO: 48544 - DNA, 20 bp, synthetic construct
  misc_feature 1..20: note = Description of Artificial Sequence: Synthetic oligonucleotide
  misc_feature 1..20: note = Target: SCN10A; (-) strand; PAM type: YTN; PAM sequence: TTG
  source 1..20: mol_type = other DNA
ggtctattcacagttcaggt

SEQ ID NO: 48545 - DNA, 20 bp, synthetic construct
  misc_feature 1..20: note = Description of Artificial Sequence: Synthetic oligonucleotide
  misc_feature 1..20: note = Target: SCN10A; (-) strand; PAM type: YTN; PAM sequence: CTA
  source 1..20: mol_type = other DNA
caaattgggtctattcacag

SEQ ID NO: 48546 - DNA, 20 bp, synthetic construct
  misc_feature 1..20: note = Description of Artificial Sequence: Synthetic oligonucleotide
  misc_feature 1..20: note = Target: SCN10A; (-) strand; PAM type: YTN; PAM sequence: TTG
  source 1..20: mol_type = other DNA
ggtgcaagtacagagtagtc

SEQ ID NO: 48547 - DNA, 20 bp, synthetic construct
  misc_feature 1..20: note = Description of Artificial Sequence: Synthetic oligonucleotide
  misc_feature 1..20: note = Target: SCN10A; (-) strand; PAM type: YTN; PAM sequence: CTG
  source 1..20: mol_type = other DNA
gttgggtgcaagtacagagt

SEQ ID NO: 48548 - DNA, 20 bp, synthetic construct
  misc_feature 1..20: note = Description of Artificial Sequence: Synthetic oligonucleotide
  misc_feature 1..20: note = Target: SCN10A; (-) strand; PAM type: YTN; PAM sequence: TTC
  source 1..20: mol_type = other DNA
cagccaggtccagctggttg

SEQ ID NO: 48549 - DNA, 20 bp, synthetic construct
  misc_feature 1..20: note = Description of Artificial Sequence: Synthetic oligonucleotide
  misc_feature 1..20: note = Target: SCN10A; (-) strand; PAM type: YTN; PAM sequence: TTT
  source 1..20: mol_type = other DNA
ccagccaggtccagctggtt

SEQ ID NO: 48550 - DNA, 20 bp, synthetic construct
  misc_feature 1..20: note = Description of Artificial Sequence: Synthetic oligonucleotide
  misc_feature 1..20: note = Target: SCN10A; (-) strand; PAM type: YTN; PAM sequence: TTT
  source 1..20: mol_type = other DNA
tccagccaggtccagctggt

SEQ ID NO: 48551 - DNA, 20 bp, synthetic construct
  misc_feature 1..20: note = Description of Artificial Sequence: Synthetic oligonucleotide
  misc_feature 1..20: note = Target: SCN10A; (-) strand; PAM type: YTN; PAM sequence: TTT
  source 1..20: mol_type = other DNA
ttccagccaggtccagctgg

SEQ ID NO: 48552 - DNA, 20 bp, synthetic construct
  misc_feature 1..20: note = Description of Artificial Sequence: Synthetic oligonucleotide
  misc_feature 1..20: note = Target: SCN10A; (-) strand; PAM type: YTN; PAM sequence: TTT
  source 1..20: mol_type = other DNA
tttccagccaggtccagctg

SEQ ID NO: 48553 - DNA, 20 bp, synthetic construct
  misc_feature 1..20: note = Description of Artificial Sequence: Synthetic oligonucleotide
  misc_feature 1..20: note = Target: SCN10A; (-) strand; PAM type: YTN; PAM sequence: TTG
  source 1..20: mol_type = other DNA
tgtattttttccagccaggt

SEQ ID NO: 48554 - DNA, 20 bp, synthetic construct
  misc_feature 1..20: note = Description of Artificial Sequence: Synthetic oligonucleotide
  misc_feature 1..20: note = Target: SCN10A; (-) strand; PAM type: YTN; PAM sequence: TTG
  source 1..20: mol_type = other DNA
gtaagcatagttgtgtattt

SEQ ID NO: 48555 - DNA, 20 bp, synthetic construct
  misc_feature 1..20: note = Description of Artificial Sequence: Synthetic oligonucleotide
  misc_feature 1..20: note = Target: SCN10A; (-) strand; PAM type: YTN; PAM sequence: CTA
  source 1..20: mol_type = other DNA
ggagggttggtaagcatagt

SEQ ID NO: 48556 - DNA, 20 bp, synthetic construct
  misc_feature 1..20: note = Description of Artificial Sequence: Synthetic oligonucleotide
  misc_feature 1..20: note = Target: SCN10A; (-) strand; PAM type: YTN; PAM sequence: CTC
  source 1..20: mol_type = other DNA
taggagggttggtaagcata

SEQ ID NO: 48557 - DNA, 20 bp, synthetic construct
  misc_feature 1..20: note = Description of Artificial Sequence: Synthetic oligonucleotide
  misc_feature 1..20: note = Target: SCN10A; (-) strand; PAM type: YTN; PAM sequence: CTC
  source 1..20: mol_type = other DNA
acagatctctaggagggttg

SEQ ID NO: 48558 - DNA, 20 bp, synthetic construct
  misc_feature 1..20: note = Description of Artificial Sequence: Synthetic oligonucleotide
  misc_feature 1..20: note = Target: SCN10A; (-) strand; PAM type: YTN; PAM sequence: CTG
  source 1..20: mol_type = other DNA
gggctcacagatctctagga

SEQ ID NO: 48559 - DNA, 20 bp, synthetic construct
  misc_feature 1..20: note = Description of Artificial Sequence: Synthetic oligonucleotide
  misc_feature 1..20: note = Target: SCN10A; (-) strand; PAM type: YTN; PAM sequence: CTG
  source 1..20: mol_type = other DNA
ggcagggcaaggctggggct

SEQ ID NO: 48560 - DNA, 20 bp, synthetic construct
  misc_feature 1..20: note = Description of Artificial Sequence: Synthetic oligonucleotide
  misc_feature 1..20: note = Target: SCN10A; (-) strand; PAM type: YTN; PAM sequence: TTC
  source 1..20: mol_type = other DNA
tgggcagggcaaggctgggg

SEQ ID NO: 48561 - DNA, 20 bp, synthetic construct
  misc_feature 1..20: note = Description of Artificial Sequence: Synthetic oligonucleotide
  misc_feature 1..20: note = Target: SCN10A; (-) strand; PAM type: YTN; PAM sequence: TTT
  source 1..20: mol_type = other DNA
ctgggcagggcaaggctggg

SEQ ID NO: 48562 - DNA, 20 bp, synthetic construct
  misc_feature 1..20: note = Description of Artificial Sequence: Synthetic oligonucleotide
  misc_feature 1..20: note = Target: SCN10A; (-) strand; PAM type: YTN; PAM sequence: CTG
  source 1..20: mol_type = other DNA
gaagaatgaaggaatggaat

SEQ ID NO: 48563 - DNA, 20 bp, synthetic construct
  misc_feature 1..20: note = Description of Artificial Sequence: Synthetic oligonucleotide
  misc_feature 1..20: note = Target: SCN10A; (-) strand; PAM type: YTN; PAM sequence: TTA
  source 1..20: mol_type = other DNA
gacgggggaagaggaagtga

SEQ ID NO: 48564 - DNA, 20 bp, synthetic construct
  misc_feature 1..20: note = Description of Artificial Sequence: Synthetic oligonucleotide
  misc_feature 1..20: note = Target: SCN10A; (-) strand; PAM type: YTN; PAM sequence: CTC
  source 1..20: mol_type = other DNA
atcaacagagagtaagtaga

SEQ ID NO: 48565 - DNA, 20 bp, synthetic construct
  misc_feature 1..20: note = Description of Artificial Sequence: Synthetic oligonucleotide
  misc_feature 1..20: note = Target: SCN10A; (-) strand; PAM type: YTN; PAM sequence: CTG
  source 1..20: mol_type = other DNA
agtgaaataaaagggagctc

SEQ ID NO: 48566 - DNA, 20 bp, synthetic construct
  misc_feature 1..20: note = Description of Artificial Sequence: Synthetic oligonucleotide
  misc_feature 1..20: note = Target: SCN10A; (-) strand; PAM type: YTN; PAM sequence: TTC
  source 1..20: mol_type = other DNA
tgagtgaaataaaagggagc

SEQ ID NO: 48567 - DNA, 20 bp, synthetic construct
  misc_feature 1..20: note = Description of Artificial Sequence: Synthetic oligonucleotide
  misc_feature 1..20: note = Target: SCN10A; (-) strand; PAM type: YTN; PAM sequence: CTA
  source 1..20: mol_type = other DNA
tattctgagtgaaataaaag

SEQ ID NO: 48568 - DNA, 20 bp, synthetic construct
  misc_feature 1..20: note = Description of Artificial Sequence: Synthetic oligonucleotide
  misc_feature 1..20: note = Target: SCN10A; (-) strand; PAM type: YTN; PAM sequence: CTA
  source 1..20: mol_type = other DNA
gtctatattctgagtgaaat

SEQ ID NO: 48569 - DNA, 20 bp, synthetic construct
  misc_feature 1..20: note = Description of Artificial Sequence: Synthetic oligonucleotide
  misc_feature 1..20: note = Target: SCN10A; (-) strand; PAM type: YTN; PAM sequence: TTG
  source 1..20: mol_type = other DNA
tgaactagtctatattctga

SEQ ID NO: 48570 - DNA, 20 bp, synthetic construct
  misc_feature 1..20: note = Description of Artificial Sequence: Synthetic oligonucleotide
  misc_feature 1..20: note = Target: SCN10A; (-) strand; PAM type: YTN; PAM sequence: TTT
  source 1..20: mol_type = other DNA
gtgaactagtctatattctg

SEQ ID NO: 48571 - DNA, 20 bp, synthetic construct
  misc_feature 1..20: note = Description of Artificial Sequence: Synthetic oligonucleotide
  misc_feature 1..20: note = Target: SCN10A; (-) strand; PAM type: YTN; PAM sequence: TTT
  source 1..20: mol_type = other DNA
tgtgaactagtctatattct

SEQ ID NO: 48572 - DNA, 20 bp, synthetic construct
  misc_feature 1..20: note = Description of Artificial Sequence: Synthetic oligonucleotide
  misc_feature 1..20: note = Target: SCN10A; (-) strand; PAM type: YTN; PAM sequence: CTT
  source 1..20: mol_type = other DNA
ttgtgaactagtctatattc

SEQ ID NO: 48573 - DNA, 20 bp, synthetic construct
  misc_feature 1..20: note = Description of Artificial Sequence: Synthetic oligonucleotide
  misc_feature 1..20: note = Target: SCN10A; (-) strand; PAM type: YTN; PAM sequence: TTC
  source 1..20: mol_type = other DNA
ttttgtgaactagtctatat

SEQ ID NO: 48574 - DNA, 20 bp, synthetic construct
  misc_feature 1..20: note = Description of Artificial Sequence: Synthetic oligonucleotide
  misc_feature 1..20: note = Target: SCN10A; (-) strand; PAM type: YTN; PAM sequence: TTA
  source 1..20: mol_type = other DNA
gtggtaggaagaaggggaag

SEQ ID NO: 48575 - DNA, 20 bp, synthetic construct
  misc_feature 1..20: note = Description of Artificial Sequence: Synthetic oligonucleotide
  misc_feature 1..20: note = Target: SCN10A; (-) strand; PAM type: YTN; PAM sequence: TTT
  source 1..20: mol_type = other DNA
agtggtaggaagaaggggaa

SEQ ID NO: 48576 - DNA, 20 bp, synthetic construct
  misc_feature 1..20: note = Description of Artificial Sequence: Synthetic oligonucleotide
  misc_feature 1..20: note = Target: SCN10A; (-) strand; PAM type: YTN; PAM sequence: TTG
  source 1..20: mol_type = other DNA
cagatatgccagagatttag

SEQ ID NO: 48577 - DNA, 20 bp, synthetic construct
  misc_feature 1..20: note = Description of Artificial Sequence: Synthetic oligonucleotide
  misc_feature 1..20: note = Target: SCN10A; (-) strand; PAM type: YTN; PAM sequence: CTT
  source 1..20: mol_type = other DNA
gcagatatgccagagattta

SEQ ID NO: 48578 - DNA, 20 bp, synthetic construct
  misc_feature 1..20: note = Description of Artificial Sequence: Synthetic oligonucleotide
  misc_feature 1..20: note = Target: SCN10A; (-) strand; PAM type: YTN; PAM sequence: CTG
  source 1..20: mol_type = other DNA
tgtggggcacgaagacagaa

SEQ ID NO: 48579 - DNA, 20 bp, synthetic construct
  misc_feature 1..20: note = Description of Artificial Sequence: Synthetic oligonucleotide
  misc_feature 1..20: note = Target: SCN10A; (-) strand; PAM type: YTN; PAM sequence: TTG
  source 1..20: mol_type = other DNA
aataggtgggagaggaaaga

SEQ ID NO: 48580 - DNA, 20 bp, synthetic construct
  misc_feature 1..20: note = Description of Artificial Sequence: Synthetic oligonucleotide
  misc_feature 1..20: note = Target: SCN10A; (-) strand; PAM type: YTN; PAM sequence: CTT
  source 1..20: mol_type = other DNA
gaataggtgggagaggaaag

SEQ ID NO: 48581 - DNA, 20 bp, synthetic construct
  misc_feature 1..20: note = Description of Artificial Sequence: Synthetic oligonucleotide
  misc_feature 1..20: note = Target: SCN10A; (-) strand; PAM type: YTN; PAM sequence: CTG
  source 1..20: mol_type = other DNA
gatgatgcaggccttgaata

SEQ ID NO: 48582 - DNA, 20 bp, synthetic construct
  misc_feature 1..20: note = Description of Artificial Sequence: Synthetic oligonucleotide
  misc_feature 1..20: note = Target: SCN10A; (-) strand; PAM type: YTN; PAM sequence: CTG
  source 1..20: mol_type = other DNA
gaagggagacaggtctggat

SEQ ID NO: 48583 - DNA, 20 bp, synthetic construct
  misc_feature 1..20: note = Description of Artificial Sequence: Synthetic oligonucleotide
  misc_feature 1..20: note = Target: SCN10A; (-) strand; PAM type: YTN; PAM sequence: CTC
  source 1..20: mol_type = other DNA
atggcaatggtctggaaggg

SEQ ID NO: 48584 - DNA, 20 bp, synthetic construct
  misc_feature 1..20: note = Description of Artificial Sequence: Synthetic oligonucleotide
  misc_feature 1..20: note = Target: SCN10A; (-) strand; PAM type: YTN; PAM sequence: CTG
  source 1..20: mol_type = other DNA
ctcatggcaatggtctggaa

SEQ ID NO: 48585 - DNA, 20 bp, synthetic construct
  misc_feature 1..20: note = Description of Artificial Sequence: Synthetic oligonucleotide
  misc_feature 1..20: note = Target: SCN10A; (-) strand; PAM type: YTN; PAM sequence: TTA
  source 1..20: mol_type = other DNA
cctgctcatggcaatggtct

SEQ ID NO: 48586 - DNA, 20 bp, synthetic construct
  misc_feature 1..20: note = Description of Artificial Sequence: Synthetic oligonucleotide
  misc_feature 1..20: note = Target: SCN10A; (-) strand; PAM type: YTN; PAM sequence: TTT
  source 1..20: mol_type = other DNA
acctgctcatggcaatggtc

SEQ ID NO: 48587 - DNA, 20 bp, synthetic construct
  misc_feature 1..20: note = Description of Artificial Sequence: Synthetic oligonucleotide
  misc_feature 1..20: note = Target: SCN10A; (-) strand; PAM type: YTN; PAM sequence: TTA
  source 1..20: mol_type = other DNA
aagcatgtttacctgctcat

SEQ ID NO: 48588 - DNA, 20 bp, synthetic construct
  misc_feature 1..20: note = Description of Artificial Sequence: Synthetic oligonucleotide
  misc_feature 1..20: note = Target: SCN10A; (-) strand; PAM type: YTN; PAM sequence: TTC
  source 1..20: mol_type = other DNA
aaagccgcgagataattaaa

SEQ ID NO: 48589 - DNA, 20 bp, synthetic construct
  misc_feature 1..20: note = Description of Artificial Sequence: Synthetic oligonucleotide
  misc_feature 1..20: note = Target: SCN10A; (-) strand; PAM type: YTN; PAM sequence: TTT
  source 1..20: mol_type = other DNA
caaagccgcgagataattaa

SEQ ID NO: 48590 - DNA, 20 bp, synthetic construct
  misc_feature 1..20: note = Description of Artificial Sequence: Synthetic oligonucleotide
  misc_feature 1..20: note = Target: SCN10A; (-) strand; PAM type: YTN; PAM sequence: TTT
  source 1..20: mol_type = other DNA
tcaaagccgcgagataatta

SEQ ID NO: 48591 - DNA, 20 bp, synthetic construct
  misc_feature 1..20: note = Description of Artificial Sequence: Synthetic oligonucleotide
  misc_feature 1..20: note = Target: SCN10A; (-) strand; PAM type: YTN; PAM sequence: TTT
  source 1..20: mol_type = other DNA
ttcaaagccgcgagataatt

SEQ ID NO: 48592 - DNA, 20 bp, synthetic construct
  misc_feature 1..20: note = Description of Artificial Sequence: Synthetic oligonucleotide
  misc_feature 1..20: note = Target: SCN10A; (-) strand; PAM type: YTN; PAM sequence: CTT
  source 1..20: mol_type = other DNA
tttcaaagccgcgagataat

SEQ ID NO: 48593 - DNA, 20 bp, synthetic construct
  misc_feature 1..20: note = Description of Artificial Sequence: Synthetic oligonucleotide
  misc_feature 1..20: note = Target: SCN10A; (-) strand; PAM type: YTN; PAM sequence: CTG
  source 1..20: mol_type = other DNA
tcaaagaagcagtaatgaaa

SEQ ID NO: 48594 - DNA, 20 bp, synthetic construct
  misc_feature 1..20: note = Description of Artificial Sequence: Synthetic oligonucleotide
  misc_feature 1..20: note = Target: SCN10A; (-) strand; PAM type: YTN; PAM sequence: TTA
  source 1..20: mol_type = other DNA
ctgtcaaagaagcagtaatg

SEQ ID NO: 48595 - DNA, 20 bp, synthetic construct
  misc_feature 1..20: note = Description of Artificial Sequence: Synthetic oligonucleotide
  misc_feature 1..20: note = Target: SCN10A; (-) strand; PAM type: YTN; PAM sequence: TTT
  source 1..20: mol_type = other DNA
actgtcaaagaagcagtaat

SEQ ID NO: 48596 - DNA, 20 bp, synthetic construct
  misc_feature 1..20: note = Description of Artificial Sequence: Synthetic oligonucleotide
  misc_feature 1..20: note = Target: SCN10A; (-) strand; PAM type: YTN; PAM sequence: TTT
  source 1..20: mol_type = other DNA
tactgtcaaagaagcagtaa

SEQ ID NO: 48597 - DNA, 20 bp, synthetic construct
  misc_feature 1..20: note = Description of Artificial Sequence: Synthetic oligonucleotide
  misc_feature 1..20: note = Target: SCN10A; (-) strand; PAM type: YTN; PAM sequence: TTG
  source 1..20: mol_type = other DNA
caaggaattttactgtcaaa

SEQ ID NO: 48598 - DNA, 20 bp, synthetic construct
  misc_feature 1..20: note = Description of Artificial Sequence: Synthetic oligonucleotide
  misc_feature 1..20: note = Target: SCN10A; (-) strand; PAM type: YTN; PAM sequence: CTT
  source 1..20: mol_type = other DNA
gcaaggaattttactgtcaa

SEQ ID NO: 48599 - DNA, 20 bp, synthetic construct
  misc_feature 1..20: note = Description of Artificial Sequence: Synthetic oligonucleotide
  misc_feature 1..20: note = Target: SCN10A; (-) strand; PAM type: YTN; PAM sequence: CTC
  source 1..20: mol_type = other DNA
ttgcaaggaattttactgtc

SEQ ID NO: 48600 - DNA, 20 bp, synthetic construct
  misc_feature 1..20: note = Description of Artificial Sequence: Synthetic oligonucleotide
  misc_feature 1..20: note = Target: SCN10A; (-) strand; PAM type: YTN; PAM sequence: TTA
  source 1..20: mol_type = other DNA
agtgtagaaaactcttgcaa

SEQ ID NO: 48601 - DNA, 20 bp, synthetic construct
  misc_feature 1..20: note = Description of Artificial Sequence: Synthetic oligonucleotide
  misc_feature 1..20: note = Target: SCN10A; (-) strand; PAM type: YTN; PAM sequence: CTG
  source 1..20: mol_type = other DNA
tagaaggttaagtgtagaaa

SEQ ID NO: 48602 - DNA, 20 bp, synthetic construct
  misc_feature 1..20: note = Description of Artificial Sequence: Synthetic oligonucleotide
  misc_feature 1..20: note = Target: SCN10A; (-) strand; PAM type: YTN; PAM sequence: CTG
  source 1..20: mol_type = other DNA
cagagaaaaaaagaggtaag

SEQ ID NO: 48603 - DNA, 20 bp, synthetic construct
  misc_feature 1..20: note = Description of Artificial Sequence: Synthetic oligonucleotide
  misc_feature 1..20: note = Target: SCN10A; (-) strand; PAM type: YTN; PAM sequence: TTC
  source 1..20: mol_type = other DNA
caggggctgcagagaaaaaa

SEQ ID NO: 48604 - DNA, 20 bp, synthetic construct
  misc_feature 1..20: note = Description of Artificial Sequence: Synthetic oligonucleotide
  misc_feature 1..20: note = Target: SCN10A; (-) strand; PAM type: YTN; PAM sequence: TTA
  source 1..20: mol_type = other DNA
aagtcagattccaggggctg

SEQ ID NO: 48605 - DNA, 20 bp, synthetic construct
  misc_feature 1..20: note = Description of Artificial Sequence: Synthetic oligonucleotide
  misc_feature 1..20: note = Target: SCN10A; (-) strand; PAM type: YTN; PAM sequence: TTG
  source 1..20: mol_type = other DNA
gaagcagttaaagtcagatt

SEQ ID NO: 48606 - DNA, 20 bp, synthetic construct
  misc_feature 1..20: note = Description of Artificial Sequence: Synthetic oligonucleotide
  misc_feature 1..20: note = Target: SCN10A; (-) strand; PAM type: YTN; PAM sequence: TTT
  source 1..20: mol_type = other DNA
ggaagcagttaaagtcagat

SEQ ID NO: 48607 - DNA, 20 bp, synthetic construct
  misc_feature 1..20: note = Description of Artificial Sequence: Synthetic oligonucleotide
  misc_feature 1..20: note = Target: SCN10A; (-) strand; PAM type: YTN; PAM sequence: TTG
  source 1..20: mol_type = other DNA
aatttggaagcagttaaagt

SEQ ID NO: 48608 - DNA, 20 bp, synthetic construct
  misc_feature 1..20: note = Description of Artificial Sequence: Synthetic oligonucleotide
  misc_feature 1..20: note = Target: SCN10A; (-) strand; PAM type: YTN; PAM sequence: TTT
  source 1..20: mol_type = other DNA
gaatttggaagcagttaaag

SEQ ID NO: 48609 - DNA, 20 bp, synthetic construct
  misc_feature 1..20: note = Description of Artificial Sequence: Synthetic oligonucleotide
  misc_feature 1..20: note = Target: SCN10A; (-) strand; PAM type: YTN; PAM sequence: TTA
  source 1..20: mol_type = other DNA
tttgaatttggaagcagtta

SEQ ID NO: 48610 - DNA, 20 bp, synthetic construct
  misc_feature 1..20: note = Description of Artificial Sequence: Synthetic oligonucleotide
  misc_feature 1..20: note = Target: SCN10A; (-) strand; PAM type: YTN; PAM sequence: CTG
  source 1..20: mol_type = other DNA
gaaatcaattatttgaattt

SEQ ID NO: 48611 - DNA, 20 bp, synthetic construct
  misc_feature 1..20: note = Description of Artificial Sequence: Synthetic oligonucleotide
  misc_feature 1..20: note = Target: SCN10A; (-) strand; PAM type: YTN; PAM sequence: TTA
  source 1..20: mol_type = other DNA
taagggtaagatgagaactg

SEQ ID NO: 48612 - DNA, 20 bp, synthetic construct
  misc_feature 1..20: note = Description of Artificial Sequence: Synthetic oligonucleotide
  misc_feature 1..20: note = Target: SCN10A; (-) strand; PAM type: YTN; PAM sequence: CTG
  source 1..20: mol_type = other DNA
tcaaatgttataagggtaag

SEQ ID NO: 48613 - DNA, 20 bp, synthetic construct
  misc_feature 1..20: note = Description of Artificial Sequence: Synthetic oligonucleotide
  misc_feature 1..20: note = Target: SCN10A; (-) strand; PAM type: YTN; PAM sequence: TTC
  source 1..20: mol_type = other DNA
tgtcaaatgttataagggta

SEQ ID NO: 48614 - DNA, 20 bp, synthetic construct
  misc_feature 1..20: note = Description of Artificial Sequence: Synthetic oligonucleotide
  misc_feature 1..20: note = Target: SCN10A; (-) strand; PAM type: YTN; PAM sequence: TTC
  source 1..20: mol_type = other DNA
aaagagaacaatataaattc

SEQ ID NO: 48615 - DNA, 20 bp, synthetic construct
  misc_feature 1..20: note = Description of Artificial Sequence: Synthetic oligonucleotide
  misc_feature 1..20: note = Target: SCN10A; (-) strand; PAM type: YTN; PAM sequence: TTT
  source 1..20: mol_type = other DNA
caaagagaacaatataaatt

SEQ ID NO: 48616 - DNA, 20 bp, synthetic construct
  misc_feature 1..20: note = Description of Artificial Sequence: Synthetic oligonucleotide
  misc_feature 1..20: note = Target: SCN10A; (-) strand; PAM type: YTN; PAM sequence: CTG
  source 1..20: mol_type = other DNA
gtttcaaagagaacaatata

SEQ ID NO: 48617 - DNA, 20 bp, synthetic construct
  misc_feature 1..20: note = Description of Artificial Sequence: Synthetic oligonucleotide
  misc_feature 1..20: note = Target: SCN10A; (-) strand; PAM type: YTN; PAM sequence: TTA
  source 1..20: mol_type = other DNA
caagcaggaaaggaaaaggg

SEQ ID NO: 48618 - DNA, 20 bp, synthetic construct
  misc_feature 1..20: note = Description of Artificial Sequence: Synthetic oligonucleotide
  misc_feature 1..20: note = Target: SCN10A; (-) strand; PAM type: YTN; PAM sequence: TTT
  source 1..20: mol_type = other DNA
acaagcaggaaaggaaaagg

SEQ ID NO: 48619 - DNA, 20 bp, synthetic construct
  misc_feature 1..20: note = Description of Artificial Sequence: Synthetic oligonucleotide
  misc_feature 1..20: note = Target: SCN10A; (-) strand; PAM type: YTN; PAM sequence: TTC
  source 1..20: mol_type = other DNA
aacatttacaagcaggaaag

SEQ ID NO: 48620 - DNA, 20 bp, synthetic construct
  misc_feature 1..20: note = Description of Artificial Sequence: Synthetic oligonucleotide
  misc_feature 1..20: note = Target: SCN10A; (-) strand; PAM type: YTN; PAM sequence: TTA
  source 1..20: mol_type = other DNA
ttcaacatttacaagcagga

SEQ ID NO: 48621 - DNA, 20 bp, synthetic construct
  misc_feature 1..20: note = Description of Artificial Sequence: Synthetic oligonucleotide
  misc_feature 1..20: note = Target: SCN10A; (-) strand; PAM type: YTN; PAM sequence: TTG
  source 1..20: mol_type = other DNA
agttattcaacatttacaag

SEQ ID NO: 48622 - DNA, 20 bp, synthetic construct
  misc_feature 1..20: note = Description of Artificial Sequence: Synthetic oligonucleotide
  misc_feature 1..20: note = Target: SCN10A; (-) strand; PAM type: YTN; PAM sequence: CTT
  source 1..20: mol_type = other DNA
gagttattcaacatttacaa

SEQ ID NO: 48623 - DNA, 20 bp, synthetic construct
  misc_feature 1..20: note = Description of Artificial Sequence: Synthetic oligonucleotide
  misc_feature 1..20: note = Target: SCN10A; (-) strand; PAM type: YTN; PAM sequence: CTA
  source 1..20: mol_type = other DNA
aggtgagaatgcttgagtta

SEQ ID NO: 48624 - DNA, 20 bp, synthetic construct
  misc_feature 1..20: note = Description of Artificial Sequence: Synthetic oligonucleotide
  misc_feature 1..20: note = Target: SCN10A; (-) strand; PAM type: YTN; PAM sequence: TTC
  source 1..20: mol_type = other DNA
aaaaacacagagaagctaag

SEQ ID NO: 48625 - DNA, 20 bp, synthetic construct
  misc_feature 1..20: note = Description of Artificial Sequence: Synthetic oligonucleotide
  misc_feature 1..20: note = Target: SCN10A; (-) strand; PAM type: YTN; PAM sequence: CTA
  source 1..20: mol_type = other DNA
tgagattcaaaaacacagag

SEQ ID NO: 48626 - DNA, 20 bp, synthetic construct
  misc_feature 1..20: note = Description of Artificial Sequence: Synthetic oligonucleotide
  misc_feature 1..20: note = Target: SCN10A; (-) strand; PAM type: YTN; PAM sequence: TTA
  source 1..20: mol_type = other DNA
gggctatgagattcaaaaac

SEQ ID NO: 48627 - DNA, 20 bp, synthetic construct
  misc_feature 1..20: note = Description of Artificial Sequence: Synthetic oligonucleotide
  misc_feature 1..20: note = Target: SCN10A; (-) strand; PAM type: YTN; PAM sequence: TTT
  source 1..20: mol_type = other DNA
agggctatgagattcaaaaa

SEQ ID NO: 48628 - DNA, 20 bp, synthetic construct
  misc_feature 1..20: note = Description of Artificial Sequence: Synthetic oligonucleotide
  misc_feature 1..20: note = Target: SCN10A; (-) strand; PAM type: YTN; PAM sequence: TTT
  source 1..20: mol_type = other DNA
tagggctatgagattcaaaa

SEQ ID NO: 48629 - DNA, 20 bp, synthetic construct
  misc_feature 1..20: note = Description of Artificial Sequence: Synthetic oligonucleotide
  misc_feature 1..20: note = Target: SCN10A; (-) strand; PAM type: YTN; PAM sequence: TTT
  source 1..20: mol_type = other DNA
ttagggctatgagattcaaa

SEQ ID NO: 48630 - DNA, 20 bp, synthetic construct
  misc_feature 1..20: note = Description of Artificial Sequence: Synthetic oligonucleotide
  misc_feature 1..20: note = Target: SCN10A; (-) strand; PAM type: YTN; PAM sequence: TTT
  source 1..20: mol_type = other DNA
tttagggctatgagattcaa

SEQ ID NO: 48631 - DNA, 20 bp, synthetic construct
  misc_feature 1..20: note = Description of Artificial Sequence: Synthetic oligonucleotide
  misc_feature 1..20: note = Target: SCN10A; (-) strand; PAM type: YTN; PAM sequence: TTG
  source 1..20: mol_type = other DNA
gcatagagatggttttttag

SEQ ID NO: 48632 - DNA, 20 bp, synthetic construct
  misc_feature 1..20: note = Description of Artificial Sequence: Synthetic oligonucleotide
  misc_feature 1..20: note = Target: SCN10A; (-) strand; PAM type: YTN; PAM sequence: TTG
  source 1..20: mol_type = other DNA
gtgggaattggcatagagat

SEQ ID NO: 48633 - DNA, 20 bp, synthetic construct
  misc_feature 1..20: note = Description of Artificial Sequence: Synthetic oligonucleotide
  misc_feature 1..20: note = Target: SCN10A; (-) strand; PAM type: YTN; PAM sequence: TTT
  source 1..20: mol_type = other DNA
ggtgggaattggcatagaga

SEQ ID NO: 48634 - DNA, 20 bp, synthetic construct
  misc_feature 1..20: note = Description of Artificial Sequence: Synthetic oligonucleotide
  misc_feature 1..20: note = Target: SCN10A; (-) strand; PAM type: YTN; PAM sequence: TTG
  source 1..20: mol_type = other DNA
gacacataatttggtgggaa

SEQ ID NO: 48635 - DNA, 20 bp, synthetic construct
  misc_feature 1..20: note = Description of Artificial Sequence: Synthetic oligonucleotide
  misc_feature 1..20: note = Target: SCN10A; (-) strand; PAM type: YTN; PAM sequence: TTC
  source 1..20: mol_type = other DNA
aggaagggatcagaaattgg

SEQ ID NO: 48636 - DNA, 20 bp, synthetic construct
  misc_feature 1..20: note = Description of Artificial Sequence: Synthetic oligonucleotide
  misc_feature 1..20: note = Target: SCN10A; (-) strand; PAM type: YTN; PAM sequence: CTA
  source 1..20: mol_type = other DNA
gtgttcaggaagggatcaga

SEQ ID NO: 48637 - DNA, 20 bp, synthetic construct
  misc_feature 1..20: note = Description of Artificial Sequence: Synthetic oligonucleotide
  misc_feature 1..20: note = Target: SCN10A; (-) strand; PAM type: YTN; PAM sequence: TTA
  source 1..20: mol_type = other DNA
acggaggcaggtagagagat

SEQ ID NO: 48638 - DNA, 20 bp, synthetic construct
  misc_feature 1..20: note = Description of Artificial Sequence: Synthetic oligonucleotide
  misc_feature 1..20: note = Target: SCN10A; (-) strand; PAM type: YTN; PAM sequence: TTT
  source 1..20: mol_type = other DNA
aacggaggcaggtagagaga

SEQ ID NO: 48639 - DNA, 20 bp, synthetic construct
  misc_feature 1..20: note = Description of Artificial Sequence: Synthetic oligonucleotide
  misc_feature 1..20: note = Target: SCN10A; (-) strand; PAM type: YTN; PAM sequence: TTA
  source 1..20: mol_type = other DNA
cacatccacatggagattta

SEQ ID NO: 48640 - DNA, 20 bp, synthetic construct
  misc_feature 1..20: note = Description of Artificial Sequence: Synthetic oligonucleotide
  misc_feature 1..20: note = Target: SCN10A; (-) strand; PAM type: YTN; PAM sequence: CTC
  source 1..20: mol_type = other DNA
catcgaggtgaacacagtta

SEQ ID NO: 48641 - DNA, 20 bp, synthetic construct
  misc_feature 1..20: note = Description of Artificial Sequence: Synthetic oligonucleotide
  misc_feature 1..20: note = Target: SCN10A; (-) strand; PAM type: YTN; PAM sequence: TTG
  source 1..20: mol_type = other DNA
ccctccatcgaggtgaacac

SEQ ID NO: 48642 - DNA, 20 bp, synthetic construct
  misc_feature 1..20: note = Description of Artificial Sequence: Synthetic oligonucleotide
  misc_feature 1..20: note = Target: SCN10A; (-) strand; PAM type: YTN; PAM sequence: CTA
  source 1..20: mol_type = other DNA
agaaattgccctccatcgag

SEQ ID NO: 48643 - DNA, 20 bp, synthetic construct
  misc_feature 1..20: note = Description of Artificial Sequence: Synthetic oligonucleotide
  misc_feature 1..20: note = Target: SCN10A; (-) strand; PAM type: YTN; PAM sequence: CTA
  source 1..20: mol_type = other DNA
aagctaagaaattgccctcc

SEQ ID NO: 48644 - DNA, 20 bp, synthetic construct
  misc_feature 1..20: note = Description of Artificial Sequence: Synthetic oligonucleotide
  misc_feature 1..20: note = Target: SCN10A; (-) strand; PAM type: YTN; PAM sequence: TTA
  source 1..20: mol_type = other DNA
tagataaacctaaagctaag

SEQ ID NO: 48645 - DNA, 20 bp, synthetic construct
  misc_feature 1..20: note = Description of Artificial Sequence: Synthetic oligonucleotide
  misc_feature 1..20: note = Target: SCN10A; (-) strand; PAM type: YTN; PAM sequence: TTT
  source 1..20: mol_type = other DNA
atagataaacctaaagctaa

SEQ ID NO: 48646 - DNA, 20 bp, synthetic construct
  misc_feature 1..20: note = Description of Artificial Sequence: Synthetic oligonucleotide
  misc_feature 1..20: note = Target: SCN10A; (-) strand; PAM type: YTN; PAM sequence: TTG
  source 1..20: mol_type = other DNA
ccgaggaatttatagataaa

SEQ ID NO: 48647 - DNA, 20 bp, synthetic construct
  misc_feature 1..20: note = Description of Artificial Sequence: Synthetic oligonucleotide
  misc_feature 1..20: note = Target: SCN10A; (-) strand; PAM type: YTN; PAM sequence: CTT
  source 1..20: mol_type = other DNA
gccgaggaatttatagataa

SEQ ID NO: 48648 - DNA, 20 bp, synthetic construct
  misc_feature 1..20: note = Description of Artificial Sequence: Synthetic oligonucleotide
  misc_feature 1..20: note = Target: SCN10A; (-) strand; PAM type: YTN; PAM sequence: TTC
  source 1..20: mol_type = other DNA
aagatgcatgtcttgccgag

SEQ ID NO: 48649 - DNA, 20 bp, synthetic construct
  misc_feature 1..20: note = Description of Artificial Sequence: Synthetic oligonucleotide
  misc_feature 1..20: note = Target: SCN10A; (-) strand; PAM type: YTN; PAM sequence: CTG
  source 1..20: mol_type = other DNA
ttcaagatgcatgtcttgcc

SEQ ID NO: 48650 - DNA, 20 bp, synthetic construct
  misc_feature 1..20: note = Description of Artificial Sequence: Synthetic oligonucleotide
  misc_feature 1..20: note = Target: SCN10A; (-) strand; PAM type: YTN; PAM sequence: CTG
  source 1..20: mol_type = other DNA
atatctgttcaagatgcatg

SEQ ID NO: 48651 - DNA, 20 bp, synthetic construct
  misc_feature 1..20: note = Description of Artificial Sequence: Synthetic oligonucleotide
  misc_feature 1..20: note = Target: SCN10A; (-) strand; PAM type: YTN; PAM sequence: TTG
  source 1..20: mol_type = other DNA
cccacataggctgatatctg

SEQ ID NO: 48652 - DNA, 20 bp, synthetic construct
  misc_feature 1..20: note = Description of Artificial Sequence: Synthetic oligonucleotide
  misc_feature 1..20: note = Target: SCN10A; (-) strand; PAM type: YTN; PAM sequence: TTT
  source 1..20: mol_type = other DNA
gcccacataggctgatatct

SEQ ID NO: 48653 - DNA, 20 bp, synthetic construct
  misc_feature 1..20: note = Description of Artificial Sequence: Synthetic oligonucleotide
  misc_feature 1..20: note = Target: SCN10A; (-) strand; PAM type: YTN; PAM sequence: CTT
  source 1..20: mol_type = other DNA
tgcccacataggctgatatc

SEQ ID NO: 48654 - DNA, 20 bp, synthetic construct
  misc_feature 1..20: note = Description of Artificial Sequence: Synthetic oligonucleotide
  misc_feature 1..20: note = Target: SCN10A; (-) strand; PAM type: YTN; PAM sequence: TTC
  source 1..20: mol_type = other DNA
tttgcccacataggctgata

SEQ ID NO: 48655 - DNA, 20 bp, synthetic construct
  misc_feature 1..20: note = Description of Artificial Sequence: Synthetic oligonucleotide
  misc_feature 1..20: note = Target: SCN10A; (-) strand; PAM type: YTN; PAM sequence: TTT
  source 1..20: mol_type = other DNA
ctttgcccacataggctgat

SEQ ID NO: 48656 - DNA, 20 bp, synthetic construct
  misc_feature 1..20: note = Description of Artificial Sequence: Synthetic oligonucleotide
  misc_feature 1..20: note = Target: SCN10A; (-) strand; PAM type: YTN; PAM sequence: CTT
  source 1..20: mol_type = other DNA
tctttgcccacataggctga

SEQ ID NO: 48657 - DNA, 20 bp, synthetic construct
  misc_feature 1..20: note = Description of Artificial Sequence: Synthetic oligonucleotide
  misc_feature 1..20: note = Target: SCN10A; (-) strand; PAM type: YTN; PAM sequence: TTA
  source 1..20: mol_type = other DNA
taaacaatggacatcatctt

SEQ ID NO: 48658 - DNA, 20 bp, synthetic construct
  misc_feature 1..20: note = Description of Artificial Sequence: Synthetic oligonucleotide
  misc_feature 1..20: note = Target: SCN10A; (-) strand; PAM type: YTN; PAM sequence: TTA
  source 1..20: mol_type = other DNA
ttataaacaatggacatcat

SEQ ID NO: 48659 - DNA, 20 bp, synthetic construct
  misc_feature 1..20: note = Description of Artificial Sequence: Synthetic oligonucleotide
  misc_feature 1..20: note = Target: SCN10A; (-) strand; PAM type: YTN; PAM sequence: TTA
  source 1..20: mol_type = other DNA
ttattataaacaatggacat

SEQ ID NO: 48660 - DNA, 20 bp, synthetic construct
  misc_feature 1..20: note = Description of Artificial Sequence: Synthetic oligonucleotide
  misc_feature 1..20: note = Target: SCN10A; (-) strand; PAM type: YTN; PAM sequence: TTC
  source 1..20: mol_type = other DNA
cattattattataaacaatg

SEQ ID NO: 48661 - DNA, 20 bp, synthetic construct
  misc_feature 1..20: note = Description of Artificial Sequence: Synthetic oligonucleotide
  misc_feature 1..20: note = Target: SCN10A; (-) strand; PAM type: YTN; PAM sequence: TTT
  source 1..20: mol_type = other DNA
ccattattattataaacaat

SEQ ID NO: 48662 - DNA, 20 bp, synthetic construct
  misc_feature 1..20: note = Description of Artificial Sequence: Synthetic oligonucleotide
  misc_feature 1..20: note = Target: SCN10A; (-) strand; PAM type: YTN; PAM sequence: TTT
  source 1..20: mol_type = other DNA
tccattattattataaacaa

SEQ ID NO: 48663 - DNA, 20 bp, synthetic construct
  misc_feature 1..20: note = Description of Artificial Sequence: Synthetic oligonucleotide
  misc_feature 1..20: note = Target: SCN10A; (-) strand; PAM type: YTN; PAM sequence: TTG
  source 1..20: mol_type = other DNA
ttttccattattattataaa

SEQ ID NO: 48664 - DNA, 20 bp, synthetic construct
  misc_feature 1..20: note = Description of Artificial Sequence: Synthetic oligonucleotide
  misc_feature 1..20: note = Target: SCN10A; (-) strand; PAM type: YTN; PAM sequence: TTG
  source 1..20: mol_type = other DNA
ttgttttccattattattat

SEQ ID NO: 48665 - DNA, 20 bp, synthetic construct
  misc_feature 1..20: note = Description of Artificial Sequence: Synthetic oligonucleotide
  misc_feature 1..20: note = Target: SCN10A; (-) strand; PAM type: YTN; PAM sequence: TTA
  source 1..20: mol_type = other DNA
tcagttgttgttttccatta

SEQ ID NO: 48666 - DNA, 20 bp, synthetic construct
  misc_feature 1..20: note = Description of Artificial Sequence: Synthetic oligonucleotide
  misc_feature 1..20: note = Target: SCN10A; (-) strand; PAM type: YTN; PAM sequence: TTT
  source 1..20: mol_type = other DNA
atcagttgttgttttccatt

SEQ ID NO: 48667 - DNA, 20 bp, synthetic construct
  misc_feature 1..20: note = Description of Artificial Sequence: Synthetic oligonucleotide
  misc_feature 1..20: note = Target: SCN10A; (-) strand; PAM type: YTN; PAM sequence: CTT
  source 1..20: mol_type = other DNA
tatcagttgttgttttccat

SEQ ID NO: 48668 - DNA, 20 bp, synthetic construct
  misc_feature 1..20: note = Description of Artificial Sequence: Synthetic oligonucleotide
  misc_feature 1..20: note = Target: SCN10A; (-) strand; PAM type: YTN; PAM sequence: TTA
  source 1..20: mol_type = other DNA
tgctttatcagttgttgttt

SEQ ID NO: 48669 - DNA, 20 bp, synthetic construct
  misc_feature 1..20: note = Description of Artificial Sequence: Synthetic oligonucleotide
  misc_feature 1..20: note = Target: SCN10A; (-) strand; PAM type: YTN; PAM sequence: TTC
  source 1..20: mol_type = other DNA
acaatgtattatgctttatc

SEQ ID NO: 48670 - DNA, 20 bp, synthetic construct
  misc_feature 1..20: note = Description of Artificial Sequence: Synthetic oligonucleotide
  misc_feature 1..20: note = Target: SCN10A; (-) strand; PAM type: YTN; PAM sequence: TTT
  source 1..20: mol_type = other DNA
cacaatgtattatgctttat

SEQ ID NO: 48671 - DNA, 20 bp, synthetic construct
  misc_feature 1..20: note = Description of Artificial Sequence: Synthetic oligonucleotide
  misc_feature 1..20: note = Target: SCN10A; (-) strand; PAM type: YTN; PAM sequence: TTT
  source 1..20: mol_type = other DNA
tcacaatgtattatgcttta

SEQ ID NO: 48672 - DNA, 20 bp, synthetic construct
  misc_feature 1..20: note = Description of Artificial Sequence: Synthetic oligonucleotide
  misc_feature 1..20: note = Target: SCN10A; (-) strand; PAM type: YTN; PAM sequence: TTT
  source 1..20: mol_type = other DNA
ttcacaatgtattatgcttt

SEQ ID NO: 48673 - DNA, 20 bp, synthetic construct
  misc_feature 1..20: note = Description of Artificial Sequence: Synthetic oligonucleotide
  misc_feature 1..20: note = Target: SCN10A; (-) strand; PAM type: YTN; PAM sequence: CTT
  source 1..20: mol_type = other DNA
tttcacaatgtattatgctt

SEQ ID NO: 48674 - DNA, 20 bp, synthetic construct
  misc_feature 1..20: note = Description of Artificial Sequence: Synthetic oligonucleotide
  misc_feature 1..20: note = Target: SCN10A; (-) strand; PAM type: YTN; PAM sequence: TTC
  source 1..20: mol_type = other DNA
tttttcacaatgtattatgc

SEQ ID NO: 48675 - DNA, 20 bp, synthetic construct
  misc_feature 1..20: note = Description of Artificial Sequence: Synthetic oligonucleotide
  misc_feature 1..20: note = Target: SCN10A; (-) strand; PAM type: YTN; PAM sequence: CTC
  source 1..20: mol_type = other DNA
attctttttcacaatgtatt

SEQ ID NO: 48676 - DNA, 20 bp, synthetic construct
  misc_feature 1..20: note = Description of Artificial Sequence: Synthetic oligonucleotide
  misc_feature 1..20: note = Target: SCN10A; (-) strand; PAM type: YTN; PAM sequence: CTG
  source 1..20: mol_type = other DNA
cctcattctttttcacaatg

SEQ ID NO: 48677 - DNA, 20 bp, synthetic construct
  misc_feature 1..20: note = Description of Artificial Sequence: Synthetic oligonucleotide
  misc_feature 1..20: note = Target: SCN10A; (-) strand; PAM type: YTN; PAM sequence: CTA
  source 1..20: mol_type = other DNA
catcaccacaaataaatctg

SEQ ID NO: 48678 - DNA, 20 bp, synthetic construct
  misc_feature 1..20: note = Description of Artificial Sequence: Synthetic oligonucleotide
  misc_feature 1..20: note = Target: SCN10A; (-) strand; PAM type: YTN; PAM sequence: TTC
  source 1..20: mol_type = other DNA
tacatcaccacaaataaatc

SEQ ID NO: 48679 - DNA, 20 bp, synthetic construct
  misc_feature 1..20: note = Description of Artificial Sequence: Synthetic oligonucleotide
  misc_feature 1..20: note = Target: SCN10A; (-) strand; PAM type: YTN; PAM sequence: TTT
  source 1..20: mol_type = other DNA
ctacatcaccacaaataaat

SEQ ID NO: 48680 - DNA, 20 bp, synthetic construct
  misc_feature 1..20: note = Description of Artificial Sequence: Synthetic oligonucleotide
  misc_feature 1..20: note = Target: SCN10A; (-) strand; PAM type: YTN; PAM sequence: TTT
  source 1..20: mol_type = other DNA
tctacatcaccacaaataaa

SEQ ID NO: 48681 - DNA, 20 bp, synthetic construct
  misc_feature 1..20: note = Description of Artificial Sequence: Synthetic oligonucleotide
  misc_feature 1..20: note = Target: SCN10A; (-) strand; PAM type: YTN; PAM sequence: TTT
  source 1..20: mol_type = other DNA
ttctacatcaccacaaataa

SEQ ID NO: 48682 - DNA, 20 bp, synthetic construct
  misc_feature 1..20: note = Description of Artificial Sequence: Synthetic oligonucleotide
  misc_feature 1..20: note = Target: SCN10A; (-) strand; PAM type: YTN; PAM sequence: CTA
  source 1..20: mol_type = other DNA
cacatacatatttttctaca

SEQ ID NO: 48683 - DNA, 20 bp, synthetic construct
  misc_feature 1..20: note = Description of Artificial Sequence: Synthetic oligonucleotide
  misc_feature 1..20: note = Target: SCN10A; (-) strand; PAM type: YTN; PAM sequence: CTA
  source 1..20: mol_type = other DNA
tgcatatataagcacatgca

SEQ ID NO: 48684 - DNA, 20 bp, synthetic construct
  misc_feature 1..20: note = Description of Artificial Sequence: Synthetic oligonucleotide
  misc_feature 1..20: note = Target: SCN10A; (-) strand; PAM type: YTN; PAM sequence: TTC
  source 1..20: mol_type = other DNA
tatgcatatataagcacatg

SEQ ID NO: 48685 - DNA, 20 bp, synthetic construct
  misc_feature 1..20: note = Description of Artificial Sequence: Synthetic oligonucleotide
  misc_feature 1..20: note = Target: SCN10A; (-) strand; PAM type: YTN; PAM sequence: TTC
  source 1..20: mol_type = other DNA
aagcaatgttctatgcatat

SEQ ID NO: 48686 - DNA, 20 bp, synthetic construct
  misc_feature 1..20: note = Description of Artificial Sequence: Synthetic oligonucleotide
  misc_feature 1..20: note = Target: SCN10A; (-) strand; PAM type: YTN; PAM sequence: CTT
  source 1..20: mol_type = other DNA
caagcaatgttctatgcata

SEQ ID NO: 48687 - DNA, 20 bp, synthetic construct
  misc_feature 1..20: note = Description of Artificial Sequence: Synthetic oligonucleotide
  misc_feature 1..20: note = Target: SCN10A; (-) strand; PAM type: YTN; PAM sequence: TTC
  source 1..20: mol_type = other DNA
ttcaagcaatgttctatgca

SEQ ID NO: 48688 - DNA, 20 bp, synthetic construct
  misc_feature 1..20: note = Description of Artificial Sequence: Synthetic oligonucleotide
  misc_feature 1..20: note = Target: SCN10A; (-) strand; PAM type: YTN; PAM sequence: TTA
  source 1..20: mol_type = other DNA
tattcttcaagcaatgttct

SEQ ID NO: 48689 - DNA, 20 bp, synthetic construct
  misc_feature 1..20: note = Description of Artificial Sequence: Synthetic oligonucleotide
  misc_feature 1..20: note = Target: SCN10A; (-) strand; PAM type: YTN; PAM sequence: CTT
  source 1..20: mol_type = other DNA
atattcttcaagcaatgttc

SEQ ID NO: 48690 - DNA, 20 bp, synthetic construct
  misc_feature 1..20: note = Description of Artificial Sequence: Synthetic oligonucleotide
  misc_feature 1..20: note = Target: SCN10A; (-) strand; PAM type: YTN; PAM sequence: TTA
  source 1..20: mol_type = other DNA
tcttatattcttcaagcaat

SEQ ID NO: 48691 - DNA, 20 bp, synthetic construct
  misc_feature 1..20: note = Description of Artificial Sequence: Synthetic oligonucleotide
  misc_feature 1..20: note = Target: SCN10A; (-) strand; PAM type: YTN; PAM sequence: TTT
  source 1..20: mol_type = other DNA
atcttatattcttcaagcaa

SEQ ID NO: 48692 - DNA, 20 bp, synthetic construct
  misc_feature 1..20: note = Description of Artificial Sequence: Synthetic oligonucleotide
  misc_feature 1..20: note = Target: SCN10A; (-) strand; PAM type: YTN; PAM sequence: CTC
  source 1..20: mol_type = other DNA
cagtttatcttatattcttc

SEQ ID NO: 48693 - DNA, 20 bp, synthetic construct
  misc_feature 1..20: note = Description of Artificial Sequence: Synthetic oligonucleotide
  misc_feature 1..20: note = Target: SCN10A; (-) strand; PAM type: YTN; PAM sequence: CTC
  source 1..20: mol_type = other DNA
ccactccagtttatcttata

SEQ ID NO: 48694 - DNA, 20 bp, synthetic construct
  misc_feature 1..20: note = Description of Artificial Sequence: Synthetic oligonucleotide
  misc_feature 1..20: note = Target: SCN10A; (-) strand; PAM type: YTN; PAM sequence: CTG
  source 1..20: mol_type = other DNA
gtgcacccccctcccactcc

SEQ ID NO: 48695 - DNA, 20 bp, synthetic construct
  misc_feature 1..20: note = Description of Artificial Sequence: Synthetic oligonucleotide
  misc_feature 1..20: note = Target: SCN10A; (-) strand; PAM type: YTN; PAM sequence: CTC
  source 1..20: mol_type = other DNA
ctggtgcacccccctcccac

SEQ ID NO: 48696 - DNA, 20 bp, synthetic construct
  misc_feature 1..20: note = Description of Artificial Sequence: Synthetic oligonucleotide
  misc_feature 1..20: note = Target: SCN10A; (-) strand; PAM type: YTN; PAM sequence: CTC
  source 1..20: mol_type = other DNA
cccagactcctggtgcaccc

SEQ ID NO: 48697 - DNA, 20 bp, synthetic construct
  misc_feature 1..20: note = Description of Artificial Sequence: Synthetic oligonucleotide
  misc_feature 1..20: note = Target: SCN10A; (-) strand; PAM type: YTN; PAM sequence: CTG
  source 1..20: mol_type = other DNA
ctccccagactcctggtgca

SEQ ID NO: 48698 - DNA, 20 bp, synthetic construct
  misc_feature 1..20: note = Description of Artificial Sequence: Synthetic oligonucleotide
  misc_feature 1..20: note = Target: SCN10A; (-) strand; PAM type: YTN; PAM sequence: TTC
  source 1..20: mol_type = other DNA
ctgctccccagactcctggt

SEQ ID NO: 48699 - DNA, 20 bp, synthetic construct
  misc_feature 1..20: note = Description of Artificial Sequence: Synthetic oligonucleotide
  misc_feature 1..20: note = Target: SCN10A; (-) strand; PAM type: YTN; PAM sequence: CTT
  source 1..20: mol_type = other DNA
cctgctccccagactcctgg

SEQ ID NO: 48700 - DNA, 20 bp, synthetic construct
  misc_feature 1..20: note = Description of Artificial Sequence: Synthetic oligonucleotide
  misc_feature 1..20: note = Target: SCN10A; (-) strand; PAM type: YTN; PAM sequence: CTA
  source 1..20: mol_type = other DNA
tagacccttcctgctcccca

SEQ ID NO: 48701 - DNA, 20 bp, synthetic construct
  misc_feature 1..20: note = Description of Artificial Sequence: Synthetic oligonucleotide
  misc_feature 1..20: note = Target: SCN10A; (-) strand; PAM type: YTN; PAM sequence: TTC
  source 1..20: mol_type = other DNA
ccactatagacccttcctgc

SEQ ID NO: 48702 - DNA, 20 bp, synthetic construct
  misc_feature 1..20: note = Description of Artificial Sequence: Synthetic oligonucleotide
  misc_feature 1..20: note = Target: SCN10A; (-) strand; PAM type: YTN; PAM sequence: CTT
  source 1..20: mol_type = other DNA
cccactatagacccttcctg

SEQ ID NO: 48703 - DNA, 20 bp, synthetic construct
  misc_feature 1..20: note = Description of Artificial Sequence: Synthetic oligonucleotide
  misc_feature 1..20: note = Target: SCN10A; (-) strand; PAM type: YTN; PAM sequence: CTC
  source 1..20: mol_type = other DNA
cttcccactatagacccttc

SEQ ID NO: 48704 - DNA, 20 bp, synthetic construct
  misc_feature 1..20: note = Description of Artificial Sequence: Synthetic oligonucleotide
  misc_feature 1..20: note = Target: SCN10A; (-) strand; PAM type: YTN; PAM sequence: CTA
  source 1..20: mol_type = other DNA
tgtctccttcccactataga

SEQ ID NO: 48705 - DNA, 20 bp, synthetic construct
  misc_feature 1..20: note = Description of Artificial Sequence: Synthetic oligonucleotide
  misc_feature 1..20: note = Target: SCN10A; (-) strand; PAM type: YTN; PAM sequence: CTG
  source 1..20: mol_type = other DNA
caagtgtgtatgcaatgaca

SEQ ID NO: 48706 - DNA, 20 bp, synthetic construct
  misc_feature 1..20: note = Description of Artificial Sequence: Synthetic oligonucleotide
  misc_feature 1..20: note = Target: SCN10A; (-) strand; PAM type: YTN; PAM sequence: CTA
  source 1..20: mol_type = other DNA
aacactgcaagtgtgtatgc

SEQ ID NO: 48707 - DNA, 20 bp, synthetic construct
  misc_feature 1..20: note = Description of Artificial Sequence: Synthetic oligonucleotide
  misc_feature 1..20: note = Target: SCN10A; (-) strand; PAM type: YTN; PAM sequence: TTC
  source 1..20: mol_type = other DNA
aagtgcatatagtaaaaaaa

SEQ ID NO: 48708 - DNA, 20 bp, synthetic construct
  misc_feature 1..20: note = Description of Artificial Sequence: Synthetic oligonucleotide
  misc_feature 1..20: note = Target: SCN10A; (-) strand; PAM type: YTN; PAM sequence: TTT
  source 1..20: mol_type = other DNA
caagtgcatatagtaaaaaa

SEQ ID NO: 48709 - DNA, 20 bp, synthetic construct
  misc_feature 1..20: note = Description of Artificial Sequence: Synthetic oligonucleotide
  misc_feature 1..20: note = Target: SCN10A; (-) strand; PAM type: YTN; PAM sequence: TTT
  source 1..20: mol_type = other DNA
tcaagtgcatatagtaaaaa

SEQ ID NO: 48710 - DNA, 20 bp, synthetic construct
  misc_feature 1..20: note = Description of Artificial Sequence: Synthetic oligonucleotide
  misc_feature 1..20: note = Target: SCN10A; (-) strand; PAM type: YTN; PAM sequence: TTT
  source 1..20: mol_type = other DNA
ttcaagtgcatatagtaaaa

SEQ ID NO: 48711 - DNA, 20 bp, synthetic construct
  misc_feature 1..20: note = Description of Artificial Sequence: Synthetic oligonucleotide
  misc_feature 1..20: note = Target: SCN10A; (-) strand; PAM type: YTN; PAM sequence: CTG
  source 1..20: mol_type = other DNA
atttttcaagtgcatatagt

SEQ ID NO: 48712 - DNA, 20 bp, synthetic construct
  misc_feature 1..20: note = Description of Artificial Sequence: Synthetic oligonucleotide
  misc_feature 1..20: note = Target: SCN10A; (-) strand; PAM type: YTN; PAM sequence: CTA
  source 1..20: mol_type = other DNA
aactgatttttcaagtgcat

SEQ ID NO: 48713 - DNA, 20 bp, synthetic construct
  misc_feature 1..20: note = Description of Artificial Sequence: Synthetic oligonucleotide
  misc_feature 1..20: note = Target: SCN10A; (-) strand; PAM type: YTN; PAM sequence: CTC
  source 1..20: mol_type = other DNA
taaactgatttttcaagtgc

SEQ ID NO: 48714 - DNA, 20 bp, synthetic construct
  misc_feature 1..20: note = Description of Artificial Sequence: Synthetic oligonucleotide
  misc_feature 1..20: note = Target: SCN10A; (-) strand; PAM type: YTN; PAM sequence: TTC
  source 1..20: mol_type = other DNA
tctaaactgatttttcaagt

SEQ ID NO: 48715 - DNA, 20 bp, synthetic construct
  misc_feature 1..20: note = Description of Artificial Sequence: Synthetic oligonucleotide
  misc_feature 1..20: note = Target: SCN10A; (-) strand; PAM type: YTN; PAM sequence: TTT
  source 1..20: mol_type = other DNA
ctctaaactgatttttcaag

SEQ ID NO: 48716 - DNA, 20 bp, synthetic construct
  misc_feature 1..20: note = Description of Artificial Sequence: Synthetic oligonucleotide
  misc_feature 1..20: note = Target: SCN10A; (-) strand; PAM type: YTN; PAM sequence: TTA
  source 1..20: mol_type = other DNA
tttctctaaactgatttttc

SEQ ID NO: 48717 - DNA, 20 bp, synthetic construct
  misc_feature 1..20: note = Description of Artificial Sequence: Synthetic oligonucleotide
  misc_feature 1..20: note = Target: SCN10A; (-) strand; PAM type: YTN; PAM sequence: TTG
  source 1..20: mol_type = other DNA
ggggcacacagttatttctc

SEQ ID NO: 48718 - DNA, 20 bp, synthetic construct
  misc_feature 1..20: note = Description of Artificial Sequence: Synthetic oligonucleotide
  misc_feature 1..20: note = Target: SCN10A; (-) strand; PAM type: YTN; PAM sequence: TTT
  source 1..20: mol_type = other DNA
gggggcacacagttatttct

SEQ ID NO: 48719 - DNA, 20 bp, synthetic construct
  misc_feature 1..20: note = Description of Artificial Sequence: Synthetic oligonucleotide
  misc_feature 1..20: note = Target: SCN10A; (-) strand; PAM type: YTN; PAM sequence: TTA
  source 1..20: mol_type = other DNA
gcaaaatttgggggcacaca

SEQ ID NO: 48720 - DNA, 20 bp, synthetic construct
  misc_feature 1..20: note = Description of Artificial Sequence: Synthetic oligonucleotide
  misc_feature 1..20: note = Target: SCN10A; (-) strand; PAM type: YTN; PAM sequence: CTG
  source 1..20: mol_type = other DNA
ttagcaaaatttgggggcac

SEQ ID NO: 48721 - DNA, 20 bp, synthetic construct
  misc_feature 1..20: note = Description of Artificial Sequence: Synthetic oligonucleotide
  misc_feature 1..20: note = Target: SCN10A; (-) strand; PAM type: YTN; PAM sequence: TTA
  source 1..20: mol_type = other DNA
tcaggaaaaaacactgttag

SEQ ID NO: 48722 - DNA, 20 bp, synthetic construct
  misc_feature 1..20: note = Description of Artificial Sequence: Synthetic oligonucleotide
  misc_feature 1..20: note = Target: SCN10A; (-) strand; PAM type: YTN; PAM sequence: TTA
  source 1..20: mol_type = other DNA
aattatcaggaaaaaacact

SEQ ID NO: 48723 - DNA, 20 bp, synthetic construct
  misc_feature 1..20: note = Description of Artificial Sequence: Synthetic oligonucleotide
  misc_feature 1..20: note = Target: SCN10A; (-) strand; PAM type: YTN; PAM sequence: TTT
  source 1..20: mol_type = other DNA
aaattatcaggaaaaaacac

SEQ ID NO: 48724 - DNA, 20 bp, synthetic construct
  misc_feature 1..20: note = Description of Artificial Sequence: Synthetic oligonucleotide
  misc_feature 1..20: note = Target: SCN10A; (-) strand; PAM type: YTN; PAM sequence: TTT
  source 1..20: mol_type = other DNA
taaattatcaggaaaaaaca

SEQ ID NO: 48725 - DNA, 20 bp, synthetic construct
  misc_feature 1..20: note = Description of Artificial Sequence: Synthetic oligonucleotide
  misc_feature 1..20: note = Target: SCN10A; (-) strand; PAM type: YTN; PAM sequence: TTT
  source 1..20: mol_type = other DNA
ttaaattatcaggaaaaaac

SEQ ID NO: 48726 - DNA, 20 bp, synthetic construct
  misc_feature 1..20: note = Description of Artificial Sequence: Synthetic oligonucleotide
  misc_feature 1..20: note = Target: SCN10A; (-) strand; PAM type: YTN; PAM sequence: CTA
  source 1..20: mol_type = other DNA
catacacatttttaaattat

SEQ ID NO: 48727 - DNA, 20 bp, synthetic construct
  misc_feature 1..20: note = Description of Artificial Sequence: Synthetic oligonucleotide
  misc_feature 1..20: note = Target: SCN10A; (-) strand; PAM type: YTN; PAM sequence: TTG
  source 1..20: mol_type = other DNA
actacatacacatttttaaa

SEQ ID NO: 48728 - DNA, 20 bp, synthetic construct
  misc_feature 1..20: note = Description of Artificial Sequence: Synthetic oligonucleotide
  misc_feature 1..20: note = Target: SCN10A; (-) strand; PAM type: YTN; PAM sequence: CTT
  source 1..20: mol_type = other DNA
gactacatacacatttttaa

SEQ ID NO: 48729 - DNA, 20 bp, synthetic construct
  misc_feature 1..20: note = Description of Artificial Sequence: Synthetic oligonucleotide
  misc_feature 1..20: note = Target: SCN10A; (-) strand; PAM type: YTN; PAM sequence: CTG
  source 1..20: mol_type = other DNA
ataaatcttgactacataca

SEQ ID NO: 48730 - DNA, 20 bp, synthetic construct
  misc_feature 1..20: note = Description of Artificial Sequence: Synthetic oligonucleotide
  misc_feature 1..20: note = Target: SCN10A; (-) strand; PAM type: YTN; PAM sequence: CTA
  source 1..20: mol_type = other DNA
ctgataaatcttgactacat

SEQ ID NO: 48731 - DNA, 20 bp, synthetic construct
  misc_feature 1..20: note = Description of Artificial Sequence: Synthetic oligonucleotide
  misc_feature 1..20: note = Target: SCN10A; (-) strand; PAM type: YTN; PAM sequence: TTG
  source 1..20: mol_type = other DNA
aaaaaaaaagaaaacaaata

SEQ ID NO: 48732 - DNA, 20 bp, synthetic construct
  misc_feature 1..20: note = Description of Artificial Sequence: Synthetic oligonucleotide
  misc_feature 1..20: note = Target: SCN10A; (-) strand; PAM type: YTN; PAM sequence: TTA
  source 1..20: mol_type = other DNA
aaataaaaaaatgaagaaaa

SEQ ID NO: 48733 - DNA, 20 bp, synthetic construct
  misc_feature 1..20: note = Description of Artificial Sequence: Synthetic oligonucleotide
  misc_feature 1..20: note = Target: SCN10A; (-) strand; PAM type: YTN; PAM sequence: TTT
  source 1..20: mol_type = other DNA
aaaataaaaaaatgaagaaa

SEQ ID NO: 48734 - DNA, 20 bp, synthetic construct
  misc_feature 1..20: note = Description of Artificial Sequence: Synthetic oligonucleotide
  misc_feature 1..20: note = Target: SCN10A; (-) strand; PAM type: YTN; PAM sequence: TTA
  source 1..20: mol_type = other DNA
aaaaaagaaaaaaatttaaa

SEQ ID NO: 48735 - DNA, 20 bp, synthetic construct
  misc_feature 1..20: note = Description of Artificial Sequence: Synthetic oligonucleotide
  misc_feature 1..20: note = Target: SCN10A; (-) strand; PAM type: YTN; PAM sequence: TTT
  source 1..20: mol_type = other DNA
aaaaaaagaaaaaaatttaa

SEQ ID NO: 48736 - DNA, 20 bp, synthetic construct
  misc_feature 1..20: note = Description of Artificial Sequence: Synthetic oligonucleotide
  misc_feature 1..20: note = Target: SCN10A; (-) strand; PAM type: YTN; PAM sequence: TTA
  source 1..20: mol_type = other DNA
aagtataatttaaaaaaaga

SEQ ID NO: 48737 - DNA, 20 bp, synthetic construct
  misc_feature 1..20: note = Description of Artificial Sequence: Synthetic oligonucleotide
  misc_feature 1..20: note = Target: SCN10A; (-) strand; PAM type: YTN; PAM sequence: CTT
  source 1..20: mol_type = other DNA
aaagtataatttaaaaaaag

SEQ ID NO: 48738 - DNA, 20 bp, synthetic construct
  misc_feature 1..20: note = Description of Artificial Sequence: Synthetic oligonucleotide
  misc_feature 1..20: note = Target: SCN10A; (-) strand; PAM type: YTN; PAM sequence: CTA
  source 1..20: mol_type = other DNA
aaacttaaagtataatttaa

SEQ ID NO: 48739 - DNA, 20 bp, synthetic construct
  misc_feature 1..20: note = Description of Artificial Sequence: Synthetic oligonucleotide
  misc_feature 1..20: note = Target: SCN10A; (-) strand; PAM type: YTN; PAM sequence: TTA
  source 1..20: mol_type = other DNA
ccctaaaacttaaagtataa

SEQ ID NO: 48740 - DNA, 20 bp, synthetic construct
  misc_feature 1..20: note = Description of Artificial Sequence: Synthetic oligonucleotide
  misc_feature 1..20: note = Target: SCN10A; (-) strand; PAM type: YTN; PAM sequence: TTT
  source 1..20: mol_type = other DNA
accctaaaacttaaagtata

SEQ ID NO: 48741 - DNA, 20 bp, synthetic construct
  misc_feature 1..20: note = Description of Artificial Sequence: Synthetic oligonucleotide
  misc_feature 1..20: note = Target: SCN10A; (-) strand; PAM type: YTN; PAM sequence: CTG
  source 1..20: mol_type = other DNA
cataatgtgcacatttaccc

SEQ ID NO: 48742 - DNA, 20 bp, synthetic construct
  misc_feature 1..20: note = Description of Artificial Sequence: Synthetic oligonucleotide
  misc_feature 1..20: note = Target: SCN10A; (-) strand; PAM type: YTN; PAM sequence: CTA
  source 1..20: mol_type = other DNA
acctgcataatgtgcacatt

SEQ ID NO: 48743 - DNA, 20 bp, synthetic construct
  misc_feature 1..20: note = Description of Artificial Sequence: Synthetic oligonucleotide
  misc_feature 1..20: note = Target: SCN10A; (-) strand; PAM type: YTN; PAM sequence: TTC
  source 1..20: mol_type = other DNA
atatgtaaggcatgtatgca

SEQ ID NO: 48744 - DNA, 20 bp, synthetic construct
  misc_feature 1..20: note = Description of Artificial Sequence: Synthetic oligonucleotide
  misc_feature 1..20: note = Target: SCN10A; (-) strand; PAM type: YTN; PAM sequence: CTT
  source 1..20: mol_type = other DNA
catatgtaaggcatgtatgc

SEQ ID NO: 48745 - DNA, 20 bp, synthetic construct
  misc_feature 1..20: note = Description of Artificial Sequence: Synthetic oligonucleotide
  misc_feature 1..20: note = Target: SCN10A; (-) strand; PAM type: YTN; PAM sequence: TTG
  source 1..20: mol_type = other DNA
tagtgagaaaagcttcatat

SEQ ID NO: 48746 - DNA, 20 bp, synthetic construct
  misc_feature 1..20: note = Description of Artificial Sequence: Synthetic oligonucleotide
  misc_feature 1..20: note = Target: SCN10A; (-) strand; PAM type: YTN; PAM sequence: CTT
  source 1..20: mol_type = other DNA
gtagtgagaaaagcttcata

SEQ ID NO: 48747 - DNA, 20 bp, synthetic construct
  misc_feature 1..20: note = Description of Artificial Sequence: Synthetic oligonucleotide
  misc_feature 1..20: note = Target: SCN10A; (-) strand; PAM type: YTN; PAM sequence: TTC
  source 1..20: mol_type = other DNA
caagccttgtagtgagaaaa

SEQ ID NO: 48748 - DNA, 20 bp, synthetic construct
  misc_feature 1..20: note = Description of Artificial Sequence: Synthetic oligonucleotide
  misc_feature 1..20: note = Target: SCN10A; (-) strand; PAM type: YTN; PAM sequence: TTT
  source 1..20: mol_type = other DNA
ccaagccttgtagtgagaaa

SEQ ID NO: 48749 - DNA, 20 bp, synthetic construct
  misc_feature 1..20: note = Description of Artificial Sequence: Synthetic oligonucleotide
  misc_feature 1..20: note = Target: SCN10A; (-) strand; PAM type: YTN; PAM sequence: TTT
  source 1..20: mol_type = other DNA
tccaagccttgtagtgagaa

SEQ ID NO: 48750 - DNA, 20 bp, synthetic construct
  misc_feature 1..20: note = Description of Artificial Sequence: Synthetic oligonucleotide
  misc_feature 1..20: note = Target: SCN10A; (-) strand; PAM type: YTN; PAM sequence: CTA
  source 1..20: mol_type = other DNA
caaaagaaagaaaaaaacat

SEQ ID NO: 48751 - DNA, 20 bp, synthetic construct
  misc_feature 1..20: note = Description of Artificial Sequence: Synthetic oligonucleotide
  misc_feature 1..20: note = Target: SCN10A; (-) strand; PAM type: YTN; PAM sequence: TTA
  source 1..20: mol_type = other DNA
agtgaaaaaagtgaaactac

SEQ ID NO: 48752 - DNA, 20 bp, synthetic construct
  misc_feature 1..20: note = Description of Artificial Sequence: Synthetic oligonucleotide
  misc_feature 1..20: note = Target: SCN10A; (-) strand; PAM type: YTN; PAM sequence: TTT
  source 1..20: mol_type = other DNA
aagtgaaaaaagtgaaacta

SEQ ID NO: 48753 - DNA, 20 bp, synthetic construct
  misc_feature 1..20: note = Description of Artificial Sequence: Synthetic oligonucleotide
  misc_feature 1..20: note = Target: SCN10A; (-) strand; PAM type: YTN; PAM sequence: TTT
  source 1..20: mol_type = other DNA
taagtgaaaaaagtgaaact

SEQ ID NO: 48754 - DNA, 20 bp, synthetic construct
  misc_feature 1..20: note = Description of Artificial Sequence: Synthetic oligonucleotide
  misc_feature 1..20: note = Target: SCN10A; (-) strand; PAM type: YTN; PAM sequence: TTC
  source 1..20: mol_type = other DNA
aaatgcaccaaagttttaag

SEQ ID NO: 48755 - DNA, 20 bp, synthetic construct
  misc_feature 1..20: note = Description of Artificial Sequence: Synthetic oligonucleotide
  misc_feature 1..20: note = Target: SCN10A; (-) strand; PAM type: YTN; PAM sequence: TTT
  source 1..20: mol_type = other DNA
caaatgcaccaaagttttaa

SEQ ID NO: 48756 - DNA, 20 bp, synthetic construct
  misc_feature 1..20: note = Description of Artificial Sequence: Synthetic oligonucleotide
  misc_feature 1..20: note = Target: SCN10A; (-) strand; PAM type: YTN; PAM sequence: TTA
  source 1..20: mol_type = other DNA
cccaaaataaatttcaaatg

SEQ ID NO: 48757 - DNA, 20 bp, synthetic construct
  misc_feature 1..20: note = Description of Artificial Sequence: Synthetic oligonucleotide
  misc_feature 1..20: note = Target: SCN10A; (-) strand; PAM type: YTN; PAM sequence: TTT
  source 1..20: mol_type = other DNA
acccaaaataaatttcaaat

SEQ ID NO: 48758 - DNA, 20 bp, synthetic construct
  misc_feature 1..20: note = Description of Artificial Sequence: Synthetic oligonucleotide
  misc_feature 1..20: note = Target: SCN10A; (-) strand; PAM type: YTN; PAM sequence: CTT
  source 1..20: mol_type = other DNA
tacccaaaataaatttcaaa

SEQ ID NO: 48759 - DNA, 20 bp, synthetic construct
  misc_feature 1..20: note = Description of Artificial Sequence: Synthetic oligonucleotide
  misc_feature 1..20: note = Target: SCN10A; (-) strand; PAM type: YTN; PAM sequence: CTC
  source 1..20: mol_type = other DNA
tttacccaaaataaatttca

SEQ ID NO: 48760 - DNA, 20 bp, synthetic construct
  misc_feature 1..20: note = Description of Artificial Sequence: Synthetic oligonucleotide
  misc_feature 1..20: note = Target: SCN10A; (-) strand; PAM type: YTN; PAM sequence: TTA
  source 1..20: mol_type = other DNA
ctctttacccaaaataaatt

SEQ ID NO: 48761 - DNA, 20 bp, synthetic construct
  misc_feature 1..20: note = Description of Artificial Sequence: Synthetic oligonucleotide
  misc_feature 1..20: note = Target: SCN10A; (-) strand; PAM type: YTN; PAM sequence: CTT
  source 1..20: mol_type = other DNA
actctttacccaaaataaat

SEQ ID NO: 48762 - DNA, 20 bp, synthetic construct
  misc_feature 1..20: note = Description of Artificial Sequence: Synthetic oligonucleotide
  misc_feature 1..20: note = Target: SCN10A; (-) strand; PAM type: YTN; PAM sequence: TTG
  source 1..20: mol_type = other DNA
atataaataatcagagacag

SEQ ID NO: 48763 - DNA, 20 bp, synthetic construct
  misc_feature 1..20: note = Description of Artificial Sequence: Synthetic oligonucleotide
  misc_feature 1..20: note = Target: SCN10A; (-) strand; PAM type: YTN; PAM sequence: TTC
  source 1..20: mol_type = other DNA
aataagtaatgttgatataa

SEQ ID NO: 48764 - DNA, 20 bp, synthetic construct
  misc_feature 1..20: note = Description of Artificial Sequence: Synthetic oligonucleotide
  misc_feature 1..20: note = Target: SCN10A; (-) strand; PAM type: YTN; PAM sequence: TTA
  source 1..20: mol_type = other DNA
ttcaataagtaatgttgata

SEQ ID NO: 48765 - DNA, 20 bp, synthetic construct
  misc_feature 1..20: note = Description of Artificial Sequence: Synthetic oligonucleotide
  misc_feature 1..20: note = Target: SCN10A; (-) strand; PAM type: YTN; PAM sequence: TTG
  source 1..20: mol_type = other DNA
ggaaaatgaaaaattattca

SEQ ID NO: 48766 - DNA, 20 bp, synthetic construct
  misc_feature 1..20: note = Description of Artificial Sequence: Synthetic oligonucleotide
  misc_feature 1..20: note = Target: SCN10A; (-) strand; PAM type: YTN; PAM sequence: CTT
  source 1..20: mol_type = other DNA
gggaaaatgaaaaattattc

SEQ ID NO: 48767 - DNA, 20 bp, synthetic construct
  misc_feature 1..20: note = Description of Artificial Sequence: Synthetic oligonucleotide
  misc_feature 1..20: note = Target: SCN10A; (-) strand; PAM type: YTN; PAM sequence: TTC
  source 1..20: mol_type = other DNA
aaatcttgggaaaatgaaaa

SEQ ID NO: 48768 - DNA, 20 bp, synthetic construct
  misc_feature 1..20: note = Description of Artificial Sequence: Synthetic oligonucleotide
  misc_feature 1..20: note = Target: SCN10A; (-) strand; PAM type: YTN; PAM sequence: TTT
  source 1..20: mol_type = other DNA
caaatcttgggaaaatgaaa

SEQ ID NO: 48769 - DNA, 20 bp, synthetic construct
  misc_feature 1..20: note = Description of Artificial Sequence: Synthetic oligonucleotide
  misc_feature 1..20: note = Target: SCN10A; (-) strand; PAM type: YTN; PAM sequence: CTG
  source 1..20: mol_type = other DNA
tggaagagaaatggacatgt

SEQ ID NO: 48770 - DNA, 20 bp, synthetic construct
  misc_feature 1..20: note = Description of Artificial Sequence: Synthetic oligonucleotide
  misc_feature 1..20: note = Target: SCN10A; (-) strand; PAM type: YTN; PAM sequence: CTG
  source 1..20: mol_type = other DNA
atctgtggaagagaaatgga

SEQ ID NO: 48771 - DNA, 20 bp, synthetic construct
  misc_feature 1..20: note = Description of Artificial Sequence: Synthetic oligonucleotide
  misc_feature 1..20: note = Target: SCN10A; (-) strand; PAM type: YTN; PAM sequence: TTA
  source 1..20: mol_type = other DNA
aaacagcatgacagtgaaaa

SEQ ID NO: 48772 - DNA, 20 bp, synthetic construct
  misc_feature 1..20: note = Description of Artificial Sequence: Synthetic oligonucleotide
  misc_feature 1..20: note = Target: SCN10A; (-) strand; PAM type: YTN; PAM sequence: CTA
  source 1..20: mol_type = other DNA
aaatccagtcagtgattaaa

SEQ ID NO: 48773 - DNA, 20 bp, synthetic construct
  misc_feature 1..20: note = Description of Artificial Sequence: Synthetic oligonucleotide
  misc_feature 1..20: note = Target: SCN10A; (-) strand; PAM type: YTN; PAM sequence: TTC
  source 1..20: mol_type = other DNA
taaaatccagtcagtgatta

SEQ ID NO: 48774 - DNA, 20 bp, synthetic construct
  misc_feature 1..20: note = Description of Artificial Sequence: Synthetic oligonucleotide
  misc_feature 1..20: note = Target: SCN10A; (-) strand; PAM type: YTN; PAM sequence: TTT
  source 1..20: mol_type = other DNA
ctaaaatccagtcagtgatt

SEQ ID NO: 48775 - DNA, 20 bp, synthetic construct
  misc_feature 1..20: note = Description of Artificial Sequence: Synthetic oligonucleotide
  misc_feature 1..20: note = Target: SCN10A; (-) strand; PAM type: YTN; PAM sequence: CTG
  source 1..20: mol_type = other DNA
tagtttctaaaatccagtca

SEQ ID NO: 48776 - DNA, 20 bp, synthetic construct
  misc_feature 1..20: note = Description of Artificial Sequence: Synthetic oligonucleotide
  misc_feature 1..20: note = Target: SCN10A; (-) strand; PAM type: YTN; PAM sequence: TTG
  source 1..20: mol_type = other DNA
gacatctgtagtttctaaaa

SEQ ID NO: 48777 - DNA, 20 bp, synthetic construct
  misc_feature 1..20: note = Description of Artificial Sequence: Synthetic oligonucleotide
  misc_feature 1..20: note = Target: SCN10A; (-) strand; PAM type: YTN; PAM sequence: TTT
  source 1..20: mol_type = other DNA
ggacatctgtagtttctaaa

SEQ ID NO: 48778 - DNA, 20 bp, synthetic construct
  misc_feature 1..20: note = Description of Artificial Sequence: Synthetic oligonucleotide
  misc_feature 1..20: note = Target: SCN10A; (-) strand; PAM type: YTN; PAM sequence: TTG
  source 1..20: mol_type = other DNA
ccagtttggacatctgtagt

SEQ ID NO: 48779 - DNA, 20 bp, synthetic construct
  misc_feature 1..20: note = Description of Artificial Sequence: Synthetic oligonucleotide
  misc_feature 1..20: note = Target: SCN10A; (-) strand; PAM type: YTN; PAM sequence: TTT
  source 1..20: mol_type = other DNA
gccagtttggacatctgtag

SEQ ID NO: 48780 - DNA, 20 bp, synthetic construct
  misc_feature 1..20: note = Description of Artificial Sequence: Synthetic oligonucleotide
  misc_feature 1..20: note = Target: SCN10A; (-) strand; PAM type: YTN; PAM sequence: CTT
  source 1..20: mol_type = other DNA
tgccagtttggacatctgta

SEQ ID NO: 48781 - DNA, 20 bp, synthetic construct
  misc_feature 1..20: note = Description of Artificial Sequence: Synthetic oligonucleotide
  misc_feature 1..20: note = Target: SCN10A; (-) strand; PAM type: YTN; PAM sequence: CTA
  source 1..20: mol_type = other DNA
tgctttgccagtttggacat

SEQ ID NO: 48782 - DNA, 20 bp, synthetic construct
  misc_feature 1..20: note = Description of Artificial Sequence: Synthetic oligonucleotide
  misc_feature 1..20: note = Target: SCN10A; (-) strand; PAM type: YTN; PAM sequence: TTA
  source 1..20: mol_type = other DNA
gagaactatgctttgccagt

SEQ ID NO: 48783 - DNA, 20 bp, synthetic construct
  misc_feature 1..20: note = Description of Artificial Sequence: Synthetic oligonucleotide
  misc_feature 1..20: note = Target: SCN10A; (-) strand; PAM type: YTN; PAM sequence: TTT
  source 1..20: mol_type = other DNA
agagaactatgctttgccag

SEQ ID NO: 48784 - DNA, 20 bp, synthetic construct
  misc_feature 1..20: note = Description of Artificial Sequence: Synthetic oligonucleotide
  misc_feature 1..20: note = Target: SCN10A; (-) strand; PAM type: YTN; PAM sequence: CTT
  source 1..20: mol_type = other DNA
tagagaactatgctttgcca

SEQ ID NO: 48785 - DNA, 20 bp, synthetic construct
  misc_feature 1..20: note = Description of Artificial Sequence: Synthetic oligonucleotide
  misc_feature 1..20: note = Target: SCN10A; (-) strand; PAM type: YTN; PAM sequence: TTC
  source 1..20: mol_type = other DNA
tttagagaactatgctttgc

SEQ ID NO: 48786 - DNA, 20 bp, synthetic construct
  misc_feature 1..20: note = Description of Artificial Sequence: Synthetic oligonucleotide
  misc_feature 1..20: note = Target: SCN10A; (-) strand; PAM type: YTN; PAM sequence: CTT
  source 1..20: mol_type = other DNA
ctttagagaactatgctttg

SEQ ID NO: 48787 - DNA, 20 bp, synthetic construct
  misc_feature 1..20: note = Description of Artificial Sequence: Synthetic oligonucleotide
  misc_feature 1..20: note = Target: SCN10A; (-) strand; PAM type: YTN; PAM sequence: TTG
  source 1..20: mol_type = other DNA
gtcccaggatgtgccaactt

SEQ ID NO: 48788 - DNA, 20 bp, synthetic construct
  misc_feature 1..20: note = Description of Artificial Sequence: Synthetic oligonucleotide
  misc_feature 1..20: note = Target: SCN10A; (-) strand; PAM type: YTN; PAM sequence: TTT
  source 1..20: mol_type = other DNA
ggtcccaggatgtgccaact

SEQ ID NO: 48789 - DNA, 20 bp, synthetic construct
  misc_feature 1..20: note = Description of Artificial Sequence: Synthetic oligonucleotide
  misc_feature 1..20: note = Target: SCN10A; (-) strand; PAM type: YTN; PAM sequence: TTT
  source 1..20: mol_type = other DNA
tggtcccaggatgtgccaac

SEQ ID NO: 48790 - DNA, 20 bp, synthetic construct
  misc_feature 1..20: note = Description of Artificial Sequence: Synthetic oligonucleotide
  misc_feature 1..20: note = Target: SCN10A; (-) strand; PAM type: YTN; PAM sequence: TTG
  source 1..20: mol_type = other DNA
attttggtcccaggatgtgc

SEQ ID NO: 48791 - DNA, 20 bp, synthetic construct
  misc_feature 1..20: note = Description of Artificial Sequence: Synthetic oligonucleotide
  misc_feature 1..20: note = Target: SCN10A; (-) strand; PAM type: YTN; PAM sequence: TTG
  source 1..20: mol_type = other DNA
ttgattttggtcccaggatg

SEQ ID NO: 48792 - DNA, 20 bp, synthetic construct
  misc_feature 1..20: note = Description of Artificial Sequence: Synthetic oligonucleotide
  misc_feature 1..20: note = Target: SCN10A; (-) strand; PAM type: YTN; PAM sequence: TTC
  source 1..20: mol_type = other DNA
caaacagggattgttgattt

SEQ ID NO: 48793 - DNA, 20 bp, synthetic construct
  misc_feature 1..20: note = Description of Artificial Sequence: Synthetic oligonucleotide
  misc_feature 1..20: note = Target: SCN10A; (-) strand; PAM type: YTN; PAM sequence: TTG
  source 1..20: mol_type = other DNA
ttccaaacagggattgttga

SEQ ID NO: 48794 - DNA, 20 bp, synthetic construct
  misc_feature 1..20: note = Description of Artificial Sequence: Synthetic oligonucleotide
  misc_feature 1..20: note = Target: SCN10A; (-) strand; PAM type: YTN; PAM sequence: TTT
  source 1..20: mol_type = other DNA
gttccaaacagggattgttg

SEQ ID NO: 48795 - DNA, 20 bp, synthetic construct
  misc_feature 1..20: note = Description of Artificial Sequence: Synthetic oligonucleotide
  misc_feature 1..20: note = Target: SCN10A; (-) strand; PAM type: YTN; PAM sequence: TTT
  source 1..20: mol_type = other DNA
tgttccaaacagggattgtt

SEQ ID NO: 48796 - DNA, 20 bp, synthetic construct
  misc_feature 1..20: note = Description of Artificial Sequence: Synthetic oligonucleotide
  misc_feature 1..20: note = Target: SCN10A; (-) strand; PAM type: YTN; PAM sequence: CTT
  source 1..20: mol_type = other DNA
ttgttccaaacagggattgt

SEQ ID NO: 48797 - DNA, 20 bp, synthetic construct
  misc_feature 1..20: note = Description of Artificial Sequence: Synthetic oligonucleotide
  misc_feature 1..20: note = Target: SCN10A; (-) strand; PAM type: YTN; PAM sequence: TTG
  source 1..20: mol_type = other DNA
cttttgttccaaacagggat

SEQ ID NO: 48798 - DNA, 20 bp, synthetic construct
  misc_feature 1..20: note = Description of Artificial Sequence: Synthetic oligonucleotide
  misc_feature 1..20: note = Target: SCN10A; (-) strand; PAM type: YTN; PAM sequence: CTT
  source 1..20: mol_type = other DNA
gcttttgttccaaacaggga

SEQ ID NO: 48799 - DNA, 20 bp, synthetic construct
  misc_feature 1..20: note = Description of Artificial Sequence: Synthetic oligonucleotide
  misc_feature 1..20: note = Target: SCN10A; (-) strand; PAM type: YTN; PAM sequence: TTC
  source 1..20: mol_type = other DNA
ttgcttttgttccaaacagg

SEQ ID NO: 48800 - DNA, 20 bp, synthetic construct
  misc_feature 1..20: note = Description of Artificial Sequence: Synthetic oligonucleotide
  misc_feature 1..20: note = Target: SCN10A; (-) strand; PAM type: YTN; PAM sequence: TTA
  source 1..20: mol_type = other DNA
gtgccaaaataggtccaggg

SEQ ID NO: 48801 - DNA, 20 bp, synthetic construct
  misc_feature 1..20: note = Description of Artificial Sequence: Synthetic oligonucleotide
  misc_feature 1..20: note = Target: SCN10A; (-) strand; PAM type: YTN; PAM sequence: TTT
  source 1..20: mol_type = other DNA
agtgccaaaataggtccagg

SEQ ID NO: 48802 - DNA, 20 bp, synthetic construct
  misc_feature 1..20: note = Description of Artificial Sequence: Synthetic oligonucleotide
  misc_feature 1..20: note = Target: SCN10A; (-) strand; PAM type: YTN; PAM sequence: TTT
  source 1..20: mol_type = other DNA
tagtgccaaaataggtccag

SEQ ID NO: 48803 - DNA, 20 bp, synthetic construct
  misc_feature 1..20: note = Description of Artificial Sequence: Synthetic oligonucleotide
  misc_feature 1..20: note = Target: SCN10A; (-) strand; PAM type: YTN; PAM sequence: TTT
  source 1..20: mol_type = other DNA
ttagtgccaaaataggtcca

SEQ ID NO: 48804 - DNA, 20 bp, synthetic construct
  misc_feature 1..20: note = Description of Artificial Sequence: Synthetic oligonucleotide
  misc_feature 1..20: note = Target: SCN10A; (-) strand; PAM type: YTN; PAM sequence: CTT
  source 1..20: mol_type = other DNA
tttagtgccaaaataggtcc

SEQ ID NO: 48805 - DNA, 20 bp, synthetic construct
  misc_feature 1..20: note = Description of Artificial Sequence: Synthetic oligonucleotide
  misc_feature 1..20: note = Target: SCN10A; (-) strand; PAM type: YTN; PAM sequence: TTC
  source 1..20: mol_type = other DNA
tttttagtgccaaaataggt

SEQ ID NO: 48806 - DNA, 20 bp, synthetic construct
  misc_feature 1..20: note = Description of Artificial Sequence: Synthetic oligonucleotide
  misc_feature 1..20: note = Target: SCN10A; (-) strand; PAM type: YTN; PAM sequence: CTT
  source 1..20: mol_type = other DNA
ctttttagtgccaaaatagg

SEQ ID NO: 48807 - DNA, 20 bp, synthetic construct
  misc_feature 1..20: note = Description of Artificial Sequence: Synthetic oligonucleotide
  misc_feature 1..20: note = Target: SCN10A; (-) strand; PAM type: YTN; PAM sequence: CTG
  source 1..20: mol_type = other DNA
tgcttctttttagtgccaaa

SEQ ID NO: 48808 - DNA, 20 bp, synthetic construct
  misc_feature 1..20: note = Description of Artificial Sequence: Synthetic oligonucleotide
  misc_feature 1..20: note = Target: SCN10A; (-) strand; PAM type: YTN; PAM sequence: TTC
  source 1..20: mol_type = other DNA
ctgtgcttctttttagtgcc

SEQ ID NO: 48809 - DNA, 20 bp, synthetic construct
  misc_feature 1..20: note = Description of Artificial Sequence: Synthetic oligonucleotide
  misc_feature 1..20: note = Target: SCN10A; (-) strand; PAM type: YTN; PAM sequence: CTT
  source 1..20: mol_type = other DNA
cctgtgcttctttttagtgc

SEQ ID NO: 48810 - DNA, 20 bp, synthetic construct
  misc_feature 1..20: note = Description of Artificial Sequence: Synthetic oligonucleotide
  misc_feature 1..20: note = Target: SCN10A; (-) strand; PAM type: YTN; PAM sequence: CTA
  source 1..20: mol_type = other DNA
cttcctgtgcttctttttag

SEQ ID NO: 48811 - DNA, 20 bp, synthetic construct
  misc_feature 1..20: note = Description of Artificial Sequence: Synthetic oligonucleotide
  misc_feature 1..20: note = Target: SCN10A; (-) strand; PAM type: YTN; PAM sequence: TTC
  source 1..20: mol_type = other DNA
atgactacttcctgtgcttc

SEQ ID NO: 48812 - DNA, 20 bp, synthetic construct
  misc_feature 1..20: note = Description of Artificial Sequence: Synthetic oligonucleotide
  misc_feature 1..20: note = Target: SCN10A; (-) strand; PAM type: YTN; PAM sequence: CTC
  source 1..20: mol_type = other DNA
attcatgactacttcctgtg

SEQ ID NO: 48813 - DNA, 20 bp, synthetic construct
  misc_feature 1..20: note = Description of Artificial Sequence: Synthetic oligonucleotide
  misc_feature 1..20: note = Target: SCN10A; (-) strand; PAM type: YTN; PAM sequence: CTA
  source 1..20: mol_type = other DNA
aagtgtcctcattcatgact

SEQ ID NO: 48814 - DNA, 20 bp, synthetic construct
  misc_feature 1..20: note = Description of Artificial Sequence: Synthetic oligonucleotide
  misc_feature 1..20: note = Target: SCN10A; (-) strand; PAM type: YTN; PAM sequence: CTG
  source 1..20: mol_type = other DNA
ccaaaatggcacatctaaag

SEQ ID NO: 48815 - DNA, 20 bp, synthetic construct
  misc_feature 1..20: note = Description of Artificial Sequence: Synthetic oligonucleotide
  misc_feature 1..20: note = Target: SCN10A; (-) strand; PAM type: YTN; PAM sequence: TTC
  source 1..20: mol_type = other DNA
ctgccaaaatggcacatcta

SEQ ID NO: 48816 - DNA, 20 bp, synthetic construct
  misc_feature 1..20: note = Description of Artificial Sequence: Synthetic oligonucleotide
  misc_feature 1..20: note = Target: SCN10A; (-) strand; PAM type: YTN; PAM sequence: CTT
  source 1..20: mol_type = other DNA
cctgccaaaatggcacatct

SEQ ID NO: 48817 - DNA, 20 bp, synthetic construct
  misc_feature 1..20: note = Description of Artificial Sequence: Synthetic oligonucleotide
  misc_feature 1..20: note = Target: SCN10A; (-) strand; PAM type: YTN; PAM sequence: CTG
  source 1..20: mol_type = other DNA
cttcctgccaaaatggcaca

SEQ ID NO: 48818 - DNA, 20 bp, synthetic construct
  misc_feature 1..20: note = Description of Artificial Sequence: Synthetic oligonucleotide
  misc_feature 1..20: note = Target: SCN10A; (-) strand; PAM type: YTN; PAM sequence: CTC
  source 1..20: mol_type = other DNA
acaggtggctgcttcctgcc

SEQ ID NO: 48819 - DNA, 20 bp, synthetic construct
  misc_feature 1..20: note = Description of Artificial Sequence: Synthetic oligonucleotide
  misc_feature 1..20: note = Target: SCN10A; (-) strand; PAM type: YTN; PAM sequence: TTC
  source 1..20: mol_type = other DNA
ccatcatgcctcacaggtgg

SEQ ID NO: 48820 - DNA, 20 bp, synthetic construct
  misc_feature 1..20: note = Description of Artificial Sequence: Synthetic oligonucleotide
  misc_feature 1..20: note = Target: SCN10A; (-) strand; PAM type: YTN; PAM sequence: TTT
  source 1..20: mol_type = other DNA
cccatcatgcctcacaggtg

SEQ ID NO: 48821 - DNA, 20 bp, synthetic construct
  misc_feature 1..20: note = Description of Artificial Sequence: Synthetic oligonucleotide
  misc_feature 1..20: note = Target: SCN10A; (-) strand; PAM type: YTN; PAM sequence: TTT
  source 1..20: mol_type = other DNA
tcccatcatgcctcacaggt

SEQ ID NO: 48822 - DNA, 20 bp, synthetic construct
  misc_feature 1..20: note = Description of Artificial Sequence: Synthetic oligonucleotide
  misc_feature 1..20: note = Target: SCN10A; (-) strand; PAM type: YTN; PAM sequence: CTT
  source 1..20: mol_type = other DNA
ttcccatcatgcctcacagg

SEQ ID NO: 48823 - DNA, 20 bp, synthetic construct
  misc_feature 1..20: note = Description of Artificial Sequence: Synthetic oligonucleotide
  misc_feature 1..20: note = Target: SCN10A; (-) strand; PAM type: YTN; PAM sequence: CTC
  source 1..20: mol_type = other DNA
ttttcccatcatgcctcaca

SEQ ID NO: 48824 - DNA, 20 bp, synthetic construct
  misc_feature 1..20: note = Description of Artificial Sequence: Synthetic oligonucleotide
  misc_feature 1..20: note = Target: SCN10A; (-) strand; PAM type: YTN; PAM sequence: CTC
  source 1..20: mol_type = other DNA
tcttttcccatcatgcctca

SEQ ID NO: 48825 - DNA, 20 bp, synthetic construct
  misc_feature 1..20: note = Description of Artificial Sequence: Synthetic oligonucleotide
  misc_feature 1..20: note = Target: SCN10A; (-) strand; PAM type: YTN; PAM sequence: TTA
  source 1..20: mol_type = other DNA
caaagatgcctctcttttcc

SEQ ID NO: 48826 - DNA, 20 bp, synthetic construct
  misc_feature 1..20: note = Description of Artificial Sequence: Synthetic oligonucleotide
  misc_feature 1..20: note = Target: SCN10A; (-) strand; PAM type: YTN; PAM sequence: TTT
  source 1..20: mol_type = other DNA
acaaagatgcctctcttttc

SEQ ID NO: 48827 - DNA, 20 bp, synthetic construct
  misc_feature 1..20: note = Description of Artificial Sequence: Synthetic oligonucleotide
  misc_feature 1..20: note = Target: SCN10A; (-) strand; PAM type: YTN; PAM sequence: CTG
  source 1..20: mol_type = other DNA
tttacaaagatgcctctctt

SEQ ID NO: 48828 - DNA, 20 bp, synthetic construct
  misc_feature 1..20: note = Description of Artificial Sequence: Synthetic oligonucleotide
  misc_feature 1..20: note = Target: SCN10A; (-) strand; PAM type: YTN; PAM sequence: TTC
  source 1..20: mol_type = other DNA
aacaatgtcaaggctgttta

SEQ ID NO: 48829 - DNA, 20 bp, synthetic construct
  misc_feature 1..20: note = Description of Artificial Sequence: Synthetic oligonucleotide
  misc_feature 1..20: note = Target: SCN10A; (-) strand; PAM type: YTN; PAM sequence: CTG
  source 1..20: mol_type = other DNA
caatcaatcaagttcaacaa

SEQ ID NO: 48830 - DNA, 20 bp, synthetic construct
  misc_feature 1..20: note = Description of Artificial Sequence: Synthetic oligonucleotide
  misc_feature 1..20: note = Target: SCN10A; (-) strand; PAM type: YTN; PAM sequence: CTC
  source 1..20: mol_type = other DNA
tgcaatcaatcaagttcaac

SEQ ID NO: 48831 - DNA, 20 bp, synthetic construct
  misc_feature 1..20: note = Description of Artificial Sequence: Synthetic oligonucleotide
  misc_feature 1..20: note = Target: SCN10A; (-) strand; PAM type: YTN; PAM sequence: CTG
  source 1..20: mol_type = other DNA
tgtctctgcaatcaatcaag

SEQ ID NO: 48832 - DNA, 20 bp, synthetic construct
  misc_feature 1..20: note = Description of Artificial Sequence: Synthetic oligonucleotide
  misc_feature 1..20: note = Target: SCN10A; (-) strand; PAM type: YTN; PAM sequence: CTC
  source 1..20: mol_type = other DNA
tgtgtctctgcaatcaatca

SEQ ID NO: 48833 - DNA, 20 bp, synthetic construct
  misc_feature 1..20: note = Description of Artificial Sequence: Synthetic oligonucleotide
  misc_feature 1..20: note = Target: SCN10A; (-) strand; PAM type: YTN; PAM sequence: TTA
  source 1..20: mol_type = other DNA
gtctctgtgtctctgcaatc

SEQ ID NO: 48834 - DNA, 20 bp, synthetic construct
  misc_feature 1..20: note = Description of Artificial Sequence: Synthetic oligonucleotide
  misc_feature 1..20: note = Target: SCN10A; (-) strand; PAM type: YTN; PAM sequence: TTT
  source 1..20: mol_type = other DNA
agtctctgtgtctctgcaat

SEQ ID NO: 48835 - DNA, 20 bp, synthetic construct
  misc_feature 1..20: note = Description of Artificial Sequence: Synthetic oligonucleotide
  misc_feature 1..20: note = Target: SCN10A; (-) strand; PAM type: YTN; PAM sequence: TTT
  source 1..20: mol_type = other DNA
tagtctctgtgtctctgcaa

SEQ ID NO: 48836 - DNA, 20 bp, synthetic construct
  misc_feature 1..20: note = Description of Artificial Sequence: Synthetic oligonucleotide
  misc_feature 1..20: note = Target: SCN10A; (-) strand; PAM type: YTN; PAM sequence: CTT
  source 1..20: mol_type = other DNA
ttagtctctgtgtctctgca

SEQ ID NO: 48837 - DNA, 20 bp, synthetic construct
  misc_feature 1..20: note = Description of Artificial Sequence: Synthetic oligonucleotide
  misc_feature 1..20: note = Target: SCN10A; (-) strand; PAM type: YTN; PAM sequence: CTG
  source 1..20: mol_type = other DNA
gcaagtagatacttttagtc

SEQ ID NO: 48838 - DNA, 20 bp, synthetic construct
  misc_feature 1..20: note = Description of Artificial Sequence: Synthetic oligonucleotide
  misc_feature 1..20: note = Target: SCN10A; (-) strand; PAM type: YTN; PAM sequence: TTA
  source 1..20: mol_type = other DNA
agctggcaagtagatacttt

SEQ ID NO: 48839 - DNA, 20 bp, synthetic construct
  misc_feature 1..20: note = Description of Artificial Sequence: Synthetic oligonucleotide
  misc_feature 1..20: note = Target: SCN10A; (-) strand; PAM type: YTN; PAM sequence: TTT
  source 1..20: mol_type = other DNA
aagctggcaagtagatactt

SEQ ID NO: 48840 - DNA, 20 bp, synthetic construct
  misc_feature 1..20: note = Description of Artificial Sequence: Synthetic oligonucleotide
  misc_feature 1..20: note = Target: SCN10A; (-) strand; PAM type: YTN; PAM sequence: TTT
  source 1..20: mol_type = other DNA
taagctggcaagtagatact

SEQ ID NO: 48841 - DNA, 20 bp, synthetic construct
  misc_feature 1..20: note = Description of Artificial Sequence: Synthetic oligonucleotide
  misc_feature 1..20: note = Target: SCN10A; (-) strand; PAM type: YTN; PAM sequence: TTG
  source 1..20: mol_type = other DNA
aggtggggccatggtcatgt

SEQ ID NO: 48842 - DNA, 20 bp, synthetic construct
  misc_feature 1..20: note = Description of Artificial Sequence: Synthetic oligonucleotide
  misc_feature 1..20: note = Target: SCN10A; (-) strand; PAM type: YTN; PAM sequence: TTT
  source 1..20: mol_type = other DNA
gaggtggggccatggtcatg

SEQ ID NO: 48843 - DNA, 20 bp, synthetic construct
  misc_feature 1..20: note = Description of Artificial Sequence: Synthetic oligonucleotide
  misc_feature 1..20: note = Target: SCN10A; (-) strand; PAM type: YTN; PAM sequence: TTT
  source 1..20: mol_type = other DNA
tgaggtggggccatggtcat

SEQ ID NO: 48844 - DNA, 20 bp, synthetic construct
  misc_feature 1..20: note = Description of Artificial Sequence: Synthetic oligonucleotide
  misc_feature 1..20: note = Target: SCN10A; (-) strand; PAM type: YTN; PAM sequence: CTT
  source 1..20: mol_type = other DNA
ttgaggtggggccatggtca

SEQ ID NO: 48845 - DNA, 20 bp, synthetic construct
  misc_feature 1..20: note = Description of Artificial Sequence: Synthetic oligonucleotide
  misc_feature 1..20: note = Target: SCN10A; (-) strand; PAM type: YTN; PAM sequence: TTA
  source 1..20: mol_type = other DNA
tataggagatccttttgagg

SEQ ID NO: 48846 - DNA, 20 bp, synthetic construct
  misc_feature 1..20: note = Description of Artificial Sequence: Synthetic oligonucleotide
  misc_feature 1..20: note = Target: SCN10A; (-) strand; PAM type: YTN; PAM sequence: TTT
  source 1..20: mol_type = other DNA
atataggagatccttttgag

SEQ ID NO: 48847 - DNA, 20 bp, synthetic construct
  misc_feature 1..20: note = Description of Artificial Sequence: Synthetic oligonucleotide
  misc_feature 1..20: note = Target: SCN10A; (-) strand; PAM type: YTN; PAM sequence: TTT
  source 1..20: mol_type = other DNA
tatataggagatccttttga

SEQ ID NO: 48848 - DNA, 20 bp, synthetic construct
  misc_feature 1..20: note = Description of Artificial Sequence: Synthetic oligonucleotide
  misc_feature 1..20: note = Target: SCN10A; (-) strand; PAM type: YTN; PAM sequence: TTA
  source 1..20: mol_type = other DNA
tcaattttatataggagatc

SEQ ID NO: 48849 - DNA, 20 bp, synthetic construct
  misc_feature 1..20: note = Description of Artificial Sequence: Synthetic oligonucleotide
  misc_feature 1..20: note = Target: SCN10A; (-) strand; PAM type: YTN; PAM sequence: CTG
  source 1..20: mol_type = other DNA
ttatcaattttatataggag

SEQ ID NO: 48850 - DNA, 20 bp, synthetic construct
  misc_feature 1..20: note = Description of Artificial Sequence: Synthetic oligonucleotide
  misc_feature 1..20: note = Target: SCN10A; (-) strand; PAM type: YTN; PAM sequence: CTC
  source 1..20: mol_type = other DNA
tgttatcaattttatatagg

SEQ ID NO: 48851 - DNA, 20 bp, synthetic construct
  misc_feature 1..20: note = Description of Artificial Sequence: Synthetic oligonucleotide
  misc_feature 1..20: note = Target: SCN10A; (-) strand; PAM type: YTN; PAM sequence: CTC
  source 1..20: mol_type = other DNA
tctgttatcaattttatata

SEQ ID NO: 48852 - DNA, 20 bp, synthetic construct
  misc_feature 1..20: note = Description of Artificial Sequence: Synthetic oligonucleotide
  misc_feature 1..20: note = Target: SCN10A; (-) strand; PAM type: YTN; PAM sequence: TTC
  source 1..20: mol_type = other DNA
tctctgttatcaattttata

SEQ ID NO: 48853 - DNA, 20 bp, synthetic construct
  misc_feature 1..20: note = Description of Artificial Sequence: Synthetic oligonucleotide
  misc_feature 1..20: note = Target: SCN10A; (-) strand; PAM type: YTN; PAM sequence: TTA
  source 1..20: mol_type = other DNA
agcgtaacaggatgaaggga

SEQ ID NO: 48854 - DNA, 20 bp, synthetic construct
  misc_feature 1..20: note = Description of Artificial Sequence: Synthetic oligonucleotide
  misc_feature 1..20: note = Target: SCN10A; (-) strand; PAM type: YTN; PAM sequence: TTT
  source 1..20: mol_type = other DNA
aagcgtaacaggatgaaggg

SEQ ID NO: 48855 - DNA, 20 bp, synthetic construct
  misc_feature 1..20: note = Description of Artificial Sequence: Synthetic oligonucleotide
  misc_feature 1..20: note = Target: SCN10A; (-) strand; PAM type: YTN; PAM sequence: CTT
  source 1..20: mol_type = other DNA
taagcgtaacaggatgaagg

SEQ ID NO: 48856 - DNA, 20 bp, synthetic construct
  misc_feature 1..20: note = Description of Artificial Sequence: Synthetic oligonucleotide
  misc_feature 1..20: note = Target: SCN10A; (-) strand; PAM type: YTN; PAM sequence: CTC
  source 1..20: mol_type = other DNA
tttaagcgtaacaggatgaa

SEQ ID NO: 48857 - DNA, 20 bp, synthetic construct
  misc_feature 1..20: note = Description of Artificial Sequence: Synthetic oligonucleotide
  misc_feature 1..20: note = Target: SCN10A; (-) strand; PAM type: YTN; PAM sequence: TTA
  source 1..20: mol_type = other DNA
acaggagcagggggacctct

SEQ ID NO: 48858 - DNA, 20 bp, synthetic construct
  misc_feature 1..20: note = Description of Artificial Sequence: Synthetic oligonucleotide
  misc_feature 1..20: note = Target: SCN10A; (-) strand; PAM type: YTN; PAM sequence: CTG
  source 1..20: mol_type = other DNA
gtgttaacaggagcaggggg

SEQ ID NO: 48859 - DNA, 20 bp, synthetic construct
  misc_feature 1..20: note = Description of Artificial Sequence: Synthetic oligonucleotide
  misc_feature 1..20: note = Target: SCN10A; (-) strand; PAM type: YTN; PAM sequence: CTG
  source 1..20: mol_type = other DNA
cagtggcaggagagaatgca

SEQ ID NO: 48860 - DNA, 20 bp, synthetic construct
  misc_feature 1..20: note = Description of Artificial Sequence: Synthetic oligonucleotide
  misc_feature 1..20: note = Target: SCN10A; (-) strand; PAM type: YTN; PAM sequence: CTC
  source 1..20: mol_type = other DNA
ctgcagtggcaggagagaat

SEQ ID NO: 48861 - DNA, 20 bp, synthetic construct
  misc_feature 1..20: note = Description of Artificial Sequence: Synthetic oligonucleotide
  misc_feature 1..20: note = Target: SCN10A; (-) strand; PAM type: YTN; PAM sequence: TTC
  source 1..20: mol_type = other DNA
aacagactcctgcagtggca

SEQ ID NO: 48862 - DNA, 20 bp, synthetic construct
  misc_feature 1..20: note = Description of Artificial Sequence: Synthetic oligonucleotide
  misc_feature 1..20: note = Target: SCN10A; (-) strand; PAM type: YTN; PAM sequence: TTA
  source 1..20: mol_type = other DNA
agggaagaaagggtatattc

SEQ ID NO: 48863 - DNA, 20 bp, synthetic construct
  misc_feature 1..20: note = Description of Artificial Sequence: Synthetic oligonucleotide
  misc_feature 1..20: note = Target: SCN10A; (-) strand; PAM type: YTN; PAM sequence: CTG
  source 1..20: mol_type = other DNA
aagattaagggaagaaaggg

SEQ ID NO: 48864 - DNA, 20 bp, synthetic construct
  misc_feature 1..20: note = Description of Artificial Sequence: Synthetic oligonucleotide
  misc_feature 1..20: note = Target: SCN10A; (-) strand; PAM type: YTN; PAM sequence: CTG
  source 1..20: mol_type = other DNA
ggagaataagagagactgaa

SEQ ID NO: 48865 - DNA, 20 bp, synthetic construct
  misc_feature 1..20: note = Description of Artificial Sequence: Synthetic oligonucleotide
  misc_feature 1..20: note = Target: SCN10A; (-) strand; PAM type: YTN; PAM sequence: CTA
  source 1..20: mol_type = other DNA
atgggaaggatctgggagaa

SEQ ID NO: 48866 - DNA, 20 bp, synthetic construct
  misc_feature 1..20: note = Description of Artificial Sequence: Synthetic oligonucleotide
  misc_feature 1..20: note = Target: SCN10A; (-) strand; PAM type: YTN; PAM sequence: TTG
  source 1..20: mol_type = other DNA
catgctaatgggaaggatct

SEQ ID NO: 48867 - DNA, 20 bp, synthetic construct
  misc_feature 1..20: note = Description of Artificial Sequence: Synthetic oligonucleotide
  misc_feature 1..20: note = Target: SCN10A; (-) strand; PAM type: YTN; PAM sequence: TTT
  source 1..20: mol_type = other DNA
gcatgctaatgggaaggatc

SEQ ID NO: 48868 - DNA, 20 bp, synthetic construct
  misc_feature 1..20: note = Description of Artificial Sequence: Synthetic oligonucleotide
  misc_feature 1..20: note = Target: SCN10A; (-) strand; PAM type: YTN; PAM sequence: TTG
  source 1..20: mol_type = other DNA
agcatatttgcatgctaatg

SEQ ID NO: 48869 - DNA, 20 bp, synthetic construct
  misc_feature 1..20: note = Description of Artificial Sequence: Synthetic oligonucleotide
  misc_feature 1..20: note = Target: SCN10A; (-) strand; PAM type: YTN; PAM sequence: TTT
  source 1..20: mol_type = other DNA
gagcatatttgcatgctaat

SEQ ID NO: 48870 - DNA, 20 bp, synthetic construct
  misc_feature 1..20: note = Description of Artificial Sequence: Synthetic oligonucleotide
  misc_feature 1..20: note = Target: SCN10A; (-) strand; PAM type: YTN; PAM sequence: TTT
  source 1..20: mol_type = other DNA
tgagcatatttgcatgctaa

SEQ ID NO: 48871 - DNA, 20 bp, synthetic construct
  misc_feature 1..20: note = Description of Artificial Sequence: Synthetic oligonucleotide
  misc_feature 1..20: note = Target: SCN10A; (-) strand; PAM type: YTN; PAM sequence: TTG
  source 1..20: mol_type = other DNA
ttttgagcatatttgcatgc

SEQ ID NO: 48872 - DNA, 20 bp, synthetic construct
  misc_feature 1..20: note = Description of Artificial Sequence: Synthetic oligonucleotide
  misc_feature 1..20: note = Target: SCN10A; (-) strand; PAM type: YTN; PAM sequence: TTT
  source 1..20: mol_type = other DNA
gttttgagcatatttgcatg

SEQ ID NO: 48873 - DNA, 20 bp, synthetic construct
  misc_feature 1..20: note = Description of Artificial Sequence: Synthetic oligonucleotide
  misc_feature 1..20: note = Target: SCN10A; (-) strand; PAM type: YTN; PAM sequence: TTG
  source 1..20: mol_type = other DNA
tttgttttgagcatatttgc

SEQ ID NO: 48874 - DNA, 20 bp, synthetic construct
  misc_feature 1..20: note = Description of Artificial Sequence: Synthetic oligonucleotide
  misc_feature 1..20: note = Target: SCN10A; (-) strand; PAM type: YTN; PAM sequence: TTT
  source 1..20: mol_type = other DNA
gtttgttttgagcatatttg

SEQ ID NO: 48875 - DNA, 20 bp, synthetic construct
  misc_feature 1..20: note = Description of Artificial Sequence: Synthetic oligonucleotide
  misc_feature 1..20: note = Target: SCN10A; (-) strand; PAM type: YTN; PAM sequence: TTG
  source 1..20: mol_type = other DNA
tttgtttgttttgagcatat

SEQ ID NO: 48876 - DNA, 20 bp, synthetic construct
  misc_feature 1..20: note = Description of Artificial Sequence: Synthetic oligonucleotide
  misc_feature 1..20: note = Target: SCN10A; (-) strand; PAM type: YTN; PAM sequence: TTT
  source 1..20: mol_type = other DNA
gtttgtttgttttgagcata

SEQ ID NO: 48877 - DNA, 20 bp, synthetic construct
  misc_feature 1..20: note = Description of Artificial Sequence: Synthetic oligonucleotide
  misc_feature 1..20: note = Target: SCN10A; (-) strand; PAM type: YTN; PAM sequence: TTG
  source 1..20: mol_type = other DNA
tttgtttgtttgttttgagc

SEQ ID NO: 48878 - DNA, 20 bp, synthetic construct
  misc_feature 1..20: note = Description of Artificial Sequence: Synthetic oligonucleotide
  misc_feature 1..20: note = Target: SCN10A; (-) strand; PAM type: YTN; PAM sequence: TTT
  source 1..20: mol_type = other DNA
gtttgtttgtttgttttgag

SEQ ID NO: 48879 - DNA, 20 bp, synthetic construct
  misc_feature 1..20: note = Description of Artificial Sequence: Synthetic oligonucleotide
  misc_feature 1..20: note = Target: SCN10A; (-) strand; PAM type: YTN; PAM sequence: TTT
  source 1..20: mol_type = other DNA
tgtttgtttgtttgttttga

SEQ ID NO: 48880 - DNA, 20 bp, synthetic construct
  misc_feature 1..20: note = Description of Artificial Sequence: Synthetic oligonucleotide
  misc_feature 1..20: note = Target: SCN10A; (-) strand; PAM type: YTN; PAM sequence: TTT
  source 1..20: mol_type = other DNA
ttgtttgtttgtttgttttg

SEQ ID NO: 48881 - DNA, 20 bp, synthetic construct
  misc_feature 1..20: note = Description of Artificial Sequence: Synthetic oligonucleotide
  misc_feature 1..20: note = Target: SCN10A; (-) strand; PAM type: YTN; PAM sequence: TTG
  source 1..20: mol_type = other DNA
ggggagtttttgtttgtttg

SEQ ID NO: 48882 - DNA, 20 bp, synthetic construct
  misc_feature 1..20: note = Description of Artificial Sequence: Synthetic oligonucleotide
  misc_feature 1..20: note = Target: SCN10A; (-) strand; PAM type: YTN; PAM sequence: TTT
  source 1..20: mol_type = other DNA
gggggagtttttgtttgttt

SEQ ID NO: 48883 - DNA, 20 bp, synthetic construct
  misc_feature 1..20: note = Description of Artificial Sequence: Synthetic oligonucleotide
  misc_feature 1..20: note = Target: SCN10A; (-) strand; PAM type: YTN; PAM sequence: TTG
  source 1..20: mol_type = other DNA
tgtttgggggagtttttgtt

SEQ ID NO: 48884 - DNA, 20 bp, synthetic construct
  misc_feature 1..20: note = Description of Artificial Sequence: Synthetic oligonucleotide
  misc_feature 1..20: note = Target: SCN10A; (-) strand; PAM type: YTN; PAM sequence: TTT
  source 1..20: mol_type = other DNA
gtgtttgggggagtttttgt

SEQ ID NO: 48885 - DNA, 20 bp, synthetic construct
  misc_feature 1..20: note = Description of Artificial Sequence: Synthetic oligonucleotide
  misc_feature 1..20: note = Target: SCN10A; (-) strand; PAM type: YTN; PAM sequence: TTT
  source 1..20: mol_type = other DNA
tgtgtttgggggagtttttg

SEQ ID NO: 48886 - DNA, 20 bp, synthetic construct
  misc_feature 1..20: note = Description of Artificial Sequence: Synthetic oligonucleotide
  misc_feature 1..20: note = Target: SCN10A; (-) strand; PAM type: YTN; PAM sequence: TTT
  source 1..20: mol_type = other DNA
ttgtgtttgggggagttttt

SEQ ID NO: 48887 - DNA, 20 bp, synthetic construct
  misc_feature 1..20: note = Description of Artificial Sequence: Synthetic oligonucleotide
  misc_feature 1..20: note = Target: SCN10A; (-) strand; PAM type: YTN; PAM sequence: TTG
  source 1..20: mol_type = other DNA
gtttttgtgtttgggggagt

SEQ ID NO: 48888 - DNA, 20 bp, synthetic construct
  misc_feature 1..20: note = Description of Artificial Sequence: Synthetic oligonucleotide
  misc_feature 1..20: note = Target: SCN10A; (-) strand; PAM type: YTN; PAM sequence: TTT
  source 1..20: mol_type = other DNA
ggtttttgtgtttgggggag

SEQ ID NO: 48889 - DNA, 20 bp, synthetic construct
  misc_feature 1..20: note = Description of Artificial Sequence: Synthetic oligonucleotide
  misc_feature 1..20: note = Target: SCN10A; (-) strand; PAM type: YTN; PAM sequence: TTT
  source 1..20: mol_type = other DNA
tggtttttgtgtttggggga

SEQ ID NO: 48890 - DNA, 20 bp, synthetic construct
  misc_feature 1..20: note = Description of Artificial Sequence: Synthetic oligonucleotide
  misc_feature 1..20: note = Target: SCN10A; (-) strand; PAM type: YTN; PAM sequence: TTT
  source 1..20: mol_type = other DNA
ttggtttttgtgtttggggg

SEQ ID NO: 48891 - DNA, 20 bp, synthetic construct
  misc_feature 1..20: note = Description of Artificial Sequence: Synthetic oligonucleotide
  misc_feature 1..20: note = Target: SCN10A; (-) strand; PAM type: YTN; PAM sequence: CTT
  source 1..20: mol_type = other DNA
tttggtttttgtgtttgggg

SEQ ID NO: 48892 - DNA, 20 bp, synthetic construct
  misc_feature 1..20: note = Description of Artificial Sequence: Synthetic oligonucleotide
  misc_feature 1..20: note = Target: SCN10A; (-) strand; PAM type: YTN; PAM sequence: TTG
  source 1..20: mol_type = other DNA
aaagaagactttttggtttt

SEQ ID NO: 48893 - DNA, 20 bp, synthetic construct
  misc_feature 1..20: note = Description of Artificial Sequence: Synthetic oligonucleotide
  misc_feature 1..20: note = Target: SCN10A; (-) strand; PAM type: YTN; PAM sequence: CTA
  source 1..20: mol_type = other DNA
gggagtagggagaattgaaa

SEQ ID NO: 48894 - DNA, 20 bp, synthetic construct
  misc_feature 1..20: note = Description of Artificial Sequence: Synthetic oligonucleotide
  misc_feature 1..20: note = Target: SCN10A; (-) strand; PAM type: YTN; PAM sequence: CTG
  source 1..20: mol_type = other DNA
tgaggaaaaggagatagtaa

SEQ ID NO: 48895 - DNA, 20 bp, synthetic construct
  misc_feature 1..20: note = Description of Artificial Sequence: Synthetic oligonucleotide
  misc_feature 1..20: note = Target: SCN10A; (-) strand; PAM type: YTN; PAM sequence: TTG
  source 1..20: mol_type = other DNA
cctgtgaggaaaaggagata

SEQ ID NO: 48896 - DNA, 20 bp, synthetic construct
  misc_feature 1..20: note = Description of Artificial Sequence: Synthetic oligonucleotide
  misc_feature 1..20: note = Target: SCN10A; (-) strand; PAM type: YTN; PAM sequence: TTT
  source 1..20: mol_type = other DNA
gcctgtgaggaaaaggagat

SEQ ID NO: 48897 - DNA, 20 bp, synthetic construct
  misc_feature 1..20: note = Description of Artificial Sequence: Synthetic oligonucleotide
  misc_feature 1..20: note = Target: SCN10A; (-) strand; PAM type: YTN; PAM sequence: TTC
  source 1..20: mol_type = other DNA
aagaagtttgcctgtgagga

SEQ ID NO: 48898 - DNA, 20 bp, synthetic construct
  misc_feature 1..20: note = Description of Artificial Sequence: Synthetic oligonucleotide
  misc_feature 1..20: note = Target: SCN10A; (-) strand; PAM type: YTN; PAM sequence: TTT
  source 1..20: mol_type = other DNA
caagaagtttgcctgtgagg

SEQ ID NO: 48899 - DNA, 20 bp, synthetic construct
  misc_feature 1..20: note = Description of Artificial Sequence: Synthetic oligonucleotide
  misc_feature 1..20: note = Target: SCN10A; (-) strand; PAM type: YTN; PAM sequence: TTT
  source 1..20: mol_type = other DNA
tcaagaagtttgcctgtgag

SEQ ID NO: 48900 - DNA, 20 bp, synthetic construct
  misc_feature 1..20: note = Description of Artificial Sequence: Synthetic oligonucleotide
  misc_feature 1..20: note = Target: SCN10A; (-) strand; PAM type: YTN; PAM sequence: TTT
  source 1..20: mol_type = other DNA
ttcaagaagtttgcctgtga

SEQ ID NO: 48901 - DNA, 20 bp, synthetic construct
  misc_feature 1..20: note = Description of Artificial Sequence: Synthetic oligonucleotide
  misc_feature 1..20: note = Target: SCN10A; (-) strand; PAM type: YTN; PAM sequence: TTT
  source 1..20: mol_type = other DNA
tttcaagaagtttgcctgtg

SEQ ID NO: 48902 - DNA, 20 bp, synthetic construct
  misc_feature 1..20: note = Description of Artificial Sequence: Synthetic oligonucleotide
  misc_feature 1..20: note = Target: SCN10A; (-) strand; PAM type: YTN; PAM sequence: TTA
  source 1..20: mol_type = other DNA
aagagcgggtgagaggtgaa

SEQ ID NO: 48903 - DNA, 20 bp, synthetic construct
  misc_feature 1..20: note = Description of Artificial Sequence: Synthetic oligonucleotide
  misc_feature 1..20: note = Target: SCN10A; (-) strand; PAM type: YTN; PAM sequence: CTT
  source 1..20: mol_type = other DNA
aaagagcgggtgagaggtga

SEQ ID NO: 48904 - DNA, 20 bp, synthetic construct
  misc_feature 1..20: note = Description of Artificial Sequence: Synthetic oligonucleotide
  misc_feature 1..20: note = Target: SCN10A; (-) strand; PAM type: YTN; PAM sequence: TTG
  source 1..20: mol_type = other DNA
aaggggcttaaagagcgggt

SEQ ID NO: 48905 - DNA, 20 bp, synthetic construct
  misc_feature 1..20: note = Description of Artificial Sequence: Synthetic oligonucleotide
  misc_feature 1..20: note = Target: SCN10A; (-) strand; PAM type: YTN; PAM sequence: TTA
  source 1..20: mol_type = other DNA
atggagtaaaagggtaggca

SEQ ID NO: 48906 - DNA, 20 bp, synthetic construct
  misc_feature 1..20: note = Description of Artificial Sequence: Synthetic oligonucleotide
  misc_feature 1..20: note = Target: SCN10A; (-) strand; PAM type: YTN; PAM sequence: CTA
  source 1..20: mol_type = other DNA
agcaaaagaggattaatgga

SEQ ID NO: 48907 - DNA, 20 bp, synthetic construct
  misc_feature 1..20: note = Description of Artificial Sequence: Synthetic oligonucleotide
  misc_feature 1..20: note = Target: SCN10A; (-) strand; PAM type: YTN; PAM sequence: TTG
  source 1..20: mol_type = other DNA
gtgatctaagcaaaagagga

SEQ ID NO: 48908 - DNA, 20 bp, synthetic construct
  misc_feature 1..20: note = Description of Artificial Sequence: Synthetic oligonucleotide
  misc_feature 1..20: note = Target: SCN10A; (-) strand; PAM type: YTN; PAM sequence: TTT
  source 1..20: mol_type = other DNA
ggtgatctaagcaaaagagg

SEQ ID NO: 48909 - DNA, 20 bp, synthetic construct
  misc_feature 1..20: note = Description of Artificial Sequence: Synthetic oligonucleotide
  misc_feature 1..20: note = Target: SCN10A; (-) strand; PAM type: YTN; PAM sequence: CTT
  source 1..20: mol_type = other DNA
tggtgatctaagcaaaagag

SEQ ID NO: 48910 - DNA, 20 bp, synthetic construct
  misc_feature 1..20: note = Description of Artificial Sequence: Synthetic oligonucleotide
  misc_feature 1..20: note = Target: SCN10A; (-) strand; PAM type: YTN; PAM sequence: TTA
  source 1..20: mol_type = other DNA
gtcacatggatgtctttggt

SEQ ID NO: 48911 - DNA, 20 bp, synthetic construct
  misc_feature 1..20: note = Description of Artificial Sequence: Synthetic oligonucleotide
  misc_feature 1..20: note = Target: SCN10A; (-) strand; PAM type: YTN; PAM sequence: TTT
  source 1..20: mol_type = other DNA
agtcacatggatgtctttgg

SEQ ID NO: 48912 - DNA, 20 bp, synthetic construct
  misc_feature 1..20: note = Description of Artificial Sequence: Synthetic oligonucleotide
  misc_feature 1..20: note = Target: SCN10A; (-) strand; PAM type: YTN; PAM sequence: CTT
  source 1..20: mol_type = other DNA
tagtcacatggatgtctttg

SEQ ID NO: 48913 - DNA, 20 bp, synthetic construct
  misc_feature 1..20: note = Description of Artificial Sequence: Synthetic oligonucleotide
  misc_feature 1..20: note = Target: SCN10A; (-) strand; PAM type: YTN; PAM sequence: CTG
  source 1..20: mol_type = other DNA
tggaaaggtcaggtaaaatg

SEQ ID NO: 48914 - DNA, 20 bp, synthetic construct
  misc_feature 1..20: note = Description of Artificial Sequence: Synthetic oligonucleotide
  misc_feature 1..20: note = Target: SCN10A; (-) strand; PAM type: YTN; PAM sequence: TTC
  source 1..20: mol_type = other DNA
agaaagaatagaaaggccaa

SEQ ID NO: 48915 - DNA, 20 bp, synthetic construct
  misc_feature 1..20: note = Description of Artificial Sequence: Synthetic oligonucleotide
  misc_feature 1..20: note = Target: SCN10A; (-) strand; PAM type: YTN; PAM sequence: CTT
  source 1..20: mol_type = other DNA
cagaaagaatagaaaggcca

SEQ ID NO: 48916 - DNA, 20 bp, synthetic construct
  misc_feature 1..20: note = Description of Artificial Sequence: Synthetic oligonucleotide
  misc_feature 1..20: note = Target: SCN10A; (-) strand; PAM type: YTN; PAM sequence: TTC
  source 1..20: mol_type = other DNA
ttcagaaagaatagaaaggc

SEQ ID NO: 48917 - DNA, 20 bp, synthetic construct
  misc_feature 1..20: note = Description of Artificial Sequence: Synthetic oligonucleotide
  misc_feature 1..20: note = Target: SCN10A; (-) strand; PAM type: YTN; PAM sequence: TTT
  source 1..20: mol_type = other DNA
cttcagaaagaatagaaagg

SEQ ID NO: 48918 - DNA, 20 bp, synthetic construct
  misc_feature 1..20: note = Description of Artificial Sequence: Synthetic oligonucleotide
  misc_feature 1..20: note = Target: SCN10A; (-) strand; PAM type: YTN; PAM sequence: CTA
  source 1..20: mol_type = other DNA
gaagaatacaatgcagagcc

SEQ ID NO: 48919 - DNA, 20 bp, synthetic construct
  misc_feature 1..20: note = Description of Artificial Sequence: Synthetic oligonucleotide
  misc_feature 1..20: note = Target: SCN10A; (-) strand; PAM type: YTN; PAM sequence: CTG
  source 1..20: mol_type = other DNA
aaaaggaaggtacagaaata

SEQ ID NO: 48920 - DNA, 20 bp, synthetic construct
  misc_feature 1..20: note = Description of Artificial Sequence: Synthetic oligonucleotide
  misc_feature 1..20: note = Target: SCN10A; (-) strand; PAM type: YTN; PAM sequence: TTA
  source 1..20: mol_type = other DNA
agcagaagagatggacccag

SEQ ID NO: 48921 - DNA, 20 bp, synthetic construct
  misc_feature 1..20: note = Description of Artificial Sequence: Synthetic oligonucleotide
  misc_feature 1..20: note = Target: SCN10A; (-) strand; PAM type: YTN; PAM sequence: TTA
  source 1..20: mol_type = other DNA
atagttaagcagaagagatg

SEQ ID NO: 48922 - DNA, 20 bp, synthetic construct
  misc_feature 1..20: note = Description of Artificial Sequence: Synthetic oligonucleotide
  misc_feature 1..20: note = Target: SCN10A; (-) strand; PAM type: YTN; PAM sequence: TTT
  source 1..20: mol_type = other DNA
aatagttaagcagaagagat

SEQ ID NO: 48923 - DNA, 20 bp, synthetic construct
  misc_feature 1..20: note = Description of Artificial Sequence: Synthetic oligonucleotide
  misc_feature 1..20: note = Target: SCN10A; (-) strand; PAM type: YTN; PAM sequence: CTA
  source 1..20: mol_type = other DNA
aatgtttaatagttaagcag

SEQ ID NO: 48924 - DNA, 20 bp, synthetic construct
  misc_feature 1..20: note = Description of Artificial Sequence: Synthetic oligonucleotide
  misc_feature 1..20: note = Target: SCN10A; (-) strand; PAM type: YTN; PAM sequence: CTA
  source 1..20: mol_type = other DNA
acaaactaaatgtttaatag

SEQ ID NO: 48925 - DNA, 20 bp, synthetic construct
  misc_feature 1..20: note = Description of Artificial Sequence: Synthetic oligonucleotide
  misc_feature 1..20: note = Target: SCN10A; (-) strand; PAM type: YTN; PAM sequence: TTC
  source 1..20: mol_type = other DNA
taacaaactaaatgtttaat

SEQ ID NO: 48926 - DNA, 20 bp, synthetic construct
  misc_feature 1..20: note = Description of Artificial Sequence: Synthetic oligonucleotide
  misc_feature 1..20: note = Target: SCN10A; (-) strand; PAM type: YTN; PAM sequence: CTC
  source 1..20: mol_type = other DNA
agacacagttctaacaaact

SEQ ID NO: 48927 - DNA, 20 bp, synthetic construct
  misc_feature 1..20: note = Description of Artificial Sequence: Synthetic oligonucleotide
  misc_feature 1..20: note = Target: SCN10A; (-) strand; PAM type: YTN; PAM sequence: TTG
  source 1..20: mol_type = other DNA
aagtaagaagagaagaaggc

SEQ ID NO: 48928 - DNA, 20 bp, synthetic construct
  misc_feature 1..20: note = Description of Artificial Sequence: Synthetic oligonucleotide
  misc_feature 1..20: note = Target: SCN10A; (-) strand; PAM type: YTN; PAM sequence: TTA
  source 1..20: mol_type = other DNA
acacagaagggttgaagtaa

SEQ ID NO: 48929 - DNA, 20 bp, synthetic construct
  misc_feature 1..20: note = Description of Artificial Sequence: Synthetic oligonucleotide
  misc_feature 1..20: note = Target: SCN10A; (-) strand; PAM type: YTN; PAM sequence: CTG
  source 1..20: mol_type = other DNA
gatgagttaacacagaaggg

SEQ ID NO: 48930 - DNA, 20 bp, synthetic construct
  misc_feature 1..20: note = Description of Artificial Sequence: Synthetic oligonucleotide
  misc_feature 1..20: note = Target: SCN10A; (-) strand; PAM type: YTN; PAM sequence: TTG
  source 1..20: mol_type = other DNA
aaaagatgcaactggatgag

SEQ ID NO: 48931 - DNA, 20 bp, synthetic construct
  misc_feature 1..20: note = Description of Artificial Sequence: Synthetic oligonucleotide
  misc_feature 1..20: note = Target: SCN10A; (-) strand; PAM type: YTN; PAM sequence: TTT
  source 1..20: mol_type = other DNA
gaaaagatgcaactggatga

SEQ ID NO: 48932 - DNA, 20 bp, synthetic construct
  misc_feature 1..20: note = Description of Artificial Sequence: Synthetic oligonucleotide
  misc_feature 1..20: note = Target: SCN10A; (-) strand; PAM type: YTN; PAM sequence: TTT
  source 1..20: mol_type = other DNA
tgaaaagatgcaactggatg

SEQ ID NO: 48933 - DNA, 20 bp, synthetic construct
  misc_feature 1..20: note = Description of Artificial Sequence: Synthetic oligonucleotide
  misc_feature 1..20: note = Target: SCN10A; (-) strand; PAM type: YTN; PAM sequence: TTG
  source 1..20: mol_type = other DNA
aatgtaagtggtaattttga

SEQ ID NO: 48934 - DNA, 20 bp, synthetic construct
  misc_feature 1..20: note = Description of Artificial Sequence: Synthetic oligonucleotide
  misc_feature 1..20: note = Target: SCN10A; (-) strand; PAM type: YTN; PAM sequence: TTT
  source 1..20: mol_type = other DNA
gaatgtaagtggtaattttg

SEQ ID NO: 48935 - DNA, 20 bp, synthetic construct
  misc_feature 1..20: note = Description of Artificial Sequence: Synthetic oligonucleotide
  misc_feature 1..20: note = Target: SCN10A; (-) strand; PAM type: YTN; PAM sequence: TTG
  source 1..20: mol_type = other DNA
aaagcagtttgaatgtaagt

SEQ ID NO: 48936 - DNA, 20 bp, synthetic construct
  misc_feature 1..20: note = Description of Artificial Sequence: Synthetic oligonucleotide
  misc_feature 1..20: note = Target: SCN10A; (-) strand; PAM type: YTN; PAM sequence: TTT
  source 1..20: mol_type = other DNA
gaaagcagtttgaatgtaag

SEQ ID NO: 48937 - DNA, 20 bp, synthetic construct
  misc_feature 1..20: note = Description of Artificial Sequence: Synthetic oligonucleotide
  misc_feature 1..20: note = Target: SCN10A; (-) strand; PAM type: YTN; PAM sequence: TTA
  source 1..20: mol_type = other DNA
gatgacaaagatggcatata

SEQ ID NO: 48938 - DNA, 20 bp, synthetic construct
  misc_feature 1..20: note = Description of Artificial Sequence: Synthetic oligonucleotide
  misc_feature 1..20: note = Target: SCN10A; (-) strand; PAM type: YTN; PAM sequence: CTT
  source 1..20: mol_type = other DNA
agatgacaaagatggcatat

SEQ ID NO: 48939 - DNA, 20 bp, synthetic construct
  misc_feature 1..20: note = Description of Artificial Sequence: Synthetic oligonucleotide
  misc_feature 1..20: note = Target: SCN10A; (-) strand; PAM type: YTN; PAM sequence: CTA
  source 1..20: mol_type = other DNA
gaacttagatgacaaagatg

SEQ ID NO: 48940 - DNA, 20 bp, synthetic construct
  misc_feature 1..20: note = Description of Artificial Sequence: Synthetic oligonucleotide
  misc_feature 1..20: note = Target: SCN10A; (-) strand; PAM type: YTN; PAM sequence: TTA
  source 1..20: mol_type = other DNA
ggatataggggtctagaact

SEQ ID NO: 48941 - DNA, 20 bp, synthetic construct
  misc_feature 1..20: note = Description of Artificial Sequence: Synthetic oligonucleotide
  misc_feature 1..20: note = Target: SCN10A; (-) strand; PAM type: YTN; PAM sequence: TTT
  source 1..20: mol_type = other DNA
aggatataggggtctagaac

SEQ ID NO: 48942 - DNA, 20 bp, synthetic construct
  misc_feature 1..20: note = Description of Artificial Sequence: Synthetic oligonucleotide
  misc_feature 1..20: note = Target: SCN10A; (-) strand; PAM type: YTN; PAM sequence: CTT
  source 1..20: mol_type = other DNA
taggatataggggtctagaa

SEQ ID NO: 48943 - DNA, 20 bp, synthetic construct
  misc_feature 1..20: note = Description of Artificial Sequence: Synthetic oligonucleotide
  misc_feature 1..20: note = Target: SCN10A; (-) strand; PAM type: YTN; PAM sequence: TTG
  source 1..20: mol_type = other DNA
actttaggatataggggtct

SEQ ID NO: 48944 - DNA, 20 bp, synthetic construct
  misc_feature 1..20: note = Description of Artificial Sequence: Synthetic oligonucleotide
  misc_feature 1..20: note = Target: SCN10A; (-) strand; PAM type: YTN; PAM sequence: CTA
  source 1..20: mol_type = other DNA
ggtaggggtgtccagtagga

SEQ ID NO: 48945 - DNA, 20 bp, synthetic construct
  misc_feature 1..20: note = Description of Artificial Sequence: Synthetic oligonucleotide
  misc_feature 1..20: note = Target: SCN10A; (-) strand; PAM type: YTN; PAM sequence: TTG
  source 1..20: mol_type = other DNA
gagcatctaggtaggggtgt

SEQ ID NO: 48946 - DNA, 20 bp, synthetic construct
  misc_feature 1..20: note = Description of Artificial Sequence: Synthetic oligonucleotide
  misc_feature 1..20: note = Target: SCN10A; (-) strand; PAM type: YTN; PAM sequence: CTT
  source 1..20: mol_type = other DNA
ggagcatctaggtaggggtg

SEQ ID NO: 48947 - DNA, 20 bp, synthetic construct
  misc_feature 1..20: note = Description of Artificial Sequence: Synthetic oligonucleotide
  misc_feature 1..20: note = Target: SCN10A; (-) strand; PAM type: YTN; PAM sequence: TTC
  source 1..20: mol_type = other DNA
aggtgcccttggagcatcta

SEQ ID NO: 48948 - DNA, 20 bp, synthetic construct
  misc_feature 1..20: note = Description of Artificial Sequence: Synthetic oligonucleotide
  misc_feature 1..20: note = Target: SCN10A; (-) strand; PAM type: YTN; PAM sequence: TTT
  source 1..20: mol_type = other DNA
caggtgcccttggagcatct

SEQ ID NO: 48949 - DNA, 20 bp, synthetic construct
  misc_feature 1..20: note = Description of Artificial Sequence: Synthetic oligonucleotide
  misc_feature 1..20: note = Target: SCN10A; (-) strand; PAM type: YTN; PAM sequence: TTG
  source 1..20: mol_type = other DNA
ggtttcaggtgcccttggag

SEQ ID NO: 48950 - DNA, 20 bp, synthetic construct
  misc_feature 1..20: note = Description of Artificial Sequence: Synthetic oligonucleotide
  misc_feature 1..20: note = Target: SCN10A; (-) strand; PAM type: YTN; PAM sequence: CTG
  source 1..20: mol_type = other DNA
ggatatattgggtttcaggt

SEQ ID NO: 48951 - DNA, 20 bp, synthetic construct
  misc_feature 1..20: note = Description of Artificial Sequence: Synthetic oligonucleotide
  misc_feature 1..20: note = Target: SCN10A; (-) strand; PAM type: YTN; PAM sequence: TTG
  source 1..20: mol_type = other DNA
agtctgggatatattgggtt

SEQ ID NO: 48952 - DNA, 20 bp, synthetic construct
  misc_feature 1..20: note = Description of Artificial Sequence: Synthetic oligonucleotide
  misc_feature 1..20: note = Target: SCN10A; (-) strand; PAM type: YTN; PAM sequence: TTA
  source 1..20: mol_type = other DNA
tgagttgagtctgggatata

SEQ ID NO: 48953 - DNA, 20 bp, synthetic construct
  misc_feature 1..20: note = Description of Artificial Sequence: Synthetic oligonucleotide
  misc_feature 1..20: note = Target: SCN10A; (-) strand; PAM type: YTN; PAM sequence: TTA
  source 1..20: mol_type = other DNA
atggggaaagatgaaagaag

SEQ ID NO: 48954 - DNA, 20 bp, synthetic construct
  misc_feature 1..20: note = Description of Artificial Sequence: Synthetic oligonucleotide
  misc_feature 1..20: note = Target: SCN10A; (-) strand; PAM type: YTN; PAM sequence: TTT
  source 1..20: mol_type = other DNA
aatggggaaagatgaaagaa

SEQ ID NO: 48955 - DNA, 20 bp, synthetic construct
  misc_feature 1..20: note = Description of Artificial Sequence: Synthetic oligonucleotide
  misc_feature 1..20: note = Target: SCN10A; (-) strand; PAM type: YTN; PAM sequence: CTT
  source 1..20: mol_type = other DNA
taatggggaaagatgaaaga

SEQ ID NO: 48956 - DNA, 20 bp, synthetic construct
  misc_feature 1..20: note = Description of Artificial Sequence: Synthetic oligonucleotide
  misc_feature 1..20: note = Target: SCN10A; (-) strand; PAM type: YTN; PAM sequence: TTA
  source 1..20: mol_type = other DNA
ggggaagaagggggctttaa

SEQ ID NO: 48957 - DNA, 20 bp, synthetic construct
  misc_feature 1..20: note = Description of Artificial Sequence: Synthetic oligonucleotide
  misc_feature 1..20: note = Target: SCN10A; (-) strand; PAM type: YTN; PAM sequence: TTT
  source 1..20: mol_type = other DNA
aggggaagaagggggcttta

SEQ ID NO: 48958 - DNA, 20 bp, synthetic construct
  misc_feature 1..20: note = Description of Artificial Sequence: Synthetic oligonucleotide
  misc_feature 1..20: note = Target: SCN10A; (-) strand; PAM type: YTN; PAM sequence: TTT
  source 1..20: mol_type = other DNA
taggggaagaagggggcttt

SEQ ID NO: 48959 - DNA, 20 bp, synthetic construct
  misc_feature 1..20: note = Description of Artificial Sequence: Synthetic oligonucleotide
  misc_feature 1..20: note = Target: SCN10A; (-) strand; PAM type: YTN; PAM sequence: CTC
  source 1..20: mol_type = other DNA
ataaagggagcattttaggg

SEQ ID NO: 48960 - DNA, 20 bp, synthetic construct
  misc_feature 1..20: note = Description of Artificial Sequence: Synthetic oligonucleotide
  misc_feature 1..20: note = Target: SCN10A; (-) strand; PAM type: YTN; PAM sequence: CTG
  source 1..20: mol_type = other DNA
atacaataactcataaaggg

SEQ ID NO: 48961 - DNA, 20 bp, synthetic construct
  misc_feature 1..20: note = Description of Artificial Sequence: Synthetic oligonucleotide
  misc_feature 1..20: note = Target: SCN10A; (-) strand; PAM type: YTN; PAM sequence: TTA
  source 1..20: mol_type = other DNA
agatatgctgatacaataac

SEQ ID NO: 48962 - DNA, 20 bp, synthetic construct
  misc_feature 1..20: note = Description of Artificial Sequence: Synthetic oligonucleotide
  misc_feature 1..20: note = Target: SCN10A; (-) strand; PAM type: YTN; PAM sequence: CTT
  source 1..20: mol_type = other DNA
aagatatgctgatacaataa

SEQ ID NO: 48963 - DNA, 20 bp, synthetic construct
  misc_feature 1..20: note = Description of Artificial Sequence: Synthetic oligonucleotide
  misc_feature 1..20: note = Target: SCN10A; (-) strand; PAM type: YTN; PAM sequence: CTG
  source 1..20: mol_type = other DNA
gtataagtgccttaagatat

SEQ ID NO: 48964 - DNA, 20 bp, synthetic construct
  misc_feature 1..20: note = Description of Artificial Sequence: Synthetic oligonucleotide
  misc_feature 1..20: note = Target: SCN10A; (-) strand; PAM type: YTN; PAM sequence: TTC
  source 1..20: mol_type = other DNA
tggtataagtgccttaagat

SEQ ID NO: 48965 - DNA, 20 bp, synthetic construct
  misc_feature 1..20: note = Description of Artificial Sequence: Synthetic oligonucleotide
  misc_feature 1..20: note = Target: SCN10A; (-) strand; PAM type: YTN; PAM sequence: TTG
  source 1..20: mol_type = other DNA
atgatgcatatggttctggt

SEQ ID NO: 48966 - DNA, 20 bp, synthetic construct
  misc_feature 1..20: note = Description of Artificial Sequence: Synthetic oligonucleotide
  misc_feature 1..20: note = Target: SCN10A; (-) strand; PAM type: YTN; PAM sequence: CTT
  source 1..20: mol_type = other DNA
gatgatgcatatggttctgg

SEQ ID NO: 48967 - DNA, 20 bp, synthetic construct
  misc_feature 1..20: note = Description of Artificial Sequence: Synthetic oligonucleotide
  misc_feature 1..20: note = Target: SCN10A; (-) strand; PAM type: YTN; PAM sequence: TTC
  source 1..20: mol_type = other DNA
aggacttgatgatgcatatg

SEQ ID NO: 48968 - DNA, 20 bp, synthetic construct
  misc_feature 1..20: note = Description of Artificial Sequence: Synthetic oligonucleotide
  misc_feature 1..20: note = Target: SCN10A; (-) strand; PAM type: YTN; PAM sequence: CTA
  source 1..20: mol_type = other DNA
aggggcataagattcaggac

SEQ ID NO: 48969 - DNA, 20 bp, synthetic construct
  misc_feature 1..20: note = Description of Artificial Sequence: Synthetic oligonucleotide
  misc_feature 1..20: note = Target: SCN10A; (-) strand; PAM type: YTN; PAM sequence: CTA
  source 1..20: mol_type = other DNA
tctaaggggcataagattca

SEQ ID NO: 48970 - DNA, 20 bp, synthetic construct
  misc_feature 1..20: note = Description of Artificial Sequence: Synthetic oligonucleotide
  misc_feature 1..20: note = Target: SCN10A; (-) strand; PAM type: YTN; PAM sequence: CTG
  source 1..20: mol_type = other DNA
atgggaaatggaaggatatg

SEQ ID NO: 48971 - DNA, 20 bp, synthetic construct
  misc_feature 1..20: note = Description of Artificial Sequence: Synthetic oligonucleotide
  misc_feature 1..20: note = Target: SCN10A; (-) strand; PAM type: YTN; PAM sequence: CTG
  source 1..20: mol_type = other DNA
gggtagtgacagtggggctg

SEQ ID NO: 48972 - DNA, 20 bp, synthetic construct
  misc_feature 1..20: note = Description of Artificial Sequence: Synthetic oligonucleotide
  misc_feature 1..20: note = Target: SCN10A; (-) strand; PAM type: YTN; PAM sequence: CTC
  source 1..20: mol_type = other DNA
tggggtagtgacagtggggc

SEQ ID NO: 48973 - DNA, 20 bp, synthetic construct
  misc_feature 1..20: note = Description of Artificial Sequence: Synthetic oligonucleotide
  misc_feature 1..20: note = Target: SCN10A; (-) strand; PAM type: YTN; PAM sequence: TTG
  source 1..20: mol_type = other DNA
aactctggggtagtgacagt

SEQ ID NO: 48974 - DNA, 20 bp, synthetic construct
  misc_feature 1..20: note = Description of Artificial Sequence: Synthetic oligonucleotide
  misc_feature 1..20: note = Target: SCN10A; (-) strand; PAM type: YTN; PAM sequence: CTT
  source 1..20: mol_type = other DNA
gaactctggggtagtgacag

SEQ ID NO: 48975 - DNA, 20 bp, synthetic construct
  misc_feature 1..20: note = Description of Artificial Sequence: Synthetic oligonucleotide
  misc_feature 1..20: note = Target: SCN10A; (-) strand; PAM type: YTN; PAM sequence: TTA
  source 1..20: mol_type = other DNA
ggaggaagccaagtacaaga

SEQ ID NO: 48976 - DNA, 20 bp, synthetic construct
  misc_feature 1..20: note = Description of Artificial Sequence: Synthetic oligonucleotide
  misc_feature 1..20: note = Target: SCN10A; (-) strand; PAM type: YTN; PAM sequence: TTG
  source 1..20: mol_type = other DNA
tcagggaaaccagttaggag

SEQ ID NO: 48977 - DNA, 20 bp, synthetic construct
  misc_feature 1..20: note = Description of Artificial Sequence: Synthetic oligonucleotide
  misc_feature 1..20: note = Target: SCN10A; (-) strand; PAM type: YTN; PAM sequence: TTG
  source 1..20: mol_type = other DNA
tagatataagaggggaagta

SEQ ID NO: 48978 - DNA, 20 bp, synthetic construct
  misc_feature 1..20: note = Description of Artificial Sequence: Synthetic oligonucleotide
  misc_feature 1..20: note = Target: SCN10A; (-) strand; PAM type: YTN; PAM sequence: CTT
  source 1..20: mol_type = other DNA
gtagatataagaggggaagt

SEQ ID NO: 48979 - DNA, 20 bp, synthetic construct
  misc_feature 1..20: note = Description of Artificial Sequence: Synthetic oligonucleotide
  misc_feature 1..20: note = Target: SCN10A; (-) strand; PAM type: YTN; PAM sequence: CTG
  source 1..20: mol_type = other DNA
gatacttgtagatataagag

SEQ ID NO: 48980 - DNA, 20 bp, synthetic construct
  misc_feature 1..20: note = Description of Artificial Sequence: Synthetic oligonucleotide
  misc_feature 1..20: note = Target: SCN10A; (-) strand; PAM type: YTN; PAM sequence: CTC
  source 1..20: mol_type = other DNA
tggatacttgtagatataag

SEQ ID NO: 48981 - DNA, 20 bp, synthetic construct
  misc_feature 1..20: note = Description of Artificial Sequence: Synthetic oligonucleotide
  misc_feature 1..20: note = Target: SCN10A; (-) strand; PAM type: YTN; PAM sequence: TTA
  source 1..20: mol_type = other DNA
ctctggatacttgtagatat

SEQ ID NO: 48982 - DNA, 20 bp, synthetic construct
  misc_feature 1..20: note = Description of Artificial Sequence: Synthetic oligonucleotide
  misc_feature 1..20: note = Target: SCN10A; (-) strand; PAM type: YTN; PAM sequence: TTA
  source 1..20: mol_type = other DNA
taaaagttactctggatact

SEQ ID NO: 48983 - DNA, 20 bp, synthetic construct
  misc_feature 1..20: note = Description of Artificial Sequence: Synthetic oligonucleotide
  misc_feature 1..20: note = Target: SCN10A; (-) strand; PAM type: YTN; PAM sequence: TTT
  source 1..20: mol_type = other DNA
ataaaagttactctggatac

SEQ ID NO: 48984 - DNA, 20 bp, synthetic construct
  misc_feature 1..20: note = Description of Artificial Sequence: Synthetic oligonucleotide
  misc_feature 1..20: note = Target: SCN10A; (-) strand; PAM type: YTN; PAM sequence: TTT
  source 1..20: mol_type = other DNA
tataaaagttactctggata

SEQ ID NO: 48985 - DNA, 20 bp, synthetic construct
  misc_feature 1..20: note = Description of Artificial Sequence: Synthetic oligonucleotide
  misc_feature 1..20: note = Target: SCN10A; (-) strand; PAM type: YTN; PAM sequence: TTG
  source 1..20: mol_type = other DNA
cattttataaaagttactct

SEQ ID NO: 48986 - DNA, 20 bp, synthetic construct
  misc_feature 1..20: note = Description of Artificial Sequence: Synthetic oligonucleotide
  misc_feature 1..20: note = Target: SCN10A; (-) strand; PAM type: YTN; PAM sequence: TTT
  source 1..20: mol_type = other DNA
gcattttataaaagttactc

SEQ ID NO: 48987 - DNA, 20 bp, synthetic construct
  misc_feature 1..20: note = Description of Artificial Sequence: Synthetic oligonucleotide
  misc_feature 1..20: note = Target: SCN10A; (-) strand; PAM type: YTN; PAM sequence: TTA
  source 1..20: mol_type = other DNA
catttgcattttataaaagt

SEQ ID NO: 48988 - DNA, 20 bp, synthetic construct
  misc_feature 1..20: note = Description of Artificial Sequence: Synthetic oligonucleotide
  misc_feature 1..20: note = Target: SCN10A; (-) strand; PAM type: YTN; PAM sequence: TTG
  source 1..20: mol_type = other DNA
gaggcagggaagttacattt

SEQ ID NO: 48989 - DNA, 20 bp, synthetic construct
  misc_feature 1..20: note = Description of Artificial Sequence: Synthetic oligonucleotide
  misc_feature 1..20: note = Target: SCN10A; (-) strand; PAM type: YTN; PAM sequence: TTA
  source 1..20: mol_type = other DNA
aaggattggaggcagggaag

SEQ ID NO: 48990 - DNA, 20 bp, synthetic construct
  misc_feature 1..20: note = Description of Artificial Sequence: Synthetic oligonucleotide
  misc_feature 1..20: note = Target: SCN10A; (-) strand; PAM type: YTN; PAM sequence: CTA
  source 1..20: mol_type = other DNA
agaggagtgaggtgccatta

SEQ ID NO: 48991 - DNA, 20 bp, synthetic construct
  misc_feature 1..20: note = Description of Artificial Sequence: Synthetic oligonucleotide
  misc_feature 1..20: note = Target: SCN10A; (-) strand; PAM type: YTN; PAM sequence: TTC
  source 1..20: mol_type = other DNA
atgctaagaggagtgaggtg

SEQ ID NO: 48992 - DNA, 20 bp, synthetic construct
  misc_feature 1..20: note = Description of Artificial Sequence: Synthetic oligonucleotide
  misc_feature 1..20: note = Target: SCN10A; (-) strand; PAM type: YTN; PAM sequence: CTT
  source 1..20: mol_type = other DNA
catgctaagaggagtgaggt

SEQ ID NO: 48993 - DNA, 20 bp, synthetic construct
  misc_feature 1..20: note = Description of Artificial Sequence: Synthetic oligonucleotide
  misc_feature 1..20: note = Target: SCN10A; (-) strand; PAM type: YTN; PAM sequence: TTA
  source 1..20: mol_type = other DNA
aggatatgggacttcatgct

SEQ ID NO: 48994 - DNA, 20 bp, synthetic construct
  misc_feature 1..20: note = Description of Artificial Sequence: Synthetic oligonucleotide
  misc_feature 1..20: note = Target: SCN10A; (-) strand; PAM type: YTN; PAM sequence: CTG
  source 1..20: mol_type = other DNA
cattaaggatatgggacttc

SEQ ID NO: 48995 - DNA, 20 bp, synthetic construct
  misc_feature 1..20: note = Description of Artificial Sequence: Synthetic oligonucleotide
  misc_feature 1..20: note = Target: SCN10A; (-) strand; PAM type: YTN; PAM sequence: CTA
  source 1..20: mol_type = other DNA
gactgcattaaggatatggg

SEQ ID NO: 48996 - DNA, 20 bp, synthetic construct
  misc_feature 1..20: note = Description of Artificial Sequence: Synthetic oligonucleotide
  misc_feature 1..20: note = Target: SCN10A; (-) strand; PAM type: YTN; PAM sequence: CTC
  source 1..20: mol_type = other DNA
ctagactgcattaaggatat

SEQ ID NO: 48997 - DNA, 20 bp, synthetic construct
  misc_feature 1..20: note = Description of Artificial Sequence: Synthetic oligonucleotide
  misc_feature 1..20: note = Target: SCN10A; (-) strand; PAM type: YTN; PAM sequence: TTG
  source 1..20: mol_type = other DNA
gggccagatcccaagaaact

SEQ ID NO: 48998 - DNA, 20 bp, synthetic construct
  misc_feature 1..20: note = Description of Artificial Sequence: Synthetic oligonucleotide
  misc_feature 1..20: note = Target: SCN10A; (-) strand; PAM type: YTN; PAM sequence: CTA
  source 1..20: mol_type = other DNA
gagggatgagttggggccag

SEQ ID NO: 48999 - DNA, 20 bp, synthetic construct
  misc_feature 1..20: note = Description of Artificial Sequence: Synthetic oligonucleotide
  misc_feature 1..20: note = Target: SCN10A; (-) strand; PAM type: YTN; PAM sequence: CTG
  source 1..20: mol_type = other DNA
aaaataaggctagagggatg

SEQ ID NO: 49000 - DNA, 20 bp, synthetic construct
  misc_feature 1..20: note = Description of Artificial Sequence: Synthetic oligonucleotide
  misc_feature 1..20: note = Target: SCN10A; (-) strand; PAM type: YTN; PAM sequence: CTA
  source 1..20: mol_type = other DNA
gagaaccaggagaactgaaa

SEQ ID NO: 49001 - DNA, 20 bp, synthetic construct
  misc_feature 1..20: note = Description of Artificial Sequence: Synthetic oligonucleotide
  misc_feature 1..20: note = Target: SCN10A; (-) strand; PAM type: YTN; PAM sequence: CTG
  source 1..20: mol_type = other DNA
taacctagagaaccaggaga

SEQ ID NO: 49002 - DNA, 20 bp, synthetic construct
  misc_feature 1..20: note = Description of Artificial Sequence: Synthetic oligonucleotide
  misc_feature 1..20: note = Target: SCN10A; (-) strand; PAM type: YTN; PAM sequence: CTA
  source 1..20: mol_type = other DNA
atgtagctgtaacctagaga

SEQ ID NO: 49003 - DNA, 20 bp, synthetic construct
  misc_feature 1..20: note = Description of Artificial Sequence: Synthetic oligonucleotide
  misc_feature 1..20: note = Target: SCN10A; (-) strand; PAM type: YTN; PAM sequence: TTG
  source 1..20: mol_type = other DNA
aaggaatgaaaaagcctaat

SEQ ID NO: 49004 - DNA, 20 bp, synthetic construct
  misc_feature 1..20: note = Description of Artificial Sequence: Synthetic oligonucleotide
  misc_feature 1..20: note = Target: SCN10A; (-) strand; PAM type: YTN; PAM sequence: TTT
  source 1..20: mol_type = other DNA
gaaggaatgaaaaagcctaa

SEQ ID NO: 49005 - DNA, 20 bp, synthetic construct
  misc_feature 1..20: note = Description of Artificial Sequence: Synthetic oligonucleotide
  misc_feature 1..20: note = Target: SCN10A; (-) strand; PAM type: YTN; PAM sequence: CTG
  source 1..20: mol_type = other DNA
caaagcagaagagagaataa

SEQ ID NO: 49006 - DNA, 20 bp, synthetic construct
  misc_feature 1..20: note = Description of Artificial Sequence: Synthetic oligonucleotide
  misc_feature 1..20: note = Target: SCN10A; (-) strand; PAM type: YTN; PAM sequence: CTG
  source 1..20: mol_type = other DNA
aaaggactgcaaagcagaag

SEQ ID NO: 49007 - DNA, 20 bp, synthetic construct
  misc_feature 1..20: note = Description of Artificial Sequence: Synthetic oligonucleotide
  misc_feature 1..20: note = Target: SCN10A; (-) strand; PAM type: YTN; PAM sequence: TTA
  source 1..20: mol_type = other DNA
tcccaggctgaaaggactgc

SEQ ID NO: 49008 - DNA, 20 bp, synthetic construct
  misc_feature 1..20: note = Description of Artificial Sequence: Synthetic oligonucleotide
  misc_feature 1..20: note = Target: SCN10A; (-) strand; PAM type: YTN; PAM sequence: CTG
  source 1..20: mol_type = other DNA
gagccagggaattatcccag

SEQ ID NO: 49009 - DNA, 20 bp, synthetic construct
  misc_feature 1..20: note = Description of Artificial Sequence: Synthetic oligonucleotide
  misc_feature 1..20: note = Target: SCN10A; (-) strand; PAM type: YTN; PAM sequence: TTG
  source 1..20: mol_type = other DNA
cctggagccagggaattatc

SEQ ID NO: 49010 - DNA, 20 bp, synthetic construct
  misc_feature 1..20: note = Description of Artificial Sequence: Synthetic oligonucleotide
  misc_feature 1..20: note = Target: SCN10A; (-) strand; PAM type: YTN; PAM sequence: TTT
  source 1..20: mol_type = other DNA
gcctggagccagggaattat

SEQ ID NO: 49011 - DNA, 20 bp, synthetic construct
  misc_feature 1..20: note = Description of Artificial Sequence: Synthetic oligonucleotide
  misc_feature 1..20: note = Target: SCN10A; (-) strand; PAM type: YTN; PAM sequence: CTA
  source 1..20: mol_type = other DNA
agtgaaatatggtaagattt

SEQ ID NO: 49012 - DNA, 20 bp, synthetic construct
  misc_feature 1..20: note = Description of Artificial Sequence: Synthetic oligonucleotide
  misc_feature 1..20: note = Target: SCN10A; (-) strand; PAM type: YTN; PAM sequence: TTA
  source 1..20: mol_type = other DNA
aagaggaagtgcaggatact

SEQ ID NO: 49013 - DNA, 20 bp, synthetic construct
  misc_feature 1..20: note = Description of Artificial Sequence: Synthetic oligonucleotide
  misc_feature 1..20: note = Target: SCN10A; (-) strand; PAM type: YTN; PAM sequence: CTT
  source 1..20: mol_type = other DNA
aaagaggaagtgcaggatac

SEQ ID NO: 49014 - DNA, 20 bp, synthetic construct
  misc_feature 1..20: note = Description of Artificial Sequence: Synthetic oligonucleotide
  misc_feature 1..20: note = Target: SCN10A; (-) strand; PAM type: YTN; PAM sequence: CTG
  source 1..20: mol_type = other DNA
gagtggtgagtgccttaaag

SEQ ID NO: 49015 - DNA, 20 bp, synthetic construct
  misc_feature 1..20: note = Description of Artificial Sequence: Synthetic oligonucleotide
  misc_feature 1..20: note = Target: SCN10A; (-) strand; PAM type: YTN; PAM sequence: TTA
  source 1..20: mol_type = other DNA
ctggagtggtgagtgcctta

SEQ ID NO: 49016 - DNA, 20 bp, synthetic construct
  misc_feature 1..20: note = Description of Artificial Sequence: Synthetic oligonucleotide
  misc_feature 1..20: note = Target: SCN10A; (-) strand; PAM type: YTN; PAM sequence: CTT
  source 1..20: mol_type = other DNA
actggagtggtgagtgcctt

SEQ ID NO: 49017 - DNA, 20 bp, synthetic construct
  misc_feature 1..20: note = Description of Artificial Sequence: Synthetic oligonucleotide
  misc_feature 1..20: note = Target: SCN10A; (-) strand; PAM type: YTN; PAM sequence: CTG
  source 1..20: mol_type = other DNA
ggtcacagcagtgagcttac

SEQ ID NO: 49018 - DNA, 20 bp, synthetic construct
  misc_feature 1..20: note = Description of Artificial Sequence: Synthetic oligonucleotide
  misc_feature 1..20: note = Target: SCN10A; (-) strand; PAM type: YTN; PAM sequence: TTC
  source 1..20: mol_type = other DNA
cagaagctgggtcacagcag

SEQ ID NO: 49019 - DNA, 20 bp, synthetic construct
  misc_feature 1..20: note = Description of Artificial Sequence: Synthetic oligonucleotide
  misc_feature 1..20: note = Target: SCN10A; (-) strand; PAM type: YTN; PAM sequence: TTG
  source 1..20: mol_type = other DNA
tccaagccagaattccagaa

SEQ ID NO: 49020 - DNA, 20 bp, synthetic construct
  misc_feature 1..20: note = Description of Artificial Sequence: Synthetic oligonucleotide
  misc_feature 1..20: note = Target: SCN10A; (-) strand; PAM type: YTN; PAM sequence: CTG
  source 1..20: mol_type = other DNA
ttgtccaagccagaattcca

SEQ ID NO: 49021 - DNA, 20 bp, synthetic construct
  misc_feature 1..20: note = Description of Artificial Sequence: Synthetic oligonucleotide
  misc_feature 1..20: note = Target: SCN10A; (-) strand; PAM type: YTN; PAM sequence: TTC
  source 1..20: mol_type = other DNA
actgttgtccaagccagaat

SEQ ID NO: 49022 - DNA, 20 bp, synthetic construct
  misc_feature 1..20: note = Description of Artificial Sequence: Synthetic oligonucleotide
  misc_feature 1..20: note = Target: SCN10A; (-) strand; PAM type: YTN; PAM sequence: TTT
  source 1..20: mol_type = other DNA
cactgttgtccaagccagaa

SEQ ID NO: 49023 - DNA, 20 bp, synthetic construct
  misc_feature 1..20: note = Description of Artificial Sequence: Synthetic oligonucleotide
  misc_feature 1..20: note = Target: SCN10A; (-) strand; PAM type: YTN; PAM sequence: CTG
  source 1..20: mol_type = other DNA
agatttcactgttgtccaag

SEQ ID NO: 49024 - DNA, 20 bp, synthetic construct
  misc_feature 1..20: note = Description of Artificial Sequence: Synthetic oligonucleotide
  misc_feature 1..20: note = Target: SCN10A; (-) strand; PAM type: YTN; PAM sequence: TTG
  source 1..20: mol_type = other DNA
gcatgcaagctgagatttca

SEQ ID NO: 49025 - DNA, 20 bp, synthetic construct
  misc_feature 1..20: note = Description of Artificial Sequence: Synthetic oligonucleotide
  misc_feature 1..20: note = Target: SCN10A; (-) strand; PAM type: YTN; PAM sequence: CTT
  source 1..20: mol_type = other DNA
ggcatgcaagctgagatttc

SEQ ID NO: 49026 - DNA, 20 bp, synthetic construct
  misc_feature 1..20: note = Description of Artificial Sequence: Synthetic oligonucleotide
  misc_feature 1..20: note = Target: SCN10A; (-) strand; PAM type: YTN; PAM sequence: CTA
  source 1..20: mol_type = other DNA
tgcttggcatgcaagctgag

SEQ ID NO: 49027 - DNA, 20 bp, synthetic construct
  misc_feature 1..20: note = Description of Artificial Sequence: Synthetic oligonucleotide
  misc_feature 1..20: note = Target: SCN10A; (-) strand; PAM type: YTN; PAM sequence: TTC
  source 1..20: mol_type = other DNA
tatgcttggcatgcaagctg

SEQ ID NO: 49028 - DNA, 20 bp, synthetic construct
  misc_feature 1..20: note = Description of Artificial Sequence: Synthetic oligonucleotide
  misc_feature 1..20: note = Target: SCN10A; (-) strand; PAM type: YTN; PAM sequence: CTT
  source 1..20: mol_type = other DNA
ctatgcttggcatgcaagct

SEQ ID NO: 49029 - DNA, 20 bp, synthetic construct
  misc_feature 1..20: note = Description of Artificial Sequence: Synthetic oligonucleotide
  misc_feature 1..20: note = Target: SCN10A; (-) strand; PAM type: YTN; PAM sequence: CTC
  source 1..20: mol_type = other DNA
aaagcatgtgaaccttctat

SEQ ID NO: 49030 - DNA, 20 bp, synthetic construct
  misc_feature 1..20: note = Description of Artificial Sequence: Synthetic oligonucleotide
  misc_feature 1..20: note = Target: SCN10A; (-) strand; PAM type: YTN; PAM sequence: CTG
  source 1..20: mol_type = other DNA
aactcaaagcatgtgaacct

SEQ ID NO: 49031 - DNA, 20 bp, synthetic construct
  misc_feature 1..20: note = Description of Artificial Sequence: Synthetic oligonucleotide
  misc_feature 1..20: note = Target: SCN10A; (-) strand; PAM type: YTN; PAM sequence: TTC
  source 1..20: mol_type = other DNA
actgaactcaaagcatgtga

SEQ ID NO: 49032 - DNA, 20 bp, synthetic construct
  misc_feature 1..20: note = Description of Artificial Sequence: Synthetic oligonucleotide
  misc_feature 1..20: note = Target: SCN10A; (-) strand; PAM type: YTN; PAM sequence: TTG
  source 1..20: mol_type = other DNA
acaattcactgaactcaaag

SEQ ID NO: 49033 - DNA, 20 bp, synthetic construct
  misc_feature 1..20: note = Description of Artificial Sequence: Synthetic oligonucleotide
  misc_feature 1..20: note = Target: SCN10A; (-) strand; PAM type: YTN; PAM sequence: TTT
  source 1..20: mol_type = other DNA
gacaattcactgaactcaaa

SEQ ID NO: 49034 - DNA, 20 bp, synthetic construct
  misc_feature 1..20: note = Description of Artificial Sequence: Synthetic oligonucleotide
  misc_feature 1..20: note = Target: SCN10A; (-) strand; PAM type: YTN; PAM sequence: TTG
  source 1..20: mol_type = other DNA
gcccaaaccaacaggagttt

SEQ ID NO: 49035 - DNA, 20 bp, synthetic construct
  misc_feature 1..20: note = Description of Artificial Sequence: Synthetic oligonucleotide
  misc_feature 1..20: note = Target: SCN10A; (-) strand; PAM type: YTN; PAM sequence: TTT
  source 1..20: mol_type = other DNA
ggcccaaaccaacaggagtt

SEQ ID NO: 49036 - DNA, 20 bp, synthetic construct
  misc_feature 1..20: note = Description of Artificial Sequence: Synthetic oligonucleotide
  misc_feature 1..20: note = Target: SCN10A; (-) strand; PAM type: YTN; PAM sequence: TTA
  source 1..20: mol_type = other DNA
agaaagtttggcccaaacca

SEQ ID NO: 49037 - DNA, 20 bp, synthetic construct
  misc_feature 1..20: note = Description of Artificial Sequence: Synthetic oligonucleotide
  misc_feature 1..20: note = Target: SCN10A; (-) strand; PAM type: YTN; PAM sequence: CTT
  source 1..20: mol_type = other DNA
aagaaagtttggcccaaacc

SEQ ID NO: 49038 - DNA, 20 bp, synthetic construct
  misc_feature 1..20: note = Description of Artificial Sequence: Synthetic oligonucleotide
  misc_feature 1..20: note = Target: SCN10A; (-) strand; PAM type: YTN; PAM sequence: TTA
  source 1..20: mol_type = other DNA
tgcttaagaaagtttggccc

SEQ ID NO: 49039 - DNA, 20 bp, synthetic construct
  misc_feature 1..20: note = Description of Artificial Sequence: Synthetic oligonucleotide
  misc_feature 1..20: note = Target: SCN10A; (-) strand; PAM type: YTN; PAM sequence: TTA
  source 1..20: mol_type = other DNA
agagggattatgcttaagaa

SEQ ID NO: 49040 - DNA, 20 bp, synthetic construct
  misc_feature 1..20: note = Description of Artificial Sequence: Synthetic oligonucleotide
  misc_feature 1..20: note = Target: SCN10A; (-) strand; PAM type: YTN; PAM sequence: TTT
  source 1..20: mol_type = other DNA
aagagggattatgcttaaga

SEQ ID NO: 49041 - DNA, 20 bp, synthetic construct
  misc_feature 1..20: note = Description of Artificial Sequence: Synthetic oligonucleotide
  misc_feature 1..20: note = Target: SCN10A; (-) strand; PAM type: YTN; PAM sequence: CTT
  source 1..20: mol_type = other DNA
taagagggattatgcttaag

SEQ ID NO: 49042 - DNA, 20 bp, synthetic construct
  misc_feature 1..20: note = Description of Artificial Sequence: Synthetic oligonucleotide
  misc_feature 1..20: note = Target: SCN10A; (-) strand; PAM type: YTN; PAM sequence: CTC
  source 1..20: mol_type = other DNA
tttaagagggattatgctta

SEQ ID NO: 49043 - DNA, 20 bp, synthetic construct
  misc_feature 1..20: note = Description of Artificial Sequence: Synthetic oligonucleotide
  misc_feature 1..20: note = Target: SCN10A; (-) strand; PAM type: YTN; PAM sequence: TTA
  source 1..20: mol_type = other DNA
taaaggccacctctttaaga

SEQ ID NO: 49044 - DNA, 20 bp, synthetic construct
  misc_feature 1..20: note = Description of Artificial Sequence: Synthetic oligonucleotide
  misc_feature 1..20: note = Target: SCN10A; (-) strand; PAM type: YTN; PAM sequence: TTT
  source 1..20: mol_type = other DNA
ataaaggccacctctttaag

SEQ ID NO: 49045 - DNA, 20 bp, synthetic construct
  misc_feature 1..20: note = Description of Artificial Sequence: Synthetic oligonucleotide
  misc_feature 1..20: note = Target: SCN10A; (-) strand; PAM type: YTN; PAM sequence: CTG
  source 1..20: mol_type = other DNA
ccagagtcgtaataggattt

SEQ ID NO: 49046 - DNA, 20 bp, synthetic construct
  misc_feature 1..20: note = Description of Artificial Sequence: Synthetic oligonucleotide
  misc_feature 1..20: note = Target: SCN10A; (-) strand; PAM type: YTN; PAM sequence: TTC
  source 1..20: mol_type = other DNA
atgctgccagagtcgtaata

SEQ ID NO: 49047 - DNA, 20 bp, synthetic construct
  misc_feature 1..20: note = Description of Artificial Sequence: Synthetic oligonucleotide
  misc_feature 1..20: note = Target: SCN10A; (-) strand; PAM type: YTN; PAM sequence: CTT
  source 1..20: mol_type = other DNA
catgctgccagagtcgtaat

SEQ ID NO: 49048 - DNA, 20 bp, synthetic construct
  misc_feature 1..20: note = Description of Artificial Sequence: Synthetic oligonucleotide
  misc_feature 1..20: note = Target: SCN10A; (-) strand; PAM type: YTN; PAM sequence: CTG
  source 1..20: mol_type = other DNA
aaggatgcttcatgctgcca

SEQ ID NO: 49049 - DNA, 20 bp, synthetic construct
  misc_feature 1..20: note = Description of Artificial Sequence: Synthetic oligonucleotide
  misc_feature 1..20: note = Target: SCN10A; (-) strand; PAM type: YTN; PAM sequence: TTA
  source 1..20: mol_type = other DNA
cacacatgagacacctgaag

SEQ ID NO: 49050 - DNA, 20 bp, synthetic construct
  misc_feature 1..20: note = Description of Artificial Sequence: Synthetic oligonucleotide
  misc_feature 1..20: note = Target: SCN10A; (-) strand; PAM type: YTN; PAM sequence: TTC
  source 1..20: mol_type = other DNA
attacacacatgagacacct

SEQ ID NO: 49051 - DNA, 20 bp, synthetic construct
  misc_feature 1..20: note = Description of Artificial Sequence: Synthetic oligonucleotide
  misc_feature 1..20: note = Target: SCN10A; (-) strand; PAM type: YTN; PAM sequence: TTA
  source 1..20: mol_type = other DNA
tattcattacacacatgaga

SEQ ID NO: 49052 - DNA, 20 bp, synthetic construct
  misc_feature 1..20: note = Description of Artificial Sequence: Synthetic oligonucleotide
  misc_feature 1..20: note = Target: SCN10A; (-) strand; PAM type: YTN; PAM sequence: TTG
  source 1..20: mol_type = other DNA
gatgttatattcattacaca

SEQ ID NO: 49053 - DNA, 20 bp, synthetic construct
  misc_feature 1..20: note = Description of Artificial Sequence: Synthetic oligonucleotide
  misc_feature 1..20: note = Target: SCN10A; (-) strand; PAM type: YTN; PAM sequence: CTG
  source 1..20: mol_type = other DNA
gttggatgttatattcatta

SEQ ID NO: 49054 - DNA, 20 bp, synthetic construct
  misc_feature 1..20: note = Description of Artificial Sequence: Synthetic oligonucleotide
  misc_feature 1..20: note = Target: SCN10A; (-) strand; PAM type: YTN; PAM sequence: CTC
  source 1..20: mol_type = other DNA
tggttggatgttatattcat

SEQ ID NO: 49055 - DNA, 20 bp, synthetic construct
  misc_feature 1..20: note = Description of Artificial Sequence: Synthetic oligonucleotide
  misc_feature 1..20: note = Target: SCN10A; (-) strand; PAM type: YTN; PAM sequence: TTC
  source 1..20: mol_type = other DNA
tctggttggatgttatattc

SEQ ID NO: 49056 - DNA, 20 bp, synthetic construct
  misc_feature 1..20: note = Description of Artificial Sequence: Synthetic oligonucleotide
  misc_feature 1..20: note = Target: SCN10A; (-) strand; PAM type: YTN; PAM sequence: CTT
  source 1..20: mol_type = other DNA
ctctggttggatgttatatt

SEQ ID NO: 49057 - DNA, 20 bp, synthetic construct
  misc_feature 1..20: note = Description of Artificial Sequence: Synthetic oligonucleotide
  misc_feature 1..20: note = Target: SCN10A; (-) strand; PAM type: YTN; PAM sequence: CTG
  source 1..20: mol_type = other DNA
agcatagggcacatcatctt

SEQ ID NO: 49058 - DNA, 20 bp, synthetic construct
  misc_feature 1..20: note = Description of Artificial Sequence: Synthetic oligonucleotide
  misc_feature 1..20: note = Target: SCN10A; (-) strand; PAM type: YTN; PAM sequence: TTC
  source 1..20: mol_type = other DNA
tgagcatagggcacatcatc

SEQ ID NO: 49059 - DNA, 20 bp, synthetic construct
  misc_feature 1..20: note = Description of Artificial Sequence: Synthetic oligonucleotide
  misc_feature 1..20: note = Target: SCN10A; (-) strand; PAM type: YTN; PAM sequence: TTT
  source 1..20: mol_type = other DNA
ctgagcatagggcacatcat

SEQ ID NO: 49060 - DNA, 20 bp, synthetic construct
  misc_feature 1..20: note = Description of Artificial Sequence: Synthetic oligonucleotide
  misc_feature 1..20: note = Target: SCN10A; (-) strand; PAM type: YTN; PAM sequence: TTT
  source 1..20: mol_type = other DNA
tctgagcatagggcacatca

SEQ ID NO: 49061 - DNA, 20 bp, synthetic construct
  misc_feature 1..20: note = Description of Artificial Sequence: Synthetic oligonucleotide
  misc_feature 1..20: note = Target: SCN10A; (-) strand; PAM type: YTN; PAM sequence: TTA
  source 1..20: mol_type = other DNA
aataaaagaggtcaaagttt

SEQ ID NO: 49062 - DNA, 20 bp, synthetic construct
  misc_feature 1..20: note = Description of Artificial Sequence: Synthetic oligonucleotide
  misc_feature 1..20: note = Target: SCN10A; (-) strand; PAM type: YTN; PAM sequence: TTA
  source 1..20: mol_type = other DNA
ggttaaataaaagaggtcaa

SEQ ID NO: 49063 - DNA, 20 bp, synthetic construct
  misc_feature 1..20: note = Description of Artificial Sequence: Synthetic oligonucleotide
  misc_feature 1..20: note = Target: SCN10A; (-) strand; PAM type: YTN; PAM sequence: CTT
  source 1..20: mol_type = other DNA
aggttaaataaaagaggtca

SEQ ID NO: 49064 - DNA, 20 bp, synthetic construct
  misc_feature 1..20: note = Description of Artificial Sequence: Synthetic oligonucleotide
  misc_feature 1..20: note = Target: SCN10A; (-) strand; PAM type: YTN; PAM sequence: CTG
  source 1..20: mol_type = other DNA
aggagaggaaaccttaggtt

SEQ ID NO: 49065 - DNA, 20 bp, synthetic construct
  misc_feature 1..20: note = Description of Artificial Sequence: Synthetic oligonucleotide
  misc_feature 1..20: note = Target: SCN10A; (-) strand; PAM type: YTN; PAM sequence: TTA
  source 1..20: mol_type = other DNA
aagaaaatctgaggagagga

SEQ ID NO: 49066 - DNA, 20 bp, synthetic construct
  misc_feature 1..20: note = Description of Artificial Sequence: Synthetic oligonucleotide
  misc_feature 1..20: note = Target: SCN10A; (-) strand; PAM type: YTN; PAM sequence: TTT
  source 1..20: mol_type = other DNA
aaagaaaatctgaggagagg

SEQ ID NO: 49067 - DNA, 20 bp, synthetic construct
  misc_feature 1..20: note = Description of Artificial Sequence: Synthetic oligonucleotide
  misc_feature 1..20: note = Target: SCN10A; (-) strand; PAM type: YTN; PAM sequence: TTT
  source 1..20: mol_type = other DNA
taaagaaaatctgaggagag

SEQ ID NO: 49068 - DNA, 20 bp, synthetic construct
  misc_feature 1..20: note = Description of Artificial Sequence: Synthetic oligonucleotide
  misc_feature 1..20: note = Target: SCN10A; (-) strand; PAM type: YTN; PAM sequence: CTG
  source 1..20: mol_type = other DNA
tgacagtagagtaagaaagg

SEQ ID NO: 49069 - DNA, 20 bp, synthetic construct
  misc_feature 1..20: note = Description of Artificial Sequence: Synthetic oligonucleotide
  misc_feature 1..20: note = Target: SCN10A; (-) strand; PAM type: YTN; PAM sequence: CTC
  source 1..20: mol_type = other DNA
aaggaagatgctgtgacagt

SEQ ID NO: 49070 - DNA, 20 bp, synthetic construct
  misc_feature 1..20: note = Description of Artificial Sequence: Synthetic oligonucleotide
  misc_feature 1..20: note = Target: SCN10A; (-) strand; PAM type: YTN; PAM sequence: TTC
  source 1..20: mol_type = other DNA
ccctcaaggaagatgctgtg

SEQ ID NO: 49071 - DNA, 20 bp, synthetic construct
  misc_feature 1..20: note = Description of Artificial Sequence: Synthetic oligonucleotide
  misc_feature 1..20: note = Target: SCN10A; (-) strand; PAM type: YTN; PAM sequence: CTT
  source 1..20: mol_type = other DNA
cccctcaaggaagatgctgt

SEQ ID NO: 49072 - DNA, 20 bp, synthetic construct
  misc_feature 1..20: note = Description of Artificial Sequence: Synthetic oligonucleotide
  misc_feature 1..20: note = Target: SCN10A; (-) strand; PAM type: YTN; PAM sequence: TTG
  source 1..20: mol_type = other DNA
gggtagggtagacttcccct

SEQ ID NO: 49073 - DNA, 20 bp, synthetic construct
  misc_feature 1..20: note = Description of Artificial Sequence: Synthetic oligonucleotide
  misc_feature 1..20: note = Target: SCN10A; (-) strand; PAM type: YTN; PAM sequence: CTG
  source 1..20: mol_type = other DNA
ataaaaaggaagaaaataag

SEQ ID NO: 49074 - DNA, 20 bp, synthetic construct
  misc_feature 1..20: note = Description of Artificial Sequence: Synthetic oligonucleotide
  misc_feature 1..20: note = Target: SCN10A; (-) strand; PAM type: YTN; PAM sequence: TTA
  source 1..20: mol_type = other DNA
taacagtgtgaactgataaa

SEQ ID NO: 49075 - DNA, 20 bp, synthetic construct
  misc_feature 1..20: note = Description of Artificial Sequence: Synthetic oligonucleotide
  misc_feature 1..20: note = Target: SCN10A; (-) strand; PAM type: YTN; PAM sequence: TTT
  source 1..20: mol_type = other DNA
ataacagtgtgaactgataa

SEQ ID NO: 49076 - DNA, 20 bp, synthetic construct
  misc_feature 1..20: note = Description of Artificial Sequence: Synthetic oligonucleotide
  misc_feature 1..20: note = Target: SCN10A; (-) strand; PAM type: YTN; PAM sequence: CTA
  source 1..20: mol_type = other DNA
atttataacagtgtgaactg

SEQ ID NO: 49077 - DNA, 20 bp, synthetic construct
  misc_feature 1..20: note = Description of Artificial Sequence: Synthetic oligonucleotide
  misc_feature 1..20: note = Target: SCN10A; (-) strand; PAM type: YTN; PAM sequence: TTG
  source 1..20: mol_type = other DNA
gcggcgggagtgatgctaat

SEQ ID NO: 49078 - DNA, 20 bp, synthetic construct
  misc_feature 1..20: note = Description of Artificial Sequence: Synthetic oligonucleotide
  misc_feature 1..20: note = Target: SCN10A; (-) strand; PAM type: YTN; PAM sequence: TTG
  source 1..20: mol_type = other DNA
ggtggttggcggcgggagtg

SEQ ID NO: 49079 - DNA, 20 bp, synthetic construct
  misc_feature 1..20: note = Description of Artificial Sequence: Synthetic oligonucleotide
  misc_feature 1..20: note = Target: SCN10A; (-) strand; PAM type: YTN; PAM sequence: TTT
  source 1..20: mol_type = other DNA
gggtggttggcggcgggagt

SEQ ID NO: 49080 - DNA, 20 bp, synthetic construct
  misc_feature 1..20: note = Description of Artificial Sequence: Synthetic oligonucleotide
  misc_feature 1..20: note = Target: SCN10A; (-) strand; PAM type: YTN; PAM sequence: TTA
  source 1..20: mol_type = other DNA
cccagaagacaagtgcatgc

SEQ ID NO: 49081 - DNA, 20 bp, synthetic construct
  misc_feature 1..20: note = Description of Artificial Sequence: Synthetic oligonucleotide
  misc_feature 1..20: note = Target: SCN10A; (-) strand; PAM type: YTN; PAM sequence: CTC
  source 1..20: mol_type = other DNA
cattacccagaagacaagtg

SEQ ID NO: 49082 - DNA, 20 bp, synthetic construct
  misc_feature 1..20: note = Description of Artificial Sequence: Synthetic oligonucleotide
  misc_feature 1..20: note = Target: SCN10A; (-) strand; PAM type: YTN; PAM sequence: CTG
  source 1..20: mol_type = other DNA
acctccattacccagaagac

SEQ ID NO: 49083 - DNA, 20 bp, synthetic construct
  misc_feature 1..20: note = Description of Artificial Sequence: Synthetic oligonucleotide
  misc_feature 1..20: note = Target: SCN10A; (-) strand; PAM type: YTN; PAM sequence: CTC
  source 1..20: mol_type = other DNA
acagcctgacctccattacc

SEQ ID NO: 49084 - DNA, 20 bp, synthetic construct
  misc_feature 1..20: note = Description of Artificial Sequence: Synthetic oligonucleotide
  misc_feature 1..20: note = Target: SCN10A; (-) strand; PAM type: YTN; PAM sequence: TTG
  source 1..20: mol_type = other DNA
ctcacagcctgacctccatt

SEQ ID NO: 49085 - DNA, 20 bp, synthetic construct
  misc_feature 1..20: note = Description of Artificial Sequence: Synthetic oligonucleotide
  misc_feature 1..20: note = Target: SCN10A; (-) strand; PAM type: YTN; PAM sequence: TTT
  source 1..20: mol_type = other DNA
gctcacagcctgacctccat

SEQ ID NO: 49086 - DNA, 20 bp, synthetic construct
  misc_feature 1..20: note = Description of Artificial Sequence: Synthetic oligonucleotide
  misc_feature 1..20: note = Target: SCN10A; (-) strand; PAM type: YTN; PAM sequence: TTT
  source 1..20: mol_type = other DNA
tgctcacagcctgacctcca

SEQ ID NO: 49087 - DNA, 20 bp, synthetic construct
  misc_feature 1..20: note = Description of Artificial Sequence: Synthetic oligonucleotide
  misc_feature 1..20: note = Target: SCN10A; (-) strand; PAM type: YTN; PAM sequence: CTG
  source 1..20: mol_type = other DNA
ttttgctcacagcctgacct

SEQ ID NO: 49088 - DNA, 20 bp, synthetic construct
  misc_feature 1..20: note = Description of Artificial Sequence: Synthetic oligonucleotide
  misc_feature 1..20: note = Target: SCN10A; (-) strand; PAM type: YTN; PAM sequence: CTA
  source 1..20: mol_type = other DNA
tgagggcggagatgtgtctg

SEQ ID NO: 49089 - DNA, 20 bp, synthetic construct
  misc_feature 1..20: note = Description of Artificial Sequence: Synthetic oligonucleotide
  misc_feature 1..20: note = Target: SCN10A; (-) strand; PAM type: YTN; PAM sequence: TTG
  source 1..20: mol_type = other DNA
taaaatctatgagggcggag

SEQ ID NO: 49090 - DNA, 20 bp, synthetic construct
  misc_feature 1..20: note = Description of Artificial Sequence: Synthetic oligonucleotide
  misc_feature 1..20: note = Target: SCN10A; (-) strand; PAM type: YTN; PAM sequence: CTA
  source 1..20: mol_type = other DNA
ggttgtaaaatctatgaggg

SEQ ID NO: 49091 - DNA, 20 bp, synthetic construct
  misc_feature 1..20: note = Description of Artificial Sequence: Synthetic oligonucleotide
  misc_feature 1..20: note = Target: SCN10A; (-) strand; PAM type: YTN; PAM sequence: TTA
  source 1..20: mol_type = other DNA
ctaggttgtaaaatctatga

SEQ ID NO: 49092 - DNA, 20 bp, synthetic construct
  misc_feature 1..20: note = Description of Artificial Sequence: Synthetic oligonucleotide
  misc_feature 1..20: note = Target: SCN10A; (-) strand; PAM type: YTN; PAM sequence: TTT
  source 1..20: mol_type = other DNA
actaggttgtaaaatctatg

SEQ ID NO: 49093 - DNA, 20 bp, synthetic construct
  misc_feature 1..20: note = Description of Artificial Sequence: Synthetic oligonucleotide
  misc_feature 1..20: note = Target: SCN10A; (-) strand; PAM type: YTN; PAM sequence: TTA
  source 1..20: mol_type = other DNA
tgatttactaggttgtaaaa

SEQ ID NO: 49094 - DNA, 20 bp, synthetic construct
  misc_feature 1..20: note = Description of Artificial Sequence: Synthetic oligonucleotide
  misc_feature 1..20: note = Target: SCN10A; (-) strand; PAM type: YTN; PAM sequence: CTA
  source 1..20: mol_type = other DNA
ttatgatttactaggttgta

SEQ ID NO: 49095 - DNA, 20 bp, synthetic construct
  misc_feature 1..20: note = Description of Artificial Sequence: Synthetic oligonucleotide
  misc_feature 1..20: note = Target: SCN10A; (-) strand; PAM type: YTN; PAM sequence: TTG
  source 1..20: mol_type = other DNA
gctattatgatttactaggt

SEQ ID NO: 49096 - DNA, 20 bp, synthetic construct
  misc_feature 1..20: note = Description of Artificial Sequence: Synthetic oligonucleotide
  misc_feature 1..20: note = Target: SCN10A; (-) strand; PAM type: YTN; PAM sequence: TTT
  source 1..20: mol_type = other DNA
ggctattatgatttactagg

SEQ ID NO: 49097 - DNA, 20 bp, synthetic construct
  misc_feature 1..20: note = Description of Artificial Sequence: Synthetic oligonucleotide
  misc_feature 1..20: note = Target: SCN10A; (-) strand; PAM type: YTN; PAM sequence: CTC
  source 1..20: mol_type = other DNA
atcacatttggctattatga

SEQ ID NO: 49098 - DNA, 20 bp, synthetic construct
  misc_feature 1..20: note = Description of Artificial Sequence: Synthetic oligonucleotide
  misc_feature 1..20: note = Target: SCN10A; (-) strand; PAM type: YTN; PAM sequence: CTG
  source 1..20: mol_type = other DNA
gcatgtagtaaatactcatc

SEQ ID NO: 49099 - DNA, 20 bp, synthetic construct
  misc_feature 1..20: note = Description of Artificial Sequence: Synthetic oligonucleotide
  misc_feature 1..20: note = Target: SCN10A; (-) strand; PAM type: YTN; PAM sequence: TTA
  source 1..20: mol_type = other DNA
gaaccacgactggcatgtag

SEQ ID NO: 49100 - DNA, 20 bp, synthetic construct
  misc_feature 1..20: note = Description of Artificial Sequence: Synthetic oligonucleotide
  misc_feature 1..20: note = Target: SCN10A; (-) strand; PAM type: YTN; PAM sequence: CTT
  source 1..20: mol_type = other DNA
agaaccacgactggcatgta

SEQ ID NO: 49101 - DNA, 20 bp, synthetic construct
  misc_feature 1..20: note = Description of Artificial Sequence: Synthetic oligonucleotide
  misc_feature 1..20: note = Target: SCN10A; (-) strand; PAM type: YTN; PAM sequence: TTA
  source 1..20: mol_type = other DNA
aatgagtcaggtcaagcaaa

SEQ ID NO: 49102 - DNA, 20 bp, synthetic construct
  misc_feature 1..20: note = Description of Artificial Sequence: Synthetic oligonucleotide
  misc_feature 1..20: note = Target: SCN10A; (-) strand; PAM type: YTN; PAM sequence: TTG
  source 1..20: mol_type = other DNA
tgaggattaaatgagtcagg

SEQ ID NO: 49103 - DNA, 20 bp, synthetic construct
  misc_feature 1..20: note = Description of Artificial Sequence: Synthetic oligonucleotide
  misc_feature 1..20: note = Target: SCN10A; (-) strand; PAM type: YTN; PAM sequence: TTT
  source 1..20: mol_type = other DNA
gtgaggattaaatgagtcag

SEQ ID NO: 49104 - DNA, 20 bp, synthetic construct
  misc_feature 1..20: note = Description of Artificial Sequence: Synthetic oligonucleotide
  misc_feature 1..20: note = Target: SCN10A; (-) strand; PAM type: YTN; PAM sequence: TTT
  source 1..20: mol_type = other DNA
tgtgaggattaaatgagtca

SEQ ID NO: 49105 - DNA, 20 bp, synthetic construct
  misc_feature 1..20: note = Description of Artificial Sequence: Synthetic oligonucleotide
  misc_feature 1..20: note = Target: SCN10A; (-) strand; PAM type: YTN; PAM sequence: TTG
  source 1..20: mol_type = other DNA
tagagttttgtgaggattaa

SEQ ID NO: 49106 - DNA, 20 bp, synthetic construct
  misc_feature 1..20: note = Description of Artificial Sequence: Synthetic oligonucleotide
  misc_feature 1..20: note = Target: SCN10A; (-) strand; PAM type: YTN; PAM sequence: CTT
  source 1..20: mol_type = other DNA
gtagagttttgtgaggatta

SEQ ID NO: 49107 - DNA, 20 bp, synthetic construct
  misc_feature 1..20: note = Description of Artificial Sequence: Synthetic oligonucleotide
  misc_feature 1..20: note = Target: SCN10A; (-) strand; PAM type: YTN; PAM sequence: TTA
  source 1..20: mol_type = other DNA
tcttgtagagttttgtgagg

SEQ ID NO: 49108 - DNA, 20 bp, synthetic construct
  misc_feature 1..20: note = Description of Artificial Sequence: Synthetic oligonucleotide
  misc_feature 1..20: note = Target: SCN10A; (-) strand; PAM type: YTN; PAM sequence: CTT
  source 1..20: mol_type = other DNA
atcttgtagagttttgtgag

SEQ ID NO: 49109 - DNA, 20 bp, synthetic construct
  misc_feature 1..20: note = Description of Artificial Sequence: Synthetic oligonucleotide
  misc_feature 1..20: note = Target: SCN10A; (-) strand; PAM type: YTN; PAM sequence: CTG
  source 1..20: mol_type = other DNA
taaagtagtgagaatatact

SEQ ID NO: 49110 - DNA, 20 bp, synthetic construct
  misc_feature 1..20: note = Description of Artificial Sequence: Synthetic oligonucleotide
  misc_feature 1..20: note = Target: SCN10A; (-) strand; PAM type: YTN; PAM sequence: TTA
  source 1..20: mol_type = other DNA
gcctgtaaagtagtgagaat

SEQ ID NO: 49111 - DNA, 20 bp, synthetic construct
  misc_feature 1..20: note = Description of Artificial Sequence: Synthetic oligonucleotide
  misc_feature 1..20: note = Target: SCN10A; (-) strand; PAM type: YTN; PAM sequence: TTT
  source 1..20: mol_type = other DNA
agcctgtaaagtagtgagaa

SEQ ID NO: 49112 - DNA, 20 bp, synthetic construct
  misc_feature 1..20: note = Description of Artificial Sequence: Synthetic oligonucleotide
  misc_feature 1..20: note = Target: SCN10A; (-) strand; PAM type: YTN; PAM sequence: TTT
  source 1..20: mol_type = other DNA
tagcctgtaaagtagtgaga

SEQ ID NO: 49113 - DNA, 20 bp, synthetic construct
  misc_feature 1..20: note = Description of Artificial Sequence: Synthetic oligonucleotide
  misc_feature 1..20: note = Target: SCN10A; (-) strand; PAM type: YTN; PAM sequence: TTT
  source 1..20: mol_type = other DNA
ttagcctgtaaagtagtgag

SEQ ID NO: 49114 - DNA, 20 bp, synthetic construct
  misc_feature 1..20: note = Description of Artificial Sequence: Synthetic oligonucleotide
  misc_feature 1..20: note = Target: SCN10A; (-) strand; PAM type: YTN; PAM sequence: CTC
  source 1..20: mol_type = other DNA
agatttttagcctgtaaagt

SEQ ID NO: 49115 - DNA, 20 bp, synthetic construct
  misc_feature 1..20: note = Description of Artificial Sequence: Synthetic oligonucleotide
  misc_feature 1..20: note = Target: SCN10A; (-) strand; PAM type: YTN; PAM sequence: CTG
  source 1..20: mol_type = other DNA
tgcctcagatttttagcctg

SEQ ID NO: 49116 - DNA, 20 bp, synthetic construct
  misc_feature 1..20: note = Description of Artificial Sequence: Synthetic oligonucleotide
  misc_feature 1..20: note = Target: SCN10A; (-) strand; PAM type: YTN; PAM sequence: TTC
  source 1..20: mol_type = other DNA
tgtgcctcagatttttagcc

SEQ ID NO: 49117 - DNA, 20 bp, synthetic construct
  misc_feature 1..20: note = Description of Artificial Sequence: Synthetic oligonucleotide
  misc_feature 1..20: note = Target: SCN10A; (-) strand; PAM type: YTN; PAM sequence: TTT
  source 1..20: mol_type = other DNA
ctgtgcctcagatttttagc

SEQ ID NO: 49118 - DNA, 20 bp, synthetic construct
  misc_feature 1..20: note = Description of Artificial Sequence: Synthetic oligonucleotide
  misc_feature 1..20: note = Target: SCN10A; (-) strand; PAM type: YTN; PAM sequence: TTT
  source 1..20: mol_type = other DNA
tctgtgcctcagatttttag

SEQ ID NO: 49119 - DNA, 20 bp, synthetic construct
  misc_feature 1..20: note = Description of Artificial Sequence: Synthetic oligonucleotide
  misc_feature 1..20: note = Target: SCN10A; (-) strand; PAM type: YTN; PAM sequence: CTT
  source 1..20: mol_type = other DNA
ttctgtgcctcagattttta

SEQ ID NO: 49120 - DNA, 20 bp, synthetic construct
  misc_feature 1..20: note = Description of Artificial Sequence: Synthetic oligonucleotide
  misc_feature 1..20: note = Target: SCN10A; (-) strand; PAM type: YTN; PAM sequence: TTC
  source 1..20: mol_type = other DNA
agtaacttttctgtgcctca

SEQ ID NO: 49121 - DNA, 20 bp, synthetic construct
  misc_feature 1..20: note = Description of Artificial Sequence: Synthetic oligonucleotide
  misc_feature 1..20: note = Target: SCN10A; (-) strand; PAM type: YTN; PAM sequence: CTT
  source 1..20: mol_type = other DNA
cagtaacttttctgtgcctc

SEQ ID NO: 49122 - DNA, 20 bp, synthetic construct
  misc_feature 1..20: note = Description of Artificial Sequence: Synthetic oligonucleotide
  misc_feature 1..20: note = Target: SCN10A; (-) strand; PAM type: YTN; PAM sequence: TTG
  source 1..20: mol_type = other DNA
gagcttcagtaacttttctg

SEQ ID NO: 49123 - DNA, 20 bp, synthetic construct
  misc_feature 1..20: note = Description of Artificial Sequence: Synthetic oligonucleotide
  misc_feature 1..20: note = Target: SCN10A; (-) strand; PAM type: YTN; PAM sequence: CTT
  source 1..20: mol_type = other DNA
ggagcttcagtaacttttct

SEQ ID NO: 49124 - DNA, 20 bp, synthetic construct
  misc_feature 1..20: note = Description of Artificial Sequence: Synthetic oligonucleotide
  misc_feature 1..20: note = Target: SCN10A; (-) strand; PAM type: YTN; PAM sequence: TTA
  source 1..20: mol_type = other DNA
tggtacacagtgtgaccttg

SEQ ID NO: 49125 - DNA, 20 bp, synthetic construct
  misc_feature 1..20: note = Description of Artificial Sequence: Synthetic oligonucleotide
  misc_feature 1..20: note = Target: SCN10A; (-) strand; PAM type: YTN; PAM sequence: CTT
  source 1..20: mol_type = other DNA
atggtacacagtgtgacctt

SEQ ID NO: 49126 - DNA, 20 bp, synthetic construct
  misc_feature 1..20: note = Description of Artificial Sequence: Synthetic oligonucleotide
  misc_feature 1..20: note = Target: SCN10A; (-) strand; PAM type: YTN; PAM sequence: TTC
  source 1..20: mol_type = other DNA
cacttatggtacacagtgtg

SEQ ID NO: 49127 - DNA, 20 bp, synthetic construct
  misc_feature 1..20: note = Description of Artificial Sequence: Synthetic oligonucleotide
  misc_feature 1..20: note = Target: SCN10A; (-) strand; PAM type: YTN; PAM sequence: CTT
  source 1..20: mol_type = other DNA
ccacttatggtacacagtgt

SEQ ID NO: 49128 - DNA, 20 bp, synthetic construct
  misc_feature 1..20: note = Description of Artificial Sequence: Synthetic oligonucleotide
  misc_feature 1..20: note = Target: SCN10A; (-) strand; PAM type: YTN; PAM sequence: CTC
  source 1..20: mol_type = other DNA
ttccacttatggtacacagt

SEQ ID NO: 49129 - DNA, 20 bp, synthetic construct
  misc_feature 1..20: note = Description of Artificial Sequence: Synthetic oligonucleotide
  misc_feature 1..20: note = Target: SCN10A; (-) strand; PAM type: YTN; PAM sequence: CTA
  source 1..20: mol_type = other DNA
gctcttccacttatggtaca

SEQ ID NO: 49130 - DNA, 20 bp, synthetic construct
  misc_feature 1..20: note = Description of Artificial Sequence: Synthetic oligonucleotide
  misc_feature 1..20: note = Target: SCN10A; (-) strand; PAM type: YTN; PAM sequence: TTG
  source 1..20: mol_type = other DNA
catcctagctcttccactta

SEQ ID NO: 49131 - DNA, 20 bp, synthetic construct
  misc_feature 1..20: note = Description of Artificial Sequence: Synthetic oligonucleotide
  misc_feature 1..20: note = Target: SCN10A; (-) strand; PAM type: YTN; PAM sequence: TTT
  source 1..20: mol_type = other DNA
gcatcctagctcttccactt

SEQ ID NO: 49132 - DNA, 20 bp, synthetic construct
  misc_feature 1..20: note = Description of Artificial Sequence: Synthetic oligonucleotide
  misc_feature 1..20: note = Target: SCN10A; (-) strand; PAM type: YTN; PAM sequence: CTG
  source 1..20: mol_type = other DNA
ggtttgcatcctagctcttc

SEQ ID NO: 49133 - DNA, 20 bp, synthetic construct
  misc_feature 1..20: note = Description of Artificial Sequence: Synthetic oligonucleotide
  misc_feature 1..20: note = Target: SCN10A; (-) strand; PAM type: YTN; PAM sequence: CTG
  source 1..20: mol_type = other DNA
cctgggtttgcatcctagct

SEQ ID NO: 49134 - DNA, 20 bp, synthetic construct
  misc_feature 1..20: note = Description of Artificial Sequence: Synthetic oligonucleotide
  misc_feature 1..20: note = Target: SCN10A; (-) strand; PAM type: YTN; PAM sequence: CTG
  source 1..20: mol_type = other DNA
gaacccggctgcctgggttt

SEQ ID NO: 49135 - DNA, 20 bp, synthetic construct
  misc_feature 1..20: note = Description of Artificial Sequence: Synthetic oligonucleotide
  misc_feature 1..20: note = Target: SCN10A; (-) strand; PAM type: YTN; PAM sequence: CTC
  source 1..20: mol_type = other DNA
tggaacccggctgcctgggt

SEQ ID NO: 49136 - DNA, 20 bp, synthetic construct
  misc_feature 1..20: note = Description of Artificial Sequence: Synthetic oligonucleotide
  misc_feature 1..20: note = Target: SCN10A; (-) strand; PAM type: YTN; PAM sequence: CTG
  source 1..20: mol_type = other DNA
ctctggaacccggctgcctg

SEQ ID NO: 49137 - DNA, 20 bp, synthetic construct
  misc_feature 1..20: note = Description of Artificial Sequence: Synthetic oligonucleotide
  misc_feature 1..20: note = Target: SCN10A; (-) strand; PAM type: YTN; PAM sequence: TTA
  source 1..20: mol_type = other DNA
gaacactgctctggaacccg

SEQ ID NO: 49138 - DNA, 20 bp, synthetic construct
  misc_feature 1..20: note = Description of Artificial Sequence: Synthetic oligonucleotide
  misc_feature 1..20: note = Target: SCN10A; (-) strand; PAM type: YTN; PAM sequence: CTG
  source 1..20: mol_type = other DNA
caagaatgagatagcaacaa

SEQ ID NO: 49139 - DNA, 20 bp, synthetic construct
  misc_feature 1..20: note = Description of Artificial Sequence: Synthetic oligonucleotide
  misc_feature 1..20: note = Target: SCN10A; (-) strand; PAM type: YTN; PAM sequence: TTC
  source 1..20: mol_type = other DNA
tgcaagaatgagatagcaac

SEQ ID NO: 49140 - DNA, 20 bp, synthetic construct
  misc_feature 1..20: note = Description of Artificial Sequence: Synthetic oligonucleotide
  misc_feature 1..20: note = Target: SCN10A; (-) strand; PAM type: YTN; PAM sequence: TTC
  source 1..20: mol_type = other DNA
gcagacacaaatagcaagta

SEQ ID NO: 49141 - DNA, 20 bp, synthetic construct
  misc_feature 1..20: note = Description of Artificial Sequence: Synthetic oligonucleotide
  misc_feature 1..20: note = Target: SCN10A; (-) strand; PAM type: YTN; PAM sequence: CTG
  source 1..20: mol_type = other DNA
aggagaaagttcgcagacac

SEQ ID NO: 49142 - DNA, 20 bp, synthetic construct
  misc_feature 1..20: note = Description of Artificial Sequence: Synthetic oligonucleotide
  misc_feature 1..20: note = Target: SCN10A; (-) strand; PAM type: YTN; PAM sequence: CTA
  source 1..20: mol_type = other DNA
tgtaagaagctgaggagaaa

SEQ ID NO: 49143 - DNA, 20 bp, synthetic construct
  misc_feature 1..20: note = Description of Artificial Sequence: Synthetic oligonucleotide
  misc_feature 1..20: note = Target: SCN10A; (-) strand; PAM type: YTN; PAM sequence: TTA
  source 1..20: mol_type = other DNA
aataaaggaatcagctatgt

SEQ ID NO: 49144 - DNA, 20 bp, synthetic construct
  misc_feature 1..20: note = Description of Artificial Sequence: Synthetic oligonucleotide
  misc_feature 1..20: note = Target: SCN10A; (-) strand; PAM type: YTN; PAM sequence: TTG
  source 1..20: mol_type = other DNA
aattaaataaaggaatcagc

SEQ ID NO: 49145 - DNA, 20 bp, synthetic construct
  misc_feature 1..20: note = Description of Artificial Sequence: Synthetic oligonucleotide
  misc_feature 1..20: note = Target: SCN10A; (-) strand; PAM type: YTN; PAM sequence: TTT
  source 1..20: mol_type = other DNA
gaattaaataaaggaatcag

SEQ ID NO: 49146 - DNA, 20 bp, synthetic construct
  misc_feature 1..20: note = Description of Artificial Sequence: Synthetic oligonucleotide
  misc_feature 1..20: note = Target: SCN10A; (-) strand; PAM type: YTN; PAM sequence: CTC
  source 1..20: mol_type = other DNA
caagaagaacagaaatttga

SEQ ID NO: 49147 - DNA, 20 bp, synthetic construct
  misc_feature 1..20: note = Description of Artificial Sequence: Synthetic oligonucleotide
  misc_feature 1..20: note = Target: SCN10A; (-) strand; PAM type: YTN; PAM sequence: CTC
  source 1..20: mol_type = other DNA
tccaagaagaacagaaattt

SEQ ID NO: 49148 - DNA, 20 bp, synthetic construct
  misc_feature 1..20: note = Description of Artificial Sequence: Synthetic oligonucleotide
  misc_feature 1..20: note = Target: SCN10A; (-) strand; PAM type: YTN; PAM sequence: TTC
  source 1..20: mol_type = other DNA
tctccaagaagaacagaaat

SEQ ID NO: 49149 - DNA, 20 bp, synthetic construct
  misc_feature 1..20: note = Description of Artificial Sequence: Synthetic oligonucleotide
  misc_feature 1..20: note = Target: SCN10A; (-) strand; PAM type: YTN; PAM sequence: TTC
  source 1..20: mol_type = other DNA
agatataagaagtaggagaa

SEQ ID NO: 49150 - DNA, 20 bp, synthetic construct
  misc_feature 1..20: note = Description of Artificial Sequence: Synthetic oligonucleotide
  misc_feature 1..20: note = Target: SCN10A; (-) strand; PAM type: YTN; PAM sequence: CTA
  source 1..20: mol_type = other DNA
gcagggaaggggacatgaaa

SEQ ID NO: 49151 - DNA, 20 bp, synthetic construct
  misc_feature 1..20: note = Description of Artificial Sequence: Synthetic oligonucleotide
  misc_feature 1..20: note = Target: SCN10A; (-) strand; PAM type: YTN; PAM sequence: CTA
  source 1..20: mol_type = other DNA
catcctagcagggaagggga

SEQ ID NO: 49152 - DNA, 20 bp, synthetic construct
  misc_feature 1..20: note = Description of Artificial Sequence: Synthetic oligonucleotide
  misc_feature 1..20: note = Target: SCN10A; (-) strand; PAM type: YTN; PAM sequence: CTC
  source 1..20: mol_type = other DNA
atggaatctacatcctagca

SEQ ID NO: 49153 - DNA, 20 bp, synthetic construct
  misc_feature 1..20: note = Description of Artificial Sequence: Synthetic oligonucleotide
  misc_feature 1..20: note = Target: SCN10A; (-) strand; PAM type: YTN; PAM sequence: TTG
  source 1..20: mol_type = other DNA
cgctcatggaatctacatcc

SEQ ID NO: 49154 - DNA, 20 bp, synthetic construct
  misc_feature 1..20: note = Description of Artificial Sequence: Synthetic oligonucleotide
  misc_feature 1..20: note = Target: SCN10A; (-) strand; PAM type: YTN; PAM sequence: CTT
  source 1..20: mol_type = other DNA
gcgctcatggaatctacatc

SEQ ID NO: 49155 - DNA, 20 bp, synthetic construct
  misc_feature 1..20: note = Description of Artificial Sequence: Synthetic oligonucleotide
  misc_feature 1..20: note = Target: SCN10A; (-) strand; PAM type: YTN; PAM sequence: CTG
  source 1..20: mol_type = other DNA
atataagcttgcgctcatgg

SEQ ID NO: 49156 - DNA, 20 bp, synthetic construct
  misc_feature 1..20: note = Description of Artificial Sequence: Synthetic oligonucleotide
  misc_feature 1..20: note = Target: SCN10A; (-) strand; PAM type: YTN; PAM sequence: TTC
  source 1..20: mol_type = other DNA
agtggtgaactgatataagc

SEQ ID NO: 49157 - DNA, 20 bp, synthetic construct
  misc_feature 1..20: note = Description of Artificial Sequence: Synthetic oligonucleotide
  misc_feature 1..20: note = Target: SCN10A; (-) strand; PAM type: YTN; PAM sequence: CTG
  source 1..20: mol_type = other DNA
ggattcagtggtgaactgat

SEQ ID NO: 49158 - DNA, 20 bp, synthetic construct
  misc_feature 1..20: note = Description of Artificial Sequence: Synthetic oligonucleotide
  misc_feature 1..20: note = Target: SCN10A; (-) strand; PAM type: YTN; PAM sequence: TTC
  source 1..20: mol_type = other DNA
aggtgctgggattcagtggt

SEQ ID NO: 49159 - DNA, 20 bp, synthetic construct
  misc_feature 1..20: note = Description of Artificial Sequence: Synthetic oligonucleotide
  misc_feature 1..20: note = Target: SCN10A; (-) strand; PAM type: YTN; PAM sequence: CTT
  source 1..20: mol_type = other DNA
caggtgctgggattcagtgg

SEQ ID NO: 49160 - DNA, 20 bp, synthetic construct
  misc_feature 1..20: note = Description of Artificial Sequence: Synthetic oligonucleotide
  misc_feature 1..20: note = Target: SCN10A; (-) strand; PAM type: YTN; PAM sequence: TTG
  source 1..20: mol_type = other DNA
cttcaggtgctgggattcag

SEQ ID NO: 49161 - DNA, 20 bp, synthetic construct
  misc_feature 1..20: note = Description of Artificial Sequence: Synthetic oligonucleotide
  misc_feature 1..20: note = Target: SCN10A; (-) strand; PAM type: YTN; PAM sequence: TTG
  source 1..20: mol_type = other DNA
tgtgtgtggcattgcttcag

SEQ ID NO: 49162 - DNA, 20 bp, synthetic construct
  misc_feature 1..20: note = Description of Artificial Sequence: Synthetic oligonucleotide
  misc_feature 1..20: note = Target: SCN10A; (-) strand; PAM type: YTN; PAM sequence: CTG
  source 1..20: mol_type = other DNA
ttgtgtgtgtggcattgctt

SEQ ID NO: 49163 - DNA, 20 bp, synthetic construct
  misc_feature 1..20: note = Description of Artificial Sequence: Synthetic oligonucleotide
  misc_feature 1..20: note = Target: SCN10A; (-) strand; PAM type: YTN; PAM sequence: TTG
  source 1..20: mol_type = other DNA
agcccctgttgtgtgtgtgg

SEQ ID NO: 49164 - DNA, 20 bp, synthetic construct
  misc_feature 1..20: note = Description of Artificial Sequence: Synthetic oligonucleotide
  misc_feature 1..20: note = Target: SCN10A; (-) strand; PAM type: YTN; PAM sequence: TTG
  source 1..20: mol_type = other DNA
ttgagcccctgttgtgtgtg

SEQ ID NO: 49165 - DNA, 20 bp, synthetic construct
  misc_feature 1..20: note = Description of Artificial Sequence: Synthetic oligonucleotide
  misc_feature 1..20: note = Target: SCN10A; (-) strand; PAM type: YTN; PAM sequence: TTT
  source 1..20: mol_type = other DNA
gttgagcccctgttgtgtgt

SEQ ID NO: 49166 - DNA, 20 bp, synthetic construct
  misc_feature 1..20: note = Description of Artificial Sequence: Synthetic oligonucleotide
  misc_feature 1..20: note = Target: SCN10A; (-) strand; PAM type: YTN; PAM sequence: TTA
  source 1..20: mol_type = other DNA
tcaacaagcatttgttgagc

SEQ ID NO: 49167 - DNA, 20 bp, synthetic construct
  misc_feature 1..20: note = Description of Artificial Sequence: Synthetic oligonucleotide
  misc_feature 1..20: note = Target: SCN10A; (-) strand; PAM type: YTN; PAM sequence: CTT
  source 1..20: mol_type = other DNA
atcaacaagcatttgttgag

SEQ ID NO: 49168 - DNA, 20 bp, synthetic construct
  misc_feature 1..20: note = Description of Artificial Sequence: Synthetic oligonucleotide
  misc_feature 1..20: note = Target: SCN10A; (-) strand; PAM type: YTN; PAM sequence: CTC
  source 1..20: mol_type = other DNA
ttatcaacaagcatttgttg

SEQ ID NO: 49169 - DNA, 20 bp, synthetic construct
  misc_feature 1..20: note = Description of Artificial Sequence: Synthetic oligonucleotide
  misc_feature 1..20: note = Target: SCN10A; (-) strand; PAM type: YTN; PAM sequence: TTC
  source 1..20: mol_type = other DNA
tcttatcaacaagcatttgt

SEQ ID NO: 49170 - DNA, 20 bp, synthetic construct
  misc_feature 1..20: note = Description of Artificial Sequence: Synthetic oligonucleotide
  misc_feature 1..20: note = Target: SCN10A; (-) strand; PAM type: YTN; PAM sequence: TTA
  source 1..20: mol_type = other DNA
ttctcttatcaacaagcatt

SEQ ID NO: 49171 - DNA, 20 bp, synthetic construct
  misc_feature 1..20: note = Description of Artificial Sequence: Synthetic oligonucleotide
  misc_feature 1..20: note = Target: SCN10A; (-) strand; PAM type: YTN; PAM sequence: TTT
  source 1..20: mol_type = other DNA
attctcttatcaacaagcat

SEQ ID NO: 49172 - DNA, 20 bp, synthetic construct
  misc_feature 1..20: note = Description of Artificial Sequence: Synthetic oligonucleotide
  misc_feature 1..20: note = Target: SCN10A; (-) strand; PAM type: YTN; PAM sequence: TTC
  source 1..20: mol_type = other DNA
atttattctcttatcaacaa

SEQ ID NO: 49173 - DNA, 20 bp, synthetic construct
  misc_feature 1..20: note = Description of Artificial Sequence: Synthetic oligonucleotide
  misc_feature 1..20: note = Target: SCN10A; (-) strand; PAM type: YTN; PAM sequence: TTT
  source 1..20: mol_type = other DNA
catttattctcttatcaaca

SEQ ID NO: 49174 - DNA, 20 bp, synthetic construct
  misc_feature 1..20: note = Description of Artificial Sequence: Synthetic oligonucleotide
  misc_feature 1..20: note = Target: SCN10A; (-) strand; PAM type: YTN; PAM sequence: CTT
  source 1..20: mol_type = other DNA
tcatttattctcttatcaac

SEQ ID NO: 49175 - DNA, 20 bp, synthetic construct
  misc_feature 1..20: note = Description of Artificial Sequence: Synthetic oligonucleotide
  misc_feature 1..20: note = Target: SCN10A; (-) strand; PAM type: YTN; PAM sequence: TTC
  source 1..20: mol_type = other DNA
tttcatttattctcttatca

SEQ ID NO: 49176 - DNA, 20 bp, synthetic construct
  misc_feature 1..20: note = Description of Artificial Sequence: Synthetic oligonucleotide
  misc_feature 1..20: note = Target: SCN10A; (-) strand; PAM type: YTN; PAM sequence: CTT
  source 1..20: mol_type = other DNA
ctttcatttattctcttatc

SEQ ID NO: 49177 - DNA, 20 bp, synthetic construct
  misc_feature 1..20: note = Description of Artificial Sequence: Synthetic oligonucleotide
  misc_feature 1..20: note = Target: SCN10A; (-) strand; PAM type: YTN; PAM sequence: CTC
  source 1..20: mol_type = other DNA
ttctttcatttattctctta

SEQ ID NO: 49178 - DNA, 20 bp, synthetic construct
  misc_feature 1..20: note = Description of Artificial Sequence: Synthetic oligonucleotide
  misc_feature 1..20: note = Target: SCN10A; (-) strand; PAM type: YTN; PAM sequence: CTC
  source 1..20: mol_type = other DNA
tcttctttcatttattctct

SEQ ID NO: 49179 - DNA, 20 bp, synthetic construct
  misc_feature 1..20: note = Description of Artificial Sequence: Synthetic oligonucleotide
  misc_feature 1..20: note = Target: SCN10A; (-) strand; PAM type: YTN; PAM sequence: TTC
  source 1..20: mol_type = other DNA
tctcttctttcatttattct

SEQ ID NO: 49180 - DNA, 20 bp, synthetic construct
  misc_feature 1..20: note = Description of Artificial Sequence: Synthetic oligonucleotide
  misc_feature 1..20: note = Target: SCN10A; (-) strand; PAM type: YTN; PAM sequence: CTT
  source 1..20: mol_type = other DNA
ctctcttctttcatttattc

SEQ ID NO: 49181 - DNA, 20 bp, synthetic construct
  misc_feature 1..20: note = Description of Artificial Sequence: Synthetic oligonucleotide
  misc_feature 1..20: note = Target: SCN10A; (-) strand; PAM type: YTN; PAM sequence: CTC
  source 1..20: mol_type = other DNA
cttctctcttctttcattta

SEQ ID NO: 49182 - DNA, 20 bp, synthetic construct
  misc_feature 1..20: note = Description of Artificial Sequence: Synthetic oligonucleotide
  misc_feature 1..20: note = Target: SCN10A; (-) strand; PAM type: YTN; PAM sequence: TTC
  source 1..20: mol_type = other DNA
ctccttctctcttctttcat

SEQ ID NO: 49183 - DNA, 20 bp, synthetic construct
  misc_feature 1..20: note = Description of Artificial Sequence: Synthetic oligonucleotide
  misc_feature 1..20: note = Target: SCN10A; (-) strand; PAM type: YTN; PAM sequence: CTT
  source 1..20: mol_type = other DNA
cctccttctctcttctttca

SEQ ID NO: 49184 - DNA, 20 bp, synthetic construct
  misc_feature 1..20: note = Description of Artificial Sequence: Synthetic oligonucleotide
  misc_feature 1..20: note = Target: SCN10A; (-) strand; PAM type: YTN; PAM sequence: TTA
  source 1..20: mol_type = other DNA
agcttcctccttctctcttc

SEQ ID NO: 49185 - DNA, 20 bp, synthetic construct
  misc_feature 1..20: note = Description of Artificial Sequence: Synthetic oligonucleotide
  misc_feature 1..20: note = Target: SCN10A; (-) strand; PAM type: YTN; PAM sequence: CTG
  source 1..20: mol_type = other DNA
ttaagcttcctccttctctc

SEQ ID NO: 49186 - DNA, 20 bp, synthetic construct
  misc_feature 1..20: note = Description of Artificial Sequence: Synthetic oligonucleotide
  misc_feature 1..20: note = Target: SCN10A; (-) strand; PAM type: YTN; PAM sequence: CTC
  source 1..20: mol_type = other DNA
gaaaactgttaagcttcctc

SEQ ID NO: 49187 - DNA, 20 bp, synthetic construct
  misc_feature 1..20: note = Description of Artificial Sequence: Synthetic oligonucleotide
  misc_feature 1..20: note = Target: SCN10A; (-) strand; PAM type: YTN; PAM sequence: TTC
  source 1..20: mol_type = other DNA
tcgaaaactgttaagcttcc

SEQ ID NO: 49188 - DNA, 20 bp, synthetic construct
  misc_feature 1..20: note = Description of Artificial Sequence: Synthetic oligonucleotide
  misc_feature 1..20: note = Target: SCN10A; (-) strand; PAM type: YTN; PAM sequence: TTA
  source 1..20: mol_type = other DNA
ttctcgaaaactgttaagct

SEQ ID NO: 49189 - DNA, 20 bp, synthetic construct
  misc_feature 1..20: note = Description of Artificial Sequence: Synthetic oligonucleotide
  misc_feature 1..20: note = Target: SCN10A; (-) strand; PAM type: YTN; PAM sequence: TTT
  source 1..20: mol_type = other DNA
attctcgaaaactgttaagc

SEQ ID NO: 49190 - DNA, 20 bp, synthetic construct
  misc_feature 1..20: note = Description of Artificial Sequence: Synthetic oligonucleotide
  misc_feature 1..20: note = Target: SCN10A; (-) strand; PAM type: YTN; PAM sequence: TTC
  source 1..20: mol_type = other DNA
atttattctcgaaaactgtt

SEQ ID NO: 49191 - DNA, 20 bp, synthetic construct
  misc_feature 1..20: note = Description of Artificial Sequence: Synthetic oligonucleotide
  misc_feature 1..20: note = Target: SCN10A; (-) strand; PAM type: YTN; PAM sequence: TTT
  source 1..20: mol_type = other DNA
catttattctcgaaaactgt

SEQ ID NO: 49192 - DNA, 20 bp, synthetic construct
  misc_feature 1..20: note = Description of Artificial Sequence: Synthetic oligonucleotide
  misc_feature 1..20: note = Target: SCN10A; (-) strand; PAM type: YTN; PAM sequence: TTT
  source 1..20: mol_type = other DNA
tcatttattctcgaaaactg

SEQ ID NO: 49193 - DNA, 20 bp, synthetic construct
  misc_feature 1..20: note = Description of Artificial Sequence: Synthetic oligonucleotide
  misc_feature 1..20: note = Target: SCN10A; (-) strand; PAM type: YTN; PAM sequence: TTT
  source 1..20: mol_type = other DNA
ttcatttattctcgaaaact

SEQ ID NO: 49194 - DNA, 20 bp, synthetic construct
  misc_feature 1..20: note = Description of Artificial Sequence: Synthetic oligonucleotide
  misc_feature 1..20: note = Target: SCN10A; (-) strand; PAM type: YTN; PAM sequence: TTT
  source 1..20: mol_type = other DNA
tttcatttattctcgaaaac

SEQ ID NO: 49195 - DNA, 20 bp, synthetic construct
  misc_feature 1..20: note = Description of Artificial Sequence: Synthetic oligonucleotide
  misc_feature 1..20: note = Target: SCN10A; (-) strand; PAM type: YTN; PAM sequence: TTT
  source 1..20: mol_type = other DNA
ttttcatttattctcgaaaa

SEQ ID NO: 49196 - DNA, 20 bp, synthetic construct
  misc_feature 1..20: note = Description of Artificial Sequence: Synthetic oligonucleotide
  misc_feature 1..20: note = Target: SCN10A; (-) strand; PAM type: YTN; PAM sequence: TTG
  source 1..20: mol_type = other DNA
tttttttcatttattctcga

SEQ ID NO: 49197 - DNA, 20 bp, synthetic construct
  misc_feature 1..20: note = Description of Artificial Sequence: Synthetic oligonucleotide
  misc_feature 1..20: note = Target: SCN10A; (-) strand; PAM type: YTN; PAM sequence: TTT
  source 1..20: mol_type = other DNA
gtttttttcatttattctcg

SEQ ID NO: 49198 - DNA, 20 bp, synthetic construct
  misc_feature 1..20: note = Description of Artificial Sequence: Synthetic oligonucleotide
  misc_feature 1..20: note = Target: SCN10A; (-) strand; PAM type: YTN; PAM sequence: TTG
  source 1..20: mol_type = other DNA
aatacaaacagtttgttttt

SEQ ID NO: 49199 - DNA, 20 bp, synthetic construct
  misc_feature 1..20: note = Description of Artificial Sequence: Synthetic oligonucleotide
  misc_feature 1..20: note = Target: SCN10A; (-) strand; PAM type: YTN; PAM sequence: TTA
  source 1..20: mol_type = other DNA
gtcatcaaacagcaaacatt

SEQ ID NO: 49200 - DNA, 20 bp, synthetic construct
  misc_feature 1..20: note = Description of Artificial Sequence: Synthetic oligonucleotide
  misc_feature 1..20: note = Target: SCN10A; (-) strand; PAM type: YTN; PAM sequence: CTA
  source 1..20: mol_type = other DNA
ttagtcatcaaacagcaaac

SEQ ID NO: 49201 - DNA, 20 bp, synthetic construct
  misc_feature 1..20: note = Description of Artificial Sequence: Synthetic oligonucleotide
  misc_feature 1..20: note = Target: SCN10A; (-) strand; PAM type: YTN; PAM sequence: TTG
  source 1..20: mol_type = other DNA
ctattagtcatcaaacagca

SEQ ID NO: 49202 - DNA, 20 bp, synthetic construct
  misc_feature 1..20: note = Description of Artificial Sequence: Synthetic oligonucleotide
  misc_feature 1..20: note = Target: SCN10A; (-) strand; PAM type: YTN; PAM sequence: TTT
  source 1..20: mol_type = other DNA
gctattagtcatcaaacagc

SEQ ID NO: 49203 - DNA, 20 bp, synthetic construct
  misc_feature 1..20: note = Description of Artificial Sequence: Synthetic oligonucleotide
  misc_feature 1..20: note = Target: SCN10A; (-) strand; PAM type: YTN; PAM sequence: TTT
  source 1..20: mol_type = other DNA
tgctattagtcatcaaacag

SEQ ID NO: 49204 - DNA, 20 bp, synthetic construct
  misc_feature 1..20: note = Description of Artificial Sequence: Synthetic oligonucleotide
  misc_feature 1..20: note = Target: SCN10A; (-) strand; PAM type: YTN; PAM sequence: TTG
  source 1..20: mol_type = other DNA
ttttgctattagtcatcaaa

SEQ ID NO: 49205 - DNA, 20 bp, synthetic construct
  misc_feature 1..20: note = Description of Artificial Sequence: Synthetic oligonucleotide
  misc_feature 1..20: note = Target: SCN10A; (-) strand; PAM type: YTN; PAM sequence: TTT
  source 1..20: mol_type = other DNA
gttttgctattagtcatcaa

SEQ ID NO: 49206 - DNA, 20 bp, synthetic construct
  misc_feature 1..20: note = Description of Artificial Sequence: Synthetic oligonucleotide
  misc_feature 1..20: note = Target: SCN10A; (-) strand; PAM type: YTN; PAM sequence: TTT
  source 1..20: mol_type = other DNA
tgttttgctattagtcatca

SEQ ID NO: 49207 - DNA, 20 bp, synthetic construct
  misc_feature 1..20: note = Description of Artificial Sequence: Synthetic oligonucleotide
  misc_feature 1..20: note = Target: SCN10A; (-) strand; PAM type: YTN; PAM sequence: TTT
  source 1..20: mol_type = other DNA
ttgttttgctattagtcatc

SEQ ID NO: 49208 - DNA, 20 bp, synthetic construct
  misc_feature 1..20: note = Description of Artificial Sequence: Synthetic oligonucleotide
  misc_feature 1..20: note = Target: SCN10A; (-) strand; PAM type: YTN; PAM sequence: TTG
  source 1..20: mol_type = other DNA
gtttttgttttgctattagt

SEQ ID NO: 49209 - DNA, 20 bp, synthetic construct
  misc_feature 1..20: note = Description of Artificial Sequence: Synthetic oligonucleotide
  misc_feature 1..20: note = Target: SCN10A; (-) strand; PAM type: YTN; PAM sequence: TTT
  source 1..20: mol_type = other DNA
ggtttttgttttgctattag

SEQ ID NO: 49210 - DNA, 20 bp, synthetic construct
  misc_feature 1..20: note = Description of Artificial Sequence: Synthetic oligonucleotide
  misc_feature 1..20: note = Target: SCN10A; (-) strand; PAM type: YTN; PAM sequence: TTT
  source 1..20: mol_type = other DNA
tggtttttgttttgctatta

SEQ ID NO: 49211 - DNA, 20 bp, synthetic construct
  misc_feature 1..20: note = Description of Artificial Sequence: Synthetic oligonucleotide
  misc_feature 1..20: note = Target: SCN10A; (-) strand; PAM type: YTN; PAM sequence: TTG
  source 1..20: mol_type = other DNA
ttttggtttttgttttgcta

SEQ ID NO: 49212 - DNA, 20 bp, synthetic construct
  misc_feature 1..20: note = Description of Artificial Sequence: Synthetic oligonucleotide
  misc_feature 1..20: note = Target: SCN10A; (-) strand; PAM type: YTN; PAM sequence: TTT
  source 1..20: mol_type = other DNA
gttttggtttttgttttgct

SEQ ID NO: 49213 - DNA, 20 bp, synthetic construct
  misc_feature 1..20: note = Description of Artificial Sequence: Synthetic oligonucleotide
  misc_feature 1..20: note = Target: SCN10A; (-) strand; PAM type: YTN; PAM sequence: TTG
  source 1..20: mol_type = other DNA
tttgttttggtttttgtttt

SEQ ID NO: 49214 - DNA, 20 bp, synthetic construct
  misc_feature 1..20: note = Description of Artificial Sequence: Synthetic oligonucleotide
  misc_feature 1..20: note = Target: SCN10A; (-) strand; PAM type: YTN; PAM sequence: TTT
  source 1..20: mol_type = other DNA
gtttgttttggtttttgttt

SEQ ID NO: 49215 - DNA, 20 bp, synthetic construct
  misc_feature 1..20: note = Description of Artificial Sequence: Synthetic oligonucleotide
  misc_feature 1..20: note = Target: SCN10A; (-) strand; PAM type: YTN; PAM sequence: TTG
  source 1..20: mol_type = other DNA
tttgtttgttttggtttttg

SEQ ID NO: 49216 - DNA, 20 bp, synthetic construct
  misc_feature 1..20: note = Description of Artificial Sequence: Synthetic oligonucleotide
  misc_feature 1..20: note = Target: SCN10A; (-) strand; PAM type: YTN; PAM sequence: TTT
  source 1..20: mol_type = other DNA
gtttgtttgttttggttttt

SEQ ID NO: 49217 - DNA, 20 bp, synthetic construct
  misc_feature 1..20: note = Description of Artificial Sequence: Synthetic oligonucleotide
  misc_feature 1..20: note = Target: SCN10A; (-) strand; PAM type: YTN; PAM sequence: TTT
  source 1..20: mol_type = other DNA
tgtttgtttgttttggtttt

SEQ ID NO: 49218 - DNA, 20 bp, synthetic construct
  misc_feature 1..20: note = Description of Artificial Sequence: Synthetic oligonucleotide
  misc_feature 1..20: note = Target: SCN10A; (-) strand; PAM type: YTN; PAM sequence: TTT
  source 1..20: mol_type = other DNA
ttgtttgtttgttttggttt

SEQ ID NO: 49219 - DNA, 20 bp, synthetic construct
  misc_feature 1..20: note = Description of Artificial Sequence: Synthetic oligonucleotide
  misc_feature 1..20: note = Target: SCN10A; (-) strand; PAM type: YTN; PAM sequence: TTG
  source 1..20: mol_type = other DNA
gtttttgtttgtttgttttg

SEQ ID NO: 49220 - DNA, 20 bp, synthetic construct
  misc_feature 1..20: note = Description of Artificial Sequence: Synthetic oligonucleotide
  misc_feature 1..20: note = Target: SCN10A; (-) strand; PAM type: YTN; PAM sequence: CTT
  source 1..20: mol_type = other DNA
ggtttttgtttgtttgtttt

SEQ ID NO: 49221 - DNA, 20 bp, synthetic construct
  misc_feature 1..20: note = Description of Artificial Sequence: Synthetic oligonucleotide
  misc_feature 1..20: note = Target: SCN10A; (-) strand; PAM type: YTN; PAM sequence: TTC
  source 1..20: mol_type = other DNA
ttggtttttgtttgtttgtt

SEQ ID NO: 49222 - DNA, 20 bp, synthetic construct
  misc_feature 1..20: note = Description of Artificial Sequence: Synthetic oligonucleotide
  misc_feature 1..20: note = Target: SCN10A; (-) strand; PAM type: YTN; PAM sequence: TTT
  source 1..20: mol_type = other DNA
cttggtttttgtttgtttgt

SEQ ID NO: 49223 - DNA, 20 bp, synthetic construct
  misc_feature 1..20: note = Description of Artificial Sequence: Synthetic oligonucleotide
  misc_feature 1..20: note = Target: SCN10A; (-) strand; PAM type: YTN; PAM sequence: TTG
  source 1..20: mol_type = other DNA
gccagataggtttcttggtt

SEQ ID NO: 49224 - DNA, 20 bp, synthetic construct
  misc_feature 1..20: note = Description of Artificial Sequence: Synthetic oligonucleotide
  misc_feature 1..20: note = Target: SCN10A; (-) strand; PAM type: YTN; PAM sequence: CTT
  source 1..20: mol_type = other DNA
ggccagataggtttcttggt

SEQ ID NO: 49225 - DNA, 20 bp, synthetic construct
  misc_feature 1..20: note = Description of Artificial Sequence: Synthetic oligonucleotide
  misc_feature 1..20: note = Target: SCN10A; (-) strand; PAM type: YTN; PAM sequence: TTC
  source 1..20: mol_type = other DNA
ttggccagataggtttcttg

SEQ ID NO: 49226 - DNA, 20 bp, synthetic construct
  misc_feature 1..20: note = Description of Artificial Sequence: Synthetic oligonucleotide
  misc_feature 1..20: note = Target: SCN10A; (-) strand; PAM type: YTN; PAM sequence: TTT
  source 1..20: mol_type = other DNA
cttggccagataggtttctt

SEQ ID NO: 49227 - DNA, 20 bp, synthetic construct
  misc_feature 1..20: note = Description of Artificial Sequence: Synthetic oligonucleotide
  misc_feature 1..20: note = Target: SCN10A; (-) strand; PAM type: YTN; PAM sequence: CTT
  source 1..20: mol_type = other DNA
tcttggccagataggtttct

SEQ ID NO: 49228 - DNA, 20 bp, synthetic construct
  misc_feature 1..20: note = Description of Artificial Sequence: Synthetic oligonucleotide
  misc_feature 1..20: note = Target: SCN10A; (-) strand; PAM type: YTN; PAM sequence: TTC
  source 1..20: mol_type = other DNA
tttcttggccagataggttt

SEQ ID NO: 49229 - DNA, 20 bp, synthetic construct
  misc_feature 1..20: note = Description of Artificial Sequence: Synthetic oligonucleotide
  misc_feature 1..20: note = Target: SCN10A; (-) strand; PAM type: YTN; PAM sequence: TTT
  source 1..20: mol_type = other DNA
ctttcttggccagataggtt

SEQ ID NO: 49230 - DNA, 20 bp, synthetic construct
  misc_feature 1..20: note = Description of Artificial Sequence: Synthetic oligonucleotide
  misc_feature 1..20: note = Target: SCN10A; (-) strand; PAM type: YTN; PAM sequence: TTC
  source 1..20: mol_type = other DNA
ccacaatttctttcttggcc

SEQ ID NO: 49231 - DNA, 20 bp, synthetic construct
  misc_feature 1..20: note = Description of Artificial Sequence: Synthetic oligonucleotide
  misc_feature 1..20: note = Target: SCN10A; (-) strand; PAM type: YTN; PAM sequence: CTA
  source 1..20: mol_type = other DNA
ttcccacaatttctttcttg

SEQ ID NO: 49232 - DNA, 20 bp, synthetic construct
  misc_feature 1..20: note = Description of Artificial Sequence: Synthetic oligonucleotide
  misc_feature 1..20: note = Target: SCN10A; (-) strand; PAM type: YTN; PAM sequence: CTG
  source 1..20: mol_type = other DNA
ctattcccacaatttctttc

SEQ ID NO: 49233 - DNA, 20 bp, synthetic construct
  misc_feature 1..20: note = Description of Artificial Sequence: Synthetic oligonucleotide
  misc_feature 1..20: note = Target: SCN10A; (-) strand; PAM type: YTN; PAM sequence: TTG
  source 1..20: mol_type = other DNA
accaagctgctattcccaca

SEQ ID NO: 49234 - DNA, 20 bp, synthetic construct
  misc_feature 1..20: note = Description of Artificial Sequence: Synthetic oligonucleotide
  misc_feature 1..20: note = Target: SCN10A; (-) strand; PAM type: YTN; PAM sequence: TTT
  source 1..20: mol_type = other DNA
gaccaagctgctattcccac

SEQ ID NO: 49235 - DNA, 20 bp, synthetic construct
  misc_feature 1..20: note = Description of Artificial Sequence: Synthetic oligonucleotide
  misc_feature 1..20: note = Target: SCN10A; (-) strand; PAM type: YTN; PAM sequence: TTC
  source 1..20: mol_type = other DNA
atggcatagaatttgaccaa

SEQ ID NO: 49236 - DNA, 20 bp, synthetic construct
  misc_feature 1..20: note = Description of Artificial Sequence: Synthetic oligonucleotide
  misc_feature 1..20: note = Target: SCN10A; (-) strand; PAM type: YTN; PAM sequence: TTT
  source 1..20: mol_type = other DNA
catggcatagaatttgacca

SEQ ID NO: 49237 - DNA, 20 bp, synthetic construct
  misc_feature 1..20: note = Description of Artificial Sequence: Synthetic oligonucleotide
  misc_feature 1..20: note = Target: SCN10A; (-) strand; PAM type: YTN; PAM sequence: TTT
  source 1..20: mol_type = other DNA
tcatggcatagaatttgacc

SEQ ID NO: 49238 - DNA, 20 bp, synthetic construct
  misc_feature 1..20: note = Description of Artificial Sequence: Synthetic oligonucleotide
  misc_feature 1..20: note = Target: SCN10A; (-) strand; PAM type: YTN; PAM sequence: TTT
  source 1..20: mol_type = other DNA
ttcatggcatagaatttgac

SEQ ID NO: 49239 - DNA, 20 bp, synthetic construct
  misc_feature 1..20: note = Description of Artificial Sequence: Synthetic oligonucleotide
  misc_feature 1..20: note = Target: SCN10A; (-) strand; PAM type: YTN; PAM sequence: CTA
  source 1..20: mol_type = other DNA
acatttttcatggcatagaa

SEQ ID NO: 49240 - DNA, 20 bp, synthetic construct
  misc_feature 1..20: note = Description of Artificial Sequence: Synthetic oligonucleotide
  misc_feature 1..20: note = Target: SCN10A; (-) strand; PAM type: YTN; PAM sequence: TTC
  source 1..20: mol_type = other DNA
taacatttttcatggcatag

SEQ ID NO: 49241 - DNA, 20 bp, synthetic construct
  misc_feature 1..20: note = Description of Artificial Sequence: Synthetic oligonucleotide
  misc_feature 1..20: note = Target: SCN10A; (-) strand; PAM type: YTN; PAM sequence: CTT
  source 1..20: mol_type = other DNA
ctaacatttttcatggcata

SEQ ID NO: 49242 - DNA, 20 bp, synthetic construct
  misc_feature 1..20: note = Description of Artificial Sequence: Synthetic oligonucleotide
  misc_feature 1..20: note = Target: SCN10A; (-) strand; PAM type: YTN; PAM sequence: CTG
  source 1..20: mol_type = other DNA
tacttctaacatttttcatg

SEQ ID NO: 49243 - DNA, 20 bp, synthetic construct
  misc_feature 1..20: note = Description of Artificial Sequence: Synthetic oligonucleotide
  misc_feature 1..20: note = Target: SCN10A; (-) strand; PAM type: YTN; PAM sequence: TTG
  source 1..20: mol_type = other DNA
taatagagtctgtacttcta

SEQ ID NO: 49244 - DNA, 20 bp, synthetic construct
  misc_feature 1..20: note = Description of Artificial Sequence: Synthetic oligonucleotide
  misc_feature 1..20: note = Target: SCN10A; (-) strand; PAM type: YTN; PAM sequence: TTC
  source 1..20: mol_type = other DNA
attgtaatagagtctgtact

SEQ ID NO: 49245 - DNA, 20 bp, synthetic construct
  misc_feature 1..20: note = Description of Artificial Sequence: Synthetic oligonucleotide
  misc_feature 1..20: note = Target: SCN10A; (-) strand; PAM type: YTN; PAM sequence: CTG
  source 1..20: mol_type = other DNA
ttcattgtaatagagtctgt

SEQ ID NO: 49246 - DNA, 20 bp, synthetic construct
  misc_feature 1..20: note = Description of Artificial Sequence: Synthetic oligonucleotide
  misc_feature 1..20: note = Target: SCN10A; (-) strand; PAM type: YTN; PAM sequence: TTA
  source 1..20: mol_type = other DNA
atatcactgttcattgtaat

SEQ ID NO: 49247 - DNA, 20 bp, synthetic construct
  misc_feature 1..20: note = Description of Artificial Sequence: Synthetic oligonucleotide
  misc_feature 1..20: note = Target: SCN10A; (-) strand; PAM type: YTN; PAM sequence: TTT
  source 1..20: mol_type = other DNA
aatatcactgttcattgtaa

SEQ ID NO: 49248 - DNA, 20 bp, synthetic construct
  misc_feature 1..20: note = Description of Artificial Sequence: Synthetic oligonucleotide
  misc_feature 1..20: note = Target: SCN10A; (-) strand; PAM type: YTN; PAM sequence: TTA
  source 1..20: mol_type = other DNA
tttaatatcactgttcattg

SEQ ID NO: 49249 - DNA, 20 bp, synthetic construct
  misc_feature 1..20: note = Description of Artificial Sequence: Synthetic oligonucleotide
  misc_feature 1..20: note = Target: SCN10A; (-) strand; PAM type: YTN; PAM sequence: TTG
  source 1..20: mol_type = other DNA
ataattatttaatatcactg

SEQ ID NO: 49250 - DNA, 20 bp, synthetic construct
  misc_feature 1..20: note = Description of Artificial Sequence: Synthetic oligonucleotide
  misc_feature 1..20: note = Target: SCN10A; (-) strand; PAM type: YTN; PAM sequence: CTC
  source 1..20: mol_type = other DNA
attgataattatttaatatc

SEQ ID NO: 49251 - DNA, 20 bp, synthetic construct
  misc_feature 1..20: note = Description of Artificial Sequence: Synthetic oligonucleotide
  misc_feature 1..20: note = Target: SCN10A; (-) strand; PAM type: YTN; PAM sequence: TTC
  source 1..20: mol_type = other DNA
tcattgataattatttaata

SEQ ID NO: 49252 - DNA, 20 bp, synthetic construct
  misc_feature 1..20: note = Description of Artificial Sequence: Synthetic oligonucleotide
  misc_feature 1..20: note = Target: SCN10A; (-) strand; PAM type: YTN; PAM sequence: TTT
  source 1..20: mol_type = other DNA
ctcattgataattatttaat

SEQ ID NO: 49253 - DNA, 20 bp, synthetic construct
  misc_feature 1..20: note = Description of Artificial Sequence: Synthetic oligonucleotide
  misc_feature 1..20: note = Target: SCN10A; (-) strand; PAM type: YTN; PAM sequence: TTT
  source 1..20: mol_type = other DNA
tctcattgataattatttaa

SEQ ID NO: 49254 - DNA, 20 bp, synthetic construct
  misc_feature 1..20: note = Description of Artificial Sequence: Synthetic oligonucleotide
  misc_feature 1..20: note = Target: SCN10A; (-) strand; PAM type: YTN; PAM sequence: TTT
  source 1..20: mol_type = other DNA
ttctcattgataattattta

SEQ ID NO: 49255 - DNA, 20 bp, synthetic construct
  misc_feature 1..20: note = Description of Artificial Sequence: Synthetic oligonucleotide
  misc_feature 1..20: note = Target: SCN10A; (-) strand; PAM type: YTN; PAM sequence: TTT
  source 1..20: mol_type = other DNA
tttctcattgataattattt

SEQ ID NO: 49256 - DNA, 20 bp, synthetic construct
  misc_feature 1..20: note = Description of Artificial Sequence: Synthetic oligonucleotide
  misc_feature 1..20: note = Target: SCN10A; (-) strand; PAM type: YTN; PAM sequence: TTA
  source 1..20: mol_type = other DNA
ttttttctcattgataatta

SEQ ID NO: 49257 - DNA, 20 bp, synthetic construct
  misc_feature 1..20: note = Description of Artificial Sequence: Synthetic oligonucleotide
  misc_feature 1..20: note = Target: SCN10A; (-) strand; PAM type: YTN; PAM sequence: CTA
  source 1..20: mol_type = other DNA
ttattttttctcattgataa

SEQ ID NO: 49258 - DNA, 20 bp, synthetic construct
  misc_feature 1..20: note = Description of Artificial Sequence: Synthetic oligonucleotide
  misc_feature 1..20: note = Target: SCN10A; (-) strand; PAM type: YTN; PAM sequence: TTC
  source 1..20: mol_type = other DNA
tattattttttctcattgat

SEQ ID NO: 49259 - DNA, 20 bp, synthetic construct
  misc_feature 1..20: note = Description of Artificial Sequence: Synthetic oligonucleotide
  misc_feature 1..20: note = Target: SCN10A; (-) strand; PAM type: YTN; PAM sequence: CTT
  source 1..20: mol_type = other DNA
ctattattttttctcattga

SEQ ID NO: 49260 - DNA, 20 bp, synthetic construct
  misc_feature 1..20: note = Description of Artificial Sequence: Synthetic oligonucleotide
  misc_feature 1..20: note = Target: SCN10A; (-) strand; PAM type: YTN; PAM sequence: CTC
  source 1..20: mol_type = other DNA
ttctattattttttctcatt

SEQ ID NO: 49261 - DNA, 20 bp, synthetic construct
  misc_feature 1..20: note = Description of Artificial Sequence: Synthetic oligonucleotide
  misc_feature 1..20: note = Target: SCN10A; (-) strand; PAM type: YTN; PAM sequence: CTC
  source 1..20: mol_type = other DNA
tcttctattattttttctca

SEQ ID NO: 49262 - DNA, 20 bp, synthetic construct
  misc_feature 1..20: note = Description of Artificial Sequence: Synthetic oligonucleotide
  misc_feature 1..20: note = Target: SCN10A; (-) strand; PAM type: YTN; PAM sequence: CTC
  source 1..20: mol_type = other DNA
aacaacaacgtgtacagact

SEQ ID NO: 49263 - DNA, 20 bp, synthetic construct
  misc_feature 1..20: note = Description of Artificial Sequence: Synthetic oligonucleotide
  misc_feature 1..20: note = Target: SCN10A; (-) strand; PAM type: YTN; PAM sequence: TTC
  source 1..20: mol_type = other DNA
tcaacaacaacgtgtacaga

SEQ ID NO: 49264 - DNA, 20 bp, synthetic construct
  misc_feature 1..20: note = Description of Artificial Sequence: Synthetic oligonucleotide
  misc_feature 1..20: note = Target: SCN10A; (-) strand; PAM type: YTN; PAM sequence: TTT
  source 1..20: mol_type = other DNA
ctcaacaacaacgtgtacag

SEQ ID NO: 49265 - DNA, 20 bp, synthetic construct
  misc_feature 1..20: note = Description of Artificial Sequence: Synthetic oligonucleotide
  misc_feature 1..20: note = Target: SCN10A; (-) strand; PAM type: YTN; PAM sequence: CTC
  source 1..20: mol_type = other DNA
atttctcaacaacaacgtgt

SEQ ID NO: 49266 - DNA, 20 bp, synthetic construct
  misc_feature 1..20: note = Description of Artificial Sequence: Synthetic oligonucleotide
  misc_feature 1..20: note = Target: SCN10A; (-) strand; PAM type: YTN; PAM sequence: TTG
  source 1..20: mol_type = other DNA
agaaatgtgtactcatttct

SEQ ID NO: 49267 - DNA, 20 bp, synthetic construct
  misc_feature 1..20: note = Description of Artificial Sequence: Synthetic oligonucleotide
  misc_feature 1..20: note = Target: SCN10A; (-) strand; PAM type: YTN; PAM sequence: TTT
  source 1..20: mol_type = other DNA
gagaaatgtgtactcatttc

SEQ ID NO: 49268 - DNA, 20 bp, synthetic construct
  misc_feature 1..20: note = Description of Artificial Sequence: Synthetic oligonucleotide
  misc_feature 1..20: note = Target: SCN10A; (-) strand; PAM type: YTN; PAM sequence: CTT
  source 1..20: mol_type = other DNA
tgagaaatgtgtactcattt

SEQ ID NO: 49269 - DNA, 20 bp, synthetic construct
  misc_feature 1..20: note = Description of Artificial Sequence: Synthetic oligonucleotide
  misc_feature 1..20: note = Target: SCN10A; (-) strand; PAM type: YTN; PAM sequence: TTG
  source 1..20: mol_type = other DNA
tgctttgagaaatgtgtact

SEQ ID NO: 49270 - DNA, 20 bp, synthetic construct
  misc_feature 1..20: note = Description of Artificial Sequence: Synthetic oligonucleotide
  misc_feature 1..20: note = Target: SCN10A; (-) strand; PAM type: YTN; PAM sequence: TTT
  source 1..20: mol_type = other DNA
gtgctttgagaaatgtgtac

SEQ ID NO: 49271 - DNA, 20 bp, synthetic construct
  misc_feature 1..20: note = Description of Artificial Sequence: Synthetic oligonucleotide
  misc_feature 1..20: note = Target: SCN10A; (-) strand; PAM type: YTN; PAM sequence: CTG
  source 1..20: mol_type = other DNA
agtttgtgctttgagaaatg

SEQ ID NO: 49272 - DNA, 20 bp, synthetic construct
  misc_feature 1..20: note = Description of Artificial Sequence: Synthetic oligonucleotide
  misc_feature 1..20: note = Target: SCN10A; (-) strand; PAM type: YTN; PAM sequence: TTG
  source 1..20: mol_type = other DNA
catacctgagtttgtgcttt

SEQ ID NO: 49273 - DNA, 20 bp, synthetic construct
  misc_feature 1..20: note = Description of Artificial Sequence: Synthetic oligonucleotide
  misc_feature 1..20: note = Target: SCN10A; (-) strand; PAM type: YTN; PAM sequence: CTT
  source 1..20: mol_type = other DNA
gcatacctgagtttgtgctt

SEQ ID NO: 49274 - DNA, 20 bp, synthetic construct
  misc_feature 1..20: note = Description of Artificial Sequence: Synthetic oligonucleotide
  misc_feature 1..20: note = Target: SCN10A; (-) strand; PAM type: YTN; PAM sequence: TTC
  source 1..20: mol_type = other DNA
ttgcatacctgagtttgtgc

SEQ ID NO: 49275 - DNA, 20 bp, synthetic construct
  misc_feature 1..20: note = Description of Artificial Sequence: Synthetic oligonucleotide
  misc_feature 1..20: note = Target: SCN10A; (-) strand; PAM type: YTN; PAM sequence: TTT
  source 1..20: mol_type = other DNA
cttgcatacctgagtttgtg

SEQ ID NO: 49276 - DNA, 20 bp, synthetic construct
  misc_feature 1..20: note = Description of Artificial Sequence: Synthetic oligonucleotide
  misc_feature 1..20: note = Target: SCN10A; (-) strand; PAM type: YTN; PAM sequence: TTA
  source 1..20: mol_type = other DNA
catttcttgcatacctgagt

SEQ ID NO: 49277 - DNA, 20 bp, synthetic construct
  misc_feature 1..20: note = Description of Artificial Sequence: Synthetic oligonucleotide
  misc_feature 1..20: note = Target: SCN10A; (-) strand; PAM type: YTN; PAM sequence: CTA
  source 1..20: mol_type = other DNA
agttacatttcttgcatacc

SEQ ID NO: 49278 - DNA, 20 bp, synthetic construct
  misc_feature 1..20: note = Description of Artificial Sequence: Synthetic oligonucleotide
  misc_feature 1..20: note = Target: SCN10A; (-) strand; PAM type: YTN; PAM sequence: TTC
  source 1..20: mol_type = other DNA
aactaagttacatttcttgc

SEQ ID NO: 49279 - DNA, 20 bp, synthetic construct
  misc_feature 1..20: note = Description of Artificial Sequence: Synthetic oligonucleotide
  misc_feature 1..20: note = Target: SCN10A; (-) strand; PAM type: YTN; PAM sequence: TTG
  source 1..20: mol_type = other DNA
aattcaactaagttacattt

SEQ ID NO: 49280 - DNA, 20 bp, synthetic construct
  misc_feature 1..20: note = Description of Artificial Sequence: Synthetic oligonucleotide
  misc_feature 1..20: note = Target: SCN10A; (-) strand; PAM type: YTN; PAM sequence: TTG
  source 1..20: mol_type = other DNA
aagcataaattgaattcaac

SEQ ID NO: 49281 - DNA, 20 bp, synthetic construct
  misc_feature 1..20: note = Description of Artificial Sequence: Synthetic oligonucleotide
  misc_feature 1..20: note = Target: SCN10A; (-) strand; PAM type: YTN; PAM sequence: CTT
  source 1..20: mol_type = other DNA
gaagcataaattgaattcaa

SEQ ID NO: 49282 - DNA, 20 bp, synthetic construct
  misc_feature 1..20: note = Description of Artificial Sequence: Synthetic oligonucleotide
  misc_feature 1..20: note = Target: SCN10A; (-) strand; PAM type: YTN; PAM sequence: TTC
  source 1..20: mol_type = other DNA
ccatggtgaggacttgaagc

SEQ ID NO: 49283 - DNA, 20 bp, synthetic construct
  misc_feature 1..20: note = Description of Artificial Sequence: Synthetic oligonucleotide
  misc_feature 1..20: note = Target: SCN10A; (-) strand; PAM type: YTN; PAM sequence: TTA
  source 1..20: mol_type = other DNA
acaagagacagttcccatgg

SEQ ID NO: 49284 - DNA, 20 bp, synthetic construct
  misc_feature 1..20: note = Description of Artificial Sequence: Synthetic oligonucleotide
  misc_feature 1..20: note = Target: SCN10A; (-) strand; PAM type: YTN; PAM sequence: CTT
  source 1..20: mol_type = other DNA
aacaagagacagttcccatg

SEQ ID NO: 49285 - DNA, 20 bp, synthetic construct
  misc_feature 1..20: note = Description of Artificial Sequence: Synthetic oligonucleotide
  misc_feature 1..20: note = Target: SCN10A; (-) strand; PAM type: YTN; PAM sequence: TTG
  source 1..20: mol_type = other DNA
acttaacaagagacagttcc

SEQ ID NO: 49286 - DNA, 20 bp, synthetic construct
  misc_feature 1..20: note = Description of Artificial Sequence: Synthetic oligonucleotide
  misc_feature 1..20: note = Target: SCN10A; (-) strand; PAM type: YTN; PAM sequence: TTG
  source 1..20: mol_type = other DNA
aaatagtacccaacattgac

SEQ ID NO: 49287 - DNA, 20 bp, synthetic construct
  misc_feature 1..20: note = Description of Artificial Sequence: Synthetic oligonucleotide
  misc_feature 1..20: note = Target: SCN10A; (-) strand; PAM type: YTN; PAM sequence: CTC
  source 1..20: mol_type = other DNA
agatattgaaatagtaccca

SEQ ID NO: 49288 - DNA, 20 bp, synthetic construct
  misc_feature 1..20: note = Description of Artificial Sequence: Synthetic oligonucleotide
  misc_feature 1..20: note = Target: SCN10A; (-) strand; PAM type: YTN; PAM sequence: CTC
  source 1..20: mol_type = other DNA
agacacagactcagatattg

SEQ ID NO: 49289 - DNA, 20 bp, synthetic construct
  misc_feature 1..20: note = Description of Artificial Sequence: Synthetic oligonucleotide
  misc_feature 1..20: note = Target: SCN10A; (-) strand; PAM type: YTN; PAM sequence: CTA
  source 1..20: mol_type = other DNA
caaaactcagacacagactc

SEQ ID NO: 49290 - DNA, 20 bp, synthetic construct
  misc_feature 1..20: note = Description of Artificial Sequence: Synthetic oligonucleotide
  misc_feature 1..20: note = Target: SCN10A; (-) strand; PAM type: YTN; PAM sequence: TTG
  source 1..20: mol_type = other DNA
agccctacaaaactcagaca

SEQ ID NO: 49291 - DNA, 20 bp, synthetic construct
  misc_feature 1..20: note = Description of Artificial Sequence: Synthetic oligonucleotide
  misc_feature 1..20: note = Target: SCN10A; (-) strand; PAM type: YTN; PAM sequence: TTT
  source 1..20: mol_type = other DNA
gagccctacaaaactcagac

SEQ ID NO: 49292 - DNA, 20 bp, synthetic construct
  misc_feature 1..20: note = Description of Artificial Sequence: Synthetic oligonucleotide
  misc_feature 1..20: note = Target: SCN10A; (-) strand; PAM type: YTN; PAM sequence: CTC
  source 1..20: mol_type = other DNA
caggtttgagccctacaaaa

SEQ ID NO: 49293 - DNA, 20 bp, synthetic construct
  misc_feature 1..20: note = Description of Artificial Sequence: Synthetic oligonucleotide
  misc_feature 1..20: note = Target: SCN10A; (-) strand; PAM type: YTN; PAM sequence: CTC
  source 1..20: mol_type = other DNA
ctccaggtttgagccctaca

SEQ ID NO: 49294 - DNA, 20 bp, synthetic construct
  misc_feature 1..20: note = Description of Artificial Sequence: Synthetic oligonucleotide
  misc_feature 1..20: note = Target: SCN10A; (-) strand; PAM type: YTN; PAM sequence: CTC
  source 1..20: mol_type = other DNA
tcctccaggtttgagcccta

SEQ ID NO: 49295 - DNA, 20 bp, synthetic construct
  misc_feature 1..20: note = Description of Artificial Sequence: Synthetic oligonucleotide
  misc_feature 1..20: note = Target: SCN10A; (-) strand; PAM type: YTN; PAM sequence: CTC
  source 1..20: mol_type = other DNA
aactctcctccaggtttgag

SEQ ID NO: 49296 - DNA, 20 bp, synthetic construct
  misc_feature 1..20: note = Description of Artificial Sequence: Synthetic oligonucleotide
  misc_feature 1..20: note = Target: SCN10A; (-) strand; PAM type: YTN; PAM sequence: TTA
  source 1..20: mol_type = other DNA
gcaatgacaaaggaccagct

SEQ ID NO: 49297 - DNA, 20 bp, synthetic construct
  misc_feature 1..20: note = Description of Artificial Sequence: Synthetic oligonucleotide
  misc_feature 1..20: note = Target: SCN10A; (-) strand; PAM type: YTN; PAM sequence: CTT
  source 1..20: mol_type = other DNA
agcaatgacaaaggaccagc

SEQ ID NO: 49298 - DNA, 20 bp, synthetic construct
  misc_feature 1..20: note = Description of Artificial Sequence: Synthetic oligonucleotide
  misc_feature 1..20: note = Target: SCN10A; (-) strand; PAM type: YTN; PAM sequence: CTC
  source 1..20: mol_type = other DNA
aggcaaaatacgcttagcaa

SEQ ID NO: 49299 - DNA, 20 bp, synthetic construct
  misc_feature 1..20: note = Description of Artificial Sequence: Synthetic oligonucleotide
  misc_feature 1..20: note = Target: SCN10A; (-) strand; PAM type: YTN; PAM sequence: CTA
  source 1..20: mol_type = other DNA
caactcaggcaaaatacgct

SEQ ID NO: 49300 - DNA, 20 bp, synthetic construct
  misc_feature 1..20: note = Description of Artificial Sequence: Synthetic oligonucleotide
  misc_feature 1..20: note = Target: SCN10A; (-) strand; PAM type: YTN; PAM sequence: CTC
  source 1..20: mol_type = other DNA
ccaccagggaccagatggga

SEQ ID NO: 49301 - DNA, 20 bp, synthetic construct
  misc_feature 1..20: note = Description of Artificial Sequence: Synthetic oligonucleotide
  misc_feature 1..20: note = Target: SCN10A; (-) strand; PAM type: YTN; PAM sequence: CTC
  source 1..20: mol_type = other DNA
tcccaccagggaccagatgg

SEQ ID NO: 49302 - DNA, 20 bp, synthetic construct
  misc_feature 1..20: note = Description of Artificial Sequence: Synthetic oligonucleotide
  misc_feature 1..20: note = Target: SCN10A; (-) strand; PAM type: YTN; PAM sequence: TTC
  source 1..20: mol_type = other DNA
atggactctcccaccaggga

SEQ ID NO: 49303 - DNA, 20 bp, synthetic construct
  misc_feature 1..20: note = Description of Artificial Sequence: Synthetic oligonucleotide
  misc_feature 1..20: note = Target: SCN10A; (-) strand; PAM type: YTN; PAM sequence: CTT
  source 1..20: mol_type = other DNA
catggactctcccaccaggg

SEQ ID NO: 49304 - DNA, 20 bp, synthetic construct
  misc_feature 1..20: note = Description of Artificial Sequence: Synthetic oligonucleotide
  misc_feature 1..20: note = Target: SCN10A; (-) strand; PAM type: YTN; PAM sequence: CTA
  source 1..20: mol_type = other DNA
gagagagaagagccatcttc

SEQ ID NO: 49305 - DNA, 20 bp, synthetic construct
  misc_feature 1..20: note = Description of Artificial Sequence: Synthetic oligonucleotide
  misc_feature 1..20: note = Target: SCN10A; (-) strand; PAM type: YTN; PAM sequence: CTA
  source 1..20: mol_type = other DNA
tggaaaaagatgagtgagac

SEQ ID NO: 49306 - DNA, 20 bp, synthetic construct
  misc_feature 1..20: note = Description of Artificial Sequence: Synthetic oligonucleotide
  misc_feature 1..20: note = Target: SCN10A; (-) strand; PAM type: YTN; PAM sequence: TTA
  source 1..20: mol_type = other DNA
gcccccagtgaaggctatgg

SEQ ID NO: 49307 - DNA, 20 bp, synthetic construct
  misc_feature 1..20: note = Description of Artificial Sequence: Synthetic oligonucleotide
  misc_feature 1..20: note = Target: SCN10A; (-) strand; PAM type: YTN; PAM sequence: CTT
  source 1..20: mol_type = other DNA
agcccccagtgaaggctatg

SEQ ID NO: 49308 - DNA, 20 bp, synthetic construct
  misc_feature 1..20: note = Description of Artificial Sequence: Synthetic oligonucleotide
  misc_feature 1..20: note = Target: SCN10A; (-) strand; PAM type: YTN; PAM sequence: CTG
  source 1..20: mol_type = other DNA
ggtgatgacttagcccccag

SEQ ID NO: 49309 - DNA, 20 bp, synthetic construct
  misc_feature 1..20: note = Description of Artificial Sequence: Synthetic oligonucleotide
  misc_feature 1..20: note = Target: SCN10A; (-) strand; PAM type: YTN; PAM sequence: CTC
  source 1..20: mol_type = other DNA
cagaatggcagagaggagct

SEQ ID NO: 49310 - DNA, 20 bp, synthetic construct
  misc_feature 1..20: note = Description of Artificial Sequence: Synthetic oligonucleotide
  misc_feature 1..20: note = Target: SCN10A; (-) strand; PAM type: YTN; PAM sequence: CTG
  source 1..20: mol_type = other DNA
tggctccagaatggcagaga

SEQ ID NO: 49311 - DNA, 20 bp, synthetic construct
  misc_feature 1..20: note = Description of Artificial Sequence: Synthetic oligonucleotide
  misc_feature 1..20: note = Target: SCN10A; (-) strand; PAM type: YTN; PAM sequence: CTC
  source 1..20: mol_type = other DNA
agagagagccctgtggctcc

SEQ ID NO: 49312 - DNA, 20 bp, synthetic construct
  misc_feature 1..20: note = Description of Artificial Sequence: Synthetic oligonucleotide
  misc_feature 1..20: note = Target: SCN10A; (-) strand; PAM type: YTN; PAM sequence: CTG
  source 1..20: mol_type = other DNA
aagcagcctcagagagagcc

SEQ ID NO: 49313 - DNA, 20 bp, synthetic construct
  misc_feature 1..20: note = Description of Artificial Sequence: Synthetic oligonucleotide
  misc_feature 1..20: note = Target: SCN10A; (-) strand; PAM type: YTN; PAM sequence: TTA
  source 1..20: mol_type = other DNA
gagaaggcctgaagcagcct

SEQ ID NO: 49314 - DNA, 20 bp, synthetic construct
  misc_feature 1..20: note = Description of Artificial Sequence: Synthetic oligonucleotide
  misc_feature 1..20: note = Target: SCN10A; (-) strand; PAM type: YTN; PAM sequence: TTA
  source 1..20: mol_type = other DNA
ggttagagaaggcctgaagc

SEQ ID NO: 49315 - DNA, 20 bp, synthetic construct
  misc_feature 1..20: note = Description of Artificial Sequence: Synthetic oligonucleotide
  misc_feature 1..20: note = Target: SCN10A; (-) strand; PAM type: YTN; PAM sequence: CTT
  source 1..20: mol_type = other DNA
aggttagagaaggcctgaag

SEQ ID NO: 49316 - DNA, 20 bp, synthetic construct
  misc_feature 1..20: note = Description of Artificial Sequence: Synthetic oligonucleotide
  misc_feature 1..20: note = Target: SCN10A; (-) strand; PAM type: YTN; PAM sequence: TTA
  source 1..20: mol_type = other DNA
ggtcaaccttaggttagaga

SEQ ID NO: 49317 - DNA, 20 bp, synthetic construct
  misc_feature 1..20: note = Description of Artificial Sequence: Synthetic oligonucleotide
  misc_feature 1..20: note = Target: SCN10A; (-) strand; PAM type: YTN; PAM sequence: CTT
  source 1..20: mol_type = other DNA
aggtcaaccttaggttagag

SEQ ID NO: 49318 - DNA, 20 bp, synthetic construct
  misc_feature 1..20: note = Description of Artificial Sequence: Synthetic oligonucleotide
  misc_feature 1..20: note = Target: SCN10A; (-) strand; PAM type: YTN; PAM sequence: TTA
  source 1..20: mol_type = other DNA
gcttaggtcaaccttaggtt

SEQ ID NO: 49319 - DNA, 20 bp, synthetic construct
  misc_feature 1..20: note = Description of Artificial Sequence: Synthetic oligonucleotide
  misc_feature 1..20: note = Target: SCN10A; (-) strand; PAM type: YTN; PAM sequence: CTT
  source 1..20: mol_type = other DNA
agcttaggtcaaccttaggt

SEQ ID NO: 49320 - DNA, 20 bp, synthetic construct
  misc_feature 1..20: note = Description of Artificial Sequence: Synthetic oligonucleotide
  misc_feature 1..20: note = Target: SCN10A; (-) strand; PAM type: YTN; PAM sequence: CTG
  source 1..20: mol_type = other DNA
gggaaaggcaaccttagctt

SEQ ID NO: 49321 - DNA, 20 bp, synthetic construct
  misc_feature 1..20: note = Description of Artificial Sequence: Synthetic oligonucleotide
  misc_feature 1..20: note = Target: SCN10A; (-) strand; PAM type: YTN; PAM sequence: TTA
  source 1..20: mol_type = other DNA
agaaaatctggggaaaggca

SEQ ID NO: 49322 - DNA, 20 bp, synthetic construct
  misc_feature 1..20: note = Description of Artificial Sequence: Synthetic oligonucleotide
  misc_feature 1..20: note = Target: SCN10A; (-) strand; PAM type: YTN; PAM sequence: TTT
  source 1..20: mol_type = other DNA
aagaaaatctggggaaaggc

SEQ ID NO: 49323 - DNA, 20 bp, synthetic construct
  misc_feature 1..20: note = Description of Artificial Sequence: Synthetic oligonucleotide
  misc_feature 1..20: note = Target: SCN10A; (-) strand; PAM type: YTN; PAM sequence: TTT
  source 1..20: mol_type = other DNA
taagaaaatctggggaaagg

SEQ ID NO: 49324 - DNA, 20 bp, synthetic construct
  misc_feature 1..20: note = Description of Artificial Sequence: Synthetic oligonucleotide
  misc_feature 1..20: note = Target: SCN10A; (-) strand; PAM type: YTN; PAM sequence: TTT
  source 1..20: mol_type = other DNA
ttaagaaaatctggggaaag

SEQ ID NO: 49325 - DNA, 20 bp, synthetic construct
  misc_feature 1..20: note = Description of Artificial Sequence: Synthetic oligonucleotide
  misc_feature 1..20: note = Target: SCN10A; (-) strand; PAM type: YTN; PAM sequence: CTG
  source 1..20: mol_type = other DNA
tgagagtagagtaagaaagg

SEQ ID NO: 49326 - DNA, 20 bp, synthetic construct
  misc_feature 1..20: note = Description of Artificial Sequence: Synthetic oligonucleotide
  misc_feature 1..20: note = Target: SCN10A; (-) strand; PAM type: YTN; PAM sequence: CTC
  source 1..20: mol_type = other DNA
aaggaagatactgtgagagt

SEQ ID NO: 49327 - DNA, 20 bp, synthetic construct
  misc_feature 1..20: note = Description of Artificial Sequence: Synthetic oligonucleotide
  misc_feature 1..20: note = Target: SCN10A; (-) strand; PAM type: YTN; PAM sequence: TTC
  source 1..20: mol_type = other DNA
cgctcaaggaagatactgtg

SEQ ID NO: 49328 - DNA, 20 bp, synthetic construct
  misc_feature 1..20: note = Description of Artificial Sequence: Synthetic oligonucleotide
  misc_feature 1..20: note = Target: SCN10A; (-) strand; PAM type: YTN; PAM sequence: CTT
  source 1..20: mol_type = other DNA
ccgctcaaggaagatactgt

SEQ ID NO: 49329 - DNA, 20 bp, synthetic construct
  misc_feature 1..20: note = Description of Artificial Sequence: Synthetic oligonucleotide
  misc_feature 1..20: note = Target: SCN10A; (-) strand; PAM type: YTN; PAM sequence: TTG
  source 1..20: mol_type = other DNA
gggtaggatagacttccgct

SEQ ID NO: 49330 - DNA, 20 bp, synthetic construct
  misc_feature 1..20: note = Description of Artificial Sequence: Synthetic oligonucleotide
  misc_feature 1..20: note = Target: SCN10A; (-) strand; PAM type: YTN; PAM sequence: CTT
  source 1..20: mol_type = other DNA
ggggtaggatagacttccgc

SEQ ID NO: 49331 - DNA, 20 bp, synthetic construct
  misc_feature 1..20: note = Description of Artificial Sequence: Synthetic oligonucleotide
  misc_feature 1..20: note = Target: SCN10A; (-) strand; PAM type: YTN; PAM sequence: CTG
  source 1..20: mol_type = other DNA
ataaaaaggaagaaaataag

SEQ ID NO: 49332 - DNA, 20 bp, synthetic construct
  misc_feature 1..20: note = Description of Artificial Sequence: Synthetic oligonucleotide
  misc_feature 1..20: note = Target: SCN10A; (-) strand; PAM type: YTN; PAM sequence: TTA
  source 1..20: mol_type = other DNA
tagtggtgtaaactgataaa

SEQ ID NO: 49333 - DNA, 20 bp, synthetic construct
  misc_feature 1..20: note = Description of Artificial Sequence: Synthetic oligonucleotide
  misc_feature 1..20: note = Target: SCN10A; (-) strand; PAM type: YTN; PAM sequence: TTT
  source 1..20: mol_type = other DNA
atagtggtgtaaactgataa

SEQ ID NO: 49334 - DNA, 20 bp, synthetic construct
  misc_feature 1..20: note = Description of Artificial Sequence: Synthetic oligonucleotide
  misc_feature 1..20: note = Target: SCN10A; (-) strand; PAM type: YTN; PAM sequence: CTT
  source 1..20: mol_type = other DNA
tatagtggtgtaaactgata

SEQ ID NO: 49335 - DNA, 20 bp, synthetic construct
  misc_feature 1..20: note = Description of Artificial Sequence: Synthetic oligonucleotide
  misc_feature 1..20: note = Target: SCN10A; (-) strand; PAM type: YTN; PAM sequence: CTA
  source 1..20: mol_type = other DNA
ctttatagtggtgtaaactg

SEQ ID NO: 49336 - DNA, 20 bp, synthetic construct
  misc_feature 1..20: note = Description of Artificial Sequence: Synthetic oligonucleotide
  misc_feature 1..20: note = Target: SCN10A; (-) strand; PAM type: YTN; PAM sequence: CTG
  source 1..20: mol_type = other DNA
gggggtgatgctactttata

SEQ ID NO: 49337 - DNA, 20 bp, synthetic construct
  misc_feature 1..20: note = Description of Artificial Sequence: Synthetic oligonucleotide
  misc_feature 1..20: note = Target: SCN10A; (-) strand; PAM type: YTN; PAM sequence: TTA
  source 1..20: mol_type = other DNA
acaaaggtgatatctggggg

SEQ ID NO: 49338 - DNA, 20 bp, synthetic construct
  misc_feature 1..20: note = Description of Artificial Sequence: Synthetic oligonucleotide
  misc_feature 1..20: note = Target: SCN10A; (-) strand; PAM type: YTN; PAM sequence: CTA
  source 1..20: mol_type = other DNA
gaagagcagtgcattaacaa

SEQ ID NO: 49339 - DNA, 20 bp, synthetic construct
  misc_feature 1..20: note = Description of Artificial Sequence: Synthetic oligonucleotide
  misc_feature 1..20: note = Target: SCN10A; (-) strand; PAM type: YTN; PAM sequence: TTA
  source 1..20: mol_type = other DNA
cctagaagagcagtgcatta

SEQ ID NO: 49340 - DNA, 20 bp, synthetic construct
  misc_feature 1..20: note = Description of Artificial Sequence: Synthetic oligonucleotide
  misc_feature 1..20: note = Target: SCN10A; (-) strand; PAM type: YTN; PAM sequence: CTC
  source 1..20: mol_type = other DNA
cattacctagaagagcagtg

SEQ ID NO: 49341 - DNA, 20 bp, synthetic construct
  misc_feature 1..20: note = Description of Artificial Sequence: Synthetic oligonucleotide
  misc_feature 1..20: note = Target: SCN10A; (-) strand; PAM type: YTN; PAM sequence: CTG
  source 1..20: mol_type = other DNA
gatctccattacctagaaga

SEQ ID NO: 49342 - DNA, 20 bp, synthetic construct
  misc_feature 1..20: note = Description of Artificial Sequence: Synthetic oligonucleotide
  misc_feature 1..20: note = Target: SCN10A; (-) strand; PAM type: YTN; PAM sequence: CTC
  source 1..20: mol_type = other DNA
acagctggatctccattacc

SEQ ID NO: 49343 - DNA, 20 bp, synthetic construct
  misc_feature 1..20: note = Description of Artificial Sequence: Synthetic oligonucleotide
  misc_feature 1..20: note = Target: SCN10A; (-) strand; PAM type: YTN; PAM sequence: TTG
  source 1..20: mol_type = other DNA
ctcacagctggatctccatt

SEQ ID NO: 49344 - DNA, 20 bp, synthetic construct
  misc_feature 1..20: note = Description of Artificial Sequence: Synthetic oligonucleotide
  misc_feature 1..20: note = Target: SCN10A; (-) strand; PAM type: YTN; PAM sequence: TTT
  source 1..20: mol_type = other DNA
gctcacagctggatctccat

SEQ ID NO: 49345 - DNA, 20 bp, synthetic construct
  misc_feature 1..20: note = Description of Artificial Sequence: Synthetic oligonucleotide
  misc_feature 1..20: note = Target: SCN10A; (-) strand; PAM type: YTN; PAM sequence: TTT
  source 1..20: mol_type = other DNA
tgctcacagctggatctcca

SEQ ID NO: 49346 - DNA, 20 bp, synthetic construct
  misc_feature 1..20: note = Description of Artificial Sequence: Synthetic oligonucleotide
  misc_feature 1..20: note = Target: SCN10A; (-) strand; PAM type: YTN; PAM sequence: CTG
  source 1..20: mol_type = other DNA
ttttgctcacagctggatct

SEQ ID NO: 49347 - DNA, 20 bp, synthetic construct
  misc_feature 1..20: note = Description of Artificial Sequence: Synthetic oligonucleotide
  misc_feature 1..20: note = Target: SCN10A; (-) strand; PAM type: YTN; PAM sequence: TTA
  source 1..20: mol_type = other DNA
ccagatatgcagagatgtat

SEQ ID NO: 49348 - DNA, 20 bp, synthetic construct
  misc_feature 1..20: note = Description of Artificial Sequence: Synthetic oligonucleotide
  misc_feature 1..20: note = Target: SCN10A; (-) strand; PAM type: YTN; PAM sequence: TTT
  source 1..20: mol_type = other DNA
accagatatgcagagatgta

SEQ ID NO: 49349 - DNA, 20 bp, synthetic construct
  misc_feature 1..20: note = Description of Artificial Sequence: Synthetic oligonucleotide
  misc_feature 1..20: note = Target: SCN10A; (-) strand; PAM type: YTN; PAM sequence: CTA
  source 1..20: mol_type = other DNA
gccagtaatttaccagatat

SEQ ID NO: 49350 - DNA, 20 bp, synthetic construct
  misc_feature 1..20: note = Description of Artificial Sequence: Synthetic oligonucleotide
  misc_feature 1..20: note = Target: SCN10A; (-) strand; PAM type: YTN; PAM sequence: CTG
  source 1..20: mol_type = other DNA
tagagtagaactagccagta

SEQ ID NO: 49351 - DNA, 20 bp, synthetic construct
  misc_feature 1..20: note = Description of Artificial Sequence: Synthetic oligonucleotide
  misc_feature 1..20: note = Target: SCN10A; (-) strand; PAM type: YTN; PAM sequence: TTC
  source 1..20: mol_type = other DNA
acatgcacagaaactgtaga

SEQ ID NO: 49352 - DNA, 20 bp, synthetic construct
  misc_feature 1..20: note = Description of Artificial Sequence: Synthetic oligonucleotide
  misc_feature 1..20: note = Target: SCN10A; (-) strand; PAM type: YTN; PAM sequence: TTA
  source 1..20: mol_type = other DNA
gagagagattcacatgcaca

SEQ ID NO: 49353 - DNA, 20 bp, synthetic construct
  misc_feature 1..20: note = Description of Artificial Sequence: Synthetic oligonucleotide
  misc_feature 1..20: note = Target: SCN10A; (-) strand; PAM type: YTN; PAM sequence: CTT
  source 1..20: mol_type = other DNA
agagagagattcacatgcac

SEQ ID NO: 49354 - DNA, 20 bp, synthetic construct
  misc_feature 1..20: note = Description of Artificial Sequence: Synthetic oligonucleotide
  misc_feature 1..20: note = Target: SCN10A; (-) strand; PAM type: YTN; PAM sequence: CTA
  source 1..20: mol_type = other DNA
ggtaaagccagaggtggcaa

SEQ ID NO: 49355 - DNA, 20 bp, synthetic construct
  misc_feature 1..20: note = Description of Artificial Sequence: Synthetic oligonucleotide
  misc_feature 1..20: note = Target: SCN10A; (-) strand; PAM type: YTN; PAM sequence: TTC
  source 1..20: mol_type = other DNA
taggtaaagccagaggtggc

SEQ ID NO: 49356 - DNA, 20 bp, synthetic construct
  misc_feature 1..20: note = Description of Artificial Sequence: Synthetic oligonucleotide
  misc_feature 1..20: note = Target: SCN10A; (-) strand; PAM type: YTN; PAM sequence: TTT
  source 1..20: mol_type = other DNA
ctaggtaaagccagaggtgg

SEQ ID NO: 49357 - DNA, 20 bp, synthetic construct
  misc_feature 1..20: note = Description of Artificial Sequence: Synthetic oligonucleotide
  misc_feature 1..20: note = Target: SCN10A; (-) strand; PAM type: YTN; PAM sequence: CTT
  source 1..20: mol_type = other DNA
tctaggtaaagccagaggtg

SEQ ID NO: 49358 - DNA, 20 bp, synthetic construct
  misc_feature 1..20: note = Description of Artificial Sequence: Synthetic oligonucleotide
  misc_feature 1..20: note = Target: SCN10A; (-) strand; PAM type: YTN; PAM sequence: CTA
  source 1..20: mol_type = other DNA
ctttctaggtaaagccagag

SEQ ID NO: 49359 - DNA, 20 bp, synthetic construct
  misc_feature 1..20: note = Description of Artificial Sequence: Synthetic oligonucleotide
  misc_feature 1..20: note = Target: SCN10A; (-) strand; PAM type: YTN; PAM sequence: TTC
  source 1..20: mol_type = other DNA
aaaacagagccaatgtgtgc

SEQ ID NO: 49360 - DNA, 20 bp, synthetic construct
  misc_feature 1..20: note = Description of Artificial Sequence: Synthetic oligonucleotide
  misc_feature 1..20: note = Target: SCN10A; (-) strand; PAM type: YTN; PAM sequence: TTT
  source 1..20: mol_type = other DNA
caaaacagagccaatgtgtg

SEQ ID NO: 49361 - DNA, 20 bp, synthetic construct
  misc_feature 1..20: note = Description of Artificial Sequence: Synthetic oligonucleotide
  misc_feature 1..20: note = Target: SCN10A; (-) strand; PAM type: YTN; PAM sequence: TTG
  source 1..20: mol_type = other DNA
agggatttcaaaacagagcc

SEQ ID NO: 49362 - DNA, 20 bp, synthetic construct
  misc_feature 1..20: note = Description of Artificial Sequence: Synthetic oligonucleotide
  misc_feature 1..20: note = Target: SCN10A; (-) strand; PAM type: YTN; PAM sequence: TTT
  source 1..20: mol_type = other DNA
gagggatttcaaaacagagc

SEQ ID NO: 49363 - DNA, 20 bp, synthetic construct
  misc_feature 1..20: note = Description of Artificial Sequence: Synthetic oligonucleotide
  misc_feature 1..20: note = Target: SCN10A; (-) strand; PAM type: YTN; PAM sequence: TTG
  source 1..20: mol_type = other DNA
aggggaagaagtggtgagca

SEQ ID NO: 49364 - DNA, 20 bp, synthetic construct
  misc_feature 1..20: note = Description of Artificial Sequence: Synthetic oligonucleotide
  misc_feature 1..20: note = Target: SCN10A; (-) strand; PAM type: YTN; PAM sequence: TTT
  source 1..20: mol_type = other DNA
gaggggaagaagtggtgagc

SEQ ID NO: 49365 - DNA, 20 bp, synthetic construct
  misc_feature 1..20: note = Description of Artificial Sequence: Synthetic oligonucleotide
  misc_feature 1..20: note = Target: SCN10A; (-) strand; PAM type: YTN; PAM sequence: CTA
  source 1..20: mol_type = other DNA
atttgaggggaagaagtggt

SEQ ID NO: 49366 - DNA, 20 bp, synthetic construct
  misc_feature 1..20: note = Description of Artificial Sequence: Synthetic oligonucleotide
  misc_feature 1..20: note = Target: SCN10A; (-) strand; PAM type: YTN; PAM sequence: CTG
  source 1..20: mol_type = other DNA
aatcctaatttgaggggaag

SEQ ID NO: 49367 - DNA, 20 bp, synthetic construct
  misc_feature 1..20: note = Description of Artificial Sequence: Synthetic oligonucleotide
  misc_feature 1..20: note = Target: SCN10A; (-) strand; PAM type: YTN; PAM sequence: CTA
  source 1..20: mol_type = other DNA
ggctgaatcctaatttgagg

SEQ ID NO: 49368 - DNA, 20 bp, synthetic construct
  misc_feature 1..20: note = Description of Artificial Sequence: Synthetic oligonucleotide
  misc_feature 1..20: note = Target: SCN10A; (-) strand; PAM type: YTN; PAM sequence: CTC
  source 1..20: mol_type = other DNA
ccagccctaggctgaatcct

SEQ ID NO: 49369 - DNA, 20 bp, synthetic construct
  misc_feature 1..20: note = Description of Artificial Sequence: Synthetic oligonucleotide
  misc_feature 1..20: note = Target: SCN10A; (-) strand; PAM type: YTN; PAM sequence: TTC
  source 1..20: mol_type = other DNA
ctcccagccctaggctgaat

SEQ ID NO: 49370 - DNA, 20 bp, synthetic construct
  misc_feature 1..20: note = Description of Artificial Sequence: Synthetic oligonucleotide
  misc_feature 1..20: note = Target: SCN10A; (-) strand; PAM type: YTN; PAM sequence: TTT
  source 1..20: mol_type = other DNA
cctcccagccctaggctgaa

SEQ ID NO: 49371 - DNA, 20 bp, synthetic construct
  misc_feature 1..20: note = Description of Artificial Sequence: Synthetic oligonucleotide
  misc_feature 1..20: note = Target: SCN10A; (-) strand; PAM type: YTN; PAM sequence: TTT
  source 1..20: mol_type = other DNA
tcctcccagccctaggctga

SEQ ID NO: 49372 - DNA, 20 bp, synthetic construct
  misc_feature 1..20: note = Description of Artificial Sequence: Synthetic oligonucleotide
  misc_feature 1..20: note = Target: SCN10A; (-) strand; PAM type: YTN; PAM sequence: CTG
  source 1..20: mol_type = other DNA
tgtgttttcctcccagccct

SEQ ID NO: 49373 - DNA, 20 bp, synthetic construct
  misc_feature 1..20: note = Description of Artificial Sequence: Synthetic oligonucleotide
  misc_feature 1..20: note = Target: SCN10A; (-) strand; PAM type: YTN; PAM sequence: CTG
  source 1..20: mol_type = other DNA
agaaggagtcctgtgtgttt

SEQ ID NO: 49374 - DNA, 20 bp, synthetic construct
  misc_feature 1..20: note = Description of Artificial Sequence: Synthetic oligonucleotide
  misc_feature 1..20: note = Target: SCN10A; (-) strand; PAM type: YTN; PAM sequence: CTG
  source 1..20: mol_type = other DNA
gtgtgcccctgagaaggagt

SEQ ID NO: 49375 - DNA, 20 bp, synthetic construct
  misc_feature 1..20: note = Description of Artificial Sequence: Synthetic oligonucleotide
  misc_feature 1..20: note = Target: SCN10A; (-) strand; PAM type: YTN; PAM sequence: TTG
  source 1..20: mol_type = other DNA
agtgctggtgtgcccctgag

SEQ ID NO: 49376 - DNA, 20 bp, synthetic construct
  misc_feature 1..20: note = Description of Artificial Sequence: Synthetic oligonucleotide
  misc_feature 1..20: note = Target: SCN10A; (-) strand; PAM type: YTN; PAM sequence: CTT
  source 1..20: mol_type = other DNA
gagtgctggtgtgcccctga

SEQ ID NO: 49377 - DNA, 20 bp, synthetic construct
  misc_feature 1..20: note = Description of Artificial Sequence: Synthetic oligonucleotide
  misc_feature 1..20: note = Target: SCN10A; (-) strand; PAM type: YTN; PAM sequence: TTG
  source 1..20: mol_type = other DNA
taagggagcttgagtgctgg

SEQ ID NO: 49378 - DNA, 20 bp, synthetic construct
  misc_feature 1..20: note = Description of Artificial Sequence: Synthetic oligonucleotide
  misc_feature 1..20: note = Target: SCN10A; (-) strand; PAM type: YTN; PAM sequence: CTG
  source 1..20: mol_type = other DNA
gaggagttgtaagggagctt

SEQ ID NO: 49379 - DNA, 20 bp, synthetic construct
  misc_feature 1..20: note = Description of Artificial Sequence: Synthetic oligonucleotide
  misc_feature 1..20: note = Target: SCN10A; (-) strand; PAM type: YTN; PAM sequence: CTA
  source 1..20: mol_type = other DNA
ggctggaggagttgtaaggg

SEQ ID NO: 49380 - DNA, 20 bp, synthetic construct
  misc_feature 1..20: note = Description of Artificial Sequence: Synthetic oligonucleotide
  misc_feature 1..20: note = Target: SCN10A; (-) strand; PAM type: YTN; PAM sequence: CTG
  source 1..20: mol_type = other DNA
acctaggctggaggagttgt

SEQ ID NO: 49381 - DNA, 20 bp, synthetic construct
  misc_feature 1..20: note = Description of Artificial Sequence: Synthetic oligonucleotide
  misc_feature 1..20: note = Target: SCN10A; (-) strand; PAM type: YTN; PAM sequence: TTA
  source 1..20: mol_type = other DNA
aactgacctaggctggagga

SEQ ID NO: 49382 - DNA, 20 bp, synthetic construct
  misc_feature 1..20: note = Description of Artificial Sequence: Synthetic oligonucleotide
  misc_feature 1..20: note = Target: SCN10A; (-) strand; PAM type: YTN; PAM sequence: CTA
  source 1..20: mol_type = other DNA
gacaaattaaactgacctag

SEQ ID NO: 49383 - DNA, 20 bp, synthetic construct
  misc_feature 1..20: note = Description of Artificial Sequence: Synthetic oligonucleotide
  misc_feature 1..20: note = Target: SCN10A; (-) strand; PAM type: YTN; PAM sequence: CTC
  source 1..20: mol_type = other DNA
ccctagacaaattaaactga

SEQ ID NO: 49384 - DNA, 20 bp, synthetic construct
  misc_feature 1..20: note = Description of Artificial Sequence: Synthetic oligonucleotide
  misc_feature 1..20: note = Target: SCN10A; (-) strand; PAM type: YTN; PAM sequence: TTA
  source 1..20: mol_type = other DNA
ctcccctagacaaattaaac

SEQ ID NO: 49385 - DNA, 20 bp, synthetic construct
  misc_feature 1..20: note = Description of Artificial Sequence: Synthetic oligonucleotide
  misc_feature 1..20: note = Target: SCN10A; (-) strand; PAM type: YTN; PAM sequence: CTT
  source 1..20: mol_type = other DNA
actcccctagacaaattaaa

SEQ ID NO: 49386 - DNA, 20 bp, synthetic construct
  misc_feature 1..20: note = Description of Artificial Sequence: Synthetic oligonucleotide
  misc_feature 1..20: note = Target: SCN10A; (-) strand; PAM type: YTN; PAM sequence: TTA
  source 1..20: mol_type = other DNA
tcttactcccctagacaaat

SEQ ID NO: 49387 - DNA, 20 bp, synthetic construct
  misc_feature 1..20: note = Description of Artificial Sequence: Synthetic oligonucleotide
  misc_feature 1..20: note = Target: SCN10A; (-) strand; PAM type: YTN; PAM sequence: TTC
  source 1..20: mol_type = other DNA
cagttatcttactcccctag

SEQ ID NO: 49388 - DNA, 20 bp, synthetic construct
  misc_feature 1..20: note = Description of Artificial Sequence: Synthetic oligonucleotide
  misc_feature 1..20: note = Target: SCN10A; (-) strand; PAM type: YTN; PAM sequence: TTT
  source 1..20: mol_type = other DNA
ccagttatcttactccccta

SEQ ID NO: 49389 - DNA, 20 bp, synthetic construct
  misc_feature 1..20: note = Description of Artificial Sequence: Synthetic oligonucleotide
  misc_feature 1..20: note = Target: SCN10A; (-) strand; PAM type: YTN; PAM sequence: TTC
  source 1..20: mol_type = other DNA
atcatttccagttatcttac

SEQ ID NO: 49390 - DNA, 20 bp, synthetic construct
  misc_feature 1..20: note = Description of Artificial Sequence: Synthetic oligonucleotide
  misc_feature 1..20: note = Target: SCN10A; (-) strand; PAM type: YTN; PAM sequence: CTT
  source 1..20: mol_type = other DNA
catcatttccagttatctta

SEQ ID NO: 49391 - DNA, 20 bp, synthetic construct
  misc_feature 1..20: note = Description of Artificial Sequence: Synthetic oligonucleotide
  misc_feature 1..20: note = Target: SCN10A; (-) strand; PAM type: YTN; PAM sequence: TTA
  source 1..20: mol_type = other DNA
gggtatggagaatgcaacct

SEQ ID NO: 49392 - DNA, 20 bp, synthetic construct
  misc_feature 1..20: note = Description of Artificial Sequence: Synthetic oligonucleotide
  misc_feature 1..20: note = Target: SCN10A; (-) strand; PAM type: YTN; PAM sequence: CTT
  source 1..20: mol_type = other DNA
agggtatggagaatgcaacc

SEQ ID NO: 49393 - DNA, 20 bp, synthetic construct
  misc_feature 1..20: note = Description of Artificial Sequence: Synthetic oligonucleotide
  misc_feature 1..20: note = Target: SCN10A; (-) strand; PAM type: YTN; PAM sequence: TTG
  source 1..20: mol_type = other DNA
ccttagggtatggagaatgc

SEQ ID NO: 49394 - DNA, 20 bp, synthetic construct
  misc_feature 1..20: note = Description of Artificial Sequence: Synthetic oligonucleotide
  misc_feature 1..20: note = Target: SCN10A; (-) strand; PAM type: YTN; PAM sequence: TTT
  source 1..20: mol_type = other DNA
gccttagggtatggagaatg

SEQ ID NO: 49395 - DNA, 20 bp, synthetic construct
  misc_feature 1..20: note = Description of Artificial Sequence: Synthetic oligonucleotide
  misc_feature 1..20: note = Target: SCN10A; (-) strand; PAM type: YTN; PAM sequence: TTT
  source 1..20: mol_type = other DNA
tgccttagggtatggagaat

SEQ ID NO: 49396 - DNA, 20 bp, synthetic construct
  misc_feature 1..20: note = Description of Artificial Sequence: Synthetic oligonucleotide
  misc_feature 1..20: note = Target: SCN10A; (-) strand; PAM type: YTN; PAM sequence: TTT
  source 1..20: mol_type = other DNA
ttgccttagggtatggagaa

SEQ ID NO: 49397 - DNA, 20 bp, synthetic construct
  misc_feature 1..20: note = Description of Artificial Sequence: Synthetic oligonucleotide
  misc_feature 1..20: note = Target: SCN10A; (-) strand; PAM type: YTN; PAM sequence: TTT
  source 1..20: mol_type = other DNA
tttgccttagggtatggaga

SEQ ID NO: 49398 - DNA, 20 bp, synthetic construct
  misc_feature 1..20: note = Description of Artificial Sequence: Synthetic oligonucleotide
  misc_feature 1..20: note = Target: SCN10A; (-) strand; PAM type: YTN; PAM sequence: TTT
  source 1..20: mol_type = other DNA
ttttgccttagggtatggag

SEQ ID NO: 49399 - DNA, 20 bp, synthetic construct
  misc_feature 1..20: note = Description of Artificial Sequence: Synthetic oligonucleotide
  misc_feature 1..20: note = Target: SCN10A; (-) strand; PAM type: YTN; PAM sequence: CTT
  source 1..20: mol_type = other DNA
tttttgccttagggtatgga

SEQ ID NO: 49400 - DNA, 20 bp, synthetic construct
  misc_feature 1..20: note = Description of Artificial Sequence: Synthetic oligonucleotide
  misc_feature 1..20: note = Target: SCN10A; (-) strand; PAM type: YTN; PAM sequence: CTA
  source 1..20: mol_type = other DNA
atccagcctttttttgcctt

SEQ ID NO: 49401 - DNA, 20 bp, synthetic construct
  misc_feature 1..20: note = Description of Artificial Sequence: Synthetic oligonucleotide
  misc_feature 1..20: note = Target: SCN10A; (-) strand; PAM type: YTN; PAM sequence: TTC
  source 1..20: mol_type = other DNA
taatccagcctttttttgcc

SEQ ID NO: 49402 - DNA, 20 bp, synthetic construct
  misc_feature 1..20: note = Description of Artificial Sequence: Synthetic oligonucleotide
  misc_feature 1..20: note = Target: SCN10A; (-) strand; PAM type: YTN; PAM sequence: CTG
  source 1..20: mol_type = other DNA
ttctaatccagccttttttt

SEQ ID NO: 49403 - DNA, 20 bp, synthetic construct
  misc_feature 1..20: note = Description of Artificial Sequence: Synthetic oligonucleotide
  misc_feature 1..20: note = Target: SCN10A; (-) strand; PAM type: YTN; PAM sequence: TTG
  source 1..20: mol_type = other DNA
agcaggaggtctgttctaat

SEQ ID NO: 49404 - DNA, 20 bp, synthetic construct
  misc_feature 1..20: note = Description of Artificial Sequence: Synthetic oligonucleotide
  misc_feature 1..20: note = Target: SCN10A; (-) strand; PAM type: YTN; PAM sequence: CTT
  source 1..20: mol_type = other DNA
gagcaggaggtctgttctaa

SEQ ID NO: 49405 - DNA, 20 bp, synthetic construct
  misc_feature 1..20: note = Description of Artificial Sequence: Synthetic oligonucleotide
  misc_feature 1..20: note = Target: SCN10A; (-) strand; PAM type: YTN; PAM sequence: CTA
  source 1..20: mol_type = other DNA
accttgagcaggaggtctgt

SEQ ID NO: 49406 - DNA, 20 bp, synthetic construct
  misc_feature 1..20: note = Description of Artificial Sequence: Synthetic oligonucleotide
  misc_feature 1..20: note = Target: SCN10A; (-) strand; PAM type: YTN; PAM sequence: CTC
  source 1..20: mol_type = other DNA
taaccttgagcaggaggtct

SEQ ID NO: 49407 - DNA, 20 bp, synthetic construct
  misc_feature 1..20: note = Description of Artificial Sequence: Synthetic oligonucleotide
  misc_feature 1..20: note = Target: SCN10A; (-) strand; PAM type: YTN; PAM sequence: TTG
  source 1..20: mol_type = other DNA
catccctctaaccttgagca

SEQ ID NO: 49408 - DNA, 20 bp, synthetic construct
  misc_feature 1..20: note = Description of Artificial Sequence: Synthetic oligonucleotide
  misc_feature 1..20: note = Target: SCN10A; (-) strand; PAM type: YTN; PAM sequence: TTG
  source 1..20: mol_type = other DNA
ccatagagcgtgattgcatc

SEQ ID NO: 49409 - DNA, 20 bp, synthetic construct
  misc_feature 1..20: note = Description of Artificial Sequence: Synthetic oligonucleotide
  misc_feature 1..20: note = Target: SCN10A; (-) strand; PAM type: YTN; PAM sequence: TTT
  source 1..20: mol_type = other DNA
gccatagagcgtgattgcat

SEQ ID NO: 49410 - DNA, 20 bp, synthetic construct
  misc_feature 1..20: note = Description of Artificial Sequence: Synthetic oligonucleotide
  misc_feature 1..20: note = Target: SCN10A; (-) strand; PAM type: YTN; PAM sequence: CTT
  source 1..20: mol_type = other DNA
tgccatagagcgtgattgca

SEQ ID NO: 49411 - DNA, 20 bp, synthetic construct
  misc_feature 1..20: note = Description of Artificial Sequence: Synthetic oligonucleotide
  misc_feature 1..20: note = Target: SCN10A; (-) strand; PAM type: YTN; PAM sequence: CTA
  source 1..20: mol_type = other DNA
tccacacactttgccataga

SEQ ID NO: 49412 - DNA, 20 bp, synthetic construct
  misc_feature 1..20: note = Description of Artificial Sequence: Synthetic oligonucleotide
  misc_feature 1..20: note = Target: SCN10A; (-) strand; PAM type: YTN; PAM sequence: TTC
  source 1..20: mol_type = other DNA
caagccaaagggtagaggaa

SEQ ID NO: 49413 - DNA, 20 bp, synthetic construct
  misc_feature 1..20: note = Description of Artificial Sequence: Synthetic oligonucleotide
  misc_feature 1..20: note = Target: SCN10A; (-) strand; PAM type: YTN; PAM sequence: CTA
  source 1..20: mol_type = other DNA
agttccaagccaaagggtag

SEQ ID NO: 49414 - DNA, 20 bp, synthetic construct
  misc_feature 1..20: note = Description of Artificial Sequence: Synthetic oligonucleotide
  misc_feature 1..20: note = Target: SCN10A; (-) strand; PAM type: YTN; PAM sequence: CTC
  source 1..20: mol_type = other DNA
cccagcaatgtatctaagtt

SEQ ID NO: 49415 - DNA, 20 bp, synthetic construct
  misc_feature 1..20: note = Description of Artificial Sequence: Synthetic oligonucleotide
  misc_feature 1..20: note = Target: SCN10A; (-) strand; PAM type: YTN; PAM sequence: CTC
  source 1..20: mol_type = other DNA
agtctccccagcaatgtatc

SEQ ID NO: 49416 - DNA, 20 bp, synthetic construct
  misc_feature 1..20: note = Description of Artificial Sequence: Synthetic oligonucleotide
  misc_feature 1..20: note = Target: SCN10A; (-) strand; PAM type: YTN; PAM sequence: CTA
  source 1..20: mol_type = other DNA
ccaatcaagtgggaatccac

SEQ ID NO: 49417 - DNA, 20 bp, synthetic construct
  misc_feature 1..20: note = Description of Artificial Sequence: Synthetic oligonucleotide
  misc_feature 1..20: note = Target: SCN10A; (-) strand; PAM type: YTN; PAM sequence: TTC
  source 1..20: mol_type = other DNA
taccaatcaagtgggaatcc

SEQ ID NO: 49418 - DNA, 20 bp, synthetic construct
  misc_feature 1..20: note = Description of Artificial Sequence: Synthetic oligonucleotide
  misc_feature 1..20: note = Target: SCN10A; (-) strand; PAM type: YTN; PAM sequence: TTA
  source 1..20: mol_type = other DNA
gaattctaccaatcaagtgg

SEQ ID NO: 49419 - DNA, 20 bp, synthetic construct
  misc_feature 1..20: note = Description of Artificial Sequence: Synthetic oligonucleotide
  misc_feature 1..20: note = Target: SCN10A; (-) strand; PAM type: YTN; PAM sequence: TTT
  source 1..20: mol_type = other DNA
agaattctaccaatcaagtg

SEQ ID NO: 49420 - DNA, 20 bp, synthetic construct
  misc_feature 1..20: note = Description of Artificial Sequence: Synthetic oligonucleotide
  misc_feature 1..20: note = Target: SCN10A; (-) strand; PAM type: YTN; PAM sequence: TTA
  source 1..20: mol_type = other DNA
atttagaattctaccaatca

SEQ ID NO: 49421 - DNA, 20 bp, synthetic construct
  misc_feature 1..20: note = Description of Artificial Sequence: Synthetic oligonucleotide
  misc_feature 1..20: note = Target: SCN10A; (-) strand; PAM type: YTN; PAM sequence: TTG
  source 1..20: mol_type = other DNA
ttaatttagaattctaccaa

SEQ ID NO: 49422 - DNA, 20 bp, synthetic construct
  misc_feature 1..20: note = Description of Artificial Sequence: Synthetic oligonucleotide
  misc_feature 1..20: note = Target: SCN10A; (-) strand; PAM type: YTN; PAM sequence: CTT
  source 1..20: mol_type = other DNA
gttaatttagaattctacca

SEQ ID NO: 49423 - DNA, 20 bp, synthetic construct
  misc_feature 1..20: note = Description of Artificial Sequence: Synthetic oligonucleotide
  misc_feature 1..20: note = Target: SCN10A; (-) strand; PAM type: YTN; PAM sequence: CTA
  source 1..20: mol_type = other DNA
agtccttgttaatttagaat

SEQ ID NO: 49424 - DNA, 20 bp, synthetic construct
  misc_feature 1..20: note = Description of Artificial Sequence: Synthetic oligonucleotide
  misc_feature 1..20: note = Target: SCN10A; (-) strand; PAM type: YTN; PAM sequence: TTA
  source 1..20: mol_type = other DNA
actaagtccttgttaattta

SEQ ID NO: 49425 - DNA, 20 bp, synthetic construct
  misc_feature 1..20: note = Description of Artificial Sequence: Synthetic oligonucleotide
  misc_feature 1..20: note = Target: SCN10A; (-) strand; PAM type: YTN; PAM sequence: TTT
  source 1..20: mol_type = other DNA
aactaagtccttgttaattt

SEQ ID NO: 49426 - DNA, 20 bp, synthetic construct
  misc_feature 1..20: note = Description of Artificial Sequence: Synthetic oligonucleotide
  misc_feature 1..20: note = Target: SCN10A; (-) strand; PAM type: YTN; PAM sequence: TTA
  source 1..20: mol_type = other DNA
atcagtcaatttaactaagt

SEQ ID NO: 49427 - DNA, 20 bp, synthetic construct
  misc_feature 1..20: note = Description of Artificial Sequence: Synthetic oligonucleotide
  misc_feature 1..20: note = Target: SCN10A; (-) strand; PAM type: YTN; PAM sequence: TTA
  source 1..20: mol_type = other DNA
agtccattaatcagtcaatt

SEQ ID NO: 49428 - DNA, 20 bp, synthetic construct
  misc_feature 1..20: note = Description of Artificial Sequence: Synthetic oligonucleotide
  misc_feature 1..20: note = Target: SCN10A; (-) strand; PAM type: YTN; PAM sequence: TTT
  source 1..20: mol_type = other DNA
aagtccattaatcagtcaat

SEQ ID NO: 49429 - DNA, 20 bp, synthetic construct
  misc_feature 1..20: note = Description of Artificial Sequence: Synthetic oligonucleotide
  misc_feature 1..20: note = Target: SCN10A; (-) strand; PAM type: YTN; PAM sequence: TTG
  source 1..20: mol_type = other DNA
gtagacaatttaagtccatt

SEQ ID NO: 49430 - DNA, 20 bp, synthetic construct
  misc_feature 1..20: note = Description of Artificial Sequence: Synthetic oligonucleotide
  misc_feature 1..20: note = Target: SCN10A; (-) strand; PAM type: YTN; PAM sequence: CTG
  source 1..20: mol_type = other DNA
aatattggtagacaatttaa

SEQ ID NO: 49431 - DNA, 20 bp, synthetic construct
  misc_feature 1..20: note = Description of Artificial Sequence: Synthetic oligonucleotide
  misc_feature 1..20: note = Target: SCN10A; (-) strand; PAM type: YTN; PAM sequence: TTA
  source 1..20: mol_type = other DNA
tgctgaatattggtagacaa

SEQ ID NO: 49432 - DNA, 20 bp, synthetic construct
  misc_feature 1..20: note = Description of Artificial Sequence: Synthetic oligonucleotide
  misc_feature 1..20: note = Target: SCN10A; (-) strand; PAM type: YTN; PAM sequence: TTC
  source 1..20: mol_type = other DNA
aagcccacattatgctgaat

SEQ ID NO: 49433 - DNA, 20 bp, synthetic construct
  misc_feature 1..20: note = Description of Artificial Sequence: Synthetic oligonucleotide
  misc_feature 1..20: note = Target: SCN10A; (-) strand; PAM type: YTN; PAM sequence: TTG
  source 1..20: mol_type = other DNA
ttcaagcccacattatgctg

SEQ ID NO: 49434 - DNA, 20 bp, synthetic construct
  misc_feature 1..20: note = Description of Artificial Sequence: Synthetic oligonucleotide
  misc_feature 1..20: note = Target: SCN10A; (-) strand; PAM type: YTN; PAM sequence: CTT
  source 1..20: mol_type = other DNA
gttcaagcccacattatgct

SEQ ID NO: 49435 - DNA, 20 bp, synthetic construct
  misc_feature 1..20: note = Description of Artificial Sequence: Synthetic oligonucleotide
  misc_feature 1..20: note = Target: SCN10A; (-) strand; PAM type: YTN; PAM sequence: TTC
  source 1..20: mol_type = other DNA
ttgttcaagcccacattatg

SEQ ID NO: 49436 - DNA, 20 bp, synthetic construct
  misc_feature 1..20: note = Description of Artificial Sequence: Synthetic oligonucleotide
  misc_feature 1..20: note = Target: SCN10A; (-) strand; PAM type: YTN; PAM sequence: TTT
  source 1..20: mol_type = other DNA
cttgttcaagcccacattat

SEQ ID NO: 49437 - DNA, 20 bp, synthetic construct
  misc_feature 1..20: note = Description of Artificial Sequence: Synthetic oligonucleotide
  misc_feature 1..20: note = Target: SCN10A; (-) strand; PAM type: YTN; PAM sequence: TTA
  source 1..20: mol_type = other DNA
atttcttgttcaagcccaca

SEQ ID NO: 49438 - DNA, 20 bp, synthetic construct
  misc_feature 1..20: note = Description of Artificial Sequence: Synthetic oligonucleotide
  misc_feature 1..20: note = Target: SCN10A; (-) strand; PAM type: YTN; PAM sequence: TTT
  source 1..20: mol_type = other DNA
aatttcttgttcaagcccac

SEQ ID NO: 49439 - DNA, 20 bp, synthetic construct
  misc_feature 1..20: note = Description of Artificial Sequence: Synthetic oligonucleotide
  misc_feature 1..20: note = Target: SCN10A; (-) strand; PAM type: YTN; PAM sequence: TTG
  source 1..20: mol_type = other DNA
taatttaatttcttgttcaa

SEQ ID NO: 49440 - DNA, 20 bp, synthetic construct
  misc_feature 1..20: note = Description of Artificial Sequence: Synthetic oligonucleotide
  misc_feature 1..20: note = Target: SCN10A; (-) strand; PAM type: YTN; PAM sequence: TTA
  source 1..20: mol_type = other DNA
cacagttgtaatttaatttc

SEQ ID NO: 49441 - DNA, 20 bp, synthetic construct
  misc_feature 1..20: note = Description of Artificial Sequence: Synthetic oligonucleotide
  misc_feature 1..20: note = Target: SCN10A; (-) strand; PAM type: YTN; PAM sequence: CTT
  source 1..20: mol_type = other DNA
acacagttgtaatttaattt

SEQ ID NO: 49442 - DNA, 20 bp, synthetic construct
  misc_feature 1..20: note = Description of Artificial Sequence: Synthetic oligonucleotide
  misc_feature 1..20: note = Target: SCN10A; (-) strand; PAM type: YTN; PAM sequence: TTG
  source 1..20: mol_type = other DNA
taacttacacagttgtaatt

SEQ ID NO: 49443 - DNA, 20 bp, synthetic construct
  misc_feature 1..20: note = Description of Artificial Sequence: Synthetic oligonucleotide
  misc_feature 1..20: note = Target: SCN10A; (-) strand; PAM type: YTN; PAM sequence: TTC
  source 1..20: mol_type = other DNA
atggttgtaacttacacagt

SEQ ID NO: 49444 - DNA, 20 bp, synthetic construct
  misc_feature 1..20: note = Description of Artificial Sequence: Synthetic oligonucleotide
  misc_feature 1..20: note = Target: SCN10A; (-) strand; PAM type: YTN; PAM sequence: TTT
  source 1..20: mol_type = other DNA
catggttgtaacttacacag

SEQ ID NO: 49445 - DNA, 20 bp, synthetic construct
  misc_feature 1..20: note = Description of Artificial Sequence: Synthetic oligonucleotide
  misc_feature 1..20: note = Target: SCN10A; (-) strand; PAM type: YTN; PAM sequence: TTT
  source 1..20: mol_type = other DNA
tcatggttgtaacttacaca

SEQ ID NO: 49446 - DNA, 20 bp, synthetic construct
  misc_feature 1..20: note = Description of Artificial Sequence: Synthetic oligonucleotide
  misc_feature 1..20: note = Target: SCN10A; (-) strand; PAM type: YTN; PAM sequence: TTT
  source 1..20: mol_type = other DNA
ttcatggttgtaacttacac

SEQ ID NO: 49447 - DNA, 20 bp, synthetic construct
  misc_feature 1..20: note = Description of Artificial Sequence: Synthetic oligonucleotide
  misc_feature 1..20: note = Target: SCN10A; (-) strand; PAM type: YTN; PAM sequence: TTA
  source 1..20: mol_type = other DNA
tatttttcatggttgtaact

SEQ ID NO: 49448 - DNA, 20 bp, synthetic construct
  misc_feature 1..20: note = Description of Artificial Sequence: Synthetic oligonucleotide
  misc_feature 1..20: note = Target: SCN10A; (-) strand; PAM type: YTN; PAM sequence: TTC
  source 1..20: mol_type = other DNA
ataattatatttttcatggt

SEQ ID NO: 49449 - DNA, 20 bp, synthetic construct
  misc_feature 1..20: note = Description of Artificial Sequence: Synthetic oligonucleotide
  misc_feature 1..20: note = Target: SCN10A; (-) strand; PAM type: YTN; PAM sequence: TTT
  source 1..20: mol_type = other DNA
cataattatatttttcatgg

SEQ ID NO: 49450 - DNA, 20 bp, synthetic construct
  misc_feature 1..20: note = Description of Artificial Sequence: Synthetic oligonucleotide
  misc_feature 1..20: note = Target: SCN10A; (-) strand; PAM type: YTN; PAM sequence: TTC
  source 1..20: mol_type = other DNA
atggtttcataattatattt

SEQ ID NO: 49451 - DNA, 20 bp, synthetic construct
  misc_feature 1..20: note = Description of Artificial Sequence: Synthetic oligonucleotide
  misc_feature 1..20: note = Target: SCN10A; (-) strand; PAM type: YTN; PAM sequence: TTT
  source 1..20: mol_type = other DNA
catggtttcataattatatt

SEQ ID NO: 49452 - DNA, 20 bp, synthetic construct
  misc_feature 1..20: note = Description of Artificial Sequence: Synthetic oligonucleotide
  misc_feature 1..20: note = Target: SCN10A; (-) strand; PAM type: YTN; PAM sequence: TTT
  source 1..20: mol_type = other DNA
tcatggtttcataattatat

SEQ ID NO: 49453 - DNA, 20 bp, synthetic construct
  misc_feature 1..20: note = Description of Artificial Sequence: Synthetic oligonucleotide
  misc_feature 1..20: note = Target: SCN10A; (-) strand; PAM type: YTN; PAM sequence: CTT
  source 1..20: mol_type = other DNA
ttcatggtttcataattata

SEQ ID NO: 49454 - DNA, 20 bp, synthetic construct
  misc_feature 1..20: note = Description of Artificial Sequence: Synthetic oligonucleotide
  misc_feature 1..20: note = Target: SCN10A; (-) strand; PAM type: YTN; PAM sequence: TTA
  source 1..20: mol_type = other DNA
tccttttcatggtttcataa

SEQ ID NO: 49455 - DNA, 20 bp, synthetic construct
  misc_feature 1..20: note = Description of Artificial Sequence: Synthetic oligonucleotide
  misc_feature 1..20: note = Target: SCN10A; (-) strand; PAM type: YTN; PAM sequence: TTC
  source 1..20: mol_type = other DNA
caacatggcaaaattatcct

SEQ ID NO: 49456 - DNA, 20 bp, synthetic construct
  misc_feature 1..20: note = Description of Artificial Sequence: Synthetic oligonucleotide
  misc_feature 1..20: note = Target: SCN10A; (-) strand; PAM type: YTN; PAM sequence: TTT
  source 1..20: mol_type = other DNA
ccaacatggcaaaattatcc

SEQ ID NO: 49457 - DNA, 20 bp, synthetic construct
  misc_feature 1..20: note = Description of Artificial Sequence: Synthetic oligonucleotide
  misc_feature 1..20: note = Target: SCN10A; (-) strand; PAM type: YTN; PAM sequence: TTT
  source 1..20: mol_type = other DNA
tccaacatggcaaaattatc

SEQ ID NO: 49458 - DNA, 20 bp, synthetic construct
  misc_feature 1..20: note = Description of Artificial Sequence: Synthetic oligonucleotide
  misc_feature 1..20: note = Target: SCN10A; (-) strand; PAM type: YTN; PAM sequence: TTA
  source 1..20: mol_type = other DNA
attttccaacatggcaaaat

SEQ ID NO: 49459 - DNA, 20 bp, synthetic construct
  misc_feature 1..20: note = Description of Artificial Sequence: Synthetic oligonucleotide
  misc_feature 1..20: note = Target: SCN10A; (-) strand; PAM type: YTN; PAM sequence: CTT
  source 1..20: mol_type = other DNA
aattttccaacatggcaaaa

SEQ ID NO: 49460 - DNA, 20 bp, synthetic construct
  misc_feature 1..20: note = Description of Artificial Sequence: Synthetic oligonucleotide
  misc_feature 1..20: note = Target: SCN10A; (-) strand; PAM type: YTN; PAM sequence: TTA
  source 1..20: mol_type = other DNA
accatccttaattttccaac

SEQ ID NO: 49461 - DNA, 20 bp, synthetic construct
  misc_feature 1..20: note = Description of Artificial Sequence: Synthetic oligonucleotide
  misc_feature 1..20: note = Target: SCN10A; (-) strand; PAM type: YTN; PAM sequence: TTT
  source 1..20: mol_type = other DNA
aaccatccttaattttccaa

SEQ ID NO: 49462 - DNA, 20 bp, synthetic construct
  misc_feature 1..20: note = Description of Artificial Sequence: Synthetic oligonucleotide
  misc_feature 1..20: note = Target: SCN10A; (-) strand; PAM type: YTN; PAM sequence: CTC
  source 1..20: mol_type = other DNA
cggtgtacaagaaatttaac

SEQ ID NO: 49463 - DNA, 20 bp, synthetic construct
  misc_feature 1..20: note = Description of Artificial Sequence: Synthetic oligonucleotide
  misc_feature 1..20: note = Target: SCN10A; (-) strand; PAM type: YTN; PAM sequence: CTC
  source 1..20: mol_type = other DNA
tccggtgtacaagaaattta

SEQ ID NO: 49464 - DNA, 20 bp, synthetic construct
  misc_feature 1..20: note = Description of Artificial Sequence: Synthetic oligonucleotide
  misc_feature 1..20: note = Target: SCN10A; (-) strand; PAM type: YTN; PAM sequence: TTC
  source 1..20: mol_type = other DNA
aggccagctctccggtgtac

SEQ ID NO: 49465 - DNA, 20 bp, synthetic construct
  misc_feature 1..20: note = Description of Artificial Sequence: Synthetic oligonucleotide
  misc_feature 1..20: note = Target: SCN10A; (-) strand; PAM type: YTN; PAM sequence: TTT
  source 1..20: mol_type = other DNA
caggccagctctccggtgta

SEQ ID NO: 49466 - DNA, 20 bp, synthetic construct
  misc_feature 1..20: note = Description of Artificial Sequence: Synthetic oligonucleotide
  misc_feature 1..20: note = Target: SCN10A; (-) strand; PAM type: YTN; PAM sequence: CTG
  source 1..20: mol_type = other DNA
gcaggcatcagagaatttca

SEQ ID NO: 49467 - DNA, 20 bp, synthetic construct
  misc_feature 1..20: note = Description of Artificial Sequence: Synthetic oligonucleotide
  misc_feature 1..20: note = Target: SCN10A; (-) strand; PAM type: YTN; PAM sequence: TTA
  source 1..20: mol_type = other DNA
aaagtgatctggcaggcatc

SEQ ID NO: 49468 - DNA, 20 bp, synthetic construct
  misc_feature 1..20: note = Description of Artificial Sequence: Synthetic oligonucleotide
  misc_feature 1..20: note = Target: SCN10A; (-) strand; PAM type: YTN; PAM sequence: TTT
  source 1..20: mol_type = other DNA
aaaagtgatctggcaggcat

SEQ ID NO: 49469 - DNA, 20 bp, synthetic construct
  misc_feature 1..20: note = Description of Artificial Sequence: Synthetic oligonucleotide
  misc_feature 1..20: note = Target: SCN10A; (-) strand; PAM type: YTN; PAM sequence: TTT
  source 1..20: mol_type = other DNA
taaaagtgatctggcaggca

SEQ ID NO: 49470 - DNA, 20 bp, synthetic construct
  misc_feature 1..20: note = Description of Artificial Sequence: Synthetic oligonucleotide
  misc_feature 1..20: note = Target: SCN10A; (-) strand; PAM type: YTN; PAM sequence: TTT
  source 1..20: mol_type = other DNA
ttaaaagtgatctggcaggc

SEQ ID NO: 49471 - DNA, 20 bp, synthetic construct
  misc_feature 1..20: note = Description of Artificial Sequence: Synthetic oligonucleotide
  misc_feature 1..20: note = Target: SCN10A; (-) strand; PAM type: YTN; PAM sequence: CTA
  source 1..20: mol_type = other DNA
gatttttaaaagtgatctgg

SEQ ID NO: 49472 - DNA, 20 bp, synthetic construct
  misc_feature 1..20: note = Description of Artificial Sequence: Synthetic oligonucleotide
  misc_feature 1..20: note = Target: SCN10A; (-) strand; PAM type: YTN; PAM sequence: TTG
  source 1..20: mol_type = other DNA
catgcatcacaaaactagat

SEQ ID NO: 49473 - DNA, 20 bp, synthetic construct
  misc_feature 1..20: note = Description of Artificial Sequence: Synthetic oligonucleotide
  misc_feature 1..20: note = Target: SCN10A; (-) strand; PAM type: YTN; PAM sequence: TTT
  source 1..20: mol_type = other DNA
gcatgcatcacaaaactaga

SEQ ID NO: 49474 - DNA, 20 bp, synthetic construct
  misc_feature 1..20: note = Description of Artificial Sequence: Synthetic oligonucleotide
  misc_feature 1..20: note = Target: SCN10A; (-) strand; PAM type: YTN; PAM sequence: CTT
  source 1..20: mol_type = other DNA
tgcatgcatcacaaaactag

SEQ ID NO: 49475 - DNA, 20 bp, synthetic construct
  misc_feature 1..20: note = Description of Artificial Sequence: Synthetic oligonucleotide
  misc_feature 1..20: note = Target: SCN10A; (-) strand; PAM type: YTN; PAM sequence: CTG
  source 1..20: mol_type = other DNA
ctttgcatgcatcacaaaac

SEQ ID NO: 49476 - DNA, 20 bp, synthetic construct
  misc_feature 1..20: note = Description of Artificial Sequence: Synthetic oligonucleotide
  misc_feature 1..20: note = Target: SCN10A; (-) strand; PAM type: YTN; PAM sequence: TTA
  source 1..20: mol_type = other DNA
gcatctgctttgcatgcatc

SEQ ID NO: 49477 - DNA, 20 bp, synthetic construct
  misc_feature 1..20: note = Description of Artificial Sequence: Synthetic oligonucleotide
  misc_feature 1..20: note = Target: SCN10A; (-) strand; PAM type: YTN; PAM sequence: TTC
  source 1..20: mol_type = other DNA
aaattagcatctgctttgca

SEQ ID NO: 49478 - DNA, 20 bp, synthetic construct
  misc_feature 1..20: note = Description of Artificial Sequence: Synthetic oligonucleotide
  misc_feature 1..20: note = Target: SCN10A; (-) strand; PAM type: YTN; PAM sequence: TTG
  source 1..20: mol_type = other DNA
ttcaaattagcatctgcttt

SEQ ID NO: 49479 - DNA, 20 bp, synthetic construct
  misc_feature 1..20: note = Description of Artificial Sequence: Synthetic oligonucleotide
  misc_feature 1..20: note = Target: SCN10A; (-) strand; PAM type: YTN; PAM sequence: CTT
  source 1..20: mol_type = other DNA
gttcaaattagcatctgctt

SEQ ID NO: 49480 - DNA, 20 bp, synthetic construct
  misc_feature 1..20: note = Description of Artificial Sequence: Synthetic oligonucleotide
  misc_feature 1..20: note = Target: SCN10A; (-) strand; PAM type: YTN; PAM sequence: CTC
  source 1..20: mol_type = other DNA
ttgttcaaattagcatctgc

SEQ ID NO: 49481 - DNA, 20 bp, synthetic construct
  misc_feature 1..20: note = Description of Artificial Sequence: Synthetic oligonucleotide
  misc_feature 1..20: note = Target: SCN10A; (-) strand; PAM type: YTN; PAM sequence: CTC
  source 1..20: mol_type = other DNA
atctcttgttcaaattagca

SEQ ID NO: 49482 - DNA, 20 bp, synthetic construct
  misc_feature 1..20: note = Description of Artificial Sequence: Synthetic oligonucleotide
  misc_feature 1..20: note = Target: SCN10A; (-) strand; PAM type: YTN; PAM sequence: CTA
  source 1..20: mol_type = other DNA
gctcatctcttgttcaaatt

SEQ ID NO: 49483 - DNA, 20 bp, synthetic construct
  misc_feature 1..20: note = Description of Artificial Sequence: Synthetic oligonucleotide
  misc_feature 1..20: note = Target: SCN10A; (-) strand; PAM type: YTN; PAM sequence: TTG
  source 1..20: mol_type = other DNA
atgaataaaatatcctagct

SEQ ID NO: 49484 - DNA, 20 bp, synthetic construct
  misc_feature 1..20: note = Description of Artificial Sequence: Synthetic oligonucleotide
  misc_feature 1..20: note = Target: SCN10A; (-) strand; PAM type: YTN; PAM sequence: TTT
  source 1..20: mol_type = other DNA
gatgaataaaatatcctagc

SEQ ID NO: 49485 - DNA, 20 bp, synthetic construct
  misc_feature 1..20: note = Description of Artificial Sequence: Synthetic oligonucleotide
  misc_feature 1..20: note = Target: SCN10A; (-) strand; PAM type: YTN; PAM sequence: TTC
  source 1..20: mol_type = other DNA
aaaaacaaaataatttgatg

SEQ ID NO: 49486 - DNA, 20 bp, synthetic construct
  misc_feature 1..20: note = Description of Artificial Sequence: Synthetic oligonucleotide
  misc_feature 1..20: note = Target: SCN10A; (-) strand; PAM type: YTN; PAM sequence: TTT
  source 1..20: mol_type = other DNA
caaaaacaaaataatttgat

SEQ ID NO: 49487 - DNA, 20 bp, synthetic construct
  misc_feature 1..20: note = Description of Artificial Sequence: Synthetic oligonucleotide
  misc_feature 1..20: note = Target: SCN10A; (-) strand; PAM type: YTN; PAM sequence: TTT
  source 1..20: mol_type = other DNA
tcaaaaacaaaataatttga

SEQ ID NO: 49488 - DNA, 20 bp, synthetic construct
  misc_feature 1..20: note = Description of Artificial Sequence: Synthetic oligonucleotide
  misc_feature 1..20: note = Target: SCN10A; (-) strand; PAM type: YTN; PAM sequence: TTT
  source 1..20: mol_type = other DNA
ttcaaaaacaaaataatttg

SEQ ID NO: 49489 - DNA, 20 bp, synthetic construct
  misc_feature 1..20: note = Description of Artificial Sequence: Synthetic oligonucleotide
  misc_feature 1..20: note = Target: SCN10A; (-) strand; PAM type: YTN; PAM sequence: TTA
  source 1..20: mol_type = other DNA
gatgcataatttttcaaaaa

SEQ ID NO: 49490 - DNA, 20 bp, synthetic construct
  misc_feature 1..20: note = Description of Artificial Sequence: Synthetic oligonucleotide
  misc_feature 1..20: note = Target: SCN10A; (-) strand; PAM type: YTN; PAM sequence: TTT
  source 1..20: mol_type = other DNA
agatgcataatttttcaaaa

SEQ ID NO: 49491 - DNA, 20 bp, synthetic construct
  misc_feature 1..20: note = Description of Artificial Sequence: Synthetic oligonucleotide
  misc_feature 1..20: note = Target: SCN10A; (-) strand; PAM type: YTN; PAM sequence: TTT
  source 1..20: mol_type = other DNA
tagatgcataatttttcaaa

SEQ ID NO: 49492 - DNA, 20 bp, synthetic construct
  misc_feature 1..20: note = Description of Artificial Sequence: Synthetic oligonucleotide
  misc_feature 1..20: note = Target: SCN10A; (-) strand; PAM type: YTN; PAM sequence: TTT
  source 1..20: mol_type = other DNA
ttagatgcataatttttcaa

SEQ ID NO: 49493 - DNA, 20 bp, synthetic construct
  misc_feature 1..20: note = Description of Artificial Sequence: Synthetic oligonucleotide
  misc_feature 1..20: note = Target: SCN10A; (-) strand; PAM type: YTN; PAM sequence: TTT
  source 1..20: mol_type = other DNA
tttagatgcataatttttca

SEQ ID NO: 49494 - DNA, 20 bp, synthetic construct
  misc_feature 1..20: note = Description of Artificial Sequence: Synthetic oligonucleotide
  misc_feature 1..20: note = Target: SCN10A; (-) strand; PAM type: YTN; PAM sequence: TTA
  source 1..20: mol_type = other DNA
tcaatgtggttttttagatg

SEQ ID NO: 49495 - DNA, 20 bp, synthetic construct
  misc_feature 1..20: note = Description of Artificial Sequence: Synthetic oligonucleotide
  misc_feature 1..20: note = Target: SCN10A; (-) strand; PAM type: YTN; PAM sequence: TTT
  source 1..20: mol_type = other DNA
atcaatgtggttttttagat

SEQ ID NO: 49496 - DNA, 20 bp, synthetic construct
  misc_feature 1..20: note = Description of Artificial Sequence: Synthetic oligonucleotide
  misc_feature 1..20: note = Target: SCN10A; (-) strand; PAM type: YTN; PAM sequence: TTT
  source 1..20: mol_type = other DNA
tatcaatgtggttttttaga

SEQ ID NO: 49497 - DNA, 20 bp, synthetic construct
  misc_feature 1..20: note = Description of Artificial Sequence: Synthetic oligonucleotide
  misc_feature 1..20: note = Target: SCN10A; (-) strand; PAM type: YTN; PAM sequence: CTT
  source 1..20: mol_type = other DNA
ttatcaatgtggttttttag

SEQ ID NO: 49498 - DNA, 20 bp, synthetic construct
  misc_feature 1..20: note = Description of Artificial Sequence: Synthetic oligonucleotide
  misc_feature 1..20: note = Target: SCN10A; (-) strand; PAM type: YTN; PAM sequence: TTA
  source 1..20: mol_type = other DNA
ggccccaccatcttttatca

SEQ ID NO: 49499 - DNA, 20 bp, synthetic construct
  misc_feature 1..20: note = Description of Artificial Sequence: Synthetic oligonucleotide
  misc_feature 1..20: note = Target: SCN10A; (-) strand; PAM type: YTN; PAM sequence: CTT
  source 1..20: mol_type = other DNA
aggccccaccatcttttatc

SEQ ID NO: 49500 - DNA, 20 bp, synthetic construct
  misc_feature 1..20: note = Description of Artificial Sequence: Synthetic oligonucleotide
  misc_feature 1..20: note = Target: SCN10A; (-) strand; PAM type: YTN; PAM sequence: TTA
  source 1..20: mol_type = other DNA
tgtcttaggccccaccatct

SEQ ID NO: 49501 - DNA, 20 bp, synthetic construct
  misc_feature 1..20: note = Description of Artificial Sequence: Synthetic oligonucleotide
  misc_feature 1..20: note = Target: SCN10A; (-) strand; PAM type: YTN; PAM sequence: CTT
  source 1..20: mol_type = other DNA
atgtcttaggccccaccatc

SEQ ID NO: 49502 - DNA, 20 bp, synthetic construct
  misc_feature 1..20: note = Description of Artificial Sequence: Synthetic oligonucleotide
  misc_feature 1..20: note = Target: SCN10A; (-) strand; PAM type: YTN; PAM sequence: TTC
  source 1..20: mol_type = other DNA
ttatgtcttaggccccacca

SEQ ID NO: 49503 - DNA, 20 bp, synthetic construct
  misc_feature 1..20: note = Description of Artificial Sequence: Synthetic oligonucleotide
  misc_feature 1..20: note = Target: SCN10A; (-) strand; PAM type: YTN; PAM sequence: CTC
  source 1..20: mol_type = other DNA
attcttatgtcttaggcccc

SEQ ID NO: 49504 - DNA, 20 bp, synthetic construct
  misc_feature 1..20: note = Description of Artificial Sequence: Synthetic oligonucleotide
  misc_feature 1..20: note = Target: SCN10A; (-) strand; PAM type: YTN; PAM sequence: CTC
  source 1..20: mol_type = other DNA
ctcattcttatgtcttaggc

SEQ ID NO: 49505 - DNA, 20 bp, synthetic construct
  misc_feature 1..20: note = Description of Artificial Sequence: Synthetic oligonucleotide
  misc_feature 1..20: note = Target: SCN10A; (-) strand; PAM type: YTN; PAM sequence: CTA
  source 1..20: mol_type = other DNA
atactcctcattcttatgtc

SEQ ID NO: 49506 - DNA, 20 bp, synthetic construct
  misc_feature 1..20: note = Description of Artificial Sequence: Synthetic oligonucleotide
  misc_feature 1..20: note = Target: SCN10A; (-) strand; PAM type: YTN; PAM sequence: TTC
  source 1..20: mol_type = other DNA
ctaatactcctcattcttat

SEQ ID NO: 49507 - DNA, 20 bp, synthetic construct
  misc_feature 1..20: note = Description of Artificial Sequence: Synthetic oligonucleotide
  misc_feature 1..20: note = Target: SCN10A; (-) strand; PAM type: YTN; PAM sequence: CTG
  source 1..20: mol_type = other DNA
gaattcctaatactcctcat

SEQ ID NO: 49508 - DNA, 20 bp, synthetic construct
  misc_feature 1..20: note = Description of Artificial Sequence: Synthetic oligonucleotide
  misc_feature 1..20: note = Target: SCN10A; (-) strand; PAM type: YTN; PAM sequence: CTG
  source 1..20: mol_type = other DNA
tgtactggaattcctaatac

SEQ ID NO: 49509 - DNA, 20 bp, synthetic construct
  misc_feature 1..20: note = Description of Artificial Sequence: Synthetic oligonucleotide
  misc_feature 1..20: note = Target: SCN10A; (-) strand; PAM type: YTN; PAM sequence: CTC
  source 1..20: mol_type = other DNA
tgtgtactggaattcctaat

SEQ ID NO: 49510 - DNA, 20 bp, synthetic construct
  misc_feature 1..20: note = Description of Artificial Sequence: Synthetic oligonucleotide
  misc_feature 1..20: note = Target: SCN10A; (-) strand; PAM type: YTN; PAM sequence: CTC
  source 1..20: mol_type = other DNA
gtgtcaaagcgtccatctct

SEQ ID NO: 49511 - DNA, 20 bp, synthetic construct
  misc_feature 1..20: note = Description of Artificial Sequence: Synthetic oligonucleotide
  misc_feature 1..20: note = Target: SCN10A; (-) strand; PAM type: YTN; PAM sequence: CTA
  source 1..20: mol_type = other DNA
actcgtgtcaaagcgtccat

SEQ ID NO: 49512 - DNA, 20 bp, synthetic construct
  misc_feature 1..20: note = Description of Artificial Sequence: Synthetic oligonucleotide
  misc_feature 1..20: note = Target: SCN10A; (-) strand; PAM type: YTN; PAM sequence: CTC
  source 1..20: mol_type = other DNA
taactcgtgtcaaagcgtcc

SEQ ID NO: 49513 - DNA, 20 bp, synthetic construct
  misc_feature 1..20: note = Description of Artificial Sequence: Synthetic oligonucleotide
  misc_feature 1..20: note = Target: SCN10A; (-) strand; PAM type: YTN; PAM sequence: TTC
  source 1..20: mol_type = other DNA
ccatgtgagcagcagaagca

SEQ ID NO: 49514 - DNA, 20 bp, synthetic construct
  misc_feature 1..20: note = Description of Artificial Sequence: Synthetic oligonucleotide
  misc_feature 1..20: note = Target: SCN10A; (-) strand; PAM type: YTN; PAM sequence: CTG
  source 1..20: mol_type = other DNA
tgtcatgatgaattcccatg

SEQ ID NO: 49515 - DNA, 20 bp, synthetic construct
  misc_feature 1..20: note = Description of Artificial Sequence: Synthetic oligonucleotide
  misc_feature 1..20: note = Target: SCN10A; (-) strand; PAM type: YTN; PAM sequence: TTC
  source 1..20: mol_type = other DNA
atccactgtgtcatgatgaa

SEQ ID NO: 49516 - DNA, 20 bp, synthetic construct
  misc_feature 1..20: note = Description of Artificial Sequence: Synthetic oligonucleotide
  misc_feature 1..20: note = Target: SCN10A; (-) strand; PAM type: YTN; PAM sequence: TTG
  source 1..20: mol_type = other DNA
ttcatccactgtgtcatgat

SEQ ID NO: 49517 - DNA, 20 bp, synthetic construct
  misc_feature 1..20: note = Description of Artificial Sequence: Synthetic oligonucleotide
  misc_feature 1..20: note = Target: SCN10A; (-) strand; PAM type: YTN; PAM sequence: CTG
  source 1..20: mol_type = other DNA
cattgttcatccactgtgtc

SEQ ID NO: 49518 - DNA, 20 bp, synthetic construct
  misc_feature 1..20: note = Description of Artificial Sequence: Synthetic oligonucleotide
  misc_feature 1..20: note = Target: SCN10A; (-) strand; PAM type: YTN; PAM sequence: CTC
  source 1..20: mol_type = other DNA
actgcattgttcatccactg

SEQ ID NO: 49519 - DNA, 20 bp, synthetic construct
  misc_feature 1..20: note = Description of Artificial Sequence: Synthetic oligonucleotide
  misc_feature 1..20: note = Target: SCN10A; (-) strand; PAM type: YTN; PAM sequence: CTG
  source 1..20: mol_type = other DNA
ctcactgcattgttcatcca

SEQ ID NO: 49520 - DNA, 20 bp, synthetic construct
  misc_feature 1..20: note = Description of Artificial Sequence: Synthetic oligonucleotide
  misc_feature 1..20: note = Target: SCN10A; (-) strand; PAM type: YTN; PAM sequence: TTG
  source 1..20: mol_type = other DNA
agggtaagtgctgctcactg

SEQ ID NO: 49521 - DNA, 20 bp, synthetic construct
  misc_feature 1..20: note = Description of Artificial Sequence: Synthetic oligonucleotide
  misc_feature 1..20: note = Target: SCN10A; (-) strand; PAM type: YTN; PAM sequence: CTT
  source 1..20: mol_type = other DNA
gagggtaagtgctgctcact

SEQ ID NO: 49522 - DNA, 20 bp, synthetic construct
  misc_feature 1..20: note = Description of Artificial Sequence: Synthetic oligonucleotide
  misc_feature 1..20: note = Target: SCN10A; (-) strand; PAM type: YTN; PAM sequence: CTC
  source 1..20: mol_type = other DNA
cgtccttgagggtaagtgct

SEQ ID NO: 49523 - DNA, 20 bp, synthetic construct
  misc_feature 1..20: note = Description of Artificial Sequence: Synthetic oligonucleotide
  misc_feature 1..20: note = Target: SCN10A; (-) strand; PAM type: YTN; PAM sequence: TTG
  source 1..20: mol_type = other DNA
tcagtatcataacctccgtc

SEQ ID NO: 49524 - DNA, 20 bp, synthetic construct
  misc_feature 1..20: note = Description of Artificial Sequence: Synthetic oligonucleotide
  misc_feature 1..20: note = Target: SCN10A; (-) strand; PAM type: YTN; PAM sequence: TTC
  source 1..20: mol_type = other DNA
cgggcccaaagggcaatgag

SEQ ID NO: 49525 - DNA, 20 bp, synthetic construct
  misc_feature 1..20: note = Description of Artificial Sequence: Synthetic oligonucleotide
  misc_feature 1..20: note = Target: SCN10A; (-) strand; PAM type: YTN; PAM sequence: TTT
  source 1..20: mol_type = other DNA
ccgggcccaaagggcaatga

SEQ ID NO: 49526 - DNA, 20 bp, synthetic construct
  misc_feature 1..20: note = Description of Artificial Sequence: Synthetic oligonucleotide
  misc_feature 1..20: note = Target: SCN10A; (-) strand; PAM type: YTN; PAM sequence: CTT
  source 1..20: mol_type = other DNA
tccgggcccaaagggcaatg

SEQ ID NO: 49527 - DNA, 20 bp, synthetic construct
  misc_feature 1..20: note = Description of Artificial Sequence: Synthetic oligonucleotide
  misc_feature 1..20: note = Target: SCN10A; (-) strand; PAM type: YTN; PAM sequence: TTA
  source 1..20: mol_type = other DNA
gatgaacctttccgggccca

SEQ ID NO: 49528 - DNA, 20 bp, synthetic construct
  misc_feature 1..20: note = Description of Artificial Sequence: Synthetic oligonucleotide
  misc_feature 1..20: note = Target: SCN10A; (-) strand; PAM type: YTN; PAM sequence: CTT
  source 1..20: mol_type = other DNA
agatgaacctttccgggccc

SEQ ID NO: 49529 - DNA, 20 bp, synthetic construct
  misc_feature 1..20: note = Description of Artificial Sequence: Synthetic oligonucleotide
  misc_feature 1..20: note = Target: SCN10A; (-) strand; PAM type: YTN; PAM sequence: TTG
  source 1..20: mol_type = other DNA
tcagcagaatacttagatga

SEQ ID NO: 49530 - DNA, 20 bp, synthetic construct
  misc_feature 1..20: note = Description of Artificial Sequence: Synthetic oligonucleotide
  misc_feature 1..20: note = Target: SCN10A; (-) strand; PAM type: YTN; PAM sequence: CTT
  source 1..20: mol_type = other DNA
gtcagcagaatacttagatg

SEQ ID NO: 49531 - DNA, 20 bp, synthetic construct
  misc_feature 1..20: note = Description of Artificial Sequence: Synthetic oligonucleotide
  misc_feature 1..20: note = Target: SCN10A; (-) strand; PAM type: YTN; PAM sequence: TTC
  source 1..20: mol_type = other DNA
ttgtcagcagaatacttaga

SEQ ID NO: 49532 - DNA, 20 bp, synthetic construct
  misc_feature 1..20: note = Description of Artificial Sequence: Synthetic oligonucleotide
  misc_feature 1..20: note = Target: SCN10A; (-) strand; PAM type: YTN; PAM sequence: TTT
  source 1..20: mol_type = other DNA
cttgtcagcagaatacttag

SEQ ID NO: 49533 - DNA, 20 bp, synthetic construct
  misc_feature 1..20: note = Description of Artificial Sequence: Synthetic oligonucleotide
  misc_feature 1..20: note = Target: SCN10A; (-) strand; PAM type: YTN; PAM sequence: CTT
  source 1..20: mol_type = other DNA
tcttgtcagcagaatactta

SEQ ID NO: 49534 - DNA, 20 bp, synthetic construct
  misc_feature 1..20: note = Description of Artificial Sequence: Synthetic oligonucleotide
  misc_feature 1..20: note = Target: SCN10A; (-) strand; PAM type: YTN; PAM sequence: TTC
  source 1..20: mol_type = other DNA
gatgcaggacaaaagaagac

SEQ ID NO: 49535 - DNA, 20 bp, synthetic construct
  misc_feature 1..20: note = Description of Artificial Sequence: Synthetic oligonucleotide
  misc_feature 1..20: note = Target: SCN10A; (-) strand; PAM type: YTN; PAM sequence: CTC
  source 1..20: mol_type = other DNA
aacaggcattcgatgcagga

SEQ ID NO: 49536 - DNA, 20 bp, synthetic construct
  misc_feature 1..20: note = Description of Artificial Sequence: Synthetic oligonucleotide
  misc_feature 1..20: note = Target: SCN10A; (-) strand; PAM type: YTN; PAM sequence: TTG
  source 1..20: mol_type = other DNA
tgtctcaacaggcattcgat

SEQ ID NO: 49537 - DNA, 20 bp, synthetic construct
  misc_feature 1..20: note = Description of Artificial Sequence: Synthetic oligonucleotide
  misc_feature 1..20: note = Target: SCN10A; (-) strand; PAM type: YTN; PAM sequence: TTT
  source 1..20: mol_type = other DNA
gtgtctcaacaggcattcga

SEQ ID NO: 49538 - DNA, 20 bp, synthetic construct
  misc_feature 1..20: note = Description of Artificial Sequence: Synthetic oligonucleotide
  misc_feature 1..20: note = Target: SCN10A; (-) strand; PAM type: YTN; PAM sequence: CTG
  source 1..20: mol_type = other DNA
tttgtgtctcaacaggcatt

SEQ ID NO: 49539 - DNA, 20 bp, synthetic construct
  misc_feature 1..20: note = Description of Artificial Sequence: Synthetic oligonucleotide
  misc_feature 1..20: note = Target: SCN10A; (-) strand; PAM type: YTN; PAM sequence: CTC
  source 1..20: mol_type = other DNA
tgtttgtgtctcaacaggca

SEQ ID NO: 49540 - DNA, 20 bp, synthetic construct
  misc_feature 1..20: note = Description of Artificial Sequence: Synthetic oligonucleotide
  misc_feature 1..20: note = Target: SCN10A; (-) strand; PAM type: YTN; PAM sequence: CTG
  source 1..20: mol_type = other DNA
actctgtttgtgtctcaaca

SEQ ID NO: 49541 - DNA, 20 bp, synthetic construct
  misc_feature 1..20: note = Description of Artificial Sequence: Synthetic oligonucleotide
  misc_feature 1..20: note = Target: SCN10A; (-) strand; PAM type: YTN; PAM sequence: TTA
  source 1..20: mol_type = other DNA
aaggagcgtcctgactctgt

SEQ ID NO: 49542 - DNA, 20 bp, synthetic construct
  misc_feature 1..20: note = Description of Artificial Sequence: Synthetic oligonucleotide
  misc_feature 1..20: note = Target: SCN10A; (-) strand; PAM type: YTN; PAM sequence: TTG
  source 1..20: mol_type = other DNA
ccatgaagatgtcaggttaa

SEQ ID NO: 49543 - DNA, 20 bp, synthetic construct
  misc_feature 1..20: note = Description of Artificial Sequence: Synthetic oligonucleotide
  misc_feature 1..20: note = Target: SCN10A; (-) strand; PAM type: YTN; PAM sequence: TTT
  source 1..20: mol_type = other DNA
gccatgaagatgtcaggtta

SEQ ID NO: 49544 - DNA, 20 bp, synthetic construct
  misc_feature 1..20: note = Description of Artificial Sequence: Synthetic oligonucleotide
  misc_feature 1..20: note = Target: SCN10A; (-) strand; PAM type: YTN; PAM sequence: CTT
  source 1..20: mol_type = other DNA
tgccatgaagatgtcaggtt

SEQ ID NO: 49545 - DNA, 20 bp, synthetic construct
  misc_feature 1..20: note = Description of Artificial Sequence: Synthetic oligonucleotide
  misc_feature 1..20: note = Target: SCN10A; (-) strand; PAM type: YTN; PAM sequence: CTG
  source 1..20: mol_type = other DNA
aatgatccaactttgccatg

SEQ ID NO: 49546 - DNA, 20 bp, synthetic construct
  misc_feature 1..20: note = Description of Artificial Sequence: Synthetic oligonucleotide
  misc_feature 1..20: note = Target: SCN10A; (-) strand; PAM type: YTN; PAM sequence: TTG
  source 1..20: mol_type = other DNA
gccaataagaggctgaatga

SEQ ID NO: 49547 - DNA, 20 bp, synthetic construct
  misc_feature 1..20: note = Description of Artificial Sequence: Synthetic oligonucleotide
  misc_feature 1..20: note = Target: SCN10A; (-) strand; PAM type: YTN; PAM sequence: CTA
  source 1..20: mol_type = other DNA
tatatgagattggccaataa

SEQ ID NO: 49548 - DNA, 20 bp, synthetic construct
  misc_feature 1..20: note = Description of Artificial Sequence: Synthetic oligonucleotide
  misc_feature 1..20: note = Target: SCN10A; (-) strand; PAM type: YTN; PAM sequence: CTG
  source 1..20: mol_type = other DNA
taagtgacatatgactatat

SEQ ID NO: 49549 - DNA, 20 bp, synthetic construct
  misc_feature 1..20: note = Description of Artificial Sequence: Synthetic oligonucleotide
  misc_feature 1..20: note = Target: SCN10A; (-) strand; PAM type: YTN; PAM sequence: CTA
  source 1..20: mol_type = other DNA
tctgtaagtgacatatgact

SEQ ID NO: 49550 - DNA, 20 bp, synthetic construct
  misc_feature 1..20: note = Description of Artificial Sequence: Synthetic oligonucleotide
  misc_feature 1..20: note = Target: SCN10A; (-) strand; PAM type: YTN; PAM sequence: CTC
  source 1..20: mol_type = other DNA
tatctgtaagtgacatatga

SEQ ID NO: 49551 - DNA, 20 bp, synthetic construct
  misc_feature 1..20: note = Description of Artificial Sequence: Synthetic oligonucleotide
  misc_feature 1..20: note = Target: SCN10A; (-) strand; PAM type: YTN; PAM sequence: TTG
  source 1..20: mol_type = other DNA
tcagaacatatctctatctg

SEQ ID NO: 49552 - DNA, 20 bp, synthetic construct
  misc_feature 1..20: note = Description of Artificial Sequence: Synthetic oligonucleotide
  misc_feature 1..20: note = Target: SCN10A; (-) strand; PAM type: YTN; PAM sequence: TTT
  source 1..20: mol_type = other DNA
gtcagaacatatctctatct

SEQ ID NO: 49553 - DNA, 20 bp, synthetic construct
  misc_feature 1..20: note = Description of Artificial Sequence: Synthetic oligonucleotide
  misc_feature 1..20: note = Target: SCN10A; (-) strand; PAM type: YTN; PAM sequence: CTA
  source 1..20: mol_type = other DNA
atgatgtatttgtcagaaca

SEQ ID NO: 49554 - DNA, 20 bp, synthetic construct
  misc_feature 1..20: note = Description of Artificial Sequence: Synthetic oligonucleotide
  misc_feature 1..20: note = Target: SCN10A; (-) strand; PAM type: YTN; PAM sequence: TTC
  source 1..20: mol_type = other DNA
acagaatgatgaaatcacct

SEQ ID NO: 49555 - DNA, 20 bp, synthetic construct
  misc_feature 1..20: note = Description of Artificial Sequence: Synthetic oligonucleotide
  misc_feature 1..20: note = Target: SCN10A; (-) strand; PAM type: YTN; PAM sequence: TTG
  source 1..20: mol_type = other DNA
tgtaaatacaatgtaggata

SEQ ID NO: 49556 - DNA, 20 bp, synthetic construct
  misc_feature 1..20: note = Description of Artificial Sequence: Synthetic oligonucleotide
  misc_feature 1..20: note = Target: SCN10A; (-) strand; PAM type: YTN; PAM sequence: TTT
  source 1..20: mol_type = other DNA
gtgtaaatacaatgtaggat

SEQ ID NO: 49557 - DNA, 20 bp, synthetic construct
  misc_feature 1..20: note = Description of Artificial Sequence: Synthetic oligonucleotide
  misc_feature 1..20: note = Target: SCN10A; (-) strand; PAM type: YTN; PAM sequence: TTG
  source 1..20: mol_type = other DNA
tttgtgtaaatacaatgtag

SEQ ID NO: 49558 - DNA, 20 bp, synthetic construct
  misc_feature 1..20: note = Description of Artificial Sequence: Synthetic oligonucleotide
  misc_feature 1..20: note = Target: SCN10A; (-) strand; PAM type: YTN; PAM sequence: TTT
  source 1..20: mol_type = other DNA
gtttgtgtaaatacaatgta

SEQ ID NO: 49559 - DNA, 20 bp, synthetic construct
  misc_feature 1..20: note = Description of Artificial Sequence: Synthetic oligonucleotide
  misc_feature 1..20: note = Target: SCN10A; (-) strand; PAM type: YTN; PAM sequence: CTA
  source 1..20: mol_type = other DNA
tagcatttgtttgtgtaaat

SEQ ID NO: 49560 - DNA, 20 bp, synthetic construct
  misc_feature 1..20: note = Description of Artificial Sequence: Synthetic oligonucleotide
  misc_feature 1..20: note = Target: SCN10A; (-) strand; PAM type: YTN; PAM sequence: CTA
  source 1..20: mol_type = other DNA
gatgtatagaaggctatagc

SEQ ID NO: 49561 - DNA, 20 bp, synthetic construct
  misc_feature 1..20: note = Description of Artificial Sequence: Synthetic oligonucleotide
  misc_feature 1..20: note = Target: SCN10A; (-) strand; PAM type: YTN; PAM sequence: TTA
  source 1..20: mol_type = other DNA
gcctagatgtatagaaggct

SEQ ID NO: 49562 - DNA, 20 bp, synthetic construct
  misc_feature 1..20: note = Description of Artificial Sequence: Synthetic oligonucleotide
  misc_feature 1..20: note = Target: SCN10A; (-) strand; PAM type: YTN; PAM sequence: TTT
  source 1..20: mol_type = other DNA
agcctagatgtatagaaggc

SEQ ID NO: 49563 - DNA, 20 bp, synthetic construct
  misc_feature 1..20: note = Description of Artificial Sequence: Synthetic oligonucleotide
  misc_feature 1..20: note = Target: SCN10A; (-) strand; PAM type: YTN; PAM sequence: CTA
  source 1..20: mol_type = other DNA
tttagcctagatgtatagaa

SEQ ID NO: 49564 - DNA, 20 bp, synthetic construct
  misc_feature 1..20: note = Description of Artificial Sequence: Synthetic oligonucleotide
  misc_feature 1..20: note = Target: SCN10A; (-) strand; PAM type: YTN; PAM sequence: CTA
  source 1..20: mol_type = other DNA
ggagcaataggccacactat

SEQ ID NO: 49565 - DNA, 20 bp, synthetic construct
  misc_feature 1..20: note = Description of Artificial Sequence: Synthetic oligonucleotide
  misc_feature 1..20: note = Target: SCN10A; (-) strand; PAM type: YTN; PAM sequence: TTG
  source 1..20: mol_type = other DNA
tagcctaggagcaataggcc

SEQ ID NO: 49566 - DNA, 20 bp, synthetic construct
  misc_feature 1..20: note = Description of Artificial Sequence: Synthetic oligonucleotide
  misc_feature 1..20: note = Target: SCN10A; (-) strand; PAM type: YTN; PAM sequence: TTT
  source 1..20: mol_type = other DNA
gtagcctaggagcaataggc

SEQ ID NO: 49567 - DNA, 20 bp, synthetic construct
  misc_feature 1..20: note = Description of Artificial Sequence: Synthetic oligonucleotide
  misc_feature 1..20: note = Target: SCN10A; (-) strand; PAM type: YTN; PAM sequence: CTG
  source 1..20: mol_type = other DNA
tacagatttgtagcctagga

SEQ ID NO: 49568 - DNA, 20 bp, synthetic construct
  misc_feature 1..20: note = Description of Artificial Sequence: Synthetic oligonucleotide
  misc_feature 1..20: note = Target: SCN10A; (-) strand; PAM type: YTN; PAM sequence: TTC
  source 1..20: mol_type = other DNA
agcaataacatgctgtacag

SEQ ID NO: 49569 - DNA, 20 bp, synthetic construct
  misc_feature 1..20: note = Description of Artificial Sequence: Synthetic oligonucleotide
  misc_feature 1..20: note = Target: SCN10A; (-) strand; PAM type: YTN; PAM sequence: TTA
  source 1..20: mol_type = other DNA
cagtattcagcaataacatg

SEQ ID NO: 49570 - DNA, 20 bp, synthetic construct
  misc_feature 1..20: note = Description of Artificial Sequence: Synthetic oligonucleotide
  misc_feature 1..20: note = Target: SCN10A; (-) strand; PAM type: YTN; PAM sequence: CTT
  source 1..20: mol_type = other DNA
acagtattcagcaataacat

SEQ ID NO: 49571 - DNA, 20 bp, synthetic construct
  misc_feature 1..20: note = Description of Artificial Sequence: Synthetic oligonucleotide
  misc_feature 1..20: note = Target: SCN10A; (-) strand; PAM type: YTN; PAM sequence: TTA
  source 1..20: mol_type = other DNA
tacttacagtattcagcaat

SEQ ID NO: 49572 - DNA, 20 bp, synthetic construct
  misc_feature 1..20: note = Description of Artificial Sequence: Synthetic oligonucleotide
  misc_feature 1..20: note = Target: SCN10A; (-) strand; PAM type: YTN; PAM sequence: TTT
  source 1..20: mol_type = other DNA
atacttacagtattcagcaa

SEQ ID NO: 49573 - DNA, 20 bp, synthetic construct
  misc_feature 1..20: note = Description of Artificial Sequence: Synthetic oligonucleotide
  misc_feature 1..20: note = Target: SCN10A; (-) strand; PAM type: YTN; PAM sequence: CTG
  source 1..20: mol_type = other DNA
tttatacttacagtattcag

SEQ ID NO: 49574 - DNA, 20 bp, synthetic construct
  misc_feature 1..20: note = Description of Artificial Sequence: Synthetic oligonucleotide
  misc_feature 1..20: note = Target: SCN10A; (-) strand; PAM type: YTN; PAM sequence: TTA
  source 1..20: mol_type = other DNA
actgtttatacttacagtat

SEQ ID NO: 49575 - DNA, 20 bp, synthetic construct
  misc_feature 1..20: note = Description of Artificial Sequence: Synthetic oligonucleotide
  misc_feature 1..20: note = Target: SCN10A; (-) strand; PAM type: YTN; PAM sequence: TTA
  source 1..20: mol_type = other DNA
ttaactgtttatacttacag

SEQ ID NO: 49576 - DNA, 20 bp, synthetic construct
  misc_feature 1..20: note = Description of Artificial Sequence: Synthetic oligonucleotide
  misc_feature 1..20: note = Target: SCN10A; (-) strand; PAM type: YTN; PAM sequence: TTT
  source 1..20: mol_type = other DNA
attaactgtttatacttaca

SEQ ID NO: 49577 - DNA, 20 bp, synthetic construct
  misc_feature 1..20: note = Description of Artificial Sequence: Synthetic oligonucleotide
  misc_feature 1..20: note = Target: SCN10A; (-) strand; PAM type: YTN; PAM sequence: TTA
  source 1..20: mol_type = other DNA
tgtttattaactgtttatac

SEQ ID NO: 49578 - DNA, 20 bp, synthetic construct
  misc_feature 1..20: note = Description of Artificial Sequence: Synthetic oligonucleotide
  misc_feature 1..20: note = Target: SCN10A; (-) strand; PAM type: YTN; PAM sequence: TTT
  source 1..20: mol_type = other DNA
atgtttattaactgtttata

SEQ ID NO: 49579 - DNA, 20 bp, synthetic construct
  misc_feature 1..20: note = Description of Artificial Sequence: Synthetic oligonucleotide
  misc_feature 1..20: note = Target: SCN10A; (-) strand; PAM type: YTN; PAM sequence: CTT
  source 1..20: mol_type = other DNA
tatgtttattaactgtttat

SEQ ID NO: 49580 - DNA, 20 bp, synthetic construct
  misc_feature 1..20: note = Description of Artificial Sequence: Synthetic oligonucleotide
  misc_feature 1..20: note = Target: SCN10A; (-) strand; PAM type: YTN; PAM sequence: TTC
  source 1..20: mol_type = other DNA
tttatgtttattaactgttt

SEQ ID NO: 49581 - DNA, 20 bp, synthetic construct
  misc_feature 1..20: note = Description of Artificial Sequence: Synthetic oligonucleotide
  misc_feature 1..20: note = Target: SCN10A; (-) strand; PAM type: YTN; PAM sequence: TTT
  source 1..20: mol_type = other DNA
ctttatgtttattaactgtt

SEQ ID NO: 49582 - DNA, 20 bp, synthetic construct
  misc_feature 1..20: note = Description of Artificial Sequence: Synthetic oligonucleotide
  misc_feature 1..20: note = Target: SCN10A; (-) strand; PAM type: YTN; PAM sequence: CTT
  source 1..20: mol_type = other DNA
tctttatgtttattaactgt

SEQ ID NO: 49583 - DNA, 20 bp, synthetic construct
  misc_feature 1..20: note = Description of Artificial Sequence: Synthetic oligonucleotide
  misc_feature 1..20: note = Target: SCN10A; (-) strand; PAM type: YTN; PAM sequence: TTA
  source 1..20: mol_type = other DNA
taaactttctttatgtttat

SEQ ID NO: 49584 - DNA, 20 bp, synthetic construct
  misc_feature 1..20: note = Description of Artificial Sequence: Synthetic oligonucleotide
  misc_feature 1..20: note = Target: SCN10A; (-) strand; PAM type: YTN; PAM sequence: TTT
  source 1..20: mol_type = other DNA
ataaactttctttatgttta

SEQ ID NO: 49585 - DNA, 20 bp, synthetic construct
  misc_feature 1..20: note = Description of Artificial Sequence: Synthetic oligonucleotide
  misc_feature 1..20: note = Target: SCN10A; (-) strand; PAM type: YTN; PAM sequence: CTT
  source 1..20: mol_type = other DNA
tataaactttctttatgttt

SEQ ID NO: 49586 - DNA, 20 bp, synthetic construct
  misc_feature 1..20: note = Description of Artificial Sequence: Synthetic oligonucleotide
  misc_feature 1..20: note = Target: SCN10A; (-) strand; PAM type: YTN; PAM sequence: TTG
  source 1..20: mol_type = other DNA
gaagctttataaactttctt

SEQ ID NO: 49587 - DNA, 20 bp, synthetic construct
  misc_feature 1..20: note = Description of Artificial Sequence: Synthetic oligonucleotide
  misc_feature 1..20: note = Target: SCN10A; (-) strand; PAM type: YTN; PAM sequence: CTC
  source 1..20: mol_type = other DNA
atggttggaagctttataaa

SEQ ID NO: 49588 - DNA, 20 bp, synthetic construct
  misc_feature 1..20: note = Description of Artificial Sequence: Synthetic oligonucleotide
  misc_feature 1..20: note = Target: SCN10A; (-) strand; PAM type: YTN; PAM sequence: TTA
  source 1..20: mol_type = other DNA
gtcctcatggttggaagctt

SEQ ID NO: 49589 - DNA, 20 bp, synthetic construct
  misc_feature 1..20: note = Description of Artificial Sequence: Synthetic oligonucleotide
  misc_feature 1..20: note = Target: SCN10A; (-) strand; PAM type: YTN; PAM sequence: CTT
  source 1..20: mol_type = other DNA
agtcctcatggttggaagct

SEQ ID NO: 49590 - DNA, 20 bp, synthetic construct
  misc_feature 1..20: note = Description of Artificial Sequence: Synthetic oligonucleotide
  misc_feature 1..20: note = Target: SCN10A; (-) strand; PAM type: YTN; PAM sequence: TTG
  source 1..20: mol_type = other DNA
cttagtcctcatggttggaa

SEQ ID NO: 49591 - DNA, 20 bp, synthetic construct
  misc_feature 1..20: note = Description of Artificial Sequence: Synthetic oligonucleotide
  misc_feature 1..20: note = Target: SCN10A; (-) strand; PAM type: YTN; PAM sequence: TTT
  source 1..20: mol_type = other DNA
gcttagtcctcatggttgga

SEQ ID NO: 49592 - DNA, 20 bp, synthetic construct
  misc_feature 1..20: note = Description of Artificial Sequence: Synthetic oligonucleotide
  misc_feature 1..20: note = Target: SCN10A; (-) strand; PAM type: YTN; PAM sequence: CTA
  source 1..20: mol_type = other DNA
gtatcatttgcttagtcctc

SEQ ID NO: 49593 - DNA, 20 bp, synthetic construct
  misc_feature 1..20: note = Description of Artificial Sequence: Synthetic oligonucleotide
  misc_feature 1..20: note = Target: SCN10A; (-) strand; PAM type: YTN; PAM sequence: CTA
  source 1..20: mol_type = other DNA
ctagtatcatttgcttagtc

SEQ ID NO: 49594 - DNA, 20 bp, synthetic construct
  misc_feature 1..20: note = Description of Artificial Sequence: Synthetic oligonucleotide
  misc_feature 1..20: note = Target: SCN10A; (-) strand; PAM type: YTN; PAM sequence: CTG
  source 1..20: mol_type = other DNA
acagataacaataaatagtg

SEQ ID NO: 49595 - DNA, 20 bp, synthetic construct
  misc_feature 1..20: note = Description of Artificial Sequence: Synthetic oligonucleotide
  misc_feature 1..20: note = Target: SCN10A; (-) strand; PAM type: YTN; PAM sequence: TTA
  source 1..20: mol_type = other DNA
tacatgtctgacagataaca

SEQ ID NO: 49596 - DNA, 20 bp, synthetic construct
  misc_feature 1..20: note = Description of Artificial Sequence: Synthetic oligonucleotide
  misc_feature 1..20: note = Target: SCN10A; (-) strand; PAM type: YTN; PAM sequence: TTT
  source 1..20: mol_type = other DNA
atacatgtctgacagataac

SEQ ID NO: 49597 - DNA, 20 bp, synthetic construct
  misc_feature 1..20: note = Description of Artificial Sequence: Synthetic oligonucleotide
  misc_feature 1..20: note = Target: SCN10A; (-) strand; PAM type: YTN; PAM sequence: TTT
  source 1..20: mol_type = other DNA
tatacatgtctgacagataa

SEQ ID NO: 49598 - DNA, 20 bp, synthetic construct
  misc_feature 1..20: note = Description of Artificial Sequence: Synthetic oligonucleotide
  misc_feature 1..20: note = Target: SCN10A; (-) strand; PAM type: YTN; PAM sequence: TTT
  source 1..20: mol_type = other DNA
ttatacatgtctgacagata

SEQ ID NO: 49599 - DNA, 20 bp, synthetic construct
  misc_feature 1..20: note = Description of Artificial Sequence: Synthetic oligonucleotide
  misc_feature 1..20: note = Target: SCN10A; (-) strand; PAM type: YTN; PAM sequence: CTA
  source 1..20: mol_type = other DNA
catttttatacatgtctgac

SEQ ID NO: 49600 - DNA, 20 bp, synthetic construct
  misc_feature 1..20: note = Description of Artificial Sequence: Synthetic oligonucleotide
  misc_feature 1..20: note = Target: SCN10A; (-) strand; PAM type: YTN; PAM sequence: TTA
  source 1..20: mol_type = other DNA
aatgaaataacaaagtgcct

SEQ ID NO: 49601 - DNA, 20 bp, synthetic construct
  misc_feature 1..20: note = Description of Artificial Sequence: Synthetic oligonucleotide
  misc_feature 1..20: note = Target: SCN10A; (-) strand; PAM type: YTN; PAM sequence: CTG
  source 1..20: mol_type = other DNA
gagggttaaatgaaataaca

SEQ ID NO: 49602 - DNA, 20 bp, synthetic construct
  misc_feature 1..20: note = Description of Artificial Sequence: Synthetic oligonucleotide
  misc_feature 1..20: note = Target: SCN10A; (-) strand; PAM type: YTN; PAM sequence: CTA
  source 1..20: mol_type = other DNA
aatagctggagggttaaatg

SEQ ID NO: 49603 - DNA, 20 bp, synthetic construct
  misc_feature 1..20: note = Description of Artificial Sequence: Synthetic oligonucleotide
  misc_feature 1..20: note = Target: SCN10A; (-) strand; PAM type: YTN; PAM sequence: TTC
  source 1..20: mol_type = other DNA
taaatagctggagggttaaa

SEQ ID NO: 49604 - DNA, 20 bp, synthetic construct
  misc_feature 1..20: note = Description of Artificial Sequence: Synthetic oligonucleotide
  misc_feature 1..20: note = Target: SCN10A; (-) strand; PAM type: YTN; PAM sequence: TTT
  source 1..20: mol_type = other DNA
ctaaatagctggagggttaa

SEQ ID NO: 49605 - DNA, 20 bp, synthetic construct
  misc_feature 1..20: note = Description of Artificial Sequence: Synthetic oligonucleotide
  misc_feature 1..20: note = Target: SCN10A; (-) strand; PAM type: YTN; PAM sequence: TTG
  source 1..20: mol_type = other DNA
taaaaaggtttctaaatagc

SEQ ID NO: 49606 - DNA, 20 bp, synthetic construct
  misc_feature 1..20: note = Description of Artificial Sequence: Synthetic oligonucleotide
  misc_feature 1..20: note = Target: SCN10A; (-) strand; PAM type: YTN; PAM sequence: CTT
  source 1..20: mol_type = other DNA
gtaaaaaggtttctaaatag

SEQ ID NO: 49607 - DNA, 20 bp, synthetic construct
  misc_feature 1..20: note = Description of Artificial Sequence: Synthetic oligonucleotide
  misc_feature 1..20: note = Target: SCN10A; (-) strand; PAM type: YTN; PAM sequence: CTC
  source 1..20: mol_type = other DNA
cccttgtaaaaaggtttcta

SEQ ID NO: 49608 - DNA, 20 bp, synthetic construct
  misc_feature 1..20: note = Description of Artificial Sequence: Synthetic oligonucleotide
  misc_feature 1..20: note = Target: SCN10A; (-) strand; PAM type: YTN; PAM sequence: TTA
  source 1..20: mol_type = other DNA
tctccccttgtaaaaaggtt

SEQ ID NO: 49609 - DNA, 20 bp, synthetic construct
  misc_feature 1..20: note = Description of Artificial Sequence: Synthetic oligonucleotide
  misc_feature 1..20: note = Target: SCN10A; (-) strand; PAM type: YTN; PAM sequence: CTT
  source 1..20: mol_type = other DNA
atctccccttgtaaaaaggt

SEQ ID NO: 49610 - DNA, 20 bp, synthetic construct
  misc_feature 1..20: note = Description of Artificial Sequence: Synthetic oligonucleotide
  misc_feature 1..20: note = Target: SCN10A; (-) strand; PAM type: YTN; PAM sequence: CTC
  source 1..20: mol_type = other DNA
cttatctccccttgtaaaaa

SEQ ID NO: 49611 - DNA, 20 bp, synthetic construct
  misc_feature 1..20: note = Description of Artificial Sequence: Synthetic oligonucleotide
  misc_feature 1..20: note = Target: SCN10A; (-) strand; PAM type: YTN; PAM sequence: TTA
  source 1..20: mol_type = other DNA
tccaagcctccttatctccc

SEQ ID NO: 49612 - DNA, 20 bp, synthetic construct
  misc_feature 1..20: note = Description of Artificial Sequence: Synthetic oligonucleotide
  misc_feature 1..20: note = Target: SCN10A; (-) strand; PAM type: YTN; PAM sequence: TTA
  source 1..20: mol_type = other DNA
aattatccaagcctccttat

SEQ ID NO: 49613 - DNA, 20 bp, synthetic construct
  misc_feature 1..20: note = Description of Artificial Sequence: Synthetic oligonucleotide
  misc_feature 1..20: note = Target: SCN10A; (-) strand; PAM type: YTN; PAM sequence: TTT
  source 1..20: mol_type = other DNA
aaattatccaagcctcctta

SEQ ID NO: 49614 - DNA, 20 bp, synthetic construct
  misc_feature 1..20: note = Description of Artificial Sequence: Synthetic oligonucleotide
  misc_feature 1..20: note = Target: SCN10A; (-) strand; PAM type: YTN; PAM sequence: CTT
  source 1..20: mol_type = other DNA
taaattatccaagcctcctt

SEQ ID NO: 49615 - DNA, 20 bp, synthetic construct
  misc_feature 1..20: note = Description of Artificial Sequence: Synthetic oligonucleotide
  misc_feature 1..20: note = Target: SCN10A; (-) strand; PAM type: YTN; PAM sequence: TTA
  source 1..20: mol_type = other DNA
gcaagtcctttaaattatcc

SEQ ID NO: 49616 - DNA, 20 bp, synthetic construct
  misc_feature 1..20: note = Description of Artificial Sequence: Synthetic oligonucleotide
  misc_feature 1..20: note = Target: SCN10A; (-) strand; PAM type: YTN; PAM sequence: TTT
  source 1..20: mol_type = other DNA
agcaagtcctttaaattatc

SEQ ID NO: 49617 - DNA, 20 bp, synthetic construct
  misc_feature 1..20: note = Description of Artificial Sequence: Synthetic oligonucleotide
  misc_feature 1..20: note = Target: SCN10A; (-) strand; PAM type: YTN; PAM sequence: CTG
  source 1..20: mol_type = other DNA
agtcacatttagcaagtcct

SEQ ID NO: 49618 - DNA, 20 bp, synthetic construct
  misc_feature 1..20: note = Description of Artificial Sequence: Synthetic oligonucleotide
  misc_feature 1..20: note = Target: SCN10A; (-) strand; PAM type: YTN; PAM sequence: TTA
  source 1..20: mol_type = other DNA
ccacctgagtcacatttagc

SEQ ID NO: 49619 - DNA, 20 bp, synthetic construct
  misc_feature 1..20: note = Description of Artificial Sequence: Synthetic oligonucleotide
  misc_feature 1..20: note = Target: SCN10A; (-) strand; PAM type: YTN; PAM sequence: CTG
  source 1..20: mol_type = other DNA
tgccagttaccacctgagtc

SEQ ID NO: 49620 - DNA, 20 bp, synthetic construct
  misc_feature 1..20: note = Description of Artificial Sequence: Synthetic oligonucleotide
  misc_feature 1..20: note = Target: SCN10A; (-) strand; PAM type: YTN; PAM sequence: TTA
  source 1..20: mol_type = other DNA
gtcccaactgtgccagttac

SEQ ID NO: 49621 - DNA, 20 bp, synthetic construct
  misc_feature 1..20: note = Description of Artificial Sequence: Synthetic oligonucleotide
  misc_feature 1..20: note = Target: SCN10A; (-) strand; PAM type: YTN; PAM sequence: TTT
  source 1..20: mol_type = other DNA
agtcccaactgtgccagtta

SEQ ID NO: 49622 - DNA, 20 bp, synthetic construct
  misc_feature 1..20: note = Description of Artificial Sequence: Synthetic oligonucleotide
  misc_feature 1..20: note = Target: SCN10A; (-) strand; PAM type: YTN; PAM sequence: TTT
  source 1..20: mol_type = other DNA
tagtcccaactgtgccagtt

SEQ ID NO: 49623 - DNA, 20 bp, synthetic construct
  misc_feature 1..20: note = Description of Artificial Sequence: Synthetic oligonucleotide
  misc_feature 1..20: note = Target: SCN10A; (-) strand; PAM type: YTN; PAM sequence: CTA
  source 1..20: mol_type = other DNA
tattttagtcccaactgtgc

SEQ ID NO: 49624 - DNA, 20 bp, synthetic construct
  misc_feature 1..20: note = Description of Artificial Sequence: Synthetic oligonucleotide
  misc_feature 1..20: note = Target: SCN10A; (-) strand; PAM type: YTN; PAM sequence: TTA
  source 1..20: mol_type = other DNA
gtatggacctatattttagt

SEQ ID NO: 49625 - DNA, 20 bp, synthetic construct
  misc_feature 1..20: note = Description of Artificial Sequence: Synthetic oligonucleotide
  misc_feature 1..20: note = Target: SCN10A; (-) strand; PAM type: YTN; PAM sequence: TTT
  source 1..20: mol_type = other DNA
agtatggacctatattttag

SEQ ID NO: 49626 - DNA, 20 bp, synthetic construct
  misc_feature 1..20: note = Description of Artificial Sequence: Synthetic oligonucleotide
  misc_feature 1..20: note = Target: SCN10A; (-) strand; PAM type: YTN; PAM sequence: CTG
  source 1..20: mol_type = other DNA
tttagtatggacctatattt

SEQ ID NO: 49627 - DNA, 20 bp, synthetic construct
  misc_feature 1..20: note = Description of Artificial Sequence: Synthetic oligonucleotide
  misc_feature 1..20: note = Target: SCN10A; (-) strand; PAM type: YTN; PAM sequence: TTC
  source 1..20: mol_type = other DNA
tgtttagtatggacctatat

SEQ ID NO: 49628 - DNA, 20 bp, synthetic construct
  misc_feature 1..20: note = Description of Artificial Sequence: Synthetic oligonucleotide
  misc_feature 1..20: note = Target: SCN10A; (-) strand; PAM type: YTN; PAM sequence: CTT
  source 1..20: mol_type = other DNA
ctgtttagtatggacctata

SEQ ID NO: 49629 - DNA, 20 bp, synthetic construct
  misc_feature 1..20: note = Description of Artificial Sequence: Synthetic oligonucleotide
  misc_feature 1..20: note = Target: SCN10A; (-) strand; PAM type: YTN; PAM sequence: TTA
  source 1..20: mol_type = other DNA
ggcccttctgtttagtatgg

SEQ ID NO: 49630 - DNA, 20 bp, synthetic construct
  misc_feature 1..20: note = Description of Artificial Sequence: Synthetic oligonucleotide
  misc_feature 1..20: note = Target: SCN10A; (-) strand; PAM type: YTN; PAM sequence: TTT
  source 1..20: mol_type = other DNA
aggcccttctgtttagtatg

SEQ ID NO: 49631 - DNA, 20 bp, synthetic construct
  misc_feature 1..20: note = Description of Artificial Sequence: Synthetic oligonucleotide
  misc_feature 1..20: note = Target: SCN10A; (-) strand; PAM type: YTN; PAM sequence: CTT
  source 1..20: mol_type = other DNA
taggcccttctgtttagtat

SEQ ID NO: 49632 - DNA, 20 bp, synthetic construct
  misc_feature 1..20: note = Description of Artificial Sequence: Synthetic oligonucleotide
  misc_feature 1..20: note = Target: SCN10A; (-) strand; PAM type: YTN; PAM sequence: CTC
  source 1..20: mol_type = other DNA
tttaggcccttctgtttagt

SEQ ID NO: 49633 - DNA, 20 bp, synthetic construct
  misc_feature 1..20: note = Description of Artificial Sequence: Synthetic oligonucleotide
  misc_feature 1..20: note = Target: SCN10A; (-) strand; PAM type: YTN; PAM sequence: TTG
  source 1..20: mol_type = other DNA
actctttaggcccttctgtt

SEQ ID NO: 49634 - DNA, 20 bp, synthetic construct
  misc_feature 1..20: note = Description of Artificial Sequence: Synthetic oligonucleotide
  misc_feature 1..20: note = Target: SCN10A; (-) strand; PAM type: YTN; PAM sequence: CTA
  source 1..20: mol_type = other DNA
gtgaaagattgactctttag

SEQ ID NO: 49635 - DNA, 20 bp, synthetic construct
  misc_feature 1..20: note = Description of Artificial Sequence: Synthetic oligonucleotide
  misc_feature 1..20: note = Target: SCN10A; (-) strand; PAM type: YTN; PAM sequence: TTA
  source 1..20: mol_type = other DNA
ccaggctagtgaaagattga

SEQ ID NO: 49636 - DNA, 20 bp, synthetic construct
  misc_feature 1..20: note = Description of Artificial Sequence: Synthetic oligonucleotide
  misc_feature 1..20: note = Target: SCN10A; (-) strand; PAM type: YTN; PAM sequence: TTA
  source 1..20: mol_type = other DNA
aattaccaggctagtgaaag

SEQ ID NO: 49637 - DNA, 20 bp, synthetic construct
  misc_feature 1..20: note = Description of Artificial Sequence: Synthetic oligonucleotide
  misc_feature 1..20: note = Target: SCN10A; (-) strand; PAM type: YTN; PAM sequence: CTA
  source 1..20: mol_type = other DNA
gttaaattaccaggctagtg

SEQ ID NO: 49638 - DNA, 20 bp, synthetic construct
  misc_feature 1..20: note = Description of Artificial Sequence: Synthetic oligonucleotide
  misc_feature 1..20: note = Target: SCN10A; (-) strand; PAM type: YTN; PAM sequence: TTC
  source 1..20: mol_type = other DNA
tagttaaattaccaggctag

SEQ ID NO: 49639 - DNA, 20 bp, synthetic construct
  misc_feature 1..20: note = Description of Artificial Sequence: Synthetic oligonucleotide
  misc_feature 1..20: note = Target: SCN10A; (-) strand; PAM type: YTN; PAM sequence: TTC
  source 1..20: mol_type = other DNA
attctagttaaattaccagg

SEQ ID NO: 49640 - DNA, 20 bp, synthetic construct
  misc_feature 1..20: note = Description of Artificial Sequence: Synthetic oligonucleotide
  misc_feature 1..20: note = Target: SCN10A; (-) strand; PAM type: YTN; PAM sequence: TTG
  source 1..20: mol_type = other DNA
attcattctagttaaattac

SEQ ID NO: 49641 - DNA, 20 bp, synthetic construct
  misc_feature 1..20: note = Description of Artificial Sequence: Synthetic oligonucleotide
  misc_feature 1..20: note = Target: SCN10A; (-) strand; PAM type: YTN; PAM sequence: CTT
  source 1..20: mol_type = other DNA
gattcattctagttaaatta

SEQ ID NO: 49642 - DNA, 20 bp, synthetic construct
  misc_feature 1..20: note = Description of Artificial Sequence: Synthetic oligonucleotide
  misc_feature 1..20: note = Target: SCN10A; (-) strand; PAM type: YTN; PAM sequence: CTG
  source 1..20: mol_type = other DNA
accttgattcattctagtta

SEQ ID NO: 49643 - DNA, 20 bp, synthetic construct
  misc_feature 1..20: note = Description of Artificial Sequence: Synthetic oligonucleotide
  misc_feature 1..20: note = Target: SCN10A; (-) strand; PAM type: YTN; PAM sequence: TTC
  source 1..20: mol_type = other DNA
tgaccttgattcattctagt

SEQ ID NO: 49644 - DNA, 20 bp, synthetic construct
  misc_feature 1..20: note = Description of Artificial Sequence: Synthetic oligonucleotide
  misc_feature 1..20: note = Target: SCN10A; (-) strand; PAM type: YTN; PAM sequence: CTA
  source 1..20: mol_type = other DNA
gatattctgaccttgattca

SEQ ID NO: 49645 - DNA, 20 bp, synthetic construct
  misc_feature 1..20: note = Description of Artificial Sequence: Synthetic oligonucleotide
  misc_feature 1..20: note = Target: SCN10A; (-) strand; PAM type: YTN; PAM sequence: TTA
  source 1..20: mol_type = other DNA
tcatgtgtctagatattctg

SEQ ID NO: 49646 - DNA, 20 bp, synthetic construct
  misc_feature 1..20: note = Description of Artificial Sequence: Synthetic oligonucleotide
  misc_feature 1..20: note = Target: SCN10A; (-) strand; PAM type: YTN; PAM sequence: CTG
  source 1..20: mol_type = other DNA
agattatcatgtgtctagat

SEQ ID NO: 49647 - DNA, 20 bp, synthetic construct
  misc_feature 1..20: note = Description of Artificial Sequence: Synthetic oligonucleotide
  misc_feature 1..20: note = Target: SCN10A; (-) strand; PAM type: YTN; PAM sequence: TTC
  source 1..20: mol_type = other DNA
ctgagattatcatgtgtcta

SEQ ID NO: 49648 - DNA, 20 bp, synthetic construct
  misc_feature 1..20: note = Description of Artificial Sequence: Synthetic oligonucleotide
  misc_feature 1..20: note = Target: SCN10A; (-) strand; PAM type: YTN; PAM sequence: CTG
  source 1..20: mol_type = other DNA
ttcctgagattatcatgtgt

SEQ ID NO: 49649 - DNA, 20 bp, synthetic construct
  misc_feature 1..20: note = Description of Artificial Sequence: Synthetic oligonucleotide
  misc_feature 1..20: note = Target: SCN10A; (-) strand; PAM type: YTN; PAM sequence: CTC
  source 1..20: mol_type = other DNA
tgttcctgagattatcatgt

SEQ ID NO: 49650 - DNA, 20 bp, synthetic construct
  misc_feature 1..20: note = Description of Artificial Sequence: Synthetic oligonucleotide
  misc_feature 1..20: note = Target: SCN10A; (-) strand; PAM type: YTN; PAM sequence: TTC
  source 1..20: mol_type = other DNA
tctgttcctgagattatcat

SEQ ID NO: 49651 - DNA, 20 bp, synthetic construct
  misc_feature 1..20: note = Description of Artificial Sequence: Synthetic oligonucleotide
  misc_feature 1..20: note = Target: SCN10A; (-) strand; PAM type: YTN; PAM sequence: TTT
  source 1..20: mol_type = other DNA
ctctgttcctgagattatca

SEQ ID NO: 49652 - DNA, 20 bp, synthetic construct
  misc_feature 1..20: note = Description of Artificial Sequence: Synthetic oligonucleotide
  misc_feature 1..20: note = Target: SCN10A; (-) strand; PAM type: YTN; PAM sequence: CTT
  source 1..20: mol_type = other DNA
tctctgttcctgagattatc

SEQ ID NO: 49653 - DNA, 20 bp, synthetic construct
  misc_feature 1..20: note = Description of Artificial Sequence: Synthetic oligonucleotide
  misc_feature 1..20: note = Target: SCN10A; (-) strand; PAM type: YTN; PAM sequence: CTC
  source 1..20: mol_type = other DNA
ctttctctgttcctgagatt

SEQ ID NO: 49654 - DNA, 20 bp, synthetic construct
  misc_feature 1..20: note = Description of Artificial Sequence: Synthetic oligonucleotide
  misc_feature 1..20: note = Target: SCN10A; (-) strand; PAM type: YTN; PAM sequence: TTG
  source 1..20: mol_type = other DNA
tgatgggcccccaccctcct

SEQ ID NO: 49655 - DNA, 20 bp, synthetic construct
  misc_feature 1..20: note = Description of Artificial Sequence: Synthetic oligonucleotide
  misc_feature 1..20: note = Target: SCN10A; (-) strand; PAM type: YTN; PAM sequence: CTT
  source 1..20: mol_type = other DNA
gtgatgggcccccaccctcc

SEQ ID NO: 49656 - DNA, 20 bp, synthetic construct
  misc_feature 1..20: note = Description of Artificial Sequence: Synthetic oligonucleotide
  misc_feature 1..20: note = Target: SCN10A; (-) strand; PAM type: YTN; PAM sequence: CTC
  source 1..20: mol_type = other DNA
ttgtgatgggcccccaccct

SEQ ID NO: 49657 - DNA, 20 bp, synthetic construct
  misc_feature 1..20: note = Description of Artificial Sequence: Synthetic oligonucleotide
  misc_feature 1..20: note = Target: SCN10A; (-) strand; PAM type: YTN; PAM sequence: CTC
  source 1..20: mol_type = other DNA
tcttgtgatgggcccccacc

SEQ ID NO: 49658 - DNA, 20 bp, synthetic construct
  misc_feature 1..20: note = Description of Artificial Sequence: Synthetic oligonucleotide
  misc_feature 1..20: note = Target: SCN10A; (-) strand; PAM type: YTN; PAM sequence: TTA
  source 1..20: mol_type = other DNA
tgcctctcttgtgatgggcc

SEQ ID NO: 49659 - DNA, 20 bp, synthetic construct
  misc_feature 1..20: note = Description of Artificial Sequence: Synthetic oligonucleotide
  misc_feature 1..20: note = Target: SCN10A; (-) strand; PAM type: YTN; PAM sequence: TTT
  source 1..20: mol_type = other DNA
atgcctctcttgtgatgggc

SEQ ID NO: 49660 - DNA, 20 bp, synthetic construct
  misc_feature 1..20: note = Description of Artificial Sequence: Synthetic oligonucleotide
  misc_feature 1..20: note = Target: SCN10A; (-) strand; PAM type: YTN; PAM sequence: CTG
  source 1..20: mol_type = other DNA
aaggcatttatgcctctctt

SEQ ID NO: 49661 - DNA, 20 bp, synthetic construct
  misc_feature 1..20: note = Description of Artificial Sequence: Synthetic oligonucleotide
  misc_feature 1..20: note = Target: SCN10A; (-) strand; PAM type: YTN; PAM sequence: CTC
  source 1..20: mol_type = other DNA
actgaaggcatttatgcctc

SEQ ID NO: 49662 - DNA, 20 bp, synthetic construct
  misc_feature 1..20: note = Description of Artificial Sequence: Synthetic oligonucleotide
  misc_feature 1..20: note = Target: SCN10A; (-) strand; PAM type: YTN; PAM sequence: CTA
  source 1..20: mol_type = other DNA
gaaaatgcctcactgaaggc

SEQ ID NO: 49663 - DNA, 20 bp, synthetic construct
  misc_feature 1..20: note = Description of Artificial Sequence: Synthetic oligonucleotide
  misc_feature 1..20: note = Target: SCN10A; (-) strand; PAM type: YTN; PAM sequence: CTC
  source 1..20: mol_type = other DNA
tagaaaatgcctcactgaag

SEQ ID NO: 49664 - DNA, 20 bp, synthetic construct
  misc_feature 1..20: note = Description of Artificial Sequence: Synthetic oligonucleotide
  misc_feature 1..20: note = Target: SCN10A; (-) strand; PAM type: YTN; PAM sequence: TTA
  source 1..20: mol_type = other DNA
gcactctagaaaatgcctca

SEQ ID NO: 49665 - DNA, 20 bp, synthetic construct
  misc_feature 1..20: note = Description of Artificial Sequence: Synthetic oligonucleotide
  misc_feature 1..20: note = Target: SCN10A; (-) strand; PAM type: YTN; PAM sequence: CTG
  source 1..20: mol_type = other DNA
ggagtgcattagcactctag

SEQ ID NO: 49666 - DNA, 20 bp, synthetic construct
  misc_feature 1..20: note = Description of Artificial Sequence: Synthetic oligonucleotide
  misc_feature 1..20: note = Target: SCN10A; (-) strand; PAM type: YTN; PAM sequence: CTC
  source 1..20: mol_type = other DNA
gctgggagtgcattagcact

SEQ ID NO: 49667 - DNA, 20 bp, synthetic construct
  misc_feature 1..20: note = Description of Artificial Sequence: Synthetic oligonucleotide
  misc_feature 1..20: note = Target: SCN10A; (-) strand; PAM type: YTN; PAM sequence: CTG
  source 1..20: mol_type = other DNA
cagggctcgctgggagtgca

SEQ ID NO: 49668 - DNA, 20 bp, synthetic construct
  misc_feature 1..20: note = Description of Artificial Sequence: Synthetic oligonucleotide
  misc_feature 1..20: note = Target: SCN10A; (-) strand; PAM type: YTN; PAM sequence: TTA
  source 1..20: mol_type = other DNA
aagtcaaaggcatcctgcag

SEQ ID NO: 49669 - DNA, 20 bp, synthetic construct
  misc_feature 1..20: note = Description of Artificial Sequence: Synthetic oligonucleotide
  misc_feature 1..20: note = Target: SCN10A; (-) strand; PAM type: YTN; PAM sequence: CTT
  source 1..20: mol_type = other DNA
aaagtcaaaggcatcctgca

SEQ ID NO: 49670 - DNA, 20 bp, synthetic construct
  misc_feature 1..20: note = Description of Artificial Sequence: Synthetic oligonucleotide
  misc_feature 1..20: note = Target: SCN10A; (-) strand; PAM type: YTN; PAM sequence: CTC
  source 1..20: mol_type = other DNA
cagggcaaatggaatcacca

SEQ ID NO: 49671 - DNA, 20 bp, synthetic construct
  misc_feature 1..20: note = Description of Artificial Sequence: Synthetic oligonucleotide
  misc_feature 1..20: note = Target: SCN10A; (-) strand; PAM type: YTN; PAM sequence: CTC
  source 1..20: mol_type = other DNA
cccaggaacagagacagtgg

SEQ ID NO: 49672 - DNA, 20 bp, synthetic construct
  misc_feature 1..20: note = Description of Artificial Sequence: Synthetic oligonucleotide
  misc_feature 1..20: note = Target: SCN10A; (-) strand; PAM type: YTN; PAM sequence: CTC
  source 1..20: mol_type = other DNA
cctccccaggaacagagaca

SEQ ID NO: 49673 - DNA, 20 bp, synthetic construct
  misc_feature 1..20: note = Description of Artificial Sequence: Synthetic oligonucleotide
  misc_feature 1..20: note = Target: SCN10A; (-) strand; PAM type: YTN; PAM sequence: TTG
  source 1..20: mol_type = other DNA
tacaggtctccctccccagg

SEQ ID NO: 49674 - DNA, 20 bp, synthetic construct
  misc_feature 1..20: note = Description of Artificial Sequence: Synthetic oligonucleotide
  misc_feature 1..20: note = Target: SCN10A; (-) strand; PAM type: YTN; PAM sequence: TTT
  source 1..20: mol_type = other DNA
gtacaggtctccctccccag

SEQ ID NO: 49675 - DNA, 20 bp, synthetic construct
  misc_feature 1..20: note = Description of Artificial Sequence: Synthetic oligonucleotide
  misc_feature 1..20: note = Target: SCN10A; (-) strand; PAM type: YTN; PAM sequence: TTT
  source 1..20: mol_type = other DNA
tgtacaggtctccctcccca

SEQ ID NO: 49676 - DNA, 20 bp, synthetic construct
  misc_feature 1..20: note = Description of Artificial Sequence: Synthetic oligonucleotide
  misc_feature 1..20: note = Target: SCN10A; (-) strand; PAM type: YTN; PAM sequence: CTG
  source 1..20: mol_type = other DNA
gccagaaccagagggtaagg

SEQ ID NO: 49677 - DNA, 20 bp, synthetic construct
  misc_feature 1..20: note = Description of Artificial Sequence: Synthetic oligonucleotide
  misc_feature 1..20: note = Target: SCN10A; (-) strand; PAM type: YTN; PAM sequence: TTA
  source 1..20: mol_type = other DNA
accaaacctggccagaacca

SEQ ID NO: 49678 - DNA, 20 bp, synthetic construct
  misc_feature 1..20: note = Description of Artificial Sequence: Synthetic oligonucleotide
  misc_feature 1..20: note = Target: SCN10A; (-) strand; PAM type: YTN; PAM sequence: CTC
  source 1..20: mol_type = other DNA
ccattaaccaaacctggcca

SEQ ID NO: 49679 - DNA, 20 bp, synthetic construct
  misc_feature 1..20: note = Description of Artificial Sequence: Synthetic oligonucleotide
  misc_feature 1..20: note = Target: SCN10A; (-) strand; PAM type: YTN; PAM sequence: CTA
  source 1..20: mol_type = other DNA
tgtctcccattaaccaaacc

SEQ ID NO: 49680 - DNA, 20 bp, synthetic construct
  misc_feature 1..20: note = Description of Artificial Sequence: Synthetic oligonucleotide
  misc_feature 1..20: note = Target: SCN10A; (-) strand; PAM type: YTN; PAM sequence: CTG
  source 1..20: mol_type = other DNA
cctatgtctcccattaacca

SEQ ID NO: 49681 - DNA, 20 bp, synthetic construct
  misc_feature 1..20: note = Description of Artificial Sequence: Synthetic oligonucleotide
  misc_feature 1..20: note = Target: SCN10A; (-) strand; PAM type: YTN; PAM sequence: TTG
  source 1..20: mol_type = other DNA
aatgtcctgcctatgtctcc

SEQ ID NO: 49682 - DNA, 20 bp, synthetic construct
  misc_feature 1..20: note = Description of Artificial Sequence: Synthetic oligonucleotide
  misc_feature 1..20: note = Target: SCN10A; (-) strand; PAM type: YTN; PAM sequence: CTT
  source 1..20: mol_type = other DNA
gaatgtcctgcctatgtctc

SEQ ID NO: 49683 - DNA, 20 bp, synthetic construct
  misc_feature 1..20: note = Description of Artificial Sequence: Synthetic oligonucleotide
  misc_feature 1..20: note = Target: SCN10A; (-) strand; PAM type: YTN; PAM sequence: CTA
  source 1..20: mol_type = other DNA
tccttgaatgtcctgcctat

SEQ ID NO: 49684 - DNA, 20 bp, synthetic construct
  misc_feature 1..20: note = Description of Artificial Sequence: Synthetic oligonucleotide
  misc_feature 1..20: note = Target: SCN10A; (-) strand; PAM type: YTN; PAM sequence: TTC
  source 1..20: mol_type = other DNA
tatccttgaatgtcctgcct

SEQ ID NO: 49685 - DNA, 20 bp, synthetic construct
  misc_feature 1..20: note = Description of Artificial Sequence: Synthetic oligonucleotide
  misc_feature 1..20: note = Target: SCN10A; (-) strand; PAM type: YTN; PAM sequence: CTT
  source 1..20: mol_type = other DNA
ctatccttgaatgtcctgcc

SEQ ID NO: 49686 - DNA, 20 bp, synthetic construct
  misc_feature 1..20: note = Description of Artificial Sequence: Synthetic oligonucleotide
  misc_feature 1..20: note = Target: SCN10A; (-) strand; PAM type: YTN; PAM sequence: CTC
  source 1..20: mol_type = other DNA
cttctatccttgaatgtcct

SEQ ID NO: 49687 - DNA, 20 bp, synthetic construct
  misc_feature 1..20: note = Description of Artificial Sequence: Synthetic oligonucleotide
  misc_feature 1..20: note = Target: SCN10A; (-) strand; PAM type: YTN; PAM sequence: CTC
  source 1..20: mol_type = other DNA
tccttctatccttgaatgtc

SEQ ID NO: 49688 - DNA, 20 bp, synthetic construct
  misc_feature 1..20: note = Description of Artificial Sequence: Synthetic oligonucleotide
  misc_feature 1..20: note = Target: SCN10A; (-) strand; PAM type: YTN; PAM sequence: TTG
  source 1..20: mol_type = other DNA
tctctccttctatccttgaa

SEQ ID NO: 49689 - DNA, 20 bp, synthetic construct
  misc_feature 1..20: note = Description of Artificial Sequence: Synthetic oligonucleotide
  misc_feature 1..20: note = Target: SCN10A; (-) strand; PAM type: YTN; PAM sequence: CTT
  source 1..20: mol_type = other DNA
gtctctccttctatccttga

SEQ ID NO: 49690 - DNA, 20 bp, synthetic construct
  misc_feature 1..20: note = Description of Artificial Sequence: Synthetic oligonucleotide
  misc_feature 1..20: note = Target: SCN10A; (-) strand; PAM type: YTN; PAM sequence: CTG
  source 1..20: mol_type = other DNA
acttgtctctccttctatcc

SEQ ID NO: 49691 - DNA, 20 bp, synthetic construct
  misc_feature 1..20: note = Description of Artificial Sequence: Synthetic oligonucleotide
  misc_feature 1..20: note = Target: SCN10A; (-) strand; PAM type: YTN; PAM sequence: CTC
  source 1..20: mol_type = other DNA
agccatagcacaggagagaa

SEQ ID NO: 49692 - DNA, 20 bp, synthetic construct
  misc_feature 1..20: note = Description of Artificial Sequence: Synthetic oligonucleotide
  misc_feature 1..20: note = Target: SCN10A; (-) strand; PAM type: YTN; PAM sequence: CTA
  source 1..20: mol_type = other DNA
ctcagccatagcacaggaga

SEQ ID NO: 49693 - DNA, 20 bp, synthetic construct
  misc_feature 1..20: note = Description of Artificial Sequence: Synthetic oligonucleotide
  misc_feature 1..20: note = Target: SCN10A; (-) strand; PAM type: YTN; PAM sequence: CTG
  source 1..20: mol_type = other DNA
ctactcagccatagcacagg

SEQ ID NO: 49694 - DNA, 20 bp, synthetic construct
  misc_feature 1..20: note = Description of Artificial Sequence: Synthetic oligonucleotide
  misc_feature 1..20: note = Target: SCN10A; (-) strand; PAM type: YTN; PAM sequence: CTC
  source 1..20: mol_type = other DNA
tgctactcagccatagcaca

SEQ ID NO: 49695 - DNA, 20 bp, synthetic construct
  misc_feature 1..20: note = Description of Artificial Sequence: Synthetic oligonucleotide
  misc_feature 1..20: note = Target: SCN10A; (-) strand; PAM type: YTN; PAM sequence: TTA
  source 1..20: mol_type = other DNA
gtagaggatcacagctctgc

SEQ ID NO: 49696 - DNA, 20 bp, synthetic construct
  misc_feature 1..20: note = Description of Artificial Sequence: Synthetic oligonucleotide
  misc_feature 1..20: note = Target: SCN10A; (-) strand; PAM type: YTN; PAM sequence: CTT
  source 1..20: mol_type = other DNA
agtagaggatcacagctctg

SEQ ID NO: 49697 - DNA, 20 bp, synthetic construct
  misc_feature 1..20: note = Description of Artificial Sequence: Synthetic oligonucleotide
  misc_feature 1..20: note = Target: SCN10A; (-) strand; PAM type: YTN; PAM sequence: TTG
  source 1..20: mol_type = other DNA
tgatcttagtagaggatcac

SEQ ID NO: 49698 - DNA, 20 bp, synthetic construct
  misc_feature 1..20: note = Description of Artificial Sequence: Synthetic oligonucleotide
  misc_feature 1..20: note = Target: SCN10A; (-) strand; PAM type: YTN; PAM sequence: CTT
  source 1..20: mol_type = other DNA
gtgatcttagtagaggatca

SEQ ID NO: 49699 - DNA, 20 bp, synthetic construct
  misc_feature 1..20: note = Description of Artificial Sequence: Synthetic oligonucleotide
  misc_feature 1..20: note = Target: SCN10A; (-) strand; PAM type: YTN; PAM sequence: CTG
  source 1..20: mol_type = other DNA
gcagaacttgtgatcttagt

SEQ ID NO: 49700 - DNA, 20 bp, synthetic construct
  misc_feature 1..20: note = Description of Artificial Sequence: Synthetic oligonucleotide
  misc_feature 1..20: note = Target: SCN10A; (-) strand; PAM type: YTN; PAM sequence: CTG
  source 1..20: mol_type = other DNA
cctggcagaacttgtgatct

SEQ ID NO: 49701 - DNA, 20 bp, synthetic construct
  misc_feature 1..20: note = Description of Artificial Sequence: Synthetic oligonucleotide
  misc_feature 1..20: note = Target: SCN10A; (-) strand; PAM type: YTN; PAM sequence: CTC
  source 1..20: mol_type = other DNA
atgtgtcagagaggctgcct

SEQ ID NO: 49702 - DNA, 20 bp, synthetic construct
  misc_feature 1..20: note = Description of Artificial Sequence: Synthetic oligonucleotide
  misc_feature 1..20: note = Target: SCN10A; (-) strand; PAM type: YTN; PAM sequence: CTG
  source 1..20: mol_type = other DNA
ccctcatgtgtcagagaggc

SEQ ID NO: 49703 - DNA, 20 bp, synthetic construct
  misc_feature 1..20: note = Description of Artificial Sequence: Synthetic oligonucleotide
  misc_feature 1..20: note = Target: SCN10A; (-) strand; PAM type: YTN; PAM sequence: CTA
  source 1..20: mol_type = other DNA
cagcagcagctgccctcatg

SEQ ID NO: 49704 - DNA, 20 bp, synthetic construct
  misc_feature 1..20: note = Description of Artificial Sequence: Synthetic oligonucleotide
  misc_feature 1..20: note = Target: SCN10A; (-) strand; PAM type: YTN; PAM sequence: TTA
  source 1..20: mol_type = other DNA
gactacagcagcagctgccc

SEQ ID NO: 49705 - DNA, 20 bp, synthetic construct
  misc_feature 1..20: note = Description of Artificial Sequence: Synthetic oligonucleotide
  misc_feature 1..20: note = Target: SCN10A; (-) strand; PAM type: YTN; PAM sequence: CTG
  source 1..20: mol_type = other DNA
aagggatgaaggaaaggacc

SEQ ID NO: 49706 - DNA, 20 bp, synthetic construct
  misc_feature 1..20: note = Description of Artificial Sequence: Synthetic oligonucleotide
  misc_feature 1..20: note = Target: SCN10A; (-) strand; PAM type: YTN; PAM sequence: CTA
  source 1..20: mol_type = other DNA
ggctgaagggatgaaggaaa

SEQ ID NO: 49707 - DNA, 20 bp, synthetic construct
  misc_feature 1..20: note = Description of Artificial Sequence: Synthetic oligonucleotide
  misc_feature 1..20: note = Target: SCN10A; (-) strand; PAM type: YTN; PAM sequence: TTA
  source 1..20: mol_type = other DNA
catgcctaggctgaagggat

SEQ ID NO: 49708 - DNA, 20 bp, synthetic construct
  misc_feature 1..20: note = Description of Artificial Sequence: Synthetic oligonucleotide
  misc_feature 1..20: note = Target: SCN10A; (-) strand; PAM type: YTN; PAM sequence: CTG
  source 1..20: mol_type = other DNA
ttacatgcctaggctgaagg

SEQ ID NO: 49709 - DNA, 20 bp, synthetic construct
  misc_feature 1..20: note = Description of Artificial Sequence: Synthetic oligonucleotide
  misc_feature 1..20: note = Target: SCN10A; (-) strand; PAM type: YTN; PAM sequence: CTA
  source 1..20: mol_type = other DNA
gtaacagggggaagctgtta

SEQ ID NO: 49710 - DNA, 20 bp, synthetic construct
  misc_feature 1..20: note = Description of Artificial Sequence: Synthetic oligonucleotide
  misc_feature 1..20: note = Target: SCN10A; (-) strand; PAM type: YTN; PAM sequence: CTA
  source 1..20: mol_type = other DNA
gaaactagtaacagggggaa

SEQ ID NO: 49711 - DNA, 20 bp, synthetic construct
  misc_feature 1..20: note = Description of Artificial Sequence: Synthetic oligonucleotide
  misc_feature 1..20: note = Target: SCN10A; (-) strand; PAM type: YTN; PAM sequence: TTA
  source 1..20: mol_type = other DNA
gggaatgaataagggacagt

SEQ ID NO: 49712 - DNA, 20 bp, synthetic construct
  misc_feature 1..20: note = Description of Artificial Sequence: Synthetic oligonucleotide
  misc_feature 1..20: note = Target: SCN10A; (-) strand; PAM type: YTN; PAM sequence: CTT
  source 1..20: mol_type = other DNA
agggaatgaataagggacag

SEQ ID NO: 49713 - DNA, 20 bp, synthetic construct
  misc_feature 1..20: note = Description of Artificial Sequence: Synthetic oligonucleotide
  misc_feature 1..20: note = Target: SCN10A; (-) strand; PAM type: YTN; PAM sequence: CTG
  source 1..20: mol_type = other DNA
ggcttagggaatgaataagg

SEQ ID NO: 49714 - DNA, 20 bp, synthetic construct
  misc_feature 1..20: note = Description of Artificial Sequence: Synthetic oligonucleotide
  misc_feature 1..20: note = Target: SCN10A; (-) strand; PAM type: YTN; PAM sequence: TTA
  source 1..20: mol_type = other DNA
cagaggtgtgggctgggctt

SEQ ID NO: 49715 - DNA, 20 bp, synthetic construct
  misc_feature 1..20: note = Description of Artificial Sequence: Synthetic oligonucleotide
  misc_feature 1..20: note = Target: SCN10A; (-) strand; PAM type: YTN; PAM sequence: TTT
  source 1..20: mol_type = other DNA
acagaggtgtgggctgggct

SEQ ID NO: 49716 - DNA, 20 bp, synthetic construct
  misc_feature 1..20: note = Description of Artificial Sequence: Synthetic oligonucleotide
  misc_feature 1..20: note = Target: SCN10A; (-) strand; PAM type: YTN; PAM sequence: TTA
  source 1..20: mol_type = other DNA
gtaaagtatttacagaggtg

SEQ ID NO: 49717 - DNA, 20 bp, synthetic construct
  misc_feature 1..20: note = Description of Artificial Sequence: Synthetic oligonucleotide
  misc_feature 1..20: note = Target: SCN10A; (-) strand; PAM type: YTN; PAM sequence: TTT
  source 1..20: mol_type = other DNA
agtaaagtatttacagaggt

SEQ ID NO: 49718 - DNA, 20 bp, synthetic construct
  misc_feature 1..20: note = Description of Artificial Sequence: Synthetic oligonucleotide
  misc_feature 1..20: note = Target: SCN10A; (-) strand; PAM type: YTN; PAM sequence: CTA
  source 1..20: mol_type = other DNA
atagagagagtttagtaaag

SEQ ID NO: 49719 - DNA, 20 bp, synthetic construct
  misc_feature 1..20: note = Description of Artificial Sequence: Synthetic oligonucleotide
  misc_feature 1..20: note = Target: SCN10A; (-) strand; PAM type: YTN; PAM sequence: CTC
  source 1..20: mol_type = other DNA
cgatgggctaatagagagag

SEQ ID NO: 49720 - DNA, 20 bp, synthetic construct
  misc_feature 1..20: note = Description of Artificial Sequence: Synthetic oligonucleotide
  misc_feature 1..20: note = Target: SCN10A; (-) strand; PAM type: YTN; PAM sequence: TTC
  source 1..20: mol_type = other DNA
agggtcccagcaagaaacag

SEQ ID NO: 49721 - DNA, 20 bp, synthetic construct
  misc_feature 1..20: note = Description of Artificial Sequence: Synthetic oligonucleotide
  misc_feature 1..20: note = Target: SCN10A; (-) strand; PAM type: YTN; PAM sequence: CTC
  source 1..20: mol_type = other DNA
aatgtcatgtgattcagggt

SEQ ID NO: 49722 - DNA, 20 bp, synthetic construct
  misc_feature 1..20: note = Description of Artificial Sequence: Synthetic oligonucleotide
  misc_feature 1..20: note = Target: SCN10A; (-) strand; PAM type: YTN; PAM sequence: CTG
  source 1..20: mol_type = other DNA
actcaatgtcatgtgattca

SEQ ID NO: 49723 - DNA, 20 bp, synthetic construct
  misc_feature 1..20: note = Description of Artificial Sequence: Synthetic oligonucleotide
  misc_feature 1..20: note = Target: SCN10A; (-) strand; PAM type: YTN; PAM sequence: CTC
  source 1..20: mol_type = other DNA
tgactcaatgtcatgtgatt

SEQ ID NO: 49724 - DNA, 20 bp, synthetic construct
  misc_feature 1..20: note = Description of Artificial Sequence: Synthetic oligonucleotide
  misc_feature 1..20: note = Target: SCN10A; (-) strand; PAM type: YTN; PAM sequence: CTC
  source 1..20: mol_type = other DNA
agtctctgactcaatgtcat

SEQ ID NO: 49725 - DNA, 20 bp, synthetic construct
  misc_feature 1..20: note = Description of Artificial Sequence: Synthetic oligonucleotide
  misc_feature 1..20: note = Target: SCN10A; (-) strand; PAM type: YTN; PAM sequence: TTA
  source 1..20: mol_type = other DNA
gctcagtctctgactcaatg

SEQ ID NO: 49726 - DNA, 20 bp, synthetic construct
  misc_feature 1..20: note = Description of Artificial Sequence: Synthetic oligonucleotide
  misc_feature 1..20: note = Target: SCN10A; (-) strand; PAM type: YTN; PAM sequence: CTT
  source 1..20: mol_type = other DNA
agctcagtctctgactcaat

SEQ ID NO: 49727 - DNA, 20 bp, synthetic construct
  misc_feature 1..20: note = Description of Artificial Sequence: Synthetic oligonucleotide
  misc_feature 1..20: note = Target: SCN10A; (-) strand; PAM type: YTN; PAM sequence: TTG
  source 1..20: mol_type = other DNA
ccttagctcagtctctgact

SEQ ID NO: 49728 - DNA, 20 bp, synthetic construct
  misc_feature 1..20: note = Description of Artificial Sequence: Synthetic oligonucleotide
  misc_feature 1..20: note = Target: SCN10A; (-) strand; PAM type: YTN; PAM sequence: TTA
  source 1..20: mol_type = other DNA
gagttgccttagctcagtct

SEQ ID NO: 49729 - DNA, 20 bp, synthetic construct
  misc_feature 1..20: note = Description of Artificial Sequence: Synthetic oligonucleotide
  misc_feature 1..20: note = Target: SCN10A; (-) strand; PAM type: YTN; PAM sequence: CTT
  source 1..20: mol_type = other DNA
agagttgccttagctcagtc

SEQ ID NO: 49730 - DNA, 20 bp, synthetic construct
  misc_feature 1..20: note = Description of Artificial Sequence: Synthetic oligonucleotide
  misc_feature 1..20: note = Target: SCN10A; (-) strand; PAM type: YTN; PAM sequence: CTG
  source 1..20: mol_type = other DNA
atacagataagtcttagagt

SEQ ID NO: 49731 - DNA, 20 bp, synthetic construct
  misc_feature 1..20: note = Description of Artificial Sequence: Synthetic oligonucleotide
  misc_feature 1..20: note = Target: SCN10A; (-) strand; PAM type: YTN; PAM sequence: TTC
  source 1..20: mol_type = other DNA
cactgatacagataagtctt

SEQ ID NO: 49732 - DNA, 20 bp, synthetic construct
  misc_feature 1..20: note = Description of Artificial Sequence: Synthetic oligonucleotide
  misc_feature 1..20: note = Target: SCN10A; (-) strand; PAM type: YTN; PAM sequence: TTG
  source 1..20: mol_type = other DNA
taaagagaccaataaatggt

SEQ ID NO: 49733 - DNA, 20 bp, synthetic construct
  misc_feature 1..20: note = Description of Artificial Sequence: Synthetic oligonucleotide
  misc_feature 1..20: note = Target: SCN10A; (-) strand; PAM type: YTN; PAM sequence: TTG
  source 1..20: mol_type = other DNA
cagacagaattgtaaagaga

SEQ ID NO: 49734 - DNA, 20 bp, synthetic construct
  misc_feature 1..20: note = Description of Artificial Sequence: Synthetic oligonucleotide
  misc_feature 1..20: note = Target: SCN10A; (-) strand; PAM type: YTN; PAM sequence: CTA
  source 1..20: mol_type = other DNA
gccagggatacagcgcaatt

SEQ ID NO: 49735 - DNA, 20 bp, synthetic construct
  misc_feature 1..20: note = Description of Artificial Sequence: Synthetic oligonucleotide
  misc_feature 1..20: note = Target: SCN10A; (-) strand; PAM type: YTN; PAM sequence: CTG
  source 1..20: mol_type = other DNA
gctagccagggatacagcgc

SEQ ID NO: 49736 - DNA, 20 bp, synthetic construct
  misc_feature 1..20: note = Description of Artificial Sequence: Synthetic oligonucleotide
  misc_feature 1..20: note = Target: SCN10A; (-) strand; PAM type: YTN; PAM sequence: CTC
  source 1..20: mol_type = other DNA
tggctagccagggatacagc

SEQ ID NO: 49737 - DNA, 20 bp, synthetic construct
  misc_feature 1..20: note = Description of Artificial Sequence: Synthetic oligonucleotide
  misc_feature 1..20: note = Target: SCN10A; (-) strand; PAM type: YTN; PAM sequence: CTC
  source 1..20: mol_type = other DNA
tctggctagccagggataca

SEQ ID NO: 49738 - DNA, 20 bp, synthetic construct
  misc_feature 1..20: note = Description of Artificial Sequence: Synthetic oligonucleotide
  misc_feature 1..20: note = Target: SCN10A; (-) strand; PAM type: YTN; PAM sequence: TTG
  source 1..20: mol_type = other DNA
ccctctctggctagccaggg

SEQ ID NO: 49739 - DNA, 20 bp, synthetic construct
  misc_feature 1..20: note = Description of Artificial Sequence: Synthetic oligonucleotide
  misc_feature 1..20: note = Target: SCN10A; (-) strand; PAM type: YTN; PAM sequence: TTT
  source 1..20: mol_type = other DNA
gccctctctggctagccagg

SEQ ID NO: 49740 - DNA, 20 bp, synthetic construct
  misc_feature 1..20: note = Description of Artificial Sequence: Synthetic oligonucleotide
  misc_feature 1..20: note = Target: SCN10A; (-) strand; PAM type: YTN; PAM sequence: TTC
  source 1..20: mol_type = other DNA
atttgccctctctggctagc

SEQ ID NO: 49741 - DNA, 20 bp, synthetic construct
  misc_feature 1..20: note = Description of Artificial Sequence: Synthetic oligonucleotide
  misc_feature 1..20: note = Target: SCN10A; (-) strand; PAM type: YTN; PAM sequence: TTT
  source 1..20: mol_type = other DNA
catttgccctctctggctag

SEQ ID NO: 49742 - DNA, 20 bp, synthetic construct
  misc_feature 1..20: note = Description of Artificial Sequence: Synthetic oligonucleotide
  misc_feature 1..20: note = Target: SCN10A; (-) strand; PAM type: YTN; PAM sequence: TTT
  source 1..20: mol_type = other DNA
tcatttgccctctctggcta

SEQ ID NO: 49743 - DNA, 20 bp, synthetic construct
  misc_feature 1..20: note = Description of Artificial Sequence: Synthetic oligonucleotide
  misc_feature 1..20: note = Target: SCN10A; (-) strand; PAM type: YTN; PAM sequence: TTT
  source 1..20: mol_type = other DNA
ttcatttgccctctctggct

SEQ ID NO: 49744 - DNA, 20 bp, synthetic construct
  misc_feature 1..20: note = Description of Artificial Sequence: Synthetic oligonucleotide
  misc_feature 1..20: note = Target: SCN10A; (-) strand; PAM type: YTN; PAM sequence: CTA
  source 1..20: mol_type = other DNA
gtgtttttcatttgccctct

SEQ ID NO: 49745 - DNA, 20 bp, synthetic construct
  misc_feature 1..20: note = Description of Artificial Sequence: Synthetic oligonucleotide
  misc_feature 1..20: note = Target: SCN10A; (-) strand; PAM type: YTN; PAM sequence: TTC
  source 1..20: mol_type = other DNA
tagtgtttttcatttgccct

SEQ ID NO: 49746 - DNA, 20 bp, synthetic construct
  misc_feature 1..20: note = Description of Artificial Sequence: Synthetic oligonucleotide
  misc_feature 1..20: note = Target: SCN10A; (-) strand; PAM type: YTN; PAM sequence: TTT
  source 1..20: mol_type = other DNA
ctagtgtttttcatttgccc

SEQ ID NO: 49747 - DNA, 20 bp, synthetic construct
  misc_feature 1..20: note = Description of Artificial Sequence: Synthetic oligonucleotide
  misc_feature 1..20: note = Target: SCN10A; (-) strand; PAM type: YTN; PAM sequence: TTC
  source 1..20: mol_type = other DNA
agcaatgatgtttctagtgt

SEQ ID NO: 49748 - DNA, 20 bp, synthetic construct
  misc_feature 1..20: note = Description of Artificial Sequence: Synthetic oligonucleotide
  misc_feature 1..20: note = Target: SCN10A; (-) strand; PAM type: YTN; PAM sequence: TTT
  source 1..20: mol_type = other DNA
cagcaatgatgtttctagtg

SEQ ID NO: 49749 - DNA, 20 bp, synthetic construct
  misc_feature 1..20: note = Description of Artificial Sequence: Synthetic oligonucleotide
  misc_feature 1..20: note = Target: SCN10A; (-) strand; PAM type: YTN; PAM sequence: CTC
  source 1..20: mol_type = other DNA
cagtttcagcaatgatgttt

SEQ ID NO: 49750 - DNA, 20 bp, synthetic construct
  misc_feature 1..20: note = Description of Artificial Sequence: Synthetic oligonucleotide
  misc_feature 1..20: note = Target: SCN10A; (-) strand; PAM type: YTN; PAM sequence: CTC
  source 1..20: mol_type = other DNA
ccctccagtttcagcaatga

SEQ ID NO: 49751 - DNA, 20 bp, synthetic construct
  misc_feature 1..20: note = Description of Artificial Sequence: Synthetic oligonucleotide
  misc_feature 1..20: note = Target: SCN10A; (-) strand; PAM type: YTN; PAM sequence: CTC
  source 1..20: mol_type = other DNA
tcccctccagtttcagcaat

SEQ ID NO: 49752 - DNA, 20 bp, synthetic construct
  misc_feature 1..20: note = Description of Artificial Sequence: Synthetic oligonucleotide
  misc_feature 1..20: note = Target: SCN10A; (-) strand; PAM type: YTN; PAM sequence: TTA
  source 1..20: mol_type = other DNA
atgtgagctctcccctccag

SEQ ID NO: 49753 - DNA, 20 bp, synthetic construct
  misc_feature 1..20: note = Description of Artificial Sequence: Synthetic oligonucleotide
  misc_feature 1..20: note = Target: SCN10A; (-) strand; PAM type: YTN; PAM sequence: CTG
  source 1..20: mol_type = other DNA
tgagttaatgtgagctctcc

SEQ ID NO: 49754 - DNA, 20 bp, synthetic construct
  misc_feature 1..20: note = Description of Artificial Sequence: Synthetic oligonucleotide
  misc_feature 1..20: note = Target: SCN10A; (-) strand; PAM type: YTN; PAM sequence: TTG
  source 1..20: mol_type = other DNA
ggagctgtgagttaatgtga

SEQ ID NO: 49755 - DNA, 20 bp, synthetic construct
  misc_feature 1..20: note = Description of Artificial Sequence: Synthetic oligonucleotide
  misc_feature 1..20: note = Target: SCN10A; (-) strand; PAM type: YTN; PAM sequence: TTG
  source 1..20: mol_type = other DNA
gattgggagctgtgagttaa

SEQ ID NO: 49756 - DNA, 20 bp, synthetic construct
  misc_feature 1..20: note = Description of Artificial Sequence: Synthetic oligonucleotide
  misc_feature 1..20: note = Target: SCN10A; (-) strand; PAM type: YTN; PAM sequence: CTC
  source 1..20: mol_type = other DNA
attggattgggagctgtgag

SEQ ID NO: 49757 - DNA, 20 bp, synthetic construct
  misc_feature 1..20: note = Description of Artificial Sequence: Synthetic oligonucleotide
  misc_feature 1..20: note = Target: SCN10A; (-) strand; PAM type: YTN; PAM sequence: TTC
  source 1..20: mol_type = other DNA
ctcattggattgggagctgt

SEQ ID NO: 49758 - DNA, 20 bp, synthetic construct
  misc_feature 1..20: note = Description of Artificial Sequence: Synthetic oligonucleotide
  misc_feature 1..20: note = Target: SCN10A; (-) strand; PAM type: YTN; PAM sequence: TTA
  source 1..20: mol_type = other DNA
atagaataatcgcagagtgt

SEQ ID NO: 49759 - DNA, 20 bp, synthetic construct
  misc_feature 1..20: note = Description of Artificial Sequence: Synthetic oligonucleotide
  misc_feature 1..20: note = Target: SCN10A; (-) strand; PAM type: YTN; PAM sequence: TTT
  source 1..20: mol_type = other DNA
aatagaataatcgcagagtg

SEQ ID NO: 49760 - DNA, 20 bp, synthetic construct
  misc_feature 1..20: note = Description of Artificial Sequence: Synthetic oligonucleotide
  misc_feature 1..20: note = Target: SCN10A; (-) strand; PAM type: YTN; PAM sequence: CTT
  source 1..20: mol_type = other DNA
taatagaataatcgcagagt

SEQ ID NO: 49761 - DNA, 20 bp, synthetic construct
  misc_feature 1..20: note = Description of Artificial Sequence: Synthetic oligonucleotide
  misc_feature 1..20: note = Target: SCN10A; (-) strand; PAM type: YTN; PAM sequence: CTC
  source 1..20: mol_type = other DNA
tttaatagaataatcgcaga

SEQ ID NO: 49762 - DNA, 20 bp, synthetic construct
  misc_feature 1..20: note = Description of Artificial Sequence: Synthetic oligonucleotide
  misc_feature 1..20: note = Target: SCN10A; (-) strand; PAM type: YTN; PAM sequence: CTG
  source 1..20: mol_type = other DNA
gccagcactctttaatagaa

SEQ ID NO: 49763 - DNA, 20 bp, synthetic construct
  misc_feature 1..20: note = Description of Artificial Sequence: Synthetic oligonucleotide
  misc_feature 1..20: note = Target: SCN10A; (-) strand; PAM type: YTN; PAM sequence: CTA
  source 1..20: mol_type = other DNA
actggccagcactctttaat

SEQ ID NO: 49764 - DNA, 20 bp, synthetic construct
  misc_feature 1..20: note = Description of Artificial Sequence: Synthetic oligonucleotide
  misc_feature 1..20: note = Target: SCN10A; (-) strand; PAM type: YTN; PAM sequence: TTA
  source 1..20: mol_type = other DNA
ggcaacagtgactaactggc

SEQ ID NO: 49765 - DNA, 20 bp, synthetic construct
  misc_feature 1..20: note = Description of Artificial Sequence: Synthetic oligonucleotide
  misc_feature 1..20: note = Target: SCN10A; (-) strand; PAM type: YTN; PAM sequence: TTG
  source 1..20: mol_type = other DNA
ccaaaatgagcaaattaggc

SEQ ID NO: 49766 - DNA, 20 bp, synthetic construct
  misc_feature 1..20: note = Description of Artificial Sequence: Synthetic oligonucleotide
  misc_feature 1..20: note = Target: SCN10A; (-) strand; PAM type: YTN; PAM sequence: TTT
  source 1..20: mol_type = other DNA
gccaaaatgagcaaattagg

SEQ ID NO: 49767 - DNA, 20 bp, synthetic construct
  misc_feature 1..20: note = Description of Artificial Sequence: Synthetic oligonucleotide
  misc_feature 1..20: note = Target: SCN10A; (-) strand; PAM type: YTN; PAM sequence: CTC
  source 1..20: mol_type = other DNA
acagaagaaataatttgcca

SEQ ID NO: 49768 - DNA, 20 bp, synthetic construct
  misc_feature 1..20: note = Description of Artificial Sequence: Synthetic oligonucleotide
  misc_feature 1..20: note = Target: SCN10A; (-) strand; PAM type: YTN; PAM sequence: TTA
  source 1..20: mol_type = other DNA
ctcacagaagaaataatttg

SEQ ID NO: 49769 - DNA, 20 bp, synthetic construct
  misc_feature 1..20: note = Description of Artificial Sequence: Synthetic oligonucleotide
  misc_feature 1..20: note = Target: SCN10A; (-) strand; PAM type: YTN; PAM sequence: TTT
  source 1..20: mol_type = other DNA
actcacagaagaaataattt

SEQ ID NO: 49770 - DNA, 20 bp, synthetic construct
  misc_feature 1..20: note = Description of Artificial Sequence: Synthetic oligonucleotide
  misc_feature 1..20: note = Target: SCN10A; (-) strand; PAM type: YTN; PAM sequence: CTT
  source 1..20: mol_type = other DNA
tactcacagaagaaataatt

SEQ ID NO: 49771 - DNA, 20 bp, synthetic construct
  misc_feature 1..20: note = Description of Artificial Sequence: Synthetic oligonucleotide
  misc_feature 1..20: note = Target: SCN10A; (-) strand; PAM type: YTN; PAM sequence: TTG
  source 1..20: mol_type = other DNA
ctttactcacagaagaaata

SEQ ID NO: 49772 - DNA, 20 bp, synthetic construct
  misc_feature 1..20: note = Description of Artificial Sequence: Synthetic oligonucleotide
  misc_feature 1..20: note = Target: SCN10A; (-) strand; PAM type: YTN; PAM sequence: CTT
  source 1..20: mol_type = other DNA
gctttactcacagaagaaat

SEQ ID NO: 49773 - DNA, 20 bp, synthetic construct
  misc_feature 1..20: note = Description of Artificial Sequence: Synthetic oligonucleotide
  misc_feature 1..20: note = Target: SCN10A; (-) strand; PAM type: YTN; PAM sequence: TTC
  source 1..20: mol_type = other DNA
cttgctttactcacagaaga

SEQ ID NO: 49774 - DNA, 20 bp, synthetic construct
  misc_feature 1..20: note = Description of Artificial Sequence: Synthetic oligonucleotide
  misc_feature 1..20: note = Target: SCN10A; (-) strand; PAM type: YTN; PAM sequence: CTG
  source 1..20: mol_type = other DNA
aatagaagcacagtattcct

SEQ ID NO: 49775 - DNA, 20 bp, synthetic construct
  misc_feature 1..20: note = Description of Artificial Sequence: Synthetic oligonucleotide
  misc_feature 1..20: note = Target: SCN10A; (-) strand; PAM type: YTN; PAM sequence: TTA
  source 1..20: mol_type = other DNA
ggacagatctgaatagaagc

SEQ ID NO: 49776 - DNA, 20 bp, synthetic construct
  misc_feature 1..20: note = Description of Artificial Sequence: Synthetic oligonucleotide
  misc_feature 1..20: note = Target: SCN10A; (-) strand; PAM type: YTN; PAM sequence: CTT
  source 1..20: mol_type = other DNA
aggacagatctgaatagaag

SEQ ID NO: 49777 - DNA, 20 bp, synthetic construct
  misc_feature 1..20: note = Description of Artificial Sequence: Synthetic oligonucleotide
  misc_feature 1..20: note = Target: SCN10A; (-) strand; PAM type: YTN; PAM sequence: TTC
  source 1..20: mol_type = other DNA
ttaggacagatctgaataga

SEQ ID NO: 49778 - DNA, 20 bp, synthetic construct
  misc_feature 1..20: note = Description of Artificial Sequence: Synthetic oligonucleotide
  misc_feature 1..20: note = Target: SCN10A; (-) strand; PAM type: YTN; PAM sequence: TTT
  source 1..20: mol_type = other DNA
cttaggacagatctgaatag

SEQ ID NO: 49779 - DNA, 20 bp, synthetic construct
  misc_feature 1..20: note = Description of Artificial Sequence: Synthetic oligonucleotide
  misc_feature 1..20: note = Target: SCN10A; (-) strand; PAM type: YTN; PAM sequence: TTC
  source 1..20: mol_type = other DNA
aggaagtttcttaggacaga

SEQ ID NO: 49780 - DNA, 20 bp, synthetic construct
  misc_feature 1..20: note = Description of Artificial Sequence: Synthetic oligonucleotide
  misc_feature 1..20: note = Target: SCN10A; (-) strand; PAM type: YTN; PAM sequence: CTG
  source 1..20: mol_type = other DNA
ggcaaatggcacccagagaa

SEQ ID NO: 49781 - DNA, 20 bp, synthetic construct
  misc_feature 1..20: note = Description of Artificial Sequence: Synthetic oligonucleotide
  misc_feature 1..20: note = Target: SCN10A; (-) strand; PAM type: YTN; PAM sequence: CTA
  source 1..20: mol_type = other DNA
ggctgggcaaatggcaccca

SEQ ID NO: 49782 - DNA, 20 bp, synthetic construct
  misc_feature 1..20: note = Description of Artificial Sequence: Synthetic oligonucleotide
  misc_feature 1..20: note = Target: SCN10A; (-) strand; PAM type: YTN; PAM sequence: TTC
  source 1..20: mol_type = other DNA
taggctgggcaaatggcacc

SEQ ID NO: 49783 - DNA, 20 bp, synthetic construct
  misc_feature 1..20: note = Description of Artificial Sequence: Synthetic oligonucleotide
  misc_feature 1..20: note = Target: SCN10A; (-) strand; PAM type: YTN; PAM sequence: CTT
  source 1..20: mol_type = other DNA
ctaggctgggcaaatggcac

SEQ ID NO: 49784 - DNA, 20 bp, synthetic construct
  misc_feature 1..20: note = Description of Artificial Sequence: Synthetic oligonucleotide
  misc_feature 1..20: note = Target: SCN10A; (-) strand; PAM type: YTN; PAM sequence: CTC
  source 1..20: mol_type = other DNA
ttctaggctgggcaaatggc

SEQ ID NO: 49785 - DNA, 20 bp, synthetic construct
  misc_feature 1..20: note = Description of Artificial Sequence: Synthetic oligonucleotide
  misc_feature 1..20: note = Target: SCN10A; (-) strand; PAM type: YTN; PAM sequence: CTA
  source 1..20: mol_type = other DNA
tgcaaactcttctaggctgg

SEQ ID NO: 49786 - DNA, 20 bp, synthetic construct
  misc_feature 1..20: note = Description of Artificial Sequence: Synthetic oligonucleotide
  misc_feature 1..20: note = Target: SCN10A; (-) strand; PAM type: YTN; PAM sequence: CTC
  source 1..20: mol_type = other DNA
tatgcaaactcttctaggct

SEQ ID NO: 49787 - DNA, 20 bp, synthetic construct
  misc_feature 1..20: note = Description of Artificial Sequence: Synthetic oligonucleotide
  misc_feature 1..20: note = Target: SCN10A; (-) strand; PAM type: YTN; PAM sequence: TTA
  source 1..20: mol_type = other DNA
tggctctatgcaaactcttc

SEQ ID NO: 49788 - DNA, 20 bp, synthetic construct
  misc_feature 1..20: note = Description of Artificial Sequence: Synthetic oligonucleotide
  misc_feature 1..20: note = Target: SCN10A; (-) strand; PAM type: YTN; PAM sequence: CTT
  source 1..20: mol_type = other DNA
atggctctatgcaaactctt

SEQ ID NO: 49789 - DNA, 20 bp, synthetic construct
  misc_feature 1..20: note = Description of Artificial Sequence: Synthetic oligonucleotide
  misc_feature 1..20: note = Target: SCN10A; (-) strand; PAM type: YTN; PAM sequence: CTG
  source 1..20: mol_type = other DNA
cttatggctctatgcaaact

SEQ ID NO: 49790 - DNA, 20 bp, synthetic construct
  misc_feature 1..20: note = Description of Artificial Sequence: Synthetic oligonucleotide
  misc_feature 1..20: note = Target: SCN10A; (-) strand; PAM type: YTN; PAM sequence: TTC
  source 1..20: mol_type = other DNA
ctgcttatggctctatgcaa

SEQ ID NO: 49791 - DNA, 20 bp, synthetic construct
  misc_feature 1..20: note = Description of Artificial Sequence: Synthetic oligonucleotide
  misc_feature 1..20: note = Target: SCN10A; (-) strand; PAM type: YTN; PAM sequence: CTT
  source 1..20: mol_type = other DNA
cctgcttatggctctatgca

SEQ ID NO: 49792 - DNA, 20 bp, synthetic construct
  misc_feature 1..20: note = Description of Artificial Sequence: Synthetic oligonucleotide
  misc_feature 1..20: note = Target: SCN10A; (-) strand; PAM type: YTN; PAM sequence: CTC
  source 1..20: mol_type = other DNA
ttcctgcttatggctctatg

SEQ ID NO: 49793 - DNA, 20 bp, synthetic construct
  misc_feature 1..20: note = Description of Artificial Sequence: Synthetic oligonucleotide
  misc_feature 1..20: note = Target: SCN10A; (-) strand; PAM type: YTN; PAM sequence: TTC
  source 1..20: mol_type = other DNA
tcttcctgcttatggctcta

SEQ ID NO: 49794 - DNA, 20 bp, synthetic construct
  misc_feature 1..20: note = Description of Artificial Sequence: Synthetic oligonucleotide
  misc_feature 1..20: note = Target: SCN10A; (-) strand; PAM type: YTN; PAM sequence: CTT
  source 1..20: mol_type = other DNA
ctcttcctgcttatggctct

SEQ ID NO: 49795 - DNA, 20 bp, synthetic construct
  misc_feature 1..20: note = Description of Artificial Sequence: Synthetic oligonucleotide
  misc_feature 1..20: note = Target: SCN10A; (-) strand; PAM type: YTN; PAM sequence: CTG
  source 1..20: mol_type = other DNA
aaggacccttctcttcctgc

SEQ ID NO: 49796 - DNA, 20 bp, synthetic construct
  misc_feature 1..20: note = Description of Artificial Sequence: Synthetic oligonucleotide
  misc_feature 1..20: note = Target: SCN10A; (-) strand; PAM type: YTN; PAM sequence: TTG
  source 1..20: mol_type = other DNA
gacaggtatgagaaaaactg

SEQ ID NO: 49797 - DNA, 20 bp, synthetic construct
  misc_feature 1..20: note = Description of Artificial Sequence: Synthetic oligonucleotide
  misc_feature 1..20: note = Target: SCN10A; (-) strand; PAM type: YTN; PAM sequence: TTG
  source 1..20: mol_type = other DNA
ttggacaggtatgagaaaaa

SEQ ID NO: 49798 - DNA, 20 bp, synthetic construct
  misc_feature 1..20: note = Description of Artificial Sequence: Synthetic oligonucleotide
  misc_feature 1..20: note = Target: SCN10A; (-) strand; PAM type: YTN; PAM sequence: CTT
  source 1..20: mol_type = other DNA
gttggacaggtatgagaaaa

SEQ ID NO: 49799 - DNA, 20 bp, synthetic construct
  misc_feature 1..20: note = Description of Artificial Sequence: Synthetic oligonucleotide
  misc_feature 1..20: note = Target: SCN10A; (-) strand; PAM type: YTN; PAM sequence: TTC
  source 1..20: mol_type = other DNA
ttgttggacaggtatgagaa

SEQ ID NO: 49800 - DNA, 20 bp, synthetic construct
  misc_feature 1..20: note = Description of Artificial Sequence: Synthetic oligonucleotide
  misc_feature 1..20: note = Target: SCN10A; (-) strand; PAM type: YTN; PAM sequence: TTT
  source 1..20: mol_type = other DNA
cttgttggacaggtatgaga

SEQ ID NO: 49801 - DNA, 20 bp, synthetic construct
  misc_feature 1..20: note = Description of Artificial Sequence: Synthetic oligonucleotide
  misc_feature 1..20: note = Target: SCN10A; (-) strand; PAM type: YTN; PAM sequence: CTT
  source 1..20: mol_type = other DNA
tcttgttggacaggtatgag

SEQ ID NO: 49802 - DNA, 20 bp, synthetic construct
  misc_feature 1..20: note = Description of Artificial Sequence: Synthetic oligonucleotide
  misc_feature 1..20: note = Target: SCN10A; (-) strand; PAM type: YTN; PAM sequence: CTG
  source 1..20: mol_type = other DNA
ctttcttgttggacaggtat

SEQ ID NO: 49803 - DNA, 20 bp, synthetic construct
  misc_feature 1..20: note = Description of Artificial Sequence: Synthetic oligonucleotide
  misc_feature 1..20: note = Target: SCN10A; (-) strand; PAM type: YTN; PAM sequence: CTC
  source 1..20: mol_type = other DNA
agtgataggcctgctttctt

SEQ ID NO: 49804 - DNA, 20 bp, synthetic construct
  misc_feature 1..20: note = Description of Artificial Sequence: Synthetic oligonucleotide
  misc_feature 1..20: note = Target: SCN10A; (-) strand; PAM type: YTN; PAM sequence: CTG
  source 1..20: mol_type = other DNA
cctcagtgataggcctgctt

SEQ ID NO: 49805 - DNA, 20 bp, synthetic construct
  misc_feature 1..20: note = Description of Artificial Sequence: Synthetic oligonucleotide
  misc_feature 1..20: note = Target: SCN10A; (-) strand; PAM type: YTN; PAM sequence: CTC
  source 1..20: mol_type = other DNA
aacatcactgcctcagtgat

SEQ ID NO: 49806 - DNA, 20 bp, synthetic construct
  misc_feature 1..20: note = Description of Artificial Sequence: Synthetic oligonucleotide
  misc_feature 1..20: note = Target: SCN10A; (-) strand; PAM type: YTN; PAM sequence: CTG
  source 1..20: mol_type = other DNA
tccccactcaacatcactgc

SEQ ID NO: 49807 - DNA, 20 bp, synthetic construct
  misc_feature 1..20: note = Description of Artificial Sequence: Synthetic oligonucleotide
  misc_feature 1..20: note = Target: SCN10A; (-) strand; PAM type: YTN; PAM sequence: CTC
  source 1..20: mol_type = other DNA
tgtccccactcaacatcact

SEQ ID NO: 49808 - DNA, 20 bp, synthetic construct
  misc_feature 1..20: note = Description of Artificial Sequence: Synthetic oligonucleotide
  misc_feature 1..20: note = Target: SCN10A; (-) strand; PAM type: YTN; PAM sequence: TTC
  source 1..20: mol_type = other DNA
tctgtccccactcaacatca

SEQ ID NO: 49809 - DNA, 20 bp, synthetic construct
  misc_feature 1..20: note = Description of Artificial Sequence: Synthetic oligonucleotide
  misc_feature 1..20: note = Target: SCN10A; (-) strand; PAM type: YTN; PAM sequence: CTT
  source 1..20: mol_type = other DNA
ctctgtccccactcaacatc

SEQ ID NO: 49810 - DNA, 20 bp, synthetic construct
  misc_feature 1..20: note = Description of Artificial Sequence: Synthetic oligonucleotide
  misc_feature 1..20: note = Target: SCN10A; (-) strand; PAM type: YTN; PAM sequence: TTA
  source 1..20: mol_type = other DNA
tcagtgcttctctgtcccca

SEQ ID NO: 49811 - DNA, 20 bp, synthetic construct
  misc_feature 1..20: note = Description of Artificial Sequence: Synthetic oligonucleotide
  misc_feature 1..20: note = Target: SCN10A; (-) strand; PAM type: YTN; PAM sequence: CTT
  source 1..20: mol_type = other DNA
atcagtgcttctctgtcccc

SEQ ID NO: 49812 - DNA, 20 bp, synthetic construct
  misc_feature 1..20: note = Description of Artificial Sequence: Synthetic oligonucleotide
  misc_feature 1..20: note = Target: SCN10A; (-) strand; PAM type: YTN; PAM sequence: TTC
  source 1..20: mol_type = other DNA
ttatcagtgcttctctgtcc

SEQ ID NO: 49813 - DNA, 20 bp, synthetic construct
  misc_feature 1..20: note = Description of Artificial Sequence: Synthetic oligonucleotide
  misc_feature 1..20: note = Target: SCN10A; (-) strand; PAM type: YTN; PAM sequence: TTT
  source 1..20: mol_type = other DNA
cttatcagtgcttctctgtc

SEQ ID NO: 49814 - DNA, 20 bp, synthetic construct
  misc_feature 1..20: note = Description of Artificial Sequence: Synthetic oligonucleotide
  misc_feature 1..20: note = Target: SCN10A; (-) strand; PAM type: YTN; PAM sequence: TTG
  source 1..20: mol_type = other DNA
accccatatttcttatcagt

SEQ ID NO: 49815 - DNA, 20 bp, synthetic construct
  misc_feature 1..20: note = Description of Artificial Sequence: Synthetic oligonucleotide
  misc_feature 1..20: note = Target: SCN10A; (-) strand; PAM type: YTN; PAM sequence: TTT
  source 1..20: mol_type = other DNA
gaccccatatttcttatcag

SEQ ID NO: 49816 - DNA, 20 bp, synthetic construct
  misc_feature 1..20: note = Description of Artificial Sequence: Synthetic oligonucleotide
  misc_feature 1..20: note = Target: SCN10A; (-) strand; PAM type: YTN; PAM sequence: TTC
  source 1..20: mol_type = other DNA
catttgaccccatatttctt

SEQ ID NO: 49817 - DNA, 20 bp, synthetic construct
  misc_feature 1..20: note = Description of Artificial Sequence: Synthetic oligonucleotide
  misc_feature 1..20: note = Target: SCN10A; (-) strand; PAM type: YTN; PAM sequence: TTA
  source 1..20: mol_type = other DNA
tattccatttgaccccatat

SEQ ID NO: 49818 - DNA, 20 bp, synthetic construct
  misc_feature 1..20: note = Description of Artificial Sequence: Synthetic oligonucleotide
  misc_feature 1..20: note = Target: SCN10A; (-) strand; PAM type: YTN; PAM sequence: CTG
  source 1..20: mol_type = other DNA
cagtagtgatgcaaattata

SEQ ID NO: 49819 - DNA, 20 bp, synthetic construct
  misc_feature 1..20: note = Description of Artificial Sequence: Synthetic oligonucleotide
  misc_feature 1..20: note = Target: SCN10A; (-) strand; PAM type: YTN; PAM sequence: TTC
  source 1..20: mol_type = other DNA
tgcagtagtgatgcaaatta

SEQ ID NO: 49820 - DNA, 20 bp, synthetic construct
  misc_feature 1..20: note = Description of Artificial Sequence: Synthetic oligonucleotide
  misc_feature 1..20: note = Target: SCN10A; (-) strand; PAM type: YTN; PAM sequence: TTA
  source 1..20: mol_type = other DNA
ttctgcagtagtgatgcaaa

SEQ ID NO: 49821 - DNA, 20 bp, synthetic construct
  misc_feature 1..20: note = Description of Artificial Sequence: Synthetic oligonucleotide
  misc_feature 1..20: note = Target: SCN10A; (-) strand; PAM type: YTN; PAM sequence: TTT
  source 1..20: mol_type = other DNA
attctgcagtagtgatgcaa

SEQ ID NO: 49822 - DNA, 20 bp, synthetic construct
  misc_feature 1..20: note = Description of Artificial Sequence: Synthetic oligonucleotide
  misc_feature 1..20: note = Target: SCN10A; (-) strand; PAM type: YTN; PAM sequence: CTG
  source 1..20: mol_type = other DNA
gtttattctgcagtagtgat

SEQ ID NO: 49823 - DNA, 20 bp, synthetic construct
  misc_feature 1..20: note = Description of Artificial Sequence: Synthetic oligonucleotide
  misc_feature 1..20: note = Target: SCN10A; (-) strand; PAM type: YTN; PAM sequence: TTC
  source 1..20: mol_type = other DNA
ctggtttattctgcagtagt

SEQ ID NO: 49824 - DNA, 20 bp, synthetic construct
  misc_feature 1..20: note = Description of Artificial Sequence: Synthetic oligonucleotide
  misc_feature 1..20: note = Target: SCN10A; (-) strand; PAM type: YTN; PAM sequence: TTT
  source 1..20: mol_type = other DNA
cctggtttattctgcagtag

SEQ ID NO: 49825 - DNA, 20 bp, synthetic construct
  misc_feature 1..20: note = Description of Artificial Sequence: Synthetic oligonucleotide
  misc_feature 1..20: note = Target: SCN10A; (-) strand; PAM type: YTN; PAM sequence: CTG
  source 1..20: mol_type = other DNA
aggtcaaacaggtttcctgg

SEQ ID NO: 49826 - DNA, 20 bp, synthetic construct
  misc_feature 1..20: note = Description of Artificial Sequence: Synthetic oligonucleotide
  misc_feature 1..20: note = Target: SCN10A; (-) strand; PAM type: YTN; PAM sequence: TTG
  source 1..20: mol_type = other DNA
gcctgaggtcaaacaggttt

SEQ ID NO: 49827 - DNA, 20 bp, synthetic construct
  misc_feature 1..20: note = Description of Artificial Sequence: Synthetic oligonucleotide
  misc_feature 1..20: note = Target: SCN10A; (-) strand; PAM type: YTN; PAM sequence: TTG
  source 1..20: mol_type = other DNA
agttggcctgaggtcaaaca

SEQ ID NO: 49828 - DNA, 20 bp, synthetic construct
  misc_feature 1..20: note = Description of Artificial Sequence: Synthetic oligonucleotide
  misc_feature 1..20: note = Target: SCN10A; (-) strand; PAM type: YTN; PAM sequence: TTA
  source 1..20: mol_type = other DNA
cagacatagaagatgagacc

SEQ ID NO: 49829 - DNA, 20 bp, synthetic construct
  misc_feature 1..20: note = Description of Artificial Sequence: Synthetic oligonucleotide
  misc_feature 1..20: note = Target: SCN10A; (-) strand; PAM type: YTN; PAM sequence: TTT
  source 1..20: mol_type = other DNA
acagacatagaagatgagac

SEQ ID NO: 49830 - DNA, 20 bp, synthetic construct
  misc_feature 1..20: note = Description of Artificial Sequence: Synthetic oligonucleotide
  misc_feature 1..20: note = Target: SCN10A; (-) strand; PAM type: YTN; PAM sequence: TTT
  source 1..20: mol_type = other DNA
tacagacatagaagatgaga

SEQ ID NO: 49831 - DNA, 20 bp, synthetic construct
  misc_feature 1..20: note = Description of Artificial Sequence: Synthetic oligonucleotide
  misc_feature 1..20: note = Target: SCN10A; (-) strand; PAM type: YTN; PAM sequence: TTT
  source 1..20: mol_type = other DNA
ttacagacatagaagatgag

SEQ ID NO: 49832 - DNA, 20 bp, synthetic construct
  misc_feature 1..20: note = Description of Artificial Sequence: Synthetic oligonucleotide
  misc_feature 1..20: note = Target: SCN10A; (-) strand; PAM type: YTN; PAM sequence: TTT
  source 1..20: mol_type = other DNA
tttacagacatagaagatga

SEQ ID NO: 49833 - DNA, 20 bp, synthetic construct
  misc_feature 1..20: note = Description of Artificial Sequence: Synthetic oligonucleotide
  misc_feature 1..20: note = Target: SCN10A; (-) strand; PAM type: YTN; PAM sequence: CTT
  source 1..20: mol_type = other DNA
ttttacagacatagaagatg

SEQ ID NO: 49834 - DNA, 20 bp, synthetic construct
  misc_feature 1..20: note = Description of Artificial Sequence: Synthetic oligonucleotide
  misc_feature 1..20: note = Target: SCN10A; (-) strand; PAM type: YTN; PAM sequence: CTC
  source 1..20: mol_type = other DNA
cttttttacagacatagaag

SEQ ID NO: 49835 - DNA, 20 bp, synthetic construct
  misc_feature 1..20: note = Description of Artificial Sequence: Synthetic oligonucleotide
  misc_feature 1..20: note = Target: SCN10A; (-) strand; PAM type: YTN; PAM sequence: CTA
  source 1..20: mol_type = other DNA
ctccttttttacagacatag

SEQ ID NO: 49836 - DNA, 20 bp, synthetic construct
  misc_feature 1..20: note = Description of Artificial Sequence: Synthetic oligonucleotide
  misc_feature 1..20: note = Target: SCN10A; (-) strand; PAM type: YTN; PAM sequence: TTC
  source 1..20: mol_type = other DNA
tactccttttttacagacat

SEQ ID NO: 49837 - DNA, 20 bp, synthetic construct
  misc_feature 1..20: note = Description of Artificial Sequence: Synthetic oligonucleotide
  misc_feature 1..20: note = Target: SCN10A; (-) strand; PAM type: YTN; PAM sequence: CTC
  source 1..20: mol_type = other DNA
cccattctactcctttttta

SEQ ID NO: 49838 - DNA, 20 bp, synthetic construct
  misc_feature 1..20: note = Description of Artificial Sequence: Synthetic oligonucleotide
  misc_feature 1..20: note = Target: SCN10A; (-) strand; PAM type: YTN; PAM sequence: CTG
  source 1..20: mol_type = other DNA
tccaatgcctccccattcta

SEQ ID NO: 49839 - DNA, 20 bp, synthetic construct
  misc_feature 1..20: note = Description of Artificial Sequence: Synthetic oligonucleotide
  misc_feature 1..20: note = Target: SCN10A; (-) strand; PAM type: YTN; PAM sequence: TTA
  source 1..20: mol_type = other DNA
gccatcatcctgtccaatgc

SEQ ID NO: 49840 - DNA, 20 bp, synthetic construct
  misc_feature 1..20: note = Description of Artificial Sequence: Synthetic oligonucleotide
  misc_feature 1..20: note = Target: SCN10A; (-) strand; PAM type: YTN; PAM sequence: TTT
  source 1..20: mol_type = other DNA
agccatcatcctgtccaatg

SEQ ID NO: 49841 - DNA, 20 bp, synthetic construct
  misc_feature 1..20: note = Description of Artificial Sequence: Synthetic oligonucleotide
  misc_feature 1..20: note = Target: SCN10A; (-) strand; PAM type: YTN; PAM sequence: CTT
  source 1..20: mol_type = other DNA
tagccatcatcctgtccaat

SEQ ID NO: 49842 - DNA, 20 bp, synthetic construct
  misc_feature 1..20: note = Description of Artificial Sequence: Synthetic oligonucleotide
  misc_feature 1..20: note = Target: SCN10A; (-) strand; PAM type: YTN; PAM sequence: CTG
  source 1..20: mol_type = other DNA
agtatcaccaatggaaggga

SEQ ID NO: 49843 - DNA, 20 bp, synthetic construct
  misc_feature 1..20: note = Description of Artificial Sequence: Synthetic oligonucleotide
  misc_feature 1..20: note = Target: SCN10A; (-) strand; PAM type: YTN; PAM sequence: TTG
  source 1..20: mol_type = other DNA
agccaagaagcctgagtatc

SEQ ID NO: 49844 - DNA, 20 bp, synthetic construct
  misc_feature 1..20: note = Description of Artificial Sequence: Synthetic oligonucleotide
  misc_feature 1..20: note = Target: SCN10A; (-) strand; PAM type: YTN; PAM sequence: CTT
  source 1..20: mol_type = other DNA
gagccaagaagcctgagtat

SEQ ID NO: 49845 - DNA, 20 bp, synthetic construct
  misc_feature 1..20: note = Description of Artificial Sequence: Synthetic oligonucleotide
  misc_feature 1..20: note = Target: SCN10A; (-) strand; PAM type: YTN; PAM sequence: CTA
  source 1..20: mol_type = other DNA
gaagccttgagccaagaagc

SEQ ID NO: 49846 - DNA, 20 bp, synthetic construct
  misc_feature 1..20: note = Description of Artificial Sequence: Synthetic oligonucleotide
  misc_feature 1..20: note = Target: SCN10A; (-) strand; PAM type: YTN; PAM sequence: TTC
  source 1..20: mol_type = other DNA
cacctagaagccttgagcca

SEQ ID NO: 49847 - DNA, 20 bp, synthetic construct
  misc_feature 1..20: note = Description of Artificial Sequence: Synthetic oligonucleotide
  misc_feature 1..20: note = Target: SCN10A; (-) strand; PAM type: YTN; PAM sequence: CTT
  source 1..20: mol_type = other DNA
ccacctagaagccttgagcc

SEQ ID NO: 49848 - DNA, 20 bp, synthetic construct
  misc_feature 1..20: note = Description of Artificial Sequence: Synthetic oligonucleotide
  misc_feature 1..20: note = Target: SCN10A; (-) strand; PAM type: YTN; PAM sequence: CTG
  source 1..20: mol_type = other DNA
tcttccacctagaagccttg

SEQ ID NO: 49849 - DNA, 20 bp, synthetic construct
  misc_feature 1..20: note = Description of Artificial Sequence: Synthetic oligonucleotide
  misc_feature 1..20: note = Target: SCN10A; (-) strand; PAM type: YTN; PAM sequence: CTC
  source 1..20: mol_type = other DNA
aggctgtcttccacctagaa

SEQ ID NO: 49850 - DNA, 20 bp, synthetic construct
  misc_feature 1..20: note = Description of Artificial Sequence: Synthetic oligonucleotide
  misc_feature 1..20: note = Target: SCN10A; (-) strand; PAM type: YTN; PAM sequence: CTC
  source 1..20: mol_type = other DNA
cctcaggctgtcttccacct

SEQ ID NO: 49851 - DNA, 20 bp, synthetic construct
  misc_feature 1..20: note = Description of Artificial Sequence: Synthetic oligonucleotide
  misc_feature 1..20: note = Target: SCN10A; (-) strand; PAM type: YTN; PAM sequence: TTC
  source 1..20: mol_type = other DNA
agactccctcaggctgtctt

SEQ ID NO: 49852 - DNA, 20 bp, synthetic construct
  misc_feature 1..20: note = Description of Artificial Sequence: Synthetic oligonucleotide
  misc_feature 1..20: note = Target: SCN10A; (-) strand; PAM type: YTN; PAM sequence: CTT
  source 1..20: mol_type = other DNA
cagactccctcaggctgtct

SEQ ID NO: 49853 - DNA, 20 bp, synthetic construct
  misc_feature 1..20: note = Description of Artificial Sequence: Synthetic oligonucleotide
  misc_feature 1..20: note = Target: SCN10A; (-) strand; PAM type: YTN; PAM sequence: TTG
  source 1..20: mol_type = other DNA
tgaatgcttcagactccctc

SEQ ID NO: 49854 - DNA, 20 bp, synthetic construct
  misc_feature 1..20: note = Description of Artificial Sequence: Synthetic oligonucleotide
  misc_feature 1..20: note = Target: SCN10A; (-) strand; PAM type: YTN; PAM sequence: TTT
  source 1..20: mol_type = other DNA
gtgaatgcttcagactccct

SEQ ID NO: 49855 - DNA, 20 bp, synthetic construct
  misc_feature 1..20: note = Description of Artificial Sequence: Synthetic oligonucleotide
  misc_feature 1..20: note = Target: SCN10A; (-) strand; PAM type: YTN; PAM sequence: CTC
  source 1..20: mol_type = other DNA
ggtgagtttgtgaatgcttc

SEQ ID NO: 49856 - DNA, 20 bp, synthetic construct
  misc_feature 1..20: note = Description of Artificial Sequence: Synthetic oligonucleotide
  misc_feature 1..20: note = Target: SCN10A; (-) strand; PAM type: YTN; PAM sequence: CTG
  source 1..20: mol_type = other DNA
tcgatgtctcggtgagtttg

SEQ ID NO: 49857 - DNA, 20 bp, synthetic construct
  misc_feature 1..20: note = Description of Artificial Sequence: Synthetic oligonucleotide
  misc_feature 1..20: note = Target: SCN10A; (-) strand; PAM type: YTN; PAM sequence: CTG
  source 1..20: mol_type = other DNA
gagctgtcgatgtctcggtg

SEQ ID NO: 49858 - DNA, 20 bp, synthetic construct
  misc_feature 1..20: note = Description of Artificial Sequence: Synthetic oligonucleotide
  misc_feature 1..20: note = Target: SCN10A; (-) strand; PAM type: YTN; PAM sequence: TTG
  source 1..20: mol_type = other DNA
cccctggagctgtcgatgtc

SEQ ID NO: 49859 - DNA, 20 bp, synthetic construct
  misc_feature 1..20: note = Description of Artificial Sequence: Synthetic oligonucleotide
  misc_feature 1..20: note = Target: SCN10A; (-) strand; PAM type: YTN; PAM sequence: CTT
  source 1..20: mol_type = other DNA
gcccctggagctgtcgatgt

SEQ ID NO: 49860 - DNA, 20 bp, synthetic construct
  misc_feature 1..20: note = Description of Artificial Sequence: Synthetic oligonucleotide
  misc_feature 1..20: note = Target: SCN10A; (-) strand; PAM type: YTN; PAM sequence: CTA
  source 1..20: mol_type = other DNA
gtgagcttgcccctggagct

SEQ ID NO: 49861 - DNA, 20 bp, synthetic construct
  misc_feature 1..20: note = Description of Artificial Sequence: Synthetic oligonucleotide
  misc_feature 1..20: note = Target: SCN10A; (-) strand; PAM type: YTN; PAM sequence: CTC
  source 1..20: mol_type = other DNA
caggcatggagaagatgaac

SEQ ID NO: 49862 - DNA, 20 bp, synthetic construct
  misc_feature 1..20: note = Description of Artificial Sequence: Synthetic oligonucleotide
  misc_feature 1..20: note = Target: SCN10A; (-) strand; PAM type: YTN; PAM sequence: CTG
  source 1..20: mol_type = other DNA
actccaggcatggagaagat

SEQ ID NO: 49863 - DNA, 20 bp, synthetic construct
  misc_feature 1..20: note = Description of Artificial Sequence: Synthetic oligonucleotide
  misc_feature 1..20: note = Target: SCN10A; (-) strand; PAM type: YTN; PAM sequence: CTC
  source 1..20: mol_type = other DNA
aacccagcaaccctgactcc

SEQ ID NO: 49864 - DNA, 20 bp, synthetic construct
  misc_feature 1..20: note = Description of Artificial Sequence: Synthetic oligonucleotide
  misc_feature 1..20: note = Target: SCN10A; (-) strand; PAM type: YTN; PAM sequence: TTC
  source 1..20: mol_type = other DNA
ctcaacccagcaaccctgac

SEQ ID NO: 49865 - DNA, 20 bp, synthetic construct
  misc_feature 1..20: note = Description of Artificial Sequence: Synthetic oligonucleotide
  misc_feature 1..20: note = Target: SCN10A; (-) strand; PAM type: YTN; PAM sequence: CTT
  source 1..20: mol_type = other DNA
cctcaacccagcaaccctga

SEQ ID NO: 49866 - DNA, 20 bp, synthetic construct
  misc_feature 1..20: note = Description of Artificial Sequence: Synthetic oligonucleotide
  misc_feature 1..20: note = Target: SCN10A; (-) strand; PAM type: YTN; PAM sequence: CTC
  source 1..20: mol_type = other DNA
ttcctcaacccagcaaccct

SEQ ID NO: 49867 - DNA, 20 bp, synthetic construct
  misc_feature 1..20: note = Description of Artificial Sequence: Synthetic oligonucleotide
  misc_feature 1..20: note = Target: SCN10A; (-) strand; PAM type: YTN; PAM sequence: CTA
  source 1..20: mol_type = other DNA
gaagccctcttcctcaaccc

SEQ ID NO: 49868 - DNA, 20 bp, synthetic construct
  misc_feature 1..20: note = Description of Artificial Sequence: Synthetic oligonucleotide
  misc_feature 1..20: note = Target: SCN10A; (-) strand; PAM type: YTN; PAM sequence: CTC
  source 1..20: mol_type = other DNA
cctagaagccctcttcctca

SEQ ID NO: 49869 - DNA, 20 bp, synthetic construct
  misc_feature 1..20: note = Description of Artificial Sequence: Synthetic oligonucleotide
  misc_feature 1..20: note = Target: SCN10A; (-) strand; PAM type: YTN; PAM sequence: CTG
  source 1..20: mol_type = other DNA
gccagcaaggccccctccct

SEQ ID NO: 49870 - DNA, 20 bp, synthetic construct
  misc_feature 1..20: note = Description of Artificial Sequence: Synthetic oligonucleotide
  misc_feature 1..20: note = Target: SCN10A; (-) strand; PAM type: YTN; PAM sequence: CTG
  source 1..20: mol_type = other DNA
ggtgggggtgctggccagca

SEQ ID NO: 49871 - DNA, 20 bp, synthetic construct
  misc_feature 1..20: note = Description of Artificial Sequence: Synthetic oligonucleotide
  misc_feature 1..20: note = Target: SCN10A; (-) strand; PAM type: YTN; PAM sequence: CTG
  source 1..20: mol_type = other DNA
ctgggtgggggtgctggcca

SEQ ID NO: 49872 - DNA, 20 bp, synthetic construct
  misc_feature 1..20: note = Description of Artificial Sequence: Synthetic oligonucleotide
  misc_feature 1..20: note = Target: SCN10A; (-) strand; PAM type: YTN; PAM sequence: CTG
  source 1..20: mol_type = other DNA
ctgctgggtgggggtgctgg

SEQ ID NO: 49873 - DNA, 20 bp, synthetic construct
  misc_feature 1..20: note = Description of Artificial Sequence: Synthetic oligonucleotide
  misc_feature 1..20: note = Target: SCN10A; (-) strand; PAM type: YTN; PAM sequence: CTC
  source 1..20: mol_type = other DNA
tgctgctgggtgggggtgct

SEQ ID NO: 49874 - DNA, 20 bp, synthetic construct
  misc_feature 1..20: note = Description of Artificial Sequence: Synthetic oligonucleotide
  misc_feature 1..20: note = Target: SCN10A; (-) strand; PAM type: YTN; PAM sequence: CTC
  source 1..20: mol_type = other DNA
tctgctgctgggtgggggtg

SEQ ID NO: 49875 - DNA, 20 bp, synthetic construct
  misc_feature 1..20: note = Description of Artificial Sequence: Synthetic oligonucleotide
  misc_feature 1..20: note = Target: SCN10A; (-) strand; PAM type: YTN; PAM sequence: CTG
  source 1..20: mol_type = other DNA
gagaccacgaaagccatcgg

SEQ ID NO: 49876 - DNA, 20 bp, synthetic construct
  misc_feature 1..20: note = Description of Artificial Sequence: Synthetic oligonucleotide
  misc_feature 1..20: note = Target: SCN10A; (-) strand; PAM type: YTN; PAM sequence: TTC
  source 1..20: mol_type = other DNA
ctggagaccacgaaagccat

SEQ ID NO: 49877 - DNA, 20 bp, synthetic construct
  misc_feature 1..20: note = Description of Artificial Sequence: Synthetic oligonucleotide
  misc_feature 1..20: note = Target: SCN10A; (-) strand; PAM type: YTN; PAM sequence: TTT
  source 1..20: mol_type = other DNA
cctggagaccacgaaagcca

SEQ ID NO: 49878 - DNA, 20 bp, synthetic construct
  misc_feature 1..20: note = Description of Artificial Sequence: Synthetic oligonucleotide
  misc_feature 1..20: note = Target: SCN10A; (-) strand; PAM type: YTN; PAM sequence: CTT
  source 1..20: mol_type = other DNA
tcctggagaccacgaaagcc

SEQ ID NO: 49879 - DNA, 20 bp, synthetic construct
  misc_feature 1..20: note = Description of Artificial Sequence: Synthetic oligonucleotide
  misc_feature 1..20: note = Target: SCN10A; (-) strand; PAM type: YTN; PAM sequence: CTG
  source 1..20: mol_type = other DNA
agggagtcacagatgatgga

SEQ ID NO: 49880 - DNA, 20 bp, synthetic construct
  misc_feature 1..20: note = Description of Artificial Sequence: Synthetic oligonucleotide
  misc_feature 1..20: note = Target: SCN10A; (-) strand; PAM type: YTN; PAM sequence: CTC
  source 1..20: mol_type = other DNA
cctgagggagtcacagatga

SEQ ID NO: 49881 - DNA, 20 bp, synthetic construct
  misc_feature 1..20: note = Description of Artificial Sequence: Synthetic oligonucleotide
  misc_feature 1..20: note = Target: SCN10A; (-) strand; PAM type: YTN; PAM sequence: CTC
  source 1..20: mol_type = other DNA
actccctgagggagtcacag

SEQ ID NO: 49882 - DNA, 20 bp, synthetic construct
  misc_feature 1..20: note = Description of Artificial Sequence: Synthetic oligonucleotide
  misc_feature 1..20: note = Target: SCN10A; (-) strand; PAM type: YTN; PAM sequence: CTG
  source 1..20: mol_type = other DNA
gccgagatatctcactccct

SEQ ID NO: 49883 - DNA, 20 bp, synthetic construct
  misc_feature 1..20: note = Description of Artificial Sequence: Synthetic oligonucleotide
  misc_feature 1..20: note = Target: SCN10A; (-) strand; PAM type: YTN; PAM sequence: TTC
  source 1..20: mol_type = other DNA
cggtcccctggccgagatat

SEQ ID NO: 49884 - DNA, 20 bp, synthetic construct
  misc_feature 1..20: note = Description of Artificial Sequence: Synthetic oligonucleotide
  misc_feature 1..20: note = Target: SCN10A; (-) strand; PAM type: YTN; PAM sequence: TTT
  source 1..20: mol_type = other DNA
ccggtcccctggccgagata

SEQ ID NO: 49885 - DNA, 20 bp, synthetic construct
  misc_feature 1..20: note = Description of Artificial Sequence: Synthetic oligonucleotide
  misc_feature 1..20: note = Target: SCN10A; (-) strand; PAM type: YTN; PAM sequence: TTC
  source 1..20: mol_type = other DNA
catttccggtcccctggccg

SEQ ID NO: 49886 - DNA, 20 bp, synthetic construct
  misc_feature 1..20: note = Description of Artificial Sequence: Synthetic oligonucleotide
  misc_feature 1..20: note = Target: SCN10A; (-) strand; PAM type: YTN; PAM sequence: CTA
  source 1..20: mol_type = other DNA
gtcatggcagtgtgttccat

SEQ ID NO: 49887 - DNA, 20 bp, synthetic construct
  misc_feature 1..20: note = Description of Artificial Sequence: Synthetic oligonucleotide
  misc_feature 1..20: note = Target: SCN10A; (-) strand; PAM type: YTN; PAM sequence: CTG
  source 1..20: mol_type = other DNA
gaaaacgccgggctagtcat

SEQ ID NO: 49888 - DNA, 20 bp, synthetic construct
  misc_feature 1..20: note = Description of Artificial Sequence: Synthetic oligonucleotide
  misc_feature 1..20: note = Target: SCN10A; (-) strand; PAM type: YTN; PAM sequence: CTC
  source 1..20: mol_type = other DNA
tggaaaacgccgggctagtc

SEQ ID NO: 49889 - DNA, 20 bp, synthetic construct
  misc_feature 1..20: note = Description of Artificial Sequence: Synthetic oligonucleotide
  misc_feature 1..20: note = Target: SCN10A; (-) strand; PAM type: YTN; PAM sequence: CTC
  source 1..20: mol_type = other DNA
gcctctggaaaacgccgggc

SEQ ID NO: 49890 - DNA, 20 bp, synthetic construct
  misc_feature 1..20: note = Description of Artificial Sequence: Synthetic oligonucleotide
  misc_feature 1..20: note = Target: SCN10A; (-) strand; PAM type: YTN; PAM sequence: CTA
  source 1..20: mol_type = other DNA
ggcctcgcctctggaaaacg

SEQ ID NO: 49891 - DNA, 20 bp, synthetic construct
  misc_feature 1..20: note = Description of Artificial Sequence: Synthetic oligonucleotide
  misc_feature 1..20: note = Target: SCN10A; (-) strand; PAM type: YTN; PAM sequence: TTC
  source 1..20: mol_type = other DNA
taggcctcgcctctggaaaa

SEQ ID NO: 49892 - DNA, 20 bp, synthetic construct
  misc_feature 1..20: note = Description of Artificial Sequence: Synthetic oligonucleotide
  misc_feature 1..20: note = Target: SCN10A; (-) strand; PAM type: YTN; PAM sequence: TTT
  source 1..20: mol_type = other DNA
ctaggcctcgcctctggaaa

SEQ ID NO: 49893 - DNA, 20 bp, synthetic construct
  misc_feature 1..20: note = Description of Artificial Sequence: Synthetic oligonucleotide
  misc_feature 1..20: note = Target: SCN10A; (-) strand; PAM type: YTN; PAM sequence: TTT
  source 1..20: mol_type = other DNA
tctaggcctcgcctctggaa

SEQ ID NO: 49894 - DNA, 20 bp, synthetic construct
  misc_feature 1..20: note = Description of Artificial Sequence: Synthetic oligonucleotide
  misc_feature 1..20: note = Target: SCN10A; (-) strand; PAM type: YTN; PAM sequence: CTT
  source 1..20: mol_type = other DNA
ttctaggcctcgcctctgga

SEQ ID NO: 49895 - DNA, 20 bp, synthetic construct
  misc_feature 1..20: note = Description of Artificial Sequence: Synthetic oligonucleotide
  misc_feature 1..20: note = Target: SCN10A; (-) strand; PAM type: YTN; PAM sequence: TTG
  source 1..20: mol_type = other DNA
gggcaatgcccagtcttttc

SEQ ID NO: 49896 - DNA, 20 bp, synthetic construct
  misc_feature 1..20: note = Description of Artificial Sequence: Synthetic oligonucleotide
  misc_feature 1..20: note = Target: SCN10A; (-) strand; PAM type: YTN; PAM sequence: TTT
  source 1..20: mol_type = other DNA
ggggcaatgcccagtctttt

SEQ ID NO: 49897 - DNA, 20 bp, synthetic construct
  misc_feature 1..20: note = Description of Artificial Sequence: Synthetic oligonucleotide
  misc_feature 1..20: note = Target: SCN10A; (-) strand; PAM type: YTN; PAM sequence: CTT
  source 1..20: mol_type = other DNA
tggggcaatgcccagtcttt

SEQ ID NO: 49898 - DNA, 20 bp, synthetic construct
  misc_feature 1..20: note = Description of Artificial Sequence: Synthetic oligonucleotide
  misc_feature 1..20: note = Target: SCN10A; (-) strand; PAM type: YTN; PAM sequence: CTC
  source 1..20: mol_type = other DNA
ctttggggcaatgcccagtc

SEQ ID NO: 49899 - DNA, 20 bp, synthetic construct
  misc_feature 1..20: note = Description of Artificial Sequence: Synthetic oligonucleotide
  misc_feature 1..20: note = Target: SCN10A; (-) strand; PAM type: YTN; PAM sequence: TTG
  source 1..20: mol_type = other DNA
ctcctttggggcaatgccca

SEQ ID NO: 49900 - DNA, 20 bp, synthetic construct
  misc_feature 1..20: note = Description of Artificial Sequence: Synthetic oligonucleotide
  misc_feature 1..20: note = Target: SCN10A; (-) strand; PAM type: YTN; PAM sequence: CTT
  source 1..20: mol_type = other DNA
gctcctttggggcaatgccc

SEQ ID NO: 49901 - DNA, 20 bp, synthetic construct
  misc_feature 1..20: note = Description of Artificial Sequence: Synthetic oligonucleotide
  misc_feature 1..20: note = Target: SCN10A; (-) strand; PAM type: YTN; PAM sequence: TTC
  source 1..20: mol_type = other DNA
ttgctcctttggggcaatgc

SEQ ID NO: 49902 - DNA, 20 bp, synthetic construct
  misc_feature 1..20: note = Description of Artificial Sequence: Synthetic oligonucleotide
  misc_feature 1..20: note = Target: SCN10A; (-) strand; PAM type: YTN; PAM sequence: CTT
  source 1..20: mol_type = other DNA
cttgctcctttggggcaatg

SEQ ID NO: 49903 - DNA, 20 bp, synthetic construct
  misc_feature 1..20: note = Description of Artificial Sequence: Synthetic oligonucleotide
  misc_feature 1..20: note = Target: SCN10A; (-) strand; PAM type: YTN; PAM sequence: TTC
  source 1..20: mol_type = other DNA
cagccttcttgctcctttgg

SEQ ID NO: 49904 - DNA, 20 bp, synthetic construct
  misc_feature 1..20: note = Description of Artificial Sequence: Synthetic oligonucleotide
  misc_feature 1..20: note = Target: SCN10A; (-) strand; PAM type: YTN; PAM sequence: TTT
  source 1..20: mol_type = other DNA
ccagccttcttgctcctttg

SEQ ID NO: 49905 - DNA, 20 bp, synthetic construct
  misc_feature 1..20: note = Description of Artificial Sequence: Synthetic oligonucleotide
  misc_feature 1..20: note = Target: SCN10A; (-) strand; PAM type: YTN; PAM sequence: TTC
  source 1..20: mol_type = other DNA
ccagaggaccagtttccagc

SEQ ID NO: 49906 - DNA, 20 bp, synthetic construct
  misc_feature 1..20: note = Description of Artificial Sequence: Synthetic oligonucleotide
  misc_feature 1..20: note = Target: SCN10A; (-) strand; PAM type: YTN; PAM sequence: TTT
  source 1..20: mol_type = other DNA
cccagaggaccagtttccag

SEQ ID NO: 49907 - DNA, 20 bp, synthetic construct
  misc_feature 1..20: note = Description of Artificial Sequence: Synthetic oligonucleotide
  misc_feature 1..20: note = Target: SCN10A; (-) strand; PAM type: YTN; PAM sequence: CTA
  source 1..20: mol_type = other DNA
gatttcccagaggaccagtt

SEQ ID NO: 49908 - DNA, 20 bp, synthetic construct
  misc_feature 1..20: note = Description of Artificial Sequence: Synthetic oligonucleotide
  misc_feature 1..20: note = Target: SCN10A; (-) strand; PAM type: YTN; PAM sequence: CTC
  source 1..20: mol_type = other DNA
tagatttcccagaggaccag

SEQ ID NO: 49909 - DNA, 20 bp, synthetic construct
  misc_feature 1..20: note = Description of Artificial Sequence: Synthetic oligonucleotide
  misc_feature 1..20: note = Target: SCN10A; (-) strand; PAM type: YTN; PAM sequence: TTG
  source 1..20: mol_type = other DNA
ggctctagatttcccagagg

SEQ ID NO: 49910 - DNA, 20 bp, synthetic construct
  misc_feature 1..20: note = Description of Artificial Sequence: Synthetic oligonucleotide
  misc_feature 1..20: note = Target: SCN10A; (-) strand; PAM type: YTN; PAM sequence: CTG
  source 1..20: mol_type = other DNA
aaaggtcataaagacagggg

SEQ ID NO: 49911 - DNA, 20 bp, synthetic construct
  misc_feature 1..20: note = Description of Artificial Sequence: Synthetic oligonucleotide
  misc_feature 1..20: note = Target: SCN10A; (-) strand; PAM type: YTN; PAM sequence: TTA
  source 1..20: mol_type = other DNA
gtgactgaaaggtcataaag

SEQ ID NO: 49912 - DNA, 20 bp, synthetic construct
  misc_feature 1..20: note = Description of Artificial Sequence: Synthetic oligonucleotide
  misc_feature 1..20: note = Target: SCN10A; (-) strand; PAM type: YTN; PAM sequence: CTT
  source 1..20: mol_type = other DNA
agtgactgaaaggtcataaa

SEQ ID NO: 49913 - DNA, 20 bp, synthetic construct
  misc_feature 1..20: note = Description of Artificial Sequence: Synthetic oligonucleotide
  misc_feature 1..20: note = Target: SCN10A; (-) strand; PAM type: YTN; PAM sequence: TTA
  source 1..20: mol_type = other DNA
cttagtgactgaaaggtcat

SEQ ID NO: 49914 - DNA, 20 bp, synthetic construct
  misc_feature 1..20: note = Description of Artificial Sequence: Synthetic oligonucleotide
  misc_feature 1..20: note = Target: SCN10A; (-) strand; PAM type: YTN; PAM sequence: TTT
  source 1..20: mol_type = other DNA
acttagtgactgaaaggtca

SEQ ID NO: 49915 - DNA, 20 bp, synthetic construct
  misc_feature 1..20: note = Description of Artificial Sequence: Synthetic oligonucleotide
  misc_feature 1..20: note = Target: SCN10A; (-) strand; PAM type: YTN; PAM sequence: CTT
  source 1..20: mol_type = other DNA
tacttagtgactgaaaggtc

SEQ ID NO: 49916 - DNA, 20 bp, synthetic construct
  misc_feature 1..20: note = Description of Artificial Sequence: Synthetic oligonucleotide
  misc_feature 1..20: note = Target: SCN10A; (-) strand; PAM type: YTN; PAM sequence: TTG
  source 1..20: mol_type = other DNA
tgcctttacttagtgactga

SEQ ID NO: 49917 - DNA, 20 bp, synthetic construct
  misc_feature 1..20: note = Description of Artificial Sequence: Synthetic oligonucleotide
  misc_feature 1..20: note = Target: SCN10A; (-) strand; PAM type: YTN; PAM sequence: TTT
  source 1..20: mol_type = other DNA
gtgcctttacttagtgactg

SEQ ID NO: 49918 - DNA, 20 bp, synthetic construct
  misc_feature 1..20: note = Description of Artificial Sequence: Synthetic oligonucleotide
  misc_feature 1..20: note = Target: SCN10A; (-) strand; PAM type: YTN; PAM sequence: TTA
  source 1..20: mol_type = other DNA
gatttgtgcctttacttagt

SEQ ID NO: 49919 - DNA, 20 bp, synthetic construct
  misc_feature 1..20: note = Description of Artificial Sequence: Synthetic oligonucleotide
  misc_feature 1..20: note = Target: SCN10A; (-) strand; PAM type: YTN; PAM sequence: CTT
  source 1..20: mol_type = other DNA
agatttgtgcctttacttag

SEQ ID NO: 49920 - DNA, 20 bp, synthetic construct
  misc_feature 1..20: note = Description of Artificial Sequence: Synthetic oligonucleotide
  misc_feature 1..20: note = Target: SCN10A; (-) strand; PAM type: YTN; PAM sequence: CTA
  source 1..20: mol_type = other DNA
gaataccccttagatttgtg

SEQ ID NO: 49921 - DNA, 20 bp, synthetic construct
  misc_feature 1..20: note = Description of Artificial Sequence: Synthetic oligonucleotide
  misc_feature 1..20: note = Target: SCN10A; (-) strand; PAM type: YTN; PAM sequence: TTC
  source 1..20: mol_type = other DNA
cccaccatgcatacctagaa

SEQ ID NO: 49922 - DNA, 20 bp, synthetic construct
  misc_feature 1..20: note = Description of Artificial Sequence: Synthetic oligonucleotide
  misc_feature 1..20: note = Target: SCN10A; (-) strand; PAM type: YTN; PAM sequence: TTT
  source 1..20: mol_type = other DNA
ccccaccatgcatacctaga

SEQ ID NO: 49923 - DNA, 20 bp, synthetic construct
  misc_feature 1..20: note = Description of Artificial Sequence: Synthetic oligonucleotide
  misc_feature 1..20: note = Target: SCN10A; (-) strand; PAM type: YTN; PAM sequence: TTT
  source 1..20: mol_type = other DNA
tccccaccatgcatacctag

SEQ ID NO: 49924 - DNA, 20 bp, synthetic construct
  misc_feature 1..20: note = Description of Artificial Sequence: Synthetic oligonucleotide
  misc_feature 1..20: note = Target: SCN10A; (-) strand; PAM type: YTN; PAM sequence: TTT
  source 1..20: mol_type = other DNA
ttccccaccatgcataccta

SEQ ID NO: 49925 - DNA, 20 bp, synthetic construct
  misc_feature 1..20: note = Description of Artificial Sequence: Synthetic oligonucleotide
  misc_feature 1..20: note = Target: SCN10A; (-) strand; PAM type: YTN; PAM sequence: CTT
  source 1..20: mol_type = other DNA
tttccccaccatgcatacct

SEQ ID NO: 49926 - DNA, 20 bp, synthetic construct
  misc_feature 1..20: note = Description of Artificial Sequence: Synthetic oligonucleotide
  misc_feature 1..20: note = Target: SCN10A; (-) strand; PAM type: YTN; PAM sequence: TTC
  source 1..20: mol_type = other DNA
tttttccccaccatgcatac

SEQ ID NO: 49927 - DNA, 20 bp, synthetic construct
  misc_feature 1..20: note = Description of Artificial Sequence: Synthetic oligonucleotide
  misc_feature 1..20: note = Target: SCN10A; (-) strand; PAM type: YTN; PAM sequence: TTT
  source 1..20: mol_type = other DNA
ctttttccccaccatgcata

SEQ ID NO: 49928 - DNA, 20 bp, synthetic construct
  misc_feature 1..20: note = Description of Artificial Sequence: Synthetic oligonucleotide
  misc_feature 1..20: note = Target: SCN10A; (-) strand; PAM type: YTN; PAM sequence: TTT
  source 1..20: mol_type = other DNA
tctttttccccaccatgcat

SEQ ID NO: 49929 - DNA, 20 bp, synthetic construct
  misc_feature 1..20: note = Description of Artificial Sequence: Synthetic oligonucleotide
  misc_feature 1..20: note = Target: SCN10A; (-) strand; PAM type: YTN; PAM sequence: TTT
  source 1..20: mol_type = other DNA
ttctttttccccaccatgca

SEQ ID NO: 49930 - DNA, 20 bp, synthetic construct
  misc_feature 1..20: note = Description of Artificial Sequence: Synthetic oligonucleotide
  misc_feature 1..20: note = Target: SCN10A; (-) strand; PAM type: YTN; PAM sequence: TTT
  source 1..20: mol_type = other DNA
tttctttttccccaccatgc

SEQ ID NO: 49931 - DNA, 20 bp, synthetic construct
  misc_feature 1..20: note = Description of Artificial Sequence: Synthetic oligonucleotide
  misc_feature 1..20: note = Target: SCN10A; (-) strand; PAM type: YTN; PAM sequence: CTT
  source 1..20: mol_type = other DNA
ttttctttttccccaccatg

SEQ ID NO: 49932 - DNA, 20 bp, synthetic construct
  misc_feature 1..20: note = Description of Artificial Sequence: Synthetic oligonucleotide
  misc_feature 1..20: note = Target: SCN10A; (-) strand; PAM type: YTN; PAM sequence: CTC
  source 1..20: mol_type = other DNA
cttttttctttttccccacc

SEQ ID NO: 49933 - DNA, 20 bp, synthetic construct
  misc_feature 1..20: note = Description of Artificial Sequence: Synthetic oligonucleotide
  misc_feature 1..20: note = Target: SCN10A; (-) strand; PAM type: YTN; PAM sequence: CTA
  source 1..20: mol_type = other DNA
gagtctccttttttcttttt

SEQ ID NO: 49934 - DNA, 20 bp, synthetic construct
  misc_feature 1..20: note = Description of Artificial Sequence: Synthetic oligonucleotide
  misc_feature 1..20: note = Target: SCN10A; (-) strand; PAM type: YTN; PAM sequence: CTA
  source 1..20: mol_type = other DNA
tctagagtctccttttttct

SEQ ID NO: 49935 - DNA, 20 bp, synthetic construct
  misc_feature 1..20: note = Description of Artificial Sequence: Synthetic oligonucleotide
  misc_feature 1..20: note = Target: SCN10A; (-) strand; PAM type: YTN; PAM sequence: TTC
  source 1..20: mol_type = other DNA
ccggagtctatctagagtct

SEQ ID NO: 49936 - DNA, 20 bp, synthetic construct
  misc_feature 1..20: note = Description of Artificial Sequence: Synthetic oligonucleotide
  misc_feature 1..20: note = Target: SCN10A; (-) strand; PAM type: YTN; PAM sequence: TTT
  source 1..20: mol_type = other DNA
cccggagtctatctagagtc

SEQ ID NO: 49937 - DNA, 20 bp, synthetic construct
  misc_feature 1..20: note = Description of Artificial Sequence: Synthetic oligonucleotide
  misc_feature 1..20: note = Target: SCN10A; (-) strand; PAM type: YTN; PAM sequence: CTT
  source 1..20: mol_type = other DNA
tcccggagtctatctagagt

SEQ ID NO: 49938 - DNA, 20 bp, synthetic construct
  misc_feature 1..20: note = Description of Artificial Sequence: Synthetic oligonucleotide
  misc_feature 1..20: note = Target: SCN10A; (-) strand; PAM type: YTN; PAM sequence: CTG
  source 1..20: mol_type = other DNA
gtctttcccggagtctatct

SEQ ID NO: 49939 - DNA, 20 bp, synthetic construct
  misc_feature 1..20: note = Description of Artificial Sequence: Synthetic oligonucleotide
  misc_feature 1..20: note = Target: SCN10A; (-) strand; PAM type: YTN; PAM sequence: CTC
  source 1..20: mol_type = other DNA
ctggtctttcccggagtcta

SEQ ID NO: 49940 - DNA, 20 bp, synthetic construct
  misc_feature 1..20: note = Description of Artificial Sequence: Synthetic oligonucleotide
  misc_feature 1..20: note = Target: SCN10A; (-) strand; PAM type: YTN; PAM sequence: CTC
  source 1..20: mol_type = other DNA
tcctggtctttcccggagtc

SEQ ID NO: 49941 - DNA, 20 bp, synthetic construct
  misc_feature 1..20: note = Description of Artificial Sequence: Synthetic oligonucleotide
  misc_feature 1..20: note = Target: SCN10A; (-) strand; PAM type: YTN; PAM sequence: CTC
  source 1..20: mol_type = other DNA
tctcctggtctttcccggag

SEQ ID NO: 49942 - DNA, 20 bp, synthetic construct
  misc_feature 1..20: note = Description of Artificial Sequence: Synthetic oligonucleotide
  misc_feature 1..20: note = Target: SCN10A; (-) strand; PAM type: YTN; PAM sequence: CTC
  source 1..20: mol_type = other DNA
ctctctcctggtctttcccg

SEQ ID NO: 49943 - DNA, 20 bp, synthetic construct
  misc_feature 1..20: note = Description of Artificial Sequence: Synthetic oligonucleotide
  misc_feature 1..20: note = Target: SCN10A; (-) strand; PAM type: YTN; PAM sequence: CTC
  source 1..20: mol_type = other DNA
tcctctctcctggtctttcc

SEQ ID NO: 49944 - DNA, 20 bp, synthetic construct
  misc_feature 1..20: note = Description of Artificial Sequence: Synthetic oligonucleotide
  misc_feature 1..20: note = Target: SCN10A; (-) strand; PAM type: YTN; PAM sequence: CTG
  source 1..20: mol_type = other DNA
taatctctcctctctcctgg

SEQ ID NO: 49945 - DNA, 20 bp, synthetic construct
  misc_feature 1..20: note = Description of Artificial Sequence: Synthetic oligonucleotide
  misc_feature 1..20: note = Target: SCN10A; (-) strand; PAM type: YTN; PAM sequence: CTG
  source 1..20: mol_type = other DNA
agcatcagcacgctgtaatc

SEQ ID NO: 49946 - DNA, 20 bp, synthetic construct
  misc_feature 1..20: note = Description of Artificial Sequence: Synthetic oligonucleotide
  misc_feature 1..20: note = Target: SCN10A; (-) strand; PAM type: YTN; PAM sequence: TTG
  source 1..20: mol_type = other DNA
ctgagcatcagcacgctgta

SEQ ID NO: 49947 - DNA, 20 bp, synthetic construct
  misc_feature 1..20: note = Description of Artificial Sequence: Synthetic oligonucleotide
  misc_feature 1..20: note = Target: SCN10A; (-) strand; PAM type: YTN; PAM sequence: TTT
  source 1..20: mol_type = other DNA
gctgagcatcagcacgctgt

SEQ ID NO: 49948 - DNA, 20 bp, synthetic construct
  misc_feature 1..20: note = Description of Artificial Sequence: Synthetic oligonucleotide
  misc_feature 1..20: note = Target: SCN10A; (-) strand; PAM type: YTN; PAM sequence: CTA
  source 1..20: mol_type = other DNA
tttgctgagcatcagcacgc

SEQ ID NO: 49949 - DNA, 20 bp, synthetic construct
  misc_feature 1..20: note = Description of Artificial Sequence: Synthetic oligonucleotide
  misc_feature 1..20: note = Target: SCN10A; (-) strand; PAM type: YTN; PAM sequence: CTG
  source 1..20: mol_type = other DNA
accatgataacctatttgct

SEQ ID NO: 49950 - DNA, 20 bp, synthetic construct
  misc_feature 1..20: note = Description of Artificial Sequence: Synthetic oligonucleotide
  misc_feature 1..20: note = Target: SCN10A; (-) strand; PAM type: YTN; PAM sequence: TTC
  source 1..20: mol_type = other DNA
ctgaccatgataacctattt

SEQ ID NO: 49951 - DNA, 20 bp, synthetic construct
  misc_feature 1..20: note = Description of Artificial Sequence: Synthetic oligonucleotide
  misc_feature 1..20: note = Target: SCN10A; (-) strand; PAM type: YTN; PAM sequence: CTG
  source 1..20: mol_type = other DNA
acatgttcctgaccatgata

SEQ ID NO: 49952 - DNA, 20 bp, synthetic construct
  misc_feature 1..20: note = Description of Artificial Sequence: Synthetic oligonucleotide
  misc_feature 1..20: note = Target: SCN10A; (-) strand; PAM type: YTN; PAM sequence: CTC
  source 1..20: mol_type = other DNA
tgacatgttcctgaccatga

SEQ ID NO: 49953 - DNA, 20 bp, synthetic construct
  misc_feature 1..20: note = Description of Artificial Sequence: Synthetic oligonucleotide
  misc_feature 1..20: note = Target: SCN10A; (-) strand; PAM type: YTN; PAM sequence: TTC
  source 1..20: mol_type = other DNA
ctctgacatgttcctgacca

SEQ ID NO: 49954 - DNA, 20 bp, synthetic construct
  misc_feature 1..20: note = Description of Artificial Sequence: Synthetic oligonucleotide
  misc_feature 1..20: note = Target: SCN10A; (-) strand; PAM type: YTN; PAM sequence: TTT
  source 1..20: mol_type = other DNA
cctctgacatgttcctgacc

SEQ ID NO: 49955 - DNA, 20 bp, synthetic construct
  misc_feature 1..20: note = Description of Artificial Sequence: Synthetic oligonucleotide
  misc_feature 1..20: note = Target: SCN10A; (-) strand; PAM type: YTN; PAM sequence: CTA
  source 1..20: mol_type = other DNA
tccaggtgacaaggtttcct

SEQ ID NO: 49956 - DNA, 20 bp, synthetic construct
  misc_feature 1..20: note = Description of Artificial Sequence: Synthetic oligonucleotide
  misc_feature 1..20: note = Target: SCN10A; (-) strand; PAM type: YTN; PAM sequence: CTG
  source 1..20: mol_type = other DNA
aactatccaggtgacaaggt

SEQ ID NO: 49957 - DNA, 20 bp, synthetic construct
  misc_feature 1..20: note = Description of Artificial Sequence: Synthetic oligonucleotide
  misc_feature 1..20: note = Target: SCN10A; (-) strand; PAM type: YTN; PAM sequence: TTG
  source 1..20: mol_type = other DNA
gcaatcaactgaactatcca

SEQ ID NO: 49958 - DNA, 20 bp, synthetic construct
  misc_feature 1..20: note = Description of Artificial Sequence: Synthetic oligonucleotide
  misc_feature 1..20: note = Target: SCN10A; (-) strand; PAM type: YTN; PAM sequence: CTG
  source 1..20: mol_type = other DNA
tggccaaaggttggcaatca

SEQ ID NO: 49959 - DNA, 20 bp, synthetic construct
  misc_feature 1..20: note = Description of Artificial Sequence: Synthetic oligonucleotide
  misc_feature 1..20: note = Target: SCN10A; (-) strand; PAM type: YTN; PAM sequence: CTA
  source 1..20: mol_type = other DNA
gccctgtggccaaaggttgg

SEQ ID NO: 49960 - DNA, 20 bp, synthetic construct
  misc_feature 1..20: note = Description of Artificial Sequence: Synthetic oligonucleotide
  misc_feature 1..20: note = Target: SCN10A; (-) strand; PAM type: YTN; PAM sequence: TTG
  source 1..20: mol_type = other DNA
tctagccctgtggccaaagg

SEQ ID NO: 49961 - DNA, 20 bp, synthetic construct
  misc_feature 1..20: note = Description of Artificial Sequence: Synthetic oligonucleotide
  misc_feature 1..20: note = Target: SCN10A; (-) strand; PAM type: YTN; PAM sequence: TTT
  source 1..20: mol_type = other DNA
gtctagccctgtggccaaag

SEQ ID NO: 49962 - DNA, 20 bp, synthetic construct
  misc_feature 1..20: note = Description of Artificial Sequence: Synthetic oligonucleotide
  misc_feature 1..20: note = Target: SCN10A; (-) strand; PAM type: YTN; PAM sequence: CTT
  source 1..20: mol_type = other DNA
tgtctagccctgtggccaaa

SEQ ID NO: 49963 - DNA, 20 bp, synthetic construct
  misc_feature 1..20: note = Description of Artificial Sequence: Synthetic oligonucleotide
  misc_feature 1..20: note = Target: SCN10A; (-) strand; PAM type: YTN; PAM sequence: TTA
  source 1..20: mol_type = other DNA
ggacagctttgtctagccct

SEQ ID NO: 49964 - DNA, 20 bp, synthetic construct
  misc_feature 1..20: note = Description of Artificial Sequence: Synthetic oligonucleotide
  misc_feature 1..20: note = Target: SCN10A; (-) strand; PAM type: YTN; PAM sequence: CTT
  source 1..20: mol_type = other DNA
aggacagctttgtctagccc

SEQ ID NO: 49965 - DNA, 20 bp, synthetic construct
  misc_feature 1..20: note = Description of Artificial Sequence: Synthetic oligonucleotide
  misc_feature 1..20: note = Target: SCN10A; (-) strand; PAM type: YTN; PAM sequence: TTG
  source 1..20: mol_type = other DNA
catgtggaaaagtgaactta

SEQ ID NO: 49966 - DNA, 20 bp, synthetic construct
  misc_feature 1..20: note = Description of Artificial Sequence: Synthetic oligonucleotide
  misc_feature 1..20: note = Target: SCN10A; (-) strand; PAM type: YTN; PAM sequence: TTT
  source 1..20: mol_type = other DNA
gcatgtggaaaagtgaactt

SEQ ID NO: 49967 - DNA, 20 bp, synthetic construct
  misc_feature 1..20: note = Description of Artificial Sequence: Synthetic oligonucleotide
  misc_feature 1..20: note = Target: SCN10A; (-) strand; PAM type: YTN; PAM sequence: CTT
  source 1..20: mol_type = other DNA
tgcatgtggaaaagtgaact

SEQ ID NO: 49968 - DNA, 20 bp, synthetic construct
  misc_feature 1..20: note = Description of Artificial Sequence: Synthetic oligonucleotide
  misc_feature 1..20: note = Target: SCN10A; (-) strand; PAM type: YTN; PAM sequence: TTA
  source 1..20: mol_type = other DNA
ggtcacaactttgcatgtgg

SEQ ID NO: 49969 - DNA, 20 bp, synthetic construct
  misc_feature 1..20: note = Description of Artificial Sequence: Synthetic oligonucleotide
  misc_feature 1..20: note = Target: SCN10A; (-) strand; PAM type: YTN; PAM sequence: CTT
  source 1..20: mol_type = other DNA
aggtcacaactttgcatgtg

SEQ ID NO: 49970 - DNA, 20 bp, synthetic construct
  misc_feature 1..20: note = Description of Artificial Sequence: Synthetic oligonucleotide
  misc_feature 1..20: note = Target: SCN10A; (-) strand; PAM type: YTN; PAM sequence: CTC
  source 1..20: mol_type = other DNA
cttaggtcacaactttgcat

SEQ ID NO: 49971 - DNA, 20 bp, synthetic construct
  misc_feature 1..20: note = Description of Artificial Sequence: Synthetic oligonucleotide
  misc_feature 1..20: note = Target: SCN10A; (-) strand; PAM type: YTN; PAM sequence: CTG
  source 1..20: mol_type = other DNA
gtgtgcatagtagcctcctt

SEQ ID NO: 49972 - DNA, 20 bp, synthetic construct
  misc_feature 1..20: note = Description of Artificial Sequence: Synthetic oligonucleotide
  misc_feature 1..20: note = Target: SCN10A; (-) strand; PAM type: YTN; PAM sequence: TTC
  source 1..20: mol_type = other DNA
cagtactggtgtgcatagta

SEQ ID NO: 49973 - DNA, 20 bp, synthetic construct
  misc_feature 1..20: note = Description of Artificial Sequence: Synthetic oligonucleotide
  misc_feature 1..20: note = Target: SCN10A; (-) strand; PAM type: YTN; PAM sequence: TTA
  source 1..20: mol_type = other DNA
ccaagtatgttccagtactg

SEQ ID NO: 49974 - DNA, 20 bp, synthetic construct
  misc_feature 1..20: note = Description of Artificial Sequence: Synthetic oligonucleotide
  misc_feature 1..20: note = Target: SCN10A; (-) strand; PAM type: YTN; PAM sequence: CTT
  source 1..20: mol_type = other DNA
accaagtatgttccagtact

SEQ ID NO: 49975 - DNA, 20 bp, synthetic construct
  misc_feature 1..20: note = Description of Artificial Sequence: Synthetic oligonucleotide
  misc_feature 1..20: note = Target: SCN10A; (-) strand; PAM type: YTN; PAM sequence: TTC
  source 1..20: mol_type = other DNA
aacaaccacttaccaagtat

SEQ ID NO: 49976 - DNA, 20 bp, synthetic construct
  misc_feature 1..20: note = Description of Artificial Sequence: Synthetic oligonucleotide
  misc_feature 1..20: note = Target: SCN10A; (-) strand; PAM type: YTN; PAM sequence: TTC
  source 1..20: mol_type = other DNA
attcaacaaccacttaccaa

SEQ ID NO: 49977 - DNA, 20 bp, synthetic construct
  misc_feature 1..20: note = Description of Artificial Sequence: Synthetic oligonucleotide
  misc_feature 1..20: note = Target: SCN10A; (-) strand; PAM type: YTN; PAM sequence: TTA
  source 1..20: mol_type = other DNA
ttcattcaacaaccacttac

SEQ ID NO: 49978 - DNA, 20 bp, synthetic construct
  misc_feature 1..20: note = Description of Artificial Sequence: Synthetic oligonucleotide
  misc_feature 1..20: note = Target: SCN10A; (-) strand; PAM type: YTN; PAM sequence: CTT
  source 1..20: mol_type = other DNA
attcattcaacaaccactta

SEQ ID NO: 49979 - DNA, 20 bp, synthetic construct
  misc_feature 1..20: note = Description of Artificial Sequence: Synthetic oligonucleotide
  misc_feature 1..20: note = Target: SCN10A; (-) strand; PAM type: YTN; PAM sequence: TTC
  source 1..20: mol_type = other DNA
agacaatgaagtgcacttat

SEQ ID NO: 49980 - DNA, 20 bp, synthetic construct
  misc_feature 1..20: note = Description of Artificial Sequence: Synthetic oligonucleotide
  misc_feature 1..20: note = Target: SCN10A; (-) strand; PAM type: YTN; PAM sequence: TTT
  source 1..20: mol_type = other DNA
cagacaatgaagtgcactta

SEQ ID NO: 49981 - DNA, 20 bp, synthetic construct
  misc_feature 1..20: note = Description of Artificial Sequence: Synthetic oligonucleotide
  misc_feature 1..20: note = Target: SCN10A; (-) strand; PAM type: YTN; PAM sequence: TTT
  source 1..20: mol_type = other DNA
tcagacaatgaagtgcactt

SEQ ID NO: 49982 - DNA, 20 bp, synthetic construct
  misc_feature 1..20: note = Description of Artificial Sequence: Synthetic oligonucleotide
  misc_feature 1..20: note = Target: SCN10A; (-) strand; PAM type: YTN; PAM sequence: CTA
  source 1..20: mol_type = other DNA
attttcagacaatgaagtgc

SEQ ID NO: 49983 - DNA, 20 bp, synthetic construct
  misc_feature 1..20: note = Description of Artificial Sequence: Synthetic oligonucleotide
  misc_feature 1..20: note = Target: SCN10A; (-) strand; PAM type: YTN; PAM sequence: CTA
  source 1..20: mol_type = other DNA
cctaattttcagacaatgaa

SEQ ID NO: 49984 - DNA, 20 bp, synthetic construct
  misc_feature 1..20: note = Description of Artificial Sequence: Synthetic oligonucleotide
  misc_feature 1..20: note = Target: SCN10A; (-) strand; PAM type: YTN; PAM sequence: TTG
  source 1..20: mol_type = other DNA
tactacctaattttcagaca

SEQ ID NO: 49985 - DNA, 20 bp, synthetic construct
  misc_feature 1..20: note = Description of Artificial Sequence: Synthetic oligonucleotide
  misc_feature 1..20: note = Target: SCN10A; (-) strand; PAM type: YTN; PAM sequence: CTA
  source 1..20: mol_type = other DNA
atgaattgtactacctaatt

SEQ ID NO: 49986 - DNA, 20 bp, synthetic construct
  misc_feature 1..20: note = Description of Artificial Sequence: Synthetic oligonucleotide
  misc_feature 1..20: note = Target: SCN10A; (-) strand; PAM type: YTN; PAM sequence: TTC
  source 1..20: mol_type = other DNA
atacagatgggatctaatga

SEQ ID NO: 49987 - DNA, 20 bp, synthetic construct
  misc_feature 1..20: note = Description of Artificial Sequence: Synthetic oligonucleotide
  misc_feature 1..20: note = Target: SCN10A; (-) strand; PAM type: YTN; PAM sequence: CTC
  source 1..20: mol_type = other DNA
acattcatacagatgggatc

SEQ ID NO: 49988 - DNA, 20 bp, synthetic construct
  misc_feature 1..20: note = Description of Artificial Sequence: Synthetic oligonucleotide
  misc_feature 1..20: note = Target: SCN10A; (-) strand; PAM type: YTN; PAM sequence: CTC
  source 1..20: mol_type = other DNA
tcacattcatacagatggga

SEQ ID NO: 49989 - DNA, 20 bp, synthetic construct
  misc_feature 1..20: note = Description of Artificial Sequence: Synthetic oligonucleotide
  misc_feature 1..20: note = Target: SCN10A; (-) strand; PAM type: YTN; PAM sequence: TTG
  source 1..20: mol_type = other DNA
caacacaaactctcacattc

SEQ ID NO: 49990 - DNA, 20 bp, synthetic construct
  misc_feature 1..20: note = Description of Artificial Sequence: Synthetic oligonucleotide
  misc_feature 1..20: note = Target: SCN10A; (-) strand; PAM type: YTN; PAM sequence: TTT
  source 1..20: mol_type = other DNA
gcaacacaaactctcacatt

SEQ ID NO: 49991 - DNA, 20 bp, synthetic construct
  misc_feature 1..20: note = Description of Artificial Sequence: Synthetic oligonucleotide
  misc_feature 1..20: note = Target: SCN10A; (-) strand; PAM type: YTN; PAM sequence: CTT
  source 1..20: mol_type = other DNA
tgcaacacaaactctcacat

SEQ ID NO: 49992 - DNA, 20 bp, synthetic construct
  misc_feature 1..20: note = Description of Artificial Sequence: Synthetic oligonucleotide
  misc_feature 1..20: note = Target: SCN10A; (-) strand; PAM type: YTN; PAM sequence: CTC
  source 1..20: mol_type = other DNA
ctttgcaacacaaactctca

SEQ ID NO: 49993 - DNA, 20 bp, synthetic construct
  misc_feature 1..20: note = Description of Artificial Sequence: Synthetic oligonucleotide
  misc_feature 1..20: note = Target: SCN10A; (-) strand; PAM type: YTN; PAM sequence: CTC
  source 1..20: mol_type = other DNA
ctcctttgcaacacaaactc

SEQ ID NO: 49994 - DNA, 20 bp, synthetic construct
  misc_feature 1..20: note = Description of Artificial Sequence: Synthetic oligonucleotide
  misc_feature 1..20: note = Target: SCN10A; (-) strand; PAM type: YTN; PAM sequence: TTG
  source 1..20: mol_type = other DNA
tctcctcctttgcaacacaa

SEQ ID NO: 49995 - DNA, 20 bp, synthetic construct
  misc_feature 1..20: note = Description of Artificial Sequence: Synthetic oligonucleotide
  misc_feature 1..20: note = Target: SCN10A; (-) strand; PAM type: YTN; PAM sequence: CTT
  source 1..20: mol_type = other DNA
gtctcctcctttgcaacaca

SEQ ID NO: 49996 - DNA, 20 bp, synthetic construct
  misc_feature 1..20: note = Description of Artificial Sequence: Synthetic oligonucleotide
  misc_feature 1..20: note = Target: SCN10A; (-) strand; PAM type: YTN; PAM sequence: CTC
  source 1..20: mol_type = other DNA
ttgtctcctcctttgcaaca

SEQ ID NO: 49997 - DNA, 20 bp, synthetic construct
  misc_feature 1..20: note = Description of Artificial Sequence: Synthetic oligonucleotide
  misc_feature 1..20: note = Target: SCN10A; (-) strand; PAM type: YTN; PAM sequence: CTG
  source 1..20: mol_type = other DNA
tacagctcttgtctcctcct

SEQ ID NO: 49998 - DNA, 20 bp, synthetic construct
  misc_feature 1..20: note = Description of Artificial Sequence: Synthetic oligonucleotide
  misc_feature 1..20: note = Target: SCN10A; (-) strand; PAM type: YTN; PAM sequence: TTG
  source 1..20: mol_type = other DNA
cactgtacagctcttgtctc

SEQ ID NO: 49999 - DNA, 20 bp, synthetic construct
  misc_feature 1..20: note = Description of Artificial Sequence: Synthetic oligonucleotide
  misc_feature 1..20: note = Target: SCN10A; (-) strand; PAM type: YTN; PAM sequence: CTC
  source 1..20: mol_type = other DNA
attgcactgtacagctcttg

SEQ ID NO: 50000 - DNA, 20 bp, synthetic construct
  misc_feature 1..20: note = Description of Artificial Sequence: Synthetic oligonucleotide
  misc_feature 1..20: note = Target: SCN10A; (-) strand; PAM type: YTN; PAM sequence: CTA
  source 1..20: mol_type = other DNA
gaaactcattgcactgtaca

SEQ ID NO: 50001 - DNA, 20 bp, synthetic construct
  misc_feature 1..20: note = Description of Artificial Sequence: Synthetic oligonucleotide
  misc_feature 1..20: note = Target: SCN10A; (-) strand; PAM type: YTN; PAM sequence: CTC
  source 1..20: mol_type = other DNA
gagggatcctagaaactcat

SEQ ID NO: 50002 - DNA, 20 bp, synthetic construct
  misc_feature 1..20: note = Description of Artificial Sequence: Synthetic oligonucleotide
  misc_feature 1..20: note = Target: SCN10A; (-) strand; PAM type: YTN; PAM sequence: TTC
  source 1..20: mol_type = other DNA
aagcctcgagggatcctaga

SEQ ID NO: 50003 - DNA, 20 bp, synthetic construct
  misc_feature 1..20: note = Description of Artificial Sequence: Synthetic oligonucleotide
  misc_feature 1..20: note = Target: SCN10A; (-) strand; PAM type: YTN; PAM sequence: CTG
  source 1..20: mol_type = other DNA
ttcaagcctcgagggatcct

SEQ ID NO: 50004 - DNA, 20 bp, synthetic construct
  misc_feature 1..20: note = Description of Artificial Sequence: Synthetic oligonucleotide
  misc_feature 1..20: note = Target: SCN10A; (-) strand; PAM type: YTN; PAM sequence: TTG
  source 1..20: mol_type = other DNA
actgttcaagcctcgaggga

SEQ ID NO: 50005 - DNA, 20 bp, synthetic construct
  misc_feature 1..20: note = Description of Artificial Sequence: Synthetic oligonucleotide
  misc_feature 1..20: note = Target: SCN10A; (-) strand; PAM type: YTN; PAM sequence: TTG
  source 1..20: mol_type = other DNA
ttgactgttcaagcctcgag

SEQ ID NO: 50006 - DNA, 20 bp, synthetic construct
  misc_feature 1..20: note = Description of Artificial Sequence: Synthetic oligonucleotide
  misc_feature 1..20: note = Target: SCN10A; (-) strand; PAM type: YTN; PAM sequence: CTC
  source 1..20: mol_type = other DNA
cattgttgactgttcaagcc

SEQ ID NO: 50007 - DNA, 20 bp, synthetic construct
  misc_feature 1..20: note = Description of Artificial Sequence: Synthetic oligonucleotide
  misc_feature 1..20: note = Target: SCN10A; (-) strand; PAM type: YTN; PAM sequence: CTC
  source 1..20: mol_type = other DNA
tccattgttgactgttcaag

SEQ ID NO: 50008 - DNA, 20 bp, synthetic construct
  misc_feature 1..20: note = Description of Artificial Sequence: Synthetic oligonucleotide
  misc_feature 1..20: note = Target: SCN10A; (-) strand; PAM type: YTN; PAM sequence: TTC
  source 1..20: mol_type = other DNA
agtctctccattgttgactg

SEQ ID NO: 50009 - DNA, 20 bp, synthetic construct
  misc_feature 1..20: note = Description of Artificial Sequence: Synthetic oligonucleotide
  misc_feature 1..20: note = Target: SCN10A; (-) strand; PAM type: YTN; PAM sequence: CTT
  source 1..20: mol_type = other DNA
cagtctctccattgttgact

SEQ ID NO: 50010 - DNA, 20 bp, synthetic construct
  misc_feature 1..20: note = Description of Artificial Sequence: Synthetic oligonucleotide
  misc_feature 1..20: note = Target: SCN10A; (-) strand; PAM type: YTN; PAM sequence: TTC
  source 1..20: mol_type = other DNA
cttcagtctctccattgttg

SEQ ID NO: 50011 - DNA, 20 bp, synthetic construct
  misc_feature 1..20: note = Description of Artificial Sequence: Synthetic oligonucleotide
  misc_feature 1..20: note = Target: SCN10A; (-) strand; PAM type: YTN; PAM sequence: CTT
  source 1..20: mol_type = other DNA
ccttcagtctctccattgtt

SEQ ID NO: 50012 - DNA, 20 bp, synthetic construct
  misc_feature 1..20: note = Description of Artificial Sequence: Synthetic oligonucleotide
  misc_feature 1..20: note = Target: SCN10A; (-) strand; PAM type: YTN; PAM sequence: CTG
  source 1..20: mol_type = other DNA
caacccttccttcagtctct

SEQ ID NO: 50013 - DNA, 20 bp, synthetic construct
  misc_feature 1..20: note = Description of Artificial Sequence: Synthetic oligonucleotide
  misc_feature 1..20: note = Target: SCN10A; (-) strand; PAM type: YTN; PAM sequence: TTA
  source 1..20: mol_type = other DNA
ggctgcaacccttccttcag

SEQ ID NO: 50014 - DNA, 20 bp, synthetic construct
  misc_feature 1..20: note = Description of Artificial Sequence: Synthetic oligonucleotide
  misc_feature 1..20: note = Target: SCN10A; (-) strand; PAM type: YTN; PAM sequence: TTC
  source 1..20: mol_type = other DNA
caggaaattaggctgcaacc

SEQ ID NO: 50015 - DNA, 20 bp, synthetic construct
  misc_feature 1..20: note = Description of Artificial Sequence: Synthetic oligonucleotide
  misc_feature 1..20: note = Target: SCN10A; (-) strand; PAM type: YTN; PAM sequence: CTT
  source 1..20: mol_type = other DNA
ccaggaaattaggctgcaac

SEQ ID NO: 50016 - DNA, 20 bp, synthetic construct
  misc_feature 1..20: note = Description of Artificial Sequence: Synthetic oligonucleotide
  misc_feature 1..20: note = Target: SCN10A; (-) strand; PAM type: YTN; PAM sequence: TTC
  source 1..20: mol_type = other DNA
ttccaggaaattaggctgca

SEQ ID NO: 50017 - DNA, 20 bp, synthetic construct
  misc_feature 1..20: note = Description of Artificial Sequence: Synthetic oligonucleotide
  misc_feature 1..20: note = Target: SCN10A; (-) strand; PAM type: YTN; PAM sequence: TTA
  source 1..20: mol_type = other DNA
ttcttccaggaaattaggct

SEQ ID NO: 50018 - DNA, 20 bp, synthetic construct
  misc_feature 1..20: note = Description of Artificial Sequence: Synthetic oligonucleotide
  misc_feature 1..20: note = Target: SCN10A; (-) strand; PAM type: YTN; PAM sequence: TTG
  source 1..20: mol_type = other DNA
gaggaatgacattattcttc

SEQ ID NO: 50019 - DNA, 20 bp, synthetic construct
  misc_feature 1..20: note = Description of Artificial Sequence: Synthetic oligonucleotide
  misc_feature 1..20: note = Target: SCN10A; (-) strand; PAM type: YTN; PAM sequence: TTT
  source 1..20: mol_type = other DNA
ggaggaatgacattattctt

SEQ ID NO: 50020 - DNA, 20 bp, synthetic construct
  misc_feature 1..20: note = Description of Artificial Sequence: Synthetic oligonucleotide
  misc_feature 1..20: note = Target: SCN10A; (-) strand; PAM type: YTN; PAM sequence: TTG
  source 1..20: mol_type = other DNA
atttggaggaatgacattat

SEQ ID NO: 50021 - DNA, 20 bp, synthetic construct
  misc_feature 1..20: note = Description of Artificial Sequence: Synthetic oligonucleotide
  misc_feature 1..20: note = Target: SCN10A; (-) strand; PAM type: YTN; PAM sequence: TTA
  source 1..20: mol_type = other DNA
ttgatttggaggaatgacat

SEQ ID NO: 50022 - DNA, 20 bp, synthetic construct
  misc_feature 1..20: note = Description of Artificial Sequence: Synthetic oligonucleotide
  misc_feature 1..20: note = Target: SCN10A; (-) strand; PAM type: YTN; PAM sequence: TTT
  source 1..20: mol_type = other DNA
attgatttggaggaatgaca

SEQ ID NO: 50023 - DNA, 20 bp, synthetic construct
  misc_feature 1..20: note = Description of Artificial Sequence: Synthetic oligonucleotide
  misc_feature 1..20: note = Target: SCN10A; (-) strand; PAM type: YTN; PAM sequence: TTG
  source 1..20: mol_type = other DNA
atgggaaatgtttattgatt

SEQ ID NO: 50024 - DNA, 20 bp, synthetic construct
  misc_feature 1..20: note = Description of Artificial Sequence: Synthetic oligonucleotide
  misc_feature 1..20: note = Target: SCN10A; (-) strand; PAM type: YTN; PAM sequence: TTT
  source 1..20: mol_type = other DNA
gatgggaaatgtttattgat

SEQ ID NO: 50025 - DNA, 20 bp, synthetic construct
  misc_feature 1..20: note = Description of Artificial Sequence: Synthetic oligonucleotide
  misc_feature 1..20: note = Target: SCN10A; (-) strand; PAM type: YTN; PAM sequence: TTT
  source 1..20: mol_type = other DNA
tgatgggaaatgtttattga

SEQ ID NO: 50026 - DNA, 20 bp, synthetic construct
  misc_feature 1..20: note = Description of Artificial Sequence: Synthetic oligonucleotide
  misc_feature 1..20: note = Target: SCN10A; (-) strand; PAM type: YTN; PAM sequence: CTC
  source 1..20: mol_type = other DNA
aatggaagattttgatggga

SEQ ID NO: 50027 - DNA, 20 bp, synthetic construct
  misc_feature 1..20: note = Description of Artificial Sequence: Synthetic oligonucleotide
  misc_feature 1..20: note = Target: SCN10A; (-) strand; PAM type: YTN; PAM sequence: TTC
  source 1..20: mol_type = other DNA
cctcaatggaagattttgat

SEQ ID NO: 50028 - DNA, 20 bp, synthetic construct
  misc_feature 1..20: note = Description of Artificial Sequence: Synthetic oligonucleotide
  misc_feature 1..20: note = Target: SCN10A; (-) strand; PAM type: YTN; PAM sequence: TTA
  source 1..20: mol_type = other DNA
agccacacagttccctcaat

SEQ ID NO: 50029 - DNA, 20 bp, synthetic construct
  misc_feature 1..20: note = Description of Artificial Sequence: Synthetic oligonucleotide
  misc_feature 1..20: note = Target: SCN10A; (-) strand; PAM type: YTN; PAM sequence: TTT
  source 1..20: mol_type = other DNA
aagccacacagttccctcaa

SEQ ID NO: 50030 - DNA, 20 bp, synthetic construct
  misc_feature 1..20: note = Description of Artificial Sequence: Synthetic oligonucleotide
  misc_feature 1..20: note = Target: SCN10A; (-) strand; PAM type: YTN; PAM sequence: CTT
  source 1..20: mol_type = other DNA
taagccacacagttccctca

SEQ ID NO: 50031 - DNA, 20 bp, synthetic construct
  misc_feature 1..20: note = Description of Artificial Sequence: Synthetic oligonucleotide
  misc_feature 1..20: note = Target: SCN10A; (-) strand; PAM type: YTN; PAM sequence: CTG
  source 1..20: mol_type = other DNA
gcaactttaagccacacagt

SEQ ID NO: 50032 - DNA, 20 bp, synthetic construct
  misc_feature 1..20: note = Description of Artificial Sequence: Synthetic oligonucleotide
  misc_feature 1..20: note = Target: SCN10A; (-) strand; PAM type: YTN; PAM sequence: CTC
  source 1..20: mol_type = other DNA
tggcaactttaagccacaca

SEQ ID NO: 50033 - DNA, 20 bp, synthetic construct
  misc_feature 1..20: note = Description of Artificial Sequence: Synthetic oligonucleotide
  misc_feature 1..20: note = Target: SCN10A; (-) strand; PAM type: YTN; PAM sequence: TTC
  source 1..20: mol_type = other DNA
tctggcaactttaagccaca

SEQ ID NO: 50034 - DNA, 20 bp, synthetic construct
  misc_feature 1..20: note = Description of Artificial Sequence: Synthetic oligonucleotide
  misc_feature 1..20: note = Target: SCN10A; (-) strand; PAM type: YTN; PAM sequence: TTT
  source 1..20: mol_type = other DNA
ctctggcaactttaagccac

SEQ ID NO: 50035 - DNA, 20 bp, synthetic construct
  misc_feature 1..20: note = Description of Artificial Sequence: Synthetic oligonucleotide
  misc_feature 1..20: note = Target: SCN10A; (-) strand; PAM type: YTN; PAM sequence: TTT
  source 1..20: mol_type = other DNA
tctctggcaactttaagcca

SEQ ID NO: 50036 - DNA, 20 bp, synthetic construct
  misc_feature 1..20: note = Description of Artificial Sequence: Synthetic oligonucleotide
  misc_feature 1..20: note = Target: SCN10A; (-) strand; PAM type: YTN; PAM sequence: CTT
  source 1..20: mol_type = other DNA
ttctctggcaactttaagcc

SEQ ID NO: 50037 - DNA, 20 bp, synthetic construct
  misc_feature 1..20: note = Description of Artificial Sequence: Synthetic oligonucleotide
  misc_feature 1..20: note = Target: SCN10A; (-) strand; PAM type: YTN; PAM sequence: CTC
  source 1..20: mol_type = other DNA
ttttctctggcaactttaag

SEQ ID NO: 50038 - DNA, 20 bp, synthetic construct
  misc_feature 1..20: note = Description of Artificial Sequence: Synthetic oligonucleotide
  misc_feature 1..20: note = Target: SCN10A; (-) strand; PAM type: YTN; PAM sequence: TTA
  source 1..20: mol_type = other DNA
gctcttttctctggcaactt

SEQ ID NO: 50039 - DNA, 20 bp, synthetic construct
  misc_feature 1..20: note = Description of Artificial Sequence: Synthetic oligonucleotide
  misc_feature 1..20: note = Target: SCN10A; (-) strand; PAM type: YTN; PAM sequence: TTA
  source 1..20: mol_type = other DNA
tgaattagctcttttctctg

SEQ ID NO: 50040 - DNA, 20 bp, synthetic construct
  misc_feature 1..20: note = Description of Artificial Sequence: Synthetic oligonucleotide
  misc_feature 1..20: note = Target: SCN10A; (-) strand; PAM type: YTN; PAM sequence: TTT
  source 1..20: mol_type = other DNA
atgaattagctcttttctct

SEQ ID NO: 50041 - DNA, 20 bp, synthetic construct
  misc_feature 1..20: note = Description of Artificial Sequence: Synthetic oligonucleotide
  misc_feature 1..20: note = Target: SCN10A; (-) strand; PAM type: YTN; PAM sequence: CTG
  source 1..20: mol_type = other DNA
ggtttatgaattagctcttt

SEQ ID NO: 50042 - DNA, 20 bp, synthetic construct
  misc_feature 1..20: note = Description of Artificial Sequence: Synthetic oligonucleotide
  misc_feature 1..20: note = Target: SCN10A; (-) strand; PAM type: YTN; PAM sequence: CTC
  source 1..20: mol_type = other DNA
tgggtttatgaattagctct

SEQ ID NO: 50043 - DNA, 20 bp, synthetic construct
  misc_feature 1..20: note = Description of Artificial Sequence: Synthetic oligonucleotide
  misc_feature 1..20: note = Target: SCN10A; (-) strand; PAM type: YTN; PAM sequence: CTG
  source 1..20: mol_type = other DNA
agggctctgggtttatgaat

SEQ ID NO: 50044 - DNA, 20 bp, synthetic construct
  misc_feature 1..20: note = Description of Artificial Sequence: Synthetic oligonucleotide
  misc_feature 1..20: note = Target: SCN10A; (-) strand; PAM type: YTN; PAM sequence: CTC
  source 1..20: mol_type = other DNA
tgagggctctgggtttatga

SEQ ID NO: 50045 - DNA, 20 bp, synthetic construct
  misc_feature 1..20: note = Description of Artificial Sequence: Synthetic oligonucleotide
  misc_feature 1..20: note = Target: SCN10A; (-) strand; PAM type: YTN; PAM sequence: TTC
  source 1..20: mol_type = other DNA
tctgagggctctgggtttat

SEQ ID NO: 50046 - DNA, 20 bp, synthetic construct
  misc_feature 1..20: note = Description of Artificial Sequence: Synthetic oligonucleotide
  misc_feature 1..20: note = Target: SCN10A; (-) strand; PAM type: YTN; PAM sequence: CTA
  source 1..20: mol_type = other DNA
attctctgagggctctgggt

SEQ ID NO: 50047 - DNA, 20 bp, synthetic construct
  misc_feature 1..20: note = Description of Artificial Sequence: Synthetic oligonucleotide
  misc_feature 1..20: note = Target: SCN10A; (-) strand; PAM type: YTN; PAM sequence: CTA
  source 1..20: mol_type = other DNA
acccagcacactaattctct

SEQ ID NO: 50048 - DNA, 20 bp, synthetic construct
  misc_feature 1..20: note = Description of Artificial Sequence: Synthetic oligonucleotide
  misc_feature 1..20: note = Target: SCN10A; (-) strand; PAM type: YTN; PAM sequence: CTA
  source 1..20: mol_type = other DNA
cctaacccagcacactaatt

SEQ ID NO: 50049 - DNA, 20 bp, synthetic construct
  misc_feature 1..20: note = Description of Artificial Sequence: Synthetic oligonucleotide
  misc_feature 1..20: note = Target: SCN10A; (-) strand; PAM type: YTN; PAM sequence: CTA
  source 1..20: mol_type = other DNA
tggtcatgggaactacctaa

SEQ ID NO: 50050 - DNA, 20 bp, synthetic construct
  misc_feature 1..20: note = Description of Artificial Sequence: Synthetic oligonucleotide
  misc_feature 1..20: note = Target: SCN10A; (-) strand; PAM type: YTN; PAM sequence: TTC
  source 1..20: mol_type = other DNA
actatggtcatgggaactac

SEQ ID NO: 50051 - DNA, 20 bp, synthetic construct
  misc_feature 1..20: note = Description of Artificial Sequence: Synthetic oligonucleotide
  misc_feature 1..20: note = Target: SCN10A; (-) strand; PAM type: YTN; PAM sequence: TTT
  source 1..20: mol_type = other DNA
cactatggtcatgggaacta

SEQ ID NO: 50052 - DNA, 20 bp, synthetic construct
  misc_feature 1..20: note = Description of Artificial Sequence: Synthetic oligonucleotide
  misc_feature 1..20: note = Target: SCN10A; (-) strand; PAM type: YTN; PAM sequence: TTA
  source 1..20: mol_type = other DNA
tggtcaagtttcactatggt

SEQ ID NO: 50053 - DNA, 20 bp, synthetic construct
  misc_feature 1..20: note = Description of Artificial Sequence: Synthetic oligonucleotide
  misc_feature 1..20: note = Target: SCN10A; (-) strand; PAM type: YTN; PAM sequence: TTA
  source 1..20: mol_type = other DNA
ttatggtcaagtttcactat

SEQ ID NO: 50054 - DNA, 20 bp, synthetic construct
  misc_feature 1..20: note = Description of Artificial Sequence: Synthetic oligonucleotide
  misc_feature 1..20: note = Target: SCN10A; (-) strand; PAM type: YTN; PAM sequence: TTT
  source 1..20: mol_type = other DNA
attatggtcaagtttcacta

SEQ ID NO: 50055 - DNA, 20 bp, synthetic construct
  misc_feature 1..20: note = Description of Artificial Sequence: Synthetic oligonucleotide
  misc_feature 1..20: note = Target: SCN10A; (-) strand; PAM type: YTN; PAM sequence: CTG
  source 1..20: mol_type = other DNA
aggacacaaatgatggttta

SEQ ID NO: 50056 - DNA, 20 bp, synthetic construct
  misc_feature 1..20: note = Description of Artificial Sequence: Synthetic oligonucleotide
  misc_feature 1..20: note = Target: SCN10A; (-) strand; PAM type: YTN; PAM sequence: CTA
  source 1..20: mol_type = other DNA
tagaccacctgaggacacaa

SEQ ID NO: 50057 - DNA, 20 bp, synthetic construct
  misc_feature 1..20: note = Description of Artificial Sequence: Synthetic oligonucleotide
  misc_feature 1..20: note = Target: SCN10A; (-) strand; PAM type: YTN; PAM sequence: TTG
  source 1..20: mol_type = other DNA
tacatactatagaccacctg

SEQ ID NO: 50058 - DNA, 20 bp, synthetic construct
  misc_feature 1..20: note = Description of Artificial Sequence: Synthetic oligonucleotide
  misc_feature 1..20: note = Target: SCN10A; (-) strand; PAM type: YTN; PAM sequence: TTT
  source 1..20: mol_type = other DNA
gtacatactatagaccacct

SEQ ID NO: 50059 - DNA, 20 bp, synthetic construct
  misc_feature 1..20: note = Description of Artificial Sequence: Synthetic oligonucleotide
  misc_feature 1..20: note = Target: SCN10A; (-) strand; PAM type: YTN; PAM sequence: TTT
  source 1..20: mol_type = other DNA
tgtacatactatagaccacc

SEQ ID NO: 50060 - DNA, 20 bp, synthetic construct
  misc_feature 1..20: note = Description of Artificial Sequence: Synthetic oligonucleotide
  misc_feature 1..20: note = Target: SCN10A; (-) strand; PAM type: YTN; PAM sequence: TTA
  source 1..20: mol_type = other DNA
gattttgtacatactataga

SEQ ID NO: 50061 - DNA, 20 bp, synthetic construct
  misc_feature 1..20: note = Description of Artificial Sequence: Synthetic oligonucleotide
  misc_feature 1..20: note = Target: SCN10A; (-) strand; PAM type: YTN; PAM sequence: TTT
  source 1..20: mol_type = other DNA
agattttgtacatactatag

SEQ ID NO: 50062 - DNA, 20 bp, synthetic construct
  misc_feature 1..20: note = Description of Artificial Sequence: Synthetic oligonucleotide
  misc_feature 1..20: note = Target: SCN10A; (-) strand; PAM type: YTN; PAM sequence: TTG
  source 1..20: mol_type = other DNA
gtatgaagtcaatgtttaga

SEQ ID NO: 50063 - DNA, 20 bp, synthetic construct
  misc_feature 1..20: note = Description of Artificial Sequence: Synthetic oligonucleotide
  misc_feature 1..20: note = Target: SCN10A; (-) strand; PAM type: YTN; PAM sequence: TTT
  source 1..20: mol_type = other DNA
ggtatgaagtcaatgtttag

SEQ ID NO: 50064 - DNA, 20 bp, synthetic construct
  misc_feature 1..20: note = Description of Artificial Sequence: Synthetic oligonucleotide
  misc_feature 1..20: note = Target: SCN10A; (-) strand; PAM type: YTN; PAM sequence: TTA
  source 1..20: mol_type = other DNA
aggaaggtgagtggaataaa

SEQ ID NO: 50065 - DNA, 20 bp, synthetic construct
  misc_feature 1..20: note = Description of Artificial Sequence: Synthetic oligonucleotide
  misc_feature 1..20: note = Target: SCN10A; (-) strand; PAM type: YTN; PAM sequence: TTA
  source 1..20: mol_type = other DNA
gtaataaaaaggagttaagg

SEQ ID NO: 50066 - DNA, 20 bp, synthetic construct
  misc_feature 1..20: note = Description of Artificial Sequence: Synthetic oligonucleotide
  misc_feature 1..20: note = Target: SCN10A; (-) strand; PAM type: YTN; PAM sequence: CTT
  source 1..20: mol_type = other DNA
agtaataaaaaggagttaag

SEQ ID NO: 50067 - DNA, 20 bp, synthetic construct
  misc_feature 1..20: note = Description of Artificial Sequence: Synthetic oligonucleotide
  misc_feature 1..20: note = Target: SCN10A; (-) strand; PAM type: YTN; PAM sequence: TTA
  source 1..20: mol_type = other DNA
gtagcttagtaataaaaagg

SEQ ID NO: 50068 - DNA, 20 bp, synthetic construct
  misc_feature 1..20: note = Description of Artificial Sequence: Synthetic oligonucleotide
  misc_feature 1..20: note = Target: SCN10A; (-) strand; PAM type: YTN; PAM sequence: TTT
  source 1..20: mol_type = other DNA
agtagcttagtaataaaaag

SEQ ID NO: 50069 - DNA, 20 bp, synthetic construct
  misc_feature 1..20: note = Description of Artificial Sequence: Synthetic oligonucleotide
  misc_feature 1..20: note = Target: SCN10A; (-) strand; PAM type: YTN; PAM sequence: CTT
  source 1..20: mol_type = other DNA
tagtagcttagtaataaaaa

SEQ ID NO: 50070 - DNA, 20 bp, synthetic construct
  misc_feature 1..20: note = Description of Artificial Sequence: Synthetic oligonucleotide
  misc_feature 1..20: note = Target: SCN10A; (-) strand; PAM type: YTN; PAM sequence: CTC
  source 1..20: mol_type = other DNA
cactttagtagcttagtaat

SEQ ID NO: 50071 - DNA, 20 bp, synthetic construct
  misc_feature 1..20: note = Description of Artificial Sequence: Synthetic oligonucleotide
  misc_feature 1..20: note = Target: SCN10A; (-) strand; PAM type: YTN; PAM sequence: TTC
  source 1..20: mol_type = other DNA
tccactttagtagcttagta

SEQ ID NO: 50072 - DNA, 20 bp, synthetic construct
  misc_feature 1..20: note = Description of Artificial Sequence: Synthetic oligonucleotide
  misc_feature 1..20: note = Target: SCN10A; (-) strand; PAM type: YTN; PAM sequence: TTG
  source 1..20: mol_type = other DNA
gcaagattctccactttagt

SEQ ID NO: 50073 - DNA, 20 bp, synthetic construct
  misc_feature 1..20: note = Description of Artificial Sequence: Synthetic oligonucleotide
  misc_feature 1..20: note = Target: SCN10A; (-) strand; PAM type: YTN; PAM sequence: TTA
  source 1..20: mol_type = other DNA
gtaaggagaaccccaattgg

SEQ ID NO: 50074 - DNA, 20 bp, synthetic construct
  misc_feature 1..20: note = Description of Artificial Sequence: Synthetic oligonucleotide
  misc_feature 1..20: note = Target: SCN10A; (-) strand; PAM type: YTN; PAM sequence: CTG
  source 1..20: mol_type = other DNA
tgagataaggggattagtaa

SEQ ID NO: 50075 - DNA, 20 bp, synthetic construct
  misc_feature 1..20: note = Description of Artificial Sequence: Synthetic oligonucleotide
  misc_feature 1..20: note = Target: SCN10A; (-) strand; PAM type: YTN; PAM sequence: TTC
  source 1..20: mol_type = other DNA
tgtgagataaggggattagt

SEQ ID NO: 50076 - DNA, 20 bp, synthetic construct
  misc_feature 1..20: note = Description of Artificial Sequence: Synthetic oligonucleotide
  misc_feature 1..20: note = Target: SCN10A; (-) strand; PAM type: YTN; PAM sequence: TTC
  source 1..20: mol_type = other DNA
agttctgtgagataagggga

SEQ ID NO: 50077 - DNA, 20 bp, synthetic construct
  misc_feature 1..20: note = Description of Artificial Sequence: Synthetic oligonucleotide
  misc_feature 1..20: note = Target: SCN10A; (-) strand; PAM type: YTN; PAM sequence: CTT
  source 1..20: mol_type = other DNA
cagttctgtgagataagggg

SEQ ID NO: 50078 - DNA, 20 bp, synthetic construct
  misc_feature 1..20: note = Description of Artificial Sequence: Synthetic oligonucleotide
  misc_feature 1..20: note = Target: SCN10A; (-) strand; PAM type: YTN; PAM sequence: TTA
  source 1..20: mol_type = other DNA
tcaagagaggaaacttcagt

SEQ ID NO: 50079 - DNA, 20 bp, synthetic construct
  misc_feature 1..20: note = Description of Artificial Sequence: Synthetic oligonucleotide
  misc_feature 1..20: note = Target: SCN10A; (-) strand; PAM type: YTN; PAM sequence: TTC
  source 1..20: mol_type = other DNA
aaattatcaagagaggaaac

SEQ ID NO: 50080 - DNA, 20 bp, synthetic construct
  misc_feature 1..20: note = Description of Artificial Sequence: Synthetic oligonucleotide
  misc_feature 1..20: note = Target: SCN10A; (-) strand; PAM type: YTN; PAM sequence: CTT
  source 1..20: mol_type = other DNA
caaattatcaagagaggaaa

SEQ ID NO: 50081 - DNA, 20 bp, synthetic construct
  misc_feature 1..20: note = Description of Artificial Sequence: Synthetic oligonucleotide
  misc_feature 1..20: note = Target: SCN10A; (-) strand; PAM type: YTN; PAM sequence: CTA
  source 1..20: mol_type = other DNA
aacaggatcaggcttcaaat

SEQ ID NO: 50082 - DNA, 20 bp, synthetic construct
  misc_feature 1..20: note = Description of Artificial Sequence: Synthetic oligonucleotide
  misc_feature 1..20: note = Target: SCN10A; (-) strand; PAM type: YTN; PAM sequence: TTG
  source 1..20: mol_type = other DNA
ctaaacaggatcaggcttca

SEQ ID NO: 50083 - DNA, 20 bp, synthetic construct
  misc_feature 1..20: note = Description of Artificial Sequence: Synthetic oligonucleotide
  misc_feature 1..20: note = Target: SCN10A; (-) strand; PAM type: YTN; PAM sequence: TTA
  source 1..20: mol_type = other DNA
ataatggttgctaaacagga

SEQ ID NO: 50084 - DNA, 20 bp, synthetic construct
  misc_feature 1..20: note = Description of Artificial Sequence: Synthetic oligonucleotide
  misc_feature 1..20: note = Target: SCN10A; (-) strand; PAM type: YTN; PAM sequence: TTT
  source 1..20: mol_type = other DNA
aataatggttgctaaacagg

SEQ ID NO: 50085 - DNA, 20 bp, synthetic construct
  misc_feature 1..20: note = Description of Artificial Sequence: Synthetic oligonucleotide
  misc_feature 1..20: note = Target: SCN10A; (-) strand; PAM type: YTN; PAM sequence: TTT
  source 1..20: mol_type = other DNA
taataatggttgctaaacag

SEQ ID NO: 50086 - DNA, 20 bp, synthetic construct
  misc_feature 1..20: note = Description of Artificial Sequence: Synthetic oligonucleotide
  misc_feature 1..20: note = Target: SCN10A; (-) strand; PAM type: YTN; PAM sequence: CTT
  source 1..20: mol_type = other DNA
ttaataatggttgctaaaca

SEQ ID NO: 50087 - DNA, 20 bp, synthetic construct
  misc_feature 1..20: note = Description of Artificial Sequence: Synthetic oligonucleotide
  misc_feature 1..20: note = Target: SCN10A; (-) strand; PAM type: YTN; PAM sequence: CTG
  source 1..20: mol_type = other DNA
agcttttaataatggttgct

SEQ ID NO: 50088 - DNA, 20 bp, synthetic construct
  misc_feature 1..20: note = Description of Artificial Sequence: Synthetic oligonucleotide
  misc_feature 1..20: note = Target: SCN10A; (-) strand; PAM type: YTN; PAM sequence: TTA
  source 1..20: mol_type = other DNA
taatactgagcttttaataa

SEQ ID NO: 50089 - DNA, 20 bp, synthetic construct
  misc_feature 1..20: note = Description of Artificial Sequence: Synthetic oligonucleotide
  misc_feature 1..20: note = Target: SCN10A; (-) strand; PAM type: YTN; PAM sequence: TTT
  source 1..20: mol_type = other DNA
ataatactgagcttttaata

SEQ ID NO: 50090 - DNA, 20 bp, synthetic construct
  misc_feature 1..20: note = Description of Artificial Sequence: Synthetic oligonucleotide
  misc_feature 1..20: note = Target: SCN10A; (-) strand; PAM type: YTN; PAM sequence: CTA
  source 1..20: mol_type = other DNA
tttataatactgagctttta

SEQ ID NO: 50091 - DNA, 20 bp, synthetic construct
  misc_feature 1..20: note = Description of Artificial Sequence: Synthetic oligonucleotide
  misc_feature 1..20: note = Target: SCN10A; (-) strand; PAM type: YTN; PAM sequence: CTC
  source 1..20: mol_type = other DNA
tatttataatactgagcttt

SEQ ID NO: 50092 - DNA, 20 bp, synthetic construct
  misc_feature 1..20: note = Description of Artificial Sequence: Synthetic oligonucleotide
  misc_feature 1..20: note = Target: SCN10A; (-) strand; PAM type: YTN; PAM sequence: TTA
  source 1..20: mol_type = other DNA
caggcagagagtactctatt

SEQ ID NO: 50093 - DNA, 20 bp, synthetic construct
  misc_feature 1..20: note = Description of Artificial Sequence: Synthetic oligonucleotide
  misc_feature 1..20: note = Target: SCN10A; (-) strand; PAM type: YTN; PAM sequence: TTG
  source 1..20: mol_type = other DNA
ggcatgtattacaggcagag

SEQ ID NO: 50094 - DNA, 20 bp, synthetic construct
  misc_feature 1..20: note = Description of Artificial Sequence: Synthetic oligonucleotide
  misc_feature 1..20: note = Target: SCN10A; (-) strand; PAM type: YTN; PAM sequence: CTT
  source 1..20: mol_type = other DNA
gggcatgtattacaggcaga

SEQ ID NO: 50095 - DNA, 20 bp, synthetic construct
  misc_feature 1..20: note = Description of Artificial Sequence: Synthetic oligonucleotide
  misc_feature 1..20: note = Target: SCN10A; (-) strand; PAM type: YTN; PAM sequence: CTA
  source 1..20: mol_type = other DNA
tagtccttgggcatgtatta

SEQ ID NO: 50096 - DNA, 20 bp, synthetic construct
  misc_feature 1..20: note = Description of Artificial Sequence: Synthetic oligonucleotide
  misc_feature 1..20: note = Target: SCN10A; (-) strand; PAM type: YTN; PAM sequence: TTC
  source 1..20: mol_type = other DNA
tatagtccttgggcatgtat

SEQ ID NO: 50097 - DNA, 20 bp, synthetic construct
  misc_feature 1..20: note = Description of Artificial Sequence: Synthetic oligonucleotide
  misc_feature 1..20: note = Target: SCN10A; (-) strand; PAM type: YTN; PAM sequence: TTA
  source 1..20: mol_type = other DNA
tgagttctatagtccttggg

SEQ ID NO: 50098 - DNA, 20 bp, synthetic construct
  misc_feature 1..20: note = Description of Artificial Sequence: Synthetic oligonucleotide
  misc_feature 1..20: note = Target: SCN10A; (-) strand; PAM type: YTN; PAM sequence: TTT
  source 1..20: mol_type = other DNA
atgagttctatagtccttgg

SEQ ID NO: 50099 - DNA, 20 bp, synthetic construct
  misc_feature 1..20: note = Description of Artificial Sequence: Synthetic oligonucleotide
  misc_feature 1..20: note = Target: SCN10A; (-) strand; PAM type: YTN; PAM sequence: TTT
  source 1..20: mol_type = other DNA
tatgagttctatagtccttg

SEQ ID NO: 50100 - DNA, 20 bp, synthetic construct
  misc_feature 1..20: note = Description of Artificial Sequence: Synthetic oligonucleotide
  misc_feature 1..20: note = Target: SCN10A; (-) strand; PAM type: YTN; PAM sequence: TTG
  source 1..20: mol_type = other DNA
cattttatgagttctatagt

SEQ ID NO: 50101 - DNA, 20 bp, synthetic construct
  misc_feature 1..20: note = Description of Artificial Sequence: Synthetic oligonucleotide
  misc_feature 1..20: note = Target: SCN10A; (-) strand; PAM type: YTN; PAM sequence: TTT
  source 1..20: mol_type = other DNA
gcattttatgagttctatag

SEQ ID NO: 50102 - DNA, 20 bp, synthetic construct
  misc_feature 1..20: note = Description of Artificial Sequence: Synthetic oligonucleotide
  misc_feature 1..20: note = Target: SCN10A; (-) strand; PAM type: YTN; PAM sequence: TTT
  source 1..20: mol_type = other DNA
tgcattttatgagttctata

SEQ ID NO: 50103 - DNA, 20 bp, synthetic construct
  misc_feature 1..20: note = Description of Artificial Sequence: Synthetic oligonucleotide
  misc_feature 1..20: note = Target: SCN10A; (-) strand; PAM type: YTN; PAM sequence: TTT
  source 1..20: mol_type = other DNA
ttgcattttatgagttctat

SEQ ID NO: 50104 - DNA, 20 bp, synthetic construct
  misc_feature 1..20: note = Description of Artificial Sequence: Synthetic oligonucleotide
  misc_feature 1..20: note = Target: SCN10A; (-) strand; PAM type: YTN; PAM sequence: TTG
  source 1..20: mol_type = other DNA
gaaggatttttgcattttat

SEQ ID NO: 50105 - DNA, 20 bp, synthetic construct
  misc_feature 1..20: note = Description of Artificial Sequence: Synthetic oligonucleotide
  misc_feature 1..20: note = Target: SCN10A; (-) strand; PAM type: YTN; PAM sequence: TTC
  source 1..20: mol_type = other DNA
aaaaattggaaggatttttg

SEQ ID NO: 50106 - DNA, 20 bp, synthetic construct
  misc_feature 1..20: note = Description of Artificial Sequence: Synthetic oligonucleotide
  misc_feature 1..20: note = Target: SCN10A; (-) strand; PAM type: YTN; PAM sequence: CTT
  source 1..20: mol_type = other DNA
caaaaattggaaggattttt

SEQ ID NO: 50107 - DNA, 20 bp, synthetic construct
  misc_feature 1..20: note = Description of Artificial Sequence: Synthetic oligonucleotide
  misc_feature 1..20: note = Target: SCN10A; (-) strand; PAM type: YTN; PAM sequence: TTG
  source 1..20: mol_type = other DNA
cttcaaaaattggaaggatt

SEQ ID NO: 50108 - DNA, 20 bp, synthetic construct
  misc_feature 1..20: note = Description of Artificial Sequence: Synthetic oligonucleotide
  misc_feature 1..20: note = Target: SCN10A; (-) strand; PAM type: YTN; PAM sequence: TTT
  source 1..20: mol_type = other DNA
gcttcaaaaattggaaggat

SEQ ID NO: 50109 - DNA, 20 bp, synthetic construct
  misc_feature 1..20: note = Description of Artificial Sequence: Synthetic oligonucleotide
  misc_feature 1..20: note = Target: SCN10A; (-) strand; PAM type: YTN; PAM sequence: CTC
  source 1..20: mol_type = other DNA
atttgcttcaaaaattggaa

SEQ ID NO: 50110 - DNA, 20 bp, synthetic construct
  misc_feature 1..20: note = Description of Artificial Sequence: Synthetic oligonucleotide
  misc_feature 1..20: note = Target: SCN10A; (-) strand; PAM type: YTN; PAM sequence: TTC
  source 1..20: mol_type = other DNA
tcatttgcttcaaaaattgg

SEQ ID NO: 50111 - DNA, 20 bp, synthetic construct
  misc_feature 1..20: note = Description of Artificial Sequence: Synthetic oligonucleotide
  misc_feature 1..20: note = Target: SCN10A; (-) strand; PAM type: YTN; PAM sequence: TTT
  source 1..20: mol_type = other DNA
ctcatttgcttcaaaaattg

SEQ ID NO: 50112 - DNA, 20 bp, synthetic construct
  misc_feature 1..20: note = Description of Artificial Sequence: Synthetic oligonucleotide
  misc_feature 1..20: note = Target: SCN10A; (-) strand; PAM type: YTN; PAM sequence: TTT
  source 1..20: mol_type = other DNA
tctcatttgcttcaaaaatt

SEQ ID NO: 50113 - DNA, 20 bp, synthetic construct
  misc_feature 1..20: note = Description of Artificial Sequence: Synthetic oligonucleotide
  misc_feature 1..20: note = Target: SCN10A; (-) strand; PAM type: YTN; PAM sequence: TTT
  source 1..20: mol_type = other DNA
ttctcatttgcttcaaaaat

SEQ ID NO: 50114 - DNA, 20 bp, synthetic construct
  misc_feature 1..20: note = Description of Artificial Sequence: Synthetic oligonucleotide
  misc_feature 1..20: note = Target: SCN10A; (-) strand; PAM type: YTN; PAM sequence: TTA
  source 1..20: mol_type = other DNA
atatggatgtgtcaattttt

SEQ ID NO: 50115 - DNA, 20 bp, synthetic construct
  misc_feature 1..20: note = Description of Artificial Sequence: Synthetic oligonucleotide
  misc_feature 1..20: note = Target: SCN10A; (-) strand; PAM type: YTN; PAM sequence: CTT
  source 1..20: mol_type = other DNA
aatatggatgtgtcaatttt

SEQ ID NO: 50116 - DNA, 20 bp, synthetic construct
  misc_feature 1..20: note = Description of Artificial Sequence: Synthetic oligonucleotide
  misc_feature 1..20: note = Target: SCN10A; (-) strand; PAM type: YTN; PAM sequence: TTC
  source 1..20: mol_type = other DNA
cttaatatggatgtgtcaat

SEQ ID NO: 50117 - DNA, 20 bp, synthetic construct
  misc_feature 1..20: note = Description of Artificial Sequence: Synthetic oligonucleotide
  misc_feature 1..20: note = Target: SCN10A; (-) strand; PAM type: YTN; PAM sequence: CTT
  source 1..20: mol_type = other DNA
ccttaatatggatgtgtcaa

SEQ ID NO: 50118 - DNA, 20 bp, synthetic construct
  misc_feature 1..20: note = Description of Artificial Sequence: Synthetic oligonucleotide
  misc_feature 1..20: note = Target: SCN10A; (-) strand; PAM type: YTN; PAM sequence: TTC
  source 1..20: mol_type = other DNA
ccttccttaatatggatgtg

SEQ ID NO: 50119 - DNA, 20 bp, synthetic construct
  misc_feature 1..20: note = Description of Artificial Sequence: Synthetic oligonucleotide
  misc_feature 1..20: note = Target: SCN10A; (-) strand; PAM type: YTN; PAM sequence: CTC
  source 1..20: mol_type = other DNA
aagtgcaaataatgtagtat

SEQ ID NO: 50120 - DNA, 20 bp, synthetic construct
  misc_feature 1..20: note = Description of Artificial Sequence: Synthetic oligonucleotide
  misc_feature 1..20: note = Target: SCN10A; (-) strand; PAM type: YTN; PAM sequence: TTG
  source 1..20: mol_type = other DNA
gtgctcaagtgcaaataatg

SEQ ID NO: 50121 - DNA, 20 bp, synthetic construct
  misc_feature 1..20: note = Description of Artificial Sequence: Synthetic oligonucleotide
  misc_feature 1..20: note = Target: SCN10A; (-) strand; PAM type: YTN; PAM sequence: CTT
  source 1..20: mol_type = other DNA
ggtgctcaagtgcaaataat

SEQ ID NO: 50122 - DNA, 20 bp, synthetic construct
  misc_feature 1..20: note = Description of Artificial Sequence: Synthetic oligonucleotide
  misc_feature 1..20: note = Target: SCN10A; (-) strand; PAM type: YTN; PAM sequence: TTG
  source 1..20: mol_type = other DNA
cttggtgctcaagtgcaaat

SEQ ID NO: 50123 - DNA, 20 bp, synthetic construct
  misc_feature 1..20: note = Description of Artificial Sequence: Synthetic oligonucleotide
  misc_feature 1..20: note = Target: SCN10A; (-) strand; PAM type: YTN; PAM sequence: TTT
  source 1..20: mol_type = other DNA
gcttggtgctcaagtgcaaa

SEQ ID NO: 50124 - DNA, 20 bp, synthetic construct
  misc_feature 1..20: note = Description of Artificial Sequence: Synthetic oligonucleotide
  misc_feature 1..20: note = Target: SCN10A; (-) strand; PAM type: YTN; PAM sequence: TTG
  source 1..20: mol_type = other DNA
gtttgcttggtgctcaagtg

SEQ ID NO: 50125 - DNA, 20 bp, synthetic construct
  misc_feature 1..20: note = Description of Artificial Sequence: Synthetic oligonucleotide
  misc_feature 1..20: note = Target: SCN10A; (-) strand; PAM type: YTN; PAM sequence: TTC
  source 1..20: mol_type = other DNA
attggtttgcttggtgctca

SEQ ID NO: 50126 - DNA, 20 bp, synthetic construct
  misc_feature 1..20: note = Description of Artificial Sequence: Synthetic oligonucleotide
  misc_feature 1..20: note = Target: SCN10A; (-) strand; PAM type: YTN; PAM sequence: CTT
  source 1..20: mol_type = other DNA
cattggtttgcttggtgctc

SEQ ID NO: 50127 - DNA, 20 bp, synthetic construct
  misc_feature 1..20: note = Description of Artificial Sequence: Synthetic oligonucleotide
  misc_feature 1..20: note = Target: SCN10A; (-) strand; PAM type: YTN; PAM sequence: TTC
  source 1..20: mol_type = other DNA
ttcattggtttgcttggtgc

SEQ ID NO: 50128 - DNA, 20 bp, synthetic construct
  misc_feature 1..20: note = Description of Artificial Sequence: Synthetic oligonucleotide
  misc_feature 1..20: note = Target: SCN10A; (-) strand; PAM type: YTN; PAM sequence: TTT
  source 1..20: mol_type = other DNA
cttcattggtttgcttggtg

SEQ ID NO: 50129 - DNA, 20 bp, synthetic construct
  misc_feature 1..20: note = Description of Artificial Sequence: Synthetic oligonucleotide
  misc_feature 1..20: note = Target: SCN10A; (-) strand; PAM type: YTN; PAM sequence: CTC
  source 1..20: mol_type = other DNA
agtttcttcattggtttgct

SEQ ID NO: 50130 - DNA, 20 bp, synthetic construct
  misc_feature 1..20: note = Description of Artificial Sequence: Synthetic oligonucleotide
  misc_feature 1..20: note = Target: SCN10A; (-) strand; PAM type: YTN; PAM sequence: TTC
  source 1..20: mol_type = other DNA
tcagtttcttcattggtttg

SEQ ID NO: 50131 - DNA, 20 bp, synthetic construct
  misc_feature 1..20: note = Description of Artificial Sequence: Synthetic oligonucleotide
  misc_feature 1..20: note = Target: SCN10A; (-) strand; PAM type: YTN; PAM sequence: CTT
  source 1..20: mol_type = other DNA
ctcagtttcttcattggttt

SEQ ID NO: 50132 - DNA, 20 bp, synthetic construct
  misc_feature 1..20: note = Description of Artificial Sequence: Synthetic oligonucleotide
  misc_feature 1..20: note = Target: SCN10A; (-) strand; PAM type: YTN; PAM sequence: TTC
  source 1..20: mol_type = other DNA
ttctcagtttcttcattggt

SEQ ID NO: 50133 - DNA, 20 bp, synthetic construct
  misc_feature 1..20: note = Description of Artificial Sequence: Synthetic oligonucleotide
  misc_feature 1..20: note = Target: SCN10A; (-) strand; PAM type: YTN; PAM sequence: TTT
  source 1..20: mol_type = other DNA
cttctcagtttcttcattgg

SEQ ID NO: 50134 - DNA, 20 bp, synthetic construct
  misc_feature 1..20: note = Description of Artificial Sequence: Synthetic oligonucleotide
  misc_feature 1..20: note = Target: SCN10A; (-) strand; PAM type: YTN; PAM sequence: TTT
  source 1..20: mol_type = other DNA
tcttctcagtttcttcattg

SEQ ID NO: 50135 - DNA, 20 bp, synthetic construct
  misc_feature 1..20: note = Description of Artificial Sequence: Synthetic oligonucleotide
  misc_feature 1..20: note = Target: SCN10A; (-) strand; PAM type: YTN; PAM sequence: CTG
  source 1..20: mol_type = other DNA
tcaaatatgcaaccaaaatt

SEQ ID NO: 50136 - DNA, 20 bp, synthetic construct
  misc_feature 1..20: note = Description of Artificial Sequence: Synthetic oligonucleotide
  misc_feature 1..20: note = Target: SCN10A; (-) strand; PAM type: YTN; PAM sequence: CTG
  source 1..20: mol_type = other DNA
ctgtcaaatatgcaaccaaa

SEQ ID NO: 50137 - DNA, 20 bp, synthetic construct
  misc_feature 1..20: note = Description of Artificial Sequence: Synthetic oligonucleotide
  misc_feature 1..20: note = Target: SCN10A; (-) strand; PAM type: YTN; PAM sequence: CTC
  source 1..20: mol_type = other DNA
gtggccaaggagacactgct

SEQ ID NO: 50138 - DNA, 20 bp, synthetic construct
  misc_feature 1..20: note = Description of Artificial Sequence: Synthetic oligonucleotide
  misc_feature 1..20: note = Target: SCN10A; (-) strand; PAM type: YTN; PAM sequence: CTA
  source 1..20: mol_type = other DNA
aaataactcgtggccaagga

SEQ ID NO: 50139 - DNA, 20 bp, synthetic construct
  misc_feature 1..20: note = Description of Artificial Sequence: Synthetic oligonucleotide
  misc_feature 1..20: note = Target: SCN10A; (-) strand; PAM type: YTN; PAM sequence: TTC
  source 1..20: mol_type = other DNA
taaaataactcgtggccaag

SEQ ID NO: 50140 - DNA, 20 bp, synthetic construct
  misc_feature 1..20: note = Description of Artificial Sequence: Synthetic oligonucleotide
  misc_feature 1..20: note = Target: SCN10A; (-) strand; PAM type: YTN; PAM sequence: TTA
  source 1..20: mol_type = other DNA
attctaaaataactcgtggc

SEQ ID NO: 50141 - DNA, 20 bp, synthetic construct
  misc_feature 1..20: note = Description of Artificial Sequence: Synthetic oligonucleotide
  misc_feature 1..20: note = Target: SCN10A; (-) strand; PAM type: YTN; PAM sequence: CTT
  source 1..20: mol_type = other DNA
aattctaaaataactcgtgg

SEQ ID NO: 50142 - DNA, 20 bp, synthetic construct
  misc_feature 1..20: note = Description of Artificial Sequence: Synthetic oligonucleotide
  misc_feature 1..20: note = Target: SCN10A; (-) strand; PAM type: YTN; PAM sequence: TTG
  source 1..20: mol_type = other DNA
tcaaaaccttaattctaaaa

SEQ ID NO: 50143 - DNA, 20 bp, synthetic construct
  misc_feature 1..20: note = Description of Artificial Sequence: Synthetic oligonucleotide
  misc_feature 1..20: note = Target: SCN10A; (-) strand; PAM type: YTN; PAM sequence: TTT
  source 1..20: mol_type = other DNA
gtcaaaaccttaattctaaa

SEQ ID NO: 50144 - DNA, 20 bp, synthetic construct
  misc_feature 1..20: note = Description of Artificial Sequence: Synthetic oligonucleotide
  misc_feature 1..20: note = Target: SCN10A; (-) strand; PAM type: YTN; PAM sequence: TTG
  source 1..20: mol_type = other DNA
cccaccatttgtcaaaacct

SEQ ID NO: 50145 - DNA, 20 bp, synthetic construct
  misc_feature 1..20: note = Description of Artificial Sequence: Synthetic oligonucleotide
  misc_feature 1..20: note = Target: SCN10A; (-) strand; PAM type: YTN; PAM sequence: CTC
  source 1..20: mol_type = other DNA
agaagacattgcccaccatt

SEQ ID NO: 50146 - DNA, 20 bp, synthetic construct
  misc_feature 1..20: note = Description of Artificial Sequence: Synthetic oligonucleotide
  misc_feature 1..20: note = Target: SCN10A; (-) strand; PAM type: YTN; PAM sequence: TTA
  source 1..20: mol_type = other DNA
tactcagaagacattgccca

SEQ ID NO: 50147 - DNA, 20 bp, synthetic construct
  misc_feature 1..20: note = Description of Artificial Sequence: Synthetic oligonucleotide
  misc_feature 1..20: note = Target: SCN10A; (-) strand; PAM type: YTN; PAM sequence: CTT
  source 1..20: mol_type = other DNA
atactcagaagacattgccc

SEQ ID NO: 50148 - DNA, 20 bp, synthetic construct
  misc_feature 1..20: note = Description of Artificial Sequence: Synthetic oligonucleotide
  misc_feature 1..20: note = Target: SCN10A; (-) strand; PAM type: YTN; PAM sequence: CTA
  source 1..20: mol_type = other DNA
atgcttatactcagaagaca

SEQ ID NO: 50149 - DNA, 20 bp, synthetic construct
  misc_feature 1..20: note = Description of Artificial Sequence: Synthetic oligonucleotide
  misc_feature 1..20: note = Target: SCN10A; (-) strand; PAM type: YTN; PAM sequence: TTC
  source 1..20: mol_type = other DNA
taatgcttatactcagaaga

SEQ ID NO: 50150 - DNA, 20 bp, synthetic construct
  misc_feature 1..20: note = Description of Artificial Sequence: Synthetic oligonucleotide
  misc_feature 1..20: note = Target: SCN10A; (-) strand; PAM type: YTN; PAM sequence: TTA
  source 1..20: mol_type = other DNA
aagcaattctaatgcttata

SEQ ID NO: 50151 - DNA, 20 bp, synthetic construct
  misc_feature 1..20: note = Description of Artificial Sequence: Synthetic oligonucleotide
  misc_feature 1..20: note = Target: SCN10A; (-) strand; PAM type: YTN; PAM sequence: TTT
  source 1..20: mol_type = other DNA
aaagcaattctaatgcttat

SEQ ID NO: 50152 - DNA, 20 bp, synthetic construct
  misc_feature 1..20: note = Description of Artificial Sequence: Synthetic oligonucleotide
  misc_feature 1..20: note = Target: SCN10A; (-) strand; PAM type: YTN; PAM sequence: TTT
  source 1..20: mol_type = other DNA
taaagcaattctaatgctta

SEQ ID NO: 50153 - DNA, 20 bp, synthetic construct
  misc_feature 1..20: note = Description of Artificial Sequence: Synthetic oligonucleotide
  misc_feature 1..20: note = Target: SCN10A; (-) strand; PAM type: YTN; PAM sequence: TTA
  source 1..20: mol_type = other DNA
gaggatgaattttaaagcaa

SEQ ID NO: 50154 - DNA, 20 bp, synthetic construct
  misc_feature 1..20: note = Description of Artificial Sequence: Synthetic oligonucleotide
  misc_feature 1..20: note = Target: SCN10A; (-) strand; PAM type: YTN; PAM sequence: CTC
  source 1..20: mol_type = other DNA
gttagaggatgaattttaaa

SEQ ID NO: 50155 - DNA, 20 bp, synthetic construct
  misc_feature 1..20: note = Description of Artificial Sequence: Synthetic oligonucleotide
  misc_feature 1..20: note = Target: SCN10A; (-) strand; PAM type: YTN; PAM sequence: TTG
  source 1..20: mol_type = other DNA
gtctcgttagaggatgaatt

SEQ ID NO: 50156 - DNA, 20 bp, synthetic construct
  misc_feature 1..20: note = Description of Artificial Sequence: Synthetic oligonucleotide
  misc_feature 1..20: note = Target: SCN10A; (-) strand; PAM type: YTN; PAM sequence: TTG
  source 1..20: mol_type = other DNA
tggaaaatcacagaccagtt

SEQ ID NO: 50157 - DNA, 20 bp, synthetic construct
  misc_feature 1..20: note = Description of Artificial Sequence: Synthetic oligonucleotide
  misc_feature 1..20: note = Target: SCN10A; (-) strand; PAM type: YTN; PAM sequence: TTT
  source 1..20: mol_type = other DNA
gtggaaaatcacagaccagt

SEQ ID NO: 50158 - DNA, 20 bp, synthetic construct
  misc_feature 1..20: note = Description of Artificial Sequence: Synthetic oligonucleotide
  misc_feature 1..20: note = Target: SCN10A; (-) strand; PAM type: YTN; PAM sequence: TTT
  source 1..20: mol_type = other DNA
tgtggaaaatcacagaccag

SEQ ID NO: 50159 - DNA, 20 bp, synthetic construct
  misc_feature 1..20: note = Description of Artificial Sequence: Synthetic oligonucleotide
  misc_feature 1..20: note = Target: SCN10A; (-) strand; PAM type: YTN; PAM sequence: TTT
  source 1..20: mol_type = other DNA
ttgtggaaaatcacagacca

SEQ ID NO: 50160 - DNA, 20 bp, synthetic construct
  misc_feature 1..20: note = Description of Artificial Sequence: Synthetic oligonucleotide
  misc_feature 1..20: note = Target: SCN10A; (-) strand; PAM type: YTN; PAM sequence: TTA
  source 1..20: mol_type = other DNA
aatagaggaatatatagaag

SEQ ID NO: 50161 - DNA, 20 bp, synthetic construct
  misc_feature 1..20: note = Description of Artificial Sequence: Synthetic oligonucleotide
  misc_feature 1..20: note = Target: SCN10A; (-) strand; PAM type: YTN; PAM sequence: TTA
  source 1..20: mol_type = other DNA
taaccaatagaaattaaata

SEQ ID NO: 50162 - DNA, 20 bp, synthetic construct
  misc_feature 1..20: note = Description of Artificial Sequence: Synthetic oligonucleotide
  misc_feature 1..20: note = Target: SCN10A; (-) strand; PAM type: YTN; PAM sequence: TTT
  source 1..20: mol_type = other DNA
ataaccaatagaaattaaat

SEQ ID NO: 50163 - DNA, 20 bp, synthetic construct
  misc_feature 1..20: note = Description of Artificial Sequence: Synthetic oligonucleotide
  misc_feature 1..20: note = Target: SCN10A; (-) strand; PAM type: YTN; PAM sequence: TTT
  source 1..20: mol_type = other DNA
tataaccaatagaaattaaa

SEQ ID NO: 50164 - DNA, 20 bp, synthetic construct
  misc_feature 1..20: note = Description of Artificial Sequence: Synthetic oligonucleotide
  misc_feature 1..20: note = Target: SCN10A; (-) strand; PAM type: YTN; PAM sequence: CTA
  source 1..20: mol_type = other DNA
aagccattttataaccaata

SEQ ID NO: 50165 - DNA, 20 bp, synthetic construct
  misc_feature 1..20: note = Description of Artificial Sequence: Synthetic oligonucleotide
  misc_feature 1..20: note = Target: SCN10A; (-) strand; PAM type: YTN; PAM sequence: TTA
  source 1..20: mol_type = other DNA
tctaaagccattttataacc

SEQ ID NO: 50166 - DNA, 20 bp, synthetic construct
  misc_feature 1..20: note = Description of Artificial Sequence: Synthetic oligonucleotide
  misc_feature 1..20: note = Target: SCN10A; (-) strand; PAM type: YTN; PAM sequence: TTT
  source 1..20: mol_type = other DNA
atctaaagccattttataac

SEQ ID NO: 50167 - DNA, 20 bp, synthetic construct
  misc_feature 1..20: note = Description of Artificial Sequence: Synthetic oligonucleotide
  misc_feature 1..20: note = Target: SCN10A; (-) strand; PAM type: YTN; PAM sequence: TTT
  source 1..20: mol_type = other DNA
tatctaaagccattttataa

SEQ ID NO: 50168 - DNA, 20 bp, synthetic construct
  misc_feature 1..20: note = Description of Artificial Sequence: Synthetic oligonucleotide
  misc_feature 1..20: note = Target: SCN10A; (-) strand; PAM type: YTN; PAM sequence: TTT
  source 1..20: mol_type = other DNA
ttatctaaagccattttata

SEQ ID NO: 50169 - DNA, 20 bp, synthetic construct
  misc_feature 1..20: note = Description of Artificial Sequence: Synthetic oligonucleotide
  misc_feature 1..20: note = Target: SCN10A; (-) strand; PAM type: YTN; PAM sequence: CTA
  source 1..20: mol_type = other DNA
atgcagtttttatctaaagc

SEQ ID NO: 50170 - DNA, 20 bp, synthetic construct
  misc_feature 1..20: note = Description of Artificial Sequence: Synthetic oligonucleotide
  misc_feature 1..20: note = Target: SCN10A; (-) strand; PAM type: YTN; PAM sequence: TTC
  source 1..20: mol_type = other DNA
atgtggtaaatagacctaat

SEQ ID NO: 50171 - DNA, 20 bp, synthetic construct
  misc_feature 1..20: note = Description of Artificial Sequence: Synthetic oligonucleotide
  misc_feature 1..20: note = Target: SCN10A; (-) strand; PAM type: YTN; PAM sequence: TTC
  source 1..20: mol_type = other DNA
ccaggtacattcatgtggta

SEQ ID NO: 50172 - DNA, 20 bp, synthetic construct
  misc_feature 1..20: note = Description of Artificial Sequence: Synthetic oligonucleotide
  misc_feature 1..20: note = Target: SCN10A; (-) strand; PAM type: YTN; PAM sequence: TTT
  source 1..20: mol_type = other DNA
cccaggtacattcatgtggt

SEQ ID NO: 50173 - DNA, 20 bp, synthetic construct
  misc_feature 1..20: note = Description of Artificial Sequence: Synthetic oligonucleotide
  misc_feature 1..20: note = Target: SCN10A; (-) strand; PAM type: YTN; PAM sequence: TTT
  source 1..20: mol_type = other DNA
tcccaggtacattcatgtgg

SEQ ID NO: 50174 - DNA, 20 bp, synthetic construct
  misc_feature 1..20: note = Description of Artificial Sequence: Synthetic oligonucleotide
  misc_feature 1..20: note = Target: SCN10A; (-) strand; PAM type: YTN; PAM sequence: CTT
  source 1..20: mol_type = other DNA
ttcccaggtacattcatgtg

SEQ ID NO: 50175 - DNA, 20 bp, synthetic construct
  misc_feature 1..20: note = Description of Artificial Sequence: Synthetic oligonucleotide
  misc_feature 1..20: note = Target: SCN10A; (-) strand; PAM type: YTN; PAM sequence: CTC
  source 1..20: mol_type = other DNA
ttttcccaggtacattcatg

SEQ ID NO: 50176 - DNA, 20 bp, synthetic construct
  misc_feature 1..20: note = Description of Artificial Sequence: Synthetic oligonucleotide
  misc_feature 1..20: note = Target: SCN10A; (-) strand; PAM type: YTN; PAM sequence: CTC
  source 1..20: mol_type = other DNA
cctcttttcccaggtacatt

SEQ ID NO: 50177 - DNA, 20 bp, synthetic construct
  misc_feature 1..20: note = Description of Artificial Sequence: Synthetic oligonucleotide
  misc_feature 1..20: note = Target: SCN10A; (-) strand; PAM type: YTN; PAM sequence: CTC
  source 1..20: mol_type = other DNA
tccctcttttcccaggtaca

SEQ ID NO: 50178 - DNA, 20 bp, synthetic construct
  misc_feature 1..20: note = Description of Artificial Sequence: Synthetic oligonucleotide
  misc_feature 1..20: note = Target: SCN10A; (-) strand; PAM type: YTN; PAM sequence: CTC
  source 1..20: mol_type = other DNA
aggaaggcatcctctccctc

SEQ ID NO: 50179 - DNA, 20 bp, synthetic construct
  misc_feature 1..20: note = Description of Artificial Sequence: Synthetic oligonucleotide
  misc_feature 1..20: note = Target: SCN10A; (-) strand; PAM type: YTN; PAM sequence: TTG
  source 1..20: mol_type = other DNA
gagcccactcaggaaggcat

SEQ ID NO: 50180 - DNA, 20 bp, synthetic construct
  misc_feature 1..20: note = Description of Artificial Sequence: Synthetic oligonucleotide
  misc_feature 1..20: note = Target: SCN10A; (-) strand; PAM type: YTN; PAM sequence: TTA
  source 1..20: mol_type = other DNA
ttggagcccactcaggaagg

SEQ ID NO: 50181 - DNA, 20 bp, synthetic construct
  misc_feature 1..20: note = Description of Artificial Sequence: Synthetic oligonucleotide
  misc_feature 1..20: note = Target: SCN10A; (-) strand; PAM type: YTN; PAM sequence: TTT
  source 1..20: mol_type = other DNA
attggagcccactcaggaag

SEQ ID NO: 50182 - DNA, 20 bp, synthetic construct
  misc_feature 1..20: note = Description of Artificial Sequence: Synthetic oligonucleotide
  misc_feature 1..20: note = Target: SCN10A; (-) strand; PAM type: YTN; PAM sequence: TTG
  source 1..20: mol_type = other DNA
atttattggagcccactcag

SEQ ID NO: 50183 - DNA, 20 bp, synthetic construct
  misc_feature 1..20: note = Description of Artificial Sequence: Synthetic oligonucleotide
  misc_feature 1..20: note = Target: SCN10A; (-) strand; PAM type: YTN; PAM sequence: CTA
  source 1..20: mol_type = other DNA
attgatttattggagcccac

SEQ ID NO: 50184 - DNA, 20 bp, synthetic construct
  misc_feature 1..20: note = Description of Artificial Sequence: Synthetic oligonucleotide
  misc_feature 1..20: note = Target: SCN10A; (-) strand; PAM type: YTN; PAM sequence: TTA
  source 1..20: mol_type = other DNA
atgctaattgatttattgga

SEQ ID NO: 50185 - DNA, 20 bp, synthetic construct
  misc_feature 1..20: note = Description of Artificial Sequence: Synthetic oligonucleotide
  misc_feature 1..20: note = Target: SCN10A; (-) strand; PAM type: YTN; PAM sequence: TTT
  source 1..20: mol_type = other DNA
aatgctaattgatttattgg

SEQ ID NO: 50186 - DNA, 20 bp, synthetic construct
  misc_feature 1..20: note = Description of Artificial Sequence: Synthetic oligonucleotide
  misc_feature 1..20: note = Target: SCN10A; (-) strand; PAM type: YTN; PAM sequence: CTT
  source 1..20: mol_type = other DNA
taatgctaattgatttattg

SEQ ID NO: 50187 - DNA, 20 bp, synthetic construct
  misc_feature 1..20: note = Description of Artificial Sequence: Synthetic oligonucleotide
  misc_feature 1..20: note = Target: SCN10A; (-) strand; PAM type: YTN; PAM sequence: TTC
  source 1..20: mol_type = other DNA
tttaatgctaattgatttat

SEQ ID NO: 50188 - DNA, 20 bp, synthetic construct
  misc_feature 1..20: note = Description of Artificial Sequence: Synthetic oligonucleotide
  misc_feature 1..20: note = Target: SCN10A; (-) strand; PAM type: YTN; PAM sequence: CTT
  source 1..20: mol_type = other DNA
ctttaatgctaattgattta

SEQ ID NO: 50189 - DNA, 20 bp, synthetic construct
  misc_feature 1..20: note = Description of Artificial Sequence: Synthetic oligonucleotide
  misc_feature 1..20: note = Target: SCN10A; (-) strand; PAM type: YTN; PAM sequence: TTA
  source 1..20: mol_type = other DNA
agtacttctttaatgctaat

SEQ ID NO: 50190 - DNA, 20 bp, synthetic construct
  misc_feature 1..20: note = Description of Artificial Sequence: Synthetic oligonucleotide
  misc_feature 1..20: note = Target: SCN10A; (-) strand; PAM type: YTN; PAM sequence: TTT
  source 1..20: mol_type = other DNA
aagtacttctttaatgctaa

SEQ ID NO: 50191 - DNA, 20 bp, synthetic construct
  misc_feature 1..20: note = Description of Artificial Sequence: Synthetic oligonucleotide
  misc_feature 1..20: note = Target: SCN10A; (-) strand; PAM type: YTN; PAM sequence: CTG
  source 1..20: mol_type = other DNA
gcagaaagaacaacatgtat

SEQ ID NO: 50192 - DNA, 20 bp, synthetic construct
  misc_feature 1..20: note = Description of Artificial Sequence: Synthetic oligonucleotide
  misc_feature 1..20: note = Target: SCN10A; (-) strand; PAM type: YTN; PAM sequence: TTC
  source 1..20: mol_type = other DNA
ctggcagaaagaacaacatg

SEQ ID NO: 50193 - DNA, 20 bp, synthetic construct
  misc_feature 1..20: note = Description of Artificial Sequence: Synthetic oligonucleotide
  misc_feature 1..20: note = Target: SCN10A; (-) strand; PAM type: YTN; PAM sequence: TTT
  source 1..20: mol_type = other DNA
cctggcagaaagaacaacat

SEQ ID NO: 50194 - DNA, 20 bp, synthetic construct
  misc_feature 1..20: note = Description of Artificial Sequence: Synthetic oligonucleotide
  misc_feature 1..20: note = Target: SCN10A; (-) strand; PAM type: YTN; PAM sequence: TTT
  source 1..20: mol_type = other DNA
tcctggcagaaagaacaaca

SEQ ID NO: 50195 - DNA, 20 bp, synthetic construct
  misc_feature 1..20: note = Description of Artificial Sequence: Synthetic oligonucleotide
  misc_feature 1..20: note = Target: SCN10A; (-) strand; PAM type: YTN; PAM sequence: TTG
  source 1..20: mol_type = other DNA
gggaggagtattttcctggc

SEQ ID NO: 50196 - DNA, 20 bp, synthetic construct
  misc_feature 1..20: note = Description of Artificial Sequence: Synthetic oligonucleotide
  misc_feature 1..20: note = Target: SCN10A; (-) strand; PAM type: YTN; PAM sequence: TTT
  source 1..20: mol_type = other DNA
ggggaggagtattttcctgg

SEQ ID NO: 50197 - DNA, 20 bp, synthetic construct
  misc_feature 1..20: note = Description of Artificial Sequence: Synthetic oligonucleotide
  misc_feature 1..20: note = Target: SCN10A; (-) strand; PAM type: YTN; PAM sequence: TTG
  source 1..20: mol_type = other DNA
agagagtttggggaggagta

SEQ ID NO: 50198 - DNA, 20 bp, synthetic construct
  misc_feature 1..20: note = Description of Artificial Sequence: Synthetic oligonucleotide
  misc_feature 1..20: note = Target: SCN10A; (-) strand; PAM type: YTN; PAM sequence: CTT
  source 1..20: mol_type = other DNA
gagagagtttggggaggagt

SEQ ID NO: 50199 - DNA, 20 bp, synthetic construct
  misc_feature 1..20: note = Description of Artificial Sequence: Synthetic oligonucleotide
  misc_feature 1..20: note = Target: SCN10A; (-) strand; PAM type: YTN; PAM sequence: TTG
  source 1..20: mol_type = other DNA
aagacttgagagagtttggg

SEQ ID NO: 50200 - DNA, 20 bp, synthetic construct
  misc_feature 1..20: note = Description of Artificial Sequence: Synthetic oligonucleotide
  misc_feature 1..20: note = Target: SCN10A; (-) strand; PAM type: YTN; PAM sequence: CTA
  source 1..20: mol_type = other DNA
gtaattgaagacttgagaga

SEQ ID NO: 50201 - DNA, 20 bp, synthetic construct
  misc_feature 1..20: note = Description of Artificial Sequence: Synthetic oligonucleotide
  misc_feature 1..20: note = Target: SCN10A; (-) strand; PAM type: YTN; PAM sequence: TTC
  source 1..20: mol_type = other DNA
tagtaattgaagacttgaga

SEQ ID NO: 50202 - DNA, 20 bp, synthetic construct
  misc_feature 1..20: note = Description of Artificial Sequence: Synthetic oligonucleotide
  misc_feature 1..20: note = Target: SCN10A; (-) strand; PAM type: YTN; PAM sequence: CTT
  source 1..20: mol_type = other DNA
ctagtaattgaagacttgag

SEQ ID NO: 50203 - DNA, 20 bp, synthetic construct
  misc_feature 1..20: note = Description of Artificial Sequence: Synthetic oligonucleotide
  misc_feature 1..20: note = Target: SCN10A; (-) strand; PAM type: YTN; PAM sequence: TTC
  source 1..20: mol_type = other DNA
ttctagtaattgaagacttg

SEQ ID NO: 50204 - DNA, 20 bp, synthetic construct
  misc_feature 1..20: note = Description of Artificial Sequence: Synthetic oligonucleotide
  misc_feature 1..20: note = Target: SCN10A; (-) strand; PAM type: YTN; PAM sequence: TTG
  source 1..20: mol_type = other DNA
ggatcaacaataaatagcat

SEQ ID NO: 50205 - DNA, 20 bp, synthetic construct
  misc_feature 1..20: note = Description of Artificial Sequence: Synthetic oligonucleotide
  misc_feature 1..20: note = Target: SCN10A; (-) strand; PAM type: YTN; PAM sequence: CTG
  source 1..20: mol_type = other DNA
gaggaaggcataattgggat

SEQ ID NO: 50206 - DNA, 20 bp, synthetic construct
  misc_feature 1..20: note = Description of Artificial Sequence: Synthetic oligonucleotide
  misc_feature 1..20: note = Target: SCN10A; (-) strand; PAM type: YTN; PAM sequence: TTC
  source 1..20: mol_type = other DNA
ctggaggaaggcataattgg

SEQ ID NO: 50207 - DNA, 20 bp, synthetic construct
  misc_feature 1..20: note = Description of Artificial Sequence: Synthetic oligonucleotide
  misc_feature 1..20: note = Target: SCN10A; (-) strand; PAM type: YTN; PAM sequence: CTT
  source 1..20: mol_type = other DNA
cctggaggaaggcataattg

SEQ ID NO: 50208 - DNA, 20 bp, synthetic construct
  misc_feature 1..20: note = Description of Artificial Sequence: Synthetic oligonucleotide
  misc_feature 1..20: note = Target: SCN10A; (-) strand; PAM type: YTN; PAM sequence: CTG
  source 1..20: mol_type = other DNA
gataggtatcagaaaaggct

SEQ ID NO: 50209 - DNA, 20 bp, synthetic construct
  misc_feature 1..20: note = Description of Artificial Sequence: Synthetic oligonucleotide
  misc_feature 1..20: note = Target: SCN10A; (-) strand; PAM type: YTN; PAM sequence: TTA
  source 1..20: mol_type = other DNA
tggggctggataggtatcag

SEQ ID NO: 50210 - DNA, 20 bp, synthetic construct
  misc_feature 1..20: note = Description of Artificial Sequence: Synthetic oligonucleotide
  misc_feature 1..20: note = Target: SCN10A; (-) strand; PAM type: YTN; PAM sequence: CTT
  source 1..20: mol_type = other DNA
atggggctggataggtatca

SEQ ID NO: 50211 - DNA, 20 bp, synthetic construct
  misc_feature 1..20: note = Description of Artificial Sequence: Synthetic oligonucleotide
  misc_feature 1..20: note = Target: SCN10A; (-) strand; PAM type: YTN; PAM sequence: CTC
  source 1..20: mol_type = other DNA
ttatggggctggataggtat

SEQ ID NO: 50212 - DNA, 20 bp, synthetic construct
  misc_feature 1..20: note = Description of Artificial Sequence: Synthetic oligonucleotide
  misc_feature 1..20: note = Target: SCN10A; (-) strand; PAM type: YTN; PAM sequence: TTG
  source 1..20: mol_type = other DNA
agaatcagggaagaaacatc

SEQ ID NO: 50213 - DNA, 20 bp, synthetic construct
  misc_feature 1..20: note = Description of Artificial Sequence: Synthetic oligonucleotide
  misc_feature 1..20: note = Target: SCN10A; (-) strand; PAM type: YTN; PAM sequence: TTT
  source 1..20: mol_type = other DNA
gagaatcagggaagaaacat

SEQ ID NO: 50214 - DNA, 20 bp, synthetic construct
  misc_feature 1..20: note = Description of Artificial Sequence: Synthetic oligonucleotide
  misc_feature 1..20: note = Target: SCN10A; (-) strand; PAM type: YTN; PAM sequence: TTT
  source 1..20: mol_type = other DNA
tgagaatcagggaagaaaca

SEQ ID NO: 50215 - DNA, 20 bp, synthetic construct
  misc_feature 1..20: note = Description of Artificial Sequence: Synthetic oligonucleotide
  misc_feature 1..20: note = Target: SCN10A; (-) strand; PAM type: YTN; PAM sequence: TTA
  source 1..20: mol_type = other DNA
gagacacatacatggtgttt

SEQ ID NO: 50216 - DNA, 20 bp, synthetic construct
  misc_feature 1..20: note = Description of Artificial Sequence: Synthetic oligonucleotide
  misc_feature 1..20: note = Target: SCN10A; (-) strand; PAM type: YTN; PAM sequence: TTA
  source 1..20: mol_type = other DNA
aatagtgtattagagacaca

SEQ ID NO: 50217 - DNA, 20 bp, synthetic construct
  misc_feature 1..20: note = Description of Artificial Sequence: Synthetic oligonucleotide
  misc_feature 1..20: note = Target: SCN10A; (-) strand; PAM type: YTN; PAM sequence: CTA
  source 1..20: mol_type = other DNA
tgtgttaaatagtgtattag

SEQ ID NO: 50218 - DNA, 20 bp, synthetic construct
  misc_feature 1..20: note = Description of Artificial Sequence: Synthetic oligonucleotide
  misc_feature 1..20: note = Target: SCN10A; (-) strand; PAM type: YTN; PAM sequence: TTG
  source 1..20: mol_type = other DNA
ggtggaggaggcagatataa

SEQ ID NO: 50219 - DNA, 20 bp, synthetic construct
  misc_feature 1..20: note = Description of Artificial Sequence: Synthetic oligonucleotide
  misc_feature 1..20: note = Target: SCN10A; (-) strand; PAM type: YTN; PAM sequence: TTT
  source 1..20: mol_type = other DNA
gggtggaggaggcagatata

SEQ ID NO: 50220 - DNA, 20 bp, synthetic construct
  misc_feature 1..20: note = Description of Artificial Sequence: Synthetic oligonucleotide
  misc_feature 1..20: note = Target: SCN10A; (-) strand; PAM type: YTN; PAM sequence: TTC
  source 1..20: mol_type = other DNA
catttgggtggaggaggcag

SEQ ID NO: 50221 - DNA, 20 bp, synthetic construct
  misc_feature 1..20: note = Description of Artificial Sequence: Synthetic oligonucleotide
  misc_feature 1..20: note = Target: SCN10A; (-) strand; PAM type: YTN; PAM sequence: TTT
  source 1..20: mol_type = other DNA
ccatttgggtggaggaggca

SEQ ID NO: 50222 - DNA, 20 bp, synthetic construct
  misc_feature 1..20: note = Description of Artificial Sequence: Synthetic oligonucleotide
  misc_feature 1..20: note = Target: SCN10A; (-) strand; PAM type: YTN; PAM sequence: CTA
  source 1..20: mol_type = other DNA
aggatttccatttgggtgga

SEQ ID NO: 50223 - DNA, 20 bp, synthetic construct
  misc_feature 1..20: note = Description of Artificial Sequence: Synthetic oligonucleotide
  misc_feature 1..20: note = Target: SCN10A; (-) strand; PAM type: YTN; PAM sequence: TTC
  source 1..20: mol_type = other DNA
cctaaggatttccatttggg

SEQ ID NO: 50224 - DNA, 20 bp, synthetic construct
  misc_feature 1..20: note = Description of Artificial Sequence: Synthetic oligonucleotide
  misc_feature 1..20: note = Target: SCN10A; (-) strand; PAM type: YTN; PAM sequence: TTT
  source 1..20: mol_type = other DNA
ccctaaggatttccatttgg

SEQ ID NO: 50225 - DNA, 20 bp, synthetic construct
  misc_feature 1..20: note = Description of Artificial Sequence: Synthetic oligonucleotide
  misc_feature 1..20: note = Target: SCN10A; (-) strand; PAM type: YTN; PAM sequence: TTT
  source 1..20: mol_type = other DNA
tccctaaggatttccatttg

SEQ ID NO: 50226 - DNA, 20 bp, synthetic construct
  misc_feature 1..20: note = Description of Artificial Sequence: Synthetic oligonucleotide
  misc_feature 1..20: note = Target: SCN10A; (-) strand; PAM type: YTN; PAM sequence: CTT
  source 1..20: mol_type = other DNA
ttccctaaggatttccattt

SEQ ID NO: 50227 - DNA, 20 bp, synthetic construct
  misc_feature 1..20: note = Description of Artificial Sequence: Synthetic oligonucleotide
  misc_feature 1..20: note = Target: SCN10A; (-) strand; PAM type: YTN; PAM sequence: TTC
  source 1..20: mol_type = other DNA
ttttccctaaggatttccat

SEQ ID NO: 50228 - DNA, 20 bp, synthetic construct
  misc_feature 1..20: note = Description of Artificial Sequence: Synthetic oligonucleotide
  misc_feature 1..20: note = Target: SCN10A; (-) strand; PAM type: YTN; PAM sequence: CTA
  source 1..20: mol_type = other DNA
gaacatgttcttttccctaa

SEQ ID NO: 50229 - DNA, 20 bp, synthetic construct
  misc_feature 1..20: note = Description of Artificial Sequence: Synthetic oligonucleotide
  misc_feature 1..20: note = Target: SCN10A; (-) strand; PAM type: YTN; PAM sequence: TTG
  source 1..20: mol_type = other DNA
gtataaagagatgactagaa

SEQ ID NO: 50230 - DNA, 20 bp, synthetic construct
  misc_feature 1..20: note = Description of Artificial Sequence: Synthetic oligonucleotide
  misc_feature 1..20: note = Target: SCN10A; (-) strand; PAM type: YTN; PAM sequence: CTT
  source 1..20: mol_type = other DNA
ggtataaagagatgactaga

SEQ ID NO: 50231 - DNA, 20 bp, synthetic construct
  misc_feature 1..20: note = Description of Artificial Sequence: Synthetic oligonucleotide
  misc_feature 1..20: note = Target: SCN10A; (-) strand; PAM type: YTN; PAM sequence: CTA
  source 1..20: mol_type = other DNA
ggtgcttggtataaagagat

SEQ ID NO: 50232 - DNA, 20 bp, synthetic construct
  misc_feature 1..20: note = Description of Artificial Sequence: Synthetic oligonucleotide
  misc_feature 1..20: note = Target: SCN10A; (-) strand; PAM type: YTN; PAM sequence: TTC
  source 1..20: mol_type = other DNA
aacaatactaggtgcttggt

SEQ ID NO: 50233 - DNA, 20 bp, synthetic construct
  misc_feature 1..20: note = Description of Artificial Sequence: Synthetic oligonucleotide
  misc_feature 1..20: note = Target: SCN10A; (-) strand; PAM type: YTN; PAM sequence: TTC
  source 1..20: mol_type = other DNA
attcaacaatactaggtgct

SEQ ID NO: 50234 - DNA, 20 bp, synthetic construct
  misc_feature 1..20: note = Description of Artificial Sequence: Synthetic oligonucleotide
  misc_feature 1..20: note = Target: SCN10A; (-) strand; PAM type: YTN; PAM sequence: TTG
  source 1..20: mol_type = other DNA
ttcattcaacaatactaggt

SEQ ID NO: 50235 - DNA, 20 bp, synthetic construct
  misc_feature 1..20: note = Description of Artificial Sequence: Synthetic oligonucleotide
  misc_feature 1..20: note = Target: SCN10A; (-) strand; PAM type: YTN; PAM sequence: CTT
  source 1..20: mol_type = other DNA
gttcattcaacaatactagg

SEQ ID NO: 50236 - DNA, 20 bp, synthetic construct
  misc_feature 1..20: note = Description of Artificial Sequence: Synthetic oligonucleotide
  misc_feature 1..20: note = Target: SCN10A; (-) strand; PAM type: YTN; PAM sequence: CTG
  source 1..20: mol_type = other DNA
taacttgttcattcaacaat

SEQ ID NO: 50237 - DNA, 20 bp, synthetic construct
  misc_feature 1..20: note = Description of Artificial Sequence: Synthetic oligonucleotide
  misc_feature 1..20: note = Target: SCN10A; (-) strand; PAM type: YTN; PAM sequence: TTC
  source 1..20: mol_type = other DNA
aaagggaaaaaagaggagct

SEQ ID NO: 50238 - DNA, 20 bp, synthetic construct
  misc_feature 1..20: note = Description of Artificial Sequence: Synthetic oligonucleotide
  misc_feature 1..20: note = Target: SCN10A; (-) strand; PAM type: YTN; PAM sequence: TTT
  source 1..20: mol_type = other DNA
caaagggaaaaaagaggagc

SEQ ID NO: 50239 - DNA, 20 bp, synthetic construct
  misc_feature 1..20: note = Description of Artificial Sequence: Synthetic oligonucleotide
  misc_feature 1..20: note = Target: SCN10A; (-) strand; PAM type: YTN; PAM sequence: CTT
  source 1..20: mol_type = other DNA
tcaaagggaaaaaagaggag

SEQ ID NO: 50240 - DNA, 20 bp, synthetic construct
  misc_feature 1..20: note = Description of Artificial Sequence: Synthetic oligonucleotide
  misc_feature 1..20: note = Target: SCN10A; (-) strand; PAM type: YTN; PAM sequence: TTA
  source 1..20: mol_type = other DNA
ctttcaaagggaaaaaagag

SEQ ID NO: 50241 - DNA, 20 bp, synthetic construct
  misc_feature 1..20: note = Description of Artificial Sequence: Synthetic oligonucleotide
  misc_feature 1..20: note = Target: SCN10A; (-) strand; PAM type: YTN; PAM sequence: CTT
  source 1..20: mol_type = other DNA
actttcaaagggaaaaaaga

SEQ ID NO: 50242 - DNA, 20 bp, synthetic construct
  misc_feature 1..20: note = Description of Artificial Sequence: Synthetic oligonucleotide
  misc_feature 1..20: note = Target: SCN10A; (-) strand; PAM type: YTN; PAM sequence: CTC
  source 1..20: mol_type = other DNA
cagtgatgcttactttcaaa

SEQ ID NO: 50243 - DNA, 20 bp, synthetic construct
  misc_feature 1..20: note = Description of Artificial Sequence: Synthetic oligonucleotide
  misc_feature 1..20: note = Target: SCN10A; (-) strand; PAM type: YTN; PAM sequence: CTC
  source 1..20: mol_type = other DNA
tccagtgatgcttactttca

SEQ ID NO: 50244 - DNA, 20 bp, synthetic construct
  misc_feature 1..20: note = Description of Artificial Sequence: Synthetic oligonucleotide
  misc_feature 1..20: note = Target: SCN10A; (-) strand; PAM type: YTN; PAM sequence: TTG
  source 1..20: mol_type = other DNA
tctctccagtgatgcttact

SEQ ID NO: 50245 - DNA, 20 bp, synthetic construct
  misc_feature 1..20: note = Description of Artificial Sequence: Synthetic oligonucleotide
  misc_feature 1..20: note = Target: SCN10A; (-) strand; PAM type: YTN; PAM sequence: CTT
  source 1..20: mol_type = other DNA
gtctctccagtgatgcttac

SEQ ID NO: 50246 - DNA, 20 bp, synthetic construct
  misc_feature 1..20: note = Description of Artificial Sequence: Synthetic oligonucleotide
  misc_feature 1..20: note = Target: SCN10A; (-) strand; PAM type: YTN; PAM sequence: TTG
  source 1..20: mol_type = other DNA
gtatgtgtgcttgtctctcc

SEQ ID NO: 50247 - DNA, 20 bp, synthetic construct
  misc_feature 1..20: note = Description of Artificial Sequence: Synthetic oligonucleotide
  misc_feature 1..20: note = Target: SCN10A; (-) strand; PAM type: YTN; PAM sequence: TTG
  source 1..20: mol_type = other DNA
gatgtccaataattggtatg

SEQ ID NO: 50248 - DNA, 20 bp, synthetic construct
  misc_feature 1..20: note = Description of Artificial Sequence: Synthetic oligonucleotide
  misc_feature 1..20: note = Target: SCN10A; (-) strand; PAM type: YTN; PAM sequence: CTT
  source 1..20: mol_type = other DNA
ggatgtccaataattggtat

SEQ ID NO: 50249 - DNA, 20 bp, synthetic construct
  misc_feature 1..20: note = Description of Artificial Sequence: Synthetic oligonucleotide
  misc_feature 1..20: note = Target: SCN10A; (-) strand; PAM type: YTN; PAM sequence: TTA
  source 1..20: mol_type = other DNA
gcacttggatgtccaataat

SEQ ID NO: 50250 - DNA, 20 bp, synthetic construct
  misc_feature 1..20: note = Description of Artificial Sequence: Synthetic oligonucleotide
  misc_feature 1..20: note = Target: SCN10A; (-) strand; PAM type: YTN; PAM sequence: CTG
  source 1..20: mol_type = other DNA
tcagccccacacagattagc

SEQ ID NO: 50251 - DNA, 20 bp, synthetic construct
  misc_feature 1..20: note = Description of Artificial Sequence: Synthetic oligonucleotide
  misc_feature 1..20: note = Target: SCN10A; (-) strand; PAM type: YTN; PAM sequence: TTC
  source 1..20: mol_type = other DNA
tgtcagccccacacagatta

SEQ ID NO: 50252 - DNA, 20 bp, synthetic construct
  misc_feature 1..20: note = Description of Artificial Sequence: Synthetic oligonucleotide
  misc_feature 1..20: note = Target: SCN10A; (-) strand; PAM type: YTN; PAM sequence: TTC
  source 1..20: mol_type = other DNA
ccccattctgtcagccccac

SEQ ID NO: 50253 - DNA, 20 bp, synthetic construct
  misc_feature 1..20: note = Description of Artificial Sequence: Synthetic oligonucleotide
  misc_feature 1..20: note = Target: SCN10A; (-) strand; PAM type: YTN; PAM sequence: TTT
  source 1..20: mol_type = other DNA
cccccattctgtcagcccca

SEQ ID NO: 50254 - DNA, 20 bp, synthetic construct
  misc_feature 1..20: note = Description of Artificial Sequence: Synthetic oligonucleotide
  misc_feature 1..20: note = Target: SCN10A; (-) strand; PAM type: YTN; PAM sequence: TTA
  source 1..20: mol_type = other DNA
atttcccccattctgtcagc

SEQ ID NO: 50255 - DNA, 20 bp, synthetic construct
  misc_feature 1..20: note = Description of Artificial Sequence: Synthetic oligonucleotide
  misc_feature 1..20: note = Target: SCN10A; (-) strand; PAM type: YTN; PAM sequence: TTT
  source 1..20: mol_type = other DNA
aatttcccccattctgtcag

SEQ ID NO: 50256 - DNA, 20 bp, synthetic construct
  misc_feature 1..20: note = Description of Artificial Sequence: Synthetic oligonucleotide
  misc_feature 1..20: note = Target: SCN10A; (-) strand; PAM type: YTN; PAM sequence: CTT
  source 1..20: mol_type = other DNA
taatttcccccattctgtca

SEQ ID NO: 50257 - DNA, 20 bp, synthetic construct
  misc_feature 1..20: note = Description of Artificial Sequence: Synthetic oligonucleotide
  misc_feature 1..20: note = Target: SCN10A; (-) strand; PAM type: YTN; PAM sequence: TTG
  source 1..20: mol_type = other DNA
ggctttaatttcccccattc

SEQ ID NO: 50258 - DNA, 20 bp, synthetic construct
  misc_feature 1..20: note = Description of Artificial Sequence: Synthetic oligonucleotide
  misc_feature 1..20: note = Target: SCN10A; (-) strand; PAM type: YTN; PAM sequence: CTG
  source 1..20: mol_type = other DNA
aattgggctttaatttcccc

SEQ ID NO: 50259 - DNA, 20 bp, synthetic construct
  misc_feature 1..20: note = Description of Artificial Sequence: Synthetic oligonucleotide
  misc_feature 1..20: note = Target: SCN10A; (-) strand; PAM type: YTN; PAM sequence: TTC
  source 1..20: mol_type = other DNA
catggaaatgtcaatgacac

SEQ ID NO: 50260 - DNA, 20 bp, synthetic construct
  misc_feature 1..20: note = Description of Artificial Sequence: Synthetic oligonucleotide
  misc_feature 1..20: note = Target: SCN10A; (-) strand; PAM type: YTN; PAM sequence: CTT
  source 1..20: mol_type = other DNA
ccatggaaatgtcaatgaca

SEQ ID NO: 50261 - DNA, 20 bp, synthetic construct
  misc_feature 1..20: note = Description of Artificial Sequence: Synthetic oligonucleotide
  misc_feature 1..20: note = Target: SCN10A; (-) strand; PAM type: YTN; PAM sequence: TTC
  source 1..20: mol_type = other DNA
agacaatcacagaacaggat

SEQ ID NO: 50262 - DNA, 20 bp, synthetic construct
  misc_feature 1..20: note = Description of Artificial Sequence: Synthetic oligonucleotide
  misc_feature 1..20: note = Target: SCN10A; (-) strand; PAM type: YTN; PAM sequence: CTG
  source 1..20: mol_type = other DNA
gcatacatggggcacagttc

SEQ ID NO: 50263 - DNA, 20 bp, synthetic construct
  misc_feature 1..20: note = Description of Artificial Sequence: Synthetic oligonucleotide
  misc_feature 1..20: note = Target: SCN10A; (-) strand; PAM type: YTN; PAM sequence: TTG
  source 1..20: mol_type = other DNA
agcagcacctggcatacatg

SEQ ID NO: 50264 - DNA, 20 bp, synthetic construct
  misc_feature 1..20: note = Description of Artificial Sequence: Synthetic oligonucleotide
  misc_feature 1..20: note = Target: SCN10A; (-) strand; PAM type: YTN; PAM sequence: TTT
  source 1..20: mol_type = other DNA
gagcagcacctggcatacat

SEQ ID NO: 50265 - DNA, 20 bp, synthetic construct
  misc_feature 1..20: note = Description of Artificial Sequence: Synthetic oligonucleotide
  misc_feature 1..20: note = Target: SCN10A; (-) strand; PAM type: YTN; PAM sequence: TTT
  source 1..20: mol_type = other DNA
tgagcagcacctggcataca

SEQ ID NO: 50266 - DNA, 20 bp, synthetic construct
  misc_feature 1..20: note = Description of Artificial Sequence: Synthetic oligonucleotide
  misc_feature 1..20: note = Target: SCN10A; (-) strand; PAM type: YTN; PAM sequence: CTT
  source 1..20: mol_type = other DNA
ttgagcagcacctggcatac

SEQ ID NO: 50267 - DNA, 20 bp, synthetic construct
  misc_feature 1..20: note = Description of Artificial Sequence: Synthetic oligonucleotide
  misc_feature 1..20: note = Target: SCN10A; (-) strand; PAM type: YTN; PAM sequence: TTG
  source 1..20: mol_type = other DNA
ccccttttgagcagcacctg

SEQ ID NO: 50268 - DNA, 20 bp, synthetic construct
  misc_feature 1..20: note = Description of Artificial Sequence: Synthetic oligonucleotide
  misc_feature 1..20: note = Target: SCN10A; (-) strand; PAM type: YTN; PAM sequence: TTT
  source 1..20: mol_type = other DNA
gccccttttgagcagcacct

SEQ ID NO: 50269 - DNA, 20 bp, synthetic construct
  misc_feature 1..20: note = Description of Artificial Sequence: Synthetic oligonucleotide
  misc_feature 1..20: note = Target: SCN10A; (-) strand; PAM type: YTN; PAM sequence: CTT
  source 1..20: mol_type = other DNA
tgccccttttgagcagcacc

SEQ ID NO: 50270 - DNA, 20 bp, synthetic construct
  misc_feature 1..20: note = Description of Artificial Sequence: Synthetic oligonucleotide
  misc_feature 1..20: note = Target: SCN10A; (-) strand; PAM type: YTN; PAM sequence: TTG
  source 1..20: mol_type = other DNA
ctttgccccttttgagcagc

SEQ ID NO: 50271 - DNA, 20 bp, synthetic construct
  misc_feature 1..20: note = Description of Artificial Sequence: Synthetic oligonucleotide
  misc_feature 1..20: note = Target: SCN10A; (-) strand; PAM type: YTN; PAM sequence: CTT
  source 1..20: mol_type = other DNA
gctttgccccttttgagcag

SEQ ID NO: 50272 - DNA, 20 bp, synthetic construct
  misc_feature 1..20: note = Description of Artificial Sequence: Synthetic oligonucleotide
  misc_feature 1..20: note = Target: SCN10A; (-) strand; PAM type: YTN; PAM sequence: TTC
  source 1..20: mol_type = other DNA
ttgctttgccccttttgagc

SEQ ID NO: 50273 - DNA, 20 bp, synthetic construct
  misc_feature 1..20: note = Description of Artificial Sequence: Synthetic oligonucleotide
  misc_feature 1..20: note = Target: SCN10A; (-) strand; PAM type: YTN; PAM sequence: TTT
  source 1..20: mol_type = other DNA
cttgctttgccccttttgag

SEQ ID NO: 50274 - DNA, 20 bp, synthetic construct
  misc_feature 1..20: note = Description of Artificial Sequence: Synthetic oligonucleotide
  misc_feature 1..20: note = Target: SCN10A; (-) strand; PAM type: YTN; PAM sequence: CTT
  source 1..20: mol_type = other DNA
tcttgctttgccccttttga

SEQ ID NO: 50275 - DNA, 20 bp, synthetic construct
  misc_feature 1..20: note = Description of Artificial Sequence: Synthetic oligonucleotide
  misc_feature 1..20: note = Target: SCN10A; (-) strand; PAM type: YTN; PAM sequence: CTC
  source 1..20: mol_type = other DNA
tttcttgctttgcccctttt

SEQ ID NO: 50276 - DNA, 20 bp, synthetic construct
  misc_feature 1..20: note = Description of Artificial Sequence: Synthetic oligonucleotide
  misc_feature 1..20: note = Target: SCN10A; (-) strand; PAM type: YTN; PAM sequence: CTC
  source 1..20: mol_type = other DNA
ctctttcttgctttgcccct

SEQ ID NO: 50277 - DNA, 20 bp, synthetic construct
  misc_feature 1..20: note = Description of Artificial Sequence: Synthetic oligonucleotide
  misc_feature 1..20: note = Target: SCN10A; (-) strand; PAM type: YTN; PAM sequence: CTG
  source 1..20: mol_type = other DNA
tgccctcctctttcttgctt

SEQ ID NO: 50278 - DNA, 20 bp, synthetic construct
  misc_feature 1..20: note = Description of Artificial Sequence: Synthetic oligonucleotide
  misc_feature 1..20: note = Target: SCN10A; (-) strand; PAM type: YTN; PAM sequence: CTG
  source 1..20: mol_type = other DNA
catctgtgccctcctctttc

SEQ ID NO: 50279 - DNA, 20 bp, synthetic construct
  misc_feature 1..20: note = Description of Artificial Sequence: Synthetic oligonucleotide
  misc_feature 1..20: note = Target: SCN10A; (-) strand; PAM type: YTN; PAM sequence: TTA
  source 1..20: mol_type = other DNA
tctgcatctgtgccctcctc

SEQ ID NO: 50280 - DNA, 20 bp, synthetic construct
  misc_feature 1..20: note = Description of Artificial Sequence: Synthetic oligonucleotide
  misc_feature 1..20: note = Target: SCN10A; (-) strand; PAM type: YTN; PAM sequence: TTT
  source 1..20: mol_type = other DNA
atctgcatctgtgccctcct

SEQ ID NO: 50281 - DNA, 20 bp, synthetic construct
  misc_feature 1..20: note = Description of Artificial Sequence: Synthetic oligonucleotide
  misc_feature 1..20: note = Target: SCN10A; (-) strand; PAM type: YTN; PAM sequence: TTC
  source 1..20: mol_type = other DNA
agcatttatctgcatctgtg

SEQ ID NO: 50282 - DNA, 20 bp, synthetic construct
  misc_feature 1..20: note = Description of Artificial Sequence: Synthetic oligonucleotide
  misc_feature 1..20: note = Target: SCN10A; (-) strand; PAM type: YTN; PAM sequence: CTT
  source 1..20: mol_type = other DNA
cagcatttatctgcatctgt

SEQ ID NO: 50283 - DNA, 20 bp, synthetic construct
  misc_feature 1..20: note = Description of Artificial Sequence: Synthetic oligonucleotide
  misc_feature 1..20: note = Target: SCN10A; (-) strand; PAM type: YTN; PAM sequence: CTC
  source 1..20: mol_type = other DNA
atgacacatccacacttcag

SEQ ID NO: 50284 - DNA, 20 bp, synthetic construct
  misc_feature 1..20: note = Description of Artificial Sequence: Synthetic oligonucleotide
  misc_feature 1..20: note = Target: SCN10A; (-) strand; PAM type: YTN; PAM sequence: CTG
  source 1..20: mol_type = other DNA
acctcatgacacatccacac

SEQ ID NO: 50285 - DNA, 20 bp, synthetic construct
  misc_feature 1..20: note = Description of Artificial Sequence: Synthetic oligonucleotide
  misc_feature 1..20: note = Target: SCN10A; (-) strand; PAM type: YTN; PAM sequence: TTG
  source 1..20: mol_type = other DNA
catgcacactgacctcatga

SEQ ID NO: 50286 - DNA, 20 bp, synthetic construct
  misc_feature 1..20: note = Description of Artificial Sequence: Synthetic oligonucleotide
  misc_feature 1..20: note = Target: SCN10A; (-) strand; PAM type: YTN; PAM sequence: CTT
  source 1..20: mol_type = other DNA
gcatgcacactgacctcatg

SEQ ID NO: 50287 - DNA, 20 bp, synthetic construct
  misc_feature 1..20: note = Description of Artificial Sequence: Synthetic oligonucleotide
  misc_feature 1..20: note = Target: SCN10A; (-) strand; PAM type: YTN; PAM sequence: TTA
  source 1..20: mol_type = other DNA
tgtgtgcatatacaaacaca

SEQ ID NO: 50288 - DNA, 20 bp, synthetic construct
  misc_feature 1..20: note = Description of Artificial Sequence: Synthetic oligonucleotide
  misc_feature 1..20: note = Target: SCN10A; (-) strand; PAM type: YTN; PAM sequence: TTT
  source 1..20: mol_type = other DNA
atgtgtgcatatacaaacac

SEQ ID NO: 50289 - DNA, 20 bp, synthetic construct
  misc_feature 1..20: note = Description of Artificial Sequence: Synthetic oligonucleotide
  misc_feature 1..20: note = Target: SCN10A; (-) strand; PAM type: YTN; PAM sequence: CTC
  source 1..20: mol_type = other DNA
agatttatgtgtgcatatac

SEQ ID NO: 50290 - DNA, 20 bp, synthetic construct
  misc_feature 1..20: note = Description of Artificial Sequence: Synthetic oligonucleotide
  misc_feature 1..20: note = Target: SCN10A; (-) strand; PAM type: YTN; PAM sequence: CTC
  source 1..20: mol_type = other DNA
caaccctcagatttatgtgt

SEQ ID NO: 50291 - DNA, 20 bp, synthetic construct
  misc_feature 1..20: note = Description of Artificial Sequence: Synthetic oligonucleotide
  misc_feature 1..20: note = Target: SCN10A; (-) strand; PAM type: YTN; PAM sequence: CTC
  source 1..20: mol_type = other DNA
tccaaccctcagatttatgt

SEQ ID NO: 50292 - DNA, 20 bp, synthetic construct
  misc_feature 1..20: note = Description of Artificial Sequence: Synthetic oligonucleotide
  misc_feature 1..20: note = Target: SCN10A; (-) strand; PAM type: YTN; PAM sequence: TTG
  source 1..20: mol_type = other DNA
caataccatctctccaaccc

SEQ ID NO: 50293 - DNA, 20 bp, synthetic construct
  misc_feature 1..20: note = Description of Artificial Sequence: Synthetic oligonucleotide
  misc_feature 1..20: note = Target: SCN10A; (-) strand; PAM type: YTN; PAM sequence: TTT
  source 1..20: mol_type = other DNA
gcaataccatctctccaacc

SEQ ID NO: 50294 - DNA, 20 bp, synthetic construct
  misc_feature 1..20: note = Description of Artificial Sequence: Synthetic oligonucleotide
  misc_feature 1..20: note = Target: SCN10A; (-) strand; PAM type: YTN; PAM sequence: TTT
  source 1..20: mol_type = other DNA
tgcaataccatctctccaac

SEQ ID NO: 50295 - DNA, 20 bp, synthetic construct
  misc_feature 1..20: note = Description of Artificial Sequence: Synthetic oligonucleotide
  misc_feature 1..20: note = Target: SCN10A; (-) strand; PAM type: YTN; PAM sequence: TTT
  source 1..20: mol_type = other DNA
ttgcaataccatctctccaa

SEQ ID NO: 50296 - DNA, 20 bp, synthetic construct
  misc_feature 1..20: note = Description of Artificial Sequence: Synthetic oligonucleotide
  misc_feature 1..20: note = Target: SCN10A; (-) strand; PAM type: YTN; PAM sequence: TTT
  source 1..20: mol_type = other DNA
tttgcaataccatctctcca

SEQ ID NO: 50297 - DNA, 20 bp, synthetic construct
  misc_feature 1..20: note = Description of Artificial Sequence: Synthetic oligonucleotide
  misc_feature 1..20: note = Target: SCN10A; (-) strand; PAM type: YTN; PAM sequence: CTT
  source 1..20: mol_type = other DNA
ttttgcaataccatctctcc

SEQ ID NO: 50298 - DNA, 20 bp, synthetic construct
  misc_feature 1..20: note = Description of Artificial Sequence: Synthetic oligonucleotide
  misc_feature 1..20: note = Target: SCN10A; (-) strand; PAM type: YTN; PAM sequence: TTA
  source 1..20: mol_type = other DNA
cttttttgcaataccatctc

SEQ ID NO: 50299 - DNA, 20 bp, synthetic construct
  misc_feature 1..20: note = Description of Artificial Sequence: Synthetic oligonucleotide
  misc_feature 1..20: note = Target: SCN10A; (-) strand; PAM type: YTN; PAM sequence: TTT
  source 1..20: mol_type = other DNA
acttttttgcaataccatct

SEQ ID NO: 50300 - DNA, 20 bp, synthetic construct
  misc_feature 1..20: note = Description of Artificial Sequence: Synthetic oligonucleotide
  misc_feature 1..20: note = Target: SCN10A; (-) strand; PAM type: YTN; PAM sequence: TTT
  source 1..20: mol_type = other DNA
tacttttttgcaataccatc

SEQ ID NO: 50301 - DNA, 20 bp, synthetic construct
  misc_feature 1..20: note = Description of Artificial Sequence: Synthetic oligonucleotide
  misc_feature 1..20: note = Target: SCN10A; (-) strand; PAM type: YTN; PAM sequence: CTA
  source 1..20: mol_type = other DNA
agccgaaggatattttactt

SEQ ID NO: 50302 - DNA, 20 bp, synthetic construct
  misc_feature 1..20: note = Description of Artificial Sequence: Synthetic oligonucleotide
  misc_feature 1..20: note = Target: SCN10A; (-) strand; PAM type: YTN; PAM sequence: CTG
  source 1..20: mol_type = other DNA
tgctaagccgaaggatattt

SEQ ID NO: 50303 - DNA, 20 bp, synthetic construct
  misc_feature 1..20: note = Description of Artificial Sequence: Synthetic oligonucleotide
  misc_feature 1..20: note = Target: SCN10A; (-) strand; PAM type: YTN; PAM sequence: TTC
  source 1..20: mol_type = other DNA
ctgtgctaagccgaaggata

SEQ ID NO: 50304 - DNA, 20 bp, synthetic construct
  misc_feature 1..20: note = Description of Artificial Sequence: Synthetic oligonucleotide
  misc_feature 1..20: note = Target: SCN10A; (-) strand; PAM type: YTN; PAM sequence: TTT
  source 1..20: mol_type = other DNA
cctgtgctaagccgaaggat

SEQ ID NO: 50305 - DNA, 20 bp, synthetic construct
  misc_feature 1..20: note = Description of Artificial Sequence: Synthetic oligonucleotide
  misc_feature 1..20: note = Target: SCN10A; (-) strand; PAM type: YTN; PAM sequence: TTT
  source 1..20: mol_type = other DNA
tcctgtgctaagccgaagga

SEQ ID NO: 50306 - DNA, 20 bp, synthetic construct
  misc_feature 1..20: note = Description of Artificial Sequence: Synthetic oligonucleotide
  misc_feature 1..20: note = Target: SCN10A; (-) strand; PAM type: YTN; PAM sequence: CTT
  source 1..20: mol_type = other DNA
ttcctgtgctaagccgaagg

SEQ ID NO: 50307 - DNA, 20 bp, synthetic construct
  misc_feature 1..20: note = Description of Artificial Sequence: Synthetic oligonucleotide
  misc_feature 1..20: note = Target: SCN10A; (-) strand; PAM type: YTN; PAM sequence: CTC
  source 1..20: mol_type = other DNA
ttttcctgtgctaagccgaa

SEQ ID NO: 50308 - DNA, 20 bp, synthetic construct
  misc_feature 1..20: note = Description of Artificial Sequence: Synthetic oligonucleotide
  misc_feature 1..20: note = Target: SCN10A; (-) strand; PAM type: YTN; PAM sequence: CTC
  source 1..20: mol_type = other DNA
aatctcttttcctgtgctaa

SEQ ID NO: 50309 - DNA, 20 bp, synthetic construct
  misc_feature 1..20: note = Description of Artificial Sequence: Synthetic oligonucleotide
  misc_feature 1..20: note = Target: SCN10A; (-) strand; PAM type: YTN; PAM sequence: CTC
  source 1..20: mol_type = other DNA
tcaatctcttttcctgtgct

SEQ ID NO: 50310 - DNA, 20 bp, synthetic construct
  misc_feature 1..20: note = Description of Artificial Sequence: Synthetic oligonucleotide
  misc_feature 1..20: note = Target: SCN10A; (-) strand; PAM type: YTN; PAM sequence: TTC
  source 1..20: mol_type = other DNA
cctctcaatctcttttcctg

SEQ ID NO: 50311 - DNA, 20 bp, synthetic construct
  misc_feature 1..20: note = Description of Artificial Sequence: Synthetic oligonucleotide
  misc_feature 1..20: note = Target: SCN10A; (-) strand; PAM type: YTN; PAM sequence: CTT
  source 1..20: mol_type = other DNA
ccctctcaatctcttttcct

SEQ ID NO: 50312 - DNA, 20 bp, synthetic construct
  misc_feature 1..20: note = Description of Artificial Sequence: Synthetic oligonucleotide
  misc_feature 1..20: note = Target: SCN10A; (-) strand; PAM type: YTN; PAM sequence: CTC
  source 1..20: mol_type = other DNA
acttccctctcaatctcttt

SEQ ID NO: 50313 - DNA, 20 bp, synthetic construct
  misc_feature 1..20: note = Description of Artificial Sequence: Synthetic oligonucleotide
  misc_feature 1..20: note = Target: SCN10A; (-) strand; PAM type: YTN; PAM sequence: CTC
  source 1..20: mol_type = other DNA
tcacttccctctcaatctct

SEQ ID NO: 50314 - DNA, 20 bp, synthetic construct
  misc_feature 1..20: note = Description of Artificial Sequence: Synthetic oligonucleotide
  misc_feature 1..20: note = Target: SCN10A; (-) strand; PAM type: YTN; PAM sequence: TTA
  source 1..20: mol_type = other DNA
tacctctcacttccctctca

SEQ ID NO: 50315 - DNA, 20 bp, synthetic construct
  misc_feature 1..20: note = Description of Artificial Sequence: Synthetic oligonucleotide
  misc_feature 1..20: note = Target: SCN10A; (-) strand; PAM type: YTN; PAM sequence: TTT
  source 1..20: mol_type = other DNA
atacctctcacttccctctc

SEQ ID NO: 50316 - DNA, 20 bp, synthetic construct
  misc_feature 1..20: note = Description of Artificial Sequence: Synthetic oligonucleotide
  misc_feature 1..20: note = Target: SCN10A; (-) strand; PAM type: YTN; PAM sequence: CTT
  source 1..20: mol_type = other DNA
tatacctctcacttccctct

SEQ ID NO: 50317 - DNA, 20 bp, synthetic construct
  misc_feature 1..20: note = Description of Artificial Sequence: Synthetic oligonucleotide
  misc_feature 1..20: note = Target: SCN10A; (-) strand; PAM type: YTN; PAM sequence: TTA
  source 1..20: mol_type = other DNA
tgctttatacctctcacttc

SEQ ID NO: 50318 - DNA, 20 bp, synthetic construct
  misc_feature 1..20: note = Description of Artificial Sequence: Synthetic oligonucleotide
  misc_feature 1..20: note = Target: SCN10A; (-) strand; PAM type: YTN; PAM sequence: TTT
  source 1..20: mol_type = other DNA
atgctttatacctctcactt

SEQ ID NO: 50319 - DNA, 20 bp, synthetic construct
  misc_feature 1..20: note = Description of Artificial Sequence: Synthetic oligonucleotide
  misc_feature 1..20: note = Target: SCN10A; (-) strand; PAM type: YTN; PAM sequence: TTT
  source 1..20: mol_type = other DNA
tatgctttatacctctcact

SEQ ID NO: 50320 - DNA, 20 bp, synthetic construct
  misc_feature 1..20: note = Description of Artificial Sequence: Synthetic oligonucleotide
  misc_feature 1..20: note = Target: SCN10A; (-) strand; PAM type: YTN; PAM sequence: TTT
  source 1..20: mol_type = other DNA
ttatgctttatacctctcac

SEQ ID NO: 50321 - DNA, 20 bp, synthetic construct
  misc_feature 1..20: note = Description of Artificial Sequence: Synthetic oligonucleotide
  misc_feature 1..20: note = Target: SCN10A; (-) strand; PAM type: YTN; PAM sequence: TTT
  source 1..20: mol_type = other DNA
tttatgctttatacctctca

SEQ ID NO: 50322 - DNA, 20 bp, synthetic construct
  misc_feature 1..20: note = Description of Artificial Sequence: Synthetic oligonucleotide
  misc_feature 1..20: note = Target: SCN10A; (-) strand; PAM type: YTN; PAM sequence: TTT
  source 1..20: mol_type = other DNA
ttttatgctttatacctctc

SEQ ID NO: 50323 - DNA, 20 bp, synthetic construct
  misc_feature 1..20: note = Description of Artificial Sequence: Synthetic oligonucleotide
  misc_feature 1..20: note = Target: SCN10A; (-) strand; PAM type: YTN; PAM sequence: CTA
  source 1..20: mol_type = other DNA
tttttttatgctttatacct

SEQ ID NO: 50324 - DNA, 20 bp, synthetic construct
  misc_feature 1..20: note = Description of Artificial Sequence: Synthetic oligonucleotide
  misc_feature 1..20: note = Target: SCN10A; (-) strand; PAM type: YTN; PAM sequence: CTA
  source 1..20: mol_type = other DNA
acagtgtggaaaaggggatc

SEQ ID NO: 50325 - DNA, 20 bp, synthetic construct
  misc_feature 1..20: note = Description of Artificial Sequence: Synthetic oligonucleotide
  misc_feature 1..20: note = Target: SCN10A; (-) strand; PAM type: YTN; PAM sequence: CTC
  source 1..20: mol_type = other DNA
cacactaacagtgtggaaaa

SEQ ID NO: 50326 - DNA, 20 bp, synthetic construct
  misc_feature 1..20: note = Description of Artificial Sequence: Synthetic oligonucleotide
  misc_feature 1..20: note = Target: SCN10A; (-) strand; PAM type: YTN; PAM sequence: CTG
  source 1..20: mol_type = other DNA
tgtgggagggtggctccaca

SEQ ID NO: 50327 - DNA, 20 bp, synthetic construct
  misc_feature 1..20: note = Description of Artificial Sequence: Synthetic oligonucleotide
  misc_feature 1..20: note = Target: SCN10A; (-) strand; PAM type: YTN; PAM sequence: CTG
  source 1..20: mol_type = other DNA
ctgtgtgggagggtggctcc

SEQ ID NO: 50328 - DNA, 20 bp, synthetic construct
  misc_feature 1..20: note = Description of Artificial Sequence: Synthetic oligonucleotide
  misc_feature 1..20: note = Target: SCN10A; (-) strand; PAM type: YTN; PAM sequence: CTG
  source 1..20: mol_type = other DNA
acagataatatctgctgtgt

SEQ ID NO: 50329 - DNA, 20 bp, synthetic construct
  misc_feature 1..20: note = Description of Artificial Sequence: Synthetic oligonucleotide
  misc_feature 1..20: note = Target: SCN10A; (-) strand; PAM type: YTN; PAM sequence: CTA
  source 1..20: mol_type = other DNA
taggtctgacagataatatc

SEQ ID NO: 50330 - DNA, 20 bp, synthetic construct
  misc_feature 1..20: note = Description of Artificial Sequence: Synthetic oligonucleotide
  misc_feature 1..20: note = Target: SCN10A; (-) strand; PAM type: YTN; PAM sequence: TTC
  source 1..20: mol_type = other DNA
tataggtctgacagataata

SEQ ID NO: 50331 - DNA, 20 bp, synthetic construct
  misc_feature 1..20: note = Description of Artificial Sequence: Synthetic oligonucleotide
  misc_feature 1..20: note = Target: SCN10A; (-) strand; PAM type: YTN; PAM sequence: TTT
  source 1..20: mol_type = other DNA
ctataggtctgacagataat

SEQ ID NO: 50332 - DNA, 20 bp, synthetic construct
  misc_feature 1..20: note = Description of Artificial Sequence: Synthetic oligonucleotide
  misc_feature 1..20: note = Target: SCN10A; (-) strand; PAM type: YTN; PAM sequence: CTT
  source 1..20: mol_type = other DNA
tctataggtctgacagataa

SEQ ID NO: 50333 - DNA, 20 bp, synthetic construct
  misc_feature 1..20: note = Description of Artificial Sequence: Synthetic oligonucleotide
  misc_feature 1..20: note = Target: SCN10A; (-) strand; PAM type: YTN; PAM sequence: TTA
  source 1..20: mol_type = other DNA
ccccaaatatgccctttcta

SEQ ID NO: 50334 - DNA, 20 bp, synthetic construct
  misc_feature 1..20: note = Description of Artificial Sequence: Synthetic oligonucleotide
  misc_feature 1..20: note = Target: SCN10A; (-) strand; PAM type: YTN; PAM sequence: TTT
  source 1..20: mol_type = other DNA
accccaaatatgccctttct

SEQ ID NO: 50335 - DNA, 20 bp, synthetic construct
  misc_feature 1..20: note = Description of Artificial Sequence: Synthetic oligonucleotide
  misc_feature 1..20: note = Target: SCN10A; (-) strand; PAM type: YTN; PAM sequence: TTT
  source 1..20: mol_type = other DNA
taccccaaatatgccctttc

SEQ ID NO: 50336 - DNA, 20 bp, synthetic construct
  misc_feature 1..20: note = Description of Artificial Sequence: Synthetic oligonucleotide
  misc_feature 1..20: note = Target: SCN10A; (-) strand; PAM type: YTN; PAM sequence: CTT
  source 1..20: mol_type = other DNA
ttaccccaaatatgcccttt

SEQ ID NO: 50337 - DNA, 20 bp, synthetic construct
  misc_feature 1..20: note = Description of Artificial Sequence: Synthetic oligonucleotide
  misc_feature 1..20: note = Target: SCN10A; (-) strand; PAM type: YTN; PAM sequence: TTG
  source 1..20: mol_type = other DNA
aaagtccttttaccccaaat

SEQ ID NO: 50338 - DNA, 20 bp, synthetic construct
  misc_feature 1..20: note = Description of Artificial Sequence: Synthetic oligonucleotide
  misc_feature 1..20: note = Target: SCN10A; (-) strand; PAM type: YTN; PAM sequence: CTT
  source 1..20: mol_type = other DNA
gaaagtccttttaccccaaa

SEQ ID NO: 50339 - DNA, 20 bp, synthetic construct
  misc_feature 1..20: note = Description of Artificial Sequence: Synthetic oligonucleotide
  misc_feature 1..20: note = Target: SCN10A; (-) strand; PAM type: YTN; PAM sequence: CTG
  source 1..20: mol_type = other DNA
ccccttgaaagtccttttac

SEQ ID NO: 50340 - DNA, 20 bp, synthetic construct
  misc_feature 1..20: note = Description of Artificial Sequence: Synthetic oligonucleotide
  misc_feature 1..20: note = Target: SCN10A; (-) strand; PAM type: YTN; PAM sequence: TTC
  source 1..20: mol_type = other DNA
ctgccccttgaaagtccttt

SEQ ID NO: 50341 - DNA, 20 bp, synthetic construct
  misc_feature 1..20: note = Description of Artificial Sequence: Synthetic oligonucleotide
  misc_feature 1..20: note = Target: SCN10A; (-) strand; PAM type: YTN; PAM sequence: CTT
  source 1..20: mol_type = other DNA
cctgccccttgaaagtcctt

SEQ ID NO: 50342 - DNA, 20 bp, synthetic construct
  misc_feature 1..20: note = Description of Artificial Sequence: Synthetic oligonucleotide
  misc_feature 1..20: note = Target: SCN10A; (-) strand; PAM type: YTN; PAM sequence: CTC
  source 1..20: mol_type = other DNA
ccaccaccttcctgcccctt

SEQ ID NO: 50343 - DNA, 20 bp, synthetic construct
  misc_feature 1..20: note = Description of Artificial Sequence: Synthetic oligonucleotide
  misc_feature 1..20: note = Target: SCN10A; (-) strand; PAM type: YTN; PAM sequence: TTC
  source 1..20: mol_type = other DNA
ctcccaccaccttcctgccc

SEQ ID NO: 50344 - DNA, 20 bp, synthetic construct
  misc_feature 1..20: note = Description of Artificial Sequence: Synthetic oligonucleotide
  misc_feature 1..20: note = Target: SCN10A; (-) strand; PAM type: YTN; PAM sequence: CTT
  source 1..20: mol_type = other DNA
cctcccaccaccttcctgcc

SEQ ID NO: 50345 - DNA, 20 bp, synthetic construct
  misc_feature 1..20: note = Description of Artificial Sequence: Synthetic oligonucleotide
  misc_feature 1..20: note = Target: SCN10A; (-) strand; PAM type: YTN; PAM sequence: CTC
  source 1..20: mol_type = other DNA
gccacgcttcctcccaccac

SEQ ID NO: 50346 - DNA, 20 bp, synthetic construct
  misc_feature 1..20: note = Description of Artificial Sequence: Synthetic oligonucleotide
  misc_feature 1..20: note = Target: SCN10A; (-) strand; PAM type: YTN; PAM sequence: TTC
  source 1..20: mol_type = other DNA
ctcgccacgcttcctcccac

SEQ ID NO: 50347 - DNA, 20 bp, synthetic construct
  misc_feature 1..20: note = Description of Artificial Sequence: Synthetic oligonucleotide
  misc_feature 1..20: note = Target: SCN10A; (-) strand; PAM type: YTN; PAM sequence: TTT
  source 1..20: mol_type = other DNA
cctcgccacgcttcctccca

SEQ ID NO: 50348 - DNA, 20 bp, synthetic construct
  misc_feature 1..20: note = Description of Artificial Sequence: Synthetic oligonucleotide
  misc_feature 1..20: note = Target: SCN10A; (-) strand; PAM type: YTN; PAM sequence: CTT
  source 1..20: mol_type = other DNA
tcctcgccacgcttcctccc

SEQ ID NO: 50349 - DNA, 20 bp, synthetic construct
  misc_feature 1..20: note = Description of Artificial Sequence: Synthetic oligonucleotide
  misc_feature 1..20: note = Target: SCN10A; (-) strand; PAM type: YTN; PAM sequence: CTG
  source 1..20: mol_type = other DNA
caactttcctcgccacgctt

SEQ ID NO: 50350 - DNA, 20 bp, synthetic construct
  misc_feature 1..20: note = Description of Artificial Sequence: Synthetic oligonucleotide
  misc_feature 1..20: note = Target: SCN10A; (-) strand; PAM type: YTN; PAM sequence: TTG
  source 1..20: mol_type = other DNA
cactgcaactttcctcgcca

SEQ ID NO: 50351 - DNA, 20 bp, synthetic construct
  misc_feature 1..20: note = Description of Artificial Sequence: Synthetic oligonucleotide
  misc_feature 1..20: note = Target: SCN10A; (-) strand; PAM type: YTN; PAM sequence: TTT
  source 1..20: mol_type = other DNA
gcactgcaactttcctcgcc

SEQ ID NO: 50352 - DNA, 20 bp, synthetic construct
  misc_feature 1..20: note = Description of Artificial Sequence: Synthetic oligonucleotide
  misc_feature 1..20: note = Target: SCN10A; (-) strand; PAM type: YTN; PAM sequence: CTA
  source 1..20: mol_type = other DNA
aaatttgcactgcaactttc

SEQ ID NO: 50353 - DNA, 20 bp, synthetic construct
  misc_feature 1..20: note = Description of Artificial Sequence: Synthetic oligonucleotide
  misc_feature 1..20: note = Target: SCN10A; (-) strand; PAM type: YTN; PAM sequence: CTC
  source 1..20: mol_type = other DNA
taaaatttgcactgcaactt

SEQ ID NO: 50354 - DNA, 20 bp, synthetic construct
  misc_feature 1..20: note = Description of Artificial Sequence: Synthetic oligonucleotide
  misc_feature 1..20: note = Target: SCN10A; (-) strand; PAM type: YTN; PAM sequence: CTC
  source 1..20: mol_type = other DNA
ccactctaaaatttgcactg

SEQ ID NO: 50355 - DNA, 20 bp, synthetic construct
  misc_feature 1..20: note = Description of Artificial Sequence: Synthetic oligonucleotide
  misc_feature 1..20: note = Target: SCN10A; (-) strand; PAM type: YTN; PAM sequence: CTG
  source 1..20: mol_type = other DNA
cctcccactctaaaatttgc

SEQ ID NO: 50356 - DNA, 20 bp, synthetic construct
  misc_feature 1..20: note = Description of Artificial Sequence: Synthetic oligonucleotide
  misc_feature 1..20: note = Target: SCN10A; (-) strand; PAM type: YTN; PAM sequence: TTC
  source 1..20: mol_type = other DNA
tgcctcccactctaaaattt

SEQ ID NO: 50357 - DNA, 20 bp, synthetic construct
  misc_feature 1..20: note = Description of Artificial Sequence: Synthetic oligonucleotide
  misc_feature 1..20: note = Target: SCN10A; (-) strand; PAM type: YTN; PAM sequence: TTT
  source 1..20: mol_type = other DNA
ctgcctcccactctaaaatt

SEQ ID NO: 50358 - DNA, 20 bp, synthetic construct
  misc_feature 1..20: note = Description of Artificial Sequence: Synthetic oligonucleotide
  misc_feature 1..20: note = Target: SCN10A; (-) strand; PAM type: YTN; PAM sequence: CTT
  source 1..20: mol_type = other DNA
tctgcctcccactctaaaat

SEQ ID NO: 50359 - DNA, 20 bp, synthetic construct
  misc_feature 1..20: note = Description of Artificial Sequence: Synthetic oligonucleotide
  misc_feature 1..20: note = Target: SCN10A; (-) strand; PAM type: YTN; PAM sequence: TTC
  source 1..20: mol_type = other DNA
cccccataataactttctgc

SEQ ID NO: 50360 - DNA, 20 bp, synthetic construct
  misc_feature 1..20: note = Description of Artificial Sequence: Synthetic oligonucleotide
  misc_feature 1..20: note = Target: SCN10A; (-) strand; PAM type: YTN; PAM sequence: TTT
  source 1..20: mol_type = other DNA
ccccccataataactttctg

SEQ ID NO: 50361 - DNA, 20 bp, synthetic construct
  misc_feature 1..20: note = Description of Artificial Sequence: Synthetic oligonucleotide
  misc_feature 1..20: note = Target: SCN10A; (-) strand; PAM type: YTN; PAM sequence: TTT
  source 1..20: mol_type = other DNA
tccccccataataactttct

SEQ ID NO: 50362 - DNA, 20 bp, synthetic construct
  misc_feature 1..20: note = Description of Artificial Sequence: Synthetic oligonucleotide
  misc_feature 1..20: note = Target: SCN10A; (-) strand; PAM type: YTN; PAM sequence: CTT
  source 1..20: mol_type = other DNA
ttccccccataataactttc

SEQ ID NO: 50363 - DNA, 20 bp, synthetic construct
  misc_feature 1..20: note = Description of Artificial Sequence: Synthetic oligonucleotide
  misc_feature 1..20: note = Target: SCN10A; (-) strand; PAM type: YTN; PAM sequence: TTC
  source 1..20: mol_type = other DNA
ttttccccccataataactt

SEQ ID NO: 50364 - DNA, 20 bp, synthetic construct
  misc_feature 1..20: note = Description of Artificial Sequence: Synthetic oligonucleotide
  misc_feature 1..20: note = Target: SCN10A; (-) strand; PAM type: YTN; PAM sequence: CTG
  source 1..20: mol_type = other DNA
tagcaattcttttcccccca

SEQ ID NO: 50365 - DNA, 20 bp, synthetic construct
  misc_feature 1..20: note = Description of Artificial Sequence: Synthetic oligonucleotide
  misc_feature 1..20: note = Target: SCN10A; (-) strand; PAM type: YTN; PAM sequence: CTC
  source 1..20: mol_type = other DNA
agaccctgtagcaattcttt

SEQ ID NO: 50366 - DNA, 20 bp, synthetic construct
  misc_feature 1..20: note = Description of Artificial Sequence: Synthetic oligonucleotide
  misc_feature 1..20: note = Target: SCN10A; (-) strand; PAM type: YTN; PAM sequence: CTC
  source 1..20: mol_type = other DNA
acctcagaccctgtagcaat

SEQ ID NO: 50367 - DNA, 20 bp, synthetic construct
  misc_feature 1..20: note = Description of Artificial Sequence: Synthetic oligonucleotide
  misc_feature 1..20: note = Target: SCN10A; (-) strand; PAM type: YTN; PAM sequence: TTC
  source 1..20: mol_type = other DNA
agcacctcacctcagaccct

SEQ ID NO: 50368 - DNA, 20 bp, synthetic construct
  misc_feature 1..20: note = Description of Artificial Sequence: Synthetic oligonucleotide
  misc_feature 1..20: note = Target: SCN10A; (-) strand; PAM type: YTN; PAM sequence: CTT
  source 1..20: mol_type = other DNA
cagcacctcacctcagaccc

SEQ ID NO: 50369 - DNA, 20 bp, synthetic construct
  misc_feature 1..20: note = Description of Artificial Sequence: Synthetic oligonucleotide
  misc_feature 1..20: note = Target: SCN10A; (-) strand; PAM type: YTN; PAM sequence: CTG
  source 1..20: mol_type = other DNA
ggaatggcttcagcacctca

SEQ ID NO: 50370 - DNA, 20 bp, synthetic construct
  misc_feature 1..20: note = Description of Artificial Sequence: Synthetic oligonucleotide
  misc_feature 1..20: note = Target: SCN10A; (-) strand; PAM type: YTN; PAM sequence: CTG
  source 1..20: mol_type = other DNA
tgacacaatccagcctggga

SEQ ID NO: 50371 - DNA, 20 bp, synthetic construct
  misc_feature 1..20: note = Description of Artificial Sequence: Synthetic oligonucleotide
  misc_feature 1..20: note = Target: SCN10A; (-) strand; PAM type: YTN; PAM sequence: CTC
  source 1..20: mol_type = other DNA
tgtgacacaatccagcctgg

SEQ ID NO: 50372 - DNA, 20 bp, synthetic construct
  misc_feature 1..20: note = Description of Artificial Sequence: Synthetic oligonucleotide
  misc_feature 1..20: note = Target: SCN10A; (-) strand; PAM type: YTN; PAM sequence: TTC
  source 1..20: mol_type = other DNA
cagcacccatctctgtgaca

SEQ ID NO: 50373 - DNA, 20 bp, synthetic construct
  misc_feature 1..20: note = Description of Artificial Sequence: Synthetic oligonucleotide
  misc_feature 1..20: note = Target: SCN10A; (-) strand; PAM type: YTN; PAM sequence: TTT
  source 1..20: mol_type = other DNA
ccagcacccatctctgtgac

SEQ ID NO: 50374 - DNA, 20 bp, synthetic construct
  misc_feature 1..20: note = Description of Artificial Sequence: Synthetic oligonucleotide
  misc_feature 1..20: note = Target: SCN10A; (-) strand; PAM type: YTN; PAM sequence: TTA
  source 1..20: mol_type = other DNA
tcagaaaagtttccagcacc

SEQ ID NO: 50375 - DNA, 20 bp, synthetic construct
  misc_feature 1..20: note = Description of Artificial Sequence: Synthetic oligonucleotide
  misc_feature 1..20: note = Target: SCN10A; (-) strand; PAM type: YTN; PAM sequence: TTG
  source 1..20: mol_type = other DNA
ttatcagaaaagtttccagc

SEQ ID NO: 50376 - DNA, 20 bp, synthetic construct
  misc_feature 1..20: note = Description of Artificial Sequence: Synthetic oligonucleotide
  misc_feature 1..20: note = Target: SCN10A; (-) strand; PAM type: YTN; PAM sequence: CTG
  source 1..20: mol_type = other DNA
ttgttatcagaaaagtttcc

SEQ ID NO: 50377 - DNA, 20 bp, synthetic construct
  misc_feature 1..20: note = Description of Artificial Sequence: Synthetic oligonucleotide
  misc_feature 1..20: note = Target: SCN10A; (-) strand; PAM type: YTN; PAM sequence: CTG
  source 1..20: mol_type = other DNA
tcacctgttgttatcagaaa

SEQ ID NO: 50378 - DNA, 20 bp, synthetic construct
  misc_feature 1..20: note = Description of Artificial Sequence: Synthetic oligonucleotide
  misc_feature 1..20: note = Target: SCN10A; (-) strand; PAM type: YTN; PAM sequence: TTC
  source 1..20: mol_type = other DNA
aagctgtcacctgttgttat

SEQ ID NO: 50379 - DNA, 20 bp, synthetic construct
  misc_feature 1..20: note = Description of Artificial Sequence: Synthetic oligonucleotide
  misc_feature 1..20: note = Target: SCN10A; (-) strand; PAM type: YTN; PAM sequence: CTG
  source 1..20: mol_type = other DNA
caattcaagctgtcacctgt

SEQ ID NO: 50380 - DNA, 20 bp, synthetic construct
  misc_feature 1..20: note = Description of Artificial Sequence: Synthetic oligonucleotide
  misc_feature 1..20: note = Target: SCN10A; (-) strand; PAM type: YTN; PAM sequence: CTA
  source 1..20: mol_type = other DNA
aggtcctgcaattcaagctg

SEQ ID NO: 50381 - DNA, 20 bp, synthetic construct
  misc_feature 1..20: note = Description of Artificial Sequence: Synthetic oligonucleotide
  misc_feature 1..20: note = Target: SCN10A; (-) strand; PAM type: YTN; PAM sequence: TTC
  source 1..20: mol_type = other DNA
ctaaggtcctgcaattcaag

SEQ ID NO: 50382 - DNA, 20 bp, synthetic construct
  misc_feature 1..20: note = Description of Artificial Sequence: Synthetic oligonucleotide
  misc_feature 1..20: note = Target: SCN10A; (-) strand; PAM type: YTN; PAM sequence: CTT
  source 1..20: mol_type = other DNA
cctaaggtcctgcaattcaa

SEQ ID NO: 50383 - DNA, 20 bp, synthetic construct
  misc_feature 1..20: note = Description of Artificial Sequence: Synthetic oligonucleotide
  misc_feature 1..20: note = Target: SCN10A; (-) strand; PAM type: YTN; PAM sequence: CTC
  source 1..20: mol_type = other DNA
cttcctaaggtcctgcaatt

SEQ ID NO: 50384 - DNA, 20 bp, synthetic construct
  misc_feature 1..20: note = Description of Artificial Sequence: Synthetic oligonucleotide
  misc_feature 1..20: note = Target: SCN10A; (-) strand; PAM type: YTN; PAM sequence: CTG
  source 1..20: mol_type = other DNA
acctccttcctaaggtcctg

SEQ ID NO: 50385 - DNA, 20 bp, synthetic construct
  misc_feature 1..20: note = Description of Artificial Sequence: Synthetic oligonucleotide
  misc_feature 1..20: note = Target: SCN10A; (-) strand; PAM type: YTN; PAM sequence: TTC
  source 1..20: mol_type = other DNA
tgacctccttcctaaggtcc

SEQ ID NO: 50386 - DNA, 20 bp, synthetic construct
  misc_feature 1..20: note = Description of Artificial Sequence: Synthetic oligonucleotide
  misc_feature 1..20: note = Target: SCN10A; (-) strand; PAM type: YTN; PAM sequence: TTT
  source 1..20: mol_type = other DNA
ctgacctccttcctaaggtc

SEQ ID NO: 50387 - DNA, 20 bp, synthetic construct
  misc_feature 1..20: note = Description of Artificial Sequence: Synthetic oligonucleotide
  misc_feature 1..20: note = Target: SCN10A; (-) strand; PAM type: YTN; PAM sequence: TTG
  source 1..20: mol_type = other DNA
ggtataatttctgacctcct

SEQ ID NO: 50388 - DNA, 20 bp, synthetic construct
  misc_feature 1..20: note = Description of Artificial Sequence: Synthetic oligonucleotide
  misc_feature 1..20: note = Target: SCN10A; (-) strand; PAM type: YTN; PAM sequence: TTA
  source 1..20: mol_type = other DNA
ttgggtataatttctgacct

SEQ ID NO: 50389 - DNA, 20 bp, synthetic construct
  misc_feature 1..20: note = Description of Artificial Sequence: Synthetic oligonucleotide
  misc_feature 1..20: note = Target: SCN10A; (-) strand; PAM type: YTN; PAM sequence: TTA
  source 1..20: mol_type = other DNA
tataattattgggtataatt

SEQ ID NO: 50390 - DNA, 20 bp, synthetic construct
  misc_feature 1..20: note = Description of Artificial Sequence: Synthetic oligonucleotide
  misc_feature 1..20: note = Target: SCN10A; (-) strand; PAM type: YTN; PAM sequence: TTT
  source 1..20: mol_type = other DNA
atataattattgggtataat

SEQ ID NO: 50391 - DNA, 20 bp, synthetic construct
  misc_feature 1..20: note = Description of Artificial Sequence: Synthetic oligonucleotide
  misc_feature 1..20: note = Target: SCN10A; (-) strand; PAM type: YTN; PAM sequence: TTT
  source 1..20: mol_type = other DNA
tatataattattgggtataa

SEQ ID NO: 50392 - DNA, 20 bp, synthetic construct
  misc_feature 1..20: note = Description of Artificial Sequence: Synthetic oligonucleotide
  misc_feature 1..20: note = Target: SCN10A; (-) strand; PAM type: YTN; PAM sequence: TTC
  source 1..20: mol_type = other DNA
acaattttatataattattg

SEQ ID NO: 50393 - DNA, 20 bp, synthetic construct
  misc_feature 1..20: note = Description of Artificial Sequence: Synthetic oligonucleotide
  misc_feature 1..20: note = Target: SCN10A; (-) strand; PAM type: YTN; PAM sequence: CTT
  source 1..20: mol_type = other DNA
cacaattttatataattatt

SEQ ID NO: 50394 - DNA, 20 bp, synthetic construct
  misc_feature 1..20: note = Description of Artificial Sequence: Synthetic oligonucleotide
  misc_feature 1..20: note = Target: SCN10A; (-) strand; PAM type: YTN; PAM sequence: TTG
  source 1..20: mol_type = other DNA
acacttcacaattttatata

SEQ ID NO: 50395 - DNA, 20 bp, synthetic construct
  misc_feature 1..20: note = Description of Artificial Sequence: Synthetic oligonucleotide
  misc_feature 1..20: note = Target: SCN10A; (-) strand; PAM type: YTN; PAM sequence: TTA
  source 1..20: mol_type = other DNA
attgacacttcacaatttta

SEQ ID NO: 50396 - DNA, 20 bp, synthetic construct
  misc_feature 1..20: note = Description of Artificial Sequence: Synthetic oligonucleotide
  misc_feature 1..20: note = Target: SCN10A; (-) strand; PAM type: YTN; PAM sequence: TTT
  source 1..20: mol_type = other DNA
aattgacacttcacaatttt

SEQ ID NO: 50397 - DNA, 20 bp, synthetic construct
  misc_feature 1..20: note = Description of Artificial Sequence: Synthetic oligonucleotide
  misc_feature 1..20: note = Target: SCN10A; (-) strand; PAM type: YTN; PAM sequence: TTT
  source 1..20: mol_type = other DNA
taattgacacttcacaattt

SEQ ID NO: 50398 - DNA, 20 bp, synthetic construct
  misc_feature 1..20: note = Description of Artificial Sequence: Synthetic oligonucleotide
  misc_feature 1..20: note = Target: SCN10A; (-) strand; PAM type: YTN; PAM sequence: TTT
  source 1..20: mol_type = other DNA
ttaattgacacttcacaatt

SEQ ID NO: 50399 - DNA, 20 bp, synthetic construct
  misc_feature 1..20: note = Description of Artificial Sequence: Synthetic oligonucleotide
  misc_feature 1..20: note = Target: SCN10A; (-) strand; PAM type: YTN; PAM sequence: TTT
  source 1..20: mol_type = other DNA
tttaattgacacttcacaat

SEQ ID NO: 50400 - DNA, 20 bp, synthetic construct
  misc_feature 1..20: note = Description of Artificial Sequence: Synthetic oligonucleotide
  misc_feature 1..20: note = Target: SCN10A; (-) strand; PAM type: YTN; PAM sequence: TTT
  source 1..20: mol_type = other DNA
ttttaattgacacttcacaa

SEQ ID NO: 50401 - DNA, 20 bp, synthetic construct
  misc_feature 1..20: note = Description of Artificial Sequence: Synthetic oligonucleotide
  misc_feature 1..20: note = Target: SCN10A; (-) strand; PAM type: YTN; PAM sequence: TTT
  source 1..20: mol_type = other DNA
tttttaattgacacttcaca

SEQ ID NO: 50402 - DNA, 20 bp, synthetic construct
  misc_feature 1..20: note = Description of Artificial Sequence: Synthetic oligonucleotide
  misc_feature 1..20: note = Target: SCN10A; (-) strand; PAM type: YTN; PAM sequence: TTA
  source 1..20: mol_type = other DNA
gttttttttaattgacactt

SEQ ID NO: 50403 - DNA, 20 bp, synthetic construct
  misc_feature 1..20: note = Description of Artificial Sequence: Synthetic oligonucleotide
  misc_feature 1..20: note = Target: SCN10A; (-) strand; PAM type: YTN; PAM sequence: CTT
  source 1..20: mol_type = other DNA
agttttttttaattgacact

SEQ ID NO: 50404 - DNA, 20 bp, synthetic construct
  misc_feature 1..20: note = Description of Artificial Sequence: Synthetic oligonucleotide
  misc_feature 1..20: note = Target: SCN10A; (-) strand; PAM type: YTN; PAM sequence: TTA
  source 1..20: mol_type = other DNA
cttagttttttttaattgac

SEQ ID NO: 50405 - DNA, 20 bp, synthetic construct
  misc_feature 1..20: note = Description of Artificial Sequence: Synthetic oligonucleotide
  misc_feature 1..20: note = Target: SCN10A; (-) strand; PAM type: YTN; PAM sequence: TTT
  source 1..20: mol_type = other DNA
acttagttttttttaattga

SEQ ID NO: 50406 - DNA, 20 bp, synthetic construct
  misc_feature 1..20: note = Description of Artificial Sequence: Synthetic oligonucleotide
  misc_feature 1..20: note = Target: SCN10A; (-) strand; PAM type: YTN; PAM sequence: TTT
  source 1..20: mol_type = other DNA
tacttagttttttttaattg

SEQ ID NO: 50407 - DNA, 20 bp, synthetic construct
  misc_feature 1..20: note = Description of Artificial Sequence: Synthetic oligonucleotide
  misc_feature 1..20: note = Target: SCN10A; (-) strand; PAM type: YTN; PAM sequence: TTT
  source 1..20: mol_type = other DNA
ttacttagttttttttaatt

SEQ ID NO: 50408 - DNA, 20 bp, synthetic construct
  misc_feature 1..20: note = Description of Artificial Sequence: Synthetic oligonucleotide
  misc_feature 1..20: note = Target: SCN10A; (-) strand; PAM type: YTN; PAM sequence: TTT
  source 1..20: mol_type = other DNA
tttacttagttttttttaat

SEQ ID NO: 50409 - DNA, 20 bp, synthetic construct
  misc_feature 1..20: note = Description of Artificial Sequence: Synthetic oligonucleotide
  misc_feature 1..20: note = Target: SCN10A; (-) strand; PAM type: YTN; PAM sequence: TTT
  source 1..20: mol_type = other DNA
ttttacttagttttttttaa

SEQ ID NO: 50410 - DNA, 20 bp, synthetic construct
  misc_feature 1..20: note = Description of Artificial Sequence: Synthetic oligonucleotide
  misc_feature 1..20: note = Target: SCN10A; (-) strand; PAM type: YTN; PAM sequence: TTA
  source 1..20: mol_type = other DNA
tttttttacttagttttttt

SEQ ID NO: 50411 - DNA, 20 bp, synthetic construct
  misc_feature 1..20: note = Description of Artificial Sequence: Synthetic oligonucleotide
  misc_feature 1..20: note = Target: SCN10A; (-) strand; PAM type: YTN; PAM sequence: TTT
  source 1..20: mol_type = other DNA
atttttttacttagtttttt

SEQ ID NO: 50412 - DNA, 20 bp, synthetic construct
  misc_feature 1..20: note = Description of Artificial Sequence: Synthetic oligonucleotide
  misc_feature 1..20: note = Target: SCN10A; (-) strand; PAM type: YTN; PAM sequence: TTT
  source 1..20: mol_type = other DNA
tatttttttacttagttttt

SEQ ID NO: 50413 - DNA, 20 bp, synthetic construct
  misc_feature 1..20: note = Description of Artificial Sequence: Synthetic oligonucleotide
  misc_feature 1..20: note = Target: SCN10A; (-) strand; PAM type: YTN; PAM sequence: TTT
  source 1..20: mol_type = other DNA
ttatttttttacttagtttt

SEQ ID NO: 50414 - DNA, 20 bp, synthetic construct
  misc_feature 1..20: note = Description of Artificial Sequence: Synthetic oligonucleotide
  misc_feature 1..20: note = Target: SCN10A; (-) strand; PAM type: YTN; PAM sequence: CTG
  source 1..20: mol_type = other DNA
atgcgtcgaggtggttttta

SEQ ID NO: 50415 - DNA, 20 bp, synthetic construct
  misc_feature 1..20: note = Description of Artificial Sequence: Synthetic oligonucleotide
  misc_feature 1..20: note = Target: SCN10A; (-) strand; PAM type: YTN; PAM sequence: TTC
  source 1..20: mol_type = other DNA
tgatgcgtcgaggtggtttt

SEQ ID NO: 50416 - DNA, 20 bp, synthetic construct
  misc_feature 1..20: note = Description of Artificial Sequence: Synthetic oligonucleotide
  misc_feature 1..20: note = Target: SCN10A; (-) strand; PAM type: YTN; PAM sequence: TTT
  source 1..20: mol_type = other DNA
ctgatgcgtcgaggtggttt

SEQ ID NO: 50417 - DNA, 20 bp, synthetic construct
  misc_feature 1..20: note = Description of Artificial Sequence: Synthetic oligonucleotide
  misc_feature 1..20: note = Target: SCN10A; (-) strand; PAM type: YTN; PAM sequence: TTT
  source 1..20: mol_type = other DNA
tctgatgcgtcgaggtggtt

SEQ ID NO: 50418 - DNA, 20 bp, synthetic construct
  misc_feature 1..20: note = Description of Artificial Sequence: Synthetic oligonucleotide
  misc_feature 1..20: note = Target: SCN10A; (-) strand; PAM type: YTN; PAM sequence: TTT
  source 1..20: mol_type = other DNA
ttctgatgcgtcgaggtggt

SEQ ID NO: 50419 - DNA, 20 bp, synthetic construct
  misc_feature 1..20: note = Description of Artificial Sequence: Synthetic oligonucleotide
  misc_feature 1..20: note = Target: SCN10A; (-) strand; PAM type: YTN; PAM sequence: TTT
  source 1..20: mol_type = other DNA
tttctgatgcgtcgaggtgg

SEQ ID NO: 50420 - DNA, 20 bp, synthetic construct
  misc_feature 1..20: note = Description of Artificial Sequence: Synthetic oligonucleotide
  misc_feature 1..20: note = Target: SCN10A; (-) strand; PAM type: YTN; PAM sequence: TTT
  source 1..20: mol_type = other DNA
ttttctgatgcgtcgaggtg

SEQ ID NO: 50421 - DNA, 20 bp, synthetic construct
  misc_feature 1..20: note = Description of Artificial Sequence: Synthetic oligonucleotide
  misc_feature 1..20: note = Target: SCN10A; (-) strand; PAM type: YTN; PAM sequence: TTT
  source 1..20: mol_type = other DNA
tttttctgatgcgtcgaggt

SEQ ID NO: 50422 - DNA, 20 bp, synthetic construct
  misc_feature 1..20: note = Description of Artificial Sequence: Synthetic oligonucleotide
  misc_feature 1..20: note = Target: SCN10A; (-) strand; PAM type: YTN; PAM sequence: TTT
  source 1..20: mol_type = other DNA
ttttttctgatgcgtcgagg

SEQ ID NO: 50423 - DNA, 20 bp, synthetic construct
  misc_feature 1..20: note = Description of Artificial Sequence: Synthetic oligonucleotide
  misc_feature 1..20: note = Target: SCN10A; (-) strand; PAM type: YTN; PAM sequence: TTT
  source 1..20: mol_type = other DNA
tttttttctgatgcgtcgag

SEQ ID NO: 50424 - DNA, 20 bp, synthetic construct
  misc_feature 1..20: note = Description of Artificial Sequence: Synthetic oligonucleotide
  misc_feature 1..20: note = Target: SCN10A; (-) strand; PAM type: YTN; PAM sequence: CTT
  source 1..20: mol_type = other DNA
ttttttttctgatgcgtcga

SEQ ID NO: 50425 - DNA, 20 bp, synthetic construct
  misc_feature 1..20: note = Description of Artificial Sequence: Synthetic oligonucleotide
  misc_feature 1..20: note = Target: SCN10A; (-) strand; PAM type: YTN; PAM sequence: TTC
  source 1..20: mol_type = other DNA
atgcaccttttttttttctg

SEQ ID NO: 50426 - DNA, 20 bp, synthetic construct
  misc_feature 1..20: note = Description of Artificial Sequence: Synthetic oligonucleotide
  misc_feature 1..20: note = Target: SCN10A; (-) strand; PAM type: YTN; PAM sequence: CTT
  source 1..20: mol_type = other DNA
catgcaccttttttttttct

SEQ ID NO: 50427 - DNA, 20 bp, synthetic construct
  misc_feature 1..20: note = Description of Artificial Sequence: Synthetic oligonucleotide
  misc_feature 1..20: note = Target: SCN10A; (-) strand; PAM type: YTN; PAM sequence: CTG
  source 1..20: mol_type = other DNA
agatccttcatgcacctttt

SEQ ID NO: 50428 - DNA, 20 bp, synthetic construct
  misc_feature 1..20: note = Description of Artificial Sequence: Synthetic oligonucleotide
  misc_feature 1..20: note = Target: SCN10A; (-) strand; PAM type: YTN; PAM sequence: CTG
  source 1..20: mol_type = other DNA
tccgtggtgctgagatcctt

SEQ ID NO: 50429 - DNA, 20 bp, synthetic construct
  misc_feature 1..20: note = Description of Artificial Sequence: Synthetic oligonucleotide
  misc_feature 1..20: note = Target: SCN10A; (-) strand; PAM type: YTN; PAM sequence: TTC
  source 1..20: mol_type = other DNA
cctgtccgtggtgctgagat

SEQ ID NO: 50430 - DNA, 20 bp, synthetic construct
  misc_feature 1..20: note = Description of Artificial Sequence: Synthetic oligonucleotide
  misc_feature 1..20: note = Target: SCN10A; (-) strand; PAM type: YTN; PAM sequence: CTA
  source 1..20: mol_type = other DNA
gagtgcaaggttccctgtcc

SEQ ID NO: 50431 - DNA, 20 bp, synthetic construct
  misc_feature 1..20: note = Description of Artificial Sequence: Synthetic oligonucleotide
  misc_feature 1..20: note = Target: SCN10A; (-) strand; PAM type: YTN; PAM sequence: TTC
  source 1..20: mol_type = other DNA
tagagtgcaaggttccctgt

SEQ ID NO: 50432 - DNA, 20 bp, synthetic construct
  misc_feature 1..20: note = Description of Artificial Sequence: Synthetic oligonucleotide
  misc_feature 1..20: note = Target: SCN10A; (-) strand; PAM type: YTN; PAM sequence: CTG
  source 1..20: mol_type = other DNA
cagttctagagtgcaaggtt

SEQ ID NO: 50433 - DNA, 20 bp, synthetic construct
  misc_feature 1..20: note = Description of Artificial Sequence: Synthetic oligonucleotide
  misc_feature 1..20: note = Target: SCN10A; (-) strand; PAM type: YTN; PAM sequence: CTG
  source 1..20: mol_type = other DNA
gtctgcagttctagagtgca

SEQ ID NO: 50434 - DNA, 20 bp, synthetic construct
  misc_feature 1..20: note = Description of Artificial Sequence: Synthetic oligonucleotide
  misc_feature 1..20: note = Target: SCN10A; (-) strand; PAM type: YTN; PAM sequence: CTC
  source 1..20: mol_type = other DNA
tggtctgcagttctagagtg

SEQ ID NO: 50435 - DNA, 20 bp, synthetic construct
  misc_feature 1..20: note = Description of Artificial Sequence: Synthetic oligonucleotide
  misc_feature 1..20: note = Target: SCN10A; (-) strand; PAM type: YTN; PAM sequence: CTG
  source 1..20: mol_type = other DNA
aggctctggtctgcagttct

SEQ ID NO: 50436 - DNA, 20 bp, synthetic construct
  misc_feature 1..20: note = Description of Artificial Sequence: Synthetic oligonucleotide
  misc_feature 1..20: note = Target: SCN10A; (-) strand; PAM type: YTN; PAM sequence: TTC
  source 1..20: mol_type = other DNA
tgaggctctggtctgcagtt

SEQ ID NO: 50437 - DNA, 20 bp, synthetic construct
  misc_feature 1..20: note = Description of Artificial Sequence: Synthetic oligonucleotide
  misc_feature 1..20: note = Target: SCN10A; (-) strand; PAM type: YTN; PAM sequence: CTT
  source 1..20: mol_type = other DNA
ctgaggctctggtctgcagt

SEQ ID NO: 50438 - DNA, 20 bp, synthetic construct
  misc_feature 1..20: note = Description of Artificial Sequence: Synthetic oligonucleotide
  misc_feature 1..20: note = Target: SCN10A; (-) strand; PAM type: YTN; PAM sequence: TTC
  source 1..20: mol_type = other DNA
cttctgaggctctggtctgc

SEQ ID NO: 50439 - DNA, 20 bp, synthetic construct
  misc_feature 1..20: note = Description of Artificial Sequence: Synthetic oligonucleotide
  misc_feature 1..20: note = Target: SCN10A; (-) strand; PAM type: YTN; PAM sequence: CTT
  source 1..20: mol_type = other DNA
ccttctgaggctctggtctg

SEQ ID NO: 50440 - DNA, 20 bp, synthetic construct
  misc_feature 1..20: note = Description of Artificial Sequence: Synthetic oligonucleotide
  misc_feature 1..20: note = Target: SCN10A; (-) strand; PAM type: YTN; PAM sequence: CTG
  source 1..20: mol_type = other DNA
cggacatcaaaggtcagctt

SEQ ID NO: 50441 - DNA, 20 bp, synthetic construct
  misc_feature 1..20: note = Description of Artificial Sequence: Synthetic oligonucleotide
  misc_feature 1..20: note = Target: SCN10A; (-) strand; PAM type: YTN; PAM sequence: TTA
  source 1..20: mol_type = other DNA
aggtgtctgcggacatcaaa

SEQ ID NO: 50442 - DNA, 20 bp, synthetic construct
  misc_feature 1..20: note = Description of Artificial Sequence: Synthetic oligonucleotide
  misc_feature 1..20: note = Target: SCN10A; (-) strand; PAM type: YTN; PAM sequence: CTT
  source 1..20: mol_type = other DNA
aaggtgtctgcggacatcaa

SEQ ID NO: 50443 - DNA, 20 bp, synthetic construct
  misc_feature 1..20: note = Description of Artificial Sequence: Synthetic oligonucleotide
  misc_feature 1..20: note = Target: SCN10A; (-) strand; PAM type: YTN; PAM sequence: CTG
  source 1..20: mol_type = other DNA
aacatgccaatcttaaggtg

SEQ ID NO: 50444 - DNA, 20 bp, synthetic construct
  misc_feature 1..20: note = Description of Artificial Sequence: Synthetic oligonucleotide
  misc_feature 1..20: note = Target: SCN10A; (-) strand; PAM type: YTN; PAM sequence: TTG
  source 1..20: mol_type = other DNA
taggaaaggtgggaagccca

SEQ ID NO: 50445 - DNA, 20 bp, synthetic construct
  misc_feature 1..20: note = Description of Artificial Sequence: Synthetic oligonucleotide
  misc_feature 1..20: note = Target: SCN10A; (-) strand; PAM type: YTN; PAM sequence: TTT
  source 1..20: mol_type = other DNA
gtaggaaaggtgggaagccc

SEQ ID NO: 50446 - DNA, 20 bp, synthetic construct
  misc_feature 1..20: note = Description of Artificial Sequence: Synthetic oligonucleotide
  misc_feature 1..20: note = Target: SCN10A; (-) strand; PAM type: YTN; PAM sequence: CTG
  source 1..20: mol_type = other DNA
gaggaagaaccccggtttgt

SEQ ID NO: 50447 - DNA, 20 bp, synthetic construct
  misc_feature 1..20: note = Description of Artificial Sequence: Synthetic oligonucleotide
  misc_feature 1..20: note = Target: SCN10A; (-) strand; PAM type: YTN; PAM sequence: TTC
  source 1..20: mol_type = other DNA
caagatgaggacactggagg

SEQ ID NO: 50448 - DNA, 20 bp, synthetic construct
  misc_feature 1..20: note = Description of Artificial Sequence: Synthetic oligonucleotide
  misc_feature 1..20: note = Target: SCN10A; (-) strand; PAM type: YTN; PAM sequence: TTG
  source 1..20: mol_type = other DNA
ggcaatcaaatgggtggtga

SEQ ID NO: 50449 - DNA, 20 bp, synthetic construct
  misc_feature 1..20: note = Description of Artificial Sequence: Synthetic oligonucleotide
  misc_feature 1..20: note = Target: SCN10A; (-) strand; PAM type: YTN; PAM sequence: TTC
  source 1..20: mol_type = other DNA
aggattgggcaatcaaatgg

SEQ ID NO: 50450 - DNA, 20 bp, synthetic construct
  misc_feature 1..20: note = Description of Artificial Sequence: Synthetic oligonucleotide
  misc_feature 1..20: note = Target: SCN10A; (-) strand; PAM type: YTN; PAM sequence: TTT
  source 1..20: mol_type = other DNA
caggattgggcaatcaaatg

SEQ ID NO: 50451 - DNA, 20 bp, synthetic construct
  misc_feature 1..20: note = Description of Artificial Sequence: Synthetic oligonucleotide
  misc_feature 1..20: note = Target: SCN10A; (-) strand; PAM type: YTN; PAM sequence: CTC
  source 1..20: mol_type = other DNA
ccaggtttcaggattgggca

SEQ ID NO: 50452 - DNA, 20 bp, synthetic construct
  misc_feature 1..20: note = Description of Artificial Sequence: Synthetic oligonucleotide
  misc_feature 1..20: note = Target: SCN10A; (-) strand; PAM type: YTN; PAM sequence: TTG
  source 1..20: mol_type = other DNA
actcccaggtttcaggattg

SEQ ID NO: 50453 - DNA, 20 bp, synthetic construct
  misc_feature 1..20: note = Description of Artificial Sequence: Synthetic oligonucleotide
  misc_feature 1..20: note = Target: SCN10A; (-) strand; PAM type: YTN; PAM sequence: TTT
  source 1..20: mol_type = other DNA
gactcccaggtttcaggatt

SEQ ID NO: 50454 - DNA, 20 bp, synthetic construct
  misc_feature 1..20: note = Description of Artificial Sequence: Synthetic oligonucleotide
  misc_feature 1..20: note = Target: SCN10A; (-) strand; PAM type: YTN; PAM sequence: CTG
  source 1..20: mol_type = other DNA
tggaaaaaggaaaggggagt

SEQ ID NO: 50455 - DNA, 20 bp, synthetic construct
  misc_feature 1..20: note = Description of Artificial Sequence: Synthetic oligonucleotide
  misc_feature 1..20: note = Target: SCN10A; (-) strand; PAM type: YTN; PAM sequence: TTG
  source 1..20: mol_type = other DNA
tggactgtggaaaaaggaaa

SEQ ID NO: 50456 - DNA, 20 bp, synthetic construct
  misc_feature 1..20: note = Description of Artificial Sequence: Synthetic oligonucleotide
  misc_feature 1..20: note = Target: SCN10A; (-) strand; PAM type: YTN; PAM sequence: TTG
  source 1..20: mol_type = other DNA
ggattgtggactgtggaaaa

SEQ ID NO: 50457 - DNA, 20 bp, synthetic construct
  misc_feature 1..20: note = Description of Artificial Sequence: Synthetic oligonucleotide
  misc_feature 1..20: note = Target: SCN10A; (-) strand; PAM type: YTN; PAM sequence: TTA
  source 1..20: mol_type = other DNA
gggaagtggatcaacaagat

SEQ ID NO: 50458 - DNA, 20 bp, synthetic construct
  misc_feature 1..20: note = Description of Artificial Sequence: Synthetic oligonucleotide
  misc_feature 1..20: note = Target: SCN10A; (-) strand; PAM type: YTN; PAM sequence: CTT
  source 1..20: mol_type = other DNA
agggaagtggatcaacaaga

SEQ ID NO: 50459 - DNA, 20 bp, synthetic construct
  misc_feature 1..20: note = Description of Artificial Sequence: Synthetic oligonucleotide
  misc_feature 1..20: note = Target: SCN10A; (-) strand; PAM type: YTN; PAM sequence: TTA
  source 1..20: mol_type = other DNA
taaggacaccttagggaagt

SEQ ID NO: 50460 - DNA, 20 bp, synthetic construct
  misc_feature 1..20: note = Description of Artificial Sequence: Synthetic oligonucleotide
  misc_feature 1..20: note = Target: SCN10A; (-) strand; PAM type: YTN; PAM sequence: TTA
  source 1..20: mol_type = other DNA
tagatggggaaaaggggtga

SEQ ID NO: 50461 - DNA, 20 bp, synthetic construct
  misc_feature 1..20: note = Description of Artificial Sequence: Synthetic oligonucleotide
  misc_feature 1..20: note = Target: SCN10A; (-) strand; PAM type: YTN; PAM sequence: CTA
  source 1..20: mol_type = other DNA
ggaaagtgtaattatagatg

SEQ ID NO: 50462 - DNA, 20 bp, synthetic construct
  misc_feature 1..20: note = Description of Artificial Sequence: Synthetic oligonucleotide
  misc_feature 1..20: note = Target: SCN10A; (-) strand; PAM type: YTN; PAM sequence: TTA
  source 1..20: mol_type = other DNA
aactaggaaagtgtaattat

SEQ ID NO: 50463 - DNA, 20 bp, synthetic construct
  misc_feature 1..20: note = Description of Artificial Sequence: Synthetic oligonucleotide
  misc_feature 1..20: note = Target: SCN10A; (-) strand; PAM type: YTN; PAM sequence: CTT
  source 1..20: mol_type = other DNA
aaactaggaaagtgtaatta

SEQ ID NO: 50464 - DNA, 20 bp, synthetic construct
  misc_feature 1..20: note = Description of Artificial Sequence: Synthetic oligonucleotide
  misc_feature 1..20: note = Target: SCN10A; (-) strand; PAM type: YTN; PAM sequence: CTC
  source 1..20: mol_type = other DNA
caaaatggtgtcttaaacta

SEQ ID NO: 50465 - DNA, 20 bp, synthetic construct
  misc_feature 1..20: note = Description of Artificial Sequence: Synthetic oligonucleotide
  misc_feature 1..20: note = Target: SCN10A; (-) strand; PAM type: YTN; PAM sequence: CTA
  source 1..20: mol_type = other DNA
aaaggatccagacacccctc

SEQ ID NO: 50466 - DNA, 20 bp, synthetic construct
  misc_feature 1..20: note = Description of Artificial Sequence: Synthetic oligonucleotide
  misc_feature 1..20: note = Target: SCN10A; (-) strand; PAM type: YTN; PAM sequence: CTG
  source 1..20: mol_type = other DNA
gaggcatagagcctaaaagg

SEQ ID NO: 50467 - DNA, 20 bp, synthetic construct
  misc_feature 1..20: note = Description of Artificial Sequence: Synthetic oligonucleotide
  misc_feature 1..20: note = Target: SCN10A; (-) strand; PAM type: YTN; PAM sequence: TTG
  source 1..20: mol_type = other DNA
gagtgggaagaggtgtgtgg

SEQ ID NO: 50468 - DNA, 20 bp, synthetic construct
  misc_feature 1..20: note = Description of Artificial Sequence: Synthetic oligonucleotide
  misc_feature 1..20: note = Target: SCN10A; (-) strand; PAM type: YTN; PAM sequence: CTG
  source 1..20: mol_type = other DNA
ccgtagacaatgagttggag

SEQ ID NO: 50469 - DNA, 20 bp, synthetic construct
  misc_feature 1..20: note = Description of Artificial Sequence: Synthetic oligonucleotide
  misc_feature 1..20: note = Target: SCN10A; (-) strand; PAM type: YTN; PAM sequence: TTG
  source 1..20: mol_type = other DNA
cagctgccgtagacaatgag

SEQ ID NO: 50470 - DNA, 20 bp, synthetic construct
  misc_feature 1..20: note = Description of Artificial Sequence: Synthetic oligonucleotide
  misc_feature 1..20: note = Target: SCN10A; (-) strand; PAM type: YTN; PAM sequence: TTA
  source 1..20: mol_type = other DNA
cccaccattgcagctgccgt

SEQ ID NO: 50471 - DNA, 20 bp, synthetic construct
  misc_feature 1..20: note = Description of Artificial Sequence: Synthetic oligonucleotide
  misc_feature 1..20: note = Target: SCN10A; (-) strand; PAM type: YTN; PAM sequence: CTA
  source 1..20: mol_type = other DNA
aagattacccaccattgcag

SEQ ID NO: 50472 - DNA, 20 bp, synthetic construct
  misc_feature 1..20: note = Description of Artificial Sequence: Synthetic oligonucleotide
  misc_feature 1..20: note = Target: SCN10A; (-) strand; PAM type: YTN; PAM sequence: CTC
  source 1..20: mol_type = other DNA
taaagattacccaccattgc

SEQ ID NO: 50473 - DNA, 20 bp, synthetic construct
  misc_feature 1..20: note = Description of Artificial Sequence: Synthetic oligonucleotide
  misc_feature 1..20: note = Target: SCN10A; (-) strand; PAM type: YTN; PAM sequence: TTG
  source 1..20: mol_type = other DNA
tgctctaaagattacccacc

SEQ ID NO: 50474 - DNA, 20 bp, synthetic construct
  misc_feature 1..20: note = Description of Artificial Sequence: Synthetic oligonucleotide
  misc_feature 1..20: note = Target: SCN10A; (-) strand; PAM type: YTN; PAM sequence: TTT
  source 1..20: mol_type = other DNA
gtgctctaaagattacccac

SEQ ID NO: 50475 - DNA, 20 bp, synthetic construct
  misc_feature 1..20: note = Description of Artificial Sequence: Synthetic oligonucleotide
  misc_feature 1..20: note = Target: SCN10A; (-) strand; PAM type: YTN; PAM sequence: CTC
  source 1..20: mol_type = other DNA
aggtttgtgctctaaagatt

SEQ ID NO: 50476 - DNA, 20 bp, synthetic construct
  misc_feature 1..20: note = Description of Artificial Sequence: Synthetic oligonucleotide
  misc_feature 1..20: note = Target: SCN10A; (-) strand; PAM type: YTN; PAM sequence: TTA
  source 1..20: mol_type = other DNA
caaccagcgcaggatggtaa

SEQ ID NO: 50477 - DNA, 20 bp, synthetic construct
  misc_feature 1..20: note = Description of Artificial Sequence: Synthetic oligonucleotide
  misc_feature 1..20: note = Target: SCN10A; (-) strand; PAM type: YTN; PAM sequence: CTT
  source 1..20: mol_type = other DNA
acaaccagcgcaggatggta

SEQ ID NO: 50478 - DNA, 20 bp, synthetic construct
  misc_feature 1..20: note = Description of Artificial Sequence: Synthetic oligonucleotide
  misc_feature 1..20: note = Target: SCN10A; (-) strand; PAM type: YTN; PAM sequence: CTG
  source 1..20: mol_type = other DNA
atccttacaaccagcgcagg

SEQ ID NO: 50479 - DNA, 20 bp, synthetic construct
  misc_feature 1..20: note = Description of Artificial Sequence: Synthetic oligonucleotide
  misc_feature 1..20: note = Target: SCN10A; (-) strand; PAM type: YTN; PAM sequence: CTC
  source 1..20: mol_type = other DNA
tgatccttacaaccagcgca

SEQ ID NO: 50480 - DNA, 20 bp, synthetic construct
  misc_feature 1..20: note = Description of Artificial Sequence: Synthetic oligonucleotide
  misc_feature 1..20: note = Target: SCN10A; (-) strand; PAM type: YTN; PAM sequence: CTC
  source 1..20: mol_type = other DNA
cacagaagacaacaaatcac

SEQ ID NO: 50481 - DNA, 20 bp, synthetic construct
  misc_feature 1..20: note = Description of Artificial Sequence: Synthetic oligonucleotide
  misc_feature 1..20: note = Target: SCN10A; (-) strand; PAM type: YTN; PAM sequence: CTC
  source 1..20: mol_type = other DNA
caaaaatgccagtgagagaa

SEQ ID NO: 50482 - DNA, 20 bp, synthetic construct
  misc_feature 1..20: note = Description of Artificial Sequence: Synthetic oligonucleotide
  misc_feature 1..20: note = Target: SCN10A; (-) strand; PAM type: YTN; PAM sequence: TTA
  source 1..20: mol_type = other DNA
acctccaaaaatgccagtga

SEQ ID NO: 50483 - DNA, 20 bp, synthetic construct
  misc_feature 1..20: note = Description of Artificial Sequence: Synthetic oligonucleotide
  misc_feature 1..20: note = Target: SCN10A; (-) strand; PAM type: YTN; PAM sequence: TTT
  source 1..20: mol_type = other DNA
aacctccaaaaatgccagtg

SEQ ID NO: 50484 - DNA, 20 bp, synthetic construct
  misc_feature 1..20: note = Description of Artificial Sequence: Synthetic oligonucleotide
  misc_feature 1..20: note = Target: SCN10A; (-) strand; PAM type: YTN; PAM sequence: CTT
  source 1..20: mol_type = other DNA
taacctccaaaaatgccagt

SEQ ID NO: 50485 - DNA, 20 bp, synthetic construct
  misc_feature 1..20: note = Description of Artificial Sequence: Synthetic oligonucleotide
  misc_feature 1..20: note = Target: SCN10A; (-) strand; PAM type: YTN; PAM sequence: CTC
  source 1..20: mol_type = other DNA
ccacaatggatcacctttaa

SEQ ID NO: 50486 - DNA, 20 bp, synthetic construct
  misc_feature 1..20: note = Description of Artificial Sequence: Synthetic oligonucleotide
  misc_feature 1..20: note = Target: SCN10A; (-) strand; PAM type: YTN; PAM sequence: CTC
  source 1..20: mol_type = other DNA
cactcccacaatggatcacc

SEQ ID NO: 50487 - DNA, 20 bp, synthetic construct
  misc_feature 1..20: note = Description of Artificial Sequence: Synthetic oligonucleotide
  misc_feature 1..20: note = Target: SCN10A; (-) strand; PAM type: YTN; PAM sequence: CTC
  source 1..20: mol_type = other DNA
tccactcccacaatggatca

SEQ ID NO: 50488 - DNA, 20 bp, synthetic construct
  misc_feature 1..20: note = Description of Artificial Sequence: Synthetic oligonucleotide
  misc_feature 1..20: note = Target: SCN10A; (-) strand; PAM type: YTN; PAM sequence: CTC
  source 1..20: mol_type = other DNA
tctccactcccacaatggat

SEQ ID NO: 50489 - DNA, 20 bp, synthetic construct
  misc_feature 1..20: note = Description of Artificial Sequence: Synthetic oligonucleotide
  misc_feature 1..20: note = Target: SCN10A; (-) strand; PAM type: YTN; PAM sequence: TTG
  source 1..20: mol_type = other DNA
acacaacctctctccactcc

SEQ ID NO: 50490 - DNA, 20 bp, synthetic construct
  misc_feature 1..20: note = Description of Artificial Sequence: Synthetic oligonucleotide
  misc_feature 1..20: note = Target: SCN10A; (-) strand; PAM type: YTN; PAM sequence: CTA
  source 1..20: mol_type = other DNA
gggattgacacaacctctct

SEQ ID NO: 50491 - DNA, 20 bp, synthetic construct
  misc_feature 1..20: note = Description of Artificial Sequence: Synthetic oligonucleotide
  misc_feature 1..20: note = Target: SCN10A; (-) strand; PAM type: YTN; PAM sequence: CTA
  source 1..20: mol_type = other DNA
gcagcactagggattgacac

SEQ ID NO: 50492 - DNA, 20 bp, synthetic construct
  misc_feature 1..20: note = Description of Artificial Sequence: Synthetic oligonucleotide
  misc_feature 1..20: note = Target: SCN10A; (-) strand; PAM type: YTN; PAM sequence: TTC
  source 1..20: mol_type = other DNA
gcaggtgctagcagcactag

SEQ ID NO: 50493 - DNA, 20 bp, synthetic construct
  misc_feature 1..20: note = Description of Artificial Sequence: Synthetic oligonucleotide
  misc_feature 1..20: note = Target: SCN10A; (-) strand; PAM type: YTN; PAM sequence: CTT
  source 1..20: mol_type = other DNA
cgcaggtgctagcagcacta

SEQ ID NO: 50494 - DNA, 20 bp, synthetic construct
  misc_feature 1..20: note = Description of Artificial Sequence: Synthetic oligonucleotide
  misc_feature 1..20: note = Target: SCN10A; (-) strand; PAM type: YTN; PAM sequence: CTC
  source 1..20: mol_type = other DNA
ttcgcaggtgctagcagcac

SEQ ID NO: 50495 - DNA, 20 bp, synthetic construct
  misc_feature 1..20: note = Description of Artificial Sequence: Synthetic oligonucleotide
  misc_feature 1..20: note = Target: SCN10A; (-) strand; PAM type: YTN; PAM sequence: CTC
  source 1..20: mol_type = other DNA
tcttcgcaggtgctagcagc

SEQ ID NO: 50496 - DNA, 20 bp, synthetic construct
  misc_feature 1..20: note = Description of Artificial Sequence: Synthetic oligonucleotide
  misc_feature 1..20: note = Target: SCN10A; (-) strand; PAM type: YTN; PAM sequence: TTC
  source 1..20: mol_type = other DNA
tctcttcgcaggtgctagca

SEQ ID NO: 50497 - DNA, 20 bp, synthetic construct
  misc_feature 1..20: note = Description of Artificial Sequence: Synthetic oligonucleotide
  misc_feature 1..20: note = Target: SCN10A; (-) strand; PAM type: YTN; PAM sequence: CTG
  source 1..20: mol_type = other DNA
ttctctcttcgcaggtgcta

SEQ ID NO: 50498 - DNA, 20 bp, synthetic construct
  misc_feature 1..20: note = Description of Artificial Sequence: Synthetic oligonucleotide
  misc_feature 1..20: note = Target: SCN10A; (-) strand; PAM type: YTN; PAM sequence: CTG
  source 1..20: mol_type = other DNA
ctgttctctcttcgcaggtg

SEQ ID NO: 50499 - DNA, 20 bp, synthetic construct
  misc_feature 1..20: note = Description of Artificial Sequence: Synthetic oligonucleotide
  misc_feature 1..20: note = Target: SCN10A; (-) strand; PAM type: YTN; PAM sequence: CTA
  source 1..20: mol_type = other DNA
cacctgctgttctctcttcg

SEQ ID NO: 50500 - DNA, 20 bp, synthetic construct
  misc_feature 1..20: note = Description of Artificial Sequence: Synthetic oligonucleotide
  misc_feature 1..20: note = Target: SCN10A; (-) strand; PAM type: YTN; PAM sequence: TTG
  source 1..20: mol_type = other DNA
gctacacctgctgttctctc

SEQ ID NO: 50501 - DNA, 20 bp, synthetic construct
  misc_feature 1..20: note = Description of Artificial Sequence: Synthetic oligonucleotide
  misc_feature 1..20: note = Target: SCN10A; (-) strand; PAM type: YTN; PAM sequence: CTA
  source 1..20: mol_type = other DNA
ttggctacacctgctgttct

SEQ ID NO: 50502 - DNA, 20 bp, synthetic construct
  misc_feature 1..20: note = Description of Artificial Sequence: Synthetic oligonucleotide
  misc_feature 1..20: note = Target: SCN10A; (-) strand; PAM type: YTN; PAM sequence: CTA
  source 1..20: mol_type = other DNA
agtccaagcaaatactattg

SEQ ID NO: 50503 - DNA, 20 bp, synthetic construct
  misc_feature 1..20: note = Description of Artificial Sequence: Synthetic oligonucleotide
  misc_feature 1..20: note = Target: SCN10A; (-) strand; PAM type: YTN; PAM sequence: TTC
  source 1..20: mol_type = other DNA
atgctaagtccaagcaaata

SEQ ID NO: 50504 - DNA, 20 bp, synthetic construct
  misc_feature 1..20: note = Description of Artificial Sequence: Synthetic oligonucleotide
  misc_feature 1..20: note = Target: SCN10A; (-) strand; PAM type: YTN; PAM sequence: CTG
  source 1..20: mol_type = other DNA
ggggacacattcatgctaag

SEQ ID NO: 50505 - DNA, 20 bp, synthetic construct
  misc_feature 1..20: note = Description of Artificial Sequence: Synthetic oligonucleotide
  misc_feature 1..20: note = Target: SCN10A; (-) strand; PAM type: YTN; PAM sequence: CTG
  source 1..20: mol_type = other DNA
gcaccccatgtctgggggac

SEQ ID NO: 50506 - DNA, 20 bp, synthetic construct
  misc_feature 1..20: note = Description of Artificial Sequence: Synthetic oligonucleotide
  misc_feature 1..20: note = Target: SCN10A; (-) strand; PAM type: YTN; PAM sequence: CTC
  source 1..20: mol_type = other DNA
acccctggcaccccatgtct

SEQ ID NO: 50507 - DNA, 20 bp, synthetic construct
  misc_feature 1..20: note = Description of Artificial Sequence: Synthetic oligonucleotide
  misc_feature 1..20: note = Target: SCN10A; (-) strand; PAM type: YTN; PAM sequence: CTC
  source 1..20: mol_type = other DNA
tcacccctggcaccccatgt

SEQ ID NO: 50508 - DNA, 20 bp, synthetic construct
  misc_feature 1..20: note = Description of Artificial Sequence: Synthetic oligonucleotide
  misc_feature 1..20: note = Target: SCN10A; (-) strand; PAM type: YTN; PAM sequence: TTC
  source 1..20: mol_type = other DNA
agatctctcacccctggcac

SEQ ID NO: 50509 - DNA, 20 bp, synthetic construct
  misc_feature 1..20: note = Description of Artificial Sequence: Synthetic oligonucleotide
  misc_feature 1..20: note = Target: SCN10A; (-) strand; PAM type: YTN; PAM sequence: TTT
  source 1..20: mol_type = other DNA
cagatctctcacccctggca

SEQ ID NO: 50510 - DNA, 20 bp, synthetic construct
  misc_feature 1..20: note = Description of Artificial Sequence: Synthetic oligonucleotide
  misc_feature 1..20: note = Target: SCN10A; (-) strand; PAM type: YTN; PAM sequence: CTG
  source 1..20: mol_type = other DNA
tttcagatctctcacccctg

SEQ ID NO: 50511 - DNA, 20 bp, synthetic construct
  misc_feature 1..20: note = Description of Artificial Sequence: Synthetic oligonucleotide
  misc_feature 1..20: note = Target: SCN10A; (-) strand; PAM type: YTN; PAM sequence: CTC
  source 1..20: mol_type = other DNA
tgtttcagatctctcacccc

SEQ ID NO: 50512 - DNA, 20 bp, synthetic construct
  misc_feature 1..20: note = Description of Artificial Sequence: Synthetic oligonucleotide
  misc_feature 1..20: note = Target: SCN10A; (-) strand; PAM type: YTN; PAM sequence: TTC
  source 1..20: mol_type = other DNA
tctgtttcagatctctcacc

SEQ ID NO: 50513 - DNA, 20 bp, synthetic construct
  misc_feature 1..20: note = Description of Artificial Sequence: Synthetic oligonucleotide
  misc_feature 1..20: note = Target: SCN10A; (-) strand; PAM type: YTN; PAM sequence: CTT
  source 1..20: mol_type = other DNA
ctctgtttcagatctctcac

SEQ ID NO: 50514 - DNA, 20 bp, synthetic construct
  misc_feature 1..20: note = Description of Artificial Sequence: Synthetic oligonucleotide
  misc_feature 1..20: note = Target: SCN10A; (-) strand; PAM type: YTN; PAM sequence: TTC
  source 1..20: mol_type = other DNA
agcttctctgtttcagatct

SEQ ID NO: 50515 - DNA, 20 bp, synthetic construct
  misc_feature 1..20: note = Description of Artificial Sequence: Synthetic oligonucleotide
  misc_feature 1..20: note = Target: SCN10A; (-) strand; PAM type: YTN; PAM sequence: CTT
  source 1..20: mol_type = other DNA
cagcttctctgtttcagatc

SEQ ID NO: 50516 - DNA, 20 bp, synthetic construct
  misc_feature 1..20: note = Description of Artificial Sequence: Synthetic oligonucleotide
  misc_feature 1..20: note = Target: SCN10A; (-) strand; PAM type: YTN; PAM sequence: CTA
  source 1..20: mol_type = other DNA
acccttcagcttctctgttt

SEQ ID NO: 50517 - DNA, 20 bp, synthetic construct
  misc_feature 1..20: note = Description of Artificial Sequence: Synthetic oligonucleotide
  misc_feature 1..20: note = Target: SCN10A; (-) strand; PAM type: YTN; PAM sequence: CTG
  source 1..20: mol_type = other DNA
gtcctaacccttcagcttct

SEQ ID NO: 50518 - DNA, 20 bp, synthetic construct
  misc_feature 1..20: note = Description of Artificial Sequence: Synthetic oligonucleotide
  misc_feature 1..20: note = Target: SCN10A; (-) strand; PAM type: YTN; PAM sequence: CTA
  source 1..20: mol_type = other DNA
atcccaccaccaccctggtc

SEQ ID NO: 50519 - DNA, 20 bp, synthetic construct
  misc_feature 1..20: note = Description of Artificial Sequence: Synthetic oligonucleotide
  misc_feature 1..20: note = Target: SCN10A; (-) strand; PAM type: YTN; PAM sequence: CTG
  source 1..20: mol_type = other DNA
ccatggcctaatcccaccac

SEQ ID NO: 50520 - DNA, 20 bp, synthetic construct
  misc_feature 1..20: note = Description of Artificial Sequence: Synthetic oligonucleotide
  misc_feature 1..20: note = Target: SCN10A; (-) strand; PAM type: YTN; PAM sequence: TTC
  source 1..20: mol_type = other DNA
ctgccatggcctaatcccac

SEQ ID NO: 50521 - DNA, 20 bp, synthetic construct
  misc_feature 1..20: note = Description of Artificial Sequence: Synthetic oligonucleotide
  misc_feature 1..20: note = Target: SCN10A; (-) strand; PAM type: YTN; PAM sequence: CTG
  source 1..20: mol_type = other DNA
ttcctgccatggcctaatcc

SEQ ID NO: 50522 - DNA, 20 bp, synthetic construct
  misc_feature 1..20: note = Description of Artificial Sequence: Synthetic oligonucleotide
  misc_feature 1..20: note = Target: SCN10A; (-) strand; PAM type: YTN; PAM sequence: CTG
  source 1..20: mol_type = other DNA
ggtggggcaccaacagagta

SEQ ID NO: 50523 - DNA, 20 bp, synthetic construct
  misc_feature 1..20: note = Description of Artificial Sequence: Synthetic oligonucleotide
  misc_feature 1..20: note = Target: SCN10A; (-) strand; PAM type: YTN; PAM sequence: CTG
  source 1..20: mol_type = other DNA
gtgaaagggatctgggtggg

SEQ ID NO: 50524 - DNA, 20 bp, synthetic construct
  misc_feature 1..20: note = Description of Artificial Sequence: Synthetic oligonucleotide
  misc_feature 1..20: note = Target: SCN10A; (-) strand; PAM type: YTN; PAM sequence: CTG
  source 1..20: mol_type = other DNA
acctggtgaaagggatctgg

SEQ ID NO: 50525 - DNA, 20 bp, synthetic construct
  misc_feature 1..20: note = Description of Artificial Sequence: Synthetic oligonucleotide
  misc_feature 1..20: note = Target: SCN10A; (-) strand; PAM type: YTN; PAM sequence: CTG
  source 1..20: mol_type = other DNA
tgctgacctggtgaaaggga

SEQ ID NO: 50526 - DNA, 20 bp, synthetic construct
  misc_feature 1..20: note = Description of Artificial Sequence: Synthetic oligonucleotide
  misc_feature 1..20: note = Target: SCN10A; (-) strand; PAM type: YTN; PAM sequence: CTC
  source 1..20: mol_type = other DNA
gggatagctgtgctgacctg

SEQ ID NO: 50527 - DNA, 20 bp, synthetic construct
  misc_feature 1..20: note = Description of Artificial Sequence: Synthetic oligonucleotide
  misc_feature 1..20: note = Target: SCN10A; (-) strand; PAM type: YTN; PAM sequence: CTG
  source 1..20: mol_type = other DNA
ccatgcaagcagctcgggat

SEQ ID NO: 50528 - DNA, 20 bp, synthetic construct
  misc_feature 1..20: note = Description of Artificial Sequence: Synthetic oligonucleotide
  misc_feature 1..20: note = Target: SCN10A; (-) strand; PAM type: YTN; PAM sequence: CTG
  source 1..20: mol_type = other DNA
ctgccatgcaagcagctcgg

SEQ ID NO: 50529 - DNA, 20 bp, synthetic construct
  misc_feature 1..20: note = Description of Artificial Sequence: Synthetic oligonucleotide
  misc_feature 1..20: note = Target: SCN10A; (-) strand; PAM type: YTN; PAM sequence: CTG
  source 1..20: mol_type = other DNA
caagtatgagccatcagctg

SEQ ID NO: 50530 - DNA, 20 bp, synthetic construct
  misc_feature 1..20: note = Description of Artificial Sequence: Synthetic oligonucleotide
  misc_feature 1..20: note = Target: SCN10A; (-) strand; PAM type: YTN; PAM sequence: TTG
  source 1..20: mol_type = other DNA
tagaatgctgcaagtatgag

SEQ ID NO: 50531 - DNA, 20 bp, synthetic construct
  misc_feature 1..20: note = Description of Artificial Sequence: Synthetic oligonucleotide
  misc_feature 1..20: note = Target: SCN10A; (-) strand; PAM type: YTN; PAM sequence: TTT
  source 1..20: mol_type = other DNA
gtagaatgctgcaagtatga

SEQ ID NO: 50532 - DNA, 20 bp, synthetic construct
  misc_feature 1..20: note = Description of Artificial Sequence: Synthetic oligonucleotide
  misc_feature 1..20: note = Target: SCN10A; (-) strand; PAM type: YTN; PAM sequence: TTT
  source 1..20: mol_type = other DNA
tgtagaatgctgcaagtatg

SEQ ID NO: 50533 - DNA, 20 bp, synthetic construct
  misc_feature 1..20: note = Description of Artificial Sequence: Synthetic oligonucleotide
  misc_feature 1..20: note = Target: SCN10A; (-) strand; PAM type: YTN; PAM sequence: TTT
  source 1..20: mol_type = other DNA
ttgtagaatgctgcaagtat

SEQ ID NO: 50534 - DNA, 20 bp, synthetic construct
  misc_feature 1..20: note = Description of Artificial Sequence: Synthetic oligonucleotide
  misc_feature 1..20: note = Target: SCN10A; (-) strand; PAM type: YTN; PAM sequence: TTT
  source 1..20: mol_type = other DNA
tttgtagaatgctgcaagta

SEQ ID NO: 50535 - DNA, 20 bp, synthetic construct
  misc_feature 1..20: note = Description of Artificial Sequence: Synthetic oligonucleotide
  misc_feature 1..20: note = Target: SCN10A; (-) strand; PAM type: YTN; PAM sequence: TTT
  source 1..20: mol_type = other DNA
ttttgtagaatgctgcaagt

SEQ ID NO: 50536 - DNA, 20 bp, synthetic construct
  misc_feature 1..20: note = Description of Artificial Sequence: Synthetic oligonucleotide
  misc_feature 1..20: note = Target: SCN10A; (-) strand; PAM type: YTN; PAM sequence: CTT
  source 1..20: mol_type = other DNA
tttttgtagaatgctgcaag

SEQ ID NO: 50537 - DNA, 20 bp, synthetic construct
  misc_feature 1..20: note = Description of Artificial Sequence: Synthetic oligonucleotide
  misc_feature 1..20: note = Target: SCN10A; (-) strand; PAM type: YTN; PAM sequence: CTA
  source 1..20: mol_type = other DNA
tcccagaagcaggcagccaa

SEQ ID NO: 50538 - DNA, 20 bp, synthetic construct
  misc_feature 1..20: note = Description of Artificial Sequence: Synthetic oligonucleotide
  misc_feature 1..20: note = Target: SCN10A; (-) strand; PAM type: YTN; PAM sequence: CTC
  source 1..20: mol_type = other DNA
cccatacctatcccagaagc

SEQ ID NO: 50539 - DNA, 20 bp, synthetic construct
  misc_feature 1..20: note = Description of Artificial Sequence: Synthetic oligonucleotide
  misc_feature 1..20: note = Target: SCN10A; (-) strand; PAM type: YTN; PAM sequence: TTA
  source 1..20: mol_type = other DNA
ccctccccatacctatccca

SEQ ID NO: 50540 - DNA, 20 bp, synthetic construct
  misc_feature 1..20: note = Description of Artificial Sequence: Synthetic oligonucleotide
  misc_feature 1..20: note = Target: SCN10A; (-) strand; PAM type: YTN; PAM sequence: TTT
  source 1..20: mol_type = other DNA
accctccccatacctatccc

SEQ ID NO: 50541 - DNA, 20 bp, synthetic construct
  misc_feature 1..20: note = Description of Artificial Sequence: Synthetic oligonucleotide
  misc_feature 1..20: note = Target: SCN10A; (-) strand; PAM type: YTN; PAM sequence: TTT
  source 1..20: mol_type = other DNA
taccctccccatacctatcc

SEQ ID NO: 50542 - DNA, 20 bp, synthetic construct
  misc_feature 1..20: note = Description of Artificial Sequence: Synthetic oligonucleotide
  misc_feature 1..20: note = Target: SCN10A; (-) strand; PAM type: YTN; PAM sequence: TTT
  source 1..20: mol_type = other DNA
ttaccctccccatacctatc

SEQ ID NO: 50543 - DNA, 20 bp, synthetic construct
  misc_feature 1..20: note = Description of Artificial Sequence: Synthetic oligonucleotide
  misc_feature 1..20: note = Target: SCN10A; (-) strand; PAM type: YTN; PAM sequence: TTT
  source 1..20: mol_type = other DNA
tttaccctccccatacctat

SEQ ID NO: 50544 - DNA, 20 bp, synthetic construct
  misc_feature 1..20: note = Description of Artificial Sequence: Synthetic oligonucleotide
  misc_feature 1..20: note = Target: SCN10A; (-) strand; PAM type: YTN; PAM sequence: TTT
  source 1..20: mol_type = other DNA
ttttaccctccccataccta

SEQ ID NO: 50545 - DNA, 20 bp, synthetic construct
  misc_feature 1..20: note = Description of Artificial Sequence: Synthetic oligonucleotide
  misc_feature 1..20: note = Target: SCN10A; (-) strand; PAM type: YTN; PAM sequence: TTT
  source 1..20: mol_type = other DNA
tttttaccctccccatacct

SEQ ID NO: 50546 - DNA, 20 bp, synthetic construct
  misc_feature 1..20: note = Description of Artificial Sequence: Synthetic oligonucleotide
  misc_feature 1..20: note = Target: SCN10A; (-) strand; PAM type: YTN; PAM sequence: TTT
  source 1..20: mol_type = other DNA
ttttttaccctccccatacc

SEQ ID NO: 50547 - DNA, 20 bp, synthetic construct
  misc_feature 1..20: note = Description of Artificial Sequence: Synthetic oligonucleotide
  misc_feature 1..20: note = Target: SCN10A; (-) strand; PAM type: YTN; PAM sequence: TTT
  source 1..20: mol_type = other DNA
tttttttaccctccccatac

SEQ ID NO: 50548 - DNA, 20 bp, synthetic construct
  misc_feature 1..20: note = Description of Artificial Sequence: Synthetic oligonucleotide
  misc_feature 1..20: note = Target: SCN10A; (-) strand; PAM type: YTN; PAM sequence: TTT
  source 1..20: mol_type = other DNA
ttttttttaccctccccata

SEQ ID NO: 50549 - DNA, 20 bp, synthetic construct
  misc_feature 1..20: note = Description of Artificial Sequence: Synthetic oligonucleotide
  misc_feature 1..20: note = Target: SCN10A; (-) strand; PAM type: YTN; PAM sequence: CTT
  source 1..20: mol_type = other DNA
tttttttttaccctccccat

SEQ ID NO: 50550 - DNA, 20 bp, synthetic construct
  misc_feature 1..20: note = Description of Artificial Sequence: Synthetic oligonucleotide
  misc_feature 1..20: note = Target: SCN10A; (-) strand; PAM type: YTN; PAM sequence: TTG
  source 1..20: mol_type = other DNA
aggcaagggggccagctttt

SEQ ID NO: 50551 - DNA, 20 bp, synthetic construct
  misc_feature 1..20: note = Description of Artificial Sequence: Synthetic oligonucleotide
  misc_feature 1..20: note = Target: SCN10A; (-) strand; PAM type: YTN; PAM sequence: CTT
  source 1..20: mol_type = other DNA
gaggcaagggggccagcttt

SEQ ID NO: 50552 - DNA, 20 bp, synthetic construct
  misc_feature 1..20: note = Description of Artificial Sequence: Synthetic oligonucleotide
  misc_feature 1..20: note = Target: SCN10A; (-) strand; PAM type: YTN; PAM sequence: CTA
  source 1..20: mol_type = other DNA
ccttgaggcaagggggccag

SEQ ID NO: 50553 - DNA, 20 bp, synthetic construct
  misc_feature 1..20: note = Description of Artificial Sequence: Synthetic oligonucleotide
  misc_feature 1..20: note = Target: SCN10A; (-) strand; PAM type: YTN; PAM sequence: TTA
  source 1..20: mol_type = other DNA
gtcctaccttgaggcaaggg

SEQ ID NO: 50554 - DNA, 20 bp, synthetic construct
  misc_feature 1..20: note = Description of Artificial Sequence: Synthetic oligonucleotide
  misc_feature 1..20: note = Target: SCN10A; (-) strand; PAM type: YTN; PAM sequence: CTG
  source 1..20: mol_type = other DNA
taccacagttagtcctacct

SEQ ID NO: 50555 - DNA, 20 bp, synthetic construct
  misc_feature 1..20: note = Description of Artificial Sequence: Synthetic oligonucleotide
  misc_feature 1..20: note = Target: SCN10A; (-) strand; PAM type: YTN; PAM sequence: CTG
  source 1..20: mol_type = other DNA
gggcatgacctgtaccacag

SEQ ID NO: 50556 - DNA, 20 bp, synthetic construct
  misc_feature 1..20: note = Description of Artificial Sequence: Synthetic oligonucleotide
  misc_feature 1..20: note = Target: SCN10A; (-) strand; PAM type: YTN; PAM sequence: CTC
  source 1..20: mol_type = other DNA
tggggcatgacctgtaccac

SEQ ID NO: 50557 - DNA, 20 bp, synthetic construct
  misc_feature 1..20: note = Description of Artificial Sequence: Synthetic oligonucleotide
  misc_feature 1..20: note = Target: SCN10A; (-) strand; PAM type: YTN; PAM sequence: TTG
  source 1..20: mol_type = other DNA
atcccatggggaactctggg

SEQ ID NO: 50558 - DNA, 20 bp, synthetic construct
  misc_feature 1..20: note = Description of Artificial Sequence: Synthetic oligonucleotide
  misc_feature 1..20: note = Target: SCN10A; (-) strand; PAM type: YTN; PAM sequence: CTT
  source 1..20: mol_type = other DNA
gatcccatggggaactctgg

SEQ ID NO: 50559 - DNA, 20 bp, synthetic construct
  misc_feature 1..20: note = Description of Artificial Sequence: Synthetic oligonucleotide
  misc_feature 1..20: note = Target: SCN10A; (-) strand; PAM type: YTN; PAM sequence: TTC
  source 1..20: mol_type = other DNA
agcttgatcccatggggaac

SEQ ID NO: 50560 - DNA, 20 bp, synthetic construct
  misc_feature 1..20: note = Description of Artificial Sequence: Synthetic oligonucleotide
  misc_feature 1..20: note = Target: SCN10A; (-) strand; PAM type: YTN; PAM sequence: CTT
  source 1..20: mol_type = other DNA
cagcttgatcccatggggaa

SEQ ID NO: 50561 - DNA, 20 bp, synthetic construct
  misc_feature 1..20: note = Description of Artificial Sequence: Synthetic oligonucleotide
  misc_feature 1..20: note = Target: SCN10A; (-) strand; PAM type: YTN; PAM sequence: CTA
  source 1..20: mol_type = other DNA
gagaccagcttcagcttgat

SEQ ID NO: 50562 - DNA, 20 bp, synthetic construct
  misc_feature 1..20: note = Description of Artificial Sequence: Synthetic oligonucleotide
  misc_feature 1..20: note = Target: SCN10A; (-) strand; PAM type: YTN; PAM sequence: CTC
  source 1..20: mol_type = other DNA
agctagagaccagcttcagc

SEQ ID NO: 50563 - DNA, 20 bp, synthetic construct
  misc_feature 1..20: note = Description of Artificial Sequence: Synthetic oligonucleotide
  misc_feature 1..20: note = Target: SCN10A; (-) strand; PAM type: YTN; PAM sequence: TTC
  source 1..20: mol_type = other DNA
tcagctagagaccagcttca

SEQ ID NO: 50564 - DNA, 20 bp, synthetic construct
  misc_feature 1..20: note = Description of Artificial Sequence: Synthetic oligonucleotide
  misc_feature 1..20: note = Target: SCN10A; (-) strand; PAM type: YTN; PAM sequence: CTA
  source 1..20: mol_type = other DNA
aacaaggagtgttctcagct

SEQ ID NO: 50565 - DNA, 20 bp, synthetic construct
  misc_feature 1..20: note = Description of Artificial Sequence: Synthetic oligonucleotide
  misc_feature 1..20: note = Target: SCN10A; (-) strand; PAM type: YTN; PAM sequence: CTC
  source 1..20: mol_type = other DNA
aggagaaagcgaatgaagca

SEQ ID NO: 50566 - DNA, 20 bp, synthetic construct
  misc_feature 1..20: note = Description of Artificial Sequence: Synthetic oligonucleotide
  misc_feature 1..20: note = Target: SCN10A; (-) strand; PAM type: YTN; PAM sequence: CTC
  source 1..20: mol_type = other DNA
tcaggagaaagcgaatgaag

SEQ ID NO: 50567 - DNA, 20 bp, synthetic construct
  misc_feature 1..20: note = Description of Artificial Sequence: Synthetic oligonucleotide
  misc_feature 1..20: note = Target: SCN10A; (-) strand; PAM type: YTN; PAM sequence: TTG
  source 1..20: mol_type = other DNA
agggagtgctctcaggagaa

SEQ ID NO: 50568 - DNA, 20 bp, synthetic construct
  misc_feature 1..20: note = Description of Artificial Sequence: Synthetic oligonucleotide
  misc_feature 1..20: note = Target: SCN10A; (-) strand; PAM type: YTN; PAM sequence: CTA
  source 1..20: mol_type = other DNA
ttgagggagtgctctcagga

SEQ ID NO: 50569 - DNA, 20 bp, synthetic construct
  misc_feature 1..20: note = Description of Artificial Sequence: Synthetic oligonucleotide
  misc_feature 1..20: note = Target: SCN10A; (-) strand; PAM type: YTN; PAM sequence: TTG
  source 1..20: mol_type = other DNA
tgcaagtgacctattgaggg

SEQ ID NO: 50570 - DNA, 20 bp, synthetic construct
  misc_feature 1..20: note = Description of Artificial Sequence: Synthetic oligonucleotide
  misc_feature 1..20: note = Target: SCN10A; (-) strand; PAM type: YTN; PAM sequence: CTT
  source 1..20: mol_type = other DNA
gtgcaagtgacctattgagg

SEQ ID NO: 50571 - DNA, 20 bp, synthetic construct
  misc_feature 1..20: note = Description of Artificial Sequence: Synthetic oligonucleotide
  misc_feature 1..20: note = Target: SCN10A; (-) strand; PAM type: YTN; PAM sequence: TTC
  source 1..20: mol_type = other DNA
ttgtgcaagtgacctattga

SEQ ID NO: 50572 - DNA, 20 bp, synthetic construct
  misc_feature 1..20: note = Description of Artificial Sequence: Synthetic oligonucleotide
  misc_feature 1..20: note = Target: SCN10A; (-) strand; PAM type: YTN; PAM sequence: CTA
  source 1..20: mol_type = other DNA
agtgaggattcttgtgcaag

SEQ ID NO: 50573 - DNA, 20 bp, synthetic construct
  misc_feature 1..20: note = Description of Artificial Sequence: Synthetic oligonucleotide
  misc_feature 1..20: note = Target: SCN10A; (-) strand; PAM type: YTN; PAM sequence: CTC
  source 1..20: mol_type = other DNA
aaagaagaagctaagtgagg

SEQ ID NO: 50574 - DNA, 20 bp, synthetic construct
  misc_feature 1..20: note = Description of Artificial Sequence: Synthetic oligonucleotide
  misc_feature 1..20: note = Target: SCN10A; (-) strand; PAM type: YTN; PAM sequence: TTC
  source 1..20: mol_type = other DNA
tcaaagaagaagctaagtga

SEQ ID NO: 50575 - DNA, 20 bp, synthetic construct
  misc_feature 1..20: note = Description of Artificial Sequence: Synthetic oligonucleotide
  misc_feature 1..20: note = Target: SCN10A; (-) strand; PAM type: YTN; PAM sequence: TTT
  source 1..20: mol_type = other DNA
ctcaaagaagaagctaagtg

SEQ ID NO: 50576 - DNA, 20 bp, synthetic construct
  misc_feature 1..20: note = Description of Artificial Sequence: Synthetic oligonucleotide
  misc_feature 1..20: note = Target: SCN10A; (-) strand; PAM type: YTN; PAM sequence: TTT
  source 1..20: mol_type = other DNA
tctcaaagaagaagctaagt

SEQ ID NO: 50577 - DNA, 20 bp, synthetic construct
  misc_feature 1..20: note = Description of Artificial Sequence: Synthetic oligonucleotide
  misc_feature 1..20: note = Target: SCN10A; (-) strand; PAM type: YTN; PAM sequence: TTA
  source 1..20: mol_type = other DNA
gatcaggttttctcaaagaa

SEQ ID NO: 50578 - DNA, 20 bp, synthetic construct
  misc_feature 1..20: note = Description of Artificial Sequence: Synthetic oligonucleotide
  misc_feature 1..20: note = Target: SCN10A; (-) strand; PAM type: YTN; PAM sequence: CTC
  source 1..20: mol_type = other DNA
agggaccatattagatcagg

SEQ ID NO: 50579 - DNA, 20 bp, synthetic construct
  misc_feature 1..20: note = Description of Artificial Sequence: Synthetic oligonucleotide
  misc_feature 1..20: note = Target: SCN10A; (-) strand; PAM type: YTN; PAM sequence: TTG
  source 1..20: mol_type = other DNA
cctcagggaccatattagat

SEQ ID NO: 50580 - DNA, 20 bp, synthetic construct
  misc_feature 1..20: note = Description of Artificial Sequence: Synthetic oligonucleotide
  misc_feature 1..20: note = Target: SCN10A; (-) strand; PAM type: YTN; PAM sequence: CTT
  source 1..20: mol_type = other DNA
gcctcagggaccatattaga

SEQ ID NO: 50581 - DNA, 20 bp, synthetic construct
  misc_feature 1..20: note = Description of Artificial Sequence: Synthetic oligonucleotide
  misc_feature 1..20: note = Target: SCN10A; (-) strand; PAM type: YTN; PAM sequence: CTA
  source 1..20: mol_type = other DNA
taggaggaatcatcttgcct

SEQ ID NO: 50582 - DNA, 20 bp, synthetic construct
  misc_feature 1..20: note = Description of Artificial Sequence: Synthetic oligonucleotide
  misc_feature 1..20: note = Target: SCN10A; (-) strand; PAM type: YTN; PAM sequence: TTA
  source 1..20: mol_type = other DNA
gggagctataggaggaatca

SEQ ID NO: 50583 - DNA, 20 bp, synthetic construct
  misc_feature 1..20: note = Description of Artificial Sequence: Synthetic oligonucleotide
  misc_feature 1..20: note = Target: SCN10A; (-) strand; PAM type: YTN; PAM sequence: TTT
  source 1..20: mol_type = other DNA
agggagctataggaggaatc

SEQ ID NO: 50584 - DNA, 20 bp, synthetic construct
  misc_feature 1..20: note = Description of Artificial Sequence: Synthetic oligonucleotide
  misc_feature 1..20: note = Target: SCN10A; (-) strand; PAM type: YTN; PAM sequence: TTA
  source 1..20: mol_type = other DNA
gggcaccgtttagggagcta

SEQ ID NO: 50585 - DNA, 20 bp, synthetic construct
  misc_feature 1..20: note = Description of Artificial Sequence: Synthetic oligonucleotide
  misc_feature 1..20: note = Target: SCN10A; (-) strand; PAM type: YTN; PAM sequence: TTC
  source 1..20: mol_type = other DNA
aattagggcaccgtttaggg

SEQ ID NO: 50586 - DNA, 20 bp, synthetic construct
  misc_feature 1..20: note = Description of Artificial Sequence: Synthetic oligonucleotide
  misc_feature 1..20: note = Target: SCN10A; (-) strand; PAM type: YTN; PAM sequence: CTT
  source 1..20: mol_type = other DNA
caattagggcaccgtttagg

SEQ ID NO: 50587 - DNA, 20 bp, synthetic construct
  misc_feature 1..20: note = Description of Artificial Sequence: Synthetic oligonucleotide
  misc_feature 1..20: note = Target: SCN10A; (-) strand; PAM type: YTN; PAM sequence: CTA
  source 1..20: mol_type = other DNA
gccacttcaattagggcacc

SEQ ID NO: 50588 - DNA, 20 bp, synthetic construct
  misc_feature 1..20: note = Description of Artificial Sequence: Synthetic oligonucleotide
  misc_feature 1..20: note = Target: SCN10A; (-) strand; PAM type: YTN; PAM sequence: CTG
  source 1..20: mol_type = other DNA
gactagccacttcaattagg

SEQ ID NO: 50589 - DNA, 20 bp, synthetic construct
  misc_feature 1..20: note = Description of Artificial Sequence: Synthetic oligonucleotide
  misc_feature 1..20: note = Target: SCN10A; (-) strand; PAM type: YTN; PAM sequence: TTC
  source 1..20: mol_type = other DNA
tggactagccacttcaatta

SEQ ID NO: 50590 - DNA, 20 bp, synthetic construct
  misc_feature 1..20: note = Description of Artificial Sequence: Synthetic oligonucleotide
  misc_feature 1..20: note = Target: SCN10A; (-) strand; PAM type: YTN; PAM sequence: CTG
  source 1..20: mol_type = other DNA
ttctggactagccacttcaa

SEQ ID NO: 50591 - DNA, 20 bp, synthetic construct
  misc_feature 1..20: note = Description of Artificial Sequence: Synthetic oligonucleotide
  misc_feature 1..20: note = Target: SCN10A; (-) strand; PAM type: YTN; PAM sequence: TTG
  source 1..20: mol_type = other DNA
gatactgttctggactagcc

SEQ ID NO: 50592 - DNA, 20 bp, synthetic construct
  misc_feature 1..20: note = Description of Artificial Sequence: Synthetic oligonucleotide
  misc_feature 1..20: note = Target: SCN10A; (-) strand; PAM type: YTN; PAM sequence: CTT
  source 1..20: mol_type = other DNA
ggatactgttctggactagc

SEQ ID NO: 50593 - DNA, 20 bp, synthetic construct
  misc_feature 1..20: note = Description of Artificial Sequence: Synthetic oligonucleotide
  misc_feature 1..20: note = Target: SCN10A; (-) strand; PAM type: YTN; PAM sequence: TTC
  source 1..20: mol_type = other DNA
ttggatactgttctggacta

SEQ ID NO: 50594 - DNA, 20 bp, synthetic construct
  misc_feature 1..20: note = Description of Artificial Sequence: Synthetic oligonucleotide
  misc_feature 1..20: note = Target: SCN10A; (-) strand; PAM type: YTN; PAM sequence: CTG
  source 1..20: mol_type = other DNA
tccattcttggatactgttc

SEQ ID NO: 50595 - DNA, 20 bp, synthetic construct
  misc_feature 1..20: note = Description of Artificial Sequence: Synthetic oligonucleotide
  misc_feature 1..20: note = Target: SCN10A; (-) strand; PAM type: YTN; PAM sequence: TTG
  source 1..20: mol_type = other DNA
cagactgtccattcttggat

SEQ ID NO: 50596 - DNA, 20 bp, synthetic construct
  misc_feature 1..20: note = Description of Artificial Sequence: Synthetic oligonucleotide
  misc_feature 1..20: note = Target: SCN10A; (-) strand; PAM type: YTN; PAM sequence: TTG
  source 1..20: mol_type = other DNA
tgaagaaggttgcagactgt

SEQ ID NO: 50597 - DNA, 20 bp, synthetic construct
  misc_feature 1..20: note = Description of Artificial Sequence: Synthetic oligonucleotide
  misc_feature 1..20: note = Target: SCN10A; (-) strand; PAM type: YTN; PAM sequence: TTT
  source 1..20: mol_type = other DNA
gtgaagaaggttgcagactg

SEQ ID NO: 50598 - DNA, 20 bp, synthetic construct
  misc_feature 1..20: note = Description of Artificial Sequence: Synthetic oligonucleotide
  misc_feature 1..20: note = Target: SCN10A; (-) strand; PAM type: YTN; PAM sequence: CTT
  source 1..20: mol_type = other DNA
tgtgaagaaggttgcagact

SEQ ID NO: 50599 - DNA, 20 bp, synthetic construct
  misc_feature 1..20: note = Description of Artificial Sequence: Synthetic oligonucleotide
  misc_feature 1..20: note = Target: SCN10A; (-) strand; PAM type: YTN; PAM sequence: TTG
  source 1..20: mol_type = other DNA
tgaggagtggaagctttgtg

SEQ ID NO: 50600 - DNA, 20 bp, synthetic construct
  misc_feature 1..20: note = Description of Artificial Sequence: Synthetic oligonucleotide
  misc_feature 1..20: note = Target: SCN10A; (-) strand; PAM type: YTN; PAM sequence: TTT
  source 1..20: mol_type = other DNA
gtgaggagtggaagctttgt

SEQ ID NO: 50601 - DNA, 20 bp, synthetic construct
  misc_feature 1..20: note = Description of Artificial Sequence: Synthetic oligonucleotide
  misc_feature 1..20: note = Target: SCN10A; (-) strand; PAM type: YTN; PAM sequence: CTC
  source 1..20: mol_type = other DNA
cggaaggagcaggaggtttg

SEQ ID NO: 50602 - DNA, 20 bp, synthetic construct
  misc_feature 1..20: note = Description of Artificial Sequence: Synthetic oligonucleotide
  misc_feature 1..20: note = Target: SCN10A; (-) strand; PAM type: YTN; PAM sequence: CTC
  source 1..20: mol_type = other DNA
gagatgctccggaaggagca

SEQ ID NO: 50603 - DNA, 20 bp, synthetic construct
  misc_feature 1..20: note = Description of Artificial Sequence: Synthetic oligonucleotide
  misc_feature 1..20: note = Target: SCN10A; (-) strand; PAM type: YTN; PAM sequence: TTC
  source 1..20: mol_type = other DNA
caggaggccctcgagatgct

SEQ ID NO: 50604 - DNA, 20 bp, synthetic construct
  misc_feature 1..20: note = Description of Artificial Sequence: Synthetic oligonucleotide
  misc_feature 1..20: note = Target: SCN10A; (-) strand; PAM type: YTN; PAM sequence: TTG
  source 1..20: mol_type = other DNA
aagcaaaggagaagaagttc

SEQ ID NO: 50605 - DNA, 20 bp, synthetic construct
  misc_feature 1..20: note = Description of Artificial Sequence: Synthetic oligonucleotide
  misc_feature 1..20: note = Target: SCN10A; (-) strand; PAM type: YTN; PAM sequence: CTG
  source 1..20: mol_type = other DNA
atgaaattgaagcaaaggag

SEQ ID NO: 50606 - DNA, 20 bp, synthetic construct
  misc_feature 1..20: note = Description of Artificial Sequence: Synthetic oligonucleotide
  misc_feature 1..20: note = Target: SCN10A; (-) strand; PAM type: YTN; PAM sequence: CTG
  source 1..20: mol_type = other DNA
tagtcaccatggcgtatgag

SEQ ID NO: 50607 - DNA, 20 bp, synthetic construct
  misc_feature 1..20: note = Description of Artificial Sequence: Synthetic oligonucleotide
  misc_feature 1..20: note = Target: SCN10A; (-) strand; PAM type: YTN; PAM sequence: TTG
  source 1..20: mol_type = other DNA
gctgtagtcaccatggcgta

SEQ ID NO: 50608 - DNA, 20 bp, synthetic construct
  misc_feature 1..20: note = Description of Artificial Sequence: Synthetic oligonucleotide
  misc_feature 1..20: note = Target: SCN10A; (-) strand; PAM type: YTN; PAM sequence: CTT
  source 1..20: mol_type = other DNA
ggctgtagtcaccatggcgt

SEQ ID NO: 50609 - DNA, 20 bp, synthetic construct
  misc_feature 1..20: note = Description of Artificial Sequence: Synthetic oligonucleotide
  misc_feature 1..20: note = Target: SCN10A; (-) strand; PAM type: YTN; PAM sequence: TTG
  source 1..20: mol_type = other DNA
atcttggctgtagtcaccat

SEQ ID NO: 50610 - DNA, 20 bp, synthetic construct
  misc_feature 1..20: note = Description of Artificial Sequence: Synthetic oligonucleotide
  misc_feature 1..20: note = Target: SCN10A; (-) strand; PAM type: YTN; PAM sequence: CTT
  source 1..20: mol_type = other DNA
gatcttggctgtagtcacca

SEQ ID NO: 50611 - DNA, 20 bp, synthetic construct
  misc_feature 1..20: note = Description of Artificial Sequence: Synthetic oligonucleotide
  misc_feature 1..20: note = Target: SCN10A; (-) strand; PAM type: YTN; PAM sequence: CTG
  source 1..20: mol_type = other DNA
gtcaacttgatcttggctgt

SEQ ID NO: 50612 - DNA, 20 bp, synthetic construct
  misc_feature 1..20: note = Description of Artificial Sequence: Synthetic oligonucleotide
  misc_feature 1..20: note = Target: SCN10A; (-) strand; PAM type: YTN; PAM sequence: CTA
  source 1..20: mol_type = other DNA
cctggtcaacttgatcttgg

SEQ ID NO: 50613 - DNA, 20 bp, synthetic construct
  misc_feature 1..20: note = Description of Artificial Sequence: Synthetic oligonucleotide
  misc_feature 1..20: note = Target: SCN10A; (-) strand; PAM type: YTN; PAM sequence: TTC
  source 1..20: mol_type = other DNA
tacctggtcaacttgatctt

SEQ ID NO: 50614 - DNA, 20 bp, synthetic construct
  misc_feature 1..20: note = Description of Artificial Sequence: Synthetic oligonucleotide
  misc_feature 1..20: note = Target: SCN10A; (-) strand; PAM type: YTN; PAM sequence: TTT
  source 1..20: mol_type = other DNA
ctacctggtcaacttgatct

SEQ ID NO: 50615 - DNA, 20 bp, synthetic construct
  misc_feature 1..20: note = Description of Artificial Sequence: Synthetic oligonucleotide
  misc_feature 1..20: note = Target: SCN10A; (-) strand; PAM type: YTN; PAM sequence: CTT
  source 1..20: mol_type = other DNA
tctacctggtcaacttgatc

SEQ ID NO: 50616 - DNA, 20 bp, synthetic construct
  misc_feature 1..20: note = Description of Artificial Sequence: Synthetic oligonucleotide
  misc_feature 1..20: note = Target: SCN10A; (-) strand; PAM type: YTN; PAM sequence: CTG
  source 1..20: mol_type = other DNA
ggatctttctacctggtcaa

SEQ ID NO: 50617 - DNA, 20 bp, synthetic construct
  misc_feature 1..20: note = Description of Artificial Sequence: Synthetic oligonucleotide
  misc_feature 1..20: note = Target: SCN10A; (-) strand; PAM type: YTN; PAM sequence: TTC
  source 1..20: mol_type = other DNA
ctgggatctttctacctggt

SEQ ID NO: 50618 - DNA, 20 bp, synthetic construct
  misc_feature 1..20: note = Description of Artificial Sequence: Synthetic oligonucleotide
  misc_feature 1..20: note = Target: SCN10A; (-) strand; PAM type: YTN; PAM sequence: CTT
  source 1..20: mol_type = other DNA
cctgggatctttctacctgg

SEQ ID NO: 50619 - DNA, 20 bp, synthetic construct
  misc_feature 1..20: note = Description of Artificial Sequence: Synthetic oligonucleotide
  misc_feature 1..20: note = Target: SCN10A; (-) strand; PAM type: YTN; PAM sequence: CTC
  source 1..20: mol_type = other DNA
gtaatcttcctgggatcttt

SEQ ID NO: 50620 - DNA, 20 bp, synthetic construct
  misc_feature 1..20: note = Description of Artificial Sequence: Synthetic oligonucleotide
  misc_feature 1..20: note = Target: SCN10A; (-) strand; PAM type: YTN; PAM sequence: TTG
  source 1..20: mol_type = other DNA
tgctcgtaatcttcctggga

SEQ ID NO: 50621 - DNA, 20 bp, synthetic construct
  misc_feature 1..20: note = Description of Artificial Sequence: Synthetic oligonucleotide
  misc_feature 1..20: note = Target: SCN10A; (-) strand; PAM type: YTN; PAM sequence: TTT
  source 1..20: mol_type = other DNA
gtgctcgtaatcttcctggg

SEQ ID NO: 50622 - DNA, 20 bp, synthetic construct
  misc_feature 1..20: note = Description of Artificial Sequence: Synthetic oligonucleotide
  misc_feature 1..20: note = Target: SCN10A; (-) strand; PAM type: YTN; PAM sequence: TTT
  source 1..20: mol_type = other DNA
tgtgctcgtaatcttcctgg

SEQ ID NO: 50623 - DNA, 20 bp, synthetic construct
  misc_feature 1..20: note = Description of Artificial Sequence: Synthetic oligonucleotide
  misc_feature 1..20: note = Target: SCN10A; (-) strand; PAM type: YTN; PAM sequence: TTT
  source 1..20: mol_type = other DNA
ttgtgctcgtaatcttcctg

SEQ ID NO: 50624 - DNA, 20 bp, synthetic construct
  misc_feature 1..20: note = Description of Artificial Sequence: Synthetic oligonucleotide
  misc_feature 1..20: note = Target: SCN10A; (-) strand; PAM type: YTN; PAM sequence: TTT
  source 1..20: mol_type = other DNA
tttgtgctcgtaatcttcct

SEQ ID NO: 50625 - DNA, 20 bp, synthetic construct
  misc_feature 1..20: note = Description of Artificial Sequence: Synthetic oligonucleotide
  misc_feature 1..20: note = Target: SCN10A; (-) strand; PAM type: YTN; PAM sequence: CTT
  source 1..20: mol_type = other DNA
ttttgtgctcgtaatcttcc

SEQ ID NO: 50626 - DNA, 20 bp, synthetic construct
  misc_feature 1..20: note = Description of Artificial Sequence: Synthetic oligonucleotide
  misc_feature 1..20: note = Target: SCN10A; (-) strand; PAM type: YTN; PAM sequence: CTA
  source 1..20: mol_type = other DNA
tatgatcttttttgtgctcg

SEQ ID NO: 50627 - DNA, 20 bp, synthetic construct
  misc_feature 1..20: note = Description of Artificial Sequence: Synthetic oligonucleotide
  misc_feature 1..20: note = Target: SCN10A; (-) strand; PAM type: YTN; PAM sequence: CTG
  source 1..20: mol_type = other DNA
ggaaaatctatatgatcttt

SEQ ID NO: 50628 - DNA, 20 bp, synthetic construct
  misc_feature 1..20: note = Description of Artificial Sequence: Synthetic oligonucleotide
  misc_feature 1..20: note = Target: SCN10A; (-) strand; PAM type: YTN; PAM sequence: TTC
  source 1..20: mol_type = other DNA
tgggaaaatctatatgatct

SEQ ID NO: 50629 - DNA, 20 bp, synthetic construct
  misc_feature 1..20: note = Description of Artificial Sequence: Synthetic oligonucleotide
  misc_feature 1..20: note = Target: SCN10A; (-) strand; PAM type: YTN; PAM sequence: CTT
  source 1..20: mol_type = other DNA
ctgggaaaatctatatgatc

SEQ ID NO: 50630 - DNA, 20 bp, synthetic construct
  misc_feature 1..20: note = Description of Artificial Sequence: Synthetic oligonucleotide
  misc_feature 1..20: note = Target: SCN10A; (-) strand; PAM type: YTN; PAM sequence: CTG
  source 1..20: mol_type = other DNA
aggacttctgggaaaatcta

SEQ ID NO: 50631 - DNA, 20 bp, synthetic construct
  misc_feature 1..20: note = Description of Artificial Sequence: Synthetic oligonucleotide
  misc_feature 1..20: note = Target: SCN10A; (-) strand; PAM type: YTN; PAM sequence: CTG
  source 1..20: mol_type = other DNA
cagaccctgaggacttctgg

SEQ ID NO: 50632 - DNA, 20 bp, synthetic construct
  misc_feature 1..20: note = Description of Artificial Sequence: Synthetic oligonucleotide
  misc_feature 1..20: note = Target: SCN10A; (-) strand; PAM type: YTN; PAM sequence: TTG
  source 1..20: mol_type = other DNA
aacctgcagaccctgaggac

SEQ ID NO: 50633 - DNA, 20 bp, synthetic construct
  misc_feature 1..20: note = Description of Artificial Sequence: Synthetic oligonucleotide
  misc_feature 1..20: note = Target: SCN10A; (-) strand; PAM type: YTN; PAM sequence: CTT
  source 1..20: mol_type = other DNA
gaacctgcagaccctgagga

SEQ ID NO: 50634 - DNA, 20 bp, synthetic construct
  misc_feature 1..20: note = Description of Artificial Sequence: Synthetic oligonucleotide
  misc_feature 1..20: note = Target: SCN10A; (-) strand; PAM type: YTN; PAM sequence: TTC
  source 1..20: mol_type = other DNA
ccttgaacctgcagaccctg

SEQ ID NO: 50635 - DNA, 20 bp, synthetic construct
  misc_feature 1..20: note = Description of Artificial Sequence: Synthetic oligonucleotide
  misc_feature 1..20: note = Target: SCN10A; (-) strand; PAM type: YTN; PAM sequence: TTT
  source 1..20: mol_type = other DNA
cccttgaacctgcagaccct

SEQ ID NO: 50636 - DNA, 20 bp, synthetic construct
  misc_feature 1..20: note = Description of Artificial Sequence: Synthetic oligonucleotide
  misc_feature 1..20: note = Target: SCN10A; (-) strand; PAM type: YTN; PAM sequence: CTT
  source 1..20: mol_type = other DNA
tcccttgaacctgcagaccc

SEQ ID NO: 50637 - DNA, 20 bp, synthetic construct
  misc_feature 1..20: note = Description of Artificial Sequence: Synthetic oligonucleotide
  misc_feature 1..20: note = Target: SCN10A; (-) strand; PAM type: YTN; PAM sequence: TTC
  source 1..20: mol_type = other DNA
tttcccttgaacctgcagac

SEQ ID NO: 50638 - DNA, 20 bp, synthetic construct
  misc_feature 1..20: note = Description of Artificial Sequence: Synthetic oligonucleotide
  misc_feature 1..20: note = Target: SCN10A; (-) strand; PAM type: YTN; PAM sequence: CTT
  source 1..20: mol_type = other DNA
ctttcccttgaacctgcaga

SEQ ID NO: 50639 - DNA, 20 bp, synthetic construct
  misc_feature 1..20: note = Description of Artificial Sequence: Synthetic oligonucleotide
  misc_feature 1..20: note = Target: SCN10A; (-) strand; PAM type: YTN; PAM sequence: CTC
  source 1..20: mol_type = other DNA
ttctttcccttgaacctgca

SEQ ID NO: 50640 - DNA, 20 bp, synthetic construct
  misc_feature 1..20: note = Description of Artificial Sequence: Synthetic oligonucleotide
  misc_feature 1..20: note = Target: SCN10A; (-) strand; PAM type: YTN; PAM sequence: TTC
  source 1..20: mol_type = other DNA
tcttctttcccttgaacctg

SEQ ID NO: 50641 - DNA, 20 bp, synthetic construct
  misc_feature 1..20: note = Description of Artificial Sequence: Synthetic oligonucleotide
  misc_feature 1..20: note = Target: SCN10A; (-) strand; PAM type: YTN; PAM sequence: TTT
  source 1..20: mol_type = other DNA
ctcttctttcccttgaacct

SEQ ID NO: 50642 - DNA, 20 bp, synthetic construct
  misc_feature 1..20: note = Description of Artificial Sequence: Synthetic oligonucleotide
  misc_feature 1..20: note = Target: SCN10A; (-) strand; PAM type: YTN; PAM sequence: CTA
  source 1..20: mol_type = other DNA
tgggtacaggtttctcttct

SEQ ID NO: 50643 - DNA, 20 bp, synthetic construct
  misc_feature 1..20: note = Description of Artificial Sequence: Synthetic oligonucleotide
  misc_feature 1..20: note = Target: SCN10A; (-) strand; PAM type: YTN; PAM sequence: TTC
  source 1..20: mol_type = other DNA
aggggtccatgtgctatggg

SEQ ID NO: 50644 - DNA, 20 bp, synthetic construct
  misc_feature 1..20: note = Description of Artificial Sequence: Synthetic oligonucleotide
  misc_feature 1..20: note = Target: SCN10A; (-) strand; PAM type: YTN; PAM sequence: TTA
  source 1..20: mol_type = other DNA
aattcaggggtccatgtgct

SEQ ID NO: 50645 - DNA, 20 bp, synthetic construct
  misc_feature 1..20: note = Description of Artificial Sequence: Synthetic oligonucleotide
  misc_feature 1..20: note = Target: SCN10A; (-) strand; PAM type: YTN; PAM sequence: CTT
  source 1..20: mol_type = other DNA
aaattcaggggtccatgtgc

SEQ ID NO: 50646 - DNA, 20 bp, synthetic construct
  misc_feature 1..20: note = Description of Artificial Sequence: Synthetic oligonucleotide
  misc_feature 1..20: note = Target: SCN10A; (-) strand; PAM type: YTN; PAM sequence: CTG
  source 1..20: mol_type = other DNA
acttaaattcaggggtccat

SEQ ID NO: 50647 - DNA, 20 bp, synthetic construct
  misc_feature 1..20: note = Description of Artificial Sequence: Synthetic oligonucleotide
  misc_feature 1..20: note = Target: SCN10A; (-) strand; PAM type: YTN; PAM sequence: CTG
  source 1..20: mol_type = other DNA
gaggaggctgacttaaattc

SEQ ID NO: 50648 - DNA, 20 bp, synthetic construct
  misc_feature 1..20: note = Description of Artificial Sequence: Synthetic oligonucleotide
  misc_feature 1..20: note = Target: SCN10A; (-) strand; PAM type: YTN; PAM sequence: TTC
  source 1..20: mol_type = other DNA
ctggaggaggctgacttaaa

SEQ ID NO: 50649 - DNA, 20 bp, synthetic construct
  misc_feature 1..20: note = Description of Artificial Sequence: Synthetic oligonucleotide
  misc_feature 1..20: note = Target: SCN10A; (-) strand; PAM type: YTN; PAM sequence: TTT
  source 1..20: mol_type = other DNA
cctggaggaggctgacttaa

SEQ ID NO: 50650 - DNA, 20 bp, synthetic construct
  misc_feature 1..20: note = Description of Artificial Sequence: Synthetic oligonucleotide
  misc_feature 1..20: note = Target: SCN10A; (-) strand; PAM type: YTN; PAM sequence: TTT
  source 1..20: mol_type = other DNA
tcctggaggaggctgactta

SEQ ID NO: 50651 - DNA, 20 bp, synthetic construct
  misc_feature 1..20: note = Description of Artificial Sequence: Synthetic oligonucleotide
  misc_feature 1..20: note = Target: SCN10A; (-) strand; PAM type: YTN; PAM sequence: CTT
  source 1..20: mol_type = other DNA
ttcctggaggaggctgactt

SEQ ID NO: 50652 - DNA, 20 bp, synthetic construct
  misc_feature 1..20: note = Description of Artificial Sequence: Synthetic oligonucleotide
  misc_feature 1..20: note = Target: SCN10A; (-) strand; PAM type: YTN; PAM sequence: CTG
  source 1..20: mol_type = other DNA
tgcttttcctggaggaggct

SEQ ID NO: 50653 - DNA, 20 bp, synthetic construct
  misc_feature 1..20: note = Description of Artificial Sequence: Synthetic oligonucleotide
  misc_feature 1..20: note = Target: SCN10A; (-) strand; PAM type: YTN; PAM sequence: CTG
  source 1..20: mol_type = other DNA
catggctgtgcttttcctgg

SEQ ID NO: 50654 - DNA, 20 bp, synthetic construct
  misc_feature 1..20: note = Description of Artificial Sequence: Synthetic oligonucleotide
  misc_feature 1..20: note = Target: SCN10A; (-) strand; PAM type: YTN; PAM sequence: CTG
  source 1..20: mol_type = other DNA
gtgggtcagctgcatggctg

SEQ ID NO: 50655 - DNA, 20 bp, synthetic construct
  misc_feature 1..20: note = Description of Artificial Sequence: Synthetic oligonucleotide
  misc_feature 1..20: note = Target: SCN10A; (-) strand; PAM type: YTN; PAM sequence: TTG
  source 1..20: mol_type = other DNA
gaggctggtgggtcagctgc

SEQ ID NO: 50656 - DNA, 20 bp, synthetic construct
  misc_feature 1..20: note = Description of Artificial Sequence: Synthetic oligonucleotide
  misc_feature 1..20: note = Target: SCN10A; (-) strand; PAM type: YTN; PAM sequence: TTG
  source 1..20: mol_type = other DNA
gttggaggctggtgggtcag

SEQ ID NO: 50657 - DNA, 20 bp, synthetic construct
  misc_feature 1..20: note = Description of Artificial Sequence: Synthetic oligonucleotide
  misc_feature 1..20: note = Target: SCN10A; (-) strand; PAM type: YTN; PAM sequence: CTT
  source 1..20: mol_type = other DNA
ggttggaggctggtgggtca

SEQ ID NO: 50658 - DNA, 20 bp, synthetic construct
  misc_feature 1..20: note = Description of Artificial Sequence: Synthetic oligonucleotide
  misc_feature 1..20: note = Target: SCN10A; (-) strand; PAM type: YTN; PAM sequence: TTC
  source 1..20: mol_type = other DNA
ccccacgcagacttggttgg

SEQ ID NO: 50659 - DNA, 20 bp, synthetic construct
  misc_feature 1..20: note = Description of Artificial Sequence: Synthetic oligonucleotide
  misc_feature 1..20: note = Target: SCN10A; (-) strand; PAM type: YTN; PAM sequence: CTG
  source 1..20: mol_type = other DNA
cattcccccacgcagacttg

SEQ ID NO: 50660 - DNA, 20 bp, synthetic construct
  misc_feature 1..20: note = Description of Artificial Sequence: Synthetic oligonucleotide
  misc_feature 1..20: note = Target: SCN10A; (-) strand; PAM type: YTN; PAM sequence: CTG
  source 1..20: mol_type = other DNA
agctgcattcccccacgcag

SEQ ID NO: 50661 - DNA, 20 bp, synthetic construct
  misc_feature 1..20: note = Description of Artificial Sequence: Synthetic oligonucleotide
  misc_feature 1..20: note = Target: SCN10A; (-) strand; PAM type: YTN; PAM sequence: CTA
  source 1..20: mol_type = other DNA
ccagcaggtactgagctgca

SEQ ID NO: 50662 - DNA, 20 bp, synthetic construct
  misc_feature 1..20: note = Description of Artificial Sequence: Synthetic oligonucleotide
  misc_feature 1..20: note = Target: SCN10A; (-) strand; PAM type: YTN; PAM sequence: CTC
  source 1..20: mol_type = other DNA
taccagcaggtactgagctg

SEQ ID NO: 50663 - DNA, 20 bp, synthetic construct
  misc_feature 1..20: note = Description of Artificial Sequence: Synthetic oligonucleotide
  misc_feature 1..20: note = Target: SCN10A; (-) strand; PAM type: YTN; PAM sequence: CTG
  source 1..20: mol_type = other DNA
ggaacgcctctaccagcagg

SEQ ID NO: 50664 - DNA, 20 bp, synthetic construct
  misc_feature 1..20: note = Description of Artificial Sequence: Synthetic oligonucleotide
  misc_feature 1..20: note = Target: SCN10A; (-) strand; PAM type: YTN; PAM sequence: TTC
  source 1..20: mol_type = other DNA
ctgggaacgcctctaccagc

SEQ ID NO: 50665 - DNA, 20 bp, synthetic construct
  misc_feature 1..20: note = Description of Artificial Sequence: Synthetic oligonucleotide
  misc_feature 1..20: note = Target: SCN10A; (-) strand; PAM type: YTN; PAM sequence: CTC
  source 1..20: mol_type = other DNA
atgacacaggattcctggga

SEQ ID NO: 50666 - DNA, 20 bp, synthetic construct
  misc_feature 1..20: note = Description of Artificial Sequence: Synthetic oligonucleotide
  misc_feature 1..20: note = Target: SCN10A; (-) strand; PAM type: YTN; PAM sequence: TTC
  source 1..20: mol_type = other DNA
cgcctcatgacacaggattc

SEQ ID NO: 50667 - DNA, 20 bp, synthetic construct
  misc_feature 1..20: note = Description of Artificial Sequence: Synthetic oligonucleotide
  misc_feature 1..20: note = Target: SCN10A; (-) strand; PAM type: YTN; PAM sequence: CTG
  source 1..20: mol_type = other DNA
ttccgcctcatgacacagga

SEQ ID NO: 50668 - DNA, 20 bp, synthetic construct
  misc_feature 1..20: note = Description of Artificial Sequence: Synthetic oligonucleotide
  misc_feature 1..20: note = Target: SCN10A; (-) strand; PAM type: YTN; PAM sequence: CTC
  source 1..20: mol_type = other DNA
actgttccgcctcatgacac

SEQ ID NO: 50669 - DNA, 20 bp, synthetic construct
  misc_feature 1..20: note = Description of Artificial Sequence: Synthetic oligonucleotide
  misc_feature 1..20: note = Target: SCN10A; (-) strand; PAM type: YTN; PAM sequence: CTC
  source 1..20: mol_type = other DNA
tcactgttccgcctcatgac

SEQ ID NO: 50670 - DNA, 20 bp, synthetic construct
  misc_feature 1..20: note = Description of Artificial Sequence: Synthetic oligonucleotide
  misc_feature 1..20: note = Target: SCN10A; (-) strand; PAM type: YTN; PAM sequence: TTC
  source 1..20: mol_type = other DNA
ctctcactgttccgcctcat

SEQ ID NO: 50671 - DNA, 20 bp, synthetic construct
  misc_feature 1..20: note = Description of Artificial Sequence: Synthetic oligonucleotide
  misc_feature 1..20: note = Target: SCN10A; (-) strand; PAM type: YTN; PAM sequence: TTT
  source 1..20: mol_type = other DNA
cctctcactgttccgcctca

SEQ ID NO: 50672 - DNA, 20 bp, synthetic construct
  misc_feature 1..20: note = Description of Artificial Sequence: Synthetic oligonucleotide
  misc_feature 1..20: note = Target: SCN10A; (-) strand; PAM type: YTN; PAM sequence: CTT
  source 1..20: mol_type = other DNA
tcctctcactgttccgcctc

SEQ ID NO: 50673 - DNA, 20 bp, synthetic construct
  misc_feature 1..20: note = Description of Artificial Sequence: Synthetic oligonucleotide
  misc_feature 1..20: note = Target: SCN10A; (-) strand; PAM type: YTN; PAM sequence: TTG
  source 1..20: mol_type = other DNA
ggctttcctctcactgttcc

SEQ ID NO: 50674 - DNA, 20 bp, synthetic construct
  misc_feature 1..20: note = Description of Artificial Sequence: Synthetic oligonucleotide
  misc_feature 1..20: note = Target: SCN10A; (-) strand; PAM type: YTN; PAM sequence: CTT
  source 1..20: mol_type = other DNA
gggctttcctctcactgttc

SEQ ID NO: 50675 - DNA, 20 bp, synthetic construct
  misc_feature 1..20: note = Description of Artificial Sequence: Synthetic oligonucleotide
  misc_feature 1..20: note = Target: SCN10A; (-) strand; PAM type: YTN; PAM sequence: TTG
  source 1..20: mol_type = other DNA
cttgggctttcctctcactg

SEQ ID NO: 50676 - DNA, 20 bp, synthetic construct
  misc_feature 1..20: note = Description of Artificial Sequence: Synthetic oligonucleotide
  misc_feature 1..20: note = Target: SCN10A; (-) strand; PAM type: YTN; PAM sequence: TTT
  source 1..20: mol_type = other DNA
gcttgggctttcctctcact

SEQ ID NO: 50677 - DNA, 20 bp, synthetic construct
  misc_feature 1..20: note = Description of Artificial Sequence: Synthetic oligonucleotide
  misc_feature 1..20: note = Target: SCN10A; (-) strand; PAM type: YTN; PAM sequence: CTT
  source 1..20: mol_type = other DNA
tgcttgggctttcctctcac

SEQ ID NO: 50678 - DNA, 20 bp, synthetic construct
  misc_feature 1..20: note = Description of Artificial Sequence: Synthetic oligonucleotide
  misc_feature 1..20: note = Target: SCN10A; (-) strand; PAM type: YTN; PAM sequence: TTC
  source 1..20: mol_type = other DNA
ctttgcttgggctttcctct

SEQ ID NO: 50679 - DNA, 20 bp, synthetic construct
  misc_feature 1..20: note = Description of Artificial Sequence: Synthetic oligonucleotide
  misc_feature 1..20: note = Target: SCN10A; (-) strand; PAM type: YTN; PAM sequence: TTG
  source 1..20: mol_type = other DNA
attcctttgcttgggctttc

SEQ ID NO: 50680 - DNA, 20 bp, synthetic construct
  misc_feature 1..20: note = Description of Artificial Sequence: Synthetic oligonucleotide
  misc_feature 1..20: note = Target: SCN10A; (-) strand; PAM type: YTN; PAM sequence: TTT
  source 1..20: mol_type = other DNA
gattcctttgcttgggcttt

SEQ ID NO: 50681 - DNA, 20 bp, synthetic construct
  misc_feature 1..20: note = Description of Artificial Sequence: Synthetic oligonucleotide
  misc_feature 1..20: note = Target: SCN10A; (-) strand; PAM type: YTN; PAM sequence: CTT
  source 1..20: mol_type = other DNA
tgattcctttgcttgggctt

SEQ ID NO: 50682 - DNA, 20 bp, synthetic construct
  misc_feature 1..20: note = Description of Artificial Sequence: Synthetic oligonucleotide
  misc_feature 1..20: note = Target: SCN10A; (-) strand; PAM type: YTN; PAM sequence: CTA
  source 1..20: mol_type = other DNA
caccagctttgattcctttg

SEQ ID NO: 50683 - DNA, 20 bp, synthetic construct
  misc_feature 1..20: note = Description of Artificial Sequence: Synthetic oligonucleotide
  misc_feature 1..20: note = Target: SCN10A; (-) strand; PAM type: YTN; PAM sequence: TTA
  source 1..20: mol_type = other DNA
actacaccagctttgattcc

SEQ ID NO: 50684 - DNA, 20 bp, synthetic construct
  misc_feature 1..20: note = Description of Artificial Sequence: Synthetic oligonucleotide
  misc_feature 1..20: note = Target: SCN10A; (-) strand; PAM type: YTN; PAM sequence: TTT
  source 1..20: mol_type = other DNA
aactacaccagctttgattc

SEQ ID NO: 50685 - DNA, 20 bp, synthetic construct
  misc_feature 1..20: note = Description of Artificial Sequence: Synthetic oligonucleotide
  misc_feature 1..20: note = Target: SCN10A; (-) strand; PAM type: YTN; PAM sequence: TTT
  source 1..20: mol_type = other DNA
taactacaccagctttgatt

SEQ ID NO: 50686 - DNA, 20 bp, synthetic construct
  misc_feature 1..20: note = Description of Artificial Sequence: Synthetic oligonucleotide
  misc_feature 1..20: note = Target: SCN10A; (-) strand; PAM type: YTN; PAM sequence: CTG
  source 1..20: mol_type = other DNA
acaacccggattttaactac

SEQ ID NO: 50687 - DNA, 20 bp, synthetic construct
  misc_feature 1..20: note = Description of Artificial Sequence: Synthetic oligonucleotide
  misc_feature 1..20: note = Target: SCN10A; (-) strand; PAM type: YTN; PAM sequence: TTC
  source 1..20: mol_type = other DNA
tgacaacccggattttaact

SEQ ID NO: 50688 - DNA, 20 bp, synthetic construct
  misc_feature 1..20: note = Description of Artificial Sequence: Synthetic oligonucleotide
  misc_feature 1..20: note = Target: SCN10A; (-) strand; PAM type: YTN; PAM sequence: CTT
  source 1..20: mol_type = other DNA
ctgacaacccggattttaac

SEQ ID NO: 50689 - DNA, 20 bp, synthetic construct
  misc_feature 1..20: note = Description of Artificial Sequence: Synthetic oligonucleotide
  misc_feature 1..20: note = Target: SCN10A; (-) strand; PAM type: YTN; PAM sequence: TTA
  source 1..20: mol_type = other DNA
aaacttctgacaacccggat

SEQ ID NO: 50690 - DNA, 20 bp, synthetic construct
  misc_feature 1..20: note = Description of Artificial Sequence: Synthetic oligonucleotide
  misc_feature 1..20: note = Target: SCN10A; (-) strand; PAM type: YTN; PAM sequence: CTT
  source 1..20: mol_type = other DNA
aaaacttctgacaacccgga

SEQ ID NO: 50691 - DNA, 20 bp, synthetic construct
  misc_feature 1..20: note = Description of Artificial Sequence: Synthetic oligonucleotide
  misc_feature 1..20: note = Target: SCN10A; (-) strand; PAM type: YTN; PAM sequence: CTG
  source 1..20: mol_type = other DNA
ccttaaaacttctgacaacc

SEQ ID NO: 50692 - DNA, 20 bp, synthetic construct
  misc_feature 1..20: note = Description of Artificial Sequence: Synthetic oligonucleotide
  misc_feature 1..20: note = Target: SCN10A; (-) strand; PAM type: YTN; PAM sequence: TTA
  source 1..20: mol_type = other DNA
tatctgccttaaaacttctg

SEQ ID NO: 50693 - DNA, 20 bp, synthetic construct
  misc_feature 1..20: note = Description of Artificial Sequence: Synthetic oligonucleotide
  misc_feature 1..20: note = Target: SCN10A; (-) strand; PAM type: YTN; PAM sequence: CTG
  source 1..20: mol_type = other DNA
atggttatatctgccttaaa

SEQ ID NO: 50694 - DNA, 20 bp, synthetic construct
  misc_feature 1..20: note = Description of Artificial Sequence: Synthetic oligonucleotide
  misc_feature 1..20: note = Target: SCN10A; (-) strand; PAM type: YTN; PAM sequence: CTG
  source 1..20: mol_type = other DNA
ccctgatggttatatctgcc

SEQ ID NO: 50695 - DNA, 20 bp, synthetic construct
  misc_feature 1..20: note = Description of Artificial Sequence: Synthetic oligonucleotide
  misc_feature 1..20: note = Target: SCN10A; (-) strand; PAM type: YTN; PAM sequence: CTG
  source 1..20: mol_type = other DNA
cagccactgccctgatggtt

SEQ ID NO: 50696 - DNA, 20 bp, synthetic construct
  misc_feature 1..20: note = Description of Artificial Sequence: Synthetic oligonucleotide
  misc_feature 1..20: note = Target: SCN10A; (-) strand; PAM type: YTN; PAM sequence: TTG
  source 1..20: mol_type = other DNA
ctgcagccactgccctgatg

SEQ ID NO: 50697 - DNA, 20 bp, synthetic construct
  misc_feature 1..20: note = Description of Artificial Sequence: Synthetic oligonucleotide
  misc_feature 1..20: note = Target: SCN10A; (-) strand; PAM type: YTN; PAM sequence: CTT
  source 1..20: mol_type = other DNA
gctgcagccactgccctgat

SEQ ID NO: 50698 - DNA, 20 bp, synthetic construct
  misc_feature 1..20: note = Description of Artificial Sequence: Synthetic oligonucleotide
  misc_feature 1..20: note = Target: SCN10A; (-) strand; PAM type: YTN; PAM sequence: TTC
  source 1..20: mol_type = other DNA
ttgctgcagccactgccctg

SEQ ID NO: 50699 - DNA, 20 bp, synthetic construct
  misc_feature 1..20: note = Description of Artificial Sequence: Synthetic oligonucleotide
  misc_feature 1..20: note = Target: SCN10A; (-) strand; PAM type: YTN; PAM sequence: CTG
  source 1..20: mol_type = other DNA
ttcttgctgcagccactgcc

SEQ ID NO: 50700 - DNA, 20 bp, synthetic construct
  misc_feature 1..20: note = Description of Artificial Sequence: Synthetic oligonucleotide
  misc_feature 1..20: note = Target: SCN10A; (-) strand; PAM type: YTN; PAM sequence: CTC
  source 1..20: mol_type = other DNA
tgttcttgctgcagccactg

SEQ ID NO: 50701 - DNA, 20 bp, synthetic construct
  misc_feature 1..20: note = Description of Artificial Sequence: Synthetic oligonucleotide
  misc_feature 1..20: note = Target: SCN10A; (-) strand; PAM type: YTN; PAM sequence: TTC
  source 1..20: mol_type = other DNA
tctgttcttgctgcagccac

SEQ ID NO: 50702 - DNA, 20 bp, synthetic construct
  misc_feature 1..20: note = Description of Artificial Sequence: Synthetic oligonucleotide
  misc_feature 1..20: note = Target: SCN10A; (-) strand; PAM type: YTN; PAM sequence: CTT
  source 1..20: mol_type = other DNA
ctctgttcttgctgcagcca

SEQ ID NO: 50703 - DNA, 20 bp, synthetic construct
  misc_feature 1..20: note = Description of Artificial Sequence: Synthetic oligonucleotide
  misc_feature 1..20: note = Target: SCN10A; (-) strand; PAM type: YTN; PAM sequence: CTG
  source 1..20: mol_type = other DNA
caataagcaggggatgacct

SEQ ID NO: 50704 - DNA, 20 bp, synthetic construct
  misc_feature 1..20: note = Description of Artificial Sequence: Synthetic oligonucleotide
  misc_feature 1..20: note = Target: SCN10A; (-) strand; PAM type: YTN; PAM sequence: TTG
  source 1..20: mol_type = other DNA
tctgcaataagcaggggatg

SEQ ID NO: 50705 - DNA, 20 bp, synthetic construct
  misc_feature 1..20: note = Description of Artificial Sequence: Synthetic oligonucleotide
  misc_feature 1..20: note = Target: SCN10A; (-) strand; PAM type: YTN; PAM sequence: CTT
  source 1..20: mol_type = other DNA
gtctgcaataagcaggggat

SEQ ID NO: 50706 - DNA, 20 bp, synthetic construct
  misc_feature 1..20: note = Description of Artificial Sequence: Synthetic oligonucleotide
  misc_feature 1..20: note = Target: SCN10A; (-) strand; PAM type: YTN; PAM sequence: CTA
  source 1..20: mol_type = other DNA
ccttgtctgcaataagcagg

SEQ ID NO: 50707 - DNA, 20 bp, synthetic construct
  misc_feature 1..20: note = Description of Artificial Sequence: Synthetic oligonucleotide
  misc_feature 1..20: note = Target: SCN10A; (-) strand; PAM type: YTN; PAM sequence: CTG
  source 1..20: mol_type = other DNA
ggctaccttgtctgcaataa

SEQ ID NO: 50708 - DNA, 20 bp, synthetic construct
  misc_feature 1..20: note = Description of Artificial Sequence: Synthetic oligonucleotide
  misc_feature 1..20: note = Target: SCN10A; (-) strand; PAM type: YTN; PAM sequence: CTC
  source 1..20: mol_type = other DNA
gcagccctgggctaccttgt

SEQ ID NO: 50709 - DNA, 20 bp, synthetic construct
  misc_feature 1..20: note = Description of Artificial Sequence: Synthetic oligonucleotide
  misc_feature 1..20: note = Target: SCN10A; (-) strand; PAM type: YTN; PAM sequence: TTG
  source 1..20: mol_type = other DNA
tctcgcagccctgggctacc

SEQ ID NO: 50710 - DNA, 20 bp, synthetic construct
  misc_feature 1..20: note = Description of Artificial Sequence: Synthetic oligonucleotide
  misc_feature 1..20: note = Target: SCN10A; (-) strand; PAM type: YTN; PAM sequence: CTG
  source 1..20: mol_type = other DNA
tggttgtctcgcagccctgg

SEQ ID NO: 50711 - DNA, 20 bp, synthetic construct
  misc_feature 1..20: note = Description of Artificial Sequence: Synthetic oligonucleotide
  misc_feature 1..20: note = Target: SCN10A; (-) strand; PAM type: YTN; PAM sequence: CTC
  source 1..20: mol_type = other DNA
tgtggttgtctcgcagccct

SEQ ID NO: 50712 - DNA, 20 bp, synthetic construct
  misc_feature 1..20: note = Description of Artificial Sequence: Synthetic oligonucleotide
  misc_feature 1..20: note = Target: SCN10A; (-) strand; PAM type: YTN; PAM sequence: CTG
  source 1..20: mol_type = other DNA
acataaaactctgtggttgt

SEQ ID NO: 50713 - DNA, 20 bp, synthetic construct
  misc_feature 1..20: note = Description of Artificial Sequence: Synthetic oligonucleotide
  misc_feature 1..20: note = Target: SCN10A; (-) strand; PAM type: YTN; PAM sequence: CTC
  source 1..20: mol_type = other DNA
tgacataaaactctgtggtt

SEQ ID NO: 50714 - DNA, 20 bp, synthetic construct
  misc_feature 1..20: note = Description of Artificial Sequence: Synthetic oligonucleotide
  misc_feature 1..20: note = Target: SCN10A; (-) strand; PAM type: YTN; PAM sequence: CTG
  source 1..20: mol_type = other DNA
atctctgacataaaactctg

SEQ ID NO: 50715 - DNA, 20 bp, synthetic construct
  misc_feature 1..20: note = Description of Artificial Sequence: Synthetic oligonucleotide
  misc_feature 1..20: note = Target: SCN10A; (-) strand; PAM type: YTN; PAM sequence: CTC
  source 1..20: mol_type = other DNA
tgatctctgacataaaactc

SEQ ID NO: 50716 - DNA, 20 bp, synthetic construct
  misc_feature 1..20: note = Description of Artificial Sequence: Synthetic oligonucleotide
  misc_feature 1..20: note = Target: SCN10A; (-) strand; PAM type: YTN; PAM sequence: TTG
  source 1..20: mol_type = other DNA
aactctgatctctgacataa

SEQ ID NO: 50717 - DNA, 20 bp, synthetic construct
  misc_feature 1..20: note = Description of Artificial Sequence: Synthetic oligonucleotide
  misc_feature 1..20: note = Target: SCN10A; (-) strand; PAM type: YTN; PAM sequence: CTT
  source 1..20: mol_type = other DNA
gaactctgatctctgacata

SEQ ID NO: 50718 - DNA, 20 bp, synthetic construct
  misc_feature 1..20: note = Description of Artificial Sequence: Synthetic oligonucleotide
  misc_feature 1..20: note = Target: SCN10A; (-) strand; PAM type: YTN; PAM sequence: CTA
  source 1..20: mol_type = other DNA
ggtcttgaactctgatctct

SEQ ID NO: 50719 - DNA, 20 bp, synthetic construct
  misc_feature 1..20: note = Description of Artificial Sequence: Synthetic oligonucleotide
  misc_feature 1..20: note = Target: SCN10A; (-) strand; PAM type: YTN; PAM sequence: CTA
  source 1..20: mol_type = other DNA
ataagaggaagactaggtct

SEQ ID NO: 50720 - DNA, 20 bp, synthetic construct
  misc_feature 1..20: note = Description of Artificial Sequence: Synthetic oligonucleotide
  misc_feature 1..20: note = Target: SCN10A; (-) strand; PAM type: YTN; PAM sequence: CTG
  source 1..20: mol_type = other DNA
ctaataagaggaagactagg

SEQ ID NO: 50721 - DNA, 20 bp, synthetic construct
  misc_feature 1..20: note = Description of Artificial Sequence: Synthetic oligonucleotide
  misc_feature 1..20: note = Target: SCN10A; (-) strand; PAM type: YTN; PAM sequence: CTA
  source 1..20: mol_type = other DNA
aacagaccaagtgtccaaga

SEQ ID NO: 50722 - DNA, 20 bp, synthetic construct
  misc_feature 1..20: note = Description of Artificial Sequence: Synthetic oligonucleotide
  misc_feature 1..20: note = Target: SCN10A; (-) strand; PAM type: YTN; PAM sequence: TTA
  source 1..20: mol_type = other DNA
tggataacagaaaccaatac

SEQ ID NO: 50723 - DNA, 20 bp, synthetic construct
  misc_feature 1..20: note = Description of Artificial Sequence: Synthetic oligonucleotide
  misc_feature 1..20: note = Target: SCN10A; (-) strand; PAM type: YTN; PAM sequence: TTT
  source 1..20: mol_type = other DNA
atggataacagaaaccaata

SEQ ID NO: 50724 - DNA, 20 bp, synthetic construct
  misc_feature 1..20: note = Description of Artificial Sequence: Synthetic oligonucleotide
  misc_feature 1..20: note = Target: SCN10A; (-) strand; PAM type: YTN; PAM sequence: TTT
  source 1..20: mol_type = other DNA
tatggataacagaaaccaat

SEQ ID NO: 50725 - DNA, 20 bp, synthetic construct
  misc_feature 1..20: note = Description of Artificial Sequence: Synthetic oligonucleotide
  misc_feature 1..20: note = Target: SCN10A; (-) strand; PAM type: YTN; PAM sequence: TTA
  source 1..20: mol_type = other DNA
gcgtccccgttttatggata

SEQ ID NO: 50726 - DNA, 20 bp, synthetic construct
  misc_feature 1..20: note = Description of Artificial Sequence: Synthetic oligonucleotide
  misc_feature 1..20: note = Target: SCN10A; (-) strand; PAM type: YTN; PAM sequence: CTG
  source 1..20: mol_type = other DNA
acgtgaaagtattagcgtcc

SEQ ID NO: 50727 - DNA, 20 bp, synthetic construct
  misc_feature 1..20: note = Description of Artificial Sequence: Synthetic oligonucleotide
  misc_feature 1..20: note = Target: SCN10A; (-) strand; PAM type: YTN; PAM sequence: TTC
  source 1..20: mol_type = other DNA
tgacgtgaaagtattagcgt

SEQ ID NO: 50728 - DNA, 20 bp, synthetic construct
  misc_feature 1..20: note = Description of Artificial Sequence: Synthetic oligonucleotide
  misc_feature 1..20: note = Target: SCN10A; (-) strand; PAM type: YTN; PAM sequence: CTG
  source 1..20: mol_type = other DNA
tgtatgaaattctgacgtga

SEQ ID NO: 50729 - DNA, 20 bp, synthetic construct
  misc_feature 1..20: note = Description of Artificial Sequence: Synthetic oligonucleotide
  misc_feature 1..20: note = Target: SCN10A; (-) strand; PAM type: YTN; PAM sequence: CTC
  source 1..20: mol_type = other DNA
ccctgtgtatgaaattctga

SEQ ID NO: 50730 - DNA, 20 bp, synthetic construct
  misc_feature 1..20: note = Description of Artificial Sequence: Synthetic oligonucleotide
  misc_feature 1..20: note = Target: SCN10A; (-) strand; PAM type: YTN; PAM sequence: TTC
  source 1..20: mol_type = other DNA
cccaggccactcccctgtgt

SEQ ID NO: 50731 - DNA, 20 bp, synthetic construct
  misc_feature 1..20: note = Description of Artificial Sequence: Synthetic oligonucleotide
  misc_feature 1..20: note = Target: SCN10A; (-) strand; PAM type: YTN; PAM sequence: CTT
  source 1..20: mol_type = other DNA
ccccaggccactcccctgtg

SEQ ID NO: 50732 - DNA, 20 bp, synthetic construct
  misc_feature 1..20: note = Description of Artificial Sequence: Synthetic oligonucleotide
  misc_feature 1..20: note = Target: SCN10A; (-) strand; PAM type: YTN; PAM sequence: CTG
  source 1..20: mol_type = other DNA
ccttccccaggccactcccc

SEQ ID NO: 50733 - DNA, 20 bp, synthetic construct
  misc_feature 1..20: note = Description of Artificial Sequence: Synthetic oligonucleotide
  misc_feature 1..20: note = Target: SCN10A; (-) strand; PAM type: YTN; PAM sequence: CTG
  source 1..20: mol_type = other DNA
ggcagtcagctgccttcccc

SEQ ID NO: 50734 - DNA, 20 bp, synthetic construct
  misc_feature 1..20: note = Description of Artificial Sequence: Synthetic oligonucleotide
  misc_feature 1..20: note = Target: SCN10A; (-) strand; PAM type: YTN; PAM sequence: TTA
  source 1..20: mol_type = other DNA
tagtatcgtgtctgggcagt

SEQ ID NO: 50735 - DNA, 20 bp, synthetic construct
  misc_feature 1..20: note = Description of Artificial Sequence: Synthetic oligonucleotide
  misc_feature 1..20: note = Target: SCN10A; (-) strand; PAM type: YTN; PAM sequence: CTT
  source 1..20: mol_type = other DNA
atagtatcgtgtctgggcag

SEQ ID NO: 50736 - DNA, 20 bp, synthetic construct
  misc_feature 1..20: note = Description of Artificial Sequence: Synthetic oligonucleotide
  misc_feature 1..20: note = Target: SCN10A; (-) strand; PAM type: YTN; PAM sequence: CTG
  source 1..20: mol_type = other DNA
gcaaagagcttatagtatcg

SEQ ID NO: 50737 - DNA, 20 bp, synthetic construct
  misc_feature 1..20: note = Description of Artificial Sequence: Synthetic oligonucleotide
  misc_feature 1..20: note = Target: SCN10A; (-) strand; PAM type: YTN; PAM sequence: CTG
  source 1..20: mol_type = other DNA
gtatgaactggcaaagagct

SEQ ID NO: 50738 - DNA, 20 bp, synthetic construct
  misc_feature 1..20: note = Description of Artificial Sequence: Synthetic oligonucleotide
  misc_feature 1..20: note = Target: SCN10A; (-) strand; PAM type: YTN; PAM sequence: TTC
  source 1..20: mol_type = other DNA
cctggtatgaactggcaaag

SEQ ID NO: 50739 - DNA, 20 bp, synthetic construct
  misc_feature 1..20: note = Description of Artificial Sequence: Synthetic oligonucleotide
  misc_feature 1..20: note = Target: SCN10A; (-) strand; PAM type: YTN; PAM sequence: TTT
  source 1..20: mol_type = other DNA
ccctggtatgaactggcaaa

SEQ ID NO: 50740 - DNA, 20 bp, synthetic construct
  misc_feature 1..20: note = Description of Artificial Sequence: Synthetic oligonucleotide
  misc_feature 1..20: note = Target: SCN10A; (-) strand; PAM type: YTN; PAM sequence: CTC
  source 1..20: mol_type = other DNA
atttccctggtatgaactgg

SEQ ID NO: 50741 - DNA, 20 bp, synthetic construct
  misc_feature 1..20: note = Description of Artificial Sequence: Synthetic oligonucleotide
  misc_feature 1..20: note = Target: SCN10A; (-) strand; PAM type: YTN; PAM sequence: CTC
  source 1..20: mol_type = other DNA
tcatttccctggtatgaact

SEQ ID NO: 50742 - DNA, 20 bp, synthetic construct
  misc_feature 1..20: note = Description of Artificial Sequence: Synthetic oligonucleotide
  misc_feature 1..20: note = Target: SCN10A; (-) strand; PAM type: YTN; PAM sequence: CTG
  source 1..20: mol_type = other DNA
actctcatttccctggtatg

SEQ ID NO: 50743 - DNA, 20 bp, synthetic construct
  misc_feature 1..20: note = Description of Artificial Sequence: Synthetic oligonucleotide
  misc_feature 1..20: note = Target: SCN10A; (-) strand; PAM type: YTN; PAM sequence: CTA
  source 1..20: mol_type = other DNA
ctgactctcatttccctggt

SEQ ID NO: 50744 - DNA, 20 bp, synthetic construct
  misc_feature 1..20: note = Description of Artificial Sequence: Synthetic oligonucleotide
  misc_feature 1..20: note = Target: SCN10A; (-) strand; PAM type: YTN; PAM sequence: TTG
  source 1..20: mol_type = other DNA
ctactgactctcatttccct

SEQ ID NO: 50745 - DNA, 20 bp, synthetic construct
  misc_feature 1..20: note = Description of Artificial Sequence: Synthetic oligonucleotide
  misc_feature 1..20: note = Target: SCN10A; (-) strand; PAM type: YTN; PAM sequence: TTA
  source 1..20: mol_type = other DNA
ttgctactgactctcatttc

SEQ ID NO: 50746 - DNA, 20 bp, synthetic construct
  misc_feature 1..20: note = Description of Artificial Sequence: Synthetic oligonucleotide
  misc_feature 1..20: note = Target: SCN10A; (-) strand; PAM type: YTN; PAM sequence: CTG
  source 1..20: mol_type = other DNA
cgttattgctactgactctc

SEQ ID NO: 50747 - DNA, 20 bp, synthetic construct
  misc_feature 1..20: note = Description of Artificial Sequence: Synthetic oligonucleotide
  misc_feature 1..20: note = Target: SCN10A; (-) strand; PAM type: YTN; PAM sequence: TTA
  source 1..20: mol_type = other DNA
agtctgcgttattgctactg

SEQ ID NO: 50748 - DNA, 20 bp, synthetic construct
  misc_feature 1..20: note = Description of Artificial Sequence: Synthetic oligonucleotide
  misc_feature 1..20: note = Target: SCN10A; (-) strand; PAM type: YTN; PAM sequence: TTT
  source 1..20: mol_type = other DNA
aagtctgcgttattgctact

SEQ ID NO: 50749 - DNA, 20 bp, synthetic construct
  misc_feature 1..20: note = Description of Artificial Sequence: Synthetic oligonucleotide
  misc_feature 1..20: note = Target: SCN10A; (-) strand; PAM type: YTN; PAM sequence: TTT
  source 1..20: mol_type = other DNA
taagtctgcgttattgctac

SEQ ID NO: 50750 - DNA, 20 bp, synthetic construct
  misc_feature 1..20: note = Description of Artificial Sequence: Synthetic oligonucleotide
  misc_feature 1..20: note = Target: SCN10A; (-) strand; PAM type: YTN; PAM sequence: CTC
  source 1..20: mol_type = other DNA
aggttttaagtctgcgttat

SEQ ID NO: 50751 - DNA, 20 bp, synthetic construct
  misc_feature 1..20: note = Description of Artificial Sequence: Synthetic oligonucleotide
  misc_feature 1..20: note = Target: SCN10A; (-) strand; PAM type: YTN; PAM sequence: CTG
  source 1..20: mol_type = other DNA
cagatgatgccaacaggctc

SEQ ID NO: 50752 - DNA, 20 bp, synthetic construct
  misc_feature 1..20: note = Description of Artificial Sequence: Synthetic oligonucleotide
  misc_feature 1..20: note = Target: SCN10A; (-) strand; PAM type: YTN; PAM sequence: CTC
  source 1..20: mol_type = other DNA
tgcagatgatgccaacaggc

SEQ ID NO: 50753 - DNA, 20 bp, synthetic construct
  misc_feature 1..20: note = Description of Artificial Sequence: Synthetic oligonucleotide
  misc_feature 1..20: note = Target: SCN10A; (-) strand; PAM type: YTN; PAM sequence: TTG
  source 1..20: mol_type = other DNA
atagacaactctgcagatga

SEQ ID NO: 50754 - DNA, 20 bp, synthetic construct
  misc_feature 1..20: note = Description of Artificial Sequence: Synthetic oligonucleotide
  misc_feature 1..20: note = Target: SCN10A; (-) strand; PAM type: YTN; PAM sequence: CTT
  source 1..20: mol_type = other DNA
gatagacaactctgcagatg

SEQ ID NO: 50755 - DNA, 20 bp, synthetic construct
  misc_feature 1..20: note = Description of Artificial Sequence: Synthetic oligonucleotide
  misc_feature 1..20: note = Target: SCN10A; (-) strand; PAM type: YTN; PAM sequence: CTC
  source 1..20: mol_type = other DNA
ccttgatagacaactctgca

SEQ ID NO: 50756 - DNA, 20 bp, synthetic construct
  misc_feature 1..20: note = Description of Artificial Sequence: Synthetic oligonucleotide
  misc_feature 1..20: note = Target: SCN10A; (-) strand; PAM type: YTN; PAM sequence: CTA
  source 1..20: mol_type = other DNA
atgtgagacctcccttgata

SEQ ID NO: 50757 - DNA, 20 bp, synthetic construct
  misc_feature 1..20: note = Description of Artificial Sequence: Synthetic oligonucleotide
  misc_feature 1..20: note = Target: SCN10A; (-) strand; PAM type: YTN; PAM sequence: TTG
  source 1..20: mol_type = other DNA
gctaatgtgagacctccctt

SEQ ID NO: 50758 - DNA, 20 bp, synthetic construct
  misc_feature 1..20: note = Description of Artificial Sequence: Synthetic oligonucleotide
  misc_feature 1..20: note = Target: SCN10A; (-) strand; PAM type: YTN; PAM sequence: CTT
  source 1..20: mol_type = other DNA
ggctaatgtgagacctccct

SEQ ID NO: 50759 - DNA, 20 bp, synthetic construct
  misc_feature 1..20: note = Description of Artificial Sequence: Synthetic oligonucleotide
  misc_feature 1..20: note = Target: SCN10A; (-) strand; PAM type: YTN; PAM sequence: TTA
  source 1..20: mol_type = other DNA
atcagtgaacttggctaatg

SEQ ID NO: 50760 - DNA, 20 bp, synthetic construct
  misc_feature 1..20: note = Description of Artificial Sequence: Synthetic oligonucleotide
  misc_feature 1..20: note = Target: SCN10A; (-) strand; PAM type: YTN; PAM sequence: TTA
  source 1..20: mol_type = other DNA
catataattaatcagtgaac

SEQ ID NO: 50761 - DNA, 20 bp, synthetic construct
  misc_feature 1..20: note = Description of Artificial Sequence: Synthetic oligonucleotide
  misc_feature 1..20: note = Target: SCN10A; (-) strand; PAM type: YTN; PAM sequence: CTG
  source 1..20: mol_type = other DNA
ttacatataattaatcagtg

SEQ ID NO: 50762 - DNA, 20 bp, synthetic construct
  misc_feature 1..20: note = Description of Artificial Sequence: Synthetic oligonucleotide
  misc_feature 1..20: note = Target: SCN10A; (-) strand; PAM type: YTN; PAM sequence: TTC
  source 1..20: mol_type = other DNA
cactgttacatataattaat

SEQ ID NO: 50763 - DNA, 20 bp, synthetic construct
  misc_feature 1..20: note = Description of Artificial Sequence: Synthetic oligonucleotide
  misc_feature 1..20: note = Target: SCN10A; (-) strand; PAM type: YTN; PAM sequence: TTT
  source 1..20: mol_type = other DNA
ccactgttacatataattaa

SEQ ID NO: 50764 - DNA, 20 bp, synthetic construct
  misc_feature 1..20: note = Description of Artificial Sequence: Synthetic oligonucleotide
  misc_feature 1..20: note = Target: SCN10A; (-) strand; PAM type: YTN; PAM sequence: TTA
  source 1..20: mol_type = other DNA
tttccactgttacatataat

SEQ ID NO: 50765 - DNA, 20 bp, synthetic construct
  misc_feature 1..20: note = Description of Artificial Sequence: Synthetic oligonucleotide
  misc_feature 1..20: note = Target: SCN10A; (-) strand; PAM type: YTN; PAM sequence: CTC
  source 1..20: mol_type = other DNA
agtaagtggaaagtgttatt

SEQ ID NO: 50766 - DNA, 20 bp, synthetic construct
  misc_feature 1..20: note = Description of Artificial Sequence: Synthetic oligonucleotide
  misc_feature 1..20: note = Target: SCN10A; (-) strand; PAM type: YTN; PAM sequence: TTA
  source 1..20: mol_type = other DNA
aagggagagagaagaacaca

SEQ ID NO: 50767 - DNA, 20 bp, synthetic construct
  misc_feature 1..20: note = Description of Artificial Sequence: Synthetic oligonucleotide
  misc_feature 1..20: note = Target: SCN10A; (-) strand; PAM type: YTN; PAM sequence: CTT
  source 1..20: mol_type = other DNA
aaagggagagagaagaacac

SEQ ID NO: 50768 - DNA, 20 bp, synthetic construct
  misc_feature 1..20: note = Description of Artificial Sequence: Synthetic oligonucleotide
  misc_feature 1..20: note = Target: SCN10A; (-) strand; PAM type: YTN; PAM sequence: TTG
  source 1..20: mol_type = other DNA
taaagcacttaaagggagag

SEQ ID NO: 50769 - DNA, 20 bp, synthetic construct
  misc_feature 1..20: note = Description of Artificial Sequence: Synthetic oligonucleotide
  misc_feature 1..20: note = Target: SCN10A; (-) strand; PAM type: YTN; PAM sequence: TTT
  source 1..20: mol_type = other DNA
gtaaagcacttaaagggaga

SEQ ID NO: 50770 - DNA, 20 bp, synthetic construct
  misc_feature 1..20: note = Description of Artificial Sequence: Synthetic oligonucleotide
  misc_feature 1..20: note = Target: SCN10A; (-) strand; PAM type: YTN; PAM sequence: TTA
  source 1..20: mol_type = other DNA
tagtgtttgtaaagcactta

SEQ ID NO: 50771 - DNA, 20 bp, synthetic construct
  misc_feature 1..20: note = Description of Artificial Sequence: Synthetic oligonucleotide
  misc_feature 1..20: note = Target: SCN10A; (-) strand; PAM type: YTN; PAM sequence: TTA
  source 1..20: mol_type = other DNA
aattatagtgtttgtaaagc

SEQ ID NO: 50772 - DNA, 20 bp, synthetic construct
  misc_feature 1..20: note = Description of Artificial Sequence: Synthetic oligonucleotide
  misc_feature 1..20: note = Target: SCN10A; (-) strand; PAM type: YTN; PAM sequence: TTG
  source 1..20: mol_type = other DNA
agtgattaaattatagtgtt

SEQ ID NO: 50773 - DNA, 20 bp, synthetic construct
  misc_feature 1..20: note = Description of Artificial Sequence: Synthetic oligonucleotide
  misc_feature 1..20: note = Target: SCN10A; (-) strand; PAM type: YTN; PAM sequence: CTG
  source 1..20: mol_type = other DNA
taaagaaagaacattgagtg

SEQ ID NO: 50774 - DNA, 20 bp, synthetic construct
  misc_feature 1..20: note = Description of Artificial Sequence: Synthetic oligonucleotide
  misc_feature 1..20: note = Target: SCN10A; (-) strand; PAM type: YTN; PAM sequence: TTA
  source 1..20: mol_type = other DNA
tctgtaaagaaagaacattg

SEQ ID NO: 50775 - DNA, 20 bp, synthetic construct
  misc_feature 1..20: note = Description of Artificial Sequence: Synthetic oligonucleotide
  misc_feature 1..20: note = Target: SCN10A; (-) strand; PAM type: YTN; PAM sequence: CTT
  source 1..20: mol_type = other DNA
atctgtaaagaaagaacatt

SEQ ID NO: 50776 - DNA, 20 bp, synthetic construct
  misc_feature 1..20: note = Description of Artificial Sequence: Synthetic oligonucleotide
  misc_feature 1..20: note = Target: SCN10A; (-) strand; PAM type: YTN; PAM sequence: TTC
  source 1..20: mol_type = other DNA
cttatctgtaaagaaagaac

SEQ ID NO: 50777 - DNA, 20 bp, synthetic construct
  misc_feature 1..20: note = Description of Artificial Sequence: Synthetic oligonucleotide
  misc_feature 1..20: note = Target: SCN10A; (-) strand; PAM type: YTN; PAM sequence: CTG
  source 1..20: mol_type = other DNA
acccccagattccttatctg

SEQ ID NO: 50778 - DNA, 20 bp, synthetic construct
  misc_feature 1..20: note = Description of Artificial Sequence: Synthetic oligonucleotide
  misc_feature 1..20: note = Target: SCN10A; (-) strand; PAM type: YTN; PAM sequence: TTC
  source 1..20: mol_type = other DNA
tgacccccagattccttatc

SEQ ID NO: 50779 - DNA, 20 bp, synthetic construct
  misc_feature 1..20: note = Description of Artificial Sequence: Synthetic oligonucleotide
  misc_feature 1..20: note = Target: SCN10A; (-) strand; PAM type: YTN; PAM sequence: TTT
  source 1..20: mol_type = other DNA
ctgacccccagattccttat

SEQ ID NO: 50780 - DNA, 20 bp, synthetic construct
  misc_feature 1..20: note = Description of Artificial Sequence: Synthetic oligonucleotide
  misc_feature 1..20: note = Target: SCN10A; (-) strand; PAM type: YTN; PAM sequence: CTT
  source 1..20: mol_type = other DNA
tctgacccccagattcctta

SEQ ID NO: 50781 - DNA, 20 bp, synthetic construct
  misc_feature 1..20: note = Description of Artificial Sequence: Synthetic oligonucleotide
  misc_feature 1..20: note = Target: SCN10A; (-) strand; PAM type: YTN; PAM sequence: TTC
  source 1..20: mol_type = other DNA
tttctgacccccagattcct

SEQ ID NO: 50782 - DNA, 20 bp, synthetic construct
  misc_feature 1..20: note = Description of Artificial Sequence: Synthetic oligonucleotide
  misc_feature 1..20: note = Target: SCN10A; (-) strand; PAM type: YTN; PAM sequence: CTT
  source 1..20: mol_type = other DNA
ctttctgacccccagattcc

SEQ ID NO: 50783 - DNA, 20 bp, synthetic construct
  misc_feature 1..20: note = Description of Artificial Sequence: Synthetic oligonucleotide
  misc_feature 1..20: note = Target: SCN10A; (-) strand; PAM type: YTN; PAM sequence: CTG
  source 1..20: mol_type = other DNA
acttctttctgacccccaga

SEQ ID NO: 50784 - DNA, 20 bp, synthetic construct
  misc_feature 1..20: note = Description of Artificial Sequence: Synthetic oligonucleotide
  misc_feature 1..20: note = Target: SCN10A; (-) strand; PAM type: YTN; PAM sequence: TTA
  source 1..20: mol_type = other DNA
ggcaactgacttctttctga

SEQ ID NO: 50785 - DNA, 20 bp, synthetic construct
  misc_feature 1..20: note = Description of Artificial Sequence: Synthetic oligonucleotide
  misc_feature 1..20: note = Target: SCN10A; (-) strand; PAM type: YTN; PAM sequence: TTT
  source 1..20: mol_type = other DNA
aggcaactgacttctttctg

SEQ ID NO: 50786 - DNA, 20 bp, synthetic construct
  misc_feature 1..20: note = Description of Artificial Sequence: Synthetic oligonucleotide
  misc_feature 1..20: note = Target: SCN10A; (-) strand; PAM type: YTN; PAM sequence: TTT
  source 1..20: mol_type = other DNA
taggcaactgacttctttct

SEQ ID NO: 50787 - DNA, 20 bp, synthetic construct
  misc_feature 1..20: note = Description of Artificial Sequence: Synthetic oligonucleotide
  misc_feature 1..20: note = Target: SCN10A; (-) strand; PAM type: YTN; PAM sequence: CTG
  source 1..20: mol_type = other DNA
cgtagttttaggcaactgac

SEQ ID NO: 50788 - DNA, 20 bp, synthetic construct
  misc_feature 1..20: note = Description of Artificial Sequence: Synthetic oligonucleotide
  misc_feature 1..20: note = Target: SCN10A; (-) strand; PAM type: YTN; PAM sequence: TTG
  source 1..20: mol_type = other DNA
acacctgcgtagttttaggc

SEQ ID NO: 50789 - DNA, 20 bp, synthetic construct
  misc_feature 1..20: note = Description of Artificial Sequence: Synthetic oligonucleotide
  misc_feature 1..20: note = Target: SCN10A; (-) strand; PAM type: YTN; PAM sequence: TTA
  source 1..20: mol_type = other DNA
ataaatatattgacacctgc

SEQ ID NO: 50790 - DNA, 20 bp, synthetic construct
  misc_feature 1..20: note = Description of Artificial Sequence: Synthetic oligonucleotide
  misc_feature 1..20: note = Target: SCN10A; (-) strand; PAM type: YTN; PAM sequence: TTT
  source 1..20: mol_type = other DNA
aataaatatattgacacctg

SEQ ID NO: 50791 - DNA, 20 bp, synthetic construct
  misc_feature 1..20: note = Description of Artificial Sequence: Synthetic oligonucleotide
  misc_feature 1..20: note = Target: SCN10A; (-) strand; PAM type: YTN; PAM sequence: TTT
  source 1..20: mol_type = other DNA
taataaatatattgacacct

SEQ ID NO: 50792 - DNA, 20 bp, synthetic construct
  misc_feature 1..20: note = Description of Artificial Sequence: Synthetic oligonucleotide
  misc_feature 1..20: note = Target: SCN10A; (-) strand; PAM type: YTN; PAM sequence: CTT
  source 1..20: mol_type = other DNA
ttaataaatatattgacacc

SEQ ID NO: 50793 - DNA, 20 bp, synthetic construct
  misc_feature 1..20: note = Description of Artificial Sequence: Synthetic oligonucleotide
  misc_feature 1..20: note = Target: SCN10A; (-) strand; PAM type: YTN; PAM sequence: CTC
  source 1..20: mol_type = other DNA
cttttaataaatatattgac

SEQ ID NO: 50794 - DNA, 20 bp, synthetic construct
  misc_feature 1..20: note = Description of Artificial Sequence: Synthetic oligonucleotide
  misc_feature 1..20: note = Target: SCN10A; (-) strand; PAM type: YTN; PAM sequence: TTC
  source 1..20: mol_type = other DNA
tccttttaataaatatattg

SEQ ID NO: 50795 - DNA, 20 bp, synthetic construct
  misc_feature 1..20: note = Description of Artificial Sequence: Synthetic oligonucleotide
  misc_feature 1..20: note = Target: SCN10A; (-) strand; PAM type: YTN; PAM sequence: TTT
  source 1..20: mol_type = other DNA
ctccttttaataaatatatt

SEQ ID NO: 50796 - DNA, 20 bp, synthetic construct
  misc_feature 1..20: note = Description of Artificial Sequence: Synthetic oligonucleotide
  misc_feature 1..20: note = Target: SCN10A; (-) strand; PAM type: YTN; PAM sequence: TTA
  source 1..20: mol_type = other DNA
tatttctccttttaataaat

SEQ ID NO: 50797 - DNA, 20 bp, synthetic construct
  misc_feature 1..20: note = Description of Artificial Sequence: Synthetic oligonucleotide
  misc_feature 1..20: note = Target: SCN10A; (-) strand; PAM type: YTN; PAM sequence: TTG
  source 1..20: mol_type = other DNA
acagttatatttctcctttt

SEQ ID NO: 50798 - DNA, 20 bp, synthetic construct
  misc_feature 1..20: note = Description of Artificial Sequence: Synthetic oligonucleotide
  misc_feature 1..20: note = Target: SCN10A; (-) strand; PAM type: YTN; PAM sequence: CTT
  source 1..20: mol_type = other DNA
gacagttatatttctccttt

SEQ ID NO: 50799 - DNA, 20 bp, synthetic construct
  misc_feature 1..20: note = Description of Artificial Sequence: Synthetic oligonucleotide
  misc_feature 1..20: note = Target: SCN10A; (-) strand; PAM type: YTN; PAM sequence: CTA
  source 1..20: mol_type = other DNA
cttgacagttatatttctcc

SEQ ID NO: 50800 - DNA, 20 bp, synthetic construct
  misc_feature 1..20: note = Description of Artificial Sequence: Synthetic oligonucleotide
  misc_feature 1..20: note = Target: SCN10A; (-) strand; PAM type: YTN; PAM sequence: TTG
  source 1..20: mol_type = other DNA
ggctacttgacagttatatt

SEQ ID NO: 50801 - DNA, 20 bp, synthetic construct
  misc_feature 1..20: note = Description of Artificial Sequence: Synthetic oligonucleotide
  misc_feature 1..20: note = Target: SCN10A; (-) strand; PAM type: YTN; PAM sequence: CTC
  source 1..20: mol_type = other DNA
aagtattgggctacttgaca

SEQ ID NO: 50802 - DNA, 20 bp, synthetic construct
  misc_feature 1..20: note = Description of Artificial Sequence: Synthetic oligonucleotide
  misc_feature 1..20: note = Target: SCN10A; (-) strand; PAM type: YTN; PAM sequence: CTG
  source 1..20: mol_type = other DNA
actcaagtattgggctactt

SEQ ID NO: 50803 - DNA, 20 bp, synthetic construct
  misc_feature 1..20: note = Description of Artificial Sequence: Synthetic oligonucleotide
  misc_feature 1..20: note = Target: SCN10A; (-) strand; PAM type: YTN; PAM sequence: CTA
  source 1..20: mol_type = other DNA
ggctgactcaagtattgggc

SEQ ID NO: 50804 - DNA, 20 bp, synthetic construct
  misc_feature 1..20: note = Description of Artificial Sequence: Synthetic oligonucleotide
  misc_feature 1..20: note = Target: SCN10A; (-) strand; PAM type: YTN; PAM sequence: TTC
  source 1..20: mol_type = other DNA
aggaggaggctaggctgact

SEQ ID NO: 50805 - DNA, 20 bp, synthetic construct
  misc_feature 1..20: note = Description of Artificial Sequence: Synthetic oligonucleotide
  misc_feature 1..20: note = Target: SCN10A; (-) strand; PAM type: YTN; PAM sequence: CTT
  source 1..20: mol_type = other DNA
caggaggaggctaggctgac

SEQ ID NO: 50806 - DNA, 20 bp, synthetic construct
  misc_feature 1..20: note = Description of Artificial Sequence: Synthetic oligonucleotide
  misc_feature 1..20: note = Target: SCN10A; (-) strand; PAM type: YTN; PAM sequence: TTC
  source 1..20: mol_type = other DNA
ataggccatcttcaggagga

SEQ ID NO: 50807 - DNA, 20 bp, synthetic construct
  misc_feature 1..20: note = Description of Artificial Sequence: Synthetic oligonucleotide
  misc_feature 1..20: note = Target: SCN10A; (-) strand; PAM type: YTN; PAM sequence: CTT
  source 1..20: mol_type = other DNA
cataggccatcttcaggagg

SEQ ID NO: 50808 - DNA, 20 bp, synthetic construct
  misc_feature 1..20: note = Description of Artificial Sequence: Synthetic oligonucleotide
  misc_feature 1..20: note = Target: SCN10A; (-) strand; PAM type: YTN; PAM sequence: TTC
  source 1..20: mol_type = other DNA
cttcataggccatcttcagg

SEQ ID NO: 50809 - DNA, 20 bp, synthetic construct
  misc_feature 1..20: note = Description of Artificial Sequence: Synthetic oligonucleotide
  misc_feature 1..20: note = Target: SCN10A; (-) strand; PAM type: YTN; PAM sequence: CTT
  source 1..20: mol_type = other DNA
ccttcataggccatcttcag

SEQ ID NO: 50810 - DNA, 20 bp, synthetic construct
  misc_feature 1..20: note = Description of Artificial Sequence: Synthetic oligonucleotide
  misc_feature 1..20: note = Target: SCN10A; (-) strand; PAM type: YTN; PAM sequence: CTG
  source 1..20: mol_type = other DNA
gccttccttcataggccatc

SEQ ID NO: 50811 - DNA, 20 bp, synthetic construct
  misc_feature 1..20: note = Description of Artificial Sequence: Synthetic oligonucleotide
  misc_feature 1..20: note = Target: SCN10A; (-) strand; PAM type: YTN; PAM sequence: TTA
  source 1..20: mol_type = other DNA
atctggccttccttcatagg

SEQ ID NO: 50812 - DNA, 20 bp, synthetic construct
  misc_feature 1..20: note = Description of Artificial Sequence: Synthetic oligonucleotide
  misc_feature 1..20: note = Target: SCN10A; (-) strand; PAM type: YTN; PAM sequence: TTT
  source 1..20: mol_type = other DNA
aatctggccttccttcatag

SEQ ID NO: 50813 - DNA, 20 bp, synthetic construct
  misc_feature 1..20: note = Description of Artificial Sequence: Synthetic oligonucleotide
  misc_feature 1..20: note = Target: SCN10A; (-) strand; PAM type: YTN; PAM sequence: TTT
  source 1..20: mol_type = other DNA
taatctggccttccttcata

SEQ ID NO: 50814 - DNA, 20 bp, synthetic construct
  misc_feature 1..20: note = Description of Artificial Sequence: Synthetic oligonucleotide
  misc_feature 1..20: note = Target: SCN10A; (-) strand; PAM type: YTN; PAM sequence: TTT
  source 1..20: mol_type = other DNA
ttaatctggccttccttcat

SEQ ID NO: 50815 - DNA, 20 bp, synthetic construct
  misc_feature 1..20: note = Description of Artificial Sequence: Synthetic oligonucleotide
  misc_feature 1..20: note = Target: SCN10A; (-) strand; PAM type: YTN; PAM sequence: CTC
  source 1..20: mol_type = other DNA
accaggcagtcatttttaat

SEQ ID NO: 50816 - DNA, 20 bp, synthetic construct
  misc_feature 1..20: note = Description of Artificial Sequence: Synthetic oligonucleotide
  misc_feature 1..20: note = Target: SCN10A; (-) strand; PAM type: YTN; PAM sequence: CTC
  source 1..20: mol_type = other DNA
aatactcaccaggcagtcat

SEQ ID NO: 50817 - DNA, 20 bp, synthetic construct
  misc_feature 1..20: note = Description of Artificial Sequence: Synthetic oligonucleotide
  misc_feature 1..20: note = Target: SCN10A; (-) strand; PAM type: YTN; PAM sequence: TTC
  source 1..20: mol_type = other DNA
ccacctcaatactcaccagg

SEQ ID NO: 50818 - DNA, 20 bp, synthetic construct
  misc_feature 1..20: note = Description of Artificial Sequence: Synthetic oligonucleotide
  misc_feature 1..20: note = Target: SCN10A; (-) strand; PAM type: YTN; PAM sequence: TTC
  source 1..20: mol_type = other DNA
agcattcccacctcaatact

SEQ ID NO: 50819 - DNA, 20 bp, synthetic construct
  misc_feature 1..20: note = Description of Artificial Sequence: Synthetic oligonucleotide
  misc_feature 1..20: note = Target: SCN10A; (-) strand; PAM type: YTN; PAM sequence: TTA
  source 1..20: mol_type = other DNA
tgagagagaggaaggagttc

SEQ ID NO: 50820 - DNA, 20 bp, synthetic construct
  misc_feature 1..20: note = Description of Artificial Sequence: Synthetic oligonucleotide
  misc_feature 1..20: note = Target: SCN10A; (-) strand; PAM type: YTN; PAM sequence: CTA
  source 1..20: mol_type = other DNA
ttatgagagagaggaaggag

SEQ ID NO: 50821 - DNA, 20 bp, synthetic construct
  misc_feature 1..20: note = Description of Artificial Sequence: Synthetic oligonucleotide
  misc_feature 1..20: note = Target: SCN10A; (-) strand; PAM type: YTN; PAM sequence: CTC
  source 1..20: mol_type = other DNA
ctattatgagagagaggaag

SEQ ID NO: 50822 - DNA, 20 bp, synthetic construct
  misc_feature 1..20: note = Description of Artificial Sequence: Synthetic oligonucleotide
  misc_feature 1..20: note = Target: SCN10A; (-) strand; PAM type: YTN; PAM sequence: CTC
  source 1..20: mol_type = other DNA
atcctcctattatgagagag

SEQ ID NO: 50823 - DNA, 20 bp, synthetic construct
  misc_feature 1..20: note = Description of Artificial Sequence: Synthetic oligonucleotide
  misc_feature 1..20: note = Target: SCN10A; (-) strand; PAM type: YTN; PAM sequence: TTG
  source 1..20: mol_type = other DNA
acatcgactcatcctcctat

SEQ ID NO: 50824 - DNA, 20 bp, synthetic construct
  misc_feature 1..20: note = Description of Artificial Sequence: Synthetic oligonucleotide
  misc_feature 1..20: note = Target: SCN10A; (-) strand; PAM type: YTN; PAM sequence: CTT
  source 1..20: mol_type = other DNA
gacatcgactcatcctccta

SEQ ID NO: 50825 - DNA, 20 bp, synthetic construct
  misc_feature 1..20: note = Description of Artificial Sequence: Synthetic oligonucleotide
  misc_feature 1..20: note = Target: SCN10A; (-) strand; PAM type: YTN; PAM sequence: TTC
  source 1..20: mol_type = other DNA
ttgacatcgactcatcctcc

SEQ ID NO: 50826 - DNA, 20 bp, synthetic construct
  misc_feature 1..20: note = Description of Artificial Sequence: Synthetic oligonucleotide
  misc_feature 1..20: note = Target: SCN10A; (-) strand; PAM type: YTN; PAM sequence: CTT
  source 1..20: mol_type = other DNA
cttgacatcgactcatcctc

SEQ ID NO: 50827 - DNA, 20 bp, synthetic construct
  misc_feature 1..20: note = Description of Artificial Sequence: Synthetic oligonucleotide
  misc_feature 1..20: note = Target: SCN10A; (-) strand; PAM type: YTN; PAM sequence: CTG
  source 1..20: mol_type = other DNA
acagatgcttcttgacatcg

SEQ ID NO: 50828 - DNA, 20 bp, synthetic construct
  misc_feature 1..20: note = Description of Artificial Sequence: Synthetic oligonucleotide
  misc_feature 1..20: note = Target: SCN10A; (-) strand; PAM type: YTN; PAM sequence: CTG
  source 1..20: mol_type = other DNA
agctgacagatgcttcttga

SEQ ID NO: 50829 - DNA, 20 bp, synthetic construct
  misc_feature 1..20: note = Description of Artificial Sequence: Synthetic oligonucleotide
  misc_feature 1..20: note = Target: SCN10A; (-) strand; PAM type: YTN; PAM sequence: CTC
  source 1..20: mol_type = other DNA
cctgagctgacagatgcttc

SEQ ID NO: 50830 - DNA, 20 bp, synthetic construct
  misc_feature 1..20: note = Description of Artificial Sequence: Synthetic oligonucleotide
  misc_feature 1..20: note = Target: SCN10A; (-) strand; PAM type: YTN; PAM sequence: TTA
  source 1..20: mol_type = other DNA
cgctccctgagctgacagat

SEQ ID NO: 50831 - DNA, 20 bp, synthetic construct
  misc_feature 1..20: note = Description of Artificial Sequence: Synthetic oligonucleotide
  misc_feature 1..20: note = Target: SCN10A; (-) strand; PAM type: YTN; PAM sequence: TTT
  source 1..20: mol_type = other DNA
acgctccctgagctgacaga

SEQ ID NO: 50832 - DNA, 20 bp, synthetic construct
  misc_feature 1..20: note = Description of Artificial Sequence: Synthetic oligonucleotide
  misc_feature 1..20: note = Target: SCN10A; (-) strand; PAM type: YTN; PAM sequence: CTT
  source 1..20: mol_type = other DNA
tacgctccctgagctgacag

SEQ ID NO: 50833 - DNA, 20 bp, synthetic construct
  misc_feature 1..20: note = Description of Artificial Sequence: Synthetic oligonucleotide
  misc_feature 1..20: note = Target: SCN10A; (-) strand; PAM type: YTN; PAM sequence: CTA
  source 1..20: mol_type = other DNA
gggtggatgagagcacttta

SEQ ID NO: 50834 - DNA, 20 bp, synthetic construct
  misc_feature 1..20: note = Description of Artificial Sequence: Synthetic oligonucleotide
  misc_feature 1..20: note = Target: SCN10A; (-) strand; PAM type: YTN; PAM sequence: CTG
  source 1..20: mol_type = other DNA
ctagggtggatgagagcact

SEQ ID NO: 50835 - DNA, 20 bp, synthetic construct
  misc_feature 1..20: note = Description of Artificial Sequence: Synthetic oligonucleotide
  misc_feature 1..20: note = Target: SCN10A; (-) strand; PAM type: YTN; PAM sequence: CTC
  source 1..20: mol_type = other DNA
tgctagggtggatgagagca

SEQ ID NO: 50836 - DNA, 20 bp, synthetic construct
  misc_feature 1..20: note = Description of Artificial Sequence: Synthetic oligonucleotide
  misc_feature 1..20: note = Target: SCN10A; (-) strand; PAM type: YTN; PAM sequence: TTG
  source 1..20: mol_type = other DNA
atcaggccatctctgctagg

SEQ ID NO: 50837 - DNA, 20 bp, synthetic construct
  misc_feature 1..20: note = Description of Artificial Sequence: Synthetic oligonucleotide
  misc_feature 1..20: note = Target: SCN10A; (-) strand; PAM type: YTN; PAM sequence: TTC
  source 1..20: mol_type = other DNA
attgatcaggccatctctgc

SEQ ID NO: 50838 - DNA, 20 bp, synthetic construct
  misc_feature 1..20: note = Description of Artificial Sequence: Synthetic oligonucleotide
  misc_feature 1..20: note = Target: SCN10A; (-) strand; PAM type: YTN; PAM sequence: TTT
  source 1..20: mol_type = other DNA
cattgatcaggccatctctg

SEQ ID NO: 50839 - DNA, 20 bp, synthetic construct
  misc_feature 1..20: note = Description of Artificial Sequence: Synthetic oligonucleotide
  misc_feature 1..20: note = Target: SCN10A; (-) strand; PAM type: YTN; PAM sequence: CTG
  source 1..20: mol_type = other DNA
tttcattgatcaggccatct

SEQ ID NO: 50840 - DNA, 20 bp, synthetic construct
  misc_feature 1..20: note = Description of Artificial Sequence: Synthetic oligonucleotide
  misc_feature 1..20: note = Target: SCN10A; (-) strand; PAM type: YTN; PAM sequence: TTG
  source 1..20: mol_type = other DNA
ctgtttcattgatcaggcca

SEQ ID NO: 50841 - DNA, 20 bp, synthetic construct
  misc_feature 1..20: note = Description of Artificial Sequence: Synthetic oligonucleotide
  misc_feature 1..20: note = Target: SCN10A; (-) strand; PAM type: YTN; PAM sequence: TTC
  source 1..20: mol_type = other DNA
aaacgaggcattgctgtttc

SEQ ID NO: 50842 - DNA, 20 bp, synthetic construct
  misc_feature 1..20: note = Description of Artificial Sequence: Synthetic oligonucleotide
  misc_feature 1..20: note = Target: SCN10A; (-) strand; PAM type: YTN; PAM sequence: CTT
  source 1..20: mol_type = other DNA
caaacgaggcattgctgttt

SEQ ID NO: 50843 - DNA, 20 bp, synthetic construct
  misc_feature 1..20: note = Description of Artificial Sequence: Synthetic oligonucleotide
  misc_feature 1..20: note = Target: SCN10A; (-) strand; PAM type: YTN; PAM sequence: CTG
  source 1..20: mol_type = other DNA
gacttcaaacgaggcattgc

SEQ ID NO: 50844 - DNA, 20 bp, synthetic construct
  misc_feature 1..20: note = Description of Artificial Sequence: Synthetic oligonucleotide
  misc_feature 1..20: note = Target: SCN10A; (-) strand; PAM type: YTN; PAM sequence: TTC
  source 1..20: mol_type = other DNA
tggacttcaaacgaggcatt

SEQ ID NO: 50845 - DNA, 20 bp, synthetic construct
  misc_feature 1..20: note = Description of Artificial Sequence: Synthetic oligonucleotide
  misc_feature 1..20: note = Target: SCN10A; (-) strand; PAM type: YTN; PAM sequence: TTA
  source 1..20: mol_type = other DNA
aaaaaataattctggacttc

SEQ ID NO: 50846 - DNA, 20 bp, synthetic construct
  misc_feature 1..20: note = Description of Artificial Sequence: Synthetic oligonucleotide
  misc_feature 1..20: note = Target: SCN10A; (-) strand; PAM type: YTN; PAM sequence: TTT
  source 1..20: mol_type = other DNA
aaaaaaataattctggactt

SEQ ID NO: 50847 - DNA, 20 bp, synthetic construct
  misc_feature 1..20: note = Description of Artificial Sequence: Synthetic oligonucleotide
  misc_feature 1..20: note = Target: SCN10A; (-) strand; PAM type: YTN; PAM sequence: TTC
  source 1..20: mol_type = other DNA
acaaggaatgcaggtaaata

SEQ ID NO: 50848 - DNA, 20 bp, synthetic construct
  misc_feature 1..20: note = Description of Artificial Sequence: Synthetic oligonucleotide
  misc_feature 1..20: note = Target: SCN10A; (-) strand; PAM type: YTN; PAM sequence: TTC
  source 1..20: mol_type = other DNA
catgtattcacaaggaatgc

SEQ ID NO: 50849 - DNA, 20 bp, synthetic construct
  misc_feature 1..20: note = Description of Artificial Sequence: Synthetic oligonucleotide
  misc_feature 1..20: note = Target: SCN10A; (-) strand; PAM type: YTN; PAM sequence: CTG
  source 1..20: mol_type = other DNA
ggagtaaaagaattccatgt

SEQ ID NO: 50850 - DNA, 20 bp, synthetic construct
  misc_feature 1..20: note = Description of Artificial Sequence: Synthetic oligonucleotide
  misc_feature 1..20: note = Target: SCN10A; (-) strand; PAM type: YTN; PAM sequence: TTC
  source 1..20: mol_type = other DNA
atggagaaatcctgggagta

SEQ ID NO: 50851 - DNA, 20 bp, synthetic construct
  misc_feature 1..20: note = Description of Artificial Sequence: Synthetic oligonucleotide
  misc_feature 1..20: note = Target: SCN10A; (-) strand; PAM type: YTN; PAM sequence: TTG
  source 1..20: mol_type = other DNA
gagttcatggagaaatcctg

SEQ ID NO: 50852 - DNA, 20 bp, synthetic construct
  misc_feature 1..20: note = Description of Artificial Sequence: Synthetic oligonucleotide
  misc_feature 1..20: note = Target: SCN10A; (-) strand; PAM type: YTN; PAM sequence: CTG
  source 1..20: mol_type = other DNA
ggataaggagagccccagag

SEQ ID NO: 50853 - DNA, 20 bp, synthetic construct
  misc_feature 1..20: note = Description of Artificial Sequence: Synthetic oligonucleotide
  misc_feature 1..20: note = Target: SCN10A; (-) strand; PAM type: YTN; PAM sequence: TTC
  source 1..20: mol_type = other DNA
acatggatgtctgggataag

SEQ ID NO: 50854 - DNA, 20 bp, synthetic construct
  misc_feature 1..20: note = Description of Artificial Sequence: Synthetic oligonucleotide
  misc_feature 1..20: note = Target: SCN10A; (-) strand; PAM type: YTN; PAM sequence: TTG
  source 1..20: mol_type = other DNA
ttcacatggatgtctgggat

SEQ ID NO: 50855 - DNA, 20 bp, synthetic construct
  misc_feature 1..20: note = Description of Artificial Sequence: Synthetic oligonucleotide
  misc_feature 1..20: note = Target: SCN10A; (-) strand; PAM type: YTN; PAM sequence: CTA
  source 1..20: mol_type = other DNA
atccatggtatgggttgttc

SEQ ID NO: 50856 - DNA, 20 bp, synthetic construct
  misc_feature 1..20: note = Description of Artificial Sequence: Synthetic oligonucleotide
  misc_feature 1..20: note = Target: SCN10A; (-) strand; PAM type: YTN; PAM sequence: CTC
  source 1..20: mol_type = other DNA
taatccatggtatgggttgt

SEQ ID NO: 50857 - DNA, 20 bp, synthetic construct
  misc_feature 1..20: note = Description of Artificial Sequence: Synthetic oligonucleotide
  misc_feature 1..20: note = Target: SCN10A; (-) strand; PAM type: YTN; PAM sequence: TTG
  source 1..20: mol_type = other DNA
tcagagctctaatccatggt

SEQ ID NO: 50858 - DNA, 20 bp, synthetic construct
  misc_feature 1..20: note = Description of Artificial Sequence: Synthetic oligonucleotide
  misc_feature 1..20: note = Target: SCN10A; (-) strand; PAM type: YTN; PAM sequence: TTA
  source 1..20: mol_type = other DNA
agttgtcagagctctaatcc

SEQ ID NO: 50859 - DNA, 20 bp, synthetic construct
  misc_feature 1..20: note = Description of Artificial Sequence: Synthetic oligonucleotide
  misc_feature 1..20: note = Target: SCN10A; (-) strand; PAM type: YTN; PAM sequence: TTA
  source 1..20: mol_type = other DNA
gaattaagttgtcagagctc

SEQ ID NO: 50860 - DNA, 20 bp, synthetic construct
  misc_feature 1..20: note = Description of Artificial Sequence: Synthetic oligonucleotide
  misc_feature 1..20: note = Target: SCN10A; (-) strand; PAM type: YTN; PAM sequence: CTG
  source 1..20: mol_type = other DNA
attagaattaagttgtcaga

SEQ ID NO: 50861 - DNA, 20 bp, synthetic construct
  misc_feature 1..20: note = Description of Artificial Sequence: Synthetic oligonucleotide
  misc_feature 1..20: note = Target: SCN10A; (-) strand; PAM type: YTN; PAM sequence: TTG
  source 1..20: mol_type = other DNA
gaactgattagaattaagtt

SEQ ID NO: 50862 - DNA, 20 bp, synthetic construct
  misc_feature 1..20: note = Description of Artificial Sequence: Synthetic oligonucleotide
  misc_feature 1..20: note = Target: SCN10A; (-) strand; PAM type: YTN; PAM sequence: CTT
  source 1..20: mol_type = other DNA
ggaactgattagaattaagt

SEQ ID NO: 50863 - DNA, 20 bp, synthetic construct
  misc_feature 1..20: note = Description of Artificial Sequence: Synthetic oligonucleotide
  misc_feature 1..20: note = Target: SCN10A; (-) strand; PAM type: YTN; PAM sequence: TTC
  source 1..20: mol_type = other DNA
aatcgaagtggagatagact

SEQ ID NO: 50864 - DNA, 20 bp, synthetic construct
  misc_feature 1..20: note = Description of Artificial Sequence: Synthetic oligonucleotide
  misc_feature 1..20: note = Target: SCN10A; (-) strand; PAM type: YTN; PAM sequence: CTT
  source 1..20: mol_type = other DNA
caatcgaagtggagatagac

SEQ ID NO: 50865 - DNA, 20 bp, synthetic construct
  misc_feature 1..20: note = Description of Artificial Sequence: Synthetic oligonucleotide
  misc_feature 1..20: note = Target: SCN10A; (-) strand; PAM type: YTN; PAM sequence: TTG
  source 1..20: mol_type = other DNA
caatcttcaatcgaagtgga

SEQ ID NO: 50866 - DNA, 20 bp, synthetic construct
  misc_feature 1..20: note = Description of Artificial Sequence: Synthetic oligonucleotide
  misc_feature 1..20: note = Target: SCN10A; (-) strand; PAM type: YTN; PAM sequence: CTT
  source 1..20: mol_type = other DNA
gcaatcttcaatcgaagtgg

SEQ ID NO: 50867 - DNA, 20 bp, synthetic construct
  misc_feature 1..20: note = Description of Artificial Sequence: Synthetic oligonucleotide
  misc_feature 1..20: note = Target: SCN10A; (-) strand; PAM type: YTN; PAM sequence: CTA
  source 1..20: mol_type = other DNA
caaagccagggaacttgcaa

SEQ ID NO: 50868 - DNA, 20 bp, synthetic construct
  misc_feature 1..20: note = Description of Artificial Sequence: Synthetic oligonucleotide
  misc_feature 1..20: note = Target: SCN10A; (-) strand; PAM type: YTN; PAM sequence: TTA
  source 1..20: mol_type = other DNA
aatgtgggtctacaaagcca

SEQ ID NO: 50869 - DNA, 20 bp, synthetic construct
  misc_feature 1..20: note = Description of Artificial Sequence: Synthetic oligonucleotide
  misc_feature 1..20: note = Target: SCN10A; (-) strand; PAM type: YTN; PAM sequence: TTT
  source 1..20: mol_type = other DNA
aaatgtgggtctacaaagcc

SEQ ID NO: 50870 - DNA, 20 bp, synthetic construct
  misc_feature 1..20: note = Description of Artificial Sequence: Synthetic oligonucleotide
  misc_feature 1..20: note = Target: SCN10A; (-) strand; PAM type: YTN; PAM sequence: CTT
  source 1..20: mol_type = other DNA
taaatgtgggtctacaaagc

SEQ ID NO: 50871 - DNA, 20 bp, synthetic construct
  misc_feature 1..20: note = Description of Artificial Sequence: Synthetic oligonucleotide
  misc_feature 1..20: note = Target: SCN10A; (-) strand; PAM type: YTN; PAM sequence: CTA
  source 1..20: mol_type = other DNA
tctttaaatgtgggtctaca

SEQ ID NO: 50872 - DNA, 20 bp, synthetic construct
  misc_feature 1..20: note = Description of Artificial Sequence: Synthetic oligonucleotide
  misc_feature 1..20: note = Target: SCN10A; (-) strand; PAM type: YTN; PAM sequence: TTG
  source 1..20: mol_type = other DNA
gaagagcaaaccaagagcct

SEQ ID NO: 50873 - DNA, 20 bp, synthetic construct
  misc_feature 1..20: note = Description of Artificial Sequence: Synthetic oligonucleotide
  misc_feature 1..20: note = Target: SCN10A; (-) strand; PAM type: YTN; PAM sequence: CTT
  source 1..20: mol_type = other DNA
ggaagagcaaaccaagagcc

SEQ ID NO: 50874 - DNA, 20 bp, synthetic construct
  misc_feature 1..20: note = Description of Artificial Sequence: Synthetic oligonucleotide
  misc_feature 1..20: note = Target: SCN10A; (-) strand; PAM type: YTN; PAM sequence: CTA
  source 1..20: mol_type = other DNA
gccccttggaagagcaaacc

SEQ ID NO: 50875 - DNA, 20 bp, synthetic construct
  misc_feature 1..20: note = Description of Artificial Sequence: Synthetic oligonucleotide
  misc_feature 1..20: note = Target: SCN10A; (-) strand; PAM type: YTN; PAM sequence: TTG
  source 1..20: mol_type = other DNA
cctagccccttggaagagca

SEQ ID NO: 50876 - DNA, 20 bp, synthetic construct
  misc_feature 1..20: note = Description of Artificial Sequence: Synthetic oligonucleotide
  misc_feature 1..20: note = Target: SCN10A; (-) strand; PAM type: YTN; PAM sequence: CTA
  source 1..20: mol_type = other DNA
caggaaatgggttgcctagc

SEQ ID NO: 50877 - DNA, 20 bp, synthetic construct
  misc_feature 1..20: note = Description of Artificial Sequence: Synthetic oligonucleotide
  misc_feature 1..20: note = Target: SCN10A; (-) strand; PAM type: YTN; PAM sequence: TTA
  source 1..20: mol_type = other DNA
agaaacctacaggaaatggg

SEQ ID NO: 50878 - DNA, 20 bp, synthetic construct
  misc_feature 1..20: note = Description of Artificial Sequence: Synthetic oligonucleotide
  misc_feature 1..20: note = Target: SCN10A; (-) strand; PAM type: YTN; PAM sequence: TTA
  source 1..20: mol_type = other DNA
attaagaaacctacaggaaa

SEQ ID NO: 50879 - DNA, 20 bp, synthetic construct
  misc_feature 1..20: note = Description of Artificial Sequence: Synthetic oligonucleotide
  misc_feature 1..20: note = Target: SCN10A; (-) strand; PAM type: YTN; PAM sequence: CTC
  source 1..20: mol_type = other DNA
agagttaattaagaaaccta

SEQ ID NO: 50880 - DNA, 20 bp, synthetic construct
  misc_feature 1..20: note = Description of Artificial Sequence: Synthetic oligonucleotide
  misc_feature 1..20: note = Target: SCN10A; (-) strand; PAM type: YTN; PAM sequence: CTG
  source 1..20: mol_type = other DNA
ccctcagagttaattaagaa

SEQ ID NO: 50881 - DNA, 20 bp, synthetic construct
  misc_feature 1..20: note = Description of Artificial Sequence: Synthetic oligonucleotide
  misc_feature 1..20: note = Target: SCN10A; (-) strand; PAM type: YTN; PAM sequence: CTA
  source 1..20: mol_type = other DNA
cagaagacatagaaacaagg

SEQ ID NO: 50882 - DNA, 20 bp, synthetic construct
  misc_feature 1..20: note = Description of Artificial Sequence: Synthetic oligonucleotide
  misc_feature 1..20: note = Target: SCN10A; (-) strand; PAM type: YTN; PAM sequence: TTC
  source 1..20: mol_type = other DNA
tacagaagacatagaaacaa

SEQ ID NO: 50883 - DNA, 20 bp, synthetic construct
  misc_feature 1..20: note = Description of Artificial Sequence: Synthetic oligonucleotide
  misc_feature 1..20: note = Target: SCN10A; (-) strand; PAM type: YTN; PAM sequence: TTT
  source 1..20: mol_type = other DNA
ctacagaagacatagaaaca

SEQ ID NO: 50884 - DNA, 20 bp, synthetic construct
  misc_feature 1..20: note = Description of Artificial Sequence: Synthetic oligonucleotide
  misc_feature 1..20: note = Target: SCN10A; (-) strand; PAM type: YTN; PAM sequence: CTA
  source 1..20: mol_type = other DNA
tggtggatttctacagaaga

SEQ ID NO: 50885 - DNA, 20 bp, synthetic construct
  misc_feature 1..20: note = Description of Artificial Sequence: Synthetic oligonucleotide
  misc_feature 1..20: note = Target: SCN10A; (-) strand; PAM type: YTN; PAM sequence: TTA
  source 1..20: mol_type = other DNA
tatgcagtggctatggtgga

SEQ ID NO: 50886 - DNA, 20 bp, synthetic construct
  misc_feature 1..20: note = Description of Artificial Sequence: Synthetic oligonucleotide
  misc_feature 1..20: note = Target: SCN10A; (-) strand; PAM type: YTN; PAM sequence: TTT
  source 1..20: mol_type = other DNA
atatgcagtggctatggtgg

SEQ ID NO: 50887 - DNA, 20 bp, synthetic construct
  misc_feature 1..20: note = Description of Artificial Sequence: Synthetic oligonucleotide
  misc_feature 1..20: note = Target: SCN10A; (-) strand; PAM type: YTN; PAM sequence: CTG
  source 1..20: mol_type = other DNA
tttatatgcagtggctatgg

SEQ ID NO: 50888 - DNA, 20 bp, synthetic construct
  misc_feature 1..20: note = Description of Artificial Sequence: Synthetic oligonucleotide
  misc_feature 1..20: note = Target: SCN10A; (-) strand; PAM type: YTN; PAM sequence: CTC
  source 1..20: mol_type = other DNA
agagcagtgaactgtttata

SEQ ID NO: 50889 - DNA, 20 bp, synthetic construct
  misc_feature 1..20: note = Description of Artificial Sequence: Synthetic oligonucleotide
  misc_feature 1..20: note = Target: SCN10A; (-) strand; PAM type: YTN; PAM sequence: TTA
  source 1..20: mol_type = other DNA
atcctcagagcagtgaactg

SEQ ID NO: 50890 - DNA, 20 bp, synthetic construct
  misc_feature 1..20: note = Description of Artificial Sequence: Synthetic oligonucleotide
  misc_feature 1..20: note = Target: SCN10A; (-) strand; PAM type: YTN; PAM sequence: TTT
  source 1..20: mol_type = other DNA
aatcctcagagcagtgaact

SEQ ID NO: 50891 - DNA, 20 bp, synthetic construct
  misc_feature 1..20: note = Description of Artificial Sequence: Synthetic oligonucleotide
  misc_feature 1..20: note = Target: SCN10A; (-) strand; PAM type: YTN; PAM sequence: CTC
  source 1..20: mol_type = other DNA
atttaatcctcagagcagtg

SEQ ID NO: 50892 - DNA, 20 bp, synthetic construct
  misc_feature 1..20: note = Description of Artificial Sequence: Synthetic oligonucleotide
  misc_feature 1..20: note = Target: SCN10A; (-) strand; PAM type: YTN; PAM sequence: CTA
  source 1..20: mol_type = other DNA
tacagtgatctcatttaatc

SEQ ID NO: 50893 - DNA, 20 bp, synthetic construct
  misc_feature 1..20: note = Description of Artificial Sequence: Synthetic oligonucleotide
  misc_feature 1..20: note = Target: SCN10A; (-) strand; PAM type: YTN; PAM sequence: CTA
  source 1..20: mol_type = other DNA
tgcagaagtgcaagacacta

SEQ ID NO: 50894 - DNA, 20 bp, synthetic construct
  misc_feature 1..20: note = Description of Artificial Sequence: Synthetic oligonucleotide
  misc_feature 1..20: note = Target: SCN10A; (-) strand; PAM type: YTN; PAM sequence: TTA
  source 1..20: mol_type = other DNA
ctatgcagaagtgcaagaca

SEQ ID NO: 50895 - DNA, 20 bp, synthetic construct
  misc_feature 1..20: note = Description of Artificial Sequence: Synthetic oligonucleotide
  misc_feature 1..20: note = Target: SCN10A; (-) strand; PAM type: YTN; PAM sequence: TTT
  source 1..20: mol_type = other DNA
actatgcagaagtgcaagac

SEQ ID NO: 50896 - DNA, 20 bp, synthetic construct
  misc_feature 1..20: note = Description of Artificial Sequence: Synthetic oligonucleotide
  misc_feature 1..20: note = Target: SCN10A; (-) strand; PAM type: YTN; PAM sequence: TTA
  source 1..20: mol_type = other DNA
tatacaatatttactatgca

SEQ ID NO: 50897 - DNA, 20 bp, synthetic construct
  misc_feature 1..20: note = Description of Artificial Sequence: Synthetic oligonucleotide
  misc_feature 1..20: note = Target: SCN10A; (-) strand; PAM type: YTN; PAM sequence: TTT
  source 1..20: mol_type = other DNA
atatacaatatttactatgc

SEQ ID NO: 50898 - DNA, 20 bp, synthetic construct
  misc_feature 1..20: note = Description of Artificial Sequence: Synthetic oligonucleotide
  misc_feature 1..20: note = Target: SCN10A; (-) strand; PAM type: YTN; PAM sequence: TTG
  source 1..20: mol_type = other DNA
cagtttatatacaatattta

SEQ ID NO: 50899 - DNA, 20 bp, synthetic construct
  misc_feature 1..20: note = Description of Artificial Sequence: Synthetic oligonucleotide
  misc_feature 1..20: note = Target: SCN10A; (-) strand; PAM type: YTN; PAM sequence: TTT
  source 1..20: mol_type = other DNA
gcagtttatatacaatattt

SEQ ID NO: 50900 - DNA, 20 bp, synthetic construct
  misc_feature 1..20: note = Description of Artificial Sequence: Synthetic oligonucleotide
  misc_feature 1..20: note = Target: SCN10A; (-) strand; PAM type: YTN; PAM sequence: CTT
  source 1..20: mol_type = other DNA
tgcagtttatatacaatatt

SEQ ID NO: 50901 - DNA, 20 bp, synthetic construct
  misc_feature 1..20: note = Description of Artificial Sequence: Synthetic oligonucleotide
  misc_feature 1..20: note = Target: SCN10A; (-) strand; PAM type: YTN; PAM sequence: TTC
  source 1..20: mol_type = other DNA
ctttgcagtttatatacaat

SEQ ID NO: 50902 - DNA, 20 bp, synthetic construct
  misc_feature 1..20: note = Description of Artificial Sequence: Synthetic oligonucleotide
  misc_feature 1..20: note = Target: SCN10A; (-) strand; PAM type: YTN; PAM sequence: TTT
  source 1..20: mol_type = other DNA
cctttgcagtttatatacaa

SEQ ID NO: 50903 - DNA, 20 bp, synthetic construct
  misc_feature 1..20: note = Description of Artificial Sequence: Synthetic oligonucleotide
  misc_feature 1..20: note = Target: SCN10A; (-) strand; PAM type: YTN; PAM sequence: TTT
  source 1..20: mol_type = other DNA
tcctttgcagtttatataca

SEQ ID NO: 50904 - DNA, 20 bp, synthetic construct
  misc_feature 1..20: note = Description of Artificial Sequence: Synthetic oligonucleotide
  misc_feature 1..20: note = Target: SCN10A; (-) strand; PAM type: YTN; PAM sequence: TTA
  source 1..20: mol_type = other DNA
aaaacaataggaattttcct

SEQ ID NO: 50905 - DNA, 20 bp, synthetic construct
  misc_feature 1..20: note = Description of Artificial Sequence: Synthetic oligonucleotide
  misc_feature 1..20: note = Target: SCN10A; (-) strand; PAM type: YTN; PAM sequence: TTC
  source 1..20: mol_type = other DNA
caaggttaaaaacaatagga

SEQ ID NO: 50906 - DNA, 20 bp, synthetic construct
  misc_feature 1..20: note = Description of Artificial Sequence: Synthetic oligonucleotide
  misc_feature 1..20: note = Target: SCN10A; (-) strand; PAM type: YTN; PAM sequence: CTT
  source 1..20: mol_type = other DNA
ccaaggttaaaaacaatagg

SEQ ID NO: 50907 - DNA, 20 bp, synthetic construct
  misc_feature 1..20: note = Description of Artificial Sequence: Synthetic oligonucleotide
  misc_feature 1..20: note = Target: SCN10A; (-) strand; PAM type: YTN; PAM sequence: TTC
  source 1..20: mol_type = other DNA
agcagcttccaaggttaaaa

SEQ ID NO: 50908 - DNA, 20 bp, synthetic construct
  misc_feature 1..20: note = Description of Artificial Sequence: Synthetic oligonucleotide
  misc_feature 1..20: note = Target: SCN10A; (-) strand; PAM type: YTN; PAM sequence: TTT
  source 1..20: mol_type = other DNA
cagcagcttccaaggttaaa

SEQ ID NO: 50909 - DNA, 20 bp, synthetic construct
  misc_feature 1..20: note = Description of Artificial Sequence: Synthetic oligonucleotide
  misc_feature 1..20: note = Target: SCN10A; (-) strand; PAM type: YTN; PAM sequence: CTT
  source 1..20: mol_type = other DNA
tcagcagcttccaaggttaa

SEQ ID NO: 50910 - DNA, 20 bp, synthetic construct
  misc_feature 1..20: note = Description of Artificial Sequence: Synthetic oligonucleotide
  misc_feature 1..20: note = Target: SCN10A; (-) strand; PAM type: YTN; PAM sequence: TTA
  source 1..20: mol_type = other DNA
tcctttcagcagcttccaag

SEQ ID NO: 50911 - DNA, 20 bp, synthetic construct
  misc_feature 1..20: note = Description of Artificial Sequence: Synthetic oligonucleotide
  misc_feature 1..20: note = Target: SCN10A; (-) strand; PAM type: YTN; PAM sequence: TTT
  source 1..20: mol_type = other DNA
atcctttcagcagcttccaa

SEQ ID NO: 50912 - DNA, 20 bp, synthetic construct
  misc_feature 1..20: note = Description of Artificial Sequence: Synthetic oligonucleotide
  misc_feature 1..20: note = Target: SCN10A; (-) strand; PAM type: YTN; PAM sequence: TTC
  source 1..20: mol_type = other DNA
cagtttatcctttcagcagc

SEQ ID NO: 50913 - DNA, 20 bp, synthetic construct
  misc_feature 1..20: note = Description of Artificial Sequence: Synthetic oligonucleotide
  misc_feature 1..20: note = Target: SCN10A; (-) strand; PAM type: YTN; PAM sequence: TTA
  source 1..20: mol_type = other DNA
ttccagtttatcctttcagc

SEQ ID NO: 50914 - DNA, 20 bp, synthetic construct
  misc_feature 1..20: note = Description of Artificial Sequence: Synthetic oligonucleotide
  misc_feature 1..20: note = Target: SCN10A; (-) strand; PAM type: YTN; PAM sequence: TTC
  source 1..20: mol_type = other DNA
cacatatattattccagttt

SEQ ID NO: 50915 - DNA, 20 bp, synthetic construct
  misc_feature 1..20: note = Description of Artificial Sequence: Synthetic oligonucleotide
  misc_feature 1..20: note = Target: SCN10A; (-) strand; PAM type: YTN; PAM sequence: CTT
  source 1..20: mol_type = other DNA
ccacatatattattccagtt

SEQ ID NO: 50916 - DNA, 20 bp, synthetic construct
  misc_feature 1..20: note = Description of Artificial Sequence: Synthetic oligonucleotide
  misc_feature 1..20: note = Target: SCN10A; (-) strand; PAM type: YTN; PAM sequence: TTC
  source 1..20: mol_type = other DNA
ttccacatatattattccag

SEQ ID NO: 50917 - DNA, 20 bp, synthetic construct
  misc_feature 1..20: note = Description of Artificial Sequence: Synthetic oligonucleotide
  misc_feature 1..20: note = Target: SCN10A; (-) strand; PAM type: YTN; PAM sequence: TTC
  source 1..20: mol_type = other DNA
agtgttcttccacatatatt

SEQ ID NO: 50918 - DNA, 20 bp, synthetic construct
  misc_feature 1..20: note = Description of Artificial Sequence: Synthetic oligonucleotide
  misc_feature 1..20: note = Target: SCN10A; (-) strand; PAM type: YTN; PAM sequence: TTT
  source 1..20: mol_type = other DNA
cagtgttcttccacatatat

SEQ ID NO: 50919 - DNA, 20 bp, synthetic construct
  misc_feature 1..20: note = Description of Artificial Sequence: Synthetic oligonucleotide
  misc_feature 1..20: note = Target: SCN10A; (-) strand; PAM type: YTN; PAM sequence: TTT
  source 1..20: mol_type = other DNA
tcagtgttcttccacatata

SEQ ID NO: 50920 - DNA, 20 bp, synthetic construct
  misc_feature 1..20: note = Description of Artificial Sequence: Synthetic oligonucleotide
  misc_feature 1..20: note = Target: SCN10A; (-) strand; PAM type: YTN; PAM sequence: TTG
  source 1..20: mol_type = other DNA
ataattttcagtgttcttcc

SEQ ID NO: 50921 - DNA, 20 bp, synthetic construct
  misc_feature 1..20: note = Description of Artificial Sequence: Synthetic oligonucleotide
  misc_feature 1..20: note = Target: SCN10A; (-) strand; PAM type: YTN; PAM sequence: CTC
  source 1..20: mol_type = other DNA
aaggcagaaaatggatacca

SEQ ID NO: 50922 - DNA, 20 bp, synthetic construct
  misc_feature 1..20: note = Description of Artificial Sequence: Synthetic oligonucleotide
  misc_feature 1..20: note = Target: SCN10A; (-) strand; PAM type: YTN; PAM sequence: CTG
  source 1..20: mol_type = other DNA
tgggaggaaggtcaggggtc

SEQ ID NO: 50923 - DNA, 20 bp, synthetic construct
  misc_feature 1..20: note = Description of Artificial Sequence: Synthetic oligonucleotide
  misc_feature 1..20: note = Target: SCN10A; (-) strand; PAM type: YTN; PAM sequence: TTG
  source 1..20: mol_type = other DNA
gccaatggcactgtgggagg

SEQ ID NO: 50924 - DNA, 20 bp, synthetic construct
  misc_feature 1..20: note = Description of Artificial Sequence: Synthetic oligonucleotide
  misc_feature 1..20: note = Target: SCN10A; (-) strand; PAM type: YTN; PAM sequence: CTG
  source 1..20: mol_type = other DNA
aggaaaggcccacattggcc

SEQ ID NO: 50925 - DNA, 20 bp, synthetic construct
  misc_feature 1..20: note = Description of Artificial Sequence: Synthetic oligonucleotide
  misc_feature 1..20: note = Target: SCN10A; (-) strand; PAM type: YTN; PAM sequence: CTG
  source 1..20: mol_type = other DNA
cagagaagccagagtcctga

SEQ ID NO: 50926 - DNA, 20 bp, synthetic construct
  misc_feature 1..20: note = Description of Artificial Sequence: Synthetic oligonucleotide
  misc_feature 1..20: note = Target: SCN10A; (-) strand; PAM type: YTN; PAM sequence: CTG
  source 1..20: mol_type = other DNA
tggggctgcagagaagccag

SEQ ID NO: 50927 - DNA, 20 bp, synthetic construct
  misc_feature 1..20: note = Description of Artificial Sequence: Synthetic oligonucleotide
  misc_feature 1..20: note = Target: SCN10A; (-) strand; PAM type: YTN; PAM sequence: CTC
  source 1..20: mol_type = other DNA
tgtggggctgcagagaagcc

SEQ ID NO: 50928 - DNA, 20 bp, synthetic construct
  misc_feature 1..20: note = Description of Artificial Sequence: Synthetic oligonucleotide
  misc_feature 1..20: note = Target: SCN10A; (-) strand; PAM type: YTN; PAM sequence: CTG
  source 1..20: mol_type = other DNA
ggtcctctgtggggctgcag

SEQ ID NO: 50929 - DNA, 20 bp, synthetic construct
  misc_feature 1..20: note = Description of Artificial Sequence: Synthetic oligonucleotide
  misc_feature 1..20: note = Target: SCN10A; (-) strand; PAM type: YTN; PAM sequence: CTA
  source 1..20: mol_type = other DNA
aacctgggtcctctgtgggg

SEQ ID NO: 50930 - DNA, 20 bp, synthetic construct
  misc_feature 1..20: note = Description of Artificial Sequence: Synthetic oligonucleotide
  misc_feature 1..20: note = Target: SCN10A; (-) strand; PAM type: YTN; PAM sequence: CTG
  source 1..20: mol_type = other DNA
ccggggcatgccgtgaaagc

SEQ ID NO: 50931 - DNA, 20 bp, synthetic construct
  misc_feature 1..20: note = Description of Artificial Sequence: Synthetic oligonucleotide
  misc_feature 1..20: note = Target: SCN10A; (-) strand; PAM type: YTN; PAM sequence: CTC
  source 1..20: mol_type = other DNA
aggataacggacagagtgaa

SEQ ID NO: 50932 - DNA, 20 bp, synthetic construct
  misc_feature 1..20: note = Description of Artificial Sequence: Synthetic oligonucleotide
  misc_feature 1..20: note = Target: SCN10A; (-) strand; PAM type: YTN; PAM sequence: CTG
  source 1..20: mol_type = other DNA
ggatggcagagagaggccag

SEQ ID NO: 50933 - DNA, 20 bp, synthetic construct
  misc_feature 1..20: note = Description of Artificial Sequence: Synthetic oligonucleotide
  misc_feature 1..20: note = Target: SCN10A; (-) strand; PAM type: YTN; PAM sequence: TTG
  source 1..20: mol_type = other DNA
ggcaggtgccagccaggcag

SEQ ID NO: 50934 - DNA, 20 bp, synthetic construct
  misc_feature 1..20: note = Description of Artificial Sequence: Synthetic oligonucleotide
  misc_feature 1..20: note = Target: SCN10A; (-) strand; PAM type: YTN; PAM sequence: CTA
  source 1..20: mol_type = other DNA
ttgggcaggtgccagccagg

SEQ ID NO: 50935 - DNA, 20 bp, synthetic construct
  misc_feature 1..20: note = Description of Artificial Sequence: Synthetic oligonucleotide
  misc_feature 1..20: note = Target: SCN10A; (-) strand; PAM type: YTN; PAM sequence: CTG
  source 1..20: mol_type = other DNA
ctattgggcaggtgccagcc

SEQ ID NO: 50936 - DNA, 20 bp, synthetic construct
  misc_feature 1..20: note = Description of Artificial Sequence: Synthetic oligonucleotide
  misc_feature 1..20: note = Target: SCN10A; (-) strand; PAM type: YTN; PAM sequence: CTG
  source 1..20: mol_type = other DNA
agaggccaggcctgctattg

SEQ ID NO: 50937 - DNA, 20 bp, synthetic construct
  misc_feature 1..20: note = Description of Artificial Sequence: Synthetic oligonucleotide
  misc_feature 1..20: note = Target: SCN10A; (-) strand; PAM type: YTN; PAM sequence: CTC
  source 1..20: mol_type = other DNA
cctgagaggccaggcctgct

SEQ ID NO: 50938 - DNA, 20 bp, synthetic construct
  misc_feature 1..20: note = Description of Artificial Sequence: Synthetic oligonucleotide
  misc_feature 1..20: note = Target: SCN10A; (-) strand; PAM type: YTN; PAM sequence: CTC
  source 1..20: mol_type = other DNA
agctccctgagaggccaggc

SEQ ID NO: 50939 - DNA, 20 bp, synthetic construct
  misc_feature 1..20: note = Description of Artificial Sequence: Synthetic oligonucleotide
  misc_feature 1..20: note = Target: SCN10A; (-) strand; PAM type: YTN; PAM sequence: CTA
  source 1..20: mol_type = other DNA
cagctcagctccctgagagg

SEQ ID NO: 50940 - DNA, 20 bp, synthetic construct
  misc_feature 1..20: note = Description of Artificial Sequence: Synthetic oligonucleotide
  misc_feature 1..20: note = Target: SCN10A; (-) strand; PAM type: YTN; PAM sequence: CTC
  source 1..20: mol_type = other DNA
tacagctcagctccctgaga

SEQ ID NO: 50941 - DNA, 20 bp, synthetic construct
  misc_feature 1..20: note = Description of Artificial Sequence: Synthetic oligonucleotide
  misc_feature 1..20: note = Target: SCN10A; (-) strand; PAM type: YTN; PAM sequence: CTA
  source 1..20: mol_type = other DNA
cacacctctacagctcagct

SEQ ID NO: 50942 - DNA, 20 bp, synthetic construct
  misc_feature 1..20: note = Description of Artificial Sequence: Synthetic oligonucleotide
  misc_feature 1..20: note = Target: SCN10A; (-) strand; PAM type: YTN; PAM sequence: TTG
  source 1..20: mol_type = other DNA
ggtccatctacacacctcta

SEQ ID NO: 50943 - DNA, 20 bp, synthetic construct
  misc_feature 1..20: note = Description of Artificial Sequence: Synthetic oligonucleotide
  misc_feature 1..20: note = Target: SCN10A; (-) strand; PAM type: YTN; PAM sequence: TTG
  source 1..20: mol_type = other DNA
ttgggtccatctacacacct

SEQ ID NO: 50944 - DNA, 20 bp, synthetic construct
  misc_feature 1..20: note = Description of Artificial Sequence: Synthetic oligonucleotide
  misc_feature 1..20: note = Target: SCN10A; (-) strand; PAM type: YTN; PAM sequence: TTG
  source 1..20: mol_type = other DNA
tggtaaagttgttgggtcca

SEQ ID NO: 50945 - DNA, 20 bp, synthetic construct
  misc_feature 1..20: note = Description of Artificial Sequence: Synthetic oligonucleotide
  misc_feature 1..20: note = Target: SCN10A; (-) strand; PAM type: YTN; PAM sequence: TTT
  source 1..20: mol_type = other DNA
gtggtaaagttgttgggtcc

SEQ ID NO: 50946 - DNA, 20 bp, synthetic construct
  misc_feature 1..20: note = Description of Artificial Sequence: Synthetic oligonucleotide
  misc_feature 1..20: note = Target: SCN10A; (-) strand; PAM type: YTN; PAM sequence: TTT
  source 1..20: mol_type = other DNA
tgtggtaaagttgttgggtc

SEQ ID NO: 50947 - DNA, 20 bp, synthetic construct
  misc_feature 1..20: note = Description of Artificial Sequence: Synthetic oligonucleotide
  misc_feature 1..20: note = Target: SCN10A; (-) strand; PAM type: YTN; PAM sequence: TTT
  source 1..20: mol_type = other DNA
ttgtggtaaagttgttgggt

SEQ ID NO: 50948 - DNA, 20 bp, synthetic construct
  misc_feature 1..20: note = Description of Artificial Sequence: Synthetic oligonucleotide
  misc_feature 1..20: note = Target: SCN10A; (-) strand; PAM type: YTN; PAM sequence: CTT
  source 1..20: mol_type = other DNA
tttgtggtaaagttgttggg

SEQ ID NO: 50949 - DNA, 20 bp, synthetic construct
  misc_feature 1..20: note = Description of Artificial Sequence: Synthetic oligonucleotide
  misc_feature 1..20: note = Target: SCN10A; (-) strand; PAM type: YTN; PAM sequence: CTC
  source 1..20: mol_type = other DNA
aagtcctttttgtggtaaag

SEQ ID NO: 50950 - DNA, 20 bp, synthetic construct
  misc_feature 1..20: note = Description of Artificial Sequence: Synthetic oligonucleotide
  misc_feature 1..20: note = Target: SCN10A; (-) strand; PAM type: YTN; PAM sequence: CTC
  source 1..20: mol_type = other DNA
cagagcagctcaagtccttt

SEQ ID NO: 50951 - DNA, 20 bp, synthetic construct
  misc_feature 1..20: note = Description of Artificial Sequence: Synthetic oligonucleotide
  misc_feature 1..20: note = Target: SCN10A; (-) strand; PAM type: YTN; PAM sequence: CTC
  source 1..20: mol_type = other DNA
aaggcaatggctccagagca

SEQ ID NO: 50952 - DNA, 20 bp, synthetic construct
  misc_feature 1..20: note = Description of Artificial Sequence: Synthetic oligonucleotide
  misc_feature 1..20: note = Target: SCN10A; (-) strand; PAM type: YTN; PAM sequence: TTC
  source 1..20: mol_type = other DNA
tcaaggcaatggctccagag

SEQ ID NO: 50953 - DNA, 20 bp, synthetic construct
  misc_feature 1..20: note = Description of Artificial Sequence: Synthetic oligonucleotide
  misc_feature 1..20: note = Target: SCN10A; (-) strand; PAM type: YTN; PAM sequence: TTT
  source 1..20: mol_type = other DNA
ctcaaggcaatggctccaga

SEQ ID NO: 50954 - DNA, 20 bp, synthetic construct
  misc_feature 1..20: note = Description of Artificial Sequence: Synthetic oligonucleotide
  misc_feature 1..20: note = Target: SCN10A; (-) strand; PAM type: YTN; PAM sequence: CTA
  source 1..20: mol_type = other DNA
gataatggcatttctcaagg

SEQ ID NO: 50955 - DNA, 20 bp, synthetic construct
  misc_feature 1..20: note = Description of Artificial Sequence: Synthetic oligonucleotide
  misc_feature 1..20: note = Target: SCN10A; (-) strand; PAM type: YTN; PAM sequence: CTG
  source 1..20: mol_type = other DNA
tctagataatggcatttctc

SEQ ID NO: 50956 - DNA, 20 bp, synthetic construct
  misc_feature 1..20: note = Description of Artificial Sequence: Synthetic oligonucleotide
  misc_feature 1..20: note = Target: SCN10A; (-) strand; PAM type: YTN; PAM sequence: TTC
  source 1..20: mol_type = other DNA
tgtctagataatggcatttc

SEQ ID NO: 50957 - DNA, 20 bp, synthetic construct
  misc_feature 1..20: note = Description of Artificial Sequence: Synthetic oligonucleotide
  misc_feature 1..20: note = Target: SCN10A; (-) strand; PAM type: YTN; PAM sequence: CTT
  source 1..20: mol_type = other DNA
ctgtctagataatggcattt

SEQ ID NO: 50958 - DNA, 20 bp, synthetic construct
  misc_feature 1..20: note = Description of Artificial Sequence: Synthetic oligonucleotide
  misc_feature 1..20: note = Target: SCN10A; (-) strand; PAM type: YTN; PAM sequence: CTC
  source 1..20: mol_type = other DNA
agcatccttctgtctagata

SEQ ID NO: 50959 - DNA, 20 bp, synthetic construct
  misc_feature 1..20: note = Description of Artificial Sequence: Synthetic oligonucleotide
  misc_feature 1..20: note = Target: SCN10A; (-) strand; PAM type: YTN; PAM sequence: TTA
  source 1..20: mol_type = other DNA
aatgtaaaccaagagcccct

SEQ ID NO: 50960 - DNA, 20 bp, synthetic construct
  misc_feature 1..20: note = Description of Artificial Sequence: Synthetic oligonucleotide
  misc_feature 1..20: note = Target: SCN10A; (-) strand; PAM type: YTN; PAM sequence: CTT
  source 1..20: mol_type = other DNA
aaatgtaaaccaagagcccc

SEQ ID NO: 50961 - DNA, 20 bp, synthetic construct
  misc_feature 1..20: note = Description of Artificial Sequence: Synthetic oligonucleotide
  misc_feature 1..20: note = Target: SCN10A; (-) strand; PAM type: YTN; PAM sequence: TTG
  source 1..20: mol_type = other DNA
acttaaatgtaaaccaagag

SEQ ID NO: 50962 - DNA, 20 bp, synthetic construct
  misc_feature 1..20: note = Description of Artificial Sequence: Synthetic oligonucleotide
  misc_feature 1..20: note = Target: SCN10A; (-) strand; PAM type: YTN; PAM sequence: TTT
  source 1..20: mol_type = other DNA
gacttaaatgtaaaccaaga

SEQ ID NO: 50963 - DNA, 20 bp, synthetic construct
  misc_feature 1..20: note = Description of Artificial Sequence: Synthetic oligonucleotide
  misc_feature 1..20: note = Target: SCN10A; (-) strand; PAM type: YTN; PAM sequence: CTT
  source 1..20: mol_type = other DNA
tgacttaaatgtaaaccaag

SEQ ID NO: 50964 - DNA, 20 bp, synthetic construct
  misc_feature 1..20: note = Description of Artificial Sequence: Synthetic oligonucleotide
  misc_feature 1..20: note = Target: SCN10A; (-) strand; PAM type: YTN; PAM sequence: TTG
  source 1..20: mol_type = other DNA
cctttgacttaaatgtaaac

SEQ ID NO: 50965 - DNA, 20 bp, synthetic construct
  misc_feature 1..20: note = Description of Artificial Sequence: Synthetic oligonucleotide
  misc_feature 1..20: note = Target: SCN10A; (-) strand; PAM type: YTN; PAM sequence: TTT
  source 1..20: mol_type = other DNA
gcctttgacttaaatgtaaa

SEQ ID NO: 50966 - DNA, 20 bp, synthetic construct
  misc_feature 1..20: note = Description of Artificial Sequence: Synthetic oligonucleotide
  misc_feature 1..20: note = Target: SCN10A; (-) strand; PAM type: YTN; PAM sequence: TTC
  source 1..20: mol_type = other DNA
atttgcctttgacttaaatg

SEQ ID NO: 50967 - DNA, 20 bp, synthetic construct
  misc_feature 1..20: note = Description of Artificial Sequence: Synthetic oligonucleotide
  misc_feature 1..20: note = Target: SCN10A; (-) strand; PAM type: YTN; PAM sequence: TTT
  source 1..20: mol_type = other DNA
catttgcctttgacttaaat

SEQ ID NO: 50968 - DNA, 20 bp, synthetic construct
  misc_feature 1..20: note = Description of Artificial Sequence: Synthetic oligonucleotide
  misc_feature 1..20: note = Target: SCN10A; (-) strand; PAM type: YTN; PAM sequence: TTT
  source 1..20: mol_type = other DNA
tcatttgcctttgacttaaa

SEQ ID NO: 50969 - DNA, 20 bp, synthetic construct
  misc_feature 1..20: note = Description of Artificial Sequence: Synthetic oligonucleotide
  misc_feature 1..20: note = Target: SCN10A; (-) strand; PAM type: YTN; PAM sequence: CTG
  source 1..20: mol_type = other DNA
acatcagttttcatttgcct

SEQ ID NO: 50970 - DNA, 20 bp, synthetic construct
  misc_feature 1..20: note = Description of Artificial Sequence: Synthetic oligonucleotide
  misc_feature 1..20: note = Target: SCN10A; (-) strand; PAM type: YTN; PAM sequence: TTC
  source 1..20: mol_type = other DNA
tgacatcagttttcatttgc

SEQ ID NO: 50971 - DNA, 20 bp, synthetic construct
  misc_feature 1..20: note = Description of Artificial Sequence: Synthetic oligonucleotide
  misc_feature 1..20: note = Target: SCN10A; (-) strand; PAM type: YTN; PAM sequence: TTG
  source 1..20: mol_type = other DNA
ttctgacatcagttttcatt

SEQ ID NO: 50972 - DNA, 20 bp, synthetic construct
  misc_feature 1..20: note = Description of Artificial Sequence: Synthetic oligonucleotide
  misc_feature 1..20: note = Target: SCN10A; (-) strand; PAM type: YTN; PAM sequence: CTC
  source 1..20: mol_type = other DNA
atgagagggttgttctgaca

SEQ ID NO: 50973 - DNA, 20 bp, synthetic construct
  misc_feature 1..20: note = Description of Artificial Sequence: Synthetic oligonucleotide
  misc_feature 1..20: note = Target: SCN10A; (-) strand; PAM type: YTN; PAM sequence: TTG
  source 1..20: mol_type = other DNA
gctcatgagagggttgttct

SEQ ID NO: 50974 - DNA, 20 bp, synthetic construct
  misc_feature 1..20: note = Description of Artificial Sequence: Synthetic oligonucleotide
  misc_feature 1..20: note = Target: SCN10A; (-) strand; PAM type: YTN; PAM sequence: TTT
  source 1..20: mol_type = other DNA
ggctcatgagagggttgttc

SEQ ID NO: 50975 - DNA, 20 bp, synthetic construct
  misc_feature 1..20: note = Description of Artificial Sequence: Synthetic oligonucleotide
  misc_feature 1..20: note = Target: SCN10A; (-) strand; PAM type: YTN; PAM sequence: CTT
  source 1..20: mol_type = other DNA
tggctcatgagagggttgtt

SEQ ID NO: 50976 - DNA, 20 bp, synthetic construct
  misc_feature 1..20: note = Description of Artificial Sequence: Synthetic oligonucleotide
  misc_feature 1..20: note = Target: SCN10A; (-) strand; PAM type: YTN; PAM sequence: TTC
  source 1..20: mol_type = other DNA
tttggctcatgagagggttg

SEQ ID NO: 50977 - DNA, 20 bp, synthetic construct
  misc_feature 1..20: note = Description of Artificial Sequence: Synthetic oligonucleotide
  misc_feature 1..20: note = Target: SCN10A; (-) strand; PAM type: YTN; PAM sequence: TTG
  source 1..20: mol_type = other DNA
gttctttggctcatgagagg

SEQ ID NO: 50978 - DNA, 20 bp, synthetic construct
  misc_feature 1..20: note = Description of Artificial Sequence: Synthetic oligonucleotide
  misc_feature 1..20: note = Target: SCN10A; (-) strand; PAM type: YTN; PAM sequence: TTT
  source 1..20: mol_type = other DNA
ggttctttggctcatgagag

SEQ ID NO: 50979 - DNA, 20 bp, synthetic construct
  misc_feature 1..20: note = Description of Artificial Sequence: Synthetic oligonucleotide
  misc_feature 1..20: note = Target: SCN10A; (-) strand; PAM type: YTN; PAM sequence: TTG
  source 1..20: mol_type = other DNA
gcatttggttctttggctca

SEQ ID NO: 50980 - DNA, 20 bp, synthetic construct
  misc_feature 1..20: note = Description of Artificial Sequence: Synthetic oligonucleotide
  misc_feature 1..20: note = Target: SCN10A; (-) strand; PAM type: YTN; PAM sequence: CTT
  source 1..20: mol_type = other DNA
ggcatttggttctttggctc

SEQ ID NO: 50981 - DNA, 20 bp, synthetic construct
  misc_feature 1..20: note = Description of Artificial Sequence: Synthetic oligonucleotide
  misc_feature 1..20: note = Target: SCN10A; (-) strand; PAM type: YTN; PAM sequence: TTC
  source 1..20: mol_type = other DNA
acaaatgcacttggcatttg

SEQ ID NO: 50982 - DNA, 20 bp, synthetic construct
  misc_feature 1..20: note = Description of Artificial Sequence: Synthetic oligonucleotide
  misc_feature 1..20: note = Target: SCN10A; (-) strand; PAM type: YTN; PAM sequence: TTT
  source 1..20: mol_type = other DNA
cacaaatgcacttggcattt

SEQ ID NO: 50983 - DNA, 20 bp, synthetic construct
  misc_feature 1..20: note = Description of Artificial Sequence: Synthetic oligonucleotide
  misc_feature 1..20: note = Target: SCN10A; (-) strand; PAM type: YTN; PAM sequence: CTT
  source 1..20: mol_type = other DNA
tcacaaatgcacttggcatt

SEQ ID NO: 50984 - DNA, 20 bp, synthetic construct
  misc_feature 1..20: note = Description of Artificial Sequence: Synthetic oligonucleotide
  misc_feature 1..20: note = Target: SCN10A; (-) strand; PAM type: YTN; PAM sequence: TTC
  source 1..20: mol_type = other DNA
tttcacaaatgcacttggca

SEQ ID NO: 50985 - DNA, 20 bp, synthetic construct
  misc_feature 1..20: note = Description of Artificial Sequence: Synthetic oligonucleotide
  misc_feature 1..20: note = Target: SCN10A; (-) strand; PAM type: YTN; PAM sequence: CTG
  source 1..20: mol_type = other DNA
ttctttcacaaatgcacttg

SEQ ID NO: 50986 - DNA, 20 bp, synthetic construct
  misc_feature 1..20: note = Description of Artificial Sequence: Synthetic oligonucleotide
  misc_feature 1..20: note = Target: SCN10A; (-) strand; PAM type: YTN; PAM sequence: TTG
  source 1..20: mol_type = other DNA
gactgttctttcacaaatgc

SEQ ID NO: 50987 - DNA, 20 bp, synthetic construct
  misc_feature 1..20: note = Description of Artificial Sequence: Synthetic oligonucleotide
  misc_feature 1..20: note = Target: SCN10A; (-) strand; PAM type: YTN; PAM sequence: CTT
  source 1..20: mol_type = other DNA
ggactgttctttcacaaatg

SEQ ID NO: 50988 - DNA, 20 bp, synthetic construct
  misc_feature 1..20: note = Description of Artificial Sequence: Synthetic oligonucleotide
  misc_feature 1..20: note = Target: SCN10A; (-) strand; PAM type: YTN; PAM sequence: TTC
  source 1..20: mol_type = other DNA
cttggactgttctttcacaa

SEQ ID NO: 50989 - DNA, 20 bp, synthetic construct
  misc_feature 1..20: note = Description of Artificial Sequence: Synthetic oligonucleotide
  misc_feature 1..20: note = Target: SCN10A; (-) strand; PAM type: YTN; PAM sequence: TTG
  source 1..20: mol_type = other DNA
gtcaacatcaggttccttgg

SEQ ID NO: 50990 - DNA, 20 bp, synthetic construct
  misc_feature 1..20: note = Description of Artificial Sequence: Synthetic oligonucleotide
  misc_feature 1..20: note = Target: SCN10A; (-) strand; PAM type: YTN; PAM sequence: TTT
  source 1..20: mol_type = other DNA
ggtcaacatcaggttccttg

SEQ ID NO: 50991 - DNA, 20 bp, synthetic construct
  misc_feature 1..20: note = Description of Artificial Sequence: Synthetic oligonucleotide
  misc_feature 1..20: note = Target: SCN10A; (-) strand; PAM type: YTN; PAM sequence: CTG
  source 1..20: mol_type = other DNA
gaaacaagcaggagcatttg

SEQ ID NO: 50992 - DNA, 20 bp, synthetic construct
  misc_feature 1..20: note = Description of Artificial Sequence: Synthetic oligonucleotide
  misc_feature 1..20: note = Target: SCN10A; (-) strand; PAM type: YTN; PAM sequence: CTG
  source 1..20: mol_type = other DNA
aggactggaaacaagcagga

SEQ ID NO: 50993 - DNA, 20 bp, synthetic construct
  misc_feature 1..20: note = Description of Artificial Sequence: Synthetic oligonucleotide
  misc_feature 1..20: note = Target: SCN10A; (-) strand; PAM type: YTN; PAM sequence: TTG
  source 1..20: mol_type = other DNA
gagctgaggactggaaacaa

SEQ ID NO: 50994 - DNA, 20 bp, synthetic construct
  misc_feature 1..20: note = Description of Artificial Sequence: Synthetic oligonucleotide
  misc_feature 1..20: note = Target: SCN10A; (-) strand; PAM type: YTN; PAM sequence: CTC
  source 1..20: mol_type = other DNA
agttggagctgaggactgga

SEQ ID NO: 50995 - DNA, 20 bp, synthetic construct
  misc_feature 1..20: note = Description of Artificial Sequence: Synthetic oligonucleotide
  misc_feature 1..20: note = Target: SCN10A; (-) strand; PAM type: YTN; PAM sequence: CTA
  source 1..20: mol_type = other DNA
tctcagttggagctgaggac

SEQ ID NO: 50996 - DNA, 20 bp, synthetic construct
  misc_feature 1..20: note = Description of Artificial Sequence: Synthetic oligonucleotide
  misc_feature 1..20: note = Target: SCN10A; (-) strand; PAM type: YTN; PAM sequence: CTA
  source 1..20: mol_type = other DNA
ggaaaactatctcagttgga

SEQ ID NO: 50997 - DNA, 20 bp, synthetic construct
  misc_feature 1..20: note = Description of Artificial Sequence: Synthetic oligonucleotide
  misc_feature 1..20: note = Target: SCN10A; (-) strand; PAM type: YTN; PAM sequence: CTC
  source 1..20: mol_type = other DNA
actaggaaaactatctcagt

SEQ ID NO: 50998 - DNA, 20 bp, synthetic construct
  misc_feature 1..20: note = Description of Artificial Sequence: Synthetic oligonucleotide
  misc_feature 1..20: note = Target: SCN10A; (-) strand; PAM type: YTN; PAM sequence: TTC
  source 1..20: mol_type = other DNA
atcagctcactaggaaaact

SEQ ID NO: 50999 - DNA, 20 bp, synthetic construct
  misc_feature 1..20: note = Description of Artificial Sequence: Synthetic oligonucleotide
  misc_feature 1..20: note = Target: SCN10A; (-) strand; PAM type: YTN; PAM sequence: CTT
  source 1..20: mol_type = other DNA
catcagctcactaggaaaac

SEQ ID NO: 51000 - DNA, 20 bp, synthetic construct
  misc_feature 1..20: note = Description of Artificial Sequence: Synthetic oligonucleotide
  misc_feature 1..20: note = Target: SCN10A; (-) strand; PAM type: YTN; PAM sequence: CTC
  source 1..20: mol_type = other DNA
caccttcatcagctcactag

SEQ ID NO: 51001 - DNA, 20 bp, synthetic construct
  misc_feature 1..20: note = Description of Artificial Sequence: Synthetic oligonucleotide
  misc_feature 1..20: note = Target: SCN10A; (-) strand; PAM type: YTN; PAM sequence: CTG
  source 1..20: mol_type = other DNA
catgaggctccaccttcatc

SEQ ID NO: 51002 - DNA, 20 bp, synthetic construct
  misc_feature 1..20: note = Description of Artificial Sequence: Synthetic oligonucleotide
  misc_feature 1..20: note = Target: SCN10A; (-) strand; PAM type: YTN; PAM sequence: CTG
  source 1..20: mol_type = other DNA
tgtggagcctgcatgaggct

SEQ ID NO: 51003 - DNA, 20 bp, synthetic construct
  misc_feature 1..20: note = Description of Artificial Sequence: Synthetic oligonucleotide
  misc_feature 1..20: note = Target: SCN10A; (-) strand; PAM type: YTN; PAM sequence: TTG
  source 1..20: mol_type = other DNA
cccaggtcgacctgtgtgga

SEQ ID NO: 51004 - DNA, 20 bp, synthetic construct
  misc_feature 1..20: note = Description of Artificial Sequence: Synthetic oligonucleotide
  misc_feature 1..20: note = Target: SCN10A; (-) strand; PAM type: YTN; PAM sequence: CTC
  source 1..20: mol_type = other DNA
catgttgcccaggtcgacct

SEQ ID NO: 51005 - DNA, 20 bp, synthetic construct
  misc_feature 1..20: note = Description of Artificial Sequence: Synthetic oligonucleotide
  misc_feature 1..20: note = Target: SCN10A; (-) strand; PAM type: YTN; PAM sequence: CTG
  source 1..20: mol_type = other DNA
acggctccatgttgcccagg

SEQ ID NO: 51006 - DNA, 20 bp, synthetic construct
  misc_feature 1..20: note = Description of Artificial Sequence: Synthetic oligonucleotide
  misc_feature 1..20: note = Target: SCN10A; (-) strand; PAM type: YTN; PAM sequence: CTG
  source 1..20: mol_type = other DNA
agaggctgacggctccatgt

SEQ ID NO: 51007 - DNA, 20 bp, synthetic construct
  misc_feature 1..20: note = Description of Artificial Sequence: Synthetic oligonucleotide
  misc_feature 1..20: note = Target: SCN10A; (-) strand; PAM type: YTN; PAM sequence: CTC
  source 1..20: mol_type = other DNA
acaacacccccagtgcctga

SEQ ID NO: 51008 - DNA, 20 bp, synthetic construct
  misc_feature 1..20: note = Description of Artificial Sequence: Synthetic oligonucleotide
  misc_feature 1..20: note = Target: SCN10A; (-) strand; PAM type: YTN; PAM sequence: TTG
  source 1..20: mol_type = other DNA
gaaaagcagagctcacaaca

SEQ ID NO: 51009 - DNA, 20 bp, synthetic construct
  misc_feature 1..20: note = Description of Artificial Sequence: Synthetic oligonucleotide
  misc_feature 1..20: note = Target: SCN10A; (-) strand; PAM type: YTN; PAM sequence: CTT
  source 1..20: mol_type = other DNA
ggaaaagcagagctcacaac

SEQ ID NO: 51010 - DNA, 20 bp, synthetic construct
  misc_feature 1..20: note = Description of Artificial Sequence: Synthetic oligonucleotide
  misc_feature 1..20: note = Target: SCN10A; (-) strand; PAM type: YTN; PAM sequence: CTG
  source 1..20: mol_type = other DNA
agagcttggaaaagcagagc

SEQ ID NO: 51011 - DNA, 20 bp, synthetic construct
  misc_feature 1..20: note = Description of Artificial Sequence: Synthetic oligonucleotide
  misc_feature 1..20: note = Target: SCN10A; (-) strand; PAM type: YTN; PAM sequence: CTC
  source 1..20: mol_type = other DNA
catggctgagagcttggaaa

SEQ ID NO: 51012 - DNA, 20 bp, synthetic construct
  misc_feature 1..20: note = Description of Artificial Sequence: Synthetic oligonucleotide
  misc_feature 1..20: note = Target: SCN10A; (-) strand; PAM type: YTN; PAM sequence: CTC
  source 1..20: mol_type = other DNA
acccacctccatggctgaga

SEQ ID NO: 51013 - DNA, 20 bp, synthetic construct
  misc_feature 1..20: note = Description of Artificial Sequence: Synthetic oligonucleotide
  misc_feature 1..20: note = Target: SCN10A; (-) strand; PAM type: YTN; PAM sequence: TTA
  source 1..20: mol_type = other DNA
ggcaaaagatcaaaaaggcc

SEQ ID NO: 51014 - DNA, 20 bp, synthetic construct
  misc_feature 1..20: note = Description of Artificial Sequence: Synthetic oligonucleotide
  misc_feature 1..20: note = Target: SCN10A; (-) strand; PAM type: YTN; PAM sequence: TTT
  source 1..20: mol_type = other DNA
aggcaaaagatcaaaaaggc

SEQ ID NO: 51015 - DNA, 20 bp, synthetic construct
  misc_feature 1..20: note = Description of Artificial Sequence: Synthetic oligonucleotide
  misc_feature 1..20: note = Target: SCN10A; (-) strand; PAM type: YTN; PAM sequence: CTT
  source 1..20: mol_type = other DNA
taggcaaaagatcaaaaagg

SEQ ID NO: 51016 - DNA, 20 bp, synthetic construct
  misc_feature 1..20: note = Description of Artificial Sequence: Synthetic oligonucleotide
  misc_feature 1..20: note = Target: SCN10A; (-) strand; PAM type: YTN; PAM sequence: CTG
  source 1..20: mol_type = other DNA
gaggaaggcatgagcagaaa

SEQ ID NO: 51017 - DNA, 20 bp, synthetic construct
  misc_feature 1..20: note = Description of Artificial Sequence: Synthetic oligonucleotide
  misc_feature 1..20: note = Target: SCN10A; (-) strand; PAM type: YTN; PAM sequence: TTG
  source 1..20: mol_type = other DNA
gccactggaggaaggcatga

SEQ ID NO: 51018 - DNA, 20 bp, synthetic construct
  misc_feature 1..20: note = Description of Artificial Sequence: Synthetic oligonucleotide
  misc_feature 1..20: note = Target: SCN10A; (-) strand; PAM type: YTN; PAM sequence: TTT
  source 1..20: mol_type = other DNA
ggccactggaggaaggcatg

SEQ ID NO: 51019 - DNA, 20 bp, synthetic construct
  misc_feature 1..20: note = Description of Artificial Sequence: Synthetic oligonucleotide
  misc_feature 1..20: note = Target: SCN10A; (-) strand; PAM type: YTN; PAM sequence: CTT
  source 1..20: mol_type = other DNA
tggccactggaggaaggcat

SEQ ID NO: 51020 - DNA, 20 bp, synthetic construct
  misc_feature 1..20: note = Description of Artificial Sequence: Synthetic oligonucleotide
  misc_feature 1..20: note = Target: SCN10A; (-) strand; PAM type: YTN; PAM sequence: CTG
  source 1..20: mol_type = other DNA
ctttggccactggaggaagg

SEQ ID NO: 51021 - DNA, 20 bp, synthetic construct
  misc_feature 1..20: note = Description of Artificial Sequence: Synthetic oligonucleotide
  misc_feature 1..20: note = Target: SCN10A; (-) strand; PAM type: YTN; PAM sequence: CTG
  source 1..20: mol_type = other DNA
ctgctttggccactggagga

SEQ ID NO: 51022 - DNA, 20 bp, synthetic construct
  misc_feature 1..20: note = Description of Artificial Sequence: Synthetic oligonucleotide
  misc_feature 1..20: note = Target: SCN10A; (-) strand; PAM type: YTN; PAM sequence: CTG
  source 1..20: mol_type = other DNA
cctgctgctttggccactgg

SEQ ID NO: 51023 - DNA, 20 bp, synthetic construct
  misc_feature 1..20: note = Description of Artificial Sequence: Synthetic oligonucleotide
  misc_feature 1..20: note = Target: SCN10A; (-) strand; PAM type: YTN; PAM sequence: CTC
  source 1..20: mol_type = other DNA
tgcctgctgctttggccact

SEQ ID NO: 51024 - DNA, 20 bp, synthetic construct
  misc_feature 1..20: note = Description of Artificial Sequence: Synthetic oligonucleotide
  misc_feature 1..20: note = Target: SCN10A; (-) strand; PAM type: YTN; PAM sequence: CTC
  source 1..20: mol_type = other DNA
agctctgcctgctgctttgg

SEQ ID NO: 51025 - DNA, 20 bp, synthetic construct
  misc_feature 1..20: note = Description of Artificial Sequence: Synthetic oligonucleotide
  misc_feature 1..20: note = Target: SCN10A; (-) strand; PAM type: YTN; PAM sequence: CTA
  source 1..20: mol_type = other DNA
agggatgaggacccctcagc

SEQ ID NO: 51026 - DNA, 20 bp, synthetic construct
  misc_feature 1..20: note = Description of Artificial Sequence: Synthetic oligonucleotide
  misc_feature 1..20: note = Target: SCN10A; (-) strand; PAM type: YTN; PAM sequence: TTC
  source 1..20: mol_type = other DNA
caggtggcagaacagaatgt

SEQ ID NO: 51027 - DNA, 20 bp, synthetic construct
  misc_feature 1..20: note = Description of Artificial Sequence: Synthetic oligonucleotide
  misc_feature 1..20: note = Target: SCN10A; (-) strand; PAM type: YTN; PAM sequence: TTC
  source 1..20: mol_type = other DNA
agcgaagaccattccaggtg

SEQ ID NO: 51028 - DNA, 20 bp, synthetic construct
  misc_feature 1..20: note = Description of Artificial Sequence: Synthetic oligonucleotide
  misc_feature 1..20: note = Target: SCN10A; (-) strand; PAM type: YTN; PAM sequence: TTT
  source 1..20: mol_type = other DNA
cagcgaagaccattccaggt

SEQ ID NO: 51029 - DNA, 20 bp, synthetic construct
  misc_feature 1..20: note = Description of Artificial Sequence: Synthetic oligonucleotide
  misc_feature 1..20: note = Target: SCN10A; (-) strand; PAM type: YTN; PAM sequence: CTG
  source 1..20: mol_type = other DNA
ggtgaatacgagatagtttc

SEQ ID NO: 51030 - DNA, 20 bp, synthetic construct
  misc_feature 1..20: note = Description of Artificial Sequence: Synthetic oligonucleotide
  misc_feature 1..20: note = Target: SCN10A; (-) strand; PAM type: YTN; PAM sequence: CTC
  source 1..20: mol_type = other DNA
caggctgggtgaatacgaga

SEQ ID NO: 51031 - DNA, 20 bp, synthetic construct
  misc_feature 1..20: note = Description of Artificial Sequence: Synthetic oligonucleotide
  misc_feature 1..20: note = Target: SCN10A; (-) strand; PAM type: YTN; PAM sequence: TTC
  source 1..20: mol_type = other DNA
aagggcaggtaggatgtctc

SEQ ID NO: 51032 - DNA, 20 bp, synthetic construct
  misc_feature 1..20: note = Description of Artificial Sequence: Synthetic oligonucleotide
  misc_feature 1..20: note = Target: SCN10A; (-) strand; PAM type: YTN; PAM sequence: TTT
  source 1..20: mol_type = other DNA
caagggcaggtaggatgtct

SEQ ID NO: 51033 - DNA, 20 bp, synthetic construct
  misc_feature 1..20: note = Description of Artificial Sequence: Synthetic oligonucleotide
  misc_feature 1..20: note = Target: SCN10A; (-) strand; PAM type: YTN; PAM sequence: CTT
  source 1..20: mol_type = other DNA
tcaagggcaggtaggatgtc

SEQ ID NO: 51034 - DNA, 20 bp, synthetic construct
  misc_feature 1..20: note = Description of Artificial Sequence: Synthetic oligonucleotide
  misc_feature 1..20: note = Target: SCN10A; (-) strand; PAM type: YTN; PAM sequence: TTG
  source 1..20: mol_type = other DNA
aggtgagctttcaagggcag

SEQ ID NO: 51035 - DNA, 20 bp, synthetic construct
  misc_feature 1..20: note = Description of Artificial Sequence: Synthetic oligonucleotide
  misc_feature 1..20: note = Target: SCN10A; (-) strand; PAM type: YTN; PAM sequence: TTT
  source 1..20: mol_type = other DNA
gaggtgagctttcaagggca

SEQ ID NO: 51036 - DNA, 20 bp, synthetic construct
  misc_feature 1..20: note = Description of Artificial Sequence: Synthetic oligonucleotide
  misc_feature 1..20: note = Target: SCN10A; (-) strand; PAM type: YTN; PAM sequence: CTG
  source 1..20: mol_type = other DNA
gaggtggtgtttgaggtgag

SEQ ID NO: 51037 - DNA, 20 bp, synthetic construct
  misc_feature 1..20: note = Description of Artificial Sequence: Synthetic oligonucleotide
  misc_feature 1..20: note = Target: SCN10A; (-) strand; PAM type: YTN; PAM sequence: TTC
  source 1..20: mol_type = other DNA
ctggaggtggtgtttgaggt

SEQ ID NO: 51038 - DNA, 20 bp, synthetic construct
  misc_feature 1..20: note = Description of Artificial Sequence: Synthetic oligonucleotide
  misc_feature 1..20: note = Target: SCN10A; (-) strand; PAM type: YTN; PAM sequence: CTT
  source 1..20: mol_type = other DNA
cctggaggtggtgtttgagg

SEQ ID NO: 51039 - DNA, 20 bp, synthetic construct
  misc_feature 1..20: note = Description of Artificial Sequence: Synthetic oligonucleotide
  misc_feature 1..20: note = Target: SCN10A; (-) strand; PAM type: YTN; PAM sequence: CTG
  source 1..20: mol_type = other DNA
ggcaaacacagtgaggtggc

SEQ ID NO: 51040 - DNA, 20 bp, synthetic construct
  misc_feature 1..20: note = Description of Artificial Sequence: Synthetic oligonucleotide
  misc_feature 1..20: note = Target: SCN10A; (-) strand; PAM type: YTN; PAM sequence: TTC
  source 1..20: mol_type = other DNA
ataggctgggcaaacacagt

SEQ ID NO: 51041 - DNA, 20 bp, synthetic construct
  misc_feature 1..20: note = Description of Artificial Sequence: Synthetic oligonucleotide
  misc_feature 1..20: note = Target: SCN10A; (-) strand; PAM type: YTN; PAM sequence: CTT
  source 1..20: mol_type = other DNA
cataggctgggcaaacacag

SEQ ID NO: 51042 - DNA, 20 bp, synthetic construct
  misc_feature 1..20: note = Description of Artificial Sequence: Synthetic oligonucleotide
  misc_feature 1..20: note = Target: SCN10A; (-) strand; PAM type: YTN; PAM sequence: CTA
  source 1..20: mol_type = other DNA
gaggcttcataggctgggca

SEQ ID NO: 51043 - DNA, 20 bp, synthetic construct
  misc_feature 1..20: note = Description of Artificial Sequence: Synthetic oligonucleotide
  misc_feature 1..20: note = Target: SCN10A; (-) strand; PAM type: YTN; PAM sequence: TTA
  source 1..20: mol_type = other DNA
ctagaggcttcataggctgg

SEQ ID NO: 51044 - DNA, 20 bp, synthetic construct
  misc_feature 1..20: note = Description of Artificial Sequence: Synthetic oligonucleotide
  misc_feature 1..20: note = Target: SCN10A; (-) strand; PAM type: YTN; PAM sequence: TTT
  source 1..20: mol_type = other DNA
actagaggcttcataggctg

SEQ ID NO: 51045 - DNA, 20 bp, synthetic construct
  misc_feature 1..20: note = Description of Artificial Sequence: Synthetic oligonucleotide
  misc_feature 1..20: note = Target: SCN10A; (-) strand; PAM type: YTN; PAM sequence: CTT
  source 1..20: mol_type = other DNA
tactagaggcttcataggct

SEQ ID NO: 51046 - DNA, 20 bp, synthetic construct
  misc_feature 1..20: note = Description of Artificial Sequence: Synthetic oligonucleotide
  misc_feature 1..20: note = Target: SCN10A; (-) strand; PAM type: YTN; PAM sequence: TTC
  source 1..20: mol_type = other DNA
tttactagaggcttcatagg

SEQ ID NO: 51047 - DNA, 20 bp, synthetic construct
  misc_feature 1..20: note = Description of Artificial Sequence: Synthetic oligonucleotide
  misc_feature 1..20: note = Target: SCN10A; (-) strand; PAM type: YTN; PAM sequence: CTG
  source 1..20: mol_type = other DNA
tggaaaacaagttctttact

SEQ ID NO: 51048 - DNA, 20 bp, synthetic construct
  misc_feature 1..20: note = Description of Artificial Sequence: Synthetic oligonucleotide
  misc_feature 1..20: note = Target: SCN10A; (-) strand; PAM type: YTN; PAM sequence: CTA
  source 1..20: mol_type = other DNA
ccctgtggaaaacaagttct

SEQ ID NO: 51049 - DNA, 20 bp, synthetic construct
  misc_feature 1..20: note = Description of Artificial Sequence: Synthetic oligonucleotide
  misc_feature 1..20: note = Target: SCN10A; (-) strand; PAM type: YTN; PAM sequence: TTC
  source 1..20: mol_type = other DNA
atagacataaagatgctacc

SEQ ID NO: 51050 - DNA, 20 bp, synthetic construct
  misc_feature 1..20: note = Description of Artificial Sequence: Synthetic oligonucleotide
  misc_feature 1..20: note = Target: SCN10A; (-) strand; PAM type: YTN; PAM sequence: CTC
  source 1..20: mol_type = other DNA
attcatagacataaagatgc

SEQ ID NO: 51051 - DNA, 20 bp, synthetic construct
  misc_feature 1..20: note = Description of Artificial Sequence: Synthetic oligonucleotide
  misc_feature 1..20: note = Target: SCN10A; (-) strand; PAM type: YTN; PAM sequence: TTC
  source 1..20: mol_type = other DNA
tcattcatagacataaagat

SEQ ID NO: 51052 - DNA, 20 bp, synthetic construct
  misc_feature 1..20: note = Description of Artificial Sequence: Synthetic oligonucleotide
  misc_feature 1..20: note = Target: SCN10A; (-) strand; PAM type: YTN; PAM sequence: TTT
  source 1..20: mol_type = other DNA
ctcattcatagacataaaga

SEQ ID NO: 51053 - DNA, 20 bp, synthetic construct
  misc_feature 1..20: note = Description of Artificial Sequence: Synthetic oligonucleotide
  misc_feature 1..20: note = Target: SCN10A; (-) strand; PAM type: YTN; PAM sequence: TTG
  source 1..20: mol_type = other DNA
caatttctcattcatagaca

SEQ ID NO: 51054 - DNA, 20 bp, synthetic construct
  misc_feature 1..20: note = Description of Artificial Sequence: Synthetic oligonucleotide
  misc_feature 1..20: note = Target: SCN10A; (-) strand; PAM type: YTN; PAM sequence: TTT
  source 1..20: mol_type = other DNA
gcaatttctcattcatagac

SEQ ID NO: 51055 - DNA, 20 bp, synthetic construct
  misc_feature 1..20: note = Description of Artificial Sequence: Synthetic oligonucleotide
  misc_feature 1..20: note = Target: SCN10A; (-) strand; PAM type: YTN; PAM sequence: CTA
  source 1..20: mol_type = other DNA
gtttgcaatttctcattcat

SEQ ID NO: 51056 - DNA, 20 bp, synthetic construct
  misc_feature 1..20: note = Description of Artificial Sequence: Synthetic oligonucleotide
  misc_feature 1..20: note = Target: SCN10A; (-) strand; PAM type: YTN; PAM sequence: CTG
  source 1..20: mol_type = other DNA
ctagtttgcaatttctcatt

SEQ ID NO: 51057 - DNA, 20 bp, synthetic construct
  misc_feature 1..20: note = Description of Artificial Sequence: Synthetic oligonucleotide
  misc_feature 1..20: note = Target: SCN10A; (-) strand; PAM type: YTN; PAM sequence: CTA
  source 1..20: mol_type = other DNA
taagctgctagtttgcaatt

SEQ ID NO: 51058 - DNA, 20 bp, synthetic construct
  misc_feature 1..20: note = Description of Artificial Sequence: Synthetic oligonucleotide
  misc_feature 1..20: note = Target: SCN10A; (-) strand; PAM type: YTN; PAM sequence: CTG
  source 1..20: mol_type = other DNA
tgggccaaatccagcctata

SEQ ID NO: 51059 - DNA, 20 bp, synthetic construct
  misc_feature 1..20: note = Description of Artificial Sequence: Synthetic oligonucleotide
  misc_feature 1..20: note = Target: SCN10A; (-) strand; PAM type: YTN; PAM sequence: TTC
  source 1..20: mol_type = other DNA
tgtgggccaaatccagccta

SEQ ID NO: 51060 - DNA, 20 bp, synthetic construct
  misc_feature 1..20: note = Description of Artificial Sequence: Synthetic oligonucleotide
  misc_feature 1..20: note = Target: SCN10A; (-) strand; PAM type: YTN; PAM sequence: TTT
  source 1..20: mol_type = other DNA
ctgtgggccaaatccagcct

SEQ ID NO: 51061 - DNA, 20 bp, synthetic construct
  misc_feature 1..20: note = Description of Artificial Sequence: Synthetic oligonucleotide
  misc_feature 1..20: note = Target: SCN10A; (-) strand; PAM type: YTN; PAM sequence: TTG
  source 1..20: mol_type = other DNA
ggccaaacaaaatatttctg

SEQ ID NO: 51062 - DNA, 20 bp, synthetic construct
  misc_feature 1..20: note = Description of Artificial Sequence: Synthetic oligonucleotide
  misc_feature 1..20: note = Target: SCN10A; (-) strand; PAM type: YTN; PAM sequence: TTG
  source 1..20: mol_type = other DNA
ttgggccaaacaaaatattt

SEQ ID NO: 51063 - DNA, 20 bp, synthetic construct
  misc_feature 1..20: note = Description of Artificial Sequence: Synthetic oligonucleotide
  misc_feature 1..20: note = Target: SCN10A; (-) strand; PAM type: YTN; PAM sequence: CTA
  source 1..20: mol_type = other DNA
catattgttgggccaaacaa

SEQ ID NO: 51064 - DNA, 20 bp, synthetic construct
  misc_feature 1..20: note = Description of Artificial Sequence: Synthetic oligonucleotide
  misc_feature 1..20: note = Target: SCN10A; (-) strand; PAM type: YTN; PAM sequence: TTC
  source 1..20: mol_type = other DNA
caaaaaatgtctacatattg

SEQ ID NO: 51065 - DNA, 20 bp, synthetic construct
  misc_feature 1..20: note = Description of Artificial Sequence: Synthetic oligonucleotide
  misc_feature 1..20: note = Target: SCN10A; (-) strand; PAM type: YTN; PAM sequence: CTA
  source 1..20: mol_type = other DNA
ttccaaaaaatgtctacata

SEQ ID NO: 51066 - DNA, 20 bp, synthetic construct
  misc_feature 1..20: note = Description of Artificial Sequence: Synthetic oligonucleotide
  misc_feature 1..20: note = Target: SCN10A; (-) strand; PAM type: YTN; PAM sequence: CTA
  source 1..20: mol_type = other DNA
cctattccaaaaaatgtcta

SEQ ID NO: 51067 - DNA, 20 bp, synthetic construct
  misc_feature 1..20: note = Description of Artificial Sequence: Synthetic oligonucleotide
  misc_feature 1..20: note = Target: SCN10A; (-) strand; PAM type: YTN; PAM sequence: TTG
  source 1..20: mol_type = other DNA
gctacctattccaaaaaatg

SEQ ID NO: 51068 - DNA, 20 bp, synthetic construct
  misc_feature 1..20: note = Description of Artificial Sequence: Synthetic oligonucleotide
  misc_feature 1..20: note = Target: SCN10A; (-) strand; PAM type: YTN; PAM sequence: CTC
  source 1..20: mol_type = other DNA
ccaaccgtaaacattggcta

SEQ ID NO: 51069 - DNA, 20 bp, synthetic construct
  misc_feature 1..20: note = Description of Artificial Sequence: Synthetic oligonucleotide
  misc_feature 1..20: note = Target: SCN10A; (-) strand; PAM type: YTN; PAM sequence: TTA
  source 1..20: mol_type = other DNA
tataaaatctcccaaccgta

SEQ ID NO: 51070 - DNA, 20 bp, synthetic construct
  misc_feature 1..20: note = Description of Artificial Sequence: Synthetic oligonucleotide
  misc_feature 1..20: note = Target: SCN10A; (-) strand; PAM type: YTN; PAM sequence: TTT
  source 1..20: mol_type = other DNA
atataaaatctcccaaccgt

SEQ ID NO: 51071 - DNA, 20 bp, synthetic construct
  misc_feature 1..20: note = Description of Artificial Sequence: Synthetic oligonucleotide
  misc_feature 1..20: note = Target: SCN10A; (-) strand; PAM type: YTN; PAM sequence: TTT
  source 1..20: mol_type = other DNA
tatataaaatctcccaaccg

SEQ ID NO: 51072 - DNA, 20 bp, synthetic construct
  misc_feature 1..20: note = Description of Artificial Sequence: Synthetic oligonucleotide
  misc_feature 1..20: note = Target: SCN10A; (-) strand; PAM type: YTN; PAM sequence: TTT
  source 1..20: mol_type = other DNA
ttatataaaatctcccaacc

SEQ ID NO: 51073 - DNA, 20 bp, synthetic construct
  misc_feature 1..20: note = Description of Artificial Sequence: Synthetic oligonucleotide
  misc_feature 1..20: note = Target: SCN10A; (-) strand; PAM type: YTN; PAM sequence: TTA
  source 1..20: mol_type = other DNA
gatttttatataaaatctcc

SEQ ID NO: 51074 - DNA, 20 bp, synthetic construct
  misc_feature 1..20: note = Description of Artificial Sequence: Synthetic oligonucleotide
  misc_feature 1..20: note = Target: SCN10A; (-) strand; PAM type: YTN; PAM sequence: TTT
  source 1..20: mol_type = other DNA
agatttttatataaaatctc

SEQ ID NO: 51075 - DNA, 20 bp, synthetic construct
  misc_feature 1..20: note = Description of Artificial Sequence: Synthetic oligonucleotide
  misc_feature 1..20: note = Target: SCN10A; (-) strand; PAM type: YTN; PAM sequence: TTA
  source 1..20: mol_type = other DNA
aaatagagataggaaattta

SEQ ID NO: 51076 - DNA, 20 bp, synthetic construct
  misc_feature 1..20: note = Description of Artificial Sequence: Synthetic oligonucleotide
  misc_feature 1..20: note = Target: SCN10A; (-) strand; PAM type: YTN; PAM sequence: TTT
  source 1..20: mol_type = other DNA
aaaatagagataggaaattt

SEQ ID NO: 51077 - DNA, 20 bp, synthetic construct
  misc_feature 1..20: note = Description of Artificial Sequence: Synthetic oligonucleotide
  misc_feature 1..20: note = Target: SCN10A; (-) strand; PAM type: YTN; PAM sequence: TTT
  source 1..20: mol_type = other DNA
taaaatagagataggaaatt

SEQ ID NO: 51078 - DNA, 20 bp, synthetic construct
  misc_feature 1..20: note = Description of Artificial Sequence: Synthetic oligonucleotide
  misc_feature 1..20: note = Target: SCN10A; (-) strand; PAM type: YTN; PAM sequence: CTT
  source 1..20: mol_type = other DNA
ttaaaatagagataggaaat

SEQ ID NO: 51079 - DNA, 20 bp, synthetic construct
  misc_feature 1..20: note = Description of Artificial Sequence: Synthetic oligonucleotide
  misc_feature 1..20: note = Target: SCN10A; (-) strand; PAM type: YTN; PAM sequence: TTC
  source 1..20: mol_type = other DNA
caacttttaaaatagagata

SEQ ID NO: 51080 - DNA, 20 bp, synthetic construct
  misc_feature 1..20: note = Description of Artificial Sequence: Synthetic oligonucleotide
  misc_feature 1..20: note = Target: SCN10A; (-) strand; PAM type: YTN; PAM sequence: CTT
  source 1..20: mol_type = other DNA
ccaacttttaaaatagagat

SEQ ID NO: 51081 - DNA, 20 bp, synthetic construct
  misc_feature 1..20: note = Description of Artificial Sequence: Synthetic oligonucleotide
  misc_feature 1..20: note = Target: SCN10A; (-) strand; PAM type: YTN; PAM sequence: CTC
  source 1..20: mol_type = other DNA
ttccaacttttaaaatagag

SEQ ID NO: 51082 - DNA, 20 bp, synthetic construct
  misc_feature 1..20: note = Description of Artificial Sequence: Synthetic oligonucleotide
  misc_feature 1..20: note = Target: SCN10A; (-) strand; PAM type: YTN; PAM sequence: TTC
  source 1..20: mol_type = other DNA
cagctcttccaacttttaaa

SEQ ID NO: 51083 - DNA, 20 bp, synthetic construct
  misc_feature 1..20: note = Description of Artificial Sequence: Synthetic oligonucleotide
  misc_feature 1..20: note = Target: SCN10A; (-) strand; PAM type: YTN; PAM sequence: TTT
  source 1..20: mol_type = other DNA
ccagctcttccaacttttaa

SEQ ID NO: 51084 - DNA, 20 bp, synthetic construct
  misc_feature 1..20: note = Description of Artificial Sequence: Synthetic oligonucleotide
  misc_feature 1..20: note = Target: SCN10A; (-) strand; PAM type: YTN; PAM sequence: CTG
  source 1..20: mol_type = other DNA
tttccagctcttccaacttt

SEQ ID NO: 51085 - DNA, 20 bp, synthetic construct
  misc_feature 1..20: note = Description of Artificial Sequence: Synthetic oligonucleotide
  misc_feature 1..20: note = Target: SCN10A; (-) strand; PAM type: YTN; PAM sequence: TTC
  source 1..20: mol_type = other DNA
actgtttccagctcttccaa

SEQ ID NO: 51086 - DNA, 20 bp, synthetic construct
  misc_feature 1..20: note = Description of Artificial Sequence: Synthetic oligonucleotide
  misc_feature 1..20: note = Target: SCN10A; (-) strand; PAM type: YTN; PAM sequence: TTG
  source 1..20: mol_type = other DNA
ccatgtggaaatgtgggttc

SEQ ID NO: 51087 - DNA, 20 bp, synthetic construct
  misc_feature 1..20: note = Description of Artificial Sequence: Synthetic oligonucleotide
  misc_feature 1..20: note = Target: SCN10A; (-) strand; PAM type: YTN; PAM sequence: TTG
  source 1..20: mol_type = other DNA
gttgccatgtggaaatgtgg

SEQ ID NO: 51088 - DNA, 20 bp, synthetic construct
  misc_feature 1..20: note = Description of Artificial Sequence: Synthetic oligonucleotide
  misc_feature 1..20: note = Target: SCN10A; (-) strand; PAM type: YTN; PAM sequence: TTT
  source 1..20: mol_type = other DNA
ggttgccatgtggaaatgtg

SEQ ID NO: 51089 - DNA, 20 bp, synthetic construct
  misc_feature 1..20: note = Description of Artificial Sequence: Synthetic oligonucleotide
  misc_feature 1..20: note = Target: SCN10A; (-) strand; PAM type: YTN; PAM sequence: TTT
  source 1..20: mol_type = other DNA
tggttgccatgtggaaatgt

SEQ ID NO: 51090 - DNA, 20 bp, synthetic construct
  misc_feature 1..20: note = Description of Artificial Sequence: Synthetic oligonucleotide
  misc_feature 1..20: note = Target: SCN10A; (-) strand; PAM type: YTN; PAM sequence: CTT
  source 1..20: mol_type = other DNA
ttggttgccatgtggaaatg

SEQ ID NO: 51091 - DNA, 20 bp, synthetic construct
  misc_feature 1..20: note = Description of Artificial Sequence: Synthetic oligonucleotide
  misc_feature 1..20: note = Target: SCN10A; (-) strand; PAM type: YTN; PAM sequence: CTC
  source 1..20: mol_type = other DNA
ggtccagcttttggttgcca

SEQ ID NO: 51092 - DNA, 20 bp, synthetic construct
  misc_feature 1..20: note = Description of Artificial Sequence: Synthetic oligonucleotide
  misc_feature 1..20: note = Target: SCN10A; (-) strand; PAM type: YTN; PAM sequence: CTG
  source 1..20: mol_type = other DNA
ctcggtccagcttttggttg

SEQ ID NO: 51093 - DNA, 20 bp, synthetic construct
  misc_feature 1..20: note = Description of Artificial Sequence: Synthetic oligonucleotide
  misc_feature 1..20: note = Target: SCN10A; (-) strand; PAM type: YTN; PAM sequence: CTA
  source 1..20: mol_type = other DNA
aaggggacagccccactgct

SEQ ID NO: 51094 - DNA, 20 bp, synthetic construct
  misc_feature 1..20: note = Description of Artificial Sequence: Synthetic oligonucleotide
  misc_feature 1..20: note = Target: SCN10A; (-) strand; PAM type: YTN; PAM sequence: CTC
  source 1..20: mol_type = other DNA
taaaggggacagccccactg

SEQ ID NO: 51095 - DNA, 20 bp, synthetic construct
  misc_feature 1..20: note = Description of Artificial Sequence: Synthetic oligonucleotide
  misc_feature 1..20: note = Target: SCN10A; (-) strand; PAM type: YTN; PAM sequence: CTC
  source 1..20: mol_type = other DNA
ctctaaaggggacagcccca

SEQ ID NO: 51096 - DNA, 20 bp, synthetic construct
  misc_feature 1..20: note = Description of Artificial Sequence: Synthetic oligonucleotide
  misc_feature 1..20: note = Target: SCN10A; (-) strand; PAM type: YTN; PAM sequence: TTC
  source 1..20: mol_type = other DNA
atgcctcctctaaaggggac

SEQ ID NO: 51097 - DNA, 20 bp, synthetic construct
  misc_feature 1..20: note = Description of Artificial Sequence: Synthetic oligonucleotide
  misc_feature 1..20: note = Target: SCN10A; (-) strand; PAM type: YTN; PAM sequence: CTG
  source 1..20: mol_type = other DNA
agagttcatgcctcctctaa

SEQ ID NO: 51098 - DNA, 20 bp, synthetic construct
  misc_feature 1..20: note = Description of Artificial Sequence: Synthetic oligonucleotide
  misc_feature 1..20: note = Target: SCN10A; (-) strand; PAM type: YTN; PAM sequence: CTA
  source 1..20: mol_type = other DNA
ggagctgagagttcatgcct

SEQ ID NO: 51099 - DNA, 20 bp, synthetic construct
  misc_feature 1..20: note = Description of Artificial Sequence: Synthetic oligonucleotide
  misc_feature 1..20: note = Target: SCN10A; (-) strand; PAM type: YTN; PAM sequence: TTC
  source 1..20: mol_type = other DNA
ataacaacaaatgagtggag

SEQ ID NO: 51100 - DNA, 20 bp, synthetic construct
  misc_feature 1..20: note = Description of Artificial Sequence: Synthetic oligonucleotide
  misc_feature 1..20: note = Target: SCN10A; (-) strand; PAM type: YTN; PAM sequence: TTA
  source 1..20: mol_type = other DNA
cagaggccagattcataaca

SEQ ID NO: 51101 - DNA, 20 bp, synthetic construct
  misc_feature 1..20: note = Description of Artificial Sequence: Synthetic oligonucleotide
  misc_feature 1..20: note = Target: SCN10A; (-) strand; PAM type: YTN; PAM sequence: CTT
  source 1..20: mol_type = other DNA
acagaggccagattcataac

SEQ ID NO: 51102 - DNA, 20 bp, synthetic construct
  misc_feature 1..20: note = Description of Artificial Sequence: Synthetic oligonucleotide
  misc_feature 1..20: note = Target: SCN10A; (-) strand; PAM type: YTN; PAM sequence: TTC
  source 1..20: mol_type = other DNA
ttacagaggccagattcata

SEQ ID NO: 51103 - DNA, 20 bp, synthetic construct
  misc_feature 1..20: note = Description of Artificial Sequence: Synthetic oligonucleotide
  misc_feature 1..20: note = Target: SCN10A; (-) strand; PAM type: YTN; PAM sequence: TTC
  source 1..20: mol_type = other DNA
gaattcttacagaggccaga

SEQ ID NO: 51104 - DNA, 20 bp, synthetic construct
  misc_feature 1..20: note = Description of Artificial Sequence: Synthetic oligonucleotide
  misc_feature 1..20: note = Target: SCN10A; (-) strand; PAM type: YTN; PAM sequence: TTT
  source 1..20: mol_type = other DNA
cgaattcttacagaggccag

SEQ ID NO: 51105 - DNA, 20 bp, synthetic construct
  misc_feature 1..20: note = Description of Artificial Sequence: Synthetic oligonucleotide
  misc_feature 1..20: note = Target: SCN10A; (-) strand; PAM type: YTN; PAM sequence: TTG
  source 1..20: mol_type = other DNA
caatttcgaattcttacaga

SEQ ID NO: 51106 - DNA, 20 bp, synthetic construct
  misc_feature 1..20: note = Description of Artificial Sequence: Synthetic oligonucleotide
  misc_feature 1..20: note = Target: SCN10A; (-) strand; PAM type: YTN; PAM sequence: TTT
  source 1..20: mol_type = other DNA
gcaatttcgaattcttacag

SEQ ID NO: 51107 - DNA, 20 bp, synthetic construct
  misc_feature 1..20: note = Description of Artificial Sequence: Synthetic oligonucleotide
  misc_feature 1..20: note = Target: SCN10A; (-) strand; PAM type: YTN; PAM sequence: CTT
  source 1..20: mol_type = other DNA
tgcaatttcgaattcttaca

SEQ ID NO: 51108 - DNA, 20 bp, synthetic construct
  misc_feature 1..20: note = Description of Artificial Sequence: Synthetic oligonucleotide
  misc_feature 1..20: note = Target: SCN10A; (-) strand; PAM type: YTN; PAM sequence: CTC
  source 1..20: mol_type = other DNA
acaagtagaggaaaaaacac

SEQ ID NO: 51109 - DNA, 20 bp, synthetic construct
  misc_feature 1..20: note = Description of Artificial Sequence: Synthetic oligonucleotide
  misc_feature 1..20: note = Target: SCN10A; (-) strand; PAM type: YTN; PAM sequence: TTA
  source 1..20: mol_type = other DNA
ccctcacaagtagaggaaaa

SEQ ID NO: 51110 - DNA, 20 bp, synthetic construct
  misc_feature 1..20: note = Description of Artificial Sequence: Synthetic oligonucleotide
  misc_feature 1..20: note = Target: SCN10A; (-) strand; PAM type: YTN; PAM sequence: CTA
  source 1..20: mol_type = other DNA
tagccacattaccctcacaa

SEQ ID NO: 51111 - DNA, 20 bp, synthetic construct
  misc_feature 1..20: note = Description of Artificial Sequence: Synthetic oligonucleotide
  misc_feature 1..20: note = Target: SCN10A; (-) strand; PAM type: YTN; PAM sequence: TTC
  source 1..20: mol_type = other DNA
tatagccacattaccctcac

SEQ ID NO: 51112 - DNA, 20 bp, synthetic construct
  misc_feature 1..20: note = Description of Artificial Sequence: Synthetic oligonucleotide
  misc_feature 1..20: note = Target: SCN10A; (-) strand; PAM type: YTN; PAM sequence: CTC
  source 1..20: mol_type = other DNA
cattctatagccacattacc

SEQ ID NO: 51113 - DNA, 20 bp, synthetic construct
  misc_feature 1..20: note = Description of Artificial Sequence: Synthetic oligonucleotide
  misc_feature 1..20: note = Target: SCN10A; (-) strand; PAM type: YTN; PAM sequence: CTA
  source 1..20: mol_type = other DNA
actccattctatagccacat

SEQ ID NO: 51114 - DNA, 20 bp, synthetic construct
  misc_feature 1..20: note = Description of Artificial Sequence: Synthetic oligonucleotide
  misc_feature 1..20: note = Target: SCN10A; (-) strand; PAM type: YTN; PAM sequence: TTA
  source 1..20: mol_type = other DNA
atcatcacagctaactccat

SEQ ID NO: 51115 - DNA, 20 bp, synthetic construct
  misc_feature 1..20: note = Description of Artificial Sequence: Synthetic oligonucleotide
  misc_feature 1..20: note = Target: SCN10A; (-) strand; PAM type: YTN; PAM sequence: CTT
  source 1..20: mol_type = other DNA
aatcatcacagctaactcca

SEQ ID NO: 51116 - DNA, 20 bp, synthetic construct
  misc_feature 1..20: note = Description of Artificial Sequence: Synthetic oligonucleotide
  misc_feature 1..20: note = Target: SCN10A; (-) strand; PAM type: YTN; PAM sequence: CTA
  source 1..20: mol_type = other DNA
cacttaatcatcacagctaa

SEQ ID NO: 51117 - DNA, 20 bp, synthetic construct
  misc_feature 1..20: note = Description of Artificial Sequence: Synthetic oligonucleotide
  misc_feature 1..20: note = Target: SCN10A; (-) strand; PAM type: YTN; PAM sequence: CTC
  source 1..20: mol_type = other DNA
tacacttaatcatcacagct

SEQ ID NO: 51118 - DNA, 20 bp, synthetic construct
  misc_feature 1..20: note = Description of Artificial Sequence: Synthetic oligonucleotide
  misc_feature 1..20: note = Target: SCN10A; (-) strand; PAM type: YTN; PAM sequence: TTG
  source 1..20: mol_type = other DNA
tgtcaaatgctctacactta

SEQ ID NO: 51119 - DNA, 20 bp, synthetic construct
  misc_feature 1..20: note = Description of Artificial Sequence: Synthetic oligonucleotide
  misc_feature 1..20: note = Target: SCN10A; (-) strand; PAM type: YTN; PAM sequence: TTT
  source 1..20: mol_type = other DNA
gtgtcaaatgctctacactt

SEQ ID NO: 51120 - DNA, 20 bp, synthetic construct
  misc_feature 1..20: note = Description of Artificial Sequence: Synthetic oligonucleotide
  misc_feature 1..20: note = Target: SCN10A; (-) strand; PAM type: YTN; PAM sequence: TTA
  source 1..20: mol_type = other DNA
tttgtgtcaaatgctctaca

SEQ ID NO: 51121 - DNA, 20 bp, synthetic construct
  misc_feature 1..20: note = Description of Artificial Sequence: Synthetic oligonucleotide
  misc_feature 1..20: note = Target: SCN10A; (-) strand; PAM type: YTN; PAM sequence: CTT
  source 1..20: mol_type = other DNA
atttgtgtcaaatgctctac

SEQ ID NO: 51122 - DNA, 20 bp, synthetic construct
  misc_feature 1..20: note = Description of Artificial Sequence: Synthetic oligonucleotide
  misc_feature 1..20: note = Target: SCN10A; (-) strand; PAM type: YTN; PAM sequence: CTA
  source 1..20: mol_type = other DNA
ccccaggaaggaaccaatac

SEQ ID NO: 51123 - DNA, 20 bp, synthetic construct
  misc_feature 1..20: note = Description of Artificial Sequence: Synthetic oligonucleotide
  misc_feature 1..20: note = Target: SCN10A; (-) strand; PAM type: YTN; PAM sequence: TTA
  source 1..20: mol_type = other DNA
ataaataatctaccccagga

SEQ ID NO: 51124 - DNA, 20 bp, synthetic construct
  misc_feature 1..20: note = Description of Artificial Sequence: Synthetic oligonucleotide
  misc_feature 1..20: note = Target: SCN10A; (-) strand; PAM type: YTN; PAM sequence: TTT
  source 1..20: mol_type = other DNA
aataaataatctaccccagg

SEQ ID NO: 51125 - DNA, 20 bp, synthetic construct
  misc_feature 1..20: note = Description of Artificial Sequence: Synthetic oligonucleotide
  misc_feature 1..20: note = Target: SCN10A; (-) strand; PAM type: YTN; PAM sequence: TTT
  source 1..20: mol_type = other DNA
taataaataatctaccccag

SEQ ID NO: 51126 - DNA, 20 bp, synthetic construct
  misc_feature 1..20: note = Description of Artificial Sequence: Synthetic oligonucleotide
  misc_feature 1..20: note = Target: SCN10A; (-) strand; PAM type: YTN; PAM sequence: TTA
  source 1..20: mol_type = other DNA
tagccattttaataaataat

SEQ ID NO: 51127 - DNA, 20 bp, synthetic construct
  misc_feature 1..20: note = Description of Artificial Sequence: Synthetic oligonucleotide
  misc_feature 1..20: note = Target: SCN10A; (-) strand; PAM type: YTN; PAM sequence: TTG
  source 1..20: mol_type = other DNA
gaaagggtgtggatacatag

SEQ ID NO: 51128 - DNA, 20 bp, synthetic construct
  misc_feature 1..20: note = Description of Artificial Sequence: Synthetic oligonucleotide
  misc_feature 1..20: note = Target: SCN10A; (-) strand; PAM type: YTN; PAM sequence: CTG
  source 1..20: mol_type = other DNA
aaaagtcacattggaaaggg

SEQ ID NO: 51129 - DNA, 20 bp, synthetic construct
  misc_feature 1..20: note = Description of Artificial Sequence: Synthetic oligonucleotide
  misc_feature 1..20: note = Target: SCN10A; (-) strand; PAM type: YTN; PAM sequence: CTC
  source 1..20: mol_type = other DNA
aatggaaagagctgaaaagt

SEQ ID NO: 51130 - DNA, 20 bp, synthetic construct
  misc_feature 1..20: note = Description of Artificial Sequence: Synthetic oligonucleotide
  misc_feature 1..20: note = Target: SCN10A; (-) strand; PAM type: YTN; PAM sequence: TTC
  source 1..20: mol_type = other DNA
atcactcaatggaaagagct

SEQ ID NO: 51131 - DNA, 20 bp, synthetic construct
  misc_feature 1..20: note = Description of Artificial Sequence: Synthetic oligonucleotide
  misc_feature 1..20: note = Target: SCN10A; (-) strand; PAM type: YTN; PAM sequence: CTT
  source 1..20: mol_type = other DNA
catcactcaatggaaagagc

SEQ ID NO: 51132 - DNA, 20 bp, synthetic construct
  misc_feature 1..20: note = Description of Artificial Sequence: Synthetic oligonucleotide
  misc_feature 1..20: note = Target: SCN10A; (-) strand; PAM type: YTN; PAM sequence: TTG
  source 1..20: mol_type = other DNA
cagtccagtagagatccaag

SEQ ID NO: 51133 - DNA, 20 bp, synthetic construct
  misc_feature 1..20: note = Description of Artificial Sequence: Synthetic oligonucleotide
  misc_feature 1..20: note = Target: SCN10A; (-) strand; PAM type: YTN; PAM sequence: CTA
  source 1..20: mol_type = other DNA
aagcaagttgcagtccagta

SEQ ID NO: 51134 - DNA, 20 bp, synthetic construct
  misc_feature 1..20: note = Description of Artificial Sequence: Synthetic oligonucleotide
  misc_feature 1..20: note = Target: SCN10A; (-) strand; PAM type: YTN; PAM sequence: TTG
  source 1..20: mol_type = other DNA
actaaagcaagttgcagtcc

SEQ ID NO: 51135 - DNA, 20 bp, synthetic construct
  misc_feature 1..20: note = Description of Artificial Sequence: Synthetic oligonucleotide
  misc_feature 1..20: note = Target: SCN10A; (-) strand; PAM type: YTN; PAM sequence: CTT
  source 1..20: mol_type = other DNA
gactaaagcaagttgcagtc

SEQ ID NO: 51136 - DNA, 20 bp, synthetic construct
  misc_feature 1..20: note = Description of Artificial Sequence: Synthetic oligonucleotide
  misc_feature 1..20: note = Target: SCN10A; (-) strand; PAM type: YTN; PAM sequence: TTC
  source 1..20: mol_type = other DNA
ttgactaaagcaagttgcag

SEQ ID NO: 51137 - DNA, 20 bp, synthetic construct
  misc_feature 1..20: note = Description of Artificial Sequence: Synthetic oligonucleotide
  misc_feature 1..20: note = Target: SCN10A; (-) strand; PAM type: YTN; PAM sequence: CTG
  source 1..20: mol_type = other DNA
atacattcttgactaaagca

SEQ ID NO: 51138 - DNA, 20 bp, synthetic construct
  misc_feature 1..20: note = Description of Artificial Sequence: Synthetic oligonucleotide
  misc_feature 1..20: note = Target: SCN10A; (-) strand; PAM type: YTN; PAM sequence: TTC
  source 1..20: mol_type = other DNA
tgatacattcttgactaaag

SEQ ID NO: 51139 - DNA, 20 bp, synthetic construct
  misc_feature 1..20: note = Description of Artificial Sequence: Synthetic oligonucleotide
  misc_feature 1..20: note = Target: SCN10A; (-) strand; PAM type: YTN; PAM sequence: TTG
  source 1..20: mol_type = other DNA
tacattctgatacattcttg

SEQ ID NO: 51140 - DNA, 20 bp, synthetic construct
  misc_feature 1..20: note = Description of Artificial Sequence: Synthetic oligonucleotide
  misc_feature 1..20: note = Target: SCN10A; (-) strand; PAM type: YTN; PAM sequence: TTT
  source 1..20: mol_type = other DNA
gtacattctgatacattctt

SEQ ID NO: 51141 - DNA, 20 bp, synthetic construct
  misc_feature 1..20: note = Description of Artificial Sequence: Synthetic oligonucleotide
  misc_feature 1..20: note = Target: SCN10A; (-) strand; PAM type: YTN; PAM sequence: TTT
  source 1..20: mol_type = other DNA
tgtacattctgatacattct

SEQ ID NO: 51142 - DNA, 20 bp, synthetic construct
  misc_feature 1..20: note = Description of Artificial Sequence: Synthetic oligonucleotide
  misc_feature 1..20: note = Target: SCN10A; (-) strand; PAM type: YTN; PAM sequence: CTT
  source 1..20: mol_type = other DNA
ttgtacattctgatacattc

SEQ ID NO: 51143 - DNA, 20 bp, synthetic construct
  misc_feature 1..20: note = Description of Artificial Sequence: Synthetic oligonucleotide
  misc_feature 1..20: note = Target: SCN10A; (-) strand; PAM type: YTN; PAM sequence: TTA
  source 1..20: mol_type = other DNA
gaaccaacacaatgtacctt

SEQ ID NO: 51144 - DNA, 20 bp, synthetic construct
  misc_feature 1..20: note = Description of Artificial Sequence: Synthetic oligonucleotide
  misc_feature 1..20: note = Target: SCN10A; (-) strand; PAM type: YTN; PAM sequence: CTT
  source 1..20: mol_type = other DNA
agaaccaacacaatgtacct

SEQ ID NO: 51145 - DNA, 20 bp, synthetic construct
  misc_feature 1..20: note = Description of Artificial Sequence: Synthetic oligonucleotide
  misc_feature 1..20: note = Target: SCN10A; (-) strand; PAM type: YTN; PAM sequence: CTA
  source 1..20: mol_type = other DNA
ggcttagaaccaacacaatg

SEQ ID NO: 51146 - DNA, 20 bp, synthetic construct
  misc_feature 1..20: note = Description of Artificial Sequence: Synthetic oligonucleotide
  misc_feature 1..20: note = Target: SCN10A; (-) strand; PAM type: YTN; PAM sequence: TTC
  source 1..20: mol_type = other DNA
aggcctaggcttagaaccaa

SEQ ID NO: 51147 - DNA, 20 bp, synthetic construct
  misc_feature 1..20: note = Description of Artificial Sequence: Synthetic oligonucleotide
  misc_feature 1..20: note = Target: SCN10A; (-) strand; PAM type: YTN; PAM sequence: CTT
  source 1..20: mol_type = other DNA
caggcctaggcttagaacca

SEQ ID NO: 51148 - DNA, 20 bp, synthetic construct
  misc_feature 1..20: note = Description of Artificial Sequence: Synthetic oligonucleotide
  misc_feature 1..20: note = Target: SCN10A; (-) strand; PAM type: YTN; PAM sequence: TTC
  source 1..20: mol_type = other DNA
ttcaggcctaggcttagaac

SEQ ID NO: 51149 - DNA, 20 bp, synthetic construct
  misc_feature 1..20: note = Description of Artificial Sequence: Synthetic oligonucleotide
  misc_feature 1..20: note = Target: SCN10A; (-) strand; PAM type: YTN; PAM sequence: CTT
  source 1..20: mol_type = other DNA
cttcaggcctaggcttagaa

SEQ ID NO: 51150 - DNA, 20 bp, synthetic construct
  misc_feature 1..20: note = Description of Artificial Sequence: Synthetic oligonucleotide
  misc_feature 1..20: note = Target: SCN10A; (-) strand; PAM type: YTN; PAM sequence: TTG
  source 1..20: mol_type = other DNA
caaggcttcttcaggcctag

SEQ ID NO: 51151 - DNA, 20 bp, synthetic construct
  misc_feature 1..20: note = Description of Artificial Sequence: Synthetic oligonucleotide
  misc_feature 1..20: note = Target: SCN10A; (-) strand; PAM type: YTN; PAM sequence: TTT
  source 1..20: mol_type = other DNA
gcaaggcttcttcaggccta

SEQ ID NO: 51152 - DNA, 20 bp, synthetic construct
  misc_feature 1..20: note = Description of Artificial Sequence: Synthetic oligonucleotide
  misc_feature 1..20: note = Target: SCN10A; (-) strand; PAM type: YTN; PAM sequence: TTC
  source 1..20: mol_type = other DNA
ccagaaaaacagtggaagtt

SEQ ID NO: 51153 - DNA, 20 bp, synthetic construct
  misc_feature 1..20: note = Description of Artificial Sequence: Synthetic oligonucleotide
  misc_feature 1..20: note = Target: SCN10A; (-) strand; PAM type: YTN; PAM sequence: CTC
  source 1..20: mol_type = other DNA
atggcagtgttcccagaaaa

SEQ ID NO: 51154 - DNA, 20 bp, synthetic construct
  misc_feature 1..20: note = Description of Artificial Sequence: Synthetic oligonucleotide
  misc_feature 1..20: note = Target: SCN10A; (-) strand; PAM type: YTN; PAM sequence: TTC
  source 1..20: mol_type = other DNA
tcatggcagtgttcccagaa

SEQ ID NO: 51155 - DNA, 20 bp, synthetic construct
  misc_feature 1..20: note = Description of Artificial Sequence: Synthetic oligonucleotide
  misc_feature 1..20: note = Target: SCN10A; (-) strand; PAM type: YTN; PAM sequence: CTG
  source 1..20: mol_type = other DNA
ttctcatggcagtgttccca

SEQ ID NO: 51156 - DNA, 20 bp, synthetic construct
  misc_feature 1..20: note = Description of Artificial Sequence: Synthetic oligonucleotide
  misc_feature 1..20: note = Target: SCN10A; (-) strand; PAM type: YTN; PAM sequence: CTG
  source 1..20: mol_type = other DNA
ggcctgttctcatggcagtg

SEQ ID NO: 51157 - DNA, 20 bp, synthetic construct
  misc_feature 1..20: note = Description of Artificial Sequence: Synthetic oligonucleotide
  misc_feature 1..20: note = Target: SCN10A; (-) strand; PAM type: YTN; PAM sequence: TTA
  source 1..20: mol_type = other DNA
gcctgggcctgttctcatgg

SEQ ID NO: 51158 - DNA, 20 bp, synthetic construct
  misc_feature 1..20: note = Description of Artificial Sequence: Synthetic oligonucleotide
  misc_feature 1..20: note = Target: SCN10A; (-) strand; PAM type: YTN; PAM sequence: CTC
  source 1..20: mol_type = other DNA
acccccaaacaggttagcct

SEQ ID NO: 51159 - DNA, 20 bp, synthetic construct
  misc_feature 1..20: note = Description of Artificial Sequence: Synthetic oligonucleotide
  misc_feature 1..20: note = Target: SCN10A; (-) strand; PAM type: YTN; PAM sequence: CTC
  source 1..20: mol_type = other DNA
tcacccccaaacaggttagc

SEQ ID NO: 51160 - DNA, 20 bp, synthetic construct
  misc_feature 1..20: note = Description of Artificial Sequence: Synthetic oligonucleotide
  misc_feature 1..20: note = Target: SCN10A; (-) strand; PAM type: YTN; PAM sequence: CTC
  source 1..20: mol_type = other DNA
atgtggcctctcacccccaa

SEQ ID NO: 51161 - DNA, 20 bp, synthetic construct
  misc_feature 1..20: note = Description of Artificial Sequence: Synthetic oligonucleotide
  misc_feature 1..20: note = Target: SCN10A; (-) strand; PAM type: YTN; PAM sequence: CTG
  source 1..20: mol_type = other DNA
ctcatgtggcctctcacccc

SEQ ID NO: 51162 - DNA, 20 bp, synthetic construct
  misc_feature 1..20: note = Description of Artificial Sequence: Synthetic oligonucleotide
  misc_feature 1..20: note = Target: SCN10A; (-) strand; PAM type: YTN; PAM sequence: CTC
  source 1..20: mol_type = other DNA
tgctcatgtggcctctcacc

SEQ ID NO: 51163 - DNA, 20 bp, synthetic construct
  misc_feature 1..20: note = Description of Artificial Sequence: Synthetic oligonucleotide
  misc_feature 1..20: note = Target: SCN10A; (-) strand; PAM type: YTN; PAM sequence: CTG
  source 1..20: mol_type = other DNA
tctctgctcatgtggcctct

SEQ ID NO: 51164 - DNA, 20 bp, synthetic construct
  misc_feature 1..20: note = Description of Artificial Sequence: Synthetic oligonucleotide
  misc_feature 1..20: note = Target: SCN10A; (-) strand; PAM type: YTN; PAM sequence: CTA
  source 1..20: mol_type = other DNA
ggacgtcctgtctctgctca

SEQ ID NO: 51165 - DNA, 20 bp, synthetic construct
  misc_feature 1..20: note = Description of Artificial Sequence: Synthetic oligonucleotide
  misc_feature 1..20: note = Target: SCN10A; (-) strand; PAM type: YTN; PAM sequence: CTG
  source 1..20: mol_type = other DNA
gtctaggacgtcctgtctct

SEQ ID NO: 51166 - DNA, 20 bp, synthetic construct
  misc_feature 1..20: note = Description of Artificial Sequence: Synthetic oligonucleotide
  misc_feature 1..20: note = Target: SCN10A; (-) strand; PAM type: YTN; PAM sequence: TTG
  source 1..20: mol_type = other DNA
gagatggctggtctaggacg

SEQ ID NO: 51167 - DNA, 20 bp, synthetic construct
  misc_feature 1..20: note = Description of Artificial Sequence: Synthetic oligonucleotide
  misc_feature 1..20: note = Target: SCN10A; (-) strand; PAM type: YTN; PAM sequence: CTT
  source 1..20: mol_type = other DNA
ggagatggctggtctaggac

SEQ ID NO: 51168 - DNA, 20 bp, synthetic construct
  misc_feature 1..20: note = Description of Artificial Sequence: Synthetic oligonucleotide
  misc_feature 1..20: note = Target: SCN10A; (-) strand; PAM type: YTN; PAM sequence: TTA
  source 1..20: mol_type = other DNA
acttggagatggctggtcta

SEQ ID NO: 51169 - DNA, 20 bp, synthetic construct
  misc_feature 1..20: note = Description of Artificial Sequence: Synthetic oligonucleotide
  misc_feature 1..20: note = Target: SCN10A; (-) strand; PAM type: YTN; PAM sequence: TTC
  source 1..20: mol_type = other DNA
atgcatatgcagacagcata

SEQ ID NO: 51170 - DNA, 20 bp, synthetic construct
  misc_feature 1..20: note = Description of Artificial Sequence: Synthetic oligonucleotide
  misc_feature 1..20: note = Target: SCN10A; (-) strand; PAM type: YTN; PAM sequence: CTC
  source 1..20: mol_type = other DNA
attcatgcatatgcagacag

SEQ ID NO: 51171 - DNA, 20 bp, synthetic construct
  misc_feature 1..20: note = Description of Artificial Sequence: Synthetic oligonucleotide
  misc_feature 1..20: note = Target: SCN10A; (-) strand; PAM type: YTN; PAM sequence: CTA
  source 1..20: mol_type = other DNA
ggctcattcatgcatatgca

SEQ ID NO: 51172 - DNA, 20 bp, synthetic construct
  misc_feature 1..20: note = Description of Artificial Sequence: Synthetic oligonucleotide
  misc_feature 1..20: note = Target: SCN10A; (-) strand; PAM type: YTN; PAM sequence: TTG
  source 1..20: mol_type = other DNA
actaggctcattcatgcata

SEQ ID NO: 51173 - DNA, 20 bp, synthetic construct
  misc_feature 1..20: note = Description of Artificial Sequence: Synthetic oligonucleotide
  misc_feature 1..20: note = Target: SCN10A; (-) strand; PAM type: YTN; PAM sequence: TTG
  source 1..20: mol_type = other DNA
ggtgacattgactaggctca

SEQ ID NO: 51174 - DNA, 20 bp, synthetic construct
  misc_feature 1..20: note = Description of Artificial Sequence: Synthetic oligonucleotide
  misc_feature 1..20: note = Target: SCN10A; (-) strand; PAM type: YTN; PAM sequence: CTG
  source 1..20: mol_type = other DNA
ggatcagatgggcattgggt

SEQ ID NO: 51175 - DNA, 20 bp, synthetic construct
  misc_feature 1..20: note = Description of Artificial Sequence: Synthetic oligonucleotide
  misc_feature 1..20: note = Target: SCN10A; (-) strand; PAM type: YTN; PAM sequence: TTG
  source 1..20: mol_type = other DNA
gactgggatcagatgggcat

SEQ ID NO: 51176 - DNA, 20 bp, synthetic construct
  misc_feature 1..20: note = Description of Artificial Sequence: Synthetic oligonucleotide
  misc_feature 1..20: note = Target: SCN10A; (-) strand; PAM type: YTN; PAM sequence: TTT
  source 1..20: mol_type = other DNA
ggactgggatcagatgggca

SEQ ID NO: 51177 - DNA, 20 bp, synthetic construct
  misc_feature 1..20: note = Description of Artificial Sequence: Synthetic oligonucleotide
  misc_feature 1..20: note = Target: SCN10A; (-) strand; PAM type: YTN; PAM sequence: TTT
  source 1..20: mol_type = other DNA
tggactgggatcagatgggc

SEQ ID NO: 51178 - DNA, 20 bp, synthetic construct
  misc_feature 1..20: note = Description of Artificial Sequence: Synthetic oligonucleotide
  misc_feature 1..20: note = Target: SCN10A; (-) strand; PAM type: YTN; PAM sequence: CTG
  source 1..20: mol_type = other DNA
tgcatcagcattttggactg

SEQ ID NO: 51179 - DNA, 20 bp, synthetic construct
  misc_feature 1..20: note = Description of Artificial Sequence: Synthetic oligonucleotide
  misc_feature 1..20: note = Target: SCN10A; (-) strand; PAM type: YTN; PAM sequence: TTC
  source 1..20: mol_type = other DNA
tgtgcatcagcattttggac

SEQ ID NO: 51180 - DNA, 20 bp, synthetic construct
  misc_feature 1..20: note = Description of Artificial Sequence: Synthetic oligonucleotide
  misc_feature 1..20: note = Target: SCN10A; (-) strand; PAM type: YTN; PAM sequence: TTC
  source 1..20: mol_type = other DNA
atgattctgtgcatcagcat

SEQ ID NO: 51181 - DNA, 20 bp, synthetic construct
  misc_feature 1..20: note = Description of Artificial Sequence: Synthetic oligonucleotide
  misc_feature 1..20: note = Target: SCN10A; (-) strand; PAM type: YTN; PAM sequence: TTA
  source 1..20: mol_type = other DNA
attcatgattctgtgcatca

SEQ ID NO: 51182 - DNA, 20 bp, synthetic construct
  misc_feature 1..20: note = Description of Artificial Sequence: Synthetic oligonucleotide
  misc_feature 1..20: note = Target: SCN10A; (-) strand; PAM type: YTN; PAM sequence: TTT
  source 1..20: mol_type = other DNA
aattcatgattctgtgcatc

SEQ ID NO: 51183 - DNA, 20 bp, synthetic construct
  misc_feature 1..20: note = Description of Artificial Sequence: Synthetic oligonucleotide
  misc_feature 1..20: note = Target: SCN10A; (-) strand; PAM type: YTN; PAM sequence: TTA
  source 1..20: mol_type = other DNA
aaacaacaatgtatttaatt

SEQ ID NO: 51184 - DNA, 20 bp, synthetic construct
  misc_feature 1..20: note = Description of Artificial Sequence: Synthetic oligonucleotide
  misc_feature 1..20: note = Target: SCN10A; (-) strand; PAM type: YTN; PAM sequence: TTG
  source 1..20: mol_type = other DNA
tgaattaaaacaacaatgta

SEQ ID NO: 51185 - DNA, 20 bp, synthetic construct
  misc_feature 1..20: note = Description of Artificial Sequence: Synthetic oligonucleotide
  misc_feature 1..20: note = Target: SCN10A; (-) strand; PAM type: YTN; PAM sequence: TTT
  source 1..20: mol_type = other DNA
gtgaattaaaacaacaatgt

SEQ ID NO: 51186 - DNA, 20 bp, synthetic construct
  misc_feature 1..20: note = Description of Artificial Sequence: Synthetic oligonucleotide
  misc_feature 1..20: note = Target: SCN10A; (-) strand; PAM type: YTN; PAM sequence: TTT
  source 1..20: mol_type = other DNA
tgtgaattaaaacaacaatg

SEQ ID NO: 51187 - DNA, 20 bp, synthetic construct
  misc_feature 1..20: note = Description of Artificial Sequence: Synthetic oligonucleotide
  misc_feature 1..20: note = Target: SCN10A; (-) strand; PAM type: YTN; PAM sequence: CTG
  source 1..20: mol_type = other DNA
tgtaacaaatgaccccaaaa

SEQ ID NO: 51188 - DNA, 20 bp, synthetic construct
  misc_feature 1..20: note = Description of Artificial Sequence: Synthetic oligonucleotide
  misc_feature 1..20: note = Target: SCN10A; (-) strand; PAM type: YTN; PAM sequence: TTC
  source 1..20: mol_type = other DNA
gctgtgtaacaaatgacccc

SEQ ID NO: 51189 - DNA, 20 bp, synthetic construct
  misc_feature 1..20: note = Description of Artificial Sequence: Synthetic oligonucleotide
  misc_feature 1..20: note = Target: SCN10A; (-) strand; PAM type: YTN; PAM sequence: TTT
  source 1..20: mol_type = other DNA
cgctgtgtaacaaatgaccc

SEQ ID NO: 51190 - DNA, 20 bp, synthetic construct
  misc_feature 1..20: note = Description of Artificial Sequence: Synthetic oligonucleotide
  misc_feature 1..20: note = Target: SCN10A; (-) strand; PAM type: YTN; PAM sequence: CTT
  source 1..20: mol_type = other DNA
tcgctgtgtaacaaatgacc

SEQ ID NO: 51191 - DNA, 20 bp, synthetic construct
  misc_feature 1..20: note = Description of Artificial Sequence: Synthetic oligonucleotide
  misc_feature 1..20: note = Target: SCN10A; (-) strand; PAM type: YTN; PAM sequence: TTA
  source 1..20: mol_type = other DNA
gctttcgctgtgtaacaaat

SEQ ID NO: 51192 - DNA, 20 bp, synthetic construct
  misc_feature 1..20: note = Description of Artificial Sequence: Synthetic oligonucleotide
  misc_feature 1..20: note = Target: SCN10A; (-) strand; PAM type: YTN; PAM sequence: CTC
  source 1..20: mol_type = other DNA
atggggagggaatgtatgag

SEQ ID NO: 51193 - DNA, 20 bp, synthetic construct
  misc_feature 1..20: note = Description of Artificial Sequence: Synthetic oligonucleotide
  misc_feature 1..20: note = Target: SCN10A; (-) strand; PAM type: YTN; PAM sequence: TTG
  source 1..20: mol_type = other DNA
ccaacccagagctcatgggg

SEQ ID NO: 51194 - DNA, 20 bp, synthetic construct
  misc_feature 1..20: note = Description of Artificial Sequence: Synthetic oligonucleotide
  misc_feature 1..20: note = Target: SCN10A; (-) strand; PAM type: YTN; PAM sequence: TTT
  source 1..20: mol_type = other DNA
gccaacccagagctcatggg

SEQ ID NO: 51195 - DNA, 20 bp, synthetic construct
  misc_feature 1..20: note = Description of Artificial Sequence: Synthetic oligonucleotide
  misc_feature 1..20: note = Target: SCN10A; (-) strand; PAM type: YTN; PAM sequence: CTT
  source 1..20: mol_type = other DNA
tgccaacccagagctcatgg

SEQ ID NO: 51196 - DNA, 20 bp, synthetic construct
  misc_feature 1..20: note = Description of Artificial Sequence: Synthetic oligonucleotide
  misc_feature 1..20: note = Target: SCN10A; (-) strand; PAM type: YTN; PAM sequence: CTG
  source 1..20: mol_type = other DNA
ggaaagatgtataaataaat

SEQ ID NO: 51197 - DNA, 20 bp, synthetic construct
  misc_feature 1..20: note = Description of Artificial Sequence: Synthetic oligonucleotide
  misc_feature 1..20: note = Target: SCN10A; (-) strand; PAM type: YTN; PAM sequence: TTG
  source 1..20: mol_type = other DNA
caggtcctgggaaagatgta

SEQ ID NO: 51198 - DNA, 20 bp, synthetic construct
  misc_feature 1..20: note = Description of Artificial Sequence: Synthetic oligonucleotide
  misc_feature 1..20: note = Target: SCN10A; (-) strand; PAM type: YTN; PAM sequence: TTA
  source 1..20: mol_type = other DNA
tgggcacagatggggttgca

SEQ ID NO: 51199 - DNA, 20 bp, synthetic construct
  misc_feature 1..20: note = Description of Artificial Sequence: Synthetic oligonucleotide
  misc_feature 1..20: note = Target: SCN10A; (-) strand; PAM type: YTN; PAM sequence: TTG
  source 1..20: mol_type = other DNA
gcatattatgggcacagatg

SEQ ID NO: 51200 - DNA, 20 bp, synthetic construct
  misc_feature 1..20: note = Description of Artificial Sequence: Synthetic oligonucleotide
  misc_feature 1..20: note = Target: SCN10A; (-) strand; PAM type: YTN; PAM sequence: CTT
  source 1..20: mol_type = other DNA
ggcatattatgggcacagat

SEQ ID NO: 51201 - DNA, 20 bp, synthetic construct
  misc_feature 1..20: note = Description of Artificial Sequence: Synthetic oligonucleotide
  misc_feature 1..20: note = Target: SCN10A; (-) strand; PAM type: YTN; PAM sequence: TTG
  source 1..20: mol_type = other DNA
tccttggcatattatgggca

SEQ ID NO: 51202 - DNA, 20 bp, synthetic construct
  misc_feature 1..20: note = Description of Artificial Sequence: Synthetic oligonucleotide
  misc_feature 1..20: note = Target: SCN10A; (-) strand; PAM type: YTN; PAM sequence: CTT
  source 1..20: mol_type = other DNA
gtccttggcatattatgggc

SEQ ID NO: 51203 - DNA, 20 bp, synthetic construct
  misc_feature 1..20: note = Description of Artificial Sequence: Synthetic oligonucleotide
  misc_feature 1..20: note = Target: SCN10A; (-) strand; PAM type: YTN; PAM sequence: CTC
  source 1..20: mol_type = other DNA
catcttgtccttggcatatt

SEQ ID NO: 51204 - DNA, 20 bp, synthetic construct
  misc_feature 1..20: note = Description of Artificial Sequence: Synthetic oligonucleotide
  misc_feature 1..20: note = Target: SCN10A; (-) strand; PAM type: YTN; PAM sequence: TTC
  source 1..20: mol_type = other DNA
tccatcttgtccttggcata

SEQ ID NO: 51205 - DNA, 20 bp, synthetic construct
  misc_feature 1..20: note = Description of Artificial Sequence: Synthetic oligonucleotide
  misc_feature 1..20: note = Target: SCN10A; (-) strand; PAM type: YTN; PAM sequence: CTT
  source 1..20: mol_type = other DNA
ctccatcttgtccttggcat

SEQ ID NO: 51206 - DNA, 20 bp, synthetic construct
  misc_feature 1..20: note = Description of Artificial Sequence: Synthetic oligonucleotide
  misc_feature 1..20: note = Target: SCN10A; (-) strand; PAM type: YTN; PAM sequence: TTC
  source 1..20: mol_type = other DNA
cttctccatcttgtccttgg

SEQ ID NO: 51207 - DNA, 20 bp, synthetic construct
  misc_feature 1..20: note = Description of Artificial Sequence: Synthetic oligonucleotide
  misc_feature 1..20: note = Target: SCN10A; (-) strand; PAM type: YTN; PAM sequence: TTA
  source 1..20: mol_type = other DNA
tgacaaagcacgagtgccca

SEQ ID NO: 51208 - DNA, 20 bp, synthetic construct
  misc_feature 1..20: note = Description of Artificial Sequence: Synthetic oligonucleotide
  misc_feature 1..20: note = Target: SCN10A; (-) strand; PAM type: YTN; PAM sequence: CTT
  source 1..20: mol_type = other DNA
atgacaaagcacgagtgccc

SEQ ID NO: 51209 - DNA, 20 bp, synthetic construct
  misc_feature 1..20: note = Description of Artificial Sequence: Synthetic oligonucleotide
  misc_feature 1..20: note = Target: SCN10A; (-) strand; PAM type: YTN; PAM sequence: TTC
  source 1..20: mol_type = other DNA
ccaacttatgacaaagcacg

SEQ ID NO: 51210 - DNA, 20 bp, synthetic construct
  misc_feature 1..20: note = Description of Artificial Sequence: Synthetic oligonucleotide
  misc_feature 1..20: note = Target: SCN10A; (-) strand; PAM type: YTN; PAM sequence: CTC
  source 1..20: mol_type = other DNA
agggtgagttcccaacttat

SEQ ID NO: 51211 - DNA, 20 bp, synthetic construct
  misc_feature 1..20: note = Description of Artificial Sequence: Synthetic oligonucleotide
  misc_feature 1..20: note = Target: SCN10A; (-) strand; PAM type: YTN; PAM sequence: CTG
  source 1..20: mol_type = other DNA
actcagggtgagttcccaac

SEQ ID NO: 51212 - DNA, 20 bp, synthetic construct
  misc_feature 1..20: note = Description of Artificial Sequence: Synthetic oligonucleotide
  misc_feature 1..20: note = Target: SCN10A; (-) strand; PAM type: YTN; PAM sequence: CTG
  source 1..20: mol_type = other DNA
tgtggcaatggatctgactc

SEQ ID NO: 51213 - DNA, 20 bp, synthetic construct
  misc_feature 1..20: note = Description of Artificial Sequence: Synthetic oligonucleotide
  misc_feature 1..20: note = Target: SCN10A; (-) strand; PAM type: YTN; PAM sequence: TTA
  source 1..20: mol_type = other DNA
ctgtgtggcaatggatctga

SEQ ID NO: 51214 - DNA, 20 bp, synthetic construct
  misc_feature 1..20: note = Description of Artificial Sequence: Synthetic oligonucleotide
  misc_feature 1..20: note = Target: SCN10A; (-) strand; PAM type: YTN; PAM sequence: CTT
  source 1..20: mol_type = other DNA
actgtgtggcaatggatctg

SEQ ID NO: 51215 - DNA, 20 bp, synthetic construct
  misc_feature 1..20: note = Description of Artificial Sequence: Synthetic oligonucleotide
  misc_feature 1..20: note = Target: SCN10A; (-) strand; PAM type: YTN; PAM sequence: CTG
  source 1..20: mol_type = other DNA
accccttactgtgtggcaat

SEQ ID NO: 51216 - DNA, 20 bp, synthetic construct
  misc_feature 1..20: note = Description of Artificial Sequence: Synthetic oligonucleotide
  misc_feature 1..20: note = Target: SCN10A; (-) strand; PAM type: YTN; PAM sequence: TTC
  source 1..20: mol_type = other DNA
tgaccccttactgtgtggca

SEQ ID NO: 51217 - DNA, 20 bp, synthetic construct
  misc_feature 1..20: note = Description of Artificial Sequence: Synthetic oligonucleotide
  misc_feature 1..20: note = Target: SCN10A; (-) strand; PAM type: YTN; PAM sequence: CTT
  source 1..20: mol_type = other DNA
ctgaccccttactgtgtggc

SEQ ID NO: 51218 - DNA, 20 bp, synthetic construct
  misc_feature 1..20: note = Description of Artificial Sequence: Synthetic oligonucleotide
  misc_feature 1..20: note = Target: SCN10A; (-) strand; PAM type: YTN; PAM sequence: CTA
  source 1..20: mol_type = other DNA
cataaataagcgaggcactt

SEQ ID NO: 51219 - DNA, 20 bp, synthetic construct
  misc_feature 1..20: note = Description of Artificial Sequence: Synthetic oligonucleotide
  misc_feature 1..20: note = Target: SCN10A; (-) strand; PAM type: YTN; PAM sequence: TTC
  source 1..20: mol_type = other DNA
agcagatatctacataaata

SEQ ID NO: 51220 - DNA, 20 bp, synthetic construct
  misc_feature 1..20: note = Description of Artificial Sequence: Synthetic oligonucleotide
  misc_feature 1..20: note = Target: SCN10A; (-) strand; PAM type: YTN; PAM sequence: CTT
  source 1..20: mol_type = other DNA
cagcagatatctacataaat

SEQ ID NO: 51221 - DNA, 20 bp, synthetic construct
  misc_feature 1..20: note = Description of Artificial Sequence: Synthetic oligonucleotide
  misc_feature 1..20: note = Target: SCN10A; (-) strand; PAM type: YTN; PAM sequence: TTC
  source 1..20: mol_type = other DNA
ttcagcagatatctacataa

SEQ ID NO: 51222 - DNA, 20 bp, synthetic construct
  misc_feature 1..20: note = Description of Artificial Sequence: Synthetic oligonucleotide
  misc_feature 1..20: note = Target: SCN10A; (-) strand; PAM type: YTN; PAM sequence: TTT
  source 1..20: mol_type = other DNA
cttcagcagatatctacata

SEQ ID NO: 51223 - DNA, 20 bp, synthetic construct
  misc_feature 1..20: note = Description of Artificial Sequence: Synthetic oligonucleotide
  misc_feature 1..20: note = Target: SCN10A; (-) strand; PAM type: YTN; PAM sequence: CTT
  source 1..20: mol_type = other DNA
tcttcagcagatatctacat

SEQ ID NO: 51224 - DNA, 20 bp, synthetic construct
  misc_feature 1..20: note = Description of Artificial Sequence: Synthetic oligonucleotide
  misc_feature 1..20: note = Target: SCN10A; (-) strand; PAM type: YTN; PAM sequence: TTC
  source 1..20: mol_type = other DNA
ctttcttcagcagatatcta

SEQ ID NO: 51225 - DNA, 20 bp, synthetic construct
  misc_feature 1..20: note = Description of Artificial Sequence: Synthetic oligonucleotide
  misc_feature 1..20: note = Target: SCN10A; (-) strand; PAM type: YTN; PAM sequence: CTT
  source 1..20: mol_type = other DNA
cctttcttcagcagatatct

SEQ ID NO: 51226 - DNA, 20 bp, synthetic construct
  misc_feature 1..20: note = Description of Artificial Sequence: Synthetic oligonucleotide
  misc_feature 1..20: note = Target: SCN10A; (-) strand; PAM type: YTN; PAM sequence: TTC
  source 1..20: mol_type = other DNA
ttcctttcttcagcagatat

SEQ ID NO: 51227 - DNA, 20 bp, synthetic construct
  misc_feature 1..20: note = Description of Artificial Sequence: Synthetic oligonucleotide
  misc_feature 1..20: note = Target: SCN10A; (-) strand; PAM type: YTN; PAM sequence: TTT
  source 1..20: mol_type = other DNA
cttcctttcttcagcagata

SEQ ID NO: 51228 - DNA, 20 bp, synthetic construct
  misc_feature 1..20: note = Description of Artificial Sequence: Synthetic oligonucleotide
  misc_feature 1..20: note = Target: SCN10A; (-) strand; PAM type: YTN; PAM sequence: TTT
  source 1..20: mol_type = other DNA
tcttcctttcttcagcagat

SEQ ID NO: 51229 - DNA, 20 bp, synthetic construct
  misc_feature 1..20: note = Description of Artificial Sequence: Synthetic oligonucleotide
  misc_feature 1..20: note = Target: SCN10A; (-) strand; PAM type: YTN; PAM sequence: CTT
  source 1..20: mol_type = other DNA
ttcttcctttcttcagcaga

SEQ ID NO: 51230 - DNA, 20 bp, synthetic construct
  misc_feature 1..20: note = Description of Artificial Sequence: Synthetic oligonucleotide
  misc_feature 1..20: note = Target: SCN10A; (-) strand; PAM type: YTN; PAM sequence: TTC
  source 1..20: mol_type = other DNA
ttttcttcctttcttcagca

SEQ ID NO: 51231 - DNA, 20 bp, synthetic construct
  misc_feature 1..20: note = Description of Artificial Sequence: Synthetic oligonucleotide
  misc_feature 1..20: note = Target: SCN10A; (-) strand; PAM type: YTN; PAM sequence: TTT
  source 1..20: mol_type = other DNA
cttttcttcctttcttcagc

SEQ ID NO: 51232 - DNA, 20 bp, synthetic construct
  misc_feature 1..20: note = Description of Artificial Sequence: Synthetic oligonucleotide
  misc_feature 1..20: note = Target: SCN10A; (-) strand; PAM type: YTN; PAM sequence: CTT
  source 1..20: mol_type = other DNA
tcttttcttcctttcttcag

SEQ ID NO: 51233 - DNA, 20 bp, synthetic construct
  misc_feature 1..20: note = Description of Artificial Sequence: Synthetic oligonucleotide
  misc_feature 1..20: note = Target: SCN10A; (-) strand; PAM type: YTN; PAM sequence: CTG
  source 1..20: mol_type = other DNA
tgaggctttcttttcttcct

SEQ ID NO: 51234 - DNA, 20 bp, synthetic construct
  misc_feature 1..20: note = Description of Artificial Sequence: Synthetic oligonucleotide
  misc_feature 1..20: note = Target: SCN10A; (-) strand; PAM type: YTN; PAM sequence: TTC
  source 1..20: mol_type = other DNA
agaaccatctgtgaggcttt

SEQ ID NO: 51235 - DNA, 20 bp, synthetic construct
  misc_feature 1..20: note = Description of Artificial Sequence: Synthetic oligonucleotide
  misc_feature 1..20: note = Target: SCN10A; (-) strand; PAM type: YTN; PAM sequence: TTG
  source 1..20: mol_type = other DNA
gagggttcagaaccatctgt

SEQ ID NO: 51236 - DNA, 20 bp, synthetic construct
  misc_feature 1..20: note = Description of Artificial Sequence: Synthetic oligonucleotide
  misc_feature 1..20: note = Target: SCN10A; (-) strand; PAM type: YTN; PAM sequence: TTG
  source 1..20: mol_type = other DNA
ggttggagggttcagaacca

SEQ ID NO: 51237 - DNA, 20 bp, synthetic construct
  misc_feature 1..20: note = Description of Artificial Sequence: Synthetic oligonucleotide
  misc_feature 1..20: note = Target: SCN10A; (-) strand; PAM type: YTN; PAM sequence: CTT
  source 1..20: mol_type = other DNA
gggttggagggttcagaacc

SEQ ID NO: 51238 - DNA, 20 bp, synthetic construct
  misc_feature 1..20: note = Description of Artificial Sequence: Synthetic oligonucleotide
  misc_feature 1..20: note = Target: SCN10A; (-) strand; PAM type: YTN; PAM sequence: TTC
  source 1..20: mol_type = other DNA
accacacaaggcttgggttg

SEQ ID NO: 51239 - DNA, 20 bp, synthetic construct
  misc_feature 1..20: note = Description of Artificial Sequence: Synthetic oligonucleotide
  misc_feature 1..20: note = Target: SCN10A; (-) strand; PAM type: YTN; PAM sequence: TTG
  source 1..20: mol_type = other DNA
cattcaccacacaaggcttg

SEQ ID NO: 51240 - DNA, 20 bp, synthetic construct
  misc_feature 1..20: note = Description of Artificial Sequence: Synthetic oligonucleotide
  misc_feature 1..20: note = Target: SCN10A; (-) strand; PAM type: YTN; PAM sequence: TTG
  source 1..20: mol_type = other DNA
ggaatattgcattcaccaca

SEQ ID NO: 51241 - DNA, 20 bp, synthetic construct
  misc_feature 1..20: note = Description of Artificial Sequence: Synthetic oligonucleotide
  misc_feature 1..20: note = Target: SCN10A; (-) strand; PAM type: YTN; PAM sequence: CTT
  source 1..20: mol_type = other DNA
gggaatattgcattcaccac

SEQ ID NO: 51242 - DNA, 20 bp, synthetic construct
  misc_feature 1..20: note = Description of Artificial Sequence: Synthetic oligonucleotide
  misc_feature 1..20: note = Target: SCN10A; (-) strand; PAM type: YTN; PAM sequence: TTG
  source 1..20: mol_type = other DNA
gaagacttgggaatattgca

SEQ ID NO: 51243 - DNA, 20 bp, synthetic construct
  misc_feature 1..20: note = Description of Artificial Sequence: Synthetic oligonucleotide
  misc_feature 1..20: note = Target: SCN10A; (-) strand; PAM type: YTN; PAM sequence: TTT
  source 1..20: mol_type = other DNA
ggaagacttgggaatattgc

SEQ ID NO: 51244 - DNA, 20 bp, synthetic construct
  misc_feature 1..20: note = Description of Artificial Sequence: Synthetic oligonucleotide
  misc_feature 1..20: note = Target: SCN10A; (-) strand; PAM type: YTN; PAM sequence: CTT
  source 1..20: mol_type = other DNA
tggaagacttgggaatattg

SEQ ID NO: 51245 - DNA, 20 bp, synthetic construct
  misc_feature 1..20: note = Description of Artificial Sequence: Synthetic oligonucleotide
  misc_feature 1..20: note = Target: SCN10A; (-) strand; PAM type: YTN; PAM sequence: CTC
  source 1..20: mol_type = other DNA
actttggaagacttgggaat

SEQ ID NO: 51246 - DNA, 20 bp, synthetic construct
  misc_feature 1..20: note = Description of Artificial Sequence: Synthetic oligonucleotide
  misc_feature 1..20: note = Target: SCN10A; (-) strand; PAM type: YTN; PAM sequence: CTG
  source 1..20: mol_type = other DNA
agtacatgtagccaaaggag

SEQ ID NO: 51247 - DNA, 20 bp, synthetic construct
  misc_feature 1..20: note = Description of Artificial Sequence: Synthetic oligonucleotide
  misc_feature 1..20: note = Target: SCN10A; (-) strand; PAM type: YTN; PAM sequence: TTC
  source 1..20: mol_type = other DNA
catgtggcccagcatgccca

SEQ ID NO: 51248 - DNA, 20 bp, synthetic construct
  misc_feature 1..20: note = Description of Artificial Sequence: Synthetic oligonucleotide
  misc_feature 1..20: note = Target: SCN10A; (-) strand; PAM type: YTN; PAM sequence: CTT
  source 1..20: mol_type = other DNA
ccatgtggcccagcatgccc

SEQ ID NO: 51249 - DNA, 20 bp, synthetic construct
  misc_feature 1..20: note = Description of Artificial Sequence: Synthetic oligonucleotide
  misc_feature 1..20: note = Target: SCN10A; (-) strand; PAM type: YTN; PAM sequence: TTA
  source 1..20: mol_type = other DNA
caacttccatgtggcccagc

SEQ ID NO: 51250 - DNA, 20 bp, synthetic construct
  misc_feature 1..20: note = Description of Artificial Sequence: Synthetic oligonucleotide
  misc_feature 1..20: note = Target: SCN10A; (-) strand; PAM type: YTN; PAM sequence: TTT
  source 1..20: mol_type = other DNA
acaacttccatgtggcccag

SEQ ID NO: 51251 - DNA, 20 bp, synthetic construct
  misc_feature 1..20: note = Description of Artificial Sequence: Synthetic oligonucleotide
  misc_feature 1..20: note = Target: SCN10A; (-) strand; PAM type: YTN; PAM sequence: CTT
  source 1..20: mol_type = other DNA
tacaacttccatgtggccca

SEQ ID NO: 51252 - DNA, 20 bp, synthetic construct
  misc_feature 1..20: note = Description of Artificial Sequence: Synthetic oligonucleotide
  misc_feature 1..20: note = Target: SCN10A; (-) strand; PAM type: YTN; PAM sequence: TTC
  source 1..20: mol_type = other DNA
agatgtgactttacaacttc

SEQ ID NO: 51253 - DNA, 20 bp, synthetic construct
  misc_feature 1..20: note = Description of Artificial Sequence: Synthetic oligonucleotide
  misc_feature 1..20: note = Target: SCN10A; (-) strand; PAM type: YTN; PAM sequence: TTT
  source 1..20: mol_type = other DNA
cagatgtgactttacaactt

SEQ ID NO: 51254 - DNA, 20 bp, synthetic construct
  misc_feature 1..20: note = Description of Artificial Sequence: Synthetic oligonucleotide
  misc_feature 1..20: note = Target: SCN10A; (-) strand; PAM type: YTN; PAM sequence: TTT
  source 1..20: mol_type = other DNA
tcagatgtgactttacaact

SEQ ID NO: 51255 - DNA, 20 bp, synthetic construct
  misc_feature 1..20: note = Description of Artificial Sequence: Synthetic oligonucleotide
  misc_feature 1..20: note = Target: SCN10A; (-) strand; PAM type: YTN; PAM sequence: CTT
  source 1..20: mol_type = other DNA
ttcagatgtgactttacaac

SEQ ID NO: 51256 - DNA, 20 bp, synthetic construct
  misc_feature 1..20: note = Description of Artificial Sequence: Synthetic oligonucleotide
  misc_feature 1..20: note = Target: SCN10A; (-) strand; PAM type: YTN; PAM sequence: CTC
  source 1..20: mol_type = other DNA
ttttcagatgtgactttaca

SEQ ID NO: 51257 - DNA, 20 bp, synthetic construct
  misc_feature 1..20: note = Description of Artificial Sequence: Synthetic oligonucleotide
  misc_feature 1..20: note = Target: SCN10A; (-) strand; PAM type: YTN; PAM sequence: TTC
  source 1..20: mol_type = other DNA
tcttttcagatgtgacttta

SEQ ID NO: 51258 - DNA, 20 bp, synthetic construct
  misc_feature 1..20: note = Description of Artificial Sequence: Synthetic oligonucleotide
  misc_feature 1..20: note = Target: SCN10A; (-) strand; PAM type: YTN; PAM sequence: CTT
  source 1..20: mol_type = other DNA
ctcttttcagatgtgacttt

SEQ ID NO: 51259 - DNA, 20 bp, synthetic construct
  misc_feature 1..20: note = Description of Artificial Sequence: Synthetic oligonucleotide
  misc_feature 1..20: note = Target: SCN10A; (-) strand; PAM type: YTN; PAM sequence: CTC
  source 1..20: mol_type = other DNA
ttctcttttcagatgtgact

SEQ ID NO: 51260 - DNA, 20 bp, synthetic construct
  misc_feature 1..20: note = Description of Artificial Sequence: Synthetic oligonucleotide
  misc_feature 1..20: note = Target: SCN10A; (-) strand; PAM type: YTN; PAM sequence: TTA
  source 1..20: mol_type = other DNA
gctcttctcttttcagatgt

SEQ ID NO: 51261 - DNA, 20 bp, synthetic construct
  misc_feature 1..20: note = Description of Artificial Sequence: Synthetic oligonucleotide
  misc_feature 1..20: note = Target: SCN10A; (-) strand; PAM type: YTN; PAM sequence: CTT
  source 1..20: mol_type = other DNA
agctcttctcttttcagatg

SEQ ID NO: 51262 - DNA, 20 bp, synthetic construct
  misc_feature 1..20: note = Description of Artificial Sequence: Synthetic oligonucleotide
  misc_feature 1..20: note = Target: SCN10A; (-) strand; PAM type: YTN; PAM sequence: CTG
  source 1..20: mol_type = other DNA
cttagctcttctcttttcag

SEQ ID NO: 51263 - DNA, 20 bp, synthetic construct
  misc_feature 1..20: note = Description of Artificial Sequence: Synthetic oligonucleotide
  misc_feature 1..20: note = Target: SCN10A; (-) strand; PAM type: YTN; PAM sequence: TTG
  source 1..20: mol_type = other DNA
agagccgaagtcactgctta

SEQ ID NO: 51264 - DNA, 20 bp, synthetic construct
  misc_feature 1..20: note = Description of Artificial Sequence: Synthetic oligonucleotide
  misc_feature 1..20: note = Target: SCN10A; (-) strand; PAM type: YTN; PAM sequence: CTG
  source 1..20: mol_type = other DNA
ggggagattgagagccgaag

SEQ ID NO: 51265 - DNA, 20 bp, synthetic construct
  misc_feature 1..20: note = Description of Artificial Sequence: Synthetic oligonucleotide
  misc_feature 1..20: note = Target: SCN10A; (-) strand; PAM type: YTN; PAM sequence: CTG
  source 1..20: mol_type = other DNA
ctgggggagattgagagccg

SEQ ID NO: 51266 - DNA, 20 bp, synthetic construct
  misc_feature 1..20: note = Description of Artificial Sequence: Synthetic oligonucleotide
  misc_feature 1..20: note = Target: SCN10A; (-) strand; PAM type: YTN; PAM sequence: CTC
  source 1..20: mol_type = other DNA
tgctgggggagattgagagc

SEQ ID NO: 51267 - DNA, 20 bp, synthetic construct
  misc_feature 1..20: note = Description of Artificial Sequence: Synthetic oligonucleotide
  misc_feature 1..20: note = Target: SCN10A; (-) strand; PAM type: YTN; PAM sequence: CTA
  source 1..20: mol_type = other DNA
cctctgctgggggagattga

SEQ ID NO: 51268 - DNA, 20 bp, synthetic construct
  misc_feature 1..20: note = Description of Artificial Sequence: Synthetic oligonucleotide
  misc_feature 1..20: note = Target: SCN10A; (-) strand; PAM type: YTN; PAM sequence: TTC
  source 1..20: mol_type = other DNA
tacctctgctgggggagatt

SEQ ID NO: 51269 - DNA, 20 bp, synthetic construct
  misc_feature 1..20: note = Description of Artificial Sequence: Synthetic oligonucleotide
  misc_feature 1..20: note = Target: SCN10A; (-) strand; PAM type: YTN; PAM sequence: CTA
  source 1..20: mol_type = other DNA
gaggcaagtcattctacctc

SEQ ID NO: 51270 - DNA, 20 bp, synthetic construct
  misc_feature 1..20: note = Description of Artificial Sequence: Synthetic oligonucleotide
  misc_feature 1..20: note = Target: SCN10A; (-) strand; PAM type: YTN; PAM sequence: TTG
  source 1..20: mol_type = other DNA
caaggaaatgagccataaat

SEQ ID NO: 51271 - DNA, 20 bp, synthetic construct
  misc_feature 1..20: note = Description of Artificial Sequence: Synthetic oligonucleotide
  misc_feature 1..20: note = Target: SCN10A; (-) strand; PAM type: YTN; PAM sequence: CTT
  source 1..20: mol_type = other DNA
gcaaggaaatgagccataaa

SEQ ID NO: 51272 - DNA, 20 bp, synthetic construct
  misc_feature 1..20: note = Description of Artificial Sequence: Synthetic oligonucleotide
  misc_feature 1..20: note = Target: SCN10A; (-) strand; PAM type: YTN; PAM sequence: CTC
  source 1..20: mol_type = other DNA
ttgcaaggaaatgagccata

SEQ ID NO: 51273 - DNA, 20 bp, synthetic construct
  misc_feature 1..20: note = Description of Artificial Sequence: Synthetic oligonucleotide
  misc_feature 1..20: note = Target: SCN10A; (-) strand; PAM type: YTN; PAM sequence: CTC
  source 1..20: mol_type = other DNA
agcatccctcttgcaaggaa

SEQ ID NO: 51274 - DNA, 20 bp, synthetic construct
  misc_feature 1..20: note = Description of Artificial Sequence: Synthetic oligonucleotide
  misc_feature 1..20: note = Target: SCN10A; (-) strand; PAM type: YTN; PAM sequence: TTG
  source 1..20: mol_type = other DNA
ctcagcatccctcttgcaag

SEQ ID NO: 51275 - DNA, 20 bp, synthetic construct
  misc_feature 1..20: note = Description of Artificial Sequence: Synthetic oligonucleotide
  misc_feature 1..20: note = Target: SCN10A; (-) strand; PAM type: YTN; PAM sequence: CTG
  source 1..20: mol_type = other DNA
ttgctcagcatccctcttgc

SEQ ID NO: 51276 - DNA, 20 bp, synthetic construct
  misc_feature 1..20: note = Description of Artificial Sequence: Synthetic oligonucleotide
  misc_feature 1..20: note = Target: SCN10A; (-) strand; PAM type: YTN; PAM sequence: TTC
  source 1..20: mol_type = other DNA
ctgttgctcagcatccctct

SEQ ID NO: 51277 - DNA, 20 bp, synthetic construct
  misc_feature 1..20: note = Description of Artificial Sequence: Synthetic oligonucleotide
  misc_feature 1..20: note = Target: SCN10A; (-) strand; PAM type: YTN; PAM sequence: TTT
  source 1..20: mol_type = other DNA
cctgttgctcagcatccctc

SEQ ID NO: 51278 - DNA, 20 bp, synthetic construct
  misc_feature 1..20: note = Description of Artificial Sequence: Synthetic oligonucleotide
  misc_feature 1..20: note = Target: SCN10A; (-) strand; PAM type: YTN; PAM sequence: CTA
  source 1..20: mol_type = other DNA
tttcctgttgctcagcatcc

SEQ ID NO: 51279 - DNA, 20 bp, synthetic construct
  misc_feature 1..20: note = Description of Artificial Sequence: Synthetic oligonucleotide
  misc_feature 1..20: note = Target: SCN10A; (-) strand; PAM type: YTN; PAM sequence: TTC
  source 1..20: mol_type = other DNA
tatttcctgttgctcagcat

SEQ ID NO: 51280 - DNA, 20 bp, synthetic construct
  misc_feature 1..20: note = Description of Artificial Sequence: Synthetic oligonucleotide
  misc_feature 1..20: note = Target: SCN10A; (-) strand; PAM type: YTN; PAM sequence: TTG
  source 1..20: mol_type = other DNA
ggtattctatttcctgttgc

SEQ ID NO: 51281 - DNA, 20 bp, synthetic construct
  misc_feature 1..20: note = Description of Artificial Sequence: Synthetic oligonucleotide
  misc_feature 1..20: note = Target: SCN10A; (-) strand; PAM type: YTN; PAM sequence: TTT
  source 1..20: mol_type = other DNA
gggtattctatttcctgttg

SEQ ID NO: 51282 - DNA, 20 bp, synthetic construct
  misc_feature 1..20: note = Description of Artificial Sequence: Synthetic oligonucleotide
  misc_feature 1..20: note = Target: SCN10A; (-) strand; PAM type: YTN; PAM sequence: TTT
  source 1..20: mol_type = other DNA
tgggtattctatttcctgtt

SEQ ID NO: 51283 - DNA, 20 bp, synthetic construct
  misc_feature 1..20: note = Description of Artificial Sequence: Synthetic oligonucleotide
  misc_feature 1..20: note = Target: SCN10A; (-) strand; PAM type: YTN; PAM sequence: CTT
  source 1..20: mol_type = other DNA
ttgggtattctatttcctgt

SEQ ID NO: 51284 - DNA, 20 bp, synthetic construct
  misc_feature 1..20: note = Description of Artificial Sequence: Synthetic oligonucleotide
  misc_feature 1..20: note = Target: SCN10A; (-) strand; PAM type: YTN; PAM sequence: TTA
  source 1..20: mol_type = other DNA
cttttgggtattctatttcc

SEQ ID NO: 51285 - DNA, 20 bp, synthetic construct
  misc_feature 1..20: note = Description of Artificial Sequence: Synthetic oligonucleotide
  misc_feature 1..20: note = Target: SCN10A; (-) strand; PAM type: YTN; PAM sequence: TTT
  source 1..20: mol_type = other DNA
acttttgggtattctatttc

SEQ ID NO: 51286 - DNA, 20 bp, synthetic construct
  misc_feature 1..20: note = Description of Artificial Sequence: Synthetic oligonucleotide
  misc_feature 1..20: note = Target: SCN10A; (-) strand; PAM type: YTN; PAM sequence: TTT
  source 1..20: mol_type = other DNA
tacttttgggtattctattt

SEQ ID NO: 51287 - DNA, 20 bp, synthetic construct
  misc_feature 1..20: note = Description of Artificial Sequence: Synthetic oligonucleotide
  misc_feature 1..20: note = Target: SCN10A; (-) strand; PAM type: YTN; PAM sequence: TTG
  source 1..20: mol_type = other DNA
tgttttacttttgggtattc

SEQ ID NO: 51288 - DNA, 20 bp, synthetic construct
  misc_feature 1..20: note = Description of Artificial Sequence: Synthetic oligonucleotide
  misc_feature 1..20: note = Target: SCN10A; (-) strand; PAM type: YTN; PAM sequence: TTG
  source 1..20: mol_type = other DNA
agttgtgttttacttttggg

SEQ ID NO: 51289 - DNA, 20 bp, synthetic construct
  misc_feature 1..20: note = Description of Artificial Sequence: Synthetic oligonucleotide
  misc_feature 1..20: note = Target: SCN10A; (-) strand; PAM type: YTN; PAM sequence: CTT
  source 1..20: mol_type = other DNA
gagttgtgttttacttttgg

SEQ ID NO: 51290 - DNA, 20 bp, synthetic construct
  misc_feature 1..20: note = Description of Artificial Sequence: Synthetic oligonucleotide
  misc_feature 1..20: note = Target: SCN10A; (-) strand; PAM type: YTN; PAM sequence: CTC
  source 1..20: mol_type = other DNA
ttgagttgtgttttactttt

SEQ ID NO: 51291 - DNA, 20 bp, synthetic construct
  misc_feature 1..20: note = Description of Artificial Sequence: Synthetic oligonucleotide
  misc_feature 1..20: note = Target: SCN10A; (-) strand; PAM type: YTN; PAM sequence: TTC
  source 1..20: mol_type = other DNA
tcttgagttgtgttttactt

SEQ ID NO: 51292 - DNA, 20 bp, synthetic construct
  misc_feature 1..20: note = Description of Artificial Sequence: Synthetic oligonucleotide
  misc_feature 1..20: note = Target: SCN10A; (-) strand; PAM type: YTN; PAM sequence: CTG
  source 1..20: mol_type = other DNA
ccaaaatggttctcttgagt

SEQ ID NO: 51293 - DNA, 20 bp, synthetic construct
  misc_feature 1..20: note = Description of Artificial Sequence: Synthetic oligonucleotide
  misc_feature 1..20: note = Target: SCN10A; (-) strand; PAM type: YTN; PAM sequence: TTC
  source 1..20: mol_type = other DNA
ctgccaaaatggttctcttg

SEQ ID NO: 51294 - DNA, 20 bp, synthetic construct
  misc_feature 1..20: note = Description of Artificial Sequence: Synthetic oligonucleotide
  misc_feature 1..20: note = Target: SCN10A; (-) strand; PAM type: YTN; PAM sequence: TTT
  source 1..20: mol_type = other DNA
cctgccaaaatggttctctt

SEQ ID NO: 51295 - DNA, 20 bp, synthetic construct
  misc_feature 1..20: note = Description of Artificial Sequence: Synthetic oligonucleotide
  misc_feature 1..20: note = Target: SCN10A; (-) strand; PAM type: YTN; PAM sequence: CTT
  source 1..20: mol_type = other DNA
tcctgccaaaatggttctct

SEQ ID NO: 51296 - DNA, 20 bp, synthetic construct
  misc_feature 1..20: note = Description of Artificial Sequence: Synthetic oligonucleotide
  misc_feature 1..20: note = Target: SCN10A; (-) strand; PAM type: YTN; PAM sequence: CTC
  source 1..20: mol_type = other DNA
ccctttcctgccaaaatggt

SEQ ID NO: 51297 - DNA, 20 bp, synthetic construct
  misc_feature 1..20: note = Description of Artificial Sequence: Synthetic oligonucleotide
  misc_feature 1..20: note = Target: SCN10A; (-) strand; PAM type: YTN; PAM sequence: TTG
  source 1..20: mol_type = other DNA
actcccctttcctgccaaaa

SEQ ID NO: 51298 - DNA, 20 bp, synthetic construct
  misc_feature 1..20: note = Description of Artificial Sequence: Synthetic oligonucleotide
  misc_feature 1..20: note = Target: SCN10A; (-) strand; PAM type: YTN; PAM sequence: TTT
  source 1..20: mol_type = other DNA
gactcccctttcctgccaaa

SEQ ID NO: 51299 - DNA, 20 bp, synthetic construct
  misc_feature 1..20: note = Description of Artificial Sequence: Synthetic oligonucleotide
  misc_feature 1..20: note = Target: SCN10A; (-) strand; PAM type: YTN; PAM sequence: TTT
  source 1..20: mol_type = other DNA
tgactcccctttcctgccaa

SEQ ID NO: 51300 - DNA, 20 bp, synthetic construct
  misc_feature 1..20: note = Description of Artificial Sequence: Synthetic oligonucleotide
  misc_feature 1..20: note = Target: SCN10A; (-) strand; PAM type: YTN; PAM sequence: CTG
  source 1..20: mol_type = other DNA
tgtgtgtgtatagacatata

SEQ ID NO: 51301 - DNA, 20 bp, synthetic construct
  misc_feature 1..20: note = Description of Artificial Sequence: Synthetic oligonucleotide
  misc_feature 1..20: note = Target: SCN10A; (-) strand; PAM type: YTN; PAM sequence: TTG
  source 1..20: mol_type = other DNA
gtatcatatagggacagggg

SEQ ID NO: 51302 - DNA, 20 bp, synthetic construct
  misc_feature 1..20: note = Description of Artificial Sequence: Synthetic oligonucleotide
  misc_feature 1..20: note = Target: SCN10A; (-) strand; PAM type: YTN; PAM sequence: CTT
  source 1..20: mol_type = other DNA
ggtatcatatagggacaggg

SEQ ID NO: 51303 - DNA, 20 bp, synthetic construct
  misc_feature 1..20: note = Description of Artificial Sequence: Synthetic oligonucleotide
  misc_feature 1..20: note = Target: SCN10A; (-) strand; PAM type: YTN; PAM sequence: TTG
  source 1..20: mol_type = other DNA
gacccttggtatcatatagg

SEQ ID NO: 51304 - DNA, 20 bp, synthetic construct
  misc_feature 1..20: note = Description of Artificial Sequence: Synthetic oligonucleotide
  misc_feature 1..20: note = Target: SCN10A; (-) strand; PAM type: YTN; PAM sequence: CTG
  source 1..20: mol_type = other DNA
gttggacccttggtatcata

SEQ ID NO: 51305 - DNA, 20 bp, synthetic construct
  misc_feature 1..20: note = Description of Artificial Sequence: Synthetic oligonucleotide
  misc_feature 1..20: note = Target: SCN10A; (-) strand; PAM type: YTN; PAM sequence: TTC
  source 1..20: mol_type = other DNA
catagggaccaaggtctggt

SEQ ID NO: 51306 - DNA, 20 bp, synthetic construct
  misc_feature 1..20: note = Description of Artificial Sequence: Synthetic oligonucleotide
  misc_feature 1..20: note = Target: SCN10A; (-) strand; PAM type: YTN; PAM sequence: CTT
  source 1..20: mol_type = other DNA
ccatagggaccaaggtctgg

SEQ ID NO: 51307 - DNA, 20 bp, synthetic construct
  misc_feature 1..20: note = Description of Artificial Sequence: Synthetic oligonucleotide
  misc_feature 1..20: note = Target: SCN10A; (-) strand; PAM type: YTN; PAM sequence: CTC
  source 1..20: mol_type = other DNA
ttccatagggaccaaggtct

SEQ ID NO: 51308 - DNA, 20 bp, synthetic construct
  misc_feature 1..20: note = Description of Artificial Sequence: Synthetic oligonucleotide
  misc_feature 1..20: note = Target: SCN10A; (-) strand; PAM type: YTN; PAM sequence: CTC
  source 1..20: mol_type = other DNA
acagaaaacgtgagtggagt

SEQ ID NO: 51309 - DNA, 20 bp, synthetic construct
  misc_feature 1..20: note = Description of Artificial Sequence: Synthetic oligonucleotide
  misc_feature 1..20: note = Target: SCN10A; (-) strand; PAM type: YTN; PAM sequence: CTC
  source 1..20: mol_type = other DNA
atctcacagaaaacgtgagt

SEQ ID NO: 51310 - DNA, 20 bp, synthetic construct
  misc_feature 1..20: note = Description of Artificial Sequence: Synthetic oligonucleotide
  misc_feature 1..20: note = Target: SCN10A; (-) strand; PAM type: YTN; PAM sequence: CTA
  source 1..20: mol_type = other DNA
ctcatctcacagaaaacgtg

SEQ ID NO: 51311 - DNA, 20 bp, synthetic construct
  misc_feature 1..20: note = Description of Artificial Sequence: Synthetic oligonucleotide
  misc_feature 1..20: note = Target: SCN10A; (-) strand; PAM type: YTN; PAM sequence: CTG
  source 1..20: mol_type = other DNA
tcaatgagacaaccaactac

SEQ ID NO: 51312 - DNA, 20 bp, synthetic construct
  misc_feature 1..20: note = Description of Artificial Sequence: Synthetic oligonucleotide
  misc_feature 1..20: note = Target: SCN10A; (-) strand; PAM type: YTN; PAM sequence: CTC
  source 1..20: mol_type = other DNA
aaaaataaatgtgtcaagaa

SEQ ID NO: 51313 - DNA, 20 bp, synthetic construct
  misc_feature 1..20: note = Description of Artificial Sequence: Synthetic oligonucleotide
  misc_feature 1..20: note = Target: SCN10A; (-) strand; PAM type: YTN; PAM sequence: TTC
  source 1..20: mol_type = other DNA
aagggcaacctcaaaaataa

SEQ ID NO: 51314 - DNA, 20 bp, synthetic construct
  misc_feature 1..20: note = Description of Artificial Sequence: Synthetic oligonucleotide
  misc_feature 1..20: note = Target: SCN10A; (-) strand; PAM type: YTN; PAM sequence: CTT
  source 1..20: mol_type = other DNA
caagggcaacctcaaaaata

SEQ ID NO: 51315 - DNA, 20 bp, synthetic construct
  misc_feature 1..20: note = Description of Artificial Sequence: Synthetic oligonucleotide
  misc_feature 1..20: note = Target: SCN10A; (-) strand; PAM type: YTN; PAM sequence: CTC
  source 1..20: mol_type = other DNA
ttcaagggcaacctcaaaaa

SEQ ID NO: 51316 - DNA, 20 bp, synthetic construct
  misc_feature 1..20: note = Description of Artificial Sequence: Synthetic oligonucleotide
  misc_feature 1..20: note = Target: SCN10A; (-) strand; PAM type: YTN; PAM sequence: CTG
  source 1..20: mol_type = other DNA
caactcttcaagggcaacct

SEQ ID NO: 51317 - DNA, 20 bp, synthetic construct
  misc_feature 1..20: note = Description of Artificial Sequence: Synthetic oligonucleotide
  misc_feature 1..20: note = Target: SCN10A; (-) strand; PAM type: YTN; PAM sequence: TTG
  source 1..20: mol_type = other DNA
gtggggctgcaactcttcaa

SEQ ID NO: 51318 - DNA, 20 bp, synthetic construct
  misc_feature 1..20: note = Description of Artificial Sequence: Synthetic oligonucleotide
  misc_feature 1..20: note = Target: SCN10A; (-) strand; PAM type: YTN; PAM sequence: CTT
  source 1..20: mol_type = other DNA
ggtggggctgcaactcttca

SEQ ID NO: 51319 - DNA, 20 bp, synthetic construct
  misc_feature 1..20: note = Description of Artificial Sequence: Synthetic oligonucleotide
  misc_feature 1..20: note = Target: SCN10A; (-) strand; PAM type: YTN; PAM sequence: TTG
  source 1..20: mol_type = other DNA
ccttggtggggctgcaactc

SEQ ID NO: 51320 - DNA, 20 bp, synthetic construct
  misc_feature 1..20: note = Description of Artificial Sequence: Synthetic oligonucleotide
  misc_feature 1..20: note = Target: SCN10A; (-) strand; PAM type: YTN; PAM sequence: TTT
  source 1..20: mol_type = other DNA
gccttggtggggctgcaact

SEQ ID NO: 51321 - DNA, 20 bp, synthetic construct
  misc_feature 1..20: note = Description of Artificial Sequence: Synthetic oligonucleotide
  misc_feature 1..20: note = Target: SCN10A; (-) strand; PAM type: YTN; PAM sequence: TTT
  source 1..20: mol_type = other DNA
tgccttggtggggctgcaac

SEQ ID NO: 51322 - DNA, 20 bp, synthetic construct
  misc_feature 1..20: note = Description of Artificial Sequence: Synthetic oligonucleotide
  misc_feature 1..20: note = Target: SCN10A; (-) strand; PAM type: YTN; PAM sequence: TTT
  source 1..20: mol_type = other DNA
ttgccttggtggggctgcaa

SEQ ID NO: 51323 - DNA, 20 bp, synthetic construct
  misc_feature 1..20: note = Description of Artificial Sequence: Synthetic oligonucleotide
  misc_feature 1..20: note = Target: SCN10A; (-) strand; PAM type: YTN; PAM sequence: CTA
  source 1..20: mol_type = other DNA
agtgtttttgccttggtggg

SEQ ID NO: 51324 - DNA, 20 bp, synthetic construct
  misc_feature 1..20: note = Description of Artificial Sequence: Synthetic oligonucleotide
  misc_feature 1..20: note = Target: SCN10A; (-) strand; PAM type: YTN; PAM sequence: CTG
  source 1..20: mol_type = other DNA
cctaagtgtttttgccttgg

SEQ ID NO: 51325 - DNA, 20 bp, synthetic construct
  misc_feature 1..20: note = Description of Artificial Sequence: Synthetic oligonucleotide
  misc_feature 1..20: note = Target: SCN10A; (-) strand; PAM type: YTN; PAM sequence: TTC
  source 1..20: mol_type = other DNA
tgcctaagtgtttttgcctt

SEQ ID NO: 51326 - DNA, 20 bp, synthetic construct
  misc_feature 1..20: note = Description of Artificial Sequence: Synthetic oligonucleotide
  misc_feature 1..20: note = Target: SCN10A; (-) strand; PAM type: YTN; PAM sequence: CTT
  source 1..20: mol_type = other DNA
ctgcctaagtgtttttgcct

SEQ ID NO: 51327 - DNA, 20 bp, synthetic construct
  misc_feature 1..20: note = Description of Artificial Sequence: Synthetic oligonucleotide
  misc_feature 1..20: note = Target: SCN10A; (-) strand; PAM type: YTN; PAM sequence: CTC
  source 1..20: mol_type = other DNA
accatcttctgcctaagtgt

SEQ ID NO: 51328 - DNA, 20 bp, synthetic construct
  misc_feature 1..20: note = Description of Artificial Sequence: Synthetic oligonucleotide
  misc_feature 1..20: note = Target: SCN10A; (-) strand; PAM type: YTN; PAM sequence: CTG
  source 1..20: mol_type = other DNA
atgtgaccatcctcaccatc

SEQ ID NO: 51329 - DNA, 20 bp, synthetic construct
  misc_feature 1..20: note = Description of Artificial Sequence: Synthetic oligonucleotide
  misc_feature 1..20: note = Target: SCN10A; (-) strand; PAM type: YTN; PAM sequence: CTG
  source 1..20: mol_type = other DNA
gctgatgtgaccatcctcac

SEQ ID NO: 51330 - DNA, 20 bp, synthetic construct
  misc_feature 1..20: note = Description of Artificial Sequence: Synthetic oligonucleotide
  misc_feature 1..20: note = Target: SCN10A; (-) strand; PAM type: YTN; PAM sequence: CTC
  source 1..20: mol_type = other DNA
agtgaagaaactggctgatg

SEQ ID NO: 51331 - DNA, 20 bp, synthetic construct
  misc_feature 1..20: note = Description of Artificial Sequence: Synthetic oligonucleotide
  misc_feature 1..20: note = Target: SCN10A; (-) strand; PAM type: YTN; PAM sequence: TTC
  source 1..20: mol_type = other DNA
actcagtgaagaaactggct

SEQ ID NO: 51332 - DNA, 20 bp, synthetic construct
  misc_feature 1..20: note = Description of Artificial Sequence: Synthetic oligonucleotide
  misc_feature 1..20: note = Target: SCN10A; (-) strand; PAM type: YTN; PAM sequence: CTG
  source 1..20: mol_type = other DNA
attcactcagtgaagaaact

SEQ ID NO: 51333 - DNA, 20 bp, synthetic construct
  misc_feature 1..20: note = Description of Artificial Sequence: Synthetic oligonucleotide
  misc_feature 1..20: note = Target: SCN10A; (-) strand; PAM type: YTN; PAM sequence: TTG
  source 1..20: mol_type = other DNA
tgggggccctgattcactca

SEQ ID NO: 51334 - DNA, 20 bp, synthetic construct
  misc_feature 1..20: note = Description of Artificial Sequence: Synthetic oligonucleotide
  misc_feature 1..20: note = Target: SCN10A; (-) strand; PAM type: YTN; PAM sequence: CTG
  source 1..20: mol_type = other DNA
aaggtcattgtgggggccct

SEQ ID NO: 51335 - DNA, 20 bp, synthetic construct
  misc_feature 1..20: note = Description of Artificial Sequence: Synthetic oligonucleotide
  misc_feature 1..20: note = Target: SCN10A; (-) strand; PAM type: YTN; PAM sequence: TTC
  source 1..20: mol_type = other DNA
ccgcaggcctgaaggtcatt

SEQ ID NO: 51336 - DNA, 20 bp, synthetic construct
  misc_feature 1..20: note = Description of Artificial Sequence: Synthetic oligonucleotide
  misc_feature 1..20: note = Target: SCN10A; (-) strand; PAM type: YTN; PAM sequence: CTT
  source 1..20: mol_type = other DNA
cccgcaggcctgaaggtcat

SEQ ID NO: 51337 - DNA, 20 bp, synthetic construct
  misc_feature 1..20: note = Description of Artificial Sequence: Synthetic oligonucleotide
  misc_feature 1..20: note = Target: SCN10A; (-) strand; PAM type: YTN; PAM sequence: CTG
  source 1..20: mol_type = other DNA
tcatcttcccgcaggcctga

SEQ ID NO: 51338 - DNA, 20 bp, synthetic construct
  misc_feature 1..20: note = Description of Artificial Sequence: Synthetic oligonucleotide
  misc_feature 1..20: note = Target: SCN10A; (-) strand; PAM type: YTN; PAM sequence: CTC
  source 1..20: mol_type = other DNA
atccatgtggtcataccact

SEQ ID NO: 51339 - DNA, 20 bp, synthetic construct
  misc_feature 1..20: note = Description of Artificial Sequence: Synthetic oligonucleotide
  misc_feature 1..20: note = Target: SCN10A; (-) strand; PAM type: YTN; PAM sequence: CTA
  source 1..20: mol_type = other DNA
cctcatccatgtggtcatac

SEQ ID NO: 51340 - DNA, 20 bp, synthetic construct
  misc_feature 1..20: note = Description of Artificial Sequence: Synthetic oligonucleotide
  misc_feature 1..20: note = Target: SCN10A; (-) strand; PAM type: YTN; PAM sequence: CTC
  source 1..20: mol_type = other DNA
cgtgtgtgctacctcatcca

SEQ ID NO: 51341 - DNA, 20 bp, synthetic construct
  misc_feature 1..20: note = Description of Artificial Sequence: Synthetic oligonucleotide
  misc_feature 1..20: note = Target: SCN10A; (-) strand; PAM type: YTN; PAM sequence: CTA
  source 1..20: mol_type = other DNA
agatgaagaagtgtgctccg

SEQ ID NO: 51342 - DNA, 20 bp, synthetic construct
  misc_feature 1..20: note = Description of Artificial Sequence: Synthetic oligonucleotide
  misc_feature 1..20: note = Target: SCN10A; (-) strand; PAM type: YTN; PAM sequence: CTG
  source 1..20: mol_type = other DNA
tatgtagagatgaaggagga

SEQ ID NO: 51343 - DNA, 20 bp, synthetic construct
  misc_feature 1..20: note = Description of Artificial Sequence: Synthetic oligonucleotide
  misc_feature 1..20: note = Target: SCN10A; (-) strand; PAM type: YTN; PAM sequence: CTC
  source 1..20: mol_type = other DNA
ctgtatgtagagatgaagga

SEQ ID NO: 51344 - DNA, 20 bp, synthetic construct
  misc_feature 1..20: note = Description of Artificial Sequence: Synthetic oligonucleotide
  misc_feature 1..20: note = Target: SCN10A; (-) strand; PAM type: YTN; PAM sequence: TTC
  source 1..20: mol_type = other DNA
actcctgtatgtagagatga

SEQ ID NO: 51345 - DNA, 20 bp, synthetic construct
  misc_feature 1..20: note = Description of Artificial Sequence: Synthetic oligonucleotide
  misc_feature 1..20: note = Target: SCN10A; (-) strand; PAM type: YTN; PAM sequence: CTT
  source 1..20: mol_type = other DNA
cactcctgtatgtagagatg

SEQ ID NO: 51346 - DNA, 20 bp, synthetic construct
  misc_feature 1..20: note = Description of Artificial Sequence: Synthetic oligonucleotide
  misc_feature 1..20: note = Target: SCN10A; (-) strand; PAM type: YTN; PAM sequence: CTG
  source 1..20: mol_type = other DNA
gagtgtgtacatacttcact

SEQ ID NO: 51347 - DNA, 20 bp, synthetic construct
  misc_feature 1..20: note = Description of Artificial Sequence: Synthetic oligonucleotide
  misc_feature 1..20: note = Target: SCN10A; (-) strand; PAM type: YTN; PAM sequence: CTG
  source 1..20: mol_type = other DNA
ccctggagtgtgtacatact

SEQ ID NO: 51348 - DNA, 20 bp, synthetic construct
  misc_feature 1..20: note = Description of Artificial Sequence: Synthetic oligonucleotide
  misc_feature 1..20: note = Target: SCN10A; (-) strand; PAM type: YTN; PAM sequence: TTG
  source 1..20: mol_type = other DNA
gaactgccctggagtgtgta

SEQ ID NO: 51349 - DNA, 20 bp, synthetic construct
  misc_feature 1..20: note = Description of Artificial Sequence: Synthetic oligonucleotide
  misc_feature 1..20: note = Target: SCN10A; (-) strand; PAM type: YTN; PAM sequence: CTT
  source 1..20: mol_type = other DNA
ggaactgccctggagtgtgt

SEQ ID NO: 51350 - DNA, 20 bp, synthetic construct
  misc_feature 1..20: note = Description of Artificial Sequence: Synthetic oligonucleotide
  misc_feature 1..20: note = Target: SCN10A; (-) strand; PAM type: YTN; PAM sequence: TTC
  source 1..20: mol_type = other DNA
ggatgagaaaggtcttggaa

SEQ ID NO: 51351 - DNA, 20 bp, synthetic construct
  misc_feature 1..20: note = Description of Artificial Sequence: Synthetic oligonucleotide
  misc_feature 1..20: note = Target: SCN10A; (-) strand; PAM type: YTN; PAM sequence: CTT
  source 1..20: mol_type = other DNA
cggatgagaaaggtcttgga

SEQ ID NO: 51352 - DNA, 20 bp, synthetic construct
  misc_feature 1..20: note = Description of Artificial Sequence: Synthetic oligonucleotide
  misc_feature 1..20: note = Target: SCN10A; (-) strand; PAM type: YTN; PAM sequence: CTC
  source 1..20: mol_type = other DNA
agagtaaatgcaagcttcgg

SEQ ID NO: 51353 - DNA, 20 bp, synthetic construct
  misc_feature 1..20: note = Description of Artificial Sequence: Synthetic oligonucleotide
  misc_feature 1..20: note = Target: SCN10A; (-) strand; PAM type: YTN; PAM sequence: CTC
  source 1..20: mol_type = other DNA
tcagagtaaatgcaagcttc

SEQ ID NO: 51354 - DNA, 20 bp, synthetic construct
  misc_feature 1..20: note = Description of Artificial Sequence: Synthetic oligonucleotide
  misc_feature 1..20: note = Target: SCN10A; (-) strand; PAM type: YTN; PAM sequence: CTG
  source 1..20: mol_type = other DNA
cctctcagagtaaatgcaag

SEQ ID NO: 51355 - DNA, 20 bp, synthetic construct
  misc_feature 1..20: note = Description of Artificial Sequence: Synthetic oligonucleotide
  misc_feature 1..20: note = Target: SCN10A; (-) strand; PAM type: YTN; PAM sequence: CTG
  source 1..20: mol_type = other DNA
cctgcctctcagagtaaatg

SEQ ID NO: 51356 - DNA, 20 bp, synthetic construct
  misc_feature 1..20: note = Description of Artificial Sequence: Synthetic oligonucleotide
  misc_feature 1..20: note = Target: SCN10A; (-) strand; PAM type: YTN; PAM sequence: CTC
  source 1..20: mol_type = other DNA
tgcctgcctctcagagtaaa

SEQ ID NO: 51357 - DNA, 20 bp, synthetic construct
  misc_feature 1..20: note = Description of Artificial Sequence: Synthetic oligonucleotide
  misc_feature 1..20: note = Target: SCN10A; (-) strand; PAM type: YTN; PAM sequence: CTC
  source 1..20: mol_type = other DNA
tctgcctgcctctcagagta

SEQ ID NO: 51358 - DNA, 20 bp, synthetic construct
  misc_feature 1..20: note = Description of Artificial Sequence: Synthetic oligonucleotide
  misc_feature 1..20: note = Target: SCN10A; (-) strand; PAM type: YTN; PAM sequence: CTG
  source 1..20: mol_type = other DNA
actctctgcctgcctctcag

SEQ ID NO: 51359 - DNA, 20 bp, synthetic construct
  misc_feature 1..20: note = Description of Artificial Sequence: Synthetic oligonucleotide
  misc_feature 1..20: note = Target: SCN10A; (-) strand; PAM type: YTN; PAM sequence: TTA
  source 1..20: mol_type = other DNA
taatgagaatagcccctgac

SEQ ID NO: 51360 - DNA, 20 bp, synthetic construct
  misc_feature 1..20: note = Description of Artificial Sequence: Synthetic oligonucleotide
  misc_feature 1..20: note = Target: SCN10A; (-) strand; PAM type: YTN; PAM sequence: TTT
  source 1..20: mol_type = other DNA
ataatgagaatagcccctga

SEQ ID NO: 51361 - DNA, 20 bp, synthetic construct
  misc_feature 1..20: note = Description of Artificial Sequence: Synthetic oligonucleotide
  misc_feature 1..20: note = Target: SCN10A; (-) strand; PAM type: YTN; PAM sequence: CTT
  source 1..20: mol_type = other DNA
tataatgagaatagcccctg

SEQ ID NO: 51362 - DNA, 20 bp, synthetic construct
  misc_feature 1..20: note = Description of Artificial Sequence: Synthetic oligonucleotide
  misc_feature 1..20: note = Target: SCN10A; (-) strand; PAM type: YTN; PAM sequence: TTG
  source 1..20: mol_type = other DNA
catcgtctttataatgagaa

SEQ ID NO: 51363 - DNA, 20 bp, synthetic construct
  misc_feature 1..20: note = Description of Artificial Sequence: Synthetic oligonucleotide
  misc_feature 1..20: note = Target: SCN10A; (-) strand; PAM type: YTN; PAM sequence: CTC
  source 1..20: mol_type = other DNA
agttgcatcgtctttataat

SEQ ID NO: 51364 - DNA, 20 bp, synthetic construct
  misc_feature 1..20: note = Description of Artificial Sequence: Synthetic oligonucleotide
  misc_feature 1..20: note = Target: SCN10A; (-) strand; PAM type: YTN; PAM sequence: CTG
  source 1..20: mol_type = other DNA
ggtctcagttgcatcgtctt

SEQ ID NO: 51365 - DNA, 20 bp, synthetic construct
  misc_feature 1..20: note = Description of Artificial Sequence: Synthetic oligonucleotide
  misc_feature 1..20: note = Target: SCN10A; (-) strand; PAM type: YTN; PAM sequence: TTG
  source 1..20: mol_type = other DNA
cctgggtctcagttgcatcg

SEQ ID NO: 51366 - DNA, 20 bp, synthetic construct
  misc_feature 1..20: note = Description of Artificial Sequence: Synthetic oligonucleotide
  misc_feature 1..20: note = Target: SCN10A; (-) strand; PAM type: YTN; PAM sequence: CTC
  source 1..20: mol_type = other DNA
aagatgataaaaaatgcatt

SEQ ID NO: 51367 - DNA, 20 bp, synthetic construct
  misc_feature 1..20: note = Description of Artificial Sequence: Synthetic oligonucleotide
  misc_feature 1..20: note = Target: SCN10A; (-) strand; PAM type: YTN; PAM sequence: TTA
  source 1..20: mol_type = other DNA
gcctcaagatgataaaaaat

SEQ ID NO: 51368 - DNA, 20 bp, synthetic construct
  misc_feature 1..20: note = Description of Artificial Sequence: Synthetic oligonucleotide
  misc_feature 1..20: note = Target: SCN10A; (-) strand; PAM type: YTN; PAM sequence: TTA
  source 1..20: mol_type = other DNA
ttagcctcaagatgataaaa

SEQ ID NO: 51369 - DNA, 20 bp, synthetic construct
  misc_feature 1..20: note = Description of Artificial Sequence: Synthetic oligonucleotide
  misc_feature 1..20: note = Target: SCN10A; (-) strand; PAM type: YTN; PAM sequence: TTT
  source 1..20: mol_type = other DNA
attagcctcaagatgataaa

SEQ ID NO: 51370 - DNA, 20 bp, synthetic construct
  misc_feature 1..20: note = Description of Artificial Sequence: Synthetic oligonucleotide
  misc_feature 1..20: note = Target: SCN10A; (-) strand; PAM type: YTN; PAM sequence: TTT
  source 1..20: mol_type = other DNA
tattagcctcaagatgataa

SEQ ID NO: 51371 - DNA, 20 bp, synthetic construct
  misc_feature 1..20: note = Description of Artificial Sequence: Synthetic oligonucleotide
  misc_feature 1..20: note = Target: SCN10A; (-) strand; PAM type: YTN; PAM sequence: CTA
  source 1..20: mol_type = other DNA
gtgtcaggaattttattagc

SEQ ID NO: 51372 - DNA, 20 bp, synthetic construct
  misc_feature 1..20: note = Description of Artificial Sequence: Synthetic oligonucleotide
  misc_feature 1..20: note = Target: SCN10A; (-) strand; PAM type: YTN; PAM sequence: TTG
  source 1..20: mol_type = other DNA
ctagtgtcaggaattttatt

SEQ ID NO: 51373 - DNA, 20 bp, synthetic construct
  misc_feature 1..20: note = Description of Artificial Sequence: Synthetic oligonucleotide
  misc_feature 1..20: note = Target: SCN10A; (-) strand; PAM type: YTN; PAM sequence: TTG
  source 1..20: mol_type = other DNA
aattgctagtgtcaggaatt

SEQ ID NO: 51374 - DNA, 20 bp, synthetic construct
  misc_feature 1..20: note = Description of Artificial Sequence: Synthetic oligonucleotide
  misc_feature 1..20: note = Target: SCN10A; (-) strand; PAM type: YTN; PAM sequence: TTA
  source 1..20: mol_type = other DNA
aattgaattgctagtgtcag

SEQ ID NO: 51375 - DNA, 20 bp, synthetic construct
  misc_feature 1..20: note = Description of Artificial Sequence: Synthetic oligonucleotide
  misc_feature 1..20: note = Target: SCN10A; (-) strand; PAM type: YTN; PAM sequence: TTT
  source 1..20: mol_type = other DNA
aaattgaattgctagtgtca

SEQ ID NO: 51376 - DNA, 20 bp, synthetic construct
  misc_feature 1..20: note = Description of Artificial Sequence: Synthetic oligonucleotide
  misc_feature 1..20: note = Target: SCN10A; (-) strand; PAM type: YTN; PAM sequence: TTA
  source 1..20: mol_type = other DNA
tttaaattgaattgctagtg

SEQ ID NO: 51377 - DNA, 20 bp, synthetic construct
  misc_feature 1..20: note = Description of Artificial Sequence: Synthetic oligonucleotide
  misc_feature 1..20: note = Target: SCN10A; (-) strand; PAM type: YTN; PAM sequence: CTC
  source 1..20: mol_type = other DNA
agcataaattatttaaattg

SEQ ID NO: 51378 - DNA, 20 bp, synthetic construct
  misc_feature 1..20: note = Description of Artificial Sequence: Synthetic oligonucleotide
  misc_feature 1..20: note = Target: SCN10A; (-) strand; PAM type: YTN; PAM sequence: CTG
  source 1..20: mol_type = other DNA
gaaaaagtaggtactcagca

SEQ ID NO: 51379 - DNA, 20 bp, synthetic construct
  misc_feature 1..20: note = Description of Artificial Sequence: Synthetic oligonucleotide
  misc_feature 1..20: note = Target: SCN10A; (-) strand; PAM type: YTN; PAM sequence: CTA
  source 1..20: mol_type = other DNA
gcacagtgcctggaaaaagt

SEQ ID NO: 51380 - DNA, 20 bp, synthetic construct
  misc_feature 1..20: note = Description of Artificial Sequence: Synthetic oligonucleotide
  misc_feature 1..20: note = Target: SCN10A; (-) strand; PAM type: YTN; PAM sequence: TTC
  source 1..20: mol_type = other DNA
atgcctagcacagtgcctgg

SEQ ID NO: 51381 - DNA, 20 bp, synthetic construct
  misc_feature 1..20: note = Description of Artificial Sequence: Synthetic oligonucleotide
  misc_feature 1..20: note = Target: SCN10A; (-) strand; PAM type: YTN; PAM sequence: CTT
  source 1..20: mol_type = other DNA
catgcctagcacagtgcctg

SEQ ID NO: 51382 - DNA, 20 bp, synthetic construct
  misc_feature 1..20: note = Description of Artificial Sequence: Synthetic oligonucleotide
  misc_feature 1..20: note = Target: SCN10A; (-) strand; PAM type: YTN; PAM sequence: TTA
  source 1..20: mol_type = other DNA
gtagcttcatgcctagcaca

SEQ ID NO: 51383 - DNA, 20 bp, synthetic construct
  misc_feature 1..20: note = Description of Artificial Sequence: Synthetic oligonucleotide
  misc_feature 1..20: note = Target: SCN10A; (-) strand; PAM type: YTN; PAM sequence: CTG
  source 1..20: mol_type = other DNA
gggtgaagttagtagcttca

SEQ ID NO: 51384 - DNA, 20 bp, synthetic construct
  misc_feature 1..20: note = Description of Artificial Sequence: Synthetic oligonucleotide
  misc_feature 1..20: note = Target: SCN10A; (-) strand; PAM type: YTN; PAM sequence: TTA
  source 1..20: mol_type = other DNA
ctggggtgaagttagtagct

SEQ ID NO: 51385 - DNA, 20 bp, synthetic construct
  misc_feature 1..20: note = Description of Artificial Sequence: Synthetic oligonucleotide
  misc_feature 1..20: note = Target: SCN10A; (-) strand; PAM type: YTN; PAM sequence: CTC
  source 1..20: mol_type = other DNA
ccagatgcatgcagaaagac

SEQ ID NO: 51386 - DNA, 20 bp, synthetic construct
  misc_feature 1..20: note = Description of Artificial Sequence: Synthetic oligonucleotide
  misc_feature 1..20: note = Target: SCN10A; (-) strand; PAM type: YTN; PAM sequence: CTG
  source 1..20: mol_type = other DNA
cctcccagatgcatgcagaa

SEQ ID NO: 51387 - DNA, 20 bp, synthetic construct
  misc_feature 1..20: note = Description of Artificial Sequence: Synthetic oligonucleotide
  misc_feature 1..20: note = Target: SCN10A; (-) strand; PAM type: YTN; PAM sequence: CTC
  source 1..20: mol_type = other DNA
aagctgcctcccagatgcat

SEQ ID NO: 51388 - DNA, 20 bp, synthetic construct
  misc_feature 1..20: note = Description of Artificial Sequence: Synthetic oligonucleotide
  misc_feature 1..20: note = Target: SCN10A; (-) strand; PAM type: YTN; PAM sequence: TTC
  source 1..20: mol_type = other DNA
atgtgtcccaagtctcaagc

SEQ ID NO: 51389 - DNA, 20 bp, synthetic construct
  misc_feature 1..20: note = Description of Artificial Sequence: Synthetic oligonucleotide
  misc_feature 1..20: note = Target: SCN10A; (-) strand; PAM type: YTN; PAM sequence: CTC
  source 1..20: mol_type = other DNA
acacacagtgaggttcatgt

SEQ ID NO: 51390 - DNA, 20 bp, synthetic construct
  misc_feature 1..20: note = Description of Artificial Sequence: Synthetic oligonucleotide
  misc_feature 1..20: note = Target: SCN10A; (-) strand; PAM type: YTN; PAM sequence: CTC
  source 1..20: mol_type = other DNA
acacacacacacacacacac

SEQ ID NO: 51391 - DNA, 20 bp, synthetic construct
  misc_feature 1..20: note = Description of Artificial Sequence: Synthetic oligonucleotide
  misc_feature 1..20: note = Target: SCN10A; (-) strand; PAM type: YTN; PAM sequence: CTC
  source 1..20: mol_type = other DNA
tcacacacacacacacacac

SEQ ID NO: 51392 - DNA, 20 bp, synthetic construct
  misc_feature 1..20: note = Description of Artificial Sequence: Synthetic oligonucleotide
  misc_feature 1..20: note = Target: SCN10A; (-) strand; PAM type: YTN; PAM sequence: CTC
  source 1..20: mol_type = other DNA
tctcacacacacacacacac

SEQ ID NO: 51393 - DNA, 20 bp, synthetic construct
  misc_feature 1..20: note = Description of Artificial Sequence: Synthetic oligonucleotide
  misc_feature 1..20: note = Target: SCN10A; (-) strand; PAM type: YTN; PAM sequence: CTC
  source 1..20: mol_type = other DNA
tctctcacacacacacacac

SEQ ID NO: 51394 - DNA, 20 bp, synthetic construct
  misc_feature 1..20: note = Description of Artificial Sequence: Synthetic oligonucleotide
  misc_feature 1..20: note = Target: SCN10A; (-) strand; PAM type: YTN; PAM sequence: CTC
  source 1..20: mol_type = other DNA
tctctctcacacacacacac

SEQ ID NO: 51395 - DNA, 20 bp, synthetic construct
  misc_feature 1..20: note = Description of Artificial Sequence: Synthetic oligonucleotide
  misc_feature 1..20: note = Target: SCN10A; (-) strand; PAM type: YTN; PAM sequence: CTC
  source 1..20: mol_type = other DNA
tctctctctcacacacacac

SEQ ID NO: 51396 - DNA, 20 bp, synthetic construct
  misc_feature 1..20: note = Description of Artificial Sequence: Synthetic oligonucleotide
  misc_feature 1..20: note = Target: SCN10A; (-) strand; PAM type: YTN; PAM sequence: CTC
  source 1..20: mol_type = other DNA
tctctctctctcacacacac

SEQ ID NO: 51397 - DNA, 20 bp, synthetic construct
  misc_feature 1..20: note = Description of Artificial Sequence: Synthetic oligonucleotide
  misc_feature 1..20: note = Target: SCN10A; (-) strand; PAM type: YTN; PAM sequence: CTC
  source 1..20: mol_type = other DNA
tctctctctctctcacacac

SEQ ID NO: 51398 - DNA, 20 bp, synthetic construct
  misc_feature 1..20: note = Description of Artificial Sequence: Synthetic oligonucleotide
  misc_feature 1..20: note = Target: SCN10A; (-) strand; PAM type: YTN; PAM sequence: CTC
  source 1..20: mol_type = other DNA
tctctctctctctctcacac

SEQ ID NO: 51399 - DNA, 20 bp, synthetic construct
  misc_feature 1..20: note = Description of Artificial Sequence: Synthetic oligonucleotide
  misc_feature 1..20: note = Target: SCN10A; (-) strand; PAM type: YTN; PAM sequence: CTC
  source 1..20: mol_type = other DNA
tctctctctctctctctcac

SEQ ID NO: 51400 - DNA, 20 bp, synthetic construct
  misc_feature 1..20: note = Description of Artificial Sequence: Synthetic oligonucleotide
  misc_feature 1..20: note = Target: SCN10A; (-) strand; PAM type: YTN; PAM sequence: CTC
  source 1..20: mol_type = other DNA
tctctctctctctctctctc

SEQ ID NO: 51401 - DNA, 20 bp, synthetic construct
  misc_feature 1..20: note = Description of Artificial Sequence: Synthetic oligonucleotide
  misc_feature 1..20: note = Target: SCN10A; (-) strand; PAM type: YTN; PAM sequence: CTC
  source 1..20: mol_type = other DNA
tctctctctctctctctctc

SEQ ID NO: 51402 - DNA, 20 bp, synthetic construct
  misc_feature 1..20: note = Description of Artificial Sequence: Synthetic oligonucleotide
  misc_feature 1..20: note = Target: SCN10A; (-) strand; PAM type: YTN; PAM sequence: CTC
  source 1..20: mol_type = other DNA
tctctctctctctctctctc

SEQ ID NO: 51403 - DNA, 20 bp, synthetic construct
  misc_feature 1..20: note = Description of Artificial Sequence: Synthetic oligonucleotide
  misc_feature 1..20: note = Target: SCN10A; (-) strand; PAM type: YTN; PAM sequence: TTC
  source 1..20: mol_type = other DNA
tctctctctctctctctctc

SEQ ID NO: 51404 - DNA, 20 bp, synthetic construct
  misc_feature 1..20: note = Description of Artificial Sequence: Synthetic oligonucleotide
  misc_feature 1..20: note = Target: SCN10A; (-) strand; PAM type: YTN; PAM sequence: TTT
  source 1..20: mol_type = other DNA
ctctctctctctctctctct

SEQ ID NO: 51405 - DNA, 20 bp, synthetic construct
  misc_feature 1..20: note = Description of Artificial Sequence: Synthetic oligonucleotide
  misc_feature 1..20: note = Target: SCN10A; (-) strand; PAM type: YTN; PAM sequence: CTT
  source 1..20: mol_type = other DNA
tctctctctctctctctctc

SEQ ID NO: 51406 - DNA, 20 bp, synthetic construct
  misc_feature 1..20: note = Description of Artificial Sequence: Synthetic oligonucleotide
  misc_feature 1..20: note = Target: SCN10A; (-) strand; PAM type: YTN; PAM sequence: CTC
  source 1..20: mol_type = other DNA
tttctctctctctctctctc

SEQ ID NO: 51407 - DNA, 20 bp, synthetic construct
  misc_feature 1..20: note = Description of Artificial Sequence: Synthetic oligonucleotide
  misc_feature 1..20: note = Target: SCN10A; (-) strand; PAM type: YTN; PAM sequence: CTC
  source 1..20: mol_type = other DNA
tctttctctctctctctctc

SEQ ID NO: 51408 - DNA, 20 bp, synthetic construct
  misc_feature 1..20: note = Description of Artificial Sequence: Synthetic oligonucleotide
  misc_feature 1..20: note = Target: SCN10A; (-) strand; PAM type: YTN; PAM sequence: CTC
  source 1..20: mol_type = other DNA
tctctttctctctctctctc

SEQ ID NO: 51409 - DNA, 20 bp, synthetic construct
  misc_feature 1..20: note = Description of Artificial Sequence: Synthetic oligonucleotide
  misc_feature 1..20: note = Target: SCN10A; (-) strand; PAM type: YTN; PAM sequence: CTC
  source 1..20: mol_type = other DNA
tctctctttctctctctctc

SEQ ID NO: 51410 - DNA, 20 bp, synthetic construct
  misc_feature 1..20: note = Description of Artificial Sequence: Synthetic oligonucleotide
  misc_feature 1..20: note = Target: SCN10A; (-) strand; PAM type: YTN; PAM sequence: CTC
  source 1..20: mol_type = other DNA
tctctctctttctctctctc

SEQ ID NO: 51411 - DNA, 20 bp, synthetic construct
  misc_feature 1..20: note = Description of Artificial Sequence: Synthetic oligonucleotide
  misc_feature 1..20: note = Target: SCN10A; (-) strand; PAM type: YTN; PAM sequence: CTC
  source 1..20: mol_type = other DNA
tctctctctctttctctctc

SEQ ID NO: 51412 - DNA, 20 bp, synthetic construct
  misc_feature 1..20: note = Description of Artificial Sequence: Synthetic oligonucleotide
  misc_feature 1..20: note = Target: SCN10A; (-) strand; PAM type: YTN; PAM sequence: CTC
  source 1..20: mol_type = other DNA
tctctctctctctttctctc

SEQ ID NO: 51413 - DNA, 20 bp, synthetic construct
  misc_feature 1..20: note = Description of Artificial Sequence: Synthetic oligonucleotide
  misc_feature 1..20: note = Target: SCN10A; (-) strand; PAM type: YTN; PAM sequence: TTG
  source 1..20: mol_type = other DNA
catctctctctctctctctt

SEQ ID NO: 51414 - DNA, 20 bp, synthetic construct
  misc_feature 1..20: note = Description of Artificial Sequence: Synthetic oligonucleotide
  misc_feature 1..20: note = Target: SCN10A; (-) strand; PAM type: YTN; PAM sequence: CTT
  source 1..20: mol_type = other DNA
gcatctctctctctctctct

SEQ ID NO: 51415 - DNA, 20 bp, synthetic construct
  misc_feature 1..20: note = Description of Artificial Sequence: Synthetic oligonucleotide
  misc_feature 1..20: note = Target: SCN10A; (-) strand; PAM type: YTN; PAM sequence: CTC
  source 1..20: mol_type = other DNA
ttgcatctctctctctctct

SEQ ID NO: 51416 - DNA, 20 bp, synthetic construct
  misc_feature 1..20: note = Description of Artificial Sequence: Synthetic oligonucleotide
  misc_feature 1..20: note = Target: SCN10A; (-) strand; PAM type: YTN; PAM sequence: CTC
  source 1..20: mol_type = other DNA
tcttgcatctctctctctct

SEQ ID NO: 51417 - DNA, 20 bp, synthetic construct
  misc_feature 1..20: note = Description of Artificial Sequence: Synthetic oligonucleotide
  misc_feature 1..20: note = Target: SCN10A; (-) strand; PAM type: YTN; PAM sequence: CTA
  source 1..20: mol_type = other DNA
tctctcttgcatctctctct

SEQ ID NO: 51418 - DNA, 20 bp, synthetic construct
  misc_feature 1..20: note = Description of Artificial Sequence: Synthetic oligonucleotide
  misc_feature 1..20: note = Target: SCN10A; (-) strand; PAM type: YTN; PAM sequence: CTC
  source 1..20: mol_type = other DNA
tatctctcttgcatctctct

SEQ ID NO: 51419 - DNA, 20 bp, synthetic construct
  misc_feature 1..20: note = Description of Artificial Sequence: Synthetic oligonucleotide
  misc_feature 1..20: note = Target: SCN10A; (-) strand; PAM type: YTN; PAM sequence: TTC
  source 1..20: mol_type = other DNA
actctatctctcttgcatct

SEQ ID NO: 51420 - DNA, 20 bp, synthetic construct
  misc_feature 1..20: note = Description of Artificial Sequence: Synthetic oligonucleotide
  misc_feature 1..20: note = Target: SCN10A; (-) strand; PAM type: YTN; PAM sequence: TTT
  source 1..20: mol_type = other DNA
cactctatctctcttgcatc

SEQ ID NO: 51421 - DNA, 20 bp, synthetic construct
  misc_feature 1..20: note = Description of Artificial Sequence: Synthetic oligonucleotide
  misc_feature 1..20: note = Target: SCN10A; (-) strand; PAM type: YTN; PAM sequence: TTG
  source 1..20: mol_type = other DNA
tttcactctatctctcttgc

SEQ ID NO: 51422 - DNA, 20 bp, synthetic construct
  misc_feature 1..20: note = Description of Artificial Sequence: Synthetic oligonucleotide
  misc_feature 1..20: note = Target: SCN10A; (-) strand; PAM type: YTN; PAM sequence: TTT
  source 1..20: mol_type = other DNA
gtttcactctatctctcttg

SEQ ID NO: 51423 - DNA, 20 bp, synthetic construct
  misc_feature 1..20: note = Description of Artificial Sequence: Synthetic oligonucleotide
  misc_feature 1..20: note = Target: SCN10A; (-) strand; PAM type: YTN; PAM sequence: TTT
  source 1..20: mol_type = other DNA
tgtttcactctatctctctt

SEQ ID NO: 51424 - DNA, 20 bp, synthetic construct
  misc_feature 1..20: note = Description of Artificial Sequence: Synthetic oligonucleotide
  misc_feature 1..20: note = Target: SCN10A; (-) strand; PAM type: YTN; PAM sequence: TTT
  source 1..20: mol_type = other DNA
ttgtttcactctatctctct

SEQ ID NO: 51425 - DNA, 20 bp, synthetic construct
  misc_feature 1..20: note = Description of Artificial Sequence: Synthetic oligonucleotide
  misc_feature 1..20: note = Target: SCN10A; (-) strand; PAM type: YTN; PAM sequence: CTA
  source 1..20: mol_type = other DNA
tttttgtttcactctatctc

SEQ ID NO: 51426 - DNA, 20 bp, synthetic construct
  misc_feature 1..20: note = Description of Artificial Sequence: Synthetic oligonucleotide
  misc_feature 1..20: note = Target: SCN10A; (-) strand; PAM type: YTN; PAM sequence: TTG
  source 1..20: mol_type = other DNA
gtctatttttgtttcactct

SEQ ID NO: 51427 - DNA, 20 bp, synthetic construct
  misc_feature 1..20: note = Description of Artificial Sequence: Synthetic oligonucleotide
  misc_feature 1..20: note = Target: SCN10A; (-) strand; PAM type: YTN; PAM sequence: CTT
  source 1..20: mol_type = other DNA
ggtctatttttgtttcactc

SEQ ID NO: 51428 - DNA, 20 bp, synthetic construct
  misc_feature 1..20: note = Description of Artificial Sequence: Synthetic oligonucleotide
  misc_feature 1..20: note = Target: SCN10A; (-) strand; PAM type: YTN; PAM sequence: CTC
  source 1..20: mol_type = other DNA
ttggtctatttttgtttcac

SEQ ID NO: 51429 - DNA, 20 bp, synthetic construct
  misc_feature 1..20: note = Description of Artificial Sequence: Synthetic oligonucleotide
  misc_feature 1..20: note = Target: SCN10A; (-) strand; PAM type: YTN; PAM sequence: TTC
  source 1..20: mol_type = other DNA
tcttggtctatttttgtttc

SEQ ID NO: 51430 - DNA, 20 bp, synthetic construct
  misc_feature 1..20: note = Description of Artificial Sequence: Synthetic oligonucleotide
  misc_feature 1..20: note = Target: SCN10A; (-) strand; PAM type: YTN; PAM sequence: TTT
  source 1..20: mol_type = other DNA
ctcttggtctatttttgttt

SEQ ID NO: 51431 - DNA, 20 bp, synthetic construct
  misc_feature 1..20: note = Description of Artificial Sequence: Synthetic oligonucleotide
  misc_feature 1..20: note = Target: SCN10A; (-) strand; PAM type: YTN; PAM sequence: CTT
  source 1..20: mol_type = other DNA
tctcttggtctatttttgtt

SEQ ID NO: 51432 - DNA, 20 bp, synthetic construct
  misc_feature 1..20: note = Description of Artificial Sequence: Synthetic oligonucleotide
  misc_feature 1..20: note = Target: SCN10A; (-) strand; PAM type: YTN; PAM sequence: TTC
  source 1..20: mol_type = other DNA
tttctcttggtctatttttg

SEQ ID NO: 51433 - DNA, 20 bp, synthetic construct
  misc_feature 1..20: note = Description of Artificial Sequence: Synthetic oligonucleotide
  misc_feature 1..20: note = Target: SCN10A; (-) strand; PAM type: YTN; PAM sequence: TTT
  source 1..20: mol_type = other DNA
ctttctcttggtctattttt

SEQ ID NO: 51434 - DNA, 20 bp, synthetic construct
  misc_feature 1..20: note = Description of Artificial Sequence: Synthetic oligonucleotide
  misc_feature 1..20: note = Target: SCN10A; (-) strand; PAM type: YTN; PAM sequence: TTT
  source 1..20: mol_type = other DNA
tctttctcttggtctatttt

SEQ ID NO: 51435 - DNA, 20 bp, synthetic construct
  misc_feature 1..20: note = Description of Artificial Sequence: Synthetic oligonucleotide
  misc_feature 1..20: note = Target: SCN10A; (-) strand; PAM type: YTN; PAM sequence: TTT
  source 1..20: mol_type = other DNA
ttctttctcttggtctattt

SEQ ID NO: 51436 - DNA, 20 bp, synthetic construct
  misc_feature 1..20: note = Description of Artificial Sequence: Synthetic oligonucleotide
  misc_feature 1..20: note = Target: SCN10A; (-) strand; PAM type: YTN; PAM sequence: CTT
  source 1..20: mol_type = other DNA
tttctttctcttggtctatt

SEQ ID NO: 51437 - DNA, 20 bp, synthetic construct
  misc_feature 1..20: note = Description of Artificial Sequence: Synthetic oligonucleotide
  misc_feature 1..20: note = Target: SCN10A; (-) strand; PAM type: YTN; PAM sequence: TTC
  source 1..20: mol_type = other DNA
tttttctttctcttggtcta

SEQ ID NO: 51438 - DNA, 20 bp, synthetic construct
  misc_feature 1..20: note = Description of Artificial Sequence: Synthetic oligonucleotide
  misc_feature 1..20: note = Target: SCN10A; (-) strand; PAM type: YTN; PAM sequence: TTT
  source 1..20: mol_type = other DNA
ctttttctttctcttggtct

SEQ ID NO: 51439 - DNA, 20 bp, synthetic construct
  misc_feature 1..20: note = Description of Artificial Sequence: Synthetic oligonucleotide
  misc_feature 1..20: note = Target: SCN10A; (-) strand; PAM type: YTN; PAM sequence: CTT
  source 1..20: mol_type = other DNA
tctttttctttctcttggtc

SEQ ID NO: 51440 - DNA, 20 bp, synthetic construct
  misc_feature 1..20: note = Description of Artificial Sequence: Synthetic oligonucleotide
  misc_feature 1..20: note = Target: SCN10A; (-) strand; PAM type: YTN; PAM sequence: CTC
  source 1..20: mol_type = other DNA
tttctttttctttctcttgg

SEQ ID NO: 51441 - DNA, 20 bp, synthetic construct
  misc_feature 1..20: note = Description of Artificial Sequence: Synthetic oligonucleotide
  misc_feature 1..20: note = Target: SCN10A; (-) strand; PAM type: YTN; PAM sequence: CTG
  source 1..20: mol_type = other DNA
tgtctctttctttttctttc

SEQ ID NO: 51442 - DNA, 20 bp, synthetic construct
  misc_feature 1..20: note = Description of Artificial Sequence: Synthetic oligonucleotide
  misc_feature 1..20: note = Target: SCN10A; (-) strand; PAM type: YTN; PAM sequence: CTC
  source 1..20: mol_type = other DNA
tgtgtctctttctttttctt

SEQ ID NO: 51443 - DNA, 20 bp, synthetic construct
  misc_feature 1..20: note = Description of Artificial Sequence: Synthetic oligonucleotide
  misc_feature 1..20: note = Target: SCN10A; (-) strand; PAM type: YTN; PAM sequence: TTC
  source 1..20: mol_type = other DNA
tctgtgtctctttctttttc

SEQ ID NO: 51444 - DNA, 20 bp, synthetic construct
  misc_feature 1..20: note = Description of Artificial Sequence: Synthetic oligonucleotide
  misc_feature 1..20: note = Target: SCN10A; (-) strand; PAM type: YTN; PAM sequence: TTT
  source 1..20: mol_type = other DNA
ctctgtgtctctttcttttt

SEQ ID NO: 51445 - DNA, 20 bp, synthetic construct
  misc_feature 1..20: note = Description of Artificial Sequence: Synthetic oligonucleotide
  misc_feature 1..20: note = Target: SCN10A; (-) strand; PAM type: YTN; PAM sequence: CTG
  source 1..20: mol_type = other DNA
tttctctgtgtctctttctt

SEQ ID NO: 51446 - DNA, 20 bp, synthetic construct
  misc_feature 1..20: note = Description of Artificial Sequence: Synthetic oligonucleotide
  misc_feature 1..20: note = Target: SCN10A; (-) strand; PAM type: YTN; PAM sequence: CTC
  source 1..20: mol_type = other DNA
tgtttctctgtgtctctttc

SEQ ID NO: 51447 - DNA, 20 bp, synthetic construct
  misc_feature 1..20: note = Description of Artificial Sequence: Synthetic oligonucleotide
  misc_feature 1..20: note = Target: SCN10A; (-) strand; PAM type: YTN; PAM sequence: CTC
  source 1..20: mol_type = other DNA
tctgtttctctgtgtctctt

SEQ ID NO: 51448 - DNA, 20 bp, synthetic construct
  misc_feature 1..20: note = Description of Artificial Sequence: Synthetic oligonucleotide
  misc_feature 1..20: note = Target: SCN10A; (-) strand; PAM type: YTN; PAM sequence: CTC
  source 1..20: mol_type = other DNA
acctctctgtttctctgtgt

SEQ ID NO: 51449 - DNA, 20 bp, synthetic construct
  misc_feature 1..20: note = Description of Artificial Sequence: Synthetic oligonucleotide
  misc_feature 1..20: note = Target: SCN10A; (-) strand; PAM type: YTN; PAM sequence: CTA
  source 1..20: mol_type = other DNA
aactcacctctctgtttctc

SEQ ID NO: 51450 - DNA, 20 bp, synthetic construct
  misc_feature 1..20: note = Description of Artificial Sequence: Synthetic oligonucleotide
  misc_feature 1..20: note = Target: SCN10A; (-) strand; PAM type: YTN; PAM sequence: TTG
  source 1..20: mol_type = other DNA
ctaaactcacctctctgttt

SEQ ID NO: 51451 - DNA, 20 bp, synthetic construct
  misc_feature 1..20: note = Description of Artificial Sequence: Synthetic oligonucleotide
  misc_feature 1..20: note = Target: SCN10A; (-) strand; PAM type: YTN; PAM sequence: CTA
  source 1..20: mol_type = other DNA
ttgctaaactcacctctctg

SEQ ID NO: 51452 - DNA, 20 bp, synthetic construct
  misc_feature 1..20: note = Description of Artificial Sequence: Synthetic oligonucleotide
  misc_feature 1..20: note = Target: SCN10A; (-) strand; PAM type: YTN; PAM sequence: TTC
  source 1..20: mol_type = other DNA
tattgctaaactcacctctc

SEQ ID NO: 51453 - DNA, 20 bp, synthetic construct
  misc_feature 1..20: note = Description of Artificial Sequence: Synthetic oligonucleotide
  misc_feature 1..20: note = Target: SCN10A; (-) strand; PAM type: YTN; PAM sequence: TTT
  source 1..20: mol_type = other DNA
ctattgctaaactcacctct

SEQ ID NO: 51454 - DNA, 20 bp, synthetic construct
  misc_feature 1..20: note = Description of Artificial Sequence: Synthetic oligonucleotide
  misc_feature 1..20: note = Target: SCN10A; (-) strand; PAM type: YTN; PAM sequence: CTT
  source 1..20: mol_type = other DNA
tctattgctaaactcacctc

SEQ ID NO: 51455 - DNA, 20 bp, synthetic construct
  misc_feature 1..20: note = Description of Artificial Sequence: Synthetic oligonucleotide
  misc_feature 1..20: note = Target: SCN10A; (-) strand; PAM type: YTN; PAM sequence: CTC
  source 1..20: mol_type = other DNA
tttctattgctaaactcacc

SEQ ID NO: 51456 - DNA, 20 bp, synthetic construct
  misc_feature 1..20: note = Description of Artificial Sequence: Synthetic oligonucleotide
  misc_feature 1..20: note = Target: SCN10A; (-) strand; PAM type: YTN; PAM sequence: TTA
  source 1..20: mol_type = other DNA
tagtctctttctattgctaa

SEQ ID NO: 51457 - DNA, 20 bp, synthetic construct
  misc_feature 1..20: note = Description of Artificial Sequence: Synthetic oligonucleotide
  misc_feature 1..20: note = Target: SCN10A; (-) strand; PAM type: YTN; PAM sequence: CTT
  source 1..20: mol_type = other DNA
atagtctctttctattgcta

SEQ ID NO: 51458 - DNA, 20 bp, synthetic construct
  misc_feature 1..20: note = Description of Artificial Sequence: Synthetic oligonucleotide
  misc_feature 1..20: note = Target: SCN10A; (-) strand; PAM type: YTN; PAM sequence: TTC
  source 1..20: mol_type = other DNA
ttatagtctctttctattgc

SEQ ID NO: 51459 - DNA, 20 bp, synthetic construct
  misc_feature 1..20: note = Description of Artificial Sequence: Synthetic oligonucleotide
  misc_feature 1..20: note = Target: SCN10A; (-) strand; PAM type: YTN; PAM sequence: TTT
  source 1..20: mol_type = other DNA
cttatagtctctttctattg

SEQ ID NO: 51460 - DNA, 20 bp, synthetic construct
  misc_feature 1..20: note = Description of Artificial Sequence: Synthetic oligonucleotide
  misc_feature 1..20: note = Target: SCN10A; (-) strand; PAM type: YTN; PAM sequence: CTC
  source 1..20: mol_type = other DNA
agtgtttcttatagtctctt

SEQ ID NO: 51461 - DNA, 20 bp, synthetic construct
  misc_feature 1..20: note = Description of Artificial Sequence: Synthetic oligonucleotide
  misc_feature 1..20: note = Target: SCN10A; (-) strand; PAM type: YTN; PAM sequence: CTG
  source 1..20: mol_type = other DNA
tctcagtgtttcttatagtc

SEQ ID NO: 51462 - DNA, 20 bp, synthetic construct
  misc_feature 1..20: note = Description of Artificial Sequence: Synthetic oligonucleotide
  misc_feature 1..20: note = Target: SCN10A; (-) strand; PAM type: YTN; PAM sequence: TTA
  source 1..20: mol_type = other DNA
tgccccagtgactgtctcag

SEQ ID NO: 51463 - DNA, 20 bp, synthetic construct
  misc_feature 1..20: note = Description of Artificial Sequence: Synthetic oligonucleotide
  misc_feature 1..20: note = Target: SCN10A; (-) strand; PAM type: YTN; PAM sequence: TTT
  source 1..20: mol_type = other DNA
atgccccagtgactgtctca

SEQ ID NO: 51464 - DNA, 20 bp, synthetic construct
  misc_feature 1..20: note = Description of Artificial Sequence: Synthetic oligonucleotide
  misc_feature 1..20: note = Target: SCN10A; (-) strand; PAM type: YTN; PAM sequence: CTA
  source 1..20: mol_type = other DNA
tttatgccccagtgactgtc

SEQ ID NO: 51465 - DNA, 20 bp, synthetic construct
  misc_feature 1..20: note = Description of Artificial Sequence: Synthetic oligonucleotide
  misc_feature 1..20: note = Target: SCN10A; (-) strand; PAM type: YTN; PAM sequence: TTC
  source 1..20: mol_type = other DNA
tatttatgccccagtgactg

SEQ ID NO: 51466 - DNA, 20 bp, synthetic construct
  misc_feature 1..20: note = Description of Artificial Sequence: Synthetic oligonucleotide
  misc_feature 1..20: note = Target: SCN10A; (-) strand; PAM type: YTN; PAM sequence: TTG
  source 1..20: mol_type = other DNA
gcacaagttctatttatgcc

SEQ ID NO: 51467 - DNA, 20 bp, synthetic construct
  misc_feature 1..20: note = Description of Artificial Sequence: Synthetic oligonucleotide
  misc_feature 1..20: note = Target: SCN10A; (-) strand; PAM type: YTN; PAM sequence: CTT
  source 1..20: mol_type = other DNA
ggcacaagttctatttatgc

SEQ ID NO: 51468 - DNA, 20 bp, synthetic construct
  misc_feature 1..20: note = Description of Artificial Sequence: Synthetic oligonucleotide
  misc_feature 1..20: note = Target: SCN10A; (-) strand; PAM type: YTN; PAM sequence: CTG
  source 1..20: mol_type = other DNA
tgcttggcacaagttctatt

SEQ ID NO: 51469 - DNA, 20 bp, synthetic construct
  misc_feature 1..20: note = Description of Artificial Sequence: Synthetic oligonucleotide
  misc_feature 1..20: note = Target: SCN10A; (-) strand; PAM type: YTN; PAM sequence: CTG
  source 1..20: mol_type = other DNA
ccagctgtgcttggcacaag

SEQ ID NO: 51470 - DNA, 20 bp, synthetic construct
  misc_feature 1..20: note = Description of Artificial Sequence: Synthetic oligonucleotide
  misc_feature 1..20: note = Target: SCN10A; (-) strand; PAM type: YTN; PAM sequence: TTG
  source 1..20: mol_type = other DNA
ctgccagctgtgcttggcac

SEQ ID NO: 51471 - DNA, 20 bp, synthetic construct
  misc_feature 1..20: note = Description of Artificial Sequence: Synthetic oligonucleotide
  misc_feature 1..20: note = Target: SCN10A; (-) strand; PAM type: YTN; PAM sequence: TTT
  source 1..20: mol_type = other DNA
gctgccagctgtgcttggca

SEQ ID NO: 51472 - DNA, 20 bp, synthetic construct
  misc_feature 1..20: note = Description of Artificial Sequence: Synthetic oligonucleotide
  misc_feature 1..20: note = Target: SCN10A; (-) strand; PAM type: YTN; PAM sequence: CTT
  source 1..20: mol_type = other DNA
tgctgccagctgtgcttggc

SEQ ID NO: 51473 - DNA, 20 bp, synthetic construct
  misc_feature 1..20: note = Description of Artificial Sequence: Synthetic oligonucleotide
  misc_feature 1..20: note = Target: SCN10A; (-) strand; PAM type: YTN; PAM sequence: TTC
  source 1..20: mol_type = other DNA
tttgctgccagctgtgcttg

SEQ ID NO: 51474 - DNA, 20 bp, synthetic construct
  misc_feature 1..20: note = Description of Artificial Sequence: Synthetic oligonucleotide
  misc_feature 1..20: note = Target: SCN10A; (-) strand; PAM type: YTN; PAM sequence: CTT
  source 1..20: mol_type = other DNA
ctttgctgccagctgtgctt

SEQ ID NO: 51475 - DNA, 20 bp, synthetic construct
  misc_feature 1..20: note = Description of Artificial Sequence: Synthetic oligonucleotide
  misc_feature 1..20: note = Target: SCN10A; (-) strand; PAM type: YTN; PAM sequence: TTA
  source 1..20: mol_type = other DNA
aacaagcaggtgtatccttc

SEQ ID NO: 51476 - DNA, 20 bp, synthetic construct
  misc_feature 1..20: note = Description of Artificial Sequence: Synthetic oligonucleotide
  misc_feature 1..20: note = Target: SCN10A; (-) strand; PAM type: YTN; PAM sequence: CTT
  source 1..20: mol_type = other DNA
aaacaagcaggtgtatcctt

SEQ ID NO: 51477 - DNA, 20 bp, synthetic construct
  misc_feature 1..20: note = Description of Artificial Sequence: Synthetic oligonucleotide
  misc_feature 1..20: note = Target: SCN10A; (-) strand; PAM type: YTN; PAM sequence: CTC
  source 1..20: mol_type = other DNA
cttaaacaagcaggtgtatc

SEQ ID NO: 51478 - DNA, 20 bp, synthetic construct
  misc_feature 1..20: note = Description of Artificial Sequence: Synthetic oligonucleotide
  misc_feature 1..20: note = Target: SCN10A; (-) strand; PAM type: YTN; PAM sequence: TTA
  source 1..20: mol_type = other DNA
ccagagcaacaaatcatccc

SEQ ID NO: 51479 - DNA, 20 bp, synthetic construct
  misc_feature 1..20: note = Description of Artificial Sequence: Synthetic oligonucleotide
  misc_feature 1..20: note = Target: SCN10A; (-) strand; PAM type: YTN; PAM sequence: CTT
  source 1..20: mol_type = other DNA
accagagcaacaaatcatcc

SEQ ID NO: 51480 - DNA, 20 bp, synthetic construct
  misc_feature 1..20: note = Description of Artificial Sequence: Synthetic oligonucleotide
  misc_feature 1..20: note = Target: SCN10A; (-) strand; PAM type: YTN; PAM sequence: TTA
  source 1..20: mol_type = other DNA
cttaccagagcaacaaatca

SEQ ID NO: 51481 - DNA, 20 bp, synthetic construct
  misc_feature 1..20: note = Description of Artificial Sequence: Synthetic oligonucleotide
  misc_feature 1..20: note = Target: SCN10A; (-) strand; PAM type: YTN; PAM sequence: TTT
  source 1..20: mol_type = other DNA
acttaccagagcaacaaatc

SEQ ID NO: 51482 - DNA, 20 bp, synthetic construct
  misc_feature 1..20: note = Description of Artificial Sequence: Synthetic oligonucleotide
  misc_feature 1..20: note = Target: SCN10A; (-) strand; PAM type: YTN; PAM sequence: TTT
  source 1..20: mol_type = other DNA
tacttaccagagcaacaaat

SEQ ID NO: 51483 - DNA, 20 bp, synthetic construct
  misc_feature 1..20: note = Description of Artificial Sequence: Synthetic oligonucleotide
  misc_feature 1..20: note = Target: SCN10A; (-) strand; PAM type: YTN; PAM sequence: TTG
  source 1..20: mol_type = other DNA
attttacttaccagagcaac

SEQ ID NO: 51484 - DNA, 20 bp, synthetic construct
  misc_feature 1..20: note = Description of Artificial Sequence: Synthetic oligonucleotide
  misc_feature 1..20: note = Target: SCN10A; (-) strand; PAM type: YTN; PAM sequence: CTC
  source 1..20: mol_type = other DNA
ccaaagaagttgattttact

SEQ ID NO: 51485 - DNA, 20 bp, synthetic construct
  misc_feature 1..20: note = Description of Artificial Sequence: Synthetic oligonucleotide
  misc_feature 1..20: note = Target: SCN10A; (-) strand; PAM type: YTN; PAM sequence: CTC
  source 1..20: mol_type = other DNA
tcccaaagaagttgatttta

SEQ ID NO: 51486 - DNA, 20 bp, synthetic construct
  misc_feature 1..20: note = Description of Artificial Sequence: Synthetic oligonucleotide
  misc_feature 1..20: note = Target: SCN10A; (-) strand; PAM type: YTN; PAM sequence: CTG
  source 1..20: mol_type = other DNA
ctctcccaaagaagttgatt

SEQ ID NO: 51487 - DNA, 20 bp, synthetic construct
  misc_feature 1..20: note = Description of Artificial Sequence: Synthetic oligonucleotide
  misc_feature 1..20: note = Target: SCN10A; (-) strand; PAM type: YTN; PAM sequence: CTG
  source 1..20: mol_type = other DNA
cgaagctgctctcccaaaga

SEQ ID NO: 51488 - DNA, 20 bp, synthetic construct
  misc_feature 1..20: note = Description of Artificial Sequence: Synthetic oligonucleotide
  misc_feature 1..20: note = Target: SCN10A; (-) strand; PAM type: YTN; PAM sequence: CTA
  source 1..20: mol_type = other DNA
cctgcgaagctgctctccca

SEQ ID NO: 51489 - DNA, 20 bp, synthetic construct
  misc_feature 1..20: note = Description of Artificial Sequence: Synthetic oligonucleotide
  misc_feature 1..20: note = Target: SCN10A; (-) strand; PAM type: YTN; PAM sequence: CTG
  source 1..20: mol_type = other DNA
ctacctgcgaagctgctctc

SEQ ID NO: 51490 - DNA, 20 bp, synthetic construct
  misc_feature 1..20: note = Description of Artificial Sequence: Synthetic oligonucleotide
  misc_feature 1..20: note = Target: SCN10A; (-) strand; PAM type: YTN; PAM sequence: TTC
  source 1..20: mol_type = other DNA
tgctacctgcgaagctgctc

SEQ ID NO: 51491 - DNA, 20 bp, synthetic construct
  misc_feature 1..20: note = Description of Artificial Sequence: Synthetic oligonucleotide
  misc_feature 1..20: note = Target: SCN10A; (-) strand; PAM type: YTN; PAM sequence: TTT
  source 1..20: mol_type = other DNA
ctgctacctgcgaagctgct

SEQ ID NO: 51492 - DNA, 20 bp, synthetic construct
  misc_feature 1..20: note = Description of Artificial Sequence: Synthetic oligonucleotide
  misc_feature 1..20: note = Target: SCN10A; (-) strand; PAM type: YTN; PAM sequence: CTT
  source 1..20: mol_type = other DNA
tctgctacctgcgaagctgc

SEQ ID NO: 51493 - DNA, 20 bp, synthetic construct
  misc_feature 1..20: note = Description of Artificial Sequence: Synthetic oligonucleotide
  misc_feature 1..20: note = Target: SCN10A; (-) strand; PAM type: YTN; PAM sequence: CTC
  source 1..20: mol_type = other DNA
tttctgctacctgcgaagct

SEQ ID NO: 51494 - DNA, 20 bp, synthetic construct
  misc_feature 1..20: note = Description of Artificial Sequence: Synthetic oligonucleotide
  misc_feature 1..20: note = Target: SCN10A; (-) strand; PAM type: YTN; PAM sequence: CTG
  source 1..20: mol_type = other DNA
gtcagagctctttctgctac

SEQ ID NO: 51495 - DNA, 20 bp, synthetic construct
  misc_feature 1..20: note = Description of Artificial Sequence: Synthetic oligonucleotide
  misc_feature 1..20: note = Target: SCN10A; (-) strand; PAM type: YTN; PAM sequence: TTC
  source 1..20: mol_type = other DNA
cctggtcagagctctttctg

SEQ ID NO: 51496 - DNA, 20 bp, synthetic construct
  misc_feature 1..20: note = Description of Artificial Sequence: Synthetic oligonucleotide
  misc_feature 1..20: note = Target: SCN10A; (-) strand; PAM type: YTN; PAM sequence: CTT
  source 1..20: mol_type = other DNA
ccctggtcagagctctttct

SEQ ID NO: 51497 - DNA, 20 bp, synthetic construct
  misc_feature 1..20: note = Description of Artificial Sequence: Synthetic oligonucleotide
  misc_feature 1..20: note = Target: SCN10A; (-) strand; PAM type: YTN; PAM sequence: TTG
  source 1..20: mol_type = other DNA
cttccctggtcagagctctt

SEQ ID NO: 51498 - DNA, 20 bp, synthetic construct
  misc_feature 1..20: note = Description of Artificial Sequence: Synthetic oligonucleotide
  misc_feature 1..20: note = Target: SCN10A; (-) strand; PAM type: YTN; PAM sequence: CTA
  source 1..20: mol_type = other DNA
gattgcttccctggtcagag

SEQ ID NO: 51499 - DNA, 20 bp, synthetic construct
  misc_feature 1..20: note = Description of Artificial Sequence: Synthetic oligonucleotide
  misc_feature 1..20: note = Target: SCN10A; (-) strand; PAM type: YTN; PAM sequence: CTA
  source 1..20: mol_type = other DNA
accaaaaataaatcctagat

SEQ ID NO: 51500 - DNA, 20 bp, synthetic construct
  misc_feature 1..20: note = Description of Artificial Sequence: Synthetic oligonucleotide
  misc_feature 1..20: note = Target: SCN10A; (-) strand; PAM type: YTN; PAM sequence: CTG
  source 1..20: mol_type = other DNA
accaaaatgactaaccaaaa

SEQ ID NO: 51501 - DNA, 20 bp, synthetic construct
  misc_feature 1..20: note = Description of Artificial Sequence: Synthetic oligonucleotide
  misc_feature 1..20: note = Target: SCN10A; (-) strand; PAM type: YTN; PAM sequence: TTG
  source 1..20: mol_type = other DNA
ctgaccaaaatgactaacca

SEQ ID NO: 51502 - DNA, 20 bp, synthetic construct
  misc_feature 1..20: note = Description of Artificial Sequence: Synthetic oligonucleotide
  misc_feature 1..20: note = Target: SCN10A; (-) strand; PAM type: YTN; PAM sequence: TTT
  source 1..20: mol_type = other DNA
gctgaccaaaatgactaacc

SEQ ID NO: 51503 - DNA, 20 bp, synthetic construct
  misc_feature 1..20: note = Description of Artificial Sequence: Synthetic oligonucleotide
  misc_feature 1..20: note = Target: SCN10A; (-) strand; PAM type: YTN; PAM sequence: TTA
  source 1..20: mol_type = other DNA
tttgctgaccaaaatgacta

SEQ ID NO: 51504 - DNA, 20 bp, synthetic construct
  misc_feature 1..20: note = Description of Artificial Sequence: Synthetic oligonucleotide
  misc_feature 1..20: note = Target: SCN10A; (-) strand; PAM type: YTN; PAM sequence: CTC
  source 1..20: mol_type = other DNA
agtggattatttgctgacca

SEQ ID NO: 51505 - DNA, 20 bp, synthetic construct
  misc_feature 1..20: note = Description of Artificial Sequence: Synthetic oligonucleotide
  misc_feature 1..20: note = Target: SCN10A; (-) strand; PAM type: YTN; PAM sequence: CTG
  source 1..20: mol_type = other DNA
acacatgtagtgctcagtgg

SEQ ID NO: 51506 - DNA, 20 bp, synthetic construct
  misc_feature 1..20: note = Description of Artificial Sequence: Synthetic oligonucleotide
  misc_feature 1..20: note = Target: SCN10A; (-) strand; PAM type: YTN; PAM sequence: CTC
  source 1..20: mol_type = other DNA
ccagtccagggactgacaca

SEQ ID NO: 51507 - DNA, 20 bp, synthetic construct
  misc_feature 1..20: note = Description of Artificial Sequence: Synthetic oligonucleotide
  misc_feature 1..20: note = Target: SCN10A; (-) strand; PAM type: YTN; PAM sequence: CTC
  source 1..20: mol_type = other DNA
agctcccagtccagggactg

SEQ ID NO: 51508 - DNA, 20 bp, synthetic construct
  misc_feature 1..20: note = Description of Artificial Sequence: Synthetic oligonucleotide
  misc_feature 1..20: note = Target: SCN10A; (-) strand; PAM type: YTN; PAM sequence: TTA
  source 1..20: mol_type = other DNA
gccatcactcagctcccagt

SEQ ID NO: 51509 - DNA, 20 bp, synthetic construct
  misc_feature 1..20: note = Description of Artificial Sequence: Synthetic oligonucleotide
  misc_feature 1..20: note = Target: SCN10A; (-) strand; PAM type: YTN; PAM sequence: CTT
  source 1..20: mol_type = other DNA
agccatcactcagctcccag

SEQ ID NO: 51510 - DNA, 20 bp, synthetic construct
  misc_feature 1..20: note = Description of Artificial Sequence: Synthetic oligonucleotide
  misc_feature 1..20: note = Target: SCN10A; (-) strand; PAM type: YTN; PAM sequence: CTG
  source 1..20: mol_type = other DNA
ccttagccatcactcagctc

SEQ ID NO: 51511 - DNA, 20 bp, synthetic construct
  misc_feature 1..20: note = Description of Artificial Sequence: Synthetic oligonucleotide
  misc_feature 1..20: note = Target: SCN10A; (-) strand; PAM type: YTN; PAM sequence: CTG
  source 1..20: mol_type = other DNA
ctgccttagccatcactcag

SEQ ID NO: 51512 - DNA, 20 bp, synthetic construct
  misc_feature 1..20: note = Description of Artificial Sequence: Synthetic oligonucleotide
  misc_feature 1..20: note = Target: SCN10A; (-) strand; PAM type: YTN; PAM sequence: CTC
  source 1..20: mol_type = other DNA
gacatgctgctgccttagcc

SEQ ID NO: 51513 - DNA, 20 bp, synthetic construct
  misc_feature 1..20: note = Description of Artificial Sequence: Synthetic oligonucleotide
  misc_feature 1..20: note = Target: SCN10A; (-) strand; PAM type: YTN; PAM sequence: TTG
  source 1..20: mol_type = other DNA
tcagacaacggcactcgaca

SEQ ID NO: 51514 - DNA, 20 bp, synthetic construct
  misc_feature 1..20: note = Description of Artificial Sequence: Synthetic oligonucleotide
  misc_feature 1..20: note = Target: SCN10A; (-) strand; PAM type: YTN; PAM sequence: CTC
  source 1..20: mol_type = other DNA
aattgtcagacaacggcact

SEQ ID NO: 51515 - DNA, 20 bp, synthetic construct
  misc_feature 1..20: note = Description of Artificial Sequence: Synthetic oligonucleotide
  misc_feature 1..20: note = Target: SCN10A; (-) strand; PAM type: YTN; PAM sequence: TTC
  source 1..20: mol_type = other DNA
ccctcaattgtcagacaacg

SEQ ID NO: 51516 - DNA, 20 bp, synthetic construct
  misc_feature 1..20: note = Description of Artificial Sequence: Synthetic oligonucleotide
  misc_feature 1..20: note = Target: SCN10A; (-) strand; PAM type: YTN; PAM sequence: TTT
  source 1..20: mol_type = other DNA
cccctcaattgtcagacaac

SEQ ID NO: 51517 - DNA, 20 bp, synthetic construct
  misc_feature 1..20: note = Description of Artificial Sequence: Synthetic oligonucleotide
  misc_feature 1..20: note = Target: SCN10A; (-) strand; PAM type: YTN; PAM sequence: CTT
  source 1..20: mol_type = other DNA
tcccctcaattgtcagacaa

SEQ ID NO: 51518 - DNA, 20 bp, synthetic construct
  misc_feature 1..20: note = Description of Artificial Sequence: Synthetic oligonucleotide
  misc_feature 1..20: note = Target: SCN10A; (-) strand; PAM type: YTN; PAM sequence: CTA
  source 1..20: mol_type = other DNA
cagactttcccctcaattgt

SEQ ID NO: 51519 - DNA, 20 bp, synthetic construct
  misc_feature 1..20: note = Description of Artificial Sequence: Synthetic oligonucleotide
  misc_feature 1..20: note = Target: SCN10A; (-) strand; PAM type: YTN; PAM sequence: CTC
  source 1..20: mol_type = other DNA
agtaatgctacagactttcc

SEQ ID NO: 51520 - DNA, 20 bp, synthetic construct
  misc_feature 1..20: note = Description of Artificial Sequence: Synthetic oligonucleotide
  misc_feature 1..20: note = Target: SCN10A; (-) strand; PAM type: YTN; PAM sequence: CTG
  source 1..20: mol_type = other DNA
ctcagtaatgctacagactt

SEQ ID NO: 51521 - DNA, 20 bp, synthetic construct
  misc_feature 1..20: note = Description of Artificial Sequence: Synthetic oligonucleotide
  misc_feature 1..20: note = Target: SCN10A; (-) strand; PAM type: YTN; PAM sequence: CTG
  source 1..20: mol_type = other DNA
tgtgcccatctgctcagtaa

SEQ ID NO: 51522 - DNA, 20 bp, synthetic construct
  misc_feature 1..20: note = Description of Artificial Sequence: Synthetic oligonucleotide
  misc_feature 1..20: note = Target: SCN10A; (-) strand; PAM type: YTN; PAM sequence: CTC
  source 1..20: mol_type = other DNA
ccctgtgtgcccatctgctc

SEQ ID NO: 51523 - DNA, 20 bp, synthetic construct
  misc_feature 1..20: note = Description of Artificial Sequence: Synthetic oligonucleotide
  misc_feature 1..20: note = Target: SCN10A; (-) strand; PAM type: YTN; PAM sequence: CTG
  source 1..20: mol_type = other DNA
ctcccctgtgtgcccatctg

SEQ ID NO: 51524 - DNA, 20 bp, synthetic construct
  misc_feature 1..20: note = Description of Artificial Sequence: Synthetic oligonucleotide
  misc_feature 1..20: note = Target: SCN10A; (-) strand; PAM type: YTN; PAM sequence: TTA
  source 1..20: mol_type = other DNA
agggctgctcccctgtgtgc

SEQ ID NO: 51525 - DNA, 20 bp, synthetic construct
  misc_feature 1..20: note = Description of Artificial Sequence: Synthetic oligonucleotide
  misc_feature 1..20: note = Target: SCN10A; (-) strand; PAM type: YTN; PAM sequence: TTC
  source 1..20: mol_type = other DNA
agttaagggctgctcccctg

SEQ ID NO: 51526 - DNA, 20 bp, synthetic construct
  misc_feature 1..20: note = Description of Artificial Sequence: Synthetic oligonucleotide
  misc_feature 1..20: note = Target: SCN10A; (-) strand; PAM type: YTN; PAM sequence: CTT
  source 1..20: mol_type = other DNA
cagttaagggctgctcccct

SEQ ID NO: 51527 - DNA, 20 bp, synthetic construct
  misc_feature 1..20: note = Description of Artificial Sequence: Synthetic oligonucleotide
  misc_feature 1..20: note = Target: SCN10A; (-) strand; PAM type: YTN; PAM sequence: CTG
  source 1..20: mol_type = other DNA
gaacttcagttaagggctgc

SEQ ID NO: 51528 - DNA, 20 bp, synthetic construct
  misc_feature 1..20: note = Description of Artificial Sequence: Synthetic oligonucleotide
  misc_feature 1..20: note = Target: SCN10A; (-) strand; PAM type: YTN; PAM sequence: CTC
  source 1..20: mol_type = other DNA
tggaacttcagttaagggct

SEQ ID NO: 51529 - DNA, 20 bp, synthetic construct
  misc_feature 1..20: note = Description of Artificial Sequence: Synthetic oligonucleotide
  misc_feature 1..20: note = Target: SCN10A; (-) strand; PAM type: YTN; PAM sequence: TTC
  source 1..20: mol_type = other DNA
ccacctctggaacttcagtt

SEQ ID NO: 51530 - DNA, 20 bp, synthetic construct
  misc_feature 1..20: note = Description of Artificial Sequence: Synthetic oligonucleotide
  misc_feature 1..20: note = Target: SCN10A; (-) strand; PAM type: YTN; PAM sequence: CTC
  source 1..20: mol_type = other DNA
cacccaccccattcccacct

SEQ ID NO: 51531 - DNA, 20 bp, synthetic construct
  misc_feature 1..20: note = Description of Artificial Sequence: Synthetic oligonucleotide
  misc_feature 1..20: note = Target: SCN10A; (-) strand; PAM type: YTN; PAM sequence: CTC
  source 1..20: mol_type = other DNA
acactccacccaccccattc

SEQ ID NO: 51532 - DNA, 20 bp, synthetic construct
  misc_feature 1..20: note = Description of Artificial Sequence: Synthetic oligonucleotide
  misc_feature 1..20: note = Target: SCN10A; (-) strand; PAM type: YTN; PAM sequence: TTC
  source 1..20: mol_type = other DNA
ctcacactccacccacccca

SEQ ID NO: 51533 - DNA, 20 bp, synthetic construct
  misc_feature 1..20: note = Description of Artificial Sequence: Synthetic oligonucleotide
  misc_feature 1..20: note = Target: SCN10A; (-) strand; PAM type: YTN; PAM sequence: CTT
  source 1..20: mol_type = other DNA
cctcacactccacccacccc

SEQ ID NO: 51534 - DNA, 20 bp, synthetic construct
  misc_feature 1..20: note = Description of Artificial Sequence: Synthetic oligonucleotide
  misc_feature 1..20: note = Target: SCN10A; (-) strand; PAM type: YTN; PAM sequence: TTC
  source 1..20: mol_type = other DNA
ccaccttcctcacactccac

SEQ ID NO: 51535 - DNA, 20 bp, synthetic construct
  misc_feature 1..20: note = Description of Artificial Sequence: Synthetic oligonucleotide
  misc_feature 1..20: note = Target: SCN10A; (-) strand; PAM type: YTN; PAM sequence: TTT
  source 1..20: mol_type = other DNA
cccaccttcctcacactcca

SEQ ID NO: 51536 - DNA, 20 bp, synthetic construct
  misc_feature 1..20: note = Description of Artificial Sequence: Synthetic oligonucleotide
  misc_feature 1..20: note = Target: SCN10A; (-) strand; PAM type: YTN; PAM sequence: TTT
  source 1..20: mol_type = other DNA
tcccaccttcctcacactcc

SEQ ID NO: 51537 - DNA, 20 bp, synthetic construct
  misc_feature 1..20: note = Description of Artificial Sequence: Synthetic oligonucleotide
  misc_feature 1..20: note = Target: SCN10A; (-) strand; PAM type: YTN; PAM sequence: CTG
  source 1..20: mol_type = other DNA
gttttcccaccttcctcaca

SEQ ID NO: 51538 - DNA, 20 bp, synthetic construct
  misc_feature 1..20: note = Description of Artificial Sequence: Synthetic oligonucleotide
  misc_feature 1..20: note = Target: SCN10A; (-) strand; PAM type: YTN; PAM sequence: CTC
  source 1..20: mol_type = other DNA
cctggttttcccaccttcct

SEQ ID NO: 51539 - DNA, 20 bp, synthetic construct
  misc_feature 1..20: note = Description of Artificial Sequence: Synthetic oligonucleotide
  misc_feature 1..20: note = Target: SCN10A; (-) strand; PAM type: YTN; PAM sequence: CTC
  source 1..20: mol_type = other DNA
ctccctggttttcccacctt

SEQ ID NO: 51540 - DNA, 20 bp, synthetic construct
  misc_feature 1..20: note = Description of Artificial Sequence: Synthetic oligonucleotide
  misc_feature 1..20: note = Target: SCN10A; (-) strand; PAM type: YTN; PAM sequence: TTA
  source 1..20: mol_type = other DNA
cctcctccctggttttccca

SEQ ID NO: 51541 - DNA, 20 bp, synthetic construct
  misc_feature 1..20: note = Description of Artificial Sequence: Synthetic oligonucleotide
  misc_feature 1..20: note = Target: SCN10A; (-) strand; PAM type: YTN; PAM sequence: TTT
  source 1..20: mol_type = other DNA
acctcctccctggttttccc

SEQ ID NO: 51542 - DNA, 20 bp, synthetic construct
  misc_feature 1..20: note = Description of Artificial Sequence: Synthetic oligonucleotide
  misc_feature 1..20: note = Target: SCN10A; (-) strand; PAM type: YTN; PAM sequence: TTT
  source 1..20: mol_type = other DNA
tacctcctccctggttttcc

SEQ ID NO: 51543 - DNA, 20 bp, synthetic construct
  misc_feature 1..20: note = Description of Artificial Sequence: Synthetic oligonucleotide
  misc_feature 1..20: note = Target: SCN10A; (-) strand; PAM type: YTN; PAM sequence: CTG
  source 1..20: mol_type = other DNA
ccaaggttttacctcctccc

SEQ ID NO: 51544 - DNA, 20 bp, synthetic construct
  misc_feature 1..20: note = Description of Artificial Sequence: Synthetic oligonucleotide
  misc_feature 1..20: note = Target: SCN10A; (-) strand; PAM type: YTN; PAM sequence: CTC
  source 1..20: mol_type = other DNA
tgccaaggttttacctcctc

SEQ ID NO: 51545 - DNA, 20 bp, synthetic construct
  misc_feature 1..20: note = Description of Artificial Sequence: Synthetic oligonucleotide
  misc_feature 1..20: note = Target: SCN10A; (-) strand; PAM type: YTN; PAM sequence: CTC
  source 1..20: mol_type = other DNA
agggctctgccaaggtttta

SEQ ID NO: 51546 - DNA, 20 bp, synthetic construct
  misc_feature 1..20: note = Description of Artificial Sequence: Synthetic oligonucleotide
  misc_feature 1..20: note = Target: SCN10A; (-) strand; PAM type: YTN; PAM sequence: TTC
  source 1..20: mol_type = other DNA
ctcagggctctgccaaggtt

SEQ ID NO: 51547 - DNA, 20 bp, synthetic construct
  misc_feature 1..20: note = Description of Artificial Sequence: Synthetic oligonucleotide
  misc_feature 1..20: note = Target: SCN10A; (-) strand; PAM type: YTN; PAM sequence: CTC
  source 1..20: mol_type = other DNA
attcctcagggctctgccaa

SEQ ID NO: 51548 - DNA, 20 bp, synthetic construct
  misc_feature 1..20: note = Description of Artificial Sequence: Synthetic oligonucleotide
  misc_feature 1..20: note = Target: SCN10A; (-) strand; PAM type: YTN; PAM sequence: CTC
  source 1..20: mol_type = other DNA
acactcattcctcagggctc

SEQ ID NO: 51549 - DNA, 20 bp, synthetic construct
  misc_feature 1..20: note = Description of Artificial Sequence: Synthetic oligonucleotide
  misc_feature 1..20: note = Target: SCN10A; (-) strand; PAM type: YTN; PAM sequence: CTC
  source 1..20: mol_type = other DNA
aactcacactcattcctcag

SEQ ID NO: 51550 - DNA, 20 bp, synthetic construct
  misc_feature 1..20: note = Description of Artificial Sequence: Synthetic oligonucleotide
  misc_feature 1..20: note = Target: SCN10A; (-) strand; PAM type: YTN; PAM sequence: TTA
  source 1..20: mol_type = other DNA
ctcaactcacactcattcct

SEQ ID NO: 51551 - DNA, 20 bp, synthetic construct
  misc_feature 1..20: note = Description of Artificial Sequence: Synthetic oligonucleotide
  misc_feature 1..20: note = Target: SCN10A; (-) strand; PAM type: YTN; PAM sequence: TTT
  source 1..20: mol_type = other DNA
actcaactcacactcattcc

SEQ ID NO: 51552 - DNA, 20 bp, synthetic construct
  misc_feature 1..20: note = Description of Artificial Sequence: Synthetic oligonucleotide
  misc_feature 1..20: note = Target: SCN10A; (-) strand; PAM type: YTN; PAM sequence: CTT
  source 1..20: mol_type = other DNA
tactcaactcacactcattc

SEQ ID NO: 51553 - DNA, 20 bp, synthetic construct
  misc_feature 1..20: note = Description of Artificial Sequence: Synthetic oligonucleotide
  misc_feature 1..20: note = Target: SCN10A; (-) strand; PAM type: YTN; PAM sequence: CTC
  source 1..20: mol_type = other DNA
tttactcaactcacactcat

SEQ ID NO: 51554 - DNA, 20 bp, synthetic construct
  misc_feature 1..20: note = Description of Artificial Sequence: Synthetic oligonucleotide
  misc_feature 1..20: note = Target: SCN10A; (-) strand; PAM type: YTN; PAM sequence: CTC
  source 1..20: mol_type = other DNA
tctttactcaactcacactc

SEQ ID NO: 51555 - DNA, 20 bp, synthetic construct
  misc_feature 1..20: note = Description of Artificial Sequence: Synthetic oligonucleotide
  misc_feature 1..20: note = Target: SCN10A; (-) strand; PAM type: YTN; PAM sequence: CTC
  source 1..20: mol_type = other DNA
ctctctttactcaactcaca

SEQ ID NO: 51556 - DNA, 20 bp, synthetic construct
  misc_feature 1..20: note = Description of Artificial Sequence: Synthetic oligonucleotide
  misc_feature 1..20: note = Target: SCN10A; (-) strand; PAM type: YTN; PAM sequence: TTC
  source 1..20: mol_type = other DNA
ctcctctctttactcaactc

SEQ ID NO: 51557 - DNA, 20 bp, synthetic construct
  misc_feature 1..20: note = Description of Artificial Sequence: Synthetic oligonucleotide
  misc_feature 1..20: note = Target: SCN10A; (-) strand; PAM type: YTN; PAM sequence: CTT
  source 1..20: mol_type = other DNA
cctcctctctttactcaact

SEQ ID NO: 51558 - DNA, 20 bp, synthetic construct
  misc_feature 1..20: note = Description of Artificial Sequence: Synthetic oligonucleotide
  misc_feature 1..20: note = Target: SCN10A; (-) strand; PAM type: YTN; PAM sequence: CTG
  source 1..20: mol_type = other DNA
ggatatccttcctcctctct

SEQ ID NO: 51559 - DNA, 20 bp, synthetic construct
  misc_feature 1..20: note = Description of Artificial Sequence: Synthetic oligonucleotide
  misc_feature 1..20: note = Target: SCN10A; (-) strand; PAM type: YTN; PAM sequence: TTC
  source 1..20: mol_type = other DNA
tgggatatccttcctcctct

SEQ ID NO: 51560 - DNA, 20 bp, synthetic construct
  misc_feature 1..20: note = Description of Artificial Sequence: Synthetic oligonucleotide
  misc_feature 1..20: note = Target: SCN10A; (-) strand; PAM type: YTN; PAM sequence: CTT
  source 1..20: mol_type = other DNA
ctgggatatccttcctcctc

SEQ ID NO: 51561 - DNA, 20 bp, synthetic construct
  misc_feature 1..20: note = Description of Artificial Sequence: Synthetic oligonucleotide
  misc_feature 1..20: note = Target: SCN10A; (-) strand; PAM type: YTN; PAM sequence: TTC
  source 1..20: mol_type = other DNA
ttctgggatatccttcctcc

SEQ ID NO: 51562 - DNA, 20 bp, synthetic construct
  misc_feature 1..20: note = Description of Artificial Sequence: Synthetic oligonucleotide
  misc_feature 1..20: note = Target: SCN10A; (-) strand; PAM type: YTN; PAM sequence: CTT
  source 1..20: mol_type = other DNA
cttctgggatatccttcctc

SEQ ID NO: 51563 - DNA, 20 bp, synthetic construct
  misc_feature 1..20: note = Description of Artificial Sequence: Synthetic oligonucleotide
  misc_feature 1..20: note = Target: SCN10A; (-) strand; PAM type: YTN; PAM sequence: CTG
  source 1..20: mol_type = other DNA
ccccttcttctgggatatcc

SEQ ID NO: 51564 - DNA, 20 bp, synthetic construct
  misc_feature 1..20: note = Description of Artificial Sequence: Synthetic oligonucleotide
  misc_feature 1..20: note = Target: SCN10A; (-) strand; PAM type: YTN; PAM sequence: CTG
  source 1..20: mol_type = other DNA
tgctgccccttcttctggga

SEQ ID NO: 51565 - DNA, 20 bp, synthetic construct
  misc_feature 1..20: note = Description of Artificial Sequence: Synthetic oligonucleotide
  misc_feature 1..20: note = Target: SCN10A; (-) strand; PAM type: YTN; PAM sequence: CTA
  source 1..20: mol_type = other DNA
ctgtgctgccccttcttctg

SEQ ID NO: 51566 - DNA, 20 bp, synthetic construct
  misc_feature 1..20: note = Description of Artificial Sequence: Synthetic oligonucleotide
  misc_feature 1..20: note = Target: SCN10A; (-) strand; PAM type: YTN; PAM sequence: TTC
  source 1..20: mol_type = other DNA
tactgtgctgccccttcttc

SEQ ID NO: 51567 - DNA, 20 bp, synthetic construct
  misc_feature 1..20: note = Description of Artificial Sequence: Synthetic oligonucleotide
  misc_feature 1..20: note = Target: SCN10A; (-) strand; PAM type: YTN; PAM sequence: CTT
  source 1..20: mol_type = other DNA
ctactgtgctgccccttctt

SEQ ID NO: 51568 - DNA, 20 bp, synthetic construct
  misc_feature 1..20: note = Description of Artificial Sequence: Synthetic oligonucleotide
  misc_feature 1..20: note = Target: SCN10A; (-) strand; PAM type: YTN; PAM sequence: CTC
  source 1..20: mol_type = other DNA
ccagccttctactgtgctgc

SEQ ID NO: 51569 - DNA, 20 bp, synthetic construct
  misc_feature 1..20: note = Description of Artificial Sequence: Synthetic oligonucleotide
  misc_feature 1..20: note = Target: SCN10A; (-) strand; PAM type: YTN; PAM sequence: CTC
  source 1..20: mol_type = other DNA
acctcccagccttctactgt

SEQ ID NO: 51570 - DNA, 20 bp, synthetic construct
  misc_feature 1..20: note = Description of Artificial Sequence: Synthetic oligonucleotide
  misc_feature 1..20: note = Target: SCN10A; (-) strand; PAM type: YTN; PAM sequence: TTG
  source 1..20: mol_type = other DNA
ctcacctcccagccttctac

SEQ ID NO: 51571 - DNA, 20 bp, synthetic construct
  misc_feature 1..20: note = Description of Artificial Sequence: Synthetic oligonucleotide
  misc_feature 1..20: note = Target: SCN10A; (-) strand; PAM type: YTN; PAM sequence: CTC
  source 1..20: mol_type = other DNA
cacaccattgctcacctccc

SEQ ID NO: 51572 - DNA, 20 bp, synthetic construct
  misc_feature 1..20: note = Description of Artificial Sequence: Synthetic oligonucleotide
  misc_feature 1..20: note = Target: SCN10A; (-) strand; PAM type: YTN; PAM sequence: CTG
  source 1..20: mol_type = other DNA
caaatactccacaccattgc

SEQ ID NO: 51573 - DNA, 20 bp, synthetic construct
  misc_feature 1..20: note = Description of Artificial Sequence: Synthetic oligonucleotide
  misc_feature 1..20: note = Target: SCN10A; (-) strand; PAM type: YTN; PAM sequence: TTC
  source 1..20: mol_type = other DNA
tgcaaatactccacaccatt

SEQ ID NO: 51574 - DNA, 20 bp, synthetic construct
  misc_feature 1..20: note = Description of Artificial Sequence: Synthetic oligonucleotide
  misc_feature 1..20: note = Target: SCN10A; (-) strand; PAM type: YTN; PAM sequence: CTA
  source 1..20: mol_type = other DNA
cggttctgcaaatactccac

SEQ ID NO: 51575 - DNA, 20 bp, synthetic construct
  misc_feature 1..20: note = Description of Artificial Sequence: Synthetic oligonucleotide
  misc_feature 1..20: note = Target: SCN10A; (-) strand; PAM type: YTN; PAM sequence: CTG
  source 1..20: mol_type = other DNA
gaatccacctacggttctgc

SEQ ID NO: 51576 - DNA, 20 bp, synthetic construct
  misc_feature 1..20: note = Description of Artificial Sequence: Synthetic oligonucleotide
  misc_feature 1..20: note = Target: SCN10A; (-) strand; PAM type: YTN; PAM sequence: CTC
  source 1..20: mol_type = other DNA
tggaatccacctacggttct

SEQ ID NO: 51577 - DNA, 20 bp, synthetic construct
  misc_feature 1..20: note = Description of Artificial Sequence: Synthetic oligonucleotide
  misc_feature 1..20: note = Target: SCN10A; (-) strand; PAM type: YTN; PAM sequence: CTC
  source 1..20: mol_type = other DNA
accatgctctggaatccacc

SEQ ID NO: 51578 - DNA, 20 bp, synthetic construct
  misc_feature 1..20: note = Description of Artificial Sequence: Synthetic oligonucleotide
  misc_feature 1..20: note = Target: SCN10A; (-) strand; PAM type: YTN; PAM sequence: CTC
  source 1..20: mol_type = other DNA
acatctcaccatgctctgga

SEQ ID NO: 51579 - DNA, 20 bp, synthetic construct
  misc_feature 1..20: note = Description of Artificial Sequence: Synthetic oligonucleotide
  misc_feature 1..20: note = Target: SCN10A; (-) strand; PAM type: YTN; PAM sequence: CTC
  source 1..20: mol_type = other DNA
ctcacatctcaccatgctct

SEQ ID NO: 51580 - DNA, 20 bp, synthetic construct
  misc_feature 1..20: note = Description of Artificial Sequence: Synthetic oligonucleotide
  misc_feature 1..20: note = Target: SCN10A; (-) strand; PAM type: YTN; PAM sequence: CTC
  source 1..20: mol_type = other DNA
tcctcacatctcaccatgct

SEQ ID NO: 51581 - DNA, 20 bp, synthetic construct
  misc_feature 1..20: note = Description of Artificial Sequence: Synthetic oligonucleotide
  misc_feature 1..20: note = Target: SCN10A; (-) strand; PAM type: YTN; PAM sequence: CTC
  source 1..20: mol_type = other DNA
acctctcctcacatctcacc

SEQ ID NO: 51582 - DNA, 20 bp, synthetic construct
  misc_feature 1..20: note = Description of Artificial Sequence: Synthetic oligonucleotide
  misc_feature 1..20: note = Target: SCN10A; (-) strand; PAM type: YTN; PAM sequence: CTC
  source 1..20: mol_type = other DNA
tcacctctcctcacatctca

SEQ ID NO: 51583 - DNA, 20 bp, synthetic construct
  misc_feature 1..20: note = Description of Artificial Sequence: Synthetic oligonucleotide
  misc_feature 1..20: note = Target: SCN10A; (-) strand; PAM type: YTN; PAM sequence: CTC
  source 1..20: mol_type = other DNA
atctctcacctctcctcaca

SEQ ID NO: 51584 - DNA, 20 bp, synthetic construct
  misc_feature 1..20: note = Description of Artificial Sequence: Synthetic oligonucleotide
  misc_feature 1..20: note = Target: SCN10A; (-) strand; PAM type: YTN; PAM sequence: CTG
  source 1..20: mol_type = other DNA
cctcatctctcacctctcct

SEQ ID NO: 51585 - DNA, 20 bp, synthetic construct
  misc_feature 1..20: note = Description of Artificial Sequence: Synthetic oligonucleotide
  misc_feature 1..20: note = Target: SCN10A; (-) strand; PAM type: YTN; PAM sequence: TTC
  source 1..20: mol_type = other DNA
tgcctcatctctcacctctc

SEQ ID NO: 51586 - DNA, 20 bp, synthetic construct
  misc_feature 1..20: note = Description of Artificial Sequence: Synthetic oligonucleotide
  misc_feature 1..20: note = Target: SCN10A; (-) strand; PAM type: YTN; PAM sequence: CTT
  source 1..20: mol_type = other DNA
ctgcctcatctctcacctct

SEQ ID NO: 51587 - DNA, 20 bp, synthetic construct
  misc_feature 1..20: note = Description of Artificial Sequence: Synthetic oligonucleotide
  misc_feature 1..20: note = Target: SCN10A; (-) strand; PAM type: YTN; PAM sequence: CTC
  source 1..20: mol_type = other DNA
ttctgcctcatctctcacct

SEQ ID NO: 51588 - DNA, 20 bp, synthetic construct
  misc_feature 1..20: note = Description of Artificial Sequence: Synthetic oligonucleotide
  misc_feature 1..20: note = Target: SCN10A; (-) strand; PAM type: YTN; PAM sequence: CTG
  source 1..20: mol_type = other DNA
tctcttctgcctcatctctc

SEQ ID NO: 51589 - DNA, 20 bp, synthetic construct
  misc_feature 1..20: note = Description of Artificial Sequence: Synthetic oligonucleotide
  misc_feature 1..20: note = Target: SCN10A; (-) strand; PAM type: YTN; PAM sequence: CTG
  source 1..20: mol_type = other DNA
tccatactgtctcttctgcc

SEQ ID NO: 51590 - DNA, 20 bp, synthetic construct
  misc_feature 1..20: note = Description of Artificial Sequence: Synthetic oligonucleotide
  misc_feature 1..20: note = Target: SCN10A; (-) strand; PAM type: YTN; PAM sequence: CTG
  source 1..20: mol_type = other DNA
gtctgtccatactgtctctt

SEQ ID NO: 51591 - DNA, 20 bp, synthetic construct
  misc_feature 1..20: note = Description of Artificial Sequence: Synthetic oligonucleotide
  misc_feature 1..20: note = Target: SCN10A; (-) strand; PAM type: YTN; PAM sequence: TTG
  source 1..20: mol_type = other DNA
caagacctggtctgtccata

SEQ ID NO: 51592 - DNA, 20 bp, synthetic construct
  misc_feature 1..20: note = Description of Artificial Sequence: Synthetic oligonucleotide
  misc_feature 1..20: note = Target: SCN10A; (-) strand; PAM type: YTN; PAM sequence: TTT
  source 1..20: mol_type = other DNA
gcaagacctggtctgtccat

SEQ ID NO: 51593 - DNA, 20 bp, synthetic construct
  misc_feature 1..20: note = Description of Artificial Sequence: Synthetic oligonucleotide
  misc_feature 1..20: note = Target: SCN10A; (-) strand; PAM type: YTN; PAM sequence: TTA
  source 1..20: mol_type = other DNA
tttgcaagacctggtctgtc

SEQ ID NO: 51594 - DNA, 20 bp, synthetic construct
  misc_feature 1..20: note = Description of Artificial Sequence: Synthetic oligonucleotide
  misc_feature 1..20: note = Target: SCN10A; (-) strand; PAM type: YTN; PAM sequence: CTT
  source 1..20: mol_type = other DNA
atttgcaagacctggtctgt

SEQ ID NO: 51595 - DNA, 20 bp, synthetic construct
  misc_feature 1..20: note = Description of Artificial Sequence: Synthetic oligonucleotide
  misc_feature 1..20: note = Target: SCN10A; (-) strand; PAM type: YTN; PAM sequence: CTG
  source 1..20: mol_type = other DNA
agtcttatttgcaagacctg

SEQ ID NO: 51596 - DNA, 20 bp, synthetic construct
  misc_feature 1..20: note = Description of Artificial Sequence: Synthetic oligonucleotide
  misc_feature 1..20: note = Target: SCN10A; (-) strand; PAM type: YTN; PAM sequence: CTG
  source 1..20: mol_type = other DNA
ggaagaccctgagtcttatt

SEQ ID NO: 51597 - DNA, 20 bp, synthetic construct
  misc_feature 1..20: note = Description of Artificial Sequence: Synthetic oligonucleotide
  misc_feature 1..20: note = Target: SCN10A; (-) strand; PAM type: YTN; PAM sequence: CTC
  source 1..20: mol_type = other DNA
aactgggaagaccctgagtc

SEQ ID NO: 51598 - DNA, 20 bp, synthetic construct
  misc_feature 1..20: note = Description of Artificial Sequence: Synthetic oligonucleotide
  misc_feature 1..20: note = Target: SCN10A; (-) strand; PAM type: YTN; PAM sequence: CTC
  source 1..20: mol_type = other DNA
tcaactgggaagaccctgag

SEQ ID NO: 51599 - DNA, 20 bp, synthetic construct
  misc_feature 1..20: note = Description of Artificial Sequence: Synthetic oligonucleotide
  misc_feature 1..20: note = Target: SCN10A; (-) strand; PAM type: YTN; PAM sequence: TTA
  source 1..20: mol_type = other DNA
ctctcaactgggaagaccct

SEQ ID NO: 51600 - DNA, 20 bp, synthetic construct
  misc_feature 1..20: note = Description of Artificial Sequence: Synthetic oligonucleotide
  misc_feature 1..20: note = Target: SCN10A; (-) strand; PAM type: YTN; PAM sequence: CTT
  source 1..20: mol_type = other DNA
actctcaactgggaagaccc

SEQ ID NO: 51601 - DNA, 20 bp, synthetic construct
  misc_feature 1..20: note = Description of Artificial Sequence: Synthetic oligonucleotide
  misc_feature 1..20: note = Target: SCN10A; (-) strand; PAM type: YTN; PAM sequence: CTC
  source 1..20: mol_type = other DNA
acttactctcaactgggaag

SEQ ID NO: 51602 - DNA, 20 bp, synthetic construct
  misc_feature 1..20: note = Description of Artificial Sequence: Synthetic oligonucleotide
  misc_feature 1..20: note = Target: SCN10A; (-) strand; PAM type: YTN; PAM sequence: CTC
  source 1..20: mol_type = other DNA
tcacttactctcaactggga

SEQ ID NO: 51603 - DNA, 20 bp, synthetic construct
  misc_feature 1..20: note = Description of Artificial Sequence: Synthetic oligonucleotide
  misc_feature 1..20: note = Target: SCN10A; (-) strand; PAM type: YTN; PAM sequence: CTC
  source 1..20: mol_type = other DNA
tctcacttactctcaactgg

SEQ ID NO: 51604 - DNA, 20 bp, synthetic construct
  misc_feature 1..20: note = Description of Artificial Sequence: Synthetic oligonucleotide
  misc_feature 1..20: note = Target: SCN10A; (-) strand; PAM type: YTN; PAM sequence: TTC
  source 1..20: mol_type = other DNA
atatctctctcacttactct

SEQ ID NO: 51605 - DNA, 20 bp, synthetic construct
  misc_feature 1..20: note = Description of Artificial Sequence: Synthetic oligonucleotide
  misc_feature 1..20: note = Target: SCN10A; (-) strand; PAM type: YTN; PAM sequence: CTT
  source 1..20: mol_type = other DNA
catatctctctcacttactc

SEQ ID NO: 51606 - DNA, 20 bp, synthetic construct
  misc_feature 1..20: note = Description of Artificial Sequence: Synthetic oligonucleotide
  misc_feature 1..20: note = Target: SCN10A; (-) strand; PAM type: YTN; PAM sequence: CTG
  source 1..20: mol_type = other DNA
ccccttcatatctctctcac

SEQ ID NO: 51607 - DNA, 20 bp, synthetic construct
  misc_feature 1..20: note = Description of Artificial Sequence: Synthetic oligonucleotide
  misc_feature 1..20: note = Target: SCN10A; (-) strand; PAM type: YTN; PAM sequence: CTG
  source 1..20: mol_type = other DNA
gtcctgccccttcatatctc

SEQ ID NO: 51608 - DNA, 20 bp, synthetic construct
  misc_feature 1..20: note = Description of Artificial Sequence: Synthetic oligonucleotide
  misc_feature 1..20: note = Target: SCN10A; (-) strand; PAM type: YTN; PAM sequence: TTG
  source 1..20: mol_type = other DNA
aagagagccctggtcctgcc

SEQ ID NO: 51609 - DNA, 20 bp, synthetic construct
  misc_feature 1..20: note = Description of Artificial Sequence: Synthetic oligonucleotide
  misc_feature 1..20: note = Target: SCN10A; (-) strand; PAM type: YTN; PAM sequence: CTT
  source 1..20: mol_type = other DNA
gaagagagccctggtcctgc

SEQ ID NO: 51610 - DNA, 20 bp, synthetic construct
  misc_feature 1..20: note = Description of Artificial Sequence: Synthetic oligonucleotide
  misc_feature 1..20: note = Target: SCN10A; (-) strand; PAM type: YTN; PAM sequence: CTC
  source 1..20: mol_type = other DNA
ttgaagagagccctggtcct

SEQ ID NO: 51611 - DNA, 20 bp, synthetic construct
  misc_feature 1..20: note = Description of Artificial Sequence: Synthetic oligonucleotide
  misc_feature 1..20: note = Target: SCN10A; (-) strand; PAM type: YTN; PAM sequence: CTG
  source 1..20: mol_type = other DNA
gacacacctcttgaagagag

SEQ ID NO: 51612 - DNA, 20 bp, synthetic construct
  misc_feature 1..20: note = Description of Artificial Sequence: Synthetic oligonucleotide
  misc_feature 1..20: note = Target: SCN10A; (-) strand; PAM type: YTN; PAM sequence: TTC
  source 1..20: mol_type = other DNA
ccactggacacacctcttga

SEQ ID NO: 51613 - DNA, 20 bp, synthetic construct
  misc_feature 1..20: note = Description of Artificial Sequence: Synthetic oligonucleotide
  misc_feature 1..20: note = Target: SCN10A; (-) strand; PAM type: YTN; PAM sequence: CTG
  source 1..20: mol_type = other DNA
ccaattcccactggacacac

SEQ ID NO: 51614 - DNA, 20 bp, synthetic construct
  misc_feature 1..20: note = Description of Artificial Sequence: Synthetic oligonucleotide
  misc_feature 1..20: note = Target: SCN10A; (-) strand; PAM type: YTN; PAM sequence: CTC
  source 1..20: mol_type = other DNA
tgccaattcccactggacac

SEQ ID NO: 51615 - DNA, 20 bp, synthetic construct
  misc_feature 1..20: note = Description of Artificial Sequence: Synthetic oligonucleotide
  misc_feature 1..20: note = Target: SCN10A; (-) strand; PAM type: YTN; PAM sequence: CTC
  source 1..20: mol_type = other DNA
tctgccaattcccactggac

SEQ ID NO: 51616 - DNA, 20 bp, synthetic construct
  misc_feature 1..20: note = Description of Artificial Sequence: Synthetic oligonucleotide
  misc_feature 1..20: note = Target: SCN10A; (-) strand; PAM type: YTN; PAM sequence: CTG
  source 1..20: mol_type = other DNA
cagggaaagataggaaactc

SEQ ID NO: 51617 - DNA, 20 bp, synthetic construct
  misc_feature 1..20: note = Description of Artificial Sequence: Synthetic oligonucleotide
  misc_feature 1..20: note = Target: SCN10A; (-) strand; PAM type: YTN; PAM sequence: CTC
  source 1..20: mol_type = other DNA
tgcagggaaagataggaaac

SEQ ID NO: 51618 - DNA, 20 bp, synthetic construct
  misc_feature 1..20: note = Description of Artificial Sequence: Synthetic oligonucleotide
  misc_feature 1..20: note = Target: SCN10A; (-) strand; PAM type: YTN; PAM sequence: CTG
  source 1..20: mol_type = other DNA
gctctgcagggaaagatagg

SEQ ID NO: 51619 - DNA, 20 bp, synthetic construct
  misc_feature 1..20: note = Description of Artificial Sequence: Synthetic oligonucleotide
  misc_feature 1..20: note = Target: SCN10A; (-) strand; PAM type: YTN; PAM sequence: TTG
  source 1..20: mol_type = other DNA
tctggctctgcagggaaaga

SEQ ID NO: 51620 - DNA, 20 bp, synthetic construct
  misc_feature 1..20: note = Description of Artificial Sequence: Synthetic oligonucleotide
  misc_feature 1..20: note = Target: SCN10A; (-) strand; PAM type: YTN; PAM sequence: CTT
  source 1..20: mol_type = other DNA
gtctggctctgcagggaaag

SEQ ID NO: 51621 - DNA, 20 bp, synthetic construct
  misc_feature 1..20: note = Description of Artificial Sequence: Synthetic oligonucleotide
  misc_feature 1..20: note = Target: SCN10A; (-) strand; PAM type: YTN; PAM sequence: TTC
  source 1..20: mol_type = other DNA
ttgtctggctctgcagggaa

SEQ ID NO: 51622 - DNA, 20 bp, synthetic construct
  misc_feature 1..20: note = Description of Artificial Sequence: Synthetic oligonucleotide
  misc_feature 1..20: note = Target: SCN10A; (-) strand; PAM type: YTN; PAM sequence: TTT
  source 1..20: mol_type = other DNA
cttgtctggctctgcaggga

SEQ ID NO: 51623 - DNA, 20 bp, synthetic construct
  misc_feature 1..20: note = Description of Artificial Sequence: Synthetic oligonucleotide
  misc_feature 1..20: note = Target: SCN10A; (-) strand; PAM type: YTN; PAM sequence: CTA
  source 1..20: mol_type = other DNA
ccatttcttgtctggctctg

SEQ ID NO: 51624 - DNA, 20 bp, synthetic construct
  misc_feature 1..20: note = Description of Artificial Sequence: Synthetic oligonucleotide
  misc_feature 1..20: note = Target: SCN10A; (-) strand; PAM type: YTN; PAM sequence: TTC
  source 1..20: mol_type = other DNA
taccatttcttgtctggctc

SEQ ID NO: 51625 - DNA, 20 bp, synthetic construct
  misc_feature 1..20: note = Description of Artificial Sequence: Synthetic oligonucleotide
  misc_feature 1..20: note = Target: SCN10A; (-) strand; PAM type: YTN; PAM sequence: TTT
  source 1..20: mol_type = other DNA
ctaccatttcttgtctggct

SEQ ID NO: 51626 - DNA, 20 bp, synthetic construct
  misc_feature 1..20: note = Description of Artificial Sequence: Synthetic oligonucleotide
  misc_feature 1..20: note = Target: SCN10A; (-) strand; PAM type: YTN; PAM sequence: TTT
  source 1..20: mol_type = other DNA
tctaccatttcttgtctggc

SEQ ID NO: 51627 - DNA, 20 bp, synthetic construct
  misc_feature 1..20: note = Description of Artificial Sequence: Synthetic oligonucleotide
  misc_feature 1..20: note = Target: SCN10A; (-) strand; PAM type: YTN; PAM sequence: CTT
  source 1..20: mol_type = other DNA
ttctaccatttcttgtctgg

SEQ ID NO: 51628 - DNA, 20 bp, synthetic construct
  misc_feature 1..20: note = Description of Artificial Sequence: Synthetic oligonucleotide
  misc_feature 1..20: note = Target: SCN10A; (-) strand; PAM type: YTN; PAM sequence: CTA
  source 1..20: mol_type = other DNA
gagtggaagtcttttctacc

SEQ ID NO: 51629 - DNA, 20 bp, synthetic construct
  misc_feature 1..20: note = Description of Artificial Sequence: Synthetic oligonucleotide
  misc_feature 1..20: note = Target: SCN10A; (-) strand; PAM type: YTN; PAM sequence: TTC
  source 1..20: mol_type = other DNA
tagagtggaagtcttttcta

SEQ ID NO: 51630 - DNA, 20 bp, synthetic construct
  misc_feature 1..20: note = Description of Artificial Sequence: Synthetic oligonucleotide
  misc_feature 1..20: note = Target: SCN10A; (-) strand; PAM type: YTN; PAM sequence: CTG
  source 1..20: mol_type = other DNA
taaacagaaacacccattct

SEQ ID NO: 51631 - DNA, 20 bp, synthetic construct
  misc_feature 1..20: note = Description of Artificial Sequence: Synthetic oligonucleotide
  misc_feature 1..20: note = Target: SCN10A; (-) strand; PAM type: YTN; PAM sequence: TTA
  source 1..20: mol_type = other DNA
tctgtaaacagaaacaccca

SEQ ID NO: 51632 - DNA, 20 bp, synthetic construct
  misc_feature 1..20: note = Description of Artificial Sequence: Synthetic oligonucleotide
  misc_feature 1..20: note = Target: SCN10A; (-) strand; PAM type: YTN; PAM sequence: CTT
  source 1..20: mol_type = other DNA
atctgtaaacagaaacaccc

SEQ ID NO: 51633 - DNA, 20 bp, synthetic construct
  misc_feature 1..20: note = Description of Artificial Sequence: Synthetic oligonucleotide
  misc_feature 1..20: note = Target: SCN10A; (-) strand; PAM type: YTN; PAM sequence: CTC
  source 1..20: mol_type = other DNA
ttatctgtaaacagaaacac

SEQ ID NO: 51634 - DNA, 20 bp, synthetic construct
  misc_feature 1..20: note = Description of Artificial Sequence: Synthetic oligonucleotide
  misc_feature 1..20: note = Target: SCN10A; (-) strand; PAM type: YTN; PAM sequence: TTC
  source 1..20: mol_type = other DNA
tcttatctgtaaacagaaac

SEQ ID NO: 51635 - DNA, 20 bp, synthetic construct
  misc_feature 1..20: note = Description of Artificial Sequence: Synthetic oligonucleotide
  misc_feature 1..20: note = Target: SCN10A; (-) strand; PAM type: YTN; PAM sequence: TTC
  source 1..20: mol_type = other DNA
gttctcttatctgtaaacag

SEQ ID NO: 51636 - DNA, 20 bp, synthetic construct
  misc_feature 1..20: note = Description of Artificial Sequence: Synthetic oligonucleotide
  misc_feature 1..20: note = Target: SCN10A; (-) strand; PAM type: YTN; PAM sequence: CTC
  source 1..20: mol_type = other DNA
accccaagaattcgttctct

SEQ ID NO: 51637 - DNA, 20 bp, synthetic construct
  misc_feature 1..20: note = Description of Artificial Sequence: Synthetic oligonucleotide
  misc_feature 1..20: note = Target: SCN10A; (-) strand; PAM type: YTN; PAM sequence: CTC
  source 1..20: mol_type = other DNA
tcaccccaagaattcgttct

SEQ ID NO: 51638 - DNA, 20 bp, synthetic construct
  misc_feature 1..20: note = Description of Artificial Sequence: Synthetic oligonucleotide
  misc_feature 1..20: note = Target: SCN10A; (-) strand; PAM type: YTN; PAM sequence: CTC
  source 1..20: mol_type = other DNA
ctctcaccccaagaattcgt

SEQ ID NO: 51639 - DNA, 20 bp, synthetic construct
  misc_feature 1..20: note = Description of Artificial Sequence: Synthetic oligonucleotide
  misc_feature 1..20: note = Target: SCN10A; (-) strand; PAM type: YTN; PAM sequence: CTC
  source 1..20: mol_type = other DNA
tcctctcaccccaagaattc

SEQ ID NO: 51640 - DNA, 20 bp, synthetic construct
  misc_feature 1..20: note = Description of Artificial Sequence: Synthetic oligonucleotide
  misc_feature 1..20: note = Target: SCN10A; (-) strand; PAM type: YTN; PAM sequence: TTC
  source 1..20: mol_type = other DNA
tctcctctcaccccaagaat

SEQ ID NO: 51641 - DNA, 20 bp, synthetic construct
  misc_feature 1..20: note = Description of Artificial Sequence: Synthetic oligonucleotide
  misc_feature 1..20: note = Target: SCN10A; (-) strand; PAM type: YTN; PAM sequence: CTG
  source 1..20: mol_type = other DNA
ataggttctctcctctcacc

SEQ ID NO: 51642 - DNA, 20 bp, synthetic construct
  misc_feature 1..20: note = Description of Artificial Sequence: Synthetic oligonucleotide
  misc_feature 1..20: note = Target: SCN10A; (-) strand; PAM type: YTN; PAM sequence: CTG
  source 1..20: mol_type = other DNA
tggcctgataggttctctcc

SEQ ID NO: 51643 - DNA, 20 bp, synthetic construct
  misc_feature 1..20: note = Description of Artificial Sequence: Synthetic oligonucleotide
  misc_feature 1..20: note = Target: SCN10A; (-) strand; PAM type: YTN; PAM sequence: CTC
  source 1..20: mol_type = other DNA
tgtggcctgataggttctct

SEQ ID NO: 51644 - DNA, 20 bp, synthetic construct
  misc_feature 1..20: note = Description of Artificial Sequence: Synthetic oligonucleotide
  misc_feature 1..20: note = Target: SCN10A; (-) strand; PAM type: YTN; PAM sequence: TTC
  source 1..20: mol_type = other DNA
ccctctgtggcctgataggt

SEQ ID NO: 51645 - DNA, 20 bp, synthetic construct
  misc_feature 1..20: note = Description of Artificial Sequence: Synthetic oligonucleotide
  misc_feature 1..20: note = Target: SCN10A; (-) strand; PAM type: YTN; PAM sequence: CTT
  source 1..20: mol_type = other DNA
cccctctgtggcctgatagg

SEQ ID NO: 51646 - DNA, 20 bp, synthetic construct
  misc_feature 1..20: note = Description of Artificial Sequence: Synthetic oligonucleotide
  misc_feature 1..20: note = Target: SCN10A; (-) strand; PAM type: YTN; PAM sequence: TTG
  source 1..20: mol_type = other DNA
atgcttcccctctgtggcct

SEQ ID NO: 51647 - DNA, 20 bp, synthetic construct
  misc_feature 1..20: note = Description of Artificial Sequence: Synthetic oligonucleotide
  misc_feature 1..20: note = Target: SCN10A; (-) strand; PAM type: YTN; PAM sequence: CTT
  source 1..20: mol_type = other DNA
gatgcttcccctctgtggcc

SEQ ID NO: 51648 - DNA, 20 bp, synthetic construct
  misc_feature 1..20: note = Description of Artificial Sequence: Synthetic oligonucleotide
  misc_feature 1..20: note = Target: SCN10A; (-) strand; PAM type: YTN; PAM sequence: CTG
  source 1..20: mol_type = other DNA
aaatgggacttgatgcttcc

SEQ ID NO: 51649 - DNA, 20 bp, synthetic construct
  misc_feature 1..20: note = Description of Artificial Sequence: Synthetic oligonucleotide
  misc_feature 1..20: note = Target: SCN10A; (-) strand; PAM type: YTN; PAM sequence: TTC
  source 1..20: mol_type = other DNA
tgaaatgggacttgatgctt

SEQ ID NO: 51650 - DNA, 20 bp, synthetic construct
  misc_feature 1..20: note = Description of Artificial Sequence: Synthetic oligonucleotide
  misc_feature 1..20: note = Target: SCN10A; (-) strand; PAM type: YTN; PAM sequence: TTT
  source 1..20: mol_type = other DNA
ctgaaatgggacttgatgct

SEQ ID NO: 51651 - DNA, 20 bp, synthetic construct
  misc_feature 1..20: note = Description of Artificial Sequence: Synthetic oligonucleotide
  misc_feature 1..20: note = Target: SCN10A; (-) strand; PAM type: YTN; PAM sequence: CTT
  source 1..20: mol_type = other DNA
tctgaaatgggacttgatgc

SEQ ID NO: 51652 - DNA, 20 bp, synthetic construct
  misc_feature 1..20: note = Description of Artificial Sequence: Synthetic oligonucleotide
  misc_feature 1..20: note = Target: SCN10A; (-) strand; PAM type: YTN; PAM sequence: TTG
  source 1..20: mol_type = other DNA
atggtgaggatggggaggcc

SEQ ID NO: 51653 - DNA, 20 bp, synthetic construct
  misc_feature 1..20: note = Description of Artificial Sequence: Synthetic oligonucleotide
  misc_feature 1..20: note = Target: SCN10A; (-) strand; PAM type: YTN; PAM sequence: TTC
  source 1..20: mol_type = other DNA
agcccccatgaggttgatgg

SEQ ID NO: 51654 - DNA, 20 bp, synthetic construct
  misc_feature 1..20: note = Description of Artificial Sequence: Synthetic oligonucleotide
  misc_feature 1..20: note = Target: SCN10A; (-) strand; PAM type: YTN; PAM sequence: CTT
  source 1..20: mol_type = other DNA
cagcccccatgaggttgatg

SEQ ID NO: 51655 - DNA, 20 bp, synthetic construct
  misc_feature 1..20: note = Description of Artificial Sequence: Synthetic oligonucleotide
  misc_feature 1..20: note = Target: SCN10A; (-) strand; PAM type: YTN; PAM sequence: CTC
  source 1..20: mol_type = other DNA
ttcagcccccatgaggttga

SEQ ID NO: 51656 - DNA, 20 bp, synthetic construct
  misc_feature 1..20: note = Description of Artificial Sequence: Synthetic oligonucleotide
  misc_feature 1..20: note = Target: SCN10A; (-) strand; PAM type: YTN; PAM sequence: CTA
  source 1..20: mol_type = other DNA
ctcttcagcccccatgaggt

SEQ ID NO: 51657 - DNA, 20 bp, synthetic construct
  misc_feature 1..20: note = Description of Artificial Sequence: Synthetic oligonucleotide
  misc_feature 1..20: note = Target: SCN10A; (-) strand; PAM type: YTN; PAM sequence: CTG
  source 1..20: mol_type = other DNA
tcaccagtagcccagcgact

SEQ ID NO: 51658 - DNA, 20 bp, synthetic construct
  misc_feature 1..20: note = Description of Artificial Sequence: Synthetic oligonucleotide
  misc_feature 1..20: note = Target: SCN10A; (-) strand; PAM type: YTN; PAM sequence: CTC
  source 1..20: mol_type = other DNA
cactgtcaccagtagcccag

SEQ ID NO: 51659 - DNA, 20 bp, synthetic construct
  misc_feature 1..20: note = Description of Artificial Sequence: Synthetic oligonucleotide
  misc_feature 1..20: note = Target: SCN10A; (-) strand; PAM type: YTN; PAM sequence: CTA
  source 1..20: mol_type = other DNA
agatctccactgtcaccagt

SEQ ID NO: 51660 - DNA, 20 bp, synthetic construct
  misc_feature 1..20: note = Description of Artificial Sequence: Synthetic oligonucleotide
  misc_feature 1..20: note = Target: SCN10A; (-) strand; PAM type: YTN; PAM sequence: CTC
  source 1..20: mol_type = other DNA
taagatctccactgtcacca

SEQ ID NO: 51661 - DNA, 20 bp, synthetic construct
  misc_feature 1..20: note = Description of Artificial Sequence: Synthetic oligonucleotide
  misc_feature 1..20: note = Target: SCN10A; (-) strand; PAM type: YTN; PAM sequence: TTG
  source 1..20: mol_type = other DNA
tgtggggcctctaagatctc

SEQ ID NO: 51662 - DNA, 20 bp, synthetic construct
  misc_feature 1..20: note = Description of Artificial Sequence: Synthetic oligonucleotide
  misc_feature 1..20: note = Target: SCN10A; (-) strand; PAM type: YTN; PAM sequence: CTC
  source 1..20: mol_type = other DNA
attgtgtggggcctctaaga

SEQ ID NO: 51663 - DNA, 20 bp, synthetic construct
  misc_feature 1..20: note = Description of Artificial Sequence: Synthetic oligonucleotide
  misc_feature 1..20: note = Target: SCN10A; (-) strand; PAM type: YTN; PAM sequence: TTC
  source 1..20: mol_type = other DNA
agaaacaaaagtagtccatc

SEQ ID NO: 51664 - DNA, 20 bp, synthetic construct
  misc_feature 1..20: note = Description of Artificial Sequence: Synthetic oligonucleotide
  misc_feature 1..20: note = Target: SCN10A; (-) strand; PAM type: YTN; PAM sequence: CTG
  source 1..20: mol_type = other DNA
agaattcagaaacaaaagta

SEQ ID NO: 51665 - DNA, 20 bp, synthetic construct
  misc_feature 1..20: note = Description of Artificial Sequence: Synthetic oligonucleotide
  misc_feature 1..20: note = Target: SCN10A; (-) strand; PAM type: YTN; PAM sequence: TTA
  source 1..20: mol_type = other DNA
ctgagaattcagaaacaaaa

SEQ ID NO: 51666 - DNA, 20 bp, synthetic construct
  misc_feature 1..20: note = Description of Artificial Sequence: Synthetic oligonucleotide
  misc_feature 1..20: note = Target: SCN10A; (-) strand; PAM type: YTN; PAM sequence: TTG
  source 1..20: mol_type = other DNA
attactgagaattcagaaac

SEQ ID NO: 51667 - DNA, 20 bp, synthetic construct
  misc_feature 1..20: note = Description of Artificial Sequence: Synthetic oligonucleotide
  misc_feature 1..20: note = Target: SCN10A; (-) strand; PAM type: YTN; PAM sequence: CTT
  source 1..20: mol_type = other DNA
gattactgagaattcagaaa

SEQ ID NO: 51668 - DNA, 20 bp, synthetic construct
  misc_feature 1..20: note = Description of Artificial Sequence: Synthetic oligonucleotide
  misc_feature 1..20: note = Target: SCN10A; (-) strand; PAM type: YTN; PAM sequence: TTC
  source 1..20: mol_type = other DNA
ttgattactgagaattcaga

SEQ ID NO: 51669 - DNA, 20 bp, synthetic construct
  misc_feature 1..20: note = Description of Artificial Sequence: Synthetic oligonucleotide
  misc_feature 1..20: note = Target: SCN10A; (-) strand; PAM type: YTN; PAM sequence: TTA
  source 1..20: mol_type = other DNA
ggcaattcttgattactgag

SEQ ID NO: 51670 - DNA, 20 bp, synthetic construct
  misc_feature 1..20: note = Description of Artificial Sequence: Synthetic oligonucleotide
  misc_feature 1..20: note = Target: SCN10A; (-) strand; PAM type: YTN; PAM sequence: TTA
  source 1..20: mol_type = other DNA
gacacccagaggaaaaaaga

SEQ ID NO: 51671 - DNA, 20 bp, synthetic construct
  misc_feature 1..20: note = Description of Artificial Sequence: Synthetic oligonucleotide
  misc_feature 1..20: note = Target: SCN10A; (-) strand; PAM type: YTN; PAM sequence: TTT
  source 1..20: mol_type = other DNA
agacacccagaggaaaaaag

SEQ ID NO: 51672 - DNA, 20 bp, synthetic construct
  misc_feature 1..20: note = Description of Artificial Sequence: Synthetic oligonucleotide
  misc_feature 1..20: note = Target: SCN10A; (-) strand; PAM type: YTN; PAM sequence: CTT
  source 1..20: mol_type = other DNA
tagacacccagaggaaaaaa

SEQ ID NO: 51673 - DNA, 20 bp, synthetic construct
  misc_feature 1..20: note = Description of Artificial Sequence: Synthetic oligonucleotide
  misc_feature 1..20: note = Target: SCN10A; (-) strand; PAM type: YTN; PAM sequence: CTG
  source 1..20: mol_type = other DNA
tctttagacacccagaggaa

SEQ ID NO: 51674 - DNA, 20 bp, synthetic construct
  misc_feature 1..20: note = Description of Artificial Sequence: Synthetic oligonucleotide
  misc_feature 1..20: note = Target: SCN10A; (-) strand; PAM type: YTN; PAM sequence: CTA
  source 1..20: mol_type = other DNA
aaatcctgtctttagacacc

SEQ ID NO: 51675 - DNA, 20 bp, synthetic construct
  misc_feature 1..20: note = Description of Artificial Sequence: Synthetic oligonucleotide
  misc_feature 1..20: note = Target: SCN10A; (-) strand; PAM type: YTN; PAM sequence: TTC
  source 1..20: mol_type = other DNA
cgtaggtctaaaatcctgtc

SEQ ID NO: 51676 - DNA, 20 bp, synthetic construct
  misc_feature 1..20: note = Description of Artificial Sequence: Synthetic oligonucleotide
  misc_feature 1..20: note = Target: SCN10A; (-) strand; PAM type: YTN; PAM sequence: TTT
  source 1..20: mol_type = other DNA
ccgtaggtctaaaatcctgt

SEQ ID NO: 51677 - DNA, 20 bp, synthetic construct
  misc_feature 1..20: note = Description of Artificial Sequence: Synthetic oligonucleotide
  misc_feature 1..20: note = Target: SCN10A; (-) strand; PAM type: YTN; PAM sequence: CTG
  source 1..20: mol_type = other DNA
tttccgtaggtctaaaatcc

SEQ ID NO: 51678 - DNA, 20 bp, synthetic construct
  misc_feature 1..20: note = Description of Artificial Sequence: Synthetic oligonucleotide
  misc_feature 1..20: note = Target: SCN10A; (-) strand; PAM type: YTN; PAM sequence: TTC
  source 1..20: mol_type = other DNA
actgtttccgtaggtctaaa

SEQ ID NO: 51679 - DNA, 20 bp, synthetic construct
  misc_feature 1..20: note = Description of Artificial Sequence: Synthetic oligonucleotide
  misc_feature 1..20: note = Target: SCN10A; (-) strand; PAM type: YTN; PAM sequence: CTT
  source 1..20: mol_type = other DNA
cactgtttccgtaggtctaa

SEQ ID NO: 51680 - DNA, 20 bp, synthetic construct
  misc_feature 1..20: note = Description of Artificial Sequence: Synthetic oligonucleotide
  misc_feature 1..20: note = Target: SCN10A; (-) strand; PAM type: YTN; PAM sequence: TTG
  source 1..20: mol_type = other DNA
gaaatggggaggaagggaga

SEQ ID NO: 51681 - DNA, 20 bp, synthetic construct
  misc_feature 1..20: note = Description of Artificial Sequence: Synthetic oligonucleotide
  misc_feature 1..20: note = Target: SCN10A; (-) strand; PAM type: YTN; PAM sequence: CTT
  source 1..20: mol_type = other DNA
ggaaatggggaggaagggag

SEQ ID NO: 51682 - DNA, 20 bp, synthetic construct
  misc_feature 1..20: note = Description of Artificial Sequence: Synthetic oligonucleotide
  misc_feature 1..20: note = Target: SCN10A; (-) strand; PAM type: YTN; PAM sequence: TTA
  source 1..20: mol_type = other DNA
aacttggaaatggggaggaa

SEQ ID NO: 51683 - DNA, 20 bp, synthetic construct
  misc_feature 1..20: note = Description of Artificial Sequence: Synthetic oligonucleotide
  misc_feature 1..20: note = Target: SCN10A; (-) strand; PAM type: YTN; PAM sequence: CTA
  source 1..20: mol_type = other DNA
aaggattaaacttggaaatg

SEQ ID NO: 51684 - DNA, 20 bp, synthetic construct
  misc_feature 1..20: note = Description of Artificial Sequence: Synthetic oligonucleotide
  misc_feature 1..20: note = Target: SCN10A; (-) strand; PAM type: YTN; PAM sequence: TTA
  source 1..20: mol_type = other DNA
aactaaaggattaaacttgg

SEQ ID NO: 51685 - DNA, 20 bp, synthetic construct
  misc_feature 1..20: note = Description of Artificial Sequence: Synthetic oligonucleotide
  misc_feature 1..20: note = Target: SCN10A; (-) strand; PAM type: YTN; PAM sequence: CTT
  source 1..20: mol_type = other DNA
aaactaaaggattaaacttg

SEQ ID NO: 51686 - DNA, 20 bp, synthetic construct
  misc_feature 1..20: note = Description of Artificial Sequence: Synthetic oligonucleotide
  misc_feature 1..20: note = Target: SCN10A; (-) strand; PAM type: YTN; PAM sequence: TTA
  source 1..20: mol_type = other DNA
taccttaaactaaaggatta

SEQ ID NO: 51687 - DNA, 20 bp, synthetic construct
  misc_feature 1..20: note = Description of Artificial Sequence: Synthetic oligonucleotide
  misc_feature 1..20: note = Target: SCN10A; (-) strand; PAM type: YTN; PAM sequence: TTT
  source 1..20: mol_type = other DNA
ataccttaaactaaaggatt

SEQ ID NO: 51688 - DNA, 20 bp, synthetic construct
  misc_feature 1..20: note = Description of Artificial Sequence: Synthetic oligonucleotide
  misc_feature 1..20: note = Target: SCN10A; (-) strand; PAM type: YTN; PAM sequence: TTA
  source 1..20: mol_type = other DNA
tttataccttaaactaaagg

SEQ ID NO: 51689 - DNA, 20 bp, synthetic construct
  misc_feature 1..20: note = Description of Artificial Sequence: Synthetic oligonucleotide
  misc_feature 1..20: note = Target: SCN10A; (-) strand; PAM type: YTN; PAM sequence: TTT
  source 1..20: mol_type = other DNA
atttataccttaaactaaag

SEQ ID NO: 51690 - DNA, 20 bp, synthetic construct
  misc_feature 1..20: note = Description of Artificial Sequence: Synthetic oligonucleotide
  misc_feature 1..20: note = Target: SCN10A; (-) strand; PAM type: YTN; PAM sequence: TTT
  source 1..20: mol_type = other DNA
tatttataccttaaactaaa

SEQ ID NO: 51691 - DNA, 20 bp, synthetic construct
  misc_feature 1..20: note = Description of Artificial Sequence: Synthetic oligonucleotide
  misc_feature 1..20: note = Target: SCN10A; (-) strand; PAM type: YTN; PAM sequence: TTT
  source 1..20: mol_type = other DNA
ttatttataccttaaactaa

SEQ ID NO: 51692 - DNA, 20 bp, synthetic construct
  misc_feature 1..20: note = Description of Artificial Sequence: Synthetic oligonucleotide
  misc_feature 1..20: note = Target: SCN10A; (-) strand; PAM type: YTN; PAM sequence: TTG
  source 1..20: mol_type = other DNA
aatttttatttataccttaa

SEQ ID NO: 51693 - DNA, 20 bp, synthetic construct
  misc_feature 1..20: note = Description of Artificial Sequence: Synthetic oligonucleotide
  misc_feature 1..20: note = Target: SCN10A; (-) strand; PAM type: YTN; PAM sequence: CTC
  source 1..20: mol_type = other DNA
agttgaatttttatttatac

SEQ ID NO: 51694 - DNA, 20 bp, synthetic construct
  misc_feature 1..20: note = Description of Artificial Sequence: Synthetic oligonucleotide
  misc_feature 1..20: note = Target: SCN10A; (-) strand; PAM type: YTN; PAM sequence: TTC
  source 1..20: mol_type = other DNA
aggcaagacccctcagttga

SEQ ID NO: 51695 - DNA, 20 bp, synthetic construct
  misc_feature 1..20: note = Description of Artificial Sequence: Synthetic oligonucleotide
  misc_feature 1..20: note = Target: SCN10A; (-) strand; PAM type: YTN; PAM sequence: TTG
  source 1..20: mol_type = other DNA
tgggattcaggcaagacccc

SEQ ID NO: 51696 - DNA, 20 bp, synthetic construct
  misc_feature 1..20: note = Description of Artificial Sequence: Synthetic oligonucleotide
  misc_feature 1..20: note = Target: SCN10A; (-) strand; PAM type: YTN; PAM sequence: CTG
  source 1..20: mol_type = other DNA
gttgtgggattcaggcaaga

SEQ ID NO: 51697 - DNA, 20 bp, synthetic construct
  misc_feature 1..20: note = Description of Artificial Sequence: Synthetic oligonucleotide
  misc_feature 1..20: note = Target: SCN10A; (-) strand; PAM type: YTN; PAM sequence: TTC
  source 1..20: mol_type = other DNA
tggttgtgggattcaggcaa

SEQ ID NO: 51698 - DNA, 20 bp, synthetic construct
  misc_feature 1..20: note = Description of Artificial Sequence: Synthetic oligonucleotide
  misc_feature 1..20: note = Target: SCN10A; (-) strand; PAM type: YTN; PAM sequence: CTG
  source 1..20: mol_type = other DNA
ttctggttgtgggattcagg

SEQ ID NO: 51699 - DNA, 20 bp, synthetic construct
  misc_feature 1..20: note = Description of Artificial Sequence: Synthetic oligonucleotide
  misc_feature 1..20: note = Target: SCN10A; (-) strand; PAM type: YTN; PAM sequence: TTC
  source 1..20: mol_type = other DNA
tgttctggttgtgggattca

SEQ ID NO: 51700 - DNA, 20 bp, synthetic construct
  misc_feature 1..20: note = Description of Artificial Sequence: Synthetic oligonucleotide
  misc_feature 1..20: note = Target: SCN10A; (-) strand; PAM type: YTN; PAM sequence: TTT
  source 1..20: mol_type = other DNA
ctgttctggttgtgggattc

SEQ ID NO: 51701 - DNA, 20 bp, synthetic construct
  misc_feature 1..20: note = Description of Artificial Sequence: Synthetic oligonucleotide
  misc_feature 1..20: note = Target: SCN10A; (-) strand; PAM type: YTN; PAM sequence: CTT
  source 1..20: mol_type = other DNA
tctgttctggttgtgggatt

SEQ ID NO: 51702 - DNA, 20 bp, synthetic construct
  misc_feature 1..20: note = Description of Artificial Sequence: Synthetic oligonucleotide
  misc_feature 1..20: note = Target: SCN10A; (-) strand; PAM type: YTN; PAM sequence: TTC
  source 1..20: mol_type = other DNA
actttctgttctggttgtgg

SEQ ID NO: 51703 - DNA, 20 bp, synthetic construct
  misc_feature 1..20: note = Description of Artificial Sequence: Synthetic oligonucleotide
  misc_feature 1..20: note = Target: SCN10A; (-) strand; PAM type: YTN; PAM sequence: CTT
  source 1..20: mol_type = other DNA
cactttctgttctggttgtg

SEQ ID NO: 51704 - DNA, 20 bp, synthetic construct
  misc_feature 1..20: note = Description of Artificial Sequence: Synthetic oligonucleotide
  misc_feature 1..20: note = Target: SCN10A; (-) strand; PAM type: YTN; PAM sequence: CTC
  source 1..20: mol_type = other DNA
acaatcaatacgtaacagga

SEQ ID NO: 51705 - DNA, 20 bp, synthetic construct
  misc_feature 1..20: note = Description of Artificial Sequence: Synthetic oligonucleotide
  misc_feature 1..20: note = Target: SCN10A; (-) strand; PAM type: YTN; PAM sequence: TTC
  source 1..20: mol_type = other DNA
ccacataccacatggcctca

SEQ ID NO: 51706 - DNA, 20 bp, synthetic construct
  misc_feature 1..20: note = Description of Artificial Sequence: Synthetic oligonucleotide
  misc_feature 1..20: note = Target: SCN10A; (-) strand; PAM type: YTN; PAM sequence: CTT
  source 1..20: mol_type = other DNA
cccacataccacatggcctc

SEQ ID NO: 51707 - DNA, 20 bp, synthetic construct
  misc_feature 1..20: note = Description of Artificial Sequence: Synthetic oligonucleotide
  misc_feature 1..20: note = Target: SCN10A; (-) strand; PAM type: YTN; PAM sequence: CTC
  source 1..20: mol_type = other DNA
ttcccacataccacatggcc

SEQ ID NO: 51708 - DNA, 20 bp, synthetic construct
  misc_feature 1..20: note = Description of Artificial Sequence: Synthetic oligonucleotide
  misc_feature 1..20: note = Target: SCN10A; (-) strand; PAM type: YTN; PAM sequence: CTA
  source 1..20: mol_type = other DNA
ggccagtgctcttcccacat

SEQ ID NO: 51709 - DNA, 20 bp, synthetic construct
  misc_feature 1..20: note = Description of Artificial Sequence: Synthetic oligonucleotide
  misc_feature 1..20: note = Target: SCN10A; (-) strand; PAM type: YTN; PAM sequence: CTC
  source 1..20: mol_type = other DNA
ctaggccagtgctcttccca

SEQ ID NO: 51710 - DNA, 20 bp, synthetic construct
  misc_feature 1..20: note = Description of Artificial Sequence: Synthetic oligonucleotide
  misc_feature 1..20: note = Target: SCN10A; (-) strand; PAM type: YTN; PAM sequence: TTG
  source 1..20: mol_type = other DNA
tcccaactcctaggccagtg

SEQ ID NO: 51711 - DNA, 20 bp, synthetic construct
  misc_feature 1..20: note = Description of Artificial Sequence: Synthetic oligonucleotide
  misc_feature 1..20: note = Target: SCN10A; (-) strand; PAM type: YTN; PAM sequence: CTA
  source 1..20: mol_type = other DNA
ttgtcccaactcctaggcca

SEQ ID NO: 51712 - DNA, 20 bp, synthetic construct
  misc_feature 1..20: note = Description of Artificial Sequence: Synthetic oligonucleotide
  misc_feature 1..20: note = Target: SCN10A; (-) strand; PAM type: YTN; PAM sequence: CTG
  source 1..20: mol_type = other DNA
gaagcctattgtcccaactc

SEQ ID NO: 51713 - DNA, 20 bp, synthetic construct
  misc_feature 1..20: note = Description of Artificial Sequence: Synthetic oligonucleotide
  misc_feature 1..20: note = Target: SCN10A; (-) strand; PAM type: YTN; PAM sequence: CTA
  source 1..20: mol_type = other DNA
gtaagagacagtgtgacctg

SEQ ID NO: 51714 - DNA, 20 bp, synthetic construct
  misc_feature 1..20: note = Description of Artificial Sequence: Synthetic oligonucleotide
  misc_feature 1..20: note = Target: SCN10A; (-) strand; PAM type: YTN; PAM sequence: TTC
  source 1..20: mol_type = other DNA
actagtaagagacagtgtga

SEQ ID NO: 51715 - DNA, 20 bp, synthetic construct
  misc_feature 1..20: note = Description of Artificial Sequence: Synthetic oligonucleotide
  misc_feature 1..20: note = Target: SCN10A; (-) strand; PAM type: YTN; PAM sequence: CTT
  source 1..20: mol_type = other DNA
cactagtaagagacagtgtg

SEQ ID NO: 51716 - DNA, 20 bp, synthetic construct
  misc_feature 1..20: note = Description of Artificial Sequence: Synthetic oligonucleotide
  misc_feature 1..20: note = Target: SCN10A; (-) strand; PAM type: YTN; PAM sequence: CTC
  source 1..20: mol_type = other DNA
ttcactagtaagagacagtg

SEQ ID NO: 51717 - DNA, 20 bp, synthetic construct
  misc_feature 1..20: note = Description of Artificial Sequence: Synthetic oligonucleotide
  misc_feature 1..20: note = Target: SCN10A; (-) strand; PAM type: YTN; PAM sequence: CTG
  source 1..20: mol_type = other DNA
gagtataggaaacataaacc

SEQ ID NO: 51718 - DNA, 20 bp, synthetic construct
  misc_feature 1..20: note = Description of Artificial Sequence: Synthetic oligonucleotide
  misc_feature 1..20: note = Target: SCN10A; (-) strand; PAM type: YTN; PAM sequence: CTG
  source 1..20: mol_type = other DNA
aggcctggagtataggaaac

SEQ ID NO: 51719 - DNA, 20 bp, synthetic construct
  misc_feature 1..20: note = Description of Artificial Sequence: Synthetic oligonucleotide
  misc_feature 1..20: note = Target: SCN10A; (-) strand; PAM type: YTN; PAM sequence: TTA
  source 1..20: mol_type = other DNA
caagacaaaggaactgaggc

SEQ ID NO: 51720 - DNA, 20 bp, synthetic construct
  misc_feature 1..20: note = Description of Artificial Sequence: Synthetic oligonucleotide
  misc_feature 1..20: note = Target: SCN10A; (-) strand; PAM type: YTN; PAM sequence: CTT
  source 1..20: mol_type = other DNA
acaagacaaaggaactgagg

SEQ ID NO: 51721 - DNA, 20 bp, synthetic construct
  misc_feature 1..20: note = Description of Artificial Sequence: Synthetic oligonucleotide
  misc_feature 1..20: note = Target: SCN10A; (-) strand; PAM type: YTN; PAM sequence: TTG
  source 1..20: mol_type = other DNA
tccccacttacaagacaaag

SEQ ID NO: 51722 - DNA, 20 bp, synthetic construct
  misc_feature 1..20: note = Description of Artificial Sequence: Synthetic oligonucleotide
  misc_feature 1..20: note = Target: SCN10A; (-) strand; PAM type: YTN; PAM sequence: CTA
  source 1..20: mol_type = other DNA
ttgtccccacttacaagaca

SEQ ID NO: 51723 - DNA, 20 bp, synthetic construct
  misc_feature 1..20: note = Description of Artificial Sequence: Synthetic oligonucleotide
  misc_feature 1..20: note = Target: SCN10A; (-) strand; PAM type: YTN; PAM sequence: TTC
  source 1..20: mol_type = other DNA
cagggcaaagactattgtcc

SEQ ID NO: 51724 - DNA, 20 bp, synthetic construct
  misc_feature 1..20: note = Description of Artificial Sequence: Synthetic oligonucleotide
  misc_feature 1..20: note = Target: SCN10A; (-) strand; PAM type: YTN; PAM sequence: CTG
  source 1..20: mol_type = other DNA
taaggttccagggcaaagac

SEQ ID NO: 51725 - DNA, 20 bp, synthetic construct
  misc_feature 1..20: note = Description of Artificial Sequence: Synthetic oligonucleotide
  misc_feature 1..20: note = Target: SCN10A; (-) strand; PAM type: YTN; PAM sequence: TTC
  source 1..20: mol_type = other DNA
acaagaaccctgtaaggttc

SEQ ID NO: 51726 - DNA, 20 bp, synthetic construct
  misc_feature 1..20: note = Description of Artificial Sequence: Synthetic oligonucleotide
  misc_feature 1..20: note = Target: SCN10A; (-) strand; PAM type: YTN; PAM sequence: TTT
  source 1..20: mol_type = other DNA
cacaagaaccctgtaaggtt

SEQ ID NO: 51727 - DNA, 20 bp, synthetic construct
  misc_feature 1..20: note = Description of Artificial Sequence: Synthetic oligonucleotide
  misc_feature 1..20: note = Target: SCN10A; (-) strand; PAM type: YTN; PAM sequence: TTT
  source 1..20: mol_type = other DNA
tcacaagaaccctgtaaggt

SEQ ID NO: 51728 - DNA, 20 bp, synthetic construct
  misc_feature 1..20: note = Description of Artificial Sequence: Synthetic oligonucleotide
  misc_feature 1..20: note = Target: SCN10A; (-) strand; PAM type: YTN; PAM sequence: CTA
  source 1..20: mol_type = other DNA
attttcacaagaaccctgta

SEQ ID NO: 51729 - DNA, 20 bp, synthetic construct
  misc_feature 1..20: note = Description of Artificial Sequence: Synthetic oligonucleotide
  misc_feature 1..20: note = Target: SCN10A; (-) strand; PAM type: YTN; PAM sequence: CTC
  source 1..20: mol_type = other DNA
taattttcacaagaaccctg

SEQ ID NO: 51730 - DNA, 20 bp, synthetic construct
  misc_feature 1..20: note = Description of Artificial Sequence: Synthetic oligonucleotide
  misc_feature 1..20: note = Target: SCN10A; (-) strand; PAM type: YTN; PAM sequence: TTC
  source 1..20: mol_type = other DNA
tctaattttcacaagaaccc

SEQ ID NO: 51731 - DNA, 20 bp, synthetic construct
  misc_feature 1..20: note = Description of Artificial Sequence: Synthetic oligonucleotide
  misc_feature 1..20: note = Target: SCN10A; (-) strand; PAM type: YTN; PAM sequence: CTT
  source 1..20: mol_type = other DNA
ctctaattttcacaagaacc

SEQ ID NO: 51732 - DNA, 20 bp, synthetic construct
  misc_feature 1..20: note = Description of Artificial Sequence: Synthetic oligonucleotide
  misc_feature 1..20: note = Target: SCN10A; (-) strand; PAM type: YTN; PAM sequence: CTC
  source 1..20: mol_type = other DNA
ccttctctaattttcacaag

SEQ ID NO: 51733 - DNA, 20 bp, synthetic construct
  misc_feature 1..20: note = Description of Artificial Sequence: Synthetic oligonucleotide
  misc_feature 1..20: note = Target: SCN10A; (-) strand; PAM type: YTN; PAM sequence: CTA
  source 1..20: mol_type = other DNA
actcccttctctaattttca

SEQ ID NO: 51734 - DNA, 20 bp, synthetic construct
  misc_feature 1..20: note = Description of Artificial Sequence: Synthetic oligonucleotide
  misc_feature 1..20: note = Target: SCN10A; (-) strand; PAM type: YTN; PAM sequence: TTC
  source 1..20: mol_type = other DNA
acagcctaactcccttctct

SEQ ID NO: 51735 - DNA, 20 bp, synthetic construct
  misc_feature 1..20: note = Description of Artificial Sequence: Synthetic oligonucleotide
  misc_feature 1..20: note = Target: SCN10A; (-) strand; PAM type: YTN; PAM sequence: TTT
  source 1..20: mol_type = other DNA
cacagcctaactcccttctc

SEQ ID NO: 51736 - DNA, 20 bp, synthetic construct
  misc_feature 1..20: note = Description of Artificial Sequence: Synthetic oligonucleotide
  misc_feature 1..20: note = Target: SCN10A; (-) strand; PAM type: YTN; PAM sequence: TTT
  source 1..20: mol_type = other DNA
tcacagcctaactcccttct

SEQ ID NO: 51737 - DNA, 20 bp, synthetic construct
  misc_feature 1..20: note = Description of Artificial Sequence: Synthetic oligonucleotide
  misc_feature 1..20: note = Target: SCN10A; (-) strand; PAM type: YTN; PAM sequence: TTG
  source 1..20: mol_type = other DNA
gttttcacagcctaactccc

SEQ ID NO: 51738 - DNA, 20 bp, synthetic construct
  misc_feature 1..20: note = Description of Artificial Sequence: Synthetic oligonucleotide
  misc_feature 1..20: note = Target: SCN10A; (-) strand; PAM type: YTN; PAM sequence: TTC
  source 1..20: mol_type = other DNA
acagagcatatgttggtttt

SEQ ID NO: 51739 - DNA, 20 bp, synthetic construct
  misc_feature 1..20: note = Description of Artificial Sequence: Synthetic oligonucleotide
  misc_feature 1..20: note = Target: SCN10A; (-) strand; PAM type: YTN; PAM sequence: TTA
  source 1..20: mol_type = other DNA
ttcacagagcatatgttggt

SEQ ID NO: 51740 - DNA, 20 bp, synthetic construct
  misc_feature 1..20: note = Description of Artificial Sequence: Synthetic oligonucleotide
  misc_feature 1..20: note = Target: SCN10A; (-) strand; PAM type: YTN; PAM sequence: TTT
  source 1..20: mol_type = other DNA
attcacagagcatatgttgg

SEQ ID NO: 51741 - DNA, 20 bp, synthetic construct
  misc_feature 1..20: note = Description of Artificial Sequence: Synthetic oligonucleotide
  misc_feature 1..20: note = Target: SCN10A; (-) strand; PAM type: YTN; PAM sequence: CTG
  source 1..20: mol_type = other DNA
tgatcccaggtgagcattta

SEQ ID NO: 51742 - DNA, 20 bp, synthetic construct
  misc_feature 1..20: note = Description of Artificial Sequence: Synthetic oligonucleotide
  misc_feature 1..20: note = Target: SCN10A; (-) strand; PAM type: YTN; PAM sequence: TTC
  source 1..20: mol_type = other DNA
tgtgatcccaggtgagcatt

SEQ ID NO: 51743 - DNA, 20 bp, synthetic construct
  misc_feature 1..20: note = Description of Artificial Sequence: Synthetic oligonucleotide
  misc_feature 1..20: note = Target: SCN10A; (-) strand; PAM type: YTN; PAM sequence: TTT
  source 1..20: mol_type = other DNA
ctgtgatcccaggtgagcat

SEQ ID NO: 51744 - DNA, 20 bp, synthetic construct
  misc_feature 1..20: note = Description of Artificial Sequence: Synthetic oligonucleotide
  misc_feature 1..20: note = Target: SCN10A; (-) strand; PAM type: YTN; PAM sequence: TTA
  source 1..20: mol_type = other DNA
aaaacagtttctgtgatccc

SEQ ID NO: 51745 - DNA, 20 bp, synthetic construct
  misc_feature 1..20: note = Description of Artificial Sequence: Synthetic oligonucleotide
  misc_feature 1..20: note = Target: SCN10A; (-) strand; PAM type: YTN; PAM sequence: TTA
  source 1..20: mol_type = other DNA
gagcattaaaaacagtttct

SEQ ID NO: 51746 - DNA, 20 bp, synthetic construct
  misc_feature 1..20: note = Description of Artificial Sequence: Synthetic oligonucleotide
  misc_feature 1..20: note = Target: SCN10A; (-) strand; PAM type: YTN; PAM sequence: CTT
  source 1..20: mol_type = other DNA
agagcattaaaaacagtttc

SEQ ID NO: 51747 - DNA, 20 bp, synthetic construct
  misc_feature 1..20: note = Description of Artificial Sequence: Synthetic oligonucleotide
  misc_feature 1..20: note = Target: SCN10A; (-) strand; PAM type: YTN; PAM sequence: TTC
  source 1..20: mol_type = other DNA
ttagagcattaaaaacagtt

SEQ ID NO: 51748 - DNA, 20 bp, synthetic construct
  misc_feature 1..20: note = Description of Artificial Sequence: Synthetic oligonucleotide
  misc_feature 1..20: note = Target: SCN10A; (-) strand; PAM type: YTN; PAM sequence: TTC
  source 1..20: mol_type = other DNA
agagttcttagagcattaaa

SEQ ID NO: 51749 - DNA, 20 bp, synthetic construct
  misc_feature 1..20: note = Description of Artificial Sequence: Synthetic oligonucleotide
  misc_feature 1..20: note = Target: SCN10A; (-) strand; PAM type: YTN; PAM sequence: CTG
  source 1..20: mol_type = other DNA
cggacattcagagttcttag

SEQ ID NO: 51750 - DNA, 20 bp, synthetic construct
  misc_feature 1..20: note = Description of Artificial Sequence: Synthetic oligonucleotide
  misc_feature 1..20: note = Target: SCN10A; (-) strand; PAM type: YTN; PAM sequence: CTC
  source 1..20: mol_type = other DNA
aggcctgcggacattcagag

SEQ ID NO: 51751 - DNA, 20 bp, synthetic construct
  misc_feature 1..20: note = Description of Artificial Sequence: Synthetic oligonucleotide
  misc_feature 1..20: note = Target: SCN10A; (-) strand; PAM type: YTN; PAM sequence: CTC
  source 1..20: mol_type = other DNA
cgtgggatctcaggcctgcg

SEQ ID NO: 51752 - DNA, 20 bp, synthetic construct
  misc_feature 1..20: note = Description of Artificial Sequence: Synthetic oligonucleotide
  misc_feature 1..20: note = Target: SCN10A; (-) strand; PAM type: YTN; PAM sequence: TTG
  source 1..20: mol_type = other DNA
gcacagcaatagatctccgt

SEQ ID NO: 51753 - DNA, 20 bp, synthetic construct
  misc_feature 1..20: note = Description of Artificial Sequence: Synthetic oligonucleotide
  misc_feature 1..20: note = Target: SCN10A; (-) strand; PAM type: YTN; PAM sequence: CTA
  source 1..20: mol_type = other DNA
cagatatgttggcacagcaa

SEQ ID NO: 51754 - DNA, 20 bp, synthetic construct
  misc_feature 1..20: note = Description of Artificial Sequence: Synthetic oligonucleotide
  misc_feature 1..20: note = Target: SCN10A; (-) strand; PAM type: YTN; PAM sequence: CTG
  source 1..20: mol_type = other DNA
gtcctacagatatgttggca

SEQ ID NO: 51755 - DNA, 20 bp, synthetic construct
  misc_feature 1..20: note = Description of Artificial Sequence: Synthetic oligonucleotide
  misc_feature 1..20: note = Target: SCN10A; (-) strand; PAM type: YTN; PAM sequence: TTC
  source 1..20: mol_type = other DNA
tggtcctacagatatgttgg

SEQ ID NO: 51756 - DNA, 20 bp, synthetic construct
  misc_feature 1..20: note = Description of Artificial Sequence: Synthetic oligonucleotide
  misc_feature 1..20: note = Target: SCN10A; (-) strand; PAM type: YTN; PAM sequence: CTT
  source 1..20: mol_type = other DNA
ctggtcctacagatatgttg

SEQ ID NO: 51757 - DNA, 20 bp, synthetic construct
  misc_feature 1..20: note = Description of Artificial Sequence: Synthetic oligonucleotide
  misc_feature 1..20: note = Target: SCN10A; (-) strand; PAM type: YTN; PAM sequence: CTA
  source 1..20: mol_type = other DNA
acttctggtcctacagatat

SEQ ID NO: 51758 - DNA, 20 bp, synthetic construct
  misc_feature 1..20: note = Description of Artificial Sequence: Synthetic oligonucleotide
  misc_feature 1..20: note = Target: SCN10A; (-) strand; PAM type: YTN; PAM sequence: CTG
  source 1..20: mol_type = other DNA
actaacttctggtcctacag

SEQ ID NO: 51759 - DNA, 20 bp, synthetic construct
  misc_feature 1..20: note = Description of Artificial Sequence: Synthetic oligonucleotide
  misc_feature 1..20: note = Target: SCN10A; (-) strand; PAM type: YTN; PAM sequence: TTG
  source 1..20: mol_type = other DNA
cagagatgctgactaacttc

SEQ ID NO: 51760 - DNA, 20 bp, synthetic construct
  misc_feature 1..20: note = Description of Artificial Sequence: Synthetic oligonucleotide
  misc_feature 1..20: note = Target: SCN10A; (-) strand; PAM type: YTN; PAM sequence: CTT
  source 1..20: mol_type = other DNA
gcagagatgctgactaactt

SEQ ID NO: 51761 - DNA, 20 bp, synthetic construct
  misc_feature 1..20: note = Description of Artificial Sequence: Synthetic oligonucleotide
  misc_feature 1..20: note = Target: SCN10A; (-) strand; PAM type: YTN; PAM sequence: TTG
  source 1..20: mol_type = other DNA
cttgcagagatgctgactaa

SEQ ID NO: 51762 - DNA, 20 bp, synthetic construct
  misc_feature 1..20: note = Description of Artificial Sequence: Synthetic oligonucleotide
  misc_feature 1..20: note = Target: SCN10A; (-) strand; PAM type: YTN; PAM sequence: CTT
  source 1..20: mol_type = other DNA
gcttgcagagatgctgacta

SEQ ID NO: 51763 - DNA, 20 bp, synthetic construct
  misc_feature 1..20: note = Description of Artificial Sequence: Synthetic oligonucleotide
  misc_feature 1..20: note = Target: SCN10A; (-) strand; PAM type: YTN; PAM sequence: CTG
  source 1..20: mol_type = other DNA
catgcatccccaggaccctt

SEQ ID NO: 51764 - DNA, 20 bp, synthetic construct
  misc_feature 1..20: note = Description of Artificial Sequence: Synthetic oligonucleotide
  misc_feature 1..20: note = Target: SCN10A; (-) strand; PAM type: YTN; PAM sequence: TTA
  source 1..20: mol_type = other DNA
tgctgcatgcatccccagga

SEQ ID NO: 51765 - DNA, 20 bp, synthetic construct
  misc_feature 1..20: note = Description of Artificial Sequence: Synthetic oligonucleotide
  misc_feature 1..20: note = Target: SCN10A; (-) strand; PAM type: YTN; PAM sequence: TTT
  source 1..20: mol_type = other DNA
atgctgcatgcatccccagg

SEQ ID NO: 51766 - DNA, 20 bp, synthetic construct
  misc_feature 1..20: note = Description of Artificial Sequence: Synthetic oligonucleotide
  misc_feature 1..20: note = Target: SCN10A; (-) strand; PAM type: YTN; PAM sequence: TTA
  source 1..20: mol_type = other DNA
tttatgctgcatgcatcccc

SEQ ID NO: 51767 - DNA, 20 bp, synthetic construct
  misc_feature 1..20: note = Description of Artificial Sequence: Synthetic oligonucleotide
  misc_feature 1..20: note = Target: SCN10A; (-) strand; PAM type: YTN; PAM sequence: CTT
  source 1..20: mol_type = other DNA
atttatgctgcatgcatccc

SEQ ID NO: 51768 - DNA, 20 bp, synthetic construct
  misc_feature 1..20: note = Description of Artificial Sequence: Synthetic oligonucleotide
  misc_feature 1..20: note = Target: SCN10A; (-) strand; PAM type: YTN; PAM sequence: TTA
  source 1..20: mol_type = other DNA
tccttatttatgctgcatgc

SEQ ID NO: 51769 - DNA, 20 bp, synthetic construct
  misc_feature 1..20: note = Description of Artificial Sequence: Synthetic oligonucleotide
  misc_feature 1..20: note = Target: SCN10A; (-) strand; PAM type: YTN; PAM sequence: CTA
  source 1..20: mol_type = other DNA
atgataccccaggttatcct

SEQ ID NO: 51770 - DNA, 20 bp, synthetic construct
  misc_feature 1..20: note = Description of Artificial Sequence: Synthetic oligonucleotide
  misc_feature 1..20: note = Target: SCN10A; (-) strand; PAM type: YTN; PAM sequence: CTA
  source 1..20: mol_type = other DNA
ggctaatgataccccaggtt

SEQ ID NO: 51771 - DNA, 20 bp, synthetic construct
  misc_feature 1..20: note = Description of Artificial Sequence: Synthetic oligonucleotide
  misc_feature 1..20: note = Target: SCN10A; (-) strand; PAM type: YTN; PAM sequence: TTC
  source 1..20: mol_type = other DNA
taggctaatgataccccagg

SEQ ID NO: 51772 - DNA, 20 bp, synthetic construct
  misc_feature 1..20: note = Description of Artificial Sequence: Synthetic oligonucleotide
  misc_feature 1..20: note = Target: SCN10A; (-) strand; PAM type: YTN; PAM sequence: TTT
  source 1..20: mol_type = other DNA
ctaggctaatgataccccag

SEQ ID NO: 51773 - DNA, 20 bp, synthetic construct
  misc_feature 1..20: note = Description of Artificial Sequence: Synthetic oligonucleotide
  misc_feature 1..20: note = Target: SCN10A; (-) strand; PAM type: YTN; PAM sequence: CTT
  source 1..20: mol_type = other DNA
tctaggctaatgatacccca

SEQ ID NO: 51774 - DNA, 20 bp, synthetic construct
  misc_feature 1..20: note = Description of Artificial Sequence: Synthetic oligonucleotide
  misc_feature 1..20: note = Target: SCN10A; (-) strand; PAM type: YTN; PAM sequence: CTG
  source 1..20: mol_type = other DNA
catcctttctaggctaatga

SEQ ID NO: 51775 - DNA, 20 bp, synthetic construct
  misc_feature 1..20: note = Description of Artificial Sequence: Synthetic oligonucleotide
  misc_feature 1..20: note = Target: SCN10A; (-) strand; PAM type: YTN; PAM sequence: TTC
  source 1..20: mol_type = other DNA
tgcatcctttctaggctaat

SEQ ID NO: 51776 - DNA, 20 bp, synthetic construct
  misc_feature 1..20: note = Description of Artificial Sequence: Synthetic oligonucleotide
  misc_feature 1..20: note = Target: SCN10A; (-) strand; PAM type: YTN; PAM sequence: CTA
  source 1..20: mol_type = other DNA
agtgtccattctgcatcctt

SEQ ID NO: 51777 - DNA, 20 bp, synthetic construct
  misc_feature 1..20: note = Description of Artificial Sequence: Synthetic oligonucleotide
  misc_feature 1..20: note = Target: SCN10A; (-) strand; PAM type: YTN; PAM sequence: TTC
  source 1..20: mol_type = other DNA
taagtgtccattctgcatcc

SEQ ID NO: 51778 - DNA, 20 bp, synthetic construct
  misc_feature 1..20: note = Description of Artificial Sequence: Synthetic oligonucleotide
  misc_feature 1..20: note = Target: SCN10A; (-) strand; PAM type: YTN; PAM sequence: CTA
  source 1..20: mol_type = other DNA
gattctaagtgtccattctg

SEQ ID NO: 51779 - DNA, 20 bp, synthetic construct
  misc_feature 1..20: note = Description of Artificial Sequence: Synthetic oligonucleotide
  misc_feature 1..20: note = Target: SCN10A; (-) strand; PAM type: YTN; PAM sequence: CTA
  source 1..20: mol_type = other DNA
tagatggcagtgtcactaga

SEQ ID NO: 51780 - DNA, 20 bp, synthetic construct
  misc_feature 1..20: note = Description of Artificial Sequence: Synthetic oligonucleotide
  misc_feature 1..20: note = Target: SCN10A; (-) strand; PAM type: YTN; PAM sequence: TTG
  source 1..20: mol_type = other DNA
caataatgaaatcagtgtca

SEQ ID NO: 51781 - DNA, 20 bp, synthetic construct
  misc_feature 1..20: note = Description of Artificial Sequence: Synthetic oligonucleotide
  misc_feature 1..20: note = Target: SCN10A; (-) strand; PAM type: YTN; PAM sequence: CTG
  source 1..20: mol_type = other DNA
aaagatgttgcaataatgaa

SEQ ID NO: 51782 - DNA, 20 bp, synthetic construct
  misc_feature 1..20: note = Description of Artificial Sequence: Synthetic oligonucleotide
  misc_feature 1..20: note = Target: SCN10A; (-) strand; PAM type: YTN; PAM sequence: CTC
  source 1..20: mol_type = other DNA
tgaaagatgttgcaataatg

SEQ ID NO: 51783 - DNA, 20 bp, synthetic construct
  misc_feature 1..20: note = Description of Artificial Sequence: Synthetic oligonucleotide
  misc_feature 1..20: note = Target: SCN10A; (-) strand; PAM type: YTN; PAM sequence: CTC
  source 1..20: mol_type = other DNA
aaagggtccactctgaaaga

SEQ ID NO: 51784 - DNA, 20 bp, synthetic construct
  misc_feature 1..20: note = Description of Artificial Sequence: Synthetic oligonucleotide
  misc_feature 1..20: note = Target: SCN10A; (-) strand; PAM type: YTN; PAM sequence: TTC
  source 1..20: mol_type = other DNA
tcaaagggtccactctgaaa

SEQ ID NO: 51785 - DNA, 20 bp, synthetic construct
  misc_feature 1..20: note = Description of Artificial Sequence: Synthetic oligonucleotide
  misc_feature 1..20: note = Target: SCN10A; (-) strand; PAM type: YTN; PAM sequence: CTT
  source 1..20: mol_type = other DNA
ctcaaagggtccactctgaa

SEQ ID NO: 51786 - DNA, 20 bp, synthetic construct
  misc_feature 1..20: note = Description of Artificial Sequence: Synthetic oligonucleotide
  misc_feature 1..20: note = Target: SCN10A; (-) strand; PAM type: YTN; PAM sequence: CTA
  source 1..20: mol_type = other DNA
gatcacaatgcatcttctca

SEQ ID NO: 51787 - DNA, 20 bp, synthetic construct
  misc_feature 1..20: note = Description of Artificial Sequence: Synthetic oligonucleotide
  misc_feature 1..20: note = Target: SCN10A; (-) strand; PAM type: YTN; PAM sequence: TTG
  source 1..20: mol_type = other DNA
cctagatcacaatgcatctt

SEQ ID NO: 51788 - DNA, 20 bp, synthetic construct
  misc_feature 1..20: note = Description of Artificial Sequence: Synthetic oligonucleotide
  misc_feature 1..20: note = Target: SCN10A; (-) strand; PAM type: YTN; PAM sequence: TTG
  source 1..20: mol_type = other DNA
aagatccgtccacatgcagt

SEQ ID NO: 51789 - DNA, 20 bp, synthetic construct
  misc_feature 1..20: note = Description of Artificial Sequence: Synthetic oligonucleotide
  misc_feature 1..20: note = Target: SCN10A; (-) strand; PAM type: YTN; PAM sequence: TTT
  source 1..20: mol_type = other DNA
gaagatccgtccacatgcag

SEQ ID NO: 51790 - DNA, 20 bp, synthetic construct
  misc_feature 1..20: note = Description of Artificial Sequence: Synthetic oligonucleotide
  misc_feature 1..20: note = Target: SCN10A; (-) strand; PAM type: YTN; PAM sequence: CTG
  source 1..20: mol_type = other DNA
tgtttgaagatccgtccaca

SEQ ID NO: 51791 - DNA, 20 bp, synthetic construct
  misc_feature 1..20: note = Description of Artificial Sequence: Synthetic oligonucleotide
  misc_feature 1..20: note = Target: SCN10A; (-) strand; PAM type: YTN; PAM sequence: CTC
  source 1..20: mol_type = other DNA
ctgtgtttgaagatccgtcc

SEQ ID NO: 51792 - DNA, 20 bp, synthetic construct
  misc_feature 1..20: note = Description of Artificial Sequence: Synthetic oligonucleotide
  misc_feature 1..20: note = Target: SCN10A; (-) strand; PAM type: YTN; PAM sequence: TTG
  source 1..20: mol_type = other DNA
gtcaaactcctgtgtttgaa

SEQ ID NO: 51793 - DNA, 20 bp, synthetic construct
  misc_feature 1..20: note = Description of Artificial Sequence: Synthetic oligonucleotide
  misc_feature 1..20: note = Target: SCN10A; (-) strand; PAM type: YTN; PAM sequence: CTG
  source 1..20: mol_type = other DNA
gttggtcaaactcctgtgtt

SEQ ID NO: 51794 - DNA, 20 bp, synthetic construct
  misc_feature 1..20: note = Description of Artificial Sequence: Synthetic oligonucleotide
  misc_feature 1..20: note = Target: SCN10A; (-) strand; PAM type: YTN; PAM sequence: CTG
  source 1..20: mol_type = other DNA
aggagactggttggtcaaac

SEQ ID NO: 51795 - DNA, 20 bp, synthetic construct
  misc_feature 1..20: note = Description of Artificial Sequence: Synthetic oligonucleotide
  misc_feature 1..20: note = Target: SCN10A; (-) strand; PAM type: YTN; PAM sequence: CTG
  source 1..20: mol_type = other DNA
agaaatcagtgtctgaggag

SEQ ID NO: 51796 - DNA, 20 bp, synthetic construct
  misc_feature 1..20: note = Description of Artificial Sequence: Synthetic oligonucleotide
  misc_feature 1..20: note = Target: SCN10A; (-) strand; PAM type: YTN; PAM sequence: TTC
  source 1..20: mol_type = other DNA
tgagaaatcagtgtctgagg

SEQ ID NO: 51797 - DNA, 20 bp, synthetic construct
  misc_feature 1..20: note = Description of Artificial Sequence: Synthetic oligonucleotide
  misc_feature 1..20: note = Target: SCN10A; (-) strand; PAM type: YTN; PAM sequence: CTT
  source 1..20: mol_type = other DNA
ctgagaaatcagtgtctgag

SEQ ID NO: 51798 - DNA, 20 bp, synthetic construct
  misc_feature 1..20: note = Description of Artificial Sequence: Synthetic oligonucleotide
  misc_feature 1..20: note = Target: SCN10A; (-) strand; PAM type: YTN; PAM sequence: CTC
  source 1..20: mol_type = other DNA
cttctgagaaatcagtgtct

SEQ ID NO: 51799 - DNA, 20 bp, synthetic construct
  misc_feature 1..20: note = Description of Artificial Sequence: Synthetic oligonucleotide
  misc_feature 1..20: note = Target: SCN10A; (-) strand; PAM type: YTN; PAM sequence: CTG
  source 1..20: mol_type = other DNA
acatggcggtctccttctga

SEQ ID NO: 51800 - DNA, 20 bp, synthetic construct
  misc_feature 1..20: note = Description of Artificial Sequence: Synthetic oligonucleotide
  misc_feature 1..20: note = Target: SCN10A; (-) strand; PAM type: YTN; PAM sequence: TTG
  source 1..20: mol_type = other DNA
tacccccctgacatggcggt

SEQ ID NO: 51801 - DNA, 20 bp, synthetic construct
  misc_feature 1..20: note = Description of Artificial Sequence: Synthetic oligonucleotide
  misc_feature 1..20: note = Target: SCN10A; (-) strand; PAM type: YTN; PAM sequence: CTT
  source 1..20: mol_type = other DNA
gtacccccctgacatggcgg

SEQ ID NO: 51802 - DNA, 20 bp, synthetic construct
  misc_feature 1..20: note = Description of Artificial Sequence: Synthetic oligonucleotide
  misc_feature 1..20: note = Target: SCN10A; (-) strand; PAM type: YTN; PAM sequence: CTG
  source 1..20: mol_type = other DNA
tcacagtggatcagaaaagg

SEQ ID NO: 51803 - DNA, 20 bp, synthetic construct
  misc_feature 1..20: note = Description of Artificial Sequence: Synthetic oligonucleotide
  misc_feature 1..20: note = Target: SCN10A; (-) strand; PAM type: YTN; PAM sequence: TTA
  source 1..20: mol_type = other DNA
gcctgtcacagtggatcaga

SEQ ID NO: 51804 - DNA, 20 bp, synthetic construct
  misc_feature 1..20: note = Description of Artificial Sequence: Synthetic oligonucleotide
  misc_feature 1..20: note = Target: SCN10A; (-) strand; PAM type: YTN; PAM sequence: CTG
  source 1..20: mol_type = other DNA
agataacagttagcctgtca

SEQ ID NO: 51805 - DNA, 20 bp, synthetic construct
  misc_feature 1..20: note = Description of Artificial Sequence: Synthetic oligonucleotide
  misc_feature 1..20: note = Target: SCN10A; (-) strand; PAM type: YTN; PAM sequence: CTC
  source 1..20: mol_type = other DNA
aaatctgagataacagttag

SEQ ID NO: 51806 - DNA, 20 bp, synthetic construct
  misc_feature 1..20: note = Description of Artificial Sequence: Synthetic oligonucleotide
  misc_feature 1..20: note = Target: SCN10A; (-) strand; PAM type: YTN; PAM sequence: TTA
  source 1..20: mol_type = other DNA
gtcccatgcccatgaggaga

SEQ ID NO: 51807 - DNA, 20 bp, synthetic construct
  misc_feature 1..20: note = Description of Artificial Sequence: Synthetic oligonucleotide
  misc_feature 1..20: note = Target: SCN10A; (-) strand; PAM type: YTN; PAM sequence: TTC
  source 1..20: mol_type = other DNA
caagattagtcccatgccca

SEQ ID NO: 51808 - DNA, 20 bp, synthetic construct
  misc_feature 1..20: note = Description of Artificial Sequence: Synthetic oligonucleotide
  misc_feature 1..20: note = Target: SCN10A; (-) strand; PAM type: YTN; PAM sequence: TTT
  source 1..20: mol_type = other DNA
ccaagattagtcccatgccc

SEQ ID NO: 51809 - DNA, 20 bp, synthetic construct
  misc_feature 1..20: note = Description of Artificial Sequence: Synthetic oligonucleotide
  misc_feature 1..20: note = Target: SCN10A; (-) strand; PAM type: YTN; PAM sequence: CTT
  source 1..20: mol_type = other DNA
tccaagattagtcccatgcc

SEQ ID NO: 51810 - DNA, 20 bp, synthetic construct
  misc_feature 1..20: note = Description of Artificial Sequence: Synthetic oligonucleotide
  misc_feature 1..20: note = Target: SCN10A; (-) strand; PAM type: YTN; PAM sequence: TTG
  source 1..20: mol_type = other DNA
ctttccaagattagtcccat

SEQ ID NO: 51811 - DNA, 20 bp, synthetic construct
  misc_feature 1..20: note = Description of Artificial Sequence: Synthetic oligonucleotide
  misc_feature 1..20: note = Target: SCN10A; (-) strand; PAM type: YTN; PAM sequence: TTC
  source 1..20: mol_type = other DNA
gggggttgctttccaagatt

SEQ ID NO: 51812 - DNA, 20 bp, synthetic construct
  misc_feature 1..20: note = Description of Artificial Sequence: Synthetic oligonucleotide
  misc_feature 1..20: note = Target: SCN10A; (-) strand; PAM type: YTN; PAM sequence: CTT
  source 1..20: mol_type = other DNA
cgggggttgctttccaagat

SEQ ID NO: 51813 - DNA, 20 bp, synthetic construct
  misc_feature 1..20: note = Description of Artificial Sequence: Synthetic oligonucleotide
  misc_feature 1..20: note = Target: SCN10A; (-) strand; PAM type: YTN; PAM sequence: TTG
  source 1..20: mol_type = other DNA
ccacagagtaccgcttcggg

SEQ ID NO: 51814 - DNA, 20 bp, synthetic construct
  misc_feature 1..20: note = Description of Artificial Sequence: Synthetic oligonucleotide
  misc_feature 1..20: note = Target: SCN10A; (-) strand; PAM type: YTN; PAM sequence: CTT
  source 1..20: mol_type = other DNA
gccacagagtaccgcttcgg

SEQ ID NO: 51815 - DNA, 20 bp, synthetic construct
  misc_feature 1..20: note = Description of Artificial Sequence: Synthetic oligonucleotide
  misc_feature 1..20: note = Target: SCN10A; (-) strand; PAM type: YTN; PAM sequence: TTC
  source 1..20: mol_type = other DNA
ttgccacagagtaccgcttc

SEQ ID NO: 51816 - DNA, 20 bp, synthetic construct
  misc_feature 1..20: note = Description of Artificial Sequence: Synthetic oligonucleotide
  misc_feature 1..20: note = Target: SCN10A; (-) strand; PAM type: YTN; PAM sequence: CTG
  source 1..20: mol_type = other DNA
gggttcttgccacagagtac

SEQ ID NO: 51817 - DNA, 20 bp, synthetic construct
  misc_feature 1..20: note = Description of Artificial Sequence: Synthetic oligonucleotide
  misc_feature 1..20: note = Target: SCN10A; (-) strand; PAM type: YTN; PAM sequence: TTG
  source 1..20: mol_type = other DNA
tatggcctggggttcttgcc

SEQ ID NO: 51818 - DNA, 20 bp, synthetic construct
  misc_feature 1..20: note = Description of Artificial Sequence: Synthetic oligonucleotide
  misc_feature 1..20: note = Target: SCN10A; (-) strand; PAM type: YTN; PAM sequence: TTG
  source 1..20: mol_type = other DNA
gaattgtatggcctggggtt

SEQ ID NO: 51819 - DNA, 20 bp, synthetic construct
  misc_feature 1..20: note = Description of Artificial Sequence: Synthetic oligonucleotide
  misc_feature 1..20: note = Target: SCN10A; (-) strand; PAM type: YTN; PAM sequence: TTT
  source 1..20: mol_type = other DNA
ggaattgtatggcctggggt

SEQ ID NO: 51820 - DNA, 20 bp, synthetic construct
  misc_feature 1..20: note = Description of Artificial Sequence: Synthetic oligonucleotide
  misc_feature 1..20: note = Target: SCN10A; (-) strand; PAM type: YTN; PAM sequence: CTC
  source 1..20: mol_type = other DNA
atttggaattgtatggcctg

SEQ ID NO: 51821 - DNA, 20 bp, synthetic construct
  misc_feature 1..20: note = Description of Artificial Sequence: Synthetic oligonucleotide
  misc_feature 1..20: note = Target: SCN10A; (-) strand; PAM type: YTN; PAM sequence: TTC
  source 1..20: mol_type = other DNA
ctcatttggaattgtatggc

SEQ ID NO: 51822 - DNA, 20 bp, synthetic construct
  misc_feature 1..20: note = Description of Artificial Sequence: Synthetic oligonucleotide
  misc_feature 1..20: note = Target: SCN10A; (-) strand; PAM type: YTN; PAM sequence: CTT
  source 1..20: mol_type = other DNA
cctcatttggaattgtatgg

SEQ ID NO: 51823 - DNA, 20 bp, synthetic construct
  misc_feature 1..20: note = Description of Artificial Sequence: Synthetic oligonucleotide
  misc_feature 1..20: note = Target: SCN10A; (-) strand; PAM type: YTN; PAM sequence: TTC
  source 1..20: mol_type = other DNA
agcttcctcatttggaattg

SEQ ID NO: 51824 - DNA, 20 bp, synthetic construct
  misc_feature 1..20: note = Description of Artificial Sequence: Synthetic oligonucleotide
  misc_feature 1..20: note = Target: SCN10A; (-) strand; PAM type: YTN; PAM sequence: CTC
  source 1..20: mol_type = other DNA
agttcagcttcctcatttgg

SEQ ID NO: 51825 - DNA, 20 bp, synthetic construct
  misc_feature 1..20: note = Description of Artificial Sequence: Synthetic oligonucleotide
  misc_feature 1..20: note = Target: SCN10A; (-) strand; PAM type: YTN; PAM sequence: TTC
  source 1..20: mol_type = other DNA
atctcagttcagcttcctca

SEQ ID NO: 51826 - DNA, 20 bp, synthetic construct
  misc_feature 1..20: note = Description of Artificial Sequence: Synthetic oligonucleotide
  misc_feature 1..20: note = Target: SCN10A; (-) strand; PAM type: YTN; PAM sequence: CTT
  source 1..20: mol_type = other DNA
catctcagttcagcttcctc

SEQ ID NO: 51827 - DNA, 20 bp, synthetic construct
  misc_feature 1..20: note = Description of Artificial Sequence: Synthetic oligonucleotide
  misc_feature 1..20: note = Target: SCN10A; (-) strand; PAM type: YTN; PAM sequence: TTC
  source 1..20: mol_type = other DNA
ttcatctcagttcagcttcc

SEQ ID NO: 51828 - DNA, 20 bp, synthetic construct
  misc_feature 1..20: note = Description of Artificial Sequence: Synthetic oligonucleotide
  misc_feature 1..20: note = Target: SCN10A; (-) strand; PAM type: YTN; PAM sequence: CTG
  source 1..20: mol_type = other DNA
aagaaggttcttcatctcag

SEQ ID NO: 51829 - DNA, 20 bp, synthetic construct
  misc_feature 1..20: note = Description of Artificial Sequence: Synthetic oligonucleotide
  misc_feature 1..20: note = Target: SCN10A; (-) strand; PAM type: YTN; PAM sequence: CTC
  source 1..20: mol_type = other DNA
tgaagaaggttcttcatctc

SEQ ID NO: 51830 - DNA, 20 bp, synthetic construct
  misc_feature 1..20: note = Description of Artificial Sequence: Synthetic oligonucleotide
  misc_feature 1..20: note = Target: SCN10A; (-) strand; PAM type: YTN; PAM sequence: CTC
  source 1..20: mol_type = other DNA
acactctgaagaaggttctt

SEQ ID NO: 51831 - DNA, 20 bp, synthetic construct
  misc_feature 1..20: note = Description of Artificial Sequence: Synthetic oligonucleotide
  misc_feature 1..20: note = Target: SCN10A; (-) strand; PAM type: YTN; PAM sequence: TTA
  source 1..20: mol_type = other DNA
tgggtgtatccaggctcaca

SEQ ID NO: 51832 - DNA, 20 bp, synthetic construct
  misc_feature 1..20: note = Description of Artificial Sequence: Synthetic oligonucleotide
  misc_feature 1..20: note = Target: SCN10A; (-) strand; PAM type: YTN; PAM sequence: CTT
  source 1..20: mol_type = other DNA
atgggtgtatccaggctcac

SEQ ID NO: 51833 - DNA, 20 bp, synthetic construct
  misc_feature 1..20: note = Description of Artificial Sequence: Synthetic oligonucleotide
  misc_feature 1..20: note = Target: SCN10A; (-) strand; PAM type: YTN; PAM sequence: TTG
  source 1..20: mol_type = other DNA
catgggtgtccatgtggggc

SEQ ID NO: 51834 - DNA, 20 bp, synthetic construct
  misc_feature 1..20: note = Description of Artificial Sequence: Synthetic oligonucleotide
  misc_feature 1..20: note = Target: SCN10A; (-) strand; PAM type: YTN; PAM sequence: TTT
  source 1..20: mol_type = other DNA
gcatgggtgtccatgtgggg

SEQ ID NO: 51835 - DNA, 20 bp, synthetic construct
  misc_feature 1..20: note = Description of Artificial Sequence: Synthetic oligonucleotide
  misc_feature 1..20: note = Target: SCN10A; (-) strand; PAM type: YTN; PAM sequence: TTG
  source 1..20: mol_type = other DNA
aaataaaataaaataaaaag

SEQ ID NO: 51836 - DNA, 20 bp, synthetic construct
  misc_feature 1..20: note = Description of Artificial Sequence: Synthetic oligonucleotide
  misc_feature 1..20: note = Target: SCN10A; (-) strand; PAM type: YTN; PAM sequence: CTA
  source 1..20: mol_type = other DNA
ttgaaataaaataaaataaa

SEQ ID NO: 51837 - DNA, 20 bp, synthetic construct
  misc_feature 1..20: note = Description of Artificial Sequence: Synthetic oligonucleotide
  misc_feature 1..20: note = Target: SCN10A; (-) strand; PAM type: YTN; PAM sequence: CTC
  source 1..20: mol_type = other DNA
aaaactattgaaataaaata

SEQ ID NO: 51838 - DNA, 20 bp, synthetic construct
  misc_feature 1..20: note = Description of Artificial Sequence: Synthetic oligonucleotide
  misc_feature 1..20: note = Target: SCN10A; (-) strand; PAM type: YTN; PAM sequence: TTC
  source 1..20: mol_type = other DNA
cctcaaaactattgaaataa

SEQ ID NO: 51839 - DNA, 20 bp, synthetic construct
  misc_feature 1..20: note = Description of Artificial Sequence: Synthetic oligonucleotide
  misc_feature 1..20: note = Target: SCN10A; (-) strand; PAM type: YTN; PAM sequence: CTG
  source 1..20: mol_type = other DNA
ttccctcaaaactattgaaa

SEQ ID NO: 51840 - DNA, 20 bp, synthetic construct
  misc_feature 1..20: note = Description of Artificial Sequence: Synthetic oligonucleotide
  misc_feature 1..20: note = Target: SCN10A; (-) strand; PAM type: YTN; PAM sequence: TTC
  source 1..20: mol_type = other DNA
atgtaaccaaaaaccacctg

SEQ ID NO: 51841 - DNA, 20 bp, synthetic construct
  misc_feature 1..20: note = Description of Artificial Sequence: Synthetic oligonucleotide
  misc_feature 1..20: note = Target: SCN10A; (-) strand; PAM type: YTN; PAM sequence: TTA
  source 1..20: mol_type = other DNA
ttcatgtaaccaaaaaccac

SEQ ID NO: 51842 - DNA, 20 bp, synthetic construct
  misc_feature 1..20: note = Description of Artificial Sequence: Synthetic oligonucleotide
  misc_feature 1..20: note = Target: SCN10A; (-) strand; PAM type: YTN; PAM sequence: CTT
  source 1..20: mol_type = other DNA
attcatgtaaccaaaaacca

SEQ ID NO: 51843 - DNA, 20 bp, synthetic construct
  misc_feature 1..20: note = Description of Artificial Sequence: Synthetic oligonucleotide
  misc_feature 1..20: note = Target: SCN10A; (-) strand; PAM type: YTN; PAM sequence: TTG
  source 1..20: mol_type = other DNA
aaatacaaataaagaactta

SEQ ID NO: 51844 - DNA, 20 bp, synthetic construct
  misc_feature 1..20: note = Description of Artificial Sequence: Synthetic oligonucleotide
  misc_feature 1..20: note = Target: SCN10A; (-) strand; PAM type: YTN; PAM sequence: CTA
  source 1..20: mol_type = other DNA
ttgaaatacaaataaagaac

SEQ ID NO: 51845 - DNA, 20 bp, synthetic construct
  misc_feature 1..20: note = Description of Artificial Sequence: Synthetic oligonucleotide
  misc_feature 1..20: note = Target: SCN10A; (-) strand; PAM type: YTN; PAM sequence: TTC
  source 1..20: mol_type = other DNA
ccaaaactattgaaatacaa

SEQ ID NO: 51846 - DNA, 20 bp, synthetic construct
  misc_feature 1..20: note = Description of Artificial Sequence: Synthetic oligonucleotide
  misc_feature 1..20: note = Target: SCN10A; (-) strand; PAM type: YTN; PAM sequence: TTT
  source 1..20: mol_type = other DNA
cccaaaactattgaaataca

SEQ ID NO: 51847 - DNA, 20 bp, synthetic construct
  misc_feature 1..20: note = Description of Artificial Sequence: Synthetic oligonucleotide
  misc_feature 1..20: note = Target: SCN10A; (-) strand; PAM type: YTN; PAM sequence: CTG
  source 1..20: mol_type = other DNA
tttcccaaaactattgaaat

SEQ ID NO: 51848 - DNA, 20 bp, synthetic construct
  misc_feature 1..20: note = Description of Artificial Sequence: Synthetic oligonucleotide
  misc_feature 1..20: note = Target: SCN10A; (-) strand; PAM type: YTN; PAM sequence: CTG
  source 1..20: mol_type = other DNA
tgcaacccaacaccacctgt

SEQ ID NO: 51849 - DNA, 20 bp, synthetic construct
  misc_feature 1..20: note = Description of Artificial Sequence: Synthetic oligonucleotide
  misc_feature 1..20: note = Target: SCN10A; (-) strand; PAM type: YTN; PAM sequence: TTC
  source 1..20: mol_type = other DNA
tgtgcaacccaacaccacct

SEQ ID NO: 51850 - DNA, 20 bp, synthetic construct
  misc_feature 1..20: note = Description of Artificial Sequence: Synthetic oligonucleotide
  misc_feature 1..20: note = Target: SCN10A; (-) strand; PAM type: YTN; PAM sequence: TTT
  source 1..20: mol_type = other DNA
ctgtgcaacccaacaccacc

SEQ ID NO: 51851 - DNA, 20 bp, synthetic construct
  misc_feature 1..20: note = Description of Artificial Sequence: Synthetic oligonucleotide
  misc_feature 1..20: note = Target: SCN10A; (-) strand; PAM type: YTN; PAM sequence: TTT
  source 1..20: mol_type = other DNA
tctgtgcaacccaacaccac

SEQ ID NO: 51852 - DNA, 20 bp, synthetic construct
  misc_feature 1..20: note = Description of Artificial Sequence: Synthetic oligonucleotide
  misc_feature 1..20: note = Target: SCN10A; (-) strand; PAM type: YTN; PAM sequence: TTT
  source 1..20: mol_type = other DNA
ttctgtgcaacccaacacca

SEQ ID NO: 51853 - DNA, 20 bp, synthetic construct
  misc_feature 1..20: note = Description of Artificial Sequence: Synthetic oligonucleotide
  misc_feature 1..20: note = Target: SCN10A; (-) strand; PAM type: YTN; PAM sequence: TTA
  source 1..20: mol_type = other DNA
aagaatttttctgtgcaacc

SEQ ID NO: 51854 - DNA, 20 bp, synthetic construct
  misc_feature 1..20: note = Description of Artificial Sequence: Synthetic oligonucleotide
  misc_feature 1..20: note = Target: SCN10A; (-) strand; PAM type: YTN; PAM sequence: CTC
  source 1..20: mol_type = other DNA
agaaatcagcgttaaagaat

SEQ ID NO: 51855 - DNA, 20 bp, synthetic construct
  misc_feature 1..20: note = Description of Artificial Sequence: Synthetic oligonucleotide
  misc_feature 1..20: note = Target: SCN10A; (-) strand; PAM type: YTN; PAM sequence: CTC
  source 1..20: mol_type = other DNA
gggtgatggtgcaccaaaat

SEQ ID NO: 51856 - DNA, 20 bp, synthetic construct
  misc_feature 1..20: note = Description of Artificial Sequence: Synthetic oligonucleotide
  misc_feature 1..20: note = Target: SCN10A; (-) strand; PAM type: YTN; PAM sequence: CTG
  source 1..20: mol_type = other DNA
ctcgggtgatggtgcaccaa

SEQ ID NO: 51857 - DNA, 20 bp, synthetic construct
  misc_feature 1..20: note = Description of Artificial Sequence: Synthetic oligonucleotide
  misc_feature 1..20: note = Target: SCN10A; (-) strand; PAM type: YTN; PAM sequence: CTG
  source 1..20: mol_type = other DNA
ggtacagtgtacactgctcg

SEQ ID NO: 51858 - DNA, 20 bp, synthetic construct
  misc_feature 1..20: note = Description of Artificial Sequence: Synthetic oligonucleotide
  misc_feature 1..20: note = Target: SCN10A; (-) strand; PAM type: YTN; PAM sequence: CTA
  source 1..20: mol_type = other DNA
cacactgggtacagtgtaca

SEQ ID NO: 51859 - DNA, 20 bp, synthetic construct
  misc_feature 1..20: note = Description of Artificial Sequence: Synthetic oligonucleotide
  misc_feature 1..20: note = Target: SCN10A; (-) strand; PAM type: YTN; PAM sequence: TTG
  source 1..20: mol_type = other DNA
ggaggaaaggtgagacgaag

SEQ ID NO: 51860 - DNA, 20 bp, synthetic construct
  misc_feature 1..20: note = Description of Artificial Sequence: Synthetic oligonucleotide
  misc_feature 1..20: note = Target: SCN10A; (-) strand; PAM type: YTN; PAM sequence: CTT
  source 1..20: mol_type = other DNA
gggaggaaaggtgagacgaa

SEQ ID NO: 51861 - DNA, 20 bp, synthetic construct
  misc_feature 1..20: note = Description of Artificial Sequence: Synthetic oligonucleotide
  misc_feature 1..20: note = Target: SCN10A; (-) strand; PAM type: YTN; PAM sequence: TTG
  source 1..20: mol_type = other DNA
gggacttgggaggaaaggtg

SEQ ID NO: 51862 - DNA, 20 bp, synthetic construct
  misc_feature 1..20: note = Description of Artificial Sequence: Synthetic oligonucleotide
  misc_feature 1..20: note = Target: SCN10A; (-) strand; PAM type: YTN; PAM sequence: TTT
  source 1..20: mol_type = other DNA
ggggacttgggaggaaaggt

SEQ ID NO: 51863 - DNA, 20 bp, synthetic construct
  misc_feature 1..20: note = Description of Artificial Sequence: Synthetic oligonucleotide
  misc_feature 1..20: note = Target: SCN10A; (-) strand; PAM type: YTN; PAM sequence: CTT
  source 1..20: mol_type = other DNA
tggggacttgggaggaaagg

SEQ ID NO: 51864 - DNA, 20 bp, synthetic construct
  misc_feature 1..20: note = Description of Artificial Sequence: Synthetic oligonucleotide
  misc_feature 1..20: note = Target: SCN10A; (-) strand; PAM type: YTN; PAM sequence: CTG
  source 1..20: mol_type = other DNA
tgaggatgcaaaggcataac

SEQ ID NO: 51865 - DNA, 20 bp, synthetic construct
  misc_feature 1..20: note = Description of Artificial Sequence: Synthetic oligonucleotide
  misc_feature 1..20: note = Target: SCN10A; (-) strand; PAM type: YTN; PAM sequence: CTA
  source 1..20: mol_type = other DNA
agctgtgaggatgcaaaggc

SEQ ID NO: 51866 - DNA, 20 bp, synthetic construct
  misc_feature 1..20: note = Description of Artificial Sequence: Synthetic oligonucleotide
  misc_feature 1..20: note = Target: SCN10A; (-) strand; PAM type: YTN; PAM sequence: TTA
  source 1..20: mol_type = other DNA
caagcaggagctaagctgtg

SEQ ID NO: 51867 - DNA, 20 bp, synthetic construct
  misc_feature 1..20: note = Description of Artificial Sequence: Synthetic oligonucleotide
  misc_feature 1..20: note = Target: SCN10A; (-) strand; PAM type: YTN; PAM sequence: TTA
  source 1..20: mol_type = other DNA
attacaagcaggagctaagc

SEQ ID NO: 51868 - DNA, 20 bp, synthetic construct
  misc_feature 1..20: note = Description of Artificial Sequence: Synthetic oligonucleotide
  misc_feature 1..20: note = Target: SCN10A; (-) strand; PAM type: YTN; PAM sequence: CTT
  source 1..20: mol_type = other DNA
aattacaagcaggagctaag

SEQ ID NO: 51869 - DNA, 20 bp, synthetic construct
  misc_feature 1..20: note = Description of Artificial Sequence: Synthetic oligonucleotide
  misc_feature 1..20: note = Target: SCN10A; (-) strand; PAM type: YTN; PAM sequence: TTC
  source 1..20: mol_type = other DNA
ttaattacaagcaggagcta

SEQ ID NO: 51870 - DNA, 20 bp, synthetic construct
  misc_feature 1..20: note = Description of Artificial Sequence: Synthetic oligonucleotide
  misc_feature 1..20: note = Target: SCN10A; (-) strand; PAM type: YTN; PAM sequence: CTC
  source 1..20: mol_type = other DNA
aggaatagaaagtcaagcat

SEQ ID NO: 51871 - DNA, 20 bp, synthetic construct
  misc_feature 1..20: note = Description of Artificial Sequence: Synthetic oligonucleotide
  misc_feature 1..20: note = Target: SCN10A; (-) strand; PAM type: YTN; PAM sequence: CTA
  source 1..20: mol_type = other DNA
aatgaagtaactcaggaata

SEQ ID NO: 51872 - DNA, 20 bp, synthetic construct
  misc_feature 1..20: note = Description of Artificial Sequence: Synthetic oligonucleotide
  misc_feature 1..20: note = Target: SCN10A; (-) strand; PAM type: YTN; PAM sequence: TTC
  source 1..20: mol_type = other DNA
taaatgaagtaactcaggaa

SEQ ID NO: 51873 - DNA, 20 bp, synthetic construct
  misc_feature 1..20: note = Description of Artificial Sequence: Synthetic oligonucleotide
  misc_feature 1..20: note = Target: SCN10A; (-) strand; PAM type: YTN; PAM sequence: TTA
  source 1..20: mol_type = other DNA
ttctaaatgaagtaactcag

SEQ ID NO: 51874 - DNA, 20 bp, synthetic construct
  misc_feature 1..20: note = Description of Artificial Sequence: Synthetic oligonucleotide
  misc_feature 1..20: note = Target: SCN10A; (-) strand; PAM type: YTN; PAM sequence: CTA
  source 1..20: mol_type = other DNA
ttattctaaatgaagtaact

SEQ ID NO: 51875 - DNA, 20 bp, synthetic construct
  misc_feature 1..20: note = Description of Artificial Sequence: Synthetic oligonucleotide
  misc_feature 1..20: note = Target: SCN10A; (-) strand; PAM type: YTN; PAM sequence: TTG
  source 1..20: mol_type = other DNA
gagactattattctaaatga

SEQ ID NO: 51876 - DNA, 20 bp, synthetic construct
  misc_feature 1..20: note = Description of Artificial Sequence: Synthetic oligonucleotide
  misc_feature 1..20: note = Target: SCN10A; (-) strand; PAM type: YTN; PAM sequence: CTG
  source 1..20: mol_type = other DNA
gatggagttggagactatta

SEQ ID NO: 51877 - DNA, 20 bp, synthetic construct
  misc_feature 1..20: note = Description of Artificial Sequence: Synthetic oligonucleotide
  misc_feature 1..20: note = Target: SCN10A; (-) strand; PAM type: YTN; PAM sequence: TTG
  source 1..20: mol_type = other DNA
gcagcaagctggatggagtt

SEQ ID NO: 51878 - DNA, 20 bp, synthetic construct
  misc_feature 1..20: note = Description of Artificial Sequence: Synthetic oligonucleotide
  misc_feature 1..20: note = Target: SCN10A; (-) strand; PAM type: YTN; PAM sequence: TTG
  source 1..20: mol_type = other DNA
taaaaaggaatgaaataatg

SEQ ID NO: 51879 - DNA, 20 bp, synthetic construct
  misc_feature 1..20: note = Description of Artificial Sequence: Synthetic oligonucleotide
  misc_feature 1..20: note = Target: SCN10A; (-) strand; PAM type: YTN; PAM sequence: CTC
  source 1..20: mol_type = other DNA
agttgtaaaaaggaatgaaa

SEQ ID NO: 51880 - DNA, 20 bp, synthetic construct
  misc_feature 1..20: note = Description of Artificial Sequence: Synthetic oligonucleotide
  misc_feature 1..20: note = Target: SCN10A; (-) strand; PAM type: YTN; PAM sequence: CTA
  source 1..20: mol_type = other DNA
ctcagttgtaaaaaggaatg

SEQ ID NO: 51881 - DNA, 20 bp, synthetic construct
  misc_feature 1..20: note = Description of Artificial Sequence: Synthetic oligonucleotide
  misc_feature 1..20: note = Target: SCN10A; (-) strand; PAM type: YTN; PAM sequence: CTA
  source 1..20: mol_type = other DNA
aatgcccatcaaccaacaag

SEQ ID NO: 51882 - DNA, 20 bp, synthetic construct
  misc_feature 1..20: note = Description of Artificial Sequence: Synthetic oligonucleotide
  misc_feature 1..20: note = Target: SCN10A; (-) strand; PAM type: YTN; PAM sequence: CTG
  source 1..20: mol_type = other DNA
caaaaatatggaaccagcct

SEQ ID NO: 51883 - DNA, 20 bp, synthetic construct
  misc_feature 1..20: note = Description of Artificial Sequence: Synthetic oligonucleotide
  misc_feature 1..20: note = Target: SCN10A; (-) strand; PAM type: YTN; PAM sequence: TTA
  source 1..20: mol_type = other DNA
caactgcaaaaatatggaac

SEQ ID NO: 51884 - DNA, 20 bp, synthetic construct
  misc_feature 1..20: note = Description of Artificial Sequence: Synthetic oligonucleotide
  misc_feature 1..20: note = Target: SCN10A; (-) strand; PAM type: YTN; PAM sequence: TTT
  source 1..20: mol_type = other DNA
acaactgcaaaaatatggaa

SEQ ID NO: 51885 - DNA, 20 bp, synthetic construct
  misc_feature 1..20: note = Description of Artificial Sequence: Synthetic oligonucleotide
  misc_feature 1..20: note = Target: SCN10A; (-) strand; PAM type: YTN; PAM sequence: TTA
  source 1..20: mol_type = other DNA
tagcagcacagtttacaact

SEQ ID NO: 51886 - DNA, 20 bp, synthetic construct
  misc_feature 1..20: note = Description of Artificial Sequence: Synthetic oligonucleotide
  misc_feature 1..20: note = Target: SCN10A; (-) strand; PAM type: YTN; PAM sequence: CTT
  source 1..20: mol_type = other DNA
atagcagcacagtttacaac

SEQ ID NO: 51887 - DNA, 20 bp, synthetic construct
  misc_feature 1..20: note = Description of Artificial Sequence: Synthetic oligonucleotide
  misc_feature 1..20: note = Target: SCN10A; (-) strand; PAM type: YTN; PAM sequence: TTG
  source 1..20: mol_type = other DNA
catatgcatgcttatagcag

SEQ ID NO: 51888 - DNA, 20 bp, synthetic construct
  misc_feature 1..20: note = Description of Artificial Sequence: Synthetic oligonucleotide
  misc_feature 1..20: note = Target: SCN10A; (-) strand; PAM type: YTN; PAM sequence: CTT
  source 1..20: mol_type = other DNA
gcatatgcatgcttatagca

SEQ ID NO: 51889 - DNA, 20 bp, synthetic construct
  misc_feature 1..20: note = Description of Artificial Sequence: Synthetic oligonucleotide
  misc_feature 1..20: note = Target: SCN10A; (-) strand; PAM type: YTN; PAM sequence: TTA
  source 1..20: mol_type = other DNA
aaaagacacttgcatatgca

SEQ ID NO: 51890 - DNA, 20 bp, synthetic construct
  misc_feature 1..20: note = Description of Artificial Sequence: Synthetic oligonucleotide
  misc_feature 1..20: note = Target: SCN10A; (-) strand; PAM type: YTN; PAM sequence: TTA
  source 1..20: mol_type = other DNA
ttaaaaagacacttgcatat

SEQ ID NO: 51891 - DNA, 20 bp, synthetic construct
  misc_feature 1..20: note = Description of Artificial Sequence: Synthetic oligonucleotide
  misc_feature 1..20: note = Target: SCN10A; (-) strand; PAM type: YTN; PAM sequence: CTA
  source 1..20: mol_type = other DNA
cccagaggaaaataagccat

SEQ ID NO: 51892 - DNA, 20 bp, synthetic construct
  misc_feature 1..20: note = Description of Artificial Sequence: Synthetic oligonucleotide
  misc_feature 1..20: note = Target: SCN10A; (-) strand; PAM type: YTN; PAM sequence: CTG
  source 1..20: mol_type = other DNA
ggtatctacccagaggaaaa

SEQ ID NO: 51893 - DNA, 20 bp, synthetic construct
  misc_feature 1..20: note = Description of Artificial Sequence: Synthetic oligonucleotide
  misc_feature 1..20: note = Target: SCN10A; (-) strand; PAM type: YTN; PAM sequence: CTA
  source 1..20: mol_type = other DNA
ctgggtatctacccagagga

SEQ ID NO: 51894 - DNA, 20 bp, synthetic construct
  misc_feature 1..20: note = Description of Artificial Sequence: Synthetic oligonucleotide
  misc_feature 1..20: note = Target: SCN10A; (-) strand; PAM type: YTN; PAM sequence: TTG
  source 1..20: mol_type = other DNA
gtccagcaatcccactactg

SEQ ID NO: 51895 - DNA, 20 bp, synthetic construct
  misc_feature 1..20: note = Description of Artificial Sequence: Synthetic oligonucleotide
  misc_feature 1..20: note = Target: SCN10A; (-) strand; PAM type: YTN; PAM sequence: TTT
  source 1..20: mol_type = other DNA
ggtccagcaatcccactact

SEQ ID NO: 51896 - DNA, 20 bp, synthetic construct
  misc_feature 1..20: note = Description of Artificial Sequence: Synthetic oligonucleotide
  misc_feature 1..20: note = Target: SCN10A; (-) strand; PAM type: YTN; PAM sequence: CTA
  source 1..20: mol_type = other DNA
ccatttggtccagcaatccc

SEQ ID NO: 51897 - DNA, 20 bp, synthetic construct
  misc_feature 1..20: note = Description of Artificial Sequence: Synthetic oligonucleotide
  misc_feature 1..20: note = Target: SCN10A; (-) strand; PAM type: YTN; PAM sequence: CTA
  source 1..20: mol_type = other DNA
aaagtagaactaccatttgg

SEQ ID NO: 51898 - DNA, 20 bp, synthetic construct
  misc_feature 1..20: note = Description of Artificial Sequence: Synthetic oligonucleotide
  misc_feature 1..20: note = Target: SCN10A; (-) strand; PAM type: YTN; PAM sequence: TTA
  source 1..20: mol_type = other DNA
aagaactaaaagtagaacta

SEQ ID NO: 51899 - DNA, 20 bp, synthetic construct
  misc_feature 1..20: note = Description of Artificial Sequence: Synthetic oligonucleotide
  misc_feature 1..20: note = Target: SCN10A; (-) strand; PAM type: YTN; PAM sequence: CTT
  source 1..20: mol_type = other DNA
aaagaactaaaagtagaact

SEQ ID NO: 51900 - DNA, 20 bp, synthetic construct
  misc_feature 1..20: note = Description of Artificial Sequence: Synthetic oligonucleotide
  misc_feature 1..20: note = Target: SCN10A; (-) strand; PAM type: YTN; PAM sequence: TTC
  source 1..20: mol_type = other DNA
cttaaagaactaaaagtaga

SEQ ID NO: 51901 - DNA, 20 bp, synthetic construct
  misc_feature 1..20: note = Description of Artificial Sequence: Synthetic oligonucleotide
  misc_feature 1..20: note = Target: SCN10A; (-) strand; PAM type: YTN; PAM sequence: TTA
  source 1..20: mol_type = other DNA
tggagattccttaaagaact

SEQ ID NO: 51902 - DNA, 20 bp, synthetic construct
  misc_feature 1..20: note = Description of Artificial Sequence: Synthetic oligonucleotide
  misc_feature 1..20: note = Target: SCN10A; (-) strand; PAM type: YTN; PAM sequence: CTA
  source 1..20: mol_type = other DNA
aggaaaacgttatggagatt

SEQ ID NO: 51903 - DNA, 20 bp, synthetic construct
  misc_feature 1..20: note = Description of Artificial Sequence: Synthetic oligonucleotide
  misc_feature 1..20: note = Target: SCN10A; (-) strand; PAM type: YTN; PAM sequence: CTA
  source 1..20: mol_type = other DNA
gtacaaccactaaggaaaac

SEQ ID NO: 51904 - DNA, 20 bp, synthetic construct
  misc_feature 1..20: note = Description of Artificial Sequence: Synthetic oligonucleotide
  misc_feature 1..20: note = Target: SCN10A; (-) strand; PAM type: YTN; PAM sequence: CTG
  source 1..20: mol_type = other DNA
gtgggaatgtaaactagtac

SEQ ID NO: 51905 - DNA, 20 bp, synthetic construct
  misc_feature 1..20: note = Description of Artificial Sequence: Synthetic oligonucleotide
  misc_feature 1..20: note = Target: SCN10A; (-) strand; PAM type: YTN; PAM sequence: CTG
  source 1..20: mol_type = other DNA
ctggtgggaatgtaaactag

SEQ ID NO: 51906 - DNA, 20 bp, synthetic construct
  misc_feature 1..20: note = Description of Artificial Sequence: Synthetic oligonucleotide
  misc_feature 1..20: note = Target: SCN10A; (-) strand; PAM type: YTN; PAM sequence: TTA
  source 1..20: mol_type = other DNA
cactgctggtgggaatgtaa

SEQ ID NO: 51907 - DNA, 20 bp, synthetic construct
  misc_feature 1..20: note = Description of Artificial Sequence: Synthetic oligonucleotide
  misc_feature 1..20: note = Target: SCN10A; (-) strand; PAM type: YTN; PAM sequence: TTT
  source 1..20: mol_type = other DNA
acactgctggtgggaatgta

SEQ ID NO: 51908 - DNA, 20 bp, synthetic construct
  misc_feature 1..20: note = Description of Artificial Sequence: Synthetic oligonucleotide
  misc_feature 1..20: note = Target: SCN10A; (-) strand; PAM type: YTN; PAM sequence: TTT
  source 1..20: mol_type = other DNA
tacactgctggtgggaatgt

SEQ ID NO: 51909 - DNA, 20 bp, synthetic construct
  misc_feature 1..20: note = Description of Artificial Sequence: Synthetic oligonucleotide
  misc_feature 1..20: note = Target: SCN10A; (-) strand; PAM type: YTN; PAM sequence: TTG
  source 1..20: mol_type = other DNA
gcatggatgtaatgaaaagg

SEQ ID NO: 51910 - DNA, 20 bp, synthetic construct
  misc_feature 1..20: note = Description of Artificial Sequence: Synthetic oligonucleotide
  misc_feature 1..20: note = Target: SCN10A; (-) strand; PAM type: YTN; PAM sequence: CTG
  source 1..20: mol_type = other DNA
caagaatggccataaccaaa

SEQ ID NO: 51911 - DNA, 20 bp, synthetic construct
  misc_feature 1..20: note = Description of Artificial Sequence: Synthetic oligonucleotide
  misc_feature 1..20: note = Target: SCN10A; (-) strand; PAM type: YTN; PAM sequence: CTC
  source 1..20: mol_type = other DNA
ctgcaagaatggccataacc

SEQ ID NO: 51912 - DNA, 20 bp, synthetic construct
  misc_feature 1..20: note = Description of Artificial Sequence: Synthetic oligonucleotide
  misc_feature 1..20: note = Target: SCN10A; (-) strand; PAM type: YTN; PAM sequence: TTA
  source 1..20: mol_type = other DNA
ctcctgcaagaatggccata

SEQ ID NO: 51913 - DNA, 20 bp, synthetic construct
  misc_feature 1..20: note = Description of Artificial Sequence: Synthetic oligonucleotide
  misc_feature 1..20: note = Target: SCN10A; (-) strand; PAM type: YTN; PAM sequence: CTT
  source 1..20: mol_type = other DNA
actcctgcaagaatggccat

SEQ ID NO: 51914 - DNA, 20 bp, synthetic construct
  misc_feature 1..20: note = Description of Artificial Sequence: Synthetic oligonucleotide
  misc_feature 1..20: note = Target: SCN10A; (-) strand; PAM type: YTN; PAM sequence: TTA
  source 1..20: mol_type = other DNA
aaaccacaatgagataccac

SEQ ID NO: 51915 - DNA, 20 bp, synthetic construct
  misc_feature 1..20: note = Description of Artificial Sequence: Synthetic oligonucleotide
  misc_feature 1..20: note = Target: SCN10A; (-) strand; PAM type: YTN; PAM sequence: TTA
  source 1..20: mol_type = other DNA
tcagggaaatgcaaattaaa

SEQ ID NO: 51916 - DNA, 20 bp, synthetic construct
  misc_feature 1..20: note = Description of Artificial Sequence: Synthetic oligonucleotide
  misc_feature 1..20: note = Target: SCN10A; (-) strand; PAM type: YTN; PAM sequence: TTA
  source 1..20: mol_type = other DNA
attatcagggaaatgcaaat

SEQ ID NO: 51917 - DNA, 20 bp, synthetic construct
  misc_feature 1..20: note = Description of Artificial Sequence: Synthetic oligonucleotide
  misc_feature 1..20: note = Target: SCN10A; (-) strand; PAM type: YTN; PAM sequence: CTC
  source 1..20: mol_type = other DNA
aacatcattaattatcaggg

SEQ ID NO: 51918 - DNA, 20 bp, synthetic construct
  misc_feature 1..20: note = Description of Artificial Sequence: Synthetic oligonucleotide
  misc_feature 1..20: note = Target: SCN10A; (-) strand; PAM type: YTN; PAM sequence: CTC
  source 1..20: mol_type = other DNA
aaaagaagatatataaatgg

SEQ ID NO: 51919 - DNA, 20 bp, synthetic construct
  misc_feature 1..20: note = Description of Artificial Sequence: Synthetic oligonucleotide
  misc_feature 1..20: note = Target: SCN10A; (-) strand; PAM type: YTN; PAM sequence: TTC
  source 1..20: mol_type = other DNA
tcaaaagaagatatataaat

SEQ ID NO: 51920 - DNA, 20 bp, synthetic construct
  misc_feature 1..20: note = Description of Artificial Sequence: Synthetic oligonucleotide
  misc_feature 1..20: note = Target: SCN10A; (-) strand; PAM type: YTN; PAM sequence: CTA
  source 1..20: mol_type = other DNA
taagaaacacaaataaatca

SEQ ID NO: 51921 - DNA, 20 bp, synthetic construct
  misc_feature 1..20: note = Description of Artificial Sequence: Synthetic oligonucleotide
  misc_feature 1..20: note = Target: SCN10A; (-) strand; PAM type: YTN; PAM sequence: CTA
  source 1..20: mol_type = other DNA
atatccagcatctataagaa

SEQ ID NO: 51922 - DNA, 20 bp, synthetic construct
  misc_feature 1..20: note = Description of Artificial Sequence: Synthetic oligonucleotide
  misc_feature 1..20: note = Target: SCN10A; (-) strand; PAM type: YTN; PAM sequence: TTC
  source 1..20: mol_type = other DNA
cagcaaaagactaatatcca

SEQ ID NO: 51923 - DNA, 20 bp, synthetic construct
  misc_feature 1..20: note = Description of Artificial Sequence: Synthetic oligonucleotide
  misc_feature 1..20: note = Target: SCN10A; (-) strand; PAM type: YTN; PAM sequence: CTT
  source 1..20: mol_type = other DNA
ccagcaaaagactaatatcc

SEQ ID NO: 51924 - DNA, 20 bp, synthetic construct
  misc_feature 1..20: note = Description of Artificial Sequence: Synthetic oligonucleotide
  misc_feature 1..20: note = Target: SCN10A; (-) strand; PAM type: YTN; PAM sequence: CTA
  source 1..20: mol_type = other DNA
tgcttccagcaaaagactaa

SEQ ID NO: 51925 - DNA, 20 bp, synthetic construct
  misc_feature 1..20: note = Description of Artificial Sequence: Synthetic oligonucleotide
  misc_feature 1..20: note = Target: SCN10A; (-) strand; PAM type: YTN; PAM sequence: TTA
  source 1..20: mol_type = other DNA
tctatgcttccagcaaaaga

SEQ ID NO: 51926 - DNA, 20 bp, synthetic construct
  misc_feature 1..20: note = Description of Artificial Sequence: Synthetic oligonucleotide
  misc_feature 1..20: note = Target: SCN10A; (-) strand; PAM type: YTN; PAM sequence: TTG
  source 1..20: mol_type = other DNA
ttatctatgcttccagcaaa

SEQ ID NO: 51927 - DNA, 20 bp, synthetic construct
  misc_feature 1..20: note = Description of Artificial Sequence: Synthetic oligonucleotide
  misc_feature 1..20: note = Target: SCN10A; (-) strand; PAM type: YTN; PAM sequence: TTT
  source 1..20: mol_type = other DNA
gttatctatgcttccagcaa

SEQ ID NO: 51928 - DNA, 20 bp, synthetic construct
  misc_feature 1..20: note = Description of Artificial Sequence: Synthetic oligonucleotide
  misc_feature 1..20: note = Target: SCN10A; (-) strand; PAM type: YTN; PAM sequence: CTT
  source 1..20: mol_type = other DNA
tgttatctatgcttccagca

SEQ ID NO: 51929 - DNA, 20 bp, synthetic construct
  misc_feature 1..20: note = Description of Artificial Sequence: Synthetic oligonucleotide
  misc_feature 1..20: note = Target: SCN10A; (-) strand; PAM type: YTN; PAM sequence: TTG
  source 1..20: mol_type = other DNA
cacagcaagagaaataatca

SEQ ID NO: 51930 - DNA, 20 bp, synthetic construct
  misc_feature 1..20: note = Description of Artificial Sequence: Synthetic oligonucleotide
  misc_feature 1..20: note = Target: SCN10A; (-) strand; PAM type: YTN; PAM sequence: CTG
  source 1..20: mol_type = other DNA
ttgcacagcaagagaaataa

SEQ ID NO: 51931 - DNA, 20 bp, synthetic construct
  misc_feature 1..20: note = Description of Artificial Sequence: Synthetic oligonucleotide
  misc_feature 1..20: note = Target: SCN10A; (-) strand; PAM type: YTN; PAM sequence: CTA
  source 1..20: mol_type = other DNA
aaaagctgttgcacagcaag

SEQ ID NO: 51932 - DNA, 20 bp, synthetic construct
  misc_feature 1..20: note = Description of Artificial Sequence: Synthetic oligonucleotide
  misc_feature 1..20: note = Target: SCN10A; (-) strand; PAM type: YTN; PAM sequence: TTA
  source 1..20: mol_type = other DNA
aactaaaaagctgttgcaca

SEQ ID NO: 51933 - DNA, 20 bp, synthetic construct
  misc_feature 1..20: note = Description of Artificial Sequence: Synthetic oligonucleotide
  misc_feature 1..20: note = Target: SCN10A; (-) strand; PAM type: YTN; PAM sequence: CTA
  source 1..20: mol_type = other DNA
attaaactaaaaagctgttg

SEQ ID NO: 51934 - DNA, 20 bp, synthetic construct
  misc_feature 1..20: note = Description of Artificial Sequence: Synthetic oligonucleotide
  misc_feature 1..20: note = Target: SCN10A; (-) strand; PAM type: YTN; PAM sequence: CTG
  source 1..20: mol_type = other DNA
accaaggacccaaagcaaat

SEQ ID NO: 51935 - DNA, 20 bp, synthetic construct
  misc_feature 1..20: note = Description of Artificial Sequence: Synthetic oligonucleotide
  misc_feature 1..20: note = Target: SCN10A; (-) strand; PAM type: YTN; PAM sequence: TTC
  source 1..20: mol_type = other DNA
ctgaccaaggacccaaagca

SEQ ID NO: 51936 - DNA, 20 bp, synthetic construct
  misc_feature 1..20: note = Description of Artificial Sequence: Synthetic oligonucleotide
  misc_feature 1..20: note = Target: SCN10A; (-) strand; PAM type: YTN; PAM sequence: TTA
  source 1..20: mol_type = other DNA
ggcaaaacgttcctgaccaa

SEQ ID NO: 51937 - DNA, 20 bp, synthetic construct
  misc_feature 1..20: note = Description of Artificial Sequence: Synthetic oligonucleotide
  misc_feature 1..20: note = Target: SCN10A; (-) strand; PAM type: YTN; PAM sequence: CTT
  source 1..20: mol_type = other DNA
aggcaaaacgttcctgacca

SEQ ID NO: 51938 - DNA, 20 bp, synthetic construct
  misc_feature 1..20: note = Description of Artificial Sequence: Synthetic oligonucleotide
  misc_feature 1..20: note = Target: SCN10A; (-) strand; PAM type: YTN; PAM sequence: TTG
  source 1..20: mol_type = other DNA
gcttaggcaaaacgttcctg

SEQ ID NO: 51939 - DNA, 20 bp, synthetic construct
  misc_feature 1..20: note = Description of Artificial Sequence: Synthetic oligonucleotide
  misc_feature 1..20: note = Target: SCN10A; (-) strand; PAM type: YTN; PAM sequence: CTA
  source 1..20: mol_type = other DNA
gacattggcttaggcaaaac

SEQ ID NO: 51940 - DNA, 20 bp, synthetic construct
  misc_feature 1..20: note = Description of Artificial Sequence: Synthetic oligonucleotide
  misc_feature 1..20: note = Target: SCN10A; (-) strand; PAM type: YTN; PAM sequence: TTC
  source 1..20: mol_type = other DNA
tagacattggcttaggcaaa

SEQ ID NO: 51941 - DNA, 20 bp, synthetic construct
  misc_feature 1..20: note = Description of Artificial Sequence: Synthetic oligonucleotide
  misc_feature 1..20: note = Target: SCN10A; (-) strand; PAM type: YTN; PAM sequence: CTT
  source 1..20: mol_type = other DNA
ctagacattggcttaggcaa

SEQ ID NO: 51942 - DNA, 20 bp, synthetic construct
  misc_feature 1..20: note = Description of Artificial Sequence: Synthetic oligonucleotide
  misc_feature 1..20: note = Target: SCN10A; (-) strand; PAM type: YTN; PAM sequence: CTC
  source 1..20: mol_type = other DNA
ttctagacattggcttaggc

SEQ ID NO: 51943 - DNA, 20 bp, synthetic construct
  misc_feature 1..20: note = Description of Artificial Sequence: Synthetic oligonucleotide
  misc_feature 1..20: note = Target: SCN10A; (-) strand; PAM type: YTN; PAM sequence: TTG
  source 1..20: mol_type = other DNA
gaaaaactcttctagacatt

SEQ ID NO: 51944 - DNA, 20 bp, synthetic construct
  misc_feature 1..20: note = Description of Artificial Sequence: Synthetic oligonucleotide
  misc_feature 1..20: note = Target: SCN10A; (-) strand; PAM type: YTN; PAM sequence: CTA
  source 1..20: mol_type = other DNA
gaagataacattggaaaaac

SEQ ID NO: 51945 - DNA, 20 bp, synthetic construct
  misc_feature 1..20: note = Description of Artificial Sequence: Synthetic oligonucleotide
  misc_feature 1..20: note = Target: SCN10A; (-) strand; PAM type: YTN; PAM sequence: TTC
  source 1..20: mol_type = other DNA
tagaagataacattggaaaa

SEQ ID NO: 51946 - DNA, 20 bp, synthetic construct
  misc_feature 1..20: note = Description of Artificial Sequence: Synthetic oligonucleotide
  misc_feature 1..20: note = Target: SCN10A; (-) strand; PAM type: YTN; PAM sequence: TTA
  source 1..20: mol_type = other DNA
taaaaaattctagaagataa

SEQ ID NO: 51947 - DNA, 20 bp, synthetic construct
  misc_feature 1..20: note = Description of Artificial Sequence: Synthetic oligonucleotide
  misc_feature 1..20: note = Target: SCN10A; (-) strand; PAM type: YTN; PAM sequence: CTG
  source 1..20: mol_type = other DNA
aaattataaaaaattctaga

SEQ ID NO: 51948 - DNA, 20 bp, synthetic construct
  misc_feature 1..20: note = Description of Artificial Sequence: Synthetic oligonucleotide
  misc_feature 1..20: note = Target: SCN10A; (-) strand; PAM type: YTN; PAM sequence: CTA
  source 1..20: mol_type = other DNA
agacctgaaattataaaaaa

SEQ ID NO: 51949 - DNA, 20 bp, synthetic construct
  misc_feature 1..20: note = Description of Artificial Sequence: Synthetic oligonucleotide
  misc_feature 1..20: note = Target: SCN10A; (-) strand; PAM type: YTN; PAM sequence: TTA
  source 1..20: mol_type = other DNA
aatctaagacctgaaattat

SEQ ID NO: 51950 - DNA, 20 bp, synthetic construct
  misc_feature 1..20: note = Description of Artificial Sequence: Synthetic oligonucleotide
  misc_feature 1..20: note = Target: SCN10A; (-) strand; PAM type: YTN; PAM sequence: CTT
  source 1..20: mol_type = other DNA
aaatctaagacctgaaatta

SEQ ID NO: 51951 - DNA, 20 bp, synthetic construct
  misc_feature 1..20: note = Description of Artificial Sequence: Synthetic oligonucleotide
  misc_feature 1..20: note = Target: SCN10A; (-) strand; PAM type: YTN; PAM sequence: TTC
  source 1..20: mol_type = other DNA
aagatggataaaaggcttaa

SEQ ID NO: 51952 - DNA, 20 bp, synthetic construct
  misc_feature 1..20: note = Description of Artificial Sequence: Synthetic oligonucleotide
  misc_feature 1..20: note = Target: SCN10A; (-) strand; PAM type: YTN; PAM sequence: TTA
  source 1..20: mol_type = other DNA
tacaaaaatcaattcaagat

SEQ ID NO: 51953 - DNA, 20 bp, synthetic construct
  misc_feature 1..20: note = Description of Artificial Sequence: Synthetic oligonucleotide
  misc_feature 1..20: note = Target: SCN10A; (-) strand; PAM type: YTN; PAM sequence: CTT
  source 1..20: mol_type = other DNA
atacaaaaatcaattcaaga

SEQ ID NO: 51954 - DNA, 20 bp, synthetic construct
  misc_feature 1..20: note = Description of Artificial Sequence: Synthetic oligonucleotide
  misc_feature 1..20: note = Target: SCN10A; (-) strand; PAM type: YTN; PAM sequence: CTC
  source 1..20: mol_type = other DNA
accttatacaaaaatcaatt

SEQ ID NO: 51955 - DNA, 20 bp, synthetic construct
  misc_feature 1..20: note = Description of Artificial Sequence: Synthetic oligonucleotide
  misc_feature 1..20: note = Target: SCN10A; (-) strand; PAM type: YTN; PAM sequence: CTC
  source 1..20: mol_type = other DNA
tcaccttatacaaaaatcaa

SEQ ID NO: 51956 - DNA, 20 bp, synthetic construct
  misc_feature 1..20: note = Description of Artificial Sequence: Synthetic oligonucleotide
  misc_feature 1..20: note = Target: SCN10A; (-) strand; PAM type: YTN; PAM sequence: TTC
  source 1..20: mol_type = other DNA
atctctcaccttatacaaaa

SEQ ID NO: 51957 - DNA, 20 bp, synthetic construct
  misc_feature 1..20: note = Description of Artificial Sequence: Synthetic oligonucleotide
  misc_feature 1..20: note = Target: SCN10A; (-) strand; PAM type: YTN; PAM sequence: CTT
  source 1..20: mol_type = other DNA
catctctcaccttatacaaa

SEQ ID NO: 51958 - DNA, 20 bp, synthetic construct
  misc_feature 1..20: note = Description of Artificial Sequence: Synthetic oligonucleotide
  misc_feature 1..20: note = Target: SCN10A; (-) strand; PAM type: YTN; PAM sequence: CTG
  source 1..20: mol_type = other DNA
aatcttcatctctcacctta

SEQ ID NO: 51959 - DNA, 20 bp, synthetic construct
  misc_feature 1..20: note = Description of Artificial Sequence: Synthetic oligonucleotide
  misc_feature 1..20: note = Target: SCN10A; (-) strand; PAM type: YTN; PAM sequence: TTA
  source 1..20: mol_type = other DNA
gcaagccacatgtggaagaa

SEQ ID NO: 51960 - DNA, 20 bp, synthetic construct
  misc_feature 1..20: note = Description of Artificial Sequence: Synthetic oligonucleotide
  misc_feature 1..20: note = Target: SCN10A; (-) strand; PAM type: YTN; PAM sequence: CTG
  source 1..20: mol_type = other DNA
ggataattagcaagccacat

SEQ ID NO: 51961 - DNA, 20 bp, synthetic construct
  misc_feature 1..20: note = Description of Artificial Sequence: Synthetic oligonucleotide
  misc_feature 1..20: note = Target: SCN10A; (-) strand; PAM type: YTN; PAM sequence: TTC
  source 1..20: mol_type = other DNA
aacaaatggtgctgggataa

SEQ ID NO: 51962 - DNA, 20 bp, synthetic construct
  misc_feature 1..20: note = Description of Artificial Sequence: Synthetic oligonucleotide
  misc_feature 1..20: note = Target: SCN10A; (-) strand; PAM type: YTN; PAM sequence: CTA
  source 1..20: mol_type = other DNA
ttcaacaaatggtgctggga

SEQ ID NO: 51963 - DNA, 20 bp, synthetic construct
  misc_feature 1..20: note = Description of Artificial Sequence: Synthetic oligonucleotide
  misc_feature 1..20: note = Target: SCN10A; (-) strand; PAM type: YTN; PAM sequence: TTG
  source 1..20: mol_type = other DNA
aaaaagcaaacaaaaacgta

SEQ ID NO: 51964 - DNA, 20 bp, synthetic construct
  misc_feature 1..20: note = Description of Artificial Sequence: Synthetic oligonucleotide
  misc_feature 1..20: note = Target: SCN10A; (-) strand; PAM type: YTN; PAM sequence: TTT
  source 1..20: mol_type = other DNA
gaaaaagcaaacaaaaacgt

SEQ ID NO: 51965 - DNA, 20 bp, synthetic construct
  misc_feature 1..20: note = Description of Artificial Sequence: Synthetic oligonucleotide
  misc_feature 1..20: note = Target: SCN10A; (-) strand; PAM type: YTN; PAM sequence: CTT
  source 1..20: mol_type = other DNA
tgaaaaagcaaacaaaaacg

SEQ ID NO: 51966 - DNA, 20 bp, synthetic construct
  misc_feature 1..20: note = Description of Artificial Sequence: Synthetic oligonucleotide
  misc_feature 1..20: note = Target: SCN10A; (-) strand; PAM type: YTN; PAM sequence: CTG
  source 1..20: mol_type = other DNA
atctttgaaaaagcaaacaa

SEQ ID NO: 51967 - DNA, 20 bp, synthetic construct
  misc_feature 1..20: note = Description of Artificial Sequence: Synthetic oligonucleotide
  misc_feature 1..20: note = Target: SCN10A; (-) strand; PAM type: YTN; PAM sequence: TTA
  source 1..20: mol_type = other DNA
caagcaactgatctttgaaa

SEQ ID NO: 51968 - DNA, 20 bp, synthetic construct
  misc_feature 1..20: note = Description of Artificial Sequence: Synthetic oligonucleotide
  misc_feature 1..20: note = Target: SCN10A; (-) strand; PAM type: YTN; PAM sequence: CTT
  source 1..20: mol_type = other DNA
acaagcaactgatctttgaa

SEQ ID NO: 51969 - DNA, 20 bp, synthetic construct
  misc_feature 1..20: note = Description of Artificial Sequence: Synthetic oligonucleotide
  misc_feature 1..20: note = Target: SCN10A; (-) strand; PAM type: YTN; PAM sequence: CTC
  source 1..20: mol_type = other DNA
agaaataaagccaaatactt

SEQ ID NO: 51970 - DNA, 20 bp, synthetic construct
  misc_feature 1..20: note = Description of Artificial Sequence: Synthetic oligonucleotide
  misc_feature 1..20: note = Target: SCN10A; (-) strand; PAM type: YTN; PAM sequence: CTG
  source 1..20: mol_type = other DNA
gtataaaaataagcacatag

SEQ ID NO: 51971 - DNA, 20 bp, synthetic construct
  misc_feature 1..20: note = Description of Artificial Sequence: Synthetic oligonucleotide
  misc_feature 1..20: note = Target: SCN10A; (-) strand; PAM type: YTN; PAM sequence: CTG
  source 1..20: mol_type = other DNA
taccaaaacagcatgatact

SEQ ID NO: 51972 - DNA, 20 bp, synthetic construct
  misc_feature 1..20: note = Description of Artificial Sequence: Synthetic oligonucleotide
  misc_feature 1..20: note = Target: SCN10A; (-) strand; PAM type: YTN; PAM sequence: CTA
  source 1..20: mol_type = other DNA
tagtatagcctgtaccaaaa

SEQ ID NO: 51973 - DNA, 20 bp, synthetic construct
  misc_feature 1..20: note = Description of Artificial Sequence: Synthetic oligonucleotide
  misc_feature 1..20: note = Target: SCN10A; (-) strand; PAM type: YTN; PAM sequence: CTA
  source 1..20: mol_type = other DNA
caaggctatagtatagcctg

SEQ ID NO: 51974 - DNA, 20 bp, synthetic construct
  misc_feature 1..20: note = Description of Artificial Sequence: Synthetic oligonucleotide
  misc_feature 1..20: note = Target: SCN10A; (-) strand; PAM type: YTN; PAM sequence: CTA
  source 1..20: mol_type = other DNA
tactacaaggctatagtata

SEQ ID NO: 51975 - DNA, 20 bp, synthetic construct
  misc_feature 1..20: note = Description of Artificial Sequence: Synthetic oligonucleotide
  misc_feature 1..20: note = Target: SCN10A; (-) strand; PAM type: YTN; PAM sequence: TTC
  source 1..20: mol_type = other DNA
aaactatactacaaggctat

SEQ ID NO: 51976 - DNA, 20 bp, synthetic construct
  misc_feature 1..20: note = Description of Artificial Sequence: Synthetic oligonucleotide
  misc_feature 1..20: note = Target: SCN10A; (-) strand; PAM type: YTN; PAM sequence: TTT
  source 1..20: mol_type = other DNA
caaactatactacaaggcta

SEQ ID NO: 51977 - DNA, 20 bp, synthetic construct
  misc_feature 1..20: note = Description of Artificial Sequence: Synthetic oligonucleotide
  misc_feature 1..20: note = Target: SCN10A; (-) strand; PAM type: YTN; PAM sequence: CTG
  source 1..20: mol_type = other DNA
atttcaaactatactacaag

SEQ ID NO: 51978 - DNA, 20 bp, synthetic construct
  misc_feature 1..20: note = Description of Artificial Sequence: Synthetic oligonucleotide
  misc_feature 1..20: note = Target: SCN10A; (-) strand; PAM type: YTN; PAM sequence: TTA
  source 1..20: mol_type = other DNA
gctgatttcaaactatacta

SEQ ID NO: 51979 - DNA, 20 bp, synthetic construct
  misc_feature 1..20: note = Description of Artificial Sequence: Synthetic oligonucleotide
  misc_feature 1..20: note = Target: SCN10A; (-) strand; PAM type: YTN; PAM sequence: CTT
  source 1..20: mol_type = other DNA
agctgatttcaaactatact

SEQ ID NO: 51980 - DNA, 20 bp, synthetic construct
  misc_feature 1..20: note = Description of Artificial Sequence: Synthetic oligonucleotide
  misc_feature 1..20: note = Target: SCN10A; (-) strand; PAM type: YTN; PAM sequence: CTG
  source 1..20: mol_type = other DNA
gaggcatcaccttagctgat

SEQ ID NO: 51981 - DNA, 20 bp, synthetic construct
  misc_feature 1..20: note = Description of Artificial Sequence: Synthetic oligonucleotide
  misc_feature 1..20: note = Target: SCN10A; (-) strand; PAM type: YTN; PAM sequence: CTA
  source 1..20: mol_type = other DNA
agcaagaataacaaatctgg

SEQ ID NO: 51982 - DNA, 20 bp, synthetic construct
  misc_feature 1..20: note = Description of Artificial Sequence: Synthetic oligonucleotide
  misc_feature 1..20: note = Target: SCN10A; (-) strand; PAM type: YTN; PAM sequence: TTC
  source 1..20: mol_type = other DNA
atagggaaccaaaaaggaat

SEQ ID NO: 51983 - DNA, 20 bp, synthetic construct
  misc_feature 1..20: note = Description of Artificial Sequence: Synthetic oligonucleotide
  misc_feature 1..20: note = Target: SCN10A; (-) strand; PAM type: YTN; PAM sequence: CTA
  source 1..20: mol_type = other DNA
aaattcatagggaaccaaaa

SEQ ID NO: 51984 - DNA, 20 bp, synthetic construct
  misc_feature 1..20: note = Description of Artificial Sequence: Synthetic oligonucleotide
  misc_feature 1..20: note = Target: SCN10A; (-) strand; PAM type: YTN; PAM sequence: TTC
  source 1..20: mol_type = other DNA
acagaaatagaaataacaac

SEQ ID NO: 51985 - DNA, 20 bp, synthetic construct
  misc_feature 1..20: note = Description of Artificial Sequence: Synthetic oligonucleotide
  misc_feature 1..20: note = Target: SCN10A; (-) strand; PAM type: YTN; PAM sequence: CTT
  source 1..20: mol_type = other DNA
cacagaaatagaaataacaa

SEQ ID NO: 51986 - DNA, 20 bp, synthetic construct
  misc_feature 1..20: note = Description of Artificial Sequence: Synthetic oligonucleotide
  misc_feature 1..20: note = Target: SCN10A; (-) strand; PAM type: YTN; PAM sequence: TTC
  source 1..20: mol_type = other DNA
ttcacagaaatagaaataac

SEQ ID NO: 51987 - DNA, 20 bp, synthetic construct
  misc_feature 1..20: note = Description of Artificial Sequence: Synthetic oligonucleotide
  misc_feature 1..20: note = Target: SCN10A; (-) strand; PAM type: YTN; PAM sequence: TTG
  source 1..20: mol_type = other DNA
aagtaccacatcattcttca

SEQ ID NO: 51988 - DNA, 20 bp, synthetic construct
  misc_feature 1..20: note = Description of Artificial Sequence: Synthetic oligonucleotide
  misc_feature 1..20: note = Target: SCN10A; (-) strand; PAM type: YTN; PAM sequence: TTC
  source 1..20: mol_type = other DNA
cattgaagtaccacatcatt

SEQ ID NO: 51989 - DNA, 20 bp, synthetic construct
  misc_feature 1..20: note = Description of Artificial Sequence: Synthetic oligonucleotide
  misc_feature 1..20: note = Target: SCN10A; (-) strand; PAM type: YTN; PAM sequence: TTT
  source 1..20: mol_type = other DNA
ccattgaagtaccacatcat

SEQ ID NO: 51990 - DNA, 20 bp, synthetic construct
  misc_feature 1..20: note = Description of Artificial Sequence: Synthetic oligonucleotide
  misc_feature 1..20: note = Target: SCN10A; (-) strand; PAM type: YTN; PAM sequence: TTC
  source 1..20: mol_type = other DNA
aatacaatttccattgaagt

SEQ ID NO: 51991 - DNA, 20 bp, synthetic construct
  misc_feature 1..20: note = Description of Artificial Sequence: Synthetic oligonucleotide
  misc_feature 1..20: note = Target: SCN10A; (-) strand; PAM type: YTN; PAM sequence: CTG
  source 1..20: mol_type = other DNA
ccaaaagcaatatacagatt

SEQ ID NO: 51992 - DNA, 20 bp, synthetic construct
  misc_feature 1..20: note = Description of Artificial Sequence: Synthetic oligonucleotide
  misc_feature 1..20: note = Target: SCN10A; (-) strand; PAM type: YTN; PAM sequence: TTA
  source 1..20: mol_type = other DNA
ctgccaaaagcaatatacag

SEQ ID NO: 51993 - DNA, 20 bp, synthetic construct
  misc_feature 1..20: note = Description of Artificial Sequence: Synthetic oligonucleotide
  misc_feature 1..20: note = Target: SCN10A; (-) strand; PAM type: YTN; PAM sequence: CTT
  source 1..20: mol_type = other DNA
actgccaaaagcaatataca

SEQ ID NO: 51994 - DNA, 20 bp, synthetic construct
  misc_feature 1..20: note = Description of Artificial Sequence: Synthetic oligonucleotide
  misc_feature 1..20: note = Target: SCN10A; (-) strand; PAM type: YTN; PAM sequence: TTG
  source 1..20: mol_type = other DNA
tgaaaatgaccttactgcca

SEQ ID NO: 51995 - DNA, 20 bp, synthetic construct
  misc_feature 1..20: note = Description of Artificial Sequence: Synthetic oligonucleotide
  misc_feature 1..20: note = Target: SCN10A; (-) strand; PAM type: YTN; PAM sequence: CTC
  source 1..20: mol_type = other DNA
atggatggataaaatcaata

SEQ ID NO: 51996 - DNA, 20 bp, synthetic construct
  misc_feature 1..20: note = Description of Artificial Sequence: Synthetic oligonucleotide
  misc_feature 1..20: note = Target: SCN10A; (-) strand; PAM type: YTN; PAM sequence: CTA
  source 1..20: mol_type = other DNA
aaataaatcacagatgacac

SEQ ID NO: 51997 - DNA, 20 bp, synthetic construct
  misc_feature 1..20: note = Description of Artificial Sequence: Synthetic oligonucleotide
  misc_feature 1..20: note = Target: SCN10A; (-) strand; PAM type: YTN; PAM sequence: CTG
  source 1..20: mol_type = other DNA
ctaaaataaatcacagatga

SEQ ID NO: 51998 - DNA, 20 bp, synthetic construct
  misc_feature 1..20: note = Description of Artificial Sequence: Synthetic oligonucleotide
  misc_feature 1..20: note = Target: SCN10A; (-) strand; PAM type: YTN; PAM sequence: CTA
  source 1..20: mol_type = other DNA
caaaacactgctaaaataaa

SEQ ID NO: 51999 - DNA, 20 bp, synthetic construct
  misc_feature 1..20: note = Description of Artificial Sequence: Synthetic oligonucleotide
  misc_feature 1..20: note = Target: SCN10A; (-) strand; PAM type: YTN; PAM sequence: CTA
  source 1..20: mol_type = other DNA
caaggaaaactacaaaacac

SEQ ID NO: 52000 - DNA, 20 bp, synthetic construct
  misc_feature 1..20: note = Description of Artificial Sequence: Synthetic oligonucleotide
  misc_feature 1..20: note = Target: SCN10A; (-) strand; PAM type: YTN; PAM sequence: TTC
  source 1..20: mol_type = other DNA
tacaaggaaaactacaaaac

SEQ ID NO: 52001 - DNA, 20 bp, synthetic construct
  misc_feature 1..20: note = Description of Artificial Sequence: Synthetic oligonucleotide
  misc_feature 1..20: note = Target: SCN10A; (-) strand; PAM type: YTN; PAM sequence: TTT
  source 1..20: mol_type = other DNA
ctacaaggaaaactacaaaa

SEQ ID NO: 52002 - DNA, 20 bp, synthetic construct
  misc_feature 1..20: note = Description of Artificial Sequence: Synthetic oligonucleotide
  misc_feature 1..20: note = Target: SCN10A; (-) strand; PAM type: YTN; PAM sequence: CTA
  source 1..20: mol_type = other DNA
accaaaaaggtgaaagattt

SEQ ID NO: 52003 - DNA, 20 bp, synthetic construct
  misc_feature 1..20: note = Description of Artificial Sequence: Synthetic oligonucleotide
  misc_feature 1..20: note = Target: SCN10A; (-) strand; PAM type: YTN; PAM sequence: TTA
  source 1..20: mol_type = other DNA
ggaatatacctaaccaaaaa

SEQ ID NO: 52004 - DNA, 20 bp, synthetic construct
  misc_feature 1..20: note = Description of Artificial Sequence: Synthetic oligonucleotide
  misc_feature 1..20: note = Target: SCN10A; (-) strand; PAM type: YTN; PAM sequence: CTT
  source 1..20: mol_type = other DNA
aggaatatacctaaccaaaa

SEQ ID NO: 52005 - DNA, 20 bp, synthetic construct
  misc_feature 1..20: note = Description of Artificial Sequence: Synthetic oligonucleotide
  misc_feature 1..20: note = Target: SCN10A; (-) strand; PAM type: YTN; PAM sequence: CTG
  source 1..20: mol_type = other DNA
caaaaaaaaaacaaaaataa

SEQ ID NO: 52006 - DNA, 20 bp, synthetic construct
  misc_feature 1..20: note = Description of Artificial Sequence: Synthetic oligonucleotide
  misc_feature 1..20: note = Target: SCN10A; (-) strand; PAM type: YTN; PAM sequence: TTA
  source 1..20: mol_type = other DNA
caacagctgcaaaaaaaaaa

SEQ ID NO: 52007 - DNA, 20 bp, synthetic construct
  misc_feature 1..20: note = Description of Artificial Sequence: Synthetic oligonucleotide
  misc_feature 1..20: note = Target: SCN10A; (-) strand; PAM type: YTN; PAM sequence: TTT
  source 1..20: mol_type = other DNA
acaacagctgcaaaaaaaaa

SEQ ID NO: 52008 - DNA, 20 bp, synthetic construct
  misc_feature 1..20: note = Description of Artificial Sequence: Synthetic oligonucleotide
  misc_feature 1..20: note = Target: SCN10A; (-) strand; PAM type: YTN; PAM sequence: TTT
  source 1..20: mol_type = other DNA
tacaacagctgcaaaaaaaa

SEQ ID NO: 52009 - DNA, 20 bp, synthetic construct
  misc_feature 1..20: note = Description of Artificial Sequence: Synthetic oligonucleotide
  misc_feature 1..20: note = Target: SCN10A; (-) strand; PAM type: YTN; PAM sequence: CTT
  source 1..20: mol_type = other DNA
ttacaacagctgcaaaaaaa

SEQ ID NO: 52010 - DNA, 20 bp, synthetic construct
  misc_feature 1..20: note = Description of Artificial Sequence: Synthetic oligonucleotide
  misc_feature 1..20: note = Target: SCN10A; (-) strand; PAM type: YTN; PAM sequence: CTC
  source 1..20: mol_type = other DNA
aatcccttttacaacagctg

SEQ ID NO: 52011 - DNA, 20 bp, synthetic construct
  misc_feature 1..20: note = Description of Artificial Sequence: Synthetic oligonucleotide
  misc_feature 1..20: note = Target: SCN10A; (-) strand; PAM type: YTN; PAM sequence: CTG
  source 1..20: mol_type = other DNA
aggaacaaatcaagaactca

SEQ ID NO: 52012 - DNA, 20 bp, synthetic construct
  misc_feature 1..20: note = Description of Artificial Sequence: Synthetic oligonucleotide
  misc_feature 1..20: note = Target: SCN10A; (-) strand; PAM type: YTN; PAM sequence: CTG
  source 1..20: mol_type = other DNA
tacaccaccagaaaccaagc

SEQ ID NO: 52013 - DNA, 20 bp, synthetic construct
  misc_feature 1..20: note = Description of Artificial Sequence: Synthetic oligonucleotide
  misc_feature 1..20: note = Target: SCN10A; (-) strand; PAM type: YTN; PAM sequence: CTA
  source 1..20: mol_type = other DNA
ctgtacaccaccagaaacca

SEQ ID NO: 52014 - DNA, 20 bp, synthetic construct
  misc_feature 1..20: note = Description of Artificial Sequence: Synthetic oligonucleotide
  misc_feature 1..20: note = Target: SCN10A; (-) strand; PAM type: YTN; PAM sequence: TTC
  source 1..20: mol_type = other DNA
aggatacaaaaacaatgtat

SEQ ID NO: 52015 - DNA, 20 bp, synthetic construct
  misc_feature 1..20: note = Description of Artificial Sequence: Synthetic oligonucleotide
  misc_feature 1..20: note = Target: SCN10A; (-) strand; PAM type: YTN; PAM sequence: TTT
  source 1..20: mol_type = other DNA
caggatacaaaaacaatgta

SEQ ID NO: 52016 - DNA, 20 bp, synthetic construct
  misc_feature 1..20: note = Description of Artificial Sequence: Synthetic oligonucleotide
  misc_feature 1..20: note = Target: SCN10A; (-) strand; PAM type: YTN; PAM sequence: TTC
  source 1..20: mol_type = other DNA
agtaaagtttcaggatacaa

SEQ ID NO: 52017 - DNA, 20 bp, synthetic construct
  misc_feature 1..20: note = Description of Artificial Sequence: Synthetic oligonucleotide
  misc_feature 1..20: note = Target: SCN10A; (-) strand; PAM type: YTN; PAM sequence: CTA
  source 1..20: mol_type = other DNA
ataaatgaattcagtaaagt

SEQ ID NO: 52018 - DNA, 20 bp, synthetic construct
  misc_feature 1..20: note = Description of Artificial Sequence: Synthetic oligonucleotide
  misc_feature 1..20: note = Target: SCN10A; (-) strand; PAM type: YTN; PAM sequence: CTA
  source 1..20: mol_type = other DNA
gatctaataaatgaattcag

SEQ ID NO: 52019 - DNA, 20 bp, synthetic construct
  misc_feature 1..20: note = Description of Artificial Sequence: Synthetic oligonucleotide
  misc_feature 1..20: note = Target: SCN10A; (-) strand; PAM type: YTN; PAM sequence: CTC
  source 1..20: mol_type = other DNA
ctagatctaataaatgaatt

SEQ ID NO: 52020 - DNA, 20 bp, synthetic construct
  misc_feature 1..20: note = Description of Artificial Sequence: Synthetic oligonucleotide
  misc_feature 1..20: note = Target: SCN10A; (-) strand; PAM type: YTN; PAM sequence: CTC
  source 1..20: mol_type = other DNA
atccaaaaagctcctagatc

SEQ ID NO: 52021 - DNA, 20 bp, synthetic construct
  misc_feature 1..20: note = Description of Artificial Sequence: Synthetic oligonucleotide
  misc_feature 1..20: note = Target: SCN10A; (-) strand; PAM type: YTN; PAM sequence: CTA
  source 1..20: mol_type = other DNA
aagactcatccaaaaagctc

SEQ ID NO: 52022 - DNA, 20 bp, synthetic construct
  misc_feature 1..20: note = Description of Artificial Sequence: Synthetic oligonucleotide
  misc_feature 1..20: note = Target: SCN10A; (-) strand; PAM type: YTN; PAM sequence: CTA
  source 1..20: mol_type = other DNA
ggaaaccctaaagactcatc

SEQ ID NO: 52023 - DNA, 20 bp, synthetic construct
  misc_feature 1..20: note = Description of Artificial Sequence: Synthetic oligonucleotide
  misc_feature 1..20: note = Target: SCN10A; (-) strand; PAM type: YTN; PAM sequence: TTC
  source 1..20: mol_type = other DNA
accaatgatatgatcgtatg

SEQ ID NO: 52024 - DNA, 20 bp, synthetic construct
  misc_feature 1..20: note = Description of Artificial Sequence: Synthetic oligonucleotide
  misc_feature 1..20: note = Target: SCN10A; (-) strand; PAM type: YTN; PAM sequence: CTG
  source 1..20: mol_type = other DNA
ttcaccaatgatatgatcgt

SEQ ID NO: 52025 - DNA, 20 bp, synthetic construct
  misc_feature 1..20: note = Description of Artificial Sequence: Synthetic oligonucleotide
  misc_feature 1..20: note = Target: SCN10A; (-) strand; PAM type: YTN; PAM sequence: TTG
  source 1..20: mol_type = other DNA
ctgttcaccaatgatatgat

SEQ ID NO: 52026 - DNA, 20 bp, synthetic construct
  misc_feature 1..20: note = Description of Artificial Sequence: Synthetic oligonucleotide
  misc_feature 1..20: note = Target: SCN10A; (-) strand; PAM type: YTN; PAM sequence: CTG
  source 1..20: mol_type = other DNA
ttgctgttcaccaatgatat

SEQ ID NO: 52027 - DNA, 20 bp, synthetic construct
  misc_feature 1..20: note = Description of Artificial Sequence: Synthetic oligonucleotide
  misc_feature 1..20: note = Target: SCN10A; (-) strand; PAM type: YTN; PAM sequence: CTA
  source 1..20: mol_type = other DNA
gccagagcaatcagacaaga

SEQ ID NO: 52028 - DNA, 20 bp, synthetic construct
  misc_feature 1..20: note = Description of Artificial Sequence: Synthetic oligonucleotide
  misc_feature 1..20: note = Target: SCN10A; (-) strand; PAM type: YTN; PAM sequence: CTG
  source 1..20: mol_type = other DNA
gaagtcctagccagagcaat

SEQ ID NO: 52029 - DNA, 20 bp, synthetic construct
  misc_feature 1..20: note = Description of Artificial Sequence: Synthetic oligonucleotide
  misc_feature 1..20: note = Target: SCN10A; (-) strand; PAM type: YTN; PAM sequence: CTA
  source 1..20: mol_type = other DNA
tccaacatagtactggaagt

SEQ ID NO: 52030 - DNA, 20 bp, synthetic construct
  misc_feature 1..20: note = Description of Artificial Sequence: Synthetic oligonucleotide
  misc_feature 1..20: note = Target: SCN10A; (-) strand; PAM type: YTN; PAM sequence: TTC
  source 1..20: mol_type = other DNA
tatccaacatagtactggaa

SEQ ID NO: 52031 - DNA, 20 bp, synthetic construct
  misc_feature 1..20: note = Description of Artificial Sequence: Synthetic oligonucleotide
  misc_feature 1..20: note = Target: SCN10A; (-) strand; PAM type: YTN; PAM sequence: TTT
  source 1..20: mol_type = other DNA
ctatccaacatagtactgga

SEQ ID NO: 52032 - DNA, 20 bp, synthetic construct
  misc_feature 1..20: note = Description of Artificial Sequence: Synthetic oligonucleotide
  misc_feature 1..20: note = Target: SCN10A; (-) strand; PAM type: YTN; PAM sequence: TTC
  source 1..20: mol_type = other DNA
accatttctatccaacatag

SEQ ID NO: 52033 - DNA, 20 bp, synthetic construct
  misc_feature 1..20: note = Description of Artificial Sequence: Synthetic oligonucleotide
  misc_feature 1..20: note = Target: SCN10A; (-) strand; PAM type: YTN; PAM sequence: TTT
  source 1..20: mol_type = other DNA
caccatttctatccaacata

SEQ ID NO: 52034 - DNA, 20 bp, synthetic construct
  misc_feature 1..20: note = Description of Artificial Sequence: Synthetic oligonucleotide
  misc_feature 1..20: note = Target: SCN10A; (-) strand; PAM type: YTN; PAM sequence: CTT
  source 1..20: mol_type = other DNA
tcaccatttctatccaacat

SEQ ID NO: 52035 - DNA, 20 bp, synthetic construct
  misc_feature 1..20: note = Description of Artificial Sequence: Synthetic oligonucleotide
  misc_feature 1..20: note = Target: SCN10A; (-) strand; PAM type: YTN; PAM sequence: CTG
  source 1..20: mol_type = other DNA
aaacaagacaaggatgccca

SEQ ID NO: 52036 - DNA, 20 bp, synthetic construct
  misc_feature 1..20: note = Description of Artificial Sequence: Synthetic oligonucleotide
  misc_feature 1..20: note = Target: SCN10A; (-) strand; PAM type: YTN; PAM sequence: CTG
  source 1..20: mol_type = other DNA
agaactgaaacaagacaagg

SEQ ID NO: 52037 - DNA, 20 bp, synthetic construct
  misc_feature 1..20: note = Description of Artificial Sequence: Synthetic oligonucleotide
  misc_feature 1..20: note = Target: SCN10A; (-) strand; PAM type: YTN; PAM sequence: TTC
  source 1..20: mol_type = other DNA
cccctgagaactgaaacaag

SEQ ID NO: 52038 - DNA, 20 bp, synthetic construct
  misc_feature 1..20: note = Description of Artificial Sequence: Synthetic oligonucleotide
  misc_feature 1..20: note = Target: SCN10A; (-) strand; PAM type: YTN; PAM sequence: TTG
  source 1..20: mol_type = other DNA
aaagcattccccctgagaac

SEQ ID NO: 52039 - DNA, 20 bp, synthetic construct
  misc_feature 1..20: note = Description of Artificial Sequence: Synthetic oligonucleotide
  misc_feature 1..20: note = Target: SCN10A; (-) strand; PAM type: YTN; PAM sequence: TTA
  source 1..20: mol_type = other DNA
taccaaacagggaaaagttg

SEQ ID NO: 52040 - DNA, 20 bp, synthetic construct
  misc_feature 1..20: note = Description of Artificial Sequence: Synthetic oligonucleotide
  misc_feature 1..20: note = Target: SCN10A; (-) strand; PAM type: YTN; PAM sequence: CTA
  source 1..20: mol_type = other DNA
tgacaaatccacagccaaca

SEQ ID NO: 52041 - DNA, 20 bp, synthetic construct
  misc_feature 1..20: note = Description of Artificial Sequence: Synthetic oligonucleotide
  misc_feature 1..20: note = Target: SCN10A; (-) strand; PAM type: YTN; PAM sequence: CTC
  source 1..20: mol_type = other DNA
caaggtaataaaagccatct

SEQ ID NO: 52042 - DNA, 20 bp, synthetic construct
  misc_feature 1..20: note = Description of Artificial Sequence: Synthetic oligonucleotide
  misc_feature 1..20: note = Target: SCN10A; (-) strand; PAM type: YTN; PAM sequence: TTG
  source 1..20: mol_type = other DNA
gcatagaagggacatactcc

SEQ ID NO: 52043 - DNA, 20 bp, synthetic construct
  misc_feature 1..20: note = Description of Artificial Sequence: Synthetic oligonucleotide
  misc_feature 1..20: note = Target: SCN10A; (-) strand; PAM type: YTN; PAM sequence: CTC
  source 1..20: mol_type = other DNA
aaccaaattggcatagaagg

SEQ ID NO: 52044 - DNA, 20 bp, synthetic construct
  misc_feature 1..20: note = Description of Artificial Sequence: Synthetic oligonucleotide
  misc_feature 1..20: note = Target: SCN10A; (-) strand; PAM type: YTN; PAM sequence: TTA
  source 1..20: mol_type = other DNA
aaaccctcaaccaaattggc

SEQ ID NO: 52045 - DNA, 20 bp, synthetic construct
  misc_feature 1..20: note = Description of Artificial Sequence: Synthetic oligonucleotide
  misc_feature 1..20: note = Target: SCN10A; (-) strand; PAM type: YTN; PAM sequence: TTA
  source 1..20: mol_type = other DNA
tgattaaaaccctcaaccaa

SEQ ID NO: 52046 - DNA, 20 bp, synthetic construct
  misc_feature 1..20: note = Description of Artificial Sequence: Synthetic oligonucleotide
  misc_feature 1..20: note = Target: SCN10A; (-) strand; PAM type: YTN; PAM sequence: TTG
  source 1..20: mol_type = other DNA
acaaaatccagcatcccatt

SEQ ID NO: 52047 - DNA, 20 bp, synthetic construct
  misc_feature 1..20: note = Description of Artificial Sequence: Synthetic oligonucleotide
  misc_feature 1..20: note = Target: SCN10A; (-) strand; PAM type: YTN; PAM sequence: TTT
  source 1..20: mol_type = other DNA
gacaaaatccagcatcccat

SEQ ID NO: 52048 - DNA, 20 bp, synthetic construct
  misc_feature 1..20: note = Description of Artificial Sequence: Synthetic oligonucleotide
  misc_feature 1..20: note = Target: SCN10A; (-) strand; PAM type: YTN; PAM sequence: CTC
  source 1..20: mol_type = other DNA
aataggtgcaggaaaagcat

SEQ ID NO: 52049 - DNA, 20 bp, synthetic construct
  misc_feature 1..20: note = Description of Artificial Sequence: Synthetic oligonucleotide
  misc_feature 1..20: note = Target: SCN10A; (-) strand; PAM type: YTN; PAM sequence: TTA
  source 1..20: mol_type = other DNA
aaaacaaaaatcatatgatc

SEQ ID NO: 52050 - DNA, 20 bp, synthetic construct
  misc_feature 1..20: note = Description of Artificial Sequence: Synthetic oligonucleotide
  misc_feature 1..20: note = Target: SCN10A; (-) strand; PAM type: YTN; PAM sequence: CTG
  source 1..20: mol_type = other DNA
cacgtcacataaacagaatt

SEQ ID NO: 52051 - DNA, 20 bp, synthetic construct
  misc_feature 1..20: note = Description of Artificial Sequence: Synthetic oligonucleotide
  misc_feature 1..20: note = Target: SCN10A; (-) strand; PAM type: YTN; PAM sequence: TTA
  source 1..20: mol_type = other DNA
acatacacaagtcaataaat

SEQ ID NO: 52052 - DNA, 20 bp, synthetic construct
  misc_feature 1..20: note = Description of Artificial Sequence: Synthetic oligonucleotide
  misc_feature 1..20: note = Target: SCN10A; (-) strand; PAM type: YTN; PAM sequence: TTT
  source 1..20: mol_type = other DNA
aacatacacaagtcaataaa

SEQ ID NO: 52053 - DNA, 20 bp, synthetic construct
  misc_feature 1..20: note = Description of Artificial Sequence: Synthetic oligonucleotide
  misc_feature 1..20: note = Target: SCN10A; (-) strand; PAM type: YTN; PAM sequence: TTC
  source 1..20: mol_type = other DNA
ataccagggaggtagggatg

SEQ ID NO: 52054 - DNA, 20 bp, synthetic construct
  misc_feature 1..20: note = Description of Artificial Sequence: Synthetic oligonucleotide
  misc_feature 1..20: note = Target: SCN10A; (-) strand; PAM type: YTN; PAM sequence: TTT
  source 1..20: mol_type = other DNA
cataccagggaggtagggat

SEQ ID NO: 52055 - DNA, 20 bp, synthetic construct
  misc_feature 1..20: note = Description of Artificial Sequence: Synthetic oligonucleotide
  misc_feature 1..20: note = Target: SCN10A; (-) strand; PAM type: YTN; PAM sequence: TTG
  source 1..20: mol_type = other DNA
aatccaacacatatccaaaa

SEQ ID NO: 52056 - DNA, 20 bp, synthetic construct
  misc_feature 1..20: note = Description of Artificial Sequence: Synthetic oligonucleotide
  misc_feature 1..20: note = Target: SCN10A; (-) strand; PAM type: YTN; PAM sequence: CTA
  source 1..20: mol_type = other DNA
attgaatccaacacatatcc

SEQ ID NO: 52057 - DNA, 20 bp, synthetic construct
  misc_feature 1..20: note = Description of Artificial Sequence: Synthetic oligonucleotide
  misc_feature 1..20: note = Target: SCN10A; (-) strand; PAM type: YTN; PAM sequence: CTA
  source 1..20: mol_type = other DNA
gctaattgaatccaacacat

SEQ ID NO: 52058 - DNA, 20 bp, synthetic construct
  misc_feature 1..20: note = Description of Artificial Sequence: Synthetic oligonucleotide
  misc_feature 1..20: note = Target: SCN10A; (-) strand; PAM type: YTN; PAM sequence: CTC
  source 1..20: mol_type = other DNA
aacaaaatgctagctaattg

SEQ ID NO: 52059 - DNA, 20 bp, synthetic construct
  misc_feature 1..20: note = Description of Artificial Sequence: Synthetic oligonucleotide
  misc_feature 1..20: note = Target: SCN10A; (-) strand; PAM type: YTN; PAM sequence: CTG
  source 1..20: mol_type = other DNA
atgaacatagatgcaaaaat

SEQ ID NO: 52060 - DNA, 20 bp, synthetic construct
  misc_feature 1..20: note = Description of Artificial Sequence: Synthetic oligonucleotide
  misc_feature 1..20: note = Target: SCN10A; (-) strand; PAM type: YTN; PAM sequence: CTA
  source 1..20: mol_type = other DNA
cagacaatatccctgatgaa

SEQ ID NO: 52061 - DNA, 20 bp, synthetic construct
  misc_feature 1..20: note = Description of Artificial Sequence: Synthetic oligonucleotide
  misc_feature 1..20: note = Target: SCN10A; (-) strand; PAM type: YTN; PAM sequence: TTA
  source 1..20: mol_type = other DNA
aaaaagaactacagacaata

SEQ ID NO: 52062 - DNA, 20 bp, synthetic construct
  misc_feature 1..20: note = Description of Artificial Sequence: Synthetic oligonucleotide
  misc_feature 1..20: note = Target: SCN10A; (-) strand; PAM type: YTN; PAM sequence: TTT
  source 1..20: mol_type = other DNA
aaaaaagaactacagacaat

SEQ ID NO: 52063 - DNA, 20 bp, synthetic construct
  misc_feature 1..20: note = Description of Artificial Sequence: Synthetic oligonucleotide
  misc_feature 1..20: note = Target: SCN10A; (-) strand; PAM type: YTN; PAM sequence: TTT
  source 1..20: mol_type = other DNA
taaaaaagaactacagacaa

SEQ ID NO: 52064 - DNA, 20 bp, synthetic construct
  misc_feature 1..20: note = Description of Artificial Sequence: Synthetic oligonucleotide
  misc_feature 1..20: note = Target: SCN10A; (-) strand; PAM type: YTN; PAM sequence: CTT
  source 1..20: mol_type = other DNA
ttaaaaaagaactacagaca

SEQ ID NO: 52065 - DNA, 20 bp, synthetic construct
  misc_feature 1..20: note = Description of Artificial Sequence: Synthetic oligonucleotide
  misc_feature 1..20: note = Target: SCN10A; (-) strand; PAM type: YTN; PAM sequence: CTA
  source 1..20: mol_type = other DNA
ataccaaaaccagaaaagga

SEQ ID NO: 52066 - DNA, 20 bp, synthetic construct
  misc_feature 1..20: note = Description of Artificial Sequence: Synthetic oligonucleotide
  misc_feature 1..20: note = Target: SCN10A; (-) strand; PAM type: YTN; PAM sequence: TTA
  source 1..20: mol_type = other DNA
tgaagccagtatcaccctaa

SEQ ID NO: 52067 - DNA, 20 bp, synthetic construct
  misc_feature 1..20: note = Description of Artificial Sequence: Synthetic oligonucleotide
  misc_feature 1..20: note = Target: SCN10A; (-) strand; PAM type: YTN; PAM sequence: TTT
  source 1..20: mol_type = other DNA
atgaagccagtatcacccta

SEQ ID NO: 52068 - DNA, 20 bp, synthetic construct
  misc_feature 1..20: note = Description of Artificial Sequence: Synthetic oligonucleotide
  misc_feature 1..20: note = Target: SCN10A; (-) strand; PAM type: YTN; PAM sequence: TTT
  source 1..20: mol_type = other DNA
tatgaagccagtatcaccct

SEQ ID NO: 52069 - DNA, 20 bp, synthetic construct
  misc_feature 1..20: note = Description of Artificial Sequence: Synthetic oligonucleotide
  misc_feature 1..20: note = Target: SCN10A; (-) strand; PAM type: YTN; PAM sequence: CTA
  source 1..20: mol_type = other DNA
aatcattttatgaagccagt

SEQ ID NO: 52070 - DNA, 20 bp, synthetic construct
  misc_feature 1..20: note = Description of Artificial Sequence: Synthetic oligonucleotide
  misc_feature 1..20: note = Target: SCN10A; (-) strand; PAM type: YTN; PAM sequence: CTC
  source 1..20: mol_type = other DNA
ctaaatcattttatgaagcc

SEQ ID NO: 52071 - DNA, 20 bp, synthetic construct
  misc_feature 1..20: note = Description of Artificial Sequence: Synthetic oligonucleotide
  misc_feature 1..20: note = Target: SCN10A; (-) strand; PAM type: YTN; PAM sequence: TTC
  source 1..20: mol_type = other DNA
caaaagatgcagaaagaggg

SEQ ID NO: 52072 - DNA, 20 bp, synthetic construct
  misc_feature 1..20: note = Description of Artificial Sequence: Synthetic oligonucleotide
  misc_feature 1..20: note = Target: SCN10A; (-) strand; PAM type: YTN; PAM sequence: CTA
  source 1..20: mol_type = other DNA
ttccaaaagatgcagaaaga

SEQ ID NO: 52073 - DNA, 20 bp, synthetic construct
  misc_feature 1..20: note = Description of Artificial Sequence: Synthetic oligonucleotide
  misc_feature 1..20: note = Target: SCN10A; (-) strand; PAM type: YTN; PAM sequence: TTG
  source 1..20: mol_type = other DNA
aaactattccaaaagatgca

SEQ ID NO: 52074 - DNA, 20 bp, synthetic construct
  misc_feature 1..20: note = Description of Artificial Sequence: Synthetic oligonucleotide
  misc_feature 1..20: note = Target: SCN10A; (-) strand; PAM type: YTN; PAM sequence: TTA
  source 1..20: mol_type = other DNA
ttgaaactattccaaaagat

SEQ ID NO: 52075 - DNA, 20 bp, synthetic construct
  misc_feature 1..20: note = Description of Artificial Sequence: Synthetic oligonucleotide
  misc_feature 1..20: note = Target: SCN10A; (-) strand; PAM type: YTN; PAM sequence: TTT
  source 1..20: mol_type = other DNA
attgaaactattccaaaaga

SEQ ID NO: 52076 - DNA, 20 bp, synthetic construct
  misc_feature 1..20: note = Description of Artificial Sequence: Synthetic oligonucleotide
  misc_feature 1..20: note = Target: SCN10A; (-) strand; PAM type: YTN; PAM sequence: TTT
  source 1..20: mol_type = other DNA
tattgaaactattccaaaag

SEQ ID NO: 52077 - DNA, 20 bp, synthetic construct
  misc_feature 1..20: note = Description of Artificial Sequence: Synthetic oligonucleotide
  misc_feature 1..20: note = Target: SCN10A; (-) strand; PAM type: YTN; PAM sequence: TTG
  source 1..20: mol_type = other DNA
gtaccaattttattgaaact

SEQ ID NO: 52078 - DNA, 20 bp, synthetic construct
  misc_feature 1..20: note = Description of Artificial Sequence: Synthetic oligonucleotide
  misc_feature 1..20: note = Target: SCN10A; (-) strand; PAM type: YTN; PAM sequence: TTC
  source 1..20: mol_type = other DNA
aaagaagaattggtaccaat

SEQ ID NO: 52079 - DNA, 20 bp, synthetic construct
  misc_feature 1..20: note = Description of Artificial Sequence: Synthetic oligonucleotide
  misc_feature 1..20: note = Target: SCN10A; (-) strand; PAM type: YTN; PAM sequence: CTA
  source 1..20: mol_type = other DNA
tcagacattcaaagaagaat

SEQ ID NO: 52080 - DNA, 20 bp, synthetic construct
  misc_feature 1..20: note = Description of Artificial Sequence: Synthetic oligonucleotide
  misc_feature 1..20: note = Target: SCN10A; (-) strand; PAM type: YTN; PAM sequence: TTC
  source 1..20: mol_type = other DNA
tatcagacattcaaagaaga

SEQ ID NO: 52081 - DNA, 20 bp, synthetic construct
  misc_feature 1..20: note = Description of Artificial Sequence: Synthetic oligonucleotide
  misc_feature 1..20: note = Target: SCN10A; (-) strand; PAM type: YTN; PAM sequence: CTG
  source 1..20: mol_type = other DNA
aattctatcagacattcaaa

SEQ ID NO: 52082 - DNA, 20 bp, synthetic construct
  misc_feature 1..20: note = Description of Artificial Sequence: Synthetic oligonucleotide
  misc_feature 1..20: note = Target: SCN10A; (-) strand; PAM type: YTN; PAM sequence: TTC
  source 1..20: mol_type = other DNA
acagctgaattctatcagac

SEQ ID NO: 52083 - DNA, 20 bp, synthetic construct
  misc_feature 1..20: note = Description of Artificial Sequence: Synthetic oligonucleotide
  misc_feature 1..20: note = Target: SCN10A; (-) strand; PAM type: YTN; PAM sequence: CTG
  source 1..20: mol_type = other DNA
gattcacagctgaattctat

SEQ ID NO: 52084 - DNA, 20 bp, synthetic construct
  misc_feature 1..20: note = Description of Artificial Sequence: Synthetic oligonucleotide
  misc_feature 1..20: note = Target: SCN10A; (-) strand; PAM type: YTN; PAM sequence: TTG
  source 1..20: mol_type = other DNA
ccaaggaaaaaaagtccagg

SEQ ID NO: 52085 - DNA, 20 bp, synthetic construct
  misc_feature 1..20: note = Description of Artificial Sequence: Synthetic oligonucleotide
  misc_feature 1..20: note = Target: SCN10A; (-) strand; PAM type: YTN; PAM sequence: TTC
  source 1..20: mol_type = other DNA
aaaaattgccaaggaaaaaa

SEQ ID NO: 52086 - DNA, 20 bp, synthetic construct
  misc_feature 1..20: note = Description of Artificial Sequence: Synthetic oligonucleotide
  misc_feature 1..20: note = Target: SCN10A; (-) strand; PAM type: YTN; PAM sequence: TTG
  source 1..20: mol_type = other DNA
aaacagtaattcaaaaattg

SEQ ID NO: 52087 - DNA, 20 bp, synthetic construct
  misc_feature 1..20: note = Description of Artificial Sequence: Synthetic oligonucleotide
  misc_feature 1..20: note = Target: SCN10A; (-) strand; PAM type: YTN; PAM sequence: CTA
  source 1..20: mol_type = other DNA
aacagaccaataacaagtag

SEQ ID NO: 52088 - DNA, 20 bp, synthetic construct
  misc_feature 1..20: note = Description of Artificial Sequence: Synthetic oligonucleotide
  misc_feature 1..20: note = Target: SCN10A; (-) strand; PAM type: YTN; PAM sequence: CTC
  source 1..20: mol_type = other DNA
taaacagaccaataacaagt

SEQ ID NO: 52089 - DNA, 20 bp, synthetic construct
  misc_feature 1..20: note = Description of Artificial Sequence: Synthetic oligonucleotide
  misc_feature 1..20: note = Target: SCN10A; (-) strand; PAM type: YTN; PAM sequence: TTA
  source 1..20: mol_type = other DNA
aatcagaaagtaatagaaac

SEQ ID NO: 52090 - DNA, 20 bp, synthetic construct
  misc_feature 1..20: note = Description of Artificial Sequence: Synthetic oligonucleotide
  misc_feature 1..20: note = Target: SCN10A; (-) strand; PAM type: YTN; PAM sequence: TTA
  source 1..20: mol_type = other DNA
gattaaatcagaaagtaata

SEQ ID NO: 52091 - DNA, 20 bp, synthetic construct
  misc_feature 1..20: note = Description of Artificial Sequence: Synthetic oligonucleotide
  misc_feature 1..20: note = Target: SCN10A; (-) strand; PAM type: YTN; PAM sequence: CTT
  source 1..20: mol_type = other DNA
agattaaatcagaaagtaat

SEQ ID NO: 52092 - DNA, 20 bp, synthetic construct
  misc_feature 1..20: note = Description of Artificial Sequence: Synthetic oligonucleotide
  misc_feature 1..20: note = Target: SCN10A; (-) strand; PAM type: YTN; PAM sequence: CTG
  source 1..20: mol_type = other DNA
tcttagattaaatcagaaag

SEQ ID NO: 52093 - DNA, 20 bp, synthetic construct
  misc_feature 1..20: note = Description of Artificial Sequence: Synthetic oligonucleotide
  misc_feature 1..20: note = Target: SCN10A; (-) strand; PAM type: YTN; PAM sequence: CTG
  source 1..20: mol_type = other DNA
gaaatatacaactgtcttag

SEQ ID NO: 52094 - DNA, 20 bp, synthetic construct
  misc_feature 1..20: note = Description of Artificial Sequence: Synthetic oligonucleotide
  misc_feature 1..20: note = Target: SCN10A; (-) strand; PAM type: YTN; PAM sequence: TTC
  source 1..20: mol_type = other DNA
ctggaaatatacaactgtct

SEQ ID NO: 52095 - DNA, 20 bp, synthetic construct
  misc_feature 1..20: note = Description of Artificial Sequence: Synthetic oligonucleotide
  misc_feature 1..20: note = Target: SCN10A; (-) strand; PAM type: YTN; PAM sequence: TTA
  source 1..20: mol_type = other DNA
gaggagatgaataaattcct

SEQ ID NO: 52096 - DNA, 20 bp, synthetic construct
  misc_feature 1..20: note = Description of Artificial Sequence: Synthetic oligonucleotide
  misc_feature 1..20: note = Target: SCN10A; (-) strand; PAM type: YTN; PAM sequence: TTT
  source 1..20: mol_type = other DNA
agaggagatgaataaattcc

SEQ ID NO: 52097 - DNA, 20 bp, synthetic construct
  misc_feature 1..20: note = Description of Artificial Sequence: Synthetic oligonucleotide
  misc_feature 1..20: note = Target: SCN10A; (-) strand; PAM type: YTN; PAM sequence: CTA
  source 1..20: mol_type = other DNA
gaaaatttagaggagatgaa

SEQ ID NO: 52098 - DNA, 20 bp, synthetic construct
  misc_feature 1..20: note = Description of Artificial Sequence: Synthetic oligonucleotide
  misc_feature 1..20: note = Target: SCN10A; (-) strand; PAM type: YTN; PAM sequence: TTG
  source 1..20: mol_type = other DNA
cacaaactagaaaatttaga

SEQ ID NO: 52099 - DNA, 20 bp, synthetic construct
  misc_feature 1..20: note = Description of Artificial Sequence: Synthetic oligonucleotide
  misc_feature 1..20: note = Target: SCN10A; (-) strand; PAM type: YTN; PAM sequence: TTT
  source 1..20: mol_type = other DNA
gcacaaactagaaaatttag

SEQ ID NO: 52100 - DNA, 20 bp, synthetic construct
  misc_feature 1..20: note = Description of Artificial Sequence: Synthetic oligonucleotide
  misc_feature 1..20: note = Target: SCN10A; (-) strand; PAM type: YTN; PAM sequence: TTA
  source 1..20: mol_type = other DNA
tttgcacaaactagaaaatt

SEQ ID NO: 52101 - DNA, 20 bp, synthetic construct
  misc_feature 1..20: note = Description of Artificial Sequence: Synthetic oligonucleotide
  misc_feature 1..20: note = Target: SCN10A; (-) strand; PAM type: YTN; PAM sequence: TTT
  source 1..20: mol_type = other DNA
atttgcacaaactagaaaat

SEQ ID NO: 52102 - DNA, 20 bp, synthetic construct
  misc_feature 1..20: note = Description of Artificial Sequence: Synthetic oligonucleotide
  misc_feature 1..20: note = Target: SCN10A; (-) strand; PAM type: YTN; PAM sequence: CTT
  source 1..20: mol_type = other DNA
tatttgcacaaactagaaaa

SEQ ID NO: 52103 - DNA, 20 bp, synthetic construct
  misc_feature 1..20: note = Description of Artificial Sequence: Synthetic oligonucleotide
  misc_feature 1..20: note = Target: SCN10A; (-) strand; PAM type: YTN; PAM sequence: CTA
  source 1..20: mol_type = other DNA
tgaacacctttatttgcaca

SEQ ID NO: 52104 - DNA, 20 bp, synthetic construct
  misc_feature 1..20: note = Description of Artificial Sequence: Synthetic oligonucleotide
  misc_feature 1..20: note = Target: SCN10A; (-) strand; PAM type: YTN; PAM sequence: CTA
  source 1..20: mol_type = other DNA
ctatgaacacctttatttgc

SEQ ID NO: 52105 - DNA, 20 bp, synthetic construct
  misc_feature 1..20: note = Description of Artificial Sequence: Synthetic oligonucleotide
  misc_feature 1..20: note = Target: SCN10A; (-) strand; PAM type: YTN; PAM sequence: TTC
  source 1..20: mol_type = other DNA
aaggctactatgaacacctt

SEQ ID NO: 52106 - DNA, 20 bp, synthetic construct
  misc_feature 1..20: note = Description of Artificial Sequence: Synthetic oligonucleotide
  misc_feature 1..20: note = Target: SCN10A; (-) strand; PAM type: YTN; PAM sequence: CTG
  source 1..20: mol_type = other DNA
ataccacagaaatacaaaaa

SEQ ID NO: 52107 - DNA, 20 bp, synthetic construct
  misc_feature 1..20: note = Description of Artificial Sequence: Synthetic oligonucleotide
  misc_feature 1..20: note = Target: SCN10A; (-) strand; PAM type: YTN; PAM sequence: TTA
  source 1..20: mol_type = other DNA
caactgataccacagaaata

SEQ ID NO: 52108 - DNA, 20 bp, synthetic construct
  misc_feature 1..20: note = Description of Artificial Sequence: Synthetic oligonucleotide
  misc_feature 1..20: note = Target: SCN10A; (-) strand; PAM type: YTN; PAM sequence: TTA
  source 1..20: mol_type = other DNA
gaaataaaatgggagatatt

SEQ ID NO: 52109 - DNA, 20 bp, synthetic construct
  misc_feature 1..20: note = Description of Artificial Sequence: Synthetic oligonucleotide
  misc_feature 1..20: note = Target: SCN10A; (-) strand; PAM type: YTN; PAM sequence: CTC
  source 1..20: mol_type = other DNA
aattagaaataaaatgggag

SEQ ID NO: 52110 - DNA, 20 bp, synthetic construct
  misc_feature 1..20: note = Description of Artificial Sequence: Synthetic oligonucleotide
  misc_feature 1..20: note = Target: SCN10A; (-) strand; PAM type: YTN; PAM sequence: TTA
  source 1..20: mol_type = other DNA
accaagaaaagaagagagaa

SEQ ID NO: 52111 - DNA, 20 bp, synthetic construct
  misc_feature 1..20: note = Description of Artificial Sequence: Synthetic oligonucleotide
  misc_feature 1..20: note = Target: SCN10A; (-) strand; PAM type: YTN; PAM sequence: TTG
  source 1..20: mol_type = other DNA
gcaagattaaccaagaaaag

SEQ ID NO: 52112 - DNA, 20 bp, synthetic construct
  misc_feature 1..20: note = Description of Artificial Sequence: Synthetic oligonucleotide
  misc_feature 1..20: note = Target: SCN10A; (-) strand; PAM type: YTN; PAM sequence: TTG
  source 1..20: mol_type = other DNA
accattggcaagattaacca

SEQ ID NO: 52113 - DNA, 20 bp, synthetic construct
  misc_feature 1..20: note = Description of Artificial Sequence: Synthetic oligonucleotide
  misc_feature 1..20: note = Target: SCN10A; (-) strand; PAM type: YTN; PAM sequence: TTG
  source 1..20: mol_type = other DNA
attgaccattggcaagatta

SEQ ID NO: 52114 - DNA, 20 bp, synthetic construct
  misc_feature 1..20: note = Description of Artificial Sequence: Synthetic oligonucleotide
  misc_feature 1..20: note = Target: SCN10A; (-) strand; PAM type: YTN; PAM sequence: TTA
  source 1..20: mol_type = other DNA
aaaagatatagaaaattgat

SEQ ID NO: 52115 - DNA, 20 bp, synthetic construct
  misc_feature 1..20: note = Description of Artificial Sequence: Synthetic oligonucleotide
  misc_feature 1..20: note = Target: SCN10A; (-) strand; PAM type: YTN; PAM sequence: TTT
  source 1..20: mol_type = other DNA
aaaaagatatagaaaattga

SEQ ID NO: 52116 - DNA, 20 bp, synthetic construct
  misc_feature 1..20: note = Description of Artificial Sequence: Synthetic oligonucleotide
  misc_feature 1..20: note = Target: SCN10A; (-) strand; PAM type: YTN; PAM sequence: CTT
  source 1..20: mol_type = other DNA
taaaaagatatagaaaattg

SEQ ID NO: 52117 - DNA, 20 bp, synthetic construct
  misc_feature 1..20: note = Description of Artificial Sequence: Synthetic oligonucleotide
  misc_feature 1..20: note = Target: SCN10A; (-) strand; PAM type: YTN; PAM sequence: TTC
  source 1..20: mol_type = other DNA
tttaaaaagatatagaaaat

SEQ ID NO: 52118 - DNA, 20 bp, synthetic construct
  misc_feature 1..20: note = Description of Artificial Sequence: Synthetic oligonucleotide
  misc_feature 1..20: note = Target: SCN10A; (-) strand; PAM type: YTN; PAM sequence: TTC
  source 1..20: mol_type = other DNA
aaataaaaataataataata

SEQ ID NO: 52119 - DNA, 20 bp, synthetic construct
  misc_feature 1..20: note = Description of Artificial Sequence: Synthetic oligonucleotide
  misc_feature 1..20: note = Target: SCN10A; (-) strand; PAM type: YTN; PAM sequence: CTA
  source 1..20: mol_type = other DNA
aatgaaattcaaataaaaat

SEQ ID NO: 52120 - DNA, 20 bp, synthetic construct
  misc_feature 1..20: note = Description of Artificial Sequence: Synthetic oligonucleotide
  misc_feature 1..20: note = Target: SCN10A; (-) strand; PAM type: YTN; PAM sequence: TTA
  source 1..20: mol_type = other DNA
gagaaacaagaacaaaacag

SEQ ID NO: 52121 - DNA, 20 bp, synthetic construct
  misc_feature 1..20: note = Description of Artificial Sequence: Synthetic oligonucleotide
  misc_feature 1..20: note = Target: SCN10A; (-) strand; PAM type: YTN; PAM sequence: CTC
  source 1..20: mol_type = other DNA
aaggaattagagaaacaaga

SEQ ID NO: 52122 - DNA, 20 bp, synthetic construct
  misc_feature 1..20: note = Description of Artificial Sequence: Synthetic oligonucleotide
  misc_feature 1..20: note = Target: SCN10A; (-) strand; PAM type: YTN; PAM sequence: CTA
  source 1..20: mol_type = other DNA
aggtcacacctcaaggaatt

SEQ ID NO: 52123 - DNA, 20 bp, synthetic construct
  misc_feature 1..20: note = Description of Artificial Sequence: Synthetic oligonucleotide
  misc_feature 1..20: note = Target: SCN10A; (-) strand; PAM type: YTN; PAM sequence: CTA
  source 1..20: mol_type = other DNA
catcaaaaagtatgaaagag

SEQ ID NO: 52124 - DNA, 20 bp, synthetic construct
  misc_feature 1..20: note = Description of Artificial Sequence: Synthetic oligonucleotide
  misc_feature 1..20: note = Target: SCN10A; (-) strand; PAM type: YTN; PAM sequence: TTA
  source 1..20: mol_type = other DNA
aatacctacatcaaaaagta

SEQ ID NO: 52125 - DNA, 20 bp, synthetic construct
  misc_feature 1..20: note = Description of Artificial Sequence: Synthetic oligonucleotide
  misc_feature 1..20: note = Target: SCN10A; (-) strand; PAM type: YTN; PAM sequence: CTC
  source 1..20: mol_type = other DNA
atagcattaaatacctacat

SEQ ID NO: 52126 - DNA, 20 bp, synthetic construct
  misc_feature 1..20: note = Description of Artificial Sequence: Synthetic oligonucleotide
  misc_feature 1..20: note = Target: SCN10A; (-) strand; PAM type: YTN; PAM sequence: CTA
  source 1..20: mol_type = other DNA
agaggaaagctcatagcatt

SEQ ID NO: 52127 - DNA, 20 bp, synthetic construct
  misc_feature 1..20: note = Description of Artificial Sequence: Synthetic oligonucleotide
  misc_feature 1..20: note = Target: SCN10A; (-) strand; PAM type: YTN; PAM sequence: CTA
  source 1..20: mol_type = other DNA
aagcagtgctaagaggaaag

SEQ ID NO: 52128 - DNA, 20 bp, synthetic construct
  misc_feature 1..20: note = Description of Artificial Sequence: Synthetic oligonucleotide
  misc_feature 1..20: note = Target: SCN10A; (-) strand; PAM type: YTN; PAM sequence: CTG
  source 1..20: mol_type = other DNA
ggatacagctaaagcagtgc

SEQ ID NO: 52129 - DNA, 20 bp, synthetic construct
  misc_feature 1..20: note = Description of Artificial Sequence: Synthetic oligonucleotide
  misc_feature 1..20: note = Target: SCN10A; (-) strand; PAM type: YTN; PAM sequence: CTC
  source 1..20: mol_type = other DNA
tgggatacagctaaagcagt

SEQ ID NO: 52130 - DNA, 20 bp, synthetic construct
  misc_feature 1..20: note = Description of Artificial Sequence: Synthetic oligonucleotide
  misc_feature 1..20: note = Target: SCN10A; (-) strand; PAM type: YTN; PAM sequence: TTA
  source 1..20: mol_type = other DNA
tcaaaacctctgggatacag

SEQ ID NO: 52131 - DNA, 20 bp, synthetic construct
  misc_feature 1..20: note = Description of Artificial Sequence: Synthetic oligonucleotide
  misc_feature 1..20: note = Target: SCN10A; (-) strand; PAM type: YTN; PAM sequence: CTT
  source 1..20: mol_type = other DNA
atcaaaacctctgggataca

SEQ ID NO: 52132 - DNA, 20 bp, synthetic construct
  misc_feature 1..20: note = Description of Artificial Sequence: Synthetic oligonucleotide
  misc_feature 1..20: note = Target: SCN10A; (-) strand; PAM type: YTN; PAM sequence: CTG
  source 1..20: mol_type = other DNA
aatgataatagtcacacaac

SEQ ID NO: 52133 - DNA, 20 bp, synthetic construct
  misc_feature 1..20: note = Description of Artificial Sequence: Synthetic oligonucleotide
  misc_feature 1..20: note = Target: SCN10A; (-) strand; PAM type: YTN; PAM sequence: TTG
  source 1..20: mol_type = other DNA
aactgaatgataatagtcac

SEQ ID NO: 52134 - DNA, 20 bp, synthetic construct
  misc_feature 1..20: note = Description of Artificial Sequence: Synthetic oligonucleotide
  misc_feature 1..20: note = Target: SCN10A; (-) strand; PAM type: YTN; PAM sequence: TTT
  source 1..20: mol_type = other DNA
gaactgaatgataatagtca

SEQ ID NO: 52135 - DNA, 20 bp, synthetic construct
  misc_feature 1..20: note = Description of Artificial Sequence: Synthetic oligonucleotide
  misc_feature 1..20: note = Target: SCN10A; (-) strand; PAM type: YTN; PAM sequence: TTT
  source 1..20: mol_type = other DNA
tgaactgaatgataatagtc

SEQ ID NO: 52136 - DNA, 20 bp, synthetic construct
  misc_feature 1..20: note = Description of Artificial Sequence: Synthetic oligonucleotide
  misc_feature 1..20: note = Target: SCN10A; (-) strand; PAM type: YTN; PAM sequence: TTT
  source 1..20: mol_type = other DNA
ttgaactgaatgataatagt

SEQ ID NO: 52137 - DNA, 20 bp, synthetic construct
  misc_feature 1..20: note = Description of Artificial Sequence: Synthetic oligonucleotide
  misc_feature 1..20: note = Target: SCN10A; (-) strand; PAM type: YTN; PAM sequence: TTT
  source 1..20: mol_type = other DNA
tttgaactgaatgataatag

SEQ ID NO: 52138 - DNA, 20 bp, synthetic construct
  misc_feature 1..20: note = Description of Artificial Sequence: Synthetic oligonucleotide
  misc_feature 1..20: note = Target: SCN10A; (-) strand; PAM type: YTN; PAM sequence: TTA
  source 1..20: mol_type = other DNA
aaaattttttgaactgaatg

SEQ ID NO: 52139 - DNA, 20 bp, synthetic construct
  misc_feature 1..20: note = Description of Artificial Sequence: Synthetic oligonucleotide
  misc_feature 1..20: note = Target: SCN10A; (-) strand; PAM type: YTN; PAM sequence: TTT
  source 1..20: mol_type = other DNA
aaaaattttttgaactgaat

SEQ ID NO: 52140 - DNA, 20 bp, synthetic construct
  misc_feature 1..20: note = Description of Artificial Sequence: Synthetic oligonucleotide
  misc_feature 1..20: note = Target: SCN10A; (-) strand; PAM type: YTN; PAM sequence: TTG
  source 1..20: mol_type = other DNA
ggtcaacaatgaaatcaaga

SEQ ID NO: 52141 - DNA, 20 bp, synthetic construct
  misc_feature 1..20: note = Description of Artificial Sequence: Synthetic oligonucleotide
  misc_feature 1..20: note = Target: SCN10A; (-) strand; PAM type: YTN; PAM sequence: TTT
  source 1..20: mol_type = other DNA
gggtcaacaatgaaatcaag

SEQ ID NO: 52142 - DNA, 20 bp, synthetic construct
  misc_feature 1..20: note = Description of Artificial Sequence: Synthetic oligonucleotide
  misc_feature 1..20: note = Target: SCN10A; (-) strand; PAM type: YTN; PAM sequence: CTT
  source 1..20: mol_type = other DNA
tgggtcaacaatgaaatcaa

SEQ ID NO: 52143 - DNA, 20 bp, synthetic construct
  misc_feature 1..20: note = Description of Artificial Sequence: Synthetic oligonucleotide
  misc_feature 1..20: note = Target: SCN10A; (-) strand; PAM type: YTN; PAM sequence: TTG
  source 1..20: mol_type = other DNA
aatgatctttgggtcaacaa

SEQ ID NO: 52144 - DNA, 20 bp, synthetic construct
  misc_feature 1..20: note = Description of Artificial Sequence: Synthetic oligonucleotide
  misc_feature 1..20: note = Target: SCN10A; (-) strand; PAM type: YTN; PAM sequence: CTT
  source 1..20: mol_type = other DNA
gaatgatctttgggtcaaca

SEQ ID NO: 52145 - DNA, 20 bp, synthetic construct
  misc_feature 1..20: note = Description of Artificial Sequence: Synthetic oligonucleotide
  misc_feature 1..20: note = Target: SCN10A; (-) strand; PAM type: YTN; PAM sequence: CTC
  source 1..20: mol_type = other DNA
ttgaatgatctttgggtcaa

SEQ ID NO: 52146 - DNA, 20 bp, synthetic construct
  misc_feature 1..20: note = Description of Artificial Sequence: Synthetic oligonucleotide
  misc_feature 1..20: note = Target: SCN10A; (-) strand; PAM type: YTN; PAM sequence: CTG
  source 1..20: mol_type = other DNA
ctcttgaatgatctttgggt

SEQ ID NO: 52147 - DNA, 20 bp, synthetic construct
  misc_feature 1..20: note = Description of Artificial Sequence: Synthetic oligonucleotide
  misc_feature 1..20: note = Target: SCN10A; (-) strand; PAM type: YTN; PAM sequence: CTA
  source 1..20: mol_type = other DNA
aacaatctgctcttgaatga

SEQ ID NO: 52148 - DNA, 20 bp, synthetic construct
  misc_feature 1..20: note = Description of Artificial Sequence: Synthetic oligonucleotide
  misc_feature 1..20: note = Target: SCN10A; (-) strand; PAM type: YTN; PAM sequence: CTA
  source 1..20: mol_type = other DNA
tacaaatacatgaaaactaa

SEQ ID NO: 52149 - DNA, 20 bp, synthetic construct
  misc_feature 1..20: note = Description of Artificial Sequence: Synthetic oligonucleotide
  misc_feature 1..20: note = Target: SCN10A; (-) strand; PAM type: YTN; PAM sequence: CTC
  source 1..20: mol_type = other DNA
aaaactatacaaatacatga

SEQ ID NO: 52150 - DNA, 20 bp, synthetic construct
  misc_feature 1..20: note = Description of Artificial Sequence: Synthetic oligonucleotide
  misc_feature 1..20: note = Target: SCN10A; (-) strand; PAM type: YTN; PAM sequence: CTC
  source 1..20: mol_type = other DNA
caaaagaaaccctcaaaact

SEQ ID NO: 52151 - DNA, 20 bp, synthetic construct
  misc_feature 1..20: note = Description of Artificial Sequence: Synthetic oligonucleotide
  misc_feature 1..20: note = Target: SCN10A; (-) strand; PAM type: YTN; PAM sequence: TTA
  source 1..20: mol_type = other DNA
actccaaaagaaaccctcaa

SEQ ID NO: 52152 - DNA, 20 bp, synthetic construct
  misc_feature 1..20: note = Description of Artificial Sequence: Synthetic oligonucleotide
  misc_feature 1..20: note = Target: SCN10A; (-) strand; PAM type: YTN; PAM sequence: CTC
  source 1..20: mol_type = other DNA
ggagttaactccaaaagaaa

SEQ ID NO: 52153 - DNA, 20 bp, synthetic construct
  misc_feature 1..20: note = Description of Artificial Sequence: Synthetic oligonucleotide
  misc_feature 1..20: note = Target: SCN10A; (-) strand; PAM type: YTN; PAM sequence: CTC
  source 1..20: mol_type = other DNA
agagcacagtcgaataaacc

SEQ ID NO: 52154 - DNA, 20 bp, synthetic construct
  misc_feature 1..20: note = Description of Artificial Sequence: Synthetic oligonucleotide
  misc_feature 1..20: note = Target: SCN10A; (-) strand; PAM type: YTN; PAM sequence: CTC
  source 1..20: mol_type = other DNA
tcagagcacagtcgaataaa

SEQ ID NO: 52155 - DNA, 20 bp, synthetic construct
  misc_feature 1..20: note = Description of Artificial Sequence: Synthetic oligonucleotide
  misc_feature 1..20: note = Target: SCN10A; (-) strand; PAM type: YTN; PAM sequence: TTA
  source 1..20: mol_type = other DNA
tgtcaggtatcctctcagag

SEQ ID NO: 52156 - DNA, 20 bp, synthetic construct
  misc_feature 1..20: note = Description of Artificial Sequence: Synthetic oligonucleotide
  misc_feature 1..20: note = Target: SCN10A; (-) strand; PAM type: YTN; PAM sequence: TTA
  source 1..20: mol_type = other DNA
agaaaatagaaattatgtca

SEQ ID NO: 52157 - DNA, 20 bp, synthetic construct
  misc_feature 1..20: note = Description of Artificial Sequence: Synthetic oligonucleotide
  misc_feature 1..20: note = Target: SCN10A; (-) strand; PAM type: YTN; PAM sequence: TTT
  source 1..20: mol_type = other DNA
aagaaaatagaaattatgtc

SEQ ID NO: 52158 - DNA, 20 bp, synthetic construct
  misc_feature 1..20: note = Description of Artificial Sequence: Synthetic oligonucleotide
  misc_feature 1..20: note = Target: SCN10A; (-) strand; PAM type: YTN; PAM sequence: CTC
  source 1..20: mol_type = other DNA
aataaatttaagaaaataga

SEQ ID NO: 52159 - DNA, 20 bp, synthetic construct
  misc_feature 1..20: note = Description of Artificial Sequence: Synthetic oligonucleotide
  misc_feature 1..20: note = Target: SCN10A; (-) strand; PAM type: YTN; PAM sequence: CTA
  source 1..20: mol_type = other DNA
agatagaccacgtgatagat

SEQ ID NO: 52160 - DNA, 20 bp, synthetic construct
  misc_feature 1..20: note = Description of Artificial Sequence: Synthetic oligonucleotide
  misc_feature 1..20: note = Target: SCN10A; (-) strand; PAM type: YTN; PAM sequence: CTC
  source 1..20: mol_type = other DNA
taagatagaccacgtgatag

SEQ ID NO: 52161 - DNA, 20 bp, synthetic construct
  misc_feature 1..20: note = Description of Artificial Sequence: Synthetic oligonucleotide
  misc_feature 1..20: note = Target: SCN10A; (-) strand; PAM type: YTN; PAM sequence: TTC
  source 1..20: mol_type = other DNA
tctaagatagaccacgtgat

SEQ ID NO: 52162 - DNA, 20 bp, synthetic construct
  misc_feature 1..20: note = Description of Artificial Sequence: Synthetic oligonucleotide
  misc_feature 1..20: note = Target: SCN10A; (-) strand; PAM type: YTN; PAM sequence: TTC
  source 1..20: mol_type = other DNA
atcagcacatggaatattct

SEQ ID NO: 52163 - DNA, 20 bp, synthetic construct
  misc_feature 1..20: note = Description of Artificial Sequence: Synthetic oligonucleotide
  misc_feature 1..20: note = Target: SCN10A; (-) strand; PAM type: YTN; PAM sequence: TTT
  source 1..20: mol_type = other DNA
catcagcacatggaatattc

SEQ ID NO: 52164 - DNA, 20 bp, synthetic construct
  misc_feature 1..20: note = Description of Artificial Sequence: Synthetic oligonucleotide
  misc_feature 1..20: note = Target: SCN10A; (-) strand; PAM type: YTN; PAM sequence: TTT
  source 1..20: mol_type = other DNA
tcatcagcacatggaatatt

SEQ ID NO: 52165 - DNA, 20 bp, synthetic construct
  misc_feature 1..20: note = Description of Artificial Sequence: Synthetic oligonucleotide
  misc_feature 1..20: note = Target: SCN10A; (-) strand; PAM type: YTN; PAM sequence: CTT
  source 1..20: mol_type = other DNA
ttcatcagcacatggaatat

SEQ ID NO: 52166 - DNA, 20 bp, synthetic construct
  misc_feature 1..20: note = Description of Artificial Sequence: Synthetic oligonucleotide
  misc_feature 1..20: note = Target: SCN10A; (-) strand; PAM type: YTN; PAM sequence: TTC
  source 1..20: mol_type = other DNA
ttttcatcagcacatggaat

SEQ ID NO: 52167 - DNA, 20 bp, synthetic construct
  misc_feature 1..20: note = Description of Artificial Sequence: Synthetic oligonucleotide
  misc_feature 1..20: note = Target: SCN10A; (-) strand; PAM type: YTN; PAM sequence: CTG
  source 1..20: mol_type = other DNA
cagaatatacattcttttca

SEQ ID NO: 52168 - DNA, 20 bp, synthetic construct
  misc_feature 1..20: note = Description of Artificial Sequence: Synthetic oligonucleotide
  misc_feature 1..20: note = Target: SCN10A; (-) strand; PAM type: YTN; PAM sequence: CTA
  source 1..20: mol_type = other DNA
ccaaacaactgcagaatata

SEQ ID NO: 52169 - DNA, 20 bp, synthetic construct
  misc_feature 1..20: note = Description of Artificial Sequence: Synthetic oligonucleotide
  misc_feature 1..20: note = Target: SCN10A; (-) strand; PAM type: YTN; PAM sequence: TTC
  source 1..20: mol_type = other DNA
taccaaacaactgcagaata

SEQ ID NO: 52170 - DNA, 20 bp, synthetic construct
  misc_feature 1..20: note = Description of Artificial Sequence: Synthetic oligonucleotide
  misc_feature 1..20: note = Target: SCN10A; (-) strand; PAM type: YTN; PAM sequence: TTA
  source 1..20: mol_type = other DNA
aaaaacattctaccaaacaa

SEQ ID NO: 52171 - DNA, 20 bp, synthetic construct
  misc_feature 1..20: note = Description of Artificial Sequence: Synthetic oligonucleotide
  misc_feature 1..20: note = Target: SCN10A; (-) strand; PAM type: YTN; PAM sequence: TTT
  source 1..20: mol_type = other DNA
aaaaaacattctaccaaaca

SEQ ID NO: 52172 - DNA, 20 bp, synthetic construct
  misc_feature 1..20: note = Description of Artificial Sequence: Synthetic oligonucleotide
  misc_feature 1..20: note = Target: SCN10A; (-) strand; PAM type: YTN; PAM sequence: TTA
  source 1..20: mol_type = other DNA
acagatatttaaaaaacatt

SEQ ID NO: 52173 - DNA, 20 bp, synthetic construct
  misc_feature 1..20: note = Description of Artificial Sequence: Synthetic oligonucleotide
  misc_feature 1..20: note = Target: SCN10A; (-) strand; PAM type: YTN; PAM sequence: CTT
  source 1..20: mol_type = other DNA
aacagatatttaaaaaacat

SEQ ID NO: 52174 - DNA, 20 bp, synthetic construct
  misc_feature 1..20: note = Description of Artificial Sequence: Synthetic oligonucleotide
  misc_feature 1..20: note = Target: SCN10A; (-) strand; PAM type: YTN; PAM sequence: CTA
  source 1..20: mol_type = other DNA
gaacaaatggacttaacaga

SEQ ID NO: 52175 - DNA, 20 bp, synthetic construct
  misc_feature 1..20: note = Description of Artificial Sequence: Synthetic oligonucleotide
  misc_feature 1..20: note = Target: SCN10A; (-) strand; PAM type: YTN; PAM sequence: CTG
  source 1..20: mol_type = other DNA
taacctagaacaaatggact

SEQ ID NO: 52176 - DNA, 20 bp, synthetic construct
  misc_feature 1..20: note = Description of Artificial Sequence: Synthetic oligonucleotide
  misc_feature 1..20: note = Target: SCN10A; (-) strand; PAM type: YTN; PAM sequence: TTA
  source 1..20: mol_type = other DNA
aactgtaacctagaacaaat

SEQ ID NO: 52177 - DNA, 20 bp, synthetic construct
  misc_feature 1..20: note = Description of Artificial Sequence: Synthetic oligonucleotide
  misc_feature 1..20: note = Target: SCN10A; (-) strand; PAM type: YTN; PAM sequence: CTT
  source 1..20: mol_type = other DNA
aaactgtaacctagaacaaa

SEQ ID NO: 52178 - DNA, 20 bp, synthetic construct
  misc_feature 1..20: note = Description of Artificial Sequence: Synthetic oligonucleotide
  misc_feature 1..20: note = Target: SCN10A; (-) strand; PAM type: YTN; PAM sequence: CTA
  source 1..20: mol_type = other DNA
gacaggtcatcaagacagaa

SEQ ID NO: 52179 - DNA, 20 bp, synthetic construct
  misc_feature 1..20: note = Description of Artificial Sequence: Synthetic oligonucleotide
  misc_feature 1..20: note = Target: SCN10A; (-) strand; PAM type: YTN; PAM sequence: CTG
  source 1..20: mol_type = other DNA
acagcactagacaggtcatc

SEQ ID NO: 52180 - DNA, 20 bp, synthetic construct
  misc_feature 1..20: note = Description of Artificial Sequence: Synthetic oligonucleotide
  misc_feature 1..20: note = Target: SCN10A; (-) strand; PAM type: YTN; PAM sequence: TTC
  source 1..20: mol_type = other DNA
cactgacagcactagacagg

SEQ ID NO: 52181 - DNA, 20 bp, synthetic construct
  misc_feature 1..20: note = Description of Artificial Sequence: Synthetic oligonucleotide
  misc_feature 1..20: note = Target: SCN10A; (-) strand; PAM type: YTN; PAM sequence: CTA
  source 1..20: mol_type = other DNA
agaaatgaaatagacagcaa

SEQ ID NO: 52182 - DNA, 20 bp, synthetic construct
  misc_feature 1..20: note = Description of Artificial Sequence: Synthetic oligonucleotide
  misc_feature 1..20: note = Target: SCN10A; (-) strand; PAM type: YTN; PAM sequence: CTA
  source 1..20: mol_type = other DNA
gacctaagaaatgaaataga

SEQ ID NO: 52183 - DNA, 20 bp, synthetic construct
  misc_feature 1..20: note = Description of Artificial Sequence: Synthetic oligonucleotide
  misc_feature 1..20: note = Target: SCN10A; (-) strand; PAM type: YTN; PAM sequence: CTA
  source 1..20: mol_type = other DNA
ctagacctaagaaatgaaat

SEQ ID NO: 52184 - DNA, 20 bp, synthetic construct
  misc_feature 1..20: note = Description of Artificial Sequence: Synthetic oligonucleotide
  misc_feature 1..20: note = Target: SCN10A; (-) strand; PAM type: YTN; PAM sequence: TTA
  source 1..20: mol_type = other DNA
ctactagacctaagaaatga

SEQ ID NO: 52185 - DNA, 20 bp, synthetic construct
  misc_feature 1..20: note = Description of Artificial Sequence: Synthetic oligonucleotide
  misc_feature 1..20: note = Target: SCN10A; (-) strand; PAM type: YTN; PAM sequence: TTA
  source 1..20: mol_type = other DNA
taaaacaattactactagac

SEQ ID NO: 52186 - DNA, 20 bp, synthetic construct
  misc_feature 1..20: note = Description of Artificial Sequence: Synthetic oligonucleotide
  misc_feature 1..20: note = Target: SCN10A; (-) strand; PAM type: YTN; PAM sequence: TTT
  source 1..20: mol_type = other DNA
ataaaacaattactactaga

SEQ ID NO: 52187 - DNA, 20 bp, synthetic construct
  misc_feature 1..20: note = Description of Artificial Sequence: Synthetic oligonucleotide
  misc_feature 1..20: note = Target: SCN10A; (-) strand; PAM type: YTN; PAM sequence: CTC
  source 1..20: mol_type = other DNA
ccaaatttataaaacaatta

SEQ ID NO: 52188 - DNA, 20 bp, synthetic construct
  misc_feature 1..20: note = Description of Artificial Sequence: Synthetic oligonucleotide
  misc_feature 1..20: note = Target: SCN10A; (-) strand; PAM type: YTN; PAM sequence: CTG
  source 1..20: mol_type = other DNA
gagctcccaaatttataaaa

SEQ ID NO: 52189 - DNA, 20 bp, synthetic construct
  misc_feature 1..20: note = Description of Artificial Sequence: Synthetic oligonucleotide
  misc_feature 1..20: note = Target: SCN10A; (-) strand; PAM type: YTN; PAM sequence: CTA
  source 1..20: mol_type = other DNA
acactggagctcccaaattt

SEQ ID NO: 52190 - DNA, 20 bp, synthetic construct
  misc_feature 1..20: note = Description of Artificial Sequence: Synthetic oligonucleotide
  misc_feature 1..20: note = Target: SCN10A; (-) strand; PAM type: YTN; PAM sequence: CTA
  source 1..20: mol_type = other DNA
aatacatatgcacctaacac

SEQ ID NO: 52191 - DNA, 20 bp, synthetic construct
  misc_feature 1..20: note = Description of Artificial Sequence: Synthetic oligonucleotide
  misc_feature 1..20: note = Target: SCN10A; (-) strand; PAM type: YTN; PAM sequence: CTA
  source 1..20: mol_type = other DNA
atggaaaaatatcataatcc

SEQ ID NO: 52192 - DNA, 20 bp, synthetic construct
  misc_feature 1..20: note = Description of Artificial Sequence: Synthetic oligonucleotide
  misc_feature 1..20: note = Target: SCN10A; (-) strand; PAM type: YTN; PAM sequence: TTG
  source 1..20: mol_type = other DNA
gtctaatggaaaaatatcat

SEQ ID NO: 52193 - DNA, 20 bp, synthetic construct
  misc_feature 1..20: note = Description of Artificial Sequence: Synthetic oligonucleotide
  misc_feature 1..20: note = Target: SCN10A; (-) strand; PAM type: YTN; PAM sequence: TTA
  source 1..20: mol_type = other DNA
aaaaaagacaaagagggaca

SEQ ID NO: 52194 - DNA, 20 bp, synthetic construct
  misc_feature 1..20: note = Description of Artificial Sequence: Synthetic oligonucleotide
  misc_feature 1..20: note = Target: SCN10A; (-) strand; PAM type: YTN; PAM sequence: TTA
  source 1..20: mol_type = other DNA
aagcaacaacagttaaaaaa

SEQ ID NO: 52195 - DNA, 20 bp, synthetic construct
  misc_feature 1..20: note = Description of Artificial Sequence: Synthetic oligonucleotide
  misc_feature 1..20: note = Target: SCN10A; (-) strand; PAM type: YTN; PAM sequence: CTT
  source 1..20: mol_type = other DNA
aaagcaacaacagttaaaaa

SEQ ID NO: 52196 - DNA, 20 bp, synthetic construct
  misc_feature 1..20: note = Description of Artificial Sequence: Synthetic oligonucleotide
  misc_feature 1..20: note = Target: SCN10A; (-) strand; PAM type: YTN; PAM sequence: TTA
  source 1..20: mol_type = other DNA
tatcagagaaaacagacctt

SEQ ID NO: 52197 - DNA, 20 bp, synthetic construct
  misc_feature 1..20: note = Description of Artificial Sequence: Synthetic oligonucleotide
  misc_feature 1..20: note = Target: SCN10A; (-) strand; PAM type: YTN; PAM sequence: CTT
  source 1..20: mol_type = other DNA
atatcagagaaaacagacct

SEQ ID NO: 52198 - DNA, 20 bp, synthetic construct
  misc_feature 1..20: note = Description of Artificial Sequence: Synthetic oligonucleotide
  misc_feature 1..20: note = Target: SCN10A; (-) strand; PAM type: YTN; PAM sequence: TTC
  source 1..20: mol_type = other DNA
ttatatcagagaaaacagac

SEQ ID NO: 52199 - DNA, 20 bp, synthetic construct
  misc_feature 1..20: note = Description of Artificial Sequence: Synthetic oligonucleotide
  misc_feature 1..20: note = Target: SCN10A; (-) strand; PAM type: YTN; PAM sequence: CTA
  source 1..20: mol_type = other DNA
ttcttatatcagagaaaaca

SEQ ID NO: 52200 - DNA, 20 bp, synthetic construct
  misc_feature 1..20: note = Description of Artificial Sequence: Synthetic oligonucleotide
  misc_feature 1..20: note = Target: SCN10A; (-) strand; PAM type: YTN; PAM sequence: TTC
  source 1..20: mol_type = other DNA
catgcaaatggaaaccaaaa

SEQ ID NO: 52201 - DNA, 20 bp, synthetic construct
  misc_feature 1..20: note = Description of Artificial Sequence: Synthetic oligonucleotide
  misc_feature 1..20: note = Target: SCN10A; (-) strand; PAM type: YTN; PAM sequence: TTA
  source 1..20: mol_type = other DNA
aggtaaagagatgggaaaag

SEQ ID NO: 52202 - DNA, 20 bp, synthetic construct
  misc_feature 1..20: note = Description of Artificial Sequence: Synthetic oligonucleotide
  misc_feature 1..20: note = Target: SCN10A; (-) strand; PAM type: YTN; PAM sequence: CTT
  source 1..20: mol_type = other DNA
aaggtaaagagatgggaaaa

SEQ ID NO: 52203 - DNA, 20 bp, synthetic construct
  misc_feature 1..20: note = Description of Artificial Sequence: Synthetic oligonucleotide
  misc_feature 1..20: note = Target: SCN10A; (-) strand; PAM type: YTN; PAM sequence: CTA
  source 1..20: mol_type = other DNA
acacataaggagccacataa

SEQ ID NO: 52204 - DNA, 20 bp, synthetic construct
  misc_feature 1..20: note = Description of Artificial Sequence: Synthetic oligonucleotide
  misc_feature 1..20: note = Target: SCN10A; (-) strand; PAM type: YTN; PAM sequence: CTC
  source 1..20: mol_type = other DNA
acctaacacataaggagcca

SEQ ID NO: 52205 - DNA, 20 bp, synthetic construct
  misc_feature 1..20: note = Description of Artificial Sequence: Synthetic oligonucleotide
  misc_feature 1..20: note = Target: SCN10A; (-) strand; PAM type: YTN; PAM sequence: TTC
  source 1..20: mol_type = other DNA
aagagactcacctaacacat

SEQ ID NO: 52206 - DNA, 20 bp, synthetic construct
  misc_feature 1..20: note = Description of Artificial Sequence: Synthetic oligonucleotide
  misc_feature 1..20: note = Target: SCN10A; (-) strand; PAM type: YTN; PAM sequence: CTT
  source 1..20: mol_type = other DNA
caagagactcacctaacaca

SEQ ID NO: 52207 - DNA, 20 bp, synthetic construct
  misc_feature 1..20: note = Description of Artificial Sequence: Synthetic oligonucleotide
  misc_feature 1..20: note = Target: SCN10A; (-) strand; PAM type: YTN; PAM sequence: CTG
  source 1..20: mol_type = other DNA
tcttcaagagactcacctaa

SEQ ID NO: 52208 - DNA, 20 bp, synthetic construct
  misc_feature 1..20: note = Description of Artificial Sequence: Synthetic oligonucleotide
  misc_feature 1..20: note = Target: SCN10A; (-) strand; PAM type: YTN; PAM sequence: CTA
  source 1..20: mol_type = other DNA
ctgtcttcaagagactcacc

SEQ ID NO: 52209 - DNA, 20 bp, synthetic construct
  misc_feature 1..20: note = Description of Artificial Sequence: Synthetic oligonucleotide
  misc_feature 1..20: note = Target: SCN10A; (-) strand; PAM type: YTN; PAM sequence: TTA
  source 1..20: mol_type = other DNA
aaatatacagaagggcagaa

SEQ ID NO: 52210 - DNA, 20 bp, synthetic construct
  misc_feature 1..20: note = Description of Artificial Sequence: Synthetic oligonucleotide
  misc_feature 1..20: note = Target: SCN10A; (-) strand; PAM type: YTN; PAM sequence: CTT
  source 1..20: mol_type = other DNA
aaaatatacagaagggcaga

SEQ ID NO: 52211 - DNA, 20 bp, synthetic construct
  misc_feature 1..20: note = Description of Artificial Sequence: Synthetic oligonucleotide
  misc_feature 1..20: note = Target: SCN10A; (-) strand; PAM type: YTN; PAM sequence: CTA
  source 1..20: mol_type = other DNA
aatgatccacttaaaatata

SEQ ID NO: 52212 - DNA, 20 bp, synthetic construct
  misc_feature 1..20: note = Description of Artificial Sequence: Synthetic oligonucleotide
  misc_feature 1..20: note = Target: SCN10A; (-) strand; PAM type: YTN; PAM sequence: TTG
  source 1..20: mol_type = other DNA
agtgtaaatgccctaaatga

SEQ ID NO: 52213 - DNA, 20 bp, synthetic construct
  misc_feature 1..20: note = Description of Artificial Sequence: Synthetic oligonucleotide
  misc_feature 1..20: note = Target: SCN10A; (-) strand; PAM type: YTN; PAM sequence: CTG
  source 1..20: mol_type = other DNA
atgttgagtgtaaatgccct

SEQ ID NO: 52214 - DNA, 20 bp, synthetic construct
  misc_feature 1..20: note = Description of Artificial Sequence: Synthetic oligonucleotide
  misc_feature 1..20: note = Target: SCN10A; (-) strand; PAM type: YTN; PAM sequence: CTC
  source 1..20: mol_type = other DNA
aatactgatgttgagtgtaa

SEQ ID NO: 52215 - DNA, 20 bp, synthetic construct
  misc_feature 1..20: note = Description of Artificial Sequence: Synthetic oligonucleotide
  misc_feature 1..20: note = Target: SCN10A; (-) strand; PAM type: YTN; PAM sequence: CTC
  source 1..20: mol_type = other DNA
acatctcaatactgatgttg

SEQ ID NO: 52216 - DNA, 20 bp, synthetic construct
  misc_feature 1..20: note = Description of Artificial Sequence: Synthetic oligonucleotide
  misc_feature 1..20: note = Target: SCN10A; (-) strand; PAM type: YTN; PAM sequence: CTA
  source 1..20: mol_type = other DNA
gcataatgaatagaagagta

SEQ ID NO: 52217 - DNA, 20 bp, synthetic construct
  misc_feature 1..20: note = Description of Artificial Sequence: Synthetic oligonucleotide
  misc_feature 1..20: note = Target: SCN10A; (-) strand; PAM type: YTN; PAM sequence: TTA
  source 1..20: mol_type = other DNA
aggcaataactagcataatg

SEQ ID NO: 52218 - DNA, 20 bp, synthetic construct
  misc_feature 1..20: note = Description of Artificial Sequence: Synthetic oligonucleotide
  misc_feature 1..20: note = Target: SCN10A; (-) strand; PAM type: YTN; PAM sequence: CTA
  source 1..20: mol_type = other DNA
taaaacaataacacaataaa

SEQ ID NO: 52219 - DNA, 20 bp, synthetic construct
  misc_feature 1..20: note = Description of Artificial Sequence: Synthetic oligonucleotide
  misc_feature 1..20: note = Target: SCN10A; (-) strand; PAM type: YTN; PAM sequence: TTA
  source 1..20: mol_type = other DNA
aagcataaatatcaaaggac

SEQ ID NO: 52220 - DNA, 20 bp, synthetic construct
  misc_feature 1..20: note = Description of Artificial Sequence: Synthetic oligonucleotide
  misc_feature 1..20: note = Target: SCN10A; (-) strand; PAM type: YTN; PAM sequence: CTT
  source 1..20: mol_type = other DNA
aaagcataaatatcaaagga

SEQ ID NO: 52221 - DNA, 20 bp, synthetic construct
  misc_feature 1..20: note = Description of Artificial Sequence: Synthetic oligonucleotide
  misc_feature 1..20: note = Target: SCN10A; (-) strand; PAM type: YTN; PAM sequence: CTC
  source 1..20: mol_type = other DNA
cttaaagcataaatatcaaa

SEQ ID NO: 52222 - DNA, 20 bp, synthetic construct
  misc_feature 1..20: note = Description of Artificial Sequence: Synthetic oligonucleotide
  misc_feature 1..20: note = Target: SCN10A; (-) strand; PAM type: YTN; PAM sequence: TTA
  source 1..20: mol_type = other DNA
aaatacaccaaaatagaacc

SEQ ID NO: 52223 - DNA, 20 bp, synthetic construct
  misc_feature 1..20: note = Description of Artificial Sequence: Synthetic oligonucleotide
  misc_feature 1..20: note = Target: SCN10A; (-) strand; PAM type: YTN; PAM sequence: CTT
  source 1..20: mol_type = other DNA
aaaatacaccaaaatagaac

SEQ ID NO: 52224 - DNA, 20 bp, synthetic construct
  misc_feature 1..20: note = Description of Artificial Sequence: Synthetic oligonucleotide
  misc_feature 1..20: note = Target: SCN10A; (-) strand; PAM type: YTN; PAM sequence: TTG
  source 1..20: mol_type = other DNA
aaataaaaccttaaaataca

SEQ ID NO: 52225 - DNA, 20 bp, synthetic construct
  misc_feature 1..20: note = Description of Artificial Sequence: Synthetic oligonucleotide
  misc_feature 1..20: note = Target: SCN10A; (-) strand; PAM type: YTN; PAM sequence: CTT
  source 1..20: mol_type = other DNA
gaaataaaaccttaaaatac

SEQ ID NO: 52226 - DNA, 20 bp, synthetic construct
  misc_feature 1..20: note = Description of Artificial Sequence: Synthetic oligonucleotide
  misc_feature 1..20: note = Target: SCN10A; (-) strand; PAM type: YTN; PAM sequence: CTA
  source 1..20: mol_type = other DNA
aatcttgaaataaaacctta

SEQ ID NO: 52227 - DNA, 20 bp, synthetic construct
  misc_feature 1..20: note = Description of Artificial Sequence: Synthetic oligonucleotide
  misc_feature 1..20: note = Target: SCN10A; (-) strand; PAM type: YTN; PAM sequence: TTC
  source 1..20: mol_type = other DNA
taaatcttgaaataaaacct

SEQ ID NO: 52228 - DNA, 20 bp, synthetic construct
  misc_feature 1..20: note = Description of Artificial Sequence: Synthetic oligonucleotide
  misc_feature 1..20: note = Target: SCN10A; (-) strand; PAM type: YTN; PAM sequence: CTA
  source 1..20: mol_type = other DNA
aaaggaattctaaatcttga

SEQ ID NO: 52229 - DNA, 20 bp, synthetic construct
  misc_feature 1..20: note = Description of Artificial Sequence: Synthetic oligonucleotide
  misc_feature 1..20: note = Target: SCN10A; (-) strand; PAM type: YTN; PAM sequence: CTA
  source 1..20: mol_type = other DNA
caagaaatgctaaaaggaat

SEQ ID NO: 52230 - DNA, 20 bp, synthetic construct
  misc_feature 1..20: note = Description of Artificial Sequence: Synthetic oligonucleotide
  misc_feature 1..20: note = Target: SCN10A; (-) strand; PAM type: YTN; PAM sequence: CTA
  source 1..20: mol_type = other DNA
ccaagccagcactacaagaa

SEQ ID NO: 52231 - DNA, 20 bp, synthetic construct
  misc_feature 1..20: note = Description of Artificial Sequence: Synthetic oligonucleotide
  misc_feature 1..20: note = Target: SCN10A; (-) strand; PAM type: YTN; PAM sequence: TTC
  source 1..20: mol_type = other DNA
cactaccaagccagcactac

SEQ ID NO: 52232 - DNA, 20 bp, synthetic construct
  misc_feature 1..20: note = Description of Artificial Sequence: Synthetic oligonucleotide
  misc_feature 1..20: note = Target: SCN10A; (-) strand; PAM type: YTN; PAM sequence: TTT
  source 1..20: mol_type = other DNA
ccactaccaagccagcacta

SEQ ID NO: 52233 - DNA, 20 bp, synthetic construct
  misc_feature 1..20: note = Description of Artificial Sequence: Synthetic oligonucleotide
  misc_feature 1..20: note = Target: SCN10A; (-) strand; PAM type: YTN; PAM sequence: TTT
  source 1..20: mol_type = other DNA
tccactaccaagccagcact

SEQ ID NO: 52234 - DNA, 20 bp, synthetic construct
  misc_feature 1..20: note = Description of Artificial Sequence: Synthetic oligonucleotide
  misc_feature 1..20: note = Target: SCN10A; (-) strand; PAM type: YTN; PAM sequence: TTC
  source 1..20: mol_type = other DNA
agacaaacaaatggtgagag

SEQ ID NO: 52235 - DNA, 20 bp, synthetic construct
  misc_feature 1..20: note = Description of Artificial Sequence: Synthetic oligonucleotide
  misc_feature 1..20: note = Target: SCN10A; (-) strand; PAM type: YTN; PAM sequence: TTT
  source 1..20: mol_type = other DNA
cagacaaacaaatggtgaga

SEQ ID NO: 52236 - DNA, 20 bp, synthetic construct
  misc_feature 1..20: note = Description of Artificial Sequence: Synthetic oligonucleotide
  misc_feature 1..20: note = Target: SCN10A; (-) strand; PAM type: YTN; PAM sequence: TTT
  source 1..20: mol_type = other DNA
tcagacaaacaaatggtgag

SEQ ID NO: 52237 - DNA, 20 bp, synthetic construct
  misc_feature 1..20: note = Description of Artificial Sequence: Synthetic oligonucleotide
  misc_feature 1..20: note = Target: SCN10A; (-) strand; PAM type: YTN; PAM sequence: TTT
  source 1..20: mol_type = other DNA
ttcagacaaacaaatggtga

SEQ ID NO: 52238 - DNA, 20 bp, synthetic construct
  misc_feature 1..20: note = Description of Artificial Sequence: Synthetic oligonucleotide
  misc_feature 1..20: note = Target: SCN10A; (-) strand; PAM type: YTN; PAM sequence: TTT
  source 1..20: mol_type = other DNA
tttcagacaaacaaatggtg

SEQ ID NO: 52239 - DNA, 20 bp, synthetic construct
  misc_feature 1..20: note = Description of Artificial Sequence: Synthetic oligonucleotide
  misc_feature 1..20: note = Target: SCN10A; (-) strand; PAM type: YTN; PAM sequence: TTT
  source 1..20: mol_type = other DNA
ttttcagacaaacaaatggt

SEQ ID NO: 52240 - DNA, 20 bp, synthetic construct
  misc_feature 1..20: note = Description of Artificial Sequence: Synthetic oligonucleotide
  misc_feature 1..20: note = Target: SCN10A; (-) strand; PAM type: YTN; PAM sequence: TTC
  source 1..20: mol_type = other DNA
ataagtgaagacaagataaa

SEQ ID NO: 52241 - DNA, 20 bp, synthetic construct
  misc_feature 1..20: note = Description of Artificial Sequence: Synthetic oligonucleotide
  misc_feature 1..20: note = Target: SCN10A; (-) strand; PAM type: YTN; PAM sequence: CTT
  source 1..20: mol_type = other DNA
cataagtgaagacaagataa

SEQ ID NO: 52242 - DNA, 20 bp, synthetic construct
  misc_feature 1..20: note = Description of Artificial Sequence: Synthetic oligonucleotide
  misc_feature 1..20: note = Target: SCN10A; (-) strand; PAM type: YTN; PAM sequence: CTA
  source 1..20: mol_type = other DNA
agcttcataagtgaagacaa

SEQ ID NO: 52243 - DNA, 20 bp, synthetic construct
  misc_feature 1..20: note = Description of Artificial Sequence: Synthetic oligonucleotide
  misc_feature 1..20: note = Target: SCN10A; (-) strand; PAM type: YTN; PAM sequence: TTG
  source 1..20: mol_type = other DNA
tatgaagagaaactaagctt

SEQ ID NO: 52244 - DNA, 20 bp, synthetic construct
  misc_feature 1..20: note = Description of Artificial Sequence: Synthetic oligonucleotide
  misc_feature 1..20: note = Target: SCN10A; (-) strand; PAM type: YTN; PAM sequence: TTG
  source 1..20: mol_type = other DNA
ccagccaagaatattgtatg

SEQ ID NO: 52245 - DNA, 20 bp, synthetic construct
  misc_feature 1..20: note = Description of Artificial Sequence: Synthetic oligonucleotide
  misc_feature 1..20: note = Target: SCN10A; (-) strand; PAM type: YTN; PAM sequence: CTG
  source 1..20: mol_type = other DNA
aaacaaaataattgccagcc

SEQ ID NO: 52246 - DNA, 20 bp, synthetic construct
  misc_feature 1..20: note = Description of Artificial Sequence: Synthetic oligonucleotide
  misc_feature 1..20: note = Target: SCN10A; (-) strand; PAM type: YTN; PAM sequence: CTC
  source 1..20: mol_type = other DNA
ctgaaacaaaataattgcca

SEQ ID NO: 52247 - DNA, 20 bp, synthetic construct
  misc_feature 1..20: note = Description of Artificial Sequence: Synthetic oligonucleotide
  misc_feature 1..20: note = Target: SCN10A; (-) strand; PAM type: YTN; PAM sequence: TTA
  source 1..20: mol_type = other DNA
gcctcctgaaacaaaataat

SEQ ID NO: 52248 - DNA, 20 bp, synthetic construct
  misc_feature 1..20: note = Description of Artificial Sequence: Synthetic oligonucleotide
  misc_feature 1..20: note = Target: SCN10A; (-) strand; PAM type: YTN; PAM sequence: TTT
  source 1..20: mol_type = other DNA
agcctcctgaaacaaaataa

SEQ ID NO: 52249 - DNA, 20 bp, synthetic construct
  misc_feature 1..20: note = Description of Artificial Sequence: Synthetic oligonucleotide
  misc_feature 1..20: note = Target: SCN10A; (-) strand; PAM type: YTN; PAM sequence: CTT
  source 1..20: mol_type = other DNA
tagcctcctgaaacaaaata

SEQ ID NO: 52250 - DNA, 20 bp, synthetic construct
  misc_feature 1..20: note = Description of Artificial Sequence: Synthetic oligonucleotide
  misc_feature 1..20: note = Target: SCN10A; (-) strand; PAM type: YTN; PAM sequence: TTA
  source 1..20: mol_type = other DNA
gggtcccatctttagcctcc

SEQ ID NO: 52251 - DNA, 20 bp, synthetic construct
  misc_feature 1..20: note = Description of Artificial Sequence: Synthetic oligonucleotide
  misc_feature 1..20: note = Target: SCN10A; (-) strand; PAM type: YTN; PAM sequence: TTG
  source 1..20: mol_type = other DNA
caagccagaagggattaggg

SEQ ID NO: 52252 - DNA, 20 bp, synthetic construct
  misc_feature 1..20: note = Description of Artificial Sequence: Synthetic oligonucleotide
  misc_feature 1..20: note = Target: SCN10A; (-) strand; PAM type: YTN; PAM sequence: CTT
  source 1..20: mol_type = other DNA
gcaagccagaagggattagg

SEQ ID NO: 52253 - DNA, 20 bp, synthetic construct
  misc_feature 1..20: note = Description of Artificial Sequence: Synthetic oligonucleotide
  misc_feature 1..20: note = Target: SCN10A; (-) strand; PAM type: YTN; PAM sequence: CTG
  source 1..20: mol_type = other DNA
aaaccttgcaagccagaagg

SEQ ID NO: 52254 - DNA, 20 bp, synthetic construct
  misc_feature 1..20: note = Description of Artificial Sequence: Synthetic oligonucleotide
  misc_feature 1..20: note = Target: SCN10A; (-) strand; PAM type: YTN; PAM sequence: CTC
  source 1..20: mol_type = other DNA
aactgaaaccttgcaagcca

SEQ ID NO: 52255 - DNA, 20 bp, synthetic construct
  misc_feature 1..20: note = Description of Artificial Sequence: Synthetic oligonucleotide
  misc_feature 1..20: note = Target: SCN10A; (-) strand; PAM type: YTN; PAM sequence: TTC
  source 1..20: mol_type = other DNA
tcaactgaaaccttgcaagc

SEQ ID NO: 52256 - DNA, 20 bp, synthetic construct
  misc_feature 1..20: note = Description of Artificial Sequence: Synthetic oligonucleotide
  misc_feature 1..20: note = Target: SCN10A; (-) strand; PAM type: YTN; PAM sequence: TTT
  source 1..20: mol_type = other DNA
ctcaactgaaaccttgcaag

SEQ ID NO: 52257 - DNA, 20 bp, synthetic construct
  misc_feature 1..20: note = Description of Artificial Sequence: Synthetic oligonucleotide
  misc_feature 1..20: note = Target: SCN10A; (-) strand; PAM type: YTN; PAM sequence: TTA
  source 1..20: mol_type = other DNA
acagcagatttctcaactga

SEQ ID NO: 52258 - DNA, 20 bp, synthetic construct
  misc_feature 1..20: note = Description of Artificial Sequence: Synthetic oligonucleotide
  misc_feature 1..20: note = Target: SCN10A; (-) strand; PAM type: YTN; PAM sequence: TTA
  source 1..20: mol_type = other DNA
cataagattaacagcagatt

SEQ ID NO: 52259 - DNA, 20 bp, synthetic construct
  misc_feature 1..20: note = Description of Artificial Sequence: Synthetic oligonucleotide
  misc_feature 1..20: note = Target: SCN10A; (-) strand; PAM type: YTN; PAM sequence: TTT
  source 1..20: mol_type = other DNA
acataagattaacagcagat

SEQ ID NO: 52260 - DNA, 20 bp, synthetic construct
  misc_feature 1..20: note = Description of Artificial Sequence: Synthetic oligonucleotide
  misc_feature 1..20: note = Target: SCN10A; (-) strand; PAM type: YTN; PAM sequence: CTG
  source 1..20: mol_type = other DNA
atttacataagattaacagc

SEQ ID NO: 52261 - DNA, 20 bp, synthetic construct
  misc_feature 1..20: note = Description of Artificial Sequence: Synthetic oligonucleotide
  misc_feature 1..20: note = Target: SCN10A; (-) strand; PAM type: YTN; PAM sequence: TTA
  source 1..20: mol_type = other DNA
tctgatttacataagattaa

SEQ ID NO: 52262 - DNA, 20 bp, synthetic construct
  misc_feature 1..20: note = Description of Artificial Sequence: Synthetic oligonucleotide
  misc_feature 1..20: note = Target: SCN10A; (-) strand; PAM type: YTN; PAM sequence: CTA
  source 1..20: mol_type = other DNA
taaaggaaaggttatctgat

SEQ ID NO: 52263 - DNA, 20 bp, synthetic construct
  misc_feature 1..20: note = Description of Artificial Sequence: Synthetic oligonucleotide
  misc_feature 1..20: note = Target: SCN10A; (-) strand; PAM type: YTN; PAM sequence: CTC
  source 1..20: mol_type = other DNA
agataacctataaaggaaag

SEQ ID NO: 52264 - DNA, 20 bp, synthetic construct
  misc_feature 1..20: note = Description of Artificial Sequence: Synthetic oligonucleotide
  misc_feature 1..20: note = Target: SCN10A; (-) strand; PAM type: YTN; PAM sequence: CTG
  source 1..20: mol_type = other DNA
tgagacaaaagcctcagata

SEQ ID NO: 52265 - DNA, 20 bp, synthetic construct
  misc_feature 1..20: note = Description of Artificial Sequence: Synthetic oligonucleotide
  misc_feature 1..20: note = Target: SCN10A; (-) strand; PAM type: YTN; PAM sequence: TTA
  source 1..20: mol_type = other DNA
agagctgtgagacaaaagcc

SEQ ID NO: 52266 - DNA, 20 bp, synthetic construct
  misc_feature 1..20: note = Description of Artificial Sequence: Synthetic oligonucleotide
  misc_feature 1..20: note = Target: SCN10A; (-) strand; PAM type: YTN; PAM sequence: CTT
  source 1..20: mol_type = other DNA
aagagctgtgagacaaaagc

SEQ ID NO: 52267 - DNA, 20 bp, synthetic construct
  misc_feature 1..20: note = Description of Artificial Sequence: Synthetic oligonucleotide
  misc_feature 1..20: note = Target: SCN10A; (-) strand; PAM type: YTN; PAM sequence: CTA
  source 1..20: mol_type = other DNA
aagtcaagacaaagaaaaga

SEQ ID NO: 52268 - DNA, 20 bp, synthetic construct
  misc_feature 1..20: note = Description of Artificial Sequence: Synthetic oligonucleotide
  misc_feature 1..20: note = Target: SCN10A; (-) strand; PAM type: YTN; PAM sequence: TTA
  source 1..20: mol_type = other DNA
tctaaagtcaagacaaagaa

SEQ ID NO: 52269 - DNA, 20 bp, synthetic construct
  misc_feature 1..20: note = Description of Artificial Sequence: Synthetic oligonucleotide
  misc_feature 1..20: note = Target: SCN10A; (-) strand; PAM type: YTN; PAM sequence: CTA
  source 1..20: mol_type = other DNA
ggcaaatagacatcaggtta

SEQ ID NO: 52270 - DNA, 20 bp, synthetic construct
  misc_feature 1..20: note = Description of Artificial Sequence: Synthetic oligonucleotide
  misc_feature 1..20: note = Target: SCN10A; (-) strand; PAM type: YTN; PAM sequence: CTG
  source 1..20: mol_type = other DNA
aaatgtgtcacaaaaaagat

SEQ ID NO: 52271 - DNA, 20 bp, synthetic construct
  misc_feature 1..20: note = Description of Artificial Sequence: Synthetic oligonucleotide
  misc_feature 1..20: note = Target: SCN10A; (-) strand; PAM type: YTN; PAM sequence: CTC
  source 1..20: mol_type = other DNA
tgaaatgtgtcacaaaaaag

SEQ ID NO: 52272 - DNA, 20 bp, synthetic construct
  misc_feature 1..20: note = Description of Artificial Sequence: Synthetic oligonucleotide
  misc_feature 1..20: note = Target: SCN10A; (-) strand; PAM type: YTN; PAM sequence: CTC
  source 1..20: mol_type = other DNA
aaagaatacctctgaaatgt

SEQ ID NO: 52273 - DNA, 20 bp, synthetic construct
  misc_feature 1..20: note = Description of Artificial Sequence: Synthetic oligonucleotide
  misc_feature 1..20: note = Target: SCN10A; (-) strand; PAM type: YTN; PAM sequence: TTA
  source 1..20: mol_type = other DNA
gaaatatagatatccaaata

SEQ ID NO: 52274 - DNA, 20 bp, synthetic construct
  misc_feature 1..20: note = Description of Artificial Sequence: Synthetic oligonucleotide
  misc_feature 1..20: note = Target: SCN10A; (-) strand; PAM type: YTN; PAM sequence: TTG
  source 1..20: mol_type = other DNA
ttagaaatatagatatccaa

SEQ ID NO: 52275 - DNA, 20 bp, synthetic construct
  misc_feature 1..20: note = Description of Artificial Sequence: Synthetic oligonucleotide
  misc_feature 1..20: note = Target: SCN10A; (-) strand; PAM type: YTN; PAM sequence: CTT
  source 1..20: mol_type = other DNA
gttagaaatatagatatcca

SEQ ID NO: 52276 - DNA, 20 bp, synthetic construct
  misc_feature 1..20: note = Description of Artificial Sequence: Synthetic oligonucleotide
  misc_feature 1..20: note = Target: SCN10A; (-) strand; PAM type: YTN; PAM sequence: CTG
  source 1..20: mol_type = other DNA
gccttgttagaaatatagat

SEQ ID NO: 52277 - DNA, 20 bp, synthetic construct
  misc_feature 1..20: note = Description of Artificial Sequence: Synthetic oligonucleotide
  misc_feature 1..20: note = Target: SCN10A; (-) strand; PAM type: YTN; PAM sequence: TTC
  source 1..20: mol_type = other DNA
cctggccttgttagaaatat

SEQ ID NO: 52278 - DNA, 20 bp, synthetic construct
  misc_feature 1..20: note = Description of Artificial Sequence: Synthetic oligonucleotide
  misc_feature 1..20: note = Target: SCN10A; (-) strand; PAM type: YTN; PAM sequence: CTT
  source 1..20: mol_type = other DNA
ccctggccttgttagaaata

SEQ ID NO: 52279 - DNA, 20 bp, synthetic construct
  misc_feature 1..20: note = Description of Artificial Sequence: Synthetic oligonucleotide
  misc_feature 1..20: note = Target: SCN10A; (-) strand; PAM type: YTN; PAM sequence: TTG
  source 1..20: mol_type = other DNA
aggaaaacttccctggcctt

SEQ ID NO: 52280 - DNA, 20 bp, synthetic construct
  misc_feature 1..20: note = Description of Artificial Sequence: Synthetic oligonucleotide
  misc_feature 1..20: note = Target: SCN10A; (-) strand; PAM type: YTN; PAM sequence: TTG
  source 1..20: mol_type = other DNA
agggaataattgaggaaaac

SEQ ID NO: 52281 - DNA, 20 bp, synthetic construct
  misc_feature 1..20: note = Description of Artificial Sequence: Synthetic oligonucleotide
  misc_feature 1..20: note = Target: SCN10A; (-) strand; PAM type: YTN; PAM sequence: TTT
  source 1..20: mol_type = other DNA
gagggaataattgaggaaaa

SEQ ID NO: 52282 - DNA, 20 bp, synthetic construct
  misc_feature 1..20: note = Description of Artificial Sequence: Synthetic oligonucleotide
  misc_feature 1..20: note = Target: SCN10A; (-) strand; PAM type: YTN; PAM sequence: TTA
  source 1..20: mol_type = other DNA
tttgagggaataattgagga

SEQ ID NO: 52283 - DNA, 20 bp, synthetic construct
  misc_feature 1..20: note = Description of Artificial Sequence: Synthetic oligonucleotide
  misc_feature 1..20: note = Target: SCN10A; (-) strand; PAM type: YTN; PAM sequence: CTT
  source 1..20: mol_type = other DNA
atttgagggaataattgagg

SEQ ID NO: 52284 - DNA, 20 bp, synthetic construct
  misc_feature 1..20: note = Description of Artificial Sequence: Synthetic oligonucleotide
  misc_feature 1..20: note = Target: SCN10A; (-) strand; PAM type: YTN; PAM sequence: TTG
  source 1..20: mol_type = other DNA
gaaaacttatttgagggaat

SEQ ID NO: 52285 - DNA, 20 bp, synthetic construct
  misc_feature 1..20: note = Description of Artificial Sequence: Synthetic oligonucleotide
  misc_feature 1..20: note = Target: SCN10A; (-) strand; PAM type: YTN; PAM sequence: TTT
  source 1..20: mol_type = other DNA
ggaaaacttatttgagggaa

SEQ ID NO: 52286 - DNA, 20 bp, synthetic construct
  misc_feature 1..20: note = Description of Artificial Sequence: Synthetic oligonucleotide
  misc_feature 1..20: note = Target: SCN10A; (-) strand; PAM type: YTN; PAM sequence: CTA
  source 1..20: mol_type = other DNA
aaagtttggaaaacttattt

SEQ ID NO: 52287 - DNA, 20 bp, synthetic construct
  misc_feature 1..20: note = Description of Artificial Sequence: Synthetic oligonucleotide
  misc_feature 1..20: note = Target: SCN10A; (-) strand; PAM type: YTN; PAM sequence: TTC
  source 1..20: mol_type = other DNA
ccaaggaagaatagaaatct

SEQ ID NO: 52288 - DNA, 20 bp, synthetic construct
  misc_feature 1..20: note = Description of Artificial Sequence: Synthetic oligonucleotide
  misc_feature 1..20: note = Target: SCN10A; (-) strand; PAM type: YTN; PAM sequence: CTA
  source 1..20: mol_type = other DNA
agaataatgggtgttcccaa

SEQ ID NO: 52289 - DNA, 20 bp, synthetic construct
  misc_feature 1..20: note = Description of Artificial Sequence: Synthetic oligonucleotide
  misc_feature 1..20: note = Target: SCN10A; (-) strand; PAM type: YTN; PAM sequence: TTG
  source 1..20: mol_type = other DNA
gaatcatgtgaaacaaccaa

SEQ ID NO: 52290 - DNA, 20 bp, synthetic construct
  misc_feature 1..20: note = Description of Artificial Sequence: Synthetic oligonucleotide
  misc_feature 1..20: note = Target: SCN10A; (-) strand; PAM type: YTN; PAM sequence: TTT
  source 1..20: mol_type = other DNA
ggaatcatgtgaaacaacca

SEQ ID NO: 52291 - DNA, 20 bp, synthetic construct
  misc_feature 1..20: note = Description of Artificial Sequence: Synthetic oligonucleotide
  misc_feature 1..20: note = Target: SCN10A; (-) strand; PAM type: YTN; PAM sequence: TTA
  source 1..20: mol_type = other DNA
aaaaaatgacaaatcggcca

SEQ ID NO: 52292 - DNA, 20 bp, synthetic construct
  misc_feature 1..20: note = Description of Artificial Sequence: Synthetic oligonucleotide
  misc_feature 1..20: note = Target: SCN10A; (-) strand; PAM type: YTN; PAM sequence: TTT
  source 1..20: mol_type = other DNA
aaaaaaatgacaaatcggcc

SEQ ID NO: 52293 - DNA, 20 bp, synthetic construct
  misc_feature 1..20: note = Description of Artificial Sequence: Synthetic oligonucleotide
  misc_feature 1..20: note = Target: SCN10A; (-) strand; PAM type: YTN; PAM sequence: TTT
  source 1..20: mol_type = other DNA
taaaaaaatgacaaatcggc

SEQ ID NO: 52294 - DNA, 20 bp, synthetic construct
  misc_feature 1..20: note = Description of Artificial Sequence: Synthetic oligonucleotide
  misc_feature 1..20: note = Target: SCN10A; (-) strand; PAM type: YTN; PAM sequence: TTT
  source 1..20: mol_type = other DNA
ttaaaaaaatgacaaatcgg

SEQ ID NO: 52295 - DNA, 20 bp, synthetic construct
  misc_feature 1..20: note = Description of Artificial Sequence: Synthetic oligonucleotide
  misc_feature 1..20: note = Target: SCN10A; (-) strand; PAM type: YTN; PAM sequence: CTA
  source 1..20: mol_type = other DNA
agacacacaaaaagaaagaa

SEQ ID NO: 52296 - DNA, 20 bp, synthetic construct
  misc_feature 1..20: note = Description of Artificial Sequence: Synthetic oligonucleotide
  misc_feature 1..20: note = Target: SCN10A; (-) strand; PAM type: YTN; PAM sequence: TTA
  source 1..20: mol_type = other DNA
atagacccaaactaagacac

SEQ ID NO: 52297 - DNA, 20 bp, synthetic construct
  misc_feature 1..20: note = Description of Artificial Sequence: Synthetic oligonucleotide
  misc_feature 1..20: note = Target: SCN10A; (-) strand; PAM type: YTN; PAM sequence: TTT
  source 1..20: mol_type = other DNA
aatagacccaaactaagaca

SEQ ID NO: 52298 - DNA, 20 bp, synthetic construct
  misc_feature 1..20: note = Description of Artificial Sequence: Synthetic oligonucleotide
  misc_feature 1..20: note = Target: SCN10A; (-) strand; PAM type: YTN; PAM sequence: TTT
  source 1..20: mol_type = other DNA
taatagacccaaactaagac

SEQ ID NO: 52299 - DNA, 20 bp, synthetic construct
  misc_feature 1..20: note = Description of Artificial Sequence: Synthetic oligonucleotide
  misc_feature 1..20: note = Target: SCN10A; (-) strand; PAM type: YTN; PAM sequence: CTT
  source 1..20: mol_type = other DNA
ttaatagacccaaactaaga

SEQ ID NO: 52300 - DNA, 20 bp, synthetic construct
  misc_feature 1..20: note = Description of Artificial Sequence: Synthetic oligonucleotide
  misc_feature 1..20: note = Target: SCN10A; (-) strand; PAM type: YTN; PAM sequence: CTC
  source 1..20: mol_type = other DNA
gaagacaaagcttttaatag

SEQ ID NO: 52301 - DNA, 20 bp, synthetic construct
  misc_feature 1..20: note = Description of Artificial Sequence: Synthetic oligonucleotide
  misc_feature 1..20: note = Target: SCN10A; (-) strand; PAM type: YTN; PAM sequence: TTC
  source 1..20: mol_type = other DNA
agagctcgaagacaaagctt

SEQ ID NO: 52302 - DNA, 20 bp, synthetic construct
  misc_feature 1..20: note = Description of Artificial Sequence: Synthetic oligonucleotide
  misc_feature 1..20: note = Target: SCN10A; (-) strand; PAM type: YTN; PAM sequence: CTT
  source 1..20: mol_type = other DNA
cagagctcgaagacaaagct

SEQ ID NO: 52303 - DNA, 20 bp, synthetic construct
  misc_feature 1..20: note = Description of Artificial Sequence: Synthetic oligonucleotide
  misc_feature 1..20: note = Target: SCN10A; (-) strand; PAM type: YTN; PAM sequence: CTA
  source 1..20: mol_type = other DNA
gaacaagtagaagaaagaac

SEQ ID NO: 52304 - DNA, 20 bp, synthetic construct
  misc_feature 1..20: note = Description of Artificial Sequence: Synthetic oligonucleotide
  misc_feature 1..20: note = Target: SCN10A; (-) strand; PAM type: YTN; PAM sequence: TTC
  source 1..20: mol_type = other DNA
aacaatagactagaacaagt

SEQ ID NO: 52305 - DNA, 20 bp, synthetic construct
  misc_feature 1..20: note = Description of Artificial Sequence: Synthetic oligonucleotide
  misc_feature 1..20: note = Target: SCN10A; (-) strand; PAM type: YTN; PAM sequence: TTT
  source 1..20: mol_type = other DNA
caacaatagactagaacaag

SEQ ID NO: 52306 - DNA, 20 bp, synthetic construct
  misc_feature 1..20: note = Description of Artificial Sequence: Synthetic oligonucleotide
  misc_feature 1..20: note = Target: SCN10A; (-) strand; PAM type: YTN; PAM sequence: TTA
  source 1..20: mol_type = other DNA
gagaaatacaaaatgcagtg

SEQ ID NO: 52307 - DNA, 20 bp, synthetic construct
  misc_feature 1..20: note = Description of Artificial Sequence: Synthetic oligonucleotide
  misc_feature 1..20: note = Target: SCN10A; (-) strand; PAM type: YTN; PAM sequence: CTT
  source 1..20: mol_type = other DNA
agagaaatacaaaatgcagt

SEQ ID NO: 52308 - DNA, 20 bp, synthetic construct
  misc_feature 1..20: note = Description of Artificial Sequence: Synthetic oligonucleotide
  misc_feature 1..20: note = Target: SCN10A; (-) strand; PAM type: YTN; PAM sequence: CTC
  source 1..20: mol_type = other DNA
acttagagaaatacaaaatg

SEQ ID NO: 52309 - DNA, 20 bp, synthetic construct
  misc_feature 1..20: note = Description of Artificial Sequence: Synthetic oligonucleotide
  misc_feature 1..20: note = Target: SCN10A; (-) strand; PAM type: YTN; PAM sequence: CTG
  source 1..20: mol_type = other DNA
gaaatggaagactcacttag

SEQ ID NO: 52310 - DNA, 20 bp, synthetic construct
  misc_feature 1..20: note = Description of Artificial Sequence: Synthetic oligonucleotide
  misc_feature 1..20: note = Target: SCN10A; (-) strand; PAM type: YTN; PAM sequence: TTC
  source 1..20: mol_type = other DNA
tggaaatggaagactcactt

SEQ ID NO: 52311 - DNA, 20 bp, synthetic construct
  misc_feature 1..20: note = Description of Artificial Sequence: Synthetic oligonucleotide
  misc_feature 1..20: note = Target: SCN10A; (-) strand; PAM type: YTN; PAM sequence: CTT
  source 1..20: mol_type = other DNA
ctggaaatggaagactcact

SEQ ID NO: 52312 - DNA, 20 bp, synthetic construct
  misc_feature 1..20: note = Description of Artificial Sequence: Synthetic oligonucleotide
  misc_feature 1..20: note = Target: SCN10A; (-) strand; PAM type: YTN; PAM sequence: CTC
  source 1..20: mol_type = other DNA
cagagaaatagatataaaga

SEQ ID NO: 52313 - DNA, 20 bp, synthetic construct
  misc_feature 1..20: note = Description of Artificial Sequence: Synthetic oligonucleotide
  misc_feature 1..20: note = Target: SCN10A; (-) strand; PAM type: YTN; PAM sequence: TTC
  source 1..20: mol_type = other DNA
tccagagaaatagatataaa

SEQ ID NO: 52314 - DNA, 20 bp, synthetic construct
  misc_feature 1..20: note = Description of Artificial Sequence: Synthetic oligonucleotide
  misc_feature 1..20: note = Target: SCN10A; (-) strand; PAM type: YTN; PAM sequence: TTA
  source 1..20: mol_type = other DNA
aaacaacaagatatggatgg

SEQ ID NO: 52315 - DNA, 20 bp, synthetic construct
  misc_feature 1..20: note = Description of Artificial Sequence: Synthetic oligonucleotide
  misc_feature 1..20: note = Target: SCN10A; (-) strand; PAM type: YTN; PAM sequence: TTT
  source 1..20: mol_type = other DNA
aaaacaacaagatatggatg

SEQ ID NO: 52316 - DNA, 20 bp, synthetic construct
  misc_feature 1..20: note = Description of Artificial Sequence: Synthetic oligonucleotide
  misc_feature 1..20: note = Target: SCN10A; (-) strand; PAM type: YTN; PAM sequence: TTT
  source 1..20: mol_type = other DNA
taaaacaacaagatatggat

SEQ ID NO: 52317 - DNA, 20 bp, synthetic construct
  misc_feature 1..20: note = Description of Artificial Sequence: Synthetic oligonucleotide
  misc_feature 1..20: note = Target: SCN10A; (-) strand; PAM type: YTN; PAM sequence: TTT
  source 1..20: mol_type = other DNA
ttaaaacaacaagatatgga

SEQ ID NO: 52318 - DNA, 20 bp, synthetic construct
  misc_feature 1..20: note = Description of Artificial Sequence: Synthetic oligonucleotide
  misc_feature 1..20: note = Target: SCN10A; (-) strand; PAM type: YTN; PAM sequence: TTA
  source 1..20: mol_type = other DNA
aagaaatttttaaaacaaca

SEQ ID NO: 52319 - DNA, 20 bp, synthetic construct
  misc_feature 1..20: note = Description of Artificial Sequence: Synthetic oligonucleotide
  misc_feature 1..20: note = Target: SCN10A; (-) strand; PAM type: YTN; PAM sequence: CTT
  source 1..20: mol_type = other DNA
aaagaaatttttaaaacaac

SEQ ID NO: 52320 - DNA, 20 bp, synthetic construct
  misc_feature 1..20: note = Description of Artificial Sequence: Synthetic oligonucleotide
  misc_feature 1..20: note = Target: SCN10A; (-) strand; PAM type: YTN; PAM sequence: TTC
  source 1..20: mol_type = other DNA
aaggagacaccagagaaaga

SEQ ID NO: 52321 - DNA, 20 bp, synthetic construct
  misc_feature 1..20: note = Description of Artificial Sequence: Synthetic oligonucleotide
  misc_feature 1..20: note = Target: SCN10A; (-) strand; PAM type: YTN; PAM sequence: TTA
  source 1..20: mol_type = other DNA
agtgattcaaggagacacca

SEQ ID NO: 52322 - DNA, 20 bp, synthetic construct
  misc_feature 1..20: note = Description of Artificial Sequence: Synthetic oligonucleotide
  misc_feature 1..20: note = Target: SCN10A; (-) strand; PAM type: YTN; PAM sequence: TTA
  source 1..20: mol_type = other DNA
ttaagtgattcaaggagaca

SEQ ID NO: 52323 - DNA, 20 bp, synthetic construct
  misc_feature 1..20: note = Description of Artificial Sequence: Synthetic oligonucleotide
  misc_feature 1..20: note = Target: SCN10A; (-) strand; PAM type: YTN; PAM sequence: CTG
  source 1..20: mol_type = other DNA
attattaagtgattcaagga

SEQ ID NO: 52324 - DNA, 20 bp, synthetic construct
  misc_feature 1..20: note = Description of Artificial Sequence: Synthetic oligonucleotide
  misc_feature 1..20: note = Target: SCN10A; (-) strand; PAM type: YTN; PAM sequence: TTC
  source 1..20: mol_type = other DNA
agaaggctgattattaagtg

SEQ ID NO: 52325 - DNA, 20 bp, synthetic construct
  misc_feature 1..20: note = Description of Artificial Sequence: Synthetic oligonucleotide
  misc_feature 1..20: note = Target: SCN10A; (-) strand; PAM type: YTN; PAM sequence: CTC
  source 1..20: mol_type = other DNA
aaaaaaaaaaaaaaaagaat

SEQ ID NO: 52326 - DNA, 20 bp, synthetic construct
  misc_feature 1..20: note = Description of Artificial Sequence: Synthetic oligonucleotide
  misc_feature 1..20: note = Target: SCN10A; (-) strand; PAM type: YTN; PAM sequence: CTG
  source 1..20: mol_type = other DNA
ggcaacaagagtgaaaatcc

SEQ ID NO: 52327 - DNA, 20 bp, synthetic construct
  misc_feature 1..20: note = Description of Artificial Sequence: Synthetic oligonucleotide
  misc_feature 1..20: note = Target: SCN10A; (-) strand; PAM type: YTN; PAM sequence: CTC
  source 1..20: mol_type = other DNA
cagcctgggcaacaagagtg

SEQ ID NO: 52328 - DNA, 20 bp, synthetic construct
  misc_feature 1..20: note = Description of Artificial Sequence: Synthetic oligonucleotide
  misc_feature 1..20: note = Target: SCN10A; (-) strand; PAM type: YTN; PAM sequence: TTG
  source 1..20: mol_type = other DNA
cactccagcctgggcaacaa

SEQ ID NO: 52329 - DNA, 20 bp, synthetic construct
  misc_feature 1..20: note = Description of Artificial Sequence: Synthetic oligonucleotide
  misc_feature 1..20: note = Target: SCN10A; (-) strand; PAM type: YTN; PAM sequence: CTG
  source 1..20: mol_type = other DNA
agatcgcgccattgcactcc

SEQ ID NO: 52330 - DNA, 20 bp, synthetic construct
  misc_feature 1..20: note = Description of Artificial Sequence: Synthetic oligonucleotide
  misc_feature 1..20: note = Target: SCN10A; (-) strand; PAM type: YTN; PAM sequence: TTG
  source 1..20: mol_type = other DNA
cggtgagctgagatcgcgcc

SEQ ID NO: 52331 - DNA, 20 bp, synthetic construct
  misc_feature 1..20: note = Description of Artificial Sequence: Synthetic oligonucleotide
  misc_feature 1..20: note = Target: SCN10A; (-) strand; PAM type: YTN; PAM sequence: CTG
  source 1..20: mol_type = other DNA
ggaggcagaggttgcggtga

SEQ ID NO: 52332 - DNA, 20 bp, synthetic construct
  misc_feature 1..20: note = Description of Artificial Sequence: Synthetic oligonucleotide
  misc_feature 1..20: note = Target: SCN10A; (-) strand; PAM type: YTN; PAM sequence: TTG
  source 1..20: mol_type = other DNA
aacctgggaggcagaggttg

SEQ ID NO: 52333 - DNA, 20 bp, synthetic construct
  misc_feature 1..20: note = Description of Artificial Sequence: Synthetic oligonucleotide
  misc_feature 1..20: note = Target: SCN10A; (-) strand; PAM type: YTN; PAM sequence: CTT
  source 1..20: mol_type = other DNA
gaacctgggaggcagaggtt

SEQ ID NO: 52334 - DNA, 20 bp, synthetic construct
  misc_feature 1..20: note = Description of Artificial Sequence: Synthetic oligonucleotide
  misc_feature 1..20: note = Target: SCN10A; (-) strand; PAM type: YTN; PAM sequence: TTG
  source 1..20: mol_type = other DNA
cttgaacctgggaggcagag

SEQ ID NO: 52335 - DNA, 20 bp, synthetic construct
  misc_feature 1..20: note = Description of Artificial Sequence: Synthetic oligonucleotide
  misc_feature 1..20: note = Target: SCN10A; (-) strand; PAM type: YTN; PAM sequence: CTG
  source 1..20: mol_type = other DNA
aggcaggagaattgcttgaa

SEQ ID NO: 52336 - DNA, 20 bp, synthetic construct
  misc_feature 1..20: note = Description of Artificial Sequence: Synthetic oligonucleotide
  misc_feature 1..20: note = Target: SCN10A; (-) strand; PAM type: YTN; PAM sequence: CTC
  source 1..20: mol_type = other DNA
aggagactgaggcaggagaa

SEQ ID NO: 52337 - DNA, 20 bp, synthetic construct
  misc_feature 1..20: note = Description of Artificial Sequence: Synthetic oligonucleotide
  misc_feature 1..20: note = Target: SCN10A; (-) strand; PAM type: YTN; PAM sequence: CTA
  source 1..20: mol_type = other DNA
ctcaggagactgaggcagga

SEQ ID NO: 52338 - DNA, 20 bp, synthetic construct
  misc_feature 1..20: note = Description of Artificial Sequence: Synthetic oligonucleotide
  misc_feature 1..20: note = Target: SCN10A; (-) strand; PAM type: YTN; PAM sequence: CTG
  source 1..20: mol_type = other DNA
taatcccagctactcaggag

SEQ ID NO: 52339 - DNA, 20 bp, synthetic construct
  misc_feature 1..20: note = Description of Artificial Sequence: Synthetic oligonucleotide
  misc_feature 1..20: note = Target: SCN10A; (-) strand; PAM type: YTN; PAM sequence: CTA
  source 1..20: mol_type = other DNA
gatgtggtggtgcatgcctg

SEQ ID NO: 52340 - DNA, 20 bp, synthetic construct
  misc_feature 1..20: note = Description of Artificial Sequence: Synthetic oligonucleotide
  misc_feature 1..20: note = Target: SCN10A; (-) strand; PAM type: YTN; PAM sequence: TTA
  source 1..20: mol_type = other DNA
gctagatgtggtggtgcatg

SEQ ID NO: 52341 - DNA, 20 bp, synthetic construct
  misc_feature 1..20: note = Description of Artificial Sequence: Synthetic oligonucleotide
  misc_feature 1..20: note = Target: SCN10A; (-) strand; PAM type: YTN; PAM sequence: CTA
  source 1..20: mol_type = other DNA
aaaaatacaaaattagctag

SEQ ID NO: 52342 - DNA, 20 bp, synthetic construct
  misc_feature 1..20: note = Description of Artificial Sequence: Synthetic oligonucleotide
  misc_feature 1..20: note = Target: SCN10A; (-) strand; PAM type: YTN; PAM sequence: CTA
  source 1..20: mol_type = other DNA
ctaaaaaatacaaaattagc

SEQ ID NO: 52343 - DNA, 20 bp, synthetic construct
  misc_feature 1..20: note = Description of Artificial Sequence: Synthetic oligonucleotide
  misc_feature 1..20: note = Target: SCN10A; (-) strand; PAM type: YTN; PAM sequence: CTC
  source 1..20: mol_type = other DNA
tactaaaaaatacaaaatta

SEQ ID NO: 52344 - DNA, 20 bp, synthetic construct
  misc_feature 1..20: note = Description of Artificial Sequence: Synthetic oligonucleotide
  misc_feature 1..20: note = Target: SCN10A; (-) strand; PAM type: YTN; PAM sequence: CTG
  source 1..20: mol_type = other DNA
aagccaacatggagaaaccc

SEQ ID NO: 52345 - DNA, 20 bp, synthetic construct
  misc_feature 1..20: note = Description of Artificial Sequence: Synthetic oligonucleotide
  misc_feature 1..20: note = Target: SCN10A; (-) strand; PAM type: YTN; PAM sequence: TTC
  source 1..20: mol_type = other DNA
aagaccagcctgaagccaac

SEQ ID NO: 52346 - DNA, 20 bp, synthetic construct
  misc_feature 1..20: note = Description of Artificial Sequence: Synthetic oligonucleotide
  misc_feature 1..20: note = Target: SCN10A; (-) strand; PAM type: YTN; PAM sequence: CTG
  source 1..20: mol_type = other DNA
aggtcagaagttcaagacca

SEQ ID NO: 52347 - DNA, 20 bp, synthetic construct
  misc_feature 1..20: note = Description of Artificial Sequence: Synthetic oligonucleotide
  misc_feature 1..20: note = Target: SCN10A; (-) strand; PAM type: YTN; PAM sequence: TTG
  source 1..20: mol_type = other DNA
ggaggccaaggtgggcagat

SEQ ID NO: 52348 - DNA, 20 bp, synthetic construct
  misc_feature 1..20: note = Description of Artificial Sequence: Synthetic oligonucleotide
  misc_feature 1..20: note = Target: SCN10A; (-) strand; PAM type: YTN; PAM sequence: TTT
  source 1..20: mol_type = other DNA
gggaggccaaggtgggcaga

SEQ ID NO: 52349 - DNA, 20 bp, synthetic construct
  misc_feature 1..20: note = Description of Artificial Sequence: Synthetic oligonucleotide
  misc_feature 1..20: note = Target: SCN10A; (-) strand; PAM type: YTN; PAM sequence: CTT
  source 1..20: mol_type = other DNA
tgggaggccaaggtgggcag

SEQ ID NO: 52350 - DNA, 20 bp, synthetic construct
  misc_feature 1..20: note = Description of Artificial Sequence: Synthetic oligonucleotide
  misc_feature 1..20: note = Target: SCN10A; (-) strand; PAM type: YTN; PAM sequence: CTC
  source 1..20: mol_type = other DNA
agcactttgggaggccaagg

SEQ ID NO: 52351 - DNA, 20 bp, synthetic construct
  misc_feature 1..20: note = Description of Artificial Sequence: Synthetic oligonucleotide
  misc_feature 1..20: note = Target: SCN10A; (-) strand; PAM type: YTN; PAM sequence: CTG
  source 1..20: mol_type = other DNA
taatctcagcactttgggag

SEQ ID NO: 52352 - DNA, 20 bp, synthetic construct
  misc_feature 1..20: note = Description of Artificial Sequence: Synthetic oligonucleotide
  misc_feature 1..20: note = Target: SCN10A; (-) strand; PAM type: YTN; PAM sequence: CTC
  source 1..20: mol_type = other DNA
acgcctgtaatctcagcact

SEQ ID NO: 52353 - DNA, 20 bp, synthetic construct
  misc_feature 1..20: note = Description of Artificial Sequence: Synthetic oligonucleotide
  misc_feature 1..20: note = Target: SCN10A; (-) strand; PAM type: YTN; PAM sequence: CTG
  source 1..20: mol_type = other DNA
ggcacagtagctcacgcctg

SEQ ID NO: 52354 - DNA, 20 bp, synthetic construct
  misc_feature 1..20: note = Description of Artificial Sequence: Synthetic oligonucleotide
  misc_feature 1..20: note = Target: SCN10A; (-) strand; PAM type: YTN; PAM sequence: TTC
  source 1..20: mol_type = other DNA
agggctgggcacagtagctc

SEQ ID NO: 52355 - DNA, 20 bp, synthetic construct
  misc_feature 1..20: note = Description of Artificial Sequence: Synthetic oligonucleotide
  misc_feature 1..20: note = Target: SCN10A; (-) strand; PAM type: YTN; PAM sequence: TTG
  source 1..20: mol_type = other DNA
ccagataaagaattcagggc

SEQ ID NO: 52356 - DNA, 20 bp, synthetic construct
  misc_feature 1..20: note = Description of Artificial Sequence: Synthetic oligonucleotide
  misc_feature 1..20: note = Target: SCN10A; (-) strand; PAM type: YTN; PAM sequence: CTG
  source 1..20: mol_type = other DNA
aattgccagataaagaattc

SEQ ID NO: 52357 - DNA, 20 bp, synthetic construct
  misc_feature 1..20: note = Description of Artificial Sequence: Synthetic oligonucleotide
  misc_feature 1..20: note = Target: SCN10A; (-) strand; PAM type: YTN; PAM sequence: CTC
  source 1..20: mol_type = other DNA
tgaattgccagataaagaat

SEQ ID NO: 52358 - DNA, 20 bp, synthetic construct
  misc_feature 1..20: note = Description of Artificial Sequence: Synthetic oligonucleotide
  misc_feature 1..20: note = Target: SCN10A; (-) strand; PAM type: YTN; PAM sequence: CTA
  source 1..20: mol_type = other DNA
agaagaaatctctgaattgc

SEQ ID NO: 52359 - DNA, 20 bp, synthetic construct
  misc_feature 1..20: note = Description of Artificial Sequence: Synthetic oligonucleotide
  misc_feature 1..20: note = Target: SCN10A; (-) strand; PAM type: YTN; PAM sequence: CTC
  source 1..20: mol_type = other DNA
cccaacaatggatccaaact

SEQ ID NO: 52360 - DNA, 20 bp, synthetic construct
  misc_feature 1..20: note = Description of Artificial Sequence: Synthetic oligonucleotide
  misc_feature 1..20: note = Target: SCN10A; (-) strand; PAM type: YTN; PAM sequence: CTA
  source 1..20: mol_type = other DNA
gctccccaacaatggatcca

SEQ ID NO: 52361 - DNA, 20 bp, synthetic construct
  misc_feature 1..20: note = Description of Artificial Sequence: Synthetic oligonucleotide
  misc_feature 1..20: note = Target: SCN10A; (-) strand; PAM type: YTN; PAM sequence: CTC
  source 1..20: mol_type = other DNA
aaaagatcaaactagctccc

SEQ ID NO: 52362 - DNA, 20 bp, synthetic construct
  misc_feature 1..20: note = Description of Artificial Sequence: Synthetic oligonucleotide
  misc_feature 1..20: note = Target: SCN10A; (-) strand; PAM type: YTN; PAM sequence: TTC
  source 1..20: mol_type = other DNA
aataacacccctcaaaagat

SEQ ID NO: 52363 - DNA, 20 bp, synthetic construct
  misc_feature 1..20: note = Description of Artificial Sequence: Synthetic oligonucleotide
  misc_feature 1..20: note = Target: SCN10A; (-) strand; PAM type: YTN; PAM sequence: CTG
  source 1..20: mol_type = other DNA
gtaatatgacaaaagagggt

SEQ ID NO: 52364 - DNA, 20 bp, synthetic construct
  misc_feature 1..20: note = Description of Artificial Sequence: Synthetic oligonucleotide
  misc_feature 1..20: note = Target: SCN10A; (-) strand; PAM type: YTN; PAM sequence: TTC
  source 1..20: mol_type = other DNA
tggtaatatgacaaaagagg

SEQ ID NO: 52365 - DNA, 20 bp, synthetic construct
  misc_feature 1..20: note = Description of Artificial Sequence: Synthetic oligonucleotide
  misc_feature 1..20: note = Target: SCN10A; (-) strand; PAM type: YTN; PAM sequence: CTC
  source 1..20: mol_type = other DNA
aaatgagaaggaaccagaaa

SEQ ID NO: 52366 - DNA, 20 bp, synthetic construct
  misc_feature 1..20: note = Description of Artificial Sequence: Synthetic oligonucleotide
  misc_feature 1..20: note = Target: SCN10A; (-) strand; PAM type: YTN; PAM sequence: CTA
  source 1..20: mol_type = other DNA
ctcaaatgagaaggaaccag

SEQ ID NO: 52367 - DNA, 20 bp, synthetic construct
  misc_feature 1..20: note = Description of Artificial Sequence: Synthetic oligonucleotide
  misc_feature 1..20: note = Target: SCN10A; (-) strand; PAM type: YTN; PAM sequence: CTG
  source 1..20: mol_type = other DNA
aaatagtctactcaaatgag

SEQ ID NO: 52368 - DNA, 20 bp, synthetic construct
  misc_feature 1..20: note = Description of Artificial Sequence: Synthetic oligonucleotide
  misc_feature 1..20: note = Target: SCN10A; (-) strand; PAM type: YTN; PAM sequence: CTC
  source 1..20: mol_type = other DNA
tgaaatagtctactcaaatg

SEQ ID NO: 52369 - DNA, 20 bp, synthetic construct
  misc_feature 1..20: note = Description of Artificial Sequence: Synthetic oligonucleotide
  misc_feature 1..20: note = Target: SCN10A; (-) strand; PAM type: YTN; PAM sequence: TTC
  source 1..20: mol_type = other DNA
tctgaaatagtctactcaaa

SEQ ID NO: 52370 - DNA, 20 bp, synthetic construct
  misc_feature 1..20: note = Description of Artificial Sequence: Synthetic oligonucleotide
  misc_feature 1..20: note = Target: SCN10A; (-) strand; PAM type: YTN; PAM sequence: TTT
  source 1..20: mol_type = other DNA
ctctgaaatagtctactcaa

SEQ ID NO: 52371 - DNA, 20 bp, synthetic construct
  misc_feature 1..20: note = Description of Artificial Sequence: Synthetic oligonucleotide
  misc_feature 1..20: note = Target: SCN10A; (-) strand; PAM type: YTN; PAM sequence: TTT
  source 1..20: mol_type = other DNA
tctctgaaatagtctactca

SEQ ID NO: 52372 - DNA, 20 bp, synthetic construct
  misc_feature 1..20: note = Description of Artificial Sequence: Synthetic oligonucleotide
  misc_feature 1..20: note = Target: SCN10A; (-) strand; PAM type: YTN; PAM sequence: CTT
  source 1..20: mol_type = other DNA
ttctctgaaatagtctactc

SEQ ID NO: 52373 - DNA, 20 bp, synthetic construct
  misc_feature 1..20: note = Description of Artificial Sequence: Synthetic oligonucleotide
  misc_feature 1..20: note = Target: SCN10A; (-) strand; PAM type: YTN; PAM sequence: TTC
  source 1..20: mol_type = other DNA
cagatcttttctctgaaata

SEQ ID NO: 52374 - DNA, 20 bp, synthetic construct
  misc_feature 1..20: note = Description of Artificial Sequence: Synthetic oligonucleotide
  misc_feature 1..20: note = Target: SCN10A; (-) strand; PAM type: YTN; PAM sequence: TTC
  source 1..20: mol_type = other DNA
agttccagatcttttctctg

SEQ ID NO: 52375 - DNA, 20 bp, synthetic construct
  misc_feature 1..20: note = Description of Artificial Sequence: Synthetic oligonucleotide
  misc_feature 1..20: note = Target: SCN10A; (-) strand; PAM type: YTN; PAM sequence: CTG
  source 1..20: mol_type = other DNA
cacaacagccattcagttcc

SEQ ID NO: 52376 - DNA, 20 bp, synthetic construct
  misc_feature 1..20: note = Description of Artificial Sequence: Synthetic oligonucleotide
  misc_feature 1..20: note = Target: SCN10A; (-) strand; PAM type: YTN; PAM sequence: TTG
  source 1..20: mol_type = other DNA
gggagagcaccacatcaaga

SEQ ID NO: 52377 - DNA, 20 bp, synthetic construct
  misc_feature 1..20: note = Description of Artificial Sequence: Synthetic oligonucleotide
  misc_feature 1..20: note = Target: SCN10A; (-) strand; PAM type: YTN; PAM sequence: CTC
  source 1..20: mol_type = other DNA
aggaagccccatccccaggg

SEQ ID NO: 52378 - DNA, 20 bp, synthetic construct
  misc_feature 1..20: note = Description of Artificial Sequence: Synthetic oligonucleotide
  misc_feature 1..20: note = Target: SCN10A; (-) strand; PAM type: YTN; PAM sequence: CTC
  source 1..20: mol_type = other DNA
tcaggaagccccatccccag

SEQ ID NO: 52379 - DNA, 20 bp, synthetic construct
  misc_feature 1..20: note = Description of Artificial Sequence: Synthetic oligonucleotide
  misc_feature 1..20: note = Target: SCN10A; (-) strand; PAM type: YTN; PAM sequence: CTG
  source 1..20: mol_type = other DNA
cagtccagctctcaggaagc

SEQ ID NO: 52380 - DNA, 20 bp, synthetic construct
  misc_feature 1..20: note = Description of Artificial Sequence: Synthetic oligonucleotide
  misc_feature 1..20: note = Target: SCN10A; (-) strand; PAM type: YTN; PAM sequence: CTA
  source 1..20: mol_type = other DNA
ggcccagaagaacaataacg

SEQ ID NO: 52381 - DNA, 20 bp, synthetic construct
  misc_feature 1..20: note = Description of Artificial Sequence: Synthetic oligonucleotide
  misc_feature 1..20: note = Target: SCN10A; (-) strand; PAM type: YTN; PAM sequence: CTG
  source 1..20: mol_type = other DNA
tgtggctaggcccagaagaa

SEQ ID NO: 52382 - DNA, 20 bp, synthetic construct
  misc_feature 1..20: note = Description of Artificial Sequence: Synthetic oligonucleotide
  misc_feature 1..20: note = Target: SCN10A; (-) strand; PAM type: YTN; PAM sequence: CTC
  source 1..20: mol_type = other DNA
tgtgtggctaggcccagaag

SEQ ID NO: 52383 - DNA, 20 bp, synthetic construct
  misc_feature 1..20: note = Description of Artificial Sequence: Synthetic oligonucleotide
  misc_feature 1..20: note = Target: SCN10A; (-) strand; PAM type: YTN; PAM sequence: CTG
  source 1..20: mol_type = other DNA
gtagcccctctgtgtggcta

SEQ ID NO: 52384 - DNA, 20 bp, synthetic construct
  misc_feature 1..20: note = Description of Artificial Sequence: Synthetic oligonucleotide
  misc_feature 1..20: note = Target: SCN10A; (-) strand; PAM type: YTN; PAM sequence: CTA
  source 1..20: mol_type = other DNA
ccccagagcctggtagcccc

SEQ ID NO: 52385 - DNA, 20 bp, synthetic construct
  misc_feature 1..20: note = Description of Artificial Sequence: Synthetic oligonucleotide
  misc_feature 1..20: note = Target: SCN10A; (-) strand; PAM type: YTN; PAM sequence: TTC
  source 1..20: mol_type = other DNA
ccagtactaccccagagcct

SEQ ID NO: 52386 - DNA, 20 bp, synthetic construct
  misc_feature 1..20: note = Description of Artificial Sequence: Synthetic oligonucleotide
  misc_feature 1..20: note = Target: SCN10A; (-) strand; PAM type: YTN; PAM sequence: TTT
  source 1..20: mol_type = other DNA
cccagtactaccccagagcc

SEQ ID NO: 52387 - DNA, 20 bp, synthetic construct
  misc_feature 1..20: note = Description of Artificial Sequence: Synthetic oligonucleotide
  misc_feature 1..20: note = Target: SCN10A; (-) strand; PAM type: YTN; PAM sequence: TTG
  source 1..20: mol_type = other DNA
caggcatttcccagtactac

SEQ ID NO: 52388 - DNA, 20 bp, synthetic construct
  misc_feature 1..20: note = Description of Artificial Sequence: Synthetic oligonucleotide
  misc_feature 1..20: note = Target: SCN10A; (-) strand; PAM type: YTN; PAM sequence: CTT
  source 1..20: mol_type = other DNA
gcaggcatttcccagtacta

SEQ ID NO: 52389 - DNA, 20 bp, synthetic construct
  misc_feature 1..20: note = Description of Artificial Sequence: Synthetic oligonucleotide
  misc_feature 1..20: note = Target: SCN10A; (-) strand; PAM type: YTN; PAM sequence: CTC
  source 1..20: mol_type = other DNA
ttgcaggcatttcccagtac

SEQ ID NO: 52390 - DNA, 20 bp, synthetic construct
  misc_feature 1..20: note = Description of Artificial Sequence: Synthetic oligonucleotide
  misc_feature 1..20: note = Target: SCN10A; (-) strand; PAM type: YTN; PAM sequence: TTC
  source 1..20: mol_type = other DNA
aagatcaatcacatcacagg

SEQ ID NO: 52391 - DNA, 20 bp, synthetic construct
  misc_feature 1..20: note = Description of Artificial Sequence: Synthetic oligonucleotide
  misc_feature 1..20: note = Target: SCN10A; (-) strand; PAM type: YTN; PAM sequence: CTT
  source 1..20: mol_type = other DNA
caagatcaatcacatcacag

SEQ ID NO: 52392 - DNA, 20 bp, synthetic construct
  misc_feature 1..20: note = Description of Artificial Sequence: Synthetic oligonucleotide
  misc_feature 1..20: note = Target: SCN10A; (-) strand; PAM type: YTN; PAM sequence: CTG
  source 1..20: mol_type = other DNA
ggagacttcaagatcaatca

SEQ ID NO: 52393 - DNA, 20 bp, synthetic construct
  misc_feature 1..20: note = Description of Artificial Sequence: Synthetic oligonucleotide
  misc_feature 1..20: note = Target: SCN10A; (-) strand; PAM type: YTN; PAM sequence: CTG
  source 1..20: mol_type = other DNA
atatccatggctgggagact

SEQ ID NO: 52394 - DNA, 20 bp, synthetic construct
  misc_feature 1..20: note = Description of Artificial Sequence: Synthetic oligonucleotide
  misc_feature 1..20: note = Target: SCN10A; (-) strand; PAM type: YTN; PAM sequence: TTC
  source 1..20: mol_type = other DNA
accagaacagatgctgatat

SEQ ID NO: 52395 - DNA, 20 bp, synthetic construct
  misc_feature 1..20: note = Description of Artificial Sequence: Synthetic oligonucleotide
  misc_feature 1..20: note = Target: SCN10A; (-) strand; PAM type: YTN; PAM sequence: CTT
  source 1..20: mol_type = other DNA
caccagaacagatgctgata

SEQ ID NO: 52396 - DNA, 20 bp, synthetic construct
  misc_feature 1..20: note = Description of Artificial Sequence: Synthetic oligonucleotide
  misc_feature 1..20: note = Target: SCN10A; (-) strand; PAM type: YTN; PAM sequence: CTG
  source 1..20: mol_type = other DNA
ccaccttcaccagaacagat

SEQ ID NO: 52397 - DNA, 20 bp, synthetic construct
  misc_feature 1..20: note = Description of Artificial Sequence: Synthetic oligonucleotide
  misc_feature 1..20: note = Target: SCN10A; (-) strand; PAM type: YTN; PAM sequence: CTC
  source 1..20: mol_type = other DNA
tgccaccttcaccagaacag

SEQ ID NO: 52398 - DNA, 20 bp, synthetic construct
  misc_feature 1..20: note = Description of Artificial Sequence: Synthetic oligonucleotide
  misc_feature 1..20: note = Target: SCN10A; (-) strand; PAM type: YTN; PAM sequence: TTC
  source 1..20: mol_type = other DNA
ctctgccaccttcaccagaa

SEQ ID NO: 52399 - DNA, 20 bp, synthetic construct
  misc_feature 1..20: note = Description of Artificial Sequence: Synthetic oligonucleotide
  misc_feature 1..20: note = Target: SCN10A; (-) strand; PAM type: YTN; PAM sequence: TTC
  source 1..20: mol_type = other DNA
attcctctgccaccttcacc

SEQ ID NO: 52400 - DNA, 20 bp, synthetic construct
  misc_feature 1..20: note = Description of Artificial Sequence: Synthetic oligonucleotide
  misc_feature 1..20: note = Target: SCN10A; (-) strand; PAM type: YTN; PAM sequence: CTT
  source 1..20: mol_type = other DNA
cattcctctgccaccttcac

SEQ ID NO: 52401 - DNA, 20 bp, synthetic construct
  misc_feature 1..20: note = Description of Artificial Sequence: Synthetic oligonucleotide
  misc_feature 1..20: note = Target: SCN10A; (-) strand; PAM type: YTN; PAM sequence: CTA
  source 1..20: mol_type = other DNA
cttcattcctctgccacctt

SEQ ID NO: 52402 - DNA, 20 bp, synthetic construct
  misc_feature 1..20: note = Description of Artificial Sequence: Synthetic oligonucleotide
  misc_feature 1..20: note = Target: SCN10A; (-) strand; PAM type: YTN; PAM sequence: CTC
  source 1..20: mol_type = other DNA
tacttcattcctctgccacc

SEQ ID NO: 52403 - DNA, 20 bp, synthetic construct
  misc_feature 1..20: note = Description of Artificial Sequence: Synthetic oligonucleotide
  misc_feature 1..20: note = Target: SCN10A; (-) strand; PAM type: YTN; PAM sequence: CTC
  source 1..20: mol_type = other DNA
acagactctacttcattcct

SEQ ID NO: 52404 - DNA, 20 bp, synthetic construct
  misc_feature 1..20: note = Description of Artificial Sequence: Synthetic oligonucleotide
  misc_feature 1..20: note = Target: SCN10A; (-) strand; PAM type: YTN; PAM sequence: CTC
  source 1..20: mol_type = other DNA
tcacagactctacttcattc

SEQ ID NO: 52405 - DNA, 20 bp, synthetic construct
  misc_feature 1..20: note = Description of Artificial Sequence: Synthetic oligonucleotide
  misc_feature 1..20: note = Target: SCN10A; (-) strand; PAM type: YTN; PAM sequence: CTA
  source 1..20: mol_type = other DNA
ggactctcacagactctact

SEQ ID NO: 52406 - DNA, 20 bp, synthetic construct
  misc_feature 1..20: note = Description of Artificial Sequence: Synthetic oligonucleotide
  misc_feature 1..20: note = Target: SCN10A; (-) strand; PAM type: YTN; PAM sequence: CTA
  source 1..20: mol_type = other DNA
cagcctaggactctcacaga

SEQ ID NO: 52407 - DNA, 20 bp, synthetic construct
  misc_feature 1..20: note = Description of Artificial Sequence: Synthetic oligonucleotide
  misc_feature 1..20: note = Target: SCN10A; (-) strand; PAM type: YTN; PAM sequence: CTA
  source 1..20: mol_type = other DNA
tctacagcctaggactctca

SEQ ID NO: 52408 - DNA, 20 bp, synthetic construct
  misc_feature 1..20: note = Description of Artificial Sequence: Synthetic oligonucleotide
  misc_feature 1..20: note = Target: SCN10A; (-) strand; PAM type: YTN; PAM sequence: CTA
  source 1..20: mol_type = other DNA
aatctatctacagcctagga

SEQ ID NO: 52409 - DNA, 20 bp, synthetic construct
  misc_feature 1..20: note = Description of Artificial Sequence: Synthetic oligonucleotide
  misc_feature 1..20: note = Target: SCN10A; (-) strand; PAM type: YTN; PAM sequence: TTC
  source 1..20: mol_type = other DNA
aagaaagccagcacactaaa

SEQ ID NO: 52410 - DNA, 20 bp, synthetic construct
  misc_feature 1..20: note = Description of Artificial Sequence: Synthetic oligonucleotide
  misc_feature 1..20: note = Target: SCN10A; (-) strand; PAM type: YTN; PAM sequence: CTA
  source 1..20: mol_type = other DNA
gcattcaagaaagccagcac

SEQ ID NO: 52411 - DNA, 20 bp, synthetic construct
  misc_feature 1..20: note = Description of Artificial Sequence: Synthetic oligonucleotide
  misc_feature 1..20: note = Target: SCN10A; (-) strand; PAM type: YTN; PAM sequence: CTA
  source 1..20: mol_type = other DNA
acataactagcattcaagaa

SEQ ID NO: 52412 - DNA, 20 bp, synthetic construct
  misc_feature 1..20: note = Description of Artificial Sequence: Synthetic oligonucleotide
  misc_feature 1..20: note = Target: SCN10A; (-) strand; PAM type: YTN; PAM sequence: CTG
  source 1..20: mol_type = other DNA
ctaacataactagcattcaa

SEQ ID NO: 52413 - DNA, 20 bp, synthetic construct
  misc_feature 1..20: note = Description of Artificial Sequence: Synthetic oligonucleotide
  misc_feature 1..20: note = Target: SCN10A; (-) strand; PAM type: YTN; PAM sequence: TTC
  source 1..20: mol_type = other DNA
actgctaacataactagcat

SEQ ID NO: 52414 - DNA, 20 bp, synthetic construct
  misc_feature 1..20: note = Description of Artificial Sequence: Synthetic oligonucleotide
  misc_feature 1..20: note = Target: SCN10A; (-) strand; PAM type: YTN; PAM sequence: CTT
  source 1..20: mol_type = other DNA
cactgctaacataactagca

SEQ ID NO: 52415 - DNA, 20 bp, synthetic construct
  misc_feature 1..20: note = Description of Artificial Sequence: Synthetic oligonucleotide
  misc_feature 1..20: note = Target: SCN10A; (-) strand; PAM type: YTN; PAM sequence: CTG
  source 1..20: mol_type = other DNA
tccatatgacaacttcactg

SEQ ID NO: 52416 - DNA, 20 bp, synthetic construct
  misc_feature 1..20: note = Description of Artificial Sequence: Synthetic oligonucleotide
  misc_feature 1..20: note = Target: SCN10A; (-) strand; PAM type: YTN; PAM sequence: CTG
  source 1..20: mol_type = other DNA
agtctgtccatatgacaact

SEQ ID NO: 52417 - DNA, 20 bp, synthetic construct
  misc_feature 1..20: note = Description of Artificial Sequence: Synthetic oligonucleotide
  misc_feature 1..20: note = Target: SCN10A; (-) strand; PAM type: YTN; PAM sequence: CTA
  source 1..20: mol_type = other DNA
accagacgtcctgagtctgt

SEQ ID NO: 52418 - DNA, 20 bp, synthetic construct
  misc_feature 1..20: note = Description of Artificial Sequence: Synthetic oligonucleotide
  misc_feature 1..20: note = Target: SCN10A; (-) strand; PAM type: YTN; PAM sequence: CTG
  source 1..20: mol_type = other DNA
gctaaccagacgtcctgagt

SEQ ID NO: 52419 - DNA, 20 bp, synthetic construct
  misc_feature 1..20: note = Description of Artificial Sequence: Synthetic oligonucleotide
  misc_feature 1..20: note = Target: SCN10A; (-) strand; PAM type: YTN; PAM sequence: CTG
  source 1..20: mol_type = other DNA
caacatcctggctaaccaga

SEQ ID NO: 52420 - DNA, 20 bp, synthetic construct
  misc_feature 1..20: note = Description of Artificial Sequence: Synthetic oligonucleotide
  misc_feature 1..20: note = Target: SCN10A; (-) strand; PAM type: YTN; PAM sequence: CTG
  source 1..20: mol_type = other DNA
cctgcaacatcctggctaac

SEQ ID NO: 52421 - DNA, 20 bp, synthetic construct
  misc_feature 1..20: note = Description of Artificial Sequence: Synthetic oligonucleotide
  misc_feature 1..20: note = Target: SCN10A; (-) strand; PAM type: YTN; PAM sequence: TTG
  source 1..20: mol_type = other DNA
cactgcctgcaacatcctgg

SEQ ID NO: 52422 - DNA, 20 bp, synthetic construct
  misc_feature 1..20: note = Description of Artificial Sequence: Synthetic oligonucleotide
  misc_feature 1..20: note = Target: SCN10A; (-) strand; PAM type: YTN; PAM sequence: TTG
  source 1..20: mol_type = other DNA
atcccaggaaaaagaaaaca

SEQ ID NO: 52423 - DNA, 20 bp, synthetic construct
  misc_feature 1..20: note = Description of Artificial Sequence: Synthetic oligonucleotide
  misc_feature 1..20: note = Target: SCN10A; (-) strand; PAM type: YTN; PAM sequence: TTT
  source 1..20: mol_type = other DNA
gatcccaggaaaaagaaaac

SEQ ID NO: 52424 - DNA, 20 bp, synthetic construct
  misc_feature 1..20: note = Description of Artificial Sequence: Synthetic oligonucleotide
  misc_feature 1..20: note = Target: SCN10A; (-) strand; PAM type: YTN; PAM sequence: CTT
  source 1..20: mol_type = other DNA
tgatcccaggaaaaagaaaa

SEQ ID NO: 52425 - DNA, 20 bp, synthetic construct
  misc_feature 1..20: note = Description of Artificial Sequence: Synthetic oligonucleotide
  misc_feature 1..20: note = Target: SCN10A; (-) strand; PAM type: YTN; PAM sequence: CTC
  source 1..20: mol_type = other DNA
atgacagaataactttgatc

SEQ ID NO: 52426 - DNA, 20 bp, synthetic construct
  misc_feature 1..20: note = Description of Artificial Sequence: Synthetic oligonucleotide
  misc_feature 1..20: note = Target: SCN10A; (-) strand; PAM type: YTN; PAM sequence: TTA
  source 1..20: mol_type = other DNA
aagcaactcatgacagaata

SEQ ID NO: 52427 - DNA, 20 bp, synthetic construct
  misc_feature 1..20: note = Description of Artificial Sequence: Synthetic oligonucleotide
  misc_feature 1..20: note = Target: SCN10A; (-) strand; PAM type: YTN; PAM sequence: CTC
  source 1..20: mol_type = other DNA
aggccattaaagcaactcat

SEQ ID NO: 52428 - DNA, 20 bp, synthetic construct
  misc_feature 1..20: note = Description of Artificial Sequence: Synthetic oligonucleotide
  misc_feature 1..20: note = Target: SCN10A; (-) strand; PAM type: YTN; PAM sequence: CTG
  source 1..20: mol_type = other DNA
gaggtcaaacagctcaggcc

SEQ ID NO: 52429 - DNA, 20 bp, synthetic construct
  misc_feature 1..20: note = Description of Artificial Sequence: Synthetic oligonucleotide
  misc_feature 1..20: note = Target: SCN10A; (-) strand; PAM type: YTN; PAM sequence: CTA
  source 1..20: mol_type = other DNA
ccggctggaggtcaaacagc

SEQ ID NO: 52430 - DNA, 20 bp, synthetic construct
  misc_feature 1..20: note = Description of Artificial Sequence: Synthetic oligonucleotide
  misc_feature 1..20: note = Target: SCN10A; (-) strand; PAM type: YTN; PAM sequence: TTG
  source 1..20: mol_type = other DNA
aaagcatcacctaccggctg

SEQ ID NO: 52431 - DNA, 20 bp, synthetic construct
  misc_feature 1..20: note = Description of Artificial Sequence: Synthetic oligonucleotide
  misc_feature 1..20: note = Target: SCN10A; (-) strand; PAM type: YTN; PAM sequence: CTT
  source 1..20: mol_type = other DNA
gaaagcatcacctaccggct

SEQ ID NO: 52432 - DNA, 20 bp, synthetic construct
  misc_feature 1..20: note = Description of Artificial Sequence: Synthetic oligonucleotide
  misc_feature 1..20: note = Target: SCN10A; (-) strand; PAM type: YTN; PAM sequence: CTC
  source 1..20: mol_type = other DNA
ttgaaagcatcacctaccgg

SEQ ID NO: 52433 - DNA, 20 bp, synthetic construct
  misc_feature 1..20: note = Description of Artificial Sequence: Synthetic oligonucleotide
  misc_feature 1..20: note = Target: SCN10A; (-) strand; PAM type: YTN; PAM sequence: CTC
  source 1..20: mol_type = other DNA
tcttgaaagcatcacctacc

SEQ ID NO: 52434 - DNA, 20 bp, synthetic construct
  misc_feature 1..20: note = Description of Artificial Sequence: Synthetic oligonucleotide
  misc_feature 1..20: note = Target: SCN10A; (-) strand; PAM type: YTN; PAM sequence: CTA
  source 1..20: mol_type = other DNA
gtgctctcttgaaagcatca

SEQ ID NO: 52435 - DNA, 20 bp, synthetic construct
  misc_feature 1..20: note = Description of Artificial Sequence: Synthetic oligonucleotide
  misc_feature 1..20: note = Target: SCN10A; (-) strand; PAM type: YTN; PAM sequence: CTA
  source 1..20: mol_type = other DNA
atgcactagtgctctcttga

SEQ ID NO: 52436 - DNA, 20 bp, synthetic construct
  misc_feature 1..20: note = Description of Artificial Sequence: Synthetic oligonucleotide
  misc_feature 1..20: note = Target: SCN10A; (-) strand; PAM type: YTN; PAM sequence: CTA
  source 1..20: mol_type = other DNA
ctaatgcactagtgctctct

SEQ ID NO: 52437 - DNA, 20 bp, synthetic construct
  misc_feature 1..20: note = Description of Artificial Sequence: Synthetic oligonucleotide
  misc_feature 1..20: note = Target: SCN10A; (-) strand; PAM type: YTN; PAM sequence: TTC
  source 1..20: mol_type = other DNA
tactaatgcactagtgctct

SEQ ID NO: 52438 - DNA, 20 bp, synthetic construct
  misc_feature 1..20: note = Description of Artificial Sequence: Synthetic oligonucleotide
  misc_feature 1..20: note = Target: SCN10A; (-) strand; PAM type: YTN; PAM sequence: CTT
  source 1..20: mol_type = other DNA
ctactaatgcactagtgctc

SEQ ID NO: 52439 - DNA, 20 bp, synthetic construct
  misc_feature 1..20: note = Description of Artificial Sequence: Synthetic oligonucleotide
  misc_feature 1..20: note = Target: SCN10A; (-) strand; PAM type: YTN; PAM sequence: TTA
  source 1..20: mol_type = other DNA
gatcccccttctactaatgc

SEQ ID NO: 52440 - DNA, 20 bp, synthetic construct
  misc_feature 1..20: note = Description of Artificial Sequence: Synthetic oligonucleotide
  misc_feature 1..20: note = Target: SCN10A; (-) strand; PAM type: YTN; PAM sequence: CTT
  source 1..20: mol_type = other DNA
agatcccccttctactaatg

SEQ ID NO: 52441 - DNA, 20 bp, synthetic construct
  misc_feature 1..20: note = Description of Artificial Sequence: Synthetic oligonucleotide
  misc_feature 1..20: note = Target: SCN10A; (-) strand; PAM type: YTN; PAM sequence: TTA
  source 1..20: mol_type = other DNA
gggtgagcttagatccccct

SEQ ID NO: 52442 - DNA, 20 bp, synthetic construct
  misc_feature 1..20: note = Description of Artificial Sequence: Synthetic oligonucleotide
  misc_feature 1..20: note = Target: SCN10A; (-) strand; PAM type: YTN; PAM sequence: CTT
  source 1..20: mol_type = other DNA
agggtgagcttagatccccc

SEQ ID NO: 52443 - DNA, 20 bp, synthetic construct
  misc_feature 1..20: note = Description of Artificial Sequence: Synthetic oligonucleotide
  misc_feature 1..20: note = Target: SCN10A; (-) strand; PAM type: YTN; PAM sequence: CTG
  source 1..20: mol_type = other DNA
gccaacttagggtgagctta

SEQ ID NO: 52444 - DNA, 20 bp, synthetic construct
  misc_feature 1..20: note = Description of Artificial Sequence: Synthetic oligonucleotide
  misc_feature 1..20: note = Target: SCN10A; (-) strand; PAM type: YTN; PAM sequence: TTA
  source 1..20: mol_type = other DNA
ccctggccaacttagggtga

SEQ ID NO: 52445 - DNA, 20 bp, synthetic construct
  misc_feature 1..20: note = Description of Artificial Sequence: Synthetic oligonucleotide
  misc_feature 1..20: note = Target: SCN10A; (-) strand; PAM type: YTN; PAM sequence: TTT
  source 1..20: mol_type = other DNA
accctggccaacttagggtg

SEQ ID NO: 52446 - DNA, 20 bp, synthetic construct
  misc_feature 1..20: note = Description of Artificial Sequence: Synthetic oligonucleotide
  misc_feature 1..20: note = Target: SCN10A; (-) strand; PAM type: YTN; PAM sequence: CTA
  source 1..20: mol_type = other DNA
aaatatttaccctggccaac

SEQ ID NO: 52447 - DNA, 20 bp, synthetic construct
  misc_feature 1..20: note = Description of Artificial Sequence: Synthetic oligonucleotide
  misc_feature 1..20: note = Target: SCN10A; (-) strand; PAM type: YTN; PAM sequence: CTA
  source 1..20: mol_type = other DNA
agaaactaaaatatttaccc

SEQ ID NO: 52448 - DNA, 20 bp, synthetic construct
  misc_feature 1..20: note = Description of Artificial Sequence: Synthetic oligonucleotide
  misc_feature 1..20: note = Target: SCN10A; (-) strand; PAM type: YTN; PAM sequence: CTC
  source 1..20: mol_type = other DNA
atcacctaagaaactaaaat

SEQ ID NO: 52449 - DNA, 20 bp, synthetic construct
  misc_feature 1..20: note = Description of Artificial Sequence: Synthetic oligonucleotide
  misc_feature 1..20: note = Target: SCN10A; (-) strand; PAM type: YTN; PAM sequence: CTG
  source 1..20: mol_type = other DNA
ctcatcacctaagaaactaa

SEQ ID NO: 52450 - DNA, 20 bp, synthetic construct
  misc_feature 1..20: note = Description of Artificial Sequence: Synthetic oligonucleotide
  misc_feature 1..20: note = Target: SCN10A; (-) strand; PAM type: YTN; PAM sequence: TTA
  source 1..20: mol_type = other DNA
tggccctgctcatcacctaa

SEQ ID NO: 52451 - DNA, 20 bp, synthetic construct
  misc_feature 1..20: note = Description of Artificial Sequence: Synthetic oligonucleotide
  misc_feature 1..20: note = Target: SCN10A; (-) strand; PAM type: YTN; PAM sequence: TTT
  source 1..20: mol_type = other DNA
atggccctgctcatcaccta

SEQ ID NO: 52452 - DNA, 20 bp, synthetic construct
  misc_feature 1..20: note = Description of Artificial Sequence: Synthetic oligonucleotide
  misc_feature 1..20: note = Target: SCN10A; (-) strand; PAM type: YTN; PAM sequence: CTT
  source 1..20: mol_type = other DNA
tatggccctgctcatcacct

SEQ ID NO: 52453 - DNA, 20 bp, synthetic construct
  misc_feature 1..20: note = Description of Artificial Sequence: Synthetic oligonucleotide
  misc_feature 1..20: note = Target: SCN10A; (-) strand; PAM type: YTN; PAM sequence: CTC
  source 1..20: mol_type = other DNA
ggaagctttatggccctgct

SEQ ID NO: 52454 - DNA, 20 bp, synthetic construct
  misc_feature 1..20: note = Description of Artificial Sequence: Synthetic oligonucleotide
  misc_feature 1..20: note = Target: SCN10A; (-) strand; PAM type: YTN; PAM sequence: CTC
  source 1..20: mol_type = other DNA
tcggaagctttatggccctg

SEQ ID NO: 52455 - DNA, 20 bp, synthetic construct
  misc_feature 1..20: note = Description of Artificial Sequence: Synthetic oligonucleotide
  misc_feature 1..20: note = Target: SCN10A; (-) strand; PAM type: YTN; PAM sequence: CTG
  source 1..20: mol_type = other DNA
aacacaaaacccagaaactc

SEQ ID NO: 52456 - DNA, 20 bp, synthetic construct
  misc_feature 1..20: note = Description of Artificial Sequence: Synthetic oligonucleotide
  misc_feature 1..20: note = Target: SCN10A; (-) strand; PAM type: YTN; PAM sequence: TTG
  source 1..20: mol_type = other DNA
gtagctgaacacaaaaccca

SEQ ID NO: 52457 - DNA, 20 bp, synthetic construct
  misc_feature 1..20: note = Description of Artificial Sequence: Synthetic oligonucleotide
  misc_feature 1..20: note = Target: SCN10A; (-) strand; PAM type: YTN; PAM sequence: CTT
  source 1..20: mol_type = other DNA
ggtagctgaacacaaaaccc

SEQ ID NO: 52458 - DNA, 20 bp, synthetic construct
  misc_feature 1..20: note = Description of Artificial Sequence: Synthetic oligonucleotide
  misc_feature 1..20: note = Target: SCN10A; (-) strand; PAM type: YTN; PAM sequence: CTG
  source 1..20: mol_type = other DNA
ccttggtagctgaacacaaa

SEQ ID NO: 52459 - DNA, 20 bp, synthetic construct
  misc_feature 1..20: note = Description of Artificial Sequence: Synthetic oligonucleotide
  misc_feature 1..20: note = Target: SCN10A; (-) strand; PAM type: YTN; PAM sequence: CTA
  source 1..20: mol_type = other DNA
cctgccttggtagctgaaca

SEQ ID NO: 52460 - DNA, 20 bp, synthetic construct
  misc_feature 1..20: note = Description of Artificial Sequence: Synthetic oligonucleotide
  misc_feature 1..20: note = Target: SCN10A; (-) strand; PAM type: YTN; PAM sequence: TTC
  source 1..20: mol_type = other DNA
cctacctgccttggtagctg

SEQ ID NO: 52461 - DNA, 20 bp, synthetic construct
  misc_feature 1..20: note = Description of Artificial Sequence: Synthetic oligonucleotide
  misc_feature 1..20: note = Target: SCN10A; (-) strand; PAM type: YTN; PAM sequence: TTT
  source 1..20: mol_type = other DNA
ccctacctgccttggtagct

SEQ ID NO: 52462 - DNA, 20 bp, synthetic construct
  misc_feature 1..20: note = Description of Artificial Sequence: Synthetic oligonucleotide
  misc_feature 1..20: note = Target: SCN10A; (-) strand; PAM type: YTN; PAM sequence: CTG
  source 1..20: mol_type = other DNA
atggtatttccctacctgcc

SEQ ID NO: 52463 - DNA, 20 bp, synthetic construct
  misc_feature 1..20: note = Description of Artificial Sequence: Synthetic oligonucleotide
  misc_feature 1..20: note = Target: SCN10A; (-) strand; PAM type: YTN; PAM sequence: CTG
  source 1..20: mol_type = other DNA
cccccacctgatggtatttc

SEQ ID NO: 52464 - DNA, 20 bp, synthetic construct
  misc_feature 1..20: note = Description of Artificial Sequence: Synthetic oligonucleotide
  misc_feature 1..20: note = Target: SCN10A; (-) strand; PAM type: YTN; PAM sequence: CTA
  source 1..20: mol_type = other DNA
cccctgcccccacctgatgg

SEQ ID NO: 52465 - DNA, 20 bp, synthetic construct
  misc_feature 1..20: note = Description of Artificial Sequence: Synthetic oligonucleotide
  misc_feature 1..20: note = Target: SCN10A; (-) strand; PAM type: YTN; PAM sequence: CTC
  source 1..20: mol_type = other DNA
acctacccctgcccccacct

SEQ ID NO: 52466 - DNA, 20 bp, synthetic construct
  misc_feature 1..20: note = Description of Artificial Sequence: Synthetic oligonucleotide
  misc_feature 1..20: note = Target: SCN10A; (-) strand; PAM type: YTN; PAM sequence: CTA
  source 1..20: mol_type = other DNA
gactcacctacccctgcccc

SEQ ID NO: 52467 - DNA, 20 bp, synthetic construct
  misc_feature 1..20: note = Description of Artificial Sequence: Synthetic oligonucleotide
  misc_feature 1..20: note = Target: SCN10A; (-) strand; PAM type: YTN; PAM sequence: CTG
  source 1..20: mol_type = other DNA
agtctagactcacctacccc

SEQ ID NO: 52468 - DNA, 20 bp, synthetic construct
  misc_feature 1..20: note = Description of Artificial Sequence: Synthetic oligonucleotide
  misc_feature 1..20: note = Target: SCN10A; (-) strand; PAM type: YTN; PAM sequence: CTA
  source 1..20: mol_type = other DNA
cccaagaagggtctgagtct

SEQ ID NO: 52469 - DNA, 20 bp, synthetic construct
  misc_feature 1..20: note = Description of Artificial Sequence: Synthetic oligonucleotide
  misc_feature 1..20: note = Target: SCN10A; (-) strand; PAM type: YTN; PAM sequence: CTG
  source 1..20: mol_type = other DNA
agaaccaacccccatccacc

SEQ ID NO: 52470 - DNA, 20 bp, synthetic construct
  misc_feature 1..20: note = Description of Artificial Sequence: Synthetic oligonucleotide
  misc_feature 1..20: note = Target: SCN10A; (-) strand; PAM type: YTN; PAM sequence: CTG
  source 1..20: mol_type = other DNA
gcctgagaaccaacccccat

SEQ ID NO: 52471 - DNA, 20 bp, synthetic construct
  misc_feature 1..20: note = Description of Artificial Sequence: Synthetic oligonucleotide
  misc_feature 1..20: note = Target: SCN10A; (-) strand; PAM type: YTN; PAM sequence: CTG
  source 1..20: mol_type = other DNA
gaacacaaccccactggcct

SEQ ID NO: 52472 - DNA, 20 bp, synthetic construct
  misc_feature 1..20: note = Description of Artificial Sequence: Synthetic oligonucleotide
  misc_feature 1..20: note = Target: SCN10A; (-) strand; PAM type: YTN; PAM sequence: CTC
  source 1..20: mol_type = other DNA
tggaacacaaccccactggc

SEQ ID NO: 52473 - DNA, 20 bp, synthetic construct
  misc_feature 1..20: note = Description of Artificial Sequence: Synthetic oligonucleotide
  misc_feature 1..20: note = Target: SCN10A; (-) strand; PAM type: YTN; PAM sequence: TTC
  source 1..20: mol_type = other DNA
cctctggaacacaaccccac

SEQ ID NO: 52474 - DNA, 20 bp, synthetic construct
  misc_feature 1..20: note = Description of Artificial Sequence: Synthetic oligonucleotide
  misc_feature 1..20: note = Target: SCN10A; (-) strand; PAM type: YTN; PAM sequence: CTA
  source 1..20: mol_type = other DNA
tggcacagcagaggcagcca

SEQ ID NO: 52475 - DNA, 20 bp, synthetic construct
  misc_feature 1..20: note = Description of Artificial Sequence: Synthetic oligonucleotide
  misc_feature 1..20: note = Target: SCN10A; (-) strand; PAM type: YTN; PAM sequence: CTC
  source 1..20: mol_type = other DNA
tatggcacagcagaggcagc

SEQ ID NO: 52476 - DNA, 20 bp, synthetic construct
  misc_feature 1..20: note = Description of Artificial Sequence: Synthetic oligonucleotide
  misc_feature 1..20: note = Target: SCN10A; (-) strand; PAM type: YTN; PAM sequence: CTG
  source 1..20: mol_type = other DNA
gagaactctatggcacagca

SEQ ID NO: 52477 - DNA, 20 bp, synthetic construct
  misc_feature 1..20: note = Description of Artificial Sequence: Synthetic oligonucleotide
  misc_feature 1..20: note = Target: SCN10A; (-) strand; PAM type: YTN; PAM sequence: TTC
  source 1..20: mol_type = other DNA
cctggagaactctatggcac

SEQ ID NO: 52478 - DNA, 20 bp, synthetic construct
  misc_feature 1..20: note = Description of Artificial Sequence: Synthetic oligonucleotide
  misc_feature 1..20: note = Target: SCN10A; (-) strand; PAM type: YTN; PAM sequence: CTT
  source 1..20: mol_type = other DNA
ccctggagaactctatggca

SEQ ID NO: 52479 - DNA, 20 bp, synthetic construct
  misc_feature 1..20: note = Description of Artificial Sequence: Synthetic oligonucleotide
  misc_feature 1..20: note = Target: SCN10A; (-) strand; PAM type: YTN; PAM sequence: CTA
  source 1..20: mol_type = other DNA
tcccccacttccctggagaa

SEQ ID NO: 52480 - DNA, 20 bp, synthetic construct
  misc_feature 1..20: note = Description of Artificial Sequence: Synthetic oligonucleotide
  misc_feature 1..20: note = Target: SCN10A; (-) strand; PAM type: YTN; PAM sequence: CTA
  source 1..20: mol_type = other DNA
gcagctatcccccacttccc

SEQ ID NO: 52481 - DNA, 20 bp, synthetic construct
  misc_feature 1..20: note = Description of Artificial Sequence: Synthetic oligonucleotide
  misc_feature 1..20: note = Target: SCN10A; (-) strand; PAM type: YTN; PAM sequence: CTC
  source 1..20: mol_type = other DNA
actagcagctatcccccact

SEQ ID NO: 52482 - DNA, 20 bp, synthetic construct
  misc_feature 1..20: note = Description of Artificial Sequence: Synthetic oligonucleotide
  misc_feature 1..20: note = Target: SCN10A; (-) strand; PAM type: YTN; PAM sequence: CTC
  source 1..20: mol_type = other DNA
tcactagcagctatccccca

SEQ ID NO: 52483 - DNA, 20 bp, synthetic construct
  misc_feature 1..20: note = Description of Artificial Sequence: Synthetic oligonucleotide
  misc_feature 1..20: note = Target: SCN10A; (-) strand; PAM type: YTN; PAM sequence: CTA
  source 1..20: mol_type = other DNA
ggtgaggcctctcactagca

SEQ ID NO: 52484 - DNA, 20 bp, synthetic construct
  misc_feature 1..20: note = Description of Artificial Sequence: Synthetic oligonucleotide
  misc_feature 1..20: note = Target: SCN10A; (-) strand; PAM type: YTN; PAM sequence: CTA
  source 1..20: mol_type = other DNA
catgagagctaggtgaggcc

SEQ ID NO: 52485 - DNA, 20 bp, synthetic construct
  misc_feature 1..20: note = Description of Artificial Sequence: Synthetic oligonucleotide
  misc_feature 1..20: note = Target: SCN10A; (-) strand; PAM type: YTN; PAM sequence: CTC
  source 1..20: mol_type = other DNA
accaactacatgagagctag

SEQ ID NO: 52486 - DNA, 20 bp, synthetic construct
  misc_feature 1..20: note = Description of Artificial Sequence: Synthetic oligonucleotide
  misc_feature 1..20: note = Target: SCN10A; (-) strand; PAM type: YTN; PAM sequence: CTG
  source 1..20: mol_type = other DNA
caggagcaagaccagcctca

SEQ ID NO: 52487 - DNA, 20 bp, synthetic construct
  misc_feature 1..20: note = Description of Artificial Sequence: Synthetic oligonucleotide
  misc_feature 1..20: note = Target: SCN10A; (-) strand; PAM type: YTN; PAM sequence: CTG
  source 1..20: mol_type = other DNA
agtagggcactgcaggagca

SEQ ID NO: 52488 - DNA, 20 bp, synthetic construct
  misc_feature 1..20: note = Description of Artificial Sequence: Synthetic oligonucleotide
  misc_feature 1..20: note = Target: SCN10A; (-) strand; PAM type: YTN; PAM sequence: CTG
  source 1..20: mol_type = other DNA
gggcaaggtctgagtagggc

SEQ ID NO: 52489 - DNA, 20 bp, synthetic construct
  misc_feature 1..20: note = Description of Artificial Sequence: Synthetic oligonucleotide
  misc_feature 1..20: note = Target: SCN10A; (-) strand; PAM type: YTN; PAM sequence: CTC
  source 1..20: mol_type = other DNA
acagcctggggcaaggtctg

SEQ ID NO: 52490 - DNA, 20 bp, synthetic construct
  misc_feature 1..20: note = Description of Artificial Sequence: Synthetic oligonucleotide
  misc_feature 1..20: note = Target: SCN10A; (-) strand; PAM type: YTN; PAM sequence: CTC
  source 1..20: mol_type = other DNA
agtggggaagctcacagcct

SEQ ID NO: 52491 - DNA, 20 bp, synthetic construct
  misc_feature 1..20: note = Description of Artificial Sequence: Synthetic oligonucleotide
  misc_feature 1..20: note = Target: SCN10A; (-) strand; PAM type: YTN; PAM sequence: TTC
  source 1..20: mol_type = other DNA
tcagtggggaagctcacagc

SEQ ID NO: 52492 - DNA, 20 bp, synthetic construct
  misc_feature 1..20: note = Description of Artificial Sequence: Synthetic oligonucleotide
  misc_feature 1..20: note = Target: SCN10A; (-) strand; PAM type: YTN; PAM sequence: TTT
  source 1..20: mol_type = other DNA
ctcagtggggaagctcacag

SEQ ID NO: 52493 - DNA, 20 bp, synthetic construct
  misc_feature 1..20: note = Description of Artificial Sequence: Synthetic oligonucleotide
  misc_feature 1..20: note = Target: SCN10A; (-) strand; PAM type: YTN; PAM sequence: CTT
  source 1..20: mol_type = other DNA
tctcagtggggaagctcaca

SEQ ID NO: 52494 - DNA, 20 bp, synthetic construct
  misc_feature 1..20: note = Description of Artificial Sequence: Synthetic oligonucleotide
  misc_feature 1..20: note = Target: SCN10A; (-) strand; PAM type: YTN; PAM sequence: TTC
  source 1..20: mol_type = other DNA
tttctcagtggggaagctca

SEQ ID NO: 52495 - DNA, 20 bp, synthetic construct
  misc_feature 1..20: note = Description of Artificial Sequence: Synthetic oligonucleotide
  misc_feature 1..20: note = Target: SCN10A; (-) strand; PAM type: YTN; PAM sequence: TTT
  source 1..20: mol_type = other DNA
ctttctcagtggggaagctc

SEQ ID NO: 52496 - DNA, 20 bp, synthetic construct
  misc_feature 1..20: note = Description of Artificial Sequence: Synthetic oligonucleotide
  misc_feature 1..20: note = Target: SCN10A; (-) strand; PAM type: YTN; PAM sequence: CTT
  source 1..20: mol_type = other DNA
tctttctcagtggggaagct

SEQ ID NO: 52497 - DNA, 20 bp, synthetic construct
  misc_feature 1..20: note = Description of Artificial Sequence: Synthetic oligonucleotide
  misc_feature 1..20: note = Target: SCN10A; (-) strand; PAM type: YTN; PAM sequence: CTG
  source 1..20: mol_type = other DNA
caagcagacagtgagggatg

SEQ ID NO: 52498 - DNA, 20 bp, synthetic construct
  misc_feature 1..20: note = Description of Artificial Sequence: Synthetic oligonucleotide
  misc_feature 1..20: note = Target: SCN10A; (-) strand; PAM type: YTN; PAM sequence: TTG
  source 1..20: mol_type = other DNA
agcagaatccagggggcaaa

SEQ ID NO: 52499 - DNA, 20 bp, synthetic construct
  misc_feature 1..20: note = Description of Artificial Sequence: Synthetic oligonucleotide
  misc_feature 1..20: note = Target: SCN10A; (-) strand; PAM type: YTN; PAM sequence: CTT
  source 1..20: mol_type = other DNA
gagcagaatccagggggcaa

SEQ ID NO: 52500 - DNA, 20 bp, synthetic construct
  misc_feature 1..20: note = Description of Artificial Sequence: Synthetic oligonucleotide
  misc_feature 1..20: note = Target: SCN10A; (-) strand; PAM type: YTN; PAM sequence: TTC
  source 1..20: mol_type = other DNA
ttgagcagaatccagggggc

SEQ ID NO: 52501 - DNA, 20 bp, synthetic construct
  misc_feature 1..20: note = Description of Artificial Sequence: Synthetic oligonucleotide
  misc_feature 1..20: note = Target: SCN10A; (-) strand; PAM type: YTN; PAM sequence: TTT
  source 1..20: mol_type = other DNA
cttgagcagaatccaggggg

SEQ ID NO: 52502 - DNA, 20 bp, synthetic construct
  misc_feature 1..20: note = Description of Artificial Sequence: Synthetic oligonucleotide
  misc_feature 1..20: note = Target: SCN10A; (-) strand; PAM type: YTN; PAM sequence: TTT
  source 1..20: mol_type = other DNA
tcttgagcagaatccagggg

SEQ ID NO: 52503 - DNA, 20 bp, synthetic construct
  misc_feature 1..20: note = Description of Artificial Sequence: Synthetic oligonucleotide
  misc_feature 1..20: note = Target: SCN10A; (-) strand; PAM type: YTN; PAM sequence: CTG
  source 1..20: mol_type = other DNA
ggcacaaattttcttgagca

SEQ ID NO: 52504 - DNA, 20 bp, synthetic construct
  misc_feature 1..20: note = Description of Artificial Sequence: Synthetic oligonucleotide
  misc_feature 1..20: note = Target: SCN10A; (-) strand; PAM type: YTN; PAM sequence: TTC
  source 1..20: mol_type = other DNA
aactgggcacaaattttctt

SEQ ID NO: 52505 - DNA, 20 bp, synthetic construct
  misc_feature 1..20: note = Description of Artificial Sequence: Synthetic oligonucleotide
  misc_feature 1..20: note = Target: SCN10A; (-) strand; PAM type: YTN; PAM sequence: TTT
  source 1..20: mol_type = other DNA
caactgggcacaaattttct

SEQ ID NO: 52506 - DNA, 20 bp, synthetic construct
  misc_feature 1..20: note = Description of Artificial Sequence: Synthetic oligonucleotide
  misc_feature 1..20: note = Target: SCN10A; (-) strand; PAM type: YTN; PAM sequence: TTA
  source 1..20: mol_type = other DNA
gtaataatttcaactgggca

SEQ ID NO: 52507 - DNA, 20 bp, synthetic construct
  misc_feature 1..20: note = Description of Artificial Sequence: Synthetic oligonucleotide
  misc_feature 1..20: note = Target: SCN10A; (-) strand; PAM type: YTN; PAM sequence: CTA
  source 1..20: mol_type = other DNA
aaattagtaataatttcaac

SEQ ID NO: 52508 - DNA, 20 bp, synthetic construct
  misc_feature 1..20: note = Description of Artificial Sequence: Synthetic oligonucleotide
  misc_feature 1..20: note = Target: SCN10A; (-) strand; PAM type: YTN; PAM sequence: TTC
  source 1..20: mol_type = other DNA
aactaaaattagtaataatt

SEQ ID NO: 52509 - DNA, 20 bp, synthetic construct
  misc_feature 1..20: note = Description of Artificial Sequence: Synthetic oligonucleotide
  misc_feature 1..20: note = Target: SCN10A; (-) strand; PAM type: YTN; PAM sequence: TTT
  source 1..20: mol_type = other DNA
caactaaaattagtaataat

SEQ ID NO: 52510 - DNA, 20 bp, synthetic construct
  misc_feature 1..20: note = Description of Artificial Sequence: Synthetic oligonucleotide
  misc_feature 1..20: note = Target: SCN10A; (-) strand; PAM type: YTN; PAM sequence: TTG
  source 1..20: mol_type = other DNA
gggaaggcagccagtggaat

SEQ ID NO: 52511 - DNA, 20 bp, synthetic construct
  misc_feature 1..20: note = Description of Artificial Sequence: Synthetic oligonucleotide
  misc_feature 1..20: note = Target: SCN10A; (-) strand; PAM type: YTN; PAM sequence: CTT
  source 1..20: mol_type = other DNA
ggggaaggcagccagtggaa

SEQ ID NO: 52512 - DNA, 20 bp, synthetic construct
  misc_feature 1..20: note = Description of Artificial Sequence: Synthetic oligonucleotide
  misc_feature 1..20: note = Target: SCN10A; (-) strand; PAM type: YTN; PAM sequence: CTC
  source 1..20: mol_type = other DNA
acaggcacccttggggaagg

SEQ ID NO: 52513 - DNA, 20 bp, synthetic construct
  misc_feature 1..20: note = Description of Artificial Sequence: Synthetic oligonucleotide
  misc_feature 1..20: note = Target: SCN10A; (-) strand; PAM type: YTN; PAM sequence: CTA
  source 1..20: mol_type = other DNA
tgtctcacaggcacccttgg

SEQ ID NO: 52514 - DNA, 20 bp, synthetic construct
  misc_feature 1..20: note = Description of Artificial Sequence: Synthetic oligonucleotide
  misc_feature 1..20: note = Target: SCN10A; (-) strand; PAM type: YTN; PAM sequence: CTG
  source 1..20: mol_type = other DNA
actatgtctcacaggcaccc

SEQ ID NO: 52515 - DNA, 20 bp, synthetic construct
  misc_feature 1..20: note = Description of Artificial Sequence: Synthetic oligonucleotide
  misc_feature 1..20: note = Target: SCN10A; (-) strand; PAM type: YTN; PAM sequence: TTG
  source 1..20: mol_type = other DNA
agaccagggaatccatccct

SEQ ID NO: 52516 - DNA, 20 bp, synthetic construct
  misc_feature 1..20: note = Description of Artificial Sequence: Synthetic oligonucleotide
  misc_feature 1..20: note = Target: SCN10A; (-) strand; PAM type: YTN; PAM sequence: CTT
  source 1..20: mol_type = other DNA
gagaccagggaatccatccc

SEQ ID NO: 52517 - DNA, 20 bp, synthetic construct
  misc_feature 1..20: note = Description of Artificial Sequence: Synthetic oligonucleotide
  misc_feature 1..20: note = Target: SCN10A; (-) strand; PAM type: YTN; PAM sequence: CTC
  source 1..20: mol_type = other DNA
cagcttgagaccagggaatc

SEQ ID NO: 52518 - DNA, 20 bp, synthetic construct
  misc_feature 1..20: note = Description of Artificial Sequence: Synthetic oligonucleotide
  misc_feature 1..20: note = Target: SCN10A; (-) strand; PAM type: YTN; PAM sequence: CTC
  source 1..20: mol_type = other DNA
ccagtctccagcttgagacc

SEQ ID NO: 52519 - DNA, 20 bp, synthetic construct
  misc_feature 1..20: note = Description of Artificial Sequence: Synthetic oligonucleotide
  misc_feature 1..20: note = Target: SCN10A; (-) strand; PAM type: YTN; PAM sequence: TTG
  source 1..20: mol_type = other DNA
taggcactcccagtctccag

SEQ ID NO: 52520 - DNA, 20 bp, synthetic construct
  misc_feature 1..20: note = Description of Artificial Sequence: Synthetic oligonucleotide
  misc_feature 1..20: note = Target: SCN10A; (-) strand; PAM type: YTN; PAM sequence: CTT
  source 1..20: mol_type = other DNA
gtaggcactcccagtctcca

SEQ ID NO: 52521 - DNA, 20 bp, synthetic construct
  misc_feature 1..20: note = Description of Artificial Sequence: Synthetic oligonucleotide
  misc_feature 1..20: note = Target: SCN10A; (-) strand; PAM type: YTN; PAM sequence: TTA
  source 1..20: mol_type = other DNA
ggaagccacacaaaatataa

SEQ ID NO: 52522 - DNA, 20 bp, synthetic construct
  misc_feature 1..20: note = Description of Artificial Sequence: Synthetic oligonucleotide
  misc_feature 1..20: note = Target: SCN10A; (-) strand; PAM type: YTN; PAM sequence: TTT
  source 1..20: mol_type = other DNA
aggaagccacacaaaatata

SEQ ID NO: 52523 - DNA, 20 bp, synthetic construct
  misc_feature 1..20: note = Description of Artificial Sequence: Synthetic oligonucleotide
  misc_feature 1..20: note = Target: SCN10A; (-) strand; PAM type: YTN; PAM sequence: CTG
  source 1..20: mol_type = other DNA
gaatgtaaataaatttagga

SEQ ID NO: 52524 - DNA, 20 bp, synthetic construct
  misc_feature 1..20: note = Description of Artificial Sequence: Synthetic oligonucleotide
  misc_feature 1..20: note = Target: SCN10A; (-) strand; PAM type: YTN; PAM sequence: TTA
  source 1..20: mol_type = other DNA
cctggaatgtaaataaattt

SEQ ID NO: 52525 - DNA, 20 bp, synthetic construct
  misc_feature 1..20: note = Description of Artificial Sequence: Synthetic oligonucleotide
  misc_feature 1..20: note = Target: SCN10A; (-) strand; PAM type: YTN; PAM sequence: CTT
  source 1..20: mol_type = other DNA
acctggaatgtaaataaatt

SEQ ID NO: 52526 - DNA, 20 bp, synthetic construct
  misc_feature 1..20: note = Description of Artificial Sequence: Synthetic oligonucleotide
  misc_feature 1..20: note = Target: SCN10A; (-) strand; PAM type: YTN; PAM sequence: TTA
  source 1..20: mol_type = other DNA
cccttacctggaatgtaaat

SEQ ID NO: 52527 - DNA, 20 bp, synthetic construct
  misc_feature 1..20: note = Description of Artificial Sequence: Synthetic oligonucleotide
  misc_feature 1..20: note = Target: SCN10A; (-) strand; PAM type: YTN; PAM sequence: TTT
  source 1..20: mol_type = other DNA
acccttacctggaatgtaaa

SEQ ID NO: 52528 - DNA, 20 bp, synthetic construct
  misc_feature 1..20: note = Description of Artificial Sequence: Synthetic oligonucleotide
  misc_feature 1..20: note = Target: SCN10A; (-) strand; PAM type: YTN; PAM sequence: CTG
  source 1..20: mol_type = other DNA
aaaatccagatcacaggaga

SEQ ID NO: 52529 - DNA, 20 bp, synthetic construct
  misc_feature 1..20: note = Description of Artificial Sequence: Synthetic oligonucleotide
  misc_feature 1..20: note = Target: SCN10A; (-) strand; PAM type: YTN; PAM sequence: CTG
  source 1..20: mol_type = other DNA
ggtaatctgaaaatccagat

SEQ ID NO: 52530 - DNA, 20 bp, synthetic construct
  misc_feature 1..20: note = Description of Artificial Sequence: Synthetic oligonucleotide
  misc_feature 1..20: note = Target: SCN10A; (-) strand; PAM type: YTN; PAM sequence: CTC
  source 1..20: mol_type = other DNA
caaacatacatcccaactgg

SEQ ID NO: 52531 - DNA, 20 bp, synthetic construct
  misc_feature 1..20: note = Description of Artificial Sequence: Synthetic oligonucleotide
  misc_feature 1..20: note = Target: SCN10A; (-) strand; PAM type: YTN; PAM sequence: CTG
  source 1..20: mol_type = other DNA
cctccaaacatacatcccaa

SEQ ID NO: 52532 - DNA, 20 bp, synthetic construct
  misc_feature 1..20: note = Description of Artificial Sequence: Synthetic oligonucleotide
  misc_feature 1..20: note = Target: SCN10A; (-) strand; PAM type: YTN; PAM sequence: CTC
  source 1..20: mol_type = other DNA
ccaaagtgtgagggggggaa

SEQ ID NO: 52533 - DNA, 20 bp, synthetic construct
  misc_feature 1..20: note = Description of Artificial Sequence: Synthetic oligonucleotide
  misc_feature 1..20: note = Target: SCN10A; (-) strand; PAM type: YTN; PAM sequence: CTG
  source 1..20: mol_type = other DNA
tgagctcccaaagtgtgagg

SEQ ID NO: 52534 - DNA, 20 bp, synthetic construct
  misc_feature 1..20: note = Description of Artificial Sequence: Synthetic oligonucleotide
  misc_feature 1..20: note = Target: SCN10A; (-) strand; PAM type: YTN; PAM sequence: CTG
  source 1..20: mol_type = other DNA
caagacaggtgaaaaactgt

SEQ ID NO: 52535 - DNA, 20 bp, synthetic construct
  misc_feature 1..20: note = Description of Artificial Sequence: Synthetic oligonucleotide
  misc_feature 1..20: note = Target: SCN10A; (-) strand; PAM type: YTN; PAM sequence: TTC
  source 1..20: mol_type = other DNA
tgcaagacaggtgaaaaact

SEQ ID NO: 52536 - DNA, 20 bp, synthetic construct
  misc_feature 1..20: note = Description of Artificial Sequence: Synthetic oligonucleotide
  misc_feature 1..20: note = Target: SCN10A; (-) strand; PAM type: YTN; PAM sequence: CTG
  source 1..20: mol_type = other DNA
gaaattctgcaagacaggtg

SEQ ID NO: 52537 - DNA, 20 bp, synthetic construct
  misc_feature 1..20: note = Description of Artificial Sequence: Synthetic oligonucleotide
  misc_feature 1..20: note = Target: SCN10A; (-) strand; PAM type: YTN; PAM sequence: CTG
  source 1..20: mol_type = other DNA
ctggaaattctgcaagacag

SEQ ID NO: 52538 - DNA, 20 bp, synthetic construct
  misc_feature 1..20: note = Description of Artificial Sequence: Synthetic oligonucleotide
  misc_feature 1..20: note = Target: SCN10A; (-) strand; PAM type: YTN; PAM sequence: TTA
  source 1..20: mol_type = other DNA
aataagtggcacactgctgg

SEQ ID NO: 52539 - DNA, 20 bp, synthetic construct
  misc_feature 1..20: note = Description of Artificial Sequence: Synthetic oligonucleotide
  misc_feature 1..20: note = Target: SCN10A; (-) strand; PAM type: YTN; PAM sequence: TTT
  source 1..20: mol_type = other DNA
aaataagtggcacactgctg

SEQ ID NO: 52540 - DNA, 20 bp, synthetic construct
  misc_feature 1..20: note = Description of Artificial Sequence: Synthetic oligonucleotide
  misc_feature 1..20: note = Target: SCN10A; (-) strand; PAM type: YTN; PAM sequence: TTT
  source 1..20: mol_type = other DNA
taaataagtggcacactgct

SEQ ID NO: 52541 - DNA, 20 bp, synthetic construct
  misc_feature 1..20: note = Description of Artificial Sequence: Synthetic oligonucleotide
  misc_feature 1..20: note = Target: SCN10A; (-) strand; PAM type: YTN; PAM sequence: CTT
  source 1..20: mol_type = other DNA
ttaaataagtggcacactgc

SEQ ID NO: 52542 - DNA, 20 bp, synthetic construct
  misc_feature 1..20: note = Description of Artificial Sequence: Synthetic oligonucleotide
  misc_feature 1..20: note = Target: SCN10A; (-) strand; PAM type: YTN; PAM sequence: TTC
  source 1..20: mol_type = other DNA
atagatccttttaaataagt

SEQ ID NO: 52543 - DNA, 20 bp, synthetic construct
  misc_feature 1..20: note = Description of Artificial Sequence: Synthetic oligonucleotide
  misc_feature 1..20: note = Target: SCN10A; (-) strand; PAM type: YTN; PAM sequence: CTG
  source 1..20: mol_type = other DNA
aaagaattcatagatccttt

SEQ ID NO: 52544 - DNA, 20 bp, synthetic construct
  misc_feature 1..20: note = Description of Artificial Sequence: Synthetic oligonucleotide
  misc_feature 1..20: note = Target: SCN10A; (-) strand; PAM type: YTN; PAM sequence: CTG
  source 1..20: mol_type = other DNA
caggaatataccaggagaac

SEQ ID NO: 52545 - DNA, 20 bp, synthetic construct
  misc_feature 1..20: note = Description of Artificial Sequence: Synthetic oligonucleotide
  misc_feature 1..20: note = Target: SCN10A; (-) strand; PAM type: YTN; PAM sequence: CTC
  source 1..20: mol_type = other DNA
caagaaccactgcaggaata

SEQ ID NO: 52546 - DNA, 20 bp, synthetic construct
  misc_feature 1..20: note = Description of Artificial Sequence: Synthetic oligonucleotide
  misc_feature 1..20: note = Target: SCN10A; (-) strand; PAM type: YTN; PAM sequence: TTG
  source 1..20: mol_type = other DNA
ctccaagaaccactgcagga

SEQ ID NO: 52547 - DNA, 20 bp, synthetic construct
  misc_feature 1..20: note = Description of Artificial Sequence: Synthetic oligonucleotide
  misc_feature 1..20: note = Target: SCN10A; (-) strand; PAM type: YTN; PAM sequence: TTT
  source 1..20: mol_type = other DNA
gctccaagaaccactgcagg

SEQ ID NO: 52548 - DNA, 20 bp, synthetic construct
  misc_feature 1..20: note = Description of Artificial Sequence: Synthetic oligonucleotide
  misc_feature 1..20: note = Target: SCN10A; (-) strand; PAM type: YTN; PAM sequence: CTC
  source 1..20: mol_type = other DNA
acaccatgaacgtttgctcc

SEQ ID NO: 52549 - DNA, 20 bp, synthetic construct
  misc_feature 1..20: note = Description of Artificial Sequence: Synthetic oligonucleotide
  misc_feature 1..20: note = Target: SCN10A; (-) strand; PAM type: YTN; PAM sequence: TTG
  source 1..20: mol_type = other DNA
gacagagtgtggagactcac

SEQ ID NO: 52550 - DNA, 20 bp, synthetic construct
  misc_feature 1..20: note = Description of Artificial Sequence: Synthetic oligonucleotide
  misc_feature 1..20: note = Target: SCN10A; (-) strand; PAM type: YTN; PAM sequence: CTT
  source 1..20: mol_type = other DNA
ggacagagtgtggagactca

SEQ ID NO: 52551 - DNA, 20 bp, synthetic construct
  misc_feature 1..20: note = Description of Artificial Sequence: Synthetic oligonucleotide
  misc_feature 1..20: note = Target: SCN10A; (-) strand; PAM type: YTN; PAM sequence: CTA
  source 1..20: mol_type = other DNA
acatgcaggtcccacttgga

SEQ ID NO: 52552 - DNA, 20 bp, synthetic construct
  misc_feature 1..20: note = Description of Artificial Sequence: Synthetic oligonucleotide
  misc_feature 1..20: note = Target: SCN10A; (-) strand; PAM type: YTN; PAM sequence: CTG
  source 1..20: mol_type = other DNA
catgtgtgataggagagggg

SEQ ID NO: 52553 - DNA, 20 bp, synthetic construct
  misc_feature 1..20: note = Description of Artificial Sequence: Synthetic oligonucleotide
  misc_feature 1..20: note = Target: SCN10A; (-) strand; PAM type: YTN; PAM sequence: CTA
  source 1..20: mol_type = other DNA
tgcagatctgcatgtgtgat

SEQ ID NO: 52554 - DNA, 20 bp, synthetic construct
  misc_feature 1..20: note = Description of Artificial Sequence: Synthetic oligonucleotide
  misc_feature 1..20: note = Target: SCN10A; (-) strand; PAM type: YTN; PAM sequence: CTC
  source 1..20: mol_type = other DNA
tatgcagatctgcatgtgtg

SEQ ID NO: 52555 - DNA, 20 bp, synthetic construct
  misc_feature 1..20: note = Description of Artificial Sequence: Synthetic oligonucleotide
  misc_feature 1..20: note = Target: SCN10A; (-) strand; PAM type: YTN; PAM sequence: CTG
  source 1..20: mol_type = other DNA
gcgtgagtatatctctatgc

SEQ ID NO: 52556 - DNA, 20 bp, synthetic construct
  misc_feature 1..20: note = Description of Artificial Sequence: Synthetic oligonucleotide
  misc_feature 1..20: note = Target: SCN10A; (-) strand; PAM type: YTN; PAM sequence: TTA
  source 1..20: mol_type = other DNA
ccctggcgtgagtatatctc

SEQ ID NO: 52557 - DNA, 20 bp, synthetic construct
  misc_feature 1..20: note = Description of Artificial Sequence: Synthetic oligonucleotide
  misc_feature 1..20: note = Target: SCN10A; (-) strand; PAM type: YTN; PAM sequence: TTA
  source 1..20: mol_type = other DNA
gcgtcattaccctggcgtga

SEQ ID NO: 52558 - DNA, 20 bp, synthetic construct
  misc_feature 1..20: note = Description of Artificial Sequence: Synthetic oligonucleotide
  misc_feature 1..20: note = Target: SCN10A; (-) strand; PAM type: YTN; PAM sequence: TTT
  source 1..20: mol_type = other DNA
agcgtcattaccctggcgtg

SEQ ID NO: 52559 - DNA, 20 bp, synthetic construct
  misc_feature 1..20: note = Description of Artificial Sequence: Synthetic oligonucleotide
  misc_feature 1..20: note = Target: SCN10A; (-) strand; PAM type: YTN; PAM sequence: TTT
  source 1..20: mol_type = other DNA
tagcgtcattaccctggcgt

SEQ ID NO: 52560 - DNA, 20 bp, synthetic construct
  misc_feature 1..20: note = Description of Artificial Sequence: Synthetic oligonucleotide
  misc_feature 1..20: note = Target: SCN10A; (-) strand; PAM type: YTN; PAM sequence: CTG
  source 1..20: mol_type = other DNA
gattttagcgtcattaccct

SEQ ID NO: 52561 - DNA, 20 bp, synthetic construct
  misc_feature 1..20: note = Description of Artificial Sequence: Synthetic oligonucleotide
  misc_feature 1..20: note = Target: SCN10A; (-) strand; PAM type: YTN; PAM sequence: CTG
  source 1..20: mol_type = other DNA
gctggattttagcgtcatta

SEQ ID NO: 52562 - DNA, 20 bp, synthetic construct
  misc_feature 1..20: note = Description of Artificial Sequence: Synthetic oligonucleotide
  misc_feature 1..20: note = Target: SCN10A; (-) strand; PAM type: YTN; PAM sequence: TTG
  source 1..20: mol_type = other DNA
gaactggctggattttagcg

SEQ ID NO: 52563 - DNA, 20 bp, synthetic construct
  misc_feature 1..20: note = Description of Artificial Sequence: Synthetic oligonucleotide
  misc_feature 1..20: note = Target: SCN10A; (-) strand; PAM type: YTN; PAM sequence: CTT
  source 1..20: mol_type = other DNA
ggaactggctggattttagc

SEQ ID NO: 52564 - DNA, 20 bp, synthetic construct
  misc_feature 1..20: note = Description of Artificial Sequence: Synthetic oligonucleotide
  misc_feature 1..20: note = Target: SCN10A; (-) strand; PAM type: YTN; PAM sequence: CTG
  source 1..20: mol_type = other DNA
agagatccttggaactggct

SEQ ID NO: 52565 - DNA, 20 bp, synthetic construct
  misc_feature 1..20: note = Description of Artificial Sequence: Synthetic oligonucleotide
  misc_feature 1..20: note = Target: SCN10A; (-) strand; PAM type: YTN; PAM sequence: TTC
  source 1..20: mol_type = other DNA
acgtacctgagagatccttg

SEQ ID NO: 52566 - DNA, 20 bp, synthetic construct
  misc_feature 1..20: note = Description of Artificial Sequence: Synthetic oligonucleotide
  misc_feature 1..20: note = Target: SCN10A; (-) strand; PAM type: YTN; PAM sequence: CTA
  source 1..20: mol_type = other DNA
aatgagttcacgtacctgag

SEQ ID NO: 52567 - DNA, 20 bp, synthetic construct
  misc_feature 1..20: note = Description of Artificial Sequence: Synthetic oligonucleotide
  misc_feature 1..20: note = Target: SCN10A; (-) strand; PAM type: YTN; PAM sequence: TTG
  source 1..20: mol_type = other DNA
tctaaatgagttcacgtacc

SEQ ID NO: 52568 - DNA, 20 bp, synthetic construct
  misc_feature 1..20: note = Description of Artificial Sequence: Synthetic oligonucleotide
  misc_feature 1..20: note = Target: SCN10A; (-) strand; PAM type: YTN; PAM sequence: TTT
  source 1..20: mol_type = other DNA
gtctaaatgagttcacgtac

SEQ ID NO: 52569 - DNA, 20 bp, synthetic construct
  misc_feature 1..20: note = Description of Artificial Sequence: Synthetic oligonucleotide
  misc_feature 1..20: note = Target: SCN10A; (-) strand; PAM type: YTN; PAM sequence: TTT
  source 1..20: mol_type = other DNA
tgtctaaatgagttcacgta

SEQ ID NO: 52570 - DNA, 20 bp, synthetic construct
  misc_feature 1..20: note = Description of Artificial Sequence: Synthetic oligonucleotide
  misc_feature 1..20: note = Target: SCN10A; (-) strand; PAM type: YTN; PAM sequence: CTG
  source 1..20: mol_type = other DNA
gcaagaggattttgtctaaa

SEQ ID NO: 52571 - DNA, 20 bp, synthetic construct
  misc_feature 1..20: note = Description of Artificial Sequence: Synthetic oligonucleotide
  misc_feature 1..20: note = Target: SCN10A; (-) strand; PAM type: YTN; PAM sequence: TTG
  source 1..20: mol_type = other DNA
ataaagatactggcaagagg

SEQ ID NO: 52572 - DNA, 20 bp, synthetic construct
  misc_feature 1..20: note = Description of Artificial Sequence: Synthetic oligonucleotide
  misc_feature 1..20: note = Target: SCN10A; (-) strand; PAM type: YTN; PAM sequence: CTT
  source 1..20: mol_type = other DNA
gataaagatactggcaagag

SEQ ID NO: 52573 - DNA, 20 bp, synthetic construct
  misc_feature 1..20: note = Description of Artificial Sequence: Synthetic oligonucleotide
  misc_feature 1..20: note = Target: SCN10A; (-) strand; PAM type: YTN; PAM sequence: TTG
  source 1..20: mol_type = other DNA
aagccttgataaagatactg

SEQ ID NO: 52574 - DNA, 20 bp, synthetic construct
  misc_feature 1..20: note = Description of Artificial Sequence: Synthetic oligonucleotide
  misc_feature 1..20: note = Target: SCN10A; (-) strand; PAM type: YTN; PAM sequence: TTT
  source 1..20: mol_type = other DNA
gaagccttgataaagatact

SEQ ID NO: 52575 - DNA, 20 bp, synthetic construct
  misc_feature 1..20: note = Description of Artificial Sequence: Synthetic oligonucleotide
  misc_feature 1..20: note = Target: SCN10A; (-) strand; PAM type: YTN; PAM sequence: CTT
  source 1..20: mol_type = other DNA
tgaagccttgataaagatac

SEQ ID NO: 52576 - DNA, 20 bp, synthetic construct
  misc_feature 1..20: note = Description of Artificial Sequence: Synthetic oligonucleotide
  misc_feature 1..20: note = Target: SCN10A; (-) strand; PAM type: YTN; PAM sequence: TTA
  source 1..20: mol_type = other DNA
cacctttgaagccttgataa

SEQ ID NO: 52577 - DNA, 20 bp, synthetic construct
  misc_feature 1..20: note = Description of Artificial Sequence: Synthetic oligonucleotide
  misc_feature 1..20: note = Target: SCN10A; (-) strand; PAM type: YTN; PAM sequence: TTT
  source 1..20: mol_type = other DNA
acacctttgaagccttgata

SEQ ID NO: 52578 - DNA, 20 bp, synthetic construct
  misc_feature 1..20: note = Description of Artificial Sequence: Synthetic oligonucleotide
  misc_feature 1..20: note = Target: SCN10A; (-) strand; PAM type: YTN; PAM sequence: CTG
  source 1..20: mol_type = other DNA
tcatttacacctttgaagcc

SEQ ID NO: 52579 - DNA, 20 bp, synthetic construct
  misc_feature 1..20: note = Description of Artificial Sequence: Synthetic oligonucleotide
  misc_feature 1..20: note = Target: SCN10A; (-) strand; PAM type: YTN; PAM sequence: TTC
  source 1..20: mol_type = other DNA
actgtcatttacacctttga

SEQ ID NO: 52580 - DNA, 20 bp, synthetic construct
  misc_feature 1..20: note = Description of Artificial Sequence: Synthetic oligonucleotide
  misc_feature 1..20: note = Target: SCN10A; (-) strand; PAM type: YTN; PAM sequence: CTT
  source 1..20: mol_type = other DNA
cactgtcatttacacctttg

SEQ ID NO: 52581 - DNA, 20 bp, synthetic construct
  misc_feature 1..20: note = Description of Artificial Sequence: Synthetic oligonucleotide
  misc_feature 1..20: note = Target: SCN10A; (-) strand; PAM type: YTN; PAM sequence: TTC
  source 1..20: mol_type = other DNA
ccagatatgtcttcactgtc

SEQ ID NO: 52582 - DNA, 20 bp, synthetic construct
  misc_feature 1..20: note = Description of Artificial Sequence: Synthetic oligonucleotide
  misc_feature 1..20: note = Target: SCN10A; (-) strand; PAM type: YTN; PAM sequence: CTT
  source 1..20: mol_type = other DNA
cccagatatgtcttcactgt

SEQ ID NO: 52583 - DNA, 20 bp, synthetic construct
  misc_feature 1..20: note = Description of Artificial Sequence: Synthetic oligonucleotide
  misc_feature 1..20: note = Target: SCN10A; (-) strand; PAM type: YTN; PAM sequence: CTC
  source 1..20: mol_type = other DNA
cttcccagatatgtcttcac

SEQ ID NO: 52584 - DNA, 20 bp, synthetic construct
  misc_feature 1..20: note = Description of Artificial Sequence: Synthetic oligonucleotide
  misc_feature 1..20: note = Target: SCN10A; (-) strand; PAM type: YTN; PAM sequence: CTA
  source 1..20: mol_type = other DNA
ccctccttcccagatatgtc

SEQ ID NO: 52585 - DNA, 20 bp, synthetic construct
  misc_feature 1..20: note = Description of Artificial Sequence: Synthetic oligonucleotide
  misc_feature 1..20: note = Target: SCN10A; (-) strand; PAM type: YTN; PAM sequence: TTC
  source 1..20: mol_type = other DNA
taccctccttcccagatatg

SEQ ID NO: 52586 - DNA, 20 bp, synthetic construct
  misc_feature 1..20: note = Description of Artificial Sequence: Synthetic oligonucleotide
  misc_feature 1..20: note = Target: SCN10A; (-) strand; PAM type: YTN; PAM sequence: TTT
  source 1..20: mol_type = other DNA
ctaccctccttcccagatat

SEQ ID NO: 52587 - DNA, 20 bp, synthetic construct
  misc_feature 1..20: note = Description of Artificial Sequence: Synthetic oligonucleotide
  misc_feature 1..20: note = Target: SCN10A; (-) strand; PAM type: YTN; PAM sequence: TTT
  source 1..20: mol_type = other DNA
tctaccctccttcccagata

SEQ ID NO: 52588 - DNA, 20 bp, synthetic construct
  misc_feature 1..20: note = Description of Artificial Sequence: Synthetic oligonucleotide
  misc_feature 1..20: note = Target: SCN10A; (-) strand; PAM type: YTN; PAM sequence: CTT
  source 1..20: mol_type = other DNA
ttctaccctccttcccagat

SEQ ID NO: 52589 - DNA, 20 bp, synthetic construct
  misc_feature 1..20: note = Description of Artificial Sequence: Synthetic oligonucleotide
  misc_feature 1..20: note = Target: SCN10A; (-) strand; PAM type: YTN; PAM sequence: CTC
  source 1..20: mol_type = other DNA
cttttctaccctccttccca

SEQ ID NO: 52590 - DNA, 20 bp, synthetic construct
  misc_feature 1..20: note = Description of Artificial Sequence: Synthetic oligonucleotide
  misc_feature 1..20: note = Target: SCN10A; (-) strand; PAM type: YTN; PAM sequence: TTG
  source 1..20: mol_type = other DNA
acactccttttctaccctcc

SEQ ID NO: 52591 - DNA, 20 bp, synthetic construct
  misc_feature 1..20: note = Description of Artificial Sequence: Synthetic oligonucleotide
  misc_feature 1..20: note = Target: SCN10A; (-) strand; PAM type: YTN; PAM sequence: CTC
  source 1..20: mol_type = other DNA
catggcacagttgacactcc

SEQ ID NO: 52592 - DNA, 20 bp, synthetic construct
  misc_feature 1..20: note = Description of Artificial Sequence: Synthetic oligonucleotide
  misc_feature 1..20: note = Target: SCN10A; (-) strand; PAM type: YTN; PAM sequence: CTG
  source 1..20: mol_type = other DNA
agtacactccatggcacagt

SEQ ID NO: 52593 - DNA, 20 bp, synthetic construct
  misc_feature 1..20: note = Description of Artificial Sequence: Synthetic oligonucleotide
  misc_feature 1..20: note = Target: SCN10A; (-) strand; PAM type: YTN; PAM sequence: CTG
  source 1..20: mol_type = other DNA
gaagaaggaaccccctgagt

SEQ ID NO: 52594 - DNA, 20 bp, synthetic construct
  misc_feature 1..20: note = Description of Artificial Sequence: Synthetic oligonucleotide
  misc_feature 1..20: note = Target: SCN10A; (-) strand; PAM type: YTN; PAM sequence: CTC
  source 1..20: mol_type = other DNA
ctggaagaaggaaccccctg

SEQ ID NO: 52595 - DNA, 20 bp, synthetic construct
  misc_feature 1..20: note = Description of Artificial Sequence: Synthetic oligonucleotide
  misc_feature 1..20: note = Target: SCN10A; (-) strand; PAM type: YTN; PAM sequence: CTC
  source 1..20: mol_type = other DNA
cctcctggaagaaggaaccc

SEQ ID NO: 52596 - DNA, 20 bp, synthetic construct
  misc_feature 1..20: note = Description of Artificial Sequence: Synthetic oligonucleotide
  misc_feature 1..20: note = Target: SCN10A; (-) strand; PAM type: YTN; PAM sequence: TTG
  source 1..20: mol_type = other DNA
gagcagtcagagcaggtcat

SEQ ID NO: 52597 - DNA, 20 bp, synthetic construct
  misc_feature 1..20: note = Description of Artificial Sequence: Synthetic oligonucleotide
  misc_feature 1..20: note = Target: SCN10A; (-) strand; PAM type: YTN; PAM sequence: CTT
  source 1..20: mol_type = other DNA
ggagcagtcagagcaggtca

SEQ ID NO: 52598 - DNA, 20 bp, synthetic construct
  misc_feature 1..20: note = Description of Artificial Sequence: Synthetic oligonucleotide
  misc_feature 1..20: note = Target: SCN10A; (-) strand; PAM type: YTN; PAM sequence: TTC
  source 1..20: mol_type = other DNA
ttggagcagtcagagcaggt

SEQ ID NO: 52599 - DNA, 20 bp, synthetic construct
  misc_feature 1..20: note = Description of Artificial Sequence: Synthetic oligonucleotide
  misc_feature 1..20: note = Target: SCN10A; (-) strand; PAM type: YTN; PAM sequence: TTT
  source 1..20: mol_type = other DNA
cttggagcagtcagagcagg

SEQ ID NO: 52600 - DNA, 20 bp, synthetic construct
  misc_feature 1..20: note = Description of Artificial Sequence: Synthetic oligonucleotide
  misc_feature 1..20: note = Target: SCN10A; (-) strand; PAM type: YTN; PAM sequence: TTT
  source 1..20: mol_type = other DNA
tcttggagcagtcagagcag

SEQ ID NO: 52601 - DNA, 20 bp, synthetic construct
  misc_feature 1..20: note = Description of Artificial Sequence: Synthetic oligonucleotide
  misc_feature 1..20: note = Target: SCN10A; (-) strand; PAM type: YTN; PAM sequence: TTT
  source 1..20: mol_type = other DNA
ttcttggagcagtcagagca

SEQ ID NO: 52602 - DNA, 20 bp, synthetic construct
  misc_feature 1..20: note = Description of Artificial Sequence: Synthetic oligonucleotide
  misc_feature 1..20: note = Target: SCN10A; (-) strand; PAM type: YTN; PAM sequence: TTT
  source 1..20: mol_type = other DNA
tttcttggagcagtcagagc

SEQ ID NO: 52603 - DNA, 20 bp, synthetic construct
  misc_feature 1..20: note = Description of Artificial Sequence: Synthetic oligonucleotide
  misc_feature 1..20: note = Target: SCN10A; (-) strand; PAM type: YTN; PAM sequence: TTG
  source 1..20: mol_type = other DNA
catgttttttcttggagcag

SEQ ID NO: 52604 - DNA, 20 bp, synthetic construct
  misc_feature 1..20: note = Description of Artificial Sequence: Synthetic oligonucleotide
  misc_feature 1..20: note = Target: SCN10A; (-) strand; PAM type: YTN; PAM sequence: TTT
  source 1..20: mol_type = other DNA
gcatgttttttcttggagca

SEQ ID NO: 52605 - DNA, 20 bp, synthetic construct
  misc_feature 1..20: note = Description of Artificial Sequence: Synthetic oligonucleotide
  misc_feature 1..20: note = Target: SCN10A; (-) strand; PAM type: YTN; PAM sequence: CTT
  source 1..20: mol_type = other DNA
tgcatgttttttcttggagc

SEQ ID NO: 52606 - DNA, 20 bp, synthetic construct
  misc_feature 1..20: note = Description of Artificial Sequence: Synthetic oligonucleotide
  misc_feature 1..20: note = Target: SCN10A; (-) strand; PAM type: YTN; PAM sequence: TTC
  source 1..20: mol_type = other DNA
tttgcatgttttttcttgga

SEQ ID NO: 52607 - DNA, 20 bp, synthetic construct
  misc_feature 1..20: note = Description of Artificial Sequence: Synthetic oligonucleotide
  misc_feature 1..20: note = Target: SCN10A; (-) strand; PAM type: YTN; PAM sequence: TTG
  source 1..20: mol_type = other DNA
gtgatattctttgcatgttt

SEQ ID NO: 52608 - DNA, 20 bp, synthetic construct
  misc_feature 1..20: note = Description of Artificial Sequence: Synthetic oligonucleotide
  misc_feature 1..20: note = Target: SCN10A; (-) strand; PAM type: YTN; PAM sequence: CTT
  source 1..20: mol_type = other DNA
ggtgatattctttgcatgtt

SEQ ID NO: 52609 - DNA, 20 bp, synthetic construct
  misc_feature 1..20: note = Description of Artificial Sequence: Synthetic oligonucleotide
  misc_feature 1..20: note = Target: SCN10A; (-) strand; PAM type: YTN; PAM sequence: CTC
  source 1..20: mol_type = other DNA
atcaccttggtgatattctt

SEQ ID NO: 52610 - DNA, 20 bp, synthetic construct
  misc_feature 1..20: note = Description of Artificial Sequence: Synthetic oligonucleotide
  misc_feature 1..20: note = Target: SCN10A; (-) strand; PAM type: YTN; PAM sequence: TTC
  source 1..20: mol_type = other DNA
cccctcatcaccttggtgat

SEQ ID NO: 52611 - DNA, 20 bp, synthetic construct
  misc_feature 1..20: note = Description of Artificial Sequence: Synthetic oligonucleotide
  misc_feature 1..20: note = Target: SCN10A; (-) strand; PAM type: YTN; PAM sequence: CTT
  source 1..20: mol_type = other DNA
ccccctcatcaccttggtga

SEQ ID NO: 52612 - DNA, 20 bp, synthetic construct
  misc_feature 1..20: note = Description of Artificial Sequence: Synthetic oligonucleotide
  misc_feature 1..20: note = Target: SCN10A; (-) strand; PAM type: YTN; PAM sequence: TTC
  source 1..20: mol_type = other DNA
ttccccctcatcaccttggt

SEQ ID NO: 52613 - DNA, 20 bp, synthetic construct
  misc_feature 1..20: note = Description of Artificial Sequence: Synthetic oligonucleotide
  misc_feature 1..20: note = Target: SCN10A; (-) strand; PAM type: YTN; PAM sequence: CTT
  source 1..20: mol_type = other DNA
cttccccctcatcaccttgg

SEQ ID NO: 52614 - DNA, 20 bp, synthetic construct
  misc_feature 1..20: note = Description of Artificial Sequence: Synthetic oligonucleotide
  misc_feature 1..20: note = Target: SCN10A; (-) strand; PAM type: YTN; PAM sequence: TTA
  source 1..20: mol_type = other DNA
ccttcttccccctcatcacc

SEQ ID NO: 52615 - DNA, 20 bp, synthetic construct
  misc_feature 1..20: note = Description of Artificial Sequence: Synthetic oligonucleotide
  misc_feature 1..20: note = Target: SCN10A; (-) strand; PAM type: YTN; PAM sequence: CTT
  source 1..20: mol_type = other DNA
accttcttccccctcatcac

SEQ ID NO: 52616 - DNA, 20 bp, synthetic construct
  misc_feature 1..20: note = Description of Artificial Sequence: Synthetic oligonucleotide
  misc_feature 1..20: note = Target: SCN10A; (-) strand; PAM type: YTN; PAM sequence: CTC
  source 1..20: mol_type = other DNA
cttaccttcttccccctcat

SEQ ID NO: 52617 - DNA, 20 bp, synthetic construct
  misc_feature 1..20: note = Description of Artificial Sequence: Synthetic oligonucleotide
  misc_feature 1..20: note = Target: SCN10A; (-) strand; PAM type: YTN; PAM sequence: CTC
  source 1..20: mol_type = other DNA
tccttaccttcttccccctc

SEQ ID NO: 52618 - DNA, 20 bp, synthetic construct
  misc_feature 1..20: note = Description of Artificial Sequence: Synthetic oligonucleotide
  misc_feature 1..20: note = Target: SCN10A; (-) strand; PAM type: YTN; PAM sequence: TTC
  source 1..20: mol_type = other DNA
ctctccttaccttcttcccc

SEQ ID NO: 52619 - DNA, 20 bp, synthetic construct
  misc_feature 1..20: note = Description of Artificial Sequence: Synthetic oligonucleotide
  misc_feature 1..20: note = Target: SCN10A; (-) strand; PAM type: YTN; PAM sequence: TTT
  source 1..20: mol_type = other DNA
cctctccttaccttcttccc

SEQ ID NO: 52620 - DNA, 20 bp, synthetic construct
  misc_feature 1..20: note = Description of Artificial Sequence: Synthetic oligonucleotide
  misc_feature 1..20: note = Target: SCN10A; (-) strand; PAM type: YTN; PAM sequence: TTG
  source 1..20: mol_type = other DNA
tttcctctccttaccttctt

SEQ ID NO: 52621 - DNA, 20 bp, synthetic construct
  misc_feature 1..20: note = Description of Artificial Sequence: Synthetic oligonucleotide
  misc_feature 1..20: note = Target: SCN10A; (-) strand; PAM type: YTN; PAM sequence: CTT
  source 1..20: mol_type = other DNA
gtttcctctccttaccttct

SEQ ID NO: 52622 - DNA, 20 bp, synthetic construct
  misc_feature 1..20: note = Description of Artificial Sequence: Synthetic oligonucleotide
  misc_feature 1..20: note = Target: SCN10A; (-) strand; PAM type: YTN; PAM sequence: CTG
  source 1..20: mol_type = other DNA
tgtcttgtttcctctcctta

SEQ ID NO: 52623 - DNA, 20 bp, synthetic construct
  misc_feature 1..20: note = Description of Artificial Sequence: Synthetic oligonucleotide
  misc_feature 1..20: note = Target: SCN10A; (-) strand; PAM type: YTN; PAM sequence: CTC
  source 1..20: mol_type = other DNA
agtctgtgtcttgtttcctc

SEQ ID NO: 52624 - DNA, 20 bp, synthetic construct
  misc_feature 1..20: note = Description of Artificial Sequence: Synthetic oligonucleotide
  misc_feature 1..20: note = Target: SCN10A; (-) strand; PAM type: YTN; PAM sequence: TTC
  source 1..20: mol_type = other DNA
cctcagtctgtgtcttgttt

SEQ ID NO: 52625 - DNA, 20 bp, synthetic construct
  misc_feature 1..20: note = Description of Artificial Sequence: Synthetic oligonucleotide
  misc_feature 1..20: note = Target: SCN10A; (-) strand; PAM type: YTN; PAM sequence: TTT
  source 1..20: mol_type = other DNA
ccctcagtctgtgtcttgtt

SEQ ID NO: 52626 - DNA, 20 bp, synthetic construct
  misc_feature 1..20: note = Description of Artificial Sequence: Synthetic oligonucleotide
  misc_feature 1..20: note = Target: SCN10A; (-) strand; PAM type: YTN; PAM sequence: TTT
  source 1..20: mol_type = other DNA
tccctcagtctgtgtcttgt

SEQ ID NO: 52627 - DNA, 20 bp, synthetic construct
  misc_feature 1..20: note = Description of Artificial Sequence: Synthetic oligonucleotide
  misc_feature 1..20: note = Target: SCN10A; (-) strand; PAM type: YTN; PAM sequence: TTT
  source 1..20: mol_type = other DNA
ttccctcagtctgtgtcttg

SEQ ID NO: 52628 - DNA, 20 bp, synthetic construct
  misc_feature 1..20: note = Description of Artificial Sequence: Synthetic oligonucleotide
  misc_feature 1..20: note = Target: SCN10A; (-) strand; PAM type: YTN; PAM sequence: CTT
  source 1..20: mol_type = other DNA
tttccctcagtctgtgtctt

SEQ ID NO: 52629 - DNA, 20 bp, synthetic construct
  misc_feature 1..20: note = Description of Artificial Sequence: Synthetic oligonucleotide
  misc_feature 1..20: note = Target: SCN10A; (-) strand; PAM type: YTN; PAM sequence: TTC
  source 1..20: mol_type = other DNA
tttttccctcagtctgtgtc

SEQ ID NO: 52630 - DNA, 20 bp, synthetic construct
  misc_feature 1..20: note = Description of Artificial Sequence: Synthetic oligonucleotide
  misc_feature 1..20: note = Target: SCN10A; (-) strand; PAM type: YTN; PAM sequence: CTT
  source 1..20: mol_type = other DNA
ctttttccctcagtctgtgt

SEQ ID NO: 52631 - DNA, 20 bp, synthetic construct
  misc_feature 1..20: note = Description of Artificial Sequence: Synthetic oligonucleotide
  misc_feature 1..20: note = Target: SCN10A; (-) strand; PAM type: YTN; PAM sequence: TTG
  source 1..20: mol_type = other DNA
tgtggcccttctttttccct

SEQ ID NO: 52632 - DNA, 20 bp, synthetic construct
  misc_feature 1..20: note = Description of Artificial Sequence: Synthetic oligonucleotide
  misc_feature 1..20: note = Target: SCN10A; (-) strand; PAM type: YTN; PAM sequence: TTT
  source 1..20: mol_type = other DNA
gtgtggcccttctttttccc

SEQ ID NO: 52633 - DNA, 20 bp, synthetic construct
  misc_feature 1..20: note = Description of Artificial Sequence: Synthetic oligonucleotide
  misc_feature 1..20: note = Target: SCN10A; (-) strand; PAM type: YTN; PAM sequence: CTA
  source 1..20: mol_type = other DNA
tttgtgtggcccttcttttt

SEQ ID NO: 52634 - DNA, 20 bp, synthetic construct
  misc_feature 1..20: note = Description of Artificial Sequence: Synthetic oligonucleotide
  misc_feature 1..20: note = Target: SCN10A; (-) strand; PAM type: YTN; PAM sequence: CTC
  source 1..20: mol_type = other DNA
catctatttgtgtggccctt

SEQ ID NO: 52635 - DNA, 20 bp, synthetic construct
  misc_feature 1..20: note = Description of Artificial Sequence: Synthetic oligonucleotide
  misc_feature 1..20: note = Target: SCN10A; (-) strand; PAM type: YTN; PAM sequence: CTC
  source 1..20: mol_type = other DNA
cccactccatctatttgtgt

SEQ ID NO: 52636 - DNA, 20 bp, synthetic construct
  misc_feature 1..20: note = Description of Artificial Sequence: Synthetic oligonucleotide
  misc_feature 1..20: note = Target: SCN10A; (-) strand; PAM type: YTN; PAM sequence: CTG
  source 1..20: mol_type = other DNA
tcccagccacacacatccct

SEQ ID NO: 52637 - DNA, 20 bp, synthetic construct
  misc_feature 1..20: note = Description of Artificial Sequence: Synthetic oligonucleotide
  misc_feature 1..20: note = Target: SCN10A; (-) strand; PAM type: YTN; PAM sequence: CTG
  source 1..20: mol_type = other DNA
gctgtcccagccacacacat

SEQ ID NO: 52638 - DNA, 20 bp, synthetic construct
  misc_feature 1..20: note = Description of Artificial Sequence: Synthetic oligonucleotide
  misc_feature 1..20: note = Target: SCN10A; (-) strand; PAM type: YTN; PAM sequence: CTG
  source 1..20: mol_type = other DNA
ctggctgtcccagccacaca

SEQ ID NO: 52639 - DNA, 20 bp, synthetic construct
  misc_feature 1..20: note = Description of Artificial Sequence: Synthetic oligonucleotide
  misc_feature 1..20: note = Target: SCN10A; (-) strand; PAM type: YTN; PAM sequence: CTA
  source 1..20: mol_type = other DNA
accccagaacagcagaagct

SEQ ID NO: 52640 - DNA, 20 bp, synthetic construct
  misc_feature 1..20: note = Description of Artificial Sequence: Synthetic oligonucleotide
  misc_feature 1..20: note = Target: SCN10A; (-) strand; PAM type: YTN; PAM sequence: CTG
  source 1..20: mol_type = other DNA
cctaaccccagaacagcaga

SEQ ID NO: 52641 - DNA, 20 bp, synthetic construct
  misc_feature 1..20: note = Description of Artificial Sequence: Synthetic oligonucleotide
  misc_feature 1..20: note = Target: SCN10A; (-) strand; PAM type: YTN; PAM sequence: CTC
  source 1..20: mol_type = other DNA
tgcctaaccccagaacagca

SEQ ID NO: 52642 - DNA, 20 bp, synthetic construct
  misc_feature 1..20: note = Description of Artificial Sequence: Synthetic oligonucleotide
  misc_feature 1..20: note = Target: SCN10A; (-) strand; PAM type: YTN; PAM sequence: CTG
  source 1..20: mol_type = other DNA
ccctctgcctaaccccagaa

SEQ ID NO: 52643 - DNA, 20 bp, synthetic construct
  misc_feature 1..20: note = Description of Artificial Sequence: Synthetic oligonucleotide
  misc_feature 1..20: note = Target: SCN10A; (-) strand; PAM type: YTN; PAM sequence: CTA
  source 1..20: mol_type = other DNA
ctgccctctgcctaacccca

SEQ ID NO: 52644 - DNA, 20 bp, synthetic construct
  misc_feature 1..20: note = Description of Artificial Sequence: Synthetic oligonucleotide
  misc_feature 1..20: note = Target: SCN10A; (-) strand; PAM type: YTN; PAM sequence: TTC
  source 1..20: mol_type = other DNA
acccgctactgccctctgcc

SEQ ID NO: 52645 - DNA, 20 bp, synthetic construct
  misc_feature 1..20: note = Description of Artificial Sequence: Synthetic oligonucleotide
  misc_feature 1..20: note = Target: SCN10A; (-) strand; PAM type: YTN; PAM sequence: CTT
  source 1..20: mol_type = other DNA
cacccgctactgccctctgc

SEQ ID NO: 52646 - DNA, 20 bp, synthetic construct
  misc_feature 1..20: note = Description of Artificial Sequence: Synthetic oligonucleotide
  misc_feature 1..20: note = Target: SCN10A; (-) strand; PAM type: YTN; PAM sequence: CTC
  source 1..20: mol_type = other DNA
ttcacccgctactgccctct

SEQ ID NO: 52647 - DNA, 20 bp, synthetic construct
  misc_feature 1..20: note = Description of Artificial Sequence: Synthetic oligonucleotide
  misc_feature 1..20: note = Target: SCN10A; (-) strand; PAM type: YTN; PAM sequence: TTG
  source 1..20: mol_type = other DNA
ctcttcacccgctactgccc

SEQ ID NO: 52648 - DNA, 20 bp, synthetic construct
  misc_feature 1..20: note = Description of Artificial Sequence: Synthetic oligonucleotide
  misc_feature 1..20: note = Target: SCN10A; (-) strand; PAM type: YTN; PAM sequence: CTT
  source 1..20: mol_type = other DNA
gctcttcacccgctactgcc

SEQ ID NO: 52649 - DNA, 20 bp, synthetic construct
  misc_feature 1..20: note = Description of Artificial Sequence: Synthetic oligonucleotide
  misc_feature 1..20: note = Target: SCN10A; (-) strand; PAM type: YTN; PAM sequence: CTG
  source 1..20: mol_type = other DNA
gcagacataaacaggagaat

SEQ ID NO: 52650 - DNA, 20 bp, synthetic construct
  misc_feature 1..20: note = Description of Artificial Sequence: Synthetic oligonucleotide
  misc_feature 1..20: note = Target: SCN10A; (-) strand; PAM type: YTN; PAM sequence: TTG
  source 1..20: mol_type = other DNA
caggatagggaggccctggc

SEQ ID NO: 52651 - DNA, 20 bp, synthetic construct
  misc_feature 1..20: note = Description of Artificial Sequence: Synthetic oligonucleotide
  misc_feature 1..20: note = Target: SCN10A; (-) strand; PAM type: YTN; PAM sequence: CTT
  source 1..20: mol_type = other DNA
gcaggatagggaggccctgg

SEQ ID NO: 52652 - DNA, 20 bp, synthetic construct
  misc_feature 1..20: note = Description of Artificial Sequence: Synthetic oligonucleotide
  misc_feature 1..20: note = Target: SCN10A; (-) strand; PAM type: YTN; PAM sequence: TTC
  source 1..20: mol_type = other DNA
ttgcaggatagggaggccct

SEQ ID NO: 52653 - DNA, 20 bp, synthetic construct
  misc_feature 1..20: note = Description of Artificial Sequence: Synthetic oligonucleotide
  misc_feature 1..20: note = Target: SCN10A; (-) strand; PAM type: YTN; PAM sequence: CTT
  source 1..20: mol_type = other DNA
cttgcaggatagggaggccc

SEQ ID NO: 52654 - DNA, 20 bp, synthetic construct
  misc_feature 1..20: note = Description of Artificial Sequence: Synthetic oligonucleotide
  misc_feature 1..20: note = Target: SCN10A; (-) strand; PAM type: YTN; PAM sequence: CTC
  source 1..20: mol_type = other DNA
cagcttcttgcaggataggg

SEQ ID NO: 52655 - DNA, 20 bp, synthetic construct
  misc_feature 1..20: note = Description of Artificial Sequence: Synthetic oligonucleotide
  misc_feature 1..20: note = Target: SCN10A; (-) strand; PAM type: YTN; PAM sequence: TTA
  source 1..20: mol_type = other DNA
gatgagcctccagcttcttg

SEQ ID NO: 52656 - DNA, 20 bp, synthetic construct
  misc_feature 1..20: note = Description of Artificial Sequence: Synthetic oligonucleotide
  misc_feature 1..20: note = Target: SCN10A; (-) strand; PAM type: YTN; PAM sequence: TTT
  source 1..20: mol_type = other DNA
agatgagcctccagcttctt

SEQ ID NO: 52657 - DNA, 20 bp, synthetic construct
  misc_feature 1..20: note = Description of Artificial Sequence: Synthetic oligonucleotide
  misc_feature 1..20: note = Target: SCN10A; (-) strand; PAM type: YTN; PAM sequence: TTT
  source 1..20: mol_type = other DNA
tagatgagcctccagcttct

SEQ ID NO: 52658 - DNA, 20 bp, synthetic construct
  misc_feature 1..20: note = Description of Artificial Sequence: Synthetic oligonucleotide
  misc_feature 1..20: note = Target: SCN10A; (-) strand; PAM type: YTN; PAM sequence: TTT
  source 1..20: mol_type = other DNA
ttagatgagcctccagcttc

SEQ ID NO: 52659 - DNA, 20 bp, synthetic construct
  misc_feature 1..20: note = Description of Artificial Sequence: Synthetic oligonucleotide
  misc_feature 1..20: note = Target: SCN10A; (-) strand; PAM type: YTN; PAM sequence: CTG
  source 1..20: mol_type = other DNA
ggagtttttagatgagcctc

SEQ ID NO: 52660 - DNA, 20 bp, synthetic construct
  misc_feature 1..20: note = Description of Artificial Sequence: Synthetic oligonucleotide
  misc_feature 1..20: note = Target: SCN10A; (-) strand; PAM type: YTN; PAM sequence: CTA
  source 1..20: mol_type = other DNA
aaaactgggagtttttagat

SEQ ID NO: 52661 - DNA, 20 bp, synthetic construct
  misc_feature 1..20: note = Description of Artificial Sequence: Synthetic oligonucleotide
  misc_feature 1..20: note = Target: SCN10A; (-) strand; PAM type: YTN; PAM sequence: TTC
  source 1..20: mol_type = other DNA
taaaaactgggagtttttag

SEQ ID NO: 52662 - DNA, 20 bp, synthetic construct
  misc_feature 1..20: note = Description of Artificial Sequence: Synthetic oligonucleotide
  misc_feature 1..20: note = Target: SCN10A; (-) strand; PAM type: YTN; PAM sequence: TTT
  source 1..20: mol_type = other DNA
ctaaaaactgggagttttta

SEQ ID NO: 52663 - DNA, 20 bp, synthetic construct
  misc_feature 1..20: note = Description of Artificial Sequence: Synthetic oligonucleotide
  misc_feature 1..20: note = Target: SCN10A; (-) strand; PAM type: YTN; PAM sequence: CTC
  source 1..20: mol_type = other DNA
cagtttctaaaaactgggag

SEQ ID NO: 52664 - DNA, 20 bp, synthetic construct
  misc_feature 1..20: note = Description of Artificial Sequence: Synthetic oligonucleotide
  misc_feature 1..20: note = Target: SCN10A; (-) strand; PAM type: YTN; PAM sequence: CTG
  source 1..20: mol_type = other DNA
cactccagtttctaaaaact

SEQ ID NO: 52665 - DNA, 20 bp, synthetic construct
  misc_feature 1..20: note = Description of Artificial Sequence: Synthetic oligonucleotide
  misc_feature 1..20: note = Target: SCN10A; (-) strand; PAM type: YTN; PAM sequence: CTC
  source 1..20: mol_type = other DNA
atcagtctgcactccagttt

SEQ ID NO: 52666 - DNA, 20 bp, synthetic construct
  misc_feature 1..20: note = Description of Artificial Sequence: Synthetic oligonucleotide
  misc_feature 1..20: note = Target: SCN10A; (-) strand; PAM type: YTN; PAM sequence: TTA
  source 1..20: mol_type = other DNA
ccactcatcagtctgcactc

SEQ ID NO: 52667 - DNA, 20 bp, synthetic construct
  misc_feature 1..20: note = Description of Artificial Sequence: Synthetic oligonucleotide
  misc_feature 1..20: note = Target: SCN10A; (-) strand; PAM type: YTN; PAM sequence: CTG
  source 1..20: mol_type = other DNA
tcagttaccactcatcagtc

SEQ ID NO: 52668 - DNA, 20 bp, synthetic construct
  misc_feature 1..20: note = Description of Artificial Sequence: Synthetic oligonucleotide
  misc_feature 1..20: note = Target: SCN10A; (-) strand; PAM type: YTN; PAM sequence: CTC
  source 1..20: mol_type = other DNA
tgtcagttaccactcatcag

SEQ ID NO: 52669 - DNA, 20 bp, synthetic construct
  misc_feature 1..20: note = Description of Artificial Sequence: Synthetic oligonucleotide
  misc_feature 1..20: note = Target: SCN10A; (-) strand; PAM type: YTN; PAM sequence: CTG
  source 1..20: mol_type = other DNA
ctctgtcagttaccactcat

SEQ ID NO: 52670 - DNA, 20 bp, synthetic construct
  misc_feature 1..20: note = Description of Artificial Sequence: Synthetic oligonucleotide
  misc_feature 1..20: note = Target: SCN10A; (-) strand; PAM type: YTN; PAM sequence: TTA
  source 1..20: mol_type = other DNA
ggtctgctctgtcagttacc

SEQ ID NO: 52671 - DNA, 20 bp, synthetic construct
  misc_feature 1..20: note = Description of Artificial Sequence: Synthetic oligonucleotide
  misc_feature 1..20: note = Target: SCN10A; (-) strand; PAM type: YTN; PAM sequence: CTT
  source 1..20: mol_type = other DNA
aggtctgctctgtcagttac

SEQ ID NO: 52672 - DNA, 20 bp, synthetic construct
  misc_feature 1..20: note = Description of Artificial Sequence: Synthetic oligonucleotide
  misc_feature 1..20: note = Target: SCN10A; (-) strand; PAM type: YTN; PAM sequence: TTC
  source 1..20: mol_type = other DNA
ttaggtctgctctgtcagtt

SEQ ID NO: 52673 - DNA, 20 bp, synthetic construct
  misc_feature 1..20: note = Description of Artificial Sequence: Synthetic oligonucleotide
  misc_feature 1..20: note = Target: SCN10A; (-) strand; PAM type: YTN; PAM sequence: TTT
  source 1..20: mol_type = other DNA
cttaggtctgctctgtcagt

SEQ ID NO: 52674 - DNA, 20 bp, synthetic construct
  misc_feature 1..20: note = Description of Artificial Sequence: Synthetic oligonucleotide
  misc_feature 1..20: note = Target: SCN10A; (-) strand; PAM type: YTN; PAM sequence: CTT
  source 1..20: mol_type = other DNA
tcttaggtctgctctgtcag

SEQ ID NO: 52675 - DNA, 20 bp, synthetic construct
  misc_feature 1..20: note = Description of Artificial Sequence: Synthetic oligonucleotide
  misc_feature 1..20: note = Target: SCN10A; (-) strand; PAM type: YTN; PAM sequence: TTC
  source 1..20: mol_type = other DNA
agctttcttaggtctgctct

SEQ ID NO: 52676 - DNA, 20 bp, synthetic construct
  misc_feature 1..20: note = Description of Artificial Sequence: Synthetic oligonucleotide
  misc_feature 1..20: note = Target: SCN10A; (-) strand; PAM type: YTN; PAM sequence: TTT
  source 1..20: mol_type = other DNA
cagctttcttaggtctgctc

SEQ ID NO: 52677 - DNA, 20 bp, synthetic construct
  misc_feature 1..20: note = Description of Artificial Sequence: Synthetic oligonucleotide
  misc_feature 1..20: note = Target: SCN10A; (-) strand; PAM type: YTN; PAM sequence: TTT
  source 1..20: mol_type = other DNA
tcagctttcttaggtctgct

SEQ ID NO: 52678 - DNA, 20 bp, synthetic construct
  misc_feature 1..20: note = Description of Artificial Sequence: Synthetic oligonucleotide
  misc_feature 1..20: note = Target: SCN10A; (-) strand; PAM type: YTN; PAM sequence: TTC
  source 1..20: mol_type = other DNA
agccagttttcagctttctt

SEQ ID NO: 52679 - DNA, 20 bp, synthetic construct
  misc_feature 1..20: note = Description of Artificial Sequence: Synthetic oligonucleotide
  misc_feature 1..20: note = Target: SCN10A; (-) strand; PAM type: YTN; PAM sequence: CTT
  source 1..20: mol_type = other DNA
cagccagttttcagctttct

SEQ ID NO: 52680 - DNA, 20 bp, synthetic construct
  misc_feature 1..20: note = Description of Artificial Sequence: Synthetic oligonucleotide
  misc_feature 1..20: note = Target: SCN10A; (-) strand; PAM type: YTN; PAM sequence: CTG
  source 1..20: mol_type = other DNA
cttcagccagttttcagctt

SEQ ID NO: 52681 - DNA, 20 bp, synthetic construct
  misc_feature 1..20: note = Description of Artificial Sequence: Synthetic oligonucleotide
  misc_feature 1..20: note = Target: SCN10A; (-) strand; PAM type: YTN; PAM sequence: TTC
  source 1..20: mol_type = other DNA
cctgcttcagccagttttca

SEQ ID NO: 52682 - DNA, 20 bp, synthetic construct
  misc_feature 1..20: note = Description of Artificial Sequence: Synthetic oligonucleotide
  misc_feature 1..20: note = Target: SCN10A; (-) strand; PAM type: YTN; PAM sequence: CTG
  source 1..20: mol_type = other DNA
ggtattccctgcttcagcca

SEQ ID NO: 52683 - DNA, 20 bp, synthetic construct
  misc_feature 1..20: note = Description of Artificial Sequence: Synthetic oligonucleotide
  misc_feature 1..20: note = Target: SCN10A; (-) strand; PAM type: YTN; PAM sequence: TTC
  source 1..20: mol_type = other DNA
tgggtattccctgcttcagc

SEQ ID NO: 52684 - DNA, 20 bp, synthetic construct
  misc_feature 1..20: note = Description of Artificial Sequence: Synthetic oligonucleotide
  misc_feature 1..20: note = Target: SCN10A; (-) strand; PAM type: YTN; PAM sequence: CTT
  source 1..20: mol_type = other DNA
ctgggtattccctgcttcag

SEQ ID NO: 52685 - DNA, 20 bp, synthetic construct
  misc_feature 1..20: note = Description of Artificial Sequence: Synthetic oligonucleotide
  misc_feature 1..20: note = Target: SCN10A; (-) strand; PAM type: YTN; PAM sequence: TTG
  source 1..20: mol_type = other DNA
cttctgggtattccctgctt

SEQ ID NO: 52686 - DNA, 20 bp, synthetic construct
  misc_feature 1..20: note = Description of Artificial Sequence: Synthetic oligonucleotide
  misc_feature 1..20: note = Target: SCN10A; (-) strand; PAM type: YTN; PAM sequence: CTT
  source 1..20: mol_type = other DNA
gcttctgggtattccctgct

SEQ ID NO: 52687 - DNA, 20 bp, synthetic construct
  misc_feature 1..20: note = Description of Artificial Sequence: Synthetic oligonucleotide
  misc_feature 1..20: note = Target: SCN10A; (-) strand; PAM type: YTN; PAM sequence: TTG
  source 1..20: mol_type = other DNA
gcttgcttctgggtattccc

SEQ ID NO: 52688 - DNA, 20 bp, synthetic construct
  misc_feature 1..20: note = Description of Artificial Sequence: Synthetic oligonucleotide
  misc_feature 1..20: note = Target: SCN10A; (-) strand; PAM type: YTN; PAM sequence: CTT
  source 1..20: mol_type = other DNA
ggcttgcttctgggtattcc

SEQ ID NO: 52689 - DNA, 20 bp, synthetic construct
  misc_feature 1..20: note = Description of Artificial Sequence: Synthetic oligonucleotide
  misc_feature 1..20: note = Target: SCN10A; (-) strand; PAM type: YTN; PAM sequence: CTG
  source 1..20: mol_type = other DNA
cagcatagcttggcttgctt

SEQ ID NO: 52690 - DNA, 20 bp, synthetic construct
  misc_feature 1..20: note = Description of Artificial Sequence: Synthetic oligonucleotide
  misc_feature 1..20: note = Target: SCN10A; (-) strand; PAM type: YTN; PAM sequence: CTC
  source 1..20: mol_type = other DNA
tgcagcatagcttggcttgc

SEQ ID NO: 52691 - DNA, 20 bp, synthetic construct
  misc_feature 1..20: note = Description of Artificial Sequence: Synthetic oligonucleotide
  misc_feature 1..20: note = Target: SCN10A; (-) strand; PAM type: YTN; PAM sequence: CTG
  source 1..20: mol_type = other DNA
gggctctgcagcatagcttg

SEQ ID NO: 52692 - DNA, 20 bp, synthetic construct
  misc_feature 1..20: note = Description of Artificial Sequence: Synthetic oligonucleotide
  misc_feature 1..20: note = Target: SCN10A; (-) strand; PAM type: YTN; PAM sequence: TTC
  source 1..20: mol_type = other DNA
tggggctctgcagcatagct

SEQ ID NO: 52693 - DNA, 20 bp, synthetic construct
  misc_feature 1..20: note = Description of Artificial Sequence: Synthetic oligonucleotide
  misc_feature 1..20: note = Target: SCN10A; (-) strand; PAM type: YTN; PAM sequence: TTC
  source 1..20: mol_type = other DNA
caagcagttctggggctctg

SEQ ID NO: 52694 - DNA, 20 bp, synthetic construct
  misc_feature 1..20: note = Description of Artificial Sequence: Synthetic oligonucleotide
  misc_feature 1..20: note = Target: SCN10A; (-) strand; PAM type: YTN; PAM sequence: CTA
  source 1..20: mol_type = other DNA
agttccaagcagttctgggg

SEQ ID NO: 52695 - DNA, 20 bp, synthetic construct
  misc_feature 1..20: note = Description of Artificial Sequence: Synthetic oligonucleotide
  misc_feature 1..20: note = Target: SCN10A; (-) strand; PAM type: YTN; PAM sequence: CTC
  source 1..20: mol_type = other DNA
taagttccaagcagttctgg

SEQ ID NO: 52696 - DNA, 20 bp, synthetic construct
  misc_feature 1..20: note = Description of Artificial Sequence: Synthetic oligonucleotide
  misc_feature 1..20: note = Target: SCN10A; (-) strand; PAM type: YTN; PAM sequence: TTA
  source 1..20: mol_type = other DNA
gcatctctaagttccaagca

SEQ ID NO: 52697 - DNA, 20 bp, synthetic construct
  misc_feature 1..20: note = Description of Artificial Sequence: Synthetic oligonucleotide
  misc_feature 1..20: note = Target: SCN10A; (-) strand; PAM type: YTN; PAM sequence: CTT
  source 1..20: mol_type = other DNA
agcatctctaagttccaagc

SEQ ID NO: 52698 - DNA, 20 bp, synthetic construct
  misc_feature 1..20: note = Description of Artificial Sequence: Synthetic oligonucleotide
  misc_feature 1..20: note = Target: SCN10A; (-) strand; PAM type: YTN; PAM sequence: TTC
  source 1..20: mol_type = other DNA
agagatacttagcatctcta

SEQ ID NO: 52699 - DNA, 20 bp, synthetic construct
  misc_feature 1..20: note = Description of Artificial Sequence: Synthetic oligonucleotide
  misc_feature 1..20: note = Target: SCN10A; (-) strand; PAM type: YTN; PAM sequence: TTT
  source 1..20: mol_type = other DNA
cagagatacttagcatctct

SEQ ID NO: 52700 - DNA, 20 bp, synthetic construct
  misc_feature 1..20: note = Description of Artificial Sequence: Synthetic oligonucleotide
  misc_feature 1..20: note = Target: SCN10A; (-) strand; PAM type: YTN; PAM sequence: CTT
  source 1..20: mol_type = other DNA
tcagagatacttagcatctc

SEQ ID NO: 52701 - DNA, 20 bp, synthetic construct
  misc_feature 1..20: note = Description of Artificial Sequence: Synthetic oligonucleotide
  misc_feature 1..20: note = Target: SCN10A; (-) strand; PAM type: YTN; PAM sequence: TTG
  source 1..20: mol_type = other DNA
ctttcagagatacttagcat

SEQ ID NO: 52702 - DNA, 20 bp, synthetic construct
  misc_feature 1..20: note = Description of Artificial Sequence: Synthetic oligonucleotide
  misc_feature 1..20: note = Target: SCN10A; (-) strand; PAM type: YTN; PAM sequence: CTT
  source 1..20: mol_type = other DNA
gctttcagagatacttagca

SEQ ID NO: 52703 - DNA, 20 bp, synthetic construct
  misc_feature 1..20: note = Description of Artificial Sequence: Synthetic oligonucleotide
  misc_feature 1..20: note = Target: SCN10A; (-) strand; PAM type: YTN; PAM sequence: CTC
  source 1..20: mol_type = other DNA
ccccaaaccttgctttcaga

SEQ ID NO: 52704 - DNA, 20 bp, synthetic construct
  misc_feature 1..20: note = Description of Artificial Sequence: Synthetic oligonucleotide
  misc_feature 1..20: note = Target: SCN10A; (-) strand; PAM type: YTN; PAM sequence: TTA
  source 1..20: mol_type = other DNA
tcaccctcccccaaaccttg

SEQ ID NO: 52705 - DNA, 20 bp, synthetic construct
  misc_feature 1..20: note = Description of Artificial Sequence: Synthetic oligonucleotide
  misc_feature 1..20: note = Target: SCN10A; (-) strand; PAM type: YTN; PAM sequence: CTT
  source 1..20: mol_type = other DNA
atcaccctcccccaaacctt

SEQ ID NO: 52706 - DNA, 20 bp, synthetic construct
  misc_feature 1..20: note = Description of Artificial Sequence: Synthetic oligonucleotide
  misc_feature 1..20: note = Target: SCN10A; (-) strand; PAM type: YTN; PAM sequence: CTA
  source 1..20: mol_type = other DNA
cttatcaccctcccccaaac

SEQ ID NO: 52707 - DNA, 20 bp, synthetic construct
  misc_feature 1..20: note = Description of Artificial Sequence: Synthetic oligonucleotide
  misc_feature 1..20: note = Target: SCN10A; (-) strand; PAM type: YTN; PAM sequence: TTC
  source 1..20: mol_type = other DNA
agccctacttatcaccctcc

SEQ ID NO: 52708 - DNA, 20 bp, synthetic construct
  misc_feature 1..20: note = Description of Artificial Sequence: Synthetic oligonucleotide
  misc_feature 1..20: note = Target: SCN10A; (-) strand; PAM type: YTN; PAM sequence: TTT
  source 1..20: mol_type = other DNA
cagccctacttatcaccctc

SEQ ID NO: 52709 - DNA, 20 bp, synthetic construct
  misc_feature 1..20: note = Description of Artificial Sequence: Synthetic oligonucleotide
  misc_feature 1..20: note = Target: SCN10A; (-) strand; PAM type: YTN; PAM sequence: CTT
  source 1..20: mol_type = other DNA
tcagccctacttatcaccct

SEQ ID NO: 52710 - DNA, 20 bp, synthetic construct
  misc_feature 1..20: note = Description of Artificial Sequence: Synthetic oligonucleotide
  misc_feature 1..20: note = Target: SCN10A; (-) strand; PAM type: YTN; PAM sequence: TTC
  source 1..20: mol_type = other DNA
tttcagccctacttatcacc

SEQ ID NO: 52711 - DNA, 20 bp, synthetic construct
  misc_feature 1..20: note = Description of Artificial Sequence: Synthetic oligonucleotide
  misc_feature 1..20: note = Target: SCN10A; (-) strand; PAM type: YTN; PAM sequence: TTC
  source 1..20: mol_type = other DNA
aagcaattctttcagcccta

SEQ ID NO: 52712 - DNA, 20 bp, synthetic construct
  misc_feature 1..20: note = Description of Artificial Sequence: Synthetic oligonucleotide
  misc_feature 1..20: note = Target: SCN10A; (-) strand; PAM type: YTN; PAM sequence: TTT
  source 1..20: mol_type = other DNA
caagcaattctttcagccct

SEQ ID NO: 52713 - DNA, 20 bp, synthetic construct
  misc_feature 1..20: note = Description of Artificial Sequence: Synthetic oligonucleotide
  misc_feature 1..20: note = Target: SCN10A; (-) strand; PAM type: YTN; PAM sequence: CTT
  source 1..20: mol_type = other DNA
tcaagcaattctttcagccc

SEQ ID NO: 52714 - DNA, 20 bp, synthetic construct
  misc_feature 1..20: note = Description of Artificial Sequence: Synthetic oligonucleotide
  misc_feature 1..20: note = Target: SCN10A; (-) strand; PAM type: YTN; PAM sequence: CTG
  source 1..20: mol_type = other DNA
taaaaaactttcaagcaatt

SEQ ID NO: 52715 - DNA, 20 bp, synthetic construct
  misc_feature 1..20: note = Description of Artificial Sequence: Synthetic oligonucleotide
  misc_feature 1..20: note = Target: SCN10A; (-) strand; PAM type: YTN; PAM sequence: TTC
  source 1..20: mol_type = other DNA
ctgtaaaaaactttcaagca

SEQ ID NO: 52716 - DNA, 20 bp, synthetic construct
  misc_feature 1..20: note = Description of Artificial Sequence: Synthetic oligonucleotide
  misc_feature 1..20: note = Target: SCN10A; (-) strand; PAM type: YTN; PAM sequence: CTG
  source 1..20: mol_type = other DNA
gttcctgtaaaaaactttca

SEQ ID NO: 52717 - DNA, 20 bp, synthetic construct
  misc_feature 1..20: note = Description of Artificial Sequence: Synthetic oligonucleotide
  misc_feature 1..20: note = Target: SCN10A; (-) strand; PAM type: YTN; PAM sequence: CTC
  source 1..20: mol_type = other DNA
aactggttcctgtaaaaaac

SEQ ID NO: 52718 - DNA, 20 bp, synthetic construct
  misc_feature 1..20: note = Description of Artificial Sequence: Synthetic oligonucleotide
  misc_feature 1..20: note = Target: SCN10A; (-) strand; PAM type: YTN; PAM sequence: CTA
  source 1..20: mol_type = other DNA
gaaagctcaactggttcctg

SEQ ID NO: 52719 - DNA, 20 bp, synthetic construct
  misc_feature 1..20: note = Description of Artificial Sequence: Synthetic oligonucleotide
  misc_feature 1..20: note = Target: SCN10A; (-) strand; PAM type: YTN; PAM sequence: TTG
  source 1..20: mol_type = other DNA
aatggatggcataaagcagc

SEQ ID NO: 52720 - DNA, 20 bp, synthetic construct
  misc_feature 1..20: note = Description of Artificial Sequence: Synthetic oligonucleotide
  misc_feature 1..20: note = Target: SCN10A; (-) strand; PAM type: YTN; PAM sequence: CTC
  source 1..20: mol_type = other DNA
attgaatggatggcataaag

SEQ ID NO: 52721 - DNA, 20 bp, synthetic construct
  misc_feature 1..20: note = Description of Artificial Sequence: Synthetic oligonucleotide
  misc_feature 1..20: note = Target: SCN10A; (-) strand; PAM type: YTN; PAM sequence: TTC
  source 1..20: mol_type = other DNA
tcattgaatggatggcataa

SEQ ID NO: 52722 - DNA, 20 bp, synthetic construct
  misc_feature 1..20: note = Description of Artificial Sequence: Synthetic oligonucleotide
  misc_feature 1..20: note = Target: SCN10A; (-) strand; PAM type: YTN; PAM sequence: TTT
  source 1..20: mol_type = other DNA
ctcattgaatggatggcata

SEQ ID NO: 52723 - DNA, 20 bp, synthetic construct
  misc_feature 1..20: note = Description of Artificial Sequence: Synthetic oligonucleotide
  misc_feature 1..20: note = Target: SCN10A; (-) strand; PAM type: YTN; PAM sequence: CTG
  source 1..20: mol_type = other DNA
gagcagaaacagtttctcat

SEQ ID NO: 52724 - DNA, 20 bp, synthetic construct
  misc_feature 1..20: note = Description of Artificial Sequence: Synthetic oligonucleotide
  misc_feature 1..20: note = Target: SCN10A; (-) strand; PAM type: YTN; PAM sequence: TTC
  source 1..20: mol_type = other DNA
tggagcagaaacagtttctc

SEQ ID NO: 52725 - DNA, 20 bp, synthetic construct
  misc_feature 1..20: note = Description of Artificial Sequence: Synthetic oligonucleotide
  misc_feature 1..20: note = Target: SCN10A; (-) strand; PAM type: YTN; PAM sequence: TTT
  source 1..20: mol_type = other DNA
ctggagcagaaacagtttct

SEQ ID NO: 52726 - DNA, 20 bp, synthetic construct
  misc_feature 1..20: note = Description of Artificial Sequence: Synthetic oligonucleotide
  misc_feature 1..20: note = Target: SCN10A; (-) strand; PAM type: YTN; PAM sequence: TTA
  source 1..20: mol_type = other DNA
agaaaatgagcatccaatcc

SEQ ID NO: 52727 - DNA, 20 bp, synthetic construct
  misc_feature 1..20: note = Description of Artificial Sequence: Synthetic oligonucleotide
  misc_feature 1..20: note = Target: SCN10A; (-) strand; PAM type: YTN; PAM sequence: CTT
  source 1..20: mol_type = other DNA
aagaaaatgagcatccaatc

SEQ ID NO: 52728 - DNA, 20 bp, synthetic construct
  misc_feature 1..20: note = Description of Artificial Sequence: Synthetic oligonucleotide
  misc_feature 1..20: note = Target: SCN10A; (-) strand; PAM type: YTN; PAM sequence: CTC
  source 1..20: mol_type = other DNA
ttaagaaaatgagcatccaa

SEQ ID NO: 52729 - DNA, 20 bp, synthetic construct
  misc_feature 1..20: note = Description of Artificial Sequence: Synthetic oligonucleotide
  misc_feature 1..20: note = Target: SCN10A; (-) strand; PAM type: YTN; PAM sequence: TTC
  source 1..20: mol_type = other DNA
aactcttaagaaaatgagca

SEQ ID NO: 52730 - DNA, 20 bp, synthetic construct
  misc_feature 1..20: note = Description of Artificial Sequence: Synthetic oligonucleotide
  misc_feature 1..20: note = Target: SCN10A; (-) strand; PAM type: YTN; PAM sequence: CTT
  source 1..20: mol_type = other DNA
caactcttaagaaaatgagc

SEQ ID NO: 52731 - DNA, 20 bp, synthetic construct
  misc_feature 1..20: note = Description of Artificial Sequence: Synthetic oligonucleotide
  misc_feature 1..20: note = Target: SCN10A; (-) strand; PAM type: YTN; PAM sequence: TTC
  source 1..20: mol_type = other DNA
ttcaactcttaagaaaatga

SEQ ID NO: 52732 - DNA, 20 bp, synthetic construct
  misc_feature 1..20: note = Description of Artificial Sequence: Synthetic oligonucleotide
  misc_feature 1..20: note = Target: SCN10A; (-) strand; PAM type: YTN; PAM sequence: CTT
  source 1..20: mol_type = other DNA
cttcaactcttaagaaaatg

SEQ ID NO: 52733 - DNA, 20 bp, synthetic construct
  misc_feature 1..20: note = Description of Artificial Sequence: Synthetic oligonucleotide
  misc_feature 1..20: note = Target: SCN10A; (-) strand; PAM type: YTN; PAM sequence: CTC
  source 1..20: mol_type = other DNA
ttcttcaactcttaagaaaa

SEQ ID NO: 52734 - DNA, 20 bp, synthetic construct
  misc_feature 1..20: note = Description of Artificial Sequence: Synthetic oligonucleotide
  misc_feature 1..20: note = Target: SCN10A; (-) strand; PAM type: YTN; PAM sequence: TTC
  source 1..20: mol_type = other DNA
cctcttcttcaactcttaag

SEQ ID NO: 52735 - DNA, 20 bp, synthetic construct
  misc_feature 1..20: note = Description of Artificial Sequence: Synthetic oligonucleotide
  misc_feature 1..20: note = Target: SCN10A; (-) strand; PAM type: YTN; PAM sequence: TTT
  source 1..20: mol_type = other DNA
ccctcttcttcaactcttaa

SEQ ID NO: 52736 - DNA, 20 bp, synthetic construct
  misc_feature 1..20: note = Description of Artificial Sequence: Synthetic oligonucleotide
  misc_feature 1..20: note = Target: SCN10A; (-) strand; PAM type: YTN; PAM sequence: CTG
  source 1..20: mol_type = other DNA
tttccctcttcttcaactct

SEQ ID NO: 52737 - DNA, 20 bp, synthetic construct
  misc_feature 1..20: note = Description of Artificial Sequence: Synthetic oligonucleotide
  misc_feature 1..20: note = Target: SCN10A; (-) strand; PAM type: YTN; PAM sequence: TTC
  source 1..20: mol_type = other DNA
agtatgcaactgtttccctc

SEQ ID NO: 52738 - DNA, 20 bp, synthetic construct
  misc_feature 1..20: note = Description of Artificial Sequence: Synthetic oligonucleotide
  misc_feature 1..20: note = Target: SCN10A; (-) strand; PAM type: YTN; PAM sequence: TTT
  source 1..20: mol_type = other DNA
cagtatgcaactgtttccct

SEQ ID NO: 52739 - DNA, 20 bp, synthetic construct
  misc_feature 1..20: note = Description of Artificial Sequence: Synthetic oligonucleotide
  misc_feature 1..20: note = Target: SCN10A; (-) strand; PAM type: YTN; PAM sequence: TTT
  source 1..20: mol_type = other DNA
tcagtatgcaactgtttccc

SEQ ID NO: 52740 - DNA, 20 bp, synthetic construct
  misc_feature 1..20: note = Description of Artificial Sequence: Synthetic oligonucleotide
  misc_feature 1..20: note = Target: SCN10A; (-) strand; PAM type: YTN; PAM sequence: TTT
  source 1..20: mol_type = other DNA
ttcagtatgcaactgtttcc

SEQ ID NO: 52741 - DNA, 20 bp, synthetic construct
  misc_feature 1..20: note = Description of Artificial Sequence: Synthetic oligonucleotide
  misc_feature 1..20: note = Target: SCN10A; (-) strand; PAM type: YTN; PAM sequence: TTA
  source 1..20: mol_type = other DNA
tatgcatttttcagtatgca

SEQ ID NO: 52742 - DNA, 20 bp, synthetic construct
  misc_feature 1..20: note = Description of Artificial Sequence: Synthetic oligonucleotide
  misc_feature 1..20: note = Target: SCN10A; (-) strand; PAM type: YTN; PAM sequence: TTT
  source 1..20: mol_type = other DNA
atatgcatttttcagtatgc

SEQ ID NO: 52743 - DNA, 20 bp, synthetic construct
  misc_feature 1..20: note = Description of Artificial Sequence: Synthetic oligonucleotide
  misc_feature 1..20: note = Target: SCN10A; (-) strand; PAM type: YTN; PAM sequence: CTT
  source 1..20: mol_type = other DNA
tatatgcatttttcagtatg

SEQ ID NO: 52744 - DNA, 20 bp, synthetic construct
  misc_feature 1..20: note = Description of Artificial Sequence: Synthetic oligonucleotide
  misc_feature 1..20: note = Target: SCN10A; (-) strand; PAM type: YTN; PAM sequence: TTC
  source 1..20: mol_type = other DNA
tttatatgcatttttcagta

SEQ ID NO: 52745 - DNA, 20 bp, synthetic construct
  misc_feature 1..20: note = Description of Artificial Sequence: Synthetic oligonucleotide
  misc_feature 1..20: note = Target: SCN10A; (-) strand; PAM type: YTN; PAM sequence: TTT
  source 1..20: mol_type = other DNA
ctttatatgcatttttcagt

SEQ ID NO: 52746 - DNA, 20 bp, synthetic construct
  misc_feature 1..20: note = Description of Artificial Sequence: Synthetic oligonucleotide
  misc_feature 1..20: note = Target: SCN10A; (-) strand; PAM type: YTN; PAM sequence: TTT
  source 1..20: mol_type = other DNA
tctttatatgcatttttcag

SEQ ID NO: 52747 - DNA, 20 bp, synthetic construct
  misc_feature 1..20: note = Description of Artificial Sequence: Synthetic oligonucleotide
  misc_feature 1..20: note = Target: SCN10A; (-) strand; PAM type: YTN; PAM sequence: CTT
  source 1..20: mol_type = other DNA
ttctttatatgcatttttca

SEQ ID NO: 52748 - DNA, 20 bp, synthetic construct
  misc_feature 1..20: note = Description of Artificial Sequence: Synthetic oligonucleotide
  misc_feature 1..20: note = Target: SCN10A; (-) strand; PAM type: YTN; PAM sequence: TTC
  source 1..20: mol_type = other DNA
agtaggtaaacttttcttta

SEQ ID NO: 52749 - DNA, 20 bp, synthetic construct
  misc_feature 1..20: note = Description of Artificial Sequence: Synthetic oligonucleotide
  misc_feature 1..20: note = Target: SCN10A; (-) strand; PAM type: YTN; PAM sequence: TTT
  source 1..20: mol_type = other DNA
cagtaggtaaacttttcttt

SEQ ID NO: 52750 - DNA, 20 bp, synthetic construct
  misc_feature 1..20: note = Description of Artificial Sequence: Synthetic oligonucleotide
  misc_feature 1..20: note = Target: SCN10A; (-) strand; PAM type: YTN; PAM sequence: CTT
  source 1..20: mol_type = other DNA
tcagtaggtaaacttttctt

SEQ ID NO: 52751 - DNA, 20 bp, synthetic construct
  misc_feature 1..20: note = Description of Artificial Sequence: Synthetic oligonucleotide
  misc_feature 1..20: note = Target: SCN10A; (-) strand; PAM type: YTN; PAM sequence: TTG
  source 1..20: mol_type = other DNA
cctttcagtaggtaaacttt

SEQ ID NO: 52752 - DNA, 20 bp, synthetic construct
  misc_feature 1..20: note = Description of Artificial Sequence: Synthetic oligonucleotide
  misc_feature 1..20: note = Target: SCN10A; (-) strand; PAM type: YTN; PAM sequence: TTT
  source 1..20: mol_type = other DNA
gcctttcagtaggtaaactt

SEQ ID NO: 52753 - DNA, 20 bp, synthetic construct
  misc_feature 1..20: note = Description of Artificial Sequence: Synthetic oligonucleotide
  misc_feature 1..20: note = Target: SCN10A; (-) strand; PAM type: YTN; PAM sequence: TTG
  source 1..20: mol_type = other DNA
tttgcctttcagtaggtaaa

SEQ ID NO: 52754 - DNA, 20 bp, synthetic construct
  misc_feature 1..20: note = Description of Artificial Sequence: Synthetic oligonucleotide
  misc_feature 1..20: note = Target: SCN10A; (-) strand; PAM type: YTN; PAM sequence: TTA
  source 1..20: mol_type = other DNA
acgaggagcagaagtgaata

SEQ ID NO: 52755 - DNA, 20 bp, synthetic construct
  misc_feature 1..20: note = Description of Artificial Sequence: Synthetic oligonucleotide
  misc_feature 1..20: note = Target: SCN10A; (-) strand; PAM type: YTN; PAM sequence: CTT
  source 1..20: mol_type = other DNA
aacgaggagcagaagtgaat

SEQ ID NO: 52756 - DNA, 20 bp, synthetic construct
  misc_feature 1..20: note = Description of Artificial Sequence: Synthetic oligonucleotide
  misc_feature 1..20: note = Target: SCN10A; (-) strand; PAM type: YTN; PAM sequence: CTG
  source 1..20: mol_type = other DNA
gaaacttaacgaggagcaga

SEQ ID NO: 52757 - DNA, 20 bp, synthetic construct
  misc_feature 1..20: note = Description of Artificial Sequence: Synthetic oligonucleotide
  misc_feature 1..20: note = Target: SCN10A; (-) strand; PAM type: YTN; PAM sequence: TTC
  source 1..20: mol_type = other DNA
tggaaacttaacgaggagca

SEQ ID NO: 52758 - DNA, 20 bp, synthetic construct
  misc_feature 1..20: note = Description of Artificial Sequence: Synthetic oligonucleotide
  misc_feature 1..20: note = Target: SCN10A; (-) strand; PAM type: YTN; PAM sequence: CTT
  source 1..20: mol_type = other DNA
ctggaaacttaacgaggagc

SEQ ID NO: 52759 - DNA, 20 bp, synthetic construct
  misc_feature 1..20: note = Description of Artificial Sequence: Synthetic oligonucleotide
  misc_feature 1..20: note = Target: SCN10A; (-) strand; PAM type: YTN; PAM sequence: TTA
  source 1..20: mol_type = other DNA
tcttctggaaacttaacgag

SEQ ID NO: 52760 - DNA, 20 bp, synthetic construct
  misc_feature 1..20: note = Description of Artificial Sequence: Synthetic oligonucleotide
  misc_feature 1..20: note = Target: SCN10A; (-) strand; PAM type: YTN; PAM sequence: CTA
  source 1..20: mol_type = other DNA
aaccagattatcttctggaa

SEQ ID NO: 52761 - DNA, 20 bp, synthetic construct
  misc_feature 1..20: note = Description of Artificial Sequence: Synthetic oligonucleotide
  misc_feature 1..20: note = Target: SCN10A; (-) strand; PAM type: YTN; PAM sequence: CTC
  source 1..20: mol_type = other DNA
taaaccagattatcttctgg

SEQ ID NO: 52762 - DNA, 20 bp, synthetic construct
  misc_feature 1..20: note = Description of Artificial Sequence: Synthetic oligonucleotide
  misc_feature 1..20: note = Target: SCN10A; (-) strand; PAM type: YTN; PAM sequence: TTC
  source 1..20: mol_type = other DNA
atgggctctaaaccagatta

SEQ ID NO: 52763 - DNA, 20 bp, synthetic construct
  misc_feature 1..20: note = Description of Artificial Sequence: Synthetic oligonucleotide
  misc_feature 1..20: note = Target: SCN10A; (-) strand; PAM type: YTN; PAM sequence: CTT
  source 1..20: mol_type = other DNA
catgggctctaaaccagatt

SEQ ID NO: 52764 - DNA, 20 bp, synthetic construct
  misc_feature 1..20: note = Description of Artificial Sequence: Synthetic oligonucleotide
  misc_feature 1..20: note = Target: SCN10A; (-) strand; PAM type: YTN; PAM sequence: TTA
  source 1..20: mol_type = other DNA
aaagtgcagcatcttcatgg

SEQ ID NO: 52765 - DNA, 20 bp, synthetic construct
  misc_feature 1..20: note = Description of Artificial Sequence: Synthetic oligonucleotide
  misc_feature 1..20: note = Target: SCN10A; (-) strand; PAM type: YTN; PAM sequence: TTC
  source 1..20: mol_type = other DNA
atgttaaaagtgcagcatct

SEQ ID NO: 52766 - DNA, 20 bp, synthetic construct
  misc_feature 1..20: note = Description of Artificial Sequence: Synthetic oligonucleotide
  misc_feature 1..20: note = Target: SCN10A; (-) strand; PAM type: YTN; PAM sequence: CTG
  source 1..20: mol_type = other DNA
ttcatgttaaaagtgcagca

SEQ ID NO: 52767 - DNA, 20 bp, synthetic construct
  misc_feature 1..20: note = Description of Artificial Sequence: Synthetic oligonucleotide
  misc_feature 1..20: note = Target: SCN10A; (-) strand; PAM type: YTN; PAM sequence: CTG
  source 1..20: mol_type = other DNA
gctgttcatgttaaaagtgc

SEQ ID NO: 52768 - DNA, 20 bp, synthetic construct
  misc_feature 1..20: note = Description of Artificial Sequence: Synthetic oligonucleotide
  misc_feature 1..20: note = Target: SCN10A; (-) strand; PAM type: YTN; PAM sequence: TTG
  source 1..20: mol_type = other DNA
gctggctgttcatgttaaaa

SEQ ID NO: 52769 - DNA, 20 bp, synthetic construct
  misc_feature 1..20: note = Description of Artificial Sequence: Synthetic oligonucleotide
  misc_feature 1..20: note = Target: SCN10A; (-) strand; PAM type: YTN; PAM sequence: CTT
  source 1..20: mol_type = other DNA
ggctggctgttcatgttaaa

SEQ ID NO: 52770 - DNA, 20 bp, synthetic construct
  misc_feature 1..20: note = Description of Artificial Sequence: Synthetic oligonucleotide
  misc_feature 1..20: note = Target: SCN10A; (-) strand; PAM type: YTN; PAM sequence: CTC
  source 1..20: mol_type = other DNA
cttggctggctgttcatgtt

SEQ ID NO: 52771 - DNA, 20 bp, synthetic construct
  misc_feature 1..20: note = Description of Artificial Sequence: Synthetic oligonucleotide
  misc_feature 1..20: note = Target: SCN10A; (-) strand; PAM type: YTN; PAM sequence: CTG
  source 1..20: mol_type = other DNA
atgctccttggctggctgtt

SEQ ID NO: 52772 - DNA, 20 bp, synthetic construct
  misc_feature 1..20: note = Description of Artificial Sequence: Synthetic oligonucleotide
  misc_feature 1..20: note = Target: SCN10A; (-) strand; PAM type: YTN; PAM sequence: TTC
  source 1..20: mol_type = other DNA
ctgatgctccttggctggct

SEQ ID NO: 52773 - DNA, 20 bp, synthetic construct
  misc_feature 1..20: note = Description of Artificial Sequence: Synthetic oligonucleotide
  misc_feature 1..20: note = Target: SCN10A; (-) strand; PAM type: YTN; PAM sequence: TTC
  source 1..20: mol_type = other DNA
aaattcctgatgctccttgg

SEQ ID NO: 52774 - DNA, 20 bp, synthetic construct
  misc_feature 1..20: note = Description of Artificial Sequence: Synthetic oligonucleotide
  misc_feature 1..20: note = Target: SCN10A; (-) strand; PAM type: YTN; PAM sequence: CTT
  source 1..20: mol_type = other DNA
caaattcctgatgctccttg

SEQ ID NO: 52775 - DNA, 20 bp, synthetic construct
  misc_feature 1..20: note = Description of Artificial Sequence: Synthetic oligonucleotide
  misc_feature 1..20: note = Target: SCN10A; (-) strand; PAM type: YTN; PAM sequence: TTA
  source 1..20: mol_type = other DNA
gaagcatccttcaaattcct

SEQ ID NO: 52776 - DNA, 20 bp, synthetic construct
  misc_feature 1..20: note = Description of Artificial Sequence: Synthetic oligonucleotide
  misc_feature 1..20: note = Target: SCN10A; (-) strand; PAM type: YTN; PAM sequence: CTG
  source 1..20: mol_type = other DNA
gtgttagaagcatccttcaa

SEQ ID NO: 52777 - DNA, 20 bp, synthetic construct
  misc_feature 1..20: note = Description of Artificial Sequence: Synthetic oligonucleotide
  misc_feature 1..20: note = Target: SCN10A; (-) strand; PAM type: YTN; PAM sequence: TTC
  source 1..20: mol_type = other DNA
tggtgttagaagcatccttc

SEQ ID NO: 52778 - DNA, 20 bp, synthetic construct
  misc_feature 1..20: note = Description of Artificial Sequence: Synthetic oligonucleotide
  misc_feature 1..20: note = Target: SCN10A; (-) strand; PAM type: YTN; PAM sequence: TTT
  source 1..20: mol_type = other DNA
ctggtgttagaagcatcctt

SEQ ID NO: 52779 - DNA, 20 bp, synthetic construct
  misc_feature 1..20: note = Description of Artificial Sequence: Synthetic oligonucleotide
  misc_feature 1..20: note = Target: SCN10A; (-) strand; PAM type: YTN; PAM sequence: TTG
  source 1..20: mol_type = other DNA
gtttctggtgttagaagcat

SEQ ID NO: 52780 - DNA, 20 bp, synthetic construct
  misc_feature 1..20: note = Description of Artificial Sequence: Synthetic oligonucleotide
  misc_feature 1..20: note = Target: SCN10A; (-) strand; PAM type: YTN; PAM sequence: TTT
  source 1..20: mol_type = other DNA
ggtttctggtgttagaagca

SEQ ID NO: 52781 - DNA, 20 bp, synthetic construct
  misc_feature 1..20: note = Description of Artificial Sequence: Synthetic oligonucleotide
  misc_feature 1..20: note = Target: SCN10A; (-) strand; PAM type: YTN; PAM sequence: CTT
  source 1..20: mol_type = other DNA
tggtttctggtgttagaagc

SEQ ID NO: 52782 - DNA, 20 bp, synthetic construct
  misc_feature 1..20: note = Description of Artificial Sequence: Synthetic oligonucleotide
  misc_feature 1..20: note = Target: SCN10A; (-) strand; PAM type: YTN; PAM sequence: TTG
  source 1..20: mol_type = other DNA
ctttggtttctggtgttaga

SEQ ID NO: 52783 - DNA, 20 bp, synthetic construct
  misc_feature 1..20: note = Description of Artificial Sequence: Synthetic oligonucleotide
  misc_feature 1..20: note = Target: SCN10A; (-) strand; PAM type: YTN; PAM sequence: TTG
  source 1..20: mol_type = other DNA
gttgctttggtttctggtgt

SEQ ID NO: 52784 - DNA, 20 bp, synthetic construct
  misc_feature 1..20: note = Description of Artificial Sequence: Synthetic oligonucleotide
  misc_feature 1..20: note = Target: SCN10A; (-) strand; PAM type: YTN; PAM sequence: TTT
  source 1..20: mol_type = other DNA
ggttgctttggtttctggtg

SEQ ID NO: 52785 - DNA, 20 bp, synthetic construct
  misc_feature 1..20: note = Description of Artificial Sequence: Synthetic oligonucleotide
  misc_feature 1..20: note = Target: SCN10A; (-) strand; PAM type: YTN; PAM sequence: TTG
  source 1..20: mol_type = other DNA
tttggttgctttggtttctg

SEQ ID NO: 52786 - DNA, 20 bp, synthetic construct
  misc_feature 1..20: note = Description of Artificial Sequence: Synthetic oligonucleotide
  misc_feature 1..20: note = Target: SCN10A; (-) strand; PAM type: YTN; PAM sequence: TTC
  source 1..20: mol_type = other DNA
agttgtttggttgctttggt

SEQ ID NO: 52787 - DNA, 20 bp, synthetic construct
  misc_feature 1..20: note = Description of Artificial Sequence: Synthetic oligonucleotide
  misc_feature 1..20: note = Target: SCN10A; (-) strand; PAM type: YTN; PAM sequence: TTT
  source 1..20: mol_type = other DNA
cagttgtttggttgctttgg

SEQ ID NO: 52788 - DNA, 20 bp, synthetic construct
  misc_feature 1..20: note = Description of Artificial Sequence: Synthetic oligonucleotide
  misc_feature 1..20: note = Target: SCN10A; (-) strand; PAM type: YTN; PAM sequence: TTT
  source 1..20: mol_type = other DNA
tcagttgtttggttgctttg

SEQ ID NO: 52789 - DNA, 20 bp, synthetic construct
  misc_feature 1..20: note = Description of Artificial Sequence: Synthetic oligonucleotide
  misc_feature 1..20: note = Target: SCN10A; (-) strand; PAM type: YTN; PAM sequence: TTT
  source 1..20: mol_type = other DNA
ttcagttgtttggttgcttt

SEQ ID NO: 52790 - DNA, 20 bp, synthetic construct
  misc_feature 1..20: note = Description of Artificial Sequence: Synthetic oligonucleotide
  misc_feature 1..20: note = Target: SCN10A; (-) strand; PAM type: YTN; PAM sequence: TTT
  source 1..20: mol_type = other DNA
tttcagttgtttggttgctt

SEQ ID NO: 52791 - DNA, 20 bp, synthetic construct
  misc_feature 1..20: note = Description of Artificial Sequence: Synthetic oligonucleotide
  misc_feature 1..20: note = Target: SCN10A; (-) strand; PAM type: YTN; PAM sequence: TTT
  source 1..20: mol_type = other DNA
ttttcagttgtttggttgct

SEQ ID NO: 52792 - DNA, 20 bp, synthetic construct
  misc_feature 1..20: note = Description of Artificial Sequence: Synthetic oligonucleotide
  misc_feature 1..20: note = Target: SCN10A; (-) strand; PAM type: YTN; PAM sequence: TTT
  source 1..20: mol_type = other DNA
tttttcagttgtttggttgc

SEQ ID NO: 52793 - DNA, 20 bp, synthetic construct
  misc_feature 1..20: note = Description of Artificial Sequence: Synthetic oligonucleotide
  misc_feature 1..20: note = Target: SCN10A; (-) strand; PAM type: YTN; PAM sequence: TTT
  source 1..20: mol_type = other DNA
ttttttcagttgtttggttg

SEQ ID NO: 52794 - DNA, 20 bp, synthetic construct
  misc_feature 1..20: note = Description of Artificial Sequence: Synthetic oligonucleotide
  misc_feature 1..20: note = Target: SCN10A; (-) strand; PAM type: YTN; PAM sequence: TTT
  source 1..20: mol_type = other DNA
tttttttcagttgtttggtt

SEQ ID NO: 52795 - DNA, 20 bp, synthetic construct
  misc_feature 1..20: note = Description of Artificial Sequence: Synthetic oligonucleotide
  misc_feature 1..20: note = Target: SCN10A; (-) strand; PAM type: YTN; PAM sequence: TTT
  source 1..20: mol_type = other DNA
ttttttttcagttgtttggt

SEQ ID NO: 52796 - DNA, 20 bp, synthetic construct
  misc_feature 1..20: note = Description of Artificial Sequence: Synthetic oligonucleotide
  misc_feature 1..20: note = Target: SCN10A; (-) strand; PAM type: YTN; PAM sequence: TTT
  source 1..20: mol_type = other DNA
tttttttttcagttgtttgg

SEQ ID NO: 52797 - DNA, 20 bp, synthetic construct
  misc_feature 1..20: note = Description of Artificial Sequence: Synthetic oligonucleotide
  misc_feature 1..20: note = Target: SCN10A; (-) strand; PAM type: YTN; PAM sequence: TTT
  source 1..20: mol_type = other DNA
ttttttttttcagttgtttg

SEQ ID NO: 52798 - DNA, 20 bp, synthetic construct
  misc_feature 1..20: note = Description of Artificial Sequence: Synthetic oligonucleotide
  misc_feature 1..20: note = Target: SCN10A; (-) strand; PAM type: YTN; PAM sequence: TTT
  source 1..20: mol_type = other DNA
tttttttttttcagttgttt

SEQ ID NO: 52799 - DNA, 20 bp, synthetic construct
  misc_feature 1..20: note = Description of Artificial Sequence: Synthetic oligonucleotide
  misc_feature 1..20: note = Target: SCN10A; (-) strand; PAM type: YTN; PAM sequence: TTT
  source 1..20: mol_type = other DNA
ttttttttttttcagttgtt

SEQ ID NO: 52800 - DNA, 20 bp, synthetic construct
  misc_feature 1..20: note = Description of Artificial Sequence: Synthetic oligonucleotide
  misc_feature 1..20: note = Target: SCN10A; (-) strand; PAM type: YTN; PAM sequence: TTT
  source 1..20: mol_type = other DNA
tttttttttttttcagttgt

SEQ ID NO: 52801 - DNA, 20 bp, synthetic construct
  misc_feature 1..20: note = Description of Artificial Sequence: Synthetic oligonucleotide
  misc_feature 1..20: note = Target: SCN10A; (-) strand; PAM type: YTN; PAM sequence: CTT
  source 1..20: mol_type = other DNA
ttttttttttttttcagttg

SEQ ID NO: 52802 - DNA, 20 bp, synthetic construct
  misc_feature 1..20: note = Description of Artificial Sequence: Synthetic oligonucleotide
  misc_feature 1..20: note = Target: SCN10A; (-) strand; PAM type: YTN; PAM sequence: TTC
  source 1..20: mol_type = other DNA
ttttttttttttttttcagt

SEQ ID NO: 52803 - DNA, 20 bp, synthetic construct
  misc_feature 1..20: note = Description of Artificial Sequence: Synthetic oligonucleotide
  misc_feature 1..20: note = Target: SCN10A; (-) strand; PAM type: YTN; PAM sequence: TTT
  source 1..20: mol_type = other DNA
cttttttttttttttttcag

SEQ ID NO: 52804 - DNA, 20 bp, synthetic construct
  misc_feature 1..20: note = Description of Artificial Sequence: Synthetic oligonucleotide
  misc_feature 1..20: note = Target: SCN10A; (-) strand; PAM type: YTN; PAM sequence: TTT
  source 1..20: mol_type = other DNA
tcttttttttttttttttca

SEQ ID NO: 52805 - DNA, 20 bp, synthetic construct
  misc_feature 1..20: note = Description of Artificial Sequence: Synthetic oligonucleotide
  misc_feature 1..20: note = Target: SCN10A; (-) strand; PAM type: YTN; PAM sequence: CTT
  source 1..20: mol_type = other DNA
ttcttttttttttttttttc

SEQ ID NO: 52806 - DNA, 20 bp, synthetic construct
  misc_feature 1..20: note = Description of Artificial Sequence: Synthetic oligonucleotide
  misc_feature 1..20: note = Target: SCN10A; (-) strand; PAM type: YTN; PAM sequence: TTC
  source 1..20: mol_type = other DNA
ttttcttttttttttttttt

SEQ ID NO: 52807 - DNA, 20 bp, synthetic construct
  misc_feature 1..20: note = Description of Artificial Sequence: Synthetic oligonucleotide
  misc_feature 1..20: note = Target: SCN10A; (-) strand; PAM type: YTN; PAM sequence: TTT
  source 1..20: mol_type = other DNA
cttttctttttttttttttt

SEQ ID NO: 52808 - DNA, 20 bp, synthetic construct
  misc_feature 1..20: note = Description of Artificial Sequence: Synthetic oligonucleotide
  misc_feature 1..20: note = Target: SCN10A; (-) strand; PAM type: YTN; PAM sequence: TTT
  source 1..20: mol_type = other DNA
tcttttcttttttttttttt

SEQ ID NO: 52809 - DNA, 20 bp, synthetic construct
  misc_feature 1..20: note = Description of Artificial Sequence: Synthetic oligonucleotide
  misc_feature 1..20: note = Target: SCN10A; (-) strand; PAM type: YTN; PAM sequence: CTT
  source 1..20: mol_type = other DNA
ttcttttctttttttttttt

SEQ ID NO: 52810 - DNA, 20 bp, synthetic construct
  misc_feature 1..20: note = Description of Artificial Sequence: Synthetic oligonucleotide
  misc_feature 1..20: note = Target: SCN10A; (-) strand; PAM type: YTN; PAM sequence: TTC
  source 1..20: mol_type = other DNA
ttttcttttctttttttttt

SEQ ID NO: 52811 - DNA, 20 bp, synthetic construct
  misc_feature 1..20: note = Description of Artificial Sequence: Synthetic oligonucleotide
  misc_feature 1..20: note = Target: SCN10A; (-) strand; PAM type: YTN; PAM sequence: TTT
  source 1..20: mol_type = other DNA
cttttcttttcttttttttt

SEQ ID NO: 52812 - DNA, 20 bp, synthetic construct
  misc_feature 1..20: note = Description of Artificial Sequence: Synthetic oligonucleotide
  misc_feature 1..20: note = Target: SCN10A; (-) strand; PAM type: YTN; PAM sequence: TTT
  source 1..20: mol_type = other DNA
tcttttcttttctttttttt

SEQ ID NO: 52813 - DNA, 20 bp, synthetic construct
  misc_feature 1..20: note = Description of Artificial Sequence: Synthetic oligonucleotide
  misc_feature 1..20: note = Target: SCN10A; (-) strand; PAM type: YTN; PAM sequence: CTT
  source 1..20: mol_type = other DNA
ttcttttcttttcttttttt

SEQ ID NO: 52814 - DNA, 20 bp, synthetic construct
  misc_feature 1..20: note = Description of Artificial Sequence: Synthetic oligonucleotide
  misc_feature 1..20: note = Target: SCN10A; (-) strand; PAM type: YTN; PAM sequence: TTC
  source 1..20: mol_type = other DNA
ttttcttttcttttcttttt

SEQ ID NO: 52815 - DNA, 20 bp, synthetic construct
  misc_feature 1..20: note = Description of Artificial Sequence: Synthetic oligonucleotide
  misc_feature 1..20: note = Target: SCN10A; (-) strand; PAM type: YTN; PAM sequence: TTT
  source 1..20: mol_type = other DNA
cttttcttttcttttctttt

SEQ ID NO: 52816 - DNA, 20 bp, synthetic construct
  misc_feature 1..20: note = Description of Artificial Sequence: Synthetic oligonucleotide
  misc_feature 1..20: note = Target: SCN10A; (-) strand; PAM type: YTN; PAM sequence: TTT
  source 1..20: mol_type = other DNA
tcttttcttttcttttcttt

SEQ ID NO: 52817 - DNA, 20 bp, synthetic construct
  misc_feature 1..20: note = Description of Artificial Sequence: Synthetic oligonucleotide
  misc_feature 1..20: note = Target: SCN10A; (-) strand; PAM type: YTN; PAM sequence: TTT
  source 1..20: mol_type = other DNA
ttcttttcttttcttttctt

SEQ ID NO: 52818 - DNA, 20 bp, synthetic construct
  misc_feature 1..20: note = Description of Artificial Sequence: Synthetic oligonucleotide
  misc_feature 1..20: note = Target: SCN10A; (-) strand; PAM type: YTN; PAM sequence: CTT
  source 1..20: mol_type = other DNA
tttcttttcttttcttttct

SEQ ID NO: 52819 - DNA, 20 bp, synthetic construct
  misc_feature 1..20: note = Description of Artificial Sequence: Synthetic oligonucleotide
  misc_feature 1..20: note = Target: SCN10A; (-) strand; PAM type: YTN; PAM sequence: CTC
  source 1..20: mol_type = other DNA
tttttcttttcttttctttt

SEQ ID NO: 52820 - DNA, 20 bp, synthetic construct
  misc_feature 1..20: note = Description of Artificial Sequence: Synthetic oligonucleotide
  misc_feature 1..20: note = Target: SCN10A; (-) strand; PAM type: YTN; PAM sequence: TTG
  source 1..20: mol_type = other DNA
tctctttttcttttcttttc

SEQ ID NO: 52821 - DNA, 20 bp, synthetic construct
  misc_feature 1..20: note = Description of Artificial Sequence: Synthetic oligonucleotide
  misc_feature 1..20: note = Target: SCN10A; (-) strand; PAM type: YTN; PAM sequence: TTA
  source 1..20: mol_type = other DNA
ttgtctctttttcttttctt

SEQ ID NO: 52822 - DNA, 20 bp, synthetic construct
  misc_feature 1..20: note = Description of Artificial Sequence: Synthetic oligonucleotide
  misc_feature 1..20: note = Target: SCN10A; (-) strand; PAM type: YTN; PAM sequence: TTT
  source 1..20: mol_type = other DNA
attgtctctttttcttttct

SEQ ID NO: 52823 - DNA, 20 bp, synthetic construct
  misc_feature 1..20: note = Description of Artificial Sequence: Synthetic oligonucleotide
  misc_feature 1..20: note = Target: SCN10A; (-) strand; PAM type: YTN; PAM sequence: CTT
  source 1..20: mol_type = other DNA
tattgtctctttttcttttc

SEQ ID NO: 52824 - DNA, 20 bp, synthetic construct
  misc_feature 1..20: note = Description of Artificial Sequence: Synthetic oligonucleotide
  misc_feature 1..20: note = Target: SCN10A; (-) strand; PAM type: YTN; PAM sequence: CTC
  source 1..20: mol_type = other DNA
tttattgtctctttttcttt

SEQ ID NO: 52825 - DNA, 20 bp, synthetic construct
  misc_feature 1..20: note = Description of Artificial Sequence: Synthetic oligonucleotide
  misc_feature 1..20: note = Target: SCN10A; (-) strand; PAM type: YTN; PAM sequence: CTG
  source 1..20: mol_type = other DNA
ccctctttattgtctctttt

SEQ ID NO: 52826 - DNA, 20 bp, synthetic construct
  misc_feature 1..20: note = Description of Artificial Sequence: Synthetic oligonucleotide
  misc_feature 1..20: note = Target: SCN10A; (-) strand; PAM type: YTN; PAM sequence: TTC
  source 1..20: mol_type = other DNA
tgccctctttattgtctctt

SEQ ID NO: 52827 - DNA, 20 bp, synthetic construct
  misc_feature 1..20: note = Description of Artificial Sequence: Synthetic oligonucleotide
  misc_feature 1..20: note = Target: SCN10A; (-) strand; PAM type: YTN; PAM sequence: CTT
  source 1..20: mol_type = other DNA
ctgccctctttattgtctct

SEQ ID NO: 52828 - DNA, 20 bp, synthetic construct
  misc_feature 1..20: note = Description of Artificial Sequence: Synthetic oligonucleotide
  misc_feature 1..20: note = Target: SCN10A; (-) strand; PAM type: YTN; PAM sequence: TTC
  source 1..20: mol_type = other DNA
ttctgccctctttattgtct

SEQ ID NO: 52829 - DNA, 20 bp, synthetic construct
  misc_feature 1..20: note = Description of Artificial Sequence: Synthetic oligonucleotide
  misc_feature 1..20: note = Target: SCN10A; (-) strand; PAM type: YTN; PAM sequence: CTT
  source 1..20: mol_type = other DNA
cttctgccctctttattgtc

SEQ ID NO: 52830 - DNA, 20 bp, synthetic construct
  misc_feature 1..20: note = Description of Artificial Sequence: Synthetic oligonucleotide
  misc_feature 1..20: note = Target: SCN10A; (-) strand; PAM type: YTN; PAM sequence: CTC
  source 1..20: mol_type = other DNA
ttcttctgccctctttattg

SEQ ID NO: 52831 - DNA, 20 bp, synthetic construct
  misc_feature 1..20: note = Description of Artificial Sequence: Synthetic oligonucleotide
  misc_feature 1..20: note = Target: SCN10A; (-) strand; PAM type: YTN; PAM sequence: CTA
  source 1..20: mol_type = other DNA
actcttcttctgccctcttt

SEQ ID NO: 52832 - DNA, 20 bp, synthetic construct
  misc_feature 1..20: note = Description of Artificial Sequence: Synthetic oligonucleotide
  misc_feature 1..20: note = Target: SCN10A; (-) strand; PAM type: YTN; PAM sequence: CTC
  source 1..20: mol_type = other DNA
taactcttcttctgccctct

SEQ ID NO: 52833 - DNA, 20 bp, synthetic construct
  misc_feature 1..20: note = Description of Artificial Sequence: Synthetic oligonucleotide
  misc_feature 1..20: note = Target: SCN10A; (-) strand; PAM type: YTN; PAM sequence: TTC
  source 1..20: mol_type = other DNA
tctaactcttcttctgccct

SEQ ID NO: 52834 - DNA, 20 bp, synthetic construct
  misc_feature 1..20: note = Description of Artificial Sequence: Synthetic oligonucleotide
  misc_feature 1..20: note = Target: SCN10A; (-) strand; PAM type: YTN; PAM sequence: TTT
  source 1..20: mol_type = other DNA
ctctaactcttcttctgccc

SEQ ID NO: 52835 - DNA, 20 bp, synthetic construct
  misc_feature 1..20: note = Description of Artificial Sequence: Synthetic oligonucleotide
  misc_feature 1..20: note = Target: SCN10A; (-) strand; PAM type: YTN; PAM sequence: TTA
  source 1..20: mol_type = other DNA
tttctctaactcttcttctg

SEQ ID NO: 52836 - DNA, 20 bp, synthetic construct
  misc_feature 1..20: note = Description of Artificial Sequence: Synthetic oligonucleotide
  misc_feature 1..20: note = Target: SCN10A; (-) strand; PAM type: YTN; PAM sequence: TTT
  source 1..20: mol_type = other DNA
atttctctaactcttcttct

SEQ ID NO: 52837 - DNA, 20 bp, synthetic construct
  misc_feature 1..20: note = Description of Artificial Sequence: Synthetic oligonucleotide
  misc_feature 1..20: note = Target: SCN10A; (-) strand; PAM type: YTN; PAM sequence: TTT
  source 1..20: mol_type = other DNA
tatttctctaactcttcttc

SEQ ID NO: 52838 - DNA, 20 bp, synthetic construct
  misc_feature 1..20: note = Description of Artificial Sequence: Synthetic oligonucleotide
  misc_feature 1..20: note = Target: SCN10A; (-) strand; PAM type: YTN; PAM sequence: CTG
  source 1..20: mol_type = other DNA
gccaatacagttttatttct

SEQ ID NO: 52839 - DNA, 20 bp, synthetic construct
  misc_feature 1..20: note = Description of Artificial Sequence: Synthetic oligonucleotide
  misc_feature 1..20: note = Target: SCN10A; (-) strand; PAM type: YTN; PAM sequence: TTA
  source 1..20: mol_type = other DNA
caggcgtgagccacagcgcc

SEQ ID NO: 52840 - DNA, 20 bp, synthetic construct
  misc_feature 1..20: note = Description of Artificial Sequence: Synthetic oligonucleotide
  misc_feature 1..20: note = Target: SCN10A; (-) strand; PAM type: YTN; PAM sequence: CTG
  source 1..20: mol_type = other DNA
cgattacaggcgtgagccac

SEQ ID NO: 52841 - DNA, 20 bp, synthetic construct
  misc_feature 1..20: note = Description of Artificial Sequence: Synthetic oligonucleotide
  misc_feature 1..20: note = Target: SCN10A; (-) strand; PAM type: YTN; PAM sequence: CTC
  source 1..20: mol_type = other DNA
ccaaagtgctgcgattacag

SEQ ID NO: 52842 - DNA, 20 bp, synthetic construct
  misc_feature 1..20: note = Description of Artificial Sequence: Synthetic oligonucleotide
  misc_feature 1..20: note = Target: SCN10A; (-) strand; PAM type: YTN; PAM sequence: CTC
  source 1..20: mol_type = other DNA
ggcctcccaaagtgctgcga

SEQ ID NO: 52843 - DNA, 20 bp, synthetic construct
  misc_feature 1..20: note = Description of Artificial Sequence: Synthetic oligonucleotide
  misc_feature 1..20: note = Target: SCN10A; (-) strand; PAM type: YTN; PAM sequence: CTG
  source 1..20: mol_type = other DNA
cccgcctcggcctcccaaag

SEQ ID NO: 52844 - DNA, 20 bp, synthetic construct
  misc_feature 1..20: note = Description of Artificial Sequence: Synthetic oligonucleotide
  misc_feature 1..20: note = Target: SCN10A; (-) strand; PAM type: YTN; PAM sequence: CTC
  source 1..20: mol_type = other DNA
gtaatctgcccgcctcggcc

SEQ ID NO: 52845 - DNA, 20 bp, synthetic construct
  misc_feature 1..20: note = Description of Artificial Sequence: Synthetic oligonucleotide
  misc_feature 1..20: note = Target: SCN10A; (-) strand; PAM type: YTN; PAM sequence: CTG
  source 1..20: mol_type = other DNA
acctcgtaatctgcccgcct

SEQ ID NO: 52846 - DNA, 20 bp, synthetic construct
  misc_feature 1..20: note = Description of Artificial Sequence: Synthetic oligonucleotide
  misc_feature 1..20: note = Target: SCN10A; (-) strand; PAM type: YTN; PAM sequence: CTC
  source 1..20: mol_type = other DNA
ctgacctcgtaatctgcccg

SEQ ID NO: 52847 - DNA, 20 bp, synthetic construct
  misc_feature 1..20: note = Description of Artificial Sequence: Synthetic oligonucleotide
  misc_feature 1..20: note = Target: SCN10A; (-) strand; PAM type: YTN; PAM sequence: CTC
  source 1..20: mol_type = other DNA
gatctcctgacctcgtaatc

SEQ ID NO: 52848 - DNA, 20 bp, synthetic construct
  misc_feature 1..20: note = Description of Artificial Sequence: Synthetic oligonucleotide
  misc_feature 1..20: note = Target: SCN10A; (-) strand; PAM type: YTN; PAM sequence: TTA
  source 1..20: mol_type = other DNA
gccaggatggtctcgatctc

SEQ ID NO: 52849 - DNA, 20 bp, synthetic construct
  misc_feature 1..20: note = Description of Artificial Sequence: Synthetic oligonucleotide
  misc_feature 1..20: note = Target: SCN10A; (-) strand; PAM type: YTN; PAM sequence: TTC
  source 1..20: mol_type = other DNA
accgcgttagccaggatggt

SEQ ID NO: 52850 - DNA, 20 bp, synthetic construct
  misc_feature 1..20: note = Description of Artificial Sequence: Synthetic oligonucleotide
  misc_feature 1..20: note = Target: SCN10A; (-) strand; PAM type: YTN; PAM sequence: TTT
  source 1..20: mol_type = other DNA
caccgcgttagccaggatgg

SEQ ID NO: 52851 - DNA, 20 bp, synthetic construct
  misc_feature 1..20: note = Description of Artificial Sequence: Synthetic oligonucleotide
  misc_feature 1..20: note = Target: SCN10A; (-) strand; PAM type: YTN; PAM sequence: TTA
  source 1..20: mol_type = other DNA
gtagagacggggtttcaccg

SEQ ID NO: 52852 - DNA, 20 bp, synthetic construct
  misc_feature 1..20: note = Description of Artificial Sequence: Synthetic oligonucleotide
  misc_feature 1..20: note = Target: SCN10A; (-) strand; PAM type: YTN; PAM sequence: TTT
  source 1..20: mol_type = other DNA
agtagagacggggtttcacc

SEQ ID NO: 52853 - DNA, 20 bp, synthetic construct
  misc_feature 1..20: note = Description of Artificial Sequence: Synthetic oligonucleotide
  misc_feature 1..20: note = Target: SCN10A; (-) strand; PAM type: YTN; PAM sequence: TTT
  source 1..20: mol_type = other DNA
tagtagagacggggtttcac

SEQ ID NO: 52854 - DNA, 20 bp, synthetic construct
  misc_feature 1..20: note = Description of Artificial Sequence: Synthetic oligonucleotide
  misc_feature 1..20: note = Target: SCN10A; (-) strand; PAM type: YTN; PAM sequence: TTT
  source 1..20: mol_type = other DNA
ttagtagagacggggtttca

SEQ ID NO: 52855 - DNA, 20 bp, synthetic construct
  misc_feature 1..20: note = Description of Artificial Sequence: Synthetic oligonucleotide
  misc_feature 1..20: note = Target: SCN10A; (-) strand; PAM type: YTN; PAM sequence: TTG
  source 1..20: mol_type = other DNA
tatttttagtagagacgggg

SEQ ID NO: 52856 - DNA, 20 bp, synthetic construct
  misc_feature 1..20: note = Description of Artificial Sequence: Synthetic oligonucleotide
  misc_feature 1..20: note = Target: SCN10A; (-) strand; PAM type: YTN; PAM sequence: TTT
  source 1..20: mol_type = other DNA
gtatttttagtagagacggg

SEQ ID NO: 52857 - DNA, 20 bp, synthetic construct
  misc_feature 1..20: note = Description of Artificial Sequence: Synthetic oligonucleotide
  misc_feature 1..20: note = Target: SCN10A; (-) strand; PAM type: YTN; PAM sequence: TTT
  source 1..20: mol_type = other DNA
tgtatttttagtagagacgg

SEQ ID NO: 52858 - DNA, 20 bp, synthetic construct
  misc_feature 1..20: note = Description of Artificial Sequence: Synthetic oligonucleotide
  misc_feature 1..20: note = Target: SCN10A; (-) strand; PAM type: YTN; PAM sequence: TTT
  source 1..20: mol_type = other DNA
ttgtatttttagtagagacg

SEQ ID NO: 52859 - DNA, 20 bp, synthetic construct
  misc_feature 1..20: note = Description of Artificial Sequence: Synthetic oligonucleotide
  misc_feature 1..20: note = Target: SCN10A; (-) strand; PAM type: YTN; PAM sequence: TTT
  source 1..20: mol_type = other DNA
tttgtatttttagtagagac

SEQ ID NO: 52860 - DNA, 20 bp, synthetic construct
  misc_feature 1..20: note = Description of Artificial Sequence: Synthetic oligonucleotide
  misc_feature 1..20: note = Target: SCN10A; (-) strand; PAM type: YTN; PAM sequence: CTA
  source 1..20: mol_type = other DNA
attttttgtatttttagtag

SEQ ID NO: 52861 - DNA, 20 bp, synthetic construct
  misc_feature 1..20: note = Description of Artificial Sequence: Synthetic oligonucleotide
  misc_feature 1..20: note = Target: SCN10A; (-) strand; PAM type: YTN; PAM sequence: CTA
  source 1..20: mol_type = other DNA
caggtgcccgccaaggcgcc

SEQ ID NO: 52862 - DNA, 20 bp, synthetic construct
  misc_feature 1..20: note = Description of Artificial Sequence: Synthetic oligonucleotide
  misc_feature 1..20: note = Target: SCN10A; (-) strand; PAM type: YTN; PAM sequence: CTG
  source 1..20: mol_type = other DNA
gaactacaggtgcccgccaa

SEQ ID NO: 52863 - DNA, 20 bp, synthetic construct
  misc_feature 1..20: note = Description of Artificial Sequence: Synthetic oligonucleotide
  misc_feature 1..20: note = Target: SCN10A; (-) strand; PAM type: YTN; PAM sequence: CTC
  source 1..20: mol_type = other DNA
cggagtagctggaactacag

SEQ ID NO: 52864 - DNA, 20 bp, synthetic construct
  misc_feature 1..20: note = Description of Artificial Sequence: Synthetic oligonucleotide
  misc_feature 1..20: note = Target: SCN10A; (-) strand; PAM type: YTN; PAM sequence: CTC
  source 1..20: mol_type = other DNA
agcctccggagtagctggaa

SEQ ID NO: 52865 - DNA, 20 bp, synthetic construct
  misc_feature 1..20: note = Description of Artificial Sequence: Synthetic oligonucleotide
  misc_feature 1..20: note = Target: SCN10A; (-) strand; PAM type: YTN; PAM sequence: CTC
  source 1..20: mol_type = other DNA
ccgcctcagcctccggagta

SEQ ID NO: 52866 - DNA, 20 bp, synthetic construct
  misc_feature 1..20: note = Description of Artificial Sequence: Synthetic oligonucleotide
  misc_feature 1..20: note = Target: SCN10A; (-) strand; PAM type: YTN; PAM sequence: TTC
  source 1..20: mol_type = other DNA
tcccgcctcagcctccggag

SEQ ID NO: 52867 - DNA, 20 bp, synthetic construct
  misc_feature 1..20: note = Description of Artificial Sequence: Synthetic oligonucleotide
  misc_feature 1..20: note = Target: SCN10A; (-) strand; PAM type: YTN; PAM sequence: TTC
  source 1..20: mol_type = other DNA
acgccattctcccgcctcag

SEQ ID NO: 52868 - DNA, 20 bp, synthetic construct
  misc_feature 1..20: note = Description of Artificial Sequence: Synthetic oligonucleotide
  misc_feature 1..20: note = Target: SCN10A; (-) strand; PAM type: YTN; PAM sequence: CTC
  source 1..20: mol_type = other DNA
ccgggttcacgccattctcc

SEQ ID NO: 52869 - DNA, 20 bp, synthetic construct
  misc_feature 1..20: note = Description of Artificial Sequence: Synthetic oligonucleotide
  misc_feature 1..20: note = Target: SCN10A; (-) strand; PAM type: YTN; PAM sequence: CTC
  source 1..20: mol_type = other DNA
cgcctcccgggttcacgcca

SEQ ID NO: 52870 - DNA, 20 bp, synthetic construct
  misc_feature 1..20: note = Description of Artificial Sequence: Synthetic oligonucleotide
  misc_feature 1..20: note = Target: SCN10A; (-) strand; PAM type: YTN; PAM sequence: CTG
  source 1..20: mol_type = other DNA
caagctccgcctcccgggtt

SEQ ID NO: 52871 - DNA, 20 bp, synthetic construct
  misc_feature 1..20: note = Description of Artificial Sequence: Synthetic oligonucleotide
  misc_feature 1..20: note = Target: SCN10A; (-) strand; PAM type: YTN; PAM sequence: CTC
  source 1..20: mol_type = other DNA
actgcaagctccgcctcccg

SEQ ID NO: 52872 - DNA, 20 bp, synthetic construct
  misc_feature 1..20: note = Description of Artificial Sequence: Synthetic oligonucleotide
  misc_feature 1..20: note = Target: SCN10A; (-) strand; PAM type: YTN; PAM sequence: CTA
  source 1..20: mol_type = other DNA
ggctcactgcaagctccgcc

SEQ ID NO: 52873 - DNA, 20 bp, synthetic construct
  misc_feature 1..20: note = Description of Artificial Sequence: Synthetic oligonucleotide
  misc_feature 1..20: note = Target: SCN10A; (-) strand; PAM type: YTN; PAM sequence: CTG
  source 1..20: mol_type = other DNA
gagtgcagtgacgcgatcta

SEQ ID NO: 52874 - DNA, 20 bp, synthetic construct
  misc_feature 1..20: note = Description of Artificial Sequence: Synthetic oligonucleotide
  misc_feature 1..20: note = Target: SCN10A; (-) strand; PAM type: YTN; PAM sequence: CTG
  source 1..20: mol_type = other DNA
tcacccagactggagtgcag

SEQ ID NO: 52875 - DNA, 20 bp, synthetic construct
  misc_feature 1..20: note = Description of Artificial Sequence: Synthetic oligonucleotide
  misc_feature 1..20: note = Target: SCN10A; (-) strand; PAM type: YTN; PAM sequence: CTC
  source 1..20: mol_type = other DNA
tgtcacccagactggagtgc

SEQ ID NO: 52876 - DNA, 20 bp, synthetic construct
  misc_feature 1..20: note = Description of Artificial Sequence: Synthetic oligonucleotide
  misc_feature 1..20: note = Target: SCN10A; (-) strand; PAM type: YTN; PAM sequence: TTG
  source 1..20: mol_type = other DNA
ctctgtcacccagactggag

SEQ ID NO: 52877 - DNA, 20 bp, synthetic construct
  misc_feature 1..20: note = Description of Artificial Sequence: Synthetic oligonucleotide
  misc_feature 1..20: note = Target: SCN10A; (-) strand; PAM type: YTN; PAM sequence: CTT
  source 1..20: mol_type = other DNA
gctctgtcacccagactgga

SEQ ID NO: 52878 - DNA, 20 bp, synthetic construct
  misc_feature 1..20: note = Description of Artificial Sequence: Synthetic oligonucleotide
  misc_feature 1..20: note = Target: SCN10A; (-) strand; PAM type: YTN; PAM sequence: TTG
  source 1..20: mol_type = other DNA
gagacgaagtcttgctctgt

SEQ ID NO: 52879 - DNA, 20 bp, synthetic construct
  misc_feature 1..20: note = Description of Artificial Sequence: Synthetic oligonucleotide
  misc_feature 1..20: note = Target: SCN10A; (-) strand; PAM type: YTN; PAM sequence: TTT
  source 1..20: mol_type = other DNA
ggagacgaagtcttgctctg

SEQ ID NO: 52880 - DNA, 20 bp, synthetic construct
  misc_feature 1..20: note = Description of Artificial Sequence: Synthetic oligonucleotide
  misc_feature 1..20: note = Target: SCN10A; (-) strand; PAM type: YTN; PAM sequence: TTT
  source 1..20: mol_type = other DNA
tggagacgaagtcttgctct

SEQ ID NO: 52881 - DNA, 20 bp, synthetic construct
  misc_feature 1..20: note = Description of Artificial Sequence: Synthetic oligonucleotide
  misc_feature 1..20: note = Target: SCN10A; (-) strand; PAM type: YTN; PAM sequence: TTG
  source 1..20: mol_type = other DNA
ttttggagacgaagtcttgc

SEQ ID NO: 52882 - DNA, 20 bp, synthetic construct
  misc_feature 1..20: note = Description of Artificial Sequence: Synthetic oligonucleotide
  misc_feature 1..20: note = Target: SCN10A; (-) strand; PAM type: YTN; PAM sequence: TTG
  source 1..20: mol_type = other DNA
ttgttttggagacgaagtct

SEQ ID NO: 52883 - DNA, 20 bp, synthetic construct
  misc_feature 1..20: note = Description of Artificial Sequence: Synthetic oligonucleotide
  misc_feature 1..20: note = Target: SCN10A; (-) strand; PAM type: YTN; PAM sequence: TTG
  source 1..20: mol_type = other DNA
ttgttgttttggagacgaag

SEQ ID NO: 52884 - DNA, 20 bp, synthetic construct
  misc_feature 1..20: note = Description of Artificial Sequence: Synthetic oligonucleotide
  misc_feature 1..20: note = Target: SCN10A; (-) strand; PAM type: YTN; PAM sequence: TTG
  source 1..20: mol_type = other DNA
ttgttgttgttttggagacg

SEQ ID NO: 52885 - DNA, 20 bp, synthetic construct
  misc_feature 1..20: note = Description of Artificial Sequence: Synthetic oligonucleotide
  misc_feature 1..20: note = Target: SCN10A; (-) strand; PAM type: YTN; PAM sequence: CTG
  source 1..20: mol_type = other DNA
ttgttgttgttgttttggag

SEQ ID NO: 52886 - DNA, 20 bp, synthetic construct
  misc_feature 1..20: note = Description of Artificial Sequence: Synthetic oligonucleotide
  misc_feature 1..20: note = Target: SCN10A; (-) strand; PAM type: YTN; PAM sequence: TTG
  source 1..20: mol_type = other DNA
ctgttgttgttgttgttttg

SEQ ID NO: 52887 - DNA, 20 bp, synthetic construct
  misc_feature 1..20: note = Description of Artificial Sequence: Synthetic oligonucleotide
  misc_feature 1..20: note = Target: SCN10A; (-) strand; PAM type: YTN; PAM sequence: TTG
  source 1..20: mol_type = other DNA
ttgctgttgttgttgttgtt

SEQ ID NO: 52888 - DNA, 20 bp, synthetic construct
  misc_feature 1..20: note = Description of Artificial Sequence: Synthetic oligonucleotide
  misc_feature 1..20: note = Target: SCN10A; (-) strand; PAM type: YTN; PAM sequence: TTG
  source 1..20: mol_type = other DNA
ttgttgctgttgttgttgtt

SEQ ID NO: 52889 - DNA, 20 bp, synthetic construct
  misc_feature 1..20: note = Description of Artificial Sequence: Synthetic oligonucleotide
  misc_feature 1..20: note = Target: SCN10A; (-) strand; PAM type: YTN; PAM sequence: TTG
  source 1..20: mol_type = other DNA
ttgttgttgctgttgttgtt

SEQ ID NO: 52890 - DNA, 20 bp, synthetic construct
  misc_feature 1..20: note = Description of Artificial Sequence: Synthetic oligonucleotide
  misc_feature 1..20: note = Target: SCN10A; (-) strand; PAM type: YTN; PAM sequence: TTG
  source 1..20: mol_type = other DNA
ttgttgttgttgctgttgtt

SEQ ID NO: 52891 - DNA, 20 bp, synthetic construct
  misc_feature 1..20: note = Description of Artificial Sequence: Synthetic oligonucleotide
  misc_feature 1..20: note = Target: SCN10A; (-) strand; PAM type: YTN; PAM sequence: TTG
  source 1..20: mol_type = other DNA
ttgttgttgttgttgctgtt

SEQ ID NO: 52892 - DNA, 20 bp, synthetic construct
  misc_feature 1..20: note = Description of Artificial Sequence: Synthetic oligonucleotide
  misc_feature 1..20: note = Target: SCN10A; (-) strand; PAM type: YTN; PAM sequence: TTT
  source 1..20: mol_type = other DNA
gttgttgttgttgttgctgt

SEQ ID NO: 52893 - DNA, 20 bp, synthetic construct
  misc_feature 1..20: note = Description of Artificial Sequence: Synthetic oligonucleotide
  misc_feature 1..20: note = Target: SCN10A; (-) strand; PAM type: YTN; PAM sequence: TTT
  source 1..20: mol_type = other DNA
tgttgttgttgttgttgctg

SEQ ID NO: 52894 - DNA, 20 bp, synthetic construct
  misc_feature 1..20: note = Description of Artificial Sequence: Synthetic oligonucleotide
  misc_feature 1..20: note = Target: SCN10A; (-) strand; PAM type: YTN; PAM sequence: TTT
  source 1..20: mol_type = other DNA
ttgttgttgttgttgttgct

SEQ ID NO: 52895 - DNA, 20 bp, synthetic construct
  misc_feature 1..20: note = Description of Artificial Sequence: Synthetic oligonucleotide
  misc_feature 1..20: note = Target: SCN10A; (-) strand; PAM type: YTN; PAM sequence: TTG
  source 1..20: mol_type = other DNA
tttttgttgttgttgttgtt

SEQ ID NO: 52896 - DNA, 20 bp, synthetic construct
  misc_feature 1..20: note = Description of Artificial Sequence: Synthetic oligonucleotide
  misc_feature 1..20: note = Target: SCN10A; (-) strand; PAM type: YTN; PAM sequence: TTT
  source 1..20: mol_type = other DNA
gtttttgttgttgttgttgt

SEQ ID NO: 52897 - DNA, 20 bp, synthetic construct
  misc_feature 1..20: note = Description of Artificial Sequence: Synthetic oligonucleotide
  misc_feature 1..20: note = Target: SCN10A; (-) strand; PAM type: YTN; PAM sequence: TTT
  source 1..20: mol_type = other DNA
tgtttttgttgttgttgttg

SEQ ID NO: 52898 - DNA, 20 bp, synthetic construct
  misc_feature 1..20: note = Description of Artificial Sequence: Synthetic oligonucleotide
  misc_feature 1..20: note = Target: SCN10A; (-) strand; PAM type: YTN; PAM sequence: TTT
  source 1..20: mol_type = other DNA
ttgtttttgttgttgttgtt

SEQ ID NO: 52899 - DNA, 20 bp, synthetic construct
  misc_feature 1..20: note = Description of Artificial Sequence: Synthetic oligonucleotide
  misc_feature 1..20: note = Target: SCN10A; (-) strand; PAM type: YTN; PAM sequence: TTG
  source 1..20: mol_type = other DNA
tttttgtttttgttgttgtt

SEQ ID NO: 52900 - DNA, 20 bp, synthetic construct
  misc_feature 1..20: note = Description of Artificial Sequence: Synthetic oligonucleotide
  misc_feature 1..20: note = Target: SCN10A; (-) strand; PAM type: YTN; PAM sequence: TTT
  source 1..20: mol_type = other DNA
gtttttgtttttgttgttgt

SEQ ID NO: 52901 - DNA, 20 bp, synthetic construct
  misc_feature 1..20: note = Description of Artificial Sequence: Synthetic oligonucleotide
  misc_feature 1..20: note = Target: SCN10A; (-) strand; PAM type: YTN; PAM sequence: TTT
  source 1..20: mol_type = other DNA
tgtttttgtttttgttgttg

SEQ ID NO: 52902 - DNA, 20 bp, synthetic construct
  misc_feature 1..20: note = Description of Artificial Sequence: Synthetic oligonucleotide
  misc_feature 1..20: note = Target: SCN10A; (-) strand; PAM type: YTN; PAM sequence: TTT
  source 1..20: mol_type = other DNA
ttgtttttgtttttgttgtt

SEQ ID NO: 52903 - DNA, 20 bp, synthetic construct
  misc_feature 1..20: note = Description of Artificial Sequence: Synthetic oligonucleotide
  misc_feature 1..20: note = Target: SCN10A; (-) strand; PAM type: YTN; PAM sequence: TTT
  source 1..20: mol_type = other DNA
tttgtttttgtttttgttgt

SEQ ID NO: 52904 - DNA, 20 bp, synthetic construct
  misc_feature 1..20: note = Description of Artificial Sequence: Synthetic oligonucleotide
  misc_feature 1..20: note = Target: SCN10A; (-) strand; PAM type: YTN; PAM sequence: TTT
  source 1..20: mol_type = other DNA
ttttgtttttgtttttgttg

SEQ ID NO: 52905 - DNA, 20 bp, synthetic construct
  misc_feature 1..20: note = Description of Artificial Sequence: Synthetic oligonucleotide
  misc_feature 1..20: note = Target: SCN10A; (-) strand; PAM type: YTN; PAM sequence: TTT
  source 1..20: mol_type = other DNA
tttttgtttttgtttttgtt

SEQ ID NO: 52906 - DNA, 20 bp, synthetic construct
  misc_feature 1..20: note = Description of Artificial Sequence: Synthetic oligonucleotide
  misc_feature 1..20: note = Target: SCN10A; (-) strand; PAM type: YTN; PAM sequence: TTT
  source 1..20: mol_type = other DNA
ttttttgtttttgtttttgt

SEQ ID NO: 52907 - DNA, 20 bp, synthetic construct
  misc_feature 1..20: note = Description of Artificial Sequence: Synthetic oligonucleotide
  misc_feature 1..20: note = Target: SCN10A; (-) strand; PAM type: YTN; PAM sequence: TTT
  source 1..20: mol_type = other DNA
tttttttgtttttgtttttg

SEQ ID NO: 52908 - DNA, 20 bp, synthetic construct
  misc_feature 1..20: note = Description of Artificial Sequence: Synthetic oligonucleotide
  misc_feature 1..20: note = Target: SCN10A; (-) strand; PAM type: YTN; PAM sequence: TTT
  source 1..20: mol_type = other DNA
ttttttttgtttttgttttt

SEQ ID NO: 52909 - DNA, 20 bp, synthetic construct
  misc_feature 1..20: note = Description of Artificial Sequence: Synthetic oligonucleotide
  misc_feature 1..20: note = Target: SCN10A; (-) strand; PAM type: YTN; PAM sequence: TTT
  source 1..20: mol_type = other DNA
tttttttttgtttttgtttt

SEQ ID NO: 52910 - DNA, 20 bp, synthetic construct
  misc_feature 1..20: note = Description of Artificial Sequence: Synthetic oligonucleotide
  misc_feature 1..20: note = Target: SCN10A; (-) strand; PAM type: YTN; PAM sequence: TTT
  source 1..20: mol_type = other DNA
ttttttttttgtttttgttt

SEQ ID NO: 52911 - DNA, 20 bp, synthetic construct
  misc_feature 1..20: note = Description of Artificial Sequence: Synthetic oligonucleotide
  misc_feature 1..20: note = Target: SCN10A; (-) strand; PAM type: YTN; PAM sequence: TTA
  source 1..20: mol_type = other DNA
gtacaggttttttttttttt

SEQ ID NO: 52912 - DNA, 20 bp, synthetic construct
  misc_feature 1..20: note = Description of Artificial Sequence: Synthetic oligonucleotide
  misc_feature 1..20: note = Target: SCN10A; (-) strand; PAM type: YTN; PAM sequence: CTA
  source 1..20: mol_type = other DNA
aaaatattagtacaggtttt

SEQ ID NO: 52913 - DNA, 20 bp, synthetic construct
  misc_feature 1..20: note = Description of Artificial Sequence: Synthetic oligonucleotide
  misc_feature 1..20: note = Target: SCN10A; (-) strand; PAM type: YTN; PAM sequence: CTC
  source 1..20: mol_type = other DNA
taaaaatattagtacaggtt

SEQ ID NO: 52914 - DNA, 20 bp, synthetic construct
  misc_feature 1..20: note = Description of Artificial Sequence: Synthetic oligonucleotide
  misc_feature 1..20: note = Target: SCN10A; (-) strand; PAM type: YTN; PAM sequence: CTC
  source 1..20: mol_type = other DNA
tctaaaaatattagtacagg

SEQ ID NO: 52915 - DNA, 20 bp, synthetic construct
  misc_feature 1..20: note = Description of Artificial Sequence: Synthetic oligonucleotide
  misc_feature 1..20: note = Target: SCN10A; (-) strand; PAM type: YTN; PAM sequence: TTA
  source 1..20: mol_type = other DNA
actctctaaaaatattagta

SEQ ID NO: 52916 - DNA, 20 bp, synthetic construct
  misc_feature 1..20: note = Description of Artificial Sequence: Synthetic oligonucleotide
  misc_feature 1..20: note = Target: SCN10A; (-) strand; PAM type: YTN; PAM sequence: CTT
  source 1..20: mol_type = other DNA
aactctctaaaaatattagt

SEQ ID NO: 52917 - DNA, 20 bp, synthetic construct
  misc_feature 1..20: note = Description of Artificial Sequence: Synthetic oligonucleotide
  misc_feature 1..20: note = Target: SCN10A; (-) strand; PAM type: YTN; PAM sequence: CTC
  source 1..20: mol_type = other DNA
ttaactctctaaaaatatta

SEQ ID NO: 52918 - DNA, 20 bp, synthetic construct
  misc_feature 1..20: note = Description of Artificial Sequence: Synthetic oligonucleotide
  misc_feature 1..20: note = Target: SCN10A; (-) strand; PAM type: YTN; PAM sequence: CTC
  source 1..20: mol_type = other DNA
acctcttaactctctaaaaa

SEQ ID NO: 52919 - DNA, 20 bp, synthetic construct
  misc_feature 1..20: note = Description of Artificial Sequence: Synthetic oligonucleotide
  misc_feature 1..20: note = Target: SCN10A; (-) strand; PAM type: YTN; PAM sequence: TTC
  source 1..20: mol_type = other DNA
tcacctcttaactctctaaa

SEQ ID NO: 52920 - DNA, 20 bp, synthetic construct
  misc_feature 1..20: note = Description of Artificial Sequence: Synthetic oligonucleotide
  misc_feature 1..20: note = Target: SCN10A; (-) strand; PAM type: YTN; PAM sequence: CTT
  source 1..20: mol_type = other DNA
ctcacctcttaactctctaa

SEQ ID NO: 52921 - DNA, 20 bp, synthetic construct
  misc_feature 1..20: note = Description of Artificial Sequence: Synthetic oligonucleotide
  misc_feature 1..20: note = Target: SCN10A; (-) strand; PAM type: YTN; PAM sequence: CTC
  source 1..20: mol_type = other DNA
ttctcacctcttaactctct

SEQ ID NO: 52922 - DNA, 20 bp, synthetic construct
  misc_feature 1..20: note = Description of Artificial Sequence: Synthetic oligonucleotide
  misc_feature 1..20: note = Target: SCN10A; (-) strand; PAM type: YTN; PAM sequence: CTA
  source 1..20: mol_type = other DNA
tacgtggagcctcttctcac

SEQ ID NO: 52923 - DNA, 20 bp, synthetic construct
  misc_feature 1..20: note = Description of Artificial Sequence: Synthetic oligonucleotide
  misc_feature 1..20: note = Target: SCN10A; (-) strand; PAM type: YTN; PAM sequence: TTC
  source 1..20: mol_type = other DNA
tatacgtggagcctcttctc

SEQ ID NO: 52924 - DNA, 20 bp, synthetic construct
  misc_feature 1..20: note = Description of Artificial Sequence: Synthetic oligonucleotide
  misc_feature 1..20: note = Target: SCN10A; (-) strand; PAM type: YTN; PAM sequence: TTG
  source 1..20: mol_type = other DNA
ttctatacgtggagcctctt

SEQ ID NO: 52925 - DNA, 20 bp, synthetic construct
  misc_feature 1..20: note = Description of Artificial Sequence: Synthetic oligonucleotide
  misc_feature 1..20: note = Target: SCN10A; (-) strand; PAM type: YTN; PAM sequence: CTT
  source 1..20: mol_type = other DNA
gttctatacgtggagcctct

SEQ ID NO: 52926 - DNA, 20 bp, synthetic construct
  misc_feature 1..20: note = Description of Artificial Sequence: Synthetic oligonucleotide
  misc_feature 1..20: note = Target: SCN10A; (-) strand; PAM type: YTN; PAM sequence: CTC
  source 1..20: mol_type = other DNA
ttgttctatacgtggagcct

SEQ ID NO: 52927 - DNA, 20 bp, synthetic construct
  misc_feature 1..20: note = Description of Artificial Sequence: Synthetic oligonucleotide
  misc_feature 1..20: note = Target: SCN10A; (-) strand; PAM type: YTN; PAM sequence: CTG
  source 1..20: mol_type = other DNA
ctcttgttctatacgtggag

SEQ ID NO: 52928 - DNA, 20 bp, synthetic construct
  misc_feature 1..20: note = Description of Artificial Sequence: Synthetic oligonucleotide
  misc_feature 1..20: note = Target: SCN10A; (-) strand; PAM type: YTN; PAM sequence: TTC
  source 1..20: mol_type = other DNA
tgctcttgttctatacgtgg

SEQ ID NO: 52929 - DNA, 20 bp, synthetic construct
  misc_feature 1..20: note = Description of Artificial Sequence: Synthetic oligonucleotide
  misc_feature 1..20: note = Target: SCN10A; (-) strand; PAM type: YTN; PAM sequence: CTT
  source 1..20: mol_type = other DNA
ctgctcttgttctatacgtg

SEQ ID NO: 52930 - DNA, 20 bp, synthetic construct
  misc_feature 1..20: note = Description of Artificial Sequence: Synthetic oligonucleotide
  misc_feature 1..20: note = Target: SCN10A; (-) strand; PAM type: YTN; PAM sequence: TTA
  source 1..20: mol_type = other DNA
catccttctgctcttgttct

SEQ ID NO: 52931 - DNA, 20 bp, synthetic construct
  misc_feature 1..20: note = Description of Artificial Sequence: Synthetic oligonucleotide
  misc_feature 1..20: note = Target: SCN10A; (-) strand; PAM type: YTN; PAM sequence: TTT
  source 1..20: mol_type = other DNA
acatccttctgctcttgttc

SEQ ID NO: 52932 - DNA, 20 bp, synthetic construct
  misc_feature 1..20: note = Description of Artificial Sequence: Synthetic oligonucleotide
  misc_feature 1..20: note = Target: SCN10A; (-) strand; PAM type: YTN; PAM sequence: TTT
  source 1..20: mol_type = other DNA
tacatccttctgctcttgtt

SEQ ID NO: 52933 - DNA, 20 bp, synthetic construct
  misc_feature 1..20: note = Description of Artificial Sequence: Synthetic oligonucleotide
  misc_feature 1..20: note = Target: SCN10A; (-) strand; PAM type: YTN; PAM sequence: TTT
  source 1..20: mol_type = other DNA
ttacatccttctgctcttgt

SEQ ID NO: 52934 - DNA, 20 bp, synthetic construct
  misc_feature 1..20: note = Description of Artificial Sequence: Synthetic oligonucleotide
  misc_feature 1..20: note = Target: SCN10A; (-) strand; PAM type: YTN; PAM sequence: CTT
  source 1..20: mol_type = other DNA
tttacatccttctgctcttg

SEQ ID NO: 52935 - DNA, 20 bp, synthetic construct
  misc_feature 1..20: note = Description of Artificial Sequence: Synthetic oligonucleotide
  misc_feature 1..20: note = Target: SCN10A; (-) strand; PAM type: YTN; PAM sequence: TTG
  source 1..20: mol_type = other DNA
aaggtactttttacatcctt

SEQ ID NO: 52936 - DNA, 20 bp, synthetic construct
  misc_feature 1..20: note = Description of Artificial Sequence: Synthetic oligonucleotide
  misc_feature 1..20: note = Target: SCN10A; (-) strand; PAM type: YTN; PAM sequence: TTT
  source 1..20: mol_type = other DNA
gaaggtactttttacatcct

SEQ ID NO: 52937 - DNA, 20 bp, synthetic construct
  misc_feature 1..20: note = Description of Artificial Sequence: Synthetic oligonucleotide
  misc_feature 1..20: note = Target: SCN10A; (-) strand; PAM type: YTN; PAM sequence: CTT
  source 1..20: mol_type = other DNA
tgaaggtactttttacatcc

SEQ ID NO: 52938 - DNA, 20 bp, synthetic construct
  misc_feature 1..20: note = Description of Artificial Sequence: Synthetic oligonucleotide
  misc_feature 1..20: note = Target: SCN10A; (-) strand; PAM type: YTN; PAM sequence: TTG
  source 1..20: mol_type = other DNA
tctttgaaggtactttttac

SEQ ID NO: 52939 - DNA, 20 bp, synthetic construct
  misc_feature 1..20: note = Description of Artificial Sequence: Synthetic oligonucleotide
  misc_feature 1..20: note = Target: SCN10A; (-) strand; PAM type: YTN; PAM sequence: TTT
  source 1..20: mol_type = other DNA
gtctttgaaggtacttttta

SEQ ID NO: 52940 - DNA, 20 bp, synthetic construct
  misc_feature 1..20: note = Description of Artificial Sequence: Synthetic oligonucleotide
  misc_feature 1..20: note = Target: SCN10A; (-) strand; PAM type: YTN; PAM sequence: TTT
  source 1..20: mol_type = other DNA
tgtctttgaaggtacttttt

SEQ ID NO: 52941 - DNA, 20 bp, synthetic construct
  misc_feature 1..20: note = Description of Artificial Sequence: Synthetic oligonucleotide
  misc_feature 1..20: note = Target: SCN10A; (-) strand; PAM type: YTN; PAM sequence: TTC
  source 1..20: mol_type = other DNA
cattttgtctttgaaggtac

SEQ ID NO: 52942 - DNA, 20 bp, synthetic construct
  misc_feature 1..20: note = Description of Artificial Sequence: Synthetic oligonucleotide
  misc_feature 1..20: note = Target: SCN10A; (-) strand; PAM type: YTN; PAM sequence: TTC
  source 1..20: mol_type = other DNA
aaaattccattttgtctttg

SEQ ID NO: 52943 - DNA, 20 bp, synthetic construct
  misc_feature 1..20: note = Description of Artificial Sequence: Synthetic oligonucleotide
  misc_feature 1..20: note = Target: SCN10A; (-) strand; PAM type: YTN; PAM sequence: TTT
  source 1..20: mol_type = other DNA
caaaattccattttgtcttt

SEQ ID NO: 52944 - DNA, 20 bp, synthetic construct
  misc_feature 1..20: note = Description of Artificial Sequence: Synthetic oligonucleotide
  misc_feature 1..20: note = Target: SCN10A; (-) strand; PAM type: YTN; PAM sequence: TTT
  source 1..20: mol_type = other DNA
tcaaaattccattttgtctt

SEQ ID NO: 52945 - DNA, 20 bp, synthetic construct
  misc_feature 1..20: note = Description of Artificial Sequence: Synthetic oligonucleotide
  misc_feature 1..20: note = Target: SCN10A; (-) strand; PAM type: YTN; PAM sequence: TTG
  source 1..20: mol_type = other DNA
ttttcaaaattccattttgt

SEQ ID NO: 52946 - DNA, 20 bp, synthetic construct
  misc_feature 1..20: note = Description of Artificial Sequence: Synthetic oligonucleotide
  misc_feature 1..20: note = Target: SCN10A; (-) strand; PAM type: YTN; PAM sequence: TTT
  source 1..20: mol_type = other DNA
gttttcaaaattccattttg

SEQ ID NO: 52947 - DNA, 20 bp, synthetic construct
  misc_feature 1..20: note = Description of Artificial Sequence: Synthetic oligonucleotide
  misc_feature 1..20: note = Target: SCN10A; (-) strand; PAM type: YTN; PAM sequence: TTT
  source 1..20: mol_type = other DNA
tgttttcaaaattccatttt

SEQ ID NO: 52948 - DNA, 20 bp, synthetic construct
  misc_feature 1..20: note = Description of Artificial Sequence: Synthetic oligonucleotide
  misc_feature 1..20: note = Target: SCN10A; (-) strand; PAM type: YTN; PAM sequence: TTT
  source 1..20: mol_type = other DNA
ttgttttcaaaattccattt

SEQ ID NO: 52949 - DNA, 20 bp, synthetic construct
  misc_feature 1..20: note = Description of Artificial Sequence: Synthetic oligonucleotide
  misc_feature 1..20: note = Target: SCN10A; (-) strand; PAM type: YTN; PAM sequence: CTA
  source 1..20: mol_type = other DNA
tcatatttttgttttcaaaa

SEQ ID NO: 52950 - DNA, 20 bp, synthetic construct
  misc_feature 1..20: note = Description of Artificial Sequence: Synthetic oligonucleotide
  misc_feature 1..20: note = Target: SCN10A; (-) strand; PAM type: YTN; PAM sequence: TTG
  source 1..20: mol_type = other DNA
ctatcatatttttgttttca

SEQ ID NO: 52951 - DNA, 20 bp, synthetic construct
  misc_feature 1..20: note = Description of Artificial Sequence: Synthetic oligonucleotide
  misc_feature 1..20: note = Target: SCN10A; (-) strand; PAM type: YTN; PAM sequence: TTT
  source 1..20: mol_type = other DNA
gctatcatatttttgttttc

SEQ ID NO: 52952 - DNA, 20 bp, synthetic construct
  misc_feature 1..20: note = Description of Artificial Sequence: Synthetic oligonucleotide
  misc_feature 1..20: note = Target: SCN10A; (-) strand; PAM type: YTN; PAM sequence: TTT
  source 1..20: mol_type = other DNA
tgctatcatatttttgtttt

SEQ ID NO: 52953 - DNA, 20 bp, synthetic construct
  misc_feature 1..20: note = Description of Artificial Sequence: Synthetic oligonucleotide
  misc_feature 1..20: note = Target: SCN10A; (-) strand; PAM type: YTN; PAM sequence: CTT
  source 1..20: mol_type = other DNA
ttgctatcatatttttgttt

SEQ ID NO: 52954 - DNA, 20 bp, synthetic construct
  misc_feature 1..20: note = Description of Artificial Sequence: Synthetic oligonucleotide
  misc_feature 1..20: note = Target: SCN10A; (-) strand; PAM type: YTN; PAM sequence: TTA
  source 1..20: mol_type = other DNA
cttttgctatcatatttttg

SEQ ID NO: 52955 - DNA, 20 bp, synthetic construct
  misc_feature 1..20: note = Description of Artificial Sequence: Synthetic oligonucleotide
  misc_feature 1..20: note = Target: SCN10A; (-) strand; PAM type: YTN; PAM sequence: TTT
  source 1..20: mol_type = other DNA
acttttgctatcatattttt

SEQ ID NO: 52956 - DNA, 20 bp, synthetic construct
  misc_feature 1..20: note = Description of Artificial Sequence: Synthetic oligonucleotide
  misc_feature 1..20: note = Target: SCN10A; (-) strand; PAM type: YTN; PAM sequence: TTT
  source 1..20: mol_type = other DNA
tacttttgctatcatatttt

SEQ ID NO: 52957 - DNA, 20 bp, synthetic construct
  misc_feature 1..20: note = Description of Artificial Sequence: Synthetic oligonucleotide
  misc_feature 1..20: note = Target: SCN10A; (-) strand; PAM type: YTN; PAM sequence: TTA
  source 1..20: mol_type = other DNA
gtgttttacttttgctatca

SEQ ID NO: 52958 - DNA, 20 bp, synthetic construct
  misc_feature 1..20: note = Description of Artificial Sequence: Synthetic oligonucleotide
  misc_feature 1..20: note = Target: SCN10A; (-) strand; PAM type: YTN; PAM sequence: CTA
  source 1..20: mol_type = other DNA
ttagtgttttacttttgcta

SEQ ID NO: 52959 - DNA, 20 bp, synthetic construct
  misc_feature 1..20: note = Description of Artificial Sequence: Synthetic oligonucleotide
  misc_feature 1..20: note = Target: SCN10A; (-) strand; PAM type: YTN; PAM sequence: TTA
  source 1..20: mol_type = other DNA
caagtccgcctattagtgtt

SEQ ID NO: 52960 - DNA, 20 bp, synthetic construct
  misc_feature 1..20: note = Description of Artificial Sequence: Synthetic oligonucleotide
  misc_feature 1..20: note = Target: SCN10A; (-) strand; PAM type: YTN; PAM sequence: TTT
  source 1..20: mol_type = other DNA
acaagtccgcctattagtgt

SEQ ID NO: 52961 - DNA, 20 bp, synthetic construct
  misc_feature 1..20: note = Description of Artificial Sequence: Synthetic oligonucleotide
  misc_feature 1..20: note = Target: SCN10A; (-) strand; PAM type: YTN; PAM sequence: TTA
  source 1..20: mol_type = other DNA
tttacaagtccgcctattag

SEQ ID NO: 52962 - DNA, 20 bp, synthetic construct
  misc_feature 1..20: note = Description of Artificial Sequence: Synthetic oligonucleotide
  misc_feature 1..20: note = Target: SCN10A; (-) strand; PAM type: YTN; PAM sequence: TTT
  source 1..20: mol_type = other DNA
atttacaagtccgcctatta

SEQ ID NO: 52963 - DNA, 20 bp, synthetic construct
  misc_feature 1..20: note = Description of Artificial Sequence: Synthetic oligonucleotide
  misc_feature 1..20: note = Target: SCN10A; (-) strand; PAM type: YTN; PAM sequence: CTT
  source 1..20: mol_type = other DNA
tatttacaagtccgcctatt

SEQ ID NO: 52964 - DNA, 20 bp, synthetic construct
  misc_feature 1..20: note = Description of Artificial Sequence: Synthetic oligonucleotide
  misc_feature 1..20: note = Target: SCN10A; (-) strand; PAM type: YTN; PAM sequence: TTC
  source 1..20: mol_type = other DNA
caaaactttatttacaagtc

SEQ ID NO: 52965 - DNA, 20 bp, synthetic construct
  misc_feature 1..20: note = Description of Artificial Sequence: Synthetic oligonucleotide
  misc_feature 1..20: note = Target: SCN10A; (-) strand; PAM type: YTN; PAM sequence: TTT
  source 1..20: mol_type = other DNA
ccaaaactttatttacaagt

SEQ ID NO: 52966 - DNA, 20 bp, synthetic construct
  misc_feature 1..20: note = Description of Artificial Sequence: Synthetic oligonucleotide
  misc_feature 1..20: note = Target: SCN10A; (-) strand; PAM type: YTN; PAM sequence: CTG
  source 1..20: mol_type = other DNA
tgagatttccaaaactttat

SEQ ID NO: 52967 - DNA, 20 bp, synthetic construct
  misc_feature 1..20: note = Description of Artificial Sequence: Synthetic oligonucleotide
  misc_feature 1..20: note = Target: SCN10A; (-) strand; PAM type: YTN; PAM sequence: TTC
  source 1..20: mol_type = other DNA
ctgtgagatttccaaaactt

SEQ ID NO: 52968 - DNA, 20 bp, synthetic construct
  misc_feature 1..20: note = Description of Artificial Sequence: Synthetic oligonucleotide
  misc_feature 1..20: note = Target: SCN10A; (-) strand; PAM type: YTN; PAM sequence: CTT
  source 1..20: mol_type = other DNA
cctgtgagatttccaaaact

SEQ ID NO: 52969 - DNA, 20 bp, synthetic construct
  misc_feature 1..20: note = Description of Artificial Sequence: Synthetic oligonucleotide
  misc_feature 1..20: note = Target: SCN10A; (-) strand; PAM type: YTN; PAM sequence: TTC
  source 1..20: mol_type = other DNA
cacttcctgtgagatttcca

SEQ ID NO: 52970 - DNA, 20 bp, synthetic construct
  misc_feature 1..20: note = Description of Artificial Sequence: Synthetic oligonucleotide
  misc_feature 1..20: note = Target: SCN10A; (-) strand; PAM type: YTN; PAM sequence: TTG
  source 1..20: mol_type = other DNA
ttccacttcctgtgagattt

SEQ ID NO: 52971 - DNA, 20 bp, synthetic construct
  misc_feature 1..20: note = Description of Artificial Sequence: Synthetic oligonucleotide
  misc_feature 1..20: note = Target: SCN10A; (-) strand; PAM type: YTN; PAM sequence: TTT
  source 1..20: mol_type = other DNA
gttccacttcctgtgagatt

SEQ ID NO: 52972 - DNA, 20 bp, synthetic construct
  misc_feature 1..20: note = Description of Artificial Sequence: Synthetic oligonucleotide
  misc_feature 1..20: note = Target: SCN10A; (-) strand; PAM type: YTN; PAM sequence: TTT
  source 1..20: mol_type = other DNA
tgttccacttcctgtgagat

SEQ ID NO: 52973 - DNA, 20 bp, synthetic construct
  misc_feature 1..20: note = Description of Artificial Sequence: Synthetic oligonucleotide
  misc_feature 1..20: note = Target: SCN10A; (-) strand; PAM type: YTN; PAM sequence: TTT
  source 1..20: mol_type = other DNA
ttgttccacttcctgtgaga

SEQ ID NO: 52974 - DNA, 20 bp, synthetic construct
  misc_feature 1..20: note = Description of Artificial Sequence: Synthetic oligonucleotide
  misc_feature 1..20: note = Target: SCN10A; (-) strand; PAM type: YTN; PAM sequence: TTT
  source 1..20: mol_type = other DNA
tttgttccacttcctgtgag

SEQ ID NO: 52975 - DNA, 20 bp, synthetic construct
  misc_feature 1..20: note = Description of Artificial Sequence: Synthetic oligonucleotide
  misc_feature 1..20: note = Target: SCN10A; (-) strand; PAM type: YTN; PAM sequence: CTT
  source 1..20: mol_type = other DNA
ttttgttccacttcctgtga

SEQ ID NO: 52976 - DNA, 20 bp, synthetic construct
  misc_feature 1..20: note = Description of Artificial Sequence: Synthetic oligonucleotide
  misc_feature 1..20: note = Target: SCN10A; (-) strand; PAM type: YTN; PAM sequence: CTG
  source 1..20: mol_type = other DNA
cttttttgttccacttcctg

SEQ ID NO: 52977 - DNA, 20 bp, synthetic construct
  misc_feature 1..20: note = Description of Artificial Sequence: Synthetic oligonucleotide
  misc_feature 1..20: note = Target: SCN10A; (-) strand; PAM type: YTN; PAM sequence: TTC
  source 1..20: mol_type = other DNA
tgcttttttgttccacttcc

SEQ ID NO: 52978 - DNA, 20 bp, synthetic construct
  misc_feature 1..20: note = Description of Artificial Sequence: Synthetic oligonucleotide
  misc_feature 1..20: note = Target: SCN10A; (-) strand; PAM type: YTN; PAM sequence: TTT
  source 1..20: mol_type = other DNA
ctgcttttttgttccacttc

SEQ ID NO: 52979 - DNA, 20 bp, synthetic construct
  misc_feature 1..20: note = Description of Artificial Sequence: Synthetic oligonucleotide
  misc_feature 1..20: note = Target: SCN10A; (-) strand; PAM type: YTN; PAM sequence: CTA
  source 1..20: mol_type = other DNA
tccatttctgcttttttgtt

SEQ ID NO: 52980 - DNA, 20 bp, synthetic construct
  misc_feature 1..20: note = Description of Artificial Sequence: Synthetic oligonucleotide
  misc_feature 1..20: note = Target: SCN10A; (-) strand; PAM type: YTN; PAM sequence: TTC
  source 1..20: mol_type = other DNA
ctatccatttctgctttttt

SEQ ID NO: 52981 - DNA, 20 bp, synthetic construct
  misc_feature 1..20: note = Description of Artificial Sequence: Synthetic oligonucleotide
  misc_feature 1..20: note = Target: SCN10A; (-) strand; PAM type: YTN; PAM sequence: CTT
  source 1..20: mol_type = other DNA
cctatccatttctgcttttt

SEQ ID NO: 52982 - DNA, 20 bp, synthetic construct
  misc_feature 1..20: note = Description of Artificial Sequence: Synthetic oligonucleotide
  misc_feature 1..20: note = Target: SCN10A; (-) strand; PAM type: YTN; PAM sequence: TTA
  source 1..20: mol_type = other DNA
tcacttcctatccatttctg

SEQ ID NO: 52983 - DNA, 20 bp, synthetic construct
  misc_feature 1..20: note = Description of Artificial Sequence: Synthetic oligonucleotide
  misc_feature 1..20: note = Target: SCN10A; (-) strand; PAM type: YTN; PAM sequence: TTT
  source 1..20: mol_type = other DNA
atcacttcctatccatttct

SEQ ID NO: 52984 - DNA, 20 bp, synthetic construct
  misc_feature 1..20: note = Description of Artificial Sequence: Synthetic oligonucleotide
  misc_feature 1..20: note = Target: SCN10A; (-) strand; PAM type: YTN; PAM sequence: TTT
  source 1..20: mol_type = other DNA
tatcacttcctatccatttc

SEQ ID NO: 52985 - DNA, 20 bp, synthetic construct
  misc_feature 1..20: note = Description of Artificial Sequence: Synthetic oligonucleotide
  misc_feature 1..20: note = Target: SCN10A; (-) strand; PAM type: YTN; PAM sequence: TTT
  source 1..20: mol_type = other DNA
ttatcacttcctatccattt

SEQ ID NO: 52986 - DNA, 20 bp, synthetic construct
  misc_feature 1..20: note = Description of Artificial Sequence: Synthetic oligonucleotide
  misc_feature 1..20: note = Target: SCN10A; (-) strand; PAM type: YTN; PAM sequence: CTT
  source 1..20: mol_type = other DNA
tttatcacttcctatccatt

SEQ ID NO: 52987 - DNA, 20 bp, synthetic construct
  misc_feature 1..20: note = Description of Artificial Sequence: Synthetic oligonucleotide
  misc_feature 1..20: note = Target: SCN10A; (-) strand; PAM type: YTN; PAM sequence: TTC
  source 1..20: mol_type = other DNA
aaactttttatcacttccta

SEQ ID NO: 52988 - DNA, 20 bp, synthetic construct
  misc_feature 1..20: note = Description of Artificial Sequence: Synthetic oligonucleotide
  misc_feature 1..20: note = Target: SCN10A; (-) strand; PAM type: YTN; PAM sequence: TTT
  source 1..20: mol_type = other DNA
caaactttttatcacttcct

SEQ ID NO: 52989 - DNA, 20 bp, synthetic construct
  misc_feature 1..20: note = Description of Artificial Sequence: Synthetic oligonucleotide
  misc_feature 1..20: note = Target: SCN10A; (-) strand; PAM type: YTN; PAM sequence: TTT
  source 1..20: mol_type = other DNA
tcaaactttttatcacttcc

SEQ ID NO: 52990 - DNA, 20 bp, synthetic construct
  misc_feature 1..20: note = Description of Artificial Sequence: Synthetic oligonucleotide
  misc_feature 1..20: note = Target: SCN10A; (-) strand; PAM type: YTN; PAM sequence: CTA
  source 1..20: mol_type = other DNA
attttcaaactttttatcac

SEQ ID NO: 52991 - DNA, 20 bp, synthetic construct
  misc_feature 1..20: note = Description of Artificial Sequence: Synthetic oligonucleotide
  misc_feature 1..20: note = Target: SCN10A; (-) strand; PAM type: YTN; PAM sequence: CTC
  source 1..20: mol_type = other DNA
taattttcaaactttttatc

SEQ ID NO: 52992 - DNA, 20 bp, synthetic construct
  misc_feature 1..20: note = Description of Artificial Sequence: Synthetic oligonucleotide
  misc_feature 1..20: note = Target: SCN10A; (-) strand; PAM type: YTN; PAM sequence: TTC
  source 1..20: mol_type = other DNA
tctaattttcaaacttttta

SEQ ID NO: 52993 - DNA, 20 bp, synthetic construct
  misc_feature 1..20: note = Description of Artificial Sequence: Synthetic oligonucleotide
  misc_feature 1..20: note = Target: SCN10A; (-) strand; PAM type: YTN; PAM sequence: CTG
  source 1..20: mol_type = other DNA
attctctaattttcaaactt

SEQ ID NO: 52994 - DNA, 20 bp, synthetic construct
  misc_feature 1..20: note = Description of Artificial Sequence: Synthetic oligonucleotide
  misc_feature 1..20: note = Target: SCN10A; (-) strand; PAM type: YTN; PAM sequence: CTA
  source 1..20: mol_type = other DNA
gtctgattctctaattttca

SEQ ID NO: 52995 - DNA, 20 bp, synthetic construct
  misc_feature 1..20: note = Description of Artificial Sequence: Synthetic oligonucleotide
  misc_feature 1..20: note = Target: SCN10A; (-) strand; PAM type: YTN; PAM sequence: CTC
  source 1..20: mol_type = other DNA
ctagtctgattctctaattt

SEQ ID NO: 52996 - DNA, 20 bp, synthetic construct
  misc_feature 1..20: note = Description of Artificial Sequence: Synthetic oligonucleotide
  misc_feature 1..20: note = Target: SCN10A; (-) strand; PAM type: YTN; PAM sequence: TTA
  source 1..20: mol_type = other DNA
gtcaaacaatatacctccta

SEQ ID NO: 52997 - DNA, 20 bp, synthetic construct
  misc_feature 1..20: note = Description of Artificial Sequence: Synthetic oligonucleotide
  misc_feature 1..20: note = Target: SCN10A; (-) strand; PAM type: YTN; PAM sequence: CTA
  source 1..20: mol_type = other DNA
ttagtcaaacaatatacctc

SEQ ID NO: 52998 - DNA, 20 bp, synthetic construct
  misc_feature 1..20: note = Description of Artificial Sequence: Synthetic oligonucleotide
  misc_feature 1..20: note = Target: SCN10A; (-) strand; PAM type: YTN; PAM sequence: CTC
  source 1..20: mol_type = other DNA
ctattagtcaaacaatatac

SEQ ID NO: 52999 - DNA, 20 bp, synthetic construct
  misc_feature 1..20: note = Description of Artificial Sequence: Synthetic oligonucleotide
  misc_feature 1..20: note = Target: SCN10A; (-) strand; PAM type: YTN; PAM sequence: CTA
  source 1..20: mol_type = other DNA
gacctcctattagtcaaaca

SEQ ID NO: 53000 - DNA, 20 bp, synthetic construct
  misc_feature 1..20: note = Description of Artificial Sequence: Synthetic oligonucleotide
  misc_feature 1..20: note = Target: SCN10A; (-) strand; PAM type: YTN; PAM sequence: TTC
  source 1..20: mol_type = other DNA
tagacctcctattagtcaaa

SEQ ID NO: 53001 - DNA, 20 bp, synthetic construct
  misc_feature 1..20: note = Description of Artificial Sequence: Synthetic oligonucleotide
  misc_feature 1..20: note = Target: SCN10A; (-) strand; PAM type: YTN; PAM sequence: TTT
  source 1..20: mol_type = other DNA
ctagacctcctattagtcaa

SEQ ID NO: 53002 - DNA, 20 bp, synthetic construct
  misc_feature 1..20: note = Description of Artificial Sequence: Synthetic oligonucleotide
  misc_feature 1..20: note = Target: SCN10A; (-) strand; PAM type: YTN; PAM sequence: CTT
  source 1..20: mol_type = other DNA
tctagacctcctattagtca

SEQ ID NO: 53003 - DNA, 20 bp, synthetic construct
  misc_feature 1..20: note = Description of Artificial Sequence: Synthetic oligonucleotide
  misc_feature 1..20: note = Target: SCN10A; (-) strand; PAM type: YTN; PAM sequence: TTC
  source 1..20: mol_type = other DNA
tttctagacctcctattagt

SEQ ID NO: 53004 - DNA, 20 bp, synthetic construct
  misc_feature 1..20: note = Description of Artificial Sequence: Synthetic oligonucleotide
  misc_feature 1..20: note = Target: SCN10A; (-) strand; PAM type: YTN; PAM sequence: TTT
  source 1..20: mol_type = other DNA
ctttctagacctcctattag

SEQ ID NO: 53005 - DNA, 20 bp, synthetic construct
  misc_feature 1..20: note = Description of Artificial Sequence: Synthetic oligonucleotide
  misc_feature 1..20: note = Target: SCN10A; (-) strand; PAM type: YTN; PAM sequence: CTA
  source 1..20: mol_type = other DNA
atttctttctagacctccta

SEQ ID NO: 53006 - DNA, 20 bp, synthetic construct
  misc_feature 1..20: note = Description of Artificial Sequence: Synthetic oligonucleotide
  misc_feature 1..20: note = Target: SCN10A; (-) strand; PAM type: YTN; PAM sequence: TTC
  source 1..20: mol_type = other DNA
taatttctttctagacctcc

SEQ ID NO: 53007 - DNA, 20 bp, synthetic construct
  misc_feature 1..20: note = Description of Artificial Sequence: Synthetic oligonucleotide
  misc_feature 1..20: note = Target: SCN10A; (-) strand; PAM type: YTN; PAM sequence: CTT
  source 1..20: mol_type = other DNA
ctaatttctttctagacctc

SEQ ID NO: 53008 - DNA, 20 bp, synthetic construct
  misc_feature 1..20: note = Description of Artificial Sequence: Synthetic oligonucleotide
  misc_feature 1..20: note = Target: SCN10A; (-) strand; PAM type: YTN; PAM sequence: TTG
  source 1..20: mol_type = other DNA
tcttctaatttctttctaga

SEQ ID NO: 53009 - DNA, 20 bp, synthetic construct
  misc_feature 1..20: note = Description of Artificial Sequence: Synthetic oligonucleotide
  misc_feature 1..20: note = Target: SCN10A; (-) strand; PAM type: YTN; PAM sequence: CTC
  source 1..20: mol_type = other DNA
attgtcttctaatttctttc

SEQ ID NO: 53010 - DNA, 20 bp, synthetic construct
  misc_feature 1..20: note = Description of Artificial Sequence: Synthetic oligonucleotide
  misc_feature 1..20: note = Target: SCN10A; (-) strand; PAM type: YTN; PAM sequence: TTG
  source 1..20: mol_type = other DNA
ctcattgtcttctaatttct

SEQ ID NO: 53011 - DNA, 20 bp, synthetic construct
  misc_feature 1..20: note = Description of Artificial Sequence: Synthetic oligonucleotide
  misc_feature 1..20: note = Target: SCN10A; (-) strand; PAM type: YTN; PAM sequence: CTT
  source 1..20: mol_type = other DNA
gctcattgtcttctaatttc

SEQ ID NO: 53012 - DNA, 20 bp, synthetic construct
  misc_feature 1..20: note = Description of Artificial Sequence: Synthetic oligonucleotide
  misc_feature 1..20: note = Target: SCN10A; (-) strand; PAM type: YTN; PAM sequence: TTG
  source 1..20: mol_type = other DNA
aaggccttgctcattgtctt

SEQ ID NO: 53013 - DNA, 20 bp, synthetic construct
  misc_feature 1..20: note = Description of Artificial Sequence: Synthetic oligonucleotide
  misc_feature 1..20: note = Target: SCN10A; (-) strand; PAM type: YTN; PAM sequence: TTT
  source 1..20: mol_type = other DNA
gaaggccttgctcattgtct

SEQ ID NO: 53014 - DNA, 20 bp, synthetic construct
  misc_feature 1..20: note = Description of Artificial Sequence: Synthetic oligonucleotide
  misc_feature 1..20: note = Target: SCN10A; (-) strand; PAM type: YTN; PAM sequence: TTT
  source 1..20: mol_type = other DNA
tgaaggccttgctcattgtc

SEQ ID NO: 53015 - DNA, 20 bp, synthetic construct
  misc_feature 1..20: note = Description of Artificial Sequence: Synthetic oligonucleotide
  misc_feature 1..20: note = Target: SCN10A; (-) strand; PAM type: YTN; PAM sequence: TTA
  source 1..20: mol_type = other DNA
attttgaaggccttgctcat

SEQ ID NO: 53016 - DNA, 20 bp, synthetic construct
  misc_feature 1..20: note = Description of Artificial Sequence: Synthetic oligonucleotide
  misc_feature 1..20: note = Target: SCN10A; (-) strand; PAM type: YTN; PAM sequence: CTT
  source 1..20: mol_type = other DNA
aattttgaaggccttgctca

SEQ ID NO: 53017 - DNA, 20 bp, synthetic construct
  misc_feature 1..20: note = Description of Artificial Sequence: Synthetic oligonucleotide
  misc_feature 1..20: note = Target: SCN10A; (-) strand; PAM type: YTN; PAM sequence: CTC
  source 1..20: mol_type = other DNA
ttaattttgaaggccttgct

SEQ ID NO: 53018 - DNA, 20 bp, synthetic construct
  misc_feature 1..20: note = Description of Artificial Sequence: Synthetic oligonucleotide
  misc_feature 1..20: note = Target: SCN10A; (-) strand; PAM type: YTN; PAM sequence: TTC
  source 1..20: mol_type = other DNA
cctcttaattttgaaggcct

SEQ ID NO: 53019 - DNA, 20 bp, synthetic construct
  misc_feature 1..20: note = Description of Artificial Sequence: Synthetic oligonucleotide
  misc_feature 1..20: note = Target: SCN10A; (-) strand; PAM type: YTN; PAM sequence: TTT
  source 1..20: mol_type = other DNA
ccctcttaattttgaaggcc

SEQ ID NO: 53020 - DNA, 20 bp, synthetic construct
  misc_feature 1..20: note = Description of Artificial Sequence: Synthetic oligonucleotide
  misc_feature 1..20: note = Target: SCN10A; (-) strand; PAM type: YTN; PAM sequence: TTA
  source 1..20: mol_type = other DNA
tttccctcttaattttgaag

SEQ ID NO: 53021 - DNA, 20 bp, synthetic construct
  misc_feature 1..20: note = Description of Artificial Sequence: Synthetic oligonucleotide
  misc_feature 1..20: note = Target: SCN10A; (-) strand; PAM type: YTN; PAM sequence: TTA
  source 1..20: mol_type = other DNA
gaaattatttccctcttaat

SEQ ID NO: 53022 - DNA, 20 bp, synthetic construct
  misc_feature 1..20: note = Description of Artificial Sequence: Synthetic oligonucleotide
  misc_feature 1..20: note = Target: SCN10A; (-) strand; PAM type: YTN; PAM sequence: CTG
  source 1..20: mol_type = other DNA
tattagaaattatttccctc

SEQ ID NO: 53023 - DNA, 20 bp, synthetic construct
  misc_feature 1..20: note = Description of Artificial Sequence: Synthetic oligonucleotide
  misc_feature 1..20: note = Target: SCN10A; (-) strand; PAM type: YTN; PAM sequence: TTC
  source 1..20: mol_type = other DNA
tgtattagaaattatttccc

SEQ ID NO: 53024 - DNA, 20 bp, synthetic construct
  misc_feature 1..20: note = Description of Artificial Sequence: Synthetic oligonucleotide
  misc_feature 1..20: note = Target: SCN10A; (-) strand; PAM type: YTN; PAM sequence: CTT
  source 1..20: mol_type = other DNA
ctgtattagaaattatttcc

SEQ ID NO: 53025 - DNA, 20 bp, synthetic construct
  misc_feature 1..20: note = Description of Artificial Sequence: Synthetic oligonucleotide
  misc_feature 1..20: note = Target: SCN10A; (-) strand; PAM type: YTN; PAM sequence: CTA
  source 1..20: mol_type = other DNA
gggaaagacttctgtattag

SEQ ID NO: 53026 - DNA, 20 bp, synthetic construct
  misc_feature 1..20: note = Description of Artificial Sequence: Synthetic oligonucleotide
  misc_feature 1..20: note = Target: SCN10A; (-) strand; PAM type: YTN; PAM sequence: TTG
  source 1..20: mol_type = other DNA
gctagggaaagacttctgta

SEQ ID NO: 53027 - DNA, 20 bp, synthetic construct
  misc_feature 1..20: note = Description of Artificial Sequence: Synthetic oligonucleotide
  misc_feature 1..20: note = Target: SCN10A; (-) strand; PAM type: YTN; PAM sequence: TTT
  source 1..20: mol_type = other DNA
ggctagggaaagacttctgt

SEQ ID NO: 53028 - DNA, 20 bp, synthetic construct
  misc_feature 1..20: note = Description of Artificial Sequence: Synthetic oligonucleotide
  misc_feature 1..20: note = Target: SCN10A; (-) strand; PAM type: YTN; PAM sequence: TTG
  source 1..20: mol_type = other DNA
acagtttggctagggaaaga

SEQ ID NO: 53029 - DNA, 20 bp, synthetic construct
  misc_feature 1..20: note = Description of Artificial Sequence: Synthetic oligonucleotide
  misc_feature 1..20: note = Target: SCN10A; (-) strand; PAM type: YTN; PAM sequence: TTT
  source 1..20: mol_type = other DNA
gacagtttggctagggaaag

SEQ ID NO: 53030 - DNA, 20 bp, synthetic construct
  misc_feature 1..20: note = Description of Artificial Sequence: Synthetic oligonucleotide
  misc_feature 1..20: note = Target: SCN10A; (-) strand; PAM type: YTN; PAM sequence: CTT
  source 1..20: mol_type = other DNA
tgacagtttggctagggaaa

SEQ ID NO: 53031 - DNA, 20 bp, synthetic construct
  misc_feature 1..20: note = Description of Artificial Sequence: Synthetic oligonucleotide
  misc_feature 1..20: note = Target: SCN10A; (-) strand; PAM type: YTN; PAM sequence: TTC
  source 1..20: mol_type = other DNA
tttgacagtttggctaggga

SEQ ID NO: 53032 - DNA, 20 bp, synthetic construct
  misc_feature 1..20: note = Description of Artificial Sequence: Synthetic oligonucleotide
  misc_feature 1..20: note = Target: SCN10A; (-) strand; PAM type: YTN; PAM sequence: CTT
  source 1..20: mol_type = other DNA
ctttgacagtttggctaggg

SEQ ID NO: 53033 - DNA, 20 bp, synthetic construct
  misc_feature 1..20: note = Description of Artificial Sequence: Synthetic oligonucleotide
  misc_feature 1..20: note = Target: SCN10A; (-) strand; PAM type: YTN; PAM sequence: CTA
  source 1..20: mol_type = other DNA
ccttctttgacagtttggct

SEQ ID NO: 53034 - DNA, 20 bp, synthetic construct
  misc_feature 1..20: note = Description of Artificial Sequence: Synthetic oligonucleotide
  misc_feature 1..20: note = Target: SCN10A; (-) strand; PAM type: YTN; PAM sequence: TTC
  source 1..20: mol_type = other DNA
taccttctttgacagtttgg

SEQ ID NO: 53035 - DNA, 20 bp, synthetic construct
  misc_feature 1..20: note = Description of Artificial Sequence: Synthetic oligonucleotide
  misc_feature 1..20: note = Target: SCN10A; (-) strand; PAM type: YTN; PAM sequence: TTC
  source 1..20: mol_type = other DNA
atatattctaccttctttga

SEQ ID NO: 53036 - DNA, 20 bp, synthetic construct
  misc_feature 1..20: note = Description of Artificial Sequence: Synthetic oligonucleotide
  misc_feature 1..20: note = Target: SCN10A; (-) strand; PAM type: YTN; PAM sequence: CTT
  source 1..20: mol_type = other DNA
catatattctaccttctttg

SEQ ID NO: 53037 - DNA, 20 bp, synthetic construct
  misc_feature 1..20: note = Description of Artificial Sequence: Synthetic oligonucleotide
  misc_feature 1..20: note = Target: SCN10A; (-) strand; PAM type: YTN; PAM sequence: TTC
  source 1..20: mol_type = other DNA
ccaagacttcatatattcta

SEQ ID NO: 53038 - DNA, 20 bp, synthetic construct
  misc_feature 1..20: note = Description of Artificial Sequence: Synthetic oligonucleotide
  misc_feature 1..20: note = Target: SCN10A; (-) strand; PAM type: YTN; PAM sequence: TTT
  source 1..20: mol_type = other DNA
cccaagacttcatatattct

SEQ ID NO: 53039 - DNA, 20 bp, synthetic construct
  misc_feature 1..20: note = Description of Artificial Sequence: Synthetic oligonucleotide
  misc_feature 1..20: note = Target: SCN10A; (-) strand; PAM type: YTN; PAM sequence: CTA
  source 1..20: mol_type = other DNA
agaagtacatttcccaagac

SEQ ID NO: 53040 - DNA, 20 bp, synthetic construct
  misc_feature 1..20: note = Description of Artificial Sequence: Synthetic oligonucleotide
  misc_feature 1..20: note = Target: SCN10A; (-) strand; PAM type: YTN; PAM sequence: TTA
  source 1..20: mol_type = other DNA
gaagggtaactaagaagtac

SEQ ID NO: 53041 - DNA, 20 bp, synthetic construct
  misc_feature 1..20: note = Description of Artificial Sequence: Synthetic oligonucleotide
  misc_feature 1..20: note = Target: SCN10A; (-) strand; PAM type: YTN; PAM sequence: TTA
  source 1..20: mol_type = other DNA
ttagaagggtaactaagaag

SEQ ID NO: 53042 - DNA, 20 bp, synthetic construct
  misc_feature 1..20: note = Description of Artificial Sequence: Synthetic oligonucleotide
  misc_feature 1..20: note = Target: SCN10A; (-) strand; PAM type: YTN; PAM sequence: TTT
  source 1..20: mol_type = other DNA
attagaagggtaactaagaa

SEQ ID NO: 53043 - DNA, 20 bp, synthetic construct
  misc_feature 1..20: note = Description of Artificial Sequence: Synthetic oligonucleotide
  misc_feature 1..20: note = Target: SCN10A; (-) strand; PAM type: YTN; PAM sequence: CTT
  source 1..20: mol_type = other DNA
tattagaagggtaactaaga

SEQ ID NO: 53044 - DNA, 20 bp, synthetic construct
  misc_feature 1..20: note = Description of Artificial Sequence: Synthetic oligonucleotide
  misc_feature 1..20: note = Target: SCN10A; (-) strand; PAM type: YTN; PAM sequence: CTA
  source 1..20: mol_type = other DNA
gtaactttattagaagggta

SEQ ID NO: 53045 - DNA, 20 bp, synthetic construct
  misc_feature 1..20: note = Description of Artificial Sequence: Synthetic oligonucleotide
  misc_feature 1..20: note = Target: SCN10A; (-) strand; PAM type: YTN; PAM sequence: TTC
  source 1..20: mol_type = other DNA
tagtaactttattagaaggg

SEQ ID NO: 53046 - DNA, 20 bp, synthetic construct
  misc_feature 1..20: note = Description of Artificial Sequence: Synthetic oligonucleotide
  misc_feature 1..20: note = Target: SCN10A; (-) strand; PAM type: YTN; PAM sequence: CTT
  source 1..20: mol_type = other DNA
ctagtaactttattagaagg

SEQ ID NO: 53047 - DNA, 20 bp, synthetic construct
  misc_feature 1..20: note = Description of Artificial Sequence: Synthetic oligonucleotide
  misc_feature 1..20: note = Target: SCN10A; (-) strand; PAM type: YTN; PAM sequence: CTA
  source 1..20: mol_type = other DNA
caggtacataccaccatgcc

SEQ ID NO: 53048 - DNA, 20 bp, synthetic construct
  misc_feature 1..20: note = Description of Artificial Sequence: Synthetic oligonucleotide
  misc_feature 1..20: note = Target: SCN10A; (-) strand; PAM type: YTN; PAM sequence: TTA
  source 1..20: mol_type = other DNA
ggactacaggtacataccac

SEQ ID NO: 53049 - DNA, 20 bp, synthetic construct
  misc_feature 1..20: note = Description of Artificial Sequence: Synthetic oligonucleotide
  misc_feature 1..20: note = Target: SCN10A; (-) strand; PAM type: YTN; PAM sequence: CTC
  source 1..20: mol_type = other DNA
ccaagtagttaggactacag

SEQ ID NO: 53050 - DNA, 20 bp, synthetic construct
  misc_feature 1..20: note = Description of Artificial Sequence: Synthetic oligonucleotide
  misc_feature 1..20: note = Target: SCN10A; (-) strand; PAM type: YTN; PAM sequence: CTC
  source 1..20: mol_type = other DNA
aacctcccaagtagttagga

SEQ ID NO: 53051 - DNA, 20 bp, synthetic construct
  misc_feature 1..20: note = Description of Artificial Sequence: Synthetic oligonucleotide
  misc_feature 1..20: note = Target: SCN10A; (-) strand; PAM type: YTN; PAM sequence: CTG
  source 1..20: mol_type = other DNA
cctcaacctcccaagtagtt

SEQ ID NO: 53052 - DNA, 20 bp, synthetic construct
  misc_feature 1..20: note = Description of Artificial Sequence: Synthetic oligonucleotide
  misc_feature 1..20: note = Target: SCN10A; (-) strand; PAM type: YTN; PAM sequence: CTC
  source 1..20: mol_type = other DNA
ctgcctcaacctcccaagta

SEQ ID NO: 53053 - DNA, 20 bp, synthetic construct
  misc_feature 1..20: note = Description of Artificial Sequence: Synthetic oligonucleotide
  misc_feature 1..20: note = Target: SCN10A; (-) strand; PAM type: YTN; PAM sequence: TTC
  source 1..20: mol_type = other DNA
aagtgatcctcctgcctcaa

SEQ ID NO: 53054 - DNA, 20 bp, synthetic construct
  misc_feature 1..20: note = Description of Artificial Sequence: Synthetic oligonucleotide
  misc_feature 1..20: note = Target: SCN10A; (-) strand; PAM type: YTN; PAM sequence: CTG
  source 1..20: mol_type = other DNA
ggttcaagtgatcctcctgc

SEQ ID NO: 53055 - DNA, 20 bp, synthetic construct
  misc_feature 1..20: note = Description of Artificial Sequence: Synthetic oligonucleotide
  misc_feature 1..20: note = Target: SCN10A; (-) strand; PAM type: YTN; PAM sequence: CTC
  source 1..20: mol_type = other DNA
ctgggttcaagtgatcctcc

SEQ ID NO: 53056 - DNA, 20 bp, synthetic construct
  misc_feature 1..20: note = Description of Artificial Sequence: Synthetic oligonucleotide
  misc_feature 1..20: note = Target: SCN10A; (-) strand; PAM type: YTN; PAM sequence: CTC
  source 1..20: mol_type = other DNA
aaactcctgggttcaagtga

SEQ ID NO: 53057 - DNA, 20 bp, synthetic construct
  misc_feature 1..20: note = Description of Artificial Sequence: Synthetic oligonucleotide
  misc_feature 1..20: note = Target: SCN10A; (-) strand; PAM type: YTN; PAM sequence: TTG
  source 1..20: mol_type = other DNA
gcctcaaactcctgggttca

SEQ ID NO: 53058 - DNA, 20 bp, synthetic construct
  misc_feature 1..20: note = Description of Artificial Sequence: Synthetic oligonucleotide
  misc_feature 1..20: note = Target: SCN10A; (-) strand; PAM type: YTN; PAM sequence: CTG
  source 1..20: mol_type = other DNA
ttggcctcaaactcctgggt

SEQ ID NO: 53059 - DNA, 20 bp, synthetic construct
  misc_feature 1..20: note = Description of Artificial Sequence: Synthetic oligonucleotide
  misc_feature 1..20: note = Target: SCN10A; (-) strand; PAM type: YTN; PAM sequence: CTG
  source 1..20: mol_type = other DNA
cccaggctgttggcctcaaa

SEQ ID NO: 53060 - DNA, 20 bp, synthetic construct
  misc_feature 1..20: note = Description of Artificial Sequence: Synthetic oligonucleotide
  misc_feature 1..20: note = Target: SCN10A; (-) strand; PAM type: YTN; PAM sequence: CTA
  source 1..20: mol_type = other DNA
tgctgcccaggctgttggcc

SEQ ID NO: 53061 - DNA, 20 bp, synthetic construct
  misc_feature 1..20: note = Description of Artificial Sequence: Synthetic oligonucleotide
  misc_feature 1..20: note = Target: SCN10A; (-) strand; PAM type: YTN; PAM sequence: CTC
  source 1..20: mol_type = other DNA
tatgctgcccaggctgttgg

SEQ ID NO: 53062 - DNA, 20 bp, synthetic construct
  misc_feature 1..20: note = Description of Artificial Sequence: Synthetic oligonucleotide
  misc_feature 1..20: note = Target: SCN10A; (-) strand; PAM type: YTN; PAM sequence: CTC
  source 1..20: mol_type = other DNA
tctatgctgcccaggctgtt

SEQ ID NO: 53063 - DNA, 20 bp, synthetic construct
  misc_feature 1..20: note = Description of Artificial Sequence: Synthetic oligonucleotide
  misc_feature 1..20: note = Target: SCN10A; (-) strand; PAM type: YTN; PAM sequence: TTA
  source 1..20: mol_type = other DNA
agacaaagtctctctatgct

SEQ ID NO: 53064 - DNA, 20 bp, synthetic construct
  misc_feature 1..20: note = Description of Artificial Sequence: Synthetic oligonucleotide
  misc_feature 1..20: note = Target: SCN10A; (-) strand; PAM type: YTN; PAM sequence: TTT
  source 1..20: mol_type = other DNA
aagacaaagtctctctatgc

SEQ ID NO: 53065 - DNA, 20 bp, synthetic construct
  misc_feature 1..20: note = Description of Artificial Sequence: Synthetic oligonucleotide
  misc_feature 1..20: note = Target: SCN10A; (-) strand; PAM type: YTN; PAM sequence: TTT
  source 1..20: mol_type = other DNA
taagacaaagtctctctatg

SEQ ID NO: 53066 - DNA, 20 bp, synthetic construct
  misc_feature 1..20: note = Description of Artificial Sequence: Synthetic oligonucleotide
  misc_feature 1..20: note = Target: SCN10A; (-) strand; PAM type: YTN; PAM sequence: TTT
  source 1..20: mol_type = other DNA
ttaagacaaagtctctctat

SEQ ID NO: 53067 - DNA, 20 bp, synthetic construct
  misc_feature 1..20: note = Description of Artificial Sequence: Synthetic oligonucleotide
  misc_feature 1..20: note = Target: SCN10A; (-) strand; PAM type: YTN; PAM sequence: TTT
  source 1..20: mol_type = other DNA
tttaagacaaagtctctcta

SEQ ID NO: 53068 - DNA, 20 bp, synthetic construct
  misc_feature 1..20: note = Description of Artificial Sequence: Synthetic oligonucleotide
  misc_feature 1..20: note = Target: SCN10A; (-) strand; PAM type: YTN; PAM sequence: TTT
  source 1..20: mol_type = other DNA
ttttaagacaaagtctctct

SEQ ID NO: 53069 - DNA, 20 bp, synthetic construct
  misc_feature 1..20: note = Description of Artificial Sequence: Synthetic oligonucleotide
  misc_feature 1..20: note = Target: SCN10A; (-) strand; PAM type: YTN; PAM sequence: TTT
  source 1..20: mol_type = other DNA
tttttaagacaaagtctctc

SEQ ID NO: 53070 - DNA, 20 bp, synthetic construct
  misc_feature 1..20: note = Description of Artificial Sequence: Synthetic oligonucleotide
  misc_feature 1..20: note = Target: SCN10A; (-) strand; PAM type: YTN; PAM sequence: TTT
  source 1..20: mol_type = other DNA
ttttttaagacaaagtctct

SEQ ID NO: 53071 - DNA, 20 bp, synthetic construct
  misc_feature 1..20: note = Description of Artificial Sequence: Synthetic oligonucleotide
  misc_feature 1..20: note = Target: SCN10A; (-) strand; PAM type: YTN; PAM sequence: CTA
  source 1..20: mol_type = other DNA
gtaacatttttttttaagac

SEQ ID NO: 53072 - DNA, 20 bp, synthetic construct
  misc_feature 1..20: note = Description of Artificial Sequence: Synthetic oligonucleotide
  misc_feature 1..20: note = Target: SCN10A; (-) strand; PAM type: YTN; PAM sequence: CTC
  source 1..20: mol_type = other DNA
tagtaacatttttttttaag

SEQ ID NO: 53073 - DNA, 20 bp, synthetic construct
  misc_feature 1..20: note = Description of Artificial Sequence: Synthetic oligonucleotide
  misc_feature 1..20: note = Target: SCN10A; (-) strand; PAM type: YTN; PAM sequence: TTG
  source 1..20: mol_type = other DNA
aatggagcatatcctctagt

SEQ ID NO: 53074 - DNA, 20 bp, synthetic construct
  misc_feature 1..20: note = Description of Artificial Sequence: Synthetic oligonucleotide
  misc_feature 1..20: note = Target: SCN10A; (-) strand; PAM type: YTN; PAM sequence: TTT
  source 1..20: mol_type = other DNA
gaatggagcatatcctctag

SEQ ID NO: 53075 - DNA, 20 bp, synthetic construct
  misc_feature 1..20: note = Description of Artificial Sequence: Synthetic oligonucleotide
  misc_feature 1..20: note = Target: SCN10A; (-) strand; PAM type: YTN; PAM sequence: TTG
  source 1..20: mol_type = other DNA
tttgaatggagcatatcctc

SEQ ID NO: 53076 - DNA, 20 bp, synthetic construct
  misc_feature 1..20: note = Description of Artificial Sequence: Synthetic oligonucleotide
  misc_feature 1..20: note = Target: SCN10A; (-) strand; PAM type: YTN; PAM sequence: CTT
  source 1..20: mol_type = other DNA
gtttgaatggagcatatcct

SEQ ID NO: 53077 - DNA, 20 bp, synthetic construct
  misc_feature 1..20: note = Description of Artificial Sequence: Synthetic oligonucleotide
  misc_feature 1..20: note = Target: SCN10A; (-) strand; PAM type: YTN; PAM sequence: TTC
  source 1..20: mol_type = other DNA
ttgtttgaatggagcatatc

SEQ ID NO: 53078 - DNA, 20 bp, synthetic construct
  misc_feature 1..20: note = Description of Artificial Sequence: Synthetic oligonucleotide
  misc_feature 1..20: note = Target: SCN10A; (-) strand; PAM type: YTN; PAM sequence: TTT
  source 1..20: mol_type = other DNA
cttgtttgaatggagcatat

SEQ ID NO: 53079 - DNA, 20 bp, synthetic construct
  misc_feature 1..20: note = Description of Artificial Sequence: Synthetic oligonucleotide
  misc_feature 1..20: note = Target: SCN10A; (-) strand; PAM type: YTN; PAM sequence: CTG
  source 1..20: mol_type = other DNA
gatcgcatatatgtttcttg

SEQ ID NO: 53080 - DNA, 20 bp, synthetic construct
  misc_feature 1..20: note = Description of Artificial Sequence: Synthetic oligonucleotide
  misc_feature 1..20: note = Target: SCN10A; (-) strand; PAM type: YTN; PAM sequence: TTC
  source 1..20: mol_type = other DNA
cctggatcgcatatatgttt

SEQ ID NO: 53081 - DNA, 20 bp, synthetic construct
  misc_feature 1..20: note = Description of Artificial Sequence: Synthetic oligonucleotide
  misc_feature 1..20: note = Target: SCN10A; (-) strand; PAM type: YTN; PAM sequence: CTT
  source 1..20: mol_type = other DNA
ccctggatcgcatatatgtt

SEQ ID NO: 53082 - DNA, 20 bp, synthetic construct
  misc_feature 1..20: note = Description of Artificial Sequence: Synthetic oligonucleotide
  misc_feature 1..20: note = Target: SCN10A; (-) strand; PAM type: YTN; PAM sequence: CTC
  source 1..20: mol_type = other DNA
ttccctggatcgcatatatg

SEQ ID NO: 53083 - DNA, 20 bp, synthetic construct
  misc_feature 1..20: note = Description of Artificial Sequence: Synthetic oligonucleotide
  misc_feature 1..20: note = Target: SCN10A; (-) strand; PAM type: YTN; PAM sequence: TTG
  source 1..20: mol_type = other DNA
cctcttccctggatcgcata

SEQ ID NO: 53084 - DNA, 20 bp, synthetic construct
  misc_feature 1..20: note = Description of Artificial Sequence: Synthetic oligonucleotide
  misc_feature 1..20: note = Target: SCN10A; (-) strand; PAM type: YTN; PAM sequence: TTT
  source 1..20: mol_type = other DNA
gcctcttccctggatcgcat

SEQ ID NO: 53085 - DNA, 20 bp, synthetic construct
  misc_feature 1..20: note = Description of Artificial Sequence: Synthetic oligonucleotide
  misc_feature 1..20: note = Target: SCN10A; (-) strand; PAM type: YTN; PAM sequence: TTT
  source 1..20: mol_type = other DNA
tgcctcttccctggatcgca

SEQ ID NO: 53086 - DNA, 20 bp, synthetic construct
  misc_feature 1..20: note = Description of Artificial Sequence: Synthetic oligonucleotide
  misc_feature 1..20: note = Target: SCN10A; (-) strand; PAM type: YTN; PAM sequence: CTT
  source 1..20: mol_type = other DNA
ttgcctcttccctggatcgc

SEQ ID NO: 53087 - DNA, 20 bp, synthetic construct
  misc_feature 1..20: note = Description of Artificial Sequence: Synthetic oligonucleotide
  misc_feature 1..20: note = Target: SCN10A; (-) strand; PAM type: YTN; PAM sequence: TTC
  source 1..20: mol_type = other DNA
cttttgcctcttccctggat

SEQ ID NO: 53088 - DNA, 20 bp, synthetic construct
  misc_feature 1..20: note = Description of Artificial Sequence: Synthetic oligonucleotide
  misc_feature 1..20: note = Target: SCN10A; (-) strand; PAM type: YTN; PAM sequence: TTG
  source 1..20: mol_type = other DNA
gattccttttgcctcttccc

SEQ ID NO: 53089 - DNA, 20 bp, synthetic construct
  misc_feature 1..20: note = Description of Artificial Sequence: Synthetic oligonucleotide
  misc_feature 1..20: note = Target: SCN10A; (-) strand; PAM type: YTN; PAM sequence: TTT
  source 1..20: mol_type = other DNA
ggattccttttgcctcttcc

SEQ ID NO: 53090 - DNA, 20 bp, synthetic construct
  misc_feature 1..20: note = Description of Artificial Sequence: Synthetic oligonucleotide
  misc_feature 1..20: note = Target: SCN10A; (-) strand; PAM type: YTN; PAM sequence: TTT
  source 1..20: mol_type = other DNA
tggattccttttgcctcttc

SEQ ID NO: 53091 - DNA, 20 bp, synthetic construct
  misc_feature 1..20: note = Description of Artificial Sequence: Synthetic oligonucleotide
  misc_feature 1..20: note = Target: SCN10A; (-) strand; PAM type: YTN; PAM sequence: TTT
  source 1..20: mol_type = other DNA
ttggattccttttgcctctt

SEQ ID NO: 53092 - DNA, 20 bp, synthetic construct
  misc_feature 1..20: note = Description of Artificial Sequence: Synthetic oligonucleotide
  misc_feature 1..20: note = Target: SCN10A; (-) strand; PAM type: YTN; PAM sequence: TTT
  source 1..20: mol_type = other DNA
tttggattccttttgcctct

SEQ ID NO: 53093 - DNA, 20 bp, synthetic construct
  misc_feature 1..20: note = Description of Artificial Sequence: Synthetic oligonucleotide
  misc_feature 1..20: note = Target: SCN10A; (-) strand; PAM type: YTN; PAM sequence: TTT
  source 1..20: mol_type = other DNA
ttttggattccttttgcctc

SEQ ID NO: 53094 - DNA, 20 bp, synthetic construct
  misc_feature 1..20: note = Description of Artificial Sequence: Synthetic oligonucleotide
  misc_feature 1..20: note = Target: SCN10A; (-) strand; PAM type: YTN; PAM sequence: CTT
  source 1..20: mol_type = other DNA
tttttggattccttttgcct

SEQ ID NO: 53095 - DNA, 20 bp, synthetic construct
  misc_feature 1..20: note = Description of Artificial Sequence: Synthetic oligonucleotide
  misc_feature 1..20: note = Target: SCN10A; (-) strand; PAM type: YTN; PAM sequence: TTC
  source 1..20: mol_type = other DNA
tttttttggattccttttgc

SEQ ID NO: 53096 - DNA, 20 bp, synthetic construct
  misc_feature 1..20: note = Description of Artificial Sequence: Synthetic oligonucleotide
  misc_feature 1..20: note = Target: SCN10A; (-) strand; PAM type: YTN; PAM sequence: TTC
  source 1..20: mol_type = other DNA
attctttttttggattcctt

SEQ ID NO: 53097 - DNA, 20 bp, synthetic construct
  misc_feature 1..20: note = Description of Artificial Sequence: Synthetic oligonucleotide
  misc_feature 1..20: note = Target: SCN10A; (-) strand; PAM type: YTN; PAM sequence: CTT
  source 1..20: mol_type = other DNA
cattctttttttggattcct

SEQ ID NO: 53098 - DNA, 20 bp, synthetic construct
  misc_feature 1..20: note = Description of Artificial Sequence: Synthetic oligonucleotide
  misc_feature 1..20: note = Target: SCN10A; (-) strand; PAM type: YTN; PAM sequence: TTC
  source 1..20: mol_type = other DNA
ttcattctttttttggattc

SEQ ID NO: 53099 - DNA, 20 bp, synthetic construct
  misc_feature 1..20: note = Description of Artificial Sequence: Synthetic oligonucleotide
  misc_feature 1..20: note = Target: SCN10A; (-) strand; PAM type: YTN; PAM sequence: CTT
  source 1..20: mol_type = other DNA
cttcattctttttttggatt

SEQ ID NO: 53100 - DNA, 20 bp, synthetic construct
  misc_feature 1..20: note = Description of Artificial Sequence: Synthetic oligonucleotide
  misc_feature 1..20: note = Target: SCN10A; (-) strand; PAM type: YTN; PAM sequence: TTC
  source 1..20: mol_type = other DNA
ttcttcattctttttttgga

SEQ ID NO: 53101 - DNA, 20 bp, synthetic construct
  misc_feature 1..20: note = Description of Artificial Sequence: Synthetic oligonucleotide
  misc_feature 1..20: note = Target: SCN10A; (-) strand; PAM type: YTN; PAM sequence: TTT
  source 1..20: mol_type = other DNA
cttcttcattctttttttgg

SEQ ID NO: 53102 - DNA, 20 bp, synthetic construct
  misc_feature 1..20: note = Description of Artificial Sequence: Synthetic oligonucleotide
  misc_feature 1..20: note = Target: SCN10A; (-) strand; PAM type: YTN; PAM sequence: TTT
  source 1..20: mol_type = other DNA
tcttcttcattctttttttg

SEQ ID NO: 53103 - DNA, 20 bp, synthetic construct
  misc_feature 1..20: note = Description of Artificial Sequence: Synthetic oligonucleotide
  misc_feature 1..20: note = Target: SCN10A; (-) strand; PAM type: YTN; PAM sequence: TTT
  source 1..20: mol_type = other DNA
ttcttcttcattcttttttt

SEQ ID NO: 53104 - DNA, 20 bp, synthetic construct
  misc_feature 1..20: note = Description of Artificial Sequence: Synthetic oligonucleotide
  misc_feature 1..20: note = Target: SCN10A; (-) strand; PAM type: YTN; PAM sequence: TTT
  source 1..20: mol_type = other DNA
tttcttcttcattctttttt

SEQ ID NO: 53105 - DNA, 20 bp, synthetic construct
  misc_feature 1..20: note = Description of Artificial Sequence: Synthetic oligonucleotide
  misc_feature 1..20: note = Target: SCN10A; (-) strand; PAM type: YTN; PAM sequence: CTA
  source 1..20: mol_type = other DNA
gagattttttcttcttcatt

SEQ ID NO: 53106 - DNA, 20 bp, synthetic construct
  misc_feature 1..20: note = Description of Artificial Sequence: Synthetic oligonucleotide
  misc_feature 1..20: note = Target: SCN10A; (-) strand; PAM type: YTN; PAM sequence: TTC
  source 1..20: mol_type = other DNA
tagagattttttcttcttca

SEQ ID NO: 53107 - DNA, 20 bp, synthetic construct
  misc_feature 1..20: note = Description of Artificial Sequence: Synthetic oligonucleotide
  misc_feature 1..20: note = Target: SCN10A; (-) strand; PAM type: YTN; PAM sequence: TTT
  source 1..20: mol_type = other DNA
ctagagattttttcttcttc

SEQ ID NO: 53108 - DNA, 20 bp, synthetic construct
  misc_feature 1..20: note = Description of Artificial Sequence: Synthetic oligonucleotide
  misc_feature 1..20: note = Target: SCN10A; (-) strand; PAM type: YTN; PAM sequence: TTT
  source 1..20: mol_type = other DNA
tctagagattttttcttctt

SEQ ID NO: 53109 - DNA, 20 bp, synthetic construct
  misc_feature 1..20: note = Description of Artificial Sequence: Synthetic oligonucleotide
  misc_feature 1..20: note = Target: SCN10A; (-) strand; PAM type: YTN; PAM sequence: CTG
  source 1..20: mol_type = other DNA
ttttctagagattttttctt

SEQ ID NO: 53110 - DNA, 20 bp, synthetic construct
  misc_feature 1..20: note = Description of Artificial Sequence: Synthetic oligonucleotide
  misc_feature 1..20: note = Target: SCN10A; (-) strand; PAM type: YTN; PAM sequence: CTG
  source 1..20: mol_type = other DNA
atgcacagctgttttctaga

SEQ ID NO: 53111 - DNA, 20 bp, synthetic construct
  misc_feature 1..20: note = Description of Artificial Sequence: Synthetic oligonucleotide
  misc_feature 1..20: note = Target: SCN10A; (-) strand; PAM type: YTN; PAM sequence: CTA
  source 1..20: mol_type = other DNA
ggcctgatgcacagctgttt

SEQ ID NO: 53112 - DNA, 20 bp, synthetic construct
  misc_feature 1..20: note = Description of Artificial Sequence: Synthetic oligonucleotide
  misc_feature 1..20: note = Target: SCN10A; (-) strand; PAM type: YTN; PAM sequence: TTC
  source 1..20: mol_type = other DNA
taggcctgatgcacagctgt

SEQ ID NO: 53113 - DNA, 20 bp, synthetic construct
  misc_feature 1..20: note = Description of Artificial Sequence: Synthetic oligonucleotide
  misc_feature 1..20: note = Target: SCN10A; (-) strand; PAM type: YTN; PAM sequence: TTT
  source 1..20: mol_type = other DNA
ctaggcctgatgcacagctg

SEQ ID NO: 53114 - DNA, 20 bp, synthetic construct
  misc_feature 1..20: note = Description of Artificial Sequence: Synthetic oligonucleotide
  misc_feature 1..20: note = Target: SCN10A; (-) strand; PAM type: YTN; PAM sequence: TTT
  source 1..20: mol_type = other DNA
tctaggcctgatgcacagct

SEQ ID NO: 53115 - DNA, 20 bp, synthetic construct
  misc_feature 1..20: note = Description of Artificial Sequence: Synthetic oligonucleotide
  misc_feature 1..20: note = Target: SCN10A; (-) strand; PAM type: YTN; PAM sequence: CTA
  source 1..20: mol_type = other DNA
gatgttttctaggcctgatg

SEQ ID NO: 53116 - DNA, 20 bp, synthetic construct
  misc_feature 1..20: note = Description of Artificial Sequence: Synthetic oligonucleotide
  misc_feature 1..20: note = Target: SCN10A; (-) strand; PAM type: YTN; PAM sequence: CTG
  source 1..20: mol_type = other DNA
acctagatgttttctaggcc

SEQ ID NO: 53117 - DNA, 20 bp, synthetic construct
  misc_feature 1..20: note = Description of Artificial Sequence: Synthetic oligonucleotide
  misc_feature 1..20: note = Target: SCN10A; (-) strand; PAM type: YTN; PAM sequence: TTC
  source 1..20: mol_type = other DNA
tgacctagatgttttctagg

SEQ ID NO: 53118 - DNA, 20 bp, synthetic construct
  misc_feature 1..20: note = Description of Artificial Sequence: Synthetic oligonucleotide
  misc_feature 1..20: note = Target: SCN10A; (-) strand; PAM type: YTN; PAM sequence: CTC
  source 1..20: mol_type = other DNA
attctgacctagatgttttc

SEQ ID NO: 53119 - DNA, 20 bp, synthetic construct
  misc_feature 1..20: note = Description of Artificial Sequence: Synthetic oligonucleotide
  misc_feature 1..20: note = Target: SCN10A; (-) strand; PAM type: YTN; PAM sequence: CTG
  source 1..20: mol_type = other DNA
cctcattctgacctagatgt

SEQ ID NO: 53120 - DNA, 20 bp, synthetic construct
  misc_feature 1..20: note = Description of Artificial Sequence: Synthetic oligonucleotide
  misc_feature 1..20: note = Target: SCN10A; (-) strand; PAM type: YTN; PAM sequence: TTC
  source 1..20: mol_type = other DNA
tgcctcattctgacctagat

SEQ ID NO: 53121 - DNA, 20 bp, synthetic construct
  misc_feature 1..20: note = Description of Artificial Sequence: Synthetic oligonucleotide
  misc_feature 1..20: note = Target: SCN10A; (-) strand; PAM type: YTN; PAM sequence: CTT
  source 1..20: mol_type = other DNA
ctgcctcattctgacctaga

SEQ ID NO: 53122 - DNA, 20 bp, synthetic construct
  misc_feature 1..20: note = Description of Artificial Sequence: Synthetic oligonucleotide
  misc_feature 1..20: note = Target: SCN10A; (-) strand; PAM type: YTN; PAM sequence: TTC
  source 1..20: mol_type = other DNA
atcttctgcctcattctgac

SEQ ID NO: 53123 - DNA, 20 bp, synthetic construct
  misc_feature 1..20: note = Description of Artificial Sequence: Synthetic oligonucleotide
  misc_feature 1..20: note = Target: SCN10A; (-) strand; PAM type: YTN; PAM sequence: CTT
  source 1..20: mol_type = other DNA
catcttctgcctcattctga

SEQ ID NO: 53124 - DNA, 20 bp, synthetic construct
  misc_feature 1..20: note = Description of Artificial Sequence: Synthetic oligonucleotide
  misc_feature 1..20: note = Target: SCN10A; (-) strand; PAM type: YTN; PAM sequence: CTA
  source 1..20: mol_type = other DNA
gagtacttcatcttctgcct

SEQ ID NO: 53125 - DNA, 20 bp, synthetic construct
  misc_feature 1..20: note = Description of Artificial Sequence: Synthetic oligonucleotide
  misc_feature 1..20: note = Target: SCN10A; (-) strand; PAM type: YTN; PAM sequence: CTA
  source 1..20: mol_type = other DNA
tgggaatcacagctagagta

SEQ ID NO: 53126 - DNA, 20 bp, synthetic construct
  misc_feature 1..20: note = Description of Artificial Sequence: Synthetic oligonucleotide
  misc_feature 1..20: note = Target: SCN10A; (-) strand; PAM type: YTN; PAM sequence: TTC
  source 1..20: mol_type = other DNA
ctatgggaatcacagctaga

SEQ ID NO: 53127 - DNA, 20 bp, synthetic construct
  misc_feature 1..20: note = Description of Artificial Sequence: Synthetic oligonucleotide
  misc_feature 1..20: note = Target: SCN10A; (-) strand; PAM type: YTN; PAM sequence: TTT
  source 1..20: mol_type = other DNA
cctatgggaatcacagctag

SEQ ID NO: 53128 - DNA, 20 bp, synthetic construct
  misc_feature 1..20: note = Description of Artificial Sequence: Synthetic oligonucleotide
  misc_feature 1..20: note = Target: SCN10A; (-) strand; PAM type: YTN; PAM sequence: TTT
  source 1..20: mol_type = other DNA
tcctatgggaatcacagcta

SEQ ID NO: 53129 - DNA, 20 bp, synthetic construct
  misc_feature 1..20: note = Description of Artificial Sequence: Synthetic oligonucleotide
  misc_feature 1..20: note = Target: SCN10A; (-) strand; PAM type: YTN; PAM sequence: TTT
  source 1..20: mol_type = other DNA
ttcctatgggaatcacagct

SEQ ID NO: 53130 - DNA, 20 bp, synthetic construct
  misc_feature 1..20: note = Description of Artificial Sequence: Synthetic oligonucleotide
  misc_feature 1..20: note = Target: SCN10A; (-) strand; PAM type: YTN; PAM sequence: TTT
  source 1..20: mol_type = other DNA
tttcctatgggaatcacagc

SEQ ID NO: 53131 - DNA, 20 bp, synthetic construct
  misc_feature 1..20: note = Description of Artificial Sequence: Synthetic oligonucleotide
  misc_feature 1..20: note = Target: SCN10A; (-) strand; PAM type: YTN; PAM sequence: TTT
  source 1..20: mol_type = other DNA
ttttcctatgggaatcacag

SEQ ID NO: 53132 - DNA, 20 bp, synthetic construct
  misc_feature 1..20: note = Description of Artificial Sequence: Synthetic oligonucleotide
  misc_feature 1..20: note = Target: SCN10A; (-) strand; PAM type: YTN; PAM sequence: TTG
  source 1..20: mol_type = other DNA
cacacatcaggtgcatgtgt

SEQ ID NO: 53133 - DNA, 20 bp, synthetic construct
  misc_feature 1..20: note = Description of Artificial Sequence: Synthetic oligonucleotide
  misc_feature 1..20: note = Target: SCN10A; (-) strand; PAM type: YTN; PAM sequence: TTT
  source 1..20: mol_type = other DNA
gcacacatcaggtgcatgtg

SEQ ID NO: 53134 - DNA, 20 bp, synthetic construct
  misc_feature 1..20: note = Description of Artificial Sequence: Synthetic oligonucleotide
  misc_feature 1..20: note = Target: SCN10A; (-) strand; PAM type: YTN; PAM sequence: TTA
  source 1..20: mol_type = other DNA
tttgcacacatcaggtgcat

SEQ ID NO: 53135 - DNA, 20 bp, synthetic construct
  misc_feature 1..20: note = Description of Artificial Sequence: Synthetic oligonucleotide
  misc_feature 1..20: note = Target: SCN10A; (-) strand; PAM type: YTN; PAM sequence: TTT
  source 1..20: mol_type = other DNA
atttgcacacatcaggtgca

SEQ ID NO: 53136 - DNA, 20 bp, synthetic construct
  misc_feature 1..20: note = Description of Artificial Sequence: Synthetic oligonucleotide
  misc_feature 1..20: note = Target: SCN10A; (-) strand; PAM type: YTN; PAM sequence: TTC
  source 1..20: mol_type = other DNA
aatttatttgcacacatcag

SEQ ID NO: 53137 - DNA, 20 bp, synthetic construct
  misc_feature 1..20: note = Description of Artificial Sequence: Synthetic oligonucleotide
  misc_feature 1..20: note = Target: SCN10A; (-) strand; PAM type: YTN; PAM sequence: CTT
  source 1..20: mol_type = other DNA
caatttatttgcacacatca

SEQ ID NO: 53138 - DNA, 20 bp, synthetic construct
  misc_feature 1..20: note = Description of Artificial Sequence: Synthetic oligonucleotide
  misc_feature 1..20: note = Target: SCN10A; (-) strand; PAM type: YTN; PAM sequence: TTG
  source 1..20: mol_type = other DNA
cttcaatttatttgcacaca

SEQ ID NO: 53139 - DNA, 20 bp, synthetic construct
  misc_feature 1..20: note = Description of Artificial Sequence: Synthetic oligonucleotide
  misc_feature 1..20: note = Target: SCN10A; (-) strand; PAM type: YTN; PAM sequence: TTG
  source 1..20: mol_type = other DNA
ttgcttcaatttatttgcac

SEQ ID NO: 53140 - DNA, 20 bp, synthetic construct
  misc_feature 1..20: note = Description of Artificial Sequence: Synthetic oligonucleotide
  misc_feature 1..20: note = Target: SCN10A; (-) strand; PAM type: YTN; PAM sequence: TTA
  source 1..20: mol_type = other DNA
attgttgcttcaatttattt

SEQ ID NO: 53141 - DNA, 20 bp, synthetic construct
  misc_feature 1..20: note = Description of Artificial Sequence: Synthetic oligonucleotide
  misc_feature 1..20: note = Target: SCN10A; (-) strand; PAM type: YTN; PAM sequence: TTT
  source 1..20: mol_type = other DNA
aattgttgcttcaatttatt

SEQ ID NO: 53142 - DNA, 20 bp, synthetic construct
  misc_feature 1..20: note = Description of Artificial Sequence: Synthetic oligonucleotide
  misc_feature 1..20: note = Target: SCN10A; (-) strand; PAM type: YTN; PAM sequence: CTC
  source 1..20: mol_type = other DNA
cagatgtttaattgttgctt

SEQ ID NO: 53143 - DNA, 20 bp, synthetic construct
  misc_feature 1..20: note = Description of Artificial Sequence: Synthetic oligonucleotide
  misc_feature 1..20: note = Target: SCN10A; (-) strand; PAM type: YTN; PAM sequence: TTC
  source 1..20: mol_type = other DNA
tccagatgtttaattgttgc

SEQ ID NO: 53144 - DNA, 20 bp, synthetic construct
  misc_feature 1..20: note = Description of Artificial Sequence: Synthetic oligonucleotide
  misc_feature 1..20: note = Target: SCN10A; (-) strand; PAM type: YTN; PAM sequence: CTT
  source 1..20: mol_type = other DNA
ctccagatgtttaattgttg

SEQ ID NO: 53145 - DNA, 20 bp, synthetic construct
  misc_feature 1..20: note = Description of Artificial Sequence: Synthetic oligonucleotide
  misc_feature 1..20: note = Target: SCN10A; (-) strand; PAM type: YTN; PAM sequence: CTC
  source 1..20: mol_type = other DNA
ttctccagatgtttaattgt

SEQ ID NO: 53146 - DNA, 20 bp, synthetic construct
  misc_feature 1..20: note = Description of Artificial Sequence: Synthetic oligonucleotide
  misc_feature 1..20: note = Target: SCN10A; (-) strand; PAM type: YTN; PAM sequence: TTC
  source 1..20: mol_type = other DNA
ccaaactcttctccagatgt

SEQ ID NO: 53147 - DNA, 20 bp, synthetic construct
  misc_feature 1..20: note = Description of Artificial Sequence: Synthetic oligonucleotide
  misc_feature 1..20: note = Target: SCN10A; (-) strand; PAM type: YTN; PAM sequence: TTG
  source 1..20: mol_type = other DNA
ttcccaaactcttctccaga

SEQ ID NO: 53148 - DNA, 20 bp, synthetic construct
  misc_feature 1..20: note = Description of Artificial Sequence: Synthetic oligonucleotide
  misc_feature 1..20: note = Target: SCN10A; (-) strand; PAM type: YTN; PAM sequence: TTT
  source 1..20: mol_type = other DNA
gttcccaaactcttctccag

SEQ ID NO: 53149 - DNA, 20 bp, synthetic construct
  misc_feature 1..20: note = Description of Artificial Sequence: Synthetic oligonucleotide
  misc_feature 1..20: note = Target: SCN10A; (-) strand; PAM type: YTN; PAM sequence: CTA
  source 1..20: mol_type = other DNA
atttgttcccaaactcttct

SEQ ID NO: 53150 - DNA, 20 bp, synthetic construct
  misc_feature 1..20: note = Description of Artificial Sequence: Synthetic oligonucleotide
  misc_feature 1..20: note = Target: SCN10A; (-) strand; PAM type: YTN; PAM sequence: TTA
  source 1..20: mol_type = other DNA
tccctaatttgttcccaaac

SEQ ID NO: 53151 - DNA, 20 bp, synthetic construct
  misc_feature 1..20: note = Description of Artificial Sequence: Synthetic oligonucleotide
  misc_feature 1..20: note = Target: SCN10A; (-) strand; PAM type: YTN; PAM sequence: TTT
  source 1..20: mol_type = other DNA
atccctaatttgttcccaaa

SEQ ID NO: 53152 - DNA, 20 bp, synthetic construct
  misc_feature 1..20: note = Description of Artificial Sequence: Synthetic oligonucleotide
  misc_feature 1..20: note = Target: SCN10A; (-) strand; PAM type: YTN; PAM sequence: CTA
  source 1..20: mol_type = other DNA
tttatccctaatttgttccc

SEQ ID NO: 53153 - DNA, 20 bp, synthetic construct
  misc_feature 1..20: note = Description of Artificial Sequence: Synthetic oligonucleotide
  misc_feature 1..20: note = Target: SCN10A; (-) strand; PAM type: YTN; PAM sequence: TTC
  source 1..20: mol_type = other DNA
tatttatccctaatttgttc

SEQ ID NO: 53154 - DNA, 20 bp, synthetic construct
  misc_feature 1..20: note = Description of Artificial Sequence: Synthetic oligonucleotide
  misc_feature 1..20: note = Target: SCN10A; (-) strand; PAM type: YTN; PAM sequence: TTT
  source 1..20: mol_type = other DNA
ctatttatccctaatttgtt

SEQ ID NO: 53155 - DNA, 20 bp, synthetic construct
  misc_feature 1..20: note = Description of Artificial Sequence: Synthetic oligonucleotide
  misc_feature 1..20: note = Target: SCN10A; (-) strand; PAM type: YTN; PAM sequence: TTT
  source 1..20: mol_type = other DNA
tctatttatccctaatttgt

SEQ ID NO: 53156 - DNA, 20 bp, synthetic construct
  misc_feature 1..20: note = Description of Artificial Sequence: Synthetic oligonucleotide
  misc_feature 1..20: note = Target: SCN10A; (-) strand; PAM type: YTN; PAM sequence: CTC
  source 1..20: mol_type = other DNA
agttttctatttatccctaa

SEQ ID NO: 53157 - DNA, 20 bp, synthetic construct
  misc_feature 1..20: note = Description of Artificial Sequence: Synthetic oligonucleotide
  misc_feature 1..20: note = Target: SCN10A; (-) strand; PAM type: YTN; PAM sequence: TTG
  source 1..20: mol_type = other DNA
ctcagttttctatttatccc

SEQ ID NO: 53158 - DNA, 20 bp, synthetic construct
  misc_feature 1..20: note = Description of Artificial Sequence: Synthetic oligonucleotide
  misc_feature 1..20: note = Target: SCN10A; (-) strand; PAM type: YTN; PAM sequence: TTT
  source 1..20: mol_type = other DNA
gctcagttttctatttatcc

SEQ ID NO: 53159 - DNA, 20 bp, synthetic construct
  misc_feature 1..20: note = Description of Artificial Sequence: Synthetic oligonucleotide
  misc_feature 1..20: note = Target: SCN10A; (-) strand; PAM type: YTN; PAM sequence: TTG
  source 1..20: mol_type = other DNA
tttgctcagttttctattta

SEQ ID NO: 53160 - DNA, 20 bp, synthetic construct
  misc_feature 1..20: note = Description of Artificial Sequence: Synthetic oligonucleotide
  misc_feature 1..20: note = Target: SCN10A; (-) strand; PAM type: YTN; PAM sequence: TTT
  source 1..20: mol_type = other DNA
gtttgctcagttttctattt

SEQ ID NO: 53161 - DNA, 20 bp, synthetic construct
  misc_feature 1..20: note = Description of Artificial Sequence: Synthetic oligonucleotide
  misc_feature 1..20: note = Target: SCN10A; (-) strand; PAM type: YTN; PAM sequence: TTT
  source 1..20: mol_type = other DNA
tgtttgctcagttttctatt

SEQ ID NO: 53162 - DNA, 20 bp, synthetic construct
  misc_feature 1..20: note = Description of Artificial Sequence: Synthetic oligonucleotide
  misc_feature 1..20: note = Target: SCN10A; (-) strand; PAM type: YTN; PAM sequence: TTT
  source 1..20: mol_type = other DNA
ttgtttgctcagttttctat

SEQ ID NO: 53163 - DNA, 20 bp, synthetic construct
  misc_feature 1..20: note = Description of Artificial Sequence: Synthetic oligonucleotide
  misc_feature 1..20: note = Target: SCN10A; (-) strand; PAM type: YTN; PAM sequence: TTT
  source 1..20: mol_type = other DNA
tttgtttgctcagttttcta

SEQ ID NO: 53164 - DNA, 20 bp, synthetic construct
  misc_feature 1..20: note = Description of Artificial Sequence: Synthetic oligonucleotide
  misc_feature 1..20: note = Target: SCN10A; (-) strand; PAM type: YTN; PAM sequence: TTT
  source 1..20: mol_type = other DNA
ttttgtttgctcagttttct

SEQ ID NO: 53165 - DNA, 20 bp, synthetic construct
  misc_feature 1..20: note = Description of Artificial Sequence: Synthetic oligonucleotide
  misc_feature 1..20: note = Target: SCN10A; (-) strand; PAM type: YTN; PAM sequence: TTA
  source 1..20: mol_type = other DNA
tttttttgtttgctcagttt

SEQ ID NO: 53166 - DNA, 20 bp, synthetic construct
  misc_feature 1..20: note = Description of Artificial Sequence: Synthetic oligonucleotide
  misc_feature 1..20: note = Target: SCN10A; (-) strand; PAM type: YTN; PAM sequence: TTT
  source 1..20: mol_type = other DNA
atttttttgtttgctcagtt

SEQ ID NO: 53167 - DNA, 20 bp, synthetic construct
  misc_feature 1..20: note = Description of Artificial Sequence: Synthetic oligonucleotide
  misc_feature 1..20: note = Target: SCN10A; (-) strand; PAM type: YTN; PAM sequence: TTT
  source 1..20: mol_type = other DNA
tatttttttgtttgctcagt

SEQ ID NO: 53168 - DNA, 20 bp, synthetic construct
  misc_feature 1..20: note = Description of Artificial Sequence: Synthetic oligonucleotide
  misc_feature 1..20: note = Target: SCN10A; (-) strand; PAM type: YTN; PAM sequence: TTA
  source 1..20: mol_type = other DNA
ataaggattttatttttttg

SEQ ID NO: 53169 - DNA, 20 bp, synthetic construct
  misc_feature 1..20: note = Description of Artificial Sequence: Synthetic oligonucleotide
  misc_feature 1..20: note = Target: SCN10A; (-) strand; PAM type: YTN; PAM sequence: TTG
  source 1..20: mol_type = other DNA
gagttaataaggattttatt

SEQ ID NO: 53170 - DNA, 20 bp, synthetic construct
  misc_feature 1..20: note = Description of Artificial Sequence: Synthetic oligonucleotide
  misc_feature 1..20: note = Target: SCN10A; (-) strand; PAM type: YTN; PAM sequence: CTT
  source 1..20: mol_type = other DNA
ggagttaataaggattttat

SEQ ID NO: 53171 - DNA, 20 bp, synthetic construct
  misc_feature 1..20: note = Description of Artificial Sequence: Synthetic oligonucleotide
  misc_feature 1..20: note = Target: SCN10A; (-) strand; PAM type: YTN; PAM sequence: TTC
  source 1..20: mol_type = other DNA
cttggagttaataaggattt

SEQ ID NO: 53172 - DNA, 20 bp, synthetic construct
  misc_feature 1..20: note = Description of Artificial Sequence: Synthetic oligonucleotide
  misc_feature 1..20: note = Target: SCN10A; (-) strand; PAM type: YTN; PAM sequence: TTT
  source 1..20: mol_type = other DNA
ccttggagttaataaggatt

SEQ ID NO: 53173 - DNA, 20 bp, synthetic construct
  misc_feature 1..20: note = Description of Artificial Sequence: Synthetic oligonucleotide
  misc_feature 1..20: note = Target: SCN10A; (-) strand; PAM type: YTN; PAM sequence: CTT
  source 1..20: mol_type = other DNA
tccttggagttaataaggat

SEQ ID NO: 53174 - DNA, 20 bp, synthetic construct
  misc_feature 1..20: note = Description of Artificial Sequence: Synthetic oligonucleotide
  misc_feature 1..20: note = Target: SCN10A; (-) strand; PAM type: YTN; PAM sequence: TTG
  source 1..20: mol_type = other DNA
ctttccttggagttaataag

SEQ ID NO: 53175 - DNA, 20 bp, synthetic construct
  misc_feature 1..20: note = Description of Artificial Sequence: Synthetic oligonucleotide
  misc_feature 1..20: note = Target: SCN10A; (-) strand; PAM type: YTN; PAM sequence: TTT
  source 1..20: mol_type = other DNA
gctttccttggagttaataa

SEQ ID NO: 53176 - DNA, 20 bp, synthetic construct
  misc_feature 1..20: note = Description of Artificial Sequence: Synthetic oligonucleotide
  misc_feature 1..20: note = Target: SCN10A; (-) strand; PAM type: YTN; PAM sequence: TTT
  source 1..20: mol_type = other DNA
tgctttccttggagttaata

SEQ ID NO: 53177 - DNA, 20 bp, synthetic construct
  misc_feature 1..20: note = Description of Artificial Sequence: Synthetic oligonucleotide
  misc_feature 1..20: note = Target: SCN10A; (-) strand; PAM type: YTN; PAM sequence: TTT
  source 1..20: mol_type = other DNA
ttgctttccttggagttaat

SEQ ID NO: 53178 - DNA, 20 bp, synthetic construct
  misc_feature 1..20: note = Description of Artificial Sequence: Synthetic oligonucleotide
  misc_feature 1..20: note = Target: SCN10A; (-) strand; PAM type: YTN; PAM sequence: TTG
  source 1..20: mol_type = other DNA
cacaatgtttttgctttcct

SEQ ID NO: 53179 - DNA, 20 bp, synthetic construct
  misc_feature 1..20: note = Description of Artificial Sequence: Synthetic oligonucleotide
  misc_feature 1..20: note = Target: SCN10A; (-) strand; PAM type: YTN; PAM sequence: TTT
  source 1..20: mol_type = other DNA
gcacaatgtttttgctttcc

SEQ ID NO: 53180 - DNA, 20 bp, synthetic construct
  misc_feature 1..20: note = Description of Artificial Sequence: Synthetic oligonucleotide
  misc_feature 1..20: note = Target: SCN10A; (-) strand; PAM type: YTN; PAM sequence: TTT
  source 1..20: mol_type = other DNA
tgcacaatgtttttgctttc

SEQ ID NO: 53181 - DNA, 20 bp, synthetic construct
  misc_feature 1..20: note = Description of Artificial Sequence: Synthetic oligonucleotide
  misc_feature 1..20: note = Target: SCN10A; (-) strand; PAM type: YTN; PAM sequence: TTT
  source 1..20: mol_type = other DNA
ttgcacaatgtttttgcttt

SEQ ID NO: 53182 - DNA, 20 bp, synthetic construct
  misc_feature 1..20: note = Description of Artificial Sequence: Synthetic oligonucleotide
  misc_feature 1..20: note = Target: SCN10A; (-) strand; PAM type: YTN; PAM sequence: CTT
  source 1..20: mol_type = other DNA
tttgcacaatgtttttgctt

SEQ ID NO: 53183 - DNA, 20 bp, synthetic construct
  misc_feature 1..20: note = Description of Artificial Sequence: Synthetic oligonucleotide
  misc_feature 1..20: note = Target: SCN10A; (-) strand; PAM type: YTN; PAM sequence: TTC
  source 1..20: mol_type = other DNA
ctttttgcacaatgtttttg

SEQ ID NO: 53184 - DNA, 20 bp, synthetic construct
  misc_feature 1..20: note = Description of Artificial Sequence: Synthetic oligonucleotide
  misc_feature 1..20: note = Target: SCN10A; (-) strand; PAM type: YTN; PAM sequence: TTT
  source 1..20: mol_type = other DNA
cctttttgcacaatgttttt

SEQ ID NO: 53185 - DNA, 20 bp, synthetic construct
  misc_feature 1..20: note = Description of Artificial Sequence: Synthetic oligonucleotide
  misc_feature 1..20: note = Target: SCN10A; (-) strand; PAM type: YTN; PAM sequence: CTA
  source 1..20: mol_type = other DNA
tatttcctttttgcacaatg

SEQ ID NO: 53186 - DNA, 20 bp, synthetic construct
  misc_feature 1..20: note = Description of Artificial Sequence: Synthetic oligonucleotide
  misc_feature 1..20: note = Target: SCN10A; (-) strand; PAM type: YTN; PAM sequence: TTG
  source 1..20: mol_type = other DNA
actatatttcctttttgcac

SEQ ID NO: 53187 - DNA, 20 bp, synthetic construct
  misc_feature 1..20: note = Description of Artificial Sequence: Synthetic oligonucleotide
  misc_feature 1..20: note = Target: SCN10A; (-) strand; PAM type: YTN; PAM sequence: TTT
  source 1..20: mol_type = other DNA
gactatatttcctttttgca

SEQ ID NO: 53188 - DNA, 20 bp, synthetic construct
  misc_feature 1..20: note = Description of Artificial Sequence: Synthetic oligonucleotide
  misc_feature 1..20: note = Target: SCN10A; (-) strand; PAM type: YTN; PAM sequence: CTT
  source 1..20: mol_type = other DNA
tgactatatttcctttttgc

SEQ ID NO: 53189 - DNA, 20 bp, synthetic construct
  misc_feature 1..20: note = Description of Artificial Sequence: Synthetic oligonucleotide
  misc_feature 1..20: note = Target: SCN10A; (-) strand; PAM type: YTN; PAM sequence: CTG
  source 1..20: mol_type = other DNA
tgtcatgcagtgtactttga

SEQ ID NO: 53190 - DNA, 20 bp, synthetic construct
  misc_feature 1..20: note = Description of Artificial Sequence: Synthetic oligonucleotide
  misc_feature 1..20: note = Target: SCN10A; (-) strand; PAM type: YTN; PAM sequence: TTA
  source 1..20: mol_type = other DNA
cagctgtgtcatgcagtgta

SEQ ID NO: 53191 - DNA, 20 bp, synthetic construct
  misc_feature 1..20: note = Description of Artificial Sequence: Synthetic oligonucleotide
  misc_feature 1..20: note = Target: SCN10A; (-) strand; PAM type: YTN; PAM sequence: TTT
  source 1..20: mol_type = other DNA
acagctgtgtcatgcagtgt

SEQ ID NO: 53192 - DNA, 20 bp, synthetic construct
  misc_feature 1..20: note = Description of Artificial Sequence: Synthetic oligonucleotide
  misc_feature 1..20: note = Target: SCN10A; (-) strand; PAM type: YTN; PAM sequence: CTG
  source 1..20: mol_type = other DNA
tttacagctgtgtcatgcag

SEQ ID NO: 53193 - DNA, 20 bp, synthetic construct
  misc_feature 1..20: note = Description of Artificial Sequence: Synthetic oligonucleotide
  misc_feature 1..20: note = Target: SCN10A; (-) strand; PAM type: YTN; PAM sequence: CTA
  source 1..20: mol_type = other DNA
agtaaacactgtttacagct

SEQ ID NO: 53194 - DNA, 20 bp, synthetic construct
  misc_feature 1..20: note = Description of Artificial Sequence: Synthetic oligonucleotide
  misc_feature 1..20: note = Target: SCN10A; (-) strand; PAM type: YTN; PAM sequence: TTG
  source 1..20: mol_type = other DNA
ctaagtaaacactgtttaca

SEQ ID NO: 53195 - DNA, 20 bp, synthetic construct
  misc_feature 1..20: note = Description of Artificial Sequence: Synthetic oligonucleotide
  misc_feature 1..20: note = Target: SCN10A; (-) strand; PAM type: YTN; PAM sequence: TTA
  source 1..20: mol_type = other DNA
cattgctaagtaaacactgt

SEQ ID NO: 53196 - DNA, 20 bp, synthetic construct
  misc_feature 1..20: note = Description of Artificial Sequence: Synthetic oligonucleotide
  misc_feature 1..20: note = Target: SCN10A; (-) strand; PAM type: YTN; PAM sequence: TTA
  source 1..20: mol_type = other DNA
cattacattgctaagtaaac

SEQ ID NO: 53197 - DNA, 20 bp, synthetic construct
  misc_feature 1..20: note = Description of Artificial Sequence: Synthetic oligonucleotide
  misc_feature 1..20: note = Target: SCN10A; (-) strand; PAM type: YTN; PAM sequence: CTA
  source 1..20: mol_type = other DNA
catatataattacattacat

SEQ ID NO: 53198 - DNA, 20 bp, synthetic construct
  misc_feature 1..20: note = Description of Artificial Sequence: Synthetic oligonucleotide
  misc_feature 1..20: note = Target: SCN10A; (-) strand; PAM type: YTN; PAM sequence: TTG
  source 1..20: mol_type = other DNA
tatgactacatatataatta

SEQ ID NO: 53199 - DNA, 20 bp, synthetic construct
  misc_feature 1..20: note = Description of Artificial Sequence: Synthetic oligonucleotide
  misc_feature 1..20: note = Target: SCN10A; (-) strand; PAM type: YTN; PAM sequence: TTA
  source 1..20: mol_type = other DNA
gatcatcagataatatatcc

SEQ ID NO: 53200 - DNA, 20 bp, synthetic construct
  misc_feature 1..20: note = Description of Artificial Sequence: Synthetic oligonucleotide
  misc_feature 1..20: note = Target: SCN10A; (-) strand; PAM type: YTN; PAM sequence: TTC
  source 1..20: mol_type = other DNA
agttagatcatcagataata

SEQ ID NO: 53201 - DNA, 20 bp, synthetic construct
  misc_feature 1..20: note = Description of Artificial Sequence: Synthetic oligonucleotide
  misc_feature 1..20: note = Target: SCN10A; (-) strand; PAM type: YTN; PAM sequence: CTT
  source 1..20: mol_type = other DNA
cagttagatcatcagataat

SEQ ID NO: 53202 - DNA, 20 bp, synthetic construct
  misc_feature 1..20: note = Description of Artificial Sequence: Synthetic oligonucleotide
  misc_feature 1..20: note = Target: SCN10A; (-) strand; PAM type: YTN; PAM sequence: TTG
  source 1..20: mol_type = other DNA
taatcttcagttagatcatc

SEQ ID NO: 53203 - DNA, 20 bp, synthetic construct
  misc_feature 1..20: note = Description of Artificial Sequence: Synthetic oligonucleotide
  misc_feature 1..20: note = Target: SCN10A; (-) strand; PAM type: YTN; PAM sequence: TTA
  source 1..20: mol_type = other DNA
tattgtaatcttcagttaga

SEQ ID NO: 53204 - DNA, 20 bp, synthetic construct
  misc_feature 1..20: note = Description of Artificial Sequence: Synthetic oligonucleotide
  misc_feature 1..20: note = Target: SCN10A; (-) strand; PAM type: YTN; PAM sequence: TTA
  source 1..20: mol_type = other DNA
cagttatattgtaatcttca

SEQ ID NO: 53205 - DNA, 20 bp, synthetic construct
  misc_feature 1..20: note = Description of Artificial Sequence: Synthetic oligonucleotide
  misc_feature 1..20: note = Target: SCN10A; (-) strand; PAM type: YTN; PAM sequence: CTG
  source 1..20: mol_type = other DNA
ttacagttatattgtaatct

SEQ ID NO: 53206 - DNA, 20 bp, synthetic construct
  misc_feature 1..20: note = Description of Artificial Sequence: Synthetic oligonucleotide
  misc_feature 1..20: note = Target: SCN10A; (-) strand; PAM type: YTN; PAM sequence: TTC
  source 1..20: mol_type = other DNA
ctgttacagttatattgtaa

SEQ ID NO: 53207 - DNA, 20 bp, synthetic construct
  misc_feature 1..20: note = Description of Artificial Sequence: Synthetic oligonucleotide
  misc_feature 1..20: note = Target: SCN10A; (-) strand; PAM type: YTN; PAM sequence: CTT
  source 1..20: mol_type = other DNA
cctgttacagttatattgta

SEQ ID NO: 53208 - DNA, 20 bp, synthetic construct
  misc_feature 1..20: note = Description of Artificial Sequence: Synthetic oligonucleotide
  misc_feature 1..20: note = Target: SCN10A; (-) strand; PAM type: YTN; PAM sequence: CTC
  source 1..20: mol_type = other DNA
atcttcctgttacagttata

SEQ ID NO: 53209 - DNA, 20 bp, synthetic construct
  misc_feature 1..20: note = Description of Artificial Sequence: Synthetic oligonucleotide
  misc_feature 1..20: note = Target: SCN10A; (-) strand; PAM type: YTN; PAM sequence: CTC
  source 1..20: mol_type = other DNA
accctcatcttcctgttaca

SEQ ID NO: 53210 - DNA, 20 bp, synthetic construct
  misc_feature 1..20: note = Description of Artificial Sequence: Synthetic oligonucleotide
  misc_feature 1..20: note = Target: SCN10A; (-) strand; PAM type: YTN; PAM sequence: CTC
  source 1..20: mol_type = other DNA
tcaccctcatcttcctgtta

SEQ ID NO: 53211 - DNA, 20 bp, synthetic construct
  misc_feature 1..20: note = Description of Artificial Sequence: Synthetic oligonucleotide
  misc_feature 1..20: note = Target: SCN10A; (-) strand; PAM type: YTN; PAM sequence: TTC
  source 1..20: mol_type = other DNA
ctctcaccctcatcttcctg

SEQ ID NO: 53212 - DNA, 20 bp, synthetic construct
  misc_feature 1..20: note = Description of Artificial Sequence: Synthetic oligonucleotide
  misc_feature 1..20: note = Target: SCN10A; (-) strand; PAM type: YTN; PAM sequence: TTT
  source 1..20: mol_type = other DNA
cctctcaccctcatcttcct

SEQ ID NO: 53213 - DNA, 20 bp, synthetic construct
  misc_feature 1..20: note = Description of Artificial Sequence: Synthetic oligonucleotide
  misc_feature 1..20: note = Target: SCN10A; (-) strand; PAM type: YTN; PAM sequence: CTC
  source 1..20: mol_type = other DNA
atttcctctcaccctcatct

SEQ ID NO: 53214 - DNA, 20 bp, synthetic construct
  misc_feature 1..20: note = Description of Artificial Sequence: Synthetic oligonucleotide
  misc_feature 1..20: note = Target: SCN10A; (-) strand; PAM type: YTN; PAM sequence: TTA
  source 1..20: mol_type = other DNA
aggccacatccacaaactca

SEQ ID NO: 53215 - DNA, 20 bp, synthetic construct
  misc_feature 1..20: note = Description of Artificial Sequence: Synthetic oligonucleotide
  misc_feature 1..20: note = Target: SCN10A; (-) strand; PAM type: YTN; PAM sequence: CTT
  source 1..20: mol_type = other DNA
aaggccacatccacaaactc

SEQ ID NO: 53216 - DNA, 20 bp, synthetic construct
  misc_feature 1..20: note = Description of Artificial Sequence: Synthetic oligonucleotide
  misc_feature 1..20: note = Target: SCN10A; (-) strand; PAM type: YTN; PAM sequence: TTA
  source 1..20: mol_type = other DNA
tgagaaaaaacttaaggcca

SEQ ID NO: 53217 - DNA, 20 bp, synthetic construct
  misc_feature 1..20: note = Description of Artificial Sequence: Synthetic oligonucleotide
  misc_feature 1..20: note = Target: SCN10A; (-) strand; PAM type: YTN; PAM sequence: CTA
  source 1..20: mol_type = other DNA
ttatgagaaaaaacttaagg

SEQ ID NO: 53218 - DNA, 20 bp, synthetic construct
  misc_feature 1..20: note = Description of Artificial Sequence: Synthetic oligonucleotide
  misc_feature 1..20: note = Target: SCN10A; (-) strand; PAM type: YTN; PAM sequence: TTC
  source 1..20: mol_type = other DNA
ctattatgagaaaaaactta

SEQ ID NO: 53219 - DNA, 20 bp, synthetic construct
  misc_feature 1..20: note = Description of Artificial Sequence: Synthetic oligonucleotide
  misc_feature 1..20: note = Target: SCN10A; (-) strand; PAM type: YTN; PAM sequence: CTT
  source 1..20: mol_type = other DNA
cctattatgagaaaaaactt

SEQ ID NO: 53220 - DNA, 20 bp, synthetic construct
  misc_feature 1..20: note = Description of Artificial Sequence: Synthetic oligonucleotide
  misc_feature 1..20: note = Target: SCN10A; (-) strand; PAM type: YTN; PAM sequence: TTG
  source 1..20: mol_type = other DNA
gcttcctattatgagaaaaa

SEQ ID NO: 53221 - DNA, 20 bp, synthetic construct
  misc_feature 1..20: note = Description of Artificial Sequence: Synthetic oligonucleotide
  misc_feature 1..20: note = Target: SCN10A; (-) strand; PAM type: YTN; PAM sequence: TTA
  source 1..20: mol_type = other DNA
ttggcttcctattatgagaa

SEQ ID NO: 53222 - DNA, 20 bp, synthetic construct
  misc_feature 1..20: note = Description of Artificial Sequence: Synthetic oligonucleotide
  misc_feature 1..20: note = Target: SCN10A; (-) strand; PAM type: YTN; PAM sequence: TTT
  source 1..20: mol_type = other DNA
attggcttcctattatgaga

SEQ ID NO: 53223 - DNA, 20 bp, synthetic construct
  misc_feature 1..20: note = Description of Artificial Sequence: Synthetic oligonucleotide
  misc_feature 1..20: note = Target: SCN10A; (-) strand; PAM type: YTN; PAM sequence: TTA
  source 1..20: mol_type = other DNA
tttattggcttcctattatg

SEQ ID NO: 53224 - DNA, 20 bp, synthetic construct
  misc_feature 1..20: note = Description of Artificial Sequence: Synthetic oligonucleotide
  misc_feature 1..20: note = Target: SCN10A; (-) strand; PAM type: YTN; PAM sequence: CTG
  source 1..20: mol_type = other DNA
atgttatttattggcttcct

SEQ ID NO: 53225 - DNA, 20 bp, synthetic construct
  misc_feature 1..20: note = Description of Artificial Sequence: Synthetic oligonucleotide
  misc_feature 1..20: note = Target: SCN10A; (-) strand; PAM type: YTN; PAM sequence: TTC
  source 1..20: mol_type = other DNA
tgatgttatttattggcttc

SEQ ID NO: 53226 - DNA, 20 bp, synthetic construct
  misc_feature 1..20: note = Description of Artificial Sequence: Synthetic oligonucleotide
  misc_feature 1..20: note = Target: SCN10A; (-) strand; PAM type: YTN; PAM sequence: TTT
  source 1..20: mol_type = other DNA
ctgatgttatttattggctt

SEQ ID NO: 53227 - DNA, 20 bp, synthetic construct
  misc_feature 1..20: note = Description of Artificial Sequence: Synthetic oligonucleotide
  misc_feature 1..20: note = Target: SCN10A; (-) strand; PAM type: YTN; PAM sequence: TTC
  source 1..20: mol_type = other DNA
aatttctgatgttatttatt

SEQ ID NO: 53228 - DNA, 20 bp, synthetic construct
  misc_feature 1..20: note = Description of Artificial Sequence: Synthetic oligonucleotide
  misc_feature 1..20: note = Target: SCN10A; (-) strand; PAM type: YTN; PAM sequence: TTT
  source 1..20: mol_type = other DNA
caatttctgatgttatttat

SEQ ID NO: 53229 - DNA, 20 bp, synthetic construct
  misc_feature 1..20: note = Description of Artificial Sequence: Synthetic oligonucleotide
  misc_feature 1..20: note = Target: SCN10A; (-) strand; PAM type: YTN; PAM sequence: TTT
  source 1..20: mol_type = other DNA
tcaatttctgatgttattta

SEQ ID NO: 53230 - DNA, 20 bp, synthetic construct
  misc_feature 1..20: note = Description of Artificial Sequence: Synthetic oligonucleotide
  misc_feature 1..20: note = Target: SCN10A; (-) strand; PAM type: YTN; PAM sequence: TTT
  source 1..20: mol_type = other DNA
ttcaatttctgatgttattt

SEQ ID NO: 53231 - DNA, 20 bp, synthetic construct
  misc_feature 1..20: note = Description of Artificial Sequence: Synthetic oligonucleotide
  misc_feature 1..20: note = Target: SCN10A; (-) strand; PAM type: YTN; PAM sequence: TTA
  source 1..20: mol_type = other DNA
atttttcaatttctgatgtt

SEQ ID NO: 53232 - DNA, 20 bp, synthetic construct
  misc_feature 1..20: note = Description of Artificial Sequence: Synthetic oligonucleotide
  misc_feature 1..20: note = Target: SCN10A; (-) strand; PAM type: YTN; PAM sequence: TTT
  source 1..20: mol_type = other DNA
aatttttcaatttctgatgt

SEQ ID NO: 53233 - DNA, 20 bp, synthetic construct
  misc_feature 1..20: note = Description of Artificial Sequence: Synthetic oligonucleotide
  misc_feature 1..20: note = Target: SCN10A; (-) strand; PAM type: YTN; PAM sequence: TTT
  source 1..20: mol_type = other DNA
taatttttcaatttctgatg

SEQ ID NO: 53234 - DNA, 20 bp, synthetic construct
  misc_feature 1..20: note = Description of Artificial Sequence: Synthetic oligonucleotide
  misc_feature 1..20: note = Target: SCN10A; (-) strand; PAM type: YTN; PAM sequence: TTT
  source 1..20: mol_type = other DNA
ttaatttttcaatttctgat

SEQ ID NO: 53235 - DNA, 20 bp, synthetic construct
  misc_feature 1..20: note = Description of Artificial Sequence: Synthetic oligonucleotide
  misc_feature 1..20: note = Target: SCN10A; (-) strand; PAM type: YTN; PAM sequence: CTA
  source 1..20: mol_type = other DNA
atttttaatttttcaatttc

SEQ ID NO: 53236 - DNA, 20 bp, synthetic construct
  misc_feature 1..20: note = Description of Artificial Sequence: Synthetic oligonucleotide
  misc_feature 1..20: note = Target: SCN10A; (-) strand; PAM type: YTN; PAM sequence: CTC
  source 1..20: mol_type = other DNA
ataatactaatttttaattt

SEQ ID NO: 53237 - DNA, 20 bp, synthetic construct
  misc_feature 1..20: note = Description of Artificial Sequence: Synthetic oligonucleotide
  misc_feature 1..20: note = Target: SCN10A; (-) strand; PAM type: YTN; PAM sequence: CTC
  source 1..20: mol_type = other DNA
caataatatactcataatac

SEQ ID NO: 53238 - DNA, 20 bp, synthetic construct
  misc_feature 1..20: note = Description of Artificial Sequence: Synthetic oligonucleotide
  misc_feature 1..20: note = Target: SCN10A; (-) strand; PAM type: YTN; PAM sequence: CTA
  source 1..20: mol_type = other DNA
tctccaataatatactcata

SEQ ID NO: 53239 - DNA, 20 bp, synthetic construct
  misc_feature 1..20: note = Description of Artificial Sequence: Synthetic oligonucleotide
  misc_feature 1..20: note = Target: SCN10A; (-) strand; PAM type: YTN; PAM sequence: CTC
  source 1..20: mol_type = other DNA
cctatctccaataatatact

SEQ ID NO: 53240 - DNA, 20 bp, synthetic construct
  misc_feature 1..20: note = Description of Artificial Sequence: Synthetic oligonucleotide
  misc_feature 1..20: note = Target: SCN10A; (-) strand; PAM type: YTN; PAM sequence: CTG
  source 1..20: mol_type = other DNA
atacctccctatctccaata

SEQ ID NO: 53241 - DNA, 20 bp, synthetic construct
  misc_feature 1..20: note = Description of Artificial Sequence: Synthetic oligonucleotide
  misc_feature 1..20: note = Target: SCN10A; (-) strand; PAM type: YTN; PAM sequence: TTC
  source 1..20: mol_type = other DNA
tgatacctccctatctccaa

SEQ ID NO: 53242 - DNA, 20 bp, synthetic construct
  misc_feature 1..20: note = Description of Artificial Sequence: Synthetic oligonucleotide
  misc_feature 1..20: note = Target: SCN10A; (-) strand; PAM type: YTN; PAM sequence: CTT
  source 1..20: mol_type = other DNA
ctgatacctccctatctcca

SEQ ID NO: 53243 - DNA, 20 bp, synthetic construct
  misc_feature 1..20: note = Description of Artificial Sequence: Synthetic oligonucleotide
  misc_feature 1..20: note = Target: SCN10A; (-) strand; PAM type: YTN; PAM sequence: CTG
  source 1..20: mol_type = other DNA
tgtcttctgatacctcccta

SEQ ID NO: 53244 - DNA, 20 bp, synthetic construct
  misc_feature 1..20: note = Description of Artificial Sequence: Synthetic oligonucleotide
  misc_feature 1..20: note = Target: SCN10A; (-) strand; PAM type: YTN; PAM sequence: TTA
  source 1..20: mol_type = other DNA
cctgtgtcttctgatacctc

SEQ ID NO: 53245 - DNA, 20 bp, synthetic construct
  misc_feature 1..20: note = Description of Artificial Sequence: Synthetic oligonucleotide
  misc_feature 1..20: note = Target: SCN10A; (-) strand; PAM type: YTN; PAM sequence: TTT
  source 1..20: mol_type = other DNA
acctgtgtcttctgatacct

SEQ ID NO: 53246 - DNA, 20 bp, synthetic construct
  misc_feature 1..20: note = Description of Artificial Sequence: Synthetic oligonucleotide
  misc_feature 1..20: note = Target: SCN10A; (-) strand; PAM type: YTN; PAM sequence: TTT
  source 1..20: mol_type = other DNA
tacctgtgtcttctgatacc

SEQ ID NO: 53247 - DNA, 20 bp, synthetic construct
  misc_feature 1..20: note = Description of Artificial Sequence: Synthetic oligonucleotide
  misc_feature 1..20: note = Target: SCN10A; (-) strand; PAM type: YTN; PAM sequence: TTT
  source 1..20: mol_type = other DNA
ttacctgtgtcttctgatac

SEQ ID NO: 53248 - DNA, 20 bp, synthetic construct
  misc_feature 1..20: note = Description of Artificial Sequence: Synthetic oligonucleotide
  misc_feature 1..20: note = Target: SCN10A; (-) strand; PAM type: YTN; PAM sequence: TTT
  source 1..20: mol_type = other DNA
tttacctgtgtcttctgata

SEQ ID NO: 53249 - DNA, 20 bp, synthetic construct
  misc_feature 1..20: note = Description of Artificial Sequence: Synthetic oligonucleotide
  misc_feature 1..20: note = Target: SCN10A; (-) strand; PAM type: YTN; PAM sequence: TTT
  source 1..20: mol_type = other DNA
ttttacctgtgtcttctgat

SEQ ID NO: 53250 - DNA, 20 bp, synthetic construct
  misc_feature 1..20: note = Description of Artificial Sequence: Synthetic oligonucleotide
  misc_feature 1..20: note = Target: SCN10A; (-) strand; PAM type: YTN; PAM sequence: CTT
  source 1..20: mol_type = other DNA
tttttacctgtgtcttctga

SEQ ID NO: 53251 - DNA, 20 bp, synthetic construct
  misc_feature 1..20: note = Description of Artificial Sequence: Synthetic oligonucleotide
  misc_feature 1..20: note = Target: SCN10A; (-) strand; PAM type: YTN; PAM sequence: TTA
  source 1..20: mol_type = other DNA
gctttttttacctgtgtctt

SEQ ID NO: 53252 - DNA, 20 bp, synthetic construct
  misc_feature 1..20: note = Description of Artificial Sequence: Synthetic oligonucleotide
  misc_feature 1..20: note = Target: SCN10A; (-) strand; PAM type: YTN; PAM sequence: TTT
  source 1..20: mol_type = other DNA
agctttttttacctgtgtct

SEQ ID NO: 53253 - DNA, 20 bp, synthetic construct
  misc_feature 1..20: note = Description of Artificial Sequence: Synthetic oligonucleotide
  misc_feature 1..20: note = Target: SCN10A; (-) strand; PAM type: YTN; PAM sequence: TTT
  source 1..20: mol_type = other DNA
tagctttttttacctgtgtc

SEQ ID NO: 53254 - DNA, 20 bp, synthetic construct
  misc_feature 1..20: note = Description of Artificial Sequence: Synthetic oligonucleotide
  misc_feature 1..20: note = Target: SCN10A; (-) strand; PAM type: YTN; PAM sequence: CTT
  source 1..20: mol_type = other DNA
ttagctttttttacctgtgt

SEQ ID NO: 53255 - DNA, 20 bp, synthetic construct
  misc_feature 1..20: note = Description of Artificial Sequence: Synthetic oligonucleotide
  misc_feature 1..20: note = Target: SCN10A; (-) strand; PAM type: YTN; PAM sequence: TTC
  source 1..20: mol_type = other DNA
cagaggccaccacttttagc

SEQ ID NO: 53256 - DNA, 20 bp, synthetic construct
  misc_feature 1..20: note = Description of Artificial Sequence: Synthetic oligonucleotide
  misc_feature 1..20: note = Target: SCN10A; (-) strand; PAM type: YTN; PAM sequence: TTT
  source 1..20: mol_type = other DNA
ccagaggccaccacttttag

SEQ ID NO: 53257 - DNA, 20 bp, synthetic construct
  misc_feature 1..20: note = Description of Artificial Sequence: Synthetic oligonucleotide
  misc_feature 1..20: note = Target: SCN10A; (-) strand; PAM type: YTN; PAM sequence: CTT
  source 1..20: mol_type = other DNA
tccagaggccaccactttta

SEQ ID NO: 53258 - DNA, 20 bp, synthetic construct
  misc_feature 1..20: note = Description of Artificial Sequence: Synthetic oligonucleotide
  misc_feature 1..20: note = Target: SCN10A; (-) strand; PAM type: YTN; PAM sequence: TTC
  source 1..20: mol_type = other DNA
tttccagaggccaccacttt

SEQ ID NO: 53259 - DNA, 20 bp, synthetic construct
  misc_feature 1..20: note = Description of Artificial Sequence: Synthetic oligonucleotide
  misc_feature 1..20: note = Target: SCN10A; (-) strand; PAM type: YTN; PAM sequence: CTT
  source 1..20: mol_type = other DNA
ctttccagaggccaccactt

SEQ ID NO: 53260 - DNA, 20 bp, synthetic construct
  misc_feature 1..20: note = Description of Artificial Sequence: Synthetic oligonucleotide
  misc_feature 1..20: note = Target: SCN10A; (-) strand; PAM type: YTN; PAM sequence: CTC
  source 1..20: mol_type = other DNA
ttctttccagaggccaccac

SEQ ID NO: 53261 - DNA, 20 bp, synthetic construct
  misc_feature 1..20: note = Description of Artificial Sequence: Synthetic oligonucleotide
  misc_feature 1..20: note = Target: SCN10A; (-) strand; PAM type: YTN; PAM sequence: CTC
  source 1..20: mol_type = other DNA
atctcttctttccagaggcc

SEQ ID NO: 53262 - DNA, 20 bp, synthetic construct
  misc_feature 1..20: note = Description of Artificial Sequence: Synthetic oligonucleotide
  misc_feature 1..20: note = Target: SCN10A; (-) strand; PAM type: YTN; PAM sequence: TTC
  source 1..20: mol_type = other DNA
tcatctcttctttccagagg

SEQ ID NO: 53263 - DNA, 20 bp, synthetic construct
  misc_feature 1..20: note = Description of Artificial Sequence: Synthetic oligonucleotide
  misc_feature 1..20: note = Target: SCN10A; (-) strand; PAM type: YTN; PAM sequence: TTT
  source 1..20: mol_type = other DNA
ctcatctcttctttccagag

SEQ ID NO: 53264 - DNA, 20 bp, synthetic construct
  misc_feature 1..20: note = Description of Artificial Sequence: Synthetic oligonucleotide
  misc_feature 1..20: note = Target: SCN10A; (-) strand; PAM type: YTN; PAM sequence: TTT
  source 1..20: mol_type = other DNA
tctcatctcttctttccaga

SEQ ID NO: 53265 - DNA, 20 bp, synthetic construct
  misc_feature 1..20: note = Description of Artificial Sequence: Synthetic oligonucleotide
  misc_feature 1..20: note = Target: SCN10A; (-) strand; PAM type: YTN; PAM sequence: TTT
  source 1..20: mol_type = other DNA
ttctcatctcttctttccag

SEQ ID NO: 53266 - DNA, 20 bp, synthetic construct
  misc_feature 1..20: note = Description of Artificial Sequence: Synthetic oligonucleotide
  misc_feature 1..20: note = Target: SCN10A; (-) strand; PAM type: YTN; PAM sequence: TTC
  source 1..20: mol_type = other DNA
atttttctcatctcttcttt

SEQ ID NO: 53267 - DNA, 20 bp, synthetic construct
  misc_feature 1..20: note = Description of Artificial Sequence: Synthetic oligonucleotide
  misc_feature 1..20: note = Target: SCN10A; (-) strand; PAM type: YTN; PAM sequence: TTT
  source 1..20: mol_type = other DNA
catttttctcatctcttctt

SEQ ID NO: 53268 - DNA, 20 bp, synthetic construct
  misc_feature 1..20: note = Description of Artificial Sequence: Synthetic oligonucleotide
  misc_feature 1..20: note = Target: SCN10A; (-) strand; PAM type: YTN; PAM sequence: CTG
  source 1..20: mol_type = other DNA
acaaaaaaaacagcaatttc

SEQ ID NO: 53269 - DNA, 20 bp, synthetic construct
  misc_feature 1..20: note = Description of Artificial Sequence: Synthetic oligonucleotide
  misc_feature 1..20: note = Target: SCN10A; (-) strand; PAM type: YTN; PAM sequence: TTC
  source 1..20: mol_type = other DNA
tgacaaaaaaaacagcaatt

SEQ ID NO: 53270 - DNA, 20 bp, synthetic construct
  misc_feature 1..20: note = Description of Artificial Sequence: Synthetic oligonucleotide
  misc_feature 1..20: note = Target: SCN10A; (-) strand; PAM type: YTN; PAM sequence: TTA
  source 1..20: mol_type = other DNA
taaagattctgacaaaaaaa

SEQ ID NO: 53271 - DNA, 20 bp, synthetic construct
  misc_feature 1..20: note = Description of Artificial Sequence: Synthetic oligonucleotide
  misc_feature 1..20: note = Target: SCN10A; (-) strand; PAM type: YTN; PAM sequence: TTT
  source 1..20: mol_type = other DNA
ataaagattctgacaaaaaa

SEQ ID NO: 53272 - DNA, 20 bp, synthetic construct
  misc_feature 1..20: note = Description of Artificial Sequence: Synthetic oligonucleotide
  misc_feature 1..20: note = Target: SCN10A; (-) strand; PAM type: YTN; PAM sequence: TTT
  source 1..20: mol_type = other DNA
tataaagattctgacaaaaa

SEQ ID NO: 53273 - DNA, 20 bp, synthetic construct
  misc_feature 1..20: note = Description of Artificial Sequence: Synthetic oligonucleotide
  misc_feature 1..20: note = Target: SCN10A; (-) strand; PAM type: YTN; PAM sequence: TTA
  source 1..20: mol_type = other DNA
aaaggtcacagagttttata

SEQ ID NO: 53274 - DNA, 20 bp, synthetic construct
  misc_feature 1..20: note = Description of Artificial Sequence: Synthetic oligonucleotide
  misc_feature 1..20: note = Target: SCN10A; (-) strand; PAM type: YTN; PAM sequence: TTT
  source 1..20: mol_type = other DNA
aaaaggtcacagagttttat

SEQ ID NO: 53275 - DNA, 20 bp, synthetic construct
  misc_feature 1..20: note = Description of Artificial Sequence: Synthetic oligonucleotide
  misc_feature 1..20: note = Target: SCN10A; (-) strand; PAM type: YTN; PAM sequence: TTC
  source 1..20: mol_type = other DNA
ataatttaaaaggtcacaga

SEQ ID NO: 53276 - DNA, 20 bp, synthetic construct
  misc_feature 1..20: note = Description of Artificial Sequence: Synthetic oligonucleotide
  misc_feature 1..20: note = Target: SCN10A; (-) strand; PAM type: YTN; PAM sequence: TTA
  source 1..20: mol_type = other DNA
agacatatatgttcataatt

SEQ ID NO: 53277 - DNA, 20 bp, synthetic construct
  misc_feature 1..20: note = Description of Artificial Sequence: Synthetic oligonucleotide
  misc_feature 1..20: note = Target: SCN10A; (-) strand; PAM type: YTN; PAM sequence: TTT
  source 1..20: mol_type = other DNA
aagacatatatgttcataat

SEQ ID NO: 53278 - DNA, 20 bp, synthetic construct
  misc_feature 1..20: note = Description of Artificial Sequence: Synthetic oligonucleotide
  misc_feature 1..20: note = Target: SCN10A; (-) strand; PAM type: YTN; PAM sequence: TTA
  source 1..20: mol_type = other DNA
tttaagacatatatgttcat

SEQ ID NO: 53279 - DNA, 20 bp, synthetic construct
  misc_feature 1..20: note = Description of Artificial Sequence: Synthetic oligonucleotide
  misc_feature 1..20: note = Target: SCN10A; (-) strand; PAM type: YTN; PAM sequence: TTT
  source 1..20: mol_type = other DNA
atttaagacatatatgttca

SEQ ID NO: 53280 - DNA, 20 bp, synthetic construct
  misc_feature 1..20: note = Description of Artificial Sequence: Synthetic oligonucleotide
  misc_feature 1..20: note = Target: SCN10A; (-) strand; PAM type: YTN; PAM sequence: TTT
  source 1..20: mol_type = other DNA
tatttaagacatatatgttc

SEQ ID NO: 53281 - DNA, 20 bp, synthetic construct
  misc_feature 1..20: note = Description of Artificial Sequence: Synthetic oligonucleotide
  misc_feature 1..20: note = Target: SCN10A; (-) strand; PAM type: YTN; PAM sequence: CTT
  source 1..20: mol_type = other DNA
ttatttaagacatatatgtt

SEQ ID NO: 53282 - DNA, 20 bp, synthetic construct
  misc_feature 1..20: note = Description of Artificial Sequence: Synthetic oligonucleotide
  misc_feature 1..20: note = Target: SCN10A; (-) strand; PAM type: YTN; PAM sequence: TTA
  source 1..20: mol_type = other DNA
cttttatttaagacatatat

SEQ ID NO: 53283 - DNA, 20 bp, synthetic construct
  misc_feature 1..20: note = Description of Artificial Sequence: Synthetic oligonucleotide
  misc_feature 1..20: note = Target: SCN10A; (-) strand; PAM type: YTN; PAM sequence: TTT
  source 1..20: mol_type = other DNA
acttttatttaagacatata

SEQ ID NO: 53284 - DNA, 20 bp, synthetic construct
  misc_feature 1..20: note = Description of Artificial Sequence: Synthetic oligonucleotide
  misc_feature 1..20: note = Target: SCN10A; (-) strand; PAM type: YTN; PAM sequence: TTT
  source 1..20: mol_type = other DNA
tacttttatttaagacatat

SEQ ID NO: 53285 - DNA, 20 bp, synthetic construct
  misc_feature 1..20: note = Description of Artificial Sequence: Synthetic oligonucleotide
  misc_feature 1..20: note = Target: SCN10A; (-) strand; PAM type: YTN; PAM sequence: CTT
  source 1..20: mol_type = other DNA
ttacttttatttaagacata

SEQ ID NO: 53286 - DNA, 20 bp, synthetic construct
  misc_feature 1..20: note = Description of Artificial Sequence: Synthetic oligonucleotide
  misc_feature 1..20: note = Target: SCN10A; (-) strand; PAM type: YTN; PAM sequence: TTG
  source 1..20: mol_type = other DNA
acttttacttttatttaaga

SEQ ID NO: 53287 - DNA, 20 bp, synthetic construct
  misc_feature 1..20: note = Description of Artificial Sequence: Synthetic oligonucleotide
  misc_feature 1..20: note = Target: SCN10A; (-) strand; PAM type: YTN; PAM sequence: CTT
  source 1..20: mol_type = other DNA
gacttttacttttatttaag

SEQ ID NO: 53288 - DNA, 20 bp, synthetic construct
  misc_feature 1..20: note = Description of Artificial Sequence: Synthetic oligonucleotide
  misc_feature 1..20: note = Target: SCN10A; (-) strand; PAM type: YTN; PAM sequence: TTA
  source 1..20: mol_type = other DNA
acttgacttttacttttatt

SEQ ID NO: 53289 - DNA, 20 bp, synthetic construct
  misc_feature 1..20: note = Description of Artificial Sequence: Synthetic oligonucleotide
  misc_feature 1..20: note = Target: SCN10A; (-) strand; PAM type: YTN; PAM sequence: TTT
  source 1..20: mol_type = other DNA
aacttgacttttacttttat

SEQ ID NO: 53290 - DNA, 20 bp, synthetic construct
  misc_feature 1..20: note = Description of Artificial Sequence: Synthetic oligonucleotide
  misc_feature 1..20: note = Target: SCN10A; (-) strand; PAM type: YTN; PAM sequence: TTT
  source 1..20: mol_type = other DNA
taacttgacttttactttta

SEQ ID NO: 53291 - DNA, 20 bp, synthetic construct
  misc_feature 1..20: note = Description of Artificial Sequence: Synthetic oligonucleotide
  misc_feature 1..20: note = Target: SCN10A; (-) strand; PAM type: YTN; PAM sequence: TTT
  source 1..20: mol_type = other DNA
ttaacttgacttttactttt

SEQ ID NO: 53292 - DNA, 20 bp, synthetic construct
  misc_feature 1..20: note = Description of Artificial Sequence: Synthetic oligonucleotide
  misc_feature 1..20: note = Target: SCN10A; (-) strand; PAM type: YTN; PAM sequence: CTT
  source 1..20: mol_type = other DNA
tttaacttgacttttacttt

SEQ ID NO: 53293 - DNA, 20 bp, synthetic construct
  misc_feature 1..20: note = Description of Artificial Sequence: Synthetic oligonucleotide
  misc_feature 1..20: note = Target: SCN10A; (-) strand; PAM type: YTN; PAM sequence: TTC
  source 1..20: mol_type = other DNA
actttttaacttgactttta

SEQ ID NO: 53294 - DNA, 20 bp, synthetic construct
  misc_feature 1..20: note = Description of Artificial Sequence: Synthetic oligonucleotide
  misc_feature 1..20: note = Target: SCN10A; (-) strand; PAM type: YTN; PAM sequence: TTA
  source 1..20: mol_type = other DNA
ttcactttttaacttgactt

SEQ ID NO: 53295 - DNA, 20 bp, synthetic construct
  misc_feature 1..20: note = Description of Artificial Sequence: Synthetic oligonucleotide
  misc_feature 1..20: note = Target: SCN10A; (-) strand; PAM type: YTN; PAM sequence: CTC
  source 1..20: mol_type = other DNA
acagatgtgaaaaaaaatta

SEQ ID NO: 53296 - DNA, 20 bp, synthetic construct
  misc_feature 1..20: note = Description of Artificial Sequence: Synthetic oligonucleotide
  misc_feature 1..20: note = Target: SCN10A; (-) strand; PAM type: YTN; PAM sequence: CTC
  source 1..20: mol_type = other DNA
tcacagatgtgaaaaaaaat

SEQ ID NO: 53297 - DNA, 20 bp, synthetic construct
  misc_feature 1..20: note = Description of Artificial Sequence: Synthetic oligonucleotide
  misc_feature 1..20: note = Target: SCN10A; (-) strand; PAM type: YTN; PAM sequence: CTC
  source 1..20: mol_type = other DNA
ctctcacagatgtgaaaaaa

SEQ ID NO: 53298 - DNA, 20 bp, synthetic construct
  misc_feature 1..20: note = Description of Artificial Sequence: Synthetic oligonucleotide
  misc_feature 1..20: note = Target: SCN10A; (-) strand; PAM type: YTN; PAM sequence: TTC
  source 1..20: mol_type = other DNA
tcctctcacagatgtgaaaa

SEQ ID NO: 53299 - DNA, 20 bp, synthetic construct
  misc_feature 1..20: note = Description of Artificial Sequence: Synthetic oligonucleotide
  misc_feature 1..20: note = Target: SCN10A; (-) strand; PAM type: YTN; PAM sequence: TTT
  source 1..20: mol_type = other DNA
ctcctctcacagatgtgaaa

SEQ ID NO: 53300 - DNA, 20 bp, synthetic construct
  misc_feature 1..20: note = Description of Artificial Sequence: Synthetic oligonucleotide
  misc_feature 1..20: note = Target: SCN10A; (-) strand; PAM type: YTN; PAM sequence: TTC
  source 1..20: mol_type = other DNA
aaacacgatttctcctctca

SEQ ID NO: 53301 - DNA, 20 bp, synthetic construct
  misc_feature 1..20: note = Description of Artificial Sequence: Synthetic oligonucleotide
  misc_feature 1..20: note = Target: SCN10A; (-) strand; PAM type: YTN; PAM sequence: TTT
  source 1..20: mol_type = other DNA
caaacacgatttctcctctc

SEQ ID NO: 53302 - DNA, 20 bp, synthetic construct
  misc_feature 1..20: note = Description of Artificial Sequence: Synthetic oligonucleotide
  misc_feature 1..20: note = Target: SCN10A; (-) strand; PAM type: YTN; PAM sequence: CTA
  source 1..20: mol_type = other DNA
aatgatttcaaacacgattt

SEQ ID NO: 53303 - DNA, 20 bp, synthetic construct
  misc_feature 1..20: note = Description of Artificial Sequence: Synthetic oligonucleotide
  misc_feature 1..20: note = Target: SCN10A; (-) strand; PAM type: YTN; PAM sequence: TTC
  source 1..20: mol_type = other DNA
ctaaatgatttcaaacacga

SEQ ID NO: 53304 - DNA, 20 bp, synthetic construct
  misc_feature 1..20: note = Description of Artificial Sequence: Synthetic oligonucleotide
  misc_feature 1..20: note = Target: SCN10A; (-) strand; PAM type: YTN; PAM sequence: CTA
  source 1..20: mol_type = other DNA
tgcaaccagatatagattcc

SEQ ID NO: 53305 - DNA, 20 bp, synthetic construct
  misc_feature 1..20: note = Description of Artificial Sequence: Synthetic oligonucleotide
  misc_feature 1..20: note = Target: SCN10A; (-) strand; PAM type: YTN; PAM sequence: CTC
  source 1..20: mol_type = other DNA
aagcagctatgcaaccagat

SEQ ID NO: 53306 - DNA, 20 bp, synthetic construct
  misc_feature 1..20: note = Description of Artificial Sequence: Synthetic oligonucleotide
  misc_feature 1..20: note = Target: SCN10A; (-) strand; PAM type: YTN; PAM sequence: CTG
  source 1..20: mol_type = other DNA
acagctcaagcagctatgca

SEQ ID NO: 53307 - DNA, 20 bp, synthetic construct
  misc_feature 1..20: note = Description of Artificial Sequence: Synthetic oligonucleotide
  misc_feature 1..20: note = Target: SCN10A; (-) strand; PAM type: YTN; PAM sequence: TTA
  source 1..20: mol_type = other DNA
gaaaacataaagagtgtggg

SEQ ID NO: 53308 - DNA, 20 bp, synthetic construct
  misc_feature 1..20: note = Description of Artificial Sequence: Synthetic oligonucleotide
  misc_feature 1..20: note = Target: SCN10A; (-) strand; PAM type: YTN; PAM sequence: TTT
  source 1..20: mol_type = other DNA
agaaaacataaagagtgtgg

SEQ ID NO: 53309 - DNA, 20 bp, synthetic construct
  misc_feature 1..20: note = Description of Artificial Sequence: Synthetic oligonucleotide
  misc_feature 1..20: note = Target: SCN10A; (-) strand; PAM type: YTN; PAM sequence: CTA
  source 1..20: mol_type = other DNA
atttagaaaacataaagagt

SEQ ID NO: 53310 - DNA, 20 bp, synthetic construct
  misc_feature 1..20: note = Description of Artificial Sequence: Synthetic oligonucleotide
  misc_feature 1..20: note = Target: SCN10A; (-) strand; PAM type: YTN; PAM sequence: TTC
  source 1..20: mol_type = other DNA
taatttagaaaacataaaga

SEQ ID NO: 53311 - DNA, 20 bp, synthetic construct
  misc_feature 1..20: note = Description of Artificial Sequence: Synthetic oligonucleotide
  misc_feature 1..20: note = Target: SCN10A; (-) strand; PAM type: YTN; PAM sequence: TTT
  source 1..20: mol_type = other DNA
ctaatttagaaaacataaag

SEQ ID NO: 53312 - DNA, 20 bp, synthetic construct
  misc_feature 1..20: note = Description of Artificial Sequence: Synthetic oligonucleotide
  misc_feature 1..20: note = Target: SCN10A; (-) strand; PAM type: YTN; PAM sequence: TTT
  source 1..20: mol_type = other DNA
tctaatttagaaaacataaa

SEQ ID NO: 53313 - DNA, 20 bp, synthetic construct
  misc_feature 1..20: note = Description of Artificial Sequence: Synthetic oligonucleotide
  misc_feature 1..20: note = Target: SCN10A; (-) strand; PAM type: YTN; PAM sequence: TTA
  source 1..20: mol_type = other DNA
agattttctaatttagaaaa

SEQ ID NO: 53314 - DNA, 20 bp, synthetic construct
  misc_feature 1..20: note = Description of Artificial Sequence: Synthetic oligonucleotide
  misc_feature 1..20: note = Target: SCN10A; (-) strand; PAM type: YTN; PAM sequence: CTG
  source 1..20: mol_type = other DNA
agttaagattttctaattta

SEQ ID NO: 53315 - DNA, 20 bp, synthetic construct
  misc_feature 1..20: note = Description of Artificial Sequence: Synthetic oligonucleotide
  misc_feature 1..20: note = Target: SCN10A; (-) strand; PAM type: YTN; PAM sequence: TTC
  source 1..20: mol_type = other DNA
tgagttaagattttctaatt

SEQ ID NO: 53316 - DNA, 20 bp, synthetic construct
  misc_feature 1..20: note = Description of Artificial Sequence: Synthetic oligonucleotide
  misc_feature 1..20: note = Target: SCN10A; (-) strand; PAM type: YTN; PAM sequence: CTA
  source 1..20: mol_type = other DNA
taattctgagttaagatttt

SEQ ID NO: 53317 - DNA, 20 bp, synthetic construct
  misc_feature 1..20: note = Description of Artificial Sequence: Synthetic oligonucleotide
  misc_feature 1..20: note = Target: SCN10A; (-) strand; PAM type: YTN; PAM sequence: TTC
  source 1..20: mol_type = other DNA
ccaacaacctataattctga

SEQ ID NO: 53318 - DNA, 20 bp, synthetic construct
  misc_feature 1..20: note = Description of Artificial Sequence: Synthetic oligonucleotide
  misc_feature 1..20: note = Target: SCN10A; (-) strand; PAM type: YTN; PAM sequence: CTT
  source 1..20: mol_type = other DNA
cccaacaacctataattctg

SEQ ID NO: 53319 - DNA, 20 bp, synthetic construct
  misc_feature 1..20: note = Description of Artificial Sequence: Synthetic oligonucleotide
  misc_feature 1..20: note = Target: SCN10A; (-) strand; PAM type: YTN; PAM sequence: TTG
  source 1..20: mol_type = other DNA
acaaaccagaaatatccatc

SEQ ID NO: 53320 - DNA, 20 bp, synthetic construct
  misc_feature 1..20: note = Description of Artificial Sequence: Synthetic oligonucleotide
  misc_feature 1..20: note = Target: SCN10A; (-) strand; PAM type: YTN; PAM sequence: TTT
  source 1..20: mol_type = other DNA
gacaaaccagaaatatccat

SEQ ID NO: 53321 - DNA, 20 bp, synthetic construct
  misc_feature 1..20: note = Description of Artificial Sequence: Synthetic oligonucleotide
  misc_feature 1..20: note = Target: SCN10A; (-) strand; PAM type: YTN; PAM sequence: TTG
  source 1..20: mol_type = other DNA
atttgacaaaccagaaatat

SEQ ID NO: 53322 - DNA, 20 bp, synthetic construct
  misc_feature 1..20: note = Description of Artificial Sequence: Synthetic oligonucleotide
  misc_feature 1..20: note = Target: SCN10A; (-) strand; PAM type: YTN; PAM sequence: TTT
  source 1..20: mol_type = other DNA
gatttgacaaaccagaaata

SEQ ID NO: 53323 - DNA, 20 bp, synthetic construct
  misc_feature 1..20: note = Description of Artificial Sequence: Synthetic oligonucleotide
  misc_feature 1..20: note = Target: SCN10A; (-) strand; PAM type: YTN; PAM sequence: CTG
  source 1..20: mol_type = other DNA
tgtttgatttgacaaaccag

SEQ ID NO: 53324 - DNA, 20 bp, synthetic construct
  misc_feature 1..20: note = Description of Artificial Sequence: Synthetic oligonucleotide
  misc_feature 1..20: note = Target: SCN10A; (-) strand; PAM type: YTN; PAM sequence: CTG
  source 1..20: mol_type = other DNA
ggtctgtgtttgatttgaca

SEQ ID NO: 53325 - DNA, 20 bp, synthetic construct
  misc_feature 1..20: note = Description of Artificial Sequence: Synthetic oligonucleotide
  misc_feature 1..20: note = Target: SCN10A; (-) strand; PAM type: YTN; PAM sequence: TTC
  source 1..20: mol_type = other DNA
tgggtctgtgtttgatttga

SEQ ID NO: 53326 - DNA, 20 bp, synthetic construct
  misc_feature 1..20: note = Description of Artificial Sequence: Synthetic oligonucleotide
  misc_feature 1..20: note = Target: SCN10A; (-) strand; PAM type: YTN; PAM sequence: TTT
  source 1..20: mol_type = other DNA
ctgggtctgtgtttgatttg

SEQ ID NO: 53327 - DNA, 20 bp, synthetic construct
  misc_feature 1..20: note = Description of Artificial Sequence: Synthetic oligonucleotide
  misc_feature 1..20: note = Target: SCN10A; (-) strand; PAM type: YTN; PAM sequence: CTC
  source 1..20: mol_type = other DNA
cataatttctgggtctgtgt

SEQ ID NO: 53328 - DNA, 20 bp, synthetic construct
  misc_feature 1..20: note = Description of Artificial Sequence: Synthetic oligonucleotide
  misc_feature 1..20: note = Target: SCN10A; (-) strand; PAM type: YTN; PAM sequence: CTC
  source 1..20: mol_type = other DNA
tccataatttctgggtctgt

SEQ ID NO: 53329 - DNA, 20 bp, synthetic construct
  misc_feature 1..20: note = Description of Artificial Sequence: Synthetic oligonucleotide
  misc_feature 1..20: note = Target: SCN10A; (-) strand; PAM type: YTN; PAM sequence: CTC
  source 1..20: mol_type = other DNA
tctccataatttctgggtct

SEQ ID NO: 53330 - DNA, 20 bp, synthetic construct
  misc_feature 1..20: note = Description of Artificial Sequence: Synthetic oligonucleotide
  misc_feature 1..20: note = Target: SCN10A; (-) strand; PAM type: YTN; PAM sequence: TTA
  source 1..20: mol_type = other DNA
gagagcactctctccataat

SEQ ID NO: 53331 - DNA, 20 bp, synthetic construct
  misc_feature 1..20: note = Description of Artificial Sequence: Synthetic oligonucleotide
  misc_feature 1..20: note = Target: SCN10A; (-) strand; PAM type: YTN; PAM sequence: TTT
  source 1..20: mol_type = other DNA
agagagcactctctccataa

SEQ ID NO: 53332 - DNA, 20 bp, synthetic construct
  misc_feature 1..20: note = Description of Artificial Sequence: Synthetic oligonucleotide
  misc_feature 1..20: note = Target: SCN10A; (-) strand; PAM type: YTN; PAM sequence: CTT
  source 1..20: mol_type = other DNA
tagagagcactctctccata

SEQ ID NO: 53333 - DNA, 20 bp, synthetic construct
  misc_feature 1..20: note = Description of Artificial Sequence: Synthetic oligonucleotide
  misc_feature 1..20: note = Target: SCN10A; (-) strand; PAM type: YTN; PAM sequence: CTG
  source 1..20: mol_type = other DNA
aaaatagtctttagagagca

SEQ ID NO: 53334 - DNA, 20 bp, synthetic construct
  misc_feature 1..20: note = Description of Artificial Sequence: Synthetic oligonucleotide
  misc_feature 1..20: note = Target: SCN10A; (-) strand; PAM type: YTN; PAM sequence: CTG
  source 1..20: mol_type = other DNA
gtgaagcactgaaaatagtc

SEQ ID NO: 53335 - DNA, 20 bp, synthetic construct
  misc_feature 1..20: note = Description of Artificial Sequence: Synthetic oligonucleotide
  misc_feature 1..20: note = Target: SCN10A; (-) strand; PAM type: YTN; PAM sequence: TTC
  source 1..20: mol_type = other DNA
tggtgaagcactgaaaatag

SEQ ID NO: 53336 - DNA, 20 bp, synthetic construct
  misc_feature 1..20: note = Description of Artificial Sequence: Synthetic oligonucleotide
  misc_feature 1..20: note = Target: SCN10A; (-) strand; PAM type: YTN; PAM sequence: CTT
  source 1..20: mol_type = other DNA
ctggtgaagcactgaaaata

SEQ ID NO: 53337 - DNA, 20 bp, synthetic construct
  misc_feature 1..20: note = Description of Artificial Sequence: Synthetic oligonucleotide
  misc_feature 1..20: note = Target: SCN10A; (-) strand; PAM type: YTN; PAM sequence: TTG
  source 1..20: mol_type = other DNA
ccttctggtgaagcactgaa

SEQ ID NO: 53338 - DNA, 20 bp, synthetic construct
  misc_feature 1..20: note = Description of Artificial Sequence: Synthetic oligonucleotide
  misc_feature 1..20: note = Target: SCN10A; (-) strand; PAM type: YTN; PAM sequence: CTT
  source 1..20: mol_type = other DNA
gccttctggtgaagcactga

SEQ ID NO: 53339 - DNA, 20 bp, synthetic construct
  misc_feature 1..20: note = Description of Artificial Sequence: Synthetic oligonucleotide
  misc_feature 1..20: note = Target: SCN10A; (-) strand; PAM type: YTN; PAM sequence: CTG
  source 1..20: mol_type = other DNA
gggcacttgccttctggtga

SEQ ID NO: 53340 - DNA, 20 bp, synthetic construct
  misc_feature 1..20: note = Description of Artificial Sequence: Synthetic oligonucleotide
  misc_feature 1..20: note = Target: SCN10A; (-) strand; PAM type: YTN; PAM sequence: TTG
  source 1..20: mol_type = other DNA
agctggggcacttgccttct

SEQ ID NO: 53341 - DNA, 20 bp, synthetic construct
  misc_feature 1..20: note = Description of Artificial Sequence: Synthetic oligonucleotide
  misc_feature 1..20: note = Target: SCN10A; (-) strand; PAM type: YTN; PAM sequence: CTG
  source 1..20: mol_type = other DNA
ttgagctggggcacttgcct

SEQ ID NO: 53342 - DNA, 20 bp, synthetic construct
  misc_feature 1..20: note = Description of Artificial Sequence: Synthetic oligonucleotide
  misc_feature 1..20: note = Target: SCN10A; (-) strand; PAM type: YTN; PAM sequence: CTG
  source 1..20: mol_type = other DNA
ctgttgagctggggcacttg

SEQ ID NO: 53343 - DNA, 20 bp, synthetic construct
  misc_feature 1..20: note = Description of Artificial Sequence: Synthetic oligonucleotide
  misc_feature 1..20: note = Target: SCN10A; (-) strand; PAM type: YTN; PAM sequence: TTA
  source 1..20: mol_type = other DNA
gctgctgttgagctggggca

SEQ ID NO: 53344 - DNA, 20 bp, synthetic construct
  misc_feature 1..20: note = Description of Artificial Sequence: Synthetic oligonucleotide
  misc_feature 1..20: note = Target: SCN10A; (-) strand; PAM type: YTN; PAM sequence: CTC
  source 1..20: mol_type = other DNA
cattagctgctgttgagctg

SEQ ID NO: 53345 - DNA, 20 bp, synthetic construct
  misc_feature 1..20: note = Description of Artificial Sequence: Synthetic oligonucleotide
  misc_feature 1..20: note = Target: SCN10A; (-) strand; PAM type: YTN; PAM sequence: TTG
  source 1..20: mol_type = other DNA
cagagccaaataccaccaaa

SEQ ID NO: 53346 - DNA, 20 bp, synthetic construct
  misc_feature 1..20: note = Description of Artificial Sequence: Synthetic oligonucleotide
  misc_feature 1..20: note = Target: SCN10A; (-) strand; PAM type: YTN; PAM sequence: CTT
  source 1..20: mol_type = other DNA
gcagagccaaataccaccaa

SEQ ID NO: 53347 - DNA, 20 bp, synthetic construct
  misc_feature 1..20: note = Description of Artificial Sequence: Synthetic oligonucleotide
  misc_feature 1..20: note = Target: SCN10A; (-) strand; PAM type: YTN; PAM sequence: CTG
  source 1..20: mol_type = other DNA
caacccaacatcaagaaata

SEQ ID NO: 53348 - DNA, 20 bp, synthetic construct
  misc_feature 1..20: note = Description of Artificial Sequence: Synthetic oligonucleotide
  misc_feature 1..20: note = Target: SCN10A; (-) strand; PAM type: YTN; PAM sequence: CTG
  source 1..20: mol_type = other DNA
aatgctgcaacccaacatca

SEQ ID NO: 53349 - DNA, 20 bp, synthetic construct
  misc_feature 1..20: note = Description of Artificial Sequence: Synthetic oligonucleotide
  misc_feature 1..20: note = Target: SCN10A; (-) strand; PAM type: YTN; PAM sequence: TTA
  source 1..20: mol_type = other DNA
catctgaatgctgcaaccca

SEQ ID NO: 53350 - DNA, 20 bp, synthetic construct
  misc_feature 1..20: note = Description of Artificial Sequence: Synthetic oligonucleotide
  misc_feature 1..20: note = Target: SCN10A; (-) strand; PAM type: YTN; PAM sequence: TTA
  source 1..20: mol_type = other DNA
aaaattacatctgaatgctg

SEQ ID NO: 53351 - DNA, 20 bp, synthetic construct
  misc_feature 1..20: note = Description of Artificial Sequence: Synthetic oligonucleotide
  misc_feature 1..20: note = Target: SCN10A; (-) strand; PAM type: YTN; PAM sequence: TTA
  source 1..20: mol_type = other DNA
ttaaaaattacatctgaatg

SEQ ID NO: 53352 - DNA, 20 bp, synthetic construct
  misc_feature 1..20: note = Description of Artificial Sequence: Synthetic oligonucleotide
  misc_feature 1..20: note = Target: SCN10A; (-) strand; PAM type: YTN; PAM sequence: CTT
  source 1..20: mol_type = other DNA
attaaaaattacatctgaat

SEQ ID NO: 53353 - DNA, 20 bp, synthetic construct
  misc_feature 1..20: note = Description of Artificial Sequence: Synthetic oligonucleotide
  misc_feature 1..20: note = Target: SCN10A; (-) strand; PAM type: YTN; PAM sequence: TTG
  source 1..20: mol_type = other DNA
ggcttattaaaaattacatc

SEQ ID NO: 53354 - DNA, 20 bp, synthetic construct
  misc_feature 1..20: note = Description of Artificial Sequence: Synthetic oligonucleotide
  misc_feature 1..20: note = Target: SCN10A; (-) strand; PAM type: YTN; PAM sequence: TTA
  source 1..20: mol_type = other DNA
ggaaataacacattgggctt

SEQ ID NO: 53355 - DNA, 20 bp, synthetic construct
  misc_feature 1..20: note = Description of Artificial Sequence: Synthetic oligonucleotide
  misc_feature 1..20: note = Target: SCN10A; (-) strand; PAM type: YTN; PAM sequence: CTT
  source 1..20: mol_type = other DNA
aggaaataacacattgggct

SEQ ID NO: 53356 - DNA, 20 bp, synthetic construct
  misc_feature 1..20: note = Description of Artificial Sequence: Synthetic oligonucleotide
  misc_feature 1..20: note = Target: SCN10A; (-) strand; PAM type: YTN; PAM sequence: TTC
  source 1..20: mol_type = other DNA
accagaaaaagcacttagga

SEQ ID NO: 53357 - DNA, 20 bp, synthetic construct
  misc_feature 1..20: note = Description of Artificial Sequence: Synthetic oligonucleotide
  misc_feature 1..20: note = Target: SCN10A; (-) strand; PAM type: YTN; PAM sequence: TTC
  source 1..20: mol_type = other DNA
attcaccagaaaaagcactt

SEQ ID NO: 53358 - DNA, 20 bp, synthetic construct
  misc_feature 1..20: note = Description of Artificial Sequence: Synthetic oligonucleotide
  misc_feature 1..20: note = Target: SCN10A; (-) strand; PAM type: YTN; PAM sequence: CTT
  source 1..20: mol_type = other DNA
cattcaccagaaaaagcact

SEQ ID NO: 53359 - DNA, 20 bp, synthetic construct
  misc_feature 1..20: note = Description of Artificial Sequence: Synthetic oligonucleotide
  misc_feature 1..20: note = Target: SCN10A; (-) strand; PAM type: YTN; PAM sequence: TTC
  source 1..20: mol_type = other DNA
ttcattcaccagaaaaagca

SEQ ID NO: 53360 - DNA, 20 bp, synthetic construct
  misc_feature 1..20: note = Description of Artificial Sequence: Synthetic oligonucleotide
  misc_feature 1..20: note = Target: SCN10A; (-) strand; PAM type: YTN; PAM sequence: TTT
  source 1..20: mol_type = other DNA
cttcattcaccagaaaaagc

SEQ ID NO: 53361 - DNA, 20 bp, synthetic construct
  misc_feature 1..20: note = Description of Artificial Sequence: Synthetic oligonucleotide
  misc_feature 1..20: note = Target: SCN10A; (-) strand; PAM type: YTN; PAM sequence: TTT
  source 1..20: mol_type = other DNA
tcttcattcaccagaaaaag

SEQ ID NO: 53362 - DNA, 20 bp, synthetic construct
  misc_feature 1..20: note = Description of Artificial Sequence: Synthetic oligonucleotide
  misc_feature 1..20: note = Target: SCN10A; (-) strand; PAM type: YTN; PAM sequence: TTC
  source 1..20: mol_type = other DNA
ccaatacccaatgattttct

SEQ ID NO: 53363 - DNA, 20 bp, synthetic construct
  misc_feature 1..20: note = Description of Artificial Sequence: Synthetic oligonucleotide
  misc_feature 1..20: note = Target: SCN10A; (-) strand; PAM type: YTN; PAM sequence: TTT
  source 1..20: mol_type = other DNA
cccaatacccaatgattttc

SEQ ID NO: 53364 - DNA, 20 bp, synthetic construct
  misc_feature 1..20: note = Description of Artificial Sequence: Synthetic oligonucleotide
  misc_feature 1..20: note = Target: SCN10A; (-) strand; PAM type: YTN; PAM sequence: TTT
  source 1..20: mol_type = other DNA
tcccaatacccaatgatttt

SEQ ID NO: 53365 - DNA, 20 bp, synthetic construct
  misc_feature 1..20: note = Description of Artificial Sequence: Synthetic oligonucleotide
  misc_feature 1..20: note = Target: SCN10A; (-) strand; PAM type: YTN; PAM sequence: TTT
  source 1..20: mol_type = other DNA
ttcccaatacccaatgattt

SEQ ID NO: 53366 - DNA, 20 bp, synthetic construct
  misc_feature 1..20: note = Description of Artificial Sequence: Synthetic oligonucleotide
  misc_feature 1..20: note = Target: SCN10A; (-) strand; PAM type: YTN; PAM sequence: CTT
  source 1..20: mol_type = other DNA
tttcccaatacccaatgatt

SEQ ID NO: 53367 - DNA, 20 bp, synthetic construct
  misc_feature 1..20: note = Description of Artificial Sequence: Synthetic oligonucleotide
  misc_feature 1..20: note = Target: SCN10A; (-) strand; PAM type: YTN; PAM sequence: TTG
  source 1..20: mol_type = other DNA
actttttcccaatacccaat

SEQ ID NO: 53368 - DNA, 20 bp, synthetic construct
  misc_feature 1..20: note = Description of Artificial Sequence: Synthetic oligonucleotide
  misc_feature 1..20: note = Target: SCN10A; (-) strand; PAM type: YTN; PAM sequence: CTT
  source 1..20: mol_type = other DNA
gactttttcccaatacccaa

SEQ ID NO: 53369 - DNA, 20 bp, synthetic construct
  misc_feature 1..20: note = Description of Artificial Sequence: Synthetic oligonucleotide
  misc_feature 1..20: note = Target: SCN10A; (-) strand; PAM type: YTN; PAM sequence: CTG
  source 1..20: mol_type = other DNA
agaacttgactttttcccaa

SEQ ID NO: 53370 - DNA, 20 bp, synthetic construct
  misc_feature 1..20: note = Description of Artificial Sequence: Synthetic oligonucleotide
  misc_feature 1..20: note = Target: SCN10A; (-) strand; PAM type: YTN; PAM sequence: CTC
  source 1..20: mol_type = other DNA
aacggctgagaacttgactt

SEQ ID NO: 53371 - DNA, 20 bp, synthetic construct
  misc_feature 1..20: note = Description of Artificial Sequence: Synthetic oligonucleotide
  misc_feature 1..20: note = Target: SCN10A; (-) strand; PAM type: YTN; PAM sequence: TTG
  source 1..20: mol_type = other DNA
taacaatcagacatcagtgg

SEQ ID NO: 53372 - DNA, 20 bp, synthetic construct
  misc_feature 1..20: note = Description of Artificial Sequence: Synthetic oligonucleotide
  misc_feature 1..20: note = Target: SCN10A; (-) strand; PAM type: YTN; PAM sequence: TTT
  source 1..20: mol_type = other DNA
gtaacaatcagacatcagtg

SEQ ID NO: 53373 - DNA, 20 bp, synthetic construct
  misc_feature 1..20: note = Description of Artificial Sequence: Synthetic oligonucleotide
  misc_feature 1..20: note = Target: SCN10A; (-) strand; PAM type: YTN; PAM sequence: CTG
  source 1..20: mol_type = other DNA
aatatcgggatttgtaacaa

SEQ ID NO: 53374 - DNA, 20 bp, synthetic construct
  misc_feature 1..20: note = Description of Artificial Sequence: Synthetic oligonucleotide
  misc_feature 1..20: note = Target: SCN10A; (-) strand; PAM type: YTN; PAM sequence: TTC
  source 1..20: mol_type = other DNA
agagcctgaatatcgggatt

SEQ ID NO: 53375 - DNA, 20 bp, synthetic construct
  misc_feature 1..20: note = Description of Artificial Sequence: Synthetic oligonucleotide
  misc_feature 1..20: note = Target: SCN10A; (-) strand; PAM type: YTN; PAM sequence: TTT
  source 1..20: mol_type = other DNA
cagagcctgaatatcgggat

SEQ ID NO: 53376 - DNA, 20 bp, synthetic construct
  misc_feature 1..20: note = Description of Artificial Sequence: Synthetic oligonucleotide
  misc_feature 1..20: note = Target: SCN10A; (-) strand; PAM type: YTN; PAM sequence: TTT
  source 1..20: mol_type = other DNA
tcagagcctgaatatcggga

SEQ ID NO: 53377 - DNA, 20 bp, synthetic construct
  misc_feature 1..20: note = Description of Artificial Sequence: Synthetic oligonucleotide
  misc_feature 1..20: note = Target: SCN10A; (-) strand; PAM type: YTN; PAM sequence: TTG
  source 1..20: mol_type = other DNA
ttttcagagcctgaatatcg

SEQ ID NO: 53378 - DNA, 20 bp, synthetic construct
  misc_feature 1..20: note = Description of Artificial Sequence: Synthetic oligonucleotide
  misc_feature 1..20: note = Target: SCN10A; (-) strand; PAM type: YTN; PAM sequence: TTT
  source 1..20: mol_type = other DNA
gttttcagagcctgaatatc

SEQ ID NO: 53379 - DNA, 20 bp, synthetic construct
  misc_feature 1..20: note = Description of Artificial Sequence: Synthetic oligonucleotide
  misc_feature 1..20: note = Target: SCN10A; (-) strand; PAM type: YTN; PAM sequence: CTT
  source 1..20: mol_type = other DNA
tgttttcagagcctgaatat

SEQ ID NO: 53380 - DNA, 20 bp, synthetic construct
  misc_feature 1..20: note = Description of Artificial Sequence: Synthetic oligonucleotide
  misc_feature 1..20: note = Target: SCN10A; (-) strand; PAM type: YTN; PAM sequence: TTA
  source 1..20: mol_type = other DNA
tgaatctttgttttcagagc

SEQ ID NO: 53381 - DNA, 20 bp, synthetic construct
  misc_feature 1..20: note = Description of Artificial Sequence: Synthetic oligonucleotide
  misc_feature 1..20: note = Target: SCN10A; (-) strand; PAM type: YTN; PAM sequence: TTG
  source 1..20: mol_type = other DNA
aatattatgaatctttgttt

SEQ ID NO: 53382 - DNA, 20 bp, synthetic construct
  misc_feature 1..20: note = Description of Artificial Sequence: Synthetic oligonucleotide
  misc_feature 1..20: note = Target: SCN10A; (-) strand; PAM type: YTN; PAM sequence: TTT
  source 1..20: mol_type = other DNA
gaatattatgaatctttgtt

SEQ ID NO: 53383 - DNA, 20 bp, synthetic construct
  misc_feature 1..20: note = Description of Artificial Sequence: Synthetic oligonucleotide
  misc_feature 1..20: note = Target: SCN10A; (-) strand; PAM type: YTN; PAM sequence: TTC
  source 1..20: mol_type = other DNA
agaatttgaatattatgaat

SEQ ID NO: 53384 - DNA, 20 bp, synthetic construct
  misc_feature 1..20: note = Description of Artificial Sequence: Synthetic oligonucleotide
  misc_feature 1..20: note = Target: SCN10A; (-) strand; PAM type: YTN; PAM sequence: CTC
  source 1..20: mol_type = other DNA
agtgatccattcagaatttg

SEQ ID NO: 53385 - DNA, 20 bp, synthetic construct
  misc_feature 1..20: note = Description of Artificial Sequence: Synthetic oligonucleotide
  misc_feature 1..20: note = Target: SCN10A; (-) strand; PAM type: YTN; PAM sequence: TTG
  source 1..20: mol_type = other DNA
ggtatctcagtgatccattc

SEQ ID NO: 53386 - DNA, 20 bp, synthetic construct
  misc_feature 1..20: note = Description of Artificial Sequence: Synthetic oligonucleotide
  misc_feature 1..20: note = Target: SCN10A; (-) strand; PAM type: YTN; PAM sequence: TTA
  source 1..20: mol_type = other DNA
tgaatacaagttgggtatct

SEQ ID NO: 53387 - DNA, 20 bp, synthetic construct
  misc_feature 1..20: note = Description of Artificial Sequence: Synthetic oligonucleotide
  misc_feature 1..20: note = Target: SCN10A; (-) strand; PAM type: YTN; PAM sequence: TTT
  source 1..20: mol_type = other DNA
atgaatacaagttgggtatc

SEQ ID NO: 53388 - DNA, 20 bp, synthetic construct
  misc_feature 1..20: note = Description of Artificial Sequence: Synthetic oligonucleotide
  misc_feature 1..20: note = Target: SCN10A; (-) strand; PAM type: YTN; PAM sequence: TTT
  source 1..20: mol_type = other DNA
tatgaatacaagttgggtat

SEQ ID NO: 53389 - DNA, 20 bp, synthetic construct
  misc_feature 1..20: note = Description of Artificial Sequence: Synthetic oligonucleotide
  misc_feature 1..20: note = Target: SCN10A; (-) strand; PAM type: YTN; PAM sequence: TTT
  source 1..20: mol_type = other DNA
ttatgaatacaagttgggta

SEQ ID NO: 53390 - DNA, 20 bp, synthetic construct
  misc_feature 1..20: note = Description of Artificial Sequence: Synthetic oligonucleotide
  misc_feature 1..20: note = Target: SCN10A; (-) strand; PAM type: YTN; PAM sequence: TTA
  source 1..20: mol_type = other DNA
ccatttttatgaatacaagt

SEQ ID NO: 53391 - DNA, 20 bp, synthetic construct
  misc_feature 1..20: note = Description of Artificial Sequence: Synthetic oligonucleotide
  misc_feature 1..20: note = Target: SCN10A; (-) strand; PAM type: YTN; PAM sequence: TTA
  source 1..20: mol_type = other DNA
aattaccatttttatgaata

SEQ ID NO: 53392 - DNA, 20 bp, synthetic construct
  misc_feature 1..20: note = Description of Artificial Sequence: Synthetic oligonucleotide
  misc_feature 1..20: note = Target: SCN10A; (-) strand; PAM type: YTN; PAM sequence: TTT
  source 1..20: mol_type = other DNA
aaattaccatttttatgaat

SEQ ID NO: 53393 - DNA, 20 bp, synthetic construct
  misc_feature 1..20: note = Description of Artificial Sequence: Synthetic oligonucleotide
  misc_feature 1..20: note = Target: SCN10A; (-) strand; PAM type: YTN; PAM sequence: TTT
  source 1..20: mol_type = other DNA
taaattaccatttttatgaa

SEQ ID NO: 53394 - DNA, 20 bp, synthetic construct
  misc_feature 1..20: note = Description of Artificial Sequence: Synthetic oligonucleotide
  misc_feature 1..20: note = Target: SCN10A; (-) strand; PAM type: YTN; PAM sequence: TTA
  source 1..20: mol_type = other DNA
aaaataaggaatgaaatgtt

SEQ ID NO: 53395 - DNA, 20 bp, synthetic construct
  misc_feature 1..20: note = Description of Artificial Sequence: Synthetic oligonucleotide
  misc_feature 1..20: note = Target: SCN10A; (-) strand; PAM type: YTN; PAM sequence: TTT
  source 1..20: mol_type = other DNA
aaaaataaggaatgaaatgt

SEQ ID NO: 53396 - DNA, 20 bp, synthetic construct
  misc_feature 1..20: note = Description of Artificial Sequence: Synthetic oligonucleotide
  misc_feature 1..20: note = Target: SCN10A; (-) strand; PAM type: YTN; PAM sequence: TTT
  source 1..20: mol_type = other DNA
taaaaataaggaatgaaatg

SEQ ID NO: 53397 - DNA, 20 bp, synthetic construct
  misc_feature 1..20: note = Description of Artificial Sequence: Synthetic oligonucleotide
  misc_feature 1..20: note = Target: SCN10A; (-) strand; PAM type: YTN; PAM sequence: TTA
  source 1..20: mol_type = other DNA
cacagagttttaaaaataag

SEQ ID NO: 53398 - DNA, 20 bp, synthetic construct
  misc_feature 1..20: note = Description of Artificial Sequence: Synthetic oligonucleotide
  misc_feature 1..20: note = Target: SCN10A; (-) strand; PAM type: YTN; PAM sequence: CTT
  source 1..20: mol_type = other DNA
acacagagttttaaaaataa

SEQ ID NO: 53399 - DNA, 20 bp, synthetic construct
  misc_feature 1..20: note = Description of Artificial Sequence: Synthetic oligonucleotide
  misc_feature 1..20: note = Target: SCN10A; (-) strand; PAM type: YTN; PAM sequence: CTG
  source 1..20: mol_type = other DNA
gcaaatgggaagggcttaca

SEQ ID NO: 53400 - DNA, 20 bp, synthetic construct
  misc_feature 1..20: note = Description of Artificial Sequence: Synthetic oligonucleotide
  misc_feature 1..20: note = Target: SCN10A; (-) strand; PAM type: YTN; PAM sequence: TTG
  source 1..20: mol_type = other DNA
gctggcaaatgggaagggct

SEQ ID NO: 53401 - DNA, 20 bp, synthetic construct
  misc_feature 1..20: note = Description of Artificial Sequence: Synthetic oligonucleotide
  misc_feature 1..20: note = Target: SCN10A; (-) strand; PAM type: YTN; PAM sequence: TTT
  source 1..20: mol_type = other DNA
ggctggcaaatgggaagggc

SEQ ID NO: 53402 - DNA, 20 bp, synthetic construct
  misc_feature 1..20: note = Description of Artificial Sequence: Synthetic oligonucleotide
  misc_feature 1..20: note = Target: SCN10A; (-) strand; PAM type: YTN; PAM sequence: CTT
  source 1..20: mol_type = other DNA
tggctggcaaatgggaaggg

SEQ ID NO: 53403 - DNA, 20 bp, synthetic construct
  misc_feature 1..20: note = Description of Artificial Sequence: Synthetic oligonucleotide
  misc_feature 1..20: note = Target: SCN10A; (-) strand; PAM type: YTN; PAM sequence: TTG
  source 1..20: mol_type = other DNA
ctttggctggcaaatgggaa

SEQ ID NO: 53404 - DNA, 20 bp, synthetic construct
  misc_feature 1..20: note = Description of Artificial Sequence: Synthetic oligonucleotide
  misc_feature 1..20: note = Target: SCN10A; (-) strand; PAM type: YTN; PAM sequence: CTG
  source 1..20: mol_type = other DNA
aattgctttggctggcaaat

SEQ ID NO: 53405 - DNA, 20 bp, synthetic construct
  misc_feature 1..20: note = Description of Artificial Sequence: Synthetic oligonucleotide
  misc_feature 1..20: note = Target: SCN10A; (-) strand; PAM type: YTN; PAM sequence: CTC
  source 1..20: mol_type = other DNA
ccacactgaattgctttggc

SEQ ID NO: 53406 - DNA, 20 bp, synthetic construct
  misc_feature 1..20: note = Description of Artificial Sequence: Synthetic oligonucleotide
  misc_feature 1..20: note = Target: SCN10A; (-) strand; PAM type: YTN; PAM sequence: CTC
  source 1..20: mol_type = other DNA
tcccacactgaattgctttg

SEQ ID NO: 53407 - DNA, 20 bp, synthetic construct
  misc_feature 1..20: note = Description of Artificial Sequence: Synthetic oligonucleotide
  misc_feature 1..20: note = Target: SCN10A; (-) strand; PAM type: YTN; PAM sequence: CTG
  source 1..20: mol_type = other DNA
ctctcccacactgaattgct

SEQ ID NO: 53408 - DNA, 20 bp, synthetic construct
  misc_feature 1..20: note = Description of Artificial Sequence: Synthetic oligonucleotide
  misc_feature 1..20: note = Target: SCN10A; (-) strand; PAM type: YTN; PAM sequence: CTG
  source 1..20: mol_type = other DNA
aaatgaaaagtgagtaagag

SEQ ID NO: 53409 - DNA, 20 bp, synthetic construct
  misc_feature 1..20: note = Description of Artificial Sequence: Synthetic oligonucleotide
  misc_feature 1..20: note = Target: SCN10A; (-) strand; PAM type: YTN; PAM sequence: CTG
  source 1..20: mol_type = other DNA
ggctgaaatgaaaagtgagt

SEQ ID NO: 53410 - DNA, 20 bp, synthetic construct
  misc_feature 1..20: note = Description of Artificial Sequence: Synthetic oligonucleotide
  misc_feature 1..20: note = Target: SCN10A; (-) strand; PAM type: YTN; PAM sequence: CTA
  source 1..20: mol_type = other DNA
ctgggctgaaatgaaaagtg

SEQ ID NO: 53411 - DNA, 20 bp, synthetic construct
  misc_feature 1..20: note = Description of Artificial Sequence: Synthetic oligonucleotide
  misc_feature 1..20: note = Target: SCN10A; (-) strand; PAM type: YTN; PAM sequence: TTG
  source 1..20: mol_type = other DNA
gcctactgggctgaaatgaa

SEQ ID NO: 53412 - DNA, 20 bp, synthetic construct
  misc_feature 1..20: note = Description of Artificial Sequence: Synthetic oligonucleotide
  misc_feature 1..20: note = Target: SCN10A; (-) strand; PAM type: YTN; PAM sequence: TTT
  source 1..20: mol_type = other DNA
ggcctactgggctgaaatga

SEQ ID NO: 53413 - DNA, 20 bp, synthetic construct
  misc_feature 1..20: note = Description of Artificial Sequence: Synthetic oligonucleotide
  misc_feature 1..20: note = Target: SCN10A; (-) strand; PAM type: YTN; PAM sequence: CTT
  source 1..20: mol_type = other DNA
tggcctactgggctgaaatg

SEQ ID NO: 53414 - DNA, 20 bp, synthetic construct
  misc_feature 1..20: note = Description of Artificial Sequence: Synthetic oligonucleotide
  misc_feature 1..20: note = Target: SCN10A; (-) strand; PAM type: YTN; PAM sequence: CTC
  source 1..20: mol_type = other DNA
tttggcctactgggctgaaa

SEQ ID NO: 53415 - DNA, 20 bp, synthetic construct
  misc_feature 1..20: note = Description of Artificial Sequence: Synthetic oligonucleotide
  misc_feature 1..20: note = Target: SCN10A; (-) strand; PAM type: YTN; PAM sequence: TTA
  source 1..20: mol_type = other DNA
gtgtacatctctttggccta

SEQ ID NO: 53416 - DNA, 20 bp, synthetic construct
  misc_feature 1..20: note = Description of Artificial Sequence: Synthetic oligonucleotide
  misc_feature 1..20: note = Target: SCN10A; (-) strand; PAM type: YTN; PAM sequence: CTT
  source 1..20: mol_type = other DNA
agtgtacatctctttggcct

SEQ ID NO: 53417 - DNA, 20 bp, synthetic construct
  misc_feature 1..20: note = Description of Artificial Sequence: Synthetic oligonucleotide
  misc_feature 1..20: note = Target: SCN10A; (-) strand; PAM type: YTN; PAM sequence: TTG
  source 1..20: mol_type = other DNA
tggtcacttagtgtacatct

SEQ ID NO: 53418 - DNA, 20 bp, synthetic construct
  misc_feature 1..20: note = Description of Artificial Sequence: Synthetic oligonucleotide
  misc_feature 1..20: note = Target: SCN10A; (-) strand; PAM type: YTN; PAM sequence: CTG
  source 1..20: mol_type = other DNA
attgtggtcacttagtgtac

SEQ ID NO: 53419 - DNA, 20 bp, synthetic construct
  misc_feature 1..20: note = Description of Artificial Sequence: Synthetic oligonucleotide
  misc_feature 1..20: note = Target: SCN10A; (-) strand; PAM type: YTN; PAM sequence: TTG
  source 1..20: mol_type = other DNA
tgaatacaaactgattgtgg

SEQ ID NO: 53420 - DNA, 20 bp, synthetic construct
  misc_feature 1..20: note = Description of Artificial Sequence: Synthetic oligonucleotide
  misc_feature 1..20: note = Target: SCN10A; (-) strand; PAM type: YTN; PAM sequence: TTG
  source 1..20: mol_type = other DNA
aggtacacagtggaaattgt

SEQ ID NO: 53421 - DNA, 20 bp, synthetic construct
  misc_feature 1..20: note = Description of Artificial Sequence: Synthetic oligonucleotide
  misc_feature 1..20: note = Target: SCN10A; (-) strand; PAM type: YTN; PAM sequence: CTG
  source 1..20: mol_type = other DNA
ttgaggtacacagtggaaat

SEQ ID NO: 53422 - DNA, 20 bp, synthetic construct
  misc_feature 1..20: note = Description of Artificial Sequence: Synthetic oligonucleotide
  misc_feature 1..20: note = Target: SCN10A; (-) strand; PAM type: YTN; PAM sequence: TTG
  source 1..20: mol_type = other DNA
ctgttgaggtacacagtgga

SEQ ID NO: 53423 - DNA, 20 bp, synthetic construct
  misc_feature 1..20: note = Description of Artificial Sequence: Synthetic oligonucleotide
  misc_feature 1..20: note = Target: SCN10A; (-) strand; PAM type: YTN; PAM sequence: TTT
  source 1..20: mol_type = other DNA
gctgttgaggtacacagtgg

SEQ ID NO: 53424 - DNA, 20 bp, synthetic construct
  misc_feature 1..20: note = Description of Artificial Sequence: Synthetic oligonucleotide
  misc_feature 1..20: note = Target: SCN10A; (-) strand; PAM type: YTN; PAM sequence: CTG
  source 1..20: mol_type = other DNA
atttgctgttgaggtacaca

SEQ ID NO: 53425 - DNA, 20 bp, synthetic construct
  misc_feature 1..20: note = Description of Artificial Sequence: Synthetic oligonucleotide
  misc_feature 1..20: note = Target: SCN10A; (-) strand; PAM type: YTN; PAM sequence: TTC
  source 1..20: mol_type = other DNA
tgatttgctgttgaggtaca

SEQ ID NO: 53426 - DNA, 20 bp, synthetic construct
  misc_feature 1..20: note = Description of Artificial Sequence: Synthetic oligonucleotide
  misc_feature 1..20: note = Target: SCN10A; (-) strand; PAM type: YTN; PAM sequence: CTC
  source 1..20: mol_type = other DNA
cagattctgatttgctgttg

SEQ ID NO: 53427 - DNA, 20 bp, synthetic construct
  misc_feature 1..20: note = Description of Artificial Sequence: Synthetic oligonucleotide
  misc_feature 1..20: note = Target: SCN10A; (-) strand; PAM type: YTN; PAM sequence: CTG
  source 1..20: mol_type = other DNA
taatatgcctccagattctg

SEQ ID NO: 53428 - DNA, 20 bp, synthetic construct
  misc_feature 1..20: note = Description of Artificial Sequence: Synthetic oligonucleotide
  misc_feature 1..20: note = Target: SCN10A; (-) strand; PAM type: YTN; PAM sequence: CTG
  source 1..20: mol_type = other DNA
ggggtctgtaatatgcctcc

SEQ ID NO: 53429 - DNA, 20 bp, synthetic construct
  misc_feature 1..20: note = Description of Artificial Sequence: Synthetic oligonucleotide
  misc_feature 1..20: note = Target: SCN10A; (-) strand; PAM type: YTN; PAM sequence: TTC
  source 1..20: mol_type = other DNA
acggaacgcagctgggggtc

SEQ ID NO: 53430 - DNA, 20 bp, synthetic construct
  misc_feature 1..20: note = Description of Artificial Sequence: Synthetic oligonucleotide
  misc_feature 1..20: note = Target: SCN10A; (-) strand; PAM type: YTN; PAM sequence: TTA
  source 1..20: mol_type = other DNA
ttcacggaacgcagctgggg

SEQ ID NO: 53431 - DNA, 20 bp, synthetic construct
  misc_feature 1..20: note = Description of Artificial Sequence: Synthetic oligonucleotide
  misc_feature 1..20: note = Target: SCN10A; (-) strand; PAM type: YTN; PAM sequence: CTT
  source 1..20: mol_type = other DNA
attcacggaacgcagctggg

SEQ ID NO: 53432 - DNA, 20 bp, synthetic construct
  misc_feature 1..20: note = Description of Artificial Sequence: Synthetic oligonucleotide
  misc_feature 1..20: note = Target: SCN10A; (-) strand; PAM type: YTN; PAM sequence: CTA
  source 1..20: mol_type = other DNA
gtgcataccttattcacgga

SEQ ID NO: 53433 - DNA, 20 bp, synthetic construct
  misc_feature 1..20: note = Description of Artificial Sequence: Synthetic oligonucleotide
  misc_feature 1..20: note = Target: SCN10A; (-) strand; PAM type: YTN; PAM sequence: CTC
  source 1..20: mol_type = other DNA
ccagatcccaatgctagtgc

SEQ ID NO: 53434 - DNA, 20 bp, synthetic construct
  misc_feature 1..20: note = Description of Artificial Sequence: Synthetic oligonucleotide
  misc_feature 1..20: note = Target: SCN10A; (-) strand; PAM type: YTN; PAM sequence: CTG
  source 1..20: mol_type = other DNA
ctcccagatcccaatgctag

SEQ ID NO: 53435 - DNA, 20 bp, synthetic construct
  misc_feature 1..20: note = Description of Artificial Sequence: Synthetic oligonucleotide
  misc_feature 1..20: note = Target: SCN10A; (-) strand; PAM type: YTN; PAM sequence: CTA
  source 1..20: mol_type = other DNA
tccagatagaagatgctgct

SEQ ID NO: 53436 - DNA, 20 bp, synthetic construct
  misc_feature 1..20: note = Description of Artificial Sequence: Synthetic oligonucleotide
  misc_feature 1..20: note = Target: SCN10A; (-) strand; PAM type: YTN; PAM sequence: CTC
  source 1..20: mol_type = other DNA
cagccacatggtcagcaagg

SEQ ID NO: 53437 - DNA, 20 bp, synthetic construct
  misc_feature 1..20: note = Description of Artificial Sequence: Synthetic oligonucleotide
  misc_feature 1..20: note = Target: SCN10A; (-) strand; PAM type: YTN; PAM sequence: TTG
  source 1..20: mol_type = other DNA
aagaaactccagccacatgg

SEQ ID NO: 53438 - DNA, 20 bp, synthetic construct
  misc_feature 1..20: note = Description of Artificial Sequence: Synthetic oligonucleotide
  misc_feature 1..20: note = Target: SCN10A; (-) strand; PAM type: YTN; PAM sequence: TTG
  source 1..20: mol_type = other DNA
ccattgaagaaactccagcc

SEQ ID NO: 53439 - DNA, 20 bp, synthetic construct
  misc_feature 1..20: note = Description of Artificial Sequence: Synthetic oligonucleotide
  misc_feature 1..20: note = Target: SCN10A; (-) strand; PAM type: YTN; PAM sequence: TTA
  source 1..20: mol_type = other DNA
aattgccattgaagaaactc

SEQ ID NO: 53440 - DNA, 20 bp, synthetic construct
  misc_feature 1..20: note = Description of Artificial Sequence: Synthetic oligonucleotide
  misc_feature 1..20: note = Target: SCN10A; (-) strand; PAM type: YTN; PAM sequence: TTA
  source 1..20: mol_type = other DNA
aaagaggaaaggtgttaaat

SEQ ID NO: 53441 - DNA, 20 bp, synthetic construct
  misc_feature 1..20: note = Description of Artificial Sequence: Synthetic oligonucleotide
  misc_feature 1..20: note = Target: SCN10A; (-) strand; PAM type: YTN; PAM sequence: TTT
  source 1..20: mol_type = other DNA
aaaagaggaaaggtgttaaa

SEQ ID NO: 53442 - DNA, 20 bp, synthetic construct
  misc_feature 1..20: note = Description of Artificial Sequence: Synthetic oligonucleotide
  misc_feature 1..20: note = Target: SCN10A; (-) strand; PAM type: YTN; PAM sequence: TTT
  source 1..20: mol_type = other DNA
taaaagaggaaaggtgttaa

SEQ ID NO: 53443 - DNA, 20 bp, synthetic construct
  misc_feature 1..20: note = Description of Artificial Sequence: Synthetic oligonucleotide
  misc_feature 1..20: note = Target: SCN10A; (-) strand; PAM type: YTN; PAM sequence: TTT
  source 1..20: mol_type = other DNA
ttaaaagaggaaaggtgtta

SEQ ID NO: 53444 - DNA, 20 bp, synthetic construct
  misc_feature 1..20: note = Description of Artificial Sequence: Synthetic oligonucleotide
  misc_feature 1..20: note = Target: SCN10A; (-) strand; PAM type: YTN; PAM sequence: TTT
  source 1..20: mol_type = other DNA
tttaaaagaggaaaggtgtt

SEQ ID NO: 53445 - DNA, 20 bp, synthetic construct
  misc_feature 1..20: note = Description of Artificial Sequence: Synthetic oligonucleotide
  misc_feature 1..20: note = Target: SCN10A; (-) strand; PAM type: YTN; PAM sequence: TTT
  source 1..20: mol_type = other DNA
ttttaaaagaggaaaggtgt

SEQ ID NO: 53446 - DNA, 20 bp, synthetic construct
  misc_feature 1..20: note = Description of Artificial Sequence: Synthetic oligonucleotide
  misc_feature 1..20: note = Target: SCN10A; (-) strand; PAM type: YTN; PAM sequence: TTT
  source 1..20: mol_type = other DNA
tttttaaaagaggaaaggtg

SEQ ID NO: 53447 - DNA, 20 bp, synthetic construct
  misc_feature 1..20: note = Description of Artificial Sequence: Synthetic oligonucleotide
  misc_feature 1..20: note = Target: SCN10A; (-) strand; PAM type: YTN; PAM sequence: CTT
  source 1..20: mol_type = other DNA
ttttttaaaagaggaaaggt

SEQ ID NO: 53448 - DNA, 20 bp, synthetic construct
  misc_feature 1..20: note = Description of Artificial Sequence: Synthetic oligonucleotide
  misc_feature 1..20: note = Target: SCN10A; (-) strand; PAM type: YTN; PAM sequence: TTA
  source 1..20: mol_type = other DNA
ccaaaacttttttttaaaag

SEQ ID NO: 53449 - DNA, 20 bp, synthetic construct
  misc_feature 1..20: note = Description of Artificial Sequence: Synthetic oligonucleotide
  misc_feature 1..20: note = Target: SCN10A; (-) strand; PAM type: YTN; PAM sequence: TTT
  source 1..20: mol_type = other DNA
accaaaacttttttttaaaa

SEQ ID NO: 53450 - DNA, 20 bp, synthetic construct
  misc_feature 1..20: note = Description of Artificial Sequence: Synthetic oligonucleotide
  misc_feature 1..20: note = Target: SCN10A; (-) strand; PAM type: YTN; PAM sequence: TTT
  source 1..20: mol_type = other DNA
taccaaaacttttttttaaa

SEQ ID NO: 53451 - DNA, 20 bp, synthetic construct
  misc_feature 1..20: note = Description of Artificial Sequence: Synthetic oligonucleotide
  misc_feature 1..20: note = Target: SCN10A; (-) strand; PAM type: YTN; PAM sequence: TTA
  source 1..20: mol_type = other DNA
tgcatattttaccaaaactt

SEQ ID NO: 53452 - DNA, 20 bp, synthetic construct
  misc_feature 1..20: note = Description of Artificial Sequence: Synthetic oligonucleotide
  misc_feature 1..20: note = Target: SCN10A; (-) strand; PAM type: YTN; PAM sequence: TTA
  source 1..20: mol_type = other DNA
tgtatattatgcatatttta

SEQ ID NO: 53453 - DNA, 20 bp, synthetic construct
  misc_feature 1..20: note = Description of Artificial Sequence: Synthetic oligonucleotide
  misc_feature 1..20: note = Target: SCN10A; (-) strand; PAM type: YTN; PAM sequence: TTA
  source 1..20: mol_type = other DNA
tgttatgtatattatgcata

SEQ ID NO: 53454 - DNA, 20 bp, synthetic construct
  misc_feature 1..20: note = Description of Artificial Sequence: Synthetic oligonucleotide
  misc_feature 1..20: note = Target: SCN10A; (-) strand; PAM type: YTN; PAM sequence: TTT
  source 1..20: mol_type = other DNA
atgttatgtatattatgcat

SEQ ID NO: 53455 - DNA, 20 bp, synthetic construct
  misc_feature 1..20: note = Description of Artificial Sequence: Synthetic oligonucleotide
  misc_feature 1..20: note = Target: SCN10A; (-) strand; PAM type: YTN; PAM sequence: TTT
  source 1..20: mol_type = other DNA
tatgttatgtatattatgca

SEQ ID NO: 53456 - DNA, 20 bp, synthetic construct
  misc_feature 1..20: note = Description of Artificial Sequence: Synthetic oligonucleotide
  misc_feature 1..20: note = Target: SCN10A; (-) strand; PAM type: YTN; PAM sequence: TTA
  source 1..20: mol_type = other DNA
aaaatggtgaaagtggtaaa

SEQ ID NO: 53457 - DNA, 20 bp, synthetic construct
  misc_feature 1..20: note = Description of Artificial Sequence: Synthetic oligonucleotide
  misc_feature 1..20: note = Target: SCN10A; (-) strand; PAM type: YTN; PAM sequence: CTT
  source 1..20: mol_type = other DNA
aaaaatggtgaaagtggtaa

SEQ ID NO: 53458 - DNA, 20 bp, synthetic construct
  misc_feature 1..20: note = Description of Artificial Sequence: Synthetic oligonucleotide
  misc_feature 1..20: note = Target: SCN10A; (-) strand; PAM type: YTN; PAM sequence: TTG
  source 1..20: mol_type = other DNA
tgtacttaaaaatggtgaaa

SEQ ID NO: 53459 - DNA, 20 bp, synthetic construct
  misc_feature 1..20: note = Description of Artificial Sequence: Synthetic oligonucleotide
  misc_feature 1..20: note = Target: SCN10A; (-) strand; PAM type: YTN; PAM sequence: CTA
  source 1..20: mol_type = other DNA
aattgtgtacttaaaaatgg

SEQ ID NO: 53460 - DNA, 20 bp, synthetic construct
  misc_feature 1..20: note = Description of Artificial Sequence: Synthetic oligonucleotide
  misc_feature 1..20: note = Target: SCN10A; (-) strand; PAM type: YTN; PAM sequence: TTA
  source 1..20: mol_type = other DNA
atgccactaaattgtgtact

SEQ ID NO: 53461 - DNA, 20 bp, synthetic construct
  misc_feature 1..20: note = Description of Artificial Sequence: Synthetic oligonucleotide
  misc_feature 1..20: note = Target: SCN10A; (-) strand; PAM type: YTN; PAM sequence: CTT
  source 1..20: mol_type = other DNA
aatgccactaaattgtgtac

SEQ ID NO: 53462 - DNA, 20 bp, synthetic construct
  misc_feature 1..20: note = Description of Artificial Sequence: Synthetic oligonucleotide
  misc_feature 1..20: note = Target: SCN10A; (-) strand; PAM type: YTN; PAM sequence: CTG
  source 1..20: mol_type = other DNA
aatgtacttaatgccactaa

SEQ ID NO: 53463 - DNA, 20 bp, synthetic construct
  misc_feature 1..20: note = Description of Artificial Sequence: Synthetic oligonucleotide
  misc_feature 1..20: note = Target: SCN10A; (-) strand; PAM type: YTN; PAM sequence: TTC
  source 1..20: mol_type = other DNA
cacaatactgaatgtactta

SEQ ID NO: 53464 - DNA, 20 bp, synthetic construct
  misc_feature 1..20: note = Description of Artificial Sequence: Synthetic oligonucleotide
  misc_feature 1..20: note = Target: SCN10A; (-) strand; PAM type: YTN; PAM sequence: TTG
  source 1..20: mol_type = other DNA
gaaacagatagtggtgatag

SEQ ID NO: 53465 - DNA, 20 bp, synthetic construct
  misc_feature 1..20: note = Description of Artificial Sequence: Synthetic oligonucleotide
  misc_feature 1..20: note = Target: SCN10A; (-) strand; PAM type: YTN; PAM sequence: TTT
  source 1..20: mol_type = other DNA
ggaaacagatagtggtgata

SEQ ID NO: 53466 - DNA, 20 bp, synthetic construct
  misc_feature 1..20: note = Description of Artificial Sequence: Synthetic oligonucleotide
  misc_feature 1..20: note = Target: SCN10A; (-) strand; PAM type: YTN; PAM sequence: TTA
  source 1..20: mol_type = other DNA
taaaaaagtttggaaacaga

SEQ ID NO: 53467 - DNA, 20 bp, synthetic construct
  misc_feature 1..20: note = Description of Artificial Sequence: Synthetic oligonucleotide
  misc_feature 1..20: note = Target: SCN10A; (-) strand; PAM type: YTN; PAM sequence: TTC
  source 1..20: mol_type = other DNA
gggattataaaaaagtttgg

SEQ ID NO: 53468 - DNA, 20 bp, synthetic construct
  misc_feature 1..20: note = Description of Artificial Sequence: Synthetic oligonucleotide
  misc_feature 1..20: note = Target: SCN10A; (-) strand; PAM type: YTN; PAM sequence: CTG
  source 1..20: mol_type = other DNA
ttcgggattataaaaaagtt

SEQ ID NO: 53469 - DNA, 20 bp, synthetic construct
  misc_feature 1..20: note = Description of Artificial Sequence: Synthetic oligonucleotide
  misc_feature 1..20: note = Target: SCN10A; (-) strand; PAM type: YTN; PAM sequence: TTC
  source 1..20: mol_type = other DNA
tgttcgggattataaaaaag

SEQ ID NO: 53470 - DNA, 20 bp, synthetic construct
  misc_feature 1..20: note = Description of Artificial Sequence: Synthetic oligonucleotide
  misc_feature 1..20: note = Target: SCN10A; (-) strand; PAM type: YTN; PAM sequence: TTT
  source 1..20: mol_type = other DNA
ctgttcgggattataaaaaa

SEQ ID NO: 53471 - DNA, 20 bp, synthetic construct
  misc_feature 1..20: note = Description of Artificial Sequence: Synthetic oligonucleotide
  misc_feature 1..20: note = Target: SCN10A; (-) strand; PAM type: YTN; PAM sequence: TTA
  source 1..20: mol_type = other DNA
atgggtacatttctgttcgg

SEQ ID NO: 53472 - DNA, 20 bp, synthetic construct
  misc_feature 1..20: note = Description of Artificial Sequence: Synthetic oligonucleotide
  misc_feature 1..20: note = Target: SCN10A; (-) strand; PAM type: YTN; PAM sequence: TTT
  source 1..20: mol_type = other DNA
aatgggtacatttctgttcg

SEQ ID NO: 53473 - DNA, 20 bp, synthetic construct
  misc_feature 1..20: note = Description of Artificial Sequence: Synthetic oligonucleotide
  misc_feature 1..20: note = Target: SCN10A; (-) strand; PAM type: YTN; PAM sequence: TTA
  source 1..20: mol_type = other DNA
tttaatgggtacatttctgt

SEQ ID NO: 53474 - DNA, 20 bp, synthetic construct
  misc_feature 1..20: note = Description of Artificial Sequence: Synthetic oligonucleotide
  misc_feature 1..20: note = Target: SCN10A; (-) strand; PAM type: YTN; PAM sequence: TTA
  source 1..20: mol_type = other DNA
ttatttaatgggtacatttc

SEQ ID NO: 53475 - DNA, 20 bp, synthetic construct
  misc_feature 1..20: note = Description of Artificial Sequence: Synthetic oligonucleotide
  misc_feature 1..20: note = Target: SCN10A; (-) strand; PAM type: YTN; PAM sequence: TTG
  source 1..20: mol_type = other DNA
ccagagagggggaatgggga

SEQ ID NO: 53476 - DNA, 20 bp, synthetic construct
  misc_feature 1..20: note = Description of Artificial Sequence: Synthetic oligonucleotide
  misc_feature 1..20: note = Target: SCN10A; (-) strand; PAM type: YTN; PAM sequence: TTC
  source 1..20: mol_type = other DNA
atggagacagaaagtagaat

SEQ ID NO: 53477 - DNA, 20 bp, synthetic construct
  misc_feature 1..20: note = Description of Artificial Sequence: Synthetic oligonucleotide
  misc_feature 1..20: note = Target: SCN10A; (-) strand; PAM type: YTN; PAM sequence: CTA
  source 1..20: mol_type = other DNA
gaacaggcaaattcatggag

SEQ ID NO: 53478 - DNA, 20 bp, synthetic construct
  misc_feature 1..20: note = Description of Artificial Sequence: Synthetic oligonucleotide
  misc_feature 1..20: note = Target: SCN10A; (-) strand; PAM type: YTN; PAM sequence: TTA
  source 1..20: mol_type = other DNA
gtaggtacctagaacaggca

SEQ ID NO: 53479 - DNA, 20 bp, synthetic construct
  misc_feature 1..20: note = Description of Artificial Sequence: Synthetic oligonucleotide
  misc_feature 1..20: note = Target: SCN10A; (-) strand; PAM type: YTN; PAM sequence: TTT
  source 1..20: mol_type = other DNA
agtaggtacctagaacaggc

SEQ ID NO: 53480 - DNA, 20 bp, synthetic construct
  misc_feature 1..20: note = Description of Artificial Sequence: Synthetic oligonucleotide
  misc_feature 1..20: note = Target: SCN10A; (-) strand; PAM type: YTN; PAM sequence: CTT
  source 1..20: mol_type = other DNA
tagtaggtacctagaacagg

SEQ ID NO: 53481 - DNA, 20 bp, synthetic construct
  misc_feature 1..20: note = Description of Artificial Sequence: Synthetic oligonucleotide
  misc_feature 1..20: note = Target: SCN10A; (-) strand; PAM type: YTN; PAM sequence: TTC
  source 1..20: mol_type = other DNA
cacctttagtaggtacctag

SEQ ID NO: 53482 - DNA, 20 bp, synthetic construct
  misc_feature 1..20: note = Description of Artificial Sequence: Synthetic oligonucleotide
  misc_feature 1..20: note = Target: SCN10A; (-) strand; PAM type: YTN; PAM sequence: TTG
  source 1..20: mol_type = other DNA
catgattccacctttagtag

SEQ ID NO: 53483 - DNA, 20 bp, synthetic construct
  misc_feature 1..20: note = Description of Artificial Sequence: Synthetic oligonucleotide
  misc_feature 1..20: note = Target: SCN10A; (-) strand; PAM type: YTN; PAM sequence: CTC
  source 1..20: mol_type = other DNA
aaacgcaaaagaacaaatgt

SEQ ID NO: 53484 - DNA, 20 bp, synthetic construct
  misc_feature 1..20: note = Description of Artificial Sequence: Synthetic oligonucleotide
  misc_feature 1..20: note = Target: SCN10A; (-) strand; PAM type: YTN; PAM sequence: CTA
  source 1..20: mol_type = other DNA
agtaaaataactcaaacgca

SEQ ID NO: 53485 - DNA, 20 bp, synthetic construct
  misc_feature 1..20: note = Description of Artificial Sequence: Synthetic oligonucleotide
  misc_feature 1..20: note = Target: SCN10A; (-) strand; PAM type: YTN; PAM sequence: TTG
  source 1..20: mol_type = other DNA
tgctaagtaaaataactcaa

SEQ ID NO: 53486 - DNA, 20 bp, synthetic construct
  misc_feature 1..20: note = Description of Artificial Sequence: Synthetic oligonucleotide
  misc_feature 1..20: note = Target: SCN10A; (-) strand; PAM type: YTN; PAM sequence: TTG
  source 1..20: mol_type = other DNA
acaaagcattgtgctaagta

SEQ ID NO: 53487 - DNA, 20 bp, synthetic construct
  misc_feature 1..20: note = Description of Artificial Sequence: Synthetic oligonucleotide
  misc_feature 1..20: note = Target: SCN10A; (-) strand; PAM type: YTN; PAM sequence: CTG
  source 1..20: mol_type = other DNA
atacatgccacaacattgac

SEQ ID NO: 53488 - DNA, 20 bp, synthetic construct
  misc_feature 1..20: note = Description of Artificial Sequence: Synthetic oligonucleotide
  misc_feature 1..20: note = Target: SCN10A; (-) strand; PAM type: YTN; PAM sequence: TTC
  source 1..20: mol_type = other DNA
tgatacatgccacaacattg

SEQ ID NO: 53489 - DNA, 20 bp, synthetic construct
  misc_feature 1..20: note = Description of Artificial Sequence: Synthetic oligonucleotide
  misc_feature 1..20: note = Target: SCN10A; (-) strand; PAM type: YTN; PAM sequence: TTA
  source 1..20: mol_type = other DNA
aaaatgaatgagattctgat

SEQ ID NO: 53490 - DNA, 20 bp, synthetic construct
  misc_feature 1..20: note = Description of Artificial Sequence: Synthetic oligonucleotide
  misc_feature 1..20: note = Target: SCN10A; (-) strand; PAM type: YTN; PAM sequence: TTT
  source 1..20: mol_type = other DNA
aaaaatgaatgagattctga

SEQ ID NO: 53491 - DNA, 20 bp, synthetic construct
  misc_feature 1..20: note = Description of Artificial Sequence: Synthetic oligonucleotide
  misc_feature 1..20: note = Target: SCN10A; (-) strand; PAM type: YTN; PAM sequence: TTT
  source 1..20: mol_type = other DNA
taaaaatgaatgagattctg

SEQ ID NO: 53492 - DNA, 20 bp, synthetic construct
  misc_feature 1..20: note = Description of Artificial Sequence: Synthetic oligonucleotide
  misc_feature 1..20: note = Target: SCN10A; (-) strand; PAM type: YTN; PAM sequence: TTC
  source 1..20: mol_type = other DNA
agttttaaaaatgaatgaga

SEQ ID NO: 53493 - DNA, 20 bp, synthetic construct
  misc_feature 1..20: note = Description of Artificial Sequence: Synthetic oligonucleotide
  misc_feature 1..20: note = Target: SCN10A; (-) strand; PAM type: YTN; PAM sequence: TTG
  source 1..20: mol_type = other DNA
aatatcattcagttttaaaa

SEQ ID NO: 53494 - DNA, 20 bp, synthetic construct
  misc_feature 1..20: note = Description of Artificial Sequence: Synthetic oligonucleotide
  misc_feature 1..20: note = Target: SCN10A; (-) strand; PAM type: YTN; PAM sequence: TTC
  source 1..20: mol_type = other DNA
acaatagccaaatatgtcca

SEQ ID NO: 53495 - DNA, 20 bp, synthetic construct
  misc_feature 1..20: note = Description of Artificial Sequence: Synthetic oligonucleotide
  misc_feature 1..20: note = Target: SCN10A; (-) strand; PAM type: YTN; PAM sequence: TTA
  source 1..20: mol_type = other DNA
ttcacaatagccaaatatgt

SEQ ID NO: 53496 - DNA, 20 bp, synthetic construct
  misc_feature 1..20: note = Description of Artificial Sequence: Synthetic oligonucleotide
  misc_feature 1..20: note = Target: SCN10A; (-) strand; PAM type: YTN; PAM sequence: TTG
  source 1..20: mol_type = other DNA
tagcagcgttattcacaata

SEQ ID NO: 53497 - DNA, 20 bp, synthetic construct
  misc_feature 1..20: note = Description of Artificial Sequence: Synthetic oligonucleotide
  misc_feature 1..20: note = Target: SCN10A; (-) strand; PAM type: YTN; PAM sequence: TTT
  source 1..20: mol_type = other DNA
gtagcagcgttattcacaat

SEQ ID NO: 53498 - DNA, 20 bp, synthetic construct
  misc_feature 1..20: note = Description of Artificial Sequence: Synthetic oligonucleotide
  misc_feature 1..20: note = Target: SCN10A; (-) strand; PAM type: YTN; PAM sequence: CTA
  source 1..20: mol_type = other DNA
atgtttgtagcagcgttatt

SEQ ID NO: 53499 - DNA, 20 bp, synthetic construct
  misc_feature 1..20: note = Description of Artificial Sequence: Synthetic oligonucleotide
  misc_feature 1..20: note = Target: SCN10A; (-) strand; PAM type: YTN; PAM sequence: TTA
  source 1..20: mol_type = other DNA
tgcactaatgtttgtagcag

SEQ ID NO: 53500 - DNA, 20 bp, synthetic construct
  misc_feature 1..20: note = Description of Artificial Sequence: Synthetic oligonucleotide
  misc_feature 1..20: note = Target: SCN10A; (-) strand; PAM type: YTN; PAM sequence: CTT
  source 1..20: mol_type = other DNA
atgcactaatgtttgtagca

SEQ ID NO: 53501 - DNA, 20 bp, synthetic construct
  misc_feature 1..20: note = Description of Artificial Sequence: Synthetic oligonucleotide
  misc_feature 1..20: note = Target: SCN10A; (-) strand; PAM type: YTN; PAM sequence: TTG
  source 1..20: mol_type = other DNA
gcttatgcactaatgtttgt

SEQ ID NO: 53502 - DNA, 20 bp, synthetic construct
  misc_feature 1..20: note = Description of Artificial Sequence: Synthetic oligonucleotide
  misc_feature 1..20: note = Target: SCN10A; (-) strand; PAM type: YTN; PAM sequence: TTA
  source 1..20: mol_type = other DNA
aaaggtatgttggcttatgc

SEQ ID NO: 53503 - DNA, 20 bp, synthetic construct
  misc_feature 1..20: note = Description of Artificial Sequence: Synthetic oligonucleotide
  misc_feature 1..20: note = Target: SCN10A; (-) strand; PAM type: YTN; PAM sequence: TTT
  source 1..20: mol_type = other DNA
aaaaggtatgttggcttatg

SEQ ID NO: 53504 - DNA, 20 bp, synthetic construct
  misc_feature 1..20: note = Description of Artificial Sequence: Synthetic oligonucleotide
  misc_feature 1..20: note = Target: SCN10A; (-) strand; PAM type: YTN; PAM sequence: CTT
  source 1..20: mol_type = other DNA
taaaaggtatgttggcttat

SEQ ID NO: 53505 - DNA, 20 bp, synthetic construct
  misc_feature 1..20: note = Description of Artificial Sequence: Synthetic oligonucleotide
  misc_feature 1..20: note = Target: SCN10A; (-) strand; PAM type: YTN; PAM sequence: CTA
  source 1..20: mol_type = other DNA
tgaaacagactttaaaaggt

SEQ ID NO: 53506 - DNA, 20 bp, synthetic construct
  misc_feature 1..20: note = Description of Artificial Sequence: Synthetic oligonucleotide
  misc_feature 1..20: note = Target: SCN10A; (-) strand; PAM type: YTN; PAM sequence: TTG
  source 1..20: mol_type = other DNA
aacctatgaaacagacttta

SEQ ID NO: 53507 - DNA, 20 bp, synthetic construct
  misc_feature 1..20: note = Description of Artificial Sequence: Synthetic oligonucleotide
  misc_feature 1..20: note = Target: SCN10A; (-) strand; PAM type: YTN; PAM sequence: TTT
  source 1..20: mol_type = other DNA
gaacctatgaaacagacttt

SEQ ID NO: 53508 - DNA, 20 bp, synthetic construct
  misc_feature 1..20: note = Description of Artificial Sequence: Synthetic oligonucleotide
  misc_feature 1..20: note = Target: SCN10A; (-) strand; PAM type: YTN; PAM sequence: TTA
  source 1..20: mol_type = other DNA
gtttgaacctatgaaacaga

SEQ ID NO: 53509 - DNA, 20 bp, synthetic construct
  misc_feature 1..20: note = Description of Artificial Sequence: Synthetic oligonucleotide
  misc_feature 1..20: note = Target: SCN10A; (-) strand; PAM type: YTN; PAM sequence: TTA
  source 1..20: mol_type = other DNA
aaaattagtttgaacctatg

SEQ ID NO: 53510 - DNA, 20 bp, synthetic construct
  misc_feature 1..20: note = Description of Artificial Sequence: Synthetic oligonucleotide
  misc_feature 1..20: note = Target: SCN10A; (-) strand; PAM type: YTN; PAM sequence: TTA
  source 1..20: mol_type = other DNA
attaaaaattagtttgaacc

SEQ ID NO: 53511 - DNA, 20 bp, synthetic construct
  misc_feature 1..20: note = Description of Artificial Sequence: Synthetic oligonucleotide
  misc_feature 1..20: note = Target: SCN10A; (-) strand; PAM type: YTN; PAM sequence: TTT
  source 1..20: mol_type = other DNA
aattaaaaattagtttgaac

SEQ ID NO: 53512 - DNA, 20 bp, synthetic construct
  misc_feature 1..20: note = Description of Artificial Sequence: Synthetic oligonucleotide
  misc_feature 1..20: note = Target: SCN10A; (-) strand; PAM type: YTN; PAM sequence: CTG
  source 1..20: mol_type = other DNA
gtttaattaaaaattagttt

SEQ ID NO: 53513 - DNA, 20 bp, synthetic construct
  misc_feature 1..20: note = Description of Artificial Sequence: Synthetic oligonucleotide
  misc_feature 1..20: note = Target: SCN10A; (-) strand; PAM type: YTN; PAM sequence: CTC
  source 1..20: mol_type = other DNA
tggtttaattaaaaattagt

SEQ ID NO: 53514 - DNA, 20 bp, synthetic construct
  misc_feature 1..20: note = Description of Artificial Sequence: Synthetic oligonucleotide
  misc_feature 1..20: note = Target: SCN10A; (-) strand; PAM type: YTN; PAM sequence: CTC
  source 1..20: mol_type = other DNA
tctggtttaattaaaaatta

SEQ ID NO: 53515 - DNA, 20 bp, synthetic construct
  misc_feature 1..20: note = Description of Artificial Sequence: Synthetic oligonucleotide
  misc_feature 1..20: note = Target: SCN10A; (-) strand; PAM type: YTN; PAM sequence: TTA
  source 1..20: mol_type = other DNA
aaagaagagctctctggttt

SEQ ID NO: 53516 - DNA, 20 bp, synthetic construct
  misc_feature 1..20: note = Description of Artificial Sequence: Synthetic oligonucleotide
  misc_feature 1..20: note = Target: SCN10A; (-) strand; PAM type: YTN; PAM sequence: TTT
  source 1..20: mol_type = other DNA
aaaagaagagctctctggtt

SEQ ID NO: 53517 - DNA, 20 bp, synthetic construct
  misc_feature 1..20: note = Description of Artificial Sequence: Synthetic oligonucleotide
  misc_feature 1..20: note = Target: SCN10A; (-) strand; PAM type: YTN; PAM sequence: TTT
  source 1..20: mol_type = other DNA
taaaagaagagctctctggt

SEQ ID NO: 53518 - DNA, 20 bp, synthetic construct
  misc_feature 1..20: note = Description of Artificial Sequence: Synthetic oligonucleotide
  misc_feature 1..20: note = Target: SCN10A; (-) strand; PAM type: YTN; PAM sequence: CTA
  source 1..20: mol_type = other DNA
attttaaaagaagagctctc

SEQ ID NO: 53519 - DNA, 20 bp, synthetic construct
  misc_feature 1..20: note = Description of Artificial Sequence: Synthetic oligonucleotide
  misc_feature 1..20: note = Target: SCN10A; (-) strand; PAM type: YTN; PAM sequence: TTA
  source 1..20: mol_type = other DNA
tcatgaagctaattttaaaa

SEQ ID NO: 53520 - DNA, 20 bp, synthetic construct
  misc_feature 1..20: note = Description of Artificial Sequence: Synthetic oligonucleotide
  misc_feature 1..20: note = Target: SCN10A; (-) strand; PAM type: YTN; PAM sequence: TTT
  source 1..20: mol_type = other DNA
atcatgaagctaattttaaa

SEQ ID NO: 53521 - DNA, 20 bp, synthetic construct
  misc_feature 1..20: note = Description of Artificial Sequence: Synthetic oligonucleotide
  misc_feature 1..20: note = Target: SCN10A; (-) strand; PAM type: YTN; PAM sequence: CTA
  source 1..20: mol_type = other DNA
tttatcatgaagctaatttt

SEQ ID NO: 53522 - DNA, 20 bp, synthetic construct
  misc_feature 1..20: note = Description of Artificial Sequence: Synthetic oligonucleotide
  misc_feature 1..20: note = Target: SCN10A; (-) strand; PAM type: YTN; PAM sequence: TTC
  source 1..20: mol_type = other DNA
tatttatcatgaagctaatt

SEQ ID NO: 53523 - DNA, 20 bp, synthetic construct
  misc_feature 1..20: note = Description of Artificial Sequence: Synthetic oligonucleotide
  misc_feature 1..20: note = Target: SCN10A; (-) strand; PAM type: YTN; PAM sequence: TTG
  source 1..20: mol_type = other DNA
ttctatttatcatgaagcta

SEQ ID NO: 53524 - DNA, 20 bp, synthetic construct
  misc_feature 1..20: note = Description of Artificial Sequence: Synthetic oligonucleotide
  misc_feature 1..20: note = Target: SCN10A; (-) strand; PAM type: YTN; PAM sequence: TTT
  source 1..20: mol_type = other DNA
gttctatttatcatgaagct

SEQ ID NO: 53525 - DNA, 20 bp, synthetic construct
  misc_feature 1..20: note = Description of Artificial Sequence: Synthetic oligonucleotide
  misc_feature 1..20: note = Target: SCN10A; (-) strand; PAM type: YTN; PAM sequence: TTT
  source 1..20: mol_type = other DNA
tgttctatttatcatgaagc

SEQ ID NO: 53526 - DNA, 20 bp, synthetic construct
  misc_feature 1..20: note = Description of Artificial Sequence: Synthetic oligonucleotide
  misc_feature 1..20: note = Target: SCN10A; (-) strand; PAM type: YTN; PAM sequence: TTT
  source 1..20: mol_type = other DNA
ttgttctatttatcatgaag

SEQ ID NO: 53527 - DNA, 20 bp, synthetic construct
  misc_feature 1..20: note = Description of Artificial Sequence: Synthetic oligonucleotide
  misc_feature 1..20: note = Target: SCN10A; (-) strand; PAM type: YTN; PAM sequence: CTT
  source 1..20: mol_type = other DNA
tttgttctatttatcatgaa

SEQ ID NO: 53528 - DNA, 20 bp, synthetic construct
  misc_feature 1..20: note = Description of Artificial Sequence: Synthetic oligonucleotide
  misc_feature 1..20: note = Target: SCN10A; (-) strand; PAM type: YTN; PAM sequence: CTC
  source 1..20: mol_type = other DNA
agtgactttttgttctattt

SEQ ID NO: 53529 - DNA, 20 bp, synthetic construct
  misc_feature 1..20: note = Description of Artificial Sequence: Synthetic oligonucleotide
  misc_feature 1..20: note = Target: SCN10A; (-) strand; PAM type: YTN; PAM sequence: CTA
  source 1..20: mol_type = other DNA
tatatatgggaaagactcag

SEQ ID NO: 53530 - DNA, 20 bp, synthetic construct
  misc_feature 1..20: note = Description of Artificial Sequence: Synthetic oligonucleotide
  misc_feature 1..20: note = Target: SCN10A; (-) strand; PAM type: YTN; PAM sequence: TTC
  source 1..20: mol_type = other DNA
actatatatatgggaaagac

SEQ ID NO: 53531 - DNA, 20 bp, synthetic construct
  misc_feature 1..20: note = Description of Artificial Sequence: Synthetic oligonucleotide
  misc_feature 1..20: note = Target: SCN10A; (-) strand; PAM type: YTN; PAM sequence: CTT
  source 1..20: mol_type = other DNA
cactatatatatgggaaaga

SEQ ID NO: 53532 - DNA, 20 bp, synthetic construct
  misc_feature 1..20: note = Description of Artificial Sequence: Synthetic oligonucleotide
  misc_feature 1..20: note = Target: SCN10A; (-) strand; PAM type: YTN; PAM sequence: TTG
  source 1..20: mol_type = other DNA
tcagcatatcttcactatat

SEQ ID NO: 53533 - DNA, 20 bp, synthetic construct
  misc_feature 1..20: note = Description of Artificial Sequence: Synthetic oligonucleotide
  misc_feature 1..20: note = Target: SCN10A; (-) strand; PAM type: YTN; PAM sequence: CTA
  source 1..20: mol_type = other DNA
tgaataagtaagttgtcagc

SEQ ID NO: 53534 - DNA, 20 bp, synthetic construct
  misc_feature 1..20: note = Description of Artificial Sequence: Synthetic oligonucleotide
  misc_feature 1..20: note = Target: SCN10A; (-) strand; PAM type: YTN; PAM sequence: TTG
  source 1..20: mol_type = other DNA
aacaaaactatgaataagta

SEQ ID NO: 53535 - DNA, 20 bp, synthetic construct
  misc_feature 1..20: note = Description of Artificial Sequence: Synthetic oligonucleotide
  misc_feature 1..20: note = Target: SCN10A; (-) strand; PAM type: YTN; PAM sequence: TTA
  source 1..20: mol_type = other DNA
tagttgaacaaaactatgaa

SEQ ID NO: 53536 - DNA, 20 bp, synthetic construct
  misc_feature 1..20: note = Description of Artificial Sequence: Synthetic oligonucleotide
  misc_feature 1..20: note = Target: SCN10A; (-) strand; PAM type: YTN; PAM sequence: TTT
  source 1..20: mol_type = other DNA
atagttgaacaaaactatga

SEQ ID NO: 53537 - DNA, 20 bp, synthetic construct
  misc_feature 1..20: note = Description of Artificial Sequence: Synthetic oligonucleotide
  misc_feature 1..20: note = Target: SCN10A; (-) strand; PAM type: YTN; PAM sequence: TTT
  source 1..20: mol_type = other DNA
tatagttgaacaaaactatg

SEQ ID NO: 53538 - DNA, 20 bp, synthetic construct
  misc_feature 1..20: note = Description of Artificial Sequence: Synthetic oligonucleotide
  misc_feature 1..20: note = Target: SCN10A; (-) strand; PAM type: YTN; PAM sequence: TTA
  source 1..20: mol_type = other DNA
ttttatagttgaacaaaact

SEQ ID NO: 53539 - DNA, 20 bp, synthetic construct
  misc_feature 1..20: note = Description of Artificial Sequence: Synthetic oligonucleotide
  misc_feature 1..20: note = Target: SCN10A; (-) strand; PAM type: YTN; PAM sequence: TTT
  source 1..20: mol_type = other DNA
attttatagttgaacaaaac

SEQ ID NO: 53540 - DNA, 20 bp, synthetic construct
  misc_feature 1..20: note = Description of Artificial Sequence: Synthetic oligonucleotide
  misc_feature 1..20: note = Target: SCN10A; (-) strand; PAM type: YTN; PAM sequence: TTT
  source 1..20: mol_type = other DNA
tattttatagttgaacaaaa

SEQ ID NO: 53541 - DNA, 20 bp, synthetic construct
  misc_feature 1..20: note = Description of Artificial Sequence: Synthetic oligonucleotide
  misc_feature 1..20: note = Target: SCN10A; (-) strand; PAM type: YTN; PAM sequence: TTA
  source 1..20: mol_type = other DNA
ggtatacgagcagacatttt

SEQ ID NO: 53542 - DNA, 20 bp, synthetic construct
  misc_feature 1..20: note = Description of Artificial Sequence: Synthetic oligonucleotide
  misc_feature 1..20: note = Target: SCN10A; (-) strand; PAM type: YTN; PAM sequence: CTG
  source 1..20: mol_type = other DNA
ttaggtatacgagcagacat

SEQ ID NO: 53543 - DNA, 20 bp, synthetic construct
  misc_feature 1..20: note = Description of Artificial Sequence: Synthetic oligonucleotide
  misc_feature 1..20: note = Target: SCN10A; (-) strand; PAM type: YTN; PAM sequence: TTA
  source 1..20: mol_type = other DNA
aagtcaatgactgttaggta

SEQ ID NO: 53544 - DNA, 20 bp, synthetic construct
  misc_feature 1..20: note = Description of Artificial Sequence: Synthetic oligonucleotide
  misc_feature 1..20: note = Target: SCN10A; (-) strand; PAM type: YTN; PAM sequence: TTT
  source 1..20: mol_type = other DNA
aaagtcaatgactgttaggt

SEQ ID NO: 53545 - DNA, 20 bp, synthetic construct
  misc_feature 1..20: note = Description of Artificial Sequence: Synthetic oligonucleotide
  misc_feature 1..20: note = Target: SCN10A; (-) strand; PAM type: YTN; PAM sequence: CTG
  source 1..20: mol_type = other DNA
gcatttaaagtcaatgactg

SEQ ID NO: 53546 - DNA, 20 bp, synthetic construct
  misc_feature 1..20: note = Description of Artificial Sequence: Synthetic oligonucleotide
  misc_feature 1..20: note = Target: SCN10A; (-) strand; PAM type: YTN; PAM sequence: TTA
  source 1..20: mol_type = other DNA
taatgtgactggcatttaaa

SEQ ID NO: 53547 - DNA, 20 bp, synthetic construct
  misc_feature 1..20: note = Description of Artificial Sequence: Synthetic oligonucleotide
  misc_feature 1..20: note = Target: SCN10A; (-) strand; PAM type: YTN; PAM sequence: CTT
  source 1..20: mol_type = other DNA
ataatgtgactggcatttaa

SEQ ID NO: 53548 - DNA, 20 bp, synthetic construct
  misc_feature 1..20: note = Description of Artificial Sequence: Synthetic oligonucleotide
  misc_feature 1..20: note = Target: SCN10A; (-) strand; PAM type: YTN; PAM sequence: TTC
  source 1..20: mol_type = other DNA
cttataatgtgactggcatt

SEQ ID NO: 53549 - DNA, 20 bp, synthetic construct
  misc_feature 1..20: note = Description of Artificial Sequence: Synthetic oligonucleotide
  misc_feature 1..20: note = Target: SCN10A; (-) strand; PAM type: YTN; PAM sequence: TTG
  source 1..20: mol_type = other DNA
cattccttataatgtgactg

SEQ ID NO: 53550 - DNA, 20 bp, synthetic construct
  misc_feature 1..20: note = Description of Artificial Sequence: Synthetic oligonucleotide
  misc_feature 1..20: note = Target: SCN10A; (-) strand; PAM type: YTN; PAM sequence: TTA
  source 1..20: mol_type = other DNA
gaagtattgcattccttata

SEQ ID NO: 53551 - DNA, 20 bp, synthetic construct
  misc_feature 1..20: note = Description of Artificial Sequence: Synthetic oligonucleotide
  misc_feature 1..20: note = Target: SCN10A; (-) strand; PAM type: YTN; PAM sequence: TTA
  source 1..20: mol_type = other DNA
attagaagtattgcattcct

SEQ ID NO: 53552 - DNA, 20 bp, synthetic construct
  misc_feature 1..20: note = Description of Artificial Sequence: Synthetic oligonucleotide
  misc_feature 1..20: note = Target: SCN10A; (-) strand; PAM type: YTN; PAM sequence: CTT
  source 1..20: mol_type = other DNA
aattagaagtattgcattcc

SEQ ID NO: 53553 - DNA, 20 bp, synthetic construct
  misc_feature 1..20: note = Description of Artificial Sequence: Synthetic oligonucleotide
  misc_feature 1..20: note = Target: SCN10A; (-) strand; PAM type: YTN; PAM sequence: TTC
  source 1..20: mol_type = other DNA
cttaattagaagtattgcat

SEQ ID NO: 53554 - DNA, 20 bp, synthetic construct
  misc_feature 1..20: note = Description of Artificial Sequence: Synthetic oligonucleotide
  misc_feature 1..20: note = Target: SCN10A; (-) strand; PAM type: YTN; PAM sequence: TTG
  source 1..20: mol_type = other DNA
gtataattccttaattagaa

SEQ ID NO: 53555 - DNA, 20 bp, synthetic construct
  misc_feature 1..20: note = Description of Artificial Sequence: Synthetic oligonucleotide
  misc_feature 1..20: note = Target: SCN10A; (-) strand; PAM type: YTN; PAM sequence: TTG
  source 1..20: mol_type = other DNA
gagaagaaacaagaaaaaca

SEQ ID NO: 53556 - DNA, 20 bp, synthetic construct
  misc_feature 1..20: note = Description of Artificial Sequence: Synthetic oligonucleotide
  misc_feature 1..20: note = Target: SCN10A; (-) strand; PAM type: YTN; PAM sequence: TTG
  source 1..20: mol_type = other DNA
tggttggagaagaaacaaga

SEQ ID NO: 53557 - DNA, 20 bp, synthetic construct
  misc_feature 1..20: note = Description of Artificial Sequence: Synthetic oligonucleotide
  misc_feature 1..20: note = Target: SCN10A; (-) strand; PAM type: YTN; PAM sequence: TTA
  source 1..20: mol_type = other DNA
caaatattgtggttggagaa

SEQ ID NO: 53558 - DNA, 20 bp, synthetic construct
  misc_feature 1..20: note = Description of Artificial Sequence: Synthetic oligonucleotide
  misc_feature 1..20: note = Target: SCN10A; (-) strand; PAM type: YTN; PAM sequence: TTC
  source 1..20: mol_type = other DNA
caaatcaattacaaatattg

SEQ ID NO: 53559 - DNA, 20 bp, synthetic construct
  misc_feature 1..20: note = Description of Artificial Sequence: Synthetic oligonucleotide
  misc_feature 1..20: note = Target: SCN10A; (-) strand; PAM type: YTN; PAM sequence: TTT
  source 1..20: mol_type = other DNA
ccaaatcaattacaaatatt

SEQ ID NO: 53560 - DNA, 20 bp, synthetic construct
  misc_feature 1..20: note = Description of Artificial Sequence: Synthetic oligonucleotide
  misc_feature 1..20: note = Target: SCN10A; (-) strand; PAM type: YTN; PAM sequence: CTG
  source 1..20: mol_type = other DNA
gtaagatacaaaaccagttt

SEQ ID NO: 53561 - DNA, 20 bp, synthetic construct
  misc_feature 1..20: note = Description of Artificial Sequence: Synthetic oligonucleotide
  misc_feature 1..20: note = Target: SCN10A; (-) strand; PAM type: YTN; PAM sequence: CTG
  source 1..20: mol_type = other DNA
ctggtaagatacaaaaccag

SEQ ID NO: 53562 - DNA, 20 bp, synthetic construct
  misc_feature 1..20: note = Description of Artificial Sequence: Synthetic oligonucleotide
  misc_feature 1..20: note = Target: SCN10A; (-) strand; PAM type: YTN; PAM sequence: CTC
  source 1..20: mol_type = other DNA
ctgctggtaagatacaaaac

SEQ ID NO: 53563 - DNA, 20 bp, synthetic construct
  misc_feature 1..20: note = Description of Artificial Sequence: Synthetic oligonucleotide
  misc_feature 1..20: note = Target: SCN10A; (-) strand; PAM type: YTN; PAM sequence: TTG
  source 1..20: mol_type = other DNA
cactcctgctggtaagatac

SEQ ID NO: 53564 - DNA, 20 bp, synthetic construct
  misc_feature 1..20: note = Description of Artificial Sequence: Synthetic oligonucleotide
  misc_feature 1..20: note = Target: SCN10A; (-) strand; PAM type: YTN; PAM sequence: CTC
  source 1..20: mol_type = other DNA
atatcaaaaataagcacaat

SEQ ID NO: 53565 - DNA, 20 bp, synthetic construct
  misc_feature 1..20: note = Description of Artificial Sequence: Synthetic oligonucleotide
  misc_feature 1..20: note = Target: SCN10A; (-) strand; PAM type: YTN; PAM sequence: TTC
  source 1..20: mol_type = other DNA
atcctcatatcaaaaataag

SEQ ID NO: 53566 - DNA, 20 bp, synthetic construct
  misc_feature 1..20: note = Description of Artificial Sequence: Synthetic oligonucleotide
  misc_feature 1..20: note = Target: SCN10A; (-) strand; PAM type: YTN; PAM sequence: CTA
  source 1..20: mol_type = other DNA
tagagtcatcattcatcctc

SEQ ID NO: 53567 - DNA, 20 bp, synthetic construct
  misc_feature 1..20: note = Description of Artificial Sequence: Synthetic oligonucleotide
  misc_feature 1..20: note = Target: SCN10A; (-) strand; PAM type: YTN; PAM sequence: TTG
  source 1..20: mol_type = other DNA
agaagacaacaaaactatag

SEQ ID NO: 53568 - DNA, 20 bp, synthetic construct
  misc_feature 1..20: note = Description of Artificial Sequence: Synthetic oligonucleotide
  misc_feature 1..20: note = Target: SCN10A; (-) strand; PAM type: YTN; PAM sequence: TTA
  source 1..20: mol_type = other DNA
aaggttgagaagacaacaaa

SEQ ID NO: 53569 - DNA, 20 bp, synthetic construct
  misc_feature 1..20: note = Description of Artificial Sequence: Synthetic oligonucleotide
  misc_feature 1..20: note = Target: SCN10A; (-) strand; PAM type: YTN; PAM sequence: TTA
  source 1..20: mol_type = other DNA
tgttaaaggttgagaagaca

SEQ ID NO: 53570 - DNA, 20 bp, synthetic construct
  misc_feature 1..20: note = Description of Artificial Sequence: Synthetic oligonucleotide
  misc_feature 1..20: note = Target: SCN10A; (-) strand; PAM type: YTN; PAM sequence: TTT
  source 1..20: mol_type = other DNA
atgttaaaggttgagaagac

SEQ ID NO: 53571 - DNA, 20 bp, synthetic construct
  misc_feature 1..20: note = Description of Artificial Sequence: Synthetic oligonucleotide
  misc_feature 1..20: note = Target: SCN10A; (-) strand; PAM type: YTN; PAM sequence: TTT
  source 1..20: mol_type = other DNA
tatgttaaaggttgagaaga

SEQ ID NO: 53572 - DNA, 20 bp, synthetic construct
  misc_feature 1..20: note = Description of Artificial Sequence: Synthetic oligonucleotide
  misc_feature 1..20: note = Target: SCN10A; (-) strand; PAM type: YTN; PAM sequence: TTG
  source 1..20: mol_type = other DNA
tgaaaattttatgttaaagg

SEQ ID NO: 53573 - DNA, 20 bp, synthetic construct
  misc_feature 1..20: note = Description of Artificial Sequence: Synthetic oligonucleotide
  misc_feature 1..20: note = Target: SCN10A; (-) strand; PAM type: YTN; PAM sequence: TTC
  source 1..20: mol_type = other DNA
ccagtataaaattgtgaaaa

SEQ ID NO: 53574 - DNA, 20 bp, synthetic construct
  misc_feature 1..20: note = Description of Artificial Sequence: Synthetic oligonucleotide
  misc_feature 1..20: note = Target: SCN10A; (-) strand; PAM type: YTN; PAM sequence: TTT
  source 1..20: mol_type = other DNA
cccagtataaaattgtgaaa

SEQ ID NO: 53575 - DNA, 20 bp, synthetic construct
  misc_feature 1..20: note = Description of Artificial Sequence: Synthetic oligonucleotide
  misc_feature 1..20: note = Target: SCN10A; (-) strand; PAM type: YTN; PAM sequence: CTT
  source 1..20: mol_type = other DNA
tcccagtataaaattgtgaa

SEQ ID NO: 53576 - DNA, 20 bp, synthetic construct
  misc_feature 1..20: note = Description of Artificial Sequence: Synthetic oligonucleotide
  misc_feature 1..20: note = Target: SCN10A; (-) strand; PAM type: YTN; PAM sequence: CTA
  source 1..20: mol_type = other DNA
caagcacaaaataaggcttt

SEQ ID NO: 53577 - DNA, 20 bp, synthetic construct
  misc_feature 1..20: note = Description of Artificial Sequence: Synthetic oligonucleotide
  misc_feature 1..20: note = Target: SCN10A; (-) strand; PAM type: YTN; PAM sequence: CTA
  source 1..20: mol_type = other DNA
ctacaagcacaaaataaggc

SEQ ID NO: 53578 - DNA, 20 bp, synthetic construct
  misc_feature 1..20: note = Description of Artificial Sequence: Synthetic oligonucleotide
  misc_feature 1..20: note = Target: SCN10A; (-) strand; PAM type: YTN; PAM sequence: CTC
  source 1..20: mol_type = other DNA
tactacaagcacaaaataag

SEQ ID NO: 53579 - DNA, 20 bp, synthetic construct
  misc_feature 1..20: note = Description of Artificial Sequence: Synthetic oligonucleotide
  misc_feature 1..20: note = Target: SCN10A; (-) strand; PAM type: YTN; PAM sequence: TTG
  source 1..20: mol_type = other DNA
aatatctctactacaagcac

SEQ ID NO: 53580 - DNA, 20 bp, synthetic construct
  misc_feature 1..20: note = Description of Artificial Sequence: Synthetic oligonucleotide
  misc_feature 1..20: note = Target: SCN10A; (-) strand; PAM type: YTN; PAM sequence: TTA
  source 1..20: mol_type = other DNA
aaccaattgaatatctctac

SEQ ID NO: 53581 - DNA, 20 bp, synthetic construct
  misc_feature 1..20: note = Description of Artificial Sequence: Synthetic oligonucleotide
  misc_feature 1..20: note = Target: SCN10A; (-) strand; PAM type: YTN; PAM sequence: TTT
  source 1..20: mol_type = other DNA
aaaccaattgaatatctcta

SEQ ID NO: 53582 - DNA, 20 bp, synthetic construct
  misc_feature 1..20: note = Description of Artificial Sequence: Synthetic oligonucleotide
  misc_feature 1..20: note = Target: SCN10A; (-) strand; PAM type: YTN; PAM sequence: TTT
  source 1..20: mol_type = other DNA
taaaccaattgaatatctct

SEQ ID NO: 53583 - DNA, 20 bp, synthetic construct
  misc_feature 1..20: note = Description of Artificial Sequence: Synthetic oligonucleotide
  misc_feature 1..20: note = Target: SCN10A; (-) strand; PAM type: YTN; PAM sequence: CTT
  source 1..20: mol_type = other DNA
ttaaaccaattgaatatctc

SEQ ID NO: 53584 - DNA, 20 bp, synthetic construct
  misc_feature 1..20: note = Description of Artificial Sequence: Synthetic oligonucleotide
  misc_feature 1..20: note = Target: SCN10A; (-) strand; PAM type: YTN; PAM sequence: TTA
  source 1..20: mol_type = other DNA
tcaaccccacttttaaacca

SEQ ID NO: 53585 - DNA, 20 bp, synthetic construct
  misc_feature 1..20: note = Description of Artificial Sequence: Synthetic oligonucleotide
  misc_feature 1..20: note = Target: SCN10A; (-) strand; PAM type: YTN; PAM sequence: TTT
  source 1..20: mol_type = other DNA
atcaaccccacttttaaacc

SEQ ID NO: 53586 - DNA, 20 bp, synthetic construct
  misc_feature 1..20: note = Description of Artificial Sequence: Synthetic oligonucleotide
  misc_feature 1..20: note = Target: SCN10A; (-) strand; PAM type: YTN; PAM sequence: TTC
  source 1..20: mol_type = other DNA
caataaagtttatcaacccc

SEQ ID NO: 53587 - DNA, 20 bp, synthetic construct
  misc_feature 1..20: note = Description of Artificial Sequence: Synthetic oligonucleotide
  misc_feature 1..20: note = Target: SCN10A; (-) strand; PAM type: YTN; PAM sequence: TTT
  source 1..20: mol_type = other DNA
ccaataaagtttatcaaccc

SEQ ID NO: 53588 - DNA, 20 bp, synthetic construct
  misc_feature 1..20: note = Description of Artificial Sequence: Synthetic oligonucleotide
  misc_feature 1..20: note = Target: SCN10A; (-) strand; PAM type: YTN; PAM sequence: TTT
  source 1..20: mol_type = other DNA
tccaataaagtttatcaacc

SEQ ID NO: 53589 - DNA, 20 bp, synthetic construct
  misc_feature 1..20: note = Description of Artificial Sequence: Synthetic oligonucleotide
  misc_feature 1..20: note = Target: SCN10A; (-) strand; PAM type: YTN; PAM sequence: TTA
  source 1..20: mol_type = other DNA
ttttccaataaagtttatca

SEQ ID NO: 53590 - DNA, 20 bp, synthetic construct
  misc_feature 1..20: note = Description of Artificial Sequence: Synthetic oligonucleotide
  misc_feature 1..20: note = Target: SCN10A; (-) strand; PAM type: YTN; PAM sequence: TTC
  source 1..20: mol_type = other DNA
catattattttccaataaag

SEQ ID NO: 53591 - DNA, 20 bp, synthetic construct
  misc_feature 1..20: note = Description of Artificial Sequence: Synthetic oligonucleotide
  misc_feature 1..20: note = Target: SCN10A; (-) strand; PAM type: YTN; PAM sequence: CTT
  source 1..20: mol_type = other DNA
ccatattattttccaataaa

SEQ ID NO: 53592 - DNA, 20 bp, synthetic construct
  misc_feature 1..20: note = Description of Artificial Sequence: Synthetic oligonucleotide
  misc_feature 1..20: note = Target: SCN10A; (-) strand; PAM type: YTN; PAM sequence: CTA
  source 1..20: mol_type = other DNA
tcaaaacttccatattattt

SEQ ID NO: 53593 - DNA, 20 bp, synthetic construct
  misc_feature 1..20: note = Description of Artificial Sequence: Synthetic oligonucleotide
  misc_feature 1..20: note = Target: SCN10A; (-) strand; PAM type: YTN; PAM sequence: TTG
  source 1..20: mol_type = other DNA
tcaagtaatgatataaagct

SEQ ID NO: 53594 - DNA, 20 bp, synthetic construct
  misc_feature 1..20: note = Description of Artificial Sequence: Synthetic oligonucleotide
  misc_feature 1..20: note = Target: SCN10A; (-) strand; PAM type: YTN; PAM sequence: TTT
  source 1..20: mol_type = other DNA
gtcaagtaatgatataaagc

SEQ ID NO: 53595 - DNA, 20 bp, synthetic construct
  misc_feature 1..20: note = Description of Artificial Sequence: Synthetic oligonucleotide
  misc_feature 1..20: note = Target: SCN10A; (-) strand; PAM type: YTN; PAM sequence: TTT
  source 1..20: mol_type = other DNA
tgtcaagtaatgatataaag

SEQ ID NO: 53596 - DNA, 20 bp, synthetic construct
  misc_feature 1..20: note = Description of Artificial Sequence: Synthetic oligonucleotide
  misc_feature 1..20: note = Target: SCN10A; (-) strand; PAM type: YTN; PAM sequence: TTT
  source 1..20: mol_type = other DNA
ttgtcaagtaatgatataaa

SEQ ID NO: 53597 - DNA, 20 bp, synthetic construct
  misc_feature 1..20: note = Description of Artificial Sequence: Synthetic oligonucleotide
  misc_feature 1..20: note = Target: SCN10A; (-) strand; PAM type: YTN; PAM sequence: CTA
  source 1..20: mol_type = other DNA
acgtttttgtcaagtaatga

SEQ ID NO: 53598 - DNA, 20 bp, synthetic construct
  misc_feature 1..20: note = Description of Artificial Sequence: Synthetic oligonucleotide
  misc_feature 1..20: note = Target: SCN10A; (-) strand; PAM type: YTN; PAM sequence: CTG
  source 1..20: mol_type = other DNA
ctaacgtttttgtcaagtaa

SEQ ID NO: 53599 - DNA, 20 bp, synthetic construct
  misc_feature 1..20: note = Description of Artificial Sequence: Synthetic oligonucleotide
  misc_feature 1..20: note = Target: SCN10A; (-) strand; PAM type: YTN; PAM sequence: TTA
  source 1..20: mol_type = other DNA
tctgctaacgtttttgtcaa

SEQ ID NO: 53600 - DNA, 20 bp, synthetic construct
  misc_feature 1..20: note = Description of Artificial Sequence: Synthetic oligonucleotide
  misc_feature 1..20: note = Target: SCN10A; (-) strand; PAM type: YTN; PAM sequence: TTA
  source 1..20: mol_type = other DNA
ttatctgctaacgtttttgt

SEQ ID NO: 53601 - DNA, 20 bp, synthetic construct
  misc_feature 1..20: note = Description of Artificial Sequence: Synthetic oligonucleotide
  misc_feature 1..20: note = Target: SCN10A; (-) strand; PAM type: YTN; PAM sequence: TTT
  source 1..20: mol_type = other DNA
attatctgctaacgtttttg

SEQ ID NO: 53602 - DNA, 20 bp, synthetic construct
  misc_feature 1..20: note = Description of Artificial Sequence: Synthetic oligonucleotide
  misc_feature 1..20: note = Target: SCN10A; (-) strand; PAM type: YTN; PAM sequence: CTA
  source 1..20: mol_type = other DNA
gtacccaatttattatctgc

SEQ ID NO: 53603 - DNA, 20 bp, synthetic construct
  misc_feature 1..20: note = Description of Artificial Sequence: Synthetic oligonucleotide
  misc_feature 1..20: note = Target: SCN10A; (-) strand; PAM type: YTN; PAM sequence: TTG
  source 1..20: mol_type = other DNA
tcctagtacccaatttatta

SEQ ID NO: 53604 - DNA, 20 bp, synthetic construct
  misc_feature 1..20: note = Description of Artificial Sequence: Synthetic oligonucleotide
  misc_feature 1..20: note = Target: SCN10A; (-) strand; PAM type: YTN; PAM sequence: TTT
  source 1..20: mol_type = other DNA
gtcctagtacccaatttatt

SEQ ID NO: 53605 - DNA, 20 bp, synthetic construct
  misc_feature 1..20: note = Description of Artificial Sequence: Synthetic oligonucleotide
  misc_feature 1..20: note = Target: SCN10A; (-) strand; PAM type: YTN; PAM sequence: TTT
  source 1..20: mol_type = other DNA
tgtcctagtacccaatttat

SEQ ID NO: 53606 - DNA, 20 bp, synthetic construct
  misc_feature 1..20: note = Description of Artificial Sequence: Synthetic oligonucleotide
  misc_feature 1..20: note = Target: SCN10A; (-) strand; PAM type: YTN; PAM sequence: CTT
  source 1..20: mol_type = other DNA
ttgtcctagtacccaattta

SEQ ID NO: 53607 - DNA, 20 bp, synthetic construct
  misc_feature 1..20: note = Description of Artificial Sequence: Synthetic oligonucleotide
  misc_feature 1..20: note = Target: SCN10A; (-) strand; PAM type: YTN; PAM sequence: TTG
  source 1..20: mol_type = other DNA
gaccaatgatccttttgtcc

SEQ ID NO: 53608 - DNA, 20 bp, synthetic construct
  misc_feature 1..20: note = Description of Artificial Sequence: Synthetic oligonucleotide
  misc_feature 1..20: note = Target: SCN10A; (-) strand; PAM type: YTN; PAM sequence: TTA
  source 1..20: mol_type = other DNA
ttggaccaatgatccttttg

SEQ ID NO: 53609 - DNA, 20 bp, synthetic construct
  misc_feature 1..20: note = Description of Artificial Sequence: Synthetic oligonucleotide
  misc_feature 1..20: note = Target: SCN10A; (-) strand; PAM type: YTN; PAM sequence: TTT
  source 1..20: mol_type = other DNA
attggaccaatgatcctttt

SEQ ID NO: 53610 - DNA, 20 bp, synthetic construct
  misc_feature 1..20: note = Description of Artificial Sequence: Synthetic oligonucleotide
  misc_feature 1..20: note = Target: SCN10A; (-) strand; PAM type: YTN; PAM sequence: TTT
  source 1..20: mol_type = other DNA
tattggaccaatgatccttt

SEQ ID NO: 53611 - DNA, 20 bp, synthetic construct
  misc_feature 1..20: note = Description of Artificial Sequence: Synthetic oligonucleotide
  misc_feature 1..20: note = Target: SCN10A; (-) strand; PAM type: YTN; PAM sequence: TTG
  source 1..20: mol_type = other DNA
aattttattggaccaatgat

SEQ ID NO: 53612 - DNA, 20 bp, synthetic construct
  misc_feature 1..20: note = Description of Artificial Sequence: Synthetic oligonucleotide
  misc_feature 1..20: note = Target: SCN10A; (-) strand; PAM type: YTN; PAM sequence: CTC
  source 1..20: mol_type = other DNA
ccaaaaccagacaaaaatat

SEQ ID NO: 53613 - DNA, 20 bp, synthetic construct
  misc_feature 1..20: note = Description of Artificial Sequence: Synthetic oligonucleotide
  misc_feature 1..20: note = Target: SCN10A; (-) strand; PAM type: YTN; PAM sequence: TTG
  source 1..20: mol_type = other DNA
tcatgagacaagtggataat

SEQ ID NO: 53614 - DNA, 20 bp, synthetic construct
  misc_feature 1..20: note = Description of Artificial Sequence: Synthetic oligonucleotide
  misc_feature 1..20: note = Target: SCN10A; (-) strand; PAM type: YTN; PAM sequence: TTT
  source 1..20: mol_type = other DNA
gtcatgagacaagtggataa

SEQ ID NO: 53615 - DNA, 20 bp, synthetic construct
  misc_feature 1..20: note = Description of Artificial Sequence: Synthetic oligonucleotide
  misc_feature 1..20: note = Target: SCN10A; (-) strand; PAM type: YTN; PAM sequence: CTG
  source 1..20: mol_type = other DNA
tttgtcatgagacaagtgga

SEQ ID NO: 53616 - DNA, 20 bp, synthetic construct
  misc_feature 1..20: note = Description of Artificial Sequence: Synthetic oligonucleotide
  misc_feature 1..20: note = Target: SCN10A; (-) strand; PAM type: YTN; PAM sequence: TTG
  source 1..20: mol_type = other DNA
taaaaatacaaagcatgaat

SEQ ID NO: 53617 - DNA, 20 bp, synthetic construct
  misc_feature 1..20: note = Description of Artificial Sequence: Synthetic oligonucleotide
  misc_feature 1..20: note = Target: SCN10A; (-) strand; PAM type: YTN; PAM sequence: CTC
  source 1..20: mol_type = other DNA
cattgtaaaaatacaaagca

SEQ ID NO: 53618 - DNA, 20 bp, synthetic construct
  misc_feature 1..20: note = Description of Artificial Sequence: Synthetic oligonucleotide
  misc_feature 1..20: note = Target: SCN10A; (-) strand; PAM type: YTN; PAM sequence: CTA
  source 1..20: mol_type = other DNA
caatgtgaaataaggtcaca

SEQ ID NO: 53619 - DNA, 20 bp, synthetic construct
  misc_feature 1..20: note = Description of Artificial Sequence: Synthetic oligonucleotide
  misc_feature 1..20: note = Target: SCN10A; (-) strand; PAM type: YTN; PAM sequence: CTG
  source 1..20: mol_type = other DNA
aagcataacaataatgataa

SEQ ID NO: 53620 - DNA, 20 bp, synthetic construct
  misc_feature 1..20: note = Description of Artificial Sequence: Synthetic oligonucleotide
  misc_feature 1..20: note = Target: SCN10A; (-) strand; PAM type: YTN; PAM sequence: TTC
  source 1..20: mol_type = other DNA
tgaagcataacaataatgat

SEQ ID NO: 53621 - DNA, 20 bp, synthetic construct
  misc_feature 1..20: note = Description of Artificial Sequence: Synthetic oligonucleotide
  misc_feature 1..20: note = Target: SCN10A; (-) strand; PAM type: YTN; PAM sequence: TTT
  source 1..20: mol_type = other DNA
ctgaagcataacaataatga

SEQ ID NO: 53622 - DNA, 20 bp, synthetic construct
  misc_feature 1..20: note = Description of Artificial Sequence: Synthetic oligonucleotide
  misc_feature 1..20: note = Target: SCN10A; (-) strand; PAM type: YTN; PAM sequence: TTT
  source 1..20: mol_type = other DNA
tctgaagcataacaataatg

SEQ ID NO: 53623 - DNA, 20 bp, synthetic construct
  misc_feature 1..20: note = Description of Artificial Sequence: Synthetic oligonucleotide
  misc_feature 1..20: note = Target: SCN10A; (-) strand; PAM type: YTN; PAM sequence: TTC
  source 1..20: mol_type = other DNA
gaaagtggttttctgaagca

SEQ ID NO: 53624 - DNA, 20 bp, synthetic construct
  misc_feature 1..20: note = Description of Artificial Sequence: Synthetic oligonucleotide
  misc_feature 1..20: note = Target: SCN10A; (-) strand; PAM type: YTN; PAM sequence: CTT
  source 1..20: mol_type = other DNA
cgaaagtggttttctgaagc

SEQ ID NO: 53625 - DNA, 20 bp, synthetic construct
  misc_feature 1..20: note = Description of Artificial Sequence: Synthetic oligonucleotide
  misc_feature 1..20: note = Target: SCN10A; (-) strand; PAM type: YTN; PAM sequence: TTC
  source 1..20: mol_type = other DNA
aaaaaaaagagtcatcactt

SEQ ID NO: 53626 - DNA, 20 bp, synthetic construct
  misc_feature 1..20: note = Description of Artificial Sequence: Synthetic oligonucleotide
  misc_feature 1..20: note = Target: SCN10A; (-) strand; PAM type: YTN; PAM sequence: TTG
  source 1..20: mol_type = other DNA
cataatatcacaattcaaaa

SEQ ID NO: 53627 - DNA, 20 bp, synthetic construct
  misc_feature 1..20: note = Description of Artificial Sequence: Synthetic oligonucleotide
  misc_feature 1..20: note = Target: SCN10A; (-) strand; PAM type: YTN; PAM sequence: TTT
  source 1..20: mol_type = other DNA
gcataatatcacaattcaaa

SEQ ID NO: 53628 - DNA, 20 bp, synthetic construct
  misc_feature 1..20: note = Description of Artificial Sequence: Synthetic oligonucleotide
  misc_feature 1..20: note = Target: SCN10A; (-) strand; PAM type: YTN; PAM sequence: CTT
  source 1..20: mol_type = other DNA
tgcataatatcacaattcaa

SEQ ID NO: 53629 - DNA, 20 bp, synthetic construct
  misc_feature 1..20: note = Description of Artificial Sequence: Synthetic oligonucleotide
  misc_feature 1..20: note = Target: SCN10A; (-) strand; PAM type: YTN; PAM sequence: CTG
  source 1..20: mol_type = other DNA
tcgctttgcataatatcaca

SEQ ID NO: 53630 - DNA, 20 bp, synthetic construct
  misc_feature 1..20: note = Description of Artificial Sequence: Synthetic oligonucleotide
  misc_feature 1..20: note = Target: SCN10A; (-) strand; PAM type: YTN; PAM sequence: TTA
  source 1..20: mol_type = other DNA
ctgtcgctttgcataatatc

SEQ ID NO: 53631 - DNA, 20 bp, synthetic construct
  misc_feature 1..20: note = Description of Artificial Sequence: Synthetic oligonucleotide
  misc_feature 1..20: note = Target: SCN10A; (-) strand; PAM type: YTN; PAM sequence: TTA
  source 1..20: mol_type = other DNA
ttactgtcgctttgcataat

SEQ ID NO: 53632 - DNA, 20 bp, synthetic construct
  misc_feature 1..20: note = Description of Artificial Sequence: Synthetic oligonucleotide
  misc_feature 1..20: note = Target: SCN10A; (-) strand; PAM type: YTN; PAM sequence: TTG
  source 1..20: mol_type = other DNA
ccattattactgtcgctttg

SEQ ID NO: 53633 - DNA, 20 bp, synthetic construct
  misc_feature 1..20: note = Description of Artificial Sequence: Synthetic oligonucleotide
  misc_feature 1..20: note = Target: SCN10A; (-) strand; PAM type: YTN; PAM sequence: TTT
  source 1..20: mol_type = other DNA
gccattattactgtcgcttt

SEQ ID NO: 53634 - DNA, 20 bp, synthetic construct
  misc_feature 1..20: note = Description of Artificial Sequence: Synthetic oligonucleotide
  misc_feature 1..20: note = Target: SCN10A; (-) strand; PAM type: YTN; PAM sequence: TTG
  source 1..20: mol_type = other DNA
catttgccattattactgtc

SEQ ID NO: 53635 - DNA, 20 bp, synthetic construct
  misc_feature 1..20: note = Description of Artificial Sequence: Synthetic oligonucleotide
  misc_feature 1..20: note = Target: SCN10A; (-) strand; PAM type: YTN; PAM sequence: CTT
  source 1..20: mol_type = other DNA
gcatttgccattattactgt

SEQ ID NO: 53636 - DNA, 20 bp, synthetic construct
  misc_feature 1..20: note = Description of Artificial Sequence: Synthetic oligonucleotide
  misc_feature 1..20: note = Target: SCN10A; (-) strand; PAM type: YTN; PAM sequence: TTG
  source 1..20: mol_type = other DNA
tcagacttgcatttgccatt

SEQ ID NO: 53637 - DNA, 20 bp, synthetic construct
  misc_feature 1..20: note = Description of Artificial Sequence: Synthetic oligonucleotide
  misc_feature 1..20: note = Target: SCN10A; (-) strand; PAM type: YTN; PAM sequence: CTT
  source 1..20: mol_type = other DNA
gtcagacttgcatttgccat

SEQ ID NO: 53638 - DNA, 20 bp, synthetic construct
  misc_feature 1..20: note = Description of Artificial Sequence: Synthetic oligonucleotide
  misc_feature 1..20: note = Target: SCN10A; (-) strand; PAM type: YTN; PAM sequence: TTA
  source 1..20: mol_type = other DNA
cacttgtcagacttgcattt

SEQ ID NO: 53639 - DNA, 20 bp, synthetic construct
  misc_feature 1..20: note = Description of Artificial Sequence: Synthetic oligonucleotide
  misc_feature 1..20: note = Target: SCN10A; (-) strand; PAM type: YTN; PAM sequence: TTT
  source 1..20: mol_type = other DNA
acacttgtcagacttgcatt

SEQ ID NO: 53640 - DNA, 20 bp, synthetic construct
  misc_feature 1..20: note = Description of Artificial Sequence: Synthetic oligonucleotide
  misc_feature 1..20: note = Target: SCN10A; (-) strand; PAM type: YTN; PAM sequence: TTA
  source 1..20: mol_type = other DNA
tttacacttgtcagacttgc

SEQ ID NO: 53641 - DNA, 20 bp, synthetic construct
  misc_feature 1..20: note = Description of Artificial Sequence: Synthetic oligonucleotide
  misc_feature 1..20: note = Target: SCN10A; (-) strand; PAM type: YTN; PAM sequence: CTG
  source 1..20: mol_type = other DNA
acagttatttacacttgtca

SEQ ID NO: 53642 - DNA, 20 bp, synthetic construct
  misc_feature 1..20: note = Description of Artificial Sequence: Synthetic oligonucleotide
  misc_feature 1..20: note = Target: SCN10A; (-) strand; PAM type: YTN; PAM sequence: TTG
  source 1..20: mol_type = other DNA
tcacctgacagttatttaca

SEQ ID NO: 53643 - DNA, 20 bp, synthetic construct
  misc_feature 1..20: note = Description of Artificial Sequence: Synthetic oligonucleotide
  misc_feature 1..20: note = Target: SCN10A; (-) strand; PAM type: YTN; PAM sequence: TTA
  source 1..20: mol_type = other DNA
ttgtcacctgacagttattt

SEQ ID NO: 53644 - DNA, 20 bp, synthetic construct
  misc_feature 1..20: note = Description of Artificial Sequence: Synthetic oligonucleotide
  misc_feature 1..20: note = Target: SCN10A; (-) strand; PAM type: YTN; PAM sequence: TTT
  source 1..20: mol_type = other DNA
attgtcacctgacagttatt

SEQ ID NO: 53645 - DNA, 20 bp, synthetic construct
  misc_feature 1..20: note = Description of Artificial Sequence: Synthetic oligonucleotide
  misc_feature 1..20: note = Target: SCN10A; (-) strand; PAM type: YTN; PAM sequence: TTT
  source 1..20: mol_type = other DNA
tattgtcacctgacagttat

SEQ ID NO: 53646 - DNA, 20 bp, synthetic construct
  misc_feature 1..20: note = Description of Artificial Sequence: Synthetic oligonucleotide
  misc_feature 1..20: note = Target: SCN10A; (-) strand; PAM type: YTN; PAM sequence: CTA
  source 1..20: mol_type = other DNA
atgtattttattgtcacctg

SEQ ID NO: 53647 - DNA, 20 bp, synthetic construct
  misc_feature 1..20: note = Description of Artificial Sequence: Synthetic oligonucleotide
  misc_feature 1..20: note = Target: SCN10A; (-) strand; PAM type: YTN; PAM sequence: TTG
  source 1..20: mol_type = other DNA
actaatgtattttattgtca

SEQ ID NO: 53648 - DNA, 20 bp, synthetic construct
  misc_feature 1..20: note = Description of Artificial Sequence: Synthetic oligonucleotide
  misc_feature 1..20: note = Target: SCN10A; (-) strand; PAM type: YTN; PAM sequence: CTT
  source 1..20: mol_type = other DNA
gactaatgtattttattgtc

SEQ ID NO: 53649 - DNA, 20 bp, synthetic construct
  misc_feature 1..20: note = Description of Artificial Sequence: Synthetic oligonucleotide
  misc_feature 1..20: note = Target: SCN10A; (-) strand; PAM type: YTN; PAM sequence: TTA
  source 1..20: mol_type = other DNA
tcttgactaatgtattttat

SEQ ID NO: 53650 - DNA, 20 bp, synthetic construct
  misc_feature 1..20: note = Description of Artificial Sequence: Synthetic oligonucleotide
  misc_feature 1..20: note = Target: SCN10A; (-) strand; PAM type: YTN; PAM sequence: TTT
  source 1..20: mol_type = other DNA
atcttgactaatgtatttta

SEQ ID NO: 53651 - DNA, 20 bp, synthetic construct
  misc_feature 1..20: note = Description of Artificial Sequence: Synthetic oligonucleotide
  misc_feature 1..20: note = Target: SCN10A; (-) strand; PAM type: YTN; PAM sequence: TTA
  source 1..20: mol_type = other DNA
atcataggcagtttatcttg

SEQ ID NO: 53652 - DNA, 20 bp, synthetic construct
  misc_feature 1..20: note = Description of Artificial Sequence: Synthetic oligonucleotide
  misc_feature 1..20: note = Target: SCN10A; (-) strand; PAM type: YTN; PAM sequence: TTA
  source 1..20: mol_type = other DNA
acatggagttaatcataggc

SEQ ID NO: 53653 - DNA, 20 bp, synthetic construct
  misc_feature 1..20: note = Description of Artificial Sequence: Synthetic oligonucleotide
  misc_feature 1..20: note = Target: SCN10A; (-) strand; PAM type: YTN; PAM sequence: TTC
  source 1..20: mol_type = other DNA
ataatggttaacatggagtt

SEQ ID NO: 53654 - DNA, 20 bp, synthetic construct
  misc_feature 1..20: note = Description of Artificial Sequence: Synthetic oligonucleotide
  misc_feature 1..20: note = Target: SCN10A; (-) strand; PAM type: YTN; PAM sequence: TTC
  source 1..20: mol_type = other DNA
attcataatggttaacatgg

SEQ ID NO: 53655 - DNA, 20 bp, synthetic construct
  misc_feature 1..20: note = Description of Artificial Sequence: Synthetic oligonucleotide
  misc_feature 1..20: note = Target: SCN10A; (-) strand; PAM type: YTN; PAM sequence: TTT
  source 1..20: mol_type = other DNA
cattcataatggttaacatg

SEQ ID NO: 53656 - DNA, 20 bp, synthetic construct
  misc_feature 1..20: note = Description of Artificial Sequence: Synthetic oligonucleotide
  misc_feature 1..20: note = Target: SCN10A; (-) strand; PAM type: YTN; PAM sequence: CTG
  source 1..20: mol_type = other DNA
atttcattcataatggttaa

SEQ ID NO: 53657 - DNA, 20 bp, synthetic construct
  misc_feature 1..20: note = Description of Artificial Sequence: Synthetic oligonucleotide
  misc_feature 1..20: note = Target: SCN10A; (-) strand; PAM type: YTN; PAM sequence: TTC
  source 1..20: mol_type = other DNA
aaaaactgatttcattcata

SEQ ID NO: 53658 - DNA, 20 bp, synthetic construct
  misc_feature 1..20: note = Description of Artificial Sequence: Synthetic oligonucleotide
  misc_feature 1..20: note = Target: SCN10A; (-) strand; PAM type: YTN; PAM sequence: CTT
  source 1..20: mol_type = other DNA
caaaaactgatttcattcat

SEQ ID NO: 53659 - DNA, 20 bp, synthetic construct
  misc_feature 1..20: note = Description of Artificial Sequence: Synthetic oligonucleotide
  misc_feature 1..20: note = Target: SCN10A; (-) strand; PAM type: YTN; PAM sequence: TTC
  source 1..20: mol_type = other DNA
aaaaacagtgtatgtgcttc

SEQ ID NO: 53660 - DNA, 20 bp, synthetic construct
  misc_feature 1..20: note = Description of Artificial Sequence: Synthetic oligonucleotide
  misc_feature 1..20: note = Target: SCN10A; (-) strand; PAM type: YTN; PAM sequence: TTT
  source 1..20: mol_type = other DNA
caaaaacagtgtatgtgctt

SEQ ID NO: 53661 - DNA, 20 bp, synthetic construct
  misc_feature 1..20: note = Description of Artificial Sequence: Synthetic oligonucleotide
  misc_feature 1..20: note = Target: SCN10A; (-) strand; PAM type: YTN; PAM sequence: TTT
  source 1..20: mol_type = other DNA
tcaaaaacagtgtatgtgct

SEQ ID NO: 53662 - DNA, 20 bp, synthetic construct
  misc_feature 1..20: note = Description of Artificial Sequence: Synthetic oligonucleotide
  misc_feature 1..20: note = Target: SCN10A; (-) strand; PAM type: YTN; PAM sequence: TTA
  source 1..20: mol_type = other DNA
tgttttcaaaaacagtgtat

SEQ ID NO: 53663 - DNA, 20 bp, synthetic construct
  misc_feature 1..20: note = Description of Artificial Sequence: Synthetic oligonucleotide
  misc_feature 1..20: note = Target: SCN10A; (-) strand; PAM type: YTN; PAM sequence: TTT
  source 1..20: mol_type = other DNA
atgttttcaaaaacagtgta

SEQ ID NO: 53664 - DNA, 20 bp, synthetic construct
  misc_feature 1..20: note = Description of Artificial Sequence: Synthetic oligonucleotide
  misc_feature 1..20: note = Target: SCN10A; (-) strand; PAM type: YTN; PAM sequence: TTT
  source 1..20: mol_type = other DNA
tatgttttcaaaaacagtgt

SEQ ID NO: 53665 - DNA, 20 bp, synthetic construct
  misc_feature 1..20: note = Description of Artificial Sequence: Synthetic oligonucleotide
  misc_feature 1..20: note = Target: SCN10A; (-) strand; PAM type: YTN; PAM sequence: TTT
  source 1..20: mol_type = other DNA
ttatgttttcaaaaacagtg

SEQ ID NO: 53666 - DNA, 20 bp, synthetic construct
  misc_feature 1..20: note = Description of Artificial Sequence: Synthetic oligonucleotide
  misc_feature 1..20: note = Target: SCN10A; (-) strand; PAM type: YTN; PAM sequence: CTT
  source 1..20: mol_type = other DNA
tttatgttttcaaaaacagt

SEQ ID NO: 53667 - DNA, 20 bp, synthetic construct
  misc_feature 1..20: note = Description of Artificial Sequence: Synthetic oligonucleotide
  misc_feature 1..20: note = Target: SCN10A; (-) strand; PAM type: YTN; PAM sequence: CTA
  source 1..20: mol_type = other DNA
actttttatgttttcaaaaa

SEQ ID NO: 53668 - DNA, 20 bp, synthetic construct
  misc_feature 1..20: note = Description of Artificial Sequence: Synthetic oligonucleotide
  misc_feature 1..20: note = Target: SCN10A; (-) strand; PAM type: YTN; PAM sequence: TTC
  source 1..20: mol_type = other DNA
taactttttatgttttcaaa

SEQ ID NO: 53669 - DNA, 20 bp, synthetic construct
  misc_feature 1..20: note = Description of Artificial Sequence: Synthetic oligonucleotide
  misc_feature 1..20: note = Target: SCN10A; (-) strand; PAM type: YTN; PAM sequence: TTT
  source 1..20: mol_type = other DNA
ctaactttttatgttttcaa

SEQ ID NO: 53670 - DNA, 20 bp, synthetic construct
  misc_feature 1..20: note = Description of Artificial Sequence: Synthetic oligonucleotide
  misc_feature 1..20: note = Target: SCN10A; (-) strand; PAM type: YTN; PAM sequence: TTC
  source 1..20: mol_type = other DNA
atagaatttctaacttttta

SEQ ID NO: 53671 - DNA, 20 bp, synthetic construct
  misc_feature 1..20: note = Description of Artificial Sequence: Synthetic oligonucleotide
  misc_feature 1..20: note = Target: SCN10A; (-) strand; PAM type: YTN; PAM sequence: TTA
  source 1..20: mol_type = other DNA
tattcatagaatttctaact

SEQ ID NO: 53672 - DNA, 20 bp, synthetic construct
  misc_feature 1..20: note = Description of Artificial Sequence: Synthetic oligonucleotide
  misc_feature 1..20: note = Target: SCN10A; (-) strand; PAM type: YTN; PAM sequence: TTA
  source 1..20: mol_type = other DNA
ttatattcatagaatttcta

SEQ ID NO: 53673 - DNA, 20 bp, synthetic construct
  misc_feature 1..20: note = Description of Artificial Sequence: Synthetic oligonucleotide
  misc_feature 1..20: note = Target: SCN10A; (-) strand; PAM type: YTN; PAM sequence: TTA
  source 1..20: mol_type = other DNA
attattatattcatagaatt

SEQ ID NO: 53674 - DNA, 20 bp, synthetic construct
  misc_feature 1..20: note = Description of Artificial Sequence: Synthetic oligonucleotide
  misc_feature 1..20: note = Target: SCN10A; (-) strand; PAM type: YTN; PAM sequence: CTA
  source 1..20: mol_type = other DNA
acatgtaagattaattatta

SEQ ID NO: 53675 - DNA, 20 bp, synthetic construct
  misc_feature 1..20: note = Description of Artificial Sequence: Synthetic oligonucleotide
  misc_feature 1..20: note = Target: SCN10A; (-) strand; PAM type: YTN; PAM sequence: TTA
  source 1..20: mol_type = other DNA
aaatctaacatgtaagatta

SEQ ID NO: 53676 - DNA, 20 bp, synthetic construct
  misc_feature 1..20: note = Description of Artificial Sequence: Synthetic oligonucleotide
  misc_feature 1..20: note = Target: SCN10A; (-) strand; PAM type: YTN; PAM sequence: TTT
  source 1..20: mol_type = other DNA
aaaatctaacatgtaagatt

SEQ ID NO: 53677 - DNA, 20 bp, synthetic construct
  misc_feature 1..20: note = Description of Artificial Sequence: Synthetic oligonucleotide
  misc_feature 1..20: note = Target: SCN10A; (-) strand; PAM type: YTN; PAM sequence: TTT
  source 1..20: mol_type = other DNA
taaaatctaacatgtaagat

SEQ ID NO: 53678 - DNA, 20 bp, synthetic construct
  misc_feature 1..20: note = Description of Artificial Sequence: Synthetic oligonucleotide
  misc_feature 1..20: note = Target: SCN10A; (-) strand; PAM type: YTN; PAM sequence: CTA
  source 1..20: mol_type = other DNA
tgcacatataattttaaaat

SEQ ID NO: 53679 - DNA, 20 bp, synthetic construct
  misc_feature 1..20: note = Description of Artificial Sequence: Synthetic oligonucleotide
  misc_feature 1..20: note = Target: SCN10A; (-) strand; PAM type: YTN; PAM sequence: CTC
  source 1..20: mol_type = other DNA
tatgcacatataattttaaa

SEQ ID NO: 53680 - DNA, 20 bp, synthetic construct
  misc_feature 1..20: note = Description of Artificial Sequence: Synthetic oligonucleotide
  misc_feature 1..20: note = Target: SCN10A; (-) strand; PAM type: YTN; PAM sequence: CTA
  source 1..20: mol_type = other DNA
aggatctctatgcacatata

SEQ ID NO: 53681 - DNA, 20 bp, synthetic construct
  misc_feature 1..20: note = Description of Artificial Sequence: Synthetic oligonucleotide
  misc_feature 1..20: note = Target: SCN10A; (-) strand; PAM type: YTN; PAM sequence: CTC
  source 1..20: mol_type = other DNA
aacaagtgatctaaggatct

SEQ ID NO: 53682 - DNA, 20 bp, synthetic construct
  misc_feature 1..20: note = Description of Artificial Sequence: Synthetic oligonucleotide
  misc_feature 1..20: note = Target: SCN10A; (-) strand; PAM type: YTN; PAM sequence: TTC
  source 1..20: mol_type = other DNA
tcaacaagtgatctaaggat

SEQ ID NO: 53683 - DNA, 20 bp, synthetic construct
  misc_feature 1..20: note = Description of Artificial Sequence: Synthetic oligonucleotide
  misc_feature 1..20: note = Target: SCN10A; (-) strand; PAM type: YTN; PAM sequence: TTT
  source 1..20: mol_type = other DNA
ctcaacaagtgatctaagga

SEQ ID NO: 53684 - DNA, 20 bp, synthetic construct
  misc_feature 1..20: note = Description of Artificial Sequence: Synthetic oligonucleotide
  misc_feature 1..20: note = Target: SCN10A; (-) strand; PAM type: YTN; PAM sequence: CTA
  source 1..20: mol_type = other DNA
caatgtttctcaacaagtga

SEQ ID NO: 53685 - DNA, 20 bp, synthetic construct
  misc_feature 1..20: note = Description of Artificial Sequence: Synthetic oligonucleotide
  misc_feature 1..20: note = Target: SCN10A; (-) strand; PAM type: YTN; PAM sequence: CTC
  source 1..20: mol_type = other DNA
ctacaatgtttctcaacaag

SEQ ID NO: 53686 - DNA, 20 bp, synthetic construct
  misc_feature 1..20: note = Description of Artificial Sequence: Synthetic oligonucleotide
  misc_feature 1..20: note = Target: SCN10A; (-) strand; PAM type: YTN; PAM sequence: CTC
  source 1..20: mol_type = other DNA
catctcctacaatgtttctc

SEQ ID NO: 53687 - DNA, 20 bp, synthetic construct
  misc_feature 1..20: note = Description of Artificial Sequence: Synthetic oligonucleotide
  misc_feature 1..20: note = Target: SCN10A; (-) strand; PAM type: YTN; PAM sequence: CTC
  source 1..20: mol_type = other DNA
tccatctcctacaatgtttc

SEQ ID NO: 53688 - DNA, 20 bp, synthetic construct
  misc_feature 1..20: note = Description of Artificial Sequence: Synthetic oligonucleotide
  misc_feature 1..20: note = Target: SCN10A; (-) strand; PAM type: YTN; PAM sequence: CTC
  source 1..20: mol_type = other DNA
tctccatctcctacaatgtt

SEQ ID NO: 53689 - DNA, 20 bp, synthetic construct
  misc_feature 1..20: note = Description of Artificial Sequence: Synthetic oligonucleotide
  misc_feature 1..20: note = Target: SCN10A; (-) strand; PAM type: YTN; PAM sequence: TTC
  source 1..20: mol_type = other DNA
atctctctccatctcctaca

SEQ ID NO: 53690 - DNA, 20 bp, synthetic construct
  misc_feature 1..20: note = Description of Artificial Sequence: Synthetic oligonucleotide
  misc_feature 1..20: note = Target: SCN10A; (-) strand; PAM type: YTN; PAM sequence: TTA
  source 1..20: mol_type = other DNA
gcagagcaattcatctctct

SEQ ID NO: 53691 - DNA, 20 bp, synthetic construct
  misc_feature 1..20: note = Description of Artificial Sequence: Synthetic oligonucleotide
  misc_feature 1..20: note = Target: SCN10A; (-) strand; PAM type: YTN; PAM sequence: TTT
  source 1..20: mol_type = other DNA
agcagagcaattcatctctc

SEQ ID NO: 53692 - DNA, 20 bp, synthetic construct
  misc_feature 1..20: note = Description of Artificial Sequence: Synthetic oligonucleotide
  misc_feature 1..20: note = Target: SCN10A; (-) strand; PAM type: YTN; PAM sequence: TTG
  source 1..20: mol_type = other DNA
tttagcagagcaattcatct

SEQ ID NO: 53693 - DNA, 20 bp, synthetic construct
  misc_feature 1..20: note = Description of Artificial Sequence: Synthetic oligonucleotide
  misc_feature 1..20: note = Target: SCN10A; (-) strand; PAM type: YTN; PAM sequence: TTT
  source 1..20: mol_type = other DNA
gtttagcagagcaattcatc

SEQ ID NO: 53694 - DNA, 20 bp, synthetic construct
  misc_feature 1..20: note = Description of Artificial Sequence: Synthetic oligonucleotide
  misc_feature 1..20: note = Target: SCN10A; (-) strand; PAM type: YTN; PAM sequence: CTT
  source 1..20: mol_type = other DNA
tgtttagcagagcaattcat

SEQ ID NO: 53695 - DNA, 20 bp, synthetic construct
  misc_feature 1..20: note = Description of Artificial Sequence: Synthetic oligonucleotide
  misc_feature 1..20: note = Target: SCN10A; (-) strand; PAM type: YTN; PAM sequence: TTA
  source 1..20: mol_type = other DNA
ctttgtttagcagagcaatt

SEQ ID NO: 53696 - DNA, 20 bp, synthetic construct
  misc_feature 1..20: note = Description of Artificial Sequence: Synthetic oligonucleotide
  misc_feature 1..20: note = Target: SCN10A; (-) strand; PAM type: YTN; PAM sequence: CTT
  source 1..20: mol_type = other DNA
actttgtttagcagagcaat

SEQ ID NO: 53697 - DNA, 20 bp, synthetic construct
  misc_feature 1..20: note = Description of Artificial Sequence: Synthetic oligonucleotide
  misc_feature 1..20: note = Target: SCN10A; (-) strand; PAM type: YTN; PAM sequence: TTC
  source 1..20: mol_type = other DNA
ttactttgtttagcagagca

SEQ ID NO: 53698 - DNA, 20 bp, synthetic construct
  misc_feature 1..20: note = Description of Artificial Sequence: Synthetic oligonucleotide
  misc_feature 1..20: note = Target: SCN10A; (-) strand; PAM type: YTN; PAM sequence: TTA
  source 1..20: mol_type = other DNA
ttcttactttgtttagcaga

SEQ ID NO: 53699 - DNA, 20 bp, synthetic construct
  misc_feature 1..20: note = Description of Artificial Sequence: Synthetic oligonucleotide
  misc_feature 1..20: note = Target: SCN10A; (-) strand; PAM type: YTN; PAM sequence: CTT
  source 1..20: mol_type = other DNA
attcttactttgtttagcag

SEQ ID NO: 53700 - DNA, 20 bp, synthetic construct
  misc_feature 1..20: note = Description of Artificial Sequence: Synthetic oligonucleotide
  misc_feature 1..20: note = Target: SCN10A; (-) strand; PAM type: YTN; PAM sequence: CTC
  source 1..20: mol_type = other DNA
caacttattcttactttgtt

SEQ ID NO: 53701 - DNA, 20 bp, synthetic construct
  misc_feature 1..20: note = Description of Artificial Sequence: Synthetic oligonucleotide
  misc_feature 1..20: note = Target: SCN10A; (-) strand; PAM type: YTN; PAM sequence: CTG
  source 1..20: mol_type = other DNA
ggaactccaacttattctta

SEQ ID NO: 53702 - DNA, 20 bp, synthetic construct
  misc_feature 1..20: note = Description of Artificial Sequence: Synthetic oligonucleotide
  misc_feature 1..20: note = Target: SCN10A; (-) strand; PAM type: YTN; PAM sequence: TTG
  source 1..20: mol_type = other DNA
tccctgggaactccaactta

SEQ ID NO: 53703 - DNA, 20 bp, synthetic construct
  misc_feature 1..20: note = Description of Artificial Sequence: Synthetic oligonucleotide
  misc_feature 1..20: note = Target: SCN10A; (-) strand; PAM type: YTN; PAM sequence: CTC
  source 1..20: mol_type = other DNA
aattgtccctgggaactcca

SEQ ID NO: 53704 - DNA, 20 bp, synthetic construct
  misc_feature 1..20: note = Description of Artificial Sequence: Synthetic oligonucleotide
  misc_feature 1..20: note = Target: SCN10A; (-) strand; PAM type: YTN; PAM sequence: CTC
  source 1..20: mol_type = other DNA
ctcaattgtccctgggaact

SEQ ID NO: 53705 - DNA, 20 bp, synthetic construct
  misc_feature 1..20: note = Description of Artificial Sequence: Synthetic oligonucleotide
  misc_feature 1..20: note = Target: SCN10A; (-) strand; PAM type: YTN; PAM sequence: CTC
  source 1..20: mol_type = other DNA
tcctcaattgtccctgggaa

SEQ ID NO: 53706 - DNA, 20 bp, synthetic construct
  misc_feature 1..20: note = Description of Artificial Sequence: Synthetic oligonucleotide
  misc_feature 1..20: note = Target: SCN10A; (-) strand; PAM type: YTN; PAM sequence: CTC
  source 1..20: mol_type = other DNA
tctcctcaattgtccctggg

SEQ ID NO: 53707 - DNA, 20 bp, synthetic construct
  misc_feature 1..20: note = Description of Artificial Sequence: Synthetic oligonucleotide
  misc_feature 1..20: note = Target: SCN10A; (-) strand; PAM type: YTN; PAM sequence: TTC
  source 1..20: mol_type = other DNA
caactctctcctcaattgtc

SEQ ID NO: 53708 - DNA, 20 bp, synthetic construct
  misc_feature 1..20: note = Description of Artificial Sequence: Synthetic oligonucleotide
  misc_feature 1..20: note = Target: SCN10A; (-) strand; PAM type: YTN; PAM sequence: TTG
  source 1..20: mol_type = other DNA
ggatgttccaactctctcct

SEQ ID NO: 53709 - DNA, 20 bp, synthetic construct
  misc_feature 1..20: note = Description of Artificial Sequence: Synthetic oligonucleotide
  misc_feature 1..20: note = Target: SCN10A; (-) strand; PAM type: YTN; PAM sequence: TTT
  source 1..20: mol_type = other DNA
gggatgttccaactctctcc

SEQ ID NO: 53710 - DNA, 20 bp, synthetic construct
  misc_feature 1..20: note = Description of Artificial Sequence: Synthetic oligonucleotide
  misc_feature 1..20: note = Target: SCN10A; (-) strand; PAM type: YTN; PAM sequence: CTT
  source 1..20: mol_type = other DNA
tgggatgttccaactctctc

SEQ ID NO: 53711 - DNA, 20 bp, synthetic construct
  misc_feature 1..20: note = Description of Artificial Sequence: Synthetic oligonucleotide
  misc_feature 1..20: note = Target: SCN10A; (-) strand; PAM type: YTN; PAM sequence: CTG
  source 1..20: mol_type = other DNA
tccctttgggatgttccaac

SEQ ID NO: 53712 - DNA, 20 bp, synthetic construct
  misc_feature 1..20: note = Description of Artificial Sequence: Synthetic oligonucleotide
  misc_feature 1..20: note = Target: SCN10A; (-) strand; PAM type: YTN; PAM sequence: TTC
  source 1..20: mol_type = other DNA
ataaactgtccctttgggat

SEQ ID NO: 53713 - DNA, 20 bp, synthetic construct
  misc_feature 1..20: note = Description of Artificial Sequence: Synthetic oligonucleotide
  misc_feature 1..20: note = Target: SCN10A; (-) strand; PAM type: YTN; PAM sequence: TTT
  source 1..20: mol_type = other DNA
cataaactgtccctttggga

SEQ ID NO: 53714 - DNA, 20 bp, synthetic construct
  misc_feature 1..20: note = Description of Artificial Sequence: Synthetic oligonucleotide
  misc_feature 1..20: note = Target: SCN10A; (-) strand; PAM type: YTN; PAM sequence: CTT
  source 1..20: mol_type = other DNA
tcataaactgtccctttggg

SEQ ID NO: 53715 - DNA, 20 bp, synthetic construct
  misc_feature 1..20: note = Description of Artificial Sequence: Synthetic oligonucleotide
  misc_feature 1..20: note = Target: SCN10A; (-) strand; PAM type: YTN; PAM sequence: TTC
  source 1..20: mol_type = other DNA
tttcataaactgtccctttg

SEQ ID NO: 53716 - DNA, 20 bp, synthetic construct
  misc_feature 1..20: note = Description of Artificial Sequence: Synthetic oligonucleotide
  misc_feature 1..20: note = Target: SCN10A; (-) strand; PAM type: YTN; PAM sequence: CTT
  source 1..20: mol_type = other DNA
ctttcataaactgtcccttt

SEQ ID NO: 53717 - DNA, 20 bp, synthetic construct
  misc_feature 1..20: note = Description of Artificial Sequence: Synthetic oligonucleotide
  misc_feature 1..20: note = Target: SCN10A; (-) strand; PAM type: YTN; PAM sequence: CTG
  source 1..20: mol_type = other DNA
taatcttctttcataaactg

SEQ ID NO: 53718 - DNA, 20 bp, synthetic construct
  misc_feature 1..20: note = Description of Artificial Sequence: Synthetic oligonucleotide
  misc_feature 1..20: note = Target: SCN10A; (-) strand; PAM type: YTN; PAM sequence: CTG
  source 1..20: mol_type = other DNA
gcctgtaatcttctttcata

SEQ ID NO: 53719 - DNA, 20 bp, synthetic construct
  misc_feature 1..20: note = Description of Artificial Sequence: Synthetic oligonucleotide
  misc_feature 1..20: note = Target: SCN10A; (-) strand; PAM type: YTN; PAM sequence: CTA
  source 1..20: mol_type = other DNA
aatgaggctggcctgtaatc

SEQ ID NO: 53720 - DNA, 20 bp, synthetic construct
  misc_feature 1..20: note = Description of Artificial Sequence: Synthetic oligonucleotide
  misc_feature 1..20: note = Target: SCN10A; (-) strand; PAM type: YTN; PAM sequence: TTG
  source 1..20: mol_type = other DNA
ctaaatgaggctggcctgta

SEQ ID NO: 53721 - DNA, 20 bp, synthetic construct
  misc_feature 1..20: note = Description of Artificial Sequence: Synthetic oligonucleotide
  misc_feature 1..20: note = Target: SCN10A; (-) strand; PAM type: YTN; PAM sequence: TTT
  source 1..20: mol_type = other DNA
gctaaatgaggctggcctgt

SEQ ID NO: 53722 - DNA, 20 bp, synthetic construct
  misc_feature 1..20: note = Description of Artificial Sequence: Synthetic oligonucleotide
  misc_feature 1..20: note = Target: SCN10A; (-) strand; PAM type: YTN; PAM sequence: TTT
  source 1..20: mol_type = other DNA
tgctaaatgaggctggcctg

SEQ ID NO: 53723 - DNA, 20 bp, synthetic construct
  misc_feature 1..20: note = Description of Artificial Sequence: Synthetic oligonucleotide
  misc_feature 1..20: note = Target: SCN10A; (-) strand; PAM type: YTN; PAM sequence: CTA
  source 1..20: mol_type = other DNA
ttttgctaaatgaggctggc

SEQ ID NO: 53724 - DNA, 20 bp, synthetic construct
  misc_feature 1..20: note = Description of Artificial Sequence: Synthetic oligonucleotide
  misc_feature 1..20: note = Target: SCN10A; (-) strand; PAM type: YTN; PAM sequence: TTA
  source 1..20: mol_type = other DNA
tctattttgctaaatgaggc

SEQ ID NO: 53725 - DNA, 20 bp, synthetic construct
  misc_feature 1..20: note = Description of Artificial Sequence: Synthetic oligonucleotide
  misc_feature 1..20: note = Target: SCN10A; (-) strand; PAM type: YTN; PAM sequence: TTT
  source 1..20: mol_type = other DNA
atctattttgctaaatgagg

SEQ ID NO: 53726 - DNA, 20 bp, synthetic construct
  misc_feature 1..20: note = Description of Artificial Sequence: Synthetic oligonucleotide
  misc_feature 1..20: note = Target: SCN10A; (-) strand; PAM type: YTN; PAM sequence: TTT
  source 1..20: mol_type = other DNA
tatctattttgctaaatgag

SEQ ID NO: 53727 - DNA, 20 bp, synthetic construct
  misc_feature 1..20: note = Description of Artificial Sequence: Synthetic oligonucleotide
  misc_feature 1..20: note = Target: SCN10A; (-) strand; PAM type: YTN; PAM sequence: TTC
  source 1..20: mol_type = other DNA
attttatctattttgctaaa

SEQ ID NO: 53728 - DNA, 20 bp, synthetic construct
  misc_feature 1..20: note = Description of Artificial Sequence: Synthetic oligonucleotide
  misc_feature 1..20: note = Target: SCN10A; (-) strand; PAM type: YTN; PAM sequence: TTT
  source 1..20: mol_type = other DNA
cattttatctattttgctaa

SEQ ID NO: 53729 - DNA, 20 bp, synthetic construct
  misc_feature 1..20: note = Description of Artificial Sequence: Synthetic oligonucleotide
  misc_feature 1..20: note = Target: SCN10A; (-) strand; PAM type: YTN; PAM sequence: TTA
  source 1..20: mol_type = other DNA
ggtgtatttcattttatcta

SEQ ID NO: 53730 - DNA, 20 bp, synthetic construct
  misc_feature 1..20: note = Description of Artificial Sequence: Synthetic oligonucleotide
  misc_feature 1..20: note = Target: SCN10A; (-) strand; PAM type: YTN; PAM sequence: TTC
  source 1..20: mol_type = other DNA
aattaggtgtatttcatttt

SEQ ID NO: 53731 - DNA, 20 bp, synthetic construct
  misc_feature 1..20: note = Description of Artificial Sequence: Synthetic oligonucleotide
  misc_feature 1..20: note = Target: SCN10A; (-) strand; PAM type: YTN; PAM sequence: CTG
  source 1..20: mol_type = other DNA
gattcaattaggtgtatttc

SEQ ID NO: 53732 - DNA, 20 bp, synthetic construct
  misc_feature 1..20: note = Description of Artificial Sequence: Synthetic oligonucleotide
  misc_feature 1..20: note = Target: SCN10A; (-) strand; PAM type: YTN; PAM sequence: TTG
  source 1..20: mol_type = other DNA
ctggattcaattaggtgtat

SEQ ID NO: 53733 - DNA, 20 bp, synthetic construct
  misc_feature 1..20: note = Description of Artificial Sequence: Synthetic oligonucleotide
  misc_feature 1..20: note = Target: SCN10A; (-) strand; PAM type: YTN; PAM sequence: TTT
  source 1..20: mol_type = other DNA
gctggattcaattaggtgta

SEQ ID NO: 53734 - DNA, 20 bp, synthetic construct
  misc_feature 1..20: note = Description of Artificial Sequence: Synthetic oligonucleotide
  misc_feature 1..20: note = Target: SCN10A; (-) strand; PAM type: YTN; PAM sequence: TTT
  source 1..20: mol_type = other DNA
tgctggattcaattaggtgt

SEQ ID NO: 53735 - DNA, 20 bp, synthetic construct
  misc_feature 1..20: note = Description of Artificial Sequence: Synthetic oligonucleotide
  misc_feature 1..20: note = Target: SCN10A; (-) strand; PAM type: YTN; PAM sequence: CTG
  source 1..20: mol_type = other DNA
atcattttgctggattcaat

SEQ ID NO: 53736 - DNA, 20 bp, synthetic construct
  misc_feature 1..20: note = Description of Artificial Sequence: Synthetic oligonucleotide
  misc_feature 1..20: note = Target: SCN10A; (-) strand; PAM type: YTN; PAM sequence: TTC
  source 1..20: mol_type = other DNA
cagctgatcattttgctgga

SEQ ID NO: 53737 - DNA, 20 bp, synthetic construct
  misc_feature 1..20: note = Description of Artificial Sequence: Synthetic oligonucleotide
  misc_feature 1..20: note = Target: SCN10A; (-) strand; PAM type: YTN; PAM sequence: TTA
  source 1..20: mol_type = other DNA
atggttccagctgatcattt

SEQ ID NO: 53738 - DNA, 20 bp, synthetic construct
  misc_feature 1..20: note = Description of Artificial Sequence: Synthetic oligonucleotide
  misc_feature 1..20: note = Target: SCN10A; (-) strand; PAM type: YTN; PAM sequence: TTT
  source 1..20: mol_type = other DNA
aatggttccagctgatcatt

SEQ ID NO: 53739 - DNA, 20 bp, synthetic construct
  misc_feature 1..20: note = Description of Artificial Sequence: Synthetic oligonucleotide
  misc_feature 1..20: note = Target: SCN10A; (-) strand; PAM type: YTN; PAM sequence: TTT
  source 1..20: mol_type = other DNA
taatggttccagctgatcat

SEQ ID NO: 53740 - DNA, 20 bp, synthetic construct
  misc_feature 1..20: note = Description of Artificial Sequence: Synthetic oligonucleotide
  misc_feature 1..20: note = Target: SCN10A; (-) strand; PAM type: YTN; PAM sequence: TTT
  source 1..20: mol_type = other DNA
ttaatggttccagctgatca

SEQ ID NO: 53741 - DNA, 20 bp, synthetic construct
  misc_feature 1..20: note = Description of Artificial Sequence: Synthetic oligonucleotide
  misc_feature 1..20: note = Target: SCN10A; (-) strand; PAM type: YTN; PAM sequence: CTA
  source 1..20: mol_type = other DNA
tttttaatggttccagctga

SEQ ID NO: 53742 - DNA, 20 bp, synthetic construct
  misc_feature 1..20: note = Description of Artificial Sequence: Synthetic oligonucleotide
  misc_feature 1..20: note = Target: SCN10A; (-) strand; PAM type: YTN; PAM sequence: TTA
  source 1..20: mol_type = other DNA
gtctatttttaatggttcca

SEQ ID NO: 53743 - DNA, 20 bp, synthetic construct
  misc_feature 1..20: note = Description of Artificial Sequence: Synthetic oligonucleotide
  misc_feature 1..20: note = Target: SCN10A; (-) strand; PAM type: YTN; PAM sequence: TTG
  source 1..20: mol_type = other DNA
ttagtctatttttaatggtt

SEQ ID NO: 53744 - DNA, 20 bp, synthetic construct
  misc_feature 1..20: note = Description of Artificial Sequence: Synthetic oligonucleotide
  misc_feature 1..20: note = Target: SCN10A; (-) strand; PAM type: YTN; PAM sequence: TTT
  source 1..20: mol_type = other DNA
gttagtctatttttaatggt

SEQ ID NO: 53745 - DNA, 20 bp, synthetic construct
  misc_feature 1..20: note = Description of Artificial Sequence: Synthetic oligonucleotide
  misc_feature 1..20: note = Target: SCN10A; (-) strand; PAM type: YTN; PAM sequence: CTA
  source 1..20: mol_type = other DNA
acaggtttgttagtctattt

SEQ ID NO: 53746 - DNA, 20 bp, synthetic construct
  misc_feature 1..20: note = Description of Artificial Sequence: Synthetic oligonucleotide
  misc_feature 1..20: note = Target: SCN10A; (-) strand; PAM type: YTN; PAM sequence: CTG
  source 1..20: mol_type = other DNA
taaactaacaggtttgttag

SEQ ID NO: 53747 - DNA, 20 bp, synthetic construct
  misc_feature 1..20: note = Description of Artificial Sequence: Synthetic oligonucleotide
  misc_feature 1..20: note = Target: SCN10A; (-) strand; PAM type: YTN; PAM sequence: TTA
  source 1..20: mol_type = other DNA
gtatagtaaatctgtaaact

SEQ ID NO: 53748 - DNA, 20 bp, synthetic construct
  misc_feature 1..20: note = Description of Artificial Sequence: Synthetic oligonucleotide
  misc_feature 1..20: note = Target: SCN10A; (-) strand; PAM type: YTN; PAM sequence: CTG
  source 1..20: mol_type = other DNA
ttagtatagtaaatctgtaa

SEQ ID NO: 53749 - DNA, 20 bp, synthetic construct
  misc_feature 1..20: note = Description of Artificial Sequence: Synthetic oligonucleotide
  misc_feature 1..20: note = Target: SCN10A; (-) strand; PAM type: YTN; PAM sequence: TTC
  source 1..20: mol_type = other DNA
atctgttagtatagtaaatc

SEQ ID NO: 53750 - DNA, 20 bp, synthetic construct
  misc_feature 1..20: note = Description of Artificial Sequence: Synthetic oligonucleotide
  misc_feature 1..20: note = Target: SCN10A; (-) strand; PAM type: YTN; PAM sequence: TTT
  source 1..20: mol_type = other DNA
catctgttagtatagtaaat

SEQ ID NO: 53751 - DNA, 20 bp, synthetic construct
  misc_feature 1..20: note = Description of Artificial Sequence: Synthetic oligonucleotide
  misc_feature 1..20: note = Target: SCN10A; (-) strand; PAM type: YTN; PAM sequence: CTT
  source 1..20: mol_type = other DNA
tcatctgttagtatagtaaa

SEQ ID NO: 53752 - DNA, 20 bp, synthetic construct
  misc_feature 1..20: note = Description of Artificial Sequence: Synthetic oligonucleotide
  misc_feature 1..20: note = Target: SCN10A; (-) strand; PAM type: YTN; PAM sequence: TTA
  source 1..20: mol_type = other DNA
tcatatagtctttcatctgt

SEQ ID NO: 53753 - DNA, 20 bp, synthetic construct
  misc_feature 1..20: note = Description of Artificial Sequence: Synthetic oligonucleotide
  misc_feature 1..20: note = Target: SCN10A; (-) strand; PAM type: YTN; PAM sequence: TTG
  source 1..20: mol_type = other DNA
aggttatcatatagtctttc

SEQ ID NO: 53754 - DNA, 20 bp, synthetic construct
  misc_feature 1..20: note = Description of Artificial Sequence: Synthetic oligonucleotide
  misc_feature 1..20: note = Target: SCN10A; (-) strand; PAM type: YTN; PAM sequence: TTA
  source 1..20: mol_type = other DNA
ttgaggttatcatatagtct

SEQ ID NO: 53755 - DNA, 20 bp, synthetic construct
  misc_feature 1..20: note = Description of Artificial Sequence: Synthetic oligonucleotide
  misc_feature 1..20: note = Target: SCN10A; (-) strand; PAM type: YTN; PAM sequence: TTT
  source 1..20: mol_type = other DNA
attgaggttatcatatagtc

SEQ ID NO: 53756 - DNA, 20 bp, synthetic construct
  misc_feature 1..20: note = Description of Artificial Sequence: Synthetic oligonucleotide
  misc_feature 1..20: note = Target: SCN10A; (-) strand; PAM type: YTN; PAM sequence: TTA
  source 1..20: mol_type = other DNA
tatttattgaggttatcata

SEQ ID NO: 53757 - DNA, 20 bp, synthetic construct
  misc_feature 1..20: note = Description of Artificial Sequence: Synthetic oligonucleotide
  misc_feature 1..20: note = Target: SCN10A; (-) strand; PAM type: YTN; PAM sequence: TTT
  source 1..20: mol_type = other DNA
atatttattgaggttatcat

SEQ ID NO: 53758 - DNA, 20 bp, synthetic construct
  misc_feature 1..20: note = Description of Artificial Sequence: Synthetic oligonucleotide
  misc_feature 1..20: note = Target: SCN10A; (-) strand; PAM type: YTN; PAM sequence: TTT
  source 1..20: mol_type = other DNA
tatatttattgaggttatca

SEQ ID NO: 53759 - DNA, 20 bp, synthetic construct
  misc_feature 1..20: note = Description of Artificial Sequence: Synthetic oligonucleotide
  misc_feature 1..20: note = Target: SCN10A; (-) strand; PAM type: YTN; PAM sequence: TTT
  source 1..20: mol_type = other DNA
ttatatttattgaggttatc

SEQ ID NO: 53760 - DNA, 20 bp, synthetic construct
  misc_feature 1..20: note = Description of Artificial Sequence: Synthetic oligonucleotide
  misc_feature 1..20: note = Target: SCN10A; (-) strand; PAM type: YTN; PAM sequence: CTA
  source 1..20: mol_type = other DNA
tcagtatttttatatttatt

SEQ ID NO: 53761 - DNA, 20 bp, synthetic construct
  misc_feature 1..20: note = Description of Artificial Sequence: Synthetic oligonucleotide
  misc_feature 1..20: note = Target: SCN10A; (-) strand; PAM type: YTN; PAM sequence: TTC
  source 1..20: mol_type = other DNA
tatcagtatttttatattta

SEQ ID NO: 53762 - DNA, 20 bp, synthetic construct
  misc_feature 1..20: note = Description of Artificial Sequence: Synthetic oligonucleotide
  misc_feature 1..20: note = Target: SCN10A; (-) strand; PAM type: YTN; PAM sequence: CTT
  source 1..20: mol_type = other DNA
ctatcagtatttttatattt

SEQ ID NO: 53763 - DNA, 20 bp, synthetic construct
  misc_feature 1..20: note = Description of Artificial Sequence: Synthetic oligonucleotide
  misc_feature 1..20: note = Target: SCN10A; (-) strand; PAM type: YTN; PAM sequence: TTG
  source 1..20: mol_type = other DNA
gcttctatcagtatttttat

SEQ ID NO: 53764 - DNA, 20 bp, synthetic construct
  misc_feature 1..20: note = Description of Artificial Sequence: Synthetic oligonucleotide
  misc_feature 1..20: note = Target: SCN10A; (-) strand; PAM type: YTN; PAM sequence: TTC
  source 1..20: mol_type = other DNA
atcatgaatgggtgttggct

SEQ ID NO: 53765 - DNA, 20 bp, synthetic construct
  misc_feature 1..20: note = Description of Artificial Sequence: Synthetic oligonucleotide
  misc_feature 1..20: note = Target: SCN10A; (-) strand; PAM type: YTN; PAM sequence: TTT
  source 1..20: mol_type = other DNA
catcatgaatgggtgttggc

SEQ ID NO: 53766 - DNA, 20 bp, synthetic construct
  misc_feature 1..20: note = Description of Artificial Sequence: Synthetic oligonucleotide
  misc_feature 1..20: note = Target: SCN10A; (-) strand; PAM type: YTN; PAM sequence: CTT
  source 1..20: mol_type = other DNA
tcatcatgaatgggtgttgg

SEQ ID NO: 53767 - DNA, 20 bp, synthetic construct
  misc_feature 1..20: note = Description of Artificial Sequence: Synthetic oligonucleotide
  misc_feature 1..20: note = Target: SCN10A; (-) strand; PAM type: YTN; PAM sequence: TTG
  source 1..20: mol_type = other DNA
agactttcatcatgaatggg

SEQ ID NO: 53768 - DNA, 20 bp, synthetic construct
  misc_feature 1..20: note = Description of Artificial Sequence: Synthetic oligonucleotide
  misc_feature 1..20: note = Target: SCN10A; (-) strand; PAM type: YTN; PAM sequence: TTG
  source 1..20: mol_type = other DNA
ttgagactttcatcatgaat

SEQ ID NO: 53769 - DNA, 20 bp, synthetic construct
  misc_feature 1..20: note = Description of Artificial Sequence: Synthetic oligonucleotide
  misc_feature 1..20: note = Target: SCN10A; (-) strand; PAM type: YTN; PAM sequence: TTT
  source 1..20: mol_type = other DNA
gttgagactttcatcatgaa

SEQ ID NO: 53770 - DNA, 20 bp, synthetic construct
  misc_feature 1..20: note = Description of Artificial Sequence: Synthetic oligonucleotide
  misc_feature 1..20: note = Target: SCN10A; (-) strand; PAM type: YTN; PAM sequence: TTG
  source 1..20: mol_type = other DNA
tttgttgagactttcatcat

SEQ ID NO: 53771 - DNA, 20 bp, synthetic construct
  misc_feature 1..20: note = Description of Artificial Sequence: Synthetic oligonucleotide
  misc_feature 1..20: note = Target: SCN10A; (-) strand; PAM type: YTN; PAM sequence: CTT
  source 1..20: mol_type = other DNA
gtttgttgagactttcatca

SEQ ID NO: 53772 - DNA, 20 bp, synthetic construct
  misc_feature 1..20: note = Description of Artificial Sequence: Synthetic oligonucleotide
  misc_feature 1..20: note = Target: SCN10A; (-) strand; PAM type: YTN; PAM sequence: TTC
  source 1..20: mol_type = other DNA
ttgtttgttgagactttcat

SEQ ID NO: 53773 - DNA, 20 bp, synthetic construct
  misc_feature 1..20: note = Description of Artificial Sequence: Synthetic oligonucleotide
  misc_feature 1..20: note = Target: SCN10A; (-) strand; PAM type: YTN; PAM sequence: TTT
  source 1..20: mol_type = other DNA
cttgtttgttgagactttca

SEQ ID NO: 53774 - DNA, 20 bp, synthetic construct
  misc_feature 1..20: note = Description of Artificial Sequence: Synthetic oligonucleotide
  misc_feature 1..20: note = Target: SCN10A; (-) strand; PAM type: YTN; PAM sequence: TTC
  source 1..20: mol_type = other DNA
catttcttgtttgttgagac

SEQ ID NO: 53775 - DNA, 20 bp, synthetic construct
  misc_feature 1..20: note = Description of Artificial Sequence: Synthetic oligonucleotide
  misc_feature 1..20: note = Target: SCN10A; (-) strand; PAM type: YTN; PAM sequence: TTT
  source 1..20: mol_type = other DNA
ccatttcttgtttgttgaga

SEQ ID NO: 53776 - DNA, 20 bp, synthetic construct
  misc_feature 1..20: note = Description of Artificial Sequence: Synthetic oligonucleotide
  misc_feature 1..20: note = Target: SCN10A; (-) strand; PAM type: YTN; PAM sequence: TTT
  source 1..20: mol_type = other DNA
tccatttcttgtttgttgag

SEQ ID NO: 53777 - DNA, 20 bp, synthetic construct
  misc_feature 1..20: note = Description of Artificial Sequence: Synthetic oligonucleotide
  misc_feature 1..20: note = Target: SCN10A; (-) strand; PAM type: YTN; PAM sequence: TTT
  source 1..20: mol_type = other DNA
ttccatttcttgtttgttga

SEQ ID NO: 53778 - DNA, 20 bp, synthetic construct
  misc_feature 1..20: note = Description of Artificial Sequence: Synthetic oligonucleotide
  misc_feature 1..20: note = Target: SCN10A; (-) strand; PAM type: YTN; PAM sequence: TTT
  source 1..20: mol_type = other DNA
tttccatttcttgtttgttg

SEQ ID NO: 53779 - DNA, 20 bp, synthetic construct
  misc_feature 1..20: note = Description of Artificial Sequence: Synthetic oligonucleotide
  misc_feature 1..20: note = Target: SCN10A; (-) strand; PAM type: YTN; PAM sequence: TTA
  source 1..20: mol_type = other DNA
tatcaattttttccatttct

SEQ ID NO: 53780 - DNA, 20 bp, synthetic construct
  misc_feature 1..20: note = Description of Artificial Sequence: Synthetic oligonucleotide
  misc_feature 1..20: note = Target: SCN10A; (-) strand; PAM type: YTN; PAM sequence: TTT
  source 1..20: mol_type = other DNA
atatcaattttttccatttc

SEQ ID NO: 53781 - DNA, 20 bp, synthetic construct
  misc_feature 1..20: note = Description of Artificial Sequence: Synthetic oligonucleotide
  misc_feature 1..20: note = Target: SCN10A; (-) strand; PAM type: YTN; PAM sequence: TTT
  source 1..20: mol_type = other DNA
tatatcaattttttccattt

SEQ ID NO: 53782 - DNA, 20 bp, synthetic construct
  misc_feature 1..20: note = Description of Artificial Sequence: Synthetic oligonucleotide
  misc_feature 1..20: note = Target: SCN10A; (-) strand; PAM type: YTN; PAM sequence: TTT
  source 1..20: mol_type = other DNA
ttatatcaattttttccatt

SEQ ID NO: 53783 - DNA, 20 bp, synthetic construct
  misc_feature 1..20: note = Description of Artificial Sequence: Synthetic oligonucleotide
  misc_feature 1..20: note = Target: SCN10A; (-) strand; PAM type: YTN; PAM sequence: CTT
  source 1..20: mol_type = other DNA
tttatatcaattttttccat

SEQ ID NO: 53784 - DNA, 20 bp, synthetic construct
  misc_feature 1..20: note = Description of Artificial Sequence: Synthetic oligonucleotide
  misc_feature 1..20: note = Target: SCN10A; (-) strand; PAM type: YTN; PAM sequence: TTA
  source 1..20: mol_type = other DNA
ctttttatatcaattttttc

SEQ ID NO: 53785 - DNA, 20 bp, synthetic construct
  misc_feature 1..20: note = Description of Artificial Sequence: Synthetic oligonucleotide
  misc_feature 1..20: note = Target: SCN10A; (-) strand; PAM type: YTN; PAM sequence: CTC
  source 1..20: mol_type = other DNA
ataattactttttatatcaa

SEQ ID NO: 53786 - DNA, 20 bp, synthetic construct
  misc_feature 1..20: note = Description of Artificial Sequence: Synthetic oligonucleotide
  misc_feature 1..20: note = Target: SCN10A; (-) strand; PAM type: YTN; PAM sequence: TTA
  source 1..20: mol_type = other DNA
tgagagtctcataattactt

SEQ ID NO: 53787 - DNA, 20 bp, synthetic construct
  misc_feature 1..20: note = Description of Artificial Sequence: Synthetic oligonucleotide
  misc_feature 1..20: note = Target: SCN10A; (-) strand; PAM type: YTN; PAM sequence: TTT
  source 1..20: mol_type = other DNA
atgagagtctcataattact

SEQ ID NO: 53788 - DNA, 20 bp, synthetic construct
  misc_feature 1..20: note = Description of Artificial Sequence: Synthetic oligonucleotide
  misc_feature 1..20: note = Target: SCN10A; (-) strand; PAM type: YTN; PAM sequence: TTA
  source 1..20: mol_type = other DNA
tgatgtttatgagagtctca

SEQ ID NO: 53789 - DNA, 20 bp, synthetic construct
  misc_feature 1..20: note = Description of Artificial Sequence: Synthetic oligonucleotide
  misc_feature 1..20: note = Target: SCN10A; (-) strand; PAM type: YTN; PAM sequence: CTA
  source 1..20: mol_type = other DNA
ttatgatgtttatgagagtc

SEQ ID NO: 53790 - DNA, 20 bp, synthetic construct
  misc_feature 1..20: note = Description of Artificial Sequence: Synthetic oligonucleotide
  misc_feature 1..20: note = Target: SCN10A; (-) strand; PAM type: YTN; PAM sequence: TTC
  source 1..20: mol_type = other DNA
actattatgatgtttatgag

SEQ ID NO: 53791 - DNA, 20 bp, synthetic construct
  misc_feature 1..20: note = Description of Artificial Sequence: Synthetic oligonucleotide
  misc_feature 1..20: note = Target: SCN10A; (-) strand; PAM type: YTN; PAM sequence: TTT
  source 1..20: mol_type = other DNA
cactattatgatgtttatga

SEQ ID NO: 53792 - DNA, 20 bp, synthetic construct
  misc_feature 1..20: note = Description of Artificial Sequence: Synthetic oligonucleotide
  misc_feature 1..20: note = Target: SCN10A; (-) strand; PAM type: YTN; PAM sequence: CTA
  source 1..20: mol_type = other DNA
atgtttcactattatgatgt

SEQ ID NO: 53793 - DNA, 20 bp, synthetic construct
  misc_feature 1..20: note = Description of Artificial Sequence: Synthetic oligonucleotide
  misc_feature 1..20: note = Target: SCN10A; (-) strand; PAM type: YTN; PAM sequence: TTC
  source 1..20: mol_type = other DNA
taatgtttcactattatgat

SEQ ID NO: 53794 - DNA, 20 bp, synthetic construct
  misc_feature 1..20: note = Description of Artificial Sequence: Synthetic oligonucleotide
  misc_feature 1..20: note = Target: SCN10A; (-) strand; PAM type: YTN; PAM sequence: CTT
  source 1..20: mol_type = other DNA
ctaatgtttcactattatga

SEQ ID NO: 53795 - DNA, 20 bp, synthetic construct
  misc_feature 1..20: note = Description of Artificial Sequence: Synthetic oligonucleotide
  misc_feature 1..20: note = Target: SCN10A; (-) strand; PAM type: YTN; PAM sequence: TTA
  source 1..20: mol_type = other DNA
aagtgtgtgcttctaatgtt

SEQ ID NO: 53796 - DNA, 20 bp, synthetic construct
  misc_feature 1..20: note = Description of Artificial Sequence: Synthetic oligonucleotide
  misc_feature 1..20: note = Target: SCN10A; (-) strand; PAM type: YTN; PAM sequence: TTT
  source 1..20: mol_type = other DNA
aaagtgtgtgcttctaatgt

SEQ ID NO: 53797 - DNA, 20 bp, synthetic construct
  misc_feature 1..20: note = Description of Artificial Sequence: Synthetic oligonucleotide
  misc_feature 1..20: note = Target: SCN10A; (-) strand; PAM type: YTN; PAM sequence: TTT
  source 1..20: mol_type = other DNA
taaagtgtgtgcttctaatg

SEQ ID NO: 53798 - DNA, 20 bp, synthetic construct
  misc_feature 1..20: note = Description of Artificial Sequence: Synthetic oligonucleotide
  misc_feature 1..20: note = Target: SCN10A; (-) strand; PAM type: YTN; PAM sequence: TTG
  source 1..20: mol_type = other DNA
attttaaagtgtgtgcttct

SEQ ID NO: 53799 - DNA, 20 bp, synthetic construct
  misc_feature 1..20: note = Description of Artificial Sequence: Synthetic oligonucleotide
  misc_feature 1..20: note = Target: SCN10A; (-) strand; PAM type: YTN; PAM sequence: CTT
  source 1..20: mol_type = other DNA
gattttaaagtgtgtgcttc

SEQ ID NO: 53800 - DNA, 20 bp, synthetic construct
  misc_feature 1..20: note = Description of Artificial Sequence: Synthetic oligonucleotide
  misc_feature 1..20: note = Target: SCN10A; (-) strand; PAM type: YTN; PAM sequence: CTC
  source 1..20: mol_type = other DNA
ttgattttaaagtgtgtgct

SEQ ID NO: 53801 - DNA, 20 bp, synthetic construct
  misc_feature 1..20: note = Description of Artificial Sequence: Synthetic oligonucleotide
  misc_feature 1..20: note = Target: SCN10A; (-) strand; PAM type: YTN; PAM sequence: TTG
  source 1..20: mol_type = other DNA
ctcttgattttaaagtgtgt

SEQ ID NO: 53802 - DNA, 20 bp, synthetic construct
  misc_feature 1..20: note = Description of Artificial Sequence: Synthetic oligonucleotide
  misc_feature 1..20: note = Target: SCN10A; (-) strand; PAM type: YTN; PAM sequence: TTT
  source 1..20: mol_type = other DNA
gctcttgattttaaagtgtg

SEQ ID NO: 53803 - DNA, 20 bp, synthetic construct
  misc_feature 1..20: note = Description of Artificial Sequence: Synthetic oligonucleotide
  misc_feature 1..20: note = Target: SCN10A; (-) strand; PAM type: YTN; PAM sequence: TTT
  source 1..20: mol_type = other DNA
tgctcttgattttaaagtgt

SEQ ID NO: 53804 - DNA, 20 bp, synthetic construct
  misc_feature 1..20: note = Description of Artificial Sequence: Synthetic oligonucleotide
  misc_feature 1..20: note = Target: SCN10A; (-) strand; PAM type: YTN; PAM sequence: TTA
  source 1..20: mol_type = other DNA
ttttgctcttgattttaaag

SEQ ID NO: 53805 - DNA, 20 bp, synthetic construct
  misc_feature 1..20: note = Description of Artificial Sequence: Synthetic oligonucleotide
  misc_feature 1..20: note = Target: SCN10A; (-) strand; PAM type: YTN; PAM sequence: TTT
  source 1..20: mol_type = other DNA
attttgctcttgattttaaa

SEQ ID NO: 53806 - DNA, 20 bp, synthetic construct
  misc_feature 1..20: note = Description of Artificial Sequence: Synthetic oligonucleotide
  misc_feature 1..20: note = Target: SCN10A; (-) strand; PAM type: YTN; PAM sequence: CTA
  source 1..20: mol_type = other DNA
tgacagtgagcatatttatt

SEQ ID NO: 53807 - DNA, 20 bp, synthetic construct
  misc_feature 1..20: note = Description of Artificial Sequence: Synthetic oligonucleotide
  misc_feature 1..20: note = Target: SCN10A; (-) strand; PAM type: YTN; PAM sequence: TTC
  source 1..20: mol_type = other DNA
aaagctatgacagtgagcat

SEQ ID NO: 53808 - DNA, 20 bp, synthetic construct
  misc_feature 1..20: note = Description of Artificial Sequence: Synthetic oligonucleotide
  misc_feature 1..20: note = Target: SCN10A; (-) strand; PAM type: YTN; PAM sequence: TTC
  source 1..20: mol_type = other DNA
aacaagatggtaattcaaag

SEQ ID NO: 53809 - DNA, 20 bp, synthetic construct
  misc_feature 1..20: note = Description of Artificial Sequence: Synthetic oligonucleotide
  misc_feature 1..20: note = Target: SCN10A; (-) strand; PAM type: YTN; PAM sequence: CTT
  source 1..20: mol_type = other DNA
caacaagatggtaattcaaa

SEQ ID NO: 53810 - DNA, 20 bp, synthetic construct
  misc_feature 1..20: note = Description of Artificial Sequence: Synthetic oligonucleotide
  misc_feature 1..20: note = Target: SCN10A; (-) strand; PAM type: YTN; PAM sequence: TTG
  source 1..20: mol_type = other DNA
gccgggaccttcaacaagat

SEQ ID NO: 53811 - DNA, 20 bp, synthetic construct
  misc_feature 1..20: note = Description of Artificial Sequence: Synthetic oligonucleotide
  misc_feature 1..20: note = Target: SCN10A; (-) strand; PAM type: YTN; PAM sequence: TTG
  source 1..20: mol_type = other DNA
aattggccgggaccttcaac

SEQ ID NO: 53812 - DNA, 20 bp, synthetic construct
  misc_feature 1..20: note = Description of Artificial Sequence: Synthetic oligonucleotide
  misc_feature 1..20: note = Target: SCN10A; (-) strand; PAM type: YTN; PAM sequence: TTA
  source 1..20: mol_type = other DNA
ttgaattggccgggaccttc

SEQ ID NO: 53813 - DNA, 20 bp, synthetic construct
  misc_feature 1..20: note = Description of Artificial Sequence: Synthetic oligonucleotide
  misc_feature 1..20: note = Target: SCN10A; (-) strand; PAM type: YTN; PAM sequence: CTT
  source 1..20: mol_type = other DNA
attgaattggccgggacctt

SEQ ID NO: 53814 - DNA, 20 bp, synthetic construct
  misc_feature 1..20: note = Description of Artificial Sequence: Synthetic oligonucleotide
  misc_feature 1..20: note = Target: SCN10A; (-) strand; PAM type: YTN; PAM sequence: CTG
  source 1..20: mol_type = other DNA
tcttattgaattggccggga

SEQ ID NO: 53815 - DNA, 20 bp, synthetic construct
  misc_feature 1..20: note = Description of Artificial Sequence: Synthetic oligonucleotide
  misc_feature 1..20: note = Target: SCN10A; (-) strand; PAM type: YTN; PAM sequence: TTC
  source 1..20: mol_type = other DNA
ctgtcttattgaattggccg

SEQ ID NO: 53816 - DNA, 20 bp, synthetic construct
  misc_feature 1..20: note = Description of Artificial Sequence: Synthetic oligonucleotide
  misc_feature 1..20: note = Target: SCN10A; (-) strand; PAM type: YTN; PAM sequence: TTT
  source 1..20: mol_type = other DNA
cctgtcttattgaattggcc

SEQ ID NO: 53817 - DNA, 20 bp, synthetic construct
  misc_feature 1..20: note = Description of Artificial Sequence: Synthetic oligonucleotide
  misc_feature 1..20: note = Target: SCN10A; (-) strand; PAM type: YTN; PAM sequence: TTT
  source 1..20: mol_type = other DNA
tcctgtcttattgaattggc

SEQ ID NO: 53818 - DNA, 20 bp, synthetic construct
  misc_feature 1..20: note = Description of Artificial Sequence: Synthetic oligonucleotide
  misc_feature 1..20: note = Target: SCN10A; (-) strand; PAM type: YTN; PAM sequence: TTT
  source 1..20: mol_type = other DNA
ttcctgtcttattgaattgg

SEQ ID NO: 53819 - DNA, 20 bp, synthetic construct
  misc_feature 1..20: note = Description of Artificial Sequence: Synthetic oligonucleotide
  misc_feature 1..20: note = Target: SCN10A; (-) strand; PAM type: YTN; PAM sequence: TTA
  source 1..20: mol_type = other DNA
tttttcctgtcttattgaat

SEQ ID NO: 53820 - DNA, 20 bp, synthetic construct
  misc_feature 1..20: note = Description of Artificial Sequence: Synthetic oligonucleotide
  misc_feature 1..20: note = Target: SCN10A; (-) strand; PAM type: YTN; PAM sequence: TTT
  source 1..20: mol_type = other DNA
atttttcctgtcttattgaa

SEQ ID NO: 53821 - DNA, 20 bp, synthetic construct
  misc_feature 1..20: note = Description of Artificial Sequence: Synthetic oligonucleotide
  misc_feature 1..20: note = Target: SCN10A; (-) strand; PAM type: YTN; PAM sequence: TTT
  source 1..20: mol_type = other DNA
tatttttcctgtcttattga

SEQ ID NO: 53822 - DNA, 20 bp, synthetic construct
  misc_feature 1..20: note = Description of Artificial Sequence: Synthetic oligonucleotide
  misc_feature 1..20: note = Target: SCN10A; (-) strand; PAM type: YTN; PAM sequence: TTT
  source 1..20: mol_type = other DNA
ttatttttcctgtcttattg

SEQ ID NO: 53823 - DNA, 20 bp, synthetic construct
  misc_feature 1..20: note = Description of Artificial Sequence: Synthetic oligonucleotide
  misc_feature 1..20: note = Target: SCN10A; (-) strand; PAM type: YTN; PAM sequence: TTT
  source 1..20: mol_type = other DNA
tttatttttcctgtcttatt

SEQ ID NO: 53824 - DNA, 20 bp, synthetic construct
  misc_feature 1..20: note = Description of Artificial Sequence: Synthetic oligonucleotide
  misc_feature 1..20: note = Target: SCN10A; (-) strand; PAM type: YTN; PAM sequence: CTT
  source 1..20: mol_type = other DNA
ttttatttttcctgtcttat

SEQ ID NO: 53825 - DNA, 20 bp, synthetic construct
  misc_feature 1..20: note = Description of Artificial Sequence: Synthetic oligonucleotide
  misc_feature 1..20: note = Target: SCN10A; (-) strand; PAM type: YTN; PAM sequence: TTA
  source 1..20: mol_type = other DNA
taccacttttttatttttcc

SEQ ID NO: 53826 - DNA, 20 bp, synthetic construct
  misc_feature 1..20: note = Description of Artificial Sequence: Synthetic oligonucleotide
  misc_feature 1..20: note = Target: SCN10A; (-) strand; PAM type: YTN; PAM sequence: CTT
  source 1..20: mol_type = other DNA
ataccacttttttatttttc

SEQ ID NO: 53827 - DNA, 20 bp, synthetic construct
  misc_feature 1..20: note = Description of Artificial Sequence: Synthetic oligonucleotide
  misc_feature 1..20: note = Target: SCN10A; (-) strand; PAM type: YTN; PAM sequence: TTC
  source 1..20: mol_type = other DNA
ttataccacttttttatttt

SEQ ID NO: 53828 - DNA, 20 bp, synthetic construct
  misc_feature 1..20: note = Description of Artificial Sequence: Synthetic oligonucleotide
  misc_feature 1..20: note = Target: SCN10A; (-) strand; PAM type: YTN; PAM sequence: TTA
  source 1..20: mol_type = other DNA
tgattcttataccacttttt

SEQ ID NO: 53829 - DNA, 20 bp, synthetic construct
  misc_feature 1..20: note = Description of Artificial Sequence: Synthetic oligonucleotide
  misc_feature 1..20: note = Target: SCN10A; (-) strand; PAM type: YTN; PAM sequence: TTT
  source 1..20: mol_type = other DNA
atgattcttataccactttt

SEQ ID NO: 53830 - DNA, 20 bp, synthetic construct
  misc_feature 1..20: note = Description of Artificial Sequence: Synthetic oligonucleotide
  misc_feature 1..20: note = Target: SCN10A; (-) strand; PAM type: YTN; PAM sequence: CTT
  source 1..20: mol_type = other DNA
tatgattcttataccacttt

SEQ ID NO: 53831 - DNA, 20 bp, synthetic construct
  misc_feature 1..20: note = Description of Artificial Sequence: Synthetic oligonucleotide
  misc_feature 1..20: note = Target: SCN10A; (-) strand; PAM type: YTN; PAM sequence: TTC
  source 1..20: mol_type = other DNA
ctttatgattcttataccac

SEQ ID NO: 53832 - DNA, 20 bp, synthetic construct
  misc_feature 1..20: note = Description of Artificial Sequence: Synthetic oligonucleotide
  misc_feature 1..20: note = Target: SCN10A; (-) strand; PAM type: YTN; PAM sequence: CTT
  source 1..20: mol_type = other DNA
cctttatgattcttatacca

SEQ ID NO: 53833 - DNA, 20 bp, synthetic construct
  misc_feature 1..20: note = Description of Artificial Sequence: Synthetic oligonucleotide
  misc_feature 1..20: note = Target: SCN10A; (-) strand; PAM type: YTN; PAM sequence: TTC
  source 1..20: mol_type = other DNA
ttcctttatgattcttatac

SEQ ID NO: 53834 - DNA, 20 bp, synthetic construct
  misc_feature 1..20: note = Description of Artificial Sequence: Synthetic oligonucleotide
  misc_feature 1..20: note = Target: SCN10A; (-) strand; PAM type: YTN; PAM sequence: TTT
  source 1..20: mol_type = other DNA
cttcctttatgattcttata

SEQ ID NO: 53835 - DNA, 20 bp, synthetic construct
  misc_feature 1..20: note = Description of Artificial Sequence: Synthetic oligonucleotide
  misc_feature 1..20: note = Target: SCN10A; (-) strand; PAM type: YTN; PAM sequence: TTG
  source 1..20: mol_type = other DNA
tttcttcctttatgattctt

SEQ ID NO: 53836 - DNA, 20 bp, synthetic construct
  misc_feature 1..20: note = Description of Artificial Sequence: Synthetic oligonucleotide
  misc_feature 1..20: note = Target: SCN10A; (-) strand; PAM type: YTN; PAM sequence: CTT
  source 1..20: mol_type = other DNA
gtttcttcctttatgattct

SEQ ID NO: 53837 - DNA, 20 bp, synthetic construct
  misc_feature 1..20: note = Description of Artificial Sequence: Synthetic oligonucleotide
  misc_feature 1..20: note = Target: SCN10A; (-) strand; PAM type: YTN; PAM sequence: CTG
  source 1..20: mol_type = other DNA
caaataatgacaaacttgtt

SEQ ID NO: 53838 - DNA, 20 bp, synthetic construct
  misc_feature 1..20: note = Description of Artificial Sequence: Synthetic oligonucleotide
  misc_feature 1..20: note = Target: SCN10A; (-) strand; PAM type: YTN; PAM sequence: TTA
  source 1..20: mol_type = other DNA
tctgcaaataatgacaaact

SEQ ID NO: 53839 - DNA, 20 bp, synthetic construct
  misc_feature 1..20: note = Description of Artificial Sequence: Synthetic oligonucleotide
  misc_feature 1..20: note = Target: SCN10A; (-) strand; PAM type: YTN; PAM sequence: TTA
  source 1..20: mol_type = other DNA
tattatctgcaaataatgac

SEQ ID NO: 53840 - DNA, 20 bp, synthetic construct
  misc_feature 1..20: note = Description of Artificial Sequence: Synthetic oligonucleotide
  misc_feature 1..20: note = Target: SCN10A; (-) strand; PAM type: YTN; PAM sequence: TTA
  source 1..20: mol_type = other DNA
gacagttatattatctgcaa

SEQ ID NO: 53841 - DNA, 20 bp, synthetic construct
  misc_feature 1..20: note = Description of Artificial Sequence: Synthetic oligonucleotide
  misc_feature 1..20: note = Target: SCN10A; (-) strand; PAM type: YTN; PAM sequence: TTT
  source 1..20: mol_type = other DNA
agacagttatattatctgca

SEQ ID NO: 53842 - DNA, 20 bp, synthetic construct
  misc_feature 1..20: note = Description of Artificial Sequence: Synthetic oligonucleotide
  misc_feature 1..20: note = Target: SCN10A; (-) strand; PAM type: YTN; PAM sequence: CTA
  source 1..20: mol_type = other DNA
tttagacagttatattatct

SEQ ID NO: 53843 - DNA, 20 bp, synthetic construct
  misc_feature 1..20: note = Description of Artificial Sequence: Synthetic oligonucleotide
  misc_feature 1..20: note = Target: SCN10A; (-) strand; PAM type: YTN; PAM sequence: TTC
  source 1..20: mol_type = other DNA
ctatttagacagttatatta

SEQ ID NO: 53844 - DNA, 20 bp, synthetic construct
  misc_feature 1..20: note = Description of Artificial Sequence: Synthetic oligonucleotide
  misc_feature 1..20: note = Target: SCN10A; (-) strand; PAM type: YTN; PAM sequence: CTT
  source 1..20: mol_type = other DNA
cctatttagacagttatatt

SEQ ID NO: 53845 - DNA, 20 bp, synthetic construct
  misc_feature 1..20: note = Description of Artificial Sequence: Synthetic oligonucleotide
  misc_feature 1..20: note = Target: SCN10A; (-) strand; PAM type: YTN; PAM sequence: TTG
  source 1..20: mol_type = other DNA
gacttcctatttagacagtt

SEQ ID NO: 53846 - DNA, 20 bp, synthetic construct
  misc_feature 1..20: note = Description of Artificial Sequence: Synthetic oligonucleotide
  misc_feature 1..20: note = Target: SCN10A; (-) strand; PAM type: YTN; PAM sequence: CTT
  source 1..20: mol_type = other DNA
ggacttcctatttagacagt

SEQ ID NO: 53847 - DNA, 20 bp, synthetic construct
  misc_feature 1..20: note = Description of Artificial Sequence: Synthetic oligonucleotide
  misc_feature 1..20: note = Target: SCN10A; (-) strand; PAM type: YTN; PAM sequence: TTC
  source 1..20: mol_type = other DNA
ccttggacttcctatttaga

SEQ ID NO: 53848 - DNA, 20 bp, synthetic construct
  misc_feature 1..20: note = Description of Artificial Sequence: Synthetic oligonucleotide
  misc_feature 1..20: note = Target: SCN10A; (-) strand; PAM type: YTN; PAM sequence: CTG
  source 1..20: mol_type = other DNA
tagattcccttggacttcct

SEQ ID NO: 53849 - DNA, 20 bp, synthetic construct
  misc_feature 1..20: note = Description of Artificial Sequence: Synthetic oligonucleotide
  misc_feature 1..20: note = Target: SCN10A; (-) strand; PAM type: YTN; PAM sequence: TTC
  source 1..20: mol_type = other DNA
tgtagattcccttggacttc

SEQ ID NO: 53850 - DNA, 20 bp, synthetic construct
  misc_feature 1..20: note = Description of Artificial Sequence: Synthetic oligonucleotide
  misc_feature 1..20: note = Target: SCN10A; (-) strand; PAM type: YTN; PAM sequence: TTT
  source 1..20: mol_type = other DNA
ctgtagattcccttggactt

SEQ ID NO: 53851 - DNA, 20 bp, synthetic construct
  misc_feature 1..20: note = Description of Artificial Sequence: Synthetic oligonucleotide
  misc_feature 1..20: note = Target: SCN10A; (-) strand; PAM type: YTN; PAM sequence: TTT
  source 1..20: mol_type = other DNA
tctgtagattcccttggact

SEQ ID NO: 53852 - DNA, 20 bp, synthetic construct
  misc_feature 1..20: note = Description of Artificial Sequence: Synthetic oligonucleotide
  misc_feature 1..20: note = Target: SCN10A; (-) strand; PAM type: YTN; PAM sequence: TTT
  source 1..20: mol_type = other DNA
ttctgtagattcccttggac

SEQ ID NO: 53853 - DNA, 20 bp, synthetic construct
  misc_feature 1..20: note = Description of Artificial Sequence: Synthetic oligonucleotide
  misc_feature 1..20: note = Target: SCN10A; (-) strand; PAM type: YTN; PAM sequence: TTA
  source 1..20: mol_type = other DNA
aatttttctgtagattccct

SEQ ID NO: 53854 - DNA, 20 bp, synthetic construct
  misc_feature 1..20: note = Description of Artificial Sequence: Synthetic oligonucleotide
  misc_feature 1..20: note = Target: SCN10A; (-) strand; PAM type: YTN; PAM sequence: TTA
  source 1..20: mol_type = other DNA
aagttaaatttttctgtaga

SEQ ID NO: 53855 - DNA, 20 bp, synthetic construct
  misc_feature 1..20: note = Description of Artificial Sequence: Synthetic oligonucleotide
  misc_feature 1..20: note = Target: SCN10A; (-) strand; PAM type: YTN; PAM sequence: CTT
  source 1..20: mol_type = other DNA
aaagttaaatttttctgtag

SEQ ID NO: 53856 - DNA, 20 bp, synthetic construct
  misc_feature 1..20: note = Description of Artificial Sequence: Synthetic oligonucleotide
  misc_feature 1..20: note = Target: SCN10A; (-) strand; PAM type: YTN; PAM sequence: CTC
  source 1..20: mol_type = other DNA
cttaaagttaaatttttctg

SEQ ID NO: 53857 - DNA, 20 bp, synthetic construct
  misc_feature 1..20: note = Description of Artificial Sequence: Synthetic oligonucleotide
  misc_feature 1..20: note = Target: SCN10A; (-) strand; PAM type: YTN; PAM sequence: CTG
  source 1..20: mol_type = other DNA
agctccttaaagttaaattt

SEQ ID NO: 53858 - DNA, 20 bp, synthetic construct
  misc_feature 1..20: note = Description of Artificial Sequence: Synthetic oligonucleotide
  misc_feature 1..20: note = Target: SCN10A; (-) strand; PAM type: YTN; PAM sequence: CTG
  source 1..20: mol_type = other DNA
ctgagctccttaaagttaaa

SEQ ID NO: 53859 - DNA, 20 bp, synthetic construct
  misc_feature 1..20: note = Description of Artificial Sequence: Synthetic oligonucleotide
  misc_feature 1..20: note = Target: SCN10A; (-) strand; PAM type: YTN; PAM sequence: TTG
  source 1..20: mol_type = other DNA
catccagcaaccctgctgag

SEQ ID NO: 53860 - DNA, 20 bp, synthetic construct
  misc_feature 1..20: note = Description of Artificial Sequence: Synthetic oligonucleotide
  misc_feature 1..20: note = Target: SCN10A; (-) strand; PAM type: YTN; PAM sequence: TTT
  source 1..20: mol_type = other DNA
gcatccagcaaccctgctga

SEQ ID NO: 53861 - DNA, 20 bp, synthetic construct
  misc_feature 1..20: note = Description of Artificial Sequence: Synthetic oligonucleotide
  misc_feature 1..20: note = Target: SCN10A; (-) strand; PAM type: YTN; PAM sequence: TTT
  source 1..20: mol_type = other DNA
tgcatccagcaaccctgctg

SEQ ID NO: 53862 - DNA, 20 bp, synthetic construct
  misc_feature 1..20: note = Description of Artificial Sequence: Synthetic oligonucleotide
  misc_feature 1..20: note = Target: SCN10A; (-) strand; PAM type: YTN; PAM sequence: CTA
  source 1..20: mol_type = other DNA
tatagtgattttgcatccag

SEQ ID NO: 53863 - DNA, 20 bp, synthetic construct
  misc_feature 1..20: note = Description of Artificial Sequence: Synthetic oligonucleotide
  misc_feature 1..20: note = Target: SCN10A; (-) strand; PAM type: YTN; PAM sequence: TTC
  source 1..20: mol_type = other DNA
tatatagtgattttgcatcc

SEQ ID NO: 53864 - DNA, 20 bp, synthetic construct
  misc_feature 1..20: note = Description of Artificial Sequence: Synthetic oligonucleotide
  misc_feature 1..20: note = Target: SCN10A; (-) strand; PAM type: YTN; PAM sequence: TTT
  source 1..20: mol_type = other DNA
ctatatagtgattttgcatc

SEQ ID NO: 53865 - DNA, 20 bp, synthetic construct
  misc_feature 1..20: note = Description of Artificial Sequence: Synthetic oligonucleotide
  misc_feature 1..20: note = Target: SCN10A; (-) strand; PAM type: YTN; PAM sequence: TTA
  source 1..20: mol_type = other DNA
atttctatatagtgattttg

SEQ ID NO: 53866 - DNA, 20 bp, synthetic construct
  misc_feature 1..20: note = Description of Artificial Sequence: Synthetic oligonucleotide
  misc_feature 1..20: note = Target: SCN10A; (-) strand; PAM type: YTN; PAM sequence: TTA
  source 1..20: mol_type = other DNA
ttaatttctatatagtgatt

SEQ ID NO: 53867 - DNA, 20 bp, synthetic construct
  misc_feature 1..20: note = Description of Artificial Sequence: Synthetic oligonucleotide
  misc_feature 1..20: note = Target: SCN10A; (-) strand; PAM type: YTN; PAM sequence: TTA
  source 1..20: mol_type = other DNA
atattattaatttctatata

SEQ ID NO: 53868 - DNA, 20 bp, synthetic construct
  misc_feature 1..20: note = Description of Artificial Sequence: Synthetic oligonucleotide
  misc_feature 1..20: note = Target: SCN10A; (-) strand; PAM type: YTN; PAM sequence: CTT
  source 1..20: mol_type = other DNA
aatattattaatttctatat

SEQ ID NO: 53869 - DNA, 20 bp, synthetic construct
  misc_feature 1..20: note = Description of Artificial Sequence: Synthetic oligonucleotide
  misc_feature 1..20: note = Target: SCN10A; (-) strand; PAM type: YTN; PAM sequence: CTG
  source 1..20: mol_type = other DNA
tcttaatattattaatttct

SEQ ID NO: 53870 - DNA, 20 bp, synthetic construct
  misc_feature 1..20: note = Description of Artificial Sequence: Synthetic oligonucleotide
  misc_feature 1..20: note = Target: SCN10A; (-) strand; PAM type: YTN; PAM sequence: CTA
  source 1..20: mol_type = other DNA
aactgtcttaatattattaa

SEQ ID NO: 53871 - DNA, 20 bp, synthetic construct
  misc_feature 1..20: note = Description of Artificial Sequence: Synthetic oligonucleotide
  misc_feature 1..20: note = Target: SCN10A; (-) strand; PAM type: YTN; PAM sequence: TTG
  source 1..20: mol_type = other DNA
ctaaactgtcttaatattat

SEQ ID NO: 53872 - DNA, 20 bp, synthetic construct
  misc_feature 1..20: note = Description of Artificial Sequence: Synthetic oligonucleotide
  misc_feature 1..20: note = Target: SCN10A; (-) strand; PAM type: YTN; PAM sequence: TTA
  source 1..20: mol_type = other DNA
ttgctaaactgtcttaatat

SEQ ID NO: 53873 - DNA, 20 bp, synthetic construct
  misc_feature 1..20: note = Description of Artificial Sequence: Synthetic oligonucleotide
  misc_feature 1..20: note = Target: SCN10A; (-) strand; PAM type: YTN; PAM sequence: TTA
  source 1..20: mol_type = other DNA
ttattgctaaactgtcttaa

SEQ ID NO: 53874 - DNA, 20 bp, synthetic construct
  misc_feature 1..20: note = Description of Artificial Sequence: Synthetic oligonucleotide
  misc_feature 1..20: note = Target: SCN10A; (-) strand; PAM type: YTN; PAM sequence: CTT
  source 1..20: mol_type = other DNA
attattgctaaactgtctta

SEQ ID NO: 53875 - DNA, 20 bp, synthetic construct
  misc_feature 1..20: note = Description of Artificial Sequence: Synthetic oligonucleotide
  misc_feature 1..20: note = Target: SCN10A; (-) strand; PAM type: YTN; PAM sequence: TTG
  source 1..20: mol_type = other DNA
aatacttattattgctaaac

SEQ ID NO: 53876 - DNA, 20 bp, synthetic construct
  misc_feature 1..20: note = Description of Artificial Sequence: Synthetic oligonucleotide
  misc_feature 1..20: note = Target: SCN10A; (-) strand; PAM type: YTN; PAM sequence: CTA
  source 1..20: mol_type = other DNA
ttgaatacttattattgcta

SEQ ID NO: 53877 - DNA, 20 bp, synthetic construct
  misc_feature 1..20: note = Description of Artificial Sequence: Synthetic oligonucleotide
  misc_feature 1..20: note = Target: SCN10A; (-) strand; PAM type: YTN; PAM sequence: TTG
  source 1..20: mol_type = other DNA
ccctattgaatacttattat

SEQ ID NO: 53878 - DNA, 20 bp, synthetic construct
  misc_feature 1..20: note = Description of Artificial Sequence: Synthetic oligonucleotide
  misc_feature 1..20: note = Target: SCN10A; (-) strand; PAM type: YTN; PAM sequence: TTG
  source 1..20: mol_type = other DNA
gttgccctattgaatactta

SEQ ID NO: 53879 - DNA, 20 bp, synthetic construct
  misc_feature 1..20: note = Description of Artificial Sequence: Synthetic oligonucleotide
  misc_feature 1..20: note = Target: SCN10A; (-) strand; PAM type: YTN; PAM sequence: TTT
  source 1..20: mol_type = other DNA
ggttgccctattgaatactt

SEQ ID NO: 53880 - DNA, 20 bp, synthetic construct
  misc_feature 1..20: note = Description of Artificial Sequence: Synthetic oligonucleotide
  misc_feature 1..20: note = Target: SCN10A; (-) strand; PAM type: YTN; PAM sequence: TTT
  source 1..20: mol_type = other DNA
tggttgccctattgaatact

SEQ ID NO: 53881 - DNA, 20 bp, synthetic construct
  misc_feature 1..20: note = Description of Artificial Sequence: Synthetic oligonucleotide
  misc_feature 1..20: note = Target: SCN10A; (-) strand; PAM type: YTN; PAM sequence: TTG
  source 1..20: mol_type = other DNA
caattttggttgccctattg

SEQ ID NO: 53882 - DNA, 20 bp, synthetic construct
  misc_feature 1..20: note = Description of Artificial Sequence: Synthetic oligonucleotide
  misc_feature 1..20: note = Target: SCN10A; (-) strand; PAM type: YTN; PAM sequence: CTA
  source 1..20: mol_type = other DNA
ggtacattgcaattttggtt

SEQ ID NO: 53883 - DNA, 20 bp, synthetic construct
  misc_feature 1..20: note = Description of Artificial Sequence: Synthetic oligonucleotide
  misc_feature 1..20: note = Target: SCN10A; (-) strand; PAM type: YTN; PAM sequence: TTC
  source 1..20: mol_type = other DNA
ctaggtacattgcaattttg

SEQ ID NO: 53884 - DNA, 20 bp, synthetic construct
  misc_feature 1..20: note = Description of Artificial Sequence: Synthetic oligonucleotide
  misc_feature 1..20: note = Target: SCN10A; (-) strand; PAM type: YTN; PAM sequence: TTT
  source 1..20: mol_type = other DNA
cctaggtacattgcaatttt

SEQ ID NO: 53885 - DNA, 20 bp, synthetic construct
  misc_feature 1..20: note = Description of Artificial Sequence: Synthetic oligonucleotide
  misc_feature 1..20: note = Target: SCN10A; (-) strand; PAM type: YTN; PAM sequence: TTT
  source 1..20: mol_type = other DNA
tcctaggtacattgcaattt

SEQ ID NO: 53886 - DNA, 20 bp, synthetic construct
  misc_feature 1..20: note = Description of Artificial Sequence: Synthetic oligonucleotide
  misc_feature 1..20: note = Target: SCN10A; (-) strand; PAM type: YTN; PAM sequence: TTT
  source 1..20: mol_type = other DNA
ttcctaggtacattgcaatt

SEQ ID NO: 53887 - DNA, 20 bp, synthetic construct
  misc_feature 1..20: note = Description of Artificial Sequence: Synthetic oligonucleotide
  misc_feature 1..20: note = Target: SCN10A; (-) strand; PAM type: YTN; PAM sequence: CTT
  source 1..20: mol_type = other DNA
tttcctaggtacattgcaat

SEQ ID NO: 53888 - DNA, 20 bp, synthetic construct
  misc_feature 1..20: note = Description of Artificial Sequence: Synthetic oligonucleotide
  misc_feature 1..20: note = Target: SCN10A; (-) strand; PAM type: YTN; PAM sequence: TTA
  source 1..20: mol_type = other DNA
taatgtctttttcctaggta

SEQ ID NO: 53889 - DNA, 20 bp, synthetic construct
  misc_feature 1..20: note = Description of Artificial Sequence: Synthetic oligonucleotide
  misc_feature 1..20: note = Target: SCN10A; (-) strand; PAM type: YTN; PAM sequence: TTT
  source 1..20: mol_type = other DNA
ataatgtctttttcctaggt

SEQ ID NO: 53890 - DNA, 20 bp, synthetic construct
  misc_feature 1..20: note = Description of Artificial Sequence: Synthetic oligonucleotide
  misc_feature 1..20: note = Target: SCN10A; (-) strand; PAM type: YTN; PAM sequence: TTT
  source 1..20: mol_type = other DNA
tataatgtctttttcctagg

SEQ ID NO: 53891 - DNA, 20 bp, synthetic construct
  misc_feature 1..20: note = Description of Artificial Sequence: Synthetic oligonucleotide
  misc_feature 1..20: note = Target: SCN10A; (-) strand; PAM type: YTN; PAM sequence: CTA
  source 1..20: mol_type = other DNA
cattttataatgtctttttc

SEQ ID NO: 53892 - DNA, 20 bp, synthetic construct
  misc_feature 1..20: note = Description of Artificial Sequence: Synthetic oligonucleotide
  misc_feature 1..20: note = Target: SCN10A; (-) strand; PAM type: YTN; PAM sequence: TTC
  source 1..20: mol_type = other DNA
tacattttataatgtctttt

SEQ ID NO: 53893 - DNA, 20 bp, synthetic construct
  misc_feature 1..20: note = Description of Artificial Sequence: Synthetic oligonucleotide
  misc_feature 1..20: note = Target: SCN10A; (-) strand; PAM type: YTN; PAM sequence: TTT
  source 1..20: mol_type = other DNA
ctacattttataatgtcttt

SEQ ID NO: 53894 - DNA, 20 bp, synthetic construct
  misc_feature 1..20: note = Description of Artificial Sequence: Synthetic oligonucleotide
  misc_feature 1..20: note = Target: SCN10A; (-) strand; PAM type: YTN; PAM sequence: TTT
  source 1..20: mol_type = other DNA
tctacattttataatgtctt

SEQ ID NO: 53895 - DNA, 20 bp, synthetic construct
  misc_feature 1..20: note = Description of Artificial Sequence: Synthetic oligonucleotide
  misc_feature 1..20: note = Target: SCN10A; (-) strand; PAM type: YTN; PAM sequence: TTT
  source 1..20: mol_type = other DNA
ttctacattttataatgtct

SEQ ID NO: 53896 - DNA, 20 bp, synthetic construct
  misc_feature 1..20: note = Description of Artificial Sequence: Synthetic oligonucleotide
  misc_feature 1..20: note = Target: SCN10A; (-) strand; PAM type: YTN; PAM sequence: TTA
  source 1..20: mol_type = other DNA
atatttttctacattttata

SEQ ID NO: 53897 - DNA, 20 bp, synthetic construct
  misc_feature 1..20: note = Description of Artificial Sequence: Synthetic oligonucleotide
  misc_feature 1..20: note = Target: SCN10A; (-) strand; PAM type: YTN; PAM sequence: TTT
  source 1..20: mol_type = other DNA
aatatttttctacattttat

SEQ ID NO: 53898 - DNA, 20 bp, synthetic construct
  misc_feature 1..20: note = Description of Artificial Sequence: Synthetic oligonucleotide
  misc_feature 1..20: note = Target: SCN10A; (-) strand; PAM type: YTN; PAM sequence: CTT
  source 1..20: mol_type = other DNA
taatatttttctacatttta

SEQ ID NO: 53899 - DNA, 20 bp, synthetic construct
  misc_feature 1..20: note = Description of Artificial Sequence: Synthetic oligonucleotide
  misc_feature 1..20: note = Target: SCN10A; (-) strand; PAM type: YTN; PAM sequence: TTC
  source 1..20: mol_type = other DNA
tttaatatttttctacattt

SEQ ID NO: 53900 - DNA, 20 bp, synthetic construct
  misc_feature 1..20: note = Description of Artificial Sequence: Synthetic oligonucleotide
  misc_feature 1..20: note = Target: SCN10A; (-) strand; PAM type: YTN; PAM sequence: CTT
  source 1..20: mol_type = other DNA
ctttaatatttttctacatt

SEQ ID NO: 53901 - DNA, 20 bp, synthetic construct
  misc_feature 1..20: note = Description of Artificial Sequence: Synthetic oligonucleotide
  misc_feature 1..20: note = Target: SCN10A; (-) strand; PAM type: YTN; PAM sequence: TTA
  source 1..20: mol_type = other DNA
tacaggtcttctttaatatt

SEQ ID NO: 53902 - DNA, 20 bp, synthetic construct
  misc_feature 1..20: note = Description of Artificial Sequence: Synthetic oligonucleotide
  misc_feature 1..20: note = Target: SCN10A; (-) strand; PAM type: YTN; PAM sequence: TTT
  source 1..20: mol_type = other DNA
atacaggtcttctttaatat

SEQ ID NO: 53903 - DNA, 20 bp, synthetic construct
  misc_feature 1..20: note = Description of Artificial Sequence: Synthetic oligonucleotide
  misc_feature 1..20: note = Target: SCN10A; (-) strand; PAM type: YTN; PAM sequence: TTA
  source 1..20: mol_type = other DNA
atttatacaggtcttcttta

SEQ ID NO: 53904 - DNA, 20 bp, synthetic construct
  misc_feature 1..20: note = Description of Artificial Sequence: Synthetic oligonucleotide
  misc_feature 1..20: note = Target: SCN10A; (-) strand; PAM type: YTN; PAM sequence: CTT
  source 1..20: mol_type = other DNA
aatttatacaggtcttcttt

SEQ ID NO: 53905 - DNA, 20 bp, synthetic construct
  misc_feature 1..20: note = Description of Artificial Sequence: Synthetic oligonucleotide
  misc_feature 1..20: note = Target: SCN10A; (-) strand; PAM type: YTN; PAM sequence: CTC
  source 1..20: mol_type = other DNA
ttaatttatacaggtcttct

SEQ ID NO: 53906 - DNA, 20 bp, synthetic construct
  misc_feature 1..20: note = Description of Artificial Sequence: Synthetic oligonucleotide
  misc_feature 1..20: note = Target: SCN10A; (-) strand; PAM type: YTN; PAM sequence: TTC
  source 1..20: mol_type = other DNA
ccacacatcagtatggcaga

SEQ ID NO: 53907 - DNA, 20 bp, synthetic construct
  misc_feature 1..20: note = Description of Artificial Sequence: Synthetic oligonucleotide
  misc_feature 1..20: note = Target: SCN10A; (-) strand; PAM type: YTN; PAM sequence: CTT
  source 1..20: mol_type = other DNA
cccacacatcagtatggcag

SEQ ID NO: 53908 - DNA, 20 bp, synthetic construct
  misc_feature 1..20: note = Description of Artificial Sequence: Synthetic oligonucleotide
  misc_feature 1..20: note = Target: SCN10A; (-) strand; PAM type: YTN; PAM sequence: TTA
  source 1..20: mol_type = other DNA
caatacgaagccttcccaca

SEQ ID NO: 53909 - DNA, 20 bp, synthetic construct
  misc_feature 1..20: note = Description of Artificial Sequence: Synthetic oligonucleotide
  misc_feature 1..20: note = Target: SCN10A; (-) strand; PAM type: YTN; PAM sequence: TTT
  source 1..20: mol_type = other DNA
acaatacgaagccttcccac

SEQ ID NO: 53910 - DNA, 20 bp, synthetic construct
  misc_feature 1..20: note = Description of Artificial Sequence: Synthetic oligonucleotide
  misc_feature 1..20: note = Target: SCN10A; (-) strand; PAM type: YTN; PAM sequence: TTA
  source 1..20: mol_type = other DNA
tcaccacaggaagaatcgcc

SEQ ID NO: 53911 - DNA, 20 bp, synthetic construct
  misc_feature 1..20: note = Description of Artificial Sequence: Synthetic oligonucleotide
  misc_feature 1..20: note = Target: SCN10A; (-) strand; PAM type: YTN; PAM sequence: TTT
  source 1..20: mol_type = other DNA
atcaccacaggaagaatcgc

SEQ ID NO: 53912 - DNA, 20 bp, synthetic construct
  misc_feature 1..20: note = Description of Artificial Sequence: Synthetic oligonucleotide
  misc_feature 1..20: note = Target: SCN10A; (-) strand; PAM type: YTN; PAM sequence: TTG
  source 1..20: mol_type = other DNA
atttatcaccacaggaagaa

SEQ ID NO: 53913 - DNA, 20 bp, synthetic construct
  misc_feature 1..20: note = Description of Artificial Sequence: Synthetic oligonucleotide
  misc_feature 1..20: note = Target: SCN10A; (-) strand; PAM type: YTN; PAM sequence: CTG
  source 1..20: mol_type = other DNA
aattgatttatcaccacagg

SEQ ID NO: 53914 - DNA, 20 bp, synthetic construct
  misc_feature 1..20: note = Description of Artificial Sequence: Synthetic oligonucleotide
  misc_feature 1..20: note = Target: SCN10A; (-) strand; PAM type: YTN; PAM sequence: TTG
  source 1..20: mol_type = other DNA
gtaatgcactgaattgattt

SEQ ID NO: 53915 - DNA, 20 bp, synthetic construct
  misc_feature 1..20: note = Description of Artificial Sequence: Synthetic oligonucleotide
  misc_feature 1..20: note = Target: SCN10A; (-) strand; PAM type: YTN; PAM sequence: TTT
  source 1..20: mol_type = other DNA
ggtaatgcactgaattgatt

SEQ ID NO: 53916 - DNA, 20 bp, synthetic construct
  misc_feature 1..20: note = Description of Artificial Sequence: Synthetic oligonucleotide
  misc_feature 1..20: note = Target: SCN10A; (-) strand; PAM type: YTN; PAM sequence: TTG
  source 1..20: mol_type = other DNA
tttggtaatgcactgaattg

SEQ ID NO: 53917 - DNA, 20 bp, synthetic construct
  misc_feature 1..20: note = Description of Artificial Sequence: Synthetic oligonucleotide
  misc_feature 1..20: note = Target: SCN10A; (-) strand; PAM type: YTN; PAM sequence: TTT
  source 1..20: mol_type = other DNA
gtttggtaatgcactgaatt

SEQ ID NO: 53918 - DNA, 20 bp, synthetic construct
  misc_feature 1..20: note = Description of Artificial Sequence: Synthetic oligonucleotide
  misc_feature 1..20: note = Target: SCN10A; (-) strand; PAM type: YTN; PAM sequence: CTT
  source 1..20: mol_type = other DNA
tgtttggtaatgcactgaat

SEQ ID NO: 53919 - DNA, 20 bp, synthetic construct
  misc_feature 1..20: note = Description of Artificial Sequence: Synthetic oligonucleotide
  misc_feature 1..20: note = Target: SCN10A; (-) strand; PAM type: YTN; PAM sequence: CTG
  source 1..20: mol_type = other DNA
tggaaactttgtttggtaat

SEQ ID NO: 53920 - DNA, 20 bp, synthetic construct
  misc_feature 1..20: note = Description of Artificial Sequence: Synthetic oligonucleotide
  misc_feature 1..20: note = Target: SCN10A; (-) strand; PAM type: YTN; PAM sequence: CTC
  source 1..20: mol_type = other DNA
tgtggaaactttgtttggta

SEQ ID NO: 53921 - DNA, 20 bp, synthetic construct
  misc_feature 1..20: note = Description of Artificial Sequence: Synthetic oligonucleotide
  misc_feature 1..20: note = Target: SCN10A; (-) strand; PAM type: YTN; PAM sequence: TTA
  source 1..20: mol_type = other DNA
caactctgtggaaactttgt

SEQ ID NO: 53922 - DNA, 20 bp, synthetic construct
  misc_feature 1..20: note = Description of Artificial Sequence: Synthetic oligonucleotide
  misc_feature 1..20: note = Target: SCN10A; (-) strand; PAM type: YTN; PAM sequence: CTT
  source 1..20: mol_type = other DNA
acaactctgtggaaactttg

SEQ ID NO: 53923 - DNA, 20 bp, synthetic construct
  misc_feature 1..20: note = Description of Artificial Sequence: Synthetic oligonucleotide
  misc_feature 1..20: note = Target: SCN10A; (-) strand; PAM type: YTN; PAM sequence: TTC
  source 1..20: mol_type = other DNA
ttacaactctgtggaaactt

SEQ ID NO: 53924 - DNA, 20 bp, synthetic construct
  misc_feature 1..20: note = Description of Artificial Sequence: Synthetic oligonucleotide
  misc_feature 1..20: note = Target: SCN10A; (-) strand; PAM type: YTN; PAM sequence: TTT
  source 1..20: mol_type = other DNA
cttacaactctgtggaaact

SEQ ID NO: 53925 - DNA, 20 bp, synthetic construct
  misc_feature 1..20: note = Description of Artificial Sequence: Synthetic oligonucleotide
  misc_feature 1..20: note = Target: SCN10A; (-) strand; PAM type: YTN; PAM sequence: TTT
  source 1..20: mol_type = other DNA
tcttacaactctgtggaaac

SEQ ID NO: 53926 - DNA, 20 bp, synthetic construct
  misc_feature 1..20: note = Description of Artificial Sequence: Synthetic oligonucleotide
  misc_feature 1..20: note = Target: SCN10A; (-) strand; PAM type: YTN; PAM sequence: CTT
  source 1..20: mol_type = other DNA
ttcttacaactctgtggaaa

SEQ ID NO: 53927 - DNA, 20 bp, synthetic construct
  misc_feature 1..20: note = Description of Artificial Sequence: Synthetic oligonucleotide
  misc_feature 1..20: note = Target: SCN10A; (-) strand; PAM type: YTN; PAM sequence: CTC
  source 1..20: mol_type = other DNA
ttttcttacaactctgtgga

SEQ ID NO: 53928 - DNA, 20 bp, synthetic construct
  misc_feature 1..20: note = Description of Artificial Sequence: Synthetic oligonucleotide
  misc_feature 1..20: note = Target: SCN10A; (-) strand; PAM type: YTN; PAM sequence: TTC
  source 1..20: mol_type = other DNA
cagctcttttcttacaactc

SEQ ID NO: 53929 - DNA, 20 bp, synthetic construct
  misc_feature 1..20: note = Description of Artificial Sequence: Synthetic oligonucleotide
  misc_feature 1..20: note = Target: SCN10A; (-) strand; PAM type: YTN; PAM sequence: TTT
  source 1..20: mol_type = other DNA
ccagctcttttcttacaact

SEQ ID NO: 53930 - DNA, 20 bp, synthetic construct
  misc_feature 1..20: note = Description of Artificial Sequence: Synthetic oligonucleotide
  misc_feature 1..20: note = Target: SCN10A; (-) strand; PAM type: YTN; PAM sequence: TTT
  source 1..20: mol_type = other DNA
tccagctcttttcttacaac

SEQ ID NO: 53931 - DNA, 20 bp, synthetic construct
  misc_feature 1..20: note = Description of Artificial Sequence: Synthetic oligonucleotide
  misc_feature 1..20: note = Target: SCN10A; (-) strand; PAM type: YTN; PAM sequence: TTA
  source 1..20: mol_type = other DNA
agggtcacattttccagctc

SEQ ID NO: 53932 - DNA, 20 bp, synthetic construct
  misc_feature 1..20: note = Description of Artificial Sequence: Synthetic oligonucleotide
  misc_feature 1..20: note = Target: SCN10A; (-) strand; PAM type: YTN; PAM sequence: TTT
  source 1..20: mol_type = other DNA
aagggtcacattttccagct

SEQ ID NO: 53933 - DNA, 20 bp, synthetic construct
  misc_feature 1..20: note = Description of Artificial Sequence: Synthetic oligonucleotide
  misc_feature 1..20: note = Target: SCN10A; (-) strand; PAM type: YTN; PAM sequence: TTC
  source 1..20: mol_type = other DNA
catatcagtttaagggtcac

SEQ ID NO: 53934 - DNA, 20 bp, synthetic construct
  misc_feature 1..20: note = Description of Artificial Sequence: Synthetic oligonucleotide
  misc_feature 1..20: note = Target: SCN10A; (-) strand; PAM type: YTN; PAM sequence: TTT
  source 1..20: mol_type = other DNA
ccatatcagtttaagggtca

SEQ ID NO: 53935 - DNA, 20 bp, synthetic construct
  misc_feature 1..20: note = Description of Artificial Sequence: Synthetic oligonucleotide
  misc_feature 1..20: note = Target: SCN10A; (-) strand; PAM type: YTN; PAM sequence: TTT
  source 1..20: mol_type = other DNA
tccatatcagtttaagggtc

SEQ ID NO: 53936 - DNA, 20 bp, synthetic construct
  misc_feature 1..20: note = Description of Artificial Sequence: Synthetic oligonucleotide
  misc_feature 1..20: note = Target: SCN10A; (-) strand; PAM type: YTN; PAM sequence: CTT
  source 1..20: mol_type = other DNA
ttccatatcagtttaagggt

SEQ ID NO: 53937 - DNA, 20 bp, synthetic construct
  misc_feature 1..20: note = Description of Artificial Sequence: Synthetic oligonucleotide
  misc_feature 1..20: note = Target: SCN10A; (-) strand; PAM type: YTN; PAM sequence: TTA
  source 1..20: mol_type = other DNA
cttttccatatcagtttaag

SEQ ID NO: 53938 - DNA, 20 bp, synthetic construct
  misc_feature 1..20: note = Description of Artificial Sequence: Synthetic oligonucleotide
  misc_feature 1..20: note = Target: SCN10A; (-) strand; PAM type: YTN; PAM sequence: TTT
  source 1..20: mol_type = other DNA
acttttccatatcagtttaa

SEQ ID NO: 53939 - DNA, 20 bp, synthetic construct
  misc_feature 1..20: note = Description of Artificial Sequence: Synthetic oligonucleotide
  misc_feature 1..20: note = Target: SCN10A; (-) strand; PAM type: YTN; PAM sequence: CTT
  source 1..20: mol_type = other DNA
tacttttccatatcagttta

SEQ ID NO: 53940 - DNA, 20 bp, synthetic construct
  misc_feature 1..20: note = Description of Artificial Sequence: Synthetic oligonucleotide
  misc_feature 1..20: note = Target: SCN10A; (-) strand; PAM type: YTN; PAM sequence: TTC
  source 1..20: mol_type = other DNA
tttacttttccatatcagtt

SEQ ID NO: 53941 - DNA, 20 bp, synthetic construct
  misc_feature 1..20: note = Description of Artificial Sequence: Synthetic oligonucleotide
  misc_feature 1..20: note = Target: SCN10A; (-) strand; PAM type: YTN; PAM sequence: TTT
  source 1..20: mol_type = other DNA
ctttacttttccatatcagt

SEQ ID NO: 53942 - DNA, 20 bp, synthetic construct
  misc_feature 1..20: note = Description of Artificial Sequence: Synthetic oligonucleotide
  misc_feature 1..20: note = Target: SCN10A; (-) strand; PAM type: YTN; PAM sequence: TTG
  source 1..20: mol_type = other DNA
tttctttacttttccatatc

SEQ ID NO: 53943 - DNA, 20 bp, synthetic construct
  misc_feature 1..20: note = Description of Artificial Sequence: Synthetic oligonucleotide
  misc_feature 1..20: note = Target: SCN10A; (-) strand; PAM type: YTN; PAM sequence: CTT
  source 1..20: mol_type = other DNA
gtttctttacttttccatat

SEQ ID NO: 53944 - DNA, 20 bp, synthetic construct
  misc_feature 1..20: note = Description of Artificial Sequence: Synthetic oligonucleotide
  misc_feature 1..20: note = Target: SCN10A; (-) strand; PAM type: YTN; PAM sequence: TTC
  source 1..20: mol_type = other DNA
ttgtttctttacttttccat

SEQ ID NO: 53945 - DNA, 20 bp, synthetic construct
  misc_feature 1..20: note = Description of Artificial Sequence: Synthetic oligonucleotide
  misc_feature 1..20: note = Target: SCN10A; (-) strand; PAM type: YTN; PAM sequence: TTG
  source 1..20: mol_type = other DNA
gttcttgtttctttactttt

SEQ ID NO: 53946 - DNA, 20 bp, synthetic construct
  misc_feature 1..20: note = Description of Artificial Sequence: Synthetic oligonucleotide
  misc_feature 1..20: note = Target: SCN10A; (-) strand; PAM type: YTN; PAM sequence: TTT
  source 1..20: mol_type = other DNA
ggttcttgtttctttacttt

SEQ ID NO: 53947 - DNA, 20 bp, synthetic construct
  misc_feature 1..20: note = Description of Artificial Sequence: Synthetic oligonucleotide
  misc_feature 1..20: note = Target: SCN10A; (-) strand; PAM type: YTN; PAM sequence: TTT
  source 1..20: mol_type = other DNA
tggttcttgtttctttactt

SEQ ID NO: 53948 - DNA, 20 bp, synthetic construct
  misc_feature 1..20: note = Description of Artificial Sequence: Synthetic oligonucleotide
  misc_feature 1..20: note = Target: SCN10A; (-) strand; PAM type: YTN; PAM sequence: TTA
  source 1..20: mol_type = other DNA
ttttggttcttgtttcttta

SEQ ID NO: 53949 - DNA, 20 bp, synthetic construct
  misc_feature 1..20: note = Description of Artificial Sequence: Synthetic oligonucleotide
  misc_feature 1..20: note = Target: SCN10A; (-) strand; PAM type: YTN; PAM sequence: TTG
  source 1..20: mol_type = other DNA
aaaattattttggttcttgt

SEQ ID NO: 53950 - DNA, 20 bp, synthetic construct
  misc_feature 1..20: note = Description of Artificial Sequence: Synthetic oligonucleotide
  misc_feature 1..20: note = Target: SCN10A; (-) strand; PAM type: YTN; PAM sequence: CTT
  source 1..20: mol_type = other DNA
gaaaattattttggttcttg

SEQ ID NO: 53951 - DNA, 20 bp, synthetic construct
  misc_feature 1..20: note = Description of Artificial Sequence: Synthetic oligonucleotide
  misc_feature 1..20: note = Target: SCN10A; (-) strand; PAM type: YTN; PAM sequence: TTC
  source 1..20: mol_type = other DNA
ttgaaaattattttggttct

SEQ ID NO: 53952 - DNA, 20 bp, synthetic construct
  misc_feature 1..20: note = Description of Artificial Sequence: Synthetic oligonucleotide
  misc_feature 1..20: note = Target: SCN10A; (-) strand; PAM type: YTN; PAM sequence: CTT
  source 1..20: mol_type = other DNA
cttgaaaattattttggttc

SEQ ID NO: 53953 - DNA, 20 bp, synthetic construct
  misc_feature 1..20: note = Description of Artificial Sequence: Synthetic oligonucleotide
  misc_feature 1..20: note = Target: SCN10A; (-) strand; PAM type: YTN; PAM sequence: TTG
  source 1..20: mol_type = other DNA
tcttcttgaaaattattttg

SEQ ID NO: 53954 - DNA, 20 bp, synthetic construct
  misc_feature 1..20: note = Description of Artificial Sequence: Synthetic oligonucleotide
  misc_feature 1..20: note = Target: SCN10A; (-) strand; PAM type: YTN; PAM sequence: TTT
  source 1..20: mol_type = other DNA
gtcttcttgaaaattatttt

SEQ ID NO: 53955 - DNA, 20 bp, synthetic construct
  misc_feature 1..20: note = Description of Artificial Sequence: Synthetic oligonucleotide
  misc_feature 1..20: note = Target: SCN10A; (-) strand; PAM type: YTN; PAM sequence: TTA
  source 1..20: mol_type = other DNA
tttgtcttcttgaaaattat

SEQ ID NO: 53956 - DNA, 20 bp, synthetic construct
  misc_feature 1..20: note = Description of Artificial Sequence: Synthetic oligonucleotide
  misc_feature 1..20: note = Target: SCN10A; (-) strand; PAM type: YTN; PAM sequence: CTT
  source 1..20: mol_type = other DNA
atttgtcttcttgaaaatta

SEQ ID NO: 53957 - DNA, 20 bp, synthetic construct
  misc_feature 1..20: note = Description of Artificial Sequence: Synthetic oligonucleotide
  misc_feature 1..20: note = Target: SCN10A; (-) strand; PAM type: YTN; PAM sequence: CTC
  source 1..20: mol_type = other DNA
cttatttgtcttcttgaaaa

SEQ ID NO: 53958 - DNA, 20 bp, synthetic construct
  misc_feature 1..20: note = Description of Artificial Sequence: Synthetic oligonucleotide
  misc_feature 1..20: note = Target: SCN10A; (-) strand; PAM type: YTN; PAM sequence: TTC
  source 1..20: mol_type = other DNA
acatgcccctccttatttgt

SEQ ID NO: 53959 - DNA, 20 bp, synthetic construct
  misc_feature 1..20: note = Description of Artificial Sequence: Synthetic oligonucleotide
  misc_feature 1..20: note = Target: SCN10A; (-) strand; PAM type: YTN; PAM sequence: CTG
  source 1..20: mol_type = other DNA
gtcgattcacatgcccctcc

SEQ ID NO: 53960 - DNA, 20 bp, synthetic construct
  misc_feature 1..20: note = Description of Artificial Sequence: Synthetic oligonucleotide
  misc_feature 1..20: note = Target: SCN10A; (-) strand; PAM type: YTN; PAM sequence: TTG
  source 1..20: mol_type = other DNA
acctggtcgattcacatgcc

SEQ ID NO: 53961 - DNA, 20 bp, synthetic construct
  misc_feature 1..20: note = Description of Artificial Sequence: Synthetic oligonucleotide
  misc_feature 1..20: note = Target: SCN10A; (-) strand; PAM type: YTN; PAM sequence: TTT
  source 1..20: mol_type = other DNA
gacctggtcgattcacatgc

SEQ ID NO: 53962 - DNA, 20 bp, synthetic construct
  misc_feature 1..20: note = Description of Artificial Sequence: Synthetic oligonucleotide
  misc_feature 1..20: note = Target: SCN10A; (-) strand; PAM type: YTN; PAM sequence: CTA
  source 1..20: mol_type = other DNA
tagtaagatttgacctggtc

SEQ ID NO: 53963 - DNA, 20 bp, synthetic construct
  misc_feature 1..20: note = Description of Artificial Sequence: Synthetic oligonucleotide
  misc_feature 1..20: note = Target: SCN10A; (-) strand; PAM type: YTN; PAM sequence: CTC
  source 1..20: mol_type = other DNA
tatagtaagatttgacctgg

SEQ ID NO: 53964 - DNA, 20 bp, synthetic construct
  misc_feature 1..20: note = Description of Artificial Sequence: Synthetic oligonucleotide
  misc_feature 1..20: note = Target: SCN10A; (-) strand; PAM type: YTN; PAM sequence: TTA
  source 1..20: mol_type = other DNA
aatgctctatagtaagattt

SEQ ID NO: 53965 - DNA, 20 bp, synthetic construct
  misc_feature 1..20: note = Description of Artificial Sequence: Synthetic oligonucleotide
  misc_feature 1..20: note = Target: SCN10A; (-) strand; PAM type: YTN; PAM sequence: TTT
  source 1..20: mol_type = other DNA
aaatgctctatagtaagatt

SEQ ID NO: 53966 - DNA, 20 bp, synthetic construct
  misc_feature 1..20: note = Description of Artificial Sequence: Synthetic oligonucleotide
  misc_feature 1..20: note = Target: SCN10A; (-) strand; PAM type: YTN; PAM sequence: CTG
  source 1..20: mol_type = other DNA
agtcaacaccacgtggattt

SEQ ID NO: 53967 - DNA, 20 bp, synthetic construct
  misc_feature 1..20: note = Description of Artificial Sequence: Synthetic oligonucleotide
  misc_feature 1..20: note = Target: SCN10A; (-) strand; PAM type: YTN; PAM sequence: TTG
  source 1..20: mol_type = other DNA
tcacatcctgagtcaacacc

SEQ ID NO: 53968 - DNA, 20 bp, synthetic construct
  misc_feature 1..20: note = Description of Artificial Sequence: Synthetic oligonucleotide
  misc_feature 1..20: note = Target: SCN10A; (-) strand; PAM type: YTN; PAM sequence: CTC
  source 1..20: mol_type = other DNA
attgtcacatcctgagtcaa

SEQ ID NO: 53969 - DNA, 20 bp, synthetic construct
  misc_feature 1..20: note = Description of Artificial Sequence: Synthetic oligonucleotide
  misc_feature 1..20: note = Target: SCN10A; (-) strand; PAM type: YTN; PAM sequence: CTC
  source 1..20: mol_type = other DNA
ccagtaatctcattgtcaca

SEQ ID NO: 53970 - DNA, 20 bp, synthetic construct
  misc_feature 1..20: note = Description of Artificial Sequence: Synthetic oligonucleotide
  misc_feature 1..20: note = Target: SCN10A; (-) strand; PAM type: YTN; PAM sequence: TTC
  source 1..20: mol_type = other DNA
tcccagtaatctcattgtca

SEQ ID NO: 53971 - DNA, 20 bp, synthetic construct
  misc_feature 1..20: note = Description of Artificial Sequence: Synthetic oligonucleotide
  misc_feature 1..20: note = Target: SCN10A; (-) strand; PAM type: YTN; PAM sequence: TTT
  source 1..20: mol_type = other DNA
ctcccagtaatctcattgtc

SEQ ID NO: 53972 - DNA, 20 bp, synthetic construct
  misc_feature 1..20: note = Description of Artificial Sequence: Synthetic oligonucleotide
  misc_feature 1..20: note = Target: SCN10A; (-) strand; PAM type: YTN; PAM sequence: CTG
  source 1..20: mol_type = other DNA
tttctcccagtaatctcatt

SEQ ID NO: 53973 - DNA, 20 bp, synthetic construct
  misc_feature 1..20: note = Description of Artificial Sequence: Synthetic oligonucleotide
  misc_feature 1..20: note = Target: SCN10A; (-) strand; PAM type: YTN; PAM sequence: CTG
  source 1..20: mol_type = other DNA
aatctgtttctcccagtaat

SEQ ID NO: 53974 - DNA, 20 bp, synthetic construct
  misc_feature 1..20: note = Description of Artificial Sequence: Synthetic oligonucleotide
  misc_feature 1..20: note = Target: SCN10A; (-) strand; PAM type: YTN; PAM sequence: CTA
  source 1..20: mol_type = other DNA
ctgaatctgtttctcccagt

SEQ ID NO: 53975 - DNA, 20 bp, synthetic construct
  misc_feature 1..20: note = Description of Artificial Sequence: Synthetic oligonucleotide
  misc_feature 1..20: note = Target: SCN10A; (-) strand; PAM type: YTN; PAM sequence: TTC
  source 1..20: mol_type = other DNA
ccatgtctactgaatctgtt

SEQ ID NO: 53976 - DNA, 20 bp, synthetic construct
  misc_feature 1..20: note = Description of Artificial Sequence: Synthetic oligonucleotide
  misc_feature 1..20: note = Target: SCN10A; (-) strand; PAM type: YTN; PAM sequence: CTG
  source 1..20: mol_type = other DNA
ccatgcaccagattcccatg

SEQ ID NO: 53977 - DNA, 20 bp, synthetic construct
  misc_feature 1..20: note = Description of Artificial Sequence: Synthetic oligonucleotide
  misc_feature 1..20: note = Target: SCN10A; (-) strand; PAM type: YTN; PAM sequence: TTC
  source 1..20: mol_type = other DNA
tgccatgcaccagattccca

SEQ ID NO: 53978 - DNA, 20 bp, synthetic construct
  misc_feature 1..20: note = Description of Artificial Sequence: Synthetic oligonucleotide
  misc_feature 1..20: note = Target: SCN10A; (-) strand; PAM type: YTN; PAM sequence: CTT
  source 1..20: mol_type = other DNA
ctgccatgcaccagattccc

SEQ ID NO: 53979 - DNA, 20 bp, synthetic construct
  misc_feature 1..20: note = Description of Artificial Sequence: Synthetic oligonucleotide
  misc_feature 1..20: note = Target: SCN10A; (-) strand; PAM type: YTN; PAM sequence: CTG
  source 1..20: mol_type = other DNA
cttctgccatgcaccagatt

SEQ ID NO: 53980 - DNA, 20 bp, synthetic construct
  misc_feature 1..20: note = Description of Artificial Sequence: Synthetic oligonucleotide
  misc_feature 1..20: note = Target: SCN10A; (-) strand; PAM type: YTN; PAM sequence: CTA
  source 1..20: mol_type = other DNA
ccactgcttctgccatgcac

SEQ ID NO: 53981 - DNA, 20 bp, synthetic construct
  misc_feature 1..20: note = Description of Artificial Sequence: Synthetic oligonucleotide
  misc_feature 1..20: note = Target: SCN10A; (-) strand; PAM type: YTN; PAM sequence: TTC
  source 1..20: mol_type = other DNA
ctaccactgcttctgccatg

SEQ ID NO: 53982 - DNA, 20 bp, synthetic construct
  misc_feature 1..20: note = Description of Artificial Sequence: Synthetic oligonucleotide
  misc_feature 1..20: note = Target: SCN10A; (-) strand; PAM type: YTN; PAM sequence: TTC
  source 1..20: mol_type = other DNA
ccaagtggttcctaccactg

SEQ ID NO: 53983 - DNA, 20 bp, synthetic construct
  misc_feature 1..20: note = Description of Artificial Sequence: Synthetic oligonucleotide
  misc_feature 1..20: note = Target: SCN10A; (-) strand; PAM type: YTN; PAM sequence: TTT
  source 1..20: mol_type = other DNA
cccaagtggttcctaccact

SEQ ID NO: 53984 - DNA, 20 bp, synthetic construct
  misc_feature 1..20: note = Description of Artificial Sequence: Synthetic oligonucleotide
  misc_feature 1..20: note = Target: SCN10A; (-) strand; PAM type: YTN; PAM sequence: TTC
  source 1..20: mol_type = other DNA
aatacatcatttcccaagtg

SEQ ID NO: 53985 - DNA, 20 bp, synthetic construct
  misc_feature 1..20: note = Description of Artificial Sequence: Synthetic oligonucleotide
  misc_feature 1..20: note = Target: SCN10A; (-) strand; PAM type: YTN; PAM sequence: TTT
  source 1..20: mol_type = other DNA
caatacatcatttcccaagt

SEQ ID NO: 53986 - DNA, 20 bp, synthetic construct
  misc_feature 1..20: note = Description of Artificial Sequence: Synthetic oligonucleotide
  misc_feature 1..20: note = Target: SCN10A; (-) strand; PAM type: YTN; PAM sequence: TTT
  source 1..20: mol_type = other DNA
tcaatacatcatttcccaag

SEQ ID NO: 53987 - DNA, 20 bp, synthetic construct
  misc_feature 1..20: note = Description of Artificial Sequence: Synthetic oligonucleotide
  misc_feature 1..20: note = Target: SCN10A; (-) strand; PAM type: YTN; PAM sequence: TTT
  source 1..20: mol_type = other DNA
ttcaatacatcatttcccaa

SEQ ID NO: 53988 - DNA, 20 bp, synthetic construct
  misc_feature 1..20: note = Description of Artificial Sequence: Synthetic oligonucleotide
  misc_feature 1..20: note = Target: SCN10A; (-) strand; PAM type: YTN; PAM sequence: TTT
  source 1..20: mol_type = other DNA
tttcaatacatcatttccca

SEQ ID NO: 53989 - DNA, 20 bp, synthetic construct
  misc_feature 1..20: note = Description of Artificial Sequence: Synthetic oligonucleotide
  misc_feature 1..20: note = Target: SCN10A; (-) strand; PAM type: YTN; PAM sequence: TTT
  source 1..20: mol_type = other DNA
ttttcaatacatcatttccc

SEQ ID NO: 53990 - DNA, 20 bp, synthetic construct
  misc_feature 1..20: note = Description of Artificial Sequence: Synthetic oligonucleotide
  misc_feature 1..20: note = Target: SCN10A; (-) strand; PAM type: YTN; PAM sequence: TTC
  source 1..20: mol_type = other DNA
caacatttttttcaatacat

SEQ ID NO: 53991 - DNA, 20 bp, synthetic construct
  misc_feature 1..20: note = Description of Artificial Sequence: Synthetic oligonucleotide
  misc_feature 1..20: note = Target: SCN10A; (-) strand; PAM type: YTN; PAM sequence: TTA
  source 1..20: mol_type = other DNA
ttccaacatttttttcaata

SEQ ID NO: 53992 - DNA, 20 bp, synthetic construct
  misc_feature 1..20: note = Description of Artificial Sequence: Synthetic oligonucleotide
  misc_feature 1..20: note = Target: SCN10A; (-) strand; PAM type: YTN; PAM sequence: TTC
  source 1..20: mol_type = other DNA
catatggattattccaacat

SEQ ID NO: 53993 - DNA, 20 bp, synthetic construct
  misc_feature 1..20: note = Description of Artificial Sequence: Synthetic oligonucleotide
  misc_feature 1..20: note = Target: SCN10A; (-) strand; PAM type: YTN; PAM sequence: TTT
  source 1..20: mol_type = other DNA
ccatatggattattccaaca

SEQ ID NO: 53994 - DNA, 20 bp, synthetic construct
  misc_feature 1..20: note = Description of Artificial Sequence: Synthetic oligonucleotide
  misc_feature 1..20: note = Target: SCN10A; (-) strand; PAM type: YTN; PAM sequence: TTT
  source 1..20: mol_type = other DNA
tccatatggattattccaac

SEQ ID NO: 53995 - DNA, 20 bp, synthetic construct
  misc_feature 1..20: note = Description of Artificial Sequence: Synthetic oligonucleotide
  misc_feature 1..20: note = Target: SCN10A; (-) strand; PAM type: YTN; PAM sequence: TTT
  source 1..20: mol_type = other DNA
ttccatatggattattccaa

SEQ ID NO: 53996 - DNA, 20 bp, synthetic construct
  misc_feature 1..20: note = Description of Artificial Sequence: Synthetic oligonucleotide
  misc_feature 1..20: note = Target: SCN10A; (-) strand; PAM type: YTN; PAM sequence: TTC
  source 1..20: mol_type = other DNA
caatatttttccatatggat

SEQ ID NO: 53997 - DNA, 20 bp, synthetic construct
  misc_feature 1..20: note = Description of Artificial Sequence: Synthetic oligonucleotide
  misc_feature 1..20: note = Target: SCN10A; (-) strand; PAM type: YTN; PAM sequence: CTT
  source 1..20: mol_type = other DNA
ccaatatttttccatatgga

SEQ ID NO: 53998 - DNA, 20 bp, synthetic construct
  misc_feature 1..20: note = Description of Artificial Sequence: Synthetic oligonucleotide
  misc_feature 1..20: note = Target: SCN10A; (-) strand; PAM type: YTN; PAM sequence: TTG
  source 1..20: mol_type = other DNA
tatgtgtgtggtatgagata

SEQ ID NO: 53999 - DNA, 20 bp, synthetic construct
  misc_feature 1..20: note = Description of Artificial Sequence: Synthetic oligonucleotide
  misc_feature 1..20: note = Target: SCN10A; (-) strand; PAM type: YTN; PAM sequence: TTT
  source 1..20: mol_type = other DNA
gtatgtgtgtggtatgagat

SEQ ID NO: 54000 - DNA, 20 bp, synthetic construct
  misc_feature 1..20: note = Description of Artificial Sequence: Synthetic oligonucleotide
  misc_feature 1..20: note = Target: SCN10A; (-) strand; PAM type: YTN; PAM sequence: TTT
  source 1..20: mol_type = other DNA
tgtatgtgtgtggtatgaga

SEQ ID NO: 54001 - DNA, 20 bp, synthetic construct
  misc_feature 1..20: note = Description of Artificial Sequence: Synthetic oligonucleotide
  misc_feature 1..20: note = Target: SCN10A; (-) strand; PAM type: YTN; PAM sequence: TTT
  source 1..20: mol_type = other DNA
ttgtatgtgtgtggtatgag

SEQ ID NO: 54002 - DNA, 20 bp, synthetic construct
  misc_feature 1..20: note = Description of Artificial Sequence: Synthetic oligonucleotide
  misc_feature 1..20: note = Target: SCN10A; (-) strand; PAM type: YTN; PAM sequence: TTA
  source 1..20: mol_type = other DNA
tttttgtatgtgtgtggtat

SEQ ID NO: 54003 - DNA, 20 bp, synthetic construct
  misc_feature 1..20: note = Description of Artificial Sequence: Synthetic oligonucleotide
  misc_feature 1..20: note = Target: SCN10A; (-) strand; PAM type: YTN; PAM sequence: TTT
  source 1..20: mol_type = other DNA
atttttgtatgtgtgtggta

SEQ ID NO: 54004 - DNA, 20 bp, synthetic construct
  misc_feature 1..20: note = Description of Artificial Sequence: Synthetic oligonucleotide
  misc_feature 1..20: note = Target: SCN10A; (-) strand; PAM type: YTN; PAM sequence: CTA
  source 1..20: mol_type = other DNA
gaatttatttttgtatgtgt

SEQ ID NO: 54005 - DNA, 20 bp, synthetic construct
  misc_feature 1..20: note = Description of Artificial Sequence: Synthetic oligonucleotide
  misc_feature 1..20: note = Target: SCN10A; (-) strand; PAM type: YTN; PAM sequence: CTC
  source 1..20: mol_type = other DNA
ctagaatttatttttgtatg

SEQ ID NO: 54006 - DNA, 20 bp, synthetic construct
  misc_feature 1..20: note = Description of Artificial Sequence: Synthetic oligonucleotide
  misc_feature 1..20: note = Target: SCN10A; (-) strand; PAM type: YTN; PAM sequence: TTC
  source 1..20: mol_type = other DNA
aatctcctagaatttatttt

SEQ ID NO: 54007 - DNA, 20 bp, synthetic construct
  misc_feature 1..20: note = Description of Artificial Sequence: Synthetic oligonucleotide
  misc_feature 1..20: note = Target: SCN10A; (-) strand; PAM type: YTN; PAM sequence: TTT
  source 1..20: mol_type = other DNA
caatctcctagaatttattt

SEQ ID NO: 54008 - DNA, 20 bp, synthetic construct
  misc_feature 1..20: note = Description of Artificial Sequence: Synthetic oligonucleotide
  misc_feature 1..20: note = Target: SCN10A; (-) strand; PAM type: YTN; PAM sequence: TTA
  source 1..20: mol_type = other DNA
ggtatttcaatctcctagaa

SEQ ID NO: 54009 - DNA, 20 bp, synthetic construct
  misc_feature 1..20: note = Description of Artificial Sequence: Synthetic oligonucleotide
  misc_feature 1..20: note = Target: SCN10A; (-) strand; PAM type: YTN; PAM sequence: TTT
  source 1..20: mol_type = other DNA
aggtatttcaatctcctaga

SEQ ID NO: 54010 - DNA, 20 bp, synthetic construct
  misc_feature 1..20: note = Description of Artificial Sequence: Synthetic oligonucleotide
  misc_feature 1..20: note = Target: SCN10A; (-) strand; PAM type: YTN; PAM sequence: CTA
  source 1..20: mol_type = other DNA
catttaggtatttcaatctc

SEQ ID NO: 54011 - DNA, 20 bp, synthetic construct
  misc_feature 1..20: note = Description of Artificial Sequence: Synthetic oligonucleotide
  misc_feature 1..20: note = Target: SCN10A; (-) strand; PAM type: YTN; PAM sequence: TTC
  source 1..20: mol_type = other DNA
tacatttaggtatttcaatc

SEQ ID NO: 54012 - DNA, 20 bp, synthetic construct
  misc_feature 1..20: note = Description of Artificial Sequence: Synthetic oligonucleotide
  misc_feature 1..20: note = Target: SCN10A; (-) strand; PAM type: YTN; PAM sequence: TTT
  source 1..20: mol_type = other DNA
ctacatttaggtatttcaat

SEQ ID NO: 54013 - DNA, 20 bp, synthetic construct
  misc_feature 1..20: note = Description of Artificial Sequence: Synthetic oligonucleotide
  misc_feature 1..20: note = Target: SCN10A; (-) strand; PAM type: YTN; PAM sequence: CTT
  source 1..20: mol_type = other DNA
tctacatttaggtatttcaa

SEQ ID NO: 54014 - DNA, 20 bp, synthetic construct
  misc_feature 1..20: note = Description of Artificial Sequence: Synthetic oligonucleotide
  misc_feature 1..20: note = Target: SCN10A; (-) strand; PAM type: YTN; PAM sequence: TTC
  source 1..20: mol_type = other DNA
ctttctacatttaggtattt

SEQ ID NO: 54015 - DNA, 20 bp, synthetic construct
  misc_feature 1..20: note = Description of Artificial Sequence: Synthetic oligonucleotide
  misc_feature 1..20: note = Target: SCN10A; (-) strand; PAM type: YTN; PAM sequence: TTT
  source 1..20: mol_type = other DNA
cctttctacatttaggtatt

SEQ ID NO: 54016 - DNA, 20 bp, synthetic construct
  misc_feature 1..20: note = Description of Artificial Sequence: Synthetic oligonucleotide
  misc_feature 1..20: note = Target: SCN10A; (-) strand; PAM type: YTN; PAM sequence: TTT
  source 1..20: mol_type = other DNA
tcctttctacatttaggtat

SEQ ID NO: 54017 - DNA, 20 bp, synthetic construct
  misc_feature 1..20: note = Description of Artificial Sequence: Synthetic oligonucleotide
  misc_feature 1..20: note = Target: SCN10A; (-) strand; PAM type: YTN; PAM sequence: TTA
  source 1..20: mol_type = other DNA
cagttttcctttctacattt

SEQ ID NO: 54018 - DNA, 20 bp, synthetic construct
  misc_feature 1..20: note = Description of Artificial Sequence: Synthetic oligonucleotide
  misc_feature 1..20: note = Target: SCN10A; (-) strand; PAM type: YTN; PAM sequence: CTC
  source 1..20: mol_type = other DNA
aaagttacagttttcctttc

SEQ ID NO: 54019 - DNA, 20 bp, synthetic construct
  misc_feature 1..20: note = Description of Artificial Sequence: Synthetic oligonucleotide
  misc_feature 1..20: note = Target: SCN10A; (-) strand; PAM type: YTN; PAM sequence: CTC
  source 1..20: mol_type = other DNA
ctcaaagttacagttttcct

SEQ ID NO: 54020 - DNA, 20 bp, synthetic construct
  misc_feature 1..20: note = Description of Artificial Sequence: Synthetic oligonucleotide
  misc_feature 1..20: note = Target: SCN10A; (-) strand; PAM type: YTN; PAM sequence: TTC
  source 1..20: mol_type = other DNA
tcctcaaagttacagttttc

SEQ ID NO: 54021 - DNA, 20 bp, synthetic construct
  misc_feature 1..20: note = Description of Artificial Sequence: Synthetic oligonucleotide
  misc_feature 1..20: note = Target: SCN10A; (-) strand; PAM type: YTN; PAM sequence: TTT
  source 1..20: mol_type = other DNA
ctcctcaaagttacagtttt

SEQ ID NO: 54022 - DNA, 20 bp, synthetic construct
  misc_feature 1..20: note = Description of Artificial Sequence: Synthetic oligonucleotide
  misc_feature 1..20: note = Target: SCN10A; (-) strand; PAM type: YTN; PAM sequence: TTT
  source 1..20: mol_type = other DNA
tctcctcaaagttacagttt

SEQ ID NO: 54023 - DNA, 20 bp, synthetic construct
  misc_feature 1..20: note = Description of Artificial Sequence: Synthetic oligonucleotide
  misc_feature 1..20: note = Target: SCN10A; (-) strand; PAM type: YTN; PAM sequence: CTG
  source 1..20: mol_type = other DNA
tgttttctcctcaaagttac

SEQ ID NO: 54024 - DNA, 20 bp, synthetic construct
  misc_feature 1..20: note = Description of Artificial Sequence: Synthetic oligonucleotide
  misc_feature 1..20: note = Target: SCN10A; (-) strand; PAM type: YTN; PAM sequence: TTA
  source 1..20: mol_type = other DNA
tcctgtgttttctcctcaaa

SEQ ID NO: 54025 - DNA, 20 bp, synthetic construct
  misc_feature 1..20: note = Description of Artificial Sequence: Synthetic oligonucleotide
  misc_feature 1..20: note = Target: SCN10A; (-) strand; PAM type: YTN; PAM sequence: TTC
  source 1..20: mol_type = other DNA
cataaagatattatcctgtg

SEQ ID NO: 54026 - DNA, 20 bp, synthetic construct
  misc_feature 1..20: note = Description of Artificial Sequence: Synthetic oligonucleotide
  misc_feature 1..20: note = Target: SCN10A; (-) strand; PAM type: YTN; PAM sequence: TTG
  source 1..20: mol_type = other DNA
ccatatagtattccataaag

SEQ ID NO: 54027 - DNA, 20 bp, synthetic construct
  misc_feature 1..20: note = Description of Artificial Sequence: Synthetic oligonucleotide
  misc_feature 1..20: note = Target: SCN10A; (-) strand; PAM type: YTN; PAM sequence: TTA
  source 1..20: mol_type = other DNA
ttgccatatagtattccata

SEQ ID NO: 54028 - DNA, 20 bp, synthetic construct
  misc_feature 1..20: note = Description of Artificial Sequence: Synthetic oligonucleotide
  misc_feature 1..20: note = Target: SCN10A; (-) strand; PAM type: YTN; PAM sequence: TTT
  source 1..20: mol_type = other DNA
attgccatatagtattccat

SEQ ID NO: 54029 - DNA, 20 bp, synthetic construct
  misc_feature 1..20: note = Description of Artificial Sequence: Synthetic oligonucleotide
  misc_feature 1..20: note = Target: SCN10A; (-) strand; PAM type: YTN; PAM sequence: TTT
  source 1..20: mol_type = other DNA
tattgccatatagtattcca

SEQ ID NO: 54030 - DNA, 20 bp, synthetic construct
  misc_feature 1..20: note = Description of Artificial Sequence: Synthetic oligonucleotide
  misc_feature 1..20: note = Target: SCN10A; (-) strand; PAM type: YTN; PAM sequence: TTT
  source 1..20: mol_type = other DNA
ttattgccatatagtattcc

SEQ ID NO: 54031 - DNA, 20 bp, synthetic construct
  misc_feature 1..20: note = Description of Artificial Sequence: Synthetic oligonucleotide
  misc_feature 1..20: note = Target: SCN10A; (-) strand; PAM type: YTN; PAM sequence: TTT
  source 1..20: mol_type = other DNA
tttattgccatatagtattc

SEQ ID NO: 54032 - DNA, 20 bp, synthetic construct
  misc_feature 1..20: note = Description of Artificial Sequence: Synthetic oligonucleotide
  misc_feature 1..20: note = Target: SCN10A; (-) strand; PAM type: YTN; PAM sequence: TTC
  source 1..20: mol_type = other DNA
attttttattgccatatagt

SEQ ID NO: 54033 - DNA, 20 bp, synthetic construct
  misc_feature 1..20: note = Description of Artificial Sequence: Synthetic oligonucleotide
  misc_feature 1..20: note = Target: SCN10A; (-) strand; PAM type: YTN; PAM sequence: TTC
  source 1..20: mol_type = other DNA
attcattttttattgccata

SEQ ID NO: 54034 - DNA, 20 bp, synthetic construct
  misc_feature 1..20: note = Description of Artificial Sequence: Synthetic oligonucleotide
  misc_feature 1..20: note = Target: SCN10A; (-) strand; PAM type: YTN; PAM sequence: CTA
  source 1..20: mol_type = other DNA
attcattcattttttattgc

SEQ ID NO: 54035 - DNA, 20 bp, synthetic construct
  misc_feature 1..20: note = Description of Artificial Sequence: Synthetic oligonucleotide
  misc_feature 1..20: note = Target: SCN10A; (-) strand; PAM type: YTN; PAM sequence: TTG
  source 1..20: mol_type = other DNA
cccaaatggatacatgtaga

SEQ ID NO: 54036 - DNA, 20 bp, synthetic construct
  misc_feature 1..20: note = Description of Artificial Sequence: Synthetic oligonucleotide
  misc_feature 1..20: note = Target: SCN10A; (-) strand; PAM type: YTN; PAM sequence: TTT
  source 1..20: mol_type = other DNA
gcccaaatggatacatgtag

SEQ ID NO: 54037 - DNA, 20 bp, synthetic construct
  misc_feature 1..20: note = Description of Artificial Sequence: Synthetic oligonucleotide
  misc_feature 1..20: note = Target: SCN10A; (-) strand; PAM type: YTN; PAM sequence: TTG
  source 1..20: mol_type = other DNA
ggatttgcccaaatggatac

SEQ ID NO: 54038 - DNA, 20 bp, synthetic construct
  misc_feature 1..20: note = Description of Artificial Sequence: Synthetic oligonucleotide
  misc_feature 1..20: note = Target: SCN10A; (-) strand; PAM type: YTN; PAM sequence: TTT
  source 1..20: mol_type = other DNA
gggatttgcccaaatggata

SEQ ID NO: 54039 - DNA, 20 bp, synthetic construct
  misc_feature 1..20: note = Description of Artificial Sequence: Synthetic oligonucleotide
  misc_feature 1..20: note = Target: SCN10A; (-) strand; PAM type: YTN; PAM sequence: TTT
  source 1..20: mol_type = other DNA
tgggatttgcccaaatggat

SEQ ID NO: 54040 - DNA, 20 bp, synthetic construct
  misc_feature 1..20: note = Description of Artificial Sequence: Synthetic oligonucleotide
  misc_feature 1..20: note = Target: SCN10A; (-) strand; PAM type: YTN; PAM sequence: TTT
  source 1..20: mol_type = other DNA
ttgggatttgcccaaatgga

SEQ ID NO: 54041 - DNA, 20 bp, synthetic construct
  misc_feature 1..20: note = Description of Artificial Sequence: Synthetic oligonucleotide
  misc_feature 1..20: note = Target: SCN10A; (-) strand; PAM type: YTN; PAM sequence: TTA
  source 1..20: mol_type = other DNA
tgtttttgggatttgcccaa

SEQ ID NO: 54042 - DNA, 20 bp, synthetic construct
  misc_feature 1..20: note = Description of Artificial Sequence: Synthetic oligonucleotide
  misc_feature 1..20: note = Target: SCN10A; (-) strand; PAM type: YTN; PAM sequence: TTA
  source 1..20: mol_type = other DNA
aaattatgtttttgggattt

SEQ ID NO: 54043 - DNA, 20 bp, synthetic construct
  misc_feature 1..20: note = Description of Artificial Sequence: Synthetic oligonucleotide
  misc_feature 1..20: note = Target: SCN10A; (-) strand; PAM type: YTN; PAM sequence: TTT
  source 1..20: mol_type = other DNA
aaaattatgtttttgggatt

SEQ ID NO: 54044 - DNA, 20 bp, synthetic construct
  misc_feature 1..20: note = Description of Artificial Sequence: Synthetic oligonucleotide
  misc_feature 1..20: note = Target: SCN10A; (-) strand; PAM type: YTN; PAM sequence: TTT
  source 1..20: mol_type = other DNA
taaaattatgtttttgggat

SEQ ID NO: 54045 - DNA, 20 bp, synthetic construct
  misc_feature 1..20: note = Description of Artificial Sequence: Synthetic oligonucleotide
  misc_feature 1..20: note = Target: SCN10A; (-) strand; PAM type: YTN; PAM sequence: CTG
  source 1..20: mol_type = other DNA
atgttttaaaattatgtttt

SEQ ID NO: 54046 - DNA, 20 bp, synthetic construct
  misc_feature 1..20: note = Description of Artificial Sequence: Synthetic oligonucleotide
  misc_feature 1..20: note = Target: SCN10A; (-) strand; PAM type: YTN; PAM sequence: TTA
  source 1..20: mol_type = other DNA
tctgatgttttaaaattatg

SEQ ID NO: 54047 - DNA, 20 bp, synthetic construct
  misc_feature 1..20: note = Description of Artificial Sequence: Synthetic oligonucleotide
  misc_feature 1..20: note = Target: SCN10A; (-) strand; PAM type: YTN; PAM sequence: TTT
  source 1..20: mol_type = other DNA
atctgatgttttaaaattat

SEQ ID NO: 54048 - DNA, 20 bp, synthetic construct
  misc_feature 1..20: note = Description of Artificial Sequence: Synthetic oligonucleotide
  misc_feature 1..20: note = Target: SCN10A; (-) strand; PAM type: YTN; PAM sequence: CTT
  source 1..20: mol_type = other DNA
tatctgatgttttaaaatta

SEQ ID NO: 54049 - DNA, 20 bp, synthetic construct
  misc_feature 1..20: note = Description of Artificial Sequence: Synthetic oligonucleotide
  misc_feature 1..20: note = Target: SCN10A; (-) strand; PAM type: YTN; PAM sequence: TTA
  source 1..20: mol_type = other DNA
tatgtgtgctttatctgatg

SEQ ID NO: 54050 - DNA, 20 bp, synthetic construct
  misc_feature 1..20: note = Description of Artificial Sequence: Synthetic oligonucleotide
  misc_feature 1..20: note = Target: SCN10A; (-) strand; PAM type: YTN; PAM sequence: TTT
  source 1..20: mol_type = other DNA
atatgtgtgctttatctgat

SEQ ID NO: 54051 - DNA, 20 bp, synthetic construct
  misc_feature 1..20: note = Description of Artificial Sequence: Synthetic oligonucleotide
  misc_feature 1..20: note = Target: SCN10A; (-) strand; PAM type: YTN; PAM sequence: TTT
  source 1..20: mol_type = other DNA
tatatgtgtgctttatctga

SEQ ID NO: 54052 - DNA, 20 bp, synthetic construct
  misc_feature 1..20: note = Description of Artificial Sequence: Synthetic oligonucleotide
  misc_feature 1..20: note = Target: SCN10A; (-) strand; PAM type: YTN; PAM sequence: TTA
  source 1..20: mol_type = other DNA
tcattttatatgtgtgcttt

SEQ ID NO: 54053 - DNA, 20 bp, synthetic construct
  misc_feature 1..20: note = Description of Artificial Sequence: Synthetic oligonucleotide
  misc_feature 1..20: note = Target: SCN10A; (-) strand; PAM type: YTN; PAM sequence: CTG
  source 1..20: mol_type = other DNA
ttatcattttatatgtgtgc

SEQ ID NO: 54054 - DNA, 20 bp, synthetic construct
  misc_feature 1..20: note = Description of Artificial Sequence: Synthetic oligonucleotide
  misc_feature 1..20: note = Target: SCN10A; (-) strand; PAM type: YTN; PAM sequence: TTA
  source 1..20: mol_type = other DNA
tggaactgttatcattttat

SEQ ID NO: 54055 - DNA, 20 bp, synthetic construct
  misc_feature 1..20: note = Description of Artificial Sequence: Synthetic oligonucleotide
  misc_feature 1..20: note = Target: SCN10A; (-) strand; PAM type: YTN; PAM sequence: TTT
  source 1..20: mol_type = other DNA
atggaactgttatcatttta

SEQ ID NO: 54056 - DNA, 20 bp, synthetic construct
  misc_feature 1..20: note = Description of Artificial Sequence: Synthetic oligonucleotide
  misc_feature 1..20: note = Target: SCN10A; (-) strand; PAM type: YTN; PAM sequence: TTC
  source 1..20: mol_type = other DNA
aaatttatggaactgttatc

SEQ ID NO: 54057 - DNA, 20 bp, synthetic construct
  misc_feature 1..20: note = Description of Artificial Sequence: Synthetic oligonucleotide
  misc_feature 1..20: note = Target: SCN10A; (-) strand; PAM type: YTN; PAM sequence: TTT
  source 1..20: mol_type = other DNA
caaatttatggaactgttat

SEQ ID NO: 54058 - DNA, 20 bp, synthetic construct
  misc_feature 1..20: note = Description of Artificial Sequence: Synthetic oligonucleotide
  misc_feature 1..20: note = Target: SCN10A; (-) strand; PAM type: YTN; PAM sequence: TTT
  source 1..20: mol_type = other DNA
tcaaatttatggaactgtta

SEQ ID NO: 54059 - DNA, 20 bp, synthetic construct
  misc_feature 1..20: note = Description of Artificial Sequence: Synthetic oligonucleotide
  misc_feature 1..20: note = Target: SCN10A; (-) strand; PAM type: YTN; PAM sequence: CTT
  source 1..20: mol_type = other DNA
ttcaaatttatggaactgtt

SEQ ID NO: 54060 - DNA, 20 bp, synthetic construct
  misc_feature 1..20: note = Description of Artificial Sequence: Synthetic oligonucleotide
  misc_feature 1..20: note = Target: SCN10A; (-) strand; PAM type: YTN; PAM sequence: TTG
  source 1..20: mol_type = other DNA
tatcttttcaaatttatgga

SEQ ID NO: 54061 - DNA, 20 bp, synthetic construct
  misc_feature 1..20: note = Description of Artificial Sequence: Synthetic oligonucleotide
  misc_feature 1..20: note = Target: SCN10A; (-) strand; PAM type: YTN; PAM sequence: TTT
  source 1..20: mol_type = other DNA
gtatcttttcaaatttatgg

SEQ ID NO: 54062 - DNA, 20 bp, synthetic construct
  misc_feature 1..20: note = Description of Artificial Sequence: Synthetic oligonucleotide
  misc_feature 1..20: note = Target: SCN10A; (-) strand; PAM type: YTN; PAM sequence: TTG
  source 1..20: mol_type = other DNA
atttgtatcttttcaaattt

SEQ ID NO: 54063 - DNA, 20 bp, synthetic construct
  misc_feature 1..20: note = Description of Artificial Sequence: Synthetic oligonucleotide
  misc_feature 1..20: note = Target: SCN10A; (-) strand; PAM type: YTN; PAM sequence: CTG
  source 1..20: mol_type = other DNA
catgcataaagtattgattt

SEQ ID NO: 54064 - DNA, 20 bp, synthetic construct
  misc_feature 1..20: note = Description of Artificial Sequence: Synthetic oligonucleotide
  misc_feature 1..20: note = Target: SCN10A; (-) strand; PAM type: YTN; PAM sequence: TTA
  source 1..20: mol_type = other DNA
acactgcatgcataaagtat

SEQ ID NO: 54065 - DNA, 20 bp, synthetic construct
  misc_feature 1..20: note = Description of Artificial Sequence: Synthetic oligonucleotide
  misc_feature 1..20: note = Target: SCN10A; (-) strand; PAM type: YTN; PAM sequence: TTT
  source 1..20: mol_type = other DNA
aacactgcatgcataaagta

SEQ ID NO: 54066 - DNA, 20 bp, synthetic construct
  misc_feature 1..20: note = Description of Artificial Sequence: Synthetic oligonucleotide
  misc_feature 1..20: note = Target: SCN10A; (-) strand; PAM type: YTN; PAM sequence: CTG
  source 1..20: mol_type = other DNA
caaacggggaagtgggtgtt

SEQ ID NO: 54067 - DNA, 20 bp, synthetic construct
  misc_feature 1..20: note = Description of Artificial Sequence: Synthetic oligonucleotide
  misc_feature 1..20: note = Target: SCN10A; (-) strand; PAM type: YTN; PAM sequence: CTA
  source 1..20: mol_type = other DNA
ctgcaaacggggaagtgggt

SEQ ID NO: 54068 - DNA, 20 bp, synthetic construct
  misc_feature 1..20: note = Description of Artificial Sequence: Synthetic oligonucleotide
  misc_feature 1..20: note = Target: SCN10A; (-) strand; PAM type: YTN; PAM sequence: CTG
  source 1..20: mol_type = other DNA
aatctactgcaaacggggaa

SEQ ID NO: 54069 - DNA, 20 bp, synthetic construct
  misc_feature 1..20: note = Description of Artificial Sequence: Synthetic oligonucleotide
  misc_feature 1..20: note = Target: SCN10A; (-) strand; PAM type: YTN; PAM sequence: CTG
  source 1..20: mol_type = other DNA
gcaaagaacatgtgaaatga

SEQ ID NO: 54070 - DNA, 20 bp, synthetic construct
  misc_feature 1..20: note = Description of Artificial Sequence: Synthetic oligonucleotide
  misc_feature 1..20: note = Target: SCN10A; (-) strand; PAM type: YTN; PAM sequence: CTC
  source 1..20: mol_type = other DNA
acctggcaaagaacatgtga

SEQ ID NO: 54071 - DNA, 20 bp, synthetic construct
  misc_feature 1..20: note = Description of Artificial Sequence: Synthetic oligonucleotide
  misc_feature 1..20: note = Target: SCN10A; (-) strand; PAM type: YTN; PAM sequence: TTC
  source 1..20: mol_type = other DNA
tcacctggcaaagaacatgt

SEQ ID NO: 54072 - DNA, 20 bp, synthetic construct
  misc_feature 1..20: note = Description of Artificial Sequence: Synthetic oligonucleotide
  misc_feature 1..20: note = Target: SCN10A; (-) strand; PAM type: YTN; PAM sequence: TTT
  source 1..20: mol_type = other DNA
ctcacctggcaaagaacatg

SEQ ID NO: 54073 - DNA, 20 bp, synthetic construct
  misc_feature 1..20: note = Description of Artificial Sequence: Synthetic oligonucleotide
  misc_feature 1..20: note = Target: SCN10A; (-) strand; PAM type: YTN; PAM sequence: TTT
  source 1..20: mol_type = other DNA
tctcacctggcaaagaacat

SEQ ID NO: 54074 - DNA, 20 bp, synthetic construct
  misc_feature 1..20: note = Description of Artificial Sequence: Synthetic oligonucleotide
  misc_feature 1..20: note = Target: SCN10A; (-) strand; PAM type: YTN; PAM sequence: TTG
  source 1..20: mol_type = other DNA
tagagaagataaatgttttc

SEQ ID NO: 54075 - DNA, 20 bp, synthetic construct
  misc_feature 1..20: note = Description of Artificial Sequence: Synthetic oligonucleotide
  misc_feature 1..20: note = Target: SCN10A; (-) strand; PAM type: YTN; PAM sequence: TTG
  source 1..20: mol_type = other DNA
gttgtagagaagataaatgt

SEQ ID NO: 54076 - DNA, 20 bp, synthetic construct
  misc_feature 1..20: note = Description of Artificial Sequence: Synthetic oligonucleotide
  misc_feature 1..20: note = Target: SCN10A; (-) strand; PAM type: YTN; PAM sequence: TTT
  source 1..20: mol_type = other DNA
ggttgtagagaagataaatg

SEQ ID NO: 54077 - DNA, 20 bp, synthetic construct
  misc_feature 1..20: note = Description of Artificial Sequence: Synthetic oligonucleotide
  misc_feature 1..20: note = Target: SCN10A; (-) strand; PAM type: YTN; PAM sequence: TTA
  source 1..20: mol_type = other DNA
tagcaatttggttgtagaga

SEQ ID NO: 54078 - DNA, 20 bp, synthetic construct
  misc_feature 1..20: note = Description of Artificial Sequence: Synthetic oligonucleotide
  misc_feature 1..20: note = Target: SCN10A; (-) strand; PAM type: YTN; PAM sequence: TTG
  source 1..20: mol_type = other DNA
acaaattatagcaatttggt

SEQ ID NO: 54079 - DNA, 20 bp, synthetic construct
  misc_feature 1..20: note = Description of Artificial Sequence: Synthetic oligonucleotide
  misc_feature 1..20: note = Target: SCN10A; (-) strand; PAM type: YTN; PAM sequence: TTT
  source 1..20: mol_type = other DNA
gacaaattatagcaatttgg

SEQ ID NO: 54080 - DNA, 20 bp, synthetic construct
  misc_feature 1..20: note = Description of Artificial Sequence: Synthetic oligonucleotide
  misc_feature 1..20: note = Target: SCN10A; (-) strand; PAM type: YTN; PAM sequence: CTT
  source 1..20: mol_type = other DNA
tgacaaattatagcaatttg

SEQ ID NO: 54081 - DNA, 20 bp, synthetic construct
  misc_feature 1..20: note = Description of Artificial Sequence: Synthetic oligonucleotide
  misc_feature 1..20: note = Target: SCN10A; (-) strand; PAM type: YTN; PAM sequence: CTG
  source 1..20: mol_type = other DNA
gaaaacctttgacaaattat

SEQ ID NO: 54082 - DNA, 20 bp, synthetic construct
  misc_feature 1..20: note = Description of Artificial Sequence: Synthetic oligonucleotide
  misc_feature 1..20: note = Target: SCN10A; (-) strand; PAM type: YTN; PAM sequence: TTC
  source 1..20: mol_type = other DNA
tggaaaacctttgacaaatt

SEQ ID NO: 54083 - DNA, 20 bp, synthetic construct
  misc_feature 1..20: note = Description of Artificial Sequence: Synthetic oligonucleotide
  misc_feature 1..20: note = Target: SCN10A; (-) strand; PAM type: YTN; PAM sequence: CTA
  source 1..20: mol_type = other DNA
agcataacaatattctggaa

SEQ ID NO: 54084 - DNA, 20 bp, synthetic construct
  misc_feature 1..20: note = Description of Artificial Sequence: Synthetic oligonucleotide
  misc_feature 1..20: note = Target: SCN10A; (-) strand; PAM type: YTN; PAM sequence: CTC
  source 1..20: mol_type = other DNA
taagcataacaatattctgg

SEQ ID NO: 54085 - DNA, 20 bp, synthetic construct
  misc_feature 1..20: note = Description of Artificial Sequence: Synthetic oligonucleotide
  misc_feature 1..20: note = Target: SCN10A; (-) strand; PAM type: YTN; PAM sequence: CTC
  source 1..20: mol_type = other DNA
acctctaagcataacaatat

SEQ ID NO: 54086 - DNA, 20 bp, synthetic construct
  misc_feature 1..20: note = Description of Artificial Sequence: Synthetic oligonucleotide
  misc_feature 1..20: note = Target: SCN10A; (-) strand; PAM type: YTN; PAM sequence: CTA
  source 1..20: mol_type = other DNA
ggacactcacctctaagcat

SEQ ID NO: 54087 - DNA, 20 bp, synthetic construct
  misc_feature 1..20: note = Description of Artificial Sequence: Synthetic oligonucleotide
  misc_feature 1..20: note = Target: SCN10A; (-) strand; PAM type: YTN; PAM sequence: TTG
  source 1..20: mol_type = other DNA
atgaccctaggacactcacc

SEQ ID NO: 54088 - DNA, 20 bp, synthetic construct
  misc_feature 1..20: note = Description of Artificial Sequence: Synthetic oligonucleotide
  misc_feature 1..20: note = Target: SCN10A; (-) strand; PAM type: YTN; PAM sequence: TTT
  source 1..20: mol_type = other DNA
gatgaccctaggacactcac

SEQ ID NO: 54089 - DNA, 20 bp, synthetic construct
  misc_feature 1..20: note = Description of Artificial Sequence: Synthetic oligonucleotide
  misc_feature 1..20: note = Target: SCN10A; (-) strand; PAM type: YTN; PAM sequence: CTT
  source 1..20: mol_type = other DNA
tgatgaccctaggacactca

SEQ ID NO: 54090 - DNA, 20 bp, synthetic construct
  misc_feature 1..20: note = Description of Artificial Sequence: Synthetic oligonucleotide
  misc_feature 1..20: note = Target: SCN10A; (-) strand; PAM type: YTN; PAM sequence: CTC
  source 1..20: mol_type = other DNA
tttgatgaccctaggacact

SEQ ID NO: 54091 - DNA, 20 bp, synthetic construct
  misc_feature 1..20: note = Description of Artificial Sequence: Synthetic oligonucleotide
  misc_feature 1..20: note = Target: SCN10A; (-) strand; PAM type: YTN; PAM sequence: TTG
  source 1..20: mol_type = other DNA
aaggggctctttgatgaccc

SEQ ID NO: 54092 - DNA, 20 bp, synthetic construct
  misc_feature 1..20: note = Description of Artificial Sequence: Synthetic oligonucleotide
  misc_feature 1..20: note = Target: SCN10A; (-) strand; PAM type: YTN; PAM sequence: TTC
  source 1..20: mol_type = other DNA
agagaatcattgaaggggct

SEQ ID NO: 54093 - DNA, 20 bp, synthetic construct
  misc_feature 1..20: note = Description of Artificial Sequence: Synthetic oligonucleotide
  misc_feature 1..20: note = Target: SCN10A; (-) strand; PAM type: YTN; PAM sequence: TTT
  source 1..20: mol_type = other DNA
cagagaatcattgaaggggc

SEQ ID NO: 54094 - DNA, 20 bp, synthetic construct
  misc_feature 1..20: note = Description of Artificial Sequence: Synthetic oligonucleotide
  misc_feature 1..20: note = Target: SCN10A; (-) strand; PAM type: YTN; PAM sequence: CTG
  source 1..20: mol_type = other DNA
gtttcagagaatcattgaag

SEQ ID NO: 54095 - DNA, 20 bp, synthetic construct
  misc_feature 1..20: note = Description of Artificial Sequence: Synthetic oligonucleotide
  misc_feature 1..20: note = Target: SCN10A; (-) strand; PAM type: YTN; PAM sequence: CTC
  source 1..20: mol_type = other DNA
cccatgccctggtttcagag

SEQ ID NO: 54096 - DNA, 20 bp, synthetic construct
  misc_feature 1..20: note = Description of Artificial Sequence: Synthetic oligonucleotide
  misc_feature 1..20: note = Target: SCN10A; (-) strand; PAM type: YTN; PAM sequence: CTC
  source 1..20: mol_type = other DNA
tccccatgccctggtttcag

SEQ ID NO: 54097 - DNA, 20 bp, synthetic construct
  misc_feature 1..20: note = Description of Artificial Sequence: Synthetic oligonucleotide
  misc_feature 1..20: note = Target: SCN10A; (-) strand; PAM type: YTN; PAM sequence: CTA
  source 1..20: mol_type = other DNA
ctctccccatgccctggttt

SEQ ID NO: 54098 - DNA, 20 bp, synthetic construct
  misc_feature 1..20: note = Description of Artificial Sequence: Synthetic oligonucleotide
  misc_feature 1..20: note = Target: SCN10A; (-) strand; PAM type: YTN; PAM sequence: TTC
  source 1..20: mol_type = other DNA
ctactctccccatgccctgg

SEQ ID NO: 54099 - DNA, 20 bp, synthetic construct
  misc_feature 1..20: note = Description of Artificial Sequence: Synthetic oligonucleotide
  misc_feature 1..20: note = Target: SCN10A; (-) strand; PAM type: YTN; PAM sequence: TTT
  source 1..20: mol_type = other DNA
cctactctccccatgccctg

SEQ ID NO: 54100 - DNA, 20 bp, synthetic construct
  misc_feature 1..20: note = Description of Artificial Sequence: Synthetic oligonucleotide
  misc_feature 1..20: note = Target: SCN10A; (-) strand; PAM type: YTN; PAM sequence: CTT
  source 1..20: mol_type = other DNA
tcctactctccccatgccct

SEQ ID NO: 54101 - DNA, 20 bp, synthetic construct
  misc_feature 1..20: note = Description of Artificial Sequence: Synthetic oligonucleotide
  misc_feature 1..20: note = Target: SCN10A; (-) strand; PAM type: YTN; PAM sequence: CTA
  source 1..20: mol_type = other DNA
gaactttcctactctcccca

SEQ ID NO: 54102 - DNA, 20 bp, synthetic construct
  misc_feature 1..20: note = Description of Artificial Sequence: Synthetic oligonucleotide
  misc_feature 1..20: note = Target: SCN10A; (-) strand; PAM type: YTN; PAM sequence: TTA
  source 1..20: mol_type = other DNA
agaagggcaagactagaact

SEQ ID NO: 54103 - DNA, 20 bp, synthetic construct
  misc_feature 1..20: note = Description of Artificial Sequence: Synthetic oligonucleotide
  misc_feature 1..20: note = Target: SCN10A; (-) strand; PAM type: YTN; PAM sequence: TTG
  source 1..20: mol_type = other DNA
ttaagaagggcaagactaga

SEQ ID NO: 54104 - DNA, 20 bp, synthetic construct
  misc_feature 1..20: note = Description of Artificial Sequence: Synthetic oligonucleotide
  misc_feature 1..20: note = Target: SCN10A; (-) strand; PAM type: YTN; PAM sequence: TTG
  source 1..20: mol_type = other DNA
ggcaccagaaggtaaagaga

SEQ ID NO: 54105 - DNA, 20 bp, synthetic construct
  misc_feature 1..20: note = Description of Artificial Sequence: Synthetic oligonucleotide
  misc_feature 1..20: note = Target: SCN10A; (-) strand; PAM type: YTN; PAM sequence: CTC
  source 1..20: mol_type = other DNA
agattgggcaccagaaggta

SEQ ID NO: 54106 - DNA, 20 bp, synthetic construct
  misc_feature 1..20: note = Description of Artificial Sequence: Synthetic oligonucleotide
  misc_feature 1..20: note = Target: SCN10A; (-) strand; PAM type: YTN; PAM sequence: TTC
  source 1..20: mol_type = other DNA
ctcagattgggcaccagaag

SEQ ID NO: 54107 - DNA, 20 bp, synthetic construct
  misc_feature 1..20: note = Description of Artificial Sequence: Synthetic oligonucleotide
  misc_feature 1..20: note = Target: SCN10A; (-) strand; PAM type: YTN; PAM sequence: CTT
  source 1..20: mol_type = other DNA
cctcagattgggcaccagaa

SEQ ID NO: 54108 - DNA, 20 bp, synthetic construct
  misc_feature 1..20: note = Description of Artificial Sequence: Synthetic oligonucleotide
  misc_feature 1..20: note = Target: SCN10A; (-) strand; PAM type: YTN; PAM sequence: TTC
  source 1..20: mol_type = other DNA
ttcctcagattgggcaccag

SEQ ID NO: 54109 - DNA, 20 bp, synthetic construct
  misc_feature 1..20: note = Description of Artificial Sequence: Synthetic oligonucleotide
  misc_feature 1..20: note = Target: SCN10A; (-) strand; PAM type: YTN; PAM sequence: CTA
  source 1..20: mol_type = other DNA
gaggttcttcctcagattgg

SEQ ID NO: 54110 - DNA, 20 bp, synthetic construct
  misc_feature 1..20: note = Description of Artificial Sequence: Synthetic oligonucleotide
  misc_feature 1..20: note = Target: SCN10A; (-) strand; PAM type: YTN; PAM sequence: TTG
  source 1..20: mol_type = other DNA
ggaagaaactagaggttctt

SEQ ID NO: 54111 - DNA, 20 bp, synthetic construct
  misc_feature 1..20: note = Description of Artificial Sequence: Synthetic oligonucleotide
  misc_feature 1..20: note = Target: SCN10A; (-) strand; PAM type: YTN; PAM sequence: CTT
  source 1..20: mol_type = other DNA
gggaagaaactagaggttct

SEQ ID NO: 54112 - DNA, 20 bp, synthetic construct
  misc_feature 1..20: note = Description of Artificial Sequence: Synthetic oligonucleotide
  misc_feature 1..20: note = Target: SCN10A; (-) strand; PAM type: YTN; PAM sequence: TTG
  source 1..20: mol_type = other DNA
cttgggaagaaactagaggt

SEQ ID NO: 54113 - DNA, 20 bp, synthetic construct
  misc_feature 1..20: note = Description of Artificial Sequence: Synthetic oligonucleotide
  misc_feature 1..20: note = Target: SCN10A; (-) strand; PAM type: YTN; PAM sequence: TTT
  source 1..20: mol_type = other DNA
gcttgggaagaaactagagg

SEQ ID NO: 54114 - DNA, 20 bp, synthetic construct
  misc_feature 1..20: note = Description of Artificial Sequence: Synthetic oligonucleotide
  misc_feature 1..20: note = Target: SCN10A; (-) strand; PAM type: YTN; PAM sequence: TTT
  source 1..20: mol_type = other DNA
tgcttgggaagaaactagag

SEQ ID NO: 54115 - DNA, 20 bp, synthetic construct
  misc_feature 1..20: note = Description of Artificial Sequence: Synthetic oligonucleotide
  misc_feature 1..20: note = Target: SCN10A; (-) strand; PAM type: YTN; PAM sequence: CTT
  source 1..20: mol_type = other DNA
ttgcttgggaagaaactaga

SEQ ID NO: 54116 - DNA, 20 bp, synthetic construct
  misc_feature 1..20: note = Description of Artificial Sequence: Synthetic oligonucleotide
  misc_feature 1..20: note = Target: SCN10A; (-) strand; PAM type: YTN; PAM sequence: CTC
  source 1..20: mol_type = other DNA
ttttgcttgggaagaaacta

SEQ ID NO: 54117 - DNA, 20 bp, synthetic construct
  misc_feature 1..20: note = Description of Artificial Sequence: Synthetic oligonucleotide
  misc_feature 1..20: note = Target: SCN10A; (-) strand; PAM type: YTN; PAM sequence: CTA
  source 1..20: mol_type = other DNA
atcccctcttttgcttggga

SEQ ID NO: 54118 - DNA, 20 bp, synthetic construct
  misc_feature 1..20: note = Description of Artificial Sequence: Synthetic oligonucleotide
  misc_feature 1..20: note = Target: SCN10A; (-) strand; PAM type: YTN; PAM sequence: TTC
  source 1..20: mol_type = other DNA
taatcccctcttttgcttgg

SEQ ID NO: 54119 - DNA, 20 bp, synthetic construct
  misc_feature 1..20: note = Description of Artificial Sequence: Synthetic oligonucleotide
  misc_feature 1..20: note = Target: SCN10A; (-) strand; PAM type: YTN; PAM sequence: TTT
  source 1..20: mol_type = other DNA
ctaatcccctcttttgcttg

SEQ ID NO: 54120 - DNA, 20 bp, synthetic construct
  misc_feature 1..20: note = Description of Artificial Sequence: Synthetic oligonucleotide
  misc_feature 1..20: note = Target: SCN10A; (-) strand; PAM type: YTN; PAM sequence: TTT
  source 1..20: mol_type = other DNA
tctaatcccctcttttgctt

SEQ ID NO: 54121 - DNA, 20 bp, synthetic construct
  misc_feature 1..20: note = Description of Artificial Sequence: Synthetic oligonucleotide
  misc_feature 1..20: note = Target: SCN10A; (-) strand; PAM type: YTN; PAM sequence: TTC
  source 1..20: mol_type = other DNA
cattttctaatcccctcttt

SEQ ID NO: 54122 - DNA, 20 bp, synthetic construct
  misc_feature 1..20: note = Description of Artificial Sequence: Synthetic oligonucleotide
  misc_feature 1..20: note = Target: SCN10A; (-) strand; PAM type: YTN; PAM sequence: TTG
  source 1..20: mol_type = other DNA
tggaaagataaagatagata

SEQ ID NO: 54123 - DNA, 20 bp, synthetic construct
  misc_feature 1..20: note = Description of Artificial Sequence: Synthetic oligonucleotide
  misc_feature 1..20: note = Target: SCN10A; (-) strand; PAM type: YTN; PAM sequence: CTT
  source 1..20: mol_type = other DNA
gtggaaagataaagatagat

SEQ ID NO: 54124 - DNA, 20 bp, synthetic construct
  misc_feature 1..20: note = Description of Artificial Sequence: Synthetic oligonucleotide
  misc_feature 1..20: note = Target: SCN10A; (-) strand; PAM type: YTN; PAM sequence: CTG
  source 1..20: mol_type = other DNA
cttgtggaaagataaagata

SEQ ID NO: 54125 - DNA, 20 bp, synthetic construct
  misc_feature 1..20: note = Description of Artificial Sequence: Synthetic oligonucleotide
  misc_feature 1..20: note = Target: SCN10A; (-) strand; PAM type: YTN; PAM sequence: CTG
  source 1..20: mol_type = other DNA
tctgcttgtggaaagataaa

SEQ ID NO: 54126 - DNA, 20 bp, synthetic construct
  misc_feature 1..20: note = Description of Artificial Sequence: Synthetic oligonucleotide
  misc_feature 1..20: note = Target: SCN10A; (-) strand; PAM type: YTN; PAM sequence: CTA
  source 1..20: mol_type = other DNA
tctgtctgcttgtggaaaga

SEQ ID NO: 54127 - DNA, 20 bp, synthetic construct
  misc_feature 1..20: note = Description of Artificial Sequence: Synthetic oligonucleotide
  misc_feature 1..20: note = Target: SCN10A; (-) strand; PAM type: YTN; PAM sequence: CTG
  source 1..20: mol_type = other DNA
cctatctgtctgcttgtgga

SEQ ID NO: 54128 - DNA, 20 bp, synthetic construct
  misc_feature 1..20: note = Description of Artificial Sequence: Synthetic oligonucleotide
  misc_feature 1..20: note = Target: SCN10A; (-) strand; PAM type: YTN; PAM sequence: CTG
  source 1..20: mol_type = other DNA
cgtgcctgcctatctgtctg

SEQ ID NO: 54129 - DNA, 20 bp, synthetic construct
  misc_feature 1..20: note = Description of Artificial Sequence: Synthetic oligonucleotide
  misc_feature 1..20: note = Target: SCN10A; (-) strand; PAM type: YTN; PAM sequence: TTC
  source 1..20: mol_type = other DNA
tgcgtgcctgcctatctgtc

SEQ ID NO: 54130 - DNA, 20 bp, synthetic construct
  misc_feature 1..20: note = Description of Artificial Sequence: Synthetic oligonucleotide
  misc_feature 1..20: note = Target: SCN10A; (-) strand; PAM type: YTN; PAM sequence: TTT
  source 1..20: mol_type = other DNA
ctgcgtgcctgcctatctgt

SEQ ID NO: 54131 - DNA, 20 bp, synthetic construct
  misc_feature 1..20: note = Description of Artificial Sequence: Synthetic oligonucleotide
  misc_feature 1..20: note = Target: SCN10A; (-) strand; PAM type: YTN; PAM sequence: CTT
  source 1..20: mol_type = other DNA
tctgcgtgcctgcctatctg

SEQ ID NO: 54132 - DNA, 20 bp, synthetic construct
  misc_feature 1..20: note = Description of Artificial Sequence: Synthetic oligonucleotide
  misc_feature 1..20: note = Target: SCN10A; (-) strand; PAM type: YTN; PAM sequence: CTA
  source 1..20: mol_type = other DNA
tgtctttctgcgtgcctgcc

SEQ ID NO: 54133 - DNA, 20 bp, synthetic construct
  misc_feature 1..20: note = Description of Artificial Sequence: Synthetic oligonucleotide
  misc_feature 1..20: note = Target: SCN10A; (-) strand; PAM type: YTN; PAM sequence: CTC
  source 1..20: mol_type = other DNA
tatgtctttctgcgtgcctg

SEQ ID NO: 54134 - DNA, 20 bp, synthetic construct
  misc_feature 1..20: note = Description of Artificial Sequence: Synthetic oligonucleotide
  misc_feature 1..20: note = Target: SCN10A; (-) strand; PAM type: YTN; PAM sequence: CTG
  source 1..20: mol_type = other DNA
ataatggtagctctatgtct

SEQ ID NO: 54135 - DNA, 20 bp, synthetic construct
  misc_feature 1..20: note = Description of Artificial Sequence: Synthetic oligonucleotide
  misc_feature 1..20: note = Target: SCN10A; (-) strand; PAM type: YTN; PAM sequence: CTG
  source 1..20: mol_type = other DNA
ctgataatggtagctctatg

SEQ ID NO: 54136 - DNA, 20 bp, synthetic construct
  misc_feature 1..20: note = Description of Artificial Sequence: Synthetic oligonucleotide
  misc_feature 1..20: note = Target: SCN10A; (-) strand; PAM type: YTN; PAM sequence: TTA
  source 1..20: mol_type = other DNA
cctgctgataatggtagctc

SEQ ID NO: 54137 - DNA, 20 bp, synthetic construct
  misc_feature 1..20: note = Description of Artificial Sequence: Synthetic oligonucleotide
  misc_feature 1..20: note = Target: SCN10A; (-) strand; PAM type: YTN; PAM sequence: TTG
  source 1..20: mol_type = other DNA
cacaattacctgctgataat

SEQ ID NO: 54138 - DNA, 20 bp, synthetic construct
  misc_feature 1..20: note = Description of Artificial Sequence: Synthetic oligonucleotide
  misc_feature 1..20: note = Target: SCN10A; (-) strand; PAM type: YTN; PAM sequence: TTT
  source 1..20: mol_type = other DNA
gcacaattacctgctgataa

SEQ ID NO: 54139 - DNA, 20 bp, synthetic construct
  misc_feature 1..20: note = Description of Artificial Sequence: Synthetic oligonucleotide
  misc_feature 1..20: note = Target: SCN10A; (-) strand; PAM type: YTN; PAM sequence: CTT
  source 1..20: mol_type = other DNA
tgcacaattacctgctgata

SEQ ID NO: 54140 - DNA, 20 bp, synthetic construct
  misc_feature 1..20: note = Description of Artificial Sequence: Synthetic oligonucleotide
  misc_feature 1..20: note = Target: SCN10A; (-) strand; PAM type: YTN; PAM sequence: TTA
  source 1..20: mol_type = other DNA
gctttgcacaattacctgct

SEQ ID NO: 54141 - DNA, 20 bp, synthetic construct
  misc_feature 1..20: note = Description of Artificial Sequence: Synthetic oligonucleotide
  misc_feature 1..20: note = Target: SCN10A; (-) strand; PAM type: YTN; PAM sequence: CTG
  source 1..20: mol_type = other DNA
aaacattagctttgcacaat

SEQ ID NO: 54142 - DNA, 20 bp, synthetic construct
  misc_feature 1..20: note = Description of Artificial Sequence: Synthetic oligonucleotide
  misc_feature 1..20: note = Target: SCN10A; (-) strand; PAM type: YTN; PAM sequence: TTG
  source 1..20: mol_type = other DNA
ctgaaacattagctttgcac

SEQ ID NO: 54143 - DNA, 20 bp, synthetic construct
  misc_feature 1..20: note = Description of Artificial Sequence: Synthetic oligonucleotide
  misc_feature 1..20: note = Target: SCN10A; (-) strand; PAM type: YTN; PAM sequence: CTT
  source 1..20: mol_type = other DNA
gctgaaacattagctttgca

SEQ ID NO: 54144 - DNA, 20 bp, synthetic construct
  misc_feature 1..20: note = Description of Artificial Sequence: Synthetic oligonucleotide
  misc_feature 1..20: note = Target: SCN10A; (-) strand; PAM type: YTN; PAM sequence: TTC
  source 1..20: mol_type = other DNA
cttgctgaaacattagcttt

SEQ ID NO: 54145 - DNA, 20 bp, synthetic construct
  misc_feature 1..20: note = Description of Artificial Sequence: Synthetic oligonucleotide
  misc_feature 1..20: note = Target: SCN10A; (-) strand; PAM type: YTN; PAM sequence: TTA
  source 1..20: mol_type = other DNA
ttccttgctgaaacattagc

SEQ ID NO: 54146 - DNA, 20 bp, synthetic construct
  misc_feature 1..20: note = Description of Artificial Sequence: Synthetic oligonucleotide
  misc_feature 1..20: note = Target: SCN10A; (-) strand; PAM type: YTN; PAM sequence: TTC
  source 1..20: mol_type = other DNA
cattattccttgctgaaaca

SEQ ID NO: 54147 - DNA, 20 bp, synthetic construct
  misc_feature 1..20: note = Description of Artificial Sequence: Synthetic oligonucleotide
  misc_feature 1..20: note = Target: SCN10A; (-) strand; PAM type: YTN; PAM sequence: CTT
  source 1..20: mol_type = other DNA
ccattattccttgctgaaac

SEQ ID NO: 54148 - DNA, 20 bp, synthetic construct
  misc_feature 1..20: note = Description of Artificial Sequence: Synthetic oligonucleotide
  misc_feature 1..20: note = Target: SCN10A; (-) strand; PAM type: YTN; PAM sequence: CTC
  source 1..20: mol_type = other DNA
ccttccattattccttgctg

SEQ ID NO: 54149 - DNA, 20 bp, synthetic construct
  misc_feature 1..20: note = Description of Artificial Sequence: Synthetic oligonucleotide
  misc_feature 1..20: note = Target: SCN10A; (-) strand; PAM type: YTN; PAM sequence: TTC
  source 1..20: mol_type = other DNA
cctcccttccattattcctt

SEQ ID NO: 54150 - DNA, 20 bp, synthetic construct
  misc_feature 1..20: note = Description of Artificial Sequence: Synthetic oligonucleotide
  misc_feature 1..20: note = Target: SCN10A; (-) strand; PAM type: YTN; PAM sequence: CTT
  source 1..20: mol_type = other DNA
ccctcccttccattattcct

SEQ ID NO: 54151 - DNA, 20 bp, synthetic construct
  misc_feature 1..20: note = Description of Artificial Sequence: Synthetic oligonucleotide
  misc_feature 1..20: note = Target: SCN10A; (-) strand; PAM type: YTN; PAM sequence: TTA
  source 1..20: mol_type = other DNA
tcttccctcccttccattat

SEQ ID NO: 54152 - DNA, 20 bp, synthetic construct
  misc_feature 1..20: note = Description of Artificial Sequence: Synthetic oligonucleotide
  misc_feature 1..20: note = Target: SCN10A; (-) strand; PAM type: YTN; PAM sequence: CTT
  source 1..20: mol_type = other DNA
atcttccctcccttccatta

SEQ ID NO: 54153 - DNA, 20 bp, synthetic construct
  misc_feature 1..20: note = Description of Artificial Sequence: Synthetic oligonucleotide
  misc_feature 1..20: note = Target: SCN10A; (-) strand; PAM type: YTN; PAM sequence: TTC
  source 1..20: mol_type = other DNA
cttatcttccctcccttcca

SEQ ID NO: 54154 - DNA, 20 bp, synthetic construct
  misc_feature 1..20: note = Description of Artificial Sequence: Synthetic oligonucleotide
  misc_feature 1..20: note = Target: SCN10A; (-) strand; PAM type: YTN; PAM sequence: TTT
  source 1..20: mol_type = other DNA
ccttatcttccctcccttcc

SEQ ID NO: 54155 - DNA, 20 bp, synthetic construct
  misc_feature 1..20: note = Description of Artificial Sequence: Synthetic oligonucleotide
  misc_feature 1..20: note = Target: SCN10A; (-) strand; PAM type: YTN; PAM sequence: TTT
  source 1..20: mol_type = other DNA
tccttatcttccctcccttc

SEQ ID NO: 54156 - DNA, 20 bp, synthetic construct
  misc_feature 1..20: note = Description of Artificial Sequence: Synthetic oligonucleotide
  misc_feature 1..20: note = Target: SCN10A; (-) strand; PAM type: YTN; PAM sequence: TTT
  source 1..20: mol_type = other DNA
ttccttatcttccctccctt

SEQ ID NO: 54157 - DNA, 20 bp, synthetic construct
  misc_feature 1..20: note = Description of Artificial Sequence: Synthetic oligonucleotide
  misc_feature 1..20: note = Target: SCN10A; (-) strand; PAM type: YTN; PAM sequence: CTT
  source 1..20: mol_type = other DNA
tttccttatcttccctccct

SEQ ID NO: 54158 - DNA, 20 bp, synthetic construct
  misc_feature 1..20: note = Description of Artificial Sequence: Synthetic oligonucleotide
  misc_feature 1..20: note = Target: SCN10A; (-) strand; PAM type: YTN; PAM sequence: TTA
  source 1..20: mol_type = other DNA
acacaatctttttccttatc

SEQ ID NO: 54159 - DNA, 20 bp, synthetic construct
  misc_feature 1..20: note = Description of Artificial Sequence: Synthetic oligonucleotide
  misc_feature 1..20: note = Target: SCN10A; (-) strand; PAM type: YTN; PAM sequence: CTT
  source 1..20: mol_type = other DNA
aacacaatctttttccttat

SEQ ID NO: 54160 - DNA, 20 bp, synthetic construct
  misc_feature 1..20: note = Description of Artificial Sequence: Synthetic oligonucleotide
  misc_feature 1..20: note = Target: SCN10A; (-) strand; PAM type: YTN; PAM sequence: TTC
  source 1..20: mol_type = other DNA
ttaacacaatctttttcctt

SEQ ID NO: 54161 - DNA, 20 bp, synthetic construct
  misc_feature 1..20: note = Description of Artificial Sequence: Synthetic oligonucleotide
  misc_feature 1..20: note = Target: SCN10A; (-) strand; PAM type: YTN; PAM sequence: TTG
  source 1..20: mol_type = other DNA
ccatgttcttaacacaatct

SEQ ID NO: 54162 - DNA, 20 bp, synthetic construct
  misc_feature 1..20: note = Description of Artificial Sequence: Synthetic oligonucleotide
  misc_feature 1..20: note = Target: SCN10A; (-) strand; PAM type: YTN; PAM sequence: TTA
  source 1..20: mol_type = other DNA
ttgccatgttcttaacacaa

SEQ ID NO: 54163 - DNA, 20 bp, synthetic construct
  misc_feature 1..20: note = Description of Artificial Sequence: Synthetic oligonucleotide
  misc_feature 1..20: note = Target: SCN10A; (-) strand; PAM type: YTN; PAM sequence: CTT
  source 1..20: mol_type = other DNA
attgccatgttcttaacaca

SEQ ID NO: 54164 - DNA, 20 bp, synthetic construct
  misc_feature 1..20: note = Description of Artificial Sequence: Synthetic oligonucleotide
  misc_feature 1..20: note = Target: SCN10A; (-) strand; PAM type: YTN; PAM sequence: TTG
  source 1..20: mol_type = other DNA
tagccagtgaggaatcagaa

SEQ ID NO: 54165 - DNA, 20 bp, synthetic construct
  misc_feature 1..20: note = Description of Artificial Sequence: Synthetic oligonucleotide
  misc_feature 1..20: note = Target: SCN10A; (-) strand; PAM type: YTN; PAM sequence: TTA
  source 1..20: mol_type = other DNA
aattgtagccagtgaggaat

SEQ ID NO: 54166 - DNA, 20 bp, synthetic construct
  misc_feature 1..20: note = Description of Artificial Sequence: Synthetic oligonucleotide
  misc_feature 1..20: note = Target: SCN10A; (-) strand; PAM type: YTN; PAM sequence: TTG
  source 1..20: mol_type = other DNA
aaaaagcattaaattgtagc

SEQ ID NO: 54167 - DNA, 20 bp, synthetic construct
  misc_feature 1..20: note = Description of Artificial Sequence: Synthetic oligonucleotide
  misc_feature 1..20: note = Target: SCN10A; (-) strand; PAM type: YTN; PAM sequence: TTT
  source 1..20: mol_type = other DNA
gaaaaagcattaaattgtag

SEQ ID NO: 54168 - DNA, 20 bp, synthetic construct
  misc_feature 1..20: note = Description of Artificial Sequence: Synthetic oligonucleotide
  misc_feature 1..20: note = Target: SCN10A; (-) strand; PAM type: YTN; PAM sequence: TTT
  source 1..20: mol_type = other DNA
tgaaaaagcattaaattgta

SEQ ID NO: 54169 - DNA, 20 bp, synthetic construct
  misc_feature 1..20: note = Description of Artificial Sequence: Synthetic oligonucleotide
  misc_feature 1..20: note = Target: SCN10A; (-) strand; PAM type: YTN; PAM sequence: CTT
  source 1..20: mol_type = other DNA
ttgaaaaagcattaaattgt

SEQ ID NO: 54170 - DNA, 20 bp, synthetic construct
  misc_feature 1..20: note = Description of Artificial Sequence: Synthetic oligonucleotide
  misc_feature 1..20: note = Target: SCN10A; (-) strand; PAM type: YTN; PAM sequence: CTG
  source 1..20: mol_type = other DNA
tatacttttgaaaaagcatt

SEQ ID NO: 54171 - DNA, 20 bp, synthetic construct
  misc_feature 1..20: note = Description of Artificial Sequence: Synthetic oligonucleotide
  misc_feature 1..20: note = Target: SCN10A; (-) strand; PAM type: YTN; PAM sequence: CTC
  source 1..20: mol_type = other DNA
caaagatcatgctgtatact

SEQ ID NO: 54172 - DNA, 20 bp, synthetic construct
  misc_feature 1..20: note = Description of Artificial Sequence: Synthetic oligonucleotide
  misc_feature 1..20: note = Target: SCN10A; (-) strand; PAM type: YTN; PAM sequence: CTG
  source 1..20: mol_type = other DNA
gggctccaaagatcatgctg

SEQ ID NO: 54173 - DNA, 20 bp, synthetic construct
  misc_feature 1..20: note = Description of Artificial Sequence: Synthetic oligonucleotide
  misc_feature 1..20: note = Target: SCN10A; (-) strand; PAM type: YTN; PAM sequence: TTG
  source 1..20: mol_type = other DNA
ggatagactggggctccaaa

SEQ ID NO: 54174 - DNA, 20 bp, synthetic construct
  misc_feature 1..20: note = Description of Artificial Sequence: Synthetic oligonucleotide
  misc_feature 1..20: note = Target: SCN10A; (-) strand; PAM type: YTN; PAM sequence: CTT
  source 1..20: mol_type = other DNA
gggatagactggggctccaa

SEQ ID NO: 54175 - DNA, 20 bp, synthetic construct
  misc_feature 1..20: note = Description of Artificial Sequence: Synthetic oligonucleotide
  misc_feature 1..20: note = Target: SCN10A; (-) strand; PAM type: YTN; PAM sequence: CTG
  source 1..20: mol_type = other DNA
agaacccagaggaagataat

SEQ ID NO: 54176 - DNA, 20 bp, synthetic construct
  misc_feature 1..20: note = Description of Artificial Sequence: Synthetic oligonucleotide
  misc_feature 1..20: note = Target: SCN10A; (-) strand; PAM type: YTN; PAM sequence: TTG
  source 1..20: mol_type = other DNA
ctgagaacccagaggaagat

SEQ ID NO: 54177 - DNA, 20 bp, synthetic construct
  misc_feature 1..20: note = Description of Artificial Sequence: Synthetic oligonucleotide
  misc_feature 1..20: note = Target: SCN10A; (-) strand; PAM type: YTN; PAM sequence: CTA
  source 1..20: mol_type = other DNA
tgttgctgagaacccagagg

SEQ ID NO: 54178 - DNA, 20 bp, synthetic construct
  misc_feature 1..20: note = Description of Artificial Sequence: Synthetic oligonucleotide
  misc_feature 1..20: note = Target: SCN10A; (-) strand; PAM type: YTN; PAM sequence: TTC
  source 1..20: mol_type = other DNA
ctatgttgctgagaacccag

SEQ ID NO: 54179 - DNA, 20 bp, synthetic construct
  misc_feature 1..20: note = Description of Artificial Sequence: Synthetic oligonucleotide
  misc_feature 1..20: note = Target: SCN10A; (-) strand; PAM type: YTN; PAM sequence: TTT
  source 1..20: mol_type = other DNA
cctatgttgctgagaaccca

SEQ ID NO: 54180 - DNA, 20 bp, synthetic construct
  misc_feature 1..20: note = Description of Artificial Sequence: Synthetic oligonucleotide
  misc_feature 1..20: note = Target: SCN10A; (-) strand; PAM type: YTN; PAM sequence: TTG
  source 1..20: mol_type = other DNA
tttcctatgttgctgagaac

SEQ ID NO: 54181 - DNA, 20 bp, synthetic construct
  misc_feature 1..20: note = Description of Artificial Sequence: Synthetic oligonucleotide
  misc_feature 1..20: note = Target: SCN10A; (-) strand; PAM type: YTN; PAM sequence: TTA
  source 1..20: mol_type = other DNA
gttgtttcctatgttgctga

SEQ ID NO: 54182 - DNA, 20 bp, synthetic construct
  misc_feature 1..20: note = Description of Artificial Sequence: Synthetic oligonucleotide
  misc_feature 1..20: note = Target: SCN10A; (-) strand; PAM type: YTN; PAM sequence: TTG
  source 1..20: mol_type = other DNA
ataatagccattagttgttt

SEQ ID NO: 54183 - DNA, 20 bp, synthetic construct
  misc_feature 1..20: note = Description of Artificial Sequence: Synthetic oligonucleotide
  misc_feature 1..20: note = Target: SCN10A; (-) strand; PAM type: YTN; PAM sequence: TTG
  source 1..20: mol_type = other DNA
aaatgcaaattgataatagc

SEQ ID NO: 54184 - DNA, 20 bp, synthetic construct
  misc_feature 1..20: note = Description of Artificial Sequence: Synthetic oligonucleotide
  misc_feature 1..20: note = Target: SCN10A; (-) strand; PAM type: YTN; PAM sequence: TTT
  source 1..20: mol_type = other DNA
gaaatgcaaattgataatag

SEQ ID NO: 54185 - DNA, 20 bp, synthetic construct
  misc_feature 1..20: note = Description of Artificial Sequence: Synthetic oligonucleotide
  misc_feature 1..20: note = Target: SCN10A; (-) strand; PAM type: YTN; PAM sequence: TTT
  source 1..20: mol_type = other DNA
tgaaatgcaaattgataata

SEQ ID NO: 54186 - DNA, 20 bp, synthetic construct
  misc_feature 1..20: note = Description of Artificial Sequence: Synthetic oligonucleotide
  misc_feature 1..20: note = Target: SCN10A; (-) strand; PAM type: YTN; PAM sequence: TTT
  source 1..20: mol_type = other DNA
ttgaaatgcaaattgataat

SEQ ID NO: 54187 - DNA, 20 bp, synthetic construct
  misc_feature 1..20: note = Description of Artificial Sequence: Synthetic oligonucleotide
  misc_feature 1..20: note = Target: SCN10A; (-) strand; PAM type: YTN; PAM sequence: CTT
  source 1..20: mol_type = other DNA
tttgaaatgcaaattgataa

SEQ ID NO: 54188 - DNA, 20 bp, synthetic construct
  misc_feature 1..20: note = Description of Artificial Sequence: Synthetic oligonucleotide
  misc_feature 1..20: note = Target: SCN10A; (-) strand; PAM type: YTN; PAM sequence: TTC
  source 1..20: mol_type = other DNA
tttttgaaatgcaaattgat

SEQ ID NO: 54189 - DNA, 20 bp, synthetic construct
  misc_feature 1..20: note = Description of Artificial Sequence: Synthetic oligonucleotide
  misc_feature 1..20: note = Target: SCN10A; (-) strand; PAM type: YTN; PAM sequence: TTT
  source 1..20: mol_type = other DNA
ctttttgaaatgcaaattga

SEQ ID NO: 54190 - DNA, 20 bp, synthetic construct
  misc_feature 1..20: note = Description of Artificial Sequence: Synthetic oligonucleotide
  misc_feature 1..20: note = Target: SCN10A; (-) strand; PAM type: YTN; PAM sequence: TTT
  source 1..20: mol_type = other DNA
tctttttgaaatgcaaattg

SEQ ID NO: 54191 - DNA, 20 bp, synthetic construct
  misc_feature 1..20: note = Description of Artificial Sequence: Synthetic oligonucleotide
  misc_feature 1..20: note = Target: SCN10A; (-) strand; PAM type: YTN; PAM sequence: CTA
  source 1..20: mol_type = other DNA
gattttctttttgaaatgca

SEQ ID NO: 54192 - DNA, 20 bp, synthetic construct
  misc_feature 1..20: note = Description of Artificial Sequence: Synthetic oligonucleotide
  misc_feature 1..20: note = Target: SCN10A; (-) strand; PAM type: YTN; PAM sequence: CTC
  source 1..20: mol_type = other DNA
gtggaaataatcagactaga

SEQ ID NO: 54193 - DNA, 20 bp, synthetic construct
  misc_feature 1..20: note = Description of Artificial Sequence: Synthetic oligonucleotide
  misc_feature 1..20: note = Target: SCN10A; (-) strand; PAM type: YTN; PAM sequence: TTG
  source 1..20: mol_type = other DNA
gcctcgtggaaataatcaga

SEQ ID NO: 54194 - DNA, 20 bp, synthetic construct
  misc_feature 1..20: note = Description of Artificial Sequence: Synthetic oligonucleotide
  misc_feature 1..20: note = Target: SCN10A; (-) strand; PAM type: YTN; PAM sequence: CTT
  source 1..20: mol_type = other DNA
ggcctcgtggaaataatcag

SEQ ID NO: 54195 - DNA, 20 bp, synthetic construct
  misc_feature 1..20: note = Description of Artificial Sequence: Synthetic oligonucleotide
  misc_feature 1..20: note = Target: SCN10A; (-) strand; PAM type: YTN; PAM sequence: TTC
  source 1..20: mol_type = other DNA
agcatccttggcctcgtgga

SEQ ID NO: 54196 - DNA, 20 bp, synthetic construct
  misc_feature 1..20: note = Description of Artificial Sequence: Synthetic oligonucleotide
  misc_feature 1..20: note = Target: SCN10A; (-) strand; PAM type: YTN; PAM sequence: TTG
  source 1..20: mol_type = other DNA
gatgatgttcagcatccttg

SEQ ID NO: 54197 - DNA, 20 bp, synthetic construct
  misc_feature 1..20: note = Description of Artificial Sequence: Synthetic oligonucleotide
  misc_feature 1..20: note = Target: SCN10A; (-) strand; PAM type: YTN; PAM sequence: TTA
  source 1..20: mol_type = other DNA
tgtgacaggtattggatgat

SEQ ID NO: 54198 - DNA, 20 bp, synthetic construct
  misc_feature 1..20: note = Description of Artificial Sequence: Synthetic oligonucleotide
  misc_feature 1..20: note = Target: SCN10A; (-) strand; PAM type: YTN; PAM sequence: TTT
  source 1..20: mol_type = other DNA
atgtgacaggtattggatga

SEQ ID NO: 54199 - DNA, 20 bp, synthetic construct
  misc_feature 1..20: note = Description of Artificial Sequence: Synthetic oligonucleotide
  misc_feature 1..20: note = Target: SCN10A; (-) strand; PAM type: YTN; PAM sequence: CTG
  source 1..20: mol_type = other DNA
ggaatttatgtgacaggtat

SEQ ID NO: 54200 - DNA, 20 bp, synthetic construct
  misc_feature 1..20: note = Description of Artificial Sequence: Synthetic oligonucleotide
  misc_feature 1..20: note = Target: SCN10A; (-) strand; PAM type: YTN; PAM sequence: CTA
  source 1..20: mol_type = other DNA
tatggtcacaatcctgggaa

SEQ ID NO: 54201 - DNA, 20 bp, synthetic construct
  misc_feature 1..20: note = Description of Artificial Sequence: Synthetic oligonucleotide
  misc_feature 1..20: note = Target: SCN10A; (-) strand; PAM type: YTN; PAM sequence: CTA
  source 1..20: mol_type = other DNA
cctatatggtcacaatcctg

SEQ ID NO: 54202 - DNA, 20 bp, synthetic construct
  misc_feature 1..20: note = Description of Artificial Sequence: Synthetic oligonucleotide
  misc_feature 1..20: note = Target: SCN10A; (-) strand; PAM type: YTN; PAM sequence: CTA
  source 1..20: mol_type = other DNA
tgaaaagtataacatataca

SEQ ID NO: 54203 - DNA, 20 bp, synthetic construct
  misc_feature 1..20: note = Description of Artificial Sequence: Synthetic oligonucleotide
  misc_feature 1..20: note = Target: SCN10A; (-) strand; PAM type: YTN; PAM sequence: TTA
  source 1..20: mol_type = other DNA
tatgcacactatgaaaagta

SEQ ID NO: 54204 - DNA, 20 bp, synthetic construct
  misc_feature 1..20: note = Description of Artificial Sequence: Synthetic oligonucleotide
  misc_feature 1..20: note = Target: SCN10A; (-) strand; PAM type: YTN; PAM sequence: TTT
  source 1..20: mol_type = other DNA
atatgcacactatgaaaagt

SEQ ID NO: 54205 - DNA, 20 bp, synthetic construct
  misc_feature 1..20: note = Description of Artificial Sequence: Synthetic oligonucleotide
  misc_feature 1..20: note = Target: SCN10A; (-) strand; PAM type: YTN; PAM sequence: CTT
  source 1..20: mol_type = other DNA
tatatgcacactatgaaaag

SEQ ID NO: 54206 - DNA, 20 bp, synthetic construct
  misc_feature 1..20: note = Description of Artificial Sequence: Synthetic oligonucleotide
  misc_feature 1..20: note = Target: SCN10A; (-) strand; PAM type: YTN; PAM sequence: TTC
  source 1..20: mol_type = other DNA
cctttatatgcacactatga

SEQ ID NO: 54207 - DNA, 20 bp, synthetic construct
  misc_feature 1..20: note = Description of Artificial Sequence: Synthetic oligonucleotide
  misc_feature 1..20: note = Target: SCN10A; (-) strand; PAM type: YTN; PAM sequence: TTG
  source 1..20: mol_type = other DNA
acataattccctttatatgc

SEQ ID NO: 54208 - DNA, 20 bp, synthetic construct
  misc_feature 1..20: note = Description of Artificial Sequence: Synthetic oligonucleotide
  misc_feature 1..20: note = Target: SCN10A; (-) strand; PAM type: YTN; PAM sequence: CTG
  source 1..20: mol_type = other DNA
ttgacataattccctttata

SEQ ID NO: 54209 - DNA, 20 bp, synthetic construct
  misc_feature 1..20: note = Description of Artificial Sequence: Synthetic oligonucleotide
  misc_feature 1..20: note = Target: SCN10A; (-) strand; PAM type: YTN; PAM sequence: CTG
  source 1..20: mol_type = other DNA
aactgttgacataattccct

SEQ ID NO: 54210 - DNA, 20 bp, synthetic construct
  misc_feature 1..20: note = Description of Artificial Sequence: Synthetic oligonucleotide
  misc_feature 1..20: note = Target: SCN10A; (-) strand; PAM type: YTN; PAM sequence: TTA
  source 1..20: mol_type = other DNA
actgaactgttgacataatt

SEQ ID NO: 54211 - DNA, 20 bp, synthetic construct
  misc_feature 1..20: note = Description of Artificial Sequence: Synthetic oligonucleotide
  misc_feature 1..20: note = Target: SCN10A; (-) strand; PAM type: YTN; PAM sequence: TTG
  source 1..20: mol_type = other DNA
tattaactgaactgttgaca

SEQ ID NO: 54212 - DNA, 20 bp, synthetic construct
  misc_feature 1..20: note = Description of Artificial Sequence: Synthetic oligonucleotide
  misc_feature 1..20: note = Target: SCN10A; (-) strand; PAM type: YTN; PAM sequence: TTT
  source 1..20: mol_type = other DNA
gtattaactgaactgttgac

SEQ ID NO: 54213 - DNA, 20 bp, synthetic construct
  misc_feature 1..20: note = Description of Artificial Sequence: Synthetic oligonucleotide
  misc_feature 1..20: note = Target: SCN10A; (-) strand; PAM type: YTN; PAM sequence: TTT
  source 1..20: mol_type = other DNA
tgtattaactgaactgttga

SEQ ID NO: 54214 - DNA, 20 bp, synthetic construct
  misc_feature 1..20: note = Description of Artificial Sequence: Synthetic oligonucleotide
  misc_feature 1..20: note = Target: SCN10A; (-) strand; PAM type: YTN; PAM sequence: TTA
  source 1..20: mol_type = other DNA
ggagattttgtattaactga

SEQ ID NO: 54215 - DNA, 20 bp, synthetic construct
  misc_feature 1..20: note = Description of Artificial Sequence: Synthetic oligonucleotide
  misc_feature 1..20: note = Target: SCN10A; (-) strand; PAM type: YTN; PAM sequence: TTT
  source 1..20: mol_type = other DNA
aggagattttgtattaactg

SEQ ID NO: 54216 - DNA, 20 bp, synthetic construct
  misc_feature 1..20: note = Description of Artificial Sequence: Synthetic oligonucleotide
  misc_feature 1..20: note = Target: SCN10A; (-) strand; PAM type: YTN; PAM sequence: CTT
  source 1..20: mol_type = other DNA
taggagattttgtattaact

SEQ ID NO: 54217 - DNA, 20 bp, synthetic construct
  misc_feature 1..20: note = Description of Artificial Sequence: Synthetic oligonucleotide
  misc_feature 1..20: note = Target: SCN10A; (-) strand; PAM type: YTN; PAM sequence: TTC
  source 1..20: mol_type = other DNA
tttaggagattttgtattaa

SEQ ID NO: 54218 - DNA, 20 bp, synthetic construct
  misc_feature 1..20: note = Description of Artificial Sequence: Synthetic oligonucleotide
  misc_feature 1..20: note = Target: SCN10A; (-) strand; PAM type: YTN; PAM sequence: TTA
  source 1..20: mol_type = other DNA
tcaaatccattctttaggag

SEQ ID NO: 54219 - DNA, 20 bp, synthetic construct
  misc_feature 1..20: note = Description of Artificial Sequence: Synthetic oligonucleotide
  misc_feature 1..20: note = Target: SCN10A; (-) strand; PAM type: YTN; PAM sequence: TTC
  source 1..20: mol_type = other DNA
ccagtaattatcaaatccat

SEQ ID NO: 54220 - DNA, 20 bp, synthetic construct
  misc_feature 1..20: note = Description of Artificial Sequence: Synthetic oligonucleotide
  misc_feature 1..20: note = Target: SCN10A; (-) strand; PAM type: YTN; PAM sequence: TTC
  source 1..20: mol_type = other DNA
cattcccagtaattatcaaa

SEQ ID NO: 54221 - DNA, 20 bp, synthetic construct
  misc_feature 1..20: note = Description of Artificial Sequence: Synthetic oligonucleotide
  misc_feature 1..20: note = Target: SCN10A; (-) strand; PAM type: YTN; PAM sequence: TTT
  source 1..20: mol_type = other DNA
ccattcccagtaattatcaa

SEQ ID NO: 54222 - DNA, 20 bp, synthetic construct
  misc_feature 1..20: note = Description of Artificial Sequence: Synthetic oligonucleotide
  misc_feature 1..20: note = Target: SCN10A; (-) strand; PAM type: YTN; PAM sequence: CTT
  source 1..20: mol_type = other DNA
tccattcccagtaattatca

SEQ ID NO: 54223 - DNA, 20 bp, synthetic construct
  misc_feature 1..20: note = Description of Artificial Sequence: Synthetic oligonucleotide
  misc_feature 1..20: note = Target: SCN10A; (-) strand; PAM type: YTN; PAM sequence: TTG
  source 1..20: mol_type = other DNA
gatcctttccattcccagta

SEQ ID NO: 54224 - DNA, 20 bp, synthetic construct
  misc_feature 1..20: note = Description of Artificial Sequence: Synthetic oligonucleotide
  misc_feature 1..20: note = Target: SCN10A; (-) strand; PAM type: YTN; PAM sequence: TTC
  source 1..20: mol_type = other DNA
caaagttggatcctttccat

SEQ ID NO: 54225 - DNA, 20 bp, synthetic construct
  misc_feature 1..20: note = Description of Artificial Sequence: Synthetic oligonucleotide
  misc_feature 1..20: note = Target: SCN10A; (-) strand; PAM type: YTN; PAM sequence: CTT
  source 1..20: mol_type = other DNA
ccaaagttggatcctttcca

SEQ ID NO: 54226 - DNA, 20 bp, synthetic construct
  misc_feature 1..20: note = Description of Artificial Sequence: Synthetic oligonucleotide
  misc_feature 1..20: note = Target: SCN10A; (-) strand; PAM type: YTN; PAM sequence: TTG
  source 1..20: mol_type = other DNA
ccaaatcgtcttccaaagtt

SEQ ID NO: 54227 - DNA, 20 bp, synthetic construct
  misc_feature 1..20: note = Description of Artificial Sequence: Synthetic oligonucleotide
  misc_feature 1..20: note = Target: SCN10A; (-) strand; PAM type: YTN; PAM sequence: TTG
  source 1..20: mol_type = other DNA
agatattgccaaatcgtctt

SEQ ID NO: 54228 - DNA, 20 bp, synthetic construct
  misc_feature 1..20: note = Description of Artificial Sequence: Synthetic oligonucleotide
  misc_feature 1..20: note = Target: SCN10A; (-) strand; PAM type: YTN; PAM sequence: TTT
  source 1..20: mol_type = other DNA
gagatattgccaaatcgtct

SEQ ID NO: 54229 - DNA, 20 bp, synthetic construct
  misc_feature 1..20: note = Description of Artificial Sequence: Synthetic oligonucleotide
  misc_feature 1..20: note = Target: SCN10A; (-) strand; PAM type: YTN; PAM sequence: TTT
  source 1..20: mol_type = other DNA
tgagatattgccaaatcgtc

SEQ ID NO: 54230 - DNA, 20 bp, synthetic construct
  misc_feature 1..20: note = Description of Artificial Sequence: Synthetic oligonucleotide
  misc_feature 1..20: note = Target: SCN10A; (-) strand; PAM type: YTN; PAM sequence: TTT
  source 1..20: mol_type = other DNA
ttgagatattgccaaatcgt

SEQ ID NO: 54231 - DNA, 20 bp, synthetic construct
  misc_feature 1..20: note = Description of Artificial Sequence: Synthetic oligonucleotide
  misc_feature 1..20: note = Target: SCN10A; (-) strand; PAM type: YTN; PAM sequence: TTA
  source 1..20: mol_type = other DNA
atttttgagatattgccaaa

SEQ ID NO: 54232 - DNA, 20 bp, synthetic construct
  misc_feature 1..20: note = Description of Artificial Sequence: Synthetic oligonucleotide
  misc_feature 1..20: note = Target: SCN10A; (-) strand; PAM type: YTN; PAM sequence: TTT
  source 1..20: mol_type = other DNA
aatttttgagatattgccaa

SEQ ID NO: 54233 - DNA, 20 bp, synthetic construct
  misc_feature 1..20: note = Description of Artificial Sequence: Synthetic oligonucleotide
  misc_feature 1..20: note = Target: SCN10A; (-) strand; PAM type: YTN; PAM sequence: TTT
  source 1..20: mol_type = other DNA
taatttttgagatattgcca

SEQ ID NO: 54234 - DNA, 20 bp, synthetic construct
  misc_feature 1..20: note = Description of Artificial Sequence: Synthetic oligonucleotide
  misc_feature 1..20: note = Target: SCN10A; (-) strand; PAM type: YTN; PAM sequence: TTG
  source 1..20: mol_type = other DNA
ccaggtcaaaggggtgtaca

SEQ ID NO: 54235 - DNA, 20 bp, synthetic construct
  misc_feature 1..20: note = Description of Artificial Sequence: Synthetic oligonucleotide
  misc_feature 1..20: note = Target: SCN10A; (-) strand; PAM type: YTN; PAM sequence: CTA
  source 1..20: mol_type = other DNA
gaagtagaattgccaggtca

SEQ ID NO: 54236 - DNA, 20 bp, synthetic construct
  misc_feature 1..20: note = Description of Artificial Sequence: Synthetic oligonucleotide
  misc_feature 1..20: note = Target: SCN10A; (-) strand; PAM type: YTN; PAM sequence: TTC
  source 1..20: mol_type = other DNA
tagaagtagaattgccaggt

SEQ ID NO: 54237 - DNA, 20 bp, synthetic construct
  misc_feature 1..20: note = Description of Artificial Sequence: Synthetic oligonucleotide
  misc_feature 1..20: note = Target: SCN10A; (-) strand; PAM type: YTN; PAM sequence: TTT
  source 1..20: mol_type = other DNA
ctagaagtagaattgccagg

SEQ ID NO: 54238 - DNA, 20 bp, synthetic construct
  misc_feature 1..20: note = Description of Artificial Sequence: Synthetic oligonucleotide
  misc_feature 1..20: note = Target: SCN10A; (-) strand; PAM type: YTN; PAM sequence: TTA
  source 1..20: mol_type = other DNA
aggatgaatttctagaagta

SEQ ID NO: 54239 - DNA, 20 bp, synthetic construct
  misc_feature 1..20: note = Description of Artificial Sequence: Synthetic oligonucleotide
  misc_feature 1..20: note = Target: SCN10A; (-) strand; PAM type: YTN; PAM sequence: TTG
  source 1..20: mol_type = other DNA
tacacataatatgagtaaaa

SEQ ID NO: 54240 - DNA, 20 bp, synthetic construct
  misc_feature 1..20: note = Description of Artificial Sequence: Synthetic oligonucleotide
  misc_feature 1..20: note = Target: SCN10A; (-) strand; PAM type: YTN; PAM sequence: TTT
  source 1..20: mol_type = other DNA
gtacacataatatgagtaaa

SEQ ID NO: 54241 - DNA, 20 bp, synthetic construct
  misc_feature 1..20: note = Description of Artificial Sequence: Synthetic oligonucleotide
  misc_feature 1..20: note = Target: SCN10A; (-) strand; PAM type: YTN; PAM sequence: CTT
  source 1..20: mol_type = other DNA
tgtacacataatatgagtaa

SEQ ID NO: 54242 - DNA, 20 bp, synthetic construct
  misc_feature 1..20: note = Description of Artificial Sequence: Synthetic oligonucleotide
  misc_feature 1..20: note = Target: SCN10A; (-) strand; PAM type: YTN; PAM sequence: TTA
  source 1..20: mol_type = other DNA
cacatgtatctttgtacaca

SEQ ID NO: 54243 - DNA, 20 bp, synthetic construct
  misc_feature 1..20: note = Description of Artificial Sequence: Synthetic oligonucleotide
  misc_feature 1..20: note = Target: SCN10A; (-) strand; PAM type: YTN; PAM sequence: CTT
  source 1..20: mol_type = other DNA
acacatgtatctttgtacac

SEQ ID NO: 54244 - DNA, 20 bp, synthetic construct
  misc_feature 1..20: note = Description of Artificial Sequence: Synthetic oligonucleotide
  misc_feature 1..20: note = Target: SCN10A; (-) strand; PAM type: YTN; PAM sequence: TTG
  source 1..20: mol_type = other DNA
gtgagtatccttacacatgt

SEQ ID NO: 54245 - DNA, 20 bp, synthetic construct
  misc_feature 1..20: note = Description of Artificial Sequence: Synthetic oligonucleotide
  misc_feature 1..20: note = Target: SCN10A; (-) strand; PAM type: YTN; PAM sequence: TTT
  source 1..20: mol_type = other DNA
ggtgagtatccttacacatg

SEQ ID NO: 54246 - DNA, 20 bp, synthetic construct
  misc_feature 1..20: note = Description of Artificial Sequence: Synthetic oligonucleotide
  misc_feature 1..20: note = Target: SCN10A; (-) strand; PAM type: YTN; PAM sequence: TTT
  source 1..20: mol_type = other DNA
tggtgagtatccttacacat

SEQ ID NO: 54247 - DNA, 20 bp, synthetic construct
  misc_feature 1..20: note = Description of Artificial Sequence: Synthetic oligonucleotide
  misc_feature 1..20: note = Target: SCN10A; (-) strand; PAM type: YTN; PAM sequence: TTT
  source 1..20: mol_type = other DNA
ttggtgagtatccttacaca

SEQ ID NO: 54248 - DNA, 20 bp, synthetic construct
  misc_feature 1..20: note = Description of Artificial Sequence: Synthetic oligonucleotide
  misc_feature 1..20: note = Target: SCN10A; (-) strand; PAM type: YTN; PAM sequence: TTT
  source 1..20: mol_type = other DNA
tttggtgagtatccttacac

SEQ ID NO: 54249 - DNA, 20 bp, synthetic construct
  misc_feature 1..20: note = Description of Artificial Sequence: Synthetic oligonucleotide
  misc_feature 1..20: note = Target: SCN10A; (-) strand; PAM type: YTN; PAM sequence: TTA
  source 1..20: mol_type = other DNA
attttttggtgagtatcctt

SEQ ID NO: 54250 - DNA, 20 bp, synthetic construct
  misc_feature 1..20: note = Description of Artificial Sequence: Synthetic oligonucleotide
  misc_feature 1..20: note = Target: SCN10A; (-) strand; PAM type: YTN; PAM sequence: TTG
  source 1..20: mol_type = other DNA
ccaccacatattaatttttt

SEQ ID NO: 54251 - DNA, 20 bp, synthetic construct
  misc_feature 1..20: note = Description of Artificial Sequence: Synthetic oligonucleotide
  misc_feature 1..20: note = Target: SCN10A; (-) strand; PAM type: YTN; PAM sequence: TTT
  source 1..20: mol_type = other DNA
gccaccacatattaattttt

SEQ ID NO: 54252 - DNA, 20 bp, synthetic construct
  misc_feature 1..20: note = Description of Artificial Sequence: Synthetic oligonucleotide
  misc_feature 1..20: note = Target: SCN10A; (-) strand; PAM type: YTN; PAM sequence: TTT
  source 1..20: mol_type = other DNA
tgccaccacatattaatttt

SEQ ID NO: 54253 - DNA, 20 bp, synthetic construct
  misc_feature 1..20: note = Description of Artificial Sequence: Synthetic oligonucleotide
  misc_feature 1..20: note = Target: SCN10A; (-) strand; PAM type: YTN; PAM sequence: CTC
  source 1..20: mol_type = other DNA
atattttgccaccacatatt

SEQ ID NO: 54254 - DNA, 20 bp, synthetic construct
  misc_feature 1..20: note = Description of Artificial Sequence: Synthetic oligonucleotide
  misc_feature 1..20: note = Target: SCN10A; (-) strand; PAM type: YTN; PAM sequence: TTA
  source 1..20: mol_type = other DNA
acataatcctcatattttgc

SEQ ID NO: 54255 - DNA, 20 bp, synthetic construct
  misc_feature 1..20: note = Description of Artificial Sequence: Synthetic oligonucleotide
  misc_feature 1..20: note = Target: SCN10A; (-) strand; PAM type: YTN; PAM sequence: TTA
  source 1..20: mol_type = other DNA
tcataattaacataatcctc

SEQ ID NO: 54256 - DNA, 20 bp, synthetic construct
  misc_feature 1..20: note = Description of Artificial Sequence: Synthetic oligonucleotide
  misc_feature 1..20: note = Target: SCN10A; (-) strand; PAM type: YTN; PAM sequence: TTT
  source 1..20: mol_type = other DNA
atcataattaacataatcct

SEQ ID NO: 54257 - DNA, 20 bp, synthetic construct
  misc_feature 1..20: note = Description of Artificial Sequence: Synthetic oligonucleotide
  misc_feature 1..20: note = Target: SCN10A; (-) strand; PAM type: YTN; PAM sequence: TTC
  source 1..20: mol_type = other DNA
acatttatcataattaacat

SEQ ID NO: 54258 - DNA, 20 bp, synthetic construct
  misc_feature 1..20: note = Description of Artificial Sequence: Synthetic oligonucleotide
  misc_feature 1..20: note = Target: SCN10A; (-) strand; PAM type: YTN; PAM sequence: TTG
  source 1..20: mol_type = other DNA
atagacattcacatttatca

SEQ ID NO: 54259 - DNA, 20 bp, synthetic construct
  misc_feature 1..20: note = Description of Artificial Sequence: Synthetic oligonucleotide
  misc_feature 1..20: note = Target: SCN10A; (-) strand; PAM type: YTN; PAM sequence: CTA
  source 1..20: mol_type = other DNA
ttgatagacattcacattta

SEQ ID NO: 54260 - DNA, 20 bp, synthetic construct
  misc_feature 1..20: note = Description of Artificial Sequence: Synthetic oligonucleotide
  misc_feature 1..20: note = Target: SCN10A; (-) strand; PAM type: YTN; PAM sequence: TTC
  source 1..20: mol_type = other DNA
ctattgatagacattcacat

SEQ ID NO: 54261 - DNA, 20 bp, synthetic construct
  misc_feature 1..20: note = Description of Artificial Sequence: Synthetic oligonucleotide
  misc_feature 1..20: note = Target: SCN10A; (-) strand; PAM type: YTN; PAM sequence: TTT
  source 1..20: mol_type = other DNA
cctattgatagacattcaca

SEQ ID NO: 54262 - DNA, 20 bp, synthetic construct
  misc_feature 1..20: note = Description of Artificial Sequence: Synthetic oligonucleotide
  misc_feature 1..20: note = Target: SCN10A; (-) strand; PAM type: YTN; PAM sequence: TTT
  source 1..20: mol_type = other DNA
tcctattgatagacattcac

SEQ ID NO: 54263 - DNA, 20 bp, synthetic construct
  misc_feature 1..20: note = Description of Artificial Sequence: Synthetic oligonucleotide
  misc_feature 1..20: note = Target: SCN10A; (-) strand; PAM type: YTN; PAM sequence: CTA
  source 1..20: mol_type = other DNA
ttttcctattgatagacatt

SEQ ID NO: 54264 - DNA, 20 bp, synthetic construct
  misc_feature 1..20: note = Description of Artificial Sequence: Synthetic oligonucleotide
  misc_feature 1..20: note = Target: SCN10A; (-) strand; PAM type: YTN; PAM sequence: TTA
  source 1..20: mol_type = other DNA
actattttcctattgataga

SEQ ID NO: 54265 - DNA, 20 bp, synthetic construct
  misc_feature 1..20: note = Description of Artificial Sequence: Synthetic oligonucleotide
  misc_feature 1..20: note = Target: SCN10A; (-) strand; PAM type: YTN; PAM sequence: TTT
  source 1..20: mol_type = other DNA
aactattttcctattgatag

SEQ ID NO: 54266 - DNA, 20 bp, synthetic construct
  misc_feature 1..20: note = Description of Artificial Sequence: Synthetic oligonucleotide
  misc_feature 1..20: note = Target: SCN10A; (-) strand; PAM type: YTN; PAM sequence: TTA
  source 1..20: mol_type = other DNA
tttaactattttcctattga

SEQ ID NO: 54267 - DNA, 20 bp, synthetic construct
  misc_feature 1..20: note = Description of Artificial Sequence: Synthetic oligonucleotide
  misc_feature 1..20: note = Target: SCN10A; (-) strand; PAM type: YTN; PAM sequence: TTT
  source 1..20: mol_type = other DNA
atttaactattttcctattg

SEQ ID NO: 54268 - DNA, 20 bp, synthetic construct
  misc_feature 1..20: note = Description of Artificial Sequence: Synthetic oligonucleotide
  misc_feature 1..20: note = Target: SCN10A; (-) strand; PAM type: YTN; PAM sequence: TTG
  source 1..20: mol_type = other DNA
catggatgaagtgaagttta

SEQ ID NO: 54269 - DNA, 20 bp, synthetic construct
  misc_feature 1..20: note = Description of Artificial Sequence: Synthetic oligonucleotide
  misc_feature 1..20: note = Target: SCN10A; (-) strand; PAM type: YTN; PAM sequence: TTT
  source 1..20: mol_type = other DNA
gcatggatgaagtgaagttt

SEQ ID NO: 54270 - DNA, 20 bp, synthetic construct
  misc_feature 1..20: note = Description of Artificial Sequence: Synthetic oligonucleotide
  misc_feature 1..20: note = Target: SCN10A; (-) strand; PAM type: YTN; PAM sequence: TTC
  source 1..20: mol_type = other DNA
atttgcatggatgaagtgaa

SEQ ID NO: 54271 - DNA, 20 bp, synthetic construct
  misc_feature 1..20: note = Description of Artificial Sequence: Synthetic oligonucleotide
  misc_feature 1..20: note = Target: SCN10A; (-) strand; PAM type: YTN; PAM sequence: TTT
  source 1..20: mol_type = other DNA
catttgcatggatgaagtga

SEQ ID NO: 54272 - DNA, 20 bp, synthetic construct
  misc_feature 1..20: note = Description of Artificial Sequence: Synthetic oligonucleotide
  misc_feature 1..20: note = Target: SCN10A; (-) strand; PAM type: YTN; PAM sequence: CTG
  source 1..20: mol_type = other DNA
aacagatttcatttgcatgg

SEQ ID NO: 54273 - DNA, 20 bp, synthetic construct
  misc_feature 1..20: note = Description of Artificial Sequence: Synthetic oligonucleotide
  misc_feature 1..20: note = Target: SCN10A; (-) strand; PAM type: YTN; PAM sequence: TTA
  source 1..20: mol_type = other DNA
gctgaacagatttcatttgc

SEQ ID NO: 54274 - DNA, 20 bp, synthetic construct
  misc_feature 1..20: note = Description of Artificial Sequence: Synthetic oligonucleotide
  misc_feature 1..20: note = Target: SCN10A; (-) strand; PAM type: YTN; PAM sequence: TTA
  source 1..20: mol_type = other DNA
tagaaattagctgaacagat

SEQ ID NO: 54275 - DNA, 20 bp, synthetic construct
  misc_feature 1..20: note = Description of Artificial Sequence: Synthetic oligonucleotide
  misc_feature 1..20: note = Target: SCN10A; (-) strand; PAM type: YTN; PAM sequence: TTT
  source 1..20: mol_type = other DNA
atagaaattagctgaacaga

SEQ ID NO: 54276 - DNA, 20 bp, synthetic construct
  misc_feature 1..20: note = Description of Artificial Sequence: Synthetic oligonucleotide
  misc_feature 1..20: note = Target: SCN10A; (-) strand; PAM type: YTN; PAM sequence: TTT
  source 1..20: mol_type = other DNA
tatagaaattagctgaacag

SEQ ID NO: 54277 - DNA, 20 bp, synthetic construct
  misc_feature 1..20: note = Description of Artificial Sequence: Synthetic oligonucleotide
  misc_feature 1..20: note = Target: SCN10A; (-) strand; PAM type: YTN; PAM sequence: CTG
  source 1..20: mol_type = other DNA
ttttatagaaattagctgaa

SEQ ID NO: 54278 - DNA, 20 bp, synthetic construct
  misc_feature 1..20: note = Description of Artificial Sequence: Synthetic oligonucleotide
  misc_feature 1..20: note = Target: SCN10A; (-) strand; PAM type: YTN; PAM sequence: TTC
  source 1..20: mol_type = other DNA
aatgacatccccaaaaaaat

SEQ ID NO: 54279 - DNA, 20 bp, synthetic construct
  misc_feature 1..20: note = Description of Artificial Sequence: Synthetic oligonucleotide
  misc_feature 1..20: note = Target: SCN10A; (-) strand; PAM type: YTN; PAM sequence: CTA
  source 1..20: mol_type = other DNA
taaattcaatgacatcccca

SEQ ID NO: 54280 - DNA, 20 bp, synthetic construct
  misc_feature 1..20: note = Description of Artificial Sequence: Synthetic oligonucleotide
  misc_feature 1..20: note = Target: SCN10A; (-) strand; PAM type: YTN; PAM sequence: TTA
  source 1..20: mol_type = other DNA
gtctataaattcaatgacat

SEQ ID NO: 54281 - DNA, 20 bp, synthetic construct
  misc_feature 1..20: note = Description of Artificial Sequence: Synthetic oligonucleotide
  misc_feature 1..20: note = Target: SCN10A; (-) strand; PAM type: YTN; PAM sequence: CTG
  source 1..20: mol_type = other DNA
cccaaattagtctataaatt

SEQ ID NO: 54282 - DNA, 20 bp, synthetic construct
  misc_feature 1..20: note = Description of Artificial Sequence: Synthetic oligonucleotide
  misc_feature 1..20: note = Target: SCN10A; (-) strand; PAM type: YTN; PAM sequence: TTA
  source 1..20: mol_type = other DNA
gaatgtcagtgctgcccaaa

SEQ ID NO: 54283 - DNA, 20 bp, synthetic construct
  misc_feature 1..20: note = Description of Artificial Sequence: Synthetic oligonucleotide
  misc_feature 1..20: note = Target: SCN10A; (-) strand; PAM type: YTN; PAM sequence: TTG
  source 1..20: mol_type = other DNA
ttagaatgtcagtgctgccc

SEQ ID NO: 54284 - DNA, 20 bp, synthetic construct
  misc_feature 1..20: note = Description of Artificial Sequence: Synthetic oligonucleotide
  misc_feature 1..20: note = Target: SCN10A; (-) strand; PAM type: YTN; PAM sequence: TTC
  source 1..20: mol_type = other DNA
ataattgttagaatgtcagt

SEQ ID NO: 54285 - DNA, 20 bp, synthetic construct
  misc_feature 1..20: note = Description of Artificial Sequence: Synthetic oligonucleotide
  misc_feature 1..20: note = Target: SCN10A; (-) strand; PAM type: YTN; PAM sequence: TTA
  source 1..20: mol_type = other DNA
gaagattcataattgttaga

SEQ ID NO: 54286 - DNA, 20 bp, synthetic construct
  misc_feature 1..20: note = Description of Artificial Sequence: Synthetic oligonucleotide
  misc_feature 1..20: note = Target: SCN10A; (-) strand; PAM type: YTN; PAM sequence: CTG
  source 1..20: mol_type = other DNA
gattagaagattcataattg

SEQ ID NO: 54287 - DNA, 20 bp, synthetic construct
  misc_feature 1..20: note = Description of Artificial Sequence: Synthetic oligonucleotide
  misc_feature 1..20: note = Target: SCN10A; (-) strand; PAM type: YTN; PAM sequence: CTC
  source 1..20: mol_type = other DNA
atgtgactggattagaagat

SEQ ID NO: 54288 - DNA, 20 bp, synthetic construct
  misc_feature 1..20: note = Description of Artificial Sequence: Synthetic oligonucleotide
  misc_feature 1..20: note = Target: SCN10A; (-) strand; PAM type: YTN; PAM sequence: TTA
  source 1..20: mol_type = other DNA
aaggatgtctcatgtgactg

SEQ ID NO: 54289 - DNA, 20 bp, synthetic construct
  misc_feature 1..20: note = Description of Artificial Sequence: Synthetic oligonucleotide
  misc_feature 1..20: note = Target: SCN10A; (-) strand; PAM type: YTN; PAM sequence: CTA
  source 1..20: mol_type = other DNA
aatgaattaaaggatgtctc

SEQ ID NO: 54290 - DNA, 20 bp, synthetic construct
  misc_feature 1..20: note = Description of Artificial Sequence: Synthetic oligonucleotide
  misc_feature 1..20: note = Target: SCN10A; (-) strand; PAM type: YTN; PAM sequence: TTA
  source 1..20: mol_type = other DNA
aagtacctaaatgaattaaa

SEQ ID NO: 54291 - DNA, 20 bp, synthetic construct
  misc_feature 1..20: note = Description of Artificial Sequence: Synthetic oligonucleotide
  misc_feature 1..20: note = Target: SCN10A; (-) strand; PAM type: YTN; PAM sequence: TTT
  source 1..20: mol_type = other DNA
aaagtacctaaatgaattaa

SEQ ID NO: 54292 - DNA, 20 bp, synthetic construct
  misc_feature 1..20: note = Description of Artificial Sequence: Synthetic oligonucleotide
  misc_feature 1..20: note = Target: SCN10A; (-) strand; PAM type: YTN; PAM sequence: TTT
  source 1..20: mol_type = other DNA
taaagtacctaaatgaatta

SEQ ID NO: 54293 - DNA, 20 bp, synthetic construct
  misc_feature 1..20: note = Description of Artificial Sequence: Synthetic oligonucleotide
  misc_feature 1..20: note = Target: SCN10A; (-) strand; PAM type: YTN; PAM sequence: TTG
  source 1..20: mol_type = other DNA
agagaaattttaaagtacct

SEQ ID NO: 54294 - DNA, 20 bp, synthetic construct
  misc_feature 1..20: note = Description of Artificial Sequence: Synthetic oligonucleotide
  misc_feature 1..20: note = Target: SCN10A; (-) strand; PAM type: YTN; PAM sequence: TTA
  source 1..20: mol_type = other DNA
ttgagagaaattttaaagta

SEQ ID NO: 54295 - DNA, 20 bp, synthetic construct
  misc_feature 1..20: note = Description of Artificial Sequence: Synthetic oligonucleotide
  misc_feature 1..20: note = Target: SCN10A; (-) strand; PAM type: YTN; PAM sequence: CTA
  source 1..20: mol_type = other DNA
aaaaataatacagcattatt

SEQ ID NO: 54296 - DNA, 20 bp, synthetic construct
  misc_feature 1..20: note = Description of Artificial Sequence: Synthetic oligonucleotide
  misc_feature 1..20: note = Target: SCN10A; (-) strand; PAM type: YTN; PAM sequence: TTA
  source 1..20: mol_type = other DNA
tactaaaaaataatacagca

SEQ ID NO: 54297 - DNA, 20 bp, synthetic construct
  misc_feature 1..20: note = Description of Artificial Sequence: Synthetic oligonucleotide
  misc_feature 1..20: note = Target: SCN10A; (-) strand; PAM type: YTN; PAM sequence: TTT
  source 1..20: mol_type = other DNA
atactaaaaaataatacagc

SEQ ID NO: 54298 - DNA, 20 bp, synthetic construct
  misc_feature 1..20: note = Description of Artificial Sequence: Synthetic oligonucleotide
  misc_feature 1..20: note = Target: SCN10A; (-) strand; PAM type: YTN; PAM sequence: CTT
  source 1..20: mol_type = other DNA
tatactaaaaaataatacag

SEQ ID NO: 54299 - DNA, 20 bp, synthetic construct
  misc_feature 1..20: note = Description of Artificial Sequence: Synthetic oligonucleotide
  misc_feature 1..20: note = Target: SCN10A; (-) strand; PAM type: YTN; PAM sequence: TTG
  source 1..20: mol_type = other DNA
taaaaatatgcacaagacct

SEQ ID NO: 54300 - DNA, 20 bp, synthetic construct
  misc_feature 1..20: note = Description of Artificial Sequence: Synthetic oligonucleotide
  misc_feature 1..20: note = Target: SCN10A; (-) strand; PAM type: YTN; PAM sequence: CTG
  source 1..20: mol_type = other DNA
ttgtaaaaatatgcacaaga

SEQ ID NO: 54301 - DNA, 20 bp, synthetic construct
  misc_feature 1..20: note = Description of Artificial Sequence: Synthetic oligonucleotide
  misc_feature 1..20: note = Target: SCN10A; (-) strand; PAM type: YTN; PAM sequence: CTA
  source 1..20: mol_type = other DNA
ataaatccaaatgctgttgt

SEQ ID NO: 54302 - DNA, 20 bp, synthetic construct
  misc_feature 1..20: note = Description of Artificial Sequence: Synthetic oligonucleotide
  misc_feature 1..20: note = Target: SCN10A; (-) strand; PAM type: YTN; PAM sequence: TTA
  source 1..20: mol_type = other DNA
caaaatagaaaaacagtaga

SEQ ID NO: 54303 - DNA, 20 bp, synthetic construct
  misc_feature 1..20: note = Description of Artificial Sequence: Synthetic oligonucleotide
  misc_feature 1..20: note = Target: SCN10A; (-) strand; PAM type: YTN; PAM sequence: TTA
  source 1..20: mol_type = other DNA
taaaaagcaataaattacaa

SEQ ID NO: 54304 - DNA, 20 bp, synthetic construct
  misc_feature 1..20: note = Description of Artificial Sequence: Synthetic oligonucleotide
  misc_feature 1..20: note = Target: SCN10A; (-) strand; PAM type: YTN; PAM sequence: TTA
  source 1..20: mol_type = other DNA
ataattataaaaagcaataa

SEQ ID NO: 54305 - DNA, 20 bp, synthetic construct
  misc_feature 1..20: note = Description of Artificial Sequence: Synthetic oligonucleotide
  misc_feature 1..20: note = Target: SCN10A; (-) strand; PAM type: YTN; PAM sequence: CTA
  source 1..20: mol_type = other DNA
gaaaaaggataacaaatgaa

SEQ ID NO: 54306 - DNA, 20 bp, synthetic construct
  misc_feature 1..20: note = Description of Artificial Sequence: Synthetic oligonucleotide
  misc_feature 1..20: note = Target: SCN10A; (-) strand; PAM type: YTN; PAM sequence: CTA
  source 1..20: mol_type = other DNA
acaaaactagaaaaaggata

SEQ ID NO: 54307 - DNA, 20 bp, synthetic construct
  misc_feature 1..20: note = Description of Artificial Sequence: Synthetic oligonucleotide
  misc_feature 1..20: note = Target: SCN10A; (-) strand; PAM type: YTN; PAM sequence: TTA
  source 1..20: mol_type = other DNA
aagacctaacaaaactagaa

SEQ ID NO: 54308 - DNA, 20 bp, synthetic construct
  misc_feature 1..20: note = Description of Artificial Sequence: Synthetic oligonucleotide
  misc_feature 1..20: note = Target: SCN10A; (-) strand; PAM type: YTN; PAM sequence: TTT
  source 1..20: mol_type = other DNA
aaagacctaacaaaactaga

SEQ ID NO: 54309 - DNA, 20 bp, synthetic construct
  misc_feature 1..20: note = Description of Artificial Sequence: Synthetic oligonucleotide
  misc_feature 1..20: note = Target: SCN10A; (-) strand; PAM type: YTN; PAM sequence: TTA
  source 1..20: mol_type = other DNA
tttaaagacctaacaaaact

SEQ ID NO: 54310 - DNA, 20 bp, synthetic construct
  misc_feature 1..20: note = Description of Artificial Sequence: Synthetic oligonucleotide
  misc_feature 1..20: note = Target: SCN10A; (-) strand; PAM type: YTN; PAM sequence: CTG
  source 1..20: mol_type = other DNA
aaaagaaattatttaaagac

SEQ ID NO: 54311 - DNA, 20 bp, synthetic construct
  misc_feature 1..20: note = Description of Artificial Sequence: Synthetic oligonucleotide
  misc_feature 1..20: note = Target: SCN10A; (-) strand; PAM type: YTN; PAM sequence: TTA
  source 1..20: mol_type = other DNA
tatcagtaaaagctgaaaag

SEQ ID NO: 54312 - DNA, 20 bp, synthetic construct
  misc_feature 1..20: note = Description of Artificial Sequence: Synthetic oligonucleotide
  misc_feature 1..20: note = Target: SCN10A; (-) strand; PAM type: YTN; PAM sequence: TTT
  source 1..20: mol_type = other DNA
atatcagtaaaagctgaaaa

SEQ ID NO: 54313 - DNA, 20 bp, synthetic construct
  misc_feature 1..20: note = Description of Artificial Sequence: Synthetic oligonucleotide
  misc_feature 1..20: note = Target: SCN10A; (-) strand; PAM type: YTN; PAM sequence: TTC
  source 1..20: mol_type = other DNA
agggaataagtcacagcatg

SEQ ID NO: 54314 - DNA, 20 bp, synthetic construct
  misc_feature 1..20: note = Description of Artificial Sequence: Synthetic oligonucleotide
  misc_feature 1..20: note = Target: SCN10A; (-) strand; PAM type: YTN; PAM sequence: TTA
  source 1..20: mol_type = other DNA
aagacatacatattcaggga

SEQ ID NO: 54315 - DNA, 20 bp, synthetic construct
  misc_feature 1..20: note = Description of Artificial Sequence: Synthetic oligonucleotide
  misc_feature 1..20: note = Target: SCN10A; (-) strand; PAM type: YTN; PAM sequence: CTA
  source 1..20: mol_type = other DNA
gagagtgcagttaaagacat

SEQ ID NO: 54316 - DNA, 20 bp, synthetic construct
  misc_feature 1..20: note = Description of Artificial Sequence: Synthetic oligonucleotide
  misc_feature 1..20: note = Target: SCN10A; (-) strand; PAM type: YTN; PAM sequence: TTA
  source 1..20: mol_type = other DNA
atcagaacctagagagtgca

SEQ ID NO: 54317 - DNA, 20 bp, synthetic construct
  misc_feature 1..20: note = Description of Artificial Sequence: Synthetic oligonucleotide
  misc_feature 1..20: note = Target: SCN10A; (-) strand; PAM type: YTN; PAM sequence: TTT
  source 1..20: mol_type = other DNA
aatcagaacctagagagtgc

SEQ ID NO: 54318 - DNA, 20 bp, synthetic construct
  misc_feature 1..20: note = Description of Artificial Sequence: Synthetic oligonucleotide
  misc_feature 1..20: note = Target: SCN10A; (-) strand; PAM type: YTN; PAM sequence: TTC
  source 1..20: mol_type = other DNA
gagggaaggaaagataaaaa

SEQ ID NO: 54319 - DNA, 20 bp, synthetic construct
  misc_feature 1..20: note = Description of Artificial Sequence: Synthetic oligonucleotide
  misc_feature 1..20: note = Target: SCN10A; (-) strand; PAM type: YTN; PAM sequence: TTT
  source 1..20: mol_type = other DNA
cgagggaaggaaagataaaa

SEQ ID NO: 54320 - DNA, 20 bp, synthetic construct
  misc_feature 1..20: note = Description of Artificial Sequence: Synthetic oligonucleotide
  misc_feature 1..20: note = Target: SCN10A; (-) strand; PAM type: YTN; PAM sequence: TTA
  source 1..20: mol_type = other DNA
tataatttcgagggaaggaa

SEQ ID NO: 54321 - DNA, 20 bp, synthetic construct
  misc_feature 1..20: note = Description of Artificial Sequence: Synthetic oligonucleotide
  misc_feature 1..20: note = Target: SCN10A; (-) strand; PAM type: YTN; PAM sequence: CTA
  source 1..20: mol_type = other DNA
aaattatataatttcgaggg

SEQ ID NO: 54322 - DNA, 20 bp, synthetic construct
  misc_feature 1..20: note = Description of Artificial Sequence: Synthetic oligonucleotide
  misc_feature 1..20: note = Target: SCN10A; (-) strand; PAM type: YTN; PAM sequence: CTA
  source 1..20: mol_type = other DNA
taaactaaaattatataatt

SEQ ID NO: 54323 - DNA, 20 bp, synthetic construct
  misc_feature 1..20: note = Description of Artificial Sequence: Synthetic oligonucleotide
  misc_feature 1..20: note = Target: SCN10A; (-) strand; PAM type: YTN; PAM sequence: TTG
  source 1..20: mol_type = other DNA
gacaaaagacaaactataaa

SEQ ID NO: 54324 - DNA, 20 bp, synthetic construct
  misc_feature 1..20: note = Description of Artificial Sequence: Synthetic oligonucleotide
  misc_feature 1..20: note = Target: SCN10A; (-) strand; PAM type: YTN; PAM sequence: CTT
  source 1..20: mol_type = other DNA
ggacaaaagacaaactataa

SEQ ID NO: 54325 - DNA, 20 bp, synthetic construct
  misc_feature 1..20: note = Description of Artificial Sequence: Synthetic oligonucleotide
  misc_feature 1..20: note = Target: SCN10A; (-) strand; PAM type: YTN; PAM sequence: TTC
  source 1..20: mol_type = other DNA
ttggacaaaagacaaactat

SEQ ID NO: 54326 - DNA, 20 bp, synthetic construct
  misc_feature 1..20: note = Description of Artificial Sequence: Synthetic oligonucleotide
  misc_feature 1..20: note = Target: SCN10A; (-) strand; PAM type: YTN; PAM sequence: TTA
  source 1..20: mol_type = other DNA
aagaattcttggacaaaaga

SEQ ID NO: 54327 - DNA, 20 bp, synthetic construct
  misc_feature 1..20: note = Description of Artificial Sequence: Synthetic oligonucleotide
  misc_feature 1..20: note = Target: SCN10A; (-) strand; PAM type: YTN; PAM sequence: CTT
  source 1..20: mol_type = other DNA
aaagaattcttggacaaaag

SEQ ID NO: 54328 - DNA, 20 bp, synthetic construct
  misc_feature 1..20: note = Description of Artificial Sequence: Synthetic oligonucleotide
  misc_feature 1..20: note = Target: SCN10A; (-) strand; PAM type: YTN; PAM sequence: CTC
  source 1..20: mol_type = other DNA
ttaaagaattcttggacaaa

SEQ ID NO: 54329 - DNA, 20 bp, synthetic construct
  misc_feature 1..20: note = Description of Artificial Sequence: Synthetic oligonucleotide
  misc_feature 1..20: note = Target: SCN10A; (-) strand; PAM type: YTN; PAM sequence: CTC
  source 1..20: mol_type = other DNA
tcttaaagaattcttggaca

SEQ ID NO: 54330 - DNA, 20 bp, synthetic construct
  misc_feature 1..20: note = Description of Artificial Sequence: Synthetic oligonucleotide
  misc_feature 1..20: note = Target: SCN10A; (-) strand; PAM type: YTN; PAM sequence: TTA
  source 1..20: mol_type = other DNA
aaaatctctcttaaagaatt

SEQ ID NO: 54331 - DNA, 20 bp, synthetic construct
  misc_feature 1..20: note = Description of Artificial Sequence: Synthetic oligonucleotide
  misc_feature 1..20: note = Target: SCN10A; (-) strand; PAM type: YTN; PAM sequence: TTT
  source 1..20: mol_type = other DNA
aaaaatctctcttaaagaat

SEQ ID NO: 54332 - DNA, 20 bp, synthetic construct
  misc_feature 1..20: note = Description of Artificial Sequence: Synthetic oligonucleotide
  misc_feature 1..20: note = Target: SCN10A; (-) strand; PAM type: YTN; PAM sequence: TTT
  source 1..20: mol_type = other DNA
taaaaatctctcttaaagaa

SEQ ID NO: 54333 - DNA, 20 bp, synthetic construct
  misc_feature 1..20: note = Description of Artificial Sequence: Synthetic oligonucleotide
  misc_feature 1..20: note = Target: SCN10A; (-) strand; PAM type: YTN; PAM sequence: TTT
  source 1..20: mol_type = other DNA
ttaaaaatctctcttaaaga

SEQ ID NO: 54334 - DNA, 20 bp, synthetic construct
  misc_feature 1..20: note = Description of Artificial Sequence: Synthetic oligonucleotide
  misc_feature 1..20: note = Target: SCN10A; (-) strand; PAM type: YTN; PAM sequence: TTG
  source 1..20: mol_type = other DNA
ataatttttaaaaatctctc

SEQ ID NO: 54335 - DNA, 20 bp, synthetic construct
  misc_feature 1..20: note = Description of Artificial Sequence: Synthetic oligonucleotide
  misc_feature 1..20: note = Target: SCN10A; (-) strand; PAM type: YTN; PAM sequence: CTT
  source 1..20: mol_type = other DNA
gataatttttaaaaatctct

SEQ ID NO: 54336 - DNA, 20 bp, synthetic construct
  misc_feature 1..20: note = Description of Artificial Sequence: Synthetic oligonucleotide
  misc_feature 1..20: note = Target: SCN10A; (-) strand; PAM type: YTN; PAM sequence: TTC
  source 1..20: mol_type = other DNA
cacttgataatttttaaaaa

SEQ ID NO: 54337 - DNA, 20 bp, synthetic construct
  misc_feature 1..20: note = Description of Artificial Sequence: Synthetic oligonucleotide
  misc_feature 1..20: note = Target: SCN10A; (-) strand; PAM type: YTN; PAM sequence: TTT
  source 1..20: mol_type = other DNA
ccacttgataatttttaaaa

SEQ ID NO: 54338 - DNA, 20 bp, synthetic construct
  misc_feature 1..20: note = Description of Artificial Sequence: Synthetic oligonucleotide
  misc_feature 1..20: note = Target: SCN10A; (-) strand; PAM type: YTN; PAM sequence: CTT
  source 1..20: mol_type = other DNA
tccacttgataatttttaaa

SEQ ID NO: 54339 - DNA, 20 bp, synthetic construct
  misc_feature 1..20: note = Description of Artificial Sequence: Synthetic oligonucleotide
  misc_feature 1..20: note = Target: SCN10A; (-) strand; PAM type: YTN; PAM sequence: TTA
  source 1..20: mol_type = other DNA
atgaaatgagaggactttcc

SEQ ID NO: 54340 - DNA, 20 bp, synthetic construct
  misc_feature 1..20: note = Description of Artificial Sequence: Synthetic oligonucleotide
  misc_feature 1..20: note = Target: SCN10A; (-) strand; PAM type: YTN; PAM sequence: TTT
  source 1..20: mol_type = other DNA
aatgaaatgagaggactttc

SEQ ID NO: 54341 - DNA, 20 bp, synthetic construct
  misc_feature 1..20: note = Description of Artificial Sequence: Synthetic oligonucleotide
  misc_feature 1..20: note = Target: SCN10A; (-) strand; PAM type: YTN; PAM sequence: TTA
  source 1..20: mol_type = other DNA
aaaaaaataaccaaatttaa

SEQ ID NO: 54342 - DNA, 20 bp, synthetic construct
  misc_feature 1..20: note = Description of Artificial Sequence: Synthetic oligonucleotide
  misc_feature 1..20: note = Target: SCN10A; (-) strand; PAM type: YTN; PAM sequence: CTG
  source 1..20: mol_type = other DNA
atcataatgaaatagagtta

SEQ ID NO: 54343 - DNA, 20 bp, synthetic construct
  misc_feature 1..20: note = Description of Artificial Sequence: Synthetic oligonucleotide
  misc_feature 1..20: note = Target: SCN10A; (-) strand; PAM type: YTN; PAM sequence: CTC
  source 1..20: mol_type = other DNA
tgatcataatgaaatagagt

SEQ ID NO: 54344 - DNA, 20 bp, synthetic construct
  misc_feature 1..20: note = Description of Artificial Sequence: Synthetic oligonucleotide
  misc_feature 1..20: note = Target: SCN10A; (-) strand; PAM type: YTN; PAM sequence: TTC
  source 1..20: mol_type = other DNA
tctgatcataatgaaataga

SEQ ID NO: 54345 - DNA, 20 bp, synthetic construct
  misc_feature 1..20: note = Description of Artificial Sequence: Synthetic oligonucleotide
  misc_feature 1..20: note = Target: SCN10A; (-) strand; PAM type: YTN; PAM sequence: CTC
  source 1..20: mol_type = other DNA
cagaaagtggaaataatata

SEQ ID NO: 54346 - DNA, 20 bp, synthetic construct
  misc_feature 1..20: note = Description of Artificial Sequence: Synthetic oligonucleotide
  misc_feature 1..20: note = Target: SCN10A; (-) strand; PAM type: YTN; PAM sequence: CTC
  source 1..20: mol_type = other DNA
aataagctccagaaagtgga

SEQ ID NO: 54347 - DNA, 20 bp, synthetic construct
  misc_feature 1..20: note = Description of Artificial Sequence: Synthetic oligonucleotide
  misc_feature 1..20: note = Target: SCN10A; (-) strand; PAM type: YTN; PAM sequence: TTA
  source 1..20: mol_type = other DNA
agccatgacaaaaacctcaa

SEQ ID NO: 54348 - DNA, 20 bp, synthetic construct
  misc_feature 1..20: note = Description of Artificial Sequence: Synthetic oligonucleotide
  misc_feature 1..20: note = Target: SCN10A; (-) strand; PAM type: YTN; PAM sequence: TTC
  source 1..20: mol_type = other DNA
aaaaaaccaaacatatcaaa

SEQ ID NO: 54349 - DNA, 20 bp, synthetic construct
  misc_feature 1..20: note = Description of Artificial Sequence: Synthetic oligonucleotide
  misc_feature 1..20: note = Target: SCN10A; (-) strand; PAM type: YTN; PAM sequence: TTT
  source 1..20: mol_type = other DNA
caaaaaaccaaacatatcaa

SEQ ID NO: 54350 - DNA, 20 bp, synthetic construct
  misc_feature 1..20: note = Description of Artificial Sequence: Synthetic oligonucleotide
  misc_feature 1..20: note = Target: SCN10A; (-) strand; PAM type: YTN; PAM sequence: TTT
  source 1..20: mol_type = other DNA
tcaaaaaaccaaacatatca

SEQ ID NO: 54351 - DNA, 20 bp, synthetic construct
  misc_feature 1..20: note = Description of Artificial Sequence: Synthetic oligonucleotide
  misc_feature 1..20: note = Target: SCN10A; (-) strand; PAM type: YTN; PAM sequence: CTT
  source 1..20: mol_type = other DNA
ttcaaaaaaccaaacatatc

SEQ ID NO: 54352 - DNA, 20 bp, synthetic construct
  misc_feature 1..20: note = Description of Artificial Sequence: Synthetic oligonucleotide
  misc_feature 1..20: note = Target: SCN10A; (-) strand; PAM type: YTN; PAM sequence: CTC
  source 1..20: mol_type = other DNA
cttttcaaaaaaccaaacat

SEQ ID NO: 54353 - DNA, 20 bp, synthetic construct
  misc_feature 1..20: note = Description of Artificial Sequence: Synthetic oligonucleotide
  misc_feature 1..20: note = Target: SCN10A; (-) strand; PAM type: YTN; PAM sequence: CTA
  source 1..20: mol_type = other DNA
acaatagaaaatgcacctcc

SEQ ID NO: 54354 - DNA, 20 bp, synthetic construct
  misc_feature 1..20: note = Description of Artificial Sequence: Synthetic oligonucleotide
  misc_feature 1..20: note = Target: SCN10A; (-) strand; PAM type: YTN; PAM sequence: TTC
  source 1..20: mol_type = other DNA
cctaacaatagaaaatgcac

SEQ ID NO: 54355 - DNA, 20 bp, synthetic construct
  misc_feature 1..20: note = Description of Artificial Sequence: Synthetic oligonucleotide
  misc_feature 1..20: note = Target: SCN10A; (-) strand; PAM type: YTN; PAM sequence: CTT
  source 1..20: mol_type = other DNA
ccctaacaatagaaaatgca

SEQ ID NO: 54356 - DNA, 20 bp, synthetic construct
  misc_feature 1..20: note = Description of Artificial Sequence: Synthetic oligonucleotide
  misc_feature 1..20: note = Target: SCN10A; (-) strand; PAM type: YTN; PAM sequence: CTA
  source 1..20: mol_type = other DNA
ccttccctaacaatagaaaa

SEQ ID NO: 54357 - DNA, 20 bp, synthetic construct
  misc_feature 1..20: note = Description of Artificial Sequence: Synthetic oligonucleotide
  misc_feature 1..20: note = Target: SCN10A; (-) strand; PAM type: YTN; PAM sequence: TTA
  source 1..20: mol_type = other DNA
atatatagcaaactaccttc

SEQ ID NO: 54358 - DNA, 20 bp, synthetic construct
  misc_feature 1..20: note = Description of Artificial Sequence: Synthetic oligonucleotide
  misc_feature 1..20: note = Target: SCN10A; (-) strand; PAM type: YTN; PAM sequence: CTG
  source 1..20: mol_type = other DNA
attaatatatagcaaactac

SEQ ID NO: 54359 - DNA, 20 bp, synthetic construct
  misc_feature 1..20: note = Description of Artificial Sequence: Synthetic oligonucleotide
  misc_feature 1..20: note = Target: SCN10A; (-) strand; PAM type: YTN; PAM sequence: TTA
  source 1..20: mol_type = other DNA
atataatgtatctgattaat

SEQ ID NO: 54360 - DNA, 20 bp, synthetic construct
  misc_feature 1..20: note = Description of Artificial Sequence: Synthetic oligonucleotide
  misc_feature 1..20: note = Target: SCN10A; (-) strand; PAM type: YTN; PAM sequence: CTA
  source 1..20: mol_type = other DNA
gtaatataattaatataatg

SEQ ID NO: 54361 - DNA, 20 bp, synthetic construct
  misc_feature 1..20: note = Description of Artificial Sequence: Synthetic oligonucleotide
  misc_feature 1..20: note = Target: SCN10A; (-) strand; PAM type: YTN; PAM sequence: TTA
  source 1..20: mol_type = other DNA
tagatgacctagtaatataa

SEQ ID NO: 54362 - DNA, 20 bp, synthetic construct
  misc_feature 1..20: note = Description of Artificial Sequence: Synthetic oligonucleotide
  misc_feature 1..20: note = Target: SCN10A; (-) strand; PAM type: YTN; PAM sequence: TTA
  source 1..20: mol_type = other DNA
aaaagtatgtaaaattatag

SEQ ID NO: 54363 - DNA, 20 bp, synthetic construct
  misc_feature 1..20: note = Description of Artificial Sequence: Synthetic oligonucleotide
  misc_feature 1..20: note = Target: SCN10A; (-) strand; PAM type: YTN; PAM sequence: TTA
  source 1..20: mol_type = other DNA
gccaataacagatcaaatgt

SEQ ID NO: 54364 - DNA, 20 bp, synthetic construct
  misc_feature 1..20: note = Description of Artificial Sequence: Synthetic oligonucleotide
  misc_feature 1..20: note = Target: SCN10A; (-) strand; PAM type: YTN; PAM sequence: TTT
  source 1..20: mol_type = other DNA
agccaataacagatcaaatg

SEQ ID NO: 54365 - DNA, 20 bp, synthetic construct
  misc_feature 1..20: note = Description of Artificial Sequence: Synthetic oligonucleotide
  misc_feature 1..20: note = Target: SCN10A; (-) strand; PAM type: YTN; PAM sequence: TTT
  source 1..20: mol_type = other DNA
tagccaataacagatcaaat

SEQ ID NO: 54366 - DNA, 20 bp, synthetic construct
  misc_feature 1..20: note = Description of Artificial Sequence: Synthetic oligonucleotide
  misc_feature 1..20: note = Target: SCN10A; (-) strand; PAM type: YTN; PAM sequence: TTA
  source 1..20: mol_type = other DNA
attttagccaataacagatc

SEQ ID NO: 54367 - DNA, 20 bp, synthetic construct
  misc_feature 1..20: note = Description of Artificial Sequence: Synthetic oligonucleotide
  misc_feature 1..20: note = Target: SCN10A; (-) strand; PAM type: YTN; PAM sequence: TTC
  source 1..20: mol_type = other DNA
aattaattttagccaataac

SEQ ID NO: 54368 - DNA, 20 bp, synthetic construct
  misc_feature 1..20: note = Description of Artificial Sequence: Synthetic oligonucleotide
  misc_feature 1..20: note = Target: SCN10A; (-) strand; PAM type: YTN; PAM sequence: TTT
  source 1..20: mol_type = other DNA
caattaattttagccaataa

SEQ ID NO: 54369 - DNA, 20 bp, synthetic construct
  misc_feature 1..20: note = Description of Artificial Sequence: Synthetic oligonucleotide
  misc_feature 1..20: note = Target: SCN10A; (-) strand; PAM type: YTN; PAM sequence: TTT
  source 1..20: mol_type = other DNA
tcaattaattttagccaata

SEQ ID NO: 54370 - DNA, 20 bp, synthetic construct
  misc_feature 1..20: note = Description of Artificial Sequence: Synthetic oligonucleotide
  misc_feature 1..20: note = Target: SCN10A; (-) strand; PAM type: YTN; PAM sequence: TTG
  source 1..20: mol_type = other DNA
taggaatagaaattttcaat

SEQ ID NO: 54371 - DNA, 20 bp, synthetic construct
  misc_feature 1..20: note = Description of Artificial Sequence: Synthetic oligonucleotide
  misc_feature 1..20: note = Target: SCN10A; (-) strand; PAM type: YTN; PAM sequence: TTA
  source 1..20: mol_type = other DNA
gagtaggaggataaataaaa

SEQ ID NO: 54372 - DNA, 20 bp, synthetic construct
  misc_feature 1..20: note = Description of Artificial Sequence: Synthetic oligonucleotide
  misc_feature 1..20: note = Target: SCN10A; (-) strand; PAM type: YTN; PAM sequence: TTA
  source 1..20: mol_type = other DNA
ttagagtaggaggataaata

SEQ ID NO: 54373 - DNA, 20 bp, synthetic construct
  misc_feature 1..20: note = Description of Artificial Sequence: Synthetic oligonucleotide
  misc_feature 1..20: note = Target: SCN10A; (-) strand; PAM type: YTN; PAM sequence: TTA
  source 1..20: mol_type = other DNA
taaatcagaaattattagag

SEQ ID NO: 54374 - DNA, 20 bp, synthetic construct
  misc_feature 1..20: note = Description of Artificial Sequence: Synthetic oligonucleotide
  misc_feature 1..20: note = Target: SCN10A; (-) strand; PAM type: YTN; PAM sequence: TTT
  source 1..20: mol_type = other DNA
ataaatcagaaattattaga

SEQ ID NO: 54375 - DNA, 20 bp, synthetic construct
  misc_feature 1..20: note = Description of Artificial Sequence: Synthetic oligonucleotide
  misc_feature 1..20: note = Target: SCN10A; (-) strand; PAM type: YTN; PAM sequence: TTG
  source 1..20: mol_type = other DNA
caacaaataagatggcaaca

SEQ ID NO: 54376 - DNA, 20 bp, synthetic construct
  misc_feature 1..20: note = Description of Artificial Sequence: Synthetic oligonucleotide
  misc_feature 1..20: note = Target: SCN10A; (-) strand; PAM type: YTN; PAM sequence: TTT
  source 1..20: mol_type = other DNA
gcaacaaataagatggcaac

SEQ ID NO: 54377 - DNA, 20 bp, synthetic construct
  misc_feature 1..20: note = Description of Artificial Sequence: Synthetic oligonucleotide
  misc_feature 1..20: note = Target: SCN10A; (-) strand; PAM type: YTN; PAM sequence: CTT
  source 1..20: mol_type = other DNA
tgcaacaaataagatggcaa

SEQ ID NO: 54378 - DNA, 20 bp, synthetic construct
  misc_feature 1..20: note = Description of Artificial Sequence: Synthetic oligonucleotide
  misc_feature 1..20: note = Target: SCN10A; (-) strand; PAM type: YTN; PAM sequence: CTA
  source 1..20: mol_type = other DNA
tatctttgcaacaaataaga

SEQ ID NO: 54379 - DNA, 20 bp, synthetic construct
  misc_feature 1..20: note = Description of Artificial Sequence: Synthetic oligonucleotide
  misc_feature 1..20: note = Target: SCN10A; (-) strand; PAM type: YTN; PAM sequence: TTA
  source 1..20: mol_type = other DNA
aagacgatagtaatctatat

SEQ ID NO: 54380 - DNA, 20 bp, synthetic construct
  misc_feature 1..20: note = Description of Artificial Sequence: Synthetic oligonucleotide
  misc_feature 1..20: note = Target: SCN10A; (-) strand; PAM type: YTN; PAM sequence: TTA
  source 1..20: mol_type = other DNA
atattaaagacgatagtaat

SEQ ID NO: 54381 - DNA, 20 bp, synthetic construct
  misc_feature 1..20: note = Description of Artificial Sequence: Synthetic oligonucleotide
  misc_feature 1..20: note = Target: SCN10A; (-) strand; PAM type: YTN; PAM sequence: TTG
  source 1..20: mol_type = other DNA
cacagacatattaatattaa

SEQ ID NO: 54382 - DNA, 20 bp, synthetic construct
  misc_feature 1..20: note = Description of Artificial Sequence: Synthetic oligonucleotide
  misc_feature 1..20: note = Target: SCN10A; (-) strand; PAM type: YTN; PAM sequence: CTC
  source 1..20: mol_type = other DNA
ggtcaaaaagcatgaaatag

SEQ ID NO: 54383 - DNA, 20 bp, synthetic construct
  misc_feature 1..20: note = Description of Artificial Sequence: Synthetic oligonucleotide
  misc_feature 1..20: note = Target: SCN10A; (-) strand; PAM type: YTN; PAM sequence: TTA
  source 1..20: mol_type = other DNA
atatcagagaaagtggaatc

SEQ ID NO: 54384 - DNA, 20 bp, synthetic construct
  misc_feature 1..20: note = Description of Artificial Sequence: Synthetic oligonucleotide
  misc_feature 1..20: note = Target: SCN10A; (-) strand; PAM type: YTN; PAM sequence: TTT
  source 1..20: mol_type = other DNA
aatatcagagaaagtggaat

SEQ ID NO: 54385 - DNA, 20 bp, synthetic construct
  misc_feature 1..20: note = Description of Artificial Sequence: Synthetic oligonucleotide
  misc_feature 1..20: note = Target: SCN10A; (-) strand; PAM type: YTN; PAM sequence: TTT
  source 1..20: mol_type = other DNA
taatatcagagaaagtggaa

SEQ ID NO: 54386 - DNA, 20 bp, synthetic construct
  misc_feature 1..20: note = Description of Artificial Sequence: Synthetic oligonucleotide
  misc_feature 1..20: note = Target: SCN10A; (-) strand; PAM type: YTN; PAM sequence: TTC
  source 1..20: mol_type = other DNA
aaaagacataagcaaaggca

SEQ ID NO: 54387 - DNA, 20 bp, synthetic construct
  misc_feature 1..20: note = Description of Artificial Sequence: Synthetic oligonucleotide
  misc_feature 1..20: note = Target: SCN10A; (-) strand; PAM type: YTN; PAM sequence: TTA
  source 1..20: mol_type = other DNA
tagaattcaaaagacataag

SEQ ID NO: 54388 - DNA, 20 bp, synthetic construct
  misc_feature 1..20: note = Description of Artificial Sequence: Synthetic oligonucleotide
  misc_feature 1..20: note = Target: SCN10A; (-) strand; PAM type: YTN; PAM sequence: CTA
  source 1..20: mol_type = other DNA
aaattatagaattcaaaaga

SEQ ID NO: 54389 - DNA, 20 bp, synthetic construct
  misc_feature 1..20: note = Description of Artificial Sequence: Synthetic oligonucleotide
  misc_feature 1..20: note = Target: SCN10A; (-) strand; PAM type: YTN; PAM sequence: CTC
  source 1..20: mol_type = other DNA
acggtgatacagaaaggcta

SEQ ID NO: 54390 - DNA, 20 bp, synthetic construct
  misc_feature 1..20: note = Description of Artificial Sequence: Synthetic oligonucleotide
  misc_feature 1..20: note = Target: SCN10A; (-) strand; PAM type: YTN; PAM sequence: CTC
  source 1..20: mol_type = other DNA
ctcacggtgatacagaaagg

SEQ ID NO: 54391 - DNA, 20 bp, synthetic construct
  misc_feature 1..20: note = Description of Artificial Sequence: Synthetic oligonucleotide
  misc_feature 1..20: note = Target: SCN10A; (-) strand; PAM type: YTN; PAM sequence: TTG
  source 1..20: mol_type = other DNA
aataaaaaaaatactcctca

SEQ ID NO: 54392 - DNA, 20 bp, synthetic construct
  misc_feature 1..20: note = Description of Artificial Sequence: Synthetic oligonucleotide
  misc_feature 1..20: note = Target: SCN10A; (-) strand; PAM type: YTN; PAM sequence: CTA
  source 1..20: mol_type = other DNA
tgttgaataaaaaaaatact

SEQ ID NO: 54393 - DNA, 20 bp, synthetic construct
  misc_feature 1..20: note = Description of Artificial Sequence: Synthetic oligonucleotide
  misc_feature 1..20: note = Target: SCN10A; (-) strand; PAM type: YTN; PAM sequence: CTC
  source 1..20: mol_type = other DNA
tatgttgaataaaaaaaata

SEQ ID NO: 54394 - DNA, 20 bp, synthetic construct
  misc_feature 1..20: note = Description of Artificial Sequence: Synthetic oligonucleotide
  misc_feature 1..20: note = Target: SCN10A; (-) strand; PAM type: YTN; PAM sequence: TTA
  source 1..20: mol_type = other DNA
caaagcaatacccaactcta

SEQ ID NO: 54395 - DNA, 20 bp, synthetic construct
  misc_feature 1..20: note = Description of Artificial Sequence: Synthetic oligonucleotide
  misc_feature 1..20: note = Target: SCN10A; (-) strand; PAM type: YTN; PAM sequence: TTA
  source 1..20: mol_type = other DNA
cattacaaagcaatacccaa

SEQ ID NO: 54396 - DNA, 20 bp, synthetic construct
  misc_feature 1..20: note = Description of Artificial Sequence: Synthetic oligonucleotide
  misc_feature 1..20: note = Target: SCN10A; (-) strand; PAM type: YTN; PAM sequence: CTA
  source 1..20: mol_type = other DNA
ttacattacaaagcaatacc

SEQ ID NO: 54397 - DNA, 20 bp, synthetic construct
  misc_feature 1..20: note = Description of Artificial Sequence: Synthetic oligonucleotide
  misc_feature 1..20: note = Target: SCN10A; (-) strand; PAM type: YTN; PAM sequence: TTA
  source 1..20: mol_type = other DNA
aaaatgcctattacattaca

SEQ ID NO: 54398 - DNA, 20 bp, synthetic construct
  misc_feature 1..20: note = Description of Artificial Sequence: Synthetic oligonucleotide
  misc_feature 1..20: note = Target: SCN10A; (-) strand; PAM type: YTN; PAM sequence: TTT
  source 1..20: mol_type = other DNA
aaaaatgcctattacattac

SEQ ID NO: 54399 - DNA, 20 bp, synthetic construct
  misc_feature 1..20: note = Description of Artificial Sequence: Synthetic oligonucleotide
  misc_feature 1..20: note = Target: SCN10A; (-) strand; PAM type: YTN; PAM sequence: TTT
  source 1..20: mol_type = other DNA
taaaaatgcctattacatta

SEQ ID NO: 54400 - DNA, 20 bp, synthetic construct
  misc_feature 1..20: note = Description of Artificial Sequence: Synthetic oligonucleotide
  misc_feature 1..20: note = Target: SCN10A; (-) strand; PAM type: YTN; PAM sequence: TTT
  source 1..20: mol_type = other DNA
ttaaaaatgcctattacatt

SEQ ID NO: 54401 - DNA, 20 bp, synthetic construct
  misc_feature 1..20: note = Description of Artificial Sequence: Synthetic oligonucleotide
  misc_feature 1..20: note = Target: SCN10A; (-) strand; PAM type: YTN; PAM sequence: CTA
  source 1..20: mol_type = other DNA
tttttaaaaatgcctattac

SEQ ID NO: 54402 - DNA, 20 bp, synthetic construct
  misc_feature 1..20: note = Description of Artificial Sequence: Synthetic oligonucleotide
  misc_feature 1..20: note = Target: SCN10A; (-) strand; PAM type: YTN; PAM sequence: CTC
  source 1..20: mol_type = other DNA
acctatttttaaaaatgcct

SEQ ID NO: 54403 - DNA, 20 bp, synthetic construct
  misc_feature 1..20: note = Description of Artificial Sequence: Synthetic oligonucleotide
  misc_feature 1..20: note = Target: SCN10A; (-) strand; PAM type: YTN; PAM sequence: TTA
  source 1..20: mol_type = other DNA
ctcacctatttttaaaaatg

SEQ ID NO: 54404 - DNA, 20 bp, synthetic construct
  misc_feature 1..20: note = Description of Artificial Sequence: Synthetic oligonucleotide
  misc_feature 1..20: note = Target: SCN10A; (-) strand; PAM type: YTN; PAM sequence: TTT
  source 1..20: mol_type = other DNA
actcacctatttttaaaaat

SEQ ID NO: 54405 - DNA, 20 bp, synthetic construct
  misc_feature 1..20: note = Description of Artificial Sequence: Synthetic oligonucleotide
  misc_feature 1..20: note = Target: SCN10A; (-) strand; PAM type: YTN; PAM sequence: TTT
  source 1..20: mol_type = other DNA
tactcacctatttttaaaaa

SEQ ID NO: 54406 - DNA, 20 bp, synthetic construct
  misc_feature 1..20: note = Description of Artificial Sequence: Synthetic oligonucleotide
  misc_feature 1..20: note = Target: SCN10A; (-) strand; PAM type: YTN; PAM sequence: CTA
  source 1..20: mol_type = other DNA
aatataaatggattttactc

SEQ ID NO: 54407 - DNA, 20 bp, synthetic construct
  misc_feature 1..20: note = Description of Artificial Sequence: Synthetic oligonucleotide
  misc_feature 1..20: note = Target: SCN10A; (-) strand; PAM type: YTN; PAM sequence: CTG
  source 1..20: mol_type = other DNA
tcatgtcactaaatataaat

SEQ ID NO: 54408 - DNA, 20 bp, synthetic construct
  misc_feature 1..20: note = Description of Artificial Sequence: Synthetic oligonucleotide
  misc_feature 1..20: note = Target: SCN10A; (-) strand; PAM type: YTN; PAM sequence: CTA
  source 1..20: mol_type = other DNA
agcaaatctgtcatgtcact

SEQ ID NO: 54409 - DNA, 20 bp, synthetic construct
  misc_feature 1..20: note = Description of Artificial Sequence: Synthetic oligonucleotide
  misc_feature 1..20: note = Target: SCN10A; (-) strand; PAM type: YTN; PAM sequence: CTA
  source 1..20: mol_type = other DNA
agactaagcaaatctgtcat

SEQ ID NO: 54410 - DNA, 20 bp, synthetic construct
  misc_feature 1..20: note = Description of Artificial Sequence: Synthetic oligonucleotide
  misc_feature 1..20: note = Target: SCN10A; (-) strand; PAM type: YTN; PAM sequence: CTA
  source 1..20: mol_type = other DNA
aatacgtcatatgaaataat

SEQ ID NO: 54411 - DNA, 20 bp, synthetic construct
  misc_feature 1..20: note = Description of Artificial Sequence: Synthetic oligonucleotide
  misc_feature 1..20: note = Target: SCN10A; (-) strand; PAM type: YTN; PAM sequence: TTA
  source 1..20: mol_type = other DNA
aaaactaaatacgtcatatg

SEQ ID NO: 54412 - DNA, 20 bp, synthetic construct
  misc_feature 1..20: note = Description of Artificial Sequence: Synthetic oligonucleotide
  misc_feature 1..20: note = Target: SCN10A; (-) strand; PAM type: YTN; PAM sequence: TTT
  source 1..20: mol_type = other DNA
aaaaactaaatacgtcatat

SEQ ID NO: 54413 - DNA, 20 bp, synthetic construct
  misc_feature 1..20: note = Description of Artificial Sequence: Synthetic oligonucleotide
  misc_feature 1..20: note = Target: SCN10A; (-) strand; PAM type: YTN; PAM sequence: TTT
  source 1..20: mol_type = other DNA
taaaaactaaatacgtcata

SEQ ID NO: 54414 - DNA, 20 bp, synthetic construct
  misc_feature 1..20: note = Description of Artificial Sequence: Synthetic oligonucleotide
  misc_feature 1..20: note = Target: SCN10A; (-) strand; PAM type: YTN; PAM sequence: CTA
  source 1..20: mol_type = other DNA
atattttaaaaactaaatac

SEQ ID NO: 54415 - DNA, 20 bp, synthetic construct
  misc_feature 1..20: note = Description of Artificial Sequence: Synthetic oligonucleotide
  misc_feature 1..20: note = Target: SCN10A; (-) strand; PAM type: YTN; PAM sequence: TTG
  source 1..20: mol_type = other DNA
taccaacctaatattttaaa

SEQ ID NO: 54416 - DNA, 20 bp, synthetic construct
  misc_feature 1..20: note = Description of Artificial Sequence: Synthetic oligonucleotide
  misc_feature 1..20: note = Target: SCN10A; (-) strand; PAM type: YTN; PAM sequence: TTT
  source 1..20: mol_type = other DNA
gtaccaacctaatattttaa

SEQ ID NO: 54417 - DNA, 20 bp, synthetic construct
  misc_feature 1..20: note = Description of Artificial Sequence: Synthetic oligonucleotide
  misc_feature 1..20: note = Target: SCN10A; (-) strand; PAM type: YTN; PAM sequence: TTT
  source 1..20: mol_type = other DNA
tgtaccaacctaatatttta

SEQ ID NO: 54418 - DNA, 20 bp, synthetic construct
  misc_feature 1..20: note = Description of Artificial Sequence: Synthetic oligonucleotide
  misc_feature 1..20: note = Target: SCN10A; (-) strand; PAM type: YTN; PAM sequence: CTT
  source 1..20: mol_type = other DNA
ttgtaccaacctaatatttt

SEQ ID NO: 54419 - DNA, 20 bp, synthetic construct
  misc_feature 1..20: note = Description of Artificial Sequence: Synthetic oligonucleotide
  misc_feature 1..20: note = Target: SCN10A; (-) strand; PAM type: YTN; PAM sequence: TTA
  source 1..20: mol_type = other DNA
cttttgtaccaacctaatat

SEQ ID NO: 54420 - DNA, 20 bp, synthetic construct
  misc_feature 1..20: note = Description of Artificial Sequence: Synthetic oligonucleotide
  misc_feature 1..20: note = Target: SCN10A; (-) strand; PAM type: YTN; PAM sequence: TTC
  source 1..20: mol_type = other DNA
aacaatgcaaaaaccacaat

SEQ ID NO: 54421 - DNA, 20 bp, synthetic construct
  misc_feature 1..20: note = Description of Artificial Sequence: Synthetic oligonucleotide
  misc_feature 1..20: note = Target: SCN10A; (-) strand; PAM type: YTN; PAM sequence: TTT
  source 1..20: mol_type = other DNA
caacaatgcaaaaaccacaa

SEQ ID NO: 54422 - DNA, 20 bp, synthetic construct
  misc_feature 1..20: note = Description of Artificial Sequence: Synthetic oligonucleotide
  misc_feature 1..20: note = Target: SCN10A; (-) strand; PAM type: YTN; PAM sequence: TTC
  source 1..20: mol_type = other DNA
caatatcaaacggcaaattt

SEQ ID NO: 54423 - DNA, 20 bp, synthetic construct
  misc_feature 1..20: note = Description of Artificial Sequence: Synthetic oligonucleotide
  misc_feature 1..20: note = Target: SCN10A; (-) strand; PAM type: YTN; PAM sequence: TTA
  source 1..20: mol_type = other DNA
agaatgtattccaatatcaa

SEQ ID NO: 54424 - DNA, 20 bp, synthetic construct
  misc_feature 1..20: note = Description of Artificial Sequence: Synthetic oligonucleotide
  misc_feature 1..20: note = Target: SCN10A; (-) strand; PAM type: YTN; PAM sequence: TTT
  source 1..20: mol_type = other DNA
aagaatgtattccaatatca

SEQ ID NO: 54425 - DNA, 20 bp, synthetic construct
  misc_feature 1..20: note = Description of Artificial Sequence: Synthetic oligonucleotide
  misc_feature 1..20: note = Target: SCN10A; (-) strand; PAM type: YTN; PAM sequence: TTA
  source 1..20: mol_type = other DNA
tttaagaatgtattccaata

SEQ ID NO: 54426 - DNA, 20 bp, synthetic construct
  misc_feature 1..20: note = Description of Artificial Sequence: Synthetic oligonucleotide
  misc_feature 1..20: note = Target: SCN10A; (-) strand; PAM type: YTN; PAM sequence: TTT
  source 1..20: mol_type = other DNA
atttaagaatgtattccaat

SEQ ID NO: 54427 - DNA, 20 bp, synthetic construct
  misc_feature 1..20: note = Description of Artificial Sequence: Synthetic oligonucleotide
  misc_feature 1..20: note = Target: SCN10A; (-) strand; PAM type: YTN; PAM sequence: TTA
  source 1..20: mol_type = other DNA
aaatgatgtataacatggtc

SEQ ID NO: 54428 - DNA, 20 bp, synthetic construct
  misc_feature 1..20: note = Description of Artificial Sequence: Synthetic oligonucleotide
  misc_feature 1..20: note = Target: SCN10A; (-) strand; PAM type: YTN; PAM sequence: TTA
  source 1..20: mol_type = other DNA
gcaaaaaaaaaagtgagaaa

SEQ ID NO: 54429 - DNA, 20 bp, synthetic construct
  misc_feature 1..20: note = Description of Artificial Sequence: Synthetic oligonucleotide
  misc_feature 1..20: note = Target: SCN10A; (-) strand; PAM type: YTN; PAM sequence: CTA
  source 1..20: mol_type = other DNA
aaataaatataaaataaaca

SEQ ID NO: 54430 - DNA, 20 bp, synthetic construct
  misc_feature 1..20: note = Description of Artificial Sequence: Synthetic oligonucleotide
  misc_feature 1..20: note = Target: SCN10A; (-) strand; PAM type: YTN; PAM sequence: TTC
  source 1..20: mol_type = other DNA
catagtctaaaataaatata

SEQ ID NO: 54431 - DNA, 20 bp, synthetic construct
  misc_feature 1..20: note = Description of Artificial Sequence: Synthetic oligonucleotide
  misc_feature 1..20: note = Target: SCN10A; (-) strand; PAM type: YTN; PAM sequence: TTT
  source 1..20: mol_type = other DNA
ccatagtctaaaataaatat

SEQ ID NO: 54432 - DNA, 20 bp, synthetic construct
  misc_feature 1..20: note = Description of Artificial Sequence: Synthetic oligonucleotide
  misc_feature 1..20: note = Target: SCN10A; (-) strand; PAM type: YTN; PAM sequence: TTG
  source 1..20: mol_type = other DNA
tataacataatttccatagt

SEQ ID NO: 54433 - DNA, 20 bp, synthetic construct
  misc_feature 1..20: note = Description of Artificial Sequence: Synthetic oligonucleotide
  misc_feature 1..20: note = Target: SCN10A; (-) strand; PAM type: YTN; PAM sequence: TTT
  source 1..20: mol_type = other DNA
gtataacataatttccatag

SEQ ID NO: 54434 - DNA, 20 bp, synthetic construct
  misc_feature 1..20: note = Description of Artificial Sequence: Synthetic oligonucleotide
  misc_feature 1..20: note = Target: SCN10A; (-) strand; PAM type: YTN; PAM sequence: TTT
  source 1..20: mol_type = other DNA
tgtataacataatttccata

SEQ ID NO: 54435 - DNA, 20 bp, synthetic construct
  misc_feature 1..20: note = Description of Artificial Sequence: Synthetic oligonucleotide
  misc_feature 1..20: note = Target: SCN10A; (-) strand; PAM type: YTN; PAM sequence: TTT
  source 1..20: mol_type = other DNA
ttgtataacataatttccat

SEQ ID NO: 54436 - DNA, 20 bp, synthetic construct
  misc_feature 1..20: note = Description of Artificial Sequence: Synthetic oligonucleotide
  misc_feature 1..20: note = Target: SCN10A; (-) strand; PAM type: YTN; PAM sequence: CTT
  source 1..20: mol_type = other DNA
tttgtataacataatttcca

SEQ ID NO: 54437 - DNA, 20 bp, synthetic construct
  misc_feature 1..20: note = Description of Artificial Sequence: Synthetic oligonucleotide
  misc_feature 1..20: note = Target: SCN10A; (-) strand; PAM type: YTN; PAM sequence: TTG
  source 1..20: mol_type = other DNA
ctttttgtataacataattt

SEQ ID NO: 54438 - DNA, 20 bp, synthetic construct
  misc_feature 1..20: note = Description of Artificial Sequence: Synthetic oligonucleotide
  misc_feature 1..20: note = Target: SCN10A; (-) strand; PAM type: YTN; PAM sequence: TTT
  source 1..20: mol_type = other DNA
gctttttgtataacataatt

SEQ ID NO: 54439 - DNA, 20 bp, synthetic construct
  misc_feature 1..20: note = Description of Artificial Sequence: Synthetic oligonucleotide
  misc_feature 1..20: note = Target: SCN10A; (-) strand; PAM type: YTN; PAM sequence: CTC
  source 1..20: mol_type = other DNA
gaatttgctttttgtataac

SEQ ID NO: 54440 - DNA, 20 bp, synthetic construct
  misc_feature 1..20: note = Description of Artificial Sequence: Synthetic oligonucleotide
  misc_feature 1..20: note = Target: SCN10A; (-) strand; PAM type: YTN; PAM sequence: CTC
  source 1..20: mol_type = other DNA
aaataagaaaatcgctcgaa

SEQ ID NO: 54441 - DNA, 20 bp, synthetic construct
  misc_feature 1..20: note = Description of Artificial Sequence: Synthetic oligonucleotide
  misc_feature 1..20: note = Target: SCN10A; (-) strand; PAM type: YTN; PAM sequence: TTG
  source 1..20: mol_type = other DNA
aactcaaataagaaaatcgc

SEQ ID NO: 54442 - DNA, 20 bp, synthetic construct
  misc_feature 1..20: note = Description of Artificial Sequence: Synthetic oligonucleotide
  misc_feature 1..20: note = Target: SCN10A; (-) strand; PAM type: YTN; PAM sequence: TTT
  source 1..20: mol_type = other DNA
gaactcaaataagaaaatcg

SEQ ID NO: 54443 - DNA, 20 bp, synthetic construct
  misc_feature 1..20: note = Description of Artificial Sequence: Synthetic oligonucleotide
  misc_feature 1..20: note = Target: SCN10A; (-) strand; PAM type: YTN; PAM sequence: TTT
  source 1..20: mol_type = other DNA
tgaactcaaataagaaaatc

SEQ ID NO: 54444 - DNA, 20 bp, synthetic construct
  misc_feature 1..20: note = Description of Artificial Sequence: Synthetic oligonucleotide
  misc_feature 1..20: note = Target: SCN10A; (-) strand; PAM type: YTN; PAM sequence: TTA
  source 1..20: mol_type = other DNA
caacccattttgaactcaaa

SEQ ID NO: 54445 - DNA, 20 bp, synthetic construct
  misc_feature 1..20: note = Description of Artificial Sequence: Synthetic oligonucleotide
  misc_feature 1..20: note = Target: SCN10A; (-) strand; PAM type: YTN; PAM sequence: TTT
  source 1..20: mol_type = other DNA
acaacccattttgaactcaa

SEQ ID NO: 54446 - DNA, 20 bp, synthetic construct
  misc_feature 1..20: note = Description of Artificial Sequence: Synthetic oligonucleotide
  misc_feature 1..20: note = Target: SCN10A; (-) strand; PAM type: YTN; PAM sequence: CTT
  source 1..20: mol_type = other DNA
tacaacccattttgaactca

SEQ ID NO: 54447 - DNA, 20 bp, synthetic construct
  misc_feature 1..20: note = Description of Artificial Sequence: Synthetic oligonucleotide
  misc_feature 1..20: note = Target: SCN10A; (-) strand; PAM type: YTN; PAM sequence: CTG
  source 1..20: mol_type = other DNA
ctttacaacccattttgaac

SEQ ID NO: 54448 - DNA, 20 bp, synthetic construct
  misc_feature 1..20: note = Description of Artificial Sequence: Synthetic oligonucleotide
  misc_feature 1..20: note = Target: SCN10A; (-) strand; PAM type: YTN; PAM sequence: CTG
  source 1..20: mol_type = other DNA
ctgctttacaacccattttg

SEQ ID NO: 54449 - DNA, 20 bp, synthetic construct
  misc_feature 1..20: note = Description of Artificial Sequence: Synthetic oligonucleotide
  misc_feature 1..20: note = Target: SCN10A; (-) strand; PAM type: YTN; PAM sequence: CTC
  source 1..20: mol_type = other DNA
tgctgctttacaacccattt

SEQ ID NO: 54450 - DNA, 20 bp, synthetic construct
  misc_feature 1..20: note = Description of Artificial Sequence: Synthetic oligonucleotide
  misc_feature 1..20: note = Target: SCN10A; (-) strand; PAM type: YTN; PAM sequence: TTG
  source 1..20: mol_type = other DNA
tctctgctgctttacaaccc

SEQ ID NO: 54451 - DNA, 20 bp, synthetic construct
  misc_feature 1..20: note = Description of Artificial Sequence: Synthetic oligonucleotide
  misc_feature 1..20: note = Target: SCN10A; (-) strand; PAM type: YTN; PAM sequence: TTG
  source 1..20: mol_type = other DNA
agttgtctctgctgctttac

SEQ ID NO: 54452 - DNA, 20 bp, synthetic construct
  misc_feature 1..20: note = Description of Artificial Sequence: Synthetic oligonucleotide
  misc_feature 1..20: note = Target: SCN10A; (-) strand; PAM type: YTN; PAM sequence: TTG
  source 1..20: mol_type = other DNA
atgttgagttgtctctgctg

SEQ ID NO: 54453 - DNA, 20 bp, synthetic construct
  misc_feature 1..20: note = Description of Artificial Sequence: Synthetic oligonucleotide
  misc_feature 1..20: note = Target: SCN10A; (-) strand; PAM type: YTN; PAM sequence: TTG
  source 1..20: mol_type = other DNA
ttgatgttgagttgtctctg

SEQ ID NO: 54454 - DNA, 20 bp, synthetic construct
  misc_feature 1..20: note = Description of Artificial Sequence: Synthetic oligonucleotide
  misc_feature 1..20: note = Target: SCN10A; (-) strand; PAM type: YTN; PAM sequence: CTG
  source 1..20: mol_type = other DNA
ggccaaatgcgttgttgatg

SEQ ID NO: 54455 - DNA, 20 bp, synthetic construct
  misc_feature 1..20: note = Description of Artificial Sequence: Synthetic oligonucleotide
  misc_feature 1..20: note = Target: SCN10A; (-) strand; PAM type: YTN; PAM sequence: TTA
  source 1..20: mol_type = other DNA
gcaatccctgggccaaatgc

SEQ ID NO: 54456 - DNA, 20 bp, synthetic construct
  misc_feature 1..20: note = Description of Artificial Sequence: Synthetic oligonucleotide
  misc_feature 1..20: note = Target: SCN10A; (-) strand; PAM type: YTN; PAM sequence: TTG
  source 1..20: mol_type = other DNA
ttagcaatccctgggccaaa

SEQ ID NO: 54457 - DNA, 20 bp, synthetic construct
  misc_feature 1..20: note = Description of Artificial Sequence: Synthetic oligonucleotide
  misc_feature 1..20: note = Target: SCN10A; (-) strand; PAM type: YTN; PAM sequence: TTT
  source 1..20: mol_type = other DNA
gttagcaatccctgggccaa

SEQ ID NO: 54458 - DNA, 20 bp, synthetic construct
  misc_feature 1..20: note = Description of Artificial Sequence: Synthetic oligonucleotide
  misc_feature 1..20: note = Target: SCN10A; (-) strand; PAM type: YTN; PAM sequence: CTT
  source 1..20: mol_type = other DNA
tgttagcaatccctgggcca

SEQ ID NO: 54459 - DNA, 20 bp, synthetic construct
  misc_feature 1..20: note = Description of Artificial Sequence: Synthetic oligonucleotide
  misc_feature 1..20: note = Target: SCN10A; (-) strand; PAM type: YTN; PAM sequence: CTG
  source 1..20: mol_type = other DNA
tacctttgttagcaatccct

SEQ ID NO: 54460 - DNA, 20 bp, synthetic construct
  misc_feature 1..20: note = Description of Artificial Sequence: Synthetic oligonucleotide
  misc_feature 1..20: note = Target: SCN10A; (-) strand; PAM type: YTN; PAM sequence: CTG
  source 1..20: mol_type = other DNA
cactgtacctttgttagcaa

SEQ ID NO: 54461 - DNA, 20 bp, synthetic construct
  misc_feature 1..20: note = Description of Artificial Sequence: Synthetic oligonucleotide
  misc_feature 1..20: note = Target: SCN10A; (-) strand; PAM type: YTN; PAM sequence: TTG
  source 1..20: mol_type = other DNA
aaccaccactgcactgtacc

SEQ ID NO: 54462 - DNA, 20 bp, synthetic construct
  misc_feature 1..20: note = Description of Artificial Sequence: Synthetic oligonucleotide
  misc_feature 1..20: note = Target: SCN10A; (-) strand; PAM type: YTN; PAM sequence: CTT
  source 1..20: mol_type = other DNA
gaaccaccactgcactgtac

SEQ ID NO: 54463 - DNA, 20 bp, synthetic construct
  misc_feature 1..20: note = Description of Artificial Sequence: Synthetic oligonucleotide
  misc_feature 1..20: note = Target: SCN10A; (-) strand; PAM type: YTN; PAM sequence: TTC
  source 1..20: mol_type = other DNA
ttgaaccaccactgcactgt

SEQ ID NO: 54464 - DNA, 20 bp, synthetic construct
  misc_feature 1..20: note = Description of Artificial Sequence: Synthetic oligonucleotide
  misc_feature 1..20: note = Target: SCN10A; (-) strand; PAM type: YTN; PAM sequence: CTT
  source 1..20: mol_type = other DNA
cttgaaccaccactgcactg

SEQ ID NO: 54465 - DNA, 20 bp, synthetic construct
  misc_feature 1..20: note = Description of Artificial Sequence: Synthetic oligonucleotide
  misc_feature 1..20: note = Target: SCN10A; (-) strand; PAM type: YTN; PAM sequence: TTG
  source 1..20: mol_type = other DNA
caaaacttcttgaaccacca

SEQ ID NO: 54466 - DNA, 20 bp, synthetic construct
  misc_feature 1..20: note = Description of Artificial Sequence: Synthetic oligonucleotide
  misc_feature 1..20: note = Target: SCN10A; (-) strand; PAM type: YTN; PAM sequence: TTT
  source 1..20: mol_type = other DNA
gcaaaacttcttgaaccacc

SEQ ID NO: 54467 - DNA, 20 bp, synthetic construct
  misc_feature 1..20: note = Description of Artificial Sequence: Synthetic oligonucleotide
  misc_feature 1..20: note = Target: SCN10A; (-) strand; PAM type: YTN; PAM sequence: CTT
  source 1..20: mol_type = other DNA
tgcaaaacttcttgaaccac

SEQ ID NO: 54468 - DNA, 20 bp, synthetic construct
  misc_feature 1..20: note = Description of Artificial Sequence: Synthetic oligonucleotide
  misc_feature 1..20: note = Target: SCN10A; (-) strand; PAM type: YTN; PAM sequence: CTC
  source 1..20: mol_type = other DNA
ctttgcaaaacttcttgaac

SEQ ID NO: 54469 - DNA, 20 bp, synthetic construct
  misc_feature 1..20: note = Description of Artificial Sequence: Synthetic oligonucleotide
  misc_feature 1..20: note = Target: SCN10A; (-) strand; PAM type: YTN; PAM sequence: CTC
  source 1..20: mol_type = other DNA
atctcctttgcaaaacttct

SEQ ID NO: 54470 - DNA, 20 bp, synthetic construct
  misc_feature 1..20: note = Description of Artificial Sequence: Synthetic oligonucleotide
  misc_feature 1..20: note = Target: SCN10A; (-) strand; PAM type: YTN; PAM sequence: TTC
  source 1..20: mol_type = other DNA
tcatctcctttgcaaaactt

SEQ ID NO: 54471 - DNA, 20 bp, synthetic construct
  misc_feature 1..20: note = Description of Artificial Sequence: Synthetic oligonucleotide
  misc_feature 1..20: note = Target: SCN10A; (-) strand; PAM type: YTN; PAM sequence: TTC
  source 1..20: mol_type = other DNA
aaggttctcatctcctttgc

SEQ ID NO: 54472 - DNA, 20 bp, synthetic construct
  misc_feature 1..20: note = Description of Artificial Sequence: Synthetic oligonucleotide
  misc_feature 1..20: note = Target: SCN10A; (-) strand; PAM type: YTN; PAM sequence: CTT
  source 1..20: mol_type = other DNA
caaggttctcatctcctttg

SEQ ID NO: 54473 - DNA, 20 bp, synthetic construct
  misc_feature 1..20: note = Description of Artificial Sequence: Synthetic oligonucleotide
  misc_feature 1..20: note = Target: SCN10A; (-) strand; PAM type: YTN; PAM sequence: CTC
  source 1..20: mol_type = other DNA
atcttcaaggttctcatctc

SEQ ID NO: 54474 - DNA, 20 bp, synthetic construct
  misc_feature 1..20: note = Description of Artificial Sequence: Synthetic oligonucleotide
  misc_feature 1..20: note = Target: SCN10A; (-) strand; PAM type: YTN; PAM sequence: CTC
  source 1..20: mol_type = other DNA
ctcatcttcaaggttctcat

SEQ ID NO: 54475 - DNA, 20 bp, synthetic construct
  misc_feature 1..20: note = Description of Artificial Sequence: Synthetic oligonucleotide
  misc_feature 1..20: note = Target: SCN10A; (-) strand; PAM type: YTN; PAM sequence: CTC
  source 1..20: mol_type = other DNA
tcctcatcttcaaggttctc

SEQ ID NO: 54476 - DNA, 20 bp, synthetic construct
  misc_feature 1..20: note = Description of Artificial Sequence: Synthetic oligonucleotide
  misc_feature 1..20: note = Target: SCN10A; (-) strand; PAM type: YTN; PAM sequence: CTA
  source 1..20: mol_type = other DNA
ctctcctcatcttcaaggtt

SEQ ID NO: 54477 - DNA, 20 bp, synthetic construct
  misc_feature 1..20: note = Description of Artificial Sequence: Synthetic oligonucleotide
  misc_feature 1..20: note = Target: SCN10A; (-) strand; PAM type: YTN; PAM sequence: TTC
  source 1..20: mol_type = other DNA
caatggccagccactactct

SEQ ID NO: 54478 - DNA, 20 bp, synthetic construct
  misc_feature 1..20: note = Description of Artificial Sequence: Synthetic oligonucleotide
  misc_feature 1..20: note = Target: SCN10A; (-) strand; PAM type: YTN; PAM sequence: CTT
  source 1..20: mol_type = other DNA
ccaatggccagccactactc

SEQ ID NO: 54479 - DNA, 20 bp, synthetic construct
  misc_feature 1..20: note = Description of Artificial Sequence: Synthetic oligonucleotide
  misc_feature 1..20: note = Target: SCN10A; (-) strand; PAM type: YTN; PAM sequence: TTG
  source 1..20: mol_type = other DNA
tcaacttccaatggccagcc

SEQ ID NO: 54480 - DNA, 20 bp, synthetic construct
  misc_feature 1..20: note = Description of Artificial Sequence: Synthetic oligonucleotide
  misc_feature 1..20: note = Target: SCN10A; (-) strand; PAM type: YTN; PAM sequence: TTG
  source 1..20: mol_type = other DNA
gtcattgtcaacttccaatg

SEQ ID NO: 54481 - DNA, 20 bp, synthetic construct
  misc_feature 1..20: note = Description of Artificial Sequence: Synthetic oligonucleotide
  misc_feature 1..20: note = Target: SCN10A; (-) strand; PAM type: YTN; PAM sequence: CTC
  source 1..20: mol_type = other DNA
aattggtcattgtcaacttc

SEQ ID NO: 54482 - DNA, 20 bp, synthetic construct
  misc_feature 1..20: note = Description of Artificial Sequence: Synthetic oligonucleotide
  misc_feature 1..20: note = Target: SCN10A; (-) strand; PAM type: YTN; PAM sequence: CTC
  source 1..20: mol_type = other DNA
tcaattggtcattgtcaact

SEQ ID NO: 54483 - DNA, 20 bp, synthetic construct
  misc_feature 1..20: note = Description of Artificial Sequence: Synthetic oligonucleotide
  misc_feature 1..20: note = Target: SCN10A; (-) strand; PAM type: YTN; PAM sequence: TTG
  source 1..20: mol_type = other DNA
ctctcaattggtcattgtca

SEQ ID NO: 54484 - DNA, 20 bp, synthetic construct
  misc_feature 1..20: note = Description of Artificial Sequence: Synthetic oligonucleotide
  misc_feature 1..20: note = Target: SCN10A; (-) strand; PAM type: YTN; PAM sequence: TTC
  source 1..20: mol_type = other DNA
gatgattgctctcaattggt

SEQ ID NO: 54485 - DNA, 20 bp, synthetic construct
  misc_feature 1..20: note = Description of Artificial Sequence: Synthetic oligonucleotide
  misc_feature 1..20: note = Target: SCN10A; (-) strand; PAM type: YTN; PAM sequence: CTT
  source 1..20: mol_type = other DNA
cgatgattgctctcaattgg

SEQ ID NO: 54486 - DNA, 20 bp, synthetic construct
  misc_feature 1..20: note = Description of Artificial Sequence: Synthetic oligonucleotide
  misc_feature 1..20: note = Target: SCN10A; (-) strand; PAM type: YTN; PAM sequence: TTG
  source 1..20: mol_type = other DNA
taagaggatcaacttcgatg

SEQ ID NO: 54487 - DNA, 20 bp, synthetic construct
  misc_feature 1..20: note = Description of Artificial Sequence: Synthetic oligonucleotide
  misc_feature 1..20: note = Target: SCN10A; (-) strand; PAM type: YTN; PAM sequence: TTG
  source 1..20: mol_type = other DNA
tgcagttgtaagaggatcaa

SEQ ID NO: 54488 - DNA, 20 bp, synthetic construct
  misc_feature 1..20: note = Description of Artificial Sequence: Synthetic oligonucleotide
  misc_feature 1..20: note = Target: SCN10A; (-) strand; PAM type: YTN; PAM sequence: CTT
  source 1..20: mol_type = other DNA
gtgcagttgtaagaggatca

SEQ ID NO: 54489 - DNA, 20 bp, synthetic construct
  misc_feature 1..20: note = Description of Artificial Sequence: Synthetic oligonucleotide
  misc_feature 1..20: note = Target: SCN10A; (-) strand; PAM type: YTN; PAM sequence: TTC
  source 1..20: mol_type = other DNA
ttgtgcagttgtaagaggat

SEQ ID NO: 54490 - DNA, 20 bp, synthetic construct
  misc_feature 1..20: note = Description of Artificial Sequence: Synthetic oligonucleotide
  misc_feature 1..20: note = Target: SCN10A; (-) strand; PAM type: YTN; PAM sequence: CTT
  source 1..20: mol_type = other DNA
cttgtgcagttgtaagagga

SEQ ID NO: 54491 - DNA, 20 bp, synthetic construct
  misc_feature 1..20: note = Description of Artificial Sequence: Synthetic oligonucleotide
  misc_feature 1..20: note = Target: SCN10A; (-) strand; PAM type: YTN; PAM sequence: CTC
  source 1..20: mol_type = other DNA
agcttcttgtgcagttgtaa

SEQ ID NO: 54492 - DNA, 20 bp, synthetic construct
  misc_feature 1..20: note = Description of Artificial Sequence: Synthetic oligonucleotide
  misc_feature 1..20: note = Target: SCN10A; (-) strand; PAM type: YTN; PAM sequence: TTC
  source 1..20: mol_type = other DNA
ctcagcttcttgtgcagttg

SEQ ID NO: 54493 - DNA, 20 bp, synthetic construct
  misc_feature 1..20: note = Description of Artificial Sequence: Synthetic oligonucleotide
  misc_feature 1..20: note = Target: SCN10A; (-) strand; PAM type: YTN; PAM sequence: CTT
  source 1..20: mol_type = other DNA
cctcagcttcttgtgcagtt

SEQ ID NO: 54494 - DNA, 20 bp, synthetic construct
  misc_feature 1..20: note = Description of Artificial Sequence: Synthetic oligonucleotide
  misc_feature 1..20: note = Target: SCN10A; (-) strand; PAM type: YTN; PAM sequence: TTC
  source 1..20: mol_type = other DNA
ttcctcagcttcttgtgcag

SEQ ID NO: 54495 - DNA, 20 bp, synthetic construct
  misc_feature 1..20: note = Description of Artificial Sequence: Synthetic oligonucleotide
  misc_feature 1..20: note = Target: SCN10A; (-) strand; PAM type: YTN; PAM sequence: CTG
  source 1..20: mol_type = other DNA
ccgaatgaccgtagaatggt

SEQ ID NO: 54496 - DNA, 20 bp, synthetic construct
  misc_feature 1..20: note = Description of Artificial Sequence: Synthetic oligonucleotide
  misc_feature 1..20: note = Target: SCN10A; (-) strand; PAM type: YTN; PAM sequence: TTC
  source 1..20: mol_type = other DNA
aactgccgaatgaccgtaga

SEQ ID NO: 54497 - DNA, 20 bp, synthetic construct
  misc_feature 1..20: note = Description of Artificial Sequence: Synthetic oligonucleotide
  misc_feature 1..20: note = Target: SCN10A; (-) strand; PAM type: YTN; PAM sequence: CTT
  source 1..20: mol_type = other DNA
caactgccgaatgaccgtag

SEQ ID NO: 54498 - DNA, 20 bp, synthetic construct
  misc_feature 1..20: note = Description of Artificial Sequence: Synthetic oligonucleotide
  misc_feature 1..20: note = Target: SCN10A; (-) strand; PAM type: YTN; PAM sequence: TTG
  source 1..20: mol_type = other DNA
cttcaactgccgaatgaccg

SEQ ID NO: 54499 - DNA, 20 bp, synthetic construct
  misc_feature 1..20: note = Description of Artificial Sequence: Synthetic oligonucleotide
  misc_feature 1..20: note = Target: SCN10A; (-) strand; PAM type: YTN; PAM sequence: TTT
  source 1..20: mol_type = other DNA
gcttcaactgccgaatgacc

SEQ ID NO: 54500 - DNA, 20 bp, synthetic construct
  misc_feature 1..20: note = Description of Artificial Sequence: Synthetic oligonucleotide
  misc_feature 1..20: note = Target: SCN10A; (-) strand; PAM type: YTN; PAM sequence: TTC
  source 1..20: mol_type = other DNA
caatttgcttcaactgccga

SEQ ID NO: 54501 - DNA, 20 bp, synthetic construct
  misc_feature 1..20: note = Description of Artificial Sequence: Synthetic oligonucleotide
  misc_feature 1..20: note = Target: SCN10A; (-) strand; PAM type: YTN; PAM sequence: TTT
  source 1..20: mol_type = other DNA
ccaatttgcttcaactgccg

SEQ ID NO: 54502 - DNA, 20 bp, synthetic construct
  misc_feature 1..20: note = Description of Artificial Sequence: Synthetic oligonucleotide
  misc_feature 1..20: note = Target: SCN10A; (-) strand; PAM type: YTN; PAM sequence: CTT
  source 1..20: mol_type = other DNA
tccaatttgcttcaactgcc

SEQ ID NO: 54503 - DNA, 20 bp, synthetic construct
  misc_feature 1..20: note = Description of Artificial Sequence: Synthetic oligonucleotide
  misc_feature 1..20: note = Target: SCN10A; (-) strand; PAM type: YTN; PAM sequence: TTC
  source 1..20: mol_type = other DNA
acctttccaatttgcttcaa

SEQ ID NO: 54504 - DNA, 20 bp, synthetic construct
  misc_feature 1..20: note = Description of Artificial Sequence: Synthetic oligonucleotide
  misc_feature 1..20: note = Target: SCN10A; (-) strand; PAM type: YTN; PAM sequence: TTT
  source 1..20: mol_type = other DNA
cacctttccaatttgcttca

SEQ ID NO: 54505 - DNA, 20 bp, synthetic construct
  misc_feature 1..20: note = Description of Artificial Sequence: Synthetic oligonucleotide
  misc_feature 1..20: note = Target: SCN10A; (-) strand; PAM type: YTN; PAM sequence: CTG
  source 1..20: mol_type = other DNA
tttcacctttccaatttgct

SEQ ID NO: 54506 - DNA, 20 bp, synthetic construct
  misc_feature 1..20: note = Description of Artificial Sequence: Synthetic oligonucleotide
  misc_feature 1..20: note = Target: SCN10A; (-) strand; PAM type: YTN; PAM sequence: TTA
  source 1..20: mol_type = other DNA
tggagctgtttcacctttcc

SEQ ID NO: 54507 - DNA, 20 bp, synthetic construct
  misc_feature 1..20: note = Description of Artificial Sequence: Synthetic oligonucleotide
  misc_feature 1..20: note = Target: SCN10A; (-) strand; PAM type: YTN; PAM sequence: TTT
  source 1..20: mol_type = other DNA
atggagctgtttcacctttc

SEQ ID NO: 54508 - DNA, 20 bp, synthetic construct
  misc_feature 1..20: note = Description of Artificial Sequence: Synthetic oligonucleotide
  misc_feature 1..20: note = Target: SCN10A; (-) strand; PAM type: YTN; PAM sequence: TTA
  source 1..20: mol_type = other DNA
tgaggcacccatttatggag

SEQ ID NO: 54509 - DNA, 20 bp, synthetic construct
  misc_feature 1..20: note = Description of Artificial Sequence: Synthetic oligonucleotide
  misc_feature 1..20: note = Target: SCN10A; (-) strand; PAM type: YTN; PAM sequence: CTT
  source 1..20: mol_type = other DNA
atgaggcacccatttatgga

SEQ ID NO: 54510 - DNA, 20 bp, synthetic construct
  misc_feature 1..20: note = Description of Artificial Sequence: Synthetic oligonucleotide
  misc_feature 1..20: note = Target: SCN10A; (-) strand; PAM type: YTN; PAM sequence: TTA
  source 1..20: mol_type = other DNA
gcttatgaggcacccattta

SEQ ID NO: 54511 - DNA, 20 bp, synthetic construct
  misc_feature 1..20: note = Description of Artificial Sequence: Synthetic oligonucleotide
  misc_feature 1..20: note = Target: SCN10A; (-) strand; PAM type: YTN; PAM sequence: CTT
  source 1..20: mol_type = other DNA
agcttatgaggcacccattt

SEQ ID NO: 54512 - DNA, 20 bp, synthetic construct
  misc_feature 1..20: note = Description of Artificial Sequence: Synthetic oligonucleotide
  misc_feature 1..20: note = Target: SCN10A; (-) strand; PAM type: YTN; PAM sequence: TTC
  source 1..20: mol_type = other DNA
cttagcttatgaggcaccca

SEQ ID NO: 54513 - DNA, 20 bp, synthetic construct
  misc_feature 1..20: note = Description of Artificial Sequence: Synthetic oligonucleotide
  misc_feature 1..20: note = Target: SCN10A; (-) strand; PAM type: YTN; PAM sequence: TTT
  source 1..20: mol_type = other DNA
ccttagcttatgaggcaccc

SEQ ID NO: 54514 - DNA, 20 bp, synthetic construct
  misc_feature 1..20: note = Description of Artificial Sequence: Synthetic oligonucleotide
  misc_feature 1..20: note = Target: SCN10A; (-) strand; PAM type: YTN; PAM sequence: TTT
  source 1..20: mol_type = other DNA
tccttagcttatgaggcacc

SEQ ID NO: 54515 - DNA, 20 bp, synthetic construct
  misc_feature 1..20: note = Description of Artificial Sequence: Synthetic oligonucleotide
  misc_feature 1..20: note = Target: SCN10A; (-) strand; PAM type: YTN; PAM sequence: TTT
  source 1..20: mol_type = other DNA
ttccttagcttatgaggcac

SEQ ID NO: 54516 - DNA, 20 bp, synthetic construct
  misc_feature 1..20: note = Description of Artificial Sequence: Synthetic oligonucleotide
  misc_feature 1..20: note = Target: SCN10A; (-) strand; PAM type: YTN; PAM sequence: TTA
  source 1..20: mol_type = other DNA
aacatttttccttagcttat

SEQ ID NO: 54517 - DNA, 20 bp, synthetic construct
  misc_feature 1..20: note = Description of Artificial Sequence: Synthetic oligonucleotide
  misc_feature 1..20: note = Target: SCN10A; (-) strand; PAM type: YTN; PAM sequence: TTT
  source 1..20: mol_type = other DNA
aaacatttttccttagctta

SEQ ID NO: 54518 - DNA, 20 bp, synthetic construct
  misc_feature 1..20: note = Description of Artificial Sequence: Synthetic oligonucleotide
  misc_feature 1..20: note = Target: SCN10A; (-) strand; PAM type: YTN; PAM sequence: TTT
  source 1..20: mol_type = other DNA
taaacatttttccttagctt

SEQ ID NO: 54519 - DNA, 20 bp, synthetic construct
  misc_feature 1..20: note = Description of Artificial Sequence: Synthetic oligonucleotide
  misc_feature 1..20: note = Target: SCN10A; (-) strand; PAM type: YTN; PAM sequence: TTT
  source 1..20: mol_type = other DNA
ttaaacatttttccttagct

SEQ ID NO: 54520 - DNA, 20 bp, synthetic construct
  misc_feature 1..20: note = Description of Artificial Sequence: Synthetic oligonucleotide
  misc_feature 1..20: note = Target: SCN10A; (-) strand; PAM type: YTN; PAM sequence: TTT
  source 1..20: mol_type = other DNA
tttaaacatttttccttagc

SEQ ID NO: 54521 - DNA, 20 bp, synthetic construct
  misc_feature 1..20: note = Description of Artificial Sequence: Synthetic oligonucleotide
  misc_feature 1..20: note = Target: SCN10A; (-) strand; PAM type: YTN; PAM sequence: TTC
  source 1..20: mol_type = other DNA
aaaatgacgattttttaaac

SEQ ID NO: 54522 - DNA, 20 bp, synthetic construct
  misc_feature 1..20: note = Description of Artificial Sequence: Synthetic oligonucleotide
  misc_feature 1..20: note = Target: SCN10A; (-) strand; PAM type: YTN; PAM sequence: CTT
  source 1..20: mol_type = other DNA
caaaatgacgattttttaaa

SEQ ID NO: 54523 - DNA, 20 bp, synthetic construct
  misc_feature 1..20: note = Description of Artificial Sequence: Synthetic oligonucleotide
  misc_feature 1..20: note = Target: SCN10A; (-) strand; PAM type: YTN; PAM sequence: TTG
  source 1..20: mol_type = other DNA
catagaataagagacgacaa

SEQ ID NO: 54524 - DNA, 20 bp, synthetic construct
  misc_feature 1..20: note = Description of Artificial Sequence: Synthetic oligonucleotide
  misc_feature 1..20: note = Target: SCN10A; (-) strand; PAM type: YTN; PAM sequence: TTG
  source 1..20: mol_type = other DNA
ttgcatagaataagagacga

SEQ ID NO: 54525 - DNA, 20 bp, synthetic construct
  misc_feature 1..20: note = Description of Artificial Sequence: Synthetic oligonucleotide
  misc_feature 1..20: note = Target: SCN10A; (-) strand; PAM type: YTN; PAM sequence: TTT
  source 1..20: mol_type = other DNA
gttgcatagaataagagacg

SEQ ID NO: 54526 - DNA, 20 bp, synthetic construct
  misc_feature 1..20: note = Description of Artificial Sequence: Synthetic oligonucleotide
  misc_feature 1..20: note = Target: SCN10A; (-) strand; PAM type: YTN; PAM sequence: TTT
  source 1..20: mol_type = other DNA
tgttgcatagaataagagac

SEQ ID NO: 54527 - DNA, 20 bp, synthetic construct
  misc_feature 1..20: note = Description of Artificial Sequence: Synthetic oligonucleotide
  misc_feature 1..20: note = Target: SCN10A; (-) strand; PAM type: YTN; PAM sequence: TTT
  source 1..20: mol_type = other DNA
ttgttgcatagaataagaga

SEQ ID NO: 54528 - DNA, 20 bp, synthetic construct
  misc_feature 1..20: note = Description of Artificial Sequence: Synthetic oligonucleotide
  misc_feature 1..20: note = Target: SCN10A; (-) strand; PAM type: YTN; PAM sequence: TTC
  source 1..20: mol_type = other DNA
atttttgttgcatagaataa

SEQ ID NO: 54529 - DNA, 20 bp, synthetic construct
  misc_feature 1..20: note = Description of Artificial Sequence: Synthetic oligonucleotide
  misc_feature 1..20: note = Target: SCN10A; (-) strand; PAM type: YTN; PAM sequence: TTA
  source 1..20: mol_type = other DNA
agaaatagttcatttttgtt

SEQ ID NO: 54530 - DNA, 20 bp, synthetic construct
  misc_feature 1..20: note = Description of Artificial Sequence: Synthetic oligonucleotide
  misc_feature 1..20: note = Target: SCN10A; (-) strand; PAM type: YTN; PAM sequence: CTG
  source 1..20: mol_type = other DNA
attaagaaatagttcatttt

SEQ ID NO: 54531 - DNA, 20 bp, synthetic construct
  misc_feature 1..20: note = Description of Artificial Sequence: Synthetic oligonucleotide
  misc_feature 1..20: note = Target: SCN10A; (-) strand; PAM type: YTN; PAM sequence: TTA
  source 1..20: mol_type = other DNA
tcgcacatcacaatctgatt

SEQ ID NO: 54532 - DNA, 20 bp, synthetic construct
  misc_feature 1..20: note = Description of Artificial Sequence: Synthetic oligonucleotide
  misc_feature 1..20: note = Target: SCN10A; (-) strand; PAM type: YTN; PAM sequence: TTT
  source 1..20: mol_type = other DNA
atcgcacatcacaatctgat

SEQ ID NO: 54533 - DNA, 20 bp, synthetic construct
  misc_feature 1..20: note = Description of Artificial Sequence: Synthetic oligonucleotide
  misc_feature 1..20: note = Target: SCN10A; (-) strand; PAM type: YTN; PAM sequence: TTT
  source 1..20: mol_type = other DNA
tatcgcacatcacaatctga

SEQ ID NO: 54534 - DNA, 20 bp, synthetic construct
  misc_feature 1..20: note = Description of Artificial Sequence: Synthetic oligonucleotide
  misc_feature 1..20: note = Target: SCN10A; (-) strand; PAM type: YTN; PAM sequence: TTT
  source 1..20: mol_type = other DNA
ttatcgcacatcacaatctg

SEQ ID NO: 54535 - DNA, 20 bp, synthetic construct
  misc_feature 1..20: note = Description of Artificial Sequence: Synthetic oligonucleotide
  misc_feature 1..20: note = Target: SCN10A; (-) strand; PAM type: YTN; PAM sequence: CTT
  source 1..20: mol_type = other DNA
tttatcgcacatcacaatct

SEQ ID NO: 54536 - DNA, 20 bp, synthetic construct
  misc_feature 1..20: note = Description of Artificial Sequence: Synthetic oligonucleotide
  misc_feature 1..20: note = Target: SCN10A; (-) strand; PAM type: YTN; PAM sequence: TTC
  source 1..20: mol_type = other DNA
actttttatcgcacatcaca

SEQ ID NO: 54537 - DNA, 20 bp, synthetic construct
  misc_feature 1..20: note = Description of Artificial Sequence: Synthetic oligonucleotide
  misc_feature 1..20: note = Target: SCN10A; (-) strand; PAM type: YTN; PAM sequence: TTG
  source 1..20: mol_type = other DNA
tcaagtaaaattcacttttt

SEQ ID NO: 54538 - DNA, 20 bp, synthetic construct
  misc_feature 1..20: note = Description of Artificial Sequence: Synthetic oligonucleotide
  misc_feature 1..20: note = Target: SCN10A; (-) strand; PAM type: YTN; PAM sequence: TTG
  source 1..20: mol_type = other DNA
ccagttgtcaagtaaaattc

SEQ ID NO: 54539 - DNA, 20 bp, synthetic construct
  misc_feature 1..20: note = Description of Artificial Sequence: Synthetic oligonucleotide
  misc_feature 1..20: note = Target: SCN10A; (-) strand; PAM type: YTN; PAM sequence: CTG
  source 1..20: mol_type = other DNA
gtcattgccagttgtcaagt

SEQ ID NO: 54540 - DNA, 20 bp, synthetic construct
  misc_feature 1..20: note = Description of Artificial Sequence: Synthetic oligonucleotide
  misc_feature 1..20: note = Target: SCN10A; (-) strand; PAM type: YTN; PAM sequence: CTC
  source 1..20: mol_type = other DNA
agtccagccaccaagctggt

SEQ ID NO: 54541 - DNA, 20 bp, synthetic construct
  misc_feature 1..20: note = Description of Artificial Sequence: Synthetic oligonucleotide
  misc_feature 1..20: note = Target: SCN10A; (-) strand; PAM type: YTN; PAM sequence: TTC
  source 1..20: mol_type = other DNA
tcagtccagccaccaagctg

SEQ ID NO: 54542 - DNA, 20 bp, synthetic construct
  misc_feature 1..20: note = Description of Artificial Sequence: Synthetic oligonucleotide
  misc_feature 1..20: note = Target: SCN10A; (-) strand; PAM type: YTN; PAM sequence: CTT
  source 1..20: mol_type = other DNA
ctcagtccagccaccaagct

SEQ ID NO: 54543 - DNA, 20 bp, synthetic construct
  misc_feature 1..20: note = Description of Artificial Sequence: Synthetic oligonucleotide
  misc_feature 1..20: note = Target: SCN10A; (-) strand; PAM type: YTN; PAM sequence: TTC
  source 1..20: mol_type = other DNA
ttctcagtccagccaccaag

SEQ ID NO: 54544 - DNA, 20 bp, synthetic construct
  misc_feature 1..20: note = Description of Artificial Sequence: Synthetic oligonucleotide
  misc_feature 1..20: note = Target: SCN10A; (-) strand; PAM type: YTN; PAM sequence: CTT
  source 1..20: mol_type = other DNA
cttctcagtccagccaccaa

SEQ ID NO: 54545 - DNA, 20 bp, synthetic construct
  misc_feature 1..20: note = Description of Artificial Sequence: Synthetic oligonucleotide
  misc_feature 1..20: note = Target: SCN10A; (-) strand; PAM type: YTN; PAM sequence: TTG
  source 1..20: mol_type = other DNA
gagcttcttctcagtccagc

SEQ ID NO: 54546 - DNA, 20 bp, synthetic construct
  misc_feature 1..20: note = Description of Artificial Sequence: Synthetic oligonucleotide
  misc_feature 1..20: note = Target: SCN10A; (-) strand; PAM type: YTN; PAM sequence: TTT
  source 1..20: mol_type = other DNA
ggagcttcttctcagtccag

SEQ ID NO: 54547 - DNA, 20 bp, synthetic construct
  misc_feature 1..20: note = Description of Artificial Sequence: Synthetic oligonucleotide
  misc_feature 1..20: note = Target: SCN10A; (-) strand; PAM type: YTN; PAM sequence: CTT
  source 1..20: mol_type = other DNA
tggagcttcttctcagtcca

SEQ ID NO: 54548 - DNA, 20 bp, synthetic construct
  misc_feature 1..20: note = Description of Artificial Sequence: Synthetic oligonucleotide
  misc_feature 1..20: note = Target: SCN10A; (-) strand; PAM type: YTN; PAM sequence: TTG
  source 1..20: mol_type = other DNA
ggaagtgctttggagcttct

SEQ ID NO: 54549 - DNA, 20 bp, synthetic construct
  misc_feature 1..20: note = Description of Artificial Sequence: Synthetic oligonucleotide
  misc_feature 1..20: note = Target: SCN10A; (-) strand; PAM type: YTN; PAM sequence: TTT
  source 1..20: mol_type = other DNA
gggaagtgctttggagcttc

SEQ ID NO: 54550 - DNA, 20 bp, synthetic construct
  misc_feature 1..20: note = Description of Artificial Sequence: Synthetic oligonucleotide
  misc_feature 1..20: note = Target: SCN10A; (-) strand; PAM type: YTN; PAM sequence: TTT
  source 1..20: mol_type = other DNA
tgggaagtgctttggagctt

SEQ ID NO: 54551 - DNA, 20 bp, synthetic construct
  misc_feature 1..20: note = Description of Artificial Sequence: Synthetic oligonucleotide
  misc_feature 1..20: note = Target: SCN10A; (-) strand; PAM type: YTN; PAM sequence: TTG
  source 1..20: mol_type = other DNA
ggttttgggaagtgctttgg

SEQ ID NO: 54552 - DNA, 20 bp, synthetic construct
  misc_feature 1..20: note = Description of Artificial Sequence: Synthetic oligonucleotide
  misc_feature 1..20: note = Target: SCN10A; (-) strand; PAM type: YTN; PAM sequence: TTG
  source 1..20: mol_type = other DNA
gtgcaagttgggttttggga

SEQ ID NO: 54553 - DNA, 20 bp, synthetic construct
  misc_feature 1..20: note = Description of Artificial Sequence: Synthetic oligonucleotide
  misc_feature 1..20: note = Target: SCN10A; (-) strand; PAM type: YTN; PAM sequence: TTT
  source 1..20: mol_type = other DNA
ggtgcaagttgggttttggg

SEQ ID NO: 54554 - DNA, 20 bp, synthetic construct
  misc_feature 1..20: note = Description of Artificial Sequence: Synthetic oligonucleotide
  misc_feature 1..20: note = Target: SCN10A; (-) strand; PAM type: YTN; PAM sequence: TTT
  source 1..20: mol_type = other DNA
tggtgcaagttgggttttgg

SEQ ID NO: 54555 - DNA, 20 bp, synthetic construct
  misc_feature 1..20: note = Description of Artificial Sequence: Synthetic oligonucleotide
  misc_feature 1..20: note = Target: SCN10A; (-) strand; PAM type: YTN; PAM sequence: TTT
  source 1..20: mol_type = other DNA
ttggtgcaagttgggttttg

SEQ ID NO: 54556 - DNA, 20 bp, synthetic construct
  misc_feature 1..20: note = Description of Artificial Sequence: Synthetic oligonucleotide
  misc_feature 1..20: note = Target: SCN10A; (-) strand; PAM type: YTN; PAM sequence: TTT
  source 1..20: mol_type = other DNA
tttggtgcaagttgggtttt

SEQ ID NO: 54557 - DNA, 20 bp, synthetic construct
  misc_feature 1..20: note = Description of Artificial Sequence: Synthetic oligonucleotide
  misc_feature 1..20: note = Target: SCN10A; (-) strand; PAM type: YTN; PAM sequence: TTT
  source 1..20: mol_type = other DNA
ttttggtgcaagttgggttt

SEQ ID NO: 54558 - DNA, 20 bp, synthetic construct
  misc_feature 1..20: note = Description of Artificial Sequence: Synthetic oligonucleotide
  misc_feature 1..20: note = Target: SCN10A; (-) strand; PAM type: YTN; PAM sequence: CTT
  source 1..20: mol_type = other DNA
tttttggtgcaagttgggtt

SEQ ID NO: 54559 - DNA, 20 bp, synthetic construct
  misc_feature 1..20: note = Description of Artificial Sequence: Synthetic oligonucleotide
  misc_feature 1..20: note = Target: SCN10A; (-) strand; PAM type: YTN; PAM sequence: CTG
  source 1..20: mol_type = other DNA
tagtagatcagaccggcagc

SEQ ID NO: 54560 - DNA, 20 bp, synthetic construct
  misc_feature 1..20: note = Description of Artificial Sequence: Synthetic oligonucleotide
  misc_feature 1..20: note = Target: SCN10A; (-) strand; PAM type: YTN; PAM sequence: TTC
  source 1..20: mol_type = other DNA
agaaagctgtagtagatcag

SEQ ID NO: 54561 - DNA, 20 bp, synthetic construct
  misc_feature 1..20: note = Description of Artificial Sequence: Synthetic oligonucleotide
  misc_feature 1..20: note = Target: SCN10A; (-) strand; PAM type: YTN; PAM sequence: CTG
  source 1..20: mol_type = other DNA
ggattcagaaagctgtagta

SEQ ID NO: 54562 - DNA, 20 bp, synthetic construct
  misc_feature 1..20: note = Description of Artificial Sequence: Synthetic oligonucleotide
  misc_feature 1..20: note = Target: SCN10A; (-) strand; PAM type: YTN; PAM sequence: TTG
  source 1..20: mol_type = other DNA
ctgggattcagaaagctgta

SEQ ID NO: 54563 - DNA, 20 bp, synthetic construct
  misc_feature 1..20: note = Description of Artificial Sequence: Synthetic oligonucleotide
  misc_feature 1..20: note = Target: SCN10A; (-) strand; PAM type: YTN; PAM sequence: TTT
  source 1..20: mol_type = other DNA
gctgggattcagaaagctgt

SEQ ID NO: 54564 - DNA, 20 bp, synthetic construct
  misc_feature 1..20: note = Description of Artificial Sequence: Synthetic oligonucleotide
  misc_feature 1..20: note = Target: SCN10A; (-) strand; PAM type: YTN; PAM sequence: CTT
  source 1..20: mol_type = other DNA
tgctgggattcagaaagctg

SEQ ID NO: 54565 - DNA, 20 bp, synthetic construct
  misc_feature 1..20: note = Description of Artificial Sequence: Synthetic oligonucleotide
  misc_feature 1..20: note = Target: SCN10A; (-) strand; PAM type: YTN; PAM sequence: CTC
  source 1..20: mol_type = other DNA
agatgtaatggctttgctgg

SEQ ID NO: 54566 - DNA, 20 bp, synthetic construct
  misc_feature 1..20: note = Description of Artificial Sequence: Synthetic oligonucleotide
  misc_feature 1..20: note = Target: SCN10A; (-) strand; PAM type: YTN; PAM sequence: TTC
  source 1..20: mol_type = other DNA
tcagatgtaatggctttgct

SEQ ID NO: 54567 - DNA, 20 bp, synthetic construct
  misc_feature 1..20: note = Description of Artificial Sequence: Synthetic oligonucleotide
  misc_feature 1..20: note = Target: SCN10A; (-) strand; PAM type: YTN; PAM sequence: TTT
  source 1..20: mol_type = other DNA
ctcagatgtaatggctttgc

SEQ ID NO: 54568 - DNA, 20 bp, synthetic construct
  misc_feature 1..20: note = Description of Artificial Sequence: Synthetic oligonucleotide
  misc_feature 1..20: note = Target: SCN10A; (-) strand; PAM type: YTN; PAM sequence: CTG
  source 1..20: mol_type = other DNA
aacatatttctcagatgtaa

SEQ ID NO: 54569 - DNA, 20 bp, synthetic construct
  misc_feature 1..20: note = Description of Artificial Sequence: Synthetic oligonucleotide
  misc_feature 1..20: note = Target: SCN10A; (-) strand; PAM type: YTN; PAM sequence: TTG
  source 1..20: mol_type = other DNA
ctgaacatatttctcagatg

SEQ ID NO: 54570 - DNA, 20 bp, synthetic construct
  misc_feature 1..20: note = Description of Artificial Sequence: Synthetic oligonucleotide
  misc_feature 1..20: note = Target: SCN10A; (-) strand; PAM type: YTN; PAM sequence: TTT
  source 1..20: mol_type = other DNA
gctgaacatatttctcagat

SEQ ID NO: 54571 - DNA, 20 bp, synthetic construct
  misc_feature 1..20: note = Description of Artificial Sequence: Synthetic oligonucleotide
  misc_feature 1..20: note = Target: SCN10A; (-) strand; PAM type: YTN; PAM sequence: CTC
  source 1..20: mol_type = other DNA
atcgatttgctgaacatatt

SEQ ID NO: 54572 - DNA, 20 bp, synthetic construct
  misc_feature 1..20: note = Description of Artificial Sequence: Synthetic oligonucleotide
  misc_feature 1..20: note = Target: SCN10A; (-) strand; PAM type: YTN; PAM sequence: CTG
  source 1..20: mol_type = other DNA
tgcatctcatcgatttgctg

SEQ ID NO: 54573 - DNA, 20 bp, synthetic construct
  misc_feature 1..20: note = Description of Artificial Sequence: Synthetic oligonucleotide
  misc_feature 1..20: note = Target: SCN10A; (-) strand; PAM type: YTN; PAM sequence: TTC
  source 1..20: mol_type = other DNA
tgtgcatctcatcgatttgc

SEQ ID NO: 54574 - DNA, 20 bp, synthetic construct
  misc_feature 1..20: note = Description of Artificial Sequence: Synthetic oligonucleotide
  misc_feature 1..20: note = Target: SCN10A; (-) strand; PAM type: YTN; PAM sequence: TTT
  source 1..20: mol_type = other DNA
ctgtgcatctcatcgatttg

SEQ ID NO: 54575 - DNA, 20 bp, synthetic construct
  misc_feature 1..20: note = Description of Artificial Sequence: Synthetic oligonucleotide
  misc_feature 1..20: note = Target: SCN10A; (-) strand; PAM type: YTN; PAM sequence: TTT
  source 1..20: mol_type = other DNA
tctgtgcatctcatcgattt

SEQ ID NO: 54576 - DNA, 20 bp, synthetic construct
  misc_feature 1..20: note = Description of Artificial Sequence: Synthetic oligonucleotide
  misc_feature 1..20: note = Target: SCN10A; (-) strand; PAM type: YTN; PAM sequence: TTG
  source 1..20: mol_type = other DNA
cagttttctgtgcatctcat

SEQ ID NO: 54577 - DNA, 20 bp, synthetic construct
  misc_feature 1..20: note = Description of Artificial Sequence: Synthetic oligonucleotide
  misc_feature 1..20: note = Target: SCN10A; (-) strand; PAM type: YTN; PAM sequence: CTT
  source 1..20: mol_type = other DNA
gcagttttctgtgcatctca

SEQ ID NO: 54578 - DNA, 20 bp, synthetic construct
  misc_feature 1..20: note = Description of Artificial Sequence: Synthetic oligonucleotide
  misc_feature 1..20: note = Target: SCN10A; (-) strand; PAM type: YTN; PAM sequence: CTG
  source 1..20: mol_type = other DNA
caggccttgcagttttctgt

SEQ ID NO: 54579 - DNA, 20 bp, synthetic construct
  misc_feature 1..20: note = Description of Artificial Sequence: Synthetic oligonucleotide
  misc_feature 1..20: note = Target: SCN10A; (-) strand; PAM type: YTN; PAM sequence: TTG
  source 1..20: mol_type = other DNA
accaatgccagctgcaggcc

SEQ ID NO: 54580 - DNA, 20 bp, synthetic construct
  misc_feature 1..20: note = Description of Artificial Sequence: Synthetic oligonucleotide
  misc_feature 1..20: note = Target: SCN10A; (-) strand; PAM type: YTN; PAM sequence: CTG
  source 1..20: mol_type = other DNA
ttgaccaatgccagctgcag

SEQ ID NO: 54581 - DNA, 20 bp, synthetic construct
  misc_feature 1..20: note = Description of Artificial Sequence: Synthetic oligonucleotide
  misc_feature 1..20: note = Target: SCN10A; (-) strand; PAM type: YTN; PAM sequence: TTC
  source 1..20: mol_type = other DNA
tgttgaccaatgccagctgc

SEQ ID NO: 54582 - DNA, 20 bp, synthetic construct
  misc_feature 1..20: note = Description of Artificial Sequence: Synthetic oligonucleotide
  misc_feature 1..20: note = Target: SCN10A; (-) strand; PAM type: YTN; PAM sequence: TTT
  source 1..20: mol_type = other DNA
ctgttgaccaatgccagctg

SEQ ID NO: 54583 - DNA, 20 bp, synthetic construct
  misc_feature 1..20: note = Description of Artificial Sequence: Synthetic oligonucleotide
  misc_feature 1..20: note = Target: SCN10A; (-) strand; PAM type: YTN; PAM sequence: CTT
  source 1..20: mol_type = other DNA
tctgttgaccaatgccagct

SEQ ID NO: 54584 - DNA, 20 bp, synthetic construct
  misc_feature 1..20: note = Description of Artificial Sequence: Synthetic oligonucleotide
  misc_feature 1..20: note = Target: SCN10A; (-) strand; PAM type: YTN; PAM sequence: TTG
  source 1..20: mol_type = other DNA
ggccctttctgttgaccaat

SEQ ID NO: 54585 - DNA, 20 bp, synthetic construct
  misc_feature 1..20: note = Description of Artificial Sequence: Synthetic oligonucleotide
  misc_feature 1..20: note = Target: SCN10A; (-) strand; PAM type: YTN; PAM sequence: TTG
  source 1..20: mol_type = other DNA
tggagaagaattgggccctt

SEQ ID NO: 54586 - DNA, 20 bp, synthetic construct
  misc_feature 1..20: note = Description of Artificial Sequence: Synthetic oligonucleotide
  misc_feature 1..20: note = Target: SCN10A; (-) strand; PAM type: YTN; PAM sequence: TTG
  source 1..20: mol_type = other DNA
ttgtggagaagaattgggcc

SEQ ID NO: 54587 - DNA, 20 bp, synthetic construct
  misc_feature 1..20: note = Description of Artificial Sequence: Synthetic oligonucleotide
  misc_feature 1..20: note = Target: SCN10A; (-) strand; PAM type: YTN; PAM sequence: TTG
  source 1..20: mol_type = other DNA
tgtgacatgcagtcggttgt

SEQ ID NO: 54588 - DNA, 20 bp, synthetic construct
  misc_feature 1..20: note = Description of Artificial Sequence: Synthetic oligonucleotide
  misc_feature 1..20: note = Target: SCN10A; (-) strand; PAM type: YTN; PAM sequence: TTG
  source 1..20: mol_type = other DNA
gttgtgtgacatgcagtcgg

SEQ ID NO: 54589 - DNA, 20 bp, synthetic construct
  misc_feature 1..20: note = Description of Artificial Sequence: Synthetic oligonucleotide
  misc_feature 1..20: note = Target: SCN10A; (-) strand; PAM type: YTN; PAM sequence: CTG
  source 1..20: mol_type = other DNA
ttggttgtgtgacatgcagt

SEQ ID NO: 54590 - DNA, 20 bp, synthetic construct
  misc_feature 1..20: note = Description of Artificial Sequence: Synthetic oligonucleotide
  misc_feature 1..20: note = Target: SCN10A; (-) strand; PAM type: YTN; PAM sequence: TTG
  source 1..20: mol_type = other DNA
aagtaactgttggttgtgtg

SEQ ID NO: 54591 - DNA, 20 bp, synthetic construct
  misc_feature 1..20: note = Description of Artificial Sequence: Synthetic oligonucleotide
  misc_feature 1..20: note = Target: SCN10A; (-) strand; PAM type: YTN; PAM sequence: TTT
  source 1..20: mol_type = other DNA
gaagtaactgttggttgtgt

SEQ ID NO: 54592 - DNA, 20 bp, synthetic construct
  misc_feature 1..20: note = Description of Artificial Sequence: Synthetic oligonucleotide
  misc_feature 1..20: note = Target: SCN10A; (-) strand; PAM type: YTN; PAM sequence: TTT
  source 1..20: mol_type = other DNA
tgaagtaactgttggttgtg

SEQ ID NO: 54593 - DNA, 20 bp, synthetic construct
  misc_feature 1..20: note = Description of Artificial Sequence: Synthetic oligonucleotide
  misc_feature 1..20: note = Target: SCN10A; (-) strand; PAM type: YTN; PAM sequence: CTT
  source 1..20: mol_type = other DNA
ttgaagtaactgttggttgt

SEQ ID NO: 54594 - DNA, 20 bp, synthetic construct
  misc_feature 1..20: note = Description of Artificial Sequence: Synthetic oligonucleotide
  misc_feature 1..20: note = Target: SCN10A; (-) strand; PAM type: YTN; PAM sequence: TTC
  source 1..20: mol_type = other DNA
aacttttgaagtaactgttg

SEQ ID NO: 54595 - DNA, 20 bp, synthetic construct
  misc_feature 1..20: note = Description of Artificial Sequence: Synthetic oligonucleotide
  misc_feature 1..20: note = Target: SCN10A; (-) strand; PAM type: YTN; PAM sequence: TTC
  source 1..20: mol_type = other DNA
attcaacttttgaagtaact

SEQ ID NO: 54596 - DNA, 20 bp, synthetic construct
  misc_feature 1..20: note = Description of Artificial Sequence: Synthetic oligonucleotide
  misc_feature 1..20: note = Target: SCN10A; (-) strand; PAM type: YTN; PAM sequence: TTC
  source 1..20: mol_type = other DNA
atagcccaattcattcaact

SEQ ID NO: 54597 - DNA, 20 bp, synthetic construct
  misc_feature 1..20: note = Description of Artificial Sequence: Synthetic oligonucleotide
  misc_feature 1..20: note = Target: SCN10A; (-) strand; PAM type: YTN; PAM sequence: CTT
  source 1..20: mol_type = other DNA
catagcccaattcattcaac

SEQ ID NO: 54598 - DNA, 20 bp, synthetic construct
  misc_feature 1..20: note = Description of Artificial Sequence: Synthetic oligonucleotide
  misc_feature 1..20: note = Target: SCN10A; (-) strand; PAM type: YTN; PAM sequence: TTG
  source 1..20: mol_type = other DNA
gtgagaggtcaggtgaatat

SEQ ID NO: 54599 - DNA, 20 bp, synthetic construct
  misc_feature 1..20: note = Description of Artificial Sequence: Synthetic oligonucleotide
  misc_feature 1..20: note = Target: SCN10A; (-) strand; PAM type: YTN; PAM sequence: TTG
  source 1..20: mol_type = other DNA
gttggtgagaggtcaggtga

SEQ ID NO: 54600 - DNA, 20 bp, synthetic construct
  misc_feature 1..20: note = Description of Artificial Sequence: Synthetic oligonucleotide
  misc_feature 1..20: note = Target: SCN10A; (-) strand; PAM type: YTN; PAM sequence: TTG
  source 1..20: mol_type = other DNA
aagaagtggtagttggttgg

SEQ ID NO: 54601 - DNA, 20 bp, synthetic construct
  misc_feature 1..20: note = Description of Artificial Sequence: Synthetic oligonucleotide
  misc_feature 1..20: note = Target: SCN10A; (-) strand; PAM type: YTN; PAM sequence: CTT
  source 1..20: mol_type = other DNA
gaagaagtggtagttggttg

SEQ ID NO: 54602 - DNA, 20 bp, synthetic construct
  misc_feature 1..20: note = Description of Artificial Sequence: Synthetic oligonucleotide
  misc_feature 1..20: note = Target: SCN10A; (-) strand; PAM type: YTN; PAM sequence: TTC
  source 1..20: mol_type = other DNA
agatgcttgaagaagtggta

SEQ ID NO: 54603 - DNA, 20 bp, synthetic construct
  misc_feature 1..20: note = Description of Artificial Sequence: Synthetic oligonucleotide
  misc_feature 1..20: note = Target: SCN10A; (-) strand; PAM type: YTN; PAM sequence: TTG
  source 1..20: mol_type = other DNA
ttcagatgcttgaagaagtg

SEQ ID NO: 54604 - DNA, 20 bp, synthetic construct
  misc_feature 1..20: note = Description of Artificial Sequence: Synthetic oligonucleotide
  misc_feature 1..20: note = Target: SCN10A; (-) strand; PAM type: YTN; PAM sequence: CTG
  source 1..20: mol_type = other DNA
caaaaagttgttcagatgct

SEQ ID NO: 54605 - DNA, 20 bp, synthetic construct
  misc_feature 1..20: note = Description of Artificial Sequence: Synthetic oligonucleotide
  misc_feature 1..20: note = Target: SCN10A; (-) strand; PAM type: YTN; PAM sequence: TTC
  source 1..20: mol_type = other DNA
acctgcaaaaagttgttcag

SEQ ID NO: 54606 - DNA, 20 bp, synthetic construct
  misc_feature 1..20: note = Description of Artificial Sequence: Synthetic oligonucleotide
  misc_feature 1..20: note = Target: SCN10A; (-) strand; PAM type: YTN; PAM sequence: TTT
  source 1..20: mol_type = other DNA
cacctgcaaaaagttgttca

SEQ ID NO: 54607 - DNA, 20 bp, synthetic construct
  misc_feature 1..20: note = Description of Artificial Sequence: Synthetic oligonucleotide
  misc_feature 1..20: note = Target: SCN10A; (-) strand; PAM type: YTN; PAM sequence: TTA
  source 1..20: mol_type = other DNA
tggaagtgtttcacctgcaa

SEQ ID NO: 54608 - DNA, 20 bp, synthetic construct
  misc_feature 1..20: note = Description of Artificial Sequence: Synthetic oligonucleotide
  misc_feature 1..20: note = Target: SCN10A; (-) strand; PAM type: YTN; PAM sequence: CTG
  source 1..20: mol_type = other DNA
gttatggaagtgtttcacct

SEQ ID NO: 54609 - DNA, 20 bp, synthetic construct
  misc_feature 1..20: note = Description of Artificial Sequence: Synthetic oligonucleotide
  misc_feature 1..20: note = Target: SCN10A; (-) strand; PAM type: YTN; PAM sequence: CTG
  source 1..20: mol_type = other DNA
catcccgctggttatggaag

SEQ ID NO: 54610 - DNA, 20 bp, synthetic construct
  misc_feature 1..20: note = Description of Artificial Sequence: Synthetic oligonucleotide
  misc_feature 1..20: note = Target: SCN10A; (-) strand; PAM type: YTN; PAM sequence: TTC
  source 1..20: mol_type = other DNA
tgcatcccgctggttatgga

SEQ ID NO: 54611 - DNA, 20 bp, synthetic construct
  misc_feature 1..20: note = Description of Artificial Sequence: Synthetic oligonucleotide
  misc_feature 1..20: note = Target: SCN10A; (-) strand; PAM type: YTN; PAM sequence: TTT
  source 1..20: mol_type = other DNA
ctgcatcccgctggttatgg

SEQ ID NO: 54612 - DNA, 20 bp, synthetic construct
  misc_feature 1..20: note = Description of Artificial Sequence: Synthetic oligonucleotide
  misc_feature 1..20: note = Target: SCN10A; (-) strand; PAM type: YTN; PAM sequence: TTT
  source 1..20: mol_type = other DNA
tctgcatcccgctggttatg

SEQ ID NO: 54613 - DNA, 20 bp, synthetic construct
  misc_feature 1..20: note = Description of Artificial Sequence: Synthetic oligonucleotide
  misc_feature 1..20: note = Target: SCN10A; (-) strand; PAM type: YTN; PAM sequence: TTG
  source 1..20: mol_type = other DNA
gaaggcattttctgcatccc

SEQ ID NO: 54614 - DNA, 20 bp, synthetic construct
  misc_feature 1..20: note = Description of Artificial Sequence: Synthetic oligonucleotide
  misc_feature 1..20: note = Target: SCN10A; (-) strand; PAM type: YTN; PAM sequence: CTT
  source 1..20: mol_type = other DNA
ggaaggcattttctgcatcc

SEQ ID NO: 54615 - DNA, 20 bp, synthetic construct
  misc_feature 1..20: note = Description of Artificial Sequence: Synthetic oligonucleotide
  misc_feature 1..20: note = Target: SCN10A; (-) strand; PAM type: YTN; PAM sequence: CTC
  source 1..20: mol_type = other DNA
ttggaaggcattttctgcat

SEQ ID NO: 54616 - DNA, 20 bp, synthetic construct
  misc_feature 1..20: note = Description of Artificial Sequence: Synthetic oligonucleotide
  misc_feature 1..20: note = Target: SCN10A; (-) strand; PAM type: YTN; PAM sequence: TTC
  source 1..20: mol_type = other DNA
aatgaactcttggaaggcat

SEQ ID NO: 54617 - DNA, 20 bp, synthetic construct
  misc_feature 1..20: note = Description of Artificial Sequence: Synthetic oligonucleotide
  misc_feature 1..20: note = Target: SCN10A; (-) strand; PAM type: YTN; PAM sequence: TTG
  source 1..20: mol_type = other DNA
ggattcaatgaactcttgga

SEQ ID NO: 54618 - DNA, 20 bp, synthetic construct
  misc_feature 1..20: note = Description of Artificial Sequence: Synthetic oligonucleotide
  misc_feature 1..20: note = Target: SCN10A; (-) strand; PAM type: YTN; PAM sequence: TTT
  source 1..20: mol_type = other DNA
gggattcaatgaactcttgg

SEQ ID NO: 54619 - DNA, 20 bp, synthetic construct
  misc_feature 1..20: note = Description of Artificial Sequence: Synthetic oligonucleotide
  misc_feature 1..20: note = Target: SCN10A; (-) strand; PAM type: YTN; PAM sequence: CTT
  source 1..20: mol_type = other DNA
tgggattcaatgaactcttg

SEQ ID NO: 54620 - DNA, 20 bp, synthetic construct
  misc_feature 1..20: note = Description of Artificial Sequence: Synthetic oligonucleotide
  misc_feature 1..20: note = Target: SCN10A; (-) strand; PAM type: YTN; PAM sequence: CTG
  source 1..20: mol_type = other DNA
tagcataaaaatccatgctt

SEQ ID NO: 54621 - DNA, 20 bp, synthetic construct
  misc_feature 1..20: note = Description of Artificial Sequence: Synthetic oligonucleotide
  misc_feature 1..20: note = Target: SCN10A; (-) strand; PAM type: YTN; PAM sequence: TTC
  source 1..20: mol_type = other DNA
ctgtagcataaaaatccatg

SEQ ID NO: 54622 - DNA, 20 bp, synthetic construct
  misc_feature 1..20: note = Description of Artificial Sequence: Synthetic oligonucleotide
  misc_feature 1..20: note = Target: SCN10A; (-) strand; PAM type: YTN; PAM sequence: TTA
  source 1..20: mol_type = other DNA
ttcctgtagcataaaaatcc

SEQ ID NO: 54623 - DNA, 20 bp, synthetic construct
  misc_feature 1..20: note = Description of Artificial Sequence: Synthetic oligonucleotide
  misc_feature 1..20: note = Target: SCN10A; (-) strand; PAM type: YTN; PAM sequence: TTT
  source 1..20: mol_type = other DNA
attcctgtagcataaaaatc

SEQ ID NO: 54624 - DNA, 20 bp, synthetic construct
  misc_feature 1..20: note = Description of Artificial Sequence: Synthetic oligonucleotide
  misc_feature 1..20: note = Target: SCN10A; (-) strand; PAM type: YTN; PAM sequence: TTG
  source 1..20: mol_type = other DNA
tttattcctgtagcataaaa

SEQ ID NO: 54625 - DNA, 20 bp, synthetic construct
  misc_feature 1..20: note = Description of Artificial Sequence: Synthetic oligonucleotide
  misc_feature 1..20: note = Target: SCN10A; (-) strand; PAM type: YTN; PAM sequence: TTT
  source 1..20: mol_type = other DNA
gtttattcctgtagcataaa

SEQ ID NO: 54626 - DNA, 20 bp, synthetic construct
  misc_feature 1..20: note = Description of Artificial Sequence: Synthetic oligonucleotide
  misc_feature 1..20: note = Target: SCN10A; (-) strand; PAM type: YTN; PAM sequence: TTG
  source 1..20: mol_type = other DNA
ccaatgagaaatgagtttgt

SEQ ID NO: 54627 - DNA, 20 bp, synthetic construct
  misc_feature 1..20: note = Description of Artificial Sequence: Synthetic oligonucleotide
  misc_feature 1..20: note = Target: SCN10A; (-) strand; PAM type: YTN; PAM sequence: TTT
  source 1..20: mol_type = other DNA
gccaatgagaaatgagtttg

SEQ ID NO: 54628 - DNA, 20 bp, synthetic construct
  misc_feature 1..20: note = Description of Artificial Sequence: Synthetic oligonucleotide
  misc_feature 1..20: note = Target: SCN10A; (-) strand; PAM type: YTN; PAM sequence: TTT
  source 1..20: mol_type = other DNA
tgccaatgagaaatgagttt

SEQ ID NO: 54629 - DNA, 20 bp, synthetic construct
  misc_feature 1..20: note = Description of Artificial Sequence: Synthetic oligonucleotide
  misc_feature 1..20: note = Target: SCN10A; (-) strand; PAM type: YTN; PAM sequence: TTT
  source 1..20: mol_type = other DNA
ttgccaatgagaaatgagtt

SEQ ID NO: 54630 - DNA, 20 bp, synthetic construct
  misc_feature 1..20: note = Description of Artificial Sequence: Synthetic oligonucleotide
  misc_feature 1..20: note = Target: SCN10A; (-) strand; PAM type: YTN; PAM sequence: TTA
  source 1..20: mol_type = other DNA
caatcaacacatttttgcca

SEQ ID NO: 54631 - DNA, 20 bp, synthetic construct
  misc_feature 1..20: note = Description of Artificial Sequence: Synthetic oligonucleotide
  misc_feature 1..20: note = Target: SCN10A; (-) strand; PAM type: YTN; PAM sequence: TTA
  source 1..20: mol_type = other DNA
atcaaagtaggaaccattac

SEQ ID NO: 54632 - DNA, 20 bp, synthetic construct
  misc_feature 1..20: note = Description of Artificial Sequence: Synthetic oligonucleotide
  misc_feature 1..20: note = Target: SCN10A; (-) strand; PAM type: YTN; PAM sequence: TTA
  source 1..20: mol_type = other DNA
ttaatcaaagtaggaaccat

SEQ ID NO: 54633 - DNA, 20 bp, synthetic construct
  misc_feature 1..20: note = Description of Artificial Sequence: Synthetic oligonucleotide
  misc_feature 1..20: note = Target: SCN10A; (-) strand; PAM type: YTN; PAM sequence: TTT
  source 1..20: mol_type = other DNA
attaatcaaagtaggaacca

SEQ ID NO: 54634 - DNA, 20 bp, synthetic construct
  misc_feature 1..20: note = Description of Artificial Sequence: Synthetic oligonucleotide
  misc_feature 1..20: note = Target: SCN10A; (-) strand; PAM type: YTN; PAM sequence: CTT
  source 1..20: mol_type = other DNA
tattaatcaaagtaggaacc

SEQ ID NO: 54635 - DNA, 20 bp, synthetic construct
  misc_feature 1..20: note = Description of Artificial Sequence: Synthetic oligonucleotide
  misc_feature 1..20: note = Target: SCN10A; (-) strand; PAM type: YTN; PAM sequence: CTC
  source 1..20: mol_type = other DNA
aaacacatctttattaatca

SEQ ID NO: 54636 - DNA, 20 bp, synthetic construct
  misc_feature 1..20: note = Description of Artificial Sequence: Synthetic oligonucleotide
  misc_feature 1..20: note = Target: SCN10A; (-) strand; PAM type: YTN; PAM sequence: CTA
  source 1..20: mol_type = other DNA
ggctcaaacacatctttatt

SEQ ID NO: 54637 - DNA, 20 bp, synthetic construct
  misc_feature 1..20: note = Description of Artificial Sequence: Synthetic oligonucleotide
  misc_feature 1..20: note = Target: SCN10A; (-) strand; PAM type: YTN; PAM sequence: TTA
  source 1..20: mol_type = other DNA
taactaggctcaaacacatc

SEQ ID NO: 54638 - DNA, 20 bp, synthetic construct
  misc_feature 1..20: note = Description of Artificial Sequence: Synthetic oligonucleotide
  misc_feature 1..20: note = Target: SCN10A; (-) strand; PAM type: YTN; PAM sequence: TTA
  source 1..20: mol_type = other DNA
aatcattataactaggctca

SEQ ID NO: 54639 - DNA, 20 bp, synthetic construct
  misc_feature 1..20: note = Description of Artificial Sequence: Synthetic oligonucleotide
  misc_feature 1..20: note = Target: SCN10A; (-) strand; PAM type: YTN; PAM sequence: TTC
  source 1..20: mol_type = other DNA
agaccataaatattaaatca

SEQ ID NO: 54640 - DNA, 20 bp, synthetic construct
  misc_feature 1..20: note = Description of Artificial Sequence: Synthetic oligonucleotide
  misc_feature 1..20: note = Target: SCN10A; (-) strand; PAM type: YTN; PAM sequence: TTT
  source 1..20: mol_type = other DNA
cagaccataaatattaaatc

SEQ ID NO: 54641 - DNA, 20 bp, synthetic construct
  misc_feature 1..20: note = Description of Artificial Sequence: Synthetic oligonucleotide
  misc_feature 1..20: note = Target: SCN10A; (-) strand; PAM type: YTN; PAM sequence: TTG
  source 1..20: mol_type = other DNA
gggtttcagaccataaatat

SEQ ID NO: 54642 - DNA, 20 bp, synthetic construct
  misc_feature 1..20: note = Description of Artificial Sequence: Synthetic oligonucleotide
  misc_feature 1..20: note = Target: SCN10A; (-) strand; PAM type: YTN; PAM sequence: TTG
  source 1..20: mol_type = other DNA
tacatcaaaaaataaaaagc

SEQ ID NO: 54643 - DNA, 20 bp, synthetic construct
  misc_feature 1..20: note = Description of Artificial Sequence: Synthetic oligonucleotide
  misc_feature 1..20: note = Target: SCN10A; (-) strand; PAM type: YTN; PAM sequence: CTG
  source 1..20: mol_type = other DNA
gaagaattgtacatcaaaaa

SEQ ID NO: 54644 - DNA, 20 bp, synthetic construct
  misc_feature 1..20: note = Description of Artificial Sequence: Synthetic oligonucleotide
  misc_feature 1..20: note = Target: SCN10A; (-) strand; PAM type: YTN; PAM sequence: CTA
  source 1..20: mol_type = other DNA
aatactggaagaattgtaca

SEQ ID NO: 54645 - DNA, 20 bp, synthetic construct
  misc_feature 1..20: note = Description of Artificial Sequence: Synthetic oligonucleotide
  misc_feature 1..20: note = Target: SCN10A; (-) strand; PAM type: YTN; PAM sequence: CTC
  source 1..20: mol_type = other DNA
taaatactggaagaattgta

SEQ ID NO: 54646 - DNA, 20 bp, synthetic construct
  misc_feature 1..20: note = Description of Artificial Sequence: Synthetic oligonucleotide
  misc_feature 1..20: note = Target: SCN10A; (-) strand; PAM type: YTN; PAM sequence: TTG
  source 1..20: mol_type = other DNA
taacaaataatatgacaaac

SEQ ID NO: 54647 - DNA, 20 bp, synthetic construct
  misc_feature 1..20: note = Description of Artificial Sequence: Synthetic oligonucleotide
  misc_feature 1..20: note = Target: SCN10A; (-) strand; PAM type: YTN; PAM sequence: TTT
  source 1..20: mol_type = other DNA
gtaacaaataatatgacaaa

SEQ ID NO: 54648 - DNA, 20 bp, synthetic construct
  misc_feature 1..20: note = Description of Artificial Sequence: Synthetic oligonucleotide
  misc_feature 1..20: note = Target: SCN10A; (-) strand; PAM type: YTN; PAM sequence: CTA
  source 1..20: mol_type = other DNA
tatatttgtaacaaataata

SEQ ID NO: 54649 - DNA, 20 bp, synthetic construct
  misc_feature 1..20: note = Description of Artificial Sequence: Synthetic oligonucleotide
  misc_feature 1..20: note = Target: SCN10A; (-) strand; PAM type: YTN; PAM sequence: TTA
  source 1..20: mol_type = other DNA
gtaatctatatatttgtaac

SEQ ID NO: 54650 - DNA, 20 bp, synthetic construct
  misc_feature 1..20: note = Description of Artificial Sequence: Synthetic oligonucleotide
  misc_feature 1..20: note = Target: SCN10A; (-) strand; PAM type: YTN; PAM sequence: TTT
  source 1..20: mol_type = other DNA
agtaatctatatatttgtaa

SEQ ID NO: 54651 - DNA, 20 bp, synthetic construct
  misc_feature 1..20: note = Description of Artificial Sequence: Synthetic oligonucleotide
  misc_feature 1..20: note = Target: SCN10A; (-) strand; PAM type: YTN; PAM sequence: CTT
  source 1..20: mol_type = other DNA
tagtaatctatatatttgta

SEQ ID NO: 54652 - DNA, 20 bp, synthetic construct
  misc_feature 1..20: note = Description of Artificial Sequence: Synthetic oligonucleotide
  misc_feature 1..20: note = Target: SCN10A; (-) strand; PAM type: YTN; PAM sequence: CTC
  source 1..20: mol_type = other DNA
tttagtaatctatatatttg

SEQ ID NO: 54653 - DNA, 20 bp, synthetic construct
  misc_feature 1..20: note = Description of Artificial Sequence: Synthetic oligonucleotide
  misc_feature 1..20: note = Target: SCN10A; (-) strand; PAM type: YTN; PAM sequence: CTA
  source 1..20: mol_type = other DNA
ggataaagatacaaactctt

SEQ ID NO: 54654 - DNA, 20 bp, synthetic construct
  misc_feature 1..20: note = Description of Artificial Sequence: Synthetic oligonucleotide
  misc_feature 1..20: note = Target: SCN10A; (-) strand; PAM type: YTN; PAM sequence: TTA
  source 1..20: mol_type = other DNA
taaagacaaccactaggata

SEQ ID NO: 54655 - DNA, 20 bp, synthetic construct
  misc_feature 1..20: note = Description of Artificial Sequence: Synthetic oligonucleotide
  misc_feature 1..20: note = Target: SCN10A; (-) strand; PAM type: YTN; PAM sequence: CTT
  source 1..20: mol_type = other DNA
ataaagacaaccactaggat

SEQ ID NO: 54656 - DNA, 20 bp, synthetic construct
  misc_feature 1..20: note = Description of Artificial Sequence: Synthetic oligonucleotide
  misc_feature 1..20: note = Target: SCN10A; (-) strand; PAM type: YTN; PAM sequence: TTA
  source 1..20: mol_type = other DNA
cttataaagacaaccactag

SEQ ID NO: 54657 - DNA, 20 bp, synthetic construct
  misc_feature 1..20: note = Description of Artificial Sequence: Synthetic oligonucleotide
  misc_feature 1..20: note = Target: SCN10A; (-) strand; PAM type: YTN; PAM sequence: TTT
  source 1..20: mol_type = other DNA
acttataaagacaaccacta

SEQ ID NO: 54658 - DNA, 20 bp, synthetic construct
  misc_feature 1..20: note = Description of Artificial Sequence: Synthetic oligonucleotide
  misc_feature 1..20: note = Target: SCN10A; (-) strand; PAM type: YTN; PAM sequence: TTT
  source 1..20: mol_type = other DNA
tacttataaagacaaccact

SEQ ID NO: 54659 - DNA, 20 bp, synthetic construct
  misc_feature 1..20: note = Description of Artificial Sequence: Synthetic oligonucleotide
  misc_feature 1..20: note = Target: SCN10A; (-) strand; PAM type: YTN; PAM sequence: TTT
  source 1..20: mol_type = other DNA
ttacttataaagacaaccac

SEQ ID NO: 54660 - DNA, 20 bp, synthetic construct
  misc_feature 1..20: note = Description of Artificial Sequence: Synthetic oligonucleotide
  misc_feature 1..20: note = Target: SCN10A; (-) strand; PAM type: YTN; PAM sequence: TTA
  source 1..20: mol_type = other DNA
taataagtttttacttataa

SEQ ID NO: 54661 - DNA, 20 bp, synthetic construct
  misc_feature 1..20: note = Description of Artificial Sequence: Synthetic oligonucleotide
  misc_feature 1..20: note = Target: SCN10A; (-) strand; PAM type: YTN; PAM sequence: TTT
  source 1..20: mol_type = other DNA
ataataagtttttacttata

SEQ ID NO: 54662 - DNA, 20 bp, synthetic construct
  misc_feature 1..20: note = Description of Artificial Sequence: Synthetic oligonucleotide
  misc_feature 1..20: note = Target: SCN10A; (-) strand; PAM type: YTN; PAM sequence: TTA
  source 1..20: mol_type = other DNA
taaatttataataagttttt

SEQ ID NO: 54663 - DNA, 20 bp, synthetic construct
  misc_feature 1..20: note = Description of Artificial Sequence: Synthetic oligonucleotide
  misc_feature 1..20: note = Target: SCN10A; (-) strand; PAM type: YTN; PAM sequence: TTA
  source 1..20: mol_type = other DNA
taattataaatttataataa

SEQ ID NO: 54664 - DNA, 20 bp, synthetic construct
  misc_feature 1..20: note = Description of Artificial Sequence: Synthetic oligonucleotide
  misc_feature 1..20: note = Target: SCN10A; (-) strand; PAM type: YTN; PAM sequence: TTA
  source 1..20: mol_type = other DNA
attataattataaatttata

SEQ ID NO: 54665 - DNA, 20 bp, synthetic construct
  misc_feature 1..20: note = Description of Artificial Sequence: Synthetic oligonucleotide
  misc_feature 1..20: note = Target: SCN10A; (-) strand; PAM type: YTN; PAM sequence: TTT
  source 1..20: mol_type = other DNA
aattataattataaatttat

SEQ ID NO: 54666 - DNA, 20 bp, synthetic construct
  misc_feature 1..20: note = Description of Artificial Sequence: Synthetic oligonucleotide
  misc_feature 1..20: note = Target: SCN10A; (-) strand; PAM type: YTN; PAM sequence: TTT
  source 1..20: mol_type = other DNA
taattataattataaattta

SEQ ID NO: 54667 - DNA, 20 bp, synthetic construct
  misc_feature 1..20: note = Description of Artificial Sequence: Synthetic oligonucleotide
  misc_feature 1..20: note = Target: SCN10A; (-) strand; PAM type: YTN; PAM sequence: TTA
  source 1..20: mol_type = other DNA
cacggttttaattataatta

SEQ ID NO: 54668 - DNA, 20 bp, synthetic construct
  misc_feature 1..20: note = Description of Artificial Sequence: Synthetic oligonucleotide
  misc_feature 1..20: note = Target: SCN10A; (-) strand; PAM type: YTN; PAM sequence: CTA
  source 1..20: mol_type = other DNA
aggacaatgtattacacggt

SEQ ID NO: 54669 - DNA, 20 bp, synthetic construct
  misc_feature 1..20: note = Description of Artificial Sequence: Synthetic oligonucleotide
  misc_feature 1..20: note = Target: SCN10A; (-) strand; PAM type: YTN; PAM sequence: TTA
  source 1..20: mol_type = other DNA
aagaaatagtacactaagga

SEQ ID NO: 54670 - DNA, 20 bp, synthetic construct
  misc_feature 1..20: note = Description of Artificial Sequence: Synthetic oligonucleotide
  misc_feature 1..20: note = Target: SCN10A; (-) strand; PAM type: YTN; PAM sequence: TTG
  source 1..20: mol_type = other DNA
attaaagaaatagtacacta

SEQ ID NO: 54671 - DNA, 20 bp, synthetic construct
  misc_feature 1..20: note = Description of Artificial Sequence: Synthetic oligonucleotide
  misc_feature 1..20: note = Target: SCN10A; (-) strand; PAM type: YTN; PAM sequence: TTT
  source 1..20: mol_type = other DNA
gattaaagaaatagtacact

SEQ ID NO: 54672 - DNA, 20 bp, synthetic construct
  misc_feature 1..20: note = Description of Artificial Sequence: Synthetic oligonucleotide
  misc_feature 1..20: note = Target: SCN10A; (-) strand; PAM type: YTN; PAM sequence: TTT
  source 1..20: mol_type = other DNA
tgattaaagaaatagtacac

SEQ ID NO: 54673 - DNA, 20 bp, synthetic construct
  misc_feature 1..20: note = Description of Artificial Sequence: Synthetic oligonucleotide
  misc_feature 1..20: note = Target: SCN10A; (-) strand; PAM type: YTN; PAM sequence: TTA
  source 1..20: mol_type = other DNA
aatacagtcagataatggat

SEQ ID NO: 54674 - DNA, 20 bp, synthetic construct
  misc_feature 1..20: note = Description of Artificial Sequence: Synthetic oligonucleotide
  misc_feature 1..20: note = Target: SCN10A; (-) strand; PAM type: YTN; PAM sequence: TTA
  source 1..20: mol_type = other DNA
ttaaatacagtcagataatg

SEQ ID NO: 54675 - DNA, 20 bp, synthetic construct
  misc_feature 1..20: note = Description of Artificial Sequence: Synthetic oligonucleotide
  misc_feature 1..20: note = Target: SCN10A; (-) strand; PAM type: YTN; PAM sequence: TTG
  source 1..20: mol_type = other DNA
acagtacaaaggtaagcaca

SEQ ID NO: 54676 - DNA, 20 bp, synthetic construct
  misc_feature 1..20: note = Description of Artificial Sequence: Synthetic oligonucleotide
  misc_feature 1..20: note = Target: SCN10A; (-) strand; PAM type: YTN; PAM sequence: CTT
  source 1..20: mol_type = other DNA
gacagtacaaaggtaagcac

SEQ ID NO: 54677 - DNA, 20 bp, synthetic construct
  misc_feature 1..20: note = Description of Artificial Sequence: Synthetic oligonucleotide
  misc_feature 1..20: note = Target: SCN10A; (-) strand; PAM type: YTN; PAM sequence: TTA
  source 1..20: mol_type = other DNA
cacttgacagtacaaaggta

SEQ ID NO: 54678 - DNA, 20 bp, synthetic construct
  misc_feature 1..20: note = Description of Artificial Sequence: Synthetic oligonucleotide
  misc_feature 1..20: note = Target: SCN10A; (-) strand; PAM type: YTN; PAM sequence: TTG
  source 1..20: mol_type = other DNA
acaaataaagaaatggacaa

SEQ ID NO: 54679 - DNA, 20 bp, synthetic construct
  misc_feature 1..20: note = Description of Artificial Sequence: Synthetic oligonucleotide
  misc_feature 1..20: note = Target: SCN10A; (-) strand; PAM type: YTN; PAM sequence: TTA
  source 1..20: mol_type = other DNA
aagttgacaaataaagaaat

SEQ ID NO: 54680 - DNA, 20 bp, synthetic construct
  misc_feature 1..20: note = Description of Artificial Sequence: Synthetic oligonucleotide
  misc_feature 1..20: note = Target: SCN10A; (-) strand; PAM type: YTN; PAM sequence: TTT
  source 1..20: mol_type = other DNA
aaagttgacaaataaagaaa

SEQ ID NO: 54681 - DNA, 20 bp, synthetic construct
  misc_feature 1..20: note = Description of Artificial Sequence: Synthetic oligonucleotide
  misc_feature 1..20: note = Target: SCN10A; (-) strand; PAM type: YTN; PAM sequence: TTA
  source 1..20: mol_type = other DNA
tttaaagttgacaaataaag

SEQ ID NO: 54682 - DNA, 20 bp, synthetic construct
  misc_feature 1..20: note = Description of Artificial Sequence: Synthetic oligonucleotide
  misc_feature 1..20: note = Target: SCN10A; (-) strand; PAM type: YTN; PAM sequence: TTA
  source 1..20: mol_type = other DNA
aagagtattatttaaagttg

SEQ ID NO: 54683 - DNA, 20 bp, synthetic construct
  misc_feature 1..20: note = Description of Artificial Sequence: Synthetic oligonucleotide
  misc_feature 1..20: note = Target: SCN10A; (-) strand; PAM type: YTN; PAM sequence: CTA
  source 1..20: mol_type = other DNA
taataacaagaagttaaaga

SEQ ID NO: 54684 - DNA, 20 bp, synthetic construct
  misc_feature 1..20: note = Description of Artificial Sequence: Synthetic oligonucleotide
  misc_feature 1..20: note = Target: SCN10A; (-) strand; PAM type: YTN; PAM sequence: TTC
  source 1..20: mol_type = other DNA
tataataacaagaagttaaa

SEQ ID NO: 54685 - DNA, 20 bp, synthetic construct
  misc_feature 1..20: note = Description of Artificial Sequence: Synthetic oligonucleotide
  misc_feature 1..20: note = Target: SCN10A; (-) strand; PAM type: YTN; PAM sequence: CTT
  source 1..20: mol_type = other DNA
ctataataacaagaagttaa

SEQ ID NO: 54686 - DNA, 20 bp, synthetic construct
  misc_feature 1..20: note = Description of Artificial Sequence: Synthetic oligonucleotide
  misc_feature 1..20: note = Target: SCN10A; (-) strand; PAM type: YTN; PAM sequence: CTG
  source 1..20: mol_type = other DNA
cttctataataacaagaagt

SEQ ID NO: 54687 - DNA, 20 bp, synthetic construct
  misc_feature 1..20: note = Description of Artificial Sequence: Synthetic oligonucleotide
  misc_feature 1..20: note = Target: SCN10A; (-) strand; PAM type: YTN; PAM sequence: CTG
  source 1..20: mol_type = other DNA
ctgcttctataataacaaga

SEQ ID NO: 54688 - DNA, 20 bp, synthetic construct
  misc_feature 1..20: note = Description of Artificial Sequence: Synthetic oligonucleotide
  misc_feature 1..20: note = Target: SCN10A; (-) strand; PAM type: YTN; PAM sequence: TTA
  source 1..20: mol_type = other DNA
ctgctgcttctataataaca

SEQ ID NO: 54689 - DNA, 20 bp, synthetic construct
  misc_feature 1..20: note = Description of Artificial Sequence: Synthetic oligonucleotide
  misc_feature 1..20: note = Target: SCN10A; (-) strand; PAM type: YTN; PAM sequence: CTT
  source 1..20: mol_type = other DNA
actgctgcttctataataac

SEQ ID NO: 54690 - DNA, 20 bp, synthetic construct
  misc_feature 1..20: note = Description of Artificial Sequence: Synthetic oligonucleotide
  misc_feature 1..20: note = Target: SCN10A; (-) strand; PAM type: YTN; PAM sequence: TTC
  source 1..20: mol_type = other DNA
acttactgctgcttctataa

SEQ ID NO: 54691 - DNA, 20 bp, synthetic construct
  misc_feature 1..20: note = Description of Artificial Sequence: Synthetic oligonucleotide
  misc_feature 1..20: note = Target: SCN10A; (-) strand; PAM type: YTN; PAM sequence: TTG
  source 1..20: mol_type = other DNA
acatgatacaaatagcaaga

SEQ ID NO: 54692 - DNA, 20 bp, synthetic construct
  misc_feature 1..20: note = Description of Artificial Sequence: Synthetic oligonucleotide
  misc_feature 1..20: note = Target: SCN10A; (-) strand; PAM type: YTN; PAM sequence: CTG
  source 1..20: mol_type = other DNA
caagtgttgacatgatacaa

SEQ ID NO: 54693 - DNA, 20 bp, synthetic construct
  misc_feature 1..20: note = Description of Artificial Sequence: Synthetic oligonucleotide
  misc_feature 1..20: note = Target: SCN10A; (-) strand; PAM type: YTN; PAM sequence: CTG
  source 1..20: mol_type = other DNA
cccaacaagccccagaggcc

SEQ ID NO: 54694 - DNA, 20 bp, synthetic construct
  misc_feature 1..20: note = Description of Artificial Sequence: Synthetic oligonucleotide
  misc_feature 1..20: note = Target: SCN10A; (-) strand; PAM type: YTN; PAM sequence: TTA
  source 1..20: mol_type = other DNA
ccgcccccgctgcccaacaa

SEQ ID NO: 54695 - DNA, 20 bp, synthetic construct
  misc_feature 1..20: note = Description of Artificial Sequence: Synthetic oligonucleotide
  misc_feature 1..20: note = Target: SCN10A; (-) strand; PAM type: YTN; PAM sequence: TTT
  source 1..20: mol_type = other DNA
accgcccccgctgcccaaca

SEQ ID NO: 54696 - DNA, 20 bp, synthetic construct
  misc_feature 1..20: note = Description of Artificial Sequence: Synthetic oligonucleotide
  misc_feature 1..20: note = Target: SCN10A; (-) strand; PAM type: YTN; PAM sequence: TTT
  source 1..20: mol_type = other DNA
taccgcccccgctgcccaac

SEQ ID NO: 54697 - DNA, 20 bp, synthetic construct
  misc_feature 1..20: note = Description of Artificial Sequence: Synthetic oligonucleotide
  misc_feature 1..20: note = Target: SCN10A; (-) strand; PAM type: YTN; PAM sequence: CTC
  source 1..20: mol_type = other DNA
cagagggggataaaaatgag

SEQ ID NO: 54698 - DNA, 20 bp, synthetic construct
  misc_feature 1..20: note = Description of Artificial Sequence: Synthetic oligonucleotide
  misc_feature 1..20: note = Target: SCN10A; (-) strand; PAM type: YTN; PAM sequence: TTA
  source 1..20: mol_type = other DNA
aaccacggtgcctccagagg

SEQ ID NO: 54699 - DNA, 20 bp, synthetic construct
  misc_feature 1..20: note = Description of Artificial Sequence: Synthetic oligonucleotide
  misc_feature 1..20: note = Target: SCN10A; (-) strand; PAM type: YTN; PAM sequence: TTG
  source 1..20: mol_type = other DNA
ttaaaccacggtgcctccag

SEQ ID NO: 54700 - DNA, 20 bp, synthetic construct
  misc_feature 1..20: note = Description of Artificial Sequence: Synthetic oligonucleotide
  misc_feature 1..20: note = Target: SCN10A; (-) strand; PAM type: YTN; PAM sequence: TTT
  source 1..20: mol_type = other DNA
gttaaaccacggtgcctcca

SEQ ID NO: 54701 - DNA, 20 bp, synthetic construct
  misc_feature 1..20: note = Description of Artificial Sequence: Synthetic oligonucleotide
  misc_feature 1..20: note = Target: SCN10A; (-) strand; PAM type: YTN; PAM sequence: TTA
  source 1..20: mol_type = other DNA
gcagatcagggtttgttaaa

SEQ ID NO: 54702 - DNA, 20 bp, synthetic construct
  misc_feature 1..20: note = Description of Artificial Sequence: Synthetic oligonucleotide
  misc_feature 1..20: note = Target: SCN10A; (-) strand; PAM type: YTN; PAM sequence: CTT
  source 1..20: mol_type = other DNA
agcagatcagggtttgttaa

SEQ ID NO: 54703 - DNA, 20 bp, synthetic construct
  misc_feature 1..20: note = Description of Artificial Sequence: Synthetic oligonucleotide
  misc_feature 1..20: note = Target: SCN10A; (-) strand; PAM type: YTN; PAM sequence: TTG
  source 1..20: mol_type = other DNA
gaagaccaaaagtgggtgga

SEQ ID NO: 54704 - DNA, 20 bp, synthetic construct
  misc_feature 1..20: note = Description of Artificial Sequence: Synthetic oligonucleotide
  misc_feature 1..20: note = Target: SCN10A; (-) strand; PAM type: YTN; PAM sequence: CTT
  source 1..20: mol_type = other DNA
ggaagaccaaaagtgggtgg

SEQ ID NO: 54705 - DNA, 20 bp, synthetic construct
  misc_feature 1..20: note = Description of Artificial Sequence: Synthetic oligonucleotide
  misc_feature 1..20: note = Target: SCN10A; (-) strand; PAM type: YTN; PAM sequence: CTC
  source 1..20: mol_type = other DNA
aaaatgccaatagaatgaca

SEQ ID NO: 54706 - DNA, 20 bp, synthetic construct
  misc_feature 1..20: note = Description of Artificial Sequence: Synthetic oligonucleotide
  misc_feature 1..20: note = Target: SCN10A; (-) strand; PAM type: YTN; PAM sequence: CTC
  source 1..20: mol_type = other DNA
tcaaaatgccaatagaatga

SEQ ID NO: 54707 - DNA, 20 bp, synthetic construct
  misc_feature 1..20: note = Description of Artificial Sequence: Synthetic oligonucleotide
  misc_feature 1..20: note = Target: SCN10A; (-) strand; PAM type: YTN; PAM sequence: TTA
  source 1..20: mol_type = other DNA
ccccaccctctcaaaatgcc

SEQ ID NO: 54708 - DNA, 20 bp, synthetic construct
  misc_feature 1..20: note = Description of Artificial Sequence: Synthetic oligonucleotide
  misc_feature 1..20: note = Target: SCN10A; (-) strand; PAM type: YTN; PAM sequence: TTT
  source 1..20: mol_type = other DNA
accccaccctctcaaaatgc

SEQ ID NO: 54709 - DNA, 20 bp, synthetic construct
  misc_feature 1..20: note = Description of Artificial Sequence: Synthetic oligonucleotide
  misc_feature 1..20: note = Target: SCN10A; (-) strand; PAM type: YTN; PAM sequence: TTT
  source 1..20: mol_type = other DNA
taccccaccctctcaaaatg

SEQ ID NO: 54710 - DNA, 20 bp, synthetic construct
  misc_feature 1..20: note = Description of Artificial Sequence: Synthetic oligonucleotide
  misc_feature 1..20: note = Target: SCN10A; (-) strand; PAM type: YTN; PAM sequence: TTA
  source 1..20: mol_type = other DNA
aatatggaagatagaatgca

SEQ ID NO: 54711 - DNA, 20 bp, synthetic construct
  misc_feature 1..20: note = Description of Artificial Sequence: Synthetic oligonucleotide
  misc_feature 1..20: note = Target: SCN10A; (-) strand; PAM type: YTN; PAM sequence: TTG
  source 1..20: mol_type = other DNA
tggttaaatatggaagatag

SEQ ID NO: 54712 - DNA, 20 bp, synthetic construct
  misc_feature 1..20: note = Description of Artificial Sequence: Synthetic oligonucleotide
  misc_feature 1..20: note = Target: SCN10A; (-) strand; PAM type: YTN; PAM sequence: TTG
  source 1..20: mol_type = other DNA
gagattgtggttaaatatgg

SEQ ID NO: 54713 - DNA, 20 bp, synthetic construct
  misc_feature 1..20: note = Description of Artificial Sequence: Synthetic oligonucleotide
  misc_feature 1..20: note = Target: SCN10A; (-) strand; PAM type: YTN; PAM sequence: TTT
  source 1..20: mol_type = other DNA
ggagattgtggttaaatatg

SEQ ID NO: 54714 - DNA, 20 bp, synthetic construct
  misc_feature 1..20: note = Description of Artificial Sequence: Synthetic oligonucleotide
  misc_feature 1..20: note = Target: SCN10A; (-) strand; PAM type: YTN; PAM sequence: TTA
  source 1..20: mol_type = other DNA
tttggagattgtggttaaat

SEQ ID NO: 54715 - DNA, 20 bp, synthetic construct
  misc_feature 1..20: note = Description of Artificial Sequence: Synthetic oligonucleotide
  misc_feature 1..20: note = Target: SCN10A; (-) strand; PAM type: YTN; PAM sequence: TTG
  source 1..20: mol_type = other DNA
ggagttatttggagattgtg

SEQ ID NO: 54716 - DNA, 20 bp, synthetic construct
  misc_feature 1..20: note = Description of Artificial Sequence: Synthetic oligonucleotide
  misc_feature 1..20: note = Target: SCN10A; (-) strand; PAM type: YTN; PAM sequence: TTT
  source 1..20: mol_type = other DNA
gggagttatttggagattgt

SEQ ID NO: 54717 - DNA, 20 bp, synthetic construct
  misc_feature 1..20: note = Description of Artificial Sequence: Synthetic oligonucleotide
  misc_feature 1..20: note = Target: SCN10A; (-) strand; PAM type: YTN; PAM sequence: TTA
  source 1..20: mol_type = other DNA
tttgggagttatttggagat

SEQ ID NO: 54718 - DNA, 20 bp, synthetic construct
  misc_feature 1..20: note = Description of Artificial Sequence: Synthetic oligonucleotide
  misc_feature 1..20: note = Target: SCN10A; (-) strand; PAM type: YTN; PAM sequence: TTG
  source 1..20: mol_type = other DNA
caaaatgagttatttgggag

SEQ ID NO: 54719 - DNA, 20 bp, synthetic construct
  misc_feature 1..20: note = Description of Artificial Sequence: Synthetic oligonucleotide
  misc_feature 1..20: note = Target: SCN10A; (-) strand; PAM type: YTN; PAM sequence: TTT
  source 1..20: mol_type = other DNA
gcaaaatgagttatttggga

SEQ ID NO: 54720 - DNA, 20 bp, synthetic construct
  misc_feature 1..20: note = Description of Artificial Sequence: Synthetic oligonucleotide
  misc_feature 1..20: note = Target: SCN10A; (-) strand; PAM type: YTN; PAM sequence: TTT
  source 1..20: mol_type = other DNA
tgcaaaatgagttatttggg

SEQ ID NO: 54721 - DNA, 20 bp, synthetic construct
  misc_feature 1..20: note = Description of Artificial Sequence: Synthetic oligonucleotide
  misc_feature 1..20: note = Target: SCN10A; (-) strand; PAM type: YTN; PAM sequence: TTT
  source 1..20: mol_type = other DNA
ttgcaaaatgagttatttgg

SEQ ID NO: 54722 - DNA, 20 bp, synthetic construct
  misc_feature 1..20: note = Description of Artificial Sequence: Synthetic oligonucleotide
  misc_feature 1..20: note = Target: SCN10A; (-) strand; PAM type: YTN; PAM sequence: TTT
  source 1..20: mol_type = other DNA
tttgcaaaatgagttatttg

SEQ ID NO: 54723 - DNA, 20 bp, synthetic construct
  misc_feature 1..20: note = Description of Artificial Sequence: Synthetic oligonucleotide
  misc_feature 1..20: note = Target: SCN10A; (-) strand; PAM type: YTN; PAM sequence: TTT
  source 1..20: mol_type = other DNA
ttttgcaaaatgagttattt

SEQ ID NO: 54724 - DNA, 20 bp, synthetic construct
  misc_feature 1..20: note = Description of Artificial Sequence: Synthetic oligonucleotide
  misc_feature 1..20: note = Target: SCN10A; (-) strand; PAM type: YTN; PAM sequence: TTA
  source 1..20: mol_type = other DNA
atgtaaaacatttttttgca

SEQ ID NO: 54725 - DNA, 20 bp, synthetic construct
  misc_feature 1..20: note = Description of Artificial Sequence: Synthetic oligonucleotide
  misc_feature 1..20: note = Target: SCN10A; (-) strand; PAM type: YTN; PAM sequence: TTT
  source 1..20: mol_type = other DNA
aatgtaaaacatttttttgc

SEQ ID NO: 54726 - DNA, 20 bp, synthetic construct
  misc_feature 1..20: note = Description of Artificial Sequence: Synthetic oligonucleotide
  misc_feature 1..20: note = Target: SCN10A; (-) strand; PAM type: YTN; PAM sequence: TTT
  source 1..20: mol_type = other DNA
taatgtaaaacatttttttg

SEQ ID NO: 54727 - DNA, 20 bp, synthetic construct
  misc_feature 1..20: note = Description of Artificial Sequence: Synthetic oligonucleotide
  misc_feature 1..20: note = Target: SCN10A; (-) strand; PAM type: YTN; PAM sequence: TTG
  source 1..20: mol_type = other DNA
gagttttaatgtaaaacatt

SEQ ID NO: 54728 - DNA, 20 bp, synthetic construct
  misc_feature 1..20: note = Description of Artificial Sequence: Synthetic oligonucleotide
  misc_feature 1..20: note = Target: SCN10A; (-) strand; PAM type: YTN; PAM sequence: TTT
  source 1..20: mol_type = other DNA
ggagttttaatgtaaaacat

SEQ ID NO: 54729 - DNA, 20 bp, synthetic construct
  misc_feature 1..20: note = Description of Artificial Sequence: Synthetic oligonucleotide
  misc_feature 1..20: note = Target: SCN10A; (-) strand; PAM type: YTN; PAM sequence: TTT
  source 1..20: mol_type = other DNA
tggagttttaatgtaaaaca

SEQ ID NO: 54730 - DNA, 20 bp, synthetic construct
  misc_feature 1..20: note = Description of Artificial Sequence: Synthetic oligonucleotide
  misc_feature 1..20: note = Target: SCN10A; (-) strand; PAM type: YTN; PAM sequence: CTT
  source 1..20: mol_type = other DNA
ttggagttttaatgtaaaac

SEQ ID NO: 54731 - DNA, 20 bp, synthetic construct
  misc_feature 1..20: note = Description of Artificial Sequence: Synthetic oligonucleotide
  misc_feature 1..20: note = Target: SCN10A; (-) strand; PAM type: YTN; PAM sequence: TTC
  source 1..20: mol_type = other DNA
ttttggagttttaatgtaaa

SEQ ID NO: 54732 - DNA, 20 bp, synthetic construct
  misc_feature 1..20: note = Description of Artificial Sequence: Synthetic oligonucleotide
  misc_feature 1..20: note = Target: SCN10A; (-) strand; PAM type: YTN; PAM sequence: CTT
  source 1..20: mol_type = other DNA
cttttggagttttaatgtaa

SEQ ID NO: 54733 - DNA, 20 bp, synthetic construct
  misc_feature 1..20: note = Description of Artificial Sequence: Synthetic oligonucleotide
  misc_feature 1..20: note = Target: SCN10A; (-) strand; PAM type: YTN; PAM sequence: CTA
  source 1..20: mol_type = other DNA
tgcttcttttggagttttaa

SEQ ID NO: 54734 - DNA, 20 bp, synthetic construct
  misc_feature 1..20: note = Description of Artificial Sequence: Synthetic oligonucleotide
  misc_feature 1..20: note = Target: SCN10A; (-) strand; PAM type: YTN; PAM sequence: TTG
  source 1..20: mol_type = other DNA
agatcatatagcatgtaaaa

SEQ ID NO: 54735 - DNA, 20 bp, synthetic construct
  misc_feature 1..20: note = Description of Artificial Sequence: Synthetic oligonucleotide
  misc_feature 1..20: note = Target: SCN10A; (-) strand; PAM type: YTN; PAM sequence: TTG
  source 1..20: mol_type = other DNA
ttgagatcatatagcatgta

SEQ ID NO: 54736 - DNA, 20 bp, synthetic construct
  misc_feature 1..20: note = Description of Artificial Sequence: Synthetic oligonucleotide
  misc_feature 1..20: note = Target: SCN10A; (-) strand; PAM type: YTN; PAM sequence: TTA
  source 1..20: mol_type = other DNA
atattgttgagatcatatag

SEQ ID NO: 54737 - DNA, 20 bp, synthetic construct
  misc_feature 1..20: note = Description of Artificial Sequence: Synthetic oligonucleotide
  misc_feature 1..20: note = Target: SCN10A; (-) strand; PAM type: YTN; PAM sequence: TTT
  source 1..20: mol_type = other DNA
aatattgttgagatcatata

SEQ ID NO: 54738 - DNA, 20 bp, synthetic construct
  misc_feature 1..20: note = Description of Artificial Sequence: Synthetic oligonucleotide
  misc_feature 1..20: note = Target: SCN10A; (-) strand; PAM type: YTN; PAM sequence: TTA
  source 1..20: mol_type = other DNA
tatttaatattgttgagatc

SEQ ID NO: 54739 - DNA, 20 bp, synthetic construct
  misc_feature 1..20: note = Description of Artificial Sequence: Synthetic oligonucleotide
  misc_feature 1..20: note = Target: SCN10A; (-) strand; PAM type: YTN; PAM sequence: CTA
  source 1..20: mol_type = other DNA
agtagagaaatcacaaaatc

SEQ ID NO: 54740 - DNA, 20 bp, synthetic construct
  misc_feature 1..20: note = Description of Artificial Sequence: Synthetic oligonucleotide
  misc_feature 1..20: note = Target: SCN10A; (-) strand; PAM type: YTN; PAM sequence: TTA
  source 1..20: mol_type = other DNA
ctaagtagagaaatcacaaa

SEQ ID NO: 54741 - DNA, 20 bp, synthetic construct
  misc_feature 1..20: note = Description of Artificial Sequence: Synthetic oligonucleotide
  misc_feature 1..20: note = Target: SCN10A; (-) strand; PAM type: YTN; PAM sequence: CTG
  source 1..20: mol_type = other DNA
aaaatataaatcagaagatg

SEQ ID NO: 54742 - DNA, 20 bp, synthetic construct
  misc_feature 1..20: note = Description of Artificial Sequence: Synthetic oligonucleotide
  misc_feature 1..20: note = Target: SCN10A; (-) strand; PAM type: YTN; PAM sequence: TTG
  source 1..20: mol_type = other DNA
caaaaaatgcagaacactga

SEQ ID NO: 54743 - DNA, 20 bp, synthetic construct
  misc_feature 1..20: note = Description of Artificial Sequence: Synthetic oligonucleotide
  misc_feature 1..20: note = Target: SCN10A; (-) strand; PAM type: YTN; PAM sequence: TTA
  source 1..20: mol_type = other DNA
aaataaatgaccattgcaaa

SEQ ID NO: 54744 - DNA, 20 bp, synthetic construct
  misc_feature 1..20: note = Description of Artificial Sequence: Synthetic oligonucleotide
  misc_feature 1..20: note = Target: SCN10A; (-) strand; PAM type: YTN; PAM sequence: TTT
  source 1..20: mol_type = other DNA
aaaataaatgaccattgcaa

SEQ ID NO: 54745 - DNA, 20 bp, synthetic construct
  misc_feature 1..20: note = Description of Artificial Sequence: Synthetic oligonucleotide
  misc_feature 1..20: note = Target: SCN10A; (-) strand; PAM type: YTN; PAM sequence: TTT
  source 1..20: mol_type = other DNA
taaaataaatgaccattgca

SEQ ID NO: 54746 - DNA, 20 bp, synthetic construct
  misc_feature 1..20: note = Description of Artificial Sequence: Synthetic oligonucleotide
  misc_feature 1..20: note = Target: SCN10A; (-) strand; PAM type: YTN; PAM sequence: TTT
  source 1..20: mol_type = other DNA
ttaaaataaatgaccattgc

SEQ ID NO: 54747 - DNA, 20 bp, synthetic construct
  misc_feature 1..20: note = Description of Artificial Sequence: Synthetic oligonucleotide
  misc_feature 1..20: note = Target: SCN10A; (-) strand; PAM type: YTN; PAM sequence: TTT
  source 1..20: mol_type = other DNA
tttaaaataaatgaccattg

SEQ ID NO: 54748 - DNA, 20 bp, synthetic construct
  misc_feature 1..20: note = Description of Artificial Sequence: Synthetic oligonucleotide
  misc_feature 1..20: note = Target: SCN10A; (-) strand; PAM type: YTN; PAM sequence: TTA
  source 1..20: mol_type = other DNA
catatcataataaaaaccca

SEQ ID NO: 54749 - DNA, 20 bp, synthetic construct
  misc_feature 1..20: note = Description of Artificial Sequence: Synthetic oligonucleotide
  misc_feature 1..20: note = Target: SCN10A; (-) strand; PAM type: YTN; PAM sequence: TTA
  source 1..20: mol_type = other DNA
tgcatgttacatatcataat

SEQ ID NO: 54750 - DNA, 20 bp, synthetic construct
  misc_feature 1..20: note = Description of Artificial Sequence: Synthetic oligonucleotide
  misc_feature 1..20: note = Target: SCN10A; (-) strand; PAM type: YTN; PAM sequence: TTA
  source 1..20: mol_type = other DNA
ttatgcatgttacatatcat

SEQ ID NO: 54751 - DNA, 20 bp, synthetic construct
  misc_feature 1..20: note = Description of Artificial Sequence: Synthetic oligonucleotide
  misc_feature 1..20: note = Target: SCN10A; (-) strand; PAM type: YTN; PAM sequence: TTT
  source 1..20: mol_type = other DNA
attatgcatgttacatatca

SEQ ID NO: 54752 - DNA, 20 bp, synthetic construct
  misc_feature 1..20: note = Description of Artificial Sequence: Synthetic oligonucleotide
  misc_feature 1..20: note = Target: SCN10A; (-) strand; PAM type: YTN; PAM sequence: TTT
  source 1..20: mol_type = other DNA
tattatgcatgttacatatc

SEQ ID NO: 54753 - DNA, 20 bp, synthetic construct
  misc_feature 1..20: note = Description of Artificial Sequence: Synthetic oligonucleotide
  misc_feature 1..20: note = Target: SCN10A; (-) strand; PAM type: YTN; PAM sequence: TTT
  source 1..20: mol_type = other DNA
ttattatgcatgttacatat

SEQ ID NO: 54754 - DNA, 20 bp, synthetic construct
  misc_feature 1..20: note = Description of Artificial Sequence: Synthetic oligonucleotide
  misc_feature 1..20: note = Target: SCN10A; (-) strand; PAM type: YTN; PAM sequence: TTA
  source 1..20: mol_type = other DNA
tgtacatttttattatgcat

SEQ ID NO: 54755 - DNA, 20 bp, synthetic construct
  misc_feature 1..20: note = Description of Artificial Sequence: Synthetic oligonucleotide
  misc_feature 1..20: note = Target: SCN10A; (-) strand; PAM type: YTN; PAM sequence: TTT
  source 1..20: mol_type = other DNA
atgtacatttttattatgca

SEQ ID NO: 54756 - DNA, 20 bp, synthetic construct
  misc_feature 1..20: note = Description of Artificial Sequence: Synthetic oligonucleotide
  misc_feature 1..20: note = Target: SCN10A; (-) strand; PAM type: YTN; PAM sequence: TTT
  source 1..20: mol_type = other DNA
tatgtacatttttattatgc

SEQ ID NO: 54757 - DNA, 20 bp, synthetic construct
  misc_feature 1..20: note = Description of Artificial Sequence: Synthetic oligonucleotide
  misc_feature 1..20: note = Target: SCN10A; (-) strand; PAM type: YTN; PAM sequence: TTA
  source 1..20: mol_type = other DNA
tgttttatgtacatttttat

SEQ ID NO: 54758 - DNA, 20 bp, synthetic construct
  misc_feature 1..20: note = Description of Artificial Sequence: Synthetic oligonucleotide
  misc_feature 1..20: note = Target: SCN10A; (-) strand; PAM type: YTN; PAM sequence: TTT
  source 1..20: mol_type = other DNA
atgttttatgtacattttta

SEQ ID NO: 54759 - DNA, 20 bp, synthetic construct
  misc_feature 1..20: note = Description of Artificial Sequence: Synthetic oligonucleotide
  misc_feature 1..20: note = Target: SCN10A; (-) strand; PAM type: YTN; PAM sequence: TTA
  source 1..20: mol_type = other DNA
atttatgttttatgtacatt

SEQ ID NO: 54760 - DNA, 20 bp, synthetic construct
  misc_feature 1..20: note = Description of Artificial Sequence: Synthetic oligonucleotide
  misc_feature 1..20: note = Target: SCN10A; (-) strand; PAM type: YTN; PAM sequence: TTA
  source 1..20: mol_type = other DNA
aaataattaatttatgtttt

SEQ ID NO: 54761 - DNA, 20 bp, synthetic construct
  misc_feature 1..20: note = Description of Artificial Sequence: Synthetic oligonucleotide
  misc_feature 1..20: note = Target: SCN10A; (-) strand; PAM type: YTN; PAM sequence: TTT
  source 1..20: mol_type = other DNA
aaaataattaatttatgttt

SEQ ID NO: 54762 - DNA, 20 bp, synthetic construct
  misc_feature 1..20: note = Description of Artificial Sequence: Synthetic oligonucleotide
  misc_feature 1..20: note = Target: SCN10A; (-) strand; PAM type: YTN; PAM sequence: TTT
  source 1..20: mol_type = other DNA
taaaataattaatttatgtt

SEQ ID NO: 54763 - DNA, 20 bp, synthetic construct
  misc_feature 1..20: note = Description of Artificial Sequence: Synthetic oligonucleotide
  misc_feature 1..20: note = Target: SCN10A; (-) strand; PAM type: YTN; PAM sequence: TTG
  source 1..20: mol_type = other DNA
ttttaaaataattaatttat

SEQ ID NO: 54764 - DNA, 20 bp, synthetic construct
  misc_feature 1..20: note = Description of Artificial Sequence: Synthetic oligonucleotide
  misc_feature 1..20: note = Target: SCN10A; (-) strand; PAM type: YTN; PAM sequence: TTT
  source 1..20: mol_type = other DNA
gttttaaaataattaattta

SEQ ID NO: 54765 - DNA, 20 bp, synthetic construct
  misc_feature 1..20: note = Description of Artificial Sequence: Synthetic oligonucleotide
  misc_feature 1..20: note = Target: SCN10A; (-) strand; PAM type: YTN; PAM sequence: CTA
  source 1..20: mol_type = other DNA
atacacaaacatttgtttta

SEQ ID NO: 54766 - DNA, 20 bp, synthetic construct
  misc_feature 1..20: note = Description of Artificial Sequence: Synthetic oligonucleotide
  misc_feature 1..20: note = Target: SCN10A; (-) strand; PAM type: YTN; PAM sequence: CTG
  source 1..20: mol_type = other DNA
actaatacacaaacatttgt

SEQ ID NO: 54767 - DNA, 20 bp, synthetic construct
  misc_feature 1..20: note = Description of Artificial Sequence: Synthetic oligonucleotide
  misc_feature 1..20: note = Target: SCN10A; (-) strand; PAM type: YTN; PAM sequence: TTA
  source 1..20: mol_type = other DNA
aggcaacaaaggctgactaa

SEQ ID NO: 54768 - DNA, 20 bp, synthetic construct
  misc_feature 1..20: note = Description of Artificial Sequence: Synthetic oligonucleotide
  misc_feature 1..20: note = Target: SCN10A; (-) strand; PAM type: YTN; PAM sequence: TTG
  source 1..20: mol_type = other DNA
ttaaggcaacaaaggctgac

SEQ ID NO: 54769 - DNA, 20 bp, synthetic construct
  misc_feature 1..20: note = Description of Artificial Sequence: Synthetic oligonucleotide
  misc_feature 1..20: note = Target: SCN10A; (-) strand; PAM type: YTN; PAM sequence: TTT
  source 1..20: mol_type = other DNA
gttaaggcaacaaaggctga

SEQ ID NO: 54770 - DNA, 20 bp, synthetic construct
  misc_feature 1..20: note = Description of Artificial Sequence: Synthetic oligonucleotide
  misc_feature 1..20: note = Target: SCN10A; (-) strand; PAM type: YTN; PAM sequence: TTT
  source 1..20: mol_type = other DNA
tgttaaggcaacaaaggctg

SEQ ID NO: 54771 - DNA, 20 bp, synthetic construct
  misc_feature 1..20: note = Description of Artificial Sequence: Synthetic oligonucleotide
  misc_feature 1..20: note = Target: SCN10A; (-) strand; PAM type: YTN; PAM sequence: CTA
  source 1..20: mol_type = other DNA
tggtattttgttaaggcaac

SEQ ID NO: 54772 - DNA, 20 bp, synthetic construct
  misc_feature 1..20: note = Description of Artificial Sequence: Synthetic oligonucleotide
  misc_feature 1..20: note = Target: SCN10A; (-) strand; PAM type: YTN; PAM sequence: TTG
  source 1..20: mol_type = other DNA
cataagccacccagtctatg

SEQ ID NO: 54773 - DNA, 20 bp, synthetic construct
  misc_feature 1..20: note = Description of Artificial Sequence: Synthetic oligonucleotide
  misc_feature 1..20: note = Target: SCN10A; (-) strand; PAM type: YTN; PAM sequence: CTG
  source 1..20: mol_type = other DNA
ttgcataagccacccagtct

SEQ ID NO: 54774 - DNA, 20 bp, synthetic construct
  misc_feature 1..20: note = Description of Artificial Sequence: Synthetic oligonucleotide
  misc_feature 1..20: note = Target: SCN10A; (-) strand; PAM type: YTN; PAM sequence: TTC
  source 1..20: mol_type = other DNA
tgttgcataagccacccagt

SEQ ID NO: 54775 - DNA, 20 bp, synthetic construct
  misc_feature 1..20: note = Description of Artificial Sequence: Synthetic oligonucleotide
  misc_feature 1..20: note = Target: SCN10A; (-) strand; PAM type: YTN; PAM sequence: TTT
  source 1..20: mol_type = other DNA
ctgttgcataagccacccag

SEQ ID NO: 54776 - DNA, 20 bp, synthetic construct
  misc_feature 1..20: note = Description of Artificial Sequence: Synthetic oligonucleotide
  misc_feature 1..20: note = Target: SCN10A; (-) strand; PAM type: YTN; PAM sequence: TTG
  source 1..20: mol_type = other DNA
tgagaaaataaatttctgtt

SEQ ID NO: 54777 - DNA, 20 bp, synthetic construct
  misc_feature 1..20: note = Description of Artificial Sequence: Synthetic oligonucleotide
  misc_feature 1..20: note = Target: SCN10A; (-) strand; PAM type: YTN; PAM sequence: TTT
  source 1..20: mol_type = other DNA
gtgagaaaataaatttctgt

SEQ ID NO: 54778 - DNA, 20 bp, synthetic construct
  misc_feature 1..20: note = Description of Artificial Sequence: Synthetic oligonucleotide
  misc_feature 1..20: note = Target: SCN10A; (-) strand; PAM type: YTN; PAM sequence: CTC
  source 1..20: mol_type = other DNA
cagatttgtgagaaaataaa

SEQ ID NO: 54779 - DNA, 20 bp, synthetic construct
  misc_feature 1..20: note = Description of Artificial Sequence: Synthetic oligonucleotide
  misc_feature 1..20: note = Target: SCN10A; (-) strand; PAM type: YTN; PAM sequence: TTC
  source 1..20: mol_type = other DNA
aacctccagatttgtgagaa

SEQ ID NO: 54780 - DNA, 20 bp, synthetic construct
  misc_feature 1..20: note = Description of Artificial Sequence: Synthetic oligonucleotide
  misc_feature 1..20: note = Target: SCN10A; (-) strand; PAM type: YTN; PAM sequence: CTT
  source 1..20: mol_type = other DNA
caacctccagatttgtgaga

SEQ ID NO: 54781 - DNA, 20 bp, synthetic construct
  misc_feature 1..20: note = Description of Artificial Sequence: Synthetic oligonucleotide
  misc_feature 1..20: note = Target: SCN10A; (-) strand; PAM type: YTN; PAM sequence: CTC
  source 1..20: mol_type = other DNA
aggcttcaacctccagattt

SEQ ID NO: 54782 - DNA, 20 bp, synthetic construct
  misc_feature 1..20: note = Description of Artificial Sequence: Synthetic oligonucleotide
  misc_feature 1..20: note = Target: SCN10A; (-) strand; PAM type: YTN; PAM sequence: CTG
  source 1..20: mol_type = other DNA
acatcccaatctcaggcttc

SEQ ID NO: 54783 - DNA, 20 bp, synthetic construct
  misc_feature 1..20: note = Description of Artificial Sequence: Synthetic oligonucleotide
  misc_feature 1..20: note = Target: SCN10A; (-) strand; PAM type: YTN; PAM sequence: CTA
  source 1..20: mol_type = other DNA
tgctgacatcccaatctcag

SEQ ID NO: 54784 - DNA, 20 bp, synthetic construct
  misc_feature 1..20: note = Description of Artificial Sequence: Synthetic oligonucleotide
  misc_feature 1..20: note = Target: SCN10A; (-) strand; PAM type: YTN; PAM sequence: TTC
  source 1..20: mol_type = other DNA
ccagacccaactatgctgac

SEQ ID NO: 54785 - DNA, 20 bp, synthetic construct
  misc_feature 1..20: note = Description of Artificial Sequence: Synthetic oligonucleotide
  misc_feature 1..20: note = Target: SCN10A; (-) strand; PAM type: YTN; PAM sequence: TTT
  source 1..20: mol_type = other DNA
cccagacccaactatgctga

SEQ ID NO: 54786 - DNA, 20 bp, synthetic construct
  misc_feature 1..20: note = Description of Artificial Sequence: Synthetic oligonucleotide
  misc_feature 1..20: note = Target: SCN10A; (-) strand; PAM type: YTN; PAM sequence: CTT
  source 1..20: mol_type = other DNA
tcccagacccaactatgctg

SEQ ID NO: 54787 - DNA, 20 bp, synthetic construct
  misc_feature 1..20: note = Description of Artificial Sequence: Synthetic oligonucleotide
  misc_feature 1..20: note = Target: SCN10A; (-) strand; PAM type: YTN; PAM sequence: CTA
  source 1..20: mol_type = other DNA
gaaagagagtctttcccaga

SEQ ID NO: 54788 - DNA, 20 bp, synthetic construct
  misc_feature 1..20: note = Description of Artificial Sequence: Synthetic oligonucleotide
  misc_feature 1..20: note = Target: SCN10A; (-) strand; PAM type: YTN; PAM sequence: CTA
  source 1..20: mol_type = other DNA
taagctagaaagagagtctt

SEQ ID NO: 54789 - DNA, 20 bp, synthetic construct
  misc_feature 1..20: note = Description of Artificial Sequence: Synthetic oligonucleotide
  misc_feature 1..20: note = Target: SCN10A; (-) strand; PAM type: YTN; PAM sequence: TTG
  source 1..20: mol_type = other DNA
tgtgagaacacaaggacaag

SEQ ID NO: 54790 - DNA, 20 bp, synthetic construct
  misc_feature 1..20: note = Description of Artificial Sequence: Synthetic oligonucleotide
  misc_feature 1..20: note = Target: SCN10A; (-) strand; PAM type: YTN; PAM sequence: TTT
  source 1..20: mol_type = other DNA
gtgtgagaacacaaggacaa

SEQ ID NO: 54791 - DNA, 20 bp, synthetic construct
  misc_feature 1..20: note = Description of Artificial Sequence: Synthetic oligonucleotide
  misc_feature 1..20: note = Target: SCN10A; (-) strand; PAM type: YTN; PAM sequence: CTT
  source 1..20: mol_type = other DNA
tgtgtgagaacacaaggaca

SEQ ID NO: 54792 - DNA, 20 bp, synthetic construct
  misc_feature 1..20: note = Description of Artificial Sequence: Synthetic oligonucleotide
  misc_feature 1..20: note = Target: SCN10A; (-) strand; PAM type: YTN; PAM sequence: CTC
  source 1..20: mol_type = other DNA
ccctttgtgtgagaacacaa

SEQ ID NO: 54793 - DNA, 20 bp, synthetic construct
  misc_feature 1..20: note = Description of Artificial Sequence: Synthetic oligonucleotide
  misc_feature 1..20: note = Target: SCN10A; (-) strand; PAM type: YTN; PAM sequence: TTC
  source 1..20: mol_type = other DNA
tcccctttgtgtgagaacac

SEQ ID NO: 54794 - DNA, 20 bp, synthetic construct
  misc_feature 1..20: note = Description of Artificial Sequence: Synthetic oligonucleotide
  misc_feature 1..20: note = Target: SCN10A; (-) strand; PAM type: YTN; PAM sequence: TTT
  source 1..20: mol_type = other DNA
ctcccctttgtgtgagaaca

SEQ ID NO: 54795 - DNA, 20 bp, synthetic construct
  misc_feature 1..20: note = Description of Artificial Sequence: Synthetic oligonucleotide
  misc_feature 1..20: note = Target: SCN10A; (-) strand; PAM type: YTN; PAM sequence: CTT
  source 1..20: mol_type = other DNA
tctcccctttgtgtgagaac

SEQ ID NO: 54796 - DNA, 20 bp, synthetic construct
  misc_feature 1..20: note = Description of Artificial Sequence: Synthetic oligonucleotide
  misc_feature 1..20: note = Target: SCN10A; (-) strand; PAM type: YTN; PAM sequence: TTA
  source 1..20: mol_type = other DNA
taagagaaagagacagcttt

SEQ ID NO: 54797 - DNA, 20 bp, synthetic construct
  misc_feature 1..20: note = Description of Artificial Sequence: Synthetic oligonucleotide
  misc_feature 1..20: note = Target: SCN10A; (-) strand; PAM type: YTN; PAM sequence: CTT
  source 1..20: mol_type = other DNA
ataagagaaagagacagctt

SEQ ID NO: 54798 - DNA, 20 bp, synthetic construct
  misc_feature 1..20: note = Description of Artificial Sequence: Synthetic oligonucleotide
  misc_feature 1..20: note = Target: SCN10A; (-) strand; PAM type: YTN; PAM sequence: CTG
  source 1..20: mol_type = other DNA
gtgtccttataagagaaaga

SEQ ID NO: 54799 - DNA, 20 bp, synthetic construct
  misc_feature 1..20: note = Description of Artificial Sequence: Synthetic oligonucleotide
  misc_feature 1..20: note = Target: SCN10A; (-) strand; PAM type: YTN; PAM sequence: TTA
  source 1..20: mol_type = other DNA
agtggtagaactggtgtcct

SEQ ID NO: 54800 - DNA, 20 bp, synthetic construct
  misc_feature 1..20: note = Description of Artificial Sequence: Synthetic oligonucleotide
  misc_feature 1..20: note = Target: SCN10A; (-) strand; PAM type: YTN; PAM sequence: CTT
  source 1..20: mol_type = other DNA
aagtggtagaactggtgtcc

SEQ ID NO: 54801 - DNA, 20 bp, synthetic construct
  misc_feature 1..20: note = Description of Artificial Sequence: Synthetic oligonucleotide
  misc_feature 1..20: note = Target: SCN10A; (-) strand; PAM type: YTN; PAM sequence: TTA
  source 1..20: mol_type = other DNA
aatgaagtcacaagagtaga

SEQ ID NO: 54802 - DNA, 20 bp, synthetic construct
  misc_feature 1..20: note = Description of Artificial Sequence: Synthetic oligonucleotide
  misc_feature 1..20: note = Target: SCN10A; (-) strand; PAM type: YTN; PAM sequence: TTG
  source 1..20: mol_type = other DNA
ggttaaatgaagtcacaaga

SEQ ID NO: 54803 - DNA, 20 bp, synthetic construct
  misc_feature 1..20: note = Description of Artificial Sequence: Synthetic oligonucleotide
  misc_feature 1..20: note = Target: SCN10A; (-) strand; PAM type: YTN; PAM sequence: CTA
  source 1..20: mol_type = other DNA
aggaggtgattgggttaaat

SEQ ID NO: 54804 - DNA, 20 bp, synthetic construct
  misc_feature 1..20: note = Description of Artificial Sequence: Synthetic oligonucleotide
  misc_feature 1..20: note = Target: SCN10A; (-) strand; PAM type: YTN; PAM sequence: CTC
  source 1..20: mol_type = other DNA
taaggaggtgattgggttaa

SEQ ID NO: 54805 - DNA, 20 bp, synthetic construct
  misc_feature 1..20: note = Description of Artificial Sequence: Synthetic oligonucleotide
  misc_feature 1..20: note = Target: SCN10A; (-) strand; PAM type: YTN; PAM sequence: TTG
  source 1..20: mol_type = other DNA
ggcctctaaggaggtgattg

SEQ ID NO: 54806 - DNA, 20 bp, synthetic construct
  misc_feature 1..20: note = Description of Artificial Sequence: Synthetic oligonucleotide
  misc_feature 1..20: note = Target: SCN10A; (-) strand; PAM type: YTN; PAM sequence: TTG
  source 1..20: mol_type = other DNA
gagattgggcctctaaggag

SEQ ID NO: 54807 - DNA, 20 bp, synthetic construct
  misc_feature 1..20: note = Description of Artificial Sequence: Synthetic oligonucleotide
  misc_feature 1..20: note = Target: SCN10A; (-) strand; PAM type: YTN; PAM sequence: CTA
  source 1..20: mol_type = other DNA
tgttggagattgggcctcta

SEQ ID NO: 54808 - DNA, 20 bp, synthetic construct
  misc_feature 1..20: note = Description of Artificial Sequence: Synthetic oligonucleotide
  misc_feature 1..20: note = Target: SCN10A; (-) strand; PAM type: YTN; PAM sequence: TTG
  source 1..20: mol_type = other DNA
ctatgttggagattgggcct

SEQ ID NO: 54809 - DNA, 20 bp, synthetic construct
  misc_feature 1..20: note = Description of Artificial Sequence: Synthetic oligonucleotide
  misc_feature 1..20: note = Target: SCN10A; (-) strand; PAM type: YTN; PAM sequence: TTG
  source 1..20: mol_type = other DNA
aaacaaaccccccatgttgc

SEQ ID NO: 54810 - DNA, 20 bp, synthetic construct
  misc_feature 1..20: note = Description of Artificial Sequence: Synthetic oligonucleotide
  misc_feature 1..20: note = Target: SCN10A; (-) strand; PAM type: YTN; PAM sequence: TTC
  source 1..20: mol_type = other DNA
aaatgttgaaacaaaccccc

SEQ ID NO: 54811 - DNA, 20 bp, synthetic construct
  misc_feature 1..20: note = Description of Artificial Sequence: Synthetic oligonucleotide
  misc_feature 1..20: note = Target: SCN10A; (-) strand; PAM type: YTN; PAM sequence: CTC
  source 1..20: mol_type = other DNA
aaaattcaaatgttgaaaca

SEQ ID NO: 54812 - DNA, 20 bp, synthetic construct
  misc_feature 1..20: note = Description of Artificial Sequence: Synthetic oligonucleotide
  misc_feature 1..20: note = Target: SCN10A; (-) strand; PAM type: YTN; PAM sequence: TTG
  source 1..20: mol_type = other DNA
tcccctcaaaattcaaatgt

SEQ ID NO: 54813 - DNA, 20 bp, synthetic construct
  misc_feature 1..20: note = Description of Artificial Sequence: Synthetic oligonucleotide
  misc_feature 1..20: note = Target: SCN10A; (-) strand; PAM type: YTN; PAM sequence: TTT
  source 1..20: mol_type = other DNA
gtcccctcaaaattcaaatg

SEQ ID NO: 54814 - DNA, 20 bp, synthetic construct
  misc_feature 1..20: note = Description of Artificial Sequence: Synthetic oligonucleotide
  misc_feature 1..20: note = Target: SCN10A; (-) strand; PAM type: YTN; PAM sequence: TTT
  source 1..20: mol_type = other DNA
tgtcccctcaaaattcaaat

SEQ ID NO: 54815 - DNA, 20 bp, synthetic construct
  misc_feature 1..20: note = Description of Artificial Sequence: Synthetic oligonucleotide
  misc_feature 1..20: note = Target: SCN10A; (-) strand; PAM type: YTN; PAM sequence: CTA
  source 1..20: mol_type = other DNA
tggagtgaattttgtcccct

SEQ ID NO: 54816 - DNA, 20 bp, synthetic construct
  misc_feature 1..20: note = Description of Artificial Sequence: Synthetic oligonucleotide
  misc_feature 1..20: note = Target: SCN10A; (-) strand; PAM type: YTN; PAM sequence: CTG
  source 1..20: mol_type = other DNA
ctatggagtgaattttgtcc

SEQ ID NO: 54817 - DNA, 20 bp, synthetic construct
  misc_feature 1..20: note = Description of Artificial Sequence: Synthetic oligonucleotide
  misc_feature 1..20: note = Target: SCN10A; (-) strand; PAM type: YTN; PAM sequence: TTG
  source 1..20: mol_type = other DNA
tcacacaagctgctatggag

SEQ ID NO: 54818 - DNA, 20 bp, synthetic construct
  misc_feature 1..20: note = Description of Artificial Sequence: Synthetic oligonucleotide
  misc_feature 1..20: note = Target: SCN10A; (-) strand; PAM type: YTN; PAM sequence: TTA
  source 1..20: mol_type = other DNA
tggcatgggtagttgtcaca

SEQ ID NO: 54819 - DNA, 20 bp, synthetic construct
  misc_feature 1..20: note = Description of Artificial Sequence: Synthetic oligonucleotide
  misc_feature 1..20: note = Target: SCN10A; (-) strand; PAM type: YTN; PAM sequence: TTT
  source 1..20: mol_type = other DNA
atggcatgggtagttgtcac

SEQ ID NO: 54820 - DNA, 20 bp, synthetic construct
  misc_feature 1..20: note = Description of Artificial Sequence: Synthetic oligonucleotide
  misc_feature 1..20: note = Target: SCN10A; (-) strand; PAM type: YTN; PAM sequence: TTT
  source 1..20: mol_type = other DNA
tatggcatgggtagttgtca

SEQ ID NO: 54821 - DNA, 20 bp, synthetic construct
  misc_feature 1..20: note = Description of Artificial Sequence: Synthetic oligonucleotide
  misc_feature 1..20: note = Target: SCN10A; (-) strand; PAM type: YTN; PAM sequence: TTC
  source 1..20: mol_type = other DNA
cattttatggcatgggtagt

SEQ ID NO: 54822 - DNA, 20 bp, synthetic construct
  misc_feature 1..20: note = Description of Artificial Sequence: Synthetic oligonucleotide
  misc_feature 1..20: note = Target: SCN10A; (-) strand; PAM type: YTN; PAM sequence: CTG
  source 1..20: mol_type = other DNA
gtcacgttccattttatggc

SEQ ID NO: 54823 - DNA, 20 bp, synthetic construct
  misc_feature 1..20: note = Description of Artificial Sequence: Synthetic oligonucleotide
  misc_feature 1..20: note = Target: SCN10A; (-) strand; PAM type: YTN; PAM sequence: CTG
  source 1..20: mol_type = other DNA
gtgaagtgctggtcacgttc

SEQ ID NO: 54824 - DNA, 20 bp, synthetic construct
  misc_feature 1..20: note = Description of Artificial Sequence: Synthetic oligonucleotide
  misc_feature 1..20: note = Target: SCN10A; (-) strand; PAM type: YTN; PAM sequence: TTG
  source 1..20: mol_type = other DNA
ggaaggagctggtgaagtgc

SEQ ID NO: 54825 - DNA, 20 bp, synthetic construct
  misc_feature 1..20: note = Description of Artificial Sequence: Synthetic oligonucleotide
  misc_feature 1..20: note = Target: SCN10A; (-) strand; PAM type: YTN; PAM sequence: CTC
  source 1..20: mol_type = other DNA
cagggcagaagagggaggat

SEQ ID NO: 54826 - DNA, 20 bp, synthetic construct
  misc_feature 1..20: note = Description of Artificial Sequence: Synthetic oligonucleotide
  misc_feature 1..20: note = Target: SCN10A; (-) strand; PAM type: YTN; PAM sequence: TTA
  source 1..20: mol_type = other DNA
ggagaatagtggcctccagg

SEQ ID NO: 54827 - DNA, 20 bp, synthetic construct
  misc_feature 1..20: note = Description of Artificial Sequence: Synthetic oligonucleotide
  misc_feature 1..20: note = Target: SCN10A; (-) strand; PAM type: YTN; PAM sequence: TTA
  source 1..20: mol_type = other DNA
tgaagtaaaaagcatcaata

SEQ ID NO: 54828 - DNA, 20 bp, synthetic construct
  misc_feature 1..20: note = Description of Artificial Sequence: Synthetic oligonucleotide
  misc_feature 1..20: note = Target: SCN10A; (-) strand; PAM type: YTN; PAM sequence: CTT
  source 1..20: mol_type = other DNA
atgaagtaaaaagcatcaat

SEQ ID NO: 54829 - DNA, 20 bp, synthetic construct
  misc_feature 1..20: note = Description of Artificial Sequence: Synthetic oligonucleotide
  misc_feature 1..20: note = Target: SCN10A; (-) strand; PAM type: YTN; PAM sequence: TTA
  source 1..20: mol_type = other DNA
ggaatgcatacttatgaagt

SEQ ID NO: 54830 - DNA, 20 bp, synthetic construct
  misc_feature 1..20: note = Description of Artificial Sequence: Synthetic oligonucleotide
  misc_feature 1..20: note = Target: SCN10A; (-) strand; PAM type: YTN; PAM sequence: TTT
  source 1..20: mol_type = other DNA
aggaatgcatacttatgaag

SEQ ID NO: 54831 - DNA, 20 bp, synthetic construct
  misc_feature 1..20: note = Description of Artificial Sequence: Synthetic oligonucleotide
  misc_feature 1..20: note = Target: SCN10A; (-) strand; PAM type: YTN; PAM sequence: TTG
  source 1..20: mol_type = other DNA
tttaggaatgcatacttatg

SEQ ID NO: 54832 - DNA, 20 bp, synthetic construct
  misc_feature 1..20: note = Description of Artificial Sequence: Synthetic oligonucleotide
  misc_feature 1..20: note = Target: SCN10A; (-) strand; PAM type: YTN; PAM sequence: TTT
  source 1..20: mol_type = other DNA
gtttaggaatgcatacttat

SEQ ID NO: 54833 - DNA, 20 bp, synthetic construct
  misc_feature 1..20: note = Description of Artificial Sequence: Synthetic oligonucleotide
  misc_feature 1..20: note = Target: SCN10A; (-) strand; PAM type: YTN; PAM sequence: TTT
  source 1..20: mol_type = other DNA
tgtttaggaatgcatactta

SEQ ID NO: 54834 - DNA, 20 bp, synthetic construct
  misc_feature 1..20: note = Description of Artificial Sequence: Synthetic oligonucleotide
  misc_feature 1..20: note = Target: SCN10A; (-) strand; PAM type: YTN; PAM sequence: CTA
  source 1..20: mol_type = other DNA
ttttgtttaggaatgcatac

SEQ ID NO: 54835 - DNA, 20 bp, synthetic construct
  misc_feature 1..20: note = Description of Artificial Sequence: Synthetic oligonucleotide
  misc_feature 1..20: note = Target: SCN10A; (-) strand; PAM type: YTN; PAM sequence: CTA
  source 1..20: mol_type = other DNA
aactattttgtttaggaatg

SEQ ID NO: 54836 - DNA, 20 bp, synthetic construct
  misc_feature 1..20: note = Description of Artificial Sequence: Synthetic oligonucleotide
  misc_feature 1..20: note = Target: SCN10A; (-) strand; PAM type: YTN; PAM sequence: TTG
  source 1..20: mol_type = other DNA
aaatcaagcaaaactaaact

SEQ ID NO: 54837 - DNA, 20 bp, synthetic construct
  misc_feature 1..20: note = Description of Artificial Sequence: Synthetic oligonucleotide
  misc_feature 1..20: note = Target: SCN10A; (-) strand; PAM type: YTN; PAM sequence: TTT
  source 1..20: mol_type = other DNA
gaaatcaagcaaaactaaac

SEQ ID NO: 54838 - DNA, 20 bp, synthetic construct
  misc_feature 1..20: note = Description of Artificial Sequence: Synthetic oligonucleotide
  misc_feature 1..20: note = Target: SCN10A; (-) strand; PAM type: YTN; PAM sequence: TTA
  source 1..20: mol_type = other DNA
tataaagtttgaaatcaagc

SEQ ID NO: 54839 - DNA, 20 bp, synthetic construct
  misc_feature 1..20: note = Description of Artificial Sequence: Synthetic oligonucleotide
  misc_feature 1..20: note = Target: SCN10A; (-) strand; PAM type: YTN; PAM sequence: TTT
  source 1..20: mol_type = other DNA
atataaagtttgaaatcaag

SEQ ID NO: 54840 - DNA, 20 bp, synthetic construct
  misc_feature 1..20: note = Description of Artificial Sequence: Synthetic oligonucleotide
  misc_feature 1..20: note = Target: SCN10A; (-) strand; PAM type: YTN; PAM sequence: TTC
  source 1..20: mol_type = other DNA
atttatataaagtttgaaat

SEQ ID NO: 54841 - DNA, 20 bp, synthetic construct
  misc_feature 1..20: note = Description of Artificial Sequence: Synthetic oligonucleotide
  misc_feature 1..20: note = Target: SCN10A; (-) strand; PAM type: YTN; PAM sequence: TTA
  source 1..20: mol_type = other DNA
cataaacaaggttcatttat

SEQ ID NO: 54842 - DNA, 20 bp, synthetic construct
  misc_feature 1..20: note = Description of Artificial Sequence: Synthetic oligonucleotide
  misc_feature 1..20: note = Target: SCN10A; (-) strand; PAM type: YTN; PAM sequence: TTG
  source 1..20: mol_type = other DNA
aacaaaaaaagccaaatgca

SEQ ID NO: 54843 - DNA, 20 bp, synthetic construct
  misc_feature 1..20: note = Description of Artificial Sequence: Synthetic oligonucleotide
  misc_feature 1..20: note = Target: SCN10A; (-) strand; PAM type: YTN; PAM sequence: TTA
  source 1..20: mol_type = other DNA
agaaagtaatattgaacaaa

SEQ ID NO: 54844 - DNA, 20 bp, synthetic construct
  misc_feature 1..20: note = Description of Artificial Sequence: Synthetic oligonucleotide
  misc_feature 1..20: note = Target: SCN10A; (-) strand; PAM type: YTN; PAM sequence: CTT
  source 1..20: mol_type = other DNA
aagaaagtaatattgaacaa

SEQ ID NO: 54845 - DNA, 20 bp, synthetic construct
  misc_feature 1..20: note = Description of Artificial Sequence: Synthetic oligonucleotide
  misc_feature 1..20: note = Target: SCN10A; (-) strand; PAM type: YTN; PAM sequence: CTG
  source 1..20: mol_type = other DNA
cacaacaataaggatgagtc

SEQ ID NO: 54846 - DNA, 20 bp, synthetic construct
  misc_feature 1..20: note = Description of Artificial Sequence: Synthetic oligonucleotide
  misc_feature 1..20: note = Target: SCN10A; (-) strand; PAM type: YTN; PAM sequence: TTA
  source 1..20: mol_type = other DNA
gtgctgcacaacaataagga

SEQ ID NO: 54847 - DNA, 20 bp, synthetic construct
  misc_feature 1..20: note = Description of Artificial Sequence: Synthetic oligonucleotide
  misc_feature 1..20: note = Target: SCN10A; (-) strand; PAM type: YTN; PAM sequence: TTT
  source 1..20: mol_type = other DNA
agtgctgcacaacaataagg

SEQ ID NO: 54848 - DNA, 20 bp, synthetic construct
  misc_feature 1..20: note = Description of Artificial Sequence: Synthetic oligonucleotide
  misc_feature 1..20: note = Target: SCN10A; (-) strand; PAM type: YTN; PAM sequence: CTT
  source 1..20: mol_type = other DNA
tagtgctgcacaacaataag

SEQ ID NO: 54849 - DNA, 20 bp, synthetic construct
  misc_feature 1..20: note = Description of Artificial Sequence: Synthetic oligonucleotide
  misc_feature 1..20: note = Target: SCN10A; (-) strand; PAM type: YTN; PAM sequence: TTA
  source 1..20: mol_type = other DNA
ataaactttagtgctgcaca

SEQ ID NO: 54850 - DNA, 20 bp, synthetic construct
  misc_feature 1..20: note = Description of Artificial Sequence: Synthetic oligonucleotide
  misc_feature 1..20: note = Target: SCN10A; (-) strand; PAM type: YTN; PAM sequence: TTA
  source 1..20: mol_type = other DNA
cagcaataaaaattaataaa

SEQ ID NO: 54851 - DNA, 20 bp, synthetic construct
  misc_feature 1..20: note = Description of Artificial Sequence: Synthetic oligonucleotide
  misc_feature 1..20: note = Target: SCN10A; (-) strand; PAM type: YTN; PAM sequence: CTT
  source 1..20: mol_type = other DNA
acagcaataaaaattaataa

SEQ ID NO: 54852 - DNA, 20 bp, synthetic construct
  misc_feature 1..20: note = Description of Artificial Sequence: Synthetic oligonucleotide
  misc_feature 1..20: note = Target: SCN10A; (-) strand; PAM type: YTN; PAM sequence: CTA
  source 1..20: mol_type = other DNA
aaatgagaaaacttacagca

SEQ ID NO: 54853 - DNA, 20 bp, synthetic construct
  misc_feature 1..20: note = Description of Artificial Sequence: Synthetic oligonucleotide
  misc_feature 1..20: note = Target: SCN10A; (-) strand; PAM type: YTN; PAM sequence: TTC
  source 1..20: mol_type = other DNA
taaaatgagaaaacttacag

SEQ ID NO: 54854 - DNA, 20 bp, synthetic construct
  misc_feature 1..20: note = Description of Artificial Sequence: Synthetic oligonucleotide
  misc_feature 1..20: note = Target: SCN10A; (-) strand; PAM type: YTN; PAM sequence: TTA
  source 1..20: mol_type = other DNA
tattctaaaatgagaaaact

SEQ ID NO: 54855 - DNA, 20 bp, synthetic construct
  misc_feature 1..20: note = Description of Artificial Sequence: Synthetic oligonucleotide
  misc_feature 1..20: note = Target: SCN10A; (-) strand; PAM type: YTN; PAM sequence: CTG
  source 1..20: mol_type = other DNA
ttatattctaaaatgagaaa

SEQ ID NO: 54856 - DNA, 20 bp, synthetic construct
  misc_feature 1..20: note = Description of Artificial Sequence: Synthetic oligonucleotide
  misc_feature 1..20: note = Target: SCN10A; (-) strand; PAM type: YTN; PAM sequence: TTC
  source 1..20: mol_type = other DNA
tgttatattctaaaatgaga

SEQ ID NO: 54857 - DNA, 20 bp, synthetic construct
  misc_feature 1..20: note = Description of Artificial Sequence: Synthetic oligonucleotide
  misc_feature 1..20: note = Target: SCN10A; (-) strand; PAM type: YTN; PAM sequence: TTT
  source 1..20: mol_type = other DNA
ctgttatattctaaaatgag

SEQ ID NO: 54858 - DNA, 20 bp, synthetic construct
  misc_feature 1..20: note = Description of Artificial Sequence: Synthetic oligonucleotide
  misc_feature 1..20: note = Target: SCN10A; (-) strand; PAM type: YTN; PAM sequence: CTA
  source 1..20: mol_type = other DNA
tttctgttatattctaaaat

SEQ ID NO: 54859 - DNA, 20 bp, synthetic construct
  misc_feature 1..20: note = Description of Artificial Sequence: Synthetic oligonucleotide
  misc_feature 1..20: note = Target: SCN10A; (-) strand; PAM type: YTN; PAM sequence: TTA
  source 1..20: mol_type = other DNA
actatttctgttatattcta

SEQ ID NO: 54860 - DNA, 20 bp, synthetic construct
  misc_feature 1..20: note = Description of Artificial Sequence: Synthetic oligonucleotide
  misc_feature 1..20: note = Target: SCN10A; (-) strand; PAM type: YTN; PAM sequence: TTG
  source 1..20: mol_type = other DNA
agtacattaactatttctgt

SEQ ID NO: 54861 - DNA, 20 bp, synthetic construct
  misc_feature 1..20: note = Description of Artificial Sequence: Synthetic oligonucleotide
  misc_feature 1..20: note = Target: SCN10A; (-) strand; PAM type: YTN; PAM sequence: TTT
  source 1..20: mol_type = other DNA
gagtacattaactatttctg

SEQ ID NO: 54862 - DNA, 20 bp, synthetic construct
  misc_feature 1..20: note = Description of Artificial Sequence: Synthetic oligonucleotide
  misc_feature 1..20: note = Target: SCN10A; (-) strand; PAM type: YTN; PAM sequence: CTT
  source 1..20: mol_type = other DNA
tgagtacattaactatttct

SEQ ID NO: 54863 - DNA, 20 bp, synthetic construct
  misc_feature 1..20: note = Description of Artificial Sequence: Synthetic oligonucleotide
  misc_feature 1..20: note = Target: SCN10A; (-) strand; PAM type: YTN; PAM sequence: CTC
  source 1..20: mol_type = other DNA
aaatgtccataaactttgag

SEQ ID NO: 54864 - DNA, 20 bp, synthetic construct
  misc_feature 1..20: note = Description of Artificial Sequence: Synthetic oligonucleotide
  misc_feature 1..20: note = Target: SCN10A; (-) strand; PAM type: YTN; PAM sequence: TTG
  source 1..20: mol_type = other DNA
cccataaaaaccccaaaccg

SEQ ID NO: 54865 - DNA, 20 bp, synthetic construct
  misc_feature 1..20: note = Description of Artificial Sequence: Synthetic oligonucleotide
  misc_feature 1..20: note = Target: SCN10A; (-) strand; PAM type: YTN; PAM sequence: TTT
  source 1..20: mol_type = other DNA
gcccataaaaaccccaaacc

SEQ ID NO: 54866 - DNA, 20 bp, synthetic construct
  misc_feature 1..20: note = Description of Artificial Sequence: Synthetic oligonucleotide
  misc_feature 1..20: note = Target: SCN10A; (-) strand; PAM type: YTN; PAM sequence: TTA
  source 1..20: mol_type = other DNA
tgaacatttgcccataaaaa

SEQ ID NO: 54867 - DNA, 20 bp, synthetic construct
  misc_feature 1..20: note = Description of Artificial Sequence: Synthetic oligonucleotide
  misc_feature 1..20: note = Target: SCN10A; (-) strand; PAM type: YTN; PAM sequence: TTT
  source 1..20: mol_type = other DNA
atgaacatttgcccataaaa

SEQ ID NO: 54868 - DNA, 20 bp, synthetic construct
  misc_feature 1..20: note = Description of Artificial Sequence: Synthetic oligonucleotide
  misc_feature 1..20: note = Target: SCN10A; (-) strand; PAM type: YTN; PAM sequence: CTA
  source 1..20: mol_type = other DNA
caagaaagtttatgaacatt

SEQ ID NO: 54869 - DNA, 20 bp, synthetic construct
  misc_feature 1..20: note = Description of Artificial Sequence: Synthetic oligonucleotide
  misc_feature 1..20: note = Target: SCN10A; (-) strand; PAM type: YTN; PAM sequence: TTA
  source 1..20: mol_type = other DNA
cagctacaagaaagtttatg

SEQ ID NO: 54870 - DNA, 20 bp, synthetic construct
  misc_feature 1..20: note = Description of Artificial Sequence: Synthetic oligonucleotide
  misc_feature 1..20: note = Target: SCN10A; (-) strand; PAM type: YTN; PAM sequence: TTG
  source 1..20: mol_type = other DNA
tggacaccagattacagcta

SEQ ID NO: 54871 - DNA, 20 bp, synthetic construct
  misc_feature 1..20: note = Description of Artificial Sequence: Synthetic oligonucleotide
  misc_feature 1..20: note = Target: SCN10A; (-) strand; PAM type: YTN; PAM sequence: CTT
  source 1..20: mol_type = other DNA
gtggacaccagattacagct

SEQ ID NO: 54872 - DNA, 20 bp, synthetic construct
  misc_feature 1..20: note = Description of Artificial Sequence: Synthetic oligonucleotide
  misc_feature 1..20: note = Target: SCN10A; (-) strand; PAM type: YTN; PAM sequence: TTA
  source 1..20: mol_type = other DNA
acagaaatatgtacttgtgg

SEQ ID NO: 54873 - DNA, 20 bp, synthetic construct
  misc_feature 1..20: note = Description of Artificial Sequence: Synthetic oligonucleotide
  misc_feature 1..20: note = Target: SCN10A; (-) strand; PAM type: YTN; PAM sequence: TTT
  source 1..20: mol_type = other DNA
aacagaaatatgtacttgtg

SEQ ID NO: 54874 - DNA, 20 bp, synthetic construct
  misc_feature 1..20: note = Description of Artificial Sequence: Synthetic oligonucleotide
  misc_feature 1..20: note = Target: SCN10A; (-) strand; PAM type: YTN; PAM sequence: CTA
  source 1..20: mol_type = other DNA
tgtttaacagaaatatgtac

SEQ ID NO: 54875 - DNA, 20 bp, synthetic construct
  misc_feature 1..20: note = Description of Artificial Sequence: Synthetic oligonucleotide
  misc_feature 1..20: note = Target: SCN10A; (-) strand; PAM type: YTN; PAM sequence: TTA
  source 1..20: mol_type = other DNA
ggtacctatgtttaacagaa

SEQ ID NO: 54876 - DNA, 20 bp, synthetic construct
  misc_feature 1..20: note = Description of Artificial Sequence: Synthetic oligonucleotide
  misc_feature 1..20: note = Target: SCN10A; (-) strand; PAM type: YTN; PAM sequence: CTT
  source 1..20: mol_type = other DNA
aggtacctatgtttaacaga

SEQ ID NO: 54877 - DNA, 20 bp, synthetic construct
  misc_feature 1..20: note = Description of Artificial Sequence: Synthetic oligonucleotide
  misc_feature 1..20: note = Target: SCN10A; (-) strand; PAM type: YTN; PAM sequence: TTA
  source 1..20: mol_type = other DNA
cacccttaggtacctatgtt

SEQ ID NO: 54878 - DNA, 20 bp, synthetic construct
  misc_feature 1..20: note = Description of Artificial Sequence: Synthetic oligonucleotide
  misc_feature 1..20: note = Target: SCN10A; (-) strand; PAM type: YTN; PAM sequence: CTA
  source 1..20: mol_type = other DNA
ttacacccttaggtacctat

SEQ ID NO: 54879 - DNA, 20 bp, synthetic construct
  misc_feature 1..20: note = Description of Artificial Sequence: Synthetic oligonucleotide
  misc_feature 1..20: note = Target: SCN10A; (-) strand; PAM type: YTN; PAM sequence: TTC
  source 1..20: mol_type = other DNA
tattacacccttaggtacct

SEQ ID NO: 54880 - DNA, 20 bp, synthetic construct
  misc_feature 1..20: note = Description of Artificial Sequence: Synthetic oligonucleotide
  misc_feature 1..20: note = Target: SCN10A; (-) strand; PAM type: YTN; PAM sequence: CTT
  source 1..20: mol_type = other DNA
ctattacacccttaggtacc

SEQ ID NO: 54881 - DNA, 20 bp, synthetic construct
  misc_feature 1..20: note = Description of Artificial Sequence: Synthetic oligonucleotide
  misc_feature 1..20: note = Target: SCN10A; (-) strand; PAM type: YTN; PAM sequence: TTC
  source 1..20: mol_type = other DNA
ttctattacacccttaggta

SEQ ID NO: 54882 - DNA, 20 bp, synthetic construct
  misc_feature 1..20: note = Description of Artificial Sequence: Synthetic oligonucleotide
  misc_feature 1..20: note = Target: SCN10A; (-) strand; PAM type: YTN; PAM sequence: CTG
  source 1..20: mol_type = other DNA
tattcttctattacaccctt

SEQ ID NO: 54883 - DNA, 20 bp, synthetic construct
  misc_feature 1..20: note = Description of Artificial Sequence: Synthetic oligonucleotide
  misc_feature 1..20: note = Target: SCN10A; (-) strand; PAM type: YTN; PAM sequence: CTA
  source 1..20: mol_type = other DNA
gtaaaggtgtaagcatacat

SEQ ID NO: 54884 - DNA, 20 bp, synthetic construct
  misc_feature 1..20: note = Description of Artificial Sequence: Synthetic oligonucleotide
  misc_feature 1..20: note = Target: SCN10A; (-) strand; PAM type: YTN; PAM sequence: TTA
  source 1..20: mol_type = other DNA
tctagtaaaggtgtaagcat

SEQ ID NO: 54885 - DNA, 20 bp, synthetic construct
  misc_feature 1..20: note = Description of Artificial Sequence: Synthetic oligonucleotide
  misc_feature 1..20: note = Target: SCN10A; (-) strand; PAM type: YTN; PAM sequence: TTG
  source 1..20: mol_type = other DNA
gaaagcaaggggtattatct

SEQ ID NO: 54886 - DNA, 20 bp, synthetic construct
  misc_feature 1..20: note = Description of Artificial Sequence: Synthetic oligonucleotide
  misc_feature 1..20: note = Target: SCN10A; (-) strand; PAM type: YTN; PAM sequence: TTT
  source 1..20: mol_type = other DNA
ggaaagcaaggggtattatc

SEQ ID NO: 54887 - DNA, 20 bp, synthetic construct
  misc_feature 1..20: note = Description of Artificial Sequence: Synthetic oligonucleotide
  misc_feature 1..20: note = Target: SCN10A; (-) strand; PAM type: YTN; PAM sequence: CTT
  source 1..20: mol_type = other DNA
tggaaagcaaggggtattat

SEQ ID NO: 54888 - DNA, 20 bp, synthetic construct
  misc_feature 1..20: note = Description of Artificial Sequence: Synthetic oligonucleotide
  misc_feature 1..20: note = Target: SCN10A; (-) strand; PAM type: YTN; PAM sequence: CTC
  source 1..20: mol_type = other DNA
tttggaaagcaaggggtatt

SEQ ID NO: 54889 - DNA, 20 bp, synthetic construct
  misc_feature 1..20: note = Description of Artificial Sequence: Synthetic oligonucleotide
  misc_feature 1..20: note = Target: SCN10A; (-) strand; PAM type: YTN; PAM sequence: TTG
  source 1..20: mol_type = other DNA
gacaacctctttggaaagca

SEQ ID NO: 54890 - DNA, 20 bp, synthetic construct
  misc_feature 1..20: note = Description of Artificial Sequence: Synthetic oligonucleotide
  misc_feature 1..20: note = Target: SCN10A; (-) strand; PAM type: YTN; PAM sequence: TTT
  source 1..20: mol_type = other DNA
ggacaacctctttggaaagc

SEQ ID NO: 54891 - DNA, 20 bp, synthetic construct
  misc_feature 1..20: note = Description of Artificial Sequence: Synthetic oligonucleotide
  misc_feature 1..20: note = Target: SCN10A; (-) strand; PAM type: YTN; PAM sequence: CTG
  source 1..20: mol_type = other DNA
gtgggagtgtaaatttggac

SEQ ID NO: 54892 - DNA, 20 bp, synthetic construct
  misc_feature 1..20: note = Description of Artificial Sequence: Synthetic oligonucleotide
  misc_feature 1..20: note = Target: SCN10A; (-) strand; PAM type: YTN; PAM sequence: CTG
  source 1..20: mol_type = other DNA
ctggtgggagtgtaaatttg

SEQ ID NO: 54893 - DNA, 20 bp, synthetic construct
  misc_feature 1..20: note = Description of Artificial Sequence: Synthetic oligonucleotide
  misc_feature 1..20: note = Target: SCN10A; (-) strand; PAM type: YTN; PAM sequence: CTC
  source 1..20: mol_type = other DNA
acacactgctggtgggagtg

SEQ ID NO: 54894 - DNA, 20 bp, synthetic construct
  misc_feature 1..20: note = Description of Artificial Sequence: Synthetic oligonucleotide
  misc_feature 1..20: note = Target: SCN10A; (-) strand; PAM type: YTN; PAM sequence: TTG
  source 1..20: mol_type = other DNA
ggaatgacatggagcaacag

SEQ ID NO: 54895 - DNA, 20 bp, synthetic construct
  misc_feature 1..20: note = Description of Artificial Sequence: Synthetic oligonucleotide
  misc_feature 1..20: note = Target: SCN10A; (-) strand; PAM type: YTN; PAM sequence: TTA
  source 1..20: mol_type = other DNA
aagtgtcacaataccaagta

SEQ ID NO: 54896 - DNA, 20 bp, synthetic construct
  misc_feature 1..20: note = Description of Artificial Sequence: Synthetic oligonucleotide
  misc_feature 1..20: note = Target: SCN10A; (-) strand; PAM type: YTN; PAM sequence: TTT
  source 1..20: mol_type = other DNA
aaagtgtcacaataccaagt

SEQ ID NO: 54897 - DNA, 20 bp, synthetic construct
  misc_feature 1..20: note = Description of Artificial Sequence: Synthetic oligonucleotide
  misc_feature 1..20: note = Target: SCN10A; (-) strand; PAM type: YTN; PAM sequence: TTT
  source 1..20: mol_type = other DNA
taaagtgtcacaataccaag

SEQ ID NO: 54898 - DNA, 20 bp, synthetic construct
  misc_feature 1..20: note = Description of Artificial Sequence: Synthetic oligonucleotide
  misc_feature 1..20: note = Target: SCN10A; (-) strand; PAM type: YTN; PAM sequence: TTT
  source 1..20: mol_type = other DNA
ttaaagtgtcacaataccaa

SEQ ID NO: 54899 - DNA, 20 bp, synthetic construct
  misc_feature 1..20: note = Description of Artificial Sequence: Synthetic oligonucleotide
  misc_feature 1..20: note = Target: SCN10A; (-) strand; PAM type: YTN; PAM sequence: TTT
  source 1..20: mol_type = other DNA
tttaaagtgtcacaatacca

SEQ ID NO: 54900 - DNA, 20 bp, synthetic construct
  misc_feature 1..20: note = Description of Artificial Sequence: Synthetic oligonucleotide
  misc_feature 1..20: note = Target: SCN10A; (-) strand; PAM type: YTN; PAM sequence: TTC
  source 1..20: mol_type = other DNA
atcatagaagggaaattttt

SEQ ID NO: 54901 - DNA, 20 bp, synthetic construct
  misc_feature 1..20: note = Description of Artificial Sequence: Synthetic oligonucleotide
  misc_feature 1..20: note = Target: SCN10A; (-) strand; PAM type: YTN; PAM sequence: TTA
  source 1..20: mol_type = other DNA
catgttcatcatagaaggga

SEQ ID NO: 54902 - DNA, 20 bp, synthetic construct
  misc_feature 1..20: note = Description of Artificial Sequence: Synthetic oligonucleotide
  misc_feature 1..20: note = Target: SCN10A; (-) strand; PAM type: YTN; PAM sequence: TTA
  source 1..20: mol_type = other DNA
ttacatgttcatcatagaag

SEQ ID NO: 54903 - DNA, 20 bp, synthetic construct
  misc_feature 1..20: note = Description of Artificial Sequence: Synthetic oligonucleotide
  misc_feature 1..20: note = Target: SCN10A; (-) strand; PAM type: YTN; PAM sequence: TTT
  source 1..20: mol_type = other DNA
attacatgttcatcatagaa

SEQ ID NO: 54904 - DNA, 20 bp, synthetic construct
  misc_feature 1..20: note = Description of Artificial Sequence: Synthetic oligonucleotide
  misc_feature 1..20: note = Target: SCN10A; (-) strand; PAM type: YTN; PAM sequence: TTT
  source 1..20: mol_type = other DNA
tattacatgttcatcataga

SEQ ID NO: 54905 - DNA, 20 bp, synthetic construct
  misc_feature 1..20: note = Description of Artificial Sequence: Synthetic oligonucleotide
  misc_feature 1..20: note = Target: SCN10A; (-) strand; PAM type: YTN; PAM sequence: CTG
  source 1..20: mol_type = other DNA
agattttattacatgttcat

SEQ ID NO: 54906 - DNA, 20 bp, synthetic construct
  misc_feature 1..20: note = Description of Artificial Sequence: Synthetic oligonucleotide
  misc_feature 1..20: note = Target: SCN10A; (-) strand; PAM type: YTN; PAM sequence: TTA
  source 1..20: mol_type = other DNA
aaatcacactgagattttat

SEQ ID NO: 54907 - DNA, 20 bp, synthetic construct
  misc_feature 1..20: note = Description of Artificial Sequence: Synthetic oligonucleotide
  misc_feature 1..20: note = Target: SCN10A; (-) strand; PAM type: YTN; PAM sequence: TTG
  source 1..20: mol_type = other DNA
caaattaaaatcacactgag

SEQ ID NO: 54908 - DNA, 20 bp, synthetic construct
  misc_feature 1..20: note = Description of Artificial Sequence: Synthetic oligonucleotide
  misc_feature 1..20: note = Target: SCN10A; (-) strand; PAM type: YTN; PAM sequence: TTA
  source 1..20: mol_type = other DNA
aatcaaagagttgcaaatta

SEQ ID NO: 54909 - DNA, 20 bp, synthetic construct
  misc_feature 1..20: note = Description of Artificial Sequence: Synthetic oligonucleotide
  misc_feature 1..20: note = Target: SCN10A; (-) strand; PAM type: YTN; PAM sequence: TTT
  source 1..20: mol_type = other DNA
aaatcaaagagttgcaaatt

SEQ ID NO: 54910 - DNA, 20 bp, synthetic construct
  misc_feature 1..20: note = Description of Artificial Sequence: Synthetic oligonucleotide
  misc_feature 1..20: note = Target: SCN10A; (-) strand; PAM type: YTN; PAM sequence: TTT
  source 1..20: mol_type = other DNA
taaatcaaagagttgcaaat

SEQ ID NO: 54911 - DNA, 20 bp, synthetic construct
  misc_feature 1..20: note = Description of Artificial Sequence: Synthetic oligonucleotide
  misc_feature 1..20: note = Target: SCN10A; (-) strand; PAM type: YTN; PAM sequence: TTT
  source 1..20: mol_type = other DNA
ttaaatcaaagagttgcaaa

SEQ ID NO: 54912 - DNA, 20 bp, synthetic construct
  misc_feature 1..20: note = Description of Artificial Sequence: Synthetic oligonucleotide
  misc_feature 1..20: note = Target: SCN10A; (-) strand; PAM type: YTN; PAM sequence: TTT
  source 1..20: mol_type = other DNA
tttaaatcaaagagttgcaa

SEQ ID NO: 54913 - DNA, 20 bp, synthetic construct
  misc_feature 1..20: note = Description of Artificial Sequence: Synthetic oligonucleotide
  misc_feature 1..20: note = Target: SCN10A; (-) strand; PAM type: YTN; PAM sequence: TTT
  source 1..20: mol_type = other DNA
ttttaaatcaaagagttgca

SEQ ID NO: 54914 - DNA, 20 bp, synthetic construct
  misc_feature 1..20: note = Description of Artificial Sequence: Synthetic oligonucleotide
  misc_feature 1..20: note = Target: SCN10A; (-) strand; PAM type: YTN; PAM sequence: CTT
  source 1..20: mol_type = other DNA
tttttaaatcaaagagttgc

SEQ ID NO: 54915 - DNA, 20 bp, synthetic construct
  misc_feature 1..20: note = Description of Artificial Sequence: Synthetic oligonucleotide
  misc_feature 1..20: note = Target: SCN10A; (-) strand; PAM type: YTN; PAM sequence: TTA
  source 1..20: mol_type = other DNA
acctttttttaaatcaaaga

SEQ ID NO: 54916 - DNA, 20 bp, synthetic construct
  misc_feature 1..20: note = Description of Artificial Sequence: Synthetic oligonucleotide
  misc_feature 1..20: note = Target: SCN10A; (-) strand; PAM type: YTN; PAM sequence: CTT
  source 1..20: mol_type = other DNA
aacctttttttaaatcaaag

SEQ ID NO: 54917 - DNA, 20 bp, synthetic construct
  misc_feature 1..20: note = Description of Artificial Sequence: Synthetic oligonucleotide
  misc_feature 1..20: note = Target: SCN10A; (-) strand; PAM type: YTN; PAM sequence: TTC
  source 1..20: mol_type = other DNA
ttaacctttttttaaatcaa

SEQ ID NO: 54918 - DNA, 20 bp, synthetic construct
  misc_feature 1..20: note = Description of Artificial Sequence: Synthetic oligonucleotide
  misc_feature 1..20: note = Target: SCN10A; (-) strand; PAM type: YTN; PAM sequence: TTA
  source 1..20: mol_type = other DNA
caaaagtggaaatccaaatg

SEQ ID NO: 54919 - DNA, 20 bp, synthetic construct
  misc_feature 1..20: note = Description of Artificial Sequence: Synthetic oligonucleotide
  misc_feature 1..20: note = Target: SCN10A; (-) strand; PAM type: YTN; PAM sequence: TTT
  source 1..20: mol_type = other DNA
acaaaagtggaaatccaaat

SEQ ID NO: 54920 - DNA, 20 bp, synthetic construct
  misc_feature 1..20: note = Description of Artificial Sequence: Synthetic oligonucleotide
  misc_feature 1..20: note = Target: SCN10A; (-) strand; PAM type: YTN; PAM sequence: CTT
  source 1..20: mol_type = other DNA
tacaaaagtggaaatccaaa

SEQ ID NO: 54921 - DNA, 20 bp, synthetic construct
  misc_feature 1..20: note = Description of Artificial Sequence: Synthetic oligonucleotide
  misc_feature 1..20: note = Target: SCN10A; (-) strand; PAM type: YTN; PAM sequence: TTG
  source 1..20: mol_type = other DNA
aataggcactttacaaaagt

SEQ ID NO: 54922 - DNA, 20 bp, synthetic construct
  misc_feature 1..20: note = Description of Artificial Sequence: Synthetic oligonucleotide
  misc_feature 1..20: note = Target: SCN10A; (-) strand; PAM type: YTN; PAM sequence: TTT
  source 1..20: mol_type = other DNA
gaataggcactttacaaaag

SEQ ID NO: 54923 - DNA, 20 bp, synthetic construct
  misc_feature 1..20: note = Description of Artificial Sequence: Synthetic oligonucleotide
  misc_feature 1..20: note = Target: SCN10A; (-) strand; PAM type: YTN; PAM sequence: TTG
  source 1..20: mol_type = other DNA
taaaatagcacaaaatttga

SEQ ID NO: 54924 - DNA, 20 bp, synthetic construct
  misc_feature 1..20: note = Description of Artificial Sequence: Synthetic oligonucleotide
  misc_feature 1..20: note = Target: SCN10A; (-) strand; PAM type: YTN; PAM sequence: CTT
  source 1..20: mol_type = other DNA
gtaaaatagcacaaaatttg

SEQ ID NO: 54925 - DNA, 20 bp, synthetic construct
  misc_feature 1..20: note = Description of Artificial Sequence: Synthetic oligonucleotide
  misc_feature 1..20: note = Target: SCN10A; (-) strand; PAM type: YTN; PAM sequence: TTA
  source 1..20: mol_type = other DNA
gaaaaatgtcagaacaacca

SEQ ID NO: 54926 - DNA, 20 bp, synthetic construct
  misc_feature 1..20: note = Description of Artificial Sequence: Synthetic oligonucleotide
  misc_feature 1..20: note = Target: SCN10A; (-) strand; PAM type: YTN; PAM sequence: CTA
  source 1..20: mol_type = other DNA
caaatcaattagaaaaatgt

SEQ ID NO: 54927 - DNA, 20 bp, synthetic construct
  misc_feature 1..20: note = Description of Artificial Sequence: Synthetic oligonucleotide
  misc_feature 1..20: note = Target: SCN10A; (-) strand; PAM type: YTN; PAM sequence: CTC
  source 1..20: mol_type = other DNA
tacaaatcaattagaaaaat

SEQ ID NO: 54928 - DNA, 20 bp, synthetic construct
  misc_feature 1..20: note = Description of Artificial Sequence: Synthetic oligonucleotide
  misc_feature 1..20: note = Target: SCN10A; (-) strand; PAM type: YTN; PAM sequence: TTC
  source 1..20: mol_type = other DNA
agagtaatgaactctacaaa

SEQ ID NO: 54929 - DNA, 20 bp, synthetic construct
  misc_feature 1..20: note = Description of Artificial Sequence: Synthetic oligonucleotide
  misc_feature 1..20: note = Target: SCN10A; (-) strand; PAM type: YTN; PAM sequence: TTA
  source 1..20: mol_type = other DNA
tattcagagtaatgaactct

SEQ ID NO: 54930 - DNA, 20 bp, synthetic construct
  misc_feature 1..20: note = Description of Artificial Sequence: Synthetic oligonucleotide
  misc_feature 1..20: note = Target: SCN10A; (-) strand; PAM type: YTN; PAM sequence: CTT
  source 1..20: mol_type = other DNA
atattcagagtaatgaactc

SEQ ID NO: 54931 - DNA, 20 bp, synthetic construct
  misc_feature 1..20: note = Description of Artificial Sequence: Synthetic oligonucleotide
  misc_feature 1..20: note = Target: SCN10A; (-) strand; PAM type: YTN; PAM sequence: TTA
  source 1..20: mol_type = other DNA
agagcatgaaaaagcaagtg

SEQ ID NO: 54932 - DNA, 20 bp, synthetic construct
  misc_feature 1..20: note = Description of Artificial Sequence: Synthetic oligonucleotide
  misc_feature 1..20: note = Target: SCN10A; (-) strand; PAM type: YTN; PAM sequence: TTT
  source 1..20: mol_type = other DNA
aagagcatgaaaaagcaagt

SEQ ID NO: 54933 - DNA, 20 bp, synthetic construct
  misc_feature 1..20: note = Description of Artificial Sequence: Synthetic oligonucleotide
  misc_feature 1..20: note = Target: SCN10A; (-) strand; PAM type: YTN; PAM sequence: CTT
  source 1..20: mol_type = other DNA
taagagcatgaaaaagcaag

SEQ ID NO: 54934 - DNA, 20 bp, synthetic construct
  misc_feature 1..20: note = Description of Artificial Sequence: Synthetic oligonucleotide
  misc_feature 1..20: note = Target: SCN10A; (-) strand; PAM type: YTN; PAM sequence: TTC
  source 1..20: mol_type = other DNA
atcagaagacaactttaaga

SEQ ID NO: 54935 - DNA, 20 bp, synthetic construct
  misc_feature 1..20: note = Description of Artificial Sequence: Synthetic oligonucleotide
  misc_feature 1..20: note = Target: SCN10A; (-) strand; PAM type: YTN; PAM sequence: TTA
  source 1..20: mol_type = other DNA
agaatgttcatcagaagaca

SEQ ID NO: 54936 - DNA, 20 bp, synthetic construct
  misc_feature 1..20: note = Description of Artificial Sequence: Synthetic oligonucleotide
  misc_feature 1..20: note = Target: SCN10A; (-) strand; PAM type: YTN; PAM sequence: CTA
  source 1..20: mol_type = other DNA
taattaagaatgttcatcag

SEQ ID NO: 54937 - DNA, 20 bp, synthetic construct
  misc_feature 1..20: note = Description of Artificial Sequence: Synthetic oligonucleotide
  misc_feature 1..20: note = Target: SCN10A; (-) strand; PAM type: YTN; PAM sequence: TTA
  source 1..20: mol_type = other DNA
gtatactataattaagaatg

SEQ ID NO: 54938 - DNA, 20 bp, synthetic construct
  misc_feature 1..20: note = Description of Artificial Sequence: Synthetic oligonucleotide
  misc_feature 1..20: note = Target: SCN10A; (-) strand; PAM type: YTN; PAM sequence: TTT
  source 1..20: mol_type = other DNA
agtatactataattaagaat

SEQ ID NO: 54939 - DNA, 20 bp, synthetic construct
  misc_feature 1..20: note = Description of Artificial Sequence: Synthetic oligonucleotide
  misc_feature 1..20: note = Target: SCN10A; (-) strand; PAM type: YTN; PAM sequence: TTT
  source 1..20: mol_type = other DNA
tagtatactataattaagaa

SEQ ID NO: 54940 - DNA, 20 bp, synthetic construct
  misc_feature 1..20: note = Description of Artificial Sequence: Synthetic oligonucleotide
  misc_feature 1..20: note = Target: SCN10A; (-) strand; PAM type: YTN; PAM sequence: CTG
  source 1..20: mol_type = other DNA
atacattttagtatactata

SEQ ID NO: 54941 - DNA, 20 bp, synthetic construct
  misc_feature 1..20: note = Description of Artificial Sequence: Synthetic oligonucleotide
  misc_feature 1..20: note = Target: SCN10A; (-) strand; PAM type: YTN; PAM sequence: CTA
  source 1..20: mol_type = other DNA
tacaggaaaaaactgataca

SEQ ID NO: 54942 - DNA, 20 bp, synthetic construct
  misc_feature 1..20: note = Description of Artificial Sequence: Synthetic oligonucleotide
  misc_feature 1..20: note = Target: SCN10A; (-) strand; PAM type: YTN; PAM sequence: CTA
  source 1..20: mol_type = other DNA
actatacaggaaaaaactga

SEQ ID NO: 54943 - DNA, 20 bp, synthetic construct
  misc_feature 1..20: note = Description of Artificial Sequence: Synthetic oligonucleotide
  misc_feature 1..20: note = Target: SCN10A; (-) strand; PAM type: YTN; PAM sequence: TTA
  source 1..20: mol_type = other DNA
catatgacacaagaagcact

SEQ ID NO: 54944 - DNA, 20 bp, synthetic construct
  misc_feature 1..20: note = Description of Artificial Sequence: Synthetic oligonucleotide
  misc_feature 1..20: note = Target: SCN10A; (-) strand; PAM type: YTN; PAM sequence: TTA
  source 1..20: mol_type = other DNA
ttacatatgacacaagaagc

SEQ ID NO: 54945 - DNA, 20 bp, synthetic construct
  misc_feature 1..20: note = Description of Artificial Sequence: Synthetic oligonucleotide
  misc_feature 1..20: note = Target: SCN10A; (-) strand; PAM type: YTN; PAM sequence: TTT
  source 1..20: mol_type = other DNA
attacatatgacacaagaag

SEQ ID NO: 54946 - DNA, 20 bp, synthetic construct
  misc_feature 1..20: note = Description of Artificial Sequence: Synthetic oligonucleotide
  misc_feature 1..20: note = Target: SCN10A; (-) strand; PAM type: YTN; PAM sequence: CTT
  source 1..20: mol_type = other DNA
tattacatatgacacaagaa

SEQ ID NO: 54947 - DNA, 20 bp, synthetic construct
  misc_feature 1..20: note = Description of Artificial Sequence: Synthetic oligonucleotide
  misc_feature 1..20: note = Target: SCN10A; (-) strand; PAM type: YTN; PAM sequence: CTA
  source 1..20: mol_type = other DNA
agaaaaactttattacatat

SEQ ID NO: 54948 - DNA, 20 bp, synthetic construct
  misc_feature 1..20: note = Description of Artificial Sequence: Synthetic oligonucleotide
  misc_feature 1..20: note = Target: SCN10A; (-) strand; PAM type: YTN; PAM sequence: CTC
  source 1..20: mol_type = other DNA
agactaagaaaaactttatt

SEQ ID NO: 54949 - DNA, 20 bp, synthetic construct
  misc_feature 1..20: note = Description of Artificial Sequence: Synthetic oligonucleotide
  misc_feature 1..20: note = Target: SCN10A; (-) strand; PAM type: YTN; PAM sequence: TTA
  source 1..20: mol_type = other DNA
tgacctcagactaagaaaaa

SEQ ID NO: 54950 - DNA, 20 bp, synthetic construct
  misc_feature 1..20: note = Description of Artificial Sequence: Synthetic oligonucleotide
  misc_feature 1..20: note = Target: SCN10A; (-) strand; PAM type: YTN; PAM sequence: TTT
  source 1..20: mol_type = other DNA
atgacctcagactaagaaaa

SEQ ID NO: 54951 - DNA, 20 bp, synthetic construct
  misc_feature 1..20: note = Description of Artificial Sequence: Synthetic oligonucleotide
  misc_feature 1..20: note = Target: SCN10A; (-) strand; PAM type: YTN; PAM sequence: CTT
  source 1..20: mol_type = other DNA
tatgacctcagactaagaaa

SEQ ID NO: 54952 - DNA, 20 bp, synthetic construct
  misc_feature 1..20: note = Description of Artificial Sequence: Synthetic oligonucleotide
  misc_feature 1..20: note = Target: SCN10A; (-) strand; PAM type: YTN; PAM sequence: TTG
  source 1..20: mol_type = other DNA
aaaggaaaaaacaaagagga

SEQ ID NO: 54953 - DNA, 20 bp, synthetic construct
  misc_feature 1..20: note = Description of Artificial Sequence: Synthetic oligonucleotide
  misc_feature 1..20: note = Target: SCN10A; (-) strand; PAM type: YTN; PAM sequence: TTT
  source 1..20: mol_type = other DNA
gaaaggaaaaaacaaagagg

SEQ ID NO: 54954 - DNA, 20 bp, synthetic construct
  misc_feature 1..20: note = Description of Artificial Sequence: Synthetic oligonucleotide
  misc_feature 1..20: note = Target: SCN10A; (-) strand; PAM type: YTN; PAM sequence: TTT
  source 1..20: mol_type = other DNA
tgaaaggaaaaaacaaagag

SEQ ID NO: 54955 - DNA, 20 bp, synthetic construct
  misc_feature 1..20: note = Description of Artificial Sequence: Synthetic oligonucleotide
  misc_feature 1..20: note = Target: SCN10A; (-) strand; PAM type: YTN; PAM sequence: TTT
  source 1..20: mol_type = other DNA
ttgaaaggaaaaaacaaaga

SEQ ID NO: 54956 - DNA, 20 bp, synthetic construct
  misc_feature 1..20: note = Description of Artificial Sequence: Synthetic oligonucleotide
  misc_feature 1..20: note = Target: SCN10A; (-) strand; PAM type: YTN; PAM sequence: CTT
  source 1..20: mol_type = other DNA
tttgaaaggaaaaaacaaag

SEQ ID NO: 54957 - DNA, 20 bp, synthetic construct
  misc_feature 1..20: note = Description of Artificial Sequence: Synthetic oligonucleotide
  misc_feature 1..20: note = Target: SCN10A; (-) strand; PAM type: YTN; PAM sequence: TTG
  source 1..20: mol_type = other DNA
atcgtggtggataagctttt

SEQ ID NO: 54958 - DNA, 20 bp, synthetic construct
  misc_feature 1..20: note = Description of Artificial Sequence: Synthetic oligonucleotide
  misc_feature 1..20: note = Target: SCN10A; (-) strand; PAM type: YTN; PAM sequence: CTT
  source 1..20: mol_type = other DNA
gatcgtggtggataagcttt

SEQ ID NO: 54959 - DNA, 20 bp, synthetic construct
  misc_feature 1..20: note = Description of Artificial Sequence: Synthetic oligonucleotide
  misc_feature 1..20: note = Target: SCN10A; (-) strand; PAM type: YTN; PAM sequence: TTG
  source 1..20: mol_type = other DNA
atcccaggtatgaagccgac

SEQ ID NO: 54960 - DNA, 20 bp, synthetic construct
  misc_feature 1..20: note = Description of Artificial Sequence: Synthetic oligonucleotide
  misc_feature 1..20: note = Target: SCN10A; (-) strand; PAM type: YTN; PAM sequence: TTT
  source 1..20: mol_type = other DNA
gatcccaggtatgaagccga

SEQ ID NO: 54961 - DNA, 20 bp, synthetic construct
  misc_feature 1..20: note = Description of Artificial Sequence: Synthetic oligonucleotide
  misc_feature 1..20: note = Target: SCN10A; (-) strand; PAM type: YTN; PAM sequence: CTT
  source 1..20: mol_type = other DNA
tgatcccaggtatgaagccg

SEQ ID NO: 54962 - DNA, 20 bp, synthetic construct
  misc_feature 1..20: note = Description of Artificial Sequence: Synthetic oligonucleotide
  misc_feature 1..20: note = Target: SCN10A; (-) strand; PAM type: YTN; PAM sequence: TTG
  source 1..20: mol_type = other DNA
aaccagctttgatcccaggt

SEQ ID NO: 54963 - DNA, 20 bp, synthetic construct
  misc_feature 1..20: note = Description of Artificial Sequence: Synthetic oligonucleotide
  misc_feature 1..20: note = Target: SCN10A; (-) strand; PAM type: YTN; PAM sequence: TTG
  source 1..20: mol_type = other DNA
cgtatgttgaaccagctttg

SEQ ID NO: 54964 - DNA, 20 bp, synthetic construct
  misc_feature 1..20: note = Description of Artificial Sequence: Synthetic oligonucleotide
  misc_feature 1..20: note = Target: SCN10A; (-) strand; PAM type: YTN; PAM sequence: CTT
  source 1..20: mol_type = other DNA
gcgtatgttgaaccagcttt

SEQ ID NO: 54965 - DNA, 20 bp, synthetic construct
  misc_feature 1..20: note = Description of Artificial Sequence: Synthetic oligonucleotide
  misc_feature 1..20: note = Target: SCN10A; (-) strand; PAM type: YTN; PAM sequence: TTG
  source 1..20: mol_type = other DNA
acttgcgtatgttgaaccag

SEQ ID NO: 54966 - DNA, 20 bp, synthetic construct
  misc_feature 1..20: note = Description of Artificial Sequence: Synthetic oligonucleotide
  misc_feature 1..20: note = Target: SCN10A; (-) strand; PAM type: YTN; PAM sequence: TTA
  source 1..20: mol_type = other DNA
ttgacttgcgtatgttgaac

SEQ ID NO: 54967 - DNA, 20 bp, synthetic construct
  misc_feature 1..20: note = Description of Artificial Sequence: Synthetic oligonucleotide
  misc_feature 1..20: note = Target: SCN10A; (-) strand; PAM type: YTN; PAM sequence: TTT
  source 1..20: mol_type = other DNA
attgacttgcgtatgttgaa

SEQ ID NO: 54968 - DNA, 20 bp, synthetic construct
  misc_feature 1..20: note = Description of Artificial Sequence: Synthetic oligonucleotide
  misc_feature 1..20: note = Target: SCN10A; (-) strand; PAM type: YTN; PAM sequence: TTA
  source 1..20: mol_type = other DNA
cgtttattgacttgcgtatg

SEQ ID NO: 54969 - DNA, 20 bp, synthetic construct
  misc_feature 1..20: note = Description of Artificial Sequence: Synthetic oligonucleotide
  misc_feature 1..20: note = Target: SCN10A; (-) strand; PAM type: YTN; PAM sequence: TTG
  source 1..20: mol_type = other DNA
tgtgatggattacgtttatt

SEQ ID NO: 54970 - DNA, 20 bp, synthetic construct
  misc_feature 1..20: note = Description of Artificial Sequence: Synthetic oligonucleotide
  misc_feature 1..20: note = Target: SCN10A; (-) strand; PAM type: YTN; PAM sequence: TTT
  source 1..20: mol_type = other DNA
gtgtgatggattacgtttat

SEQ ID NO: 54971 - DNA, 20 bp, synthetic construct
  misc_feature 1..20: note = Description of Artificial Sequence: Synthetic oligonucleotide
  misc_feature 1..20: note = Target: SCN10A; (-) strand; PAM type: YTN; PAM sequence: CTG
  source 1..20: mol_type = other DNA
tttgtgtgatggattacgtt

SEQ ID NO: 54972 - DNA, 20 bp, synthetic construct
  misc_feature 1..20: note = Description of Artificial Sequence: Synthetic oligonucleotide
  misc_feature 1..20: note = Target: SCN10A; (-) strand; PAM type: YTN; PAM sequence: TTC
  source 1..20: mol_type = other DNA
tgtttgtgtgatggattacg

SEQ ID NO: 54973 - DNA, 20 bp, synthetic construct
  misc_feature 1..20: note = Description of Artificial Sequence: Synthetic oligonucleotide
  misc_feature 1..20: note = Target: SCN10A; (-) strand; PAM type: YTN; PAM sequence: TTG
  source 1..20: mol_type = other DNA
gttctgtttgtgtgatggat

SEQ ID NO: 54974 - DNA, 20 bp, synthetic construct
  misc_feature 1..20: note = Description of Artificial Sequence: Synthetic oligonucleotide
  misc_feature 1..20: note = Target: SCN10A; (-) strand; PAM type: YTN; PAM sequence: TTG
  source 1..20: mol_type = other DNA
tcattggttctgtttgtgtg

SEQ ID NO: 54975 - DNA, 20 bp, synthetic construct
  misc_feature 1..20: note = Description of Artificial Sequence: Synthetic oligonucleotide
  misc_feature 1..20: note = Target: SCN10A; (-) strand; PAM type: YTN; PAM sequence: TTT
  source 1..20: mol_type = other DNA
gtcattggttctgtttgtgt

SEQ ID NO: 54976 - DNA, 20 bp, synthetic construct
  misc_feature 1..20: note = Description of Artificial Sequence: Synthetic oligonucleotide
  misc_feature 1..20: note = Target: SCN10A; (-) strand; PAM type: YTN; PAM sequence: TTT
  source 1..20: mol_type = other DNA
tgtcattggttctgtttgtg

SEQ ID NO: 54977 - DNA, 20 bp, synthetic construct
  misc_feature 1..20: note = Description of Artificial Sequence: Synthetic oligonucleotide
  misc_feature 1..20: note = Target: SCN10A; (-) strand; PAM type: YTN; PAM sequence: TTT
  source 1..20: mol_type = other DNA
ttgtcattggttctgtttgt

SEQ ID NO: 54978 - DNA, 20 bp, synthetic construct
  misc_feature 1..20: note = Description of Artificial Sequence: Synthetic oligonucleotide
  misc_feature 1..20: note = Target: SCN10A; (-) strand; PAM type: YTN; PAM sequence: TTG
  source 1..20: mol_type = other DNA
agataatcacgtggtttttg

SEQ ID NO: 54979 - DNA, 20 bp, synthetic construct
  misc_feature 1..20: note = Description of Artificial Sequence: Synthetic oligonucleotide
  misc_feature 1..20: note = Target: SCN10A; (-) strand; PAM type: YTN; PAM sequence: CTA
  source 1..20: mol_type = other DNA
ttgagataatcacgtggttt

SEQ ID NO: 54980 - DNA, 20 bp, synthetic construct
  misc_feature 1..20: note = Description of Artificial Sequence: Synthetic oligonucleotide
  misc_feature 1..20: note = Target: SCN10A; (-) strand; PAM type: YTN; PAM sequence: CTG
  source 1..20: mol_type = other DNA
catctattgagataatcacg

SEQ ID NO: 54981 - DNA, 20 bp, synthetic construct
  misc_feature 1..20: note = Description of Artificial Sequence: Synthetic oligonucleotide
  misc_feature 1..20: note = Target: SCN10A; (-) strand; PAM type: YTN; PAM sequence: TTC
  source 1..20: mol_type = other DNA
tgcatctattgagataatca

SEQ ID NO: 54982 - DNA, 20 bp, synthetic construct
  misc_feature 1..20: note = Description of Artificial Sequence: Synthetic oligonucleotide
  misc_feature 1..20: note = Target: SCN10A; (-) strand; PAM type: YTN; PAM sequence: TTT
  source 1..20: mol_type = other DNA
ctgcatctattgagataatc

SEQ ID NO: 54983 - DNA, 20 bp, synthetic construct
  misc_feature 1..20: note = Description of Artificial Sequence: Synthetic oligonucleotide
  misc_feature 1..20: note = Target: SCN10A; (-) strand; PAM type: YTN; PAM sequence: TTT
  source 1..20: mol_type = other DNA
tctgcatctattgagataat

SEQ ID NO: 54984 - DNA, 20 bp, synthetic construct
  misc_feature 1..20: note = Description of Artificial Sequence: Synthetic oligonucleotide
  misc_feature 1..20: note = Target: SCN10A; (-) strand; PAM type: YTN; PAM sequence: CTT
  source 1..20: mol_type = other DNA
ttctgcatctattgagataa

SEQ ID NO: 54985 - DNA, 20 bp, synthetic construct
  misc_feature 1..20: note = Description of Artificial Sequence: Synthetic oligonucleotide
  misc_feature 1..20: note = Target: SCN10A; (-) strand; PAM type: YTN; PAM sequence: TTG
  source 1..20: mol_type = other DNA
tcgaagaccttttctgcatc

SEQ ID NO: 54986 - DNA, 20 bp, synthetic construct
  misc_feature 1..20: note = Description of Artificial Sequence: Synthetic oligonucleotide
  misc_feature 1..20: note = Target: SCN10A; (-) strand; PAM type: YTN; PAM sequence: TTT
  source 1..20: mol_type = other DNA
gtcgaagaccttttctgcat

SEQ ID NO: 54987 - DNA, 20 bp, synthetic construct
  misc_feature 1..20: note = Description of Artificial Sequence: Synthetic oligonucleotide
  misc_feature 1..20: note = Target: SCN10A; (-) strand; PAM type: YTN; PAM sequence: TTT
  source 1..20: mol_type = other DNA
tgtcgaagaccttttctgca

SEQ ID NO: 54988 - DNA, 20 bp, synthetic construct
  misc_feature 1..20: note = Description of Artificial Sequence: Synthetic oligonucleotide
  misc_feature 1..20: note = Target: SCN10A; (-) strand; PAM type: YTN; PAM sequence: TTG
  source 1..20: mol_type = other DNA
aattttgtcgaagacctttt

SEQ ID NO: 54989 - DNA, 20 bp, synthetic construct
  misc_feature 1..20: note = Description of Artificial Sequence: Synthetic oligonucleotide
  misc_feature 1..20: note = Target: SCN10A; (-) strand; PAM type: YTN; PAM sequence: TTA
  source 1..20: mol_type = other DNA
gcatgaatgggtgttgaatt

SEQ ID NO: 54990 - DNA, 20 bp, synthetic construct
  misc_feature 1..20: note = Description of Artificial Sequence: Synthetic oligonucleotide
  misc_feature 1..20: note = Target: SCN10A; (-) strand; PAM type: YTN; PAM sequence: TTT
  source 1..20: mol_type = other DNA
agcatgaatgggtgttgaat

SEQ ID NO: 54991 - DNA, 20 bp, synthetic construct
  misc_feature 1..20: note = Description of Artificial Sequence: Synthetic oligonucleotide
  misc_feature 1..20: note = Target: SCN10A; (-) strand; PAM type: YTN; PAM sequence: TTT
  source 1..20: mol_type = other DNA
tagcatgaatgggtgttgaa

SEQ ID NO: 54992 - DNA, 20 bp, synthetic construct
  misc_feature 1..20: note = Description of Artificial Sequence: Synthetic oligonucleotide
  misc_feature 1..20: note = Target: SCN10A; (-) strand; PAM type: YTN; PAM sequence: CTT
  source 1..20: mol_type = other DNA
ttagcatgaatgggtgttga

SEQ ID NO: 54993 - DNA, 20 bp, synthetic construct
  misc_feature 1..20: note = Description of Artificial Sequence: Synthetic oligonucleotide
  misc_feature 1..20: note = Target: SCN10A; (-) strand; PAM type: YTN; PAM sequence: TTG
  source 1..20: mol_type = other DNA
agagcttttagcatgaatgg

SEQ ID NO: 54994 - DNA, 20 bp, synthetic construct
  misc_feature 1..20: note = Description of Artificial Sequence: Synthetic oligonucleotide
  misc_feature 1..20: note = Target: SCN10A; (-) strand; PAM type: YTN; PAM sequence: TTA
  source 1..20: mol_type = other DNA
ttgagagcttttagcatgaa

SEQ ID NO: 54995 - DNA, 20 bp, synthetic construct
  misc_feature 1..20: note = Description of Artificial Sequence: Synthetic oligonucleotide
  misc_feature 1..20: note = Target: SCN10A; (-) strand; PAM type: YTN; PAM sequence: TTT
  source 1..20: mol_type = other DNA
attgagagcttttagcatga

SEQ ID NO: 54996 - DNA, 20 bp, synthetic construct
  misc_feature 1..20: note = Description of Artificial Sequence: Synthetic oligonucleotide
  misc_feature 1..20: note = Target: SCN10A; (-) strand; PAM type: YTN; PAM sequence: CTA
  source 1..20: mol_type = other DNA
gtttattgagagcttttagc

SEQ ID NO: 54997 - DNA, 20 bp, synthetic construct
  misc_feature 1..20: note = Description of Artificial Sequence: Synthetic oligonucleotide
  misc_feature 1..20: note = Target: SCN10A; (-) strand; PAM type: YTN; PAM sequence: TTC
  source 1..20: mol_type = other DNA
catcaatacctagtttattg

SEQ ID NO: 54998 - DNA, 20 bp, synthetic construct
  misc_feature 1..20: note = Description of Artificial Sequence: Synthetic oligonucleotide
  misc_feature 1..20: note = Target: SCN10A; (-) strand; PAM type: YTN; PAM sequence: TTG
  source 1..20: mol_type = other DNA
agatacattccatcaatacc

SEQ ID NO: 54999 - DNA, 20 bp, synthetic construct
  misc_feature 1..20: note = Description of Artificial Sequence: Synthetic oligonucleotide
  misc_feature 1..20: note = Target: SCN10A; (-) strand; PAM type: YTN; PAM sequence: TTT
  source 1..20: mol_type = other DNA
gagatacattccatcaatac

SEQ ID NO: 55000 - DNA, 20 bp, synthetic construct
  misc_feature 1..20: note = Description of Artificial Sequence: Synthetic oligonucleotide
  misc_feature 1..20: note = Target: SCN10A; (-) strand; PAM type: YTN; PAM sequence: TTT
  source 1..20: mol_type = other DNA
tgagatacattccatcaata

SEQ ID NO: 55001 - DNA, 20 bp, synthetic construct
  misc_feature 1..20: note = Description of Artificial Sequence: Synthetic oligonucleotide
  misc_feature 1..20: note = Target: SCN10A; (-) strand; PAM type: YTN; PAM sequence: TTA
  source 1..20: mol_type = other DNA
ttttgagatacattccatca

SEQ ID NO: 55002 - DNA, 20 bp, synthetic construct
  misc_feature 1..20: note = Description of Artificial Sequence: Synthetic oligonucleotide
  misc_feature 1..20: note = Target: SCN10A; (-) strand; PAM type: YTN; PAM sequence: TTA
  source 1..20: mol_type = other DNA
ttattttgagatacattcca

SEQ ID NO: 55003 - DNA, 20 bp, synthetic construct
  misc_feature 1..20: note = Description of Artificial Sequence: Synthetic oligonucleotide
  misc_feature 1..20: note = Target: SCN10A; (-) strand; PAM type: YTN; PAM sequence: CTT
  source 1..20: mol_type = other DNA
attattttgagatacattcc

SEQ ID NO: 55004 - DNA, 20 bp, synthetic construct
  misc_feature 1..20: note = Description of Artificial Sequence: Synthetic oligonucleotide
  misc_feature 1..20: note = Target: SCN10A; (-) strand; PAM type: YTN; PAM sequence: TTC
  source 1..20: mol_type = other DNA
ttattattttgagatacatt

SEQ ID NO: 55005 - DNA, 20 bp, synthetic construct
  misc_feature 1..20: note = Description of Artificial Sequence: Synthetic oligonucleotide
  misc_feature 1..20: note = Target: SCN10A; (-) strand; PAM type: YTN; PAM sequence: TTG
  source 1..20: mol_type = other DNA
tcataaatagttcttattat

SEQ ID NO: 55006 - DNA, 20 bp, synthetic construct
  misc_feature 1..20: note = Description of Artificial Sequence: Synthetic oligonucleotide
  misc_feature 1..20: note = Target: SCN10A; (-) strand; PAM type: YTN; PAM sequence: CTT
  source 1..20: mol_type = other DNA
gtcataaatagttcttatta

SEQ ID NO: 55007 - DNA, 20 bp, synthetic construct
  misc_feature 1..20: note = Description of Artificial Sequence: Synthetic oligonucleotide
  misc_feature 1..20: note = Target: SCN10A; (-) strand; PAM type: YTN; PAM sequence: CTG
  source 1..20: mol_type = other DNA
ggggcttgtcataaatagtt

SEQ ID NO: 55008 - DNA, 20 bp, synthetic construct
  misc_feature 1..20: note = Description of Artificial Sequence: Synthetic oligonucleotide
  misc_feature 1..20: note = Target: SCN10A; (-) strand; PAM type: YTN; PAM sequence: TTG
  source 1..20: mol_type = other DNA
gctgggggcttgtcataaat

SEQ ID NO: 55009 - DNA, 20 bp, synthetic construct
  misc_feature 1..20: note = Description of Artificial Sequence: Synthetic oligonucleotide
  misc_feature 1..20: note = Target: SCN10A; (-) strand; PAM type: YTN; PAM sequence: TTC
  source 1..20: mol_type = other DNA
agtatgatattggctggggg

SEQ ID NO: 55010 - DNA, 20 bp, synthetic construct
  misc_feature 1..20: note = Description of Artificial Sequence: Synthetic oligonucleotide
  misc_feature 1..20: note = Target: SCN10A; (-) strand; PAM type: YTN; PAM sequence: TTG
  source 1..20: mol_type = other DNA
cccattcagtatgatattgg

SEQ ID NO: 55011 - DNA, 20 bp, synthetic construct
  misc_feature 1..20: note = Description of Artificial Sequence: Synthetic oligonucleotide
  misc_feature 1..20: note = Target: SCN10A; (-) strand; PAM type: YTN; PAM sequence: TTT
  source 1..20: mol_type = other DNA
gcccattcagtatgatattg

SEQ ID NO: 55012 - DNA, 20 bp, synthetic construct
  misc_feature 1..20: note = Description of Artificial Sequence: Synthetic oligonucleotide
  misc_feature 1..20: note = Target: SCN10A; (-) strand; PAM type: YTN; PAM sequence: TTT
  source 1..20: mol_type = other DNA
tgcccattcagtatgatatt

SEQ ID NO: 55013 - DNA, 20 bp, synthetic construct
  misc_feature 1..20: note = Description of Artificial Sequence: Synthetic oligonucleotide
  misc_feature 1..20: note = Target: SCN10A; (-) strand; PAM type: YTN; PAM sequence: TTT
  source 1..20: mol_type = other DNA
ttgcccattcagtatgatat

SEQ ID NO: 55014 - DNA, 20 bp, synthetic construct
  misc_feature 1..20: note = Description of Artificial Sequence: Synthetic oligonucleotide
  misc_feature 1..20: note = Target: SCN10A; (-) strand; PAM type: YTN; PAM sequence: TTC
  source 1..20: mol_type = other DNA
cagtttttgcccattcagta

SEQ ID NO: 55015 - DNA, 20 bp, synthetic construct
  misc_feature 1..20: note = Description of Artificial Sequence: Synthetic oligonucleotide
  misc_feature 1..20: note = Target: SCN10A; (-) strand; PAM type: YTN; PAM sequence: CTT
  source 1..20: mol_type = other DNA
ccagtttttgcccattcagt

SEQ ID NO: 55016 - DNA, 20 bp, synthetic construct
  misc_feature 1..20: note = Description of Artificial Sequence: Synthetic oligonucleotide
  misc_feature 1..20: note = Target: SCN10A; (-) strand; PAM type: YTN; PAM sequence: TTC
  source 1..20: mol_type = other DNA
aaaggaaatgcttccagttt

SEQ ID NO: 55017 - DNA, 20 bp, synthetic construct
  misc_feature 1..20: note = Description of Artificial Sequence: Synthetic oligonucleotide
  misc_feature 1..20: note = Target: SCN10A; (-) strand; PAM type: YTN; PAM sequence: TTT
  source 1..20: mol_type = other DNA
caaaggaaatgcttccagtt

SEQ ID NO: 55018 - DNA, 20 bp, synthetic construct
  misc_feature 1..20: note = Description of Artificial Sequence: Synthetic oligonucleotide
  misc_feature 1..20: note = Target: SCN10A; (-) strand; PAM type: YTN; PAM sequence: TTT
  source 1..20: mol_type = other DNA
tcaaaggaaatgcttccagt

SEQ ID NO: 55019 - DNA, 20 bp, synthetic construct
  misc_feature 1..20: note = Description of Artificial Sequence: Synthetic oligonucleotide
  misc_feature 1..20: note = Target: SCN10A; (-) strand; PAM type: YTN; PAM sequence: CTG
  source 1..20: mol_type = other DNA
gttttcaaaggaaatgcttc

SEQ ID NO: 55020 - DNA, 20 bp, synthetic construct
  misc_feature 1..20: note = Description of Artificial Sequence: Synthetic oligonucleotide
  misc_feature 1..20: note = Target: SCN10A; (-) strand; PAM type: YTN; PAM sequence: TTG
  source 1..20: mol_type = other DNA
tgctggttttcaaaggaaat

SEQ ID NO: 55021 - DNA, 20 bp, synthetic construct
  misc_feature 1..20: note = Description of Artificial Sequence: Synthetic oligonucleotide
  misc_feature 1..20: note = Target: SCN10A; (-) strand; PAM type: YTN; PAM sequence: CTT
  source 1..20: mol_type = other DNA
gtgctggttttcaaaggaaa

SEQ ID NO: 55022 - DNA, 20 bp, synthetic construct
  misc_feature 1..20: note = Description of Artificial Sequence: Synthetic oligonucleotide
  misc_feature 1..20: note = Target: SCN10A; (-) strand; PAM type: YTN; PAM sequence: TTG
  source 1..20: mol_type = other DNA
tcttgtgctggttttcaaag

SEQ ID NO: 55023 - DNA, 20 bp, synthetic construct
  misc_feature 1..20: note = Description of Artificial Sequence: Synthetic oligonucleotide
  misc_feature 1..20: note = Target: SCN10A; (-) strand; PAM type: YTN; PAM sequence: CTT
  source 1..20: mol_type = other DNA
gtcttgtgctggttttcaaa

SEQ ID NO: 55024 - DNA, 20 bp, synthetic construct
  misc_feature 1..20: note = Description of Artificial Sequence: Synthetic oligonucleotide
  misc_feature 1..20: note = Target: SCN10A; (-) strand; PAM type: YTN; PAM sequence: TTC
  source 1..20: mol_type = other DNA
ttgtcttgtgctggttttca

SEQ ID NO: 55025 - DNA, 20 bp, synthetic construct
  misc_feature 1..20: note = Description of Artificial Sequence: Synthetic oligonucleotide
  misc_feature 1..20: note = Target: SCN10A; (-) strand; PAM type: YTN; PAM sequence: TTG
  source 1..20: mol_type = other DNA
aataagagtggtgagatagg

SEQ ID NO: 55026 - DNA, 20 bp, synthetic construct
  misc_feature 1..20: note = Description of Artificial Sequence: Synthetic oligonucleotide
  misc_feature 1..20: note = Target: SCN10A; (-) strand; PAM type: YTN; PAM sequence: CTA
  source 1..20: mol_type = other DNA
tgttgaataagagtggtgag

SEQ ID NO: 55027 - DNA, 20 bp, synthetic construct
  misc_feature 1..20: note = Description of Artificial Sequence: Synthetic oligonucleotide
  misc_feature 1..20: note = Target: SCN10A; (-) strand; PAM type: YTN; PAM sequence: TTC
  source 1..20: mol_type = other DNA
caatactatgttgaataaga

SEQ ID NO: 55028 - DNA, 20 bp, synthetic construct
  misc_feature 1..20: note = Description of Artificial Sequence: Synthetic oligonucleotide
  misc_feature 1..20: note = Target: SCN10A; (-) strand; PAM type: YTN; PAM sequence: CTT
  source 1..20: mol_type = other DNA
ccaatactatgttgaataag

SEQ ID NO: 55029 - DNA, 20 bp, synthetic construct
  misc_feature 1..20: note = Description of Artificial Sequence: Synthetic oligonucleotide
  misc_feature 1..20: note = Target: SCN10A; (-) strand; PAM type: YTN; PAM sequence: CTG
  source 1..20: mol_type = other DNA
gccagaacttccaatactat

SEQ ID NO: 55030 - DNA, 20 bp, synthetic construct
  misc_feature 1..20: note = Description of Artificial Sequence: Synthetic oligonucleotide
  misc_feature 1..20: note = Target: SCN10A; (-) strand; PAM type: YTN; PAM sequence: CTG
  source 1..20: mol_type = other DNA
atcgccctggccagaacttc

SEQ ID NO: 55031 - DNA, 20 bp, synthetic construct
  misc_feature 1..20: note = Description of Artificial Sequence: Synthetic oligonucleotide
  misc_feature 1..20: note = Target: SCN10A; (-) strand; PAM type: YTN; PAM sequence: TTG
  source 1..20: mol_type = other DNA
cctgatcgccctggccagaa

SEQ ID NO: 55032 - DNA, 20 bp, synthetic construct
  misc_feature 1..20: note = Description of Artificial Sequence: Synthetic oligonucleotide
  misc_feature 1..20: note = Target: SCN10A; (-) strand; PAM type: YTN; PAM sequence: CTT
  source 1..20: mol_type = other DNA
gcctgatcgccctggccaga

SEQ ID NO: 55033 - DNA, 20 bp, synthetic construct
  misc_feature 1..20: note = Description of Artificial Sequence: Synthetic oligonucleotide
  misc_feature 1..20: note = Target: SCN10A; (-) strand; PAM type: YTN; PAM sequence: CTC
  source 1..20: mol_type = other DNA
ttgcctgatcgccctggcca

SEQ ID NO: 55034 - DNA, 20 bp, synthetic construct
  misc_feature 1..20: note = Description of Artificial Sequence: Synthetic oligonucleotide
  misc_feature 1..20: note = Target: SCN10A; (-) strand; PAM type: YTN; PAM sequence: TTC
  source 1..20: mol_type = other DNA
tcttgcctgatcgccctggc

SEQ ID NO: 55035 - DNA, 20 bp, synthetic construct
  misc_feature 1..20: note = Description of Artificial Sequence: Synthetic oligonucleotide
  misc_feature 1..20: note = Target: SCN10A; (-) strand; PAM type: YTN; PAM sequence: TTT
  source 1..20: mol_type = other DNA
ctcttgcctgatcgccctgg

SEQ ID NO: 55036 - DNA, 20 bp, synthetic construct
  misc_feature 1..20: note = Description of Artificial Sequence: Synthetic oligonucleotide
  misc_feature 1..20: note = Target: SCN10A; (-) strand; PAM type: YTN; PAM sequence: CTT
  source 1..20: mol_type = other DNA
tctcttgcctgatcgccctg

SEQ ID NO: 55037 - DNA, 20 bp, synthetic construct
  misc_feature 1..20: note = Description of Artificial Sequence: Synthetic oligonucleotide
  misc_feature 1..20: note = Target: SCN10A; (-) strand; PAM type: YTN; PAM sequence: TTC
  source 1..20: mol_type = other DNA
tttctcttgcctgatcgccc

SEQ ID NO: 55038 - DNA, 20 bp, synthetic construct
  misc_feature 1..20: note = Description of Artificial Sequence: Synthetic oligonucleotide
  misc_feature 1..20: note = Target: SCN10A; (-) strand; PAM type: YTN; PAM sequence: TTT
  source 1..20: mol_type = other DNA
ctttctcttgcctgatcgcc

SEQ ID NO: 55039 - DNA, 20 bp, synthetic construct
  misc_feature 1..20: note = Description of Artificial Sequence: Synthetic oligonucleotide
  misc_feature 1..20: note = Target: SCN10A; (-) strand; PAM type: YTN; PAM sequence: TTA
  source 1..20: mol_type = other DNA
tttctttctcttgcctgatc

SEQ ID NO: 55040 - DNA, 20 bp, synthetic construct
  misc_feature 1..20: note = Description of Artificial Sequence: Synthetic oligonucleotide
  misc_feature 1..20: note = Target: SCN10A; (-) strand; PAM type: YTN; PAM sequence: CTT
  source 1..20: mol_type = other DNA
atttctttctcttgcctgat

SEQ ID NO: 55041 - DNA, 20 bp, synthetic construct
  misc_feature 1..20: note = Description of Artificial Sequence: Synthetic oligonucleotide
  misc_feature 1..20: note = Target: SCN10A; (-) strand; PAM type: YTN; PAM sequence: TTG
  source 1..20: mol_type = other DNA
aataccccttatttctttct

SEQ ID NO: 55042 - DNA, 20 bp, synthetic construct
  misc_feature 1..20: note = Description of Artificial Sequence: Synthetic oligonucleotide
  misc_feature 1..20: note = Target: SCN10A; (-) strand; PAM type: YTN; PAM sequence: TTT
  source 1..20: mol_type = other DNA
gaataccccttatttctttc

SEQ ID NO: 55043 - DNA, 20 bp, synthetic construct
  misc_feature 1..20: note = Description of Artificial Sequence: Synthetic oligonucleotide
  misc_feature 1..20: note = Target: SCN10A; (-) strand; PAM type: YTN; PAM sequence: CTA
  source 1..20: mol_type = other DNA
tttgaataccccttatttct

SEQ ID NO: 55044 - DNA, 20 bp, synthetic construct
  misc_feature 1..20: note = Description of Artificial Sequence: Synthetic oligonucleotide
  misc_feature 1..20: note = Target: SCN10A; (-) strand; PAM type: YTN; PAM sequence: TTC
  source 1..20: mol_type = other DNA
ctatttgaataccccttatt

SEQ ID NO: 55045 - DNA, 20 bp, synthetic construct
  misc_feature 1..20: note = Description of Artificial Sequence: Synthetic oligonucleotide
  misc_feature 1..20: note = Target: SCN10A; (-) strand; PAM type: YTN; PAM sequence: TTT
  source 1..20: mol_type = other DNA
cctatttgaataccccttat

SEQ ID NO: 55046 - DNA, 20 bp, synthetic construct
  misc_feature 1..20: note = Description of Artificial Sequence: Synthetic oligonucleotide
  misc_feature 1..20: note = Target: SCN10A; (-) strand; PAM type: YTN; PAM sequence: TTT
  source 1..20: mol_type = other DNA
tcctatttgaatacccctta

SEQ ID NO: 55047 - DNA, 20 bp, synthetic construct
  misc_feature 1..20: note = Description of Artificial Sequence: Synthetic oligonucleotide
  misc_feature 1..20: note = Target: SCN10A; (-) strand; PAM type: YTN; PAM sequence: CTT
  source 1..20: mol_type = other DNA
ttcctatttgaatacccctt

SEQ ID NO: 55048 - DNA, 20 bp, synthetic construct
  misc_feature 1..20: note = Description of Artificial Sequence: Synthetic oligonucleotide
  misc_feature 1..20: note = Target: SCN10A; (-) strand; PAM type: YTN; PAM sequence: CTC
  source 1..20: mol_type = other DNA
ttttcctatttgaatacccc

SEQ ID NO: 55049 - DNA, 20 bp, synthetic construct
  misc_feature 1..20: note = Description of Artificial Sequence: Synthetic oligonucleotide
  misc_feature 1..20: note = Target: SCN10A; (-) strand; PAM type: YTN; PAM sequence: TTC
  source 1..20: mol_type = other DNA
ctcttttcctatttgaatac

SEQ ID NO: 55050 - DNA, 20 bp, synthetic construct
  misc_feature 1..20: note = Description of Artificial Sequence: Synthetic oligonucleotide
  misc_feature 1..20: note = Target: SCN10A; (-) strand; PAM type: YTN; PAM sequence: CTT
  source 1..20: mol_type = other DNA
cctcttttcctatttgaata

SEQ ID NO: 55051 - DNA, 20 bp, synthetic construct
  misc_feature 1..20: note = Description of Artificial Sequence: Synthetic oligonucleotide
  misc_feature 1..20: note = Target: SCN10A; (-) strand; PAM type: YTN; PAM sequence: TTG
  source 1..20: mol_type = other DNA
acttcctcttttcctatttg

SEQ ID NO: 55052 - DNA, 20 bp, synthetic construct
  misc_feature 1..20: note = Description of Artificial Sequence: Synthetic oligonucleotide
  misc_feature 1..20: note = Target: SCN10A; (-) strand; PAM type: YTN; PAM sequence: TTT
  source 1..20: mol_type = other DNA
gacttcctcttttcctattt

SEQ ID NO: 55053 - DNA, 20 bp, synthetic construct
  misc_feature 1..20: note = Description of Artificial Sequence: Synthetic oligonucleotide
  misc_feature 1..20: note = Target: SCN10A; (-) strand; PAM type: YTN; PAM sequence: CTG
  source 1..20: mol_type = other DNA
caaacagagacaatttgact

SEQ ID NO: 55054 - DNA, 20 bp, synthetic construct
  misc_feature 1..20: note = Description of Artificial Sequence: Synthetic oligonucleotide
  misc_feature 1..20: note = Target: SCN10A; (-) strand; PAM type: YTN; PAM sequence: CTA
  source 1..20: mol_type = other DNA
aatatacagtcatgtcatct

SEQ ID NO: 55055 - DNA, 20 bp, synthetic construct
  misc_feature 1..20: note = Description of Artificial Sequence: Synthetic oligonucleotide
  misc_feature 1..20: note = Target: SCN10A; (-) strand; PAM type: YTN; PAM sequence: TTC
  source 1..20: mol_type = other DNA
taaatatacagtcatgtcat

SEQ ID NO: 55056 - DNA, 20 bp, synthetic construct
  misc_feature 1..20: note = Description of Artificial Sequence: Synthetic oligonucleotide
  misc_feature 1..20: note = Target: SCN10A; (-) strand; PAM type: YTN; PAM sequence: TTT
  source 1..20: mol_type = other DNA
ctaaatatacagtcatgtca

SEQ ID NO: 55057 - DNA, 20 bp, synthetic construct
  misc_feature 1..20: note = Description of Artificial Sequence: Synthetic oligonucleotide
  misc_feature 1..20: note = Target: SCN10A; (-) strand; PAM type: YTN; PAM sequence: TTT
  source 1..20: mol_type = other DNA
tctaaatatacagtcatgtc

SEQ ID NO: 55058 - DNA, 20 bp, synthetic construct
  misc_feature 1..20: note = Description of Artificial Sequence: Synthetic oligonucleotide
  misc_feature 1..20: note = Target: SCN10A; (-) strand; PAM type: YTN; PAM sequence: CTG
  source 1..20: mol_type = other DNA
agatgatggggttttctaaa

SEQ ID NO: 55059 - DNA, 20 bp, synthetic construct
  misc_feature 1..20: note = Description of Artificial Sequence: Synthetic oligonucleotide
  misc_feature 1..20: note = Target: SCN10A; (-) strand; PAM type: YTN; PAM sequence: TTG
  source 1..20: mol_type = other DNA
ggctgagatgatggggtttt

SEQ ID NO: 55060 - DNA, 20 bp, synthetic construct
  misc_feature 1..20: note = Description of Artificial Sequence: Synthetic oligonucleotide
  misc_feature 1..20: note = Target: SCN10A; (-) strand; PAM type: YTN; PAM sequence: TTT
  source 1..20: mol_type = other DNA
gggctgagatgatggggttt

SEQ ID NO: 55061 - DNA, 20 bp, synthetic construct
  misc_feature 1..20: note = Description of Artificial Sequence: Synthetic oligonucleotide
  misc_feature 1..20: note = Target: SCN10A; (-) strand; PAM type: YTN; PAM sequence: TTT
  source 1..20: mol_type = other DNA
tgggctgagatgatggggtt

SEQ ID NO: 55062 - DNA, 20 bp, synthetic construct
  misc_feature 1..20: note = Description of Artificial Sequence: Synthetic oligonucleotide
  misc_feature 1..20: note = Target: SCN10A; (-) strand; PAM type: YTN; PAM sequence: TTA
  source 1..20: mol_type = other DNA
aggagattttgggctgagat

SEQ ID NO: 55063 - DNA, 20 bp, synthetic construct
  misc_feature 1..20: note = Description of Artificial Sequence: Synthetic oligonucleotide
  misc_feature 1..20: note = Target: SCN10A; (-) strand; PAM type: YTN; PAM sequence: CTT
  source 1..20: mol_type = other DNA
aaggagattttgggctgaga

SEQ ID NO: 55064 - DNA, 20 bp, synthetic construct
  misc_feature 1..20: note = Description of Artificial Sequence: Synthetic oligonucleotide
  misc_feature 1..20: note = Target: SCN10A; (-) strand; PAM type: YTN; PAM sequence: TTA
  source 1..20: mol_type = other DNA
tcagcttaaggagattttgg

SEQ ID NO: 55065 - DNA, 20 bp, synthetic construct
  misc_feature 1..20: note = Description of Artificial Sequence: Synthetic oligonucleotide
  misc_feature 1..20: note = Target: SCN10A; (-) strand; PAM type: YTN; PAM sequence: CTT
  source 1..20: mol_type = other DNA
atcagcttaaggagattttg

SEQ ID NO: 55066 - DNA, 20 bp, synthetic construct
  misc_feature 1..20: note = Description of Artificial Sequence: Synthetic oligonucleotide
  misc_feature 1..20: note = Target: SCN10A; (-) strand; PAM type: YTN; PAM sequence: TTG
  source 1..20: mol_type = other DNA
cttatcagcttaaggagatt

SEQ ID NO: 55067 - DNA, 20 bp, synthetic construct
  misc_feature 1..20: note = Description of Artificial Sequence: Synthetic oligonucleotide
  misc_feature 1..20: note = Target: SCN10A; (-) strand; PAM type: YTN; PAM sequence: CTG
  source 1..20: mol_type = other DNA
aagttgcttatcagcttaag

SEQ ID NO: 55068 - DNA, 20 bp, synthetic construct
  misc_feature 1..20: note = Description of Artificial Sequence: Synthetic oligonucleotide
  misc_feature 1..20: note = Target: SCN10A; (-) strand; PAM type: YTN; PAM sequence: TTG
  source 1..20: mol_type = other DNA
ctgaagttgcttatcagctt

SEQ ID NO: 55069 - DNA, 20 bp, synthetic construct
  misc_feature 1..20: note = Description of Artificial Sequence: Synthetic oligonucleotide
  misc_feature 1..20: note = Target: SCN10A; (-) strand; PAM type: YTN; PAM sequence: TTT
  source 1..20: mol_type = other DNA
gctgaagttgcttatcagct

SEQ ID NO: 55070 - DNA, 20 bp, synthetic construct
  misc_feature 1..20: note = Description of Artificial Sequence: Synthetic oligonucleotide
  misc_feature 1..20: note = Target: SCN10A; (-) strand; PAM type: YTN; PAM sequence: CTT
  source 1..20: mol_type = other DNA
tgctgaagttgcttatcagc

SEQ ID NO: 55071 - DNA, 20 bp, synthetic construct
  misc_feature 1..20: note = Description of Artificial Sequence: Synthetic oligonucleotide
  misc_feature 1..20: note = Target: SCN10A; (-) strand; PAM type: YTN; PAM sequence: CTG
  source 1..20: mol_type = other DNA
agactttgctgaagttgctt

SEQ ID NO: 55072 - DNA, 20 bp, synthetic construct
  misc_feature 1..20: note = Description of Artificial Sequence: Synthetic oligonucleotide
  misc_feature 1..20: note = Target: SCN10A; (-) strand; PAM type: YTN; PAM sequence: TTG
  source 1..20: mol_type = other DNA
tatcctgagactttgctgaa

SEQ ID NO: 55073 - DNA, 20 bp, synthetic construct
  misc_feature 1..20: note = Description of Artificial Sequence: Synthetic oligonucleotide
  misc_feature 1..20: note = Target: SCN10A; (-) strand; PAM type: YTN; PAM sequence: TTT
  source 1..20: mol_type = other DNA
gtatcctgagactttgctga

SEQ ID NO: 55074 - DNA, 20 bp, synthetic construct
  misc_feature 1..20: note = Description of Artificial Sequence: Synthetic oligonucleotide
  misc_feature 1..20: note = Target: SCN10A; (-) strand; PAM type: YTN; PAM sequence: TTT
  source 1..20: mol_type = other DNA
tgtatcctgagactttgctg

SEQ ID NO: 55075 - DNA, 20 bp, synthetic construct
  misc_feature 1..20: note = Description of Artificial Sequence: Synthetic oligonucleotide
  misc_feature 1..20: note = Target: SCN10A; (-) strand; PAM type: YTN; PAM sequence: TTG
  source 1..20: mol_type = other DNA
attttgtatcctgagacttt

SEQ ID NO: 55076 - DNA, 20 bp, synthetic construct
  misc_feature 1..20: note = Description of Artificial Sequence: Synthetic oligonucleotide
  misc_feature 1..20: note = Target: SCN10A; (-) strand; PAM type: YTN; PAM sequence: TTG
  source 1..20: mol_type = other DNA
cacattgattttgtatcctg

SEQ ID NO: 55077 - DNA, 20 bp, synthetic construct
  misc_feature 1..20: note = Description of Artificial Sequence: Synthetic oligonucleotide
  misc_feature 1..20: note = Target: SCN10A; (-) strand; PAM type: YTN; PAM sequence: TTT
  source 1..20: mol_type = other DNA
gcacattgattttgtatcct

SEQ ID NO: 55078 - DNA, 20 bp, synthetic construct
  misc_feature 1..20: note = Description of Artificial Sequence: Synthetic oligonucleotide
  misc_feature 1..20: note = Target: SCN10A; (-) strand; PAM type: YTN; PAM sequence: TTT
  source 1..20: mol_type = other DNA
tgcacattgattttgtatcc

SEQ ID NO: 55079 - DNA, 20 bp, synthetic construct
  misc_feature 1..20: note = Description of Artificial Sequence: Synthetic oligonucleotide
  misc_feature 1..20: note = Target: SCN10A; (-) strand; PAM type: YTN; PAM sequence: TTT
  source 1..20: mol_type = other DNA
ttgcacattgattttgtatc

SEQ ID NO: 55080 - DNA, 20 bp, synthetic construct
  misc_feature 1..20: note = Description of Artificial Sequence: Synthetic oligonucleotide
  misc_feature 1..20: note = Target: SCN10A; (-) strand; PAM type: YTN; PAM sequence: TTG
  source 1..20: mol_type = other DNA
tgatttttgcacattgattt

SEQ ID NO: 55081 - DNA, 20 bp, synthetic construct
  misc_feature 1..20: note = Description of Artificial Sequence: Synthetic oligonucleotide
  misc_feature 1..20: note = Target: SCN10A; (-) strand; PAM type: YTN; PAM sequence: CTT
  source 1..20: mol_type = other DNA
gtgatttttgcacattgatt

SEQ ID NO: 55082 - DNA, 20 bp, synthetic construct
  misc_feature 1..20: note = Description of Artificial Sequence: Synthetic oligonucleotide
  misc_feature 1..20: note = Target: SCN10A; (-) strand; PAM type: YTN; PAM sequence: TTG
  source 1..20: mol_type = other DNA
gtgtatgggaatgcttgtga

SEQ ID NO: 55083 - DNA, 20 bp, synthetic construct
  misc_feature 1..20: note = Description of Artificial Sequence: Synthetic oligonucleotide
  misc_feature 1..20: note = Target: SCN10A; (-) strand; PAM type: YTN; PAM sequence: TTA
  source 1..20: mol_type = other DNA
ttggtgtatgggaatgcttg

SEQ ID NO: 55084 - DNA, 20 bp, synthetic construct
  misc_feature 1..20: note = Description of Artificial Sequence: Synthetic oligonucleotide
  misc_feature 1..20: note = Target: SCN10A; (-) strand; PAM type: YTN; PAM sequence: CTG
  source 1..20: mol_type = other DNA
ttattggtgtatgggaatgc

SEQ ID NO: 55085 - DNA, 20 bp, synthetic construct
  misc_feature 1..20: note = Description of Artificial Sequence: Synthetic oligonucleotide
  misc_feature 1..20: note = Target: SCN10A; (-) strand; PAM type: YTN; PAM sequence: TTG
  source 1..20: mol_type = other DNA
tctgttattggtgtatggga

SEQ ID NO: 55086 - DNA, 20 bp, synthetic construct
  misc_feature 1..20: note = Description of Artificial Sequence: Synthetic oligonucleotide
  misc_feature 1..20: note = Target: SCN10A; (-) strand; PAM type: YTN; PAM sequence: TTT
  source 1..20: mol_type = other DNA
gtctgttattggtgtatggg

SEQ ID NO: 55087 - DNA, 20 bp, synthetic construct
  misc_feature 1..20: note = Description of Artificial Sequence: Synthetic oligonucleotide
  misc_feature 1..20: note = Target: SCN10A; (-) strand; PAM type: YTN; PAM sequence: CTC
  source 1..20: mol_type = other DNA
ggtttgtctgttattggtgt

SEQ ID NO: 55088 - DNA, 20 bp, synthetic construct
  misc_feature 1..20: note = Description of Artificial Sequence: Synthetic oligonucleotide
  misc_feature 1..20: note = Target: SCN10A; (-) strand; PAM type: YTN; PAM sequence: CTC
  source 1..20: mol_type = other DNA
tcggtttgtctgttattggt

SEQ ID NO: 55089 - DNA, 20 bp, synthetic construct
  misc_feature 1..20: note = Description of Artificial Sequence: Synthetic oligonucleotide
  misc_feature 1..20: note = Target: SCN10A; (-) strand; PAM type: YTN; PAM sequence: TTG
  source 1..20: mol_type = other DNA
gctctcggtttgtctgttat

SEQ ID NO: 55090 - DNA, 20 bp, synthetic construct
  misc_feature 1..20: note = Description of Artificial Sequence: Synthetic oligonucleotide
  misc_feature 1..20: note = Target: SCN10A; (-) strand; PAM type: YTN; PAM sequence: TTT
  source 1..20: mol_type = other DNA
ggctctcggtttgtctgtta

SEQ ID NO: 55091 - DNA, 20 bp, synthetic construct
  misc_feature 1..20: note = Description of Artificial Sequence: Synthetic oligonucleotide
  misc_feature 1..20: note = Target: SCN10A; (-) strand; PAM type: YTN; PAM sequence: CTC
  source 1..20: mol_type = other DNA
atgatttggctctcggtttg

SEQ ID NO: 55092 - DNA, 20 bp, synthetic construct
  misc_feature 1..20: note = Description of Artificial Sequence: Synthetic oligonucleotide
  misc_feature 1..20: note = Target: SCN10A; (-) strand; PAM type: YTN; PAM sequence: TTC
  source 1..20: mol_type = other DNA
actcatgatttggctctcgg

SEQ ID NO: 55093 - DNA, 20 bp, synthetic construct
  misc_feature 1..20: note = Description of Artificial Sequence: Synthetic oligonucleotide
  misc_feature 1..20: note = Target: SCN10A; (-) strand; PAM type: YTN; PAM sequence: TTG
  source 1..20: mol_type = other DNA
tgaatgggagttcactcatg

SEQ ID NO: 55094 - DNA, 20 bp, synthetic construct
  misc_feature 1..20: note = Description of Artificial Sequence: Synthetic oligonucleotide
  misc_feature 1..20: note = Target: SCN10A; (-) strand; PAM type: YTN; PAM sequence: TTG
  source 1..20: mol_type = other DNA
caattgtgaatgggagttca

SEQ ID NO: 55095 - DNA, 20 bp, synthetic construct
  misc_feature 1..20: note = Description of Artificial Sequence: Synthetic oligonucleotide
  misc_feature 1..20: note = Target: SCN10A; (-) strand; PAM type: YTN; PAM sequence: TTG
  source 1..20: mol_type = other DNA
ttgcaattgtgaatgggagt

SEQ ID NO: 55096 - DNA, 20 bp, synthetic construct
  misc_feature 1..20: note = Description of Artificial Sequence: Synthetic oligonucleotide
  misc_feature 1..20: note = Target: SCN10A; (-) strand; PAM type: YTN; PAM sequence: TTT
  source 1..20: mol_type = other DNA
gttgcaattgtgaatgggag

SEQ ID NO: 55097 - DNA, 20 bp, synthetic construct
  misc_feature 1..20: note = Description of Artificial Sequence: Synthetic oligonucleotide
  misc_feature 1..20: note = Target: SCN10A; (-) strand; PAM type: YTN; PAM sequence: CTT
  source 1..20: mol_type = other DNA
tgttgcaattgtgaatggga

SEQ ID NO: 55098 - DNA, 20 bp, synthetic construct
  misc_feature 1..20: note = Description of Artificial Sequence: Synthetic oligonucleotide
  misc_feature 1..20: note = Target: SCN10A; (-) strand; PAM type: YTN; PAM sequence: CTC
  source 1..20: mol_type = other DNA
tttgttgcaattgtgaatgg

SEQ ID NO: 55099 - DNA, 20 bp, synthetic construct
  misc_feature 1..20: note = Description of Artificial Sequence: Synthetic oligonucleotide
  misc_feature 1..20: note = Target: SCN10A; (-) strand; PAM type: YTN; PAM sequence: TTC
  source 1..20: mol_type = other DNA
tctttgttgcaattgtgaat

SEQ ID NO: 55100 - DNA, 20 bp, synthetic construct
  misc_feature 1..20: note = Description of Artificial Sequence: Synthetic oligonucleotide
  misc_feature 1..20: note = Target: SCN10A; (-) strand; PAM type: YTN; PAM sequence: TTA
  source 1..20: mol_type = other DNA
ttctctttgttgcaattgtg

SEQ ID NO: 55101 - DNA, 20 bp, synthetic construct
  misc_feature 1..20: note = Description of Artificial Sequence: Synthetic oligonucleotide
  misc_feature 1..20: note = Target: SCN10A; (-) strand; PAM type: YTN; PAM sequence: TTT
  source 1..20: mol_type = other DNA
attctctttgttgcaattgt

SEQ ID NO: 55102 - DNA, 20 bp, synthetic construct
  misc_feature 1..20: note = Description of Artificial Sequence: Synthetic oligonucleotide
  misc_feature 1..20: note = Target: SCN10A; (-) strand; PAM type: YTN; PAM sequence: TTT
  source 1..20: mol_type = other DNA
tattctctttgttgcaattg

SEQ ID NO: 55103 - DNA, 20 bp, synthetic construct
  misc_feature 1..20: note = Description of Artificial Sequence: Synthetic oligonucleotide
  misc_feature 1..20: note = Target: SCN10A; (-) strand; PAM type: YTN; PAM sequence: CTA
  source 1..20: mol_type = other DNA
gatattttattctctttgtt

SEQ ID NO: 55104 - DNA, 20 bp, synthetic construct
  misc_feature 1..20: note = Description of Artificial Sequence: Synthetic oligonucleotide
  misc_feature 1..20: note = Target: SCN10A; (-) strand; PAM type: YTN; PAM sequence: TTC
  source 1..20: mol_type = other DNA
tagatattttattctctttg

SEQ ID NO: 55105 - DNA, 20 bp, synthetic construct
  misc_feature 1..20: note = Description of Artificial Sequence: Synthetic oligonucleotide
  misc_feature 1..20: note = Target: SCN10A; (-) strand; PAM type: YTN; PAM sequence: TTT
  source 1..20: mol_type = other DNA
ctagatattttattctcttt

SEQ ID NO: 55106 - DNA, 20 bp, synthetic construct
  misc_feature 1..20: note = Description of Artificial Sequence: Synthetic oligonucleotide
  misc_feature 1..20: note = Target: SCN10A; (-) strand; PAM type: YTN; PAM sequence: TTG
  source 1..20: mol_type = other DNA
tatttctagatattttattc

SEQ ID NO: 55107 - DNA, 20 bp, synthetic construct
  misc_feature 1..20: note = Description of Artificial Sequence: Synthetic oligonucleotide
  misc_feature 1..20: note = Target: SCN10A; (-) strand; PAM type: YTN; PAM sequence: TTG
  source 1..20: mol_type = other DNA
taagttgtatttctagatat

SEQ ID NO: 55108 - DNA, 20 bp, synthetic construct
  misc_feature 1..20: note = Description of Artificial Sequence: Synthetic oligonucleotide
  misc_feature 1..20: note = Target: SCN10A; (-) strand; PAM type: YTN; PAM sequence: CTT
  source 1..20: mol_type = other DNA
gtaagttgtatttctagata

SEQ ID NO: 55109 - DNA, 20 bp, synthetic construct
  misc_feature 1..20: note = Description of Artificial Sequence: Synthetic oligonucleotide
  misc_feature 1..20: note = Target: SCN10A; (-) strand; PAM type: YTN; PAM sequence: TTC
  source 1..20: mol_type = other DNA
acatcccttgtaagttgtat

SEQ ID NO: 55110 - DNA, 20 bp, synthetic construct
  misc_feature 1..20: note = Description of Artificial Sequence: Synthetic oligonucleotide
  misc_feature 1..20: note = Target: SCN10A; (-) strand; PAM type: YTN; PAM sequence: CTT
  source 1..20: mol_type = other DNA
cacatcccttgtaagttgta

SEQ ID NO: 55111 - DNA, 20 bp, synthetic construct
  misc_feature 1..20: note = Description of Artificial Sequence: Synthetic oligonucleotide
  misc_feature 1..20: note = Target: SCN10A; (-) strand; PAM type: YTN; PAM sequence: TTG
  source 1..20: mol_type = other DNA
aagaggtccttcacatccct

SEQ ID NO: 55112 - DNA, 20 bp, synthetic construct
  misc_feature 1..20: note = Description of Artificial Sequence: Synthetic oligonucleotide
  misc_feature 1..20: note = Target: SCN10A; (-) strand; PAM type: YTN; PAM sequence: CTT
  source 1..20: mol_type = other DNA
gaagaggtccttcacatccc

SEQ ID NO: 55113 - DNA, 20 bp, synthetic construct
  misc_feature 1..20: note = Description of Artificial Sequence: Synthetic oligonucleotide
  misc_feature 1..20: note = Target: SCN10A; (-) strand; PAM type: YTN; PAM sequence: CTC
  source 1..20: mol_type = other DNA
cttgaagaggtccttcacat

SEQ ID NO: 55114 - DNA, 20 bp, synthetic construct
  misc_feature 1..20: note = Description of Artificial Sequence: Synthetic oligonucleotide
  misc_feature 1..20: note = Target: SCN10A; (-) strand; PAM type: YTN; PAM sequence: TTC
  source 1..20: mol_type = other DNA
tccttgaagaggtccttcac

SEQ ID NO: 55115 - DNA, 20 bp, synthetic construct
  misc_feature 1..20: note = Description of Artificial Sequence: Synthetic oligonucleotide
  misc_feature 1..20: note = Target: SCN10A; (-) strand; PAM type: YTN; PAM sequence: TTA
  source 1..20: mol_type = other DNA
gttctccttgaagaggtcct

SEQ ID NO: 55116 - DNA, 20 bp, synthetic construct
  misc_feature 1..20: note = Description of Artificial Sequence: Synthetic oligonucleotide
  misc_feature 1..20: note = Target: SCN10A; (-) strand; PAM type: YTN; PAM sequence: TTT
  source 1..20: mol_type = other DNA
agttctccttgaagaggtcc

SEQ ID NO: 55117 - DNA, 20 bp, synthetic construct
  misc_feature 1..20: note = Description of Artificial Sequence: Synthetic oligonucleotide
  misc_feature 1..20: note = Target: SCN10A; (-) strand; PAM type: YTN; PAM sequence: TTT
  source 1..20: mol_type = other DNA
tagttctccttgaagaggtc

SEQ ID NO: 55118 - DNA, 20 bp, synthetic construct
  misc_feature 1..20: note = Description of Artificial Sequence: Synthetic oligonucleotide
  misc_feature 1..20: note = Target: SCN10A; (-) strand; PAM type: YTN; PAM sequence: TTT
  source 1..20: mol_type = other DNA
ttagttctccttgaagaggt

SEQ ID NO: 55119 - DNA, 20 bp, synthetic construct
  misc_feature 1..20: note = Description of Artificial Sequence: Synthetic oligonucleotide
  misc_feature 1..20: note = Target: SCN10A; (-) strand; PAM type: YTN; PAM sequence: TTG
  source 1..20: mol_type = other DNA
agcagtgatttttagttctc

SEQ ID NO: 55120 - DNA, 20 bp, synthetic construct
  misc_feature 1..20: note = Description of Artificial Sequence: Synthetic oligonucleotide
  misc_feature 1..20: note = Target: SCN10A; (-) strand; PAM type: YTN; PAM sequence: CTT
  source 1..20: mol_type = other DNA
gagcagtgatttttagttct

SEQ ID NO: 55121 - DNA, 20 bp, synthetic construct
  misc_feature 1..20: note = Description of Artificial Sequence: Synthetic oligonucleotide
  misc_feature 1..20: note = Target: SCN10A; (-) strand; PAM type: YTN; PAM sequence: TTC
  source 1..20: mol_type = other DNA
cttgagcagtgatttttagt

SEQ ID NO: 55122 - DNA, 20 bp, synthetic construct
  misc_feature 1..20: note = Description of Artificial Sequence: Synthetic oligonucleotide
  misc_feature 1..20: note = Target: SCN10A; (-) strand; PAM type: YTN; PAM sequence: TTT
  source 1..20: mol_type = other DNA
ccttgagcagtgatttttag

SEQ ID NO: 55123 - DNA, 20 bp, synthetic construct
  misc_feature 1..20: note = Description of Artificial Sequence: Synthetic oligonucleotide
  misc_feature 1..20: note = Target: SCN10A; (-) strand; PAM type: YTN; PAM sequence: TTA
  source 1..20: mol_type = other DNA
tttccttgagcagtgatttt

SEQ ID NO: 55124 - DNA, 20 bp, synthetic construct
  misc_feature 1..20: note = Description of Artificial Sequence: Synthetic oligonucleotide
  misc_feature 1..20: note = Target: SCN10A; (-) strand; PAM type: YTN; PAM sequence: CTT
  source 1..20: mol_type = other DNA
atttccttgagcagtgattt

SEQ ID NO: 55125 - DNA, 20 bp, synthetic construct
  misc_feature 1..20: note = Description of Artificial Sequence: Synthetic oligonucleotide
  misc_feature 1..20: note = Target: SCN10A; (-) strand; PAM type: YTN; PAM sequence: CTC
  source 1..20: mol_type = other DNA
ttatttccttgagcagtgat

SEQ ID NO: 55126 - DNA, 20 bp, synthetic construct
  misc_feature 1..20: note = Description of Artificial Sequence: Synthetic oligonucleotide
  misc_feature 1..20: note = Target: SCN10A; (-) strand; PAM type: YTN; PAM sequence: CTC
  source 1..20: mol_type = other DNA
tcttatttccttgagcagtg

SEQ ID NO: 55127 - DNA, 20 bp, synthetic construct
  misc_feature 1..20: note = Description of Artificial Sequence: Synthetic oligonucleotide
  misc_feature 1..20: note = Target: SCN10A; (-) strand; PAM type: YTN; PAM sequence: TTG
  source 1..20: mol_type = other DNA
tgtcctctcttatttccttg

SEQ ID NO: 55128 - DNA, 20 bp, synthetic construct
  misc_feature 1..20: note = Description of Artificial Sequence: Synthetic oligonucleotide
  misc_feature 1..20: note = Target: SCN10A; (-) strand; PAM type: YTN; PAM sequence: TTT
  source 1..20: mol_type = other DNA
gtgtcctctcttatttcctt

SEQ ID NO: 55129 - DNA, 20 bp, synthetic construct
  misc_feature 1..20: note = Description of Artificial Sequence: Synthetic oligonucleotide
  misc_feature 1..20: note = Target: SCN10A; (-) strand; PAM type: YTN; PAM sequence: TTA
  source 1..20: mol_type = other DNA
tttgtgtcctctcttatttc

SEQ ID NO: 55130 - DNA, 20 bp, synthetic construct
  misc_feature 1..20: note = Description of Artificial Sequence: Synthetic oligonucleotide
  misc_feature 1..20: note = Target: SCN10A; (-) strand; PAM type: YTN; PAM sequence: TTT
  source 1..20: mol_type = other DNA
atttgtgtcctctcttattt

SEQ ID NO: 55131 - DNA, 20 bp, synthetic construct
  misc_feature 1..20: note = Description of Artificial Sequence: Synthetic oligonucleotide
  misc_feature 1..20: note = Target: SCN10A; (-) strand; PAM type: YTN; PAM sequence: TTC
  source 1..20: mol_type = other DNA
catttatttgtgtcctctct

SEQ ID NO: 55132 - DNA, 20 bp, synthetic construct
  misc_feature 1..20: note = Description of Artificial Sequence: Synthetic oligonucleotide
  misc_feature 1..20: note = Target: SCN10A; (-) strand; PAM type: YTN; PAM sequence: TTT
  source 1..20: mol_type = other DNA
ccatttatttgtgtcctctc

SEQ ID NO: 55133 - DNA, 20 bp, synthetic construct
  misc_feature 1..20: note = Description of Artificial Sequence: Synthetic oligonucleotide
  misc_feature 1..20: note = Target: SCN10A; (-) strand; PAM type: YTN; PAM sequence: TTT
  source 1..20: mol_type = other DNA
tccatttatttgtgtcctct

SEQ ID NO: 55134 - DNA, 20 bp, synthetic construct
  misc_feature 1..20: note = Description of Artificial Sequence: Synthetic oligonucleotide
  misc_feature 1..20: note = Target: SCN10A; (-) strand; PAM type: YTN; PAM sequence: TTT
  source 1..20: mol_type = other DNA
ttccatttatttgtgtcctc

SEQ ID NO: 55135 - DNA, 20 bp, synthetic construct
  misc_feature 1..20: note = Description of Artificial Sequence: Synthetic oligonucleotide
  misc_feature 1..20: note = Target: SCN10A; (-) strand; PAM type: YTN; PAM sequence: CTA
  source 1..20: mol_type = other DNA
tccatgagcatggaatgttt

SEQ ID NO: 55136 - DNA, 20 bp, synthetic construct
  misc_feature 1..20: note = Description of Artificial Sequence: Synthetic oligonucleotide
  misc_feature 1..20: note = Target: SCN10A; (-) strand; PAM type: YTN; PAM sequence: TTC
  source 1..20: mol_type = other DNA
ctatccatgagcatggaatg

SEQ ID NO: 55137 - DNA, 20 bp, synthetic construct
  misc_feature 1..20: note = Description of Artificial Sequence: Synthetic oligonucleotide
  misc_feature 1..20: note = Target: SCN10A; (-) strand; PAM type: YTN; PAM sequence: TTT
  source 1..20: mol_type = other DNA
cctatccatgagcatggaat

SEQ ID NO: 55138 - DNA, 20 bp, synthetic construct
  misc_feature 1..20: note = Description of Artificial Sequence: Synthetic oligonucleotide
  misc_feature 1..20: note = Target: SCN10A; (-) strand; PAM type: YTN; PAM sequence: TTT
  source 1..20: mol_type = other DNA
tcctatccatgagcatggaa

SEQ ID NO: 55139 - DNA, 20 bp, synthetic construct
  misc_feature 1..20: note = Description of Artificial Sequence: Synthetic oligonucleotide
  misc_feature 1..20: note = Target: SCN10A; (-) strand; PAM type: YTN; PAM sequence: TTT
  source 1..20: mol_type = other DNA
ttcctatccatgagcatgga

SEQ ID NO: 55140 - DNA, 20 bp, synthetic construct
  misc_feature 1..20: note = Description of Artificial Sequence: Synthetic oligonucleotide
  misc_feature 1..20: note = Target: SCN10A; (-) strand; PAM type: YTN; PAM sequence: TTG
  source 1..20: mol_type = other DNA
atttttcctatccatgagca

SEQ ID NO: 55141 - DNA, 20 bp, synthetic construct
  misc_feature 1..20: note = Description of Artificial Sequence: Synthetic oligonucleotide
  misc_feature 1..20: note = Target: SCN10A; (-) strand; PAM type: YTN; PAM sequence: TTC
  source 1..20: mol_type = other DNA
acaatattgatttttcctat

SEQ ID NO: 55142 - DNA, 20 bp, synthetic construct
  misc_feature 1..20: note = Description of Artificial Sequence: Synthetic oligonucleotide
  misc_feature 1..20: note = Target: SCN10A; (-) strand; PAM type: YTN; PAM sequence: TTT
  source 1..20: mol_type = other DNA
cacaatattgatttttccta

SEQ ID NO: 55143 - DNA, 20 bp, synthetic construct
  misc_feature 1..20: note = Description of Artificial Sequence: Synthetic oligonucleotide
  misc_feature 1..20: note = Target: SCN10A; (-) strand; PAM type: YTN; PAM sequence: TTT
  source 1..20: mol_type = other DNA
tcacaatattgatttttcct

SEQ ID NO: 55144 - DNA, 20 bp, synthetic construct
  misc_feature 1..20: note = Description of Artificial Sequence: Synthetic oligonucleotide
  misc_feature 1..20: note = Target: SCN10A; (-) strand; PAM type: YTN; PAM sequence: TTG
  source 1..20: mol_type = other DNA
ggcagtatggccattttcac

SEQ ID NO: 55145 - DNA, 20 bp, synthetic construct
  misc_feature 1..20: note = Description of Artificial Sequence: Synthetic oligonucleotide
  misc_feature 1..20: note = Target: SCN10A; (-) strand; PAM type: YTN; PAM sequence: TTT
  source 1..20: mol_type = other DNA
gggcagtatggccattttca

SEQ ID NO: 55146 - DNA, 20 bp, synthetic construct
  misc_feature 1..20: note = Description of Artificial Sequence: Synthetic oligonucleotide
  misc_feature 1..20: note = Target: SCN10A; (-) strand; PAM type: YTN; PAM sequence: CTT
  source 1..20: mol_type = other DNA
tgggcagtatggccattttc

SEQ ID NO: 55147 - DNA, 20 bp, synthetic construct
  misc_feature 1..20: note = Description of Artificial Sequence: Synthetic oligonucleotide
  misc_feature 1..20: note = Target: SCN10A; (-) strand; PAM type: YTN; PAM sequence: TTA
  source 1..20: mol_type = other DNA
ctttgggcagtatggccatt

SEQ ID NO: 55148 - DNA, 20 bp, synthetic construct
  misc_feature 1..20: note = Description of Artificial Sequence: Synthetic oligonucleotide
  misc_feature 1..20: note = Target: SCN10A; (-) strand; PAM type: YTN; PAM sequence: CTA
  source 1..20: mol_type = other DNA
taaattactttgggcagtat

SEQ ID NO: 55149 - DNA, 20 bp, synthetic construct
  misc_feature 1..20: note = Description of Artificial Sequence: Synthetic oligonucleotide
  misc_feature 1..20: note = Target: SCN10A; (-) strand; PAM type: YTN; PAM sequence: TTG
  source 1..20: mol_type = other DNA
aatctataaattactttggg

SEQ ID NO: 55150 - DNA, 20 bp, synthetic construct
  misc_feature 1..20: note = Description of Artificial Sequence: Synthetic oligonucleotide
  misc_feature 1..20: note = Target: SCN10A; (-) strand; PAM type: YTN; PAM sequence: TTG
  source 1..20: mol_type = other DNA
atggggataacattgaatct

SEQ ID NO: 55151 - DNA, 20 bp, synthetic construct
  misc_feature 1..20: note = Description of Artificial Sequence: Synthetic oligonucleotide
  misc_feature 1..20: note = Target: SCN10A; (-) strand; PAM type: YTN; PAM sequence: CTT
  source 1..20: mol_type = other DNA
gatggggataacattgaatc

SEQ ID NO: 55152 - DNA, 20 bp, synthetic construct
  misc_feature 1..20: note = Description of Artificial Sequence: Synthetic oligonucleotide
  misc_feature 1..20: note = Target: SCN10A; (-) strand; PAM type: YTN; PAM sequence: CTG
  source 1..20: mol_type = other DNA
tgaagaaagtcagtggtagc

SEQ ID NO: 55153 - DNA, 20 bp, synthetic construct
  misc_feature 1..20: note = Description of Artificial Sequence: Synthetic oligonucleotide
  misc_feature 1..20: note = Target: SCN10A; (-) strand; PAM type: YTN; PAM sequence: TTC
  source 1..20: mol_type = other DNA
tgtgaagaaagtcagtggta

SEQ ID NO: 55154 - DNA, 20 bp, synthetic construct
  misc_feature 1..20: note = Description of Artificial Sequence: Synthetic oligonucleotide
  misc_feature 1..20: note = Target: SCN10A; (-) strand; PAM type: YTN; PAM sequence: CTA
  source 1..20: mol_type = other DNA
attctgtgaagaaagtcagt

SEQ ID NO: 55155 - DNA, 20 bp, synthetic construct
  misc_feature 1..20: note = Description of Artificial Sequence: Synthetic oligonucleotide
  misc_feature 1..20: note = Target: SCN10A; (-) strand; PAM type: YTN; PAM sequence: TTC
  source 1..20: mol_type = other DNA
taattctgtgaagaaagtca

SEQ ID NO: 55156 - DNA, 20 bp, synthetic construct
  misc_feature 1..20: note = Description of Artificial Sequence: Synthetic oligonucleotide
  misc_feature 1..20: note = Target: SCN10A; (-) strand; PAM type: YTN; PAM sequence: TTT
  source 1..20: mol_type = other DNA
ctaattctgtgaagaaagtc

SEQ ID NO: 55157 - DNA, 20 bp, synthetic construct
  misc_feature 1..20: note = Description of Artificial Sequence: Synthetic oligonucleotide
  misc_feature 1..20: note = Target: SCN10A; (-) strand; PAM type: YTN; PAM sequence: TTT
  source 1..20: mol_type = other DNA
tctaattctgtgaagaaagt

SEQ ID NO: 55158 - DNA, 20 bp, synthetic construct
  misc_feature 1..20: note = Description of Artificial Sequence: Synthetic oligonucleotide
  misc_feature 1..20: note = Target: SCN10A; (-) strand; PAM type: YTN; PAM sequence: TTT
  source 1..20: mol_type = other DNA
ttctaattctgtgaagaaag

SEQ ID NO: 55159 - DNA, 20 bp, synthetic construct
  misc_feature 1..20: note = Description of Artificial Sequence: Synthetic oligonucleotide
  misc_feature 1..20: note = Target: SCN10A; (-) strand; PAM type: YTN; PAM sequence: TTA
  source 1..20: mol_type = other DNA
aagtagatttttctaattct

SEQ ID NO: 55160 - DNA, 20 bp, synthetic construct
  misc_feature 1..20: note = Description of Artificial Sequence: Synthetic oligonucleotide
  misc_feature 1..20: note = Target: SCN10A; (-) strand; PAM type: YTN; PAM sequence: TTT
  source 1..20: mol_type = other DNA
aaagtagatttttctaattc

SEQ ID NO: 55161 - DNA, 20 bp, synthetic construct
  misc_feature 1..20: note = Description of Artificial Sequence: Synthetic oligonucleotide
  misc_feature 1..20: note = Target: SCN10A; (-) strand; PAM type: YTN; PAM sequence: TTC
  source 1..20: mol_type = other DNA
cacatgaaatttaaagtaga

SEQ ID NO: 55162 - DNA, 20 bp, synthetic construct
  misc_feature 1..20: note = Description of Artificial Sequence: Synthetic oligonucleotide
  misc_feature 1..20: note = Target: SCN10A; (-) strand; PAM type: YTN; PAM sequence: TTG
  source 1..20: mol_type = other DNA
ttccacatgaaatttaaagt

SEQ ID NO: 55163 - DNA, 20 bp, synthetic construct
  misc_feature 1..20: note = Description of Artificial Sequence: Synthetic oligonucleotide
  misc_feature 1..20: note = Target: SCN10A; (-) strand; PAM type: YTN; PAM sequence: TTT
  source 1..20: mol_type = other DNA
gttccacatgaaatttaaag

SEQ ID NO: 55164 - DNA, 20 bp, synthetic construct
  misc_feature 1..20: note = Description of Artificial Sequence: Synthetic oligonucleotide
  misc_feature 1..20: note = Target: SCN10A; (-) strand; PAM type: YTN; PAM sequence: TTT
  source 1..20: mol_type = other DNA
tgttccacatgaaatttaaa

SEQ ID NO: 55165 - DNA, 20 bp, synthetic construct
  misc_feature 1..20: note = Description of Artificial Sequence: Synthetic oligonucleotide
  misc_feature 1..20: note = Target: SCN10A; (-) strand; PAM type: YTN; PAM sequence: TTT
  source 1..20: mol_type = other DNA
ttgttccacatgaaatttaa

SEQ ID NO: 55166 - DNA, 20 bp, synthetic construct
  misc_feature 1..20: note = Description of Artificial Sequence: Synthetic oligonucleotide
  misc_feature 1..20: note = Target: SCN10A; (-) strand; PAM type: YTN; PAM sequence: TTT
  source 1..20: mol_type = other DNA
tttgttccacatgaaattta

SEQ ID NO: 55167 - DNA, 20 bp, synthetic construct
  misc_feature 1..20: note = Description of Artificial Sequence: Synthetic oligonucleotide
  misc_feature 1..20: note = Target: SCN10A; (-) strand; PAM type: YTN; PAM sequence: CTT
  source 1..20: mol_type = other DNA
ttttgttccacatgaaattt

SEQ ID NO: 55168 - DNA, 20 bp, synthetic construct
  misc_feature 1..20: note = Description of Artificial Sequence: Synthetic oligonucleotide
  misc_feature 1..20: note = Target: SCN10A; (-) strand; PAM type: YTN; PAM sequence: CTC
  source 1..20: mol_type = other DNA
ttttttgttccacatgaaat

SEQ ID NO: 55169 - DNA, 20 bp, synthetic construct
  misc_feature 1..20: note = Description of Artificial Sequence: Synthetic oligonucleotide
  misc_feature 1..20: note = Target: SCN10A; (-) strand; PAM type: YTN; PAM sequence: CTA
  source 1..20: mol_type = other DNA
tgcgggctcttttttgttcc

SEQ ID NO: 55170 - DNA, 20 bp, synthetic construct
  misc_feature 1..20: note = Description of Artificial Sequence: Synthetic oligonucleotide
  misc_feature 1..20: note = Target: SCN10A; (-) strand; PAM type: YTN; PAM sequence: TTG
  source 1..20: mol_type = other DNA
actatgcgggctcttttttg

SEQ ID NO: 55171 - DNA, 20 bp, synthetic construct
  misc_feature 1..20: note = Description of Artificial Sequence: Synthetic oligonucleotide
  misc_feature 1..20: note = Target: SCN10A; (-) strand; PAM type: YTN; PAM sequence: CTT
  source 1..20: mol_type = other DNA
gactatgcgggctctttttt

SEQ ID NO: 55172 - DNA, 20 bp, synthetic construct
  misc_feature 1..20: note = Description of Artificial Sequence: Synthetic oligonucleotide
  misc_feature 1..20: note = Target: SCN10A; (-) strand; PAM type: YTN; PAM sequence: TTG
  source 1..20: mol_type = other DNA
tcttgactatgcgggctctt

SEQ ID NO: 55173 - DNA, 20 bp, synthetic construct
  misc_feature 1..20: note = Description of Artificial Sequence: Synthetic oligonucleotide
  misc_feature 1..20: note = Target: SCN10A; (-) strand; PAM type: YTN; PAM sequence: TTA
  source 1..20: mol_type = other DNA
gaattgtcttgactatgcgg

SEQ ID NO: 55174 - DNA, 20 bp, synthetic construct
  misc_feature 1..20: note = Description of Artificial Sequence: Synthetic oligonucleotide
  misc_feature 1..20: note = Target: SCN10A; (-) strand; PAM type: YTN; PAM sequence: CTT
  source 1..20: mol_type = other DNA
agaattgtcttgactatgcg

SEQ ID NO: 55175 - DNA, 20 bp, synthetic construct
  misc_feature 1..20: note = Description of Artificial Sequence: Synthetic oligonucleotide
  misc_feature 1..20: note = Target: SCN10A; (-) strand; PAM type: YTN; PAM sequence: TTG
  source 1..20: mol_type = other DNA
cttagaattgtcttgactat

SEQ ID NO: 55176 - DNA, 20 bp, synthetic construct
  misc_feature 1..20: note = Description of Artificial Sequence: Synthetic oligonucleotide
  misc_feature 1..20: note = Target: SCN10A; (-) strand; PAM type: YTN; PAM sequence: TTT
  source 1..20: mol_type = other DNA
gcttagaattgtcttgacta

SEQ ID NO: 55177 - DNA, 20 bp, synthetic construct
  misc_feature 1..20: note = Description of Artificial Sequence: Synthetic oligonucleotide
  misc_feature 1..20: note = Target: SCN10A; (-) strand; PAM type: YTN; PAM sequence: TTT
  source 1..20: mol_type = other DNA
tgcttagaattgtcttgact

SEQ ID NO: 55178 - DNA, 20 bp, synthetic construct
  misc_feature 1..20: note = Description of Artificial Sequence: Synthetic oligonucleotide
  misc_feature 1..20: note = Target: SCN10A; (-) strand; PAM type: YTN; PAM sequence: TTT
  source 1..20: mol_type = other DNA
ttgcttagaattgtcttgac

SEQ ID NO: 55179 - DNA, 20 bp, synthetic construct
  misc_feature 1..20: note = Description of Artificial Sequence: Synthetic oligonucleotide
  misc_feature 1..20: note = Target: SCN10A; (-) strand; PAM type: YTN; PAM sequence: CTT
  source 1..20: mol_type = other DNA
tttgcttagaattgtcttga

SEQ ID NO: 55180 - DNA, 20 bp, synthetic construct
  misc_feature 1..20: note = Description of Artificial Sequence: Synthetic oligonucleotide
  misc_feature 1..20: note = Target: SCN10A; (-) strand; PAM type: YTN; PAM sequence: TTC
  source 1..20: mol_type = other DNA
tttttgcttagaattgtctt

SEQ ID NO: 55181 - DNA, 20 bp, synthetic construct
  misc_feature 1..20: note = Description of Artificial Sequence: Synthetic oligonucleotide
  misc_feature 1..20: note = Target: SCN10A; (-) strand; PAM type: YTN; PAM sequence: CTT
  source 1..20: mol_type = other DNA
ctttttgcttagaattgtct

SEQ ID NO: 55182 - DNA, 20 bp, synthetic construct
  misc_feature 1..20: note = Description of Artificial Sequence: Synthetic oligonucleotide
  misc_feature 1..20: note = Target: SCN10A; (-) strand; PAM type: YTN; PAM sequence: TTC
  source 1..20: mol_type = other DNA
ttctttttgcttagaattgt

SEQ ID NO: 55183 - DNA, 20 bp, synthetic construct
  misc_feature 1..20: note = Description of Artificial Sequence: Synthetic oligonucleotide
  misc_feature 1..20: note = Target: SCN10A; (-) strand; PAM type: YTN; PAM sequence: TTT
  source 1..20: mol_type = other DNA
cttctttttgcttagaattg

SEQ ID NO: 55184 - DNA, 20 bp, synthetic construct
  misc_feature 1..20: note = Description of Artificial Sequence: Synthetic oligonucleotide
  misc_feature 1..20: note = Target: SCN10A; (-) strand; PAM type: YTN; PAM sequence: CTT
  source 1..20: mol_type = other DNA
tcttctttttgcttagaatt

SEQ ID NO: 55185 - DNA, 20 bp, synthetic construct
  misc_feature 1..20: note = Description of Artificial Sequence: Synthetic oligonucleotide
  misc_feature 1..20: note = Target: SCN10A; (-) strand; PAM type: YTN; PAM sequence: CTC
  source 1..20: mol_type = other DNA
caactttcttctttttgctt

SEQ ID NO: 55186 - DNA, 20 bp, synthetic construct
  misc_feature 1..20: note = Description of Artificial Sequence: Synthetic oligonucleotide
  misc_feature 1..20: note = Target: SCN10A; (-) strand; PAM type: YTN; PAM sequence: TTG
  source 1..20: mol_type = other DNA
aagtcaggtagcgtgatgcc

SEQ ID NO: 55187 - DNA, 20 bp, synthetic construct
  misc_feature 1..20: note = Description of Artificial Sequence: Synthetic oligonucleotide
  misc_feature 1..20: note = Target: SCN10A; (-) strand; PAM type: YTN; PAM sequence: CTT
  source 1..20: mol_type = other DNA
gaagtcaggtagcgtgatgc

SEQ ID NO: 55188 - DNA, 20 bp, synthetic construct
  misc_feature 1..20: note = Description of Artificial Sequence: Synthetic oligonucleotide
  misc_feature 1..20: note = Target: SCN10A; (-) strand; PAM type: YTN; PAM sequence: TTG
  source 1..20: mol_type = other DNA
tagtatagcttgaagtcagg

SEQ ID NO: 55189 - DNA, 20 bp, synthetic construct
  misc_feature 1..20: note = Description of Artificial Sequence: Synthetic oligonucleotide
  misc_feature 1..20: note = Target: SCN10A; (-) strand; PAM type: YTN; PAM sequence: TTT
  source 1..20: mol_type = other DNA
gtagtatagcttgaagtcag

SEQ ID NO: 55190 - DNA, 20 bp, synthetic construct
  misc_feature 1..20: note = Description of Artificial Sequence: Synthetic oligonucleotide
  misc_feature 1..20: note = Target: SCN10A; (-) strand; PAM type: YTN; PAM sequence: CTT
  source 1..20: mol_type = other DNA
tgtagtatagcttgaagtca

SEQ ID NO: 55191 - DNA, 20 bp, synthetic construct
  misc_feature 1..20: note = Description of Artificial Sequence: Synthetic oligonucleotide
  misc_feature 1..20: note = Target: SCN10A; (-) strand; PAM type: YTN; PAM sequence: CTG
  source 1..20: mol_type = other DNA
tagctttgtagtatagcttg

SEQ ID NO: 55192 - DNA, 20 bp, synthetic construct
  misc_feature 1..20: note = Description of Artificial Sequence: Synthetic oligonucleotide
  misc_feature 1..20: note = Target: SCN10A; (-) strand; PAM type: YTN; PAM sequence: TTA
  source 1..20: mol_type = other DNA
ctgtagctttgtagtatagc

SEQ ID NO: 55193 - DNA, 20 bp, synthetic construct
  misc_feature 1..20: note = Description of Artificial Sequence: Synthetic oligonucleotide
  misc_feature 1..20: note = Target: SCN10A; (-) strand; PAM type: YTN; PAM sequence: TTG
  source 1..20: mol_type = other DNA
gttactgtagctttgtagta

SEQ ID NO: 55194 - DNA, 20 bp, synthetic construct
  misc_feature 1..20: note = Description of Artificial Sequence: Synthetic oligonucleotide
  misc_feature 1..20: note = Target: SCN10A; (-) strand; PAM type: YTN; PAM sequence: TTT
  source 1..20: mol_type = other DNA
ggttactgtagctttgtagt

SEQ ID NO: 55195 - DNA, 20 bp, synthetic construct
  misc_feature 1..20: note = Description of Artificial Sequence: Synthetic oligonucleotide
  misc_feature 1..20: note = Target: SCN10A; (-) strand; PAM type: YTN; PAM sequence: TTT
  source 1..20: mol_type = other DNA
tggttactgtagctttgtag

SEQ ID NO: 55196 - DNA, 20 bp, synthetic construct
  misc_feature 1..20: note = Description of Artificial Sequence: Synthetic oligonucleotide
  misc_feature 1..20: note = Target: SCN10A; (-) strand; PAM type: YTN; PAM sequence: CTG
  source 1..20: mol_type = other DNA
ttttggttactgtagctttg

SEQ ID NO: 55197 - DNA, 20 bp, synthetic construct
  misc_feature 1..20: note = Description of Artificial Sequence: Synthetic oligonucleotide
  misc_feature 1..20: note = Target: SCN10A; (-) strand; PAM type: YTN; PAM sequence: CTC
  source 1..20: mol_type = other DNA
gctgttttggttactgtagc

SEQ ID NO: 55198 - DNA, 20 bp, synthetic construct
  misc_feature 1..20: note = Description of Artificial Sequence: Synthetic oligonucleotide
  misc_feature 1..20: note = Target: SCN10A; (-) strand; PAM type: YTN; PAM sequence: TTG
  source 1..20: mol_type = other DNA
gtaccagtacctcgctgttt

SEQ ID NO: 55199 - DNA, 20 bp, synthetic construct
  misc_feature 1..20: note = Description of Artificial Sequence: Synthetic oligonucleotide
  misc_feature 1..20: note = Target: SCN10A; (-) strand; PAM type: YTN; PAM sequence: TTT
  source 1..20: mol_type = other DNA
ggtaccagtacctcgctgtt

SEQ ID NO: 55200 - DNA, 20 bp, synthetic construct
  misc_feature 1..20: note = Description of Artificial Sequence: Synthetic oligonucleotide
  misc_feature 1..20: note = Target: SCN10A; (-) strand; PAM type: YTN; PAM sequence: TTT
  source 1..20: mol_type = other DNA
tggtaccagtacctcgctgt

SEQ ID NO: 55201 - DNA, 20 bp, synthetic construct
  misc_feature 1..20: note = Description of Artificial Sequence: Synthetic oligonucleotide
  misc_feature 1..20: note = Target: SCN10A; (-) strand; PAM type: YTN; PAM sequence: CTG
  source 1..20: mol_type = other DNA
ttttggtaccagtacctcgc

SEQ ID NO: 55202 - DNA, 20 bp, synthetic construct
  misc_feature 1..20: note = Description of Artificial Sequence: Synthetic oligonucleotide
  misc_feature 1..20: note = Target: SCN10A; (-) strand; PAM type: YTN; PAM sequence: CTA
  source 1..20: mol_type = other DNA
gatatctgttttggtaccag

SEQ ID NO: 55203 - DNA, 20 bp, synthetic construct
  misc_feature 1..20: note = Description of Artificial Sequence: Synthetic oligonucleotide
  misc_feature 1..20: note = Target: SCN10A; (-) strand; PAM type: YTN; PAM sequence: TTG
  source 1..20: mol_type = other DNA
gtctagatatctgttttggt

SEQ ID NO: 55204 - DNA, 20 bp, synthetic construct
  misc_feature 1..20: note = Description of Artificial Sequence: Synthetic oligonucleotide
  misc_feature 1..20: note = Target: SCN10A; (-) strand; PAM type: YTN; PAM sequence: TTC
  source 1..20: mol_type = other DNA
cattggtctagatatctgtt

SEQ ID NO: 55205 - DNA, 20 bp, synthetic construct
  misc_feature 1..20: note = Description of Artificial Sequence: Synthetic oligonucleotide
  misc_feature 1..20: note = Target: SCN10A; (-) strand; PAM type: YTN; PAM sequence: CTG
  source 1..20: mol_type = other DNA
ttccattggtctagatatct

SEQ ID NO: 55206 - DNA, 20 bp, synthetic construct
  misc_feature 1..20: note = Description of Artificial Sequence: Synthetic oligonucleotide
  misc_feature 1..20: note = Target: SCN10A; (-) strand; PAM type: YTN; PAM sequence: TTC
  source 1..20: mol_type = other DNA
tgttccattggtctagatat

SEQ ID NO: 55207 - DNA, 20 bp, synthetic construct
  misc_feature 1..20: note = Description of Artificial Sequence: Synthetic oligonucleotide
  misc_feature 1..20: note = Target: SCN10A; (-) strand; PAM type: YTN; PAM sequence: CTG
  source 1..20: mol_type = other DNA
ttctgttccattggtctaga

SEQ ID NO: 55208 - DNA, 20 bp, synthetic construct
  misc_feature 1..20: note = Description of Artificial Sequence: Synthetic oligonucleotide
  misc_feature 1..20: note = Target: SCN10A; (-) strand; PAM type: YTN; PAM sequence: CTC
  source 1..20: mol_type = other DNA
tgttctgttccattggtcta

SEQ ID NO: 55209 - DNA, 20 bp, synthetic construct
  misc_feature 1..20: note = Description of Artificial Sequence: Synthetic oligonucleotide
  misc_feature 1..20: note = Target: SCN10A; (-) strand; PAM type: YTN; PAM sequence: CTG
  source 1..20: mol_type = other DNA
aggcctctgttctgttccat

SEQ ID NO: 55210 - DNA, 20 bp, synthetic construct
  misc_feature 1..20: note = Description of Artificial Sequence: Synthetic oligonucleotide
  misc_feature 1..20: note = Target: SCN10A; (-) strand; PAM type: YTN; PAM sequence: TTC
  source 1..20: mol_type = other DNA
tgaggcctctgttctgttcc

SEQ ID NO: 55211 - DNA, 20 bp, synthetic construct
  misc_feature 1..20: note = Description of Artificial Sequence: Synthetic oligonucleotide
  misc_feature 1..20: note = Target: SCN10A; (-) strand; PAM type: YTN; PAM sequence: CTT
  source 1..20: mol_type = other DNA
ctgaggcctctgttctgttc

SEQ ID NO: 55212 - DNA, 20 bp, synthetic construct
  misc_feature 1..20: note = Description of Artificial Sequence: Synthetic oligonucleotide
  misc_feature 1..20: note = Target: SCN10A; (-) strand; PAM type: YTN; PAM sequence: TTA
  source 1..20: mol_type = other DNA
cttctgaggcctctgttctg

SEQ ID NO: 55213 - DNA, 20 bp, synthetic construct
  misc_feature 1..20: note = Description of Artificial Sequence: Synthetic oligonucleotide
  misc_feature 1..20: note = Target: SCN10A; (-) strand; PAM type: YTN; PAM sequence: TTG
  source 1..20: mol_type = other DNA
tagatatgcggtgttacttc

SEQ ID NO: 55214 - DNA, 20 bp, synthetic construct
  misc_feature 1..20: note = Description of Artificial Sequence: Synthetic oligonucleotide
  misc_feature 1..20: note = Target: SCN10A; (-) strand; PAM type: YTN; PAM sequence: TTG
  source 1..20: mol_type = other DNA
tcaaagatcagatggttgta

SEQ ID NO: 55215 - DNA, 20 bp, synthetic construct
  misc_feature 1..20: note = Description of Artificial Sequence: Synthetic oligonucleotide
  misc_feature 1..20: note = Target: SCN10A; (-) strand; PAM type: YTN; PAM sequence: TTT
  source 1..20: mol_type = other DNA
gtcaaagatcagatggttgt

SEQ ID NO: 55216 - DNA, 20 bp, synthetic construct
  misc_feature 1..20: note = Description of Artificial Sequence: Synthetic oligonucleotide
  misc_feature 1..20: note = Target: SCN10A; (-) strand; PAM type: YTN; PAM sequence: TTG
  source 1..20: mol_type = other DNA
tcaagtttgtcaaagatcag

SEQ ID NO: 55217 - DNA, 20 bp, synthetic construct
  misc_feature 1..20: note = Description of Artificial Sequence: Synthetic oligonucleotide
  misc_feature 1..20: note = Target: SCN10A; (-) strand; PAM type: YTN; PAM sequence: TTT
  source 1..20: mol_type = other DNA
gtcaagtttgtcaaagatca

SEQ ID NO: 55218 - DNA, 20 bp, synthetic construct
  misc_feature 1..20: note = Description of Artificial Sequence: Synthetic oligonucleotide
  misc_feature 1..20: note = Target: SCN10A; (-) strand; PAM type: YTN; PAM sequence: TTT
  source 1..20: mol_type = other DNA
tgtcaagtttgtcaaagatc

SEQ ID NO: 55219 - DNA, 20 bp, synthetic construct
  misc_feature 1..20: note = Description of Artificial Sequence: Synthetic oligonucleotide
  misc_feature 1..20: note = Target: SCN10A; (-) strand; PAM type: YTN; PAM sequence: CTT
  source 1..20: mol_type = other DNA
ttgtcaagtttgtcaaagat

SEQ ID NO: 55220 - DNA, 20 bp, synthetic construct
  misc_feature 1..20: note = Description of Artificial Sequence: Synthetic oligonucleotide
  misc_feature 1..20: note = Target: SCN10A; (-) strand; PAM type: YTN; PAM sequence: TTG
  source 1..20: mol_type = other DNA
cttttgtcaagtttgtcaaa

SEQ ID NO: 55221 - DNA, 20 bp, synthetic construct
  misc_feature 1..20: note = Description of Artificial Sequence: Synthetic oligonucleotide
  misc_feature 1..20: note = Target: SCN10A; (-) strand; PAM type: YTN; PAM sequence: CTT
  source 1..20: mol_type = other DNA
gcttttgtcaagtttgtcaa

SEQ ID NO: 55222 - DNA, 20 bp, synthetic construct
  misc_feature 1..20: note = Description of Artificial Sequence: Synthetic oligonucleotide
  misc_feature 1..20: note = Target: SCN10A; (-) strand; PAM type: YTN; PAM sequence: TTG
  source 1..20: mol_type = other DNA
cttgcttttgtcaagtttgt

SEQ ID NO: 55223 - DNA, 20 bp, synthetic construct
  misc_feature 1..20: note = Description of Artificial Sequence: Synthetic oligonucleotide
  misc_feature 1..20: note = Target: SCN10A; (-) strand; PAM type: YTN; PAM sequence: TTC
  source 1..20: mol_type = other DNA
cccattgcttgcttttgtca

SEQ ID NO: 55224 - DNA, 20 bp, synthetic construct
  misc_feature 1..20: note = Description of Artificial Sequence: Synthetic oligonucleotide
  misc_feature 1..20: note = Target: SCN10A; (-) strand; PAM type: YTN; PAM sequence: TTT
  source 1..20: mol_type = other DNA
ccccattgcttgcttttgtc

SEQ ID NO: 55225 - DNA, 20 bp, synthetic construct
  misc_feature 1..20: note = Description of Artificial Sequence: Synthetic oligonucleotide
  misc_feature 1..20: note = Target: SCN10A; (-) strand; PAM type: YTN; PAM sequence: CTT
  source 1..20: mol_type = other DNA
tccccattgcttgcttttgt

SEQ ID NO: 55226 - DNA, 20 bp, synthetic construct
  misc_feature 1..20: note = Description of Artificial Sequence: Synthetic oligonucleotide
  misc_feature 1..20: note = Target: SCN10A; (-) strand; PAM type: YTN; PAM sequence: TTA
  source 1..20: mol_type = other DNA
aatagggaatcctttcccca

SEQ ID NO: 55227 - DNA, 20 bp, synthetic construct
  misc_feature 1..20: note = Description of Artificial Sequence: Synthetic oligonucleotide
  misc_feature 1..20: note = Target: SCN10A; (-) strand; PAM type: YTN; PAM sequence: TTA
  source 1..20: mol_type = other DNA
ttaaatagggaatcctttcc

SEQ ID NO: 55228 - DNA, 20 bp, synthetic construct
  misc_feature 1..20: note = Description of Artificial Sequence: Synthetic oligonucleotide
  misc_feature 1..20: note = Target: SCN10A; (-) strand; PAM type: YTN; PAM sequence: TTT
  source 1..20: mol_type = other DNA
attaaatagggaatcctttc

SEQ ID NO: 55229 - DNA, 20 bp, synthetic construct
  misc_feature 1..20: note = Description of Artificial Sequence: Synthetic oligonucleotide
  misc_feature 1..20: note = Target: SCN10A; (-) strand; PAM type: YTN; PAM sequence: TTC
  source 1..20: mol_type = other DNA
cccacaccatttattaaata

SEQ ID NO: 55230 - DNA, 20 bp, synthetic construct
  misc_feature 1..20: note = Description of Artificial Sequence: Synthetic oligonucleotide
  misc_feature 1..20: note = Target: SCN10A; (-) strand; PAM type: YTN; PAM sequence: TTT
  source 1..20: mol_type = other DNA
ccccacaccatttattaaat

SEQ ID NO: 55231 - DNA, 20 bp, synthetic construct
  misc_feature 1..20: note = Description of Artificial Sequence: Synthetic oligonucleotide
  misc_feature 1..20: note = Target: SCN10A; (-) strand; PAM type: YTN; PAM sequence: TTT
  source 1..20: mol_type = other DNA
tccccacaccatttattaaa

SEQ ID NO: 55232 - DNA, 20 bp, synthetic construct
  misc_feature 1..20: note = Description of Artificial Sequence: Synthetic oligonucleotide
  misc_feature 1..20: note = Target: SCN10A; (-) strand; PAM type: YTN; PAM sequence: CTA
  source 1..20: mol_type = other DNA
gccagttttccccacaccat

SEQ ID NO: 55233 - DNA, 20 bp, synthetic construct
  misc_feature 1..20: note = Description of Artificial Sequence: Synthetic oligonucleotide
  misc_feature 1..20: note = Target: SCN10A; (-) strand; PAM type: YTN; PAM sequence: CTA
  source 1..20: mol_type = other DNA
aggctagccagttttcccca

SEQ ID NO: 55234 - DNA, 20 bp, synthetic construct
  misc_feature 1..20: note = Description of Artificial Sequence: Synthetic oligonucleotide
  misc_feature 1..20: note = Target: SCN10A; (-) strand; PAM type: YTN; PAM sequence: CTG
  source 1..20: mol_type = other DNA
cctaaggctagccagttttc

SEQ ID NO: 55235 - DNA, 20 bp, synthetic construct
  misc_feature 1..20: note = Description of Artificial Sequence: Synthetic oligonucleotide
  misc_feature 1..20: note = Target: SCN10A; (-) strand; PAM type: YTN; PAM sequence: TTC
  source 1..20: mol_type = other DNA
tgcctaaggctagccagttt

SEQ ID NO: 55236 - DNA, 20 bp, synthetic construct
  misc_feature 1..20: note = Description of Artificial Sequence: Synthetic oligonucleotide
  misc_feature 1..20: note = Target: SCN10A; (-) strand; PAM type: YTN; PAM sequence: TTT
  source 1..20: mol_type = other DNA
ctgcctaaggctagccagtt

SEQ ID NO: 55237 - DNA, 20 bp, synthetic construct
  misc_feature 1..20: note = Description of Artificial Sequence: Synthetic oligonucleotide
  misc_feature 1..20: note = Target: SCN10A; (-) strand; PAM type: YTN; PAM sequence: TTT
  source 1..20: mol_type = other DNA
tctgcctaaggctagccagt

SEQ ID NO: 55238 - DNA, 20 bp, synthetic construct
  misc_feature 1..20: note = Description of Artificial Sequence: Synthetic oligonucleotide
  misc_feature 1..20: note = Target: SCN10A; (-) strand; PAM type: YTN; PAM sequence: TTC
  source 1..20: mol_type = other DNA
aattttctgcctaaggctag

SEQ ID NO: 55239 - DNA, 20 bp, synthetic construct
  misc_feature 1..20: note = Description of Artificial Sequence: Synthetic oligonucleotide
  misc_feature 1..20: note = Target: SCN10A; (-) strand; PAM type: YTN; PAM sequence: TTT
  source 1..20: mol_type = other DNA
caattttctgcctaaggcta

SEQ ID NO: 55240 - DNA, 20 bp, synthetic construct
  misc_feature 1..20: note = Description of Artificial Sequence: Synthetic oligonucleotide
  misc_feature 1..20: note = Target: SCN10A; (-) strand; PAM type: YTN; PAM sequence: CTA
  source 1..20: mol_type = other DNA
gtttcaattttctgcctaag

SEQ ID NO: 55241 - DNA, 20 bp, synthetic construct
  misc_feature 1..20: note = Description of Artificial Sequence: Synthetic oligonucleotide
  misc_feature 1..20: note = Target: SCN10A; (-) strand; PAM type: YTN; PAM sequence: TTG
  source 1..20: mol_type = other DNA
tgtaaggtataaggaaggga

SEQ ID NO: 55242 - DNA, 20 bp, synthetic construct
  misc_feature 1..20: note = Description of Artificial Sequence: Synthetic oligonucleotide
  misc_feature 1..20: note = Target: SCN10A; (-) strand; PAM type: YTN; PAM sequence: TTT
  source 1..20: mol_type = other DNA
gtgtaaggtataaggaaggg

SEQ ID NO: 55243 - DNA, 20 bp, synthetic construct
  misc_feature 1..20: note = Description of Artificial Sequence: Synthetic oligonucleotide
  misc_feature 1..20: note = Target: SCN10A; (-) strand; PAM type: YTN; PAM sequence: TTT
  source 1..20: mol_type = other DNA
tgtgtaaggtataaggaagg

SEQ ID NO: 55244 - DNA, 20 bp, synthetic construct
  misc_feature 1..20: note = Description of Artificial Sequence: Synthetic oligonucleotide
  misc_feature 1..20: note = Target: SCN10A; (-) strand; PAM type: YTN; PAM sequence: TTT
  source 1..20: mol_type = other DNA
ttgtgtaaggtataaggaag

SEQ ID NO: 55245 - DNA, 20 bp, synthetic construct
  misc_feature 1..20: note = Description of Artificial Sequence: Synthetic oligonucleotide
  misc_feature 1..20: note = Target: SCN10A; (-) strand; PAM type: YTN; PAM sequence: TTA
  source 1..20: mol_type = other DNA
atttttgtgtaaggtataag

SEQ ID NO: 55246 - DNA, 20 bp, synthetic construct
  misc_feature 1..20: note = Description of Artificial Sequence: Synthetic oligonucleotide
  misc_feature 1..20: note = Target: SCN10A; (-) strand; PAM type: YTN; PAM sequence: TTG
  source 1..20: mol_type = other DNA
agttaatttttgtgtaaggt

SEQ ID NO: 55247 - DNA, 20 bp, synthetic construct
  misc_feature 1..20: note = Description of Artificial Sequence: Synthetic oligonucleotide
  misc_feature 1..20: note = Target: SCN10A; (-) strand; PAM type: YTN; PAM sequence: CTT
  source 1..20: mol_type = other DNA
gagttaatttttgtgtaagg

SEQ ID NO: 55248 - DNA, 20 bp, synthetic construct
  misc_feature 1..20: note = Description of Artificial Sequence: Synthetic oligonucleotide
  misc_feature 1..20: note = Target: SCN10A; (-) strand; PAM type: YTN; PAM sequence: CTA
  source 1..20: mol_type = other DNA
tcttgagttaatttttgtgt

SEQ ID NO: 55249 - DNA, 20 bp, synthetic construct
  misc_feature 1..20: note = Description of Artificial Sequence: Synthetic oligonucleotide
  misc_feature 1..20: note = Target: SCN10A; (-) strand; PAM type: YTN; PAM sequence: TTA
  source 1..20: mol_type = other DNA
atctatcttgagttaatttt

SEQ ID NO: 55250 - DNA, 20 bp, synthetic construct
  misc_feature 1..20: note = Description of Artificial Sequence: Synthetic oligonucleotide
  misc_feature 1..20: note = Target: SCN10A; (-) strand; PAM type: YTN; PAM sequence: TTT
  source 1..20: mol_type = other DNA
aatctatcttgagttaattt

SEQ ID NO: 55251 - DNA, 20 bp, synthetic construct
  misc_feature 1..20: note = Description of Artificial Sequence: Synthetic oligonucleotide
  misc_feature 1..20: note = Target: SCN10A; (-) strand; PAM type: YTN; PAM sequence: CTT
  source 1..20: mol_type = other DNA
taatctatcttgagttaatt

SEQ ID NO: 55252 - DNA, 20 bp, synthetic construct
  misc_feature 1..20: note = Description of Artificial Sequence: Synthetic oligonucleotide
  misc_feature 1..20: note = Target: SCN10A; (-) strand; PAM type: YTN; PAM sequence: TTA
  source 1..20: mol_type = other DNA
agtctttaatctatcttgag

SEQ ID NO: 55253 - DNA, 20 bp, synthetic construct
  misc_feature 1..20: note = Description of Artificial Sequence: Synthetic oligonucleotide
  misc_feature 1..20: note = Target: SCN10A; (-) strand; PAM type: YTN; PAM sequence: TTT
  source 1..20: mol_type = other DNA
aagtctttaatctatcttga

SEQ ID NO: 55254 - DNA, 20 bp, synthetic construct
  misc_feature 1..20: note = Description of Artificial Sequence: Synthetic oligonucleotide
  misc_feature 1..20: note = Target: SCN10A; (-) strand; PAM type: YTN; PAM sequence: TTA
  source 1..20: mol_type = other DNA
tgtttaagtctttaatctat

SEQ ID NO: 55255 - DNA, 20 bp, synthetic construct
  misc_feature 1..20: note = Description of Artificial Sequence: Synthetic oligonucleotide
  misc_feature 1..20: note = Target: SCN10A; (-) strand; PAM type: YTN; PAM sequence: CTT
  source 1..20: mol_type = other DNA
atgtttaagtctttaatcta

SEQ ID NO: 55256 - DNA, 20 bp, synthetic construct
  misc_feature 1..20: note = Description of Artificial Sequence: Synthetic oligonucleotide
  misc_feature 1..20: note = Target: SCN10A; (-) strand; PAM type: YTN; PAM sequence: TTA
  source 1..20: mol_type = other DNA
ggtcttatgtttaagtcttt

SEQ ID NO: 55257 - DNA, 20 bp, synthetic construct
  misc_feature 1..20: note = Description of Artificial Sequence: Synthetic oligonucleotide
  misc_feature 1..20: note = Target: SCN10A; (-) strand; PAM type: YTN; PAM sequence: TTT
  source 1..20: mol_type = other DNA
aggtcttatgtttaagtctt

SEQ ID NO: 55258 - DNA, 20 bp, synthetic construct
  misc_feature 1..20: note = Description of Artificial Sequence: Synthetic oligonucleotide
  misc_feature 1..20: note = Target: SCN10A; (-) strand; PAM type: YTN; PAM sequence: TTT
  source 1..20: mol_type = other DNA
taggtcttatgtttaagtct

SEQ ID NO: 55259 - DNA, 20 bp, synthetic construct
  misc_feature 1..20: note = Description of Artificial Sequence: Synthetic oligonucleotide
  misc_feature 1..20: note = Target: SCN10A; (-) strand; PAM type: YTN; PAM sequence: TTA
  source 1..20: mol_type = other DNA
tggttttaggtcttatgttt

SEQ ID NO: 55260 - DNA, 20 bp, synthetic construct
  misc_feature 1..20: note = Description of Artificial Sequence: Synthetic oligonucleotide
  misc_feature 1..20: note = Target: SCN10A; (-) strand; PAM type: YTN; PAM sequence: TTT
  source 1..20: mol_type = other DNA
atggttttaggtcttatgtt

SEQ ID NO: 55261 - DNA, 20 bp, synthetic construct
  misc_feature 1..20: note = Description of Artificial Sequence: Synthetic oligonucleotide
  misc_feature 1..20: note = Target: SCN10A; (-) strand; PAM type: YTN; PAM sequence: TTT
  source 1..20: mol_type = other DNA
tatggttttaggtcttatgt

SEQ ID NO: 55262 - DNA, 20 bp, synthetic construct
  misc_feature 1..20: note = Description of Artificial Sequence: Synthetic oligonucleotide
  misc_feature 1..20: note = Target: SCN10A; (-) strand; PAM type: YTN; PAM sequence: TTT
  source 1..20: mol_type = other DNA
ttatggttttaggtcttatg

SEQ ID NO: 55263 - DNA, 20 bp, synthetic construct
  misc_feature 1..20: note = Description of Artificial Sequence: Synthetic oligonucleotide
  misc_feature 1..20: note = Target: SCN10A; (-) strand; PAM type: YTN; PAM sequence: CTA
  source 1..20: mol_type = other DNA
gggtttttatggttttaggt

SEQ ID NO: 55264 - DNA, 20 bp, synthetic construct
  misc_feature 1..20: note = Description of Artificial Sequence: Synthetic oligonucleotide
  misc_feature 1..20: note = Target: SCN10A; (-) strand; PAM type: YTN; PAM sequence: TTC
  source 1..20: mol_type = other DNA
tagggtttttatggttttag

SEQ ID NO: 55265 - DNA, 20 bp, synthetic construct
  misc_feature 1..20: note = Description of Artificial Sequence: Synthetic oligonucleotide
  misc_feature 1..20: note = Target: SCN10A; (-) strand; PAM type: YTN; PAM sequence: CTT
  source 1..20: mol_type = other DNA
ctagggtttttatggtttta

SEQ ID NO: 55266 - DNA, 20 bp, synthetic construct
  misc_feature 1..20: note = Description of Artificial Sequence: Synthetic oligonucleotide
  misc_feature 1..20: note = Target: SCN10A; (-) strand; PAM type: YTN; PAM sequence: TTC
  source 1..20: mol_type = other DNA
ttctagggtttttatggttt

SEQ ID NO: 55267 - DNA, 20 bp, synthetic construct
  misc_feature 1..20: note = Description of Artificial Sequence: Synthetic oligonucleotide
  misc_feature 1..20: note = Target: SCN10A; (-) strand; PAM type: YTN; PAM sequence: TTT
  source 1..20: mol_type = other DNA
cttctagggtttttatggtt

SEQ ID NO: 55268 - DNA, 20 bp, synthetic construct
  misc_feature 1..20: note = Description of Artificial Sequence: Synthetic oligonucleotide
  misc_feature 1..20: note = Target: SCN10A; (-) strand; PAM type: YTN; PAM sequence: TTT
  source 1..20: mol_type = other DNA
tcttctagggtttttatggt

SEQ ID NO: 55269 - DNA, 20 bp, synthetic construct
  misc_feature 1..20: note = Description of Artificial Sequence: Synthetic oligonucleotide
  misc_feature 1..20: note = Target: SCN10A; (-) strand; PAM type: YTN; PAM sequence: CTA
  source 1..20: mol_type = other DNA
ggttttcttctagggttttt

SEQ ID NO: 55270 - DNA, 20 bp, synthetic construct
  misc_feature 1..20: note = Description of Artificial Sequence: Synthetic oligonucleotide
  misc_feature 1..20: note = Target: SCN10A; (-) strand; PAM type: YTN; PAM sequence: TTG
  source 1..20: mol_type = other DNA
cctaggttttcttctagggt

SEQ ID NO: 55271 - DNA, 20 bp, synthetic construct
  misc_feature 1..20: note = Description of Artificial Sequence: Synthetic oligonucleotide
  misc_feature 1..20: note = Target: SCN10A; (-) strand; PAM type: YTN; PAM sequence: CTG
  source 1..20: mol_type = other DNA
aagggtattgcctaggtttt

SEQ ID NO: 55272 - DNA, 20 bp, synthetic construct
  misc_feature 1..20: note = Description of Artificial Sequence: Synthetic oligonucleotide
  misc_feature 1..20: note = Target: SCN10A; (-) strand; PAM type: YTN; PAM sequence: CTA
  source 1..20: mol_type = other DNA
tgtcctgaagggtattgcct

SEQ ID NO: 55273 - DNA, 20 bp, synthetic construct
  misc_feature 1..20: note = Description of Artificial Sequence: Synthetic oligonucleotide
  misc_feature 1..20: note = Target: SCN10A; (-) strand; PAM type: YTN; PAM sequence: TTG
  source 1..20: mol_type = other DNA
cccatgcctatgtcctgaag

SEQ ID NO: 55274 - DNA, 20 bp, synthetic construct
  misc_feature 1..20: note = Description of Artificial Sequence: Synthetic oligonucleotide
  misc_feature 1..20: note = Target: SCN10A; (-) strand; PAM type: YTN; PAM sequence: TTT
  source 1..20: mol_type = other DNA
gcccatgcctatgtcctgaa

SEQ ID NO: 55275 - DNA, 20 bp, synthetic construct
  misc_feature 1..20: note = Description of Artificial Sequence: Synthetic oligonucleotide
  misc_feature 1..20: note = Target: SCN10A; (-) strand; PAM type: YTN; PAM sequence: CTT
  source 1..20: mol_type = other DNA
tgcccatgcctatgtcctga

SEQ ID NO: 55276 - DNA, 20 bp, synthetic construct
  misc_feature 1..20: note = Description of Artificial Sequence: Synthetic oligonucleotide
  misc_feature 1..20: note = Target: SCN10A; (-) strand; PAM type: YTN; PAM sequence: TTA
  source 1..20: mol_type = other DNA
gtcataaagcctttgcccat

SEQ ID NO: 55277 - DNA, 20 bp, synthetic construct
  misc_feature 1..20: note = Description of Artificial Sequence: Synthetic oligonucleotide
  misc_feature 1..20: note = Target: SCN10A; (-) strand; PAM type: YTN; PAM sequence: TTG
  source 1..20: mol_type = other DNA
atgtgttagtcataaagcct

SEQ ID NO: 55278 - DNA, 20 bp, synthetic construct
  misc_feature 1..20: note = Description of Artificial Sequence: Synthetic oligonucleotide
  misc_feature 1..20: note = Target: SCN10A; (-) strand; PAM type: YTN; PAM sequence: TTT
  source 1..20: mol_type = other DNA
gatgtgttagtcataaagcc

SEQ ID NO: 55279 - DNA, 20 bp, synthetic construct
  misc_feature 1..20: note = Description of Artificial Sequence: Synthetic oligonucleotide
  misc_feature 1..20: note = Target: SCN10A; (-) strand; PAM type: YTN; PAM sequence: TTT
  source 1..20: mol_type = other DNA
tgatgtgttagtcataaagc

SEQ ID NO: 55280 - DNA, 20 bp, synthetic construct
  misc_feature 1..20: note = Description of Artificial Sequence: Synthetic oligonucleotide
  misc_feature 1..20: note = Target: SCN10A; (-) strand; PAM type: YTN; PAM sequence: CTT
  source 1..20: mol_type = other DNA
ttgatgtgttagtcataaag

SEQ ID NO: 55281 - DNA, 20 bp, synthetic construct
  misc_feature 1..20: note = Description of Artificial Sequence: Synthetic oligonucleotide
  misc_feature 1..20: note = Target: SCN10A; (-) strand; PAM type: YTN; PAM sequence: TTG
  source 1..20: mol_type = other DNA
cttttgatgtgttagtcata

SEQ ID NO: 55282 - DNA, 20 bp, synthetic construct
  misc_feature 1..20: note = Description of Artificial Sequence: Synthetic oligonucleotide
  misc_feature 1..20: note = Target: SCN10A; (-) strand; PAM type: YTN; PAM sequence: TTG
  source 1..20: mol_type = other DNA
tcaccattgcttttgatgtg

SEQ ID NO: 55283 - DNA, 20 bp, synthetic construct
  misc_feature 1..20: note = Description of Artificial Sequence: Synthetic oligonucleotide
  misc_feature 1..20: note = Target: SCN10A; (-) strand; PAM type: YTN; PAM sequence: TTT
  source 1..20: mol_type = other DNA
gtcaccattgcttttgatgt

SEQ ID NO: 55284 - DNA, 20 bp, synthetic construct
  misc_feature 1..20: note = Description of Artificial Sequence: Synthetic oligonucleotide
  misc_feature 1..20: note = Target: SCN10A; (-) strand; PAM type: YTN; PAM sequence: TTT
  source 1..20: mol_type = other DNA
tgtcaccattgcttttgatg

SEQ ID NO: 55285 - DNA, 20 bp, synthetic construct
  misc_feature 1..20: note = Description of Artificial Sequence: Synthetic oligonucleotide
  misc_feature 1..20: note = Target: SCN10A; (-) strand; PAM type: YTN; PAM sequence: CTT
  source 1..20: mol_type = other DNA
ttgtcaccattgcttttgat

SEQ ID NO: 55286 - DNA, 20 bp, synthetic construct
  misc_feature 1..20: note = Description of Artificial Sequence: Synthetic oligonucleotide
  misc_feature 1..20: note = Target: SCN10A; (-) strand; PAM type: YTN; PAM sequence: TTG
  source 1..20: mol_type = other DNA
gcttttgtcaccattgcttt

SEQ ID NO: 55287 - DNA, 20 bp, synthetic construct
  misc_feature 1..20: note = Description of Artificial Sequence: Synthetic oligonucleotide
  misc_feature 1..20: note = Target: SCN10A; (-) strand; PAM type: YTN; PAM sequence: TTT
  source 1..20: mol_type = other DNA
ggcttttgtcaccattgctt

SEQ ID NO: 55288 - DNA, 20 bp, synthetic construct
  misc_feature 1..20: note = Description of Artificial Sequence: Synthetic oligonucleotide
  misc_feature 1..20: note = Target: SCN10A; (-) strand; PAM type: YTN; PAM sequence: TTT
  source 1..20: mol_type = other DNA
tggcttttgtcaccattgct

SEQ ID NO: 55289 - DNA, 20 bp, synthetic construct
  misc_feature 1..20: note = Description of Artificial Sequence: Synthetic oligonucleotide
  misc_feature 1..20: note = Target: SCN10A; (-) strand; PAM type: YTN; PAM sequence: TTG
  source 1..20: mol_type = other DNA
tcaattttggcttttgtcac

SEQ ID NO: 55290 - DNA, 20 bp, synthetic construct
  misc_feature 1..20: note = Description of Artificial Sequence: Synthetic oligonucleotide
  misc_feature 1..20: note = Target: SCN10A; (-) strand; PAM type: YTN; PAM sequence: TTT
  source 1..20: mol_type = other DNA
gtcaattttggcttttgtca

SEQ ID NO: 55291 - DNA, 20 bp, synthetic construct
  misc_feature 1..20: note = Description of Artificial Sequence: Synthetic oligonucleotide
  misc_feature 1..20: note = Target: SCN10A; (-) strand; PAM type: YTN; PAM sequence: TTC
  source 1..20: mol_type = other DNA
catttgtcaattttggcttt

SEQ ID NO: 55292 - DNA, 20 bp, synthetic construct
  misc_feature 1..20: note = Description of Artificial Sequence: Synthetic oligonucleotide
  misc_feature 1..20: note = Target: SCN10A; (-) strand; PAM type: YTN; PAM sequence: TTG
  source 1..20: mol_type = other DNA
gattccatttgtcaattttg

SEQ ID NO: 55293 - DNA, 20 bp, synthetic construct
  misc_feature 1..20: note = Description of Artificial Sequence: Synthetic oligonucleotide
  misc_feature 1..20: note = Target: SCN10A; (-) strand; PAM type: YTN; PAM sequence: TTA
  source 1..20: mol_type = other DNA
attggattccatttgtcaat

SEQ ID NO: 55294 - DNA, 20 bp, synthetic construct
  misc_feature 1..20: note = Description of Artificial Sequence: Synthetic oligonucleotide
  misc_feature 1..20: note = Target: SCN10A; (-) strand; PAM type: YTN; PAM sequence: TTT
  source 1..20: mol_type = other DNA
aattggattccatttgtcaa

SEQ ID NO: 55295 - DNA, 20 bp, synthetic construct
  misc_feature 1..20: note = Description of Artificial Sequence: Synthetic oligonucleotide
  misc_feature 1..20: note = Target: SCN10A; (-) strand; PAM type: YTN; PAM sequence: TTA
  source 1..20: mol_type = other DNA
gtttaattggattccatttg

SEQ ID NO: 55296 - DNA, 20 bp, synthetic construct
  misc_feature 1..20: note = Description of Artificial Sequence: Synthetic oligonucleotide
  misc_feature 1..20: note = Target: SCN10A; (-) strand; PAM type: YTN; PAM sequence: TTT
  source 1..20: mol_type = other DNA
agtttaattggattccattt

SEQ ID NO: 55297 - DNA, 20 bp, synthetic construct
  misc_feature 1..20: note = Description of Artificial Sequence: Synthetic oligonucleotide
  misc_feature 1..20: note = Target: SCN10A; (-) strand; PAM type: YTN; PAM sequence: CTT
  source 1..20: mol_type = other DNA
tagtttaattggattccatt

SEQ ID NO: 55298 - DNA, 20 bp, synthetic construct
  misc_feature 1..20: note = Description of Artificial Sequence: Synthetic oligonucleotide
  misc_feature 1..20: note = Target: SCN10A; (-) strand; PAM type: YTN; PAM sequence: CTC
  source 1..20: mol_type = other DNA
tttagtttaattggattcca

SEQ ID NO: 55299 - DNA, 20 bp, synthetic construct
  misc_feature 1..20: note = Description of Artificial Sequence: Synthetic oligonucleotide
  misc_feature 1..20: note = Target: SCN10A; (-) strand; PAM type: YTN; PAM sequence: CTG
  source 1..20: mol_type = other DNA
tgcagaagctctttagttta

SEQ ID NO: 55300 - DNA, 20 bp, synthetic construct
  misc_feature 1..20: note = Description of Artificial Sequence: Synthetic oligonucleotide
  misc_feature 1..20: note = Target: SCN10A; (-) strand; PAM type: YTN; PAM sequence: TTG
  source 1..20: mol_type = other DNA
ctgtgcagaagctctttagt

SEQ ID NO: 55301 - DNA, 20 bp, synthetic construct
  misc_feature 1..20: note = Description of Artificial Sequence: Synthetic oligonucleotide
  misc_feature 1..20: note = Target: SCN10A; (-) strand; PAM type: YTN; PAM sequence: TTT
  source 1..20: mol_type = other DNA
gctgtgcagaagctctttag

SEQ ID NO: 55302 - DNA, 20 bp, synthetic construct
  misc_feature 1..20: note = Description of Artificial Sequence: Synthetic oligonucleotide
  misc_feature 1..20: note = Target: SCN10A; (-) strand; PAM type: YTN; PAM sequence: TTT
  source 1..20: mol_type = other DNA
tgctgtgcagaagctcttta

SEQ ID NO: 55303 - DNA, 20 bp, synthetic construct
  misc_feature 1..20: note = Description of Artificial Sequence: Synthetic oligonucleotide
  misc_feature 1..20: note = Target: SCN10A; (-) strand; PAM type: YTN; PAM sequence: CTT
  source 1..20: mol_type = other DNA
ttgctgtgcagaagctcttt

SEQ ID NO: 55304 - DNA, 20 bp, synthetic construct
  misc_feature 1..20: note = Description of Artificial Sequence: Synthetic oligonucleotide
  misc_feature 1..20: note = Target: SCN10A; (-) strand; PAM type: YTN; PAM sequence: TTC
  source 1..20: mol_type = other DNA
ttttgctgtgcagaagctct

SEQ ID NO: 55305 - DNA, 20 bp, synthetic construct
  misc_feature 1..20: note = Description of Artificial Sequence: Synthetic oligonucleotide
  misc_feature 1..20: note = Target: SCN10A; (-) strand; PAM type: YTN; PAM sequence: TTT
  source 1..20: mol_type = other DNA
cttttgctgtgcagaagctc

SEQ ID NO: 55306 - DNA, 20 bp, synthetic construct
  misc_feature 1..20: note = Description of Artificial Sequence: Synthetic oligonucleotide
  misc_feature 1..20: note = Target: SCN10A; (-) strand; PAM type: YTN; PAM sequence: CTG
  source 1..20: mol_type = other DNA
atgatagtttcttttgctgt

SEQ ID NO: 55307 - DNA, 20 bp, synthetic construct
  misc_feature 1..20: note = Description of Artificial Sequence: Synthetic oligonucleotide
  misc_feature 1..20: note = Target: SCN10A; (-) strand; PAM type: YTN; PAM sequence: CTC
  source 1..20: mol_type = other DNA
tgatgatagtttcttttgct

SEQ ID NO: 55308 - DNA, 20 bp, synthetic construct
  misc_feature 1..20: note = Description of Artificial Sequence: Synthetic oligonucleotide
  misc_feature 1..20: note = Target: SCN10A; (-) strand; PAM type: YTN; PAM sequence: TTC
  source 1..20: mol_type = other DNA
actctgatgatagtttcttt

SEQ ID NO: 55309 - DNA, 20 bp, synthetic construct
  misc_feature 1..20: note = Description of Artificial Sequence: Synthetic oligonucleotide
  misc_feature 1..20: note = Target: SCN10A; (-) strand; PAM type: YTN; PAM sequence: CTA
  source 1..20: mol_type = other DNA
ttcactctgatgatagtttc

SEQ ID NO: 55310 - DNA, 20 bp, synthetic construct
  misc_feature 1..20: note = Description of Artificial Sequence: Synthetic oligonucleotide
  misc_feature 1..20: note = Target: SCN10A; (-) strand; PAM type: YTN; PAM sequence: TTA
  source 1..20: mol_type = other DNA
cctattcactctgatgatag

SEQ ID NO: 55311 - DNA, 20 bp, synthetic construct
  misc_feature 1..20: note = Description of Artificial Sequence: Synthetic oligonucleotide
  misc_feature 1..20: note = Target: SCN10A; (-) strand; PAM type: YTN; PAM sequence: CTG
  source 1..20: mol_type = other DNA
taggttacctattcactctg

SEQ ID NO: 55312 - DNA, 20 bp, synthetic construct
  misc_feature 1..20: note = Description of Artificial Sequence: Synthetic oligonucleotide
  misc_feature 1..20: note = Target: SCN10A; (-) strand; PAM type: YTN; PAM sequence: TTC
  source 1..20: mol_type = other DNA
tgtaggttacctattcactc

SEQ ID NO: 55313 - DNA, 20 bp, synthetic construct
  misc_feature 1..20: note = Description of Artificial Sequence: Synthetic oligonucleotide
  misc_feature 1..20: note = Target: SCN10A; (-) strand; PAM type: YTN; PAM sequence: CTC
  source 1..20: mol_type = other DNA
ccattctgtaggttacctat

SEQ ID NO: 55314 - DNA, 20 bp, synthetic construct
  misc_feature 1..20: note = Description of Artificial Sequence: Synthetic oligonucleotide
  misc_feature 1..20: note = Target: SCN10A; (-) strand; PAM type: YTN; PAM sequence: TTC
  source 1..20: mol_type = other DNA
tcccattctgtaggttacct

SEQ ID NO: 55315 - DNA, 20 bp, synthetic construct
  misc_feature 1..20: note = Description of Artificial Sequence: Synthetic oligonucleotide
  misc_feature 1..20: note = Target: SCN10A; (-) strand; PAM type: YTN; PAM sequence: TTT
  source 1..20: mol_type = other DNA
ctcccattctgtaggttacc

SEQ ID NO: 55316 - DNA, 20 bp, synthetic construct
  misc_feature 1..20: note = Description of Artificial Sequence: Synthetic oligonucleotide
  misc_feature 1..20: note = Target: SCN10A; (-) strand; PAM type: YTN; PAM sequence: TTT
  source 1..20: mol_type = other DNA
tctcccattctgtaggttac

SEQ ID NO: 55317 - DNA, 20 bp, synthetic construct
  misc_feature 1..20: note = Description of Artificial Sequence: Synthetic oligonucleotide
  misc_feature 1..20: note = Target: SCN10A; (-) strand; PAM type: YTN; PAM sequence: TTG
  source 1..20: mol_type = other DNA
caaaaattttctcccattct

SEQ ID NO: 55318 - DNA, 20 bp, synthetic construct
  misc_feature 1..20: note = Description of Artificial Sequence: Synthetic oligonucleotide
  misc_feature 1..20: note = Target: SCN10A; (-) strand; PAM type: YTN; PAM sequence: TTG
  source 1..20: mol_type = other DNA
atagattgcaaaaattttct

SEQ ID NO: 55319 - DNA, 20 bp, synthetic construct
  misc_feature 1..20: note = Description of Artificial Sequence: Synthetic oligonucleotide
  misc_feature 1..20: note = Target: SCN10A; (-) strand; PAM type: YTN; PAM sequence: TTG
  source 1..20: mol_type = other DNA
tcagattgatagattgcaaa

SEQ ID NO: 55320 - DNA, 20 bp, synthetic construct
  misc_feature 1..20: note = Description of Artificial Sequence: Synthetic oligonucleotide
  misc_feature 1..20: note = Target: SCN10A; (-) strand; PAM type: YTN; PAM sequence: TTT
  source 1..20: mol_type = other DNA
gtcagattgatagattgcaa

SEQ ID NO: 55321 - DNA, 20 bp, synthetic construct
  misc_feature 1..20: note = Description of Artificial Sequence: Synthetic oligonucleotide
  misc_feature 1..20: note = Target: SCN10A; (-) strand; PAM type: YTN; PAM sequence: CTT
  source 1..20: mol_type = other DNA
tgtcagattgatagattgca

SEQ ID NO: 55322 - DNA, 20 bp, synthetic construct
  misc_feature 1..20: note = Description of Artificial Sequence: Synthetic oligonucleotide
  misc_feature 1..20: note = Target: SCN10A; (-) strand; PAM type: YTN; PAM sequence: TTA
  source 1..20: mol_type = other DNA
gccctttgtcagattgatag

SEQ ID NO: 55323 - DNA, 20 bp, synthetic construct
  misc_feature 1..20: note = Description of Artificial Sequence: Synthetic oligonucleotide
  misc_feature 1..20: note = Target: SCN10A; (-) strand; PAM type: YTN; PAM sequence: CTG
  source 1..20: mol_type = other DNA
gatattagccctttgtcaga

SEQ ID NO: 55324 - DNA, 20 bp, synthetic construct
  misc_feature 1..20: note = Description of Artificial Sequence: Synthetic oligonucleotide
  misc_feature 1..20: note = Target: SCN10A; (-) strand; PAM type: YTN; PAM sequence: TTC
  source 1..20: mol_type = other DNA
tggatattagccctttgtca

SEQ ID NO: 55325 - DNA, 20 bp, synthetic construct
  misc_feature 1..20: note = Description of Artificial Sequence: Synthetic oligonucleotide
  misc_feature 1..20: note = Target: SCN10A; (-) strand; PAM type: YTN; PAM sequence: TTG
  source 1..20: mol_type = other DNA
tagattctggatattagccc

SEQ ID NO: 55326 - DNA, 20 bp, synthetic construct
  misc_feature 1..20: note = Description of Artificial Sequence: Synthetic oligonucleotide
  misc_feature 1..20: note = Target: SCN10A; (-) strand; PAM type: YTN; PAM sequence: TTT
  source 1..20: mol_type = other DNA
gtagattctggatattagcc

SEQ ID NO: 55327 - DNA, 20 bp, synthetic construct
  misc_feature 1..20: note = Description of Artificial Sequence: Synthetic oligonucleotide
  misc_feature 1..20: note = Target: SCN10A; (-) strand; PAM type: YTN; PAM sequence: TTT
  source 1..20: mol_type = other DNA
tgtagattctggatattagc

SEQ ID NO: 55328 - DNA, 20 bp, synthetic construct
  misc_feature 1..20: note = Description of Artificial Sequence: Synthetic oligonucleotide
  misc_feature 1..20: note = Target: SCN10A; (-) strand; PAM type: YTN; PAM sequence: TTT
  source 1..20: mol_type = other DNA
ttgtagattctggatattag

SEQ ID NO: 55329 - DNA, 20 bp, synthetic construct
  misc_feature 1..20: note = Description of Artificial Sequence: Synthetic oligonucleotide
  misc_feature 1..20: note = Target: SCN10A; (-) strand; PAM type: YTN; PAM sequence: TTT
  source 1..20: mol_type = other DNA
tttgtagattctggatatta

SEQ ID NO: 55330 - DNA, 20 bp, synthetic construct
  misc_feature 1..20: note = Description of Artificial Sequence: Synthetic oligonucleotide
  misc_feature 1..20: note = Target: SCN10A; (-) strand; PAM type: YTN; PAM sequence: TTA
  source 1..20: mol_type = other DNA
agttttttgtagattctgga

SEQ ID NO: 55331 - DNA, 20 bp, synthetic construct
  misc_feature 1..20: note = Description of Artificial Sequence: Synthetic oligonucleotide
  misc_feature 1..20: note = Target: SCN10A; (-) strand; PAM type: YTN; PAM sequence: TTT
  source 1..20: mol_type = other DNA
aagttttttgtagattctgg

SEQ ID NO: 55332 - DNA, 20 bp, synthetic construct
  misc_feature 1..20: note = Description of Artificial Sequence: Synthetic oligonucleotide
  misc_feature 1..20: note = Target: SCN10A; (-) strand; PAM type: YTN; PAM sequence: TTG
  source 1..20: mol_type = other DNA
tttaagttttttgtagattc

SEQ ID NO: 55333 - DNA, 20 bp, synthetic construct
  misc_feature 1..20: note = Description of Artificial Sequence: Synthetic oligonucleotide
  misc_feature 1..20: note = Target: SCN10A; (-) strand; PAM type: YTN; PAM sequence: TTT
  source 1..20: mol_type = other DNA
gtttaagttttttgtagatt

SEQ ID NO: 55334 - DNA, 20 bp, synthetic construct
  misc_feature 1..20: note = Description of Artificial Sequence: Synthetic oligonucleotide
  misc_feature 1..20: note = Target: SCN10A; (-) strand; PAM type: YTN; PAM sequence: TTG
  source 1..20: mol_type = other DNA
taaatttgtttaagtttttt

SEQ ID NO: 55335 - DNA, 20 bp, synthetic construct
  misc_feature 1..20: note = Description of Artificial Sequence: Synthetic oligonucleotide
  misc_feature 1..20: note = Target: SCN10A; (-) strand; PAM type: YTN; PAM sequence: CTT
  source 1..20: mol_type = other DNA
gtaaatttgtttaagttttt

SEQ ID NO: 55336 - DNA, 20 bp, synthetic construct
  misc_feature 1..20: note = Description of Artificial Sequence: Synthetic oligonucleotide
  misc_feature 1..20: note = Target: SCN10A; (-) strand; PAM type: YTN; PAM sequence: TTC
  source 1..20: mol_type = other DNA
ttgtaaatttgtttaagttt

SEQ ID NO: 55337 - DNA, 20 bp, synthetic construct
  misc_feature 1..20: note = Description of Artificial Sequence: Synthetic oligonucleotide
  misc_feature 1..20: note = Target: SCN10A; (-) strand; PAM type: YTN; PAM sequence: TTT
  source 1..20: mol_type = other DNA
cttgtaaatttgtttaagtt

SEQ ID NO: 55338 - DNA, 20 bp, synthetic construct
  misc_feature 1..20: note = Description of Artificial Sequence: Synthetic oligonucleotide
  misc_feature 1..20: note = Target: SCN10A; (-) strand; PAM type: YTN; PAM sequence: TTT
  source 1..20: mol_type = other DNA
tcttgtaaatttgtttaagt

SEQ ID NO: 55339 - DNA, 20 bp, synthetic construct
  misc_feature 1..20: note = Description of Artificial Sequence: Synthetic oligonucleotide
  misc_feature 1..20: note = Target: SCN10A; (-) strand; PAM type: YTN; PAM sequence: TTT
  source 1..20: mol_type = other DNA
ttcttgtaaatttgtttaag

SEQ ID NO: 55340 - DNA, 20 bp, synthetic construct
  misc_feature 1..20: note = Description of Artificial Sequence: Synthetic oligonucleotide
  misc_feature 1..20: note = Target: SCN10A; (-) strand; PAM type: YTN; PAM sequence: TTT
  source 1..20: mol_type = other DNA
tttcttgtaaatttgtttaa

SEQ ID NO: 55341 - DNA, 20 bp, synthetic construct
  misc_feature 1..20: note = Description of Artificial Sequence: Synthetic oligonucleotide
  misc_feature 1..20: note = Target: SCN10A; (-) strand; PAM type: YTN; PAM sequence: TTG
  source 1..20: mol_type = other DNA
ttttttcttgtaaatttgtt

SEQ ID NO: 55342 - DNA, 20 bp, synthetic construct
  misc_feature 1..20: note = Description of Artificial Sequence: Synthetic oligonucleotide
  misc_feature 1..20: note = Target: SCN10A; (-) strand; PAM type: YTN; PAM sequence: TTG
  source 1..20: mol_type = other DNA
atggagttgttttttcttgt

SEQ ID NO: 55343 - DNA, 20 bp, synthetic construct
  misc_feature 1..20: note = Description of Artificial Sequence: Synthetic oligonucleotide
  misc_feature 1..20: note = Target: SCN10A; (-) strand; PAM type: YTN; PAM sequence: TTT
  source 1..20: mol_type = other DNA
gatggagttgttttttcttg

SEQ ID NO: 55344 - DNA, 20 bp, synthetic construct
  misc_feature 1..20: note = Description of Artificial Sequence: Synthetic oligonucleotide
  misc_feature 1..20: note = Target: SCN10A; (-) strand; PAM type: YTN; PAM sequence: TTT
  source 1..20: mol_type = other DNA
tgatggagttgttttttctt

SEQ ID NO: 55345 - DNA, 20 bp, synthetic construct
  misc_feature 1..20: note = Description of Artificial Sequence: Synthetic oligonucleotide
  misc_feature 1..20: note = Target: SCN10A; (-) strand; PAM type: YTN; PAM sequence: TTT
  source 1..20: mol_type = other DNA
ttgatggagttgttttttct

SEQ ID NO: 55346 - DNA, 20 bp, synthetic construct
  misc_feature 1..20: note = Description of Artificial Sequence: Synthetic oligonucleotide
  misc_feature 1..20: note = Target: SCN10A; (-) strand; PAM type: YTN; PAM sequence: CTT
  source 1..20: mol_type = other DNA
tttgatggagttgttttttc

SEQ ID NO: 55347 - DNA, 20 bp, synthetic construct
  misc_feature 1..20: note = Description of Artificial Sequence: Synthetic oligonucleotide
  misc_feature 1..20: note = Target: SCN10A; (-) strand; PAM type: YTN; PAM sequence: TTG
  source 1..20: mol_type = other DNA
cccactttttgatggagttg

SEQ ID NO: 55348 - DNA, 20 bp, synthetic construct
  misc_feature 1..20: note = Description of Artificial Sequence: Synthetic oligonucleotide
  misc_feature 1..20: note = Target: SCN10A; (-) strand; PAM type: YTN; PAM sequence: TTT
  source 1..20: mol_type = other DNA
gcccactttttgatggagtt

SEQ ID NO: 55349 - DNA, 20 bp, synthetic construct
  misc_feature 1..20: note = Description of Artificial Sequence: Synthetic oligonucleotide
  misc_feature 1..20: note = Target: SCN10A; (-) strand; PAM type: YTN; PAM sequence: CTT
  source 1..20: mol_type = other DNA
tgcccactttttgatggagt

SEQ ID NO: 55350 - DNA, 20 bp, synthetic construct
  misc_feature 1..20: note = Description of Artificial Sequence: Synthetic oligonucleotide
  misc_feature 1..20: note = Target: SCN10A; (-) strand; PAM type: YTN; PAM sequence: TTC
  source 1..20: mol_type = other DNA
atatcctttgcccacttttt

SEQ ID NO: 55351 - DNA, 20 bp, synthetic construct
  misc_feature 1..20: note = Description of Artificial Sequence: Synthetic oligonucleotide
  misc_feature 1..20: note = Target: SCN10A; (-) strand; PAM type: YTN; PAM sequence: CTG
  source 1..20: mol_type = other DNA
ttcatatcctttgcccactt

SEQ ID NO: 55352 - DNA, 20 bp, synthetic construct
  misc_feature 1..20: note = Description of Artificial Sequence: Synthetic oligonucleotide
  misc_feature 1..20: note = Target: SCN10A; (-) strand; PAM type: YTN; PAM sequence: TTG
  source 1..20: mol_type = other DNA
agaagtgtctgttcatatcc

SEQ ID NO: 55353 - DNA, 20 bp, synthetic construct
  misc_feature 1..20: note = Description of Artificial Sequence: Synthetic oligonucleotide
  misc_feature 1..20: note = Target: SCN10A; (-) strand; PAM type: YTN; PAM sequence: TTT
  source 1..20: mol_type = other DNA
gagaagtgtctgttcatatc

SEQ ID NO: 55354 - DNA, 20 bp, synthetic construct
  misc_feature 1..20: note = Description of Artificial Sequence: Synthetic oligonucleotide
  misc_feature 1..20: note = Target: SCN10A; (-) strand; PAM type: YTN; PAM sequence: TTT
  source 1..20: mol_type = other DNA
tgagaagtgtctgttcatat

SEQ ID NO: 55355 - DNA, 20 bp, synthetic construct
  misc_feature 1..20: note = Description of Artificial Sequence: Synthetic oligonucleotide
  misc_feature 1..20: note = Target: SCN10A; (-) strand; PAM type: YTN; PAM sequence: CTT
  source 1..20: mol_type = other DNA
ttgagaagtgtctgttcata

SEQ ID NO: 55356 - DNA, 20 bp, synthetic construct
  misc_feature 1..20: note = Description of Artificial Sequence: Synthetic oligonucleotide
  misc_feature 1..20: note = Target: SCN10A; (-) strand; PAM type: YTN; PAM sequence: TTC
  source 1..20: mol_type = other DNA
ttttgagaagtgtctgttca

SEQ ID NO: 55357 - DNA, 20 bp, synthetic construct
  misc_feature 1..20: note = Description of Artificial Sequence: Synthetic oligonucleotide
  misc_feature 1..20: note = Target: SCN10A; (-) strand; PAM type: YTN; PAM sequence: CTT
  source 1..20: mol_type = other DNA
cttttgagaagtgtctgttc

SEQ ID NO: 55358 - DNA, 20 bp, synthetic construct
  misc_feature 1..20: note = Description of Artificial Sequence: Synthetic oligonucleotide
  misc_feature 1..20: note = Target: SCN10A; (-) strand; PAM type: YTN; PAM sequence: CTG
  source 1..20: mol_type = other DNA
cataaatgtcttcttttgag

SEQ ID NO: 55359 - DNA, 20 bp, synthetic construct
  misc_feature 1..20: note = Description of Artificial Sequence: Synthetic oligonucleotide
  misc_feature 1..20: note = Target: SCN10A; (-) strand; PAM type: YTN; PAM sequence: TTG
  source 1..20: mol_type = other DNA
gctgcataaatgtcttcttt

SEQ ID NO: 55360 - DNA, 20 bp, synthetic construct
  misc_feature 1..20: note = Description of Artificial Sequence: Synthetic oligonucleotide
  misc_feature 1..20: note = Target: SCN10A; (-) strand; PAM type: YTN; PAM sequence: TTA
  source 1..20: mol_type = other DNA
ttggctgcataaatgtcttc

SEQ ID NO: 55361 - DNA, 20 bp, synthetic construct
  misc_feature 1..20: note = Description of Artificial Sequence: Synthetic oligonucleotide
  misc_feature 1..20: note = Target: SCN10A; (-) strand; PAM type: YTN; PAM sequence: TTT
  source 1..20: mol_type = other DNA
attggctgcataaatgtctt

SEQ ID NO: 55362 - DNA, 20 bp, synthetic construct
  misc_feature 1..20: note = Description of Artificial Sequence: Synthetic oligonucleotide
  misc_feature 1..20: note = Target: SCN10A; (-) strand; PAM type: YTN; PAM sequence: TTA
  source 1..20: mol_type = other DNA
tcatatgtttattggctgca

SEQ ID NO: 55363 - DNA, 20 bp, synthetic construct
  misc_feature 1..20: note = Description of Artificial Sequence: Synthetic oligonucleotide
  misc_feature 1..20: note = Target: SCN10A; (-) strand; PAM type: YTN; PAM sequence: TTT
  source 1..20: mol_type = other DNA
atcatatgtttattggctgc

SEQ ID NO: 55364 - DNA, 20 bp, synthetic construct
  misc_feature 1..20: note = Description of Artificial Sequence: Synthetic oligonucleotide
  misc_feature 1..20: note = Target: SCN10A; (-) strand; PAM type: YTN; PAM sequence: TTT
  source 1..20: mol_type = other DNA
tatcatatgtttattggctg

SEQ ID NO: 55365 - DNA, 20 bp, synthetic construct
  misc_feature 1..20: note = Description of Artificial Sequence: Synthetic oligonucleotide
  misc_feature 1..20: note = Target: SCN10A; (-) strand; PAM type: YTN; PAM sequence: TTT
  source 1..20: mol_type = other DNA
ttatcatatgtttattggct

SEQ ID NO: 55366 - DNA, 20 bp, synthetic construct
  misc_feature 1..20: note = Description of Artificial Sequence: Synthetic oligonucleotide
  misc_feature 1..20: note = Target: SCN10A; (-) strand; PAM type: YTN; PAM sequence: CTT
  source 1..20: mol_type = other DNA
tttatcatatgtttattggc

SEQ ID NO: 55367 - DNA, 20 bp, synthetic construct
  misc_feature 1..20: note = Description of Artificial Sequence: Synthetic oligonucleotide
  misc_feature 1..20: note = Target: SCN10A; (-) strand; PAM type: YTN; PAM sequence: CTA
  source 1..20: mol_type = other DNA
atgaccagtgatgatgagct

SEQ ID NO: 55368 - DNA, 20 bp, synthetic construct
  misc_feature 1..20: note = Description of Artificial Sequence: Synthetic oligonucleotide
  misc_feature 1..20: note = Target: SCN10A; (-) strand; PAM type: YTN; PAM sequence: CTC
  source 1..20: mol_type = other DNA
taatgaccagtgatgatgag

SEQ ID NO: 55369 - DNA, 20 bp, synthetic construct
  misc_feature 1..20: note = Description of Artificial Sequence: Synthetic oligonucleotide
  misc_feature 1..20: note = Target: SCN10A; (-) strand; PAM type: YTN; PAM sequence: TTC
  source 1..20: mol_type = other DNA
tctaatgaccagtgatgatg

SEQ ID NO: 55370 - DNA, 20 bp, synthetic construct
  misc_feature 1..20: note = Description of Artificial Sequence: Synthetic oligonucleotide
  misc_feature 1..20: note = Target: SCN10A; (-) strand; PAM type: YTN; PAM sequence: TTT
  source 1..20: mol_type = other DNA
ctctaatgaccagtgatgat

SEQ ID NO: 55371 - DNA, 20 bp, synthetic construct
  misc_feature 1..20: note = Description of Artificial Sequence: Synthetic oligonucleotide
  misc_feature 1..20: note = Target: SCN10A; (-) strand; PAM type: YTN; PAM sequence: CTG
  source 1..20: mol_type = other DNA
gcatttctctaatgaccagt

SEQ ID NO: 55372 - DNA, 20 bp, synthetic construct
  misc_feature 1..20: note = Description of Artificial Sequence: Synthetic oligonucleotide
  misc_feature 1..20: note = Target: SCN10A; (-) strand; PAM type: YTN; PAM sequence: TTG
  source 1..20: mol_type = other DNA
actggcatttctctaatgac

SEQ ID NO: 55373 - DNA, 20 bp, synthetic construct
  misc_feature 1..20: note = Description of Artificial Sequence: Synthetic oligonucleotide
  misc_feature 1..20: note = Target: SCN10A; (-) strand; PAM type: YTN; PAM sequence: TTT
  source 1..20: mol_type = other DNA
gactggcatttctctaatga

SEQ ID NO: 55374 - DNA, 20 bp, synthetic construct
  misc_feature 1..20: note = Description of Artificial Sequence: Synthetic oligonucleotide
  misc_feature 1..20: note = Target: SCN10A; (-) strand; PAM type: YTN; PAM sequence: TTT
  source 1..20: mol_type = other DNA
tgactggcatttctctaatg

SEQ ID NO: 55375 - DNA, 20 bp, synthetic construct
  misc_feature 1..20: note = Description of Artificial Sequence: Synthetic oligonucleotide
  misc_feature 1..20: note = Target: SCN10A; (-) strand; PAM type: YTN; PAM sequence: TTG
  source 1..20: mol_type = other DNA
tggttttgactggcatttct

SEQ ID NO: 55376 - DNA, 20 bp, synthetic construct
  misc_feature 1..20: note = Description of Artificial Sequence: Synthetic oligonucleotide
  misc_feature 1..20: note = Target: SCN10A; (-) strand; PAM type: YTN; PAM sequence: CTC
  source 1..20: mol_type = other DNA
attgtggttttgactggcat

SEQ ID NO: 55377 - DNA, 20 bp, synthetic construct
  misc_feature 1..20: note = Description of Artificial Sequence: Synthetic oligonucleotide
  misc_feature 1..20: note = Target: SCN10A; (-) strand; PAM type: YTN; PAM sequence: CTC
  source 1..20: mol_type = other DNA
catctcattgtggttttgac

SEQ ID NO: 55378 - DNA, 20 bp, synthetic construct
  misc_feature 1..20: note = Description of Artificial Sequence: Synthetic oligonucleotide
  misc_feature 1..20: note = Target: SCN10A; (-) strand; PAM type: YTN; PAM sequence: CTG
  source 1..20: mol_type = other DNA
gtatgagactccatctcatt

SEQ ID NO: 55379 - DNA, 20 bp, synthetic construct
  misc_feature 1..20: note = Description of Artificial Sequence: Synthetic oligonucleotide
  misc_feature 1..20: note = Target: SCN10A; (-) strand; PAM type: YTN; PAM sequence: CTA
  source 1..20: mol_type = other DNA
actggtatgagactccatct

SEQ ID NO: 55380 - DNA, 20 bp, synthetic construct
  misc_feature 1..20: note = Description of Artificial Sequence: Synthetic oligonucleotide
  misc_feature 1..20: note = Target: SCN10A; (-) strand; PAM type: YTN; PAM sequence: TTC
  source 1..20: mol_type = other DNA
taactggtatgagactccat

SEQ ID NO: 55381 - DNA, 20 bp, synthetic construct
  misc_feature 1..20: note = Description of Artificial Sequence: Synthetic oligonucleotide
  misc_feature 1..20: note = Target: SCN10A; (-) strand; PAM type: YTN; PAM sequence: CTC
  source 1..20: mol_type = other DNA
cattctaactggtatgagac

SEQ ID NO: 55382 - DNA, 20 bp, synthetic construct
  misc_feature 1..20: note = Description of Artificial Sequence: Synthetic oligonucleotide
  misc_feature 1..20: note = Target: SCN10A; (-) strand; PAM type: YTN; PAM sequence: TTA
  source 1..20: mol_type = other DNA
atgatctccattctaactgg

SEQ ID NO: 55383 - DNA, 20 bp, synthetic construct
  misc_feature 1..20: note = Description of Artificial Sequence: Synthetic oligonucleotide
  misc_feature 1..20: note = Target: SCN10A; (-) strand; PAM type: YTN; PAM sequence: TTT
  source 1..20: mol_type = other DNA
aatgatctccattctaactg

SEQ ID NO: 55384 - DNA, 20 bp, synthetic construct
  misc_feature 1..20: note = Description of Artificial Sequence: Synthetic oligonucleotide
  misc_feature 1..20: note = Target: SCN10A; (-) strand; PAM type: YTN; PAM sequence: TTT
  source 1..20: mol_type = other DNA
taatgatctccattctaact

SEQ ID NO: 55385 - DNA, 20 bp, synthetic construct
  misc_feature 1..20: note = Description of Artificial Sequence: Synthetic oligonucleotide
  misc_feature 1..20: note = Target: SCN10A; (-) strand; PAM type: YTN; PAM sequence: TTT
  source 1..20: mol_type = other DNA
ttaatgatctccattctaac

SEQ ID NO: 55386 - DNA, 20 bp, synthetic construct
  misc_feature 1..20: note = Description of Artificial Sequence: Synthetic oligonucleotide
  misc_feature 1..20: note = Target: SCN10A; (-) strand; PAM type: YTN; PAM sequence: CTT
  source 1..20: mol_type = other DNA
tttaatgatctccattctaa

SEQ ID NO: 55387 - DNA, 20 bp, synthetic construct
  misc_feature 1..20: note = Description of Artificial Sequence: Synthetic oligonucleotide
  misc_feature 1..20: note = Target: SCN10A; (-) strand; PAM type: YTN; PAM sequence: CTG
  source 1..20: mol_type = other DNA
actttttaatgatctccatt

SEQ ID NO: 55388 - DNA, 20 bp, synthetic construct
  misc_feature 1..20: note = Description of Artificial Sequence: Synthetic oligonucleotide
  misc_feature 1..20: note = Target: SCN10A; (-) strand; PAM type: YTN; PAM sequence: TTC
  source 1..20: mol_type = other DNA
ctgactttttaatgatctcc

SEQ ID NO: 55389 - DNA, 20 bp, synthetic construct
  misc_feature 1..20: note = Description of Artificial Sequence: Synthetic oligonucleotide
  misc_feature 1..20: note = Target: SCN10A; (-) strand; PAM type: YTN; PAM sequence: TTT
  source 1..20: mol_type = other DNA
cctgactttttaatgatctc

SEQ ID NO: 55390 - DNA, 20 bp, synthetic construct
  misc_feature 1..20: note = Description of Artificial Sequence: Synthetic oligonucleotide
  misc_feature 1..20: note = Target: SCN10A; (-) strand; PAM type: YTN; PAM sequence: TTG
  source 1..20: mol_type = other DNA
tttcctgactttttaatgat

SEQ ID NO: 55391 - DNA, 20 bp, synthetic construct
  misc_feature 1..20: note = Description of Artificial Sequence: Synthetic oligonucleotide
  misc_feature 1..20: note = Target: SCN10A; (-) strand; PAM type: YTN; PAM sequence: CTG
  source 1..20: mol_type = other DNA
ttgtttcctgactttttaat

SEQ ID NO: 55392 - DNA, 20 bp, synthetic construct
  misc_feature 1..20: note = Description of Artificial Sequence: Synthetic oligonucleotide
  misc_feature 1..20: note = Target: SCN10A; (-) strand; PAM type: YTN; PAM sequence: CTC
  source 1..20: mol_type = other DNA
cagcatctgttgtttcctga

SEQ ID NO: 55393 - DNA, 20 bp, synthetic construct
  misc_feature 1..20: note = Description of Artificial Sequence: Synthetic oligonucleotide
  misc_feature 1..20: note = Target: SCN10A; (-) strand; PAM type: YTN; PAM sequence: CTC
  source 1..20: mol_type = other DNA
tccagcatctgttgtttcct

SEQ ID NO: 55394 - DNA, 20 bp, synthetic construct
  misc_feature 1..20: note = Description of Artificial Sequence: Synthetic oligonucleotide
  misc_feature 1..20: note = Target: SCN10A; (-) strand; PAM type: YTN; PAM sequence: CTC
  source 1..20: mol_type = other DNA
cacatcctctccagcatctg

SEQ ID NO: 55395 - DNA, 20 bp, synthetic construct
  misc_feature 1..20: note = Description of Artificial Sequence: Synthetic oligonucleotide
  misc_feature 1..20: note = Target: SCN10A; (-) strand; PAM type: YTN; PAM sequence: CTC
  source 1..20: mol_type = other DNA
tccacatcctctccagcatc

SEQ ID NO: 55396 - DNA, 20 bp, synthetic construct
  misc_feature 1..20: note = Description of Artificial Sequence: Synthetic oligonucleotide
  misc_feature 1..20: note = Target: SCN10A; (-) strand; PAM type: YTN; PAM sequence: CTA
  source 1..20: mol_type = other DNA
tctctccacatcctctccag

SEQ ID NO: 55397 - DNA, 20 bp, synthetic construct
  misc_feature 1..20: note = Description of Artificial Sequence: Synthetic oligonucleotide
  misc_feature 1..20: note = Target: SCN10A; (-) strand; PAM type: YTN; PAM sequence: TTC
  source 1..20: mol_type = other DNA
ctatctctccacatcctctc

SEQ ID NO: 55398 - DNA, 20 bp, synthetic construct
  misc_feature 1..20: note = Description of Artificial Sequence: Synthetic oligonucleotide
  misc_feature 1..20: note = Target: SCN10A; (-) strand; PAM type: YTN; PAM sequence: CTC
  source 1..20: mol_type = other DNA
ccaccaacagtgtaaaagca

SEQ ID NO: 55399 - DNA, 20 bp, synthetic construct
  misc_feature 1..20: note = Description of Artificial Sequence: Synthetic oligonucleotide
  misc_feature 1..20: note = Target: SCN10A; (-) strand; PAM type: YTN; PAM sequence: TTA
  source 1..20: mol_type = other DNA
cactcccaccaacagtgtaa

SEQ ID NO: 55400 - DNA, 20 bp, synthetic construct
  misc_feature 1..20: note = Description of Artificial Sequence: Synthetic oligonucleotide
  misc_feature 1..20: note = Target: SCN10A; (-) strand; PAM type: YTN; PAM sequence: TTT
  source 1..20: mol_type = other DNA
acactcccaccaacagtgta

SEQ ID NO: 55401 - DNA, 20 bp, synthetic construct
  misc_feature 1..20: note = Description of Artificial Sequence: Synthetic oligonucleotide
  misc_feature 1..20: note = Target: SCN10A; (-) strand; PAM type: YTN; PAM sequence: CTA
  source 1..20: mol_type = other DNA
atttacactcccaccaacag

SEQ ID NO: 55402 - DNA, 20 bp, synthetic construct
  misc_feature 1..20: note = Description of Artificial Sequence: Synthetic oligonucleotide
  misc_feature 1..20: note = Target: SCN10A; (-) strand; PAM type: YTN; PAM sequence: TTG
  source 1..20: mol_type = other DNA
aactaatttacactcccacc

SEQ ID NO: 55403 - DNA, 20 bp, synthetic construct
  misc_feature 1..20: note = Description of Artificial Sequence: Synthetic oligonucleotide
  misc_feature 1..20: note = Target: SCN10A; (-) strand; PAM type: YTN; PAM sequence: TTC
  source 1..20: mol_type = other DNA
cacaatggttgaactaattt

SEQ ID NO: 55404 - DNA, 20 bp, synthetic construct
  misc_feature 1..20: note = Description of Artificial Sequence: Synthetic oligonucleotide
  misc_feature 1..20: note = Target: SCN10A; (-) strand; PAM type: YTN; PAM sequence: CTT
  source 1..20: mol_type = other DNA
ccacaatggttgaactaatt

SEQ ID NO: 55405 - DNA, 20 bp, synthetic construct
  misc_feature 1..20: note = Description of Artificial Sequence: Synthetic oligonucleotide
  misc_feature 1..20: note = Target: SCN10A; (-) strand; PAM type: YTN; PAM sequence: CTG
  source 1..20: mol_type = other DNA
tcttccacaatggttgaact

SEQ ID NO: 55406 - DNA, 20 bp, synthetic construct
  misc_feature 1..20: note = Description of Artificial Sequence: Synthetic oligonucleotide
  misc_feature 1..20: note = Target: SCN10A; (-) strand; PAM type: YTN; PAM sequence: TTG
  source 1..20: mol_type = other DNA
aggaatcaccacactgtctt

SEQ ID NO: 55407 - DNA, 20 bp, synthetic construct
  misc_feature 1..20: note = Description of Artificial Sequence: Synthetic oligonucleotide
  misc_feature 1..20: note = Target: SCN10A; (-) strand; PAM type: YTN; PAM sequence: CTT
  source 1..20: mol_type = other DNA
gaggaatcaccacactgtct

SEQ ID NO: 55408 - DNA, 20 bp, synthetic construct
  misc_feature 1..20: note = Description of Artificial Sequence: Synthetic oligonucleotide
  misc_feature 1..20: note = Target: SCN10A; (-) strand; PAM type: YTN; PAM sequence: CTA
  source 1..20: mol_type = other DNA
gatccttgaggaatcaccac

SEQ ID NO: 55409 - DNA, 20 bp, synthetic construct
  misc_feature 1..20: note = Description of Artificial Sequence: Synthetic oligonucleotide
  misc_feature 1..20: note = Target: SCN10A; (-) strand; PAM type: YTN; PAM sequence: TTC
  source 1..20: mol_type = other DNA
tagatccttgaggaatcacc

SEQ ID NO: 55410 - DNA, 20 bp, synthetic construct
  misc_feature 1..20: note = Description of Artificial Sequence: Synthetic oligonucleotide
  misc_feature 1..20: note = Target: SCN10A; (-) strand; PAM type: YTN; PAM sequence: CTG
  source 1..20: mol_type = other DNA
gttctagatccttgaggaat

SEQ ID NO: 55411 - DNA, 20 bp, synthetic construct
  misc_feature 1..20: note = Description of Artificial Sequence: Synthetic oligonucleotide
  misc_feature 1..20: note = Target: SCN10A; (-) strand; PAM type: YTN; PAM sequence: TTC
  source 1..20: mol_type = other DNA
tggttctagatccttgagga

SEQ ID NO: 55412 - DNA, 20 bp, synthetic construct
  misc_feature 1..20: note = Description of Artificial Sequence: Synthetic oligonucleotide
  misc_feature 1..20: note = Target: SCN10A; (-) strand; PAM type: YTN; PAM sequence: TTT
  source 1..20: mol_type = other DNA
ctggttctagatccttgagg

SEQ ID NO: 55413 - DNA, 20 bp, synthetic construct
  misc_feature 1..20: note = Description of Artificial Sequence: Synthetic oligonucleotide
  misc_feature 1..20: note = Target: SCN10A; (-) strand; PAM type: YTN; PAM sequence: CTG
  source 1..20: mol_type = other DNA
ggtcaaatggtgtttctggt

SEQ ID NO: 55414 - DNA, 20 bp, synthetic construct
  misc_feature 1..20: note = Description of Artificial Sequence: Synthetic oligonucleotide
  misc_feature 1..20: note = Target: SCN10A; (-) strand; PAM type: YTN; PAM sequence: TTG
  source 1..20: mol_type = other DNA
ctgggtcaaatggtgtttct

SEQ ID NO: 55415 - DNA, 20 bp, synthetic construct
  misc_feature 1..20: note = Description of Artificial Sequence: Synthetic oligonucleotide
  misc_feature 1..20: note = Target: SCN10A; (-) strand; PAM type: YTN; PAM sequence: TTG
  source 1..20: mol_type = other DNA
ggtatatacccagtaatgga

SEQ ID NO: 55416 - DNA, 20 bp, synthetic construct
  misc_feature 1..20: note = Description of Artificial Sequence: Synthetic oligonucleotide
  misc_feature 1..20: note = Target: SCN10A; (-) strand; PAM type: YTN; PAM sequence: TTT
  source 1..20: mol_type = other DNA
gggtatatacccagtaatgg

SEQ ID NO: 55417 - DNA, 20 bp, synthetic construct
  misc_feature 1..20: note = Description of Artificial Sequence: Synthetic oligonucleotide
  misc_feature 1..20: note = Target: SCN10A; (-) strand; PAM type: YTN; PAM sequence: CTT
  source 1..20: mol_type = other DNA
tgggtatatacccagtaatg

SEQ ID NO: 55418 - DNA, 20 bp, synthetic construct
  misc_feature 1..20: note = Description of Artificial Sequence: Synthetic oligonucleotide
  misc_feature 1..20: note = Target: SCN10A; (-) strand; PAM type: YTN; PAM sequence: TTA
  source 1..20: mol_type = other DNA
taatcctttgggtatatacc

SEQ ID NO: 55419 - DNA, 20 bp, synthetic construct
  misc_feature 1..20: note = Description of Artificial Sequence: Synthetic oligonucleotide
  misc_feature 1..20: note = Target: SCN10A; (-) strand; PAM type: YTN; PAM sequence: TTT
  source 1..20: mol_type = other DNA
ataatcctttgggtatatac

SEQ ID NO: 55420 - DNA, 20 bp, synthetic construct
  misc_feature 1..20: note = Description of Artificial Sequence: Synthetic oligonucleotide
  misc_feature 1..20: note = Target: SCN10A; (-) strand; PAM type: YTN; PAM sequence: TTA
  source 1..20: mol_type = other DNA
tagtagaataatttataatc

SEQ ID NO: 55421 - DNA, 20 bp, synthetic construct
  misc_feature 1..20: note = Description of Artificial Sequence: Synthetic oligonucleotide
  misc_feature 1..20: note = Target: SCN10A; (-) strand; PAM type: YTN; PAM sequence: TTT
  source 1..20: mol_type = other DNA
atagtagaataatttataat

SEQ ID NO: 55422 - DNA, 20 bp, synthetic construct
  misc_feature 1..20: note = Description of Artificial Sequence: Synthetic oligonucleotide
  misc_feature 1..20: note = Target: SCN10A; (-) strand; PAM type: YTN; PAM sequence: CTT
  source 1..20: mol_type = other DNA
tatagtagaataatttataa

SEQ ID NO: 55423 - DNA, 20 bp, synthetic construct
  misc_feature 1..20: note = Description of Artificial Sequence: Synthetic oligonucleotide
  misc_feature 1..20: note = Target: SCN10A; (-) strand; PAM type: YTN; PAM sequence: TTG
  source 1..20: mol_type = other DNA
tatctttatagtagaataat

SEQ ID NO: 55424 - DNA, 20 bp, synthetic construct
  misc_feature 1..20: note = Description of Artificial Sequence: Synthetic oligonucleotide
  misc_feature 1..20: note = Target: SCN10A; (-) strand; PAM type: YTN; PAM sequence: CTT
  source 1..20: mol_type = other DNA
gtatctttatagtagaataa

SEQ ID NO: 55425 - DNA, 20 bp, synthetic construct
  misc_feature 1..20: note = Description of Artificial Sequence: Synthetic oligonucleotide
  misc_feature 1..20: note = Target: SCN10A; (-) strand; PAM type: YTN; PAM sequence: TTG
  source 1..20: mol_type = other DNA
tcaatagtgccacaataaac

SEQ ID NO: 55426 - DNA, 20 bp, synthetic construct
  misc_feature 1..20: note = Description of Artificial Sequence: Synthetic oligonucleotide
  misc_feature 1..20: note = Target: SCN10A; (-) strand; PAM type: YTN; PAM sequence: CTA
  source 1..20: mol_type = other DNA
ttgtcaatagtgccacaata

SEQ ID NO: 55427 - DNA, 20 bp, synthetic construct
  misc_feature 1..20: note = Description of Artificial Sequence: Synthetic oligonucleotide
  misc_feature 1..20: note = Target: SCN10A; (-) strand; PAM type: YTN; PAM sequence: TTG
  source 1..20: mol_type = other DNA
ctattgtcaatagtgccaca

SEQ ID NO: 55428 - DNA, 20 bp, synthetic construct
  misc_feature 1..20: note = Description of Artificial Sequence: Synthetic oligonucleotide
  misc_feature 1..20: note = Target: SCN10A; (-) strand; PAM type: YTN; PAM sequence: TTT
  source 1..20: mol_type = other DNA
gctattgtcaatagtgccac

SEQ ID NO: 55429 - DNA, 20 bp, synthetic construct
  misc_feature 1..20: note = Description of Artificial Sequence: Synthetic oligonucleotide
  misc_feature 1..20: note = Target: SCN10A; (-) strand; PAM type: YTN; PAM sequence: CTT
  source 1..20: mol_type = other DNA
tgctattgtcaatagtgcca

SEQ ID NO: 55430 - DNA, 20 bp, synthetic construct
  misc_feature 1..20: note = Description of Artificial Sequence: Synthetic oligonucleotide
  misc_feature 1..20: note = Target: SCN10A; (-) strand; PAM type: YTN; PAM sequence: TTC
  source 1..20: mol_type = other DNA
caagtctttgctattgtcaa

SEQ ID NO: 55431 - DNA, 20 bp, synthetic construct
  misc_feature 1..20: note = Description of Artificial Sequence: Synthetic oligonucleotide
  misc_feature 1..20: note = Target: SCN10A; (-) strand; PAM type: YTN; PAM sequence: TTA
  source 1..20: mol_type = other DNA
gttccaagtctttgctattg

SEQ ID NO: 55432 - DNA, 20 bp, synthetic construct
  misc_feature 1..20: note = Description of Artificial Sequence: Synthetic oligonucleotide
  misc_feature 1..20: note = Target: SCN10A; (-) strand; PAM type: YTN; PAM sequence: TTG
  source 1..20: mol_type = other DNA
ggttagttccaagtctttgc

SEQ ID NO: 55433 - DNA, 20 bp, synthetic construct
  misc_feature 1..20: note = Description of Artificial Sequence: Synthetic oligonucleotide
  misc_feature 1..20: note = Target: SCN10A; (-) strand; PAM type: YTN; PAM sequence: TTT
  source 1..20: mol_type = other DNA
gggttagttccaagtctttg

SEQ ID NO: 55434 - DNA, 20 bp, synthetic construct
  misc_feature 1..20: note = Description of Artificial Sequence: Synthetic oligonucleotide
  misc_feature 1..20: note = Target: SCN10A; (-) strand; PAM type: YTN; PAM sequence: CTG
  source 1..20: mol_type = other DNA
atgggcgtttgggttagttc

SEQ ID NO: 55435 - DNA, 20 bp, synthetic construct
  misc_feature 1..20: note = Description of Artificial Sequence: Synthetic oligonucleotide
  misc_feature 1..20: note = Target: SCN10A; (-) strand; PAM type: YTN; PAM sequence: CTA
  source 1..20: mol_type = other DNA
tcactgatgggcgtttgggt

SEQ ID NO: 55436 - DNA, 20 bp, synthetic construct
  misc_feature 1..20: note = Description of Artificial Sequence: Synthetic oligonucleotide
  misc_feature 1..20: note = Target: SCN10A; (-) strand; PAM type: YTN; PAM sequence: TTA
  source 1..20: mol_type = other DNA
tccagtctatcactgatggg

SEQ ID NO: 55437 - DNA, 20 bp, synthetic construct
  misc_feature 1..20: note = Description of Artificial Sequence: Synthetic oligonucleotide
  misc_feature 1..20: note = Target: SCN10A; (-) strand; PAM type: YTN; PAM sequence: TTT
  source 1..20: mol_type = other DNA
atccagtctatcactgatgg

SEQ ID NO: 55438 - DNA, 20 bp, synthetic construct
  misc_feature 1..20: note = Description of Artificial Sequence: Synthetic oligonucleotide
  misc_feature 1..20: note = Target: SCN10A; (-) strand; PAM type: YTN; PAM sequence: CTT
  source 1..20: mol_type = other DNA
tatccagtctatcactgatg

SEQ ID NO: 55439 - DNA, 20 bp, synthetic construct
  misc_feature 1..20: note = Description of Artificial Sequence: Synthetic oligonucleotide
  misc_feature 1..20: note = Target: SCN10A; (-) strand; PAM type: YTN; PAM sequence: TTC
  source 1..20: mol_type = other DNA
tttatccagtctatcactga

SEQ ID NO: 55440 - DNA, 20 bp, synthetic construct
  misc_feature 1..20: note = Description of Artificial Sequence: Synthetic oligonucleotide
  misc_feature 1..20: note = Target: SCN10A; (-) strand; PAM type: YTN; PAM sequence: TTT
  source 1..20: mol_type = other DNA
ctttatccagtctatcactg

SEQ ID NO: 55441 - DNA, 20 bp, synthetic construct
  misc_feature 1..20: note = Description of Artificial Sequence: Synthetic oligonucleotide
  misc_feature 1..20: note = Target: SCN10A; (-) strand; PAM type: YTN; PAM sequence: TTT
  source 1..20: mol_type = other DNA
tctttatccagtctatcact

SEQ ID NO: 55442 - DNA, 20 bp, synthetic construct
  misc_feature 1..20: note = Description of Artificial Sequence: Synthetic oligonucleotide
  misc_feature 1..20: note = Target: SCN10A; (-) strand; PAM type: YTN; PAM sequence: TTC
  source 1..20: mol_type = other DNA
catggtgtatatgtgccata

SEQ ID NO: 55443 - DNA, 20 bp, synthetic construct
  misc_feature 1..20: note = Description of Artificial Sequence: Synthetic oligonucleotide
  misc_feature 1..20: note = Target: SCN10A; (-) strand; PAM type: YTN; PAM sequence: CTG
  source 1..20: mol_type = other DNA
catagtattccatggtgtat

SEQ ID NO: 55444 - DNA, 20 bp, synthetic construct
  misc_feature 1..20: note = Description of Artificial Sequence: Synthetic oligonucleotide
  misc_feature 1..20: note = Target: SCN10A; (-) strand; PAM type: YTN; PAM sequence: TTA
  source 1..20: mol_type = other DNA
tggctgcatagtattccatg

SEQ ID NO: 55445 - DNA, 20 bp, synthetic construct
  misc_feature 1..20: note = Description of Artificial Sequence: Synthetic oligonucleotide
  misc_feature 1..20: note = Target: SCN10A; (-) strand; PAM type: YTN; PAM sequence: TTT
  source 1..20: mol_type = other DNA
atggctgcatagtattccat

SEQ ID NO: 55446 - DNA, 20 bp, synthetic construct
  misc_feature 1..20: note = Description of Artificial Sequence: Synthetic oligonucleotide
  misc_feature 1..20: note = Target: SCN10A; (-) strand; PAM type: YTN; PAM sequence: TTT
  source 1..20: mol_type = other DNA
tatggctgcatagtattcca

SEQ ID NO: 55447 - DNA, 20 bp, synthetic construct
  misc_feature 1..20: note = Description of Artificial Sequence: Synthetic oligonucleotide
  misc_feature 1..20: note = Target: SCN10A; (-) strand; PAM type: YTN; PAM sequence: TTT
  source 1..20: mol_type = other DNA
ttatggctgcatagtattcc

SEQ ID NO: 55448 - DNA, 20 bp, synthetic construct
  misc_feature 1..20: note = Description of Artificial Sequence: Synthetic oligonucleotide
  misc_feature 1..20: note = Target: SCN10A; (-) strand; PAM type: YTN; PAM sequence: TTT
  source 1..20: mol_type = other DNA
tttatggctgcatagtattc

SEQ ID NO: 55449 - DNA, 20 bp, synthetic construct
  misc_feature 1..20: note = Description of Artificial Sequence: Synthetic oligonucleotide
  misc_feature 1..20: note = Target: SCN10A; (-) strand; PAM type: YTN; PAM sequence: CTT
  source 1..20: mol_type = other DNA
ttttatggctgcatagtatt

SEQ ID NO: 55450 - DNA, 20 bp, synthetic construct
  misc_feature 1..20: note = Description of Artificial Sequence: Synthetic oligonucleotide
  misc_feature 1..20: note = Target: SCN10A; (-) strand; PAM type: YTN; PAM sequence: CTC
  source 1..20: mol_type = other DNA
acccttttttatggctgcat

SEQ ID NO: 55451 - DNA, 20 bp, synthetic construct
  misc_feature 1..20: note = Description of Artificial Sequence: Synthetic oligonucleotide
  misc_feature 1..20: note = Target: SCN10A; (-) strand; PAM type: YTN; PAM sequence: CTG
  source 1..20: mol_type = other DNA
caaagaacatgaactcaccc

SEQ ID NO: 55452 - DNA, 20 bp, synthetic construct
  misc_feature 1..20: note = Description of Artificial Sequence: Synthetic oligonucleotide
  misc_feature 1..20: note = Target: SCN10A; (-) strand; PAM type: YTN; PAM sequence: TTC
  source 1..20: mol_type = other DNA
atccatgtccctgcaaagaa

SEQ ID NO: 55453 - DNA, 20 bp, synthetic construct
  misc_feature 1..20: note = Description of Artificial Sequence: Synthetic oligonucleotide
  misc_feature 1..20: note = Target: SCN10A; (-) strand; PAM type: YTN; PAM sequence: CTT
  source 1..20: mol_type = other DNA
catccatgtccctgcaaaga

SEQ ID NO: 55454 - DNA, 20 bp, synthetic construct
  misc_feature 1..20: note = Description of Artificial Sequence: Synthetic oligonucleotide
  misc_feature 1..20: note = Target: SCN10A; (-) strand; PAM type: YTN; PAM sequence: TTC
  source 1..20: mol_type = other DNA
cagcttcatccatgtccctg

SEQ ID NO: 55455 - DNA, 20 bp, synthetic construct
  misc_feature 1..20: note = Description of Artificial Sequence: Synthetic oligonucleotide
  misc_feature 1..20: note = Target: SCN10A; (-) strand; PAM type: YTN; PAM sequence: TTT
  source 1..20: mol_type = other DNA
ccagcttcatccatgtccct

SEQ ID NO: 55456 - DNA, 20 bp, synthetic construct
  misc_feature 1..20: note = Description of Artificial Sequence: Synthetic oligonucleotide
  misc_feature 1..20: note = Target: SCN10A; (-) strand; PAM type: YTN; PAM sequence: CTG
  source 1..20: mol_type = other DNA
agaatgatggtttccagctt

SEQ ID NO: 55457 - DNA, 20 bp, synthetic construct
  misc_feature 1..20: note = Description of Artificial Sequence: Synthetic oligonucleotide
  misc_feature 1..20: note = Target: SCN10A; (-) strand; PAM type: YTN; PAM sequence: TTG
  source 1..20: mol_type = other DNA
ctgagaatgatggtttccag

SEQ ID NO: 55458 - DNA, 20 bp, synthetic construct
  misc_feature 1..20: note = Description of Artificial Sequence: Synthetic oligonucleotide
  misc_feature 1..20: note = Target: SCN10A; (-) strand; PAM type: YTN; PAM sequence: TTT
  source 1..20: mol_type = other DNA
gctgagaatgatggtttcca

SEQ ID NO: 55459 - DNA, 20 bp, synthetic construct
  misc_feature 1..20: note = Description of Artificial Sequence: Synthetic oligonucleotide
  misc_feature 1..20: note = Target: SCN10A; (-) strand; PAM type: YTN; PAM sequence: TTA
  source 1..20: mol_type = other DNA
tgtcagtttgctgagaatga

SEQ ID NO: 55460 - DNA, 20 bp, synthetic construct
  misc_feature 1..20: note = Description of Artificial Sequence: Synthetic oligonucleotide
  misc_feature 1..20: note = Target: SCN10A; (-) strand; PAM type: YTN; PAM sequence: CTT
  source 1..20: mol_type = other DNA
atgtcagtttgctgagaatg

SEQ ID NO: 55461 - DNA, 20 bp, synthetic construct
  misc_feature 1..20: note = Description of Artificial Sequence: Synthetic oligonucleotide
  misc_feature 1..20: note = Target: SCN10A; (-) strand; PAM type: YTN; PAM sequence: TTC
  source 1..20: mol_type = other DNA
ttatgtcagtttgctgagaa

SEQ ID NO: 55462 - DNA, 20 bp, synthetic construct
  misc_feature 1..20: note = Description of Artificial Sequence: Synthetic oligonucleotide
  misc_feature 1..20: note = Target: SCN10A; (-) strand; PAM type: YTN; PAM sequence: CTG
  source 1..20: mol_type = other DNA
ttcttatgtcagtttgctga

SEQ ID NO: 55463 - DNA, 20 bp, synthetic construct
  misc_feature 1..20: note = Description of Artificial Sequence: Synthetic oligonucleotide
  misc_feature 1..20: note = Target: SCN10A; (-) strand; PAM type: YTN; PAM sequence: TTC
  source 1..20: mol_type = other DNA
tgttcttatgtcagtttgct

SEQ ID NO: 55464 - DNA, 20 bp, synthetic construct
  misc_feature 1..20: note = Description of Artificial Sequence: Synthetic oligonucleotide
  misc_feature 1..20: note = Target: SCN10A; (-) strand; PAM type: YTN; PAM sequence: TTT
  source 1..20: mol_type = other DNA
ctgttcttatgtcagtttgc

SEQ ID NO: 55465 - DNA, 20 bp, synthetic construct
  misc_feature 1..20: note = Description of Artificial Sequence: Synthetic oligonucleotide
  misc_feature 1..20: note = Target: SCN10A; (-) strand; PAM type: YTN; PAM sequence: TTT
  source 1..20: mol_type = other DNA
tctgttcttatgtcagtttg

SEQ ID NO: 55466 - DNA, 20 bp, synthetic construct
  misc_feature 1..20: note = Description of Artificial Sequence: Synthetic oligonucleotide
  misc_feature 1..20: note = Target: SCN10A; (-) strand; PAM type: YTN; PAM sequence: TTG
  source 1..20: mol_type = other DNA
gttttctgttcttatgtcag

SEQ ID NO: 55467 - DNA, 20 bp, synthetic construct
  misc_feature 1..20: note = Description of Artificial Sequence: Synthetic oligonucleotide
  misc_feature 1..20: note = Target: SCN10A; (-) strand; PAM type: YTN; PAM sequence: TTT
  source 1..20: mol_type = other DNA
ggttttctgttcttatgtca

SEQ ID NO: 55468 - DNA, 20 bp, synthetic construct
  misc_feature 1..20: note = Description of Artificial Sequence: Synthetic oligonucleotide
  misc_feature 1..20: note = Target: SCN10A; (-) strand; PAM type: YTN; PAM sequence: CTA
  source 1..20: mol_type = other DNA
tgagtgagaacatgcggtgt

SEQ ID NO: 55469 - DNA, 20 bp, synthetic construct
  misc_feature 1..20: note = Description of Artificial Sequence: Synthetic oligonucleotide
  misc_feature 1..20: note = Target: SCN10A; (-) strand; PAM type: YTN; PAM sequence: CTC
  source 1..20: mol_type = other DNA
ccacctatgagtgagaacat

SEQ ID NO: 55470 - DNA, 20 bp, synthetic construct
  misc_feature 1..20: note = Description of Artificial Sequence: Synthetic oligonucleotide
  misc_feature 1..20: note = Target: SCN10A; (-) strand; PAM type: YTN; PAM sequence: TTC
  source 1..20: mol_type = other DNA
atctcccacctatgagtgag

SEQ ID NO: 55471 - DNA, 20 bp, synthetic construct
  misc_feature 1..20: note = Description of Artificial Sequence: Synthetic oligonucleotide
  misc_feature 1..20: note = Target: SCN10A; (-) strand; PAM type: YTN; PAM sequence: TTG
  source 1..20: mol_type = other DNA
ttcatctcccacctatgagt

SEQ ID NO: 55472 - DNA, 20 bp, synthetic construct
  misc_feature 1..20: note = Description of Artificial Sequence: Synthetic oligonucleotide
  misc_feature 1..20: note = Target: SCN10A; (-) strand; PAM type: YTN; PAM sequence: CTC
  source 1..20: mol_type = other DNA
attgttcatctcccacctat

SEQ ID NO: 55473 - DNA, 20 bp, synthetic construct
  misc_feature 1..20: note = Description of Artificial Sequence: Synthetic oligonucleotide
  misc_feature 1..20: note = Target: SCN10A; (-) strand; PAM type: YTN; PAM sequence: CTC
  source 1..20: mol_type = other DNA
tcattgttcatctcccacct

SEQ ID NO: 55474 - DNA, 20 bp, synthetic construct
  misc_feature 1..20: note = Description of Artificial Sequence: Synthetic oligonucleotide
  misc_feature 1..20: note = Target: SCN10A; (-) strand; PAM type: YTN; PAM sequence: CTG
  source 1..20: mol_type = other DNA
tatccacgtgctctcattgt

SEQ ID NO: 55475 - DNA, 20 bp, synthetic construct
  misc_feature 1..20: note = Description of Artificial Sequence: Synthetic oligonucleotide
  misc_feature 1..20: note = Target: SCN10A; (-) strand; PAM type: YTN; PAM sequence: CTC
  source 1..20: mol_type = other DNA
cctgtatccacgtgctctca

SEQ ID NO: 55476 - DNA, 20 bp, synthetic construct
  misc_feature 1..20: note = Description of Artificial Sequence: Synthetic oligonucleotide
  misc_feature 1..20: note = Target: SCN10A; (-) strand; PAM type: YTN; PAM sequence: CTG
  source 1..20: mol_type = other DNA
gtgtgtgatgtccccctccc

SEQ ID NO: 55477 - DNA, 20 bp, synthetic construct
  misc_feature 1..20: note = Description of Artificial Sequence: Synthetic oligonucleotide
  misc_feature 1..20: note = Target: SCN10A; (-) strand; PAM type: YTN; PAM sequence: CTC
  source 1..20: mol_type = other DNA
aacaggccctggtgtgtgat

SEQ ID NO: 55478 - DNA, 20 bp, synthetic construct
  misc_feature 1..20: note = Description of Artificial Sequence: Synthetic oligonucleotide
  misc_feature 1..20: note = Target: SCN10A; (-) strand; PAM type: YTN; PAM sequence: CTA
  source 1..20: mol_type = other DNA
gcccccaacccctcaacagg

SEQ ID NO: 55479 - DNA, 20 bp, synthetic construct
  misc_feature 1..20: note = Description of Artificial Sequence: Synthetic oligonucleotide
  misc_feature 1..20: note = Target: SCN10A; (-) strand; PAM type: YTN; PAM sequence: CTC
  source 1..20: mol_type = other DNA
ccctagcccccaacccctca

SEQ ID NO: 55480 - DNA, 20 bp, synthetic construct
  misc_feature 1..20: note = Description of Artificial Sequence: Synthetic oligonucleotide
  misc_feature 1..20: note = Target: SCN10A; (-) strand; PAM type: YTN; PAM sequence: CTA
  source 1..20: mol_type = other DNA
tccctcccctagcccccaac

SEQ ID NO: 55481 - DNA, 20 bp, synthetic construct
  misc_feature 1..20: note = Description of Artificial Sequence: Synthetic oligonucleotide
  misc_feature 1..20: note = Target: SCN10A; (-) strand; PAM type: YTN; PAM sequence: CTA
  source 1..20: mol_type = other DNA
atgctatccctcccctagcc

SEQ ID NO: 55482 - DNA, 20 bp, synthetic construct
  misc_feature 1..20: note = Description of Artificial Sequence: Synthetic oligonucleotide
  misc_feature 1..20: note = Target: SCN10A; (-) strand; PAM type: YTN; PAM sequence: CTC
  source 1..20: mol_type = other DNA
ctaatgctatccctccccta

SEQ ID NO: 55483 - DNA, 20 bp, synthetic construct
  misc_feature 1..20: note = Description of Artificial Sequence: Synthetic oligonucleotide
  misc_feature 1..20: note = Target: SCN10A; (-) strand; PAM type: YTN; PAM sequence: TTC
  source 1..20: mol_type = other DNA
tcctaatgctatccctcccc

SEQ ID NO: 55484 - DNA, 20 bp, synthetic construct
  misc_feature 1..20: note = Description of Artificial Sequence: Synthetic oligonucleotide
  misc_feature 1..20: note = Target: SCN10A; (-) strand; PAM type: YTN; PAM sequence: TTT
  source 1..20: mol_type = other DNA
ctcctaatgctatccctccc

SEQ ID NO: 55485 - DNA, 20 bp, synthetic construct
  misc_feature 1..20: note = Description of Artificial Sequence: Synthetic oligonucleotide
  misc_feature 1..20: note = Target: SCN10A; (-) strand; PAM type: YTN; PAM sequence: TTA
  source 1..20: mol_type = other DNA
ggtatttctcctaatgctat

SEQ ID NO: 55486 - DNA, 20 bp, synthetic construct
  misc_feature 1..20: note = Description of Artificial Sequence: Synthetic oligonucleotide
  misc_feature 1..20: note = Target: SCN10A; (-) strand; PAM type: YTN; PAM sequence: CTA
  source 1..20: mol_type = other DNA
cattaggtatttctcctaat

SEQ ID NO: 55487 - DNA, 20 bp, synthetic construct
  misc_feature 1..20: note = Description of Artificial Sequence: Synthetic oligonucleotide
  misc_feature 1..20: note = Target: SCN10A; (-) strand; PAM type: YTN; PAM sequence: CTG
  source 1..20: mol_type = other DNA
cacccatcaacccatcatct

SEQ ID NO: 55488 - DNA, 20 bp, synthetic construct
  misc_feature 1..20: note = Description of Artificial Sequence: Synthetic oligonucleotide
  misc_feature 1..20: note = Target: SCN10A; (-) strand; PAM type: YTN; PAM sequence: TTG
  source 1..20: mol_type = other DNA
ctgcacccatcaacccatca

SEQ ID NO: 55489 - DNA, 20 bp, synthetic construct
  misc_feature 1..20: note = Description of Artificial Sequence: Synthetic oligonucleotide
  misc_feature 1..20: note = Target: SCN10A; (-) strand; PAM type: YTN; PAM sequence: TTT
  source 1..20: mol_type = other DNA
gctgcacccatcaacccatc

SEQ ID NO: 55490 - DNA, 20 bp, synthetic construct
  misc_feature 1..20: note = Description of Artificial Sequence: Synthetic oligonucleotide
  misc_feature 1..20: note = Target: SCN10A; (-) strand; PAM type: YTN; PAM sequence: TTA
  source 1..20: mol_type = other DNA
cataggtatacacatgtcat

SEQ ID NO: 55491 - DNA, 20 bp, synthetic construct
  misc_feature 1..20: note = Description of Artificial Sequence: Synthetic oligonucleotide
  misc_feature 1..20: note = Target: SCN10A; (-) strand; PAM type: YTN; PAM sequence: TTG
  source 1..20: mol_type = other DNA
ttacataggtatacacatgt

SEQ ID NO: 55492 - DNA, 20 bp, synthetic construct
  misc_feature 1..20: note = Description of Artificial Sequence: Synthetic oligonucleotide
  misc_feature 1..20: note = Target: SCN10A; (-) strand; PAM type: YTN; PAM sequence: TTT
  source 1..20: mol_type = other DNA
gttacataggtatacacatg

SEQ ID NO: 55493 - DNA, 20 bp, synthetic construct
  misc_feature 1..20: note = Description of Artificial Sequence: Synthetic oligonucleotide
  misc_feature 1..20: note = Target: SCN10A; (-) strand; PAM type: YTN; PAM sequence: CTG
  source 1..20: mol_type = other DNA
gggtacatgtgcagaaagtg

SEQ ID NO: 55494 - DNA, 20 bp, synthetic construct
  misc_feature 1..20: note = Description of Artificial Sequence: Synthetic oligonucleotide
  misc_feature 1..20: note = Target: SCN10A; (-) strand; PAM type: YTN; PAM sequence: TTC
  source 1..20: mol_type = other DNA
tggggtacatgtgcagaaag

SEQ ID NO: 55495 - DNA, 20 bp, synthetic construct
  misc_feature 1..20: note = Description of Artificial Sequence: Synthetic oligonucleotide
  misc_feature 1..20: note = Target: SCN10A; (-) strand; PAM type: YTN; PAM sequence: TTA
  source 1..20: mol_type = other DNA
agttctggggtacatgtgca

SEQ ID NO: 55496 - DNA, 20 bp, synthetic construct
  misc_feature 1..20: note = Description of Artificial Sequence: Synthetic oligonucleotide
  misc_feature 1..20: note = Target: SCN10A; (-) strand; PAM type: YTN; PAM sequence: TTT
  source 1..20: mol_type = other DNA
aagttctggggtacatgtgc

SEQ ID NO: 55497 - DNA, 20 bp, synthetic construct
  misc_feature 1..20: note = Description of Artificial Sequence: Synthetic oligonucleotide
  misc_feature 1..20: note = Target: SCN10A; (-) strand; PAM type: YTN; PAM sequence: CTT
  source 1..20: mol_type = other DNA
taagttctggggtacatgtg

SEQ ID NO: 55498 - DNA, 20 bp, synthetic construct
  misc_feature 1..20: note = Description of Artificial Sequence: Synthetic oligonucleotide
  misc_feature 1..20: note = Target: SCN10A; (-) strand; PAM type: YTN; PAM sequence: TTA
  source 1..20: mol_type = other DNA
ctttaagttctggggtacat

SEQ ID NO: 55499 - DNA, 20 bp, synthetic construct
  misc_feature 1..20: note = Description of Artificial Sequence: Synthetic oligonucleotide
  misc_feature 1..20: note = Target: SCN10A; (-) strand; PAM type: YTN; PAM sequence: TTT
  source 1..20: mol_type = other DNA
actttaagttctggggtaca

SEQ ID NO: 55500 - DNA, 20 bp, synthetic construct
  misc_feature 1..20: note = Description of Artificial Sequence: Synthetic oligonucleotide
  misc_feature 1..20: note = Target: SCN10A; (-) strand; PAM type: YTN; PAM sequence: TTT
  source 1..20: mol_type = other DNA
tactttaagttctggggtac

SEQ ID NO: 55501 - DNA, 20 bp, synthetic construct
  misc_feature 1..20: note = Description of Artificial Sequence: Synthetic oligonucleotide
  misc_feature 1..20: note = Target: SCN10A; (-) strand; PAM type: YTN; PAM sequence: TTA
  source 1..20: mol_type = other DNA
aattttactttaagttctgg

SEQ ID NO: 55502 - DNA, 20 bp, synthetic construct
  misc_feature 1..20: note = Description of Artificial Sequence: Synthetic oligonucleotide
  misc_feature 1..20: note = Target: SCN10A; (-) strand; PAM type: YTN; PAM sequence: TTT
  source 1..20: mol_type = other DNA
aaattttactttaagttctg

SEQ ID NO: 55503 - DNA, 20 bp, synthetic construct
  misc_feature 1..20: note = Description of Artificial Sequence: Synthetic oligonucleotide
  misc_feature 1..20: note = Target: SCN10A; (-) strand; PAM type: YTN; PAM sequence: TTT
  source 1..20: mol_type = other DNA
taaattttactttaagttct

SEQ ID NO: 55504 - DNA, 20 bp, synthetic construct
  misc_feature 1..20: note = Description of Artificial Sequence: Synthetic oligonucleotide
  misc_feature 1..20: note = Target: SCN10A; (-) strand; PAM type: YTN; PAM sequence: TTT
  source 1..20: mol_type = other DNA
ttaaattttactttaagttc

SEQ ID NO: 55505 - DNA, 20 bp, synthetic construct
  misc_feature 1..20: note = Description of Artificial Sequence: Synthetic oligonucleotide
  misc_feature 1..20: note = Target: SCN10A; (-) strand; PAM type: YTN; PAM sequence: TTT
  source 1..20: mol_type = other DNA
tttaaattttactttaagtt

SEQ ID NO: 55506 - DNA, 20 bp, synthetic construct
  misc_feature 1..20: note = Description of Artificial Sequence: Synthetic oligonucleotide
  misc_feature 1..20: note = Target: SCN10A; (-) strand; PAM type: YTN; PAM sequence: CTT
  source 1..20: mol_type = other DNA
ttttaaattttactttaagt

SEQ ID NO: 55507 - DNA, 20 bp, synthetic construct
  misc_feature 1..20: note = Description of Artificial Sequence: Synthetic oligonucleotide
  misc_feature 1..20: note = Target: SCN10A; (-) strand; PAM type: YTN; PAM sequence: TTG
  source 1..20: mol_type = other DNA
tgaaatgcaaatatataaag

SEQ ID NO: 55508 - DNA, 20 bp, synthetic construct
  misc_feature 1..20: note = Description of Artificial Sequence: Synthetic oligonucleotide
  misc_feature 1..20: note = Target: SCN10A; (-) strand; PAM type: YTN; PAM sequence: TTT
  source 1..20: mol_type = other DNA
gtgaaatgcaaatatataaa

SEQ ID NO: 55509 - DNA, 20 bp, synthetic construct
  misc_feature 1..20: note = Description of Artificial Sequence: Synthetic oligonucleotide
  misc_feature 1..20: note = Target: SCN10A; (-) strand; PAM type: YTN; PAM sequence: CTT
  source 1..20: mol_type = other DNA
tgtgaaatgcaaatatataa

SEQ ID NO: 55510 - DNA, 20 bp, synthetic construct
  misc_feature 1..20: note = Description of Artificial Sequence: Synthetic oligonucleotide
  misc_feature 1..20: note = Target: SCN10A; (-) strand; PAM type: YTN; PAM sequence: TTG
  source 1..20: mol_type = other DNA
ctttgtgaaatgcaaatata

SEQ ID NO: 55511 - DNA, 20 bp, synthetic construct
  misc_feature 1..20: note = Description of Artificial Sequence: Synthetic oligonucleotide
  misc_feature 1..20: note = Target: SCN10A; (-) strand; PAM type: YTN; PAM sequence: CTT
  source 1..20: mol_type = other DNA
gctttgtgaaatgcaaatat

SEQ ID NO: 55512 - DNA, 20 bp, synthetic construct
  misc_feature 1..20: note = Description of Artificial Sequence: Synthetic oligonucleotide
  misc_feature 1..20: note = Target: SCN10A; (-) strand; PAM type: YTN; PAM sequence: CTC
  source 1..20: mol_type = other DNA
acttgctttgtgaaatgcaa

SEQ ID NO: 55513 - DNA, 20 bp, synthetic construct
  misc_feature 1..20: note = Description of Artificial Sequence: Synthetic oligonucleotide
  misc_feature 1..20: note = Target: SCN10A; (-) strand; PAM type: YTN; PAM sequence: CTA
  source 1..20: mol_type = other DNA
ggtggatcaacacctcactt

SEQ ID NO: 55514 - DNA, 20 bp, synthetic construct
  misc_feature 1..20: note = Description of Artificial Sequence: Synthetic oligonucleotide
  misc_feature 1..20: note = Target: SCN10A; (-) strand; PAM type: YTN; PAM sequence: TTC
  source 1..20: mol_type = other DNA
taggtggatcaacacctcac

SEQ ID NO: 55515 - DNA, 20 bp, synthetic construct
  misc_feature 1..20: note = Description of Artificial Sequence: Synthetic oligonucleotide
  misc_feature 1..20: note = Target: SCN10A; (-) strand; PAM type: YTN; PAM sequence: TTG
  source 1..20: mol_type = other DNA
caccacacacaagaatcaat

SEQ ID NO: 55516 - DNA, 20 bp, synthetic construct
  misc_feature 1..20: note = Description of Artificial Sequence: Synthetic oligonucleotide
  misc_feature 1..20: note = Target: SCN10A; (-) strand; PAM type: YTN; PAM sequence: TTT
  source 1..20: mol_type = other DNA
gcaccacacacaagaatcaa

SEQ ID NO: 55517 - DNA, 20 bp, synthetic construct
  misc_feature 1..20: note = Description of Artificial Sequence: Synthetic oligonucleotide
  misc_feature 1..20: note = Target: SCN10A; (-) strand; PAM type: YTN; PAM sequence: CTT
  source 1..20: mol_type = other DNA
tgcaccacacacaagaatca

SEQ ID NO: 55518 - DNA, 20 bp, synthetic construct
  misc_feature 1..20: note = Description of Artificial Sequence: Synthetic oligonucleotide
  misc_feature 1..20: note = Target: SCN10A; (-) strand; PAM type: YTN; PAM sequence: TTA
  source 1..20: mol_type = other DNA
aacatccaactttgcaccac

SEQ ID NO: 55519 - DNA, 20 bp, synthetic construct
  misc_feature 1..20: note = Description of Artificial Sequence: Synthetic oligonucleotide
  misc_feature 1..20: note = Target: SCN10A; (-) strand; PAM type: YTN; PAM sequence: CTA
  source 1..20: mol_type = other DNA
cattaaacatccaactttgc

SEQ ID NO: 55520 - DNA, 20 bp, synthetic construct
  misc_feature 1..20: note = Description of Artificial Sequence: Synthetic oligonucleotide
  misc_feature 1..20: note = Target: SCN10A; (-) strand; PAM type: YTN; PAM sequence: CTG
  source 1..20: mol_type = other DNA
gaaaaactacattaaacatc

SEQ ID NO: 55521 - DNA, 20 bp, synthetic construct
  misc_feature 1..20: note = Description of Artificial Sequence: Synthetic oligonucleotide
  misc_feature 1..20: note = Target: SCN10A; (-) strand; PAM type: YTN; PAM sequence: CTC
  source 1..20: mol_type = other DNA
actggaaaaactacattaaa

SEQ ID NO: 55522 - DNA, 20 bp, synthetic construct
  misc_feature 1..20: note = Description of Artificial Sequence: Synthetic oligonucleotide
  misc_feature 1..20: note = Target: SCN10A; (-) strand; PAM type: YTN; PAM sequence: TTA
  source 1..20: mol_type = other DNA
ggaatctcactggaaaaact

SEQ ID NO: 55523 - DNA, 20 bp, synthetic construct
  misc_feature 1..20: note = Description of Artificial Sequence: Synthetic oligonucleotide
  misc_feature 1..20: note = Target: SCN10A; (-) strand; PAM type: YTN; PAM sequence: CTG
  source 1..20: mol_type = other DNA
aagaattaggaatctcactg

SEQ ID NO: 55524 - DNA, 20 bp, synthetic construct
  misc_feature 1..20: note = Description of Artificial Sequence: Synthetic oligonucleotide
  misc_feature 1..20: note = Target: SCN10A; (-) strand; PAM type: YTN; PAM sequence: TTC
  source 1..20: mol_type = other DNA
aaaaaatgatgctgaagaat

SEQ ID NO: 55525 - DNA, 20 bp, synthetic construct
  misc_feature 1..20: note = Description of Artificial Sequence: Synthetic oligonucleotide
  misc_feature 1..20: note = Target: SCN10A; (-) strand; PAM type: YTN; PAM sequence: CTT
  source 1..20: mol_type = other DNA
caaaaaatgatgctgaagaa

SEQ ID NO: 55526 - DNA, 20 bp, synthetic construct
  misc_feature 1..20: note = Description of Artificial Sequence: Synthetic oligonucleotide
  misc_feature 1..20: note = Target: SCN10A; (-) strand; PAM type: YTN; PAM sequence: CTA
  source 1..20: mol_type = other DNA
atgtgtgaaaaggtggcacc

SEQ ID NO: 55527 - DNA, 20 bp, synthetic construct
  misc_feature 1..20: note = Description of Artificial Sequence: Synthetic oligonucleotide
  misc_feature 1..20: note = Target: SCN10A; (-) strand; PAM type: YTN; PAM sequence: TTG
  source 1..20: mol_type = other DNA
gtcagaataatgtaacagca

SEQ ID NO: 55528 - DNA, 20 bp, synthetic construct
  misc_feature 1..20: note = Description of Artificial Sequence: Synthetic oligonucleotide
  misc_feature 1..20: note = Target: SCN10A; (-) strand; PAM type: YTN; PAM sequence: TTG
  source 1..20: mol_type = other DNA
gtgtaagattggtcagaata

SEQ ID NO: 55529 - DNA, 20 bp, synthetic construct
  misc_feature 1..20: note = Description of Artificial Sequence: Synthetic oligonucleotide
  misc_feature 1..20: note = Target: SCN10A; (-) strand; PAM type: YTN; PAM sequence: TTG
  source 1..20: mol_type = other DNA
aagcagtgtgccattggtgt

SEQ ID NO: 55530 - DNA, 20 bp, synthetic construct
  misc_feature 1..20: note = Description of Artificial Sequence: Synthetic oligonucleotide
  misc_feature 1..20: note = Target: SCN10A; (-) strand; PAM type: YTN; PAM sequence: CTA
  source 1..20: mol_type = other DNA
attgaagcagtgtgccattg

SEQ ID NO: 55531 - DNA, 20 bp, synthetic construct
  misc_feature 1..20: note = Description of Artificial Sequence: Synthetic oligonucleotide
  misc_feature 1..20: note = Target: SCN10A; (-) strand; PAM type: YTN; PAM sequence: CTC
  source 1..20: mol_type = other DNA
taattgaagcagtgtgccat

SEQ ID NO: 55532 - DNA, 20 bp, synthetic construct
  misc_feature 1..20: note = Description of Artificial Sequence: Synthetic oligonucleotide
  misc_feature 1..20: note = Target: SCN10A; (-) strand; PAM type: YTN; PAM sequence: CTA
  source 1..20: mol_type = other DNA
taaagctctaattgaagcag

SEQ ID NO: 55533 - DNA, 20 bp, synthetic construct
  misc_feature 1..20: note = Description of Artificial Sequence: Synthetic oligonucleotide
  misc_feature 1..20: note = Target: SCN10A; (-) strand; PAM type: YTN; PAM sequence: TTA
  source 1..20: mol_type = other DNA
ctataaagctctaattgaag

SEQ ID NO: 55534 - DNA, 20 bp, synthetic construct
  misc_feature 1..20: note = Description of Artificial Sequence: Synthetic oligonucleotide
  misc_feature 1..20: note = Target: SCN10A; (-) strand; PAM type: YTN; PAM sequence: TTT
  source 1..20: mol_type = other DNA
actataaagctctaattgaa

SEQ ID NO: 55535 - DNA, 20 bp, synthetic construct
  misc_feature 1..20: note = Description of Artificial Sequence: Synthetic oligonucleotide
  misc_feature 1..20: note = Target: SCN10A; (-) strand; PAM type: YTN; PAM sequence: CTG
  source 1..20: mol_type = other DNA
gatgtcgagatttactataa

SEQ ID NO: 55536 - DNA, 20 bp, synthetic construct
  misc_feature 1..20: note = Description of Artificial Sequence: Synthetic oligonucleotide
  misc_feature 1..20: note = Target: SCN10A; (-) strand; PAM type: YTN; PAM sequence: CTA
  source 1..20: mol_type = other DNA
ctggatgtcgagatttacta

SEQ ID NO: 55537 - DNA, 20 bp, synthetic construct
  misc_feature 1..20: note = Description of Artificial Sequence: Synthetic oligonucleotide
  misc_feature 1..20: note = Target: SCN10A; (-) strand; PAM type: YTN; PAM sequence: TTC
  source 1..20: mol_type = other DNA
tactggatgtcgagatttac

SEQ ID NO: 55538 - DNA, 20 bp, synthetic construct
  misc_feature 1..20: note = Description of Artificial Sequence: Synthetic oligonucleotide
  misc_feature 1..20: note = Target: SCN10A; (-) strand; PAM type: YTN; PAM sequence: CTC
  source 1..20: mol_type = other DNA
attctactggatgtcgagat

SEQ ID NO: 55539 - DNA, 20 bp, synthetic construct
  misc_feature 1..20: note = Description of Artificial Sequence: Synthetic oligonucleotide
  misc_feature 1..20: note = Target: SCN10A; (-) strand; PAM type: YTN; PAM sequence: TTG
  source 1..20: mol_type = other DNA
aggaagaaatacaaagtggg

SEQ ID NO: 55540 - DNA, 20 bp, synthetic construct
  misc_feature 1..20: note = Description of Artificial Sequence: Synthetic oligonucleotide
  misc_feature 1..20: note = Target: SCN10A; (-) strand; PAM type: YTN; PAM sequence: TTT
  source 1..20: mol_type = other DNA
gaggaagaaatacaaagtgg

SEQ ID NO: 55541 - DNA, 20 bp, synthetic construct
  misc_feature 1..20: note = Description of Artificial Sequence: Synthetic oligonucleotide
  misc_feature 1..20: note = Target: SCN10A; (-) strand; PAM type: YTN; PAM sequence: TTT
  source 1..20: mol_type = other DNA
tgaggaagaaatacaaagtg

SEQ ID NO: 55542 - DNA, 20 bp, synthetic construct
  misc_feature 1..20: note = Description of Artificial Sequence: Synthetic oligonucleotide
  misc_feature 1..20: note = Target: SCN10A; (-) strand; PAM type: YTN; PAM sequence: CTT
  source 1..20: mol_type = other DNA
ttgaggaagaaatacaaagt

SEQ ID NO: 55543 - DNA, 20 bp, synthetic construct
  misc_feature 1..20: note = Description of Artificial Sequence: Synthetic oligonucleotide
  misc_feature 1..20: note = Target: SCN10A; (-) strand; PAM type: YTN; PAM sequence: TTA
  source 1..20: mol_type = other DNA
tagccaagaaacttttgagg

SEQ ID NO: 55544 - DNA, 20 bp, synthetic construct
  misc_feature 1..20: note = Description of Artificial Sequence: Synthetic oligonucleotide
  misc_feature 1..20: note = Target: SCN10A; (-) strand; PAM type: YTN; PAM sequence: TTA
  source 1..20: mol_type = other DNA
aagagcaaattatagccaag

SEQ ID NO: 55545 - DNA, 20 bp, synthetic construct
  misc_feature 1..20: note = Description of Artificial Sequence: Synthetic oligonucleotide
  misc_feature 1..20: note = Target: SCN10A; (-) strand; PAM type: YTN; PAM sequence: TTT
  source 1..20: mol_type = other DNA
aaagagcaaattatagccaa

SEQ ID NO: 55546 - DNA, 20 bp, synthetic construct
  misc_feature 1..20: note = Description of Artificial Sequence: Synthetic oligonucleotide
  misc_feature 1..20: note = Target: SCN10A; (-) strand; PAM type: YTN; PAM sequence: TTT
  source 1..20: mol_type = other DNA
taaagagcaaattatagcca

SEQ ID NO: 55547 - DNA, 20 bp, synthetic construct
  misc_feature 1..20: note = Description of Artificial Sequence: Synthetic oligonucleotide
  misc_feature 1..20: note = Target: SCN10A; (-) strand; PAM type: YTN; PAM sequence: TTA
  source 1..20: mol_type = other DNA
catgaaattttaaagagcaa

SEQ ID NO: 55548 - DNA, 20 bp, synthetic construct
  misc_feature 1..20: note = Description of Artificial Sequence: Synthetic oligonucleotide
  misc_feature 1..20: note = Target: SCN10A; (-) strand; PAM type: YTN; PAM sequence: TTT
  source 1..20: mol_type = other DNA
acatgaaattttaaagagca

SEQ ID NO: 55549 - DNA, 20 bp, synthetic construct
  misc_feature 1..20: note = Description of Artificial Sequence: Synthetic oligonucleotide
  misc_feature 1..20: note = Target: SCN10A; (-) strand; PAM type: YTN; PAM sequence: CTC
  source 1..20: mol_type = other DNA
aaaagtttacatgaaatttt

SEQ ID NO: 55550 - DNA, 20 bp, synthetic construct
  misc_feature 1..20: note = Description of Artificial Sequence: Synthetic oligonucleotide
  misc_feature 1..20: note = Target: SCN10A; (-) strand; PAM type: YTN; PAM sequence: TTC
  source 1..20: mol_type = other DNA
ctcaaaagtttacatgaaat

SEQ ID NO: 55551 - DNA, 20 bp, synthetic construct
  misc_feature 1..20: note = Description of Artificial Sequence: Synthetic oligonucleotide
  misc_feature 1..20: note = Target: SCN10A; (-) strand; PAM type: YTN; PAM sequence: CTT
  source 1..20: mol_type = other DNA
cctcaaaagtttacatgaaa

SEQ ID NO: 55552 - DNA, 20 bp, synthetic construct
  misc_feature 1..20: note = Description of Artificial Sequence: Synthetic oligonucleotide
  misc_feature 1..20: note = Target: SCN10A; (-) strand; PAM type: YTN; PAM sequence: TTC
  source 1..20: mol_type = other DNA
ttcctcaaaagtttacatga

SEQ ID NO: 55553 - DNA, 20 bp, synthetic construct
  misc_feature 1..20: note = Description of Artificial Sequence: Synthetic oligonucleotide
  misc_feature 1..20: note = Target: SCN10A; (-) strand; PAM type: YTN; PAM sequence: TTT
  source 1..20: mol_type = other DNA
cttcctcaaaagtttacatg

SEQ ID NO: 55554 - DNA, 20 bp, synthetic construct
  misc_feature 1..20: note = Description of Artificial Sequence: Synthetic oligonucleotide
  misc_feature 1..20: note = Target: SCN10A; (-) strand; PAM type: YTN; PAM sequence: TTT
  source 1..20: mol_type = other DNA
tcttcctcaaaagtttacat

SEQ ID NO: 55555 - DNA, 20 bp, synthetic construct
  misc_feature 1..20: note = Description of Artificial Sequence: Synthetic oligonucleotide
  misc_feature 1..20: note = Target: SCN10A; (-) strand; PAM type: YTN; PAM sequence: TTA
  source 1..20: mol_type = other DNA
aattttcttcctcaaaagtt

SEQ ID NO: 55556 - DNA, 20 bp, synthetic construct
  misc_feature 1..20: note = Description of Artificial Sequence: Synthetic oligonucleotide
  misc_feature 1..20: note = Target: SCN10A; (-) strand; PAM type: YTN; PAM sequence: TTT
  source 1..20: mol_type = other DNA
aaattttcttcctcaaaagt

SEQ ID NO: 55557 - DNA, 20 bp, synthetic construct
  misc_feature 1..20: note = Description of Artificial Sequence: Synthetic oligonucleotide
  misc_feature 1..20: note = Target: SCN10A; (-) strand; PAM type: YTN; PAM sequence: CTT
  source 1..20: mol_type = other DNA
taaattttcttcctcaaaag

SEQ ID NO: 55558 - DNA, 20 bp, synthetic construct
  misc_feature 1..20: note = Description of Artificial Sequence: Synthetic oligonucleotide
  misc_feature 1..20: note = Target: SCN10A; (-) strand; PAM type: YTN; PAM sequence: TTA
  source 1..20: mol_type = other DNA
aactttaaattttcttcctc

SEQ ID NO: 55559 - DNA, 20 bp, synthetic construct
  misc_feature 1..20: note = Description of Artificial Sequence: Synthetic oligonucleotide
  misc_feature 1..20: note = Target: SCN10A; (-) strand; PAM type: YTN; PAM sequence: TTT
  source 1..20: mol_type = other DNA
aaactttaaattttcttcct

SEQ ID NO: 55560 - DNA, 20 bp, synthetic construct
  misc_feature 1..20: note = Description of Artificial Sequence: Synthetic oligonucleotide
  misc_feature 1..20: note = Target: SCN10A; (-) strand; PAM type: YTN; PAM sequence: CTT
  source 1..20: mol_type = other DNA
taaactttaaattttcttcc

SEQ ID NO: 55561 - DNA, 20 bp, synthetic construct
  misc_feature 1..20: note = Description of Artificial Sequence: Synthetic oligonucleotide
  misc_feature 1..20: note = Target: SCN10A; (-) strand; PAM type: YTN; PAM sequence: TTG
  source 1..20: mol_type = other DNA
acaaactttaaactttaaat

SEQ ID NO: 55562 - DNA, 20 bp, synthetic construct
  misc_feature 1..20: note = Description of Artificial Sequence: Synthetic oligonucleotide
  misc_feature 1..20: note = Target: SCN10A; (-) strand; PAM type: YTN; PAM sequence: CTT
  source 1..20: mol_type = other DNA
gacaaactttaaactttaaa

SEQ ID NO: 55563 - DNA, 20 bp, synthetic construct
  misc_feature 1..20: note = Description of Artificial Sequence: Synthetic oligonucleotide
  misc_feature 1..20: note = Target: SCN10A; (-) strand; PAM type: YTN; PAM sequence: TTA
  source 1..20: mol_type = other DNA
cttgacaaactttaaacttt

SEQ ID NO: 55564 - DNA, 20 bp, synthetic construct
  misc_feature 1..20: note = Description of Artificial Sequence: Synthetic oligonucleotide
  misc_feature 1..20: note = Target: SCN10A; (-) strand; PAM type: YTN; PAM sequence: TTG
  source 1..20: mol_type = other DNA
gtattacttgacaaacttta

SEQ ID NO: 55565 - DNA, 20 bp, synthetic construct
  misc_feature 1..20: note = Description of Artificial Sequence: Synthetic oligonucleotide
  misc_feature 1..20: note = Target: SCN10A; (-) strand; PAM type: YTN; PAM sequence: TTT
  source 1..20: mol_type = other DNA
ggtattacttgacaaacttt

SEQ ID NO: 55566 - DNA, 20 bp, synthetic construct
  misc_feature 1..20: note = Description of Artificial Sequence: Synthetic oligonucleotide
  misc_feature 1..20: note = Target: SCN10A; (-) strand; PAM type: YTN; PAM sequence: TTT
  source 1..20: mol_type = other DNA
tggtattacttgacaaactt

SEQ ID NO: 55567 - DNA, 20 bp, synthetic construct
  misc_feature 1..20: note = Description of Artificial Sequence: Synthetic oligonucleotide
  misc_feature 1..20: note = Target: SCN10A; (-) strand; PAM type: YTN; PAM sequence: CTT
  source 1..20: mol_type = other DNA
ttggtattacttgacaaact

SEQ ID NO: 55568 - DNA, 20 bp, synthetic construct
  misc_feature 1..20: note = Description of Artificial Sequence: Synthetic oligonucleotide
  misc_feature 1..20: note = Target: SCN10A; (-) strand; PAM type: YTN; PAM sequence: TTC
  source 1..20: mol_type = other DNA
ttttggtattacttgacaaa

SEQ ID NO: 55569 - DNA, 20 bp, synthetic construct
  misc_feature 1..20: note = Description of Artificial Sequence: Synthetic oligonucleotide
  misc_feature 1..20: note = Target: SCN10A; (-) strand; PAM type: YTN; PAM sequence: CTT
  source 1..20: mol_type = other DNA
cttttggtattacttgacaa

SEQ ID NO: 55570 - DNA, 20 bp, synthetic construct
  misc_feature 1..20: note = Description of Artificial Sequence: Synthetic oligonucleotide
  misc_feature 1..20: note = Target: SCN10A; (-) strand; PAM type: YTN; PAM sequence: TTC
  source 1..20: mol_type = other DNA
aacaggcttcttttggtatt

SEQ ID NO: 55571 - DNA, 20 bp, synthetic construct
  misc_feature 1..20: note = Description of Artificial Sequence: Synthetic oligonucleotide
  misc_feature 1..20: note = Target: SCN10A; (-) strand; PAM type: YTN; PAM sequence: TTT
  source 1..20: mol_type = other DNA
caacaggcttcttttggtat

SEQ ID NO: 55572 - DNA, 20 bp, synthetic construct
  misc_feature 1..20: note = Description of Artificial Sequence: Synthetic oligonucleotide
  misc_feature 1..20: note = Target: SCN10A; (-) strand; PAM type: YTN; PAM sequence: CTC
  source 1..20: mol_type = other DNA
aaatcaatatttcaacaggc

SEQ ID NO: 55573 - DNA, 20 bp, synthetic construct
  misc_feature 1..20: note = Description of Artificial Sequence: Synthetic oligonucleotide
  misc_feature 1..20: note = Target: SCN10A; (-) strand; PAM type: YTN; PAM sequence: TTA
  source 1..20: mol_type = other DNA
atatgatcctcaaatcaata

SEQ ID NO: 55574 - DNA, 20 bp, synthetic construct
  misc_feature 1..20: note = Description of Artificial Sequence: Synthetic oligonucleotide
  misc_feature 1..20: note = Target: SCN10A; (-) strand; PAM type: YTN; PAM sequence: TTT
  source 1..20: mol_type = other DNA
aatatgatcctcaaatcaat

SEQ ID NO: 55575 - DNA, 20 bp, synthetic construct
  misc_feature 1..20: note = Description of Artificial Sequence: Synthetic oligonucleotide
  misc_feature 1..20: note = Target: SCN10A; (-) strand; PAM type: YTN; PAM sequence: TTA
  source 1..20: mol_type = other DNA
ataaatttaatatgatcctc

SEQ ID NO: 55576 - DNA, 20 bp, synthetic construct
  misc_feature 1..20: note = Description of Artificial Sequence: Synthetic oligonucleotide
  misc_feature 1..20: note = Target: SCN10A; (-) strand; PAM type: YTN; PAM sequence: CTC
  source 1..20: mol_type = other DNA
ccaaaaatgattaataaatt

SEQ ID NO: 55577 - DNA, 20 bp, synthetic construct
  misc_feature 1..20: note = Description of Artificial Sequence: Synthetic oligonucleotide
  misc_feature 1..20: note = Target: SCN10A; (-) strand; PAM type: YTN; PAM sequence: TTG
  source 1..20: mol_type = other DNA
taaagactcccaaaaatgat

SEQ ID NO: 55578 - DNA, 20 bp, synthetic construct
  misc_feature 1..20: note = Description of Artificial Sequence: Synthetic oligonucleotide
  misc_feature 1..20: note = Target: SCN10A; (-) strand; PAM type: YTN; PAM sequence: CTC
  source 1..20: mol_type = other DNA
aatattgtaaagactcccaa

SEQ ID NO: 55579 - DNA, 20 bp, synthetic construct
  misc_feature 1..20: note = Description of Artificial Sequence: Synthetic oligonucleotide
  misc_feature 1..20: note = Target: SCN10A; (-) strand; PAM type: YTN; PAM sequence: TTC
  source 1..20: mol_type = other DNA
aaagtctcaatattgtaaag

SEQ ID NO: 55580 - DNA, 20 bp, synthetic construct
  misc_feature 1..20: note = Description of Artificial Sequence: Synthetic oligonucleotide
  misc_feature 1..20: note = Target: SCN10A; (-) strand; PAM type: YTN; PAM sequence: CTC
  source 1..20: mol_type = other DNA
agattcaaagtctcaatatt

SEQ ID NO: 55581 - DNA, 20 bp, synthetic construct
  misc_feature 1..20: note = Description of Artificial Sequence: Synthetic oligonucleotide
  misc_feature 1..20: note = Target: SCN10A; (-) strand; PAM type: YTN; PAM sequence: TTC
  source 1..20: mol_type = other DNA
tcagattcaaagtctcaata

SEQ ID NO: 55582 - DNA, 20 bp, synthetic construct
  misc_feature 1..20: note = Description of Artificial Sequence: Synthetic oligonucleotide
  misc_feature 1..20: note = Target: SCN10A; (-) strand; PAM type: YTN; PAM sequence: TTA
  source 1..20: mol_type = other DNA
aagaaaaccaaatcagtggg

SEQ ID NO: 55583 - DNA, 20 bp, synthetic construct
  misc_feature 1..20: note = Description of Artificial Sequence: Synthetic oligonucleotide
  misc_feature 1..20: note = Target: SCN10A; (-) strand; PAM type: YTN; PAM sequence: TTT
  source 1..20: mol_type = other DNA
aaagaaaaccaaatcagtgg

SEQ ID NO: 55584 - DNA, 20 bp, synthetic construct
  misc_feature 1..20: note = Description of Artificial Sequence: Synthetic oligonucleotide
  misc_feature 1..20: note = Target: SCN10A; (-) strand; PAM type: YTN; PAM sequence: TTT
  source 1..20: mol_type = other DNA
taaagaaaaccaaatcagtg

SEQ ID NO: 55585 - DNA, 20 bp, synthetic construct
  misc_feature 1..20: note = Description of Artificial Sequence: Synthetic oligonucleotide
  misc_feature 1..20: note = Target: SCN10A; (-) strand; PAM type: YTN; PAM sequence: TTT
  source 1..20: mol_type = other DNA
ttaaagaaaaccaaatcagt

SEQ ID NO: 55586 - DNA, 20 bp, synthetic construct
  misc_feature 1..20: note = Description of Artificial Sequence: Synthetic oligonucleotide
  misc_feature 1..20: note = Target: SCN10A; (-) strand; PAM type: YTN; PAM sequence: TTG
  source 1..20: mol_type = other DNA
tgtaaagtttttaaagaaaa

SEQ ID NO: 55587 - DNA, 20 bp, synthetic construct
  misc_feature 1..20: note = Description of Artificial Sequence: Synthetic oligonucleotide
  misc_feature 1..20: note = Target: SCN10A; (-) strand; PAM type: YTN; PAM sequence: TTA
  source 1..20: mol_type = other DNA
taataagtattgtgtaaagt

SEQ ID NO: 55588 - DNA, 20 bp, synthetic construct
  misc_feature 1..20: note = Description of Artificial Sequence: Synthetic oligonucleotide
  misc_feature 1..20: note = Target: SCN10A; (-) strand; PAM type: YTN; PAM sequence: CTA
  source 1..20: mol_type = other DNA
taaggaaaattataataagt

SEQ ID NO: 55589 - DNA, 20 bp, synthetic construct
  misc_feature 1..20: note = Description of Artificial Sequence: Synthetic oligonucleotide
  misc_feature 1..20: note = Target: SCN10A; (-) strand; PAM type: YTN; PAM sequence: CTC
  source 1..20: mol_type = other DNA
tataaggaaaattataataa

SEQ ID NO: 55590 - DNA, 20 bp, synthetic construct
  misc_feature 1..20: note = Description of Artificial Sequence: Synthetic oligonucleotide
  misc_feature 1..20: note = Target: SCN10A; (-) strand; PAM type: YTN; PAM sequence: TTA
  source 1..20: mol_type = other DNA
tcaaagtataagtgagatct

SEQ ID NO: 55591 - DNA, 20 bp, synthetic construct
  misc_feature 1..20: note = Description of Artificial Sequence: Synthetic oligonucleotide
  misc_feature 1..20: note = Target: SCN10A; (-) strand; PAM type: YTN; PAM sequence: CTA
  source 1..20: mol_type = other DNA
ggaataagattatcaaagta

SEQ ID NO: 55592 - DNA, 20 bp, synthetic construct
  misc_feature 1..20: note = Description of Artificial Sequence: Synthetic oligonucleotide
  misc_feature 1..20: note = Target: SCN10A; (-) strand; PAM type: YTN; PAM sequence: TTA
  source 1..20: mol_type = other DNA
aaatgtcaagtatctaggaa

SEQ ID NO: 55593 - DNA, 20 bp, synthetic construct
  misc_feature 1..20: note = Description of Artificial Sequence: Synthetic oligonucleotide
  misc_feature 1..20: note = Target: SCN10A; (-) strand; PAM type: YTN; PAM sequence: TTT
  source 1..20: mol_type = other DNA
aaaatgtcaagtatctagga

SEQ ID NO: 55594 - DNA, 20 bp, synthetic construct
  misc_feature 1..20: note = Description of Artificial Sequence: Synthetic oligonucleotide
  misc_feature 1..20: note = Target: SCN10A; (-) strand; PAM type: YTN; PAM sequence: TTT
  source 1..20: mol_type = other DNA
taaaatgtcaagtatctagg

SEQ ID NO: 55595 - DNA, 20 bp, synthetic construct
  misc_feature 1..20: note = Description of Artificial Sequence: Synthetic oligonucleotide
  misc_feature 1..20: note = Target: SCN10A; (-) strand; PAM type: YTN; PAM sequence: CTG
  source 1..20: mol_type = other DNA
gcattttaaaatgtcaagta

SEQ ID NO: 55596 - DNA, 20 bp, synthetic construct
  misc_feature 1..20: note = Description of Artificial Sequence: Synthetic oligonucleotide
  misc_feature 1..20: note = Target: SCN10A; (-) strand; PAM type: YTN; PAM sequence: TTA
  source 1..20: mol_type = other DNA
cactggcattttaaaatgtc

SEQ ID NO: 55597 - DNA, 20 bp, synthetic construct
  misc_feature 1..20: note = Description of Artificial Sequence: Synthetic oligonucleotide
  misc_feature 1..20: note = Target: SCN10A; (-) strand; PAM type: YTN; PAM sequence: TTT
  source 1..20: mol_type = other DNA
acactggcattttaaaatgt

SEQ ID NO: 55598 - DNA, 20 bp, synthetic construct
  misc_feature 1..20: note = Description of Artificial Sequence: Synthetic oligonucleotide
  misc_feature 1..20: note = Target: SCN10A; (-) strand; PAM type: YTN; PAM sequence: TTA
  source 1..20: mol_type = other DNA
aaaataccatttacactggc

SEQ ID NO: 55599 - DNA, 20 bp, synthetic construct
  misc_feature 1..20: note = Description of Artificial Sequence: Synthetic oligonucleotide
  misc_feature 1..20: note = Target: SCN10A; (-) strand; PAM type: YTN; PAM sequence: TTT
  source 1..20: mol_type = other DNA
aaaaataccatttacactgg

SEQ ID NO: 55600 - DNA, 20 bp, synthetic construct
  misc_feature 1..20: note = Description of Artificial Sequence: Synthetic oligonucleotide
  misc_feature 1..20: note = Target: SCN10A; (-) strand; PAM type: YTN; PAM sequence: TTT
  source 1..20: mol_type = other DNA
taaaaataccatttacactg

SEQ ID NO: 55601 - DNA, 20 bp, synthetic construct
  misc_feature 1..20: note = Description of Artificial Sequence: Synthetic oligonucleotide
  misc_feature 1..20: note = Target: SCN10A; (-) strand; PAM type: YTN; PAM sequence: TTT
  source 1..20: mol_type = other DNA
ttaaaaataccatttacact

SEQ ID NO: 55602 - DNA, 20 bp, synthetic construct
  misc_feature 1..20: note = Description of Artificial Sequence: Synthetic oligonucleotide
  misc_feature 1..20: note = Target: SCN10A; (-) strand; PAM type: YTN; PAM sequence: CTA
  source 1..20: mol_type = other DNA
gcaacaaacagaaaatagtt

SEQ ID NO: 55603 - DNA, 20 bp, synthetic construct
  misc_feature 1..20: note = Description of Artificial Sequence: Synthetic oligonucleotide
  misc_feature 1..20: note = Target: SCN10A; (-) strand; PAM type: YTN; PAM sequence: TTG
  source 1..20: mol_type = other DNA
tgtatagacactagcaacaa

SEQ ID NO: 55604 - DNA, 20 bp, synthetic construct
  misc_feature 1..20: note = Description of Artificial Sequence: Synthetic oligonucleotide
  misc_feature 1..20: note = Target: SCN10A; (-) strand; PAM type: YTN; PAM sequence: TTA
  source 1..20: mol_type = other DNA
acatacataaatcaattgtg

SEQ ID NO: 55605 - DNA, 20 bp, synthetic construct
  misc_feature 1..20: note = Description of Artificial Sequence: Synthetic oligonucleotide
  misc_feature 1..20: note = Target: SCN10A; (-) strand; PAM type: YTN; PAM sequence: CTG
  source 1..20: mol_type = other DNA
ggtacaaattaacatacata

SEQ ID NO: 55606 - DNA, 20 bp, synthetic construct
  misc_feature 1..20: note = Description of Artificial Sequence: Synthetic oligonucleotide
  misc_feature 1..20: note = Target: SCN10A; (-) strand; PAM type: YTN; PAM sequence: TTA
  source 1..20: mol_type = other DNA
ataaaagagtatagtaaggt

SEQ ID NO: 55607 - DNA, 20 bp, synthetic construct
  misc_feature 1..20: note = Description of Artificial Sequence: Synthetic oligonucleotide
  misc_feature 1..20: note = Target: SCN10A; (-) strand; PAM type: YTN; PAM sequence: CTA
  source 1..20: mol_type = other DNA
gagataaacagtaagaatta

SEQ ID NO: 55608 - DNA, 20 bp, synthetic construct
  misc_feature 1..20: note = Description of Artificial Sequence: Synthetic oligonucleotide
  misc_feature 1..20: note = Target: SCN10A; (-) strand; PAM type: YTN; PAM sequence: TTG
  source 1..20: mol_type = other DNA
tatacataaaatatccaaca

SEQ ID NO: 55609 - DNA, 20 bp, synthetic construct
  misc_feature 1..20: note = Description of Artificial Sequence: Synthetic oligonucleotide
  misc_feature 1..20: note = Target: SCN10A; (-) strand; PAM type: YTN; PAM sequence: TTA
  source 1..20: mol_type = other DNA
cagataataagattgtatac

SEQ ID NO: 55610 - DNA, 20 bp, synthetic construct
  misc_feature 1..20: note = Description of Artificial Sequence: Synthetic oligonucleotide
  misc_feature 1..20: note = Target: SCN10A; (-) strand; PAM type: YTN; PAM sequence: TTT
  source 1..20: mol_type = other DNA
acagataataagattgtata

SEQ ID NO: 55611 - DNA, 20 bp, synthetic construct
  misc_feature 1..20: note = Description of Artificial Sequence: Synthetic oligonucleotide
  misc_feature 1..20: note = Target: SCN10A; (-) strand; PAM type: YTN; PAM sequence: CTC
  source 1..20: mol_type = other DNA
agccagcatagtaaagcaaa

SEQ ID NO: 55612 - DNA, 20 bp, synthetic construct
  misc_feature 1..20: note = Description of Artificial Sequence: Synthetic oligonucleotide
  misc_feature 1..20: note = Target: SCN10A; (-) strand; PAM type: YTN; PAM sequence: TTG
  source 1..20: mol_type = other DNA
taaaggaggtctcagccagc

SEQ ID NO: 55613 - DNA, 20 bp, synthetic construct
  misc_feature 1..20: note = Description of Artificial Sequence: Synthetic oligonucleotide
  misc_feature 1..20: note = Target: SCN10A; (-) strand; PAM type: YTN; PAM sequence: TTT
  source 1..20: mol_type = other DNA
gtaaaggaggtctcagccag

SEQ ID NO: 55614 - DNA, 20 bp, synthetic construct
  misc_feature 1..20: note = Description of Artificial Sequence: Synthetic oligonucleotide
  misc_feature 1..20: note = Target: SCN10A; (-) strand; PAM type: YTN; PAM sequence: CTT
  source 1..20: mol_type = other DNA
tgtaaaggaggtctcagcca

SEQ ID NO: 55615 - DNA, 20 bp, synthetic construct
  misc_feature 1..20: note = Description of Artificial Sequence: Synthetic oligonucleotide
  misc_feature 1..20: note = Target: SCN10A; (-) strand; PAM type: YTN; PAM sequence: TTC
  source 1..20: mol_type = other DNA
cactttgtaaaggaggtctc

SEQ ID NO: 55616 - DNA, 20 bp, synthetic construct
  misc_feature 1..20: note = Description of Artificial Sequence: Synthetic oligonucleotide
  misc_feature 1..20: note = Target: SCN10A; (-) strand; PAM type: YTN; PAM sequence: CTC
  source 1..20: mol_type = other DNA
agttccactttgtaaaggag

SEQ ID NO: 55617 - DNA, 20 bp, synthetic construct
  misc_feature 1..20: note = Description of Artificial Sequence: Synthetic oligonucleotide
  misc_feature 1..20: note = Target: SCN10A; (-) strand; PAM type: YTN; PAM sequence: TTC
  source 1..20: mol_type = other DNA
tcagttccactttgtaaagg

SEQ ID NO: 55618 - DNA, 20 bp, synthetic construct
  misc_feature 1..20: note = Description of Artificial Sequence: Synthetic oligonucleotide
  misc_feature 1..20: note = Target: SCN10A; (-) strand; PAM type: YTN; PAM sequence: CTT
  source 1..20: mol_type = other DNA
ctcagttccactttgtaaag

SEQ ID NO: 55619 - DNA, 20 bp, synthetic construct
  misc_feature 1..20: note = Description of Artificial Sequence: Synthetic oligonucleotide
  misc_feature 1..20: note = Target: SCN10A; (-) strand; PAM type: YTN; PAM sequence: TTC
  source 1..20: mol_type = other DNA
ttctcagttccactttgtaa

SEQ ID NO: 55620 - DNA, 20 bp, synthetic construct
  misc_feature 1..20: note = Description of Artificial Sequence: Synthetic oligonucleotide
  misc_feature 1..20: note = Target: SCN10A; (-) strand; PAM type: YTN; PAM sequence: CTG
  source 1..20: mol_type = other DNA
ttcttctcagttccactttg

SEQ ID NO: 55621 - DNA, 20 bp, synthetic construct
  misc_feature 1..20: note = Description of Artificial Sequence: Synthetic oligonucleotide
  misc_feature 1..20: note = Target: SCN10A; (-) strand; PAM type: YTN; PAM sequence: TTG
  source 1..20: mol_type = other DNA
agatcaaaagaaaaaaaaac

SEQ ID NO: 55622 - DNA, 20 bp, synthetic construct
  misc_feature 1..20: note = Description of Artificial Sequence: Synthetic oligonucleotide
  misc_feature 1..20: note = Target: SCN10A; (-) strand; PAM type: YTN; PAM sequence: TTT
  source 1..20: mol_type = other DNA
gagatcaaaagaaaaaaaaa

SEQ ID NO: 55623 - DNA, 20 bp, synthetic construct
  misc_feature 1..20: note = Description of Artificial Sequence: Synthetic oligonucleotide
  misc_feature 1..20: note = Target: SCN10A; (-) strand; PAM type: YTN; PAM sequence: CTT
  source 1..20: mol_type = other DNA
tgagatcaaaagaaaaaaaa

SEQ ID NO: 55624 - DNA, 20 bp, synthetic construct
  misc_feature 1..20: note = Description of Artificial Sequence: Synthetic oligonucleotide
  misc_feature 1..20: note = Target: SCN10A; (-) strand; PAM type: YTN; PAM sequence: TTC
  source 1..20: mol_type = other DNA
cctttgagatcaaaagaaaa

SEQ ID NO: 55625 - DNA, 20 bp, synthetic construct
  misc_feature 1..20: note = Description of Artificial Sequence: Synthetic oligonucleotide
  misc_feature 1..20: note = Target: SCN10A; (-) strand; PAM type: YTN; PAM sequence: TTT
  source 1..20: mol_type = other DNA
ccctttgagatcaaaagaaa

SEQ ID NO: 55626 - DNA, 20 bp, synthetic construct
  misc_feature 1..20: note = Description of Artificial Sequence: Synthetic oligonucleotide
  misc_feature 1..20: note = Target: SCN10A; (-) strand; PAM type: YTN; PAM sequence: CTT
  source 1..20: mol_type = other DNA
tccctttgagatcaaaagaa

SEQ ID NO: 55627 - DNA, 20 bp, synthetic construct
  misc_feature 1..20: note = Description of Artificial Sequence: Synthetic oligonucleotide
  misc_feature 1..20: note = Target: SCN10A; (-) strand; PAM type: YTN; PAM sequence: TTG
  source 1..20: mol_type = other DNA
tgaacatggaaagctttccc

SEQ ID NO: 55628 - DNA, 20 bp, synthetic construct
  misc_feature 1..20: note = Description of Artificial Sequence: Synthetic oligonucleotide
  misc_feature 1..20: note = Target: SCN10A; (-) strand; PAM type: YTN; PAM sequence: TTA
  source 1..20: mol_type = other DNA
attgtgaacatggaaagctt

SEQ ID NO: 55629 - DNA, 20 bp, synthetic construct
  misc_feature 1..20: note = Description of Artificial Sequence: Synthetic oligonucleotide
  misc_feature 1..20: note = Target: SCN10A; (-) strand; PAM type: YTN; PAM sequence: CTT
  source 1..20: mol_type = other DNA
aattgtgaacatggaaagct

SEQ ID NO: 55630 - DNA, 20 bp, synthetic construct
  misc_feature 1..20: note = Description of Artificial Sequence: Synthetic oligonucleotide
  misc_feature 1..20: note = Target: SCN10A; (-) strand; PAM type: YTN; PAM sequence: TTA
  source 1..20: mol_type = other DNA
aagtatcaagcgtcatactt

SEQ ID NO: 55631 - DNA, 20 bp, synthetic construct
  misc_feature 1..20: note = Description of Artificial Sequence: Synthetic oligonucleotide
  misc_feature 1..20: note = Target: SCN10A; (-) strand; PAM type: YTN; PAM sequence: TTT
  source 1..20: mol_type = other DNA
aaagtatcaagcgtcatact

SEQ ID NO: 55632 - DNA, 20 bp, synthetic construct
  misc_feature 1..20: note = Description of Artificial Sequence: Synthetic oligonucleotide
  misc_feature 1..20: note = Target: SCN10A; (-) strand; PAM type: YTN; PAM sequence: TTT
  source 1..20: mol_type = other DNA
taaagtatcaagcgtcatac

SEQ ID NO: 55633 - DNA, 20 bp, synthetic construct
  misc_feature 1..20: note = Description of Artificial Sequence: Synthetic oligonucleotide
  misc_feature 1..20: note = Target: SCN10A; (-) strand; PAM type: YTN; PAM sequence: TTG
  source 1..20: mol_type = other DNA
ttttaaagtatcaagcgtca

SEQ ID NO: 55634 - DNA, 20 bp, synthetic construct
  misc_feature 1..20: note = Description of Artificial Sequence: Synthetic oligonucleotide
  misc_feature 1..20: note = Target: SCN10A; (-) strand; PAM type: YTN; PAM sequence: TTC
  source 1..20: mol_type = other DNA
attgttttaaagtatcaagc

SEQ ID NO: 55635 - DNA, 20 bp, synthetic construct
  misc_feature 1..20: note = Description of Artificial Sequence: Synthetic oligonucleotide
  misc_feature 1..20: note = Target: SCN10A; (-) strand; PAM type: YTN; PAM sequence: CTG
  source 1..20: mol_type = other DNA
ataaagggtattcattgttt

SEQ ID NO: 55636 - DNA, 20 bp, synthetic construct
  misc_feature 1..20: note = Description of Artificial Sequence: Synthetic oligonucleotide
  misc_feature 1..20: note = Target: SCN10A; (-) strand; PAM type: YTN; PAM sequence: CTC
  source 1..20: mol_type = other DNA
tgataaagggtattcattgt

SEQ ID NO: 55637 - DNA, 20 bp, synthetic construct
  misc_feature 1..20: note = Description of Artificial Sequence: Synthetic oligonucleotide
  misc_feature 1..20: note = Target: SCN10A; (-) strand; PAM type: YTN; PAM sequence: TTG
  source 1..20: mol_type = other DNA
catcactctgataaagggta

SEQ ID NO: 55638 - DNA, 20 bp, synthetic construct
  misc_feature 1..20: note = Description of Artificial Sequence: Synthetic oligonucleotide
  misc_feature 1..20: note = Target: SCN10A; (-) strand; PAM type: YTN; PAM sequence: TTA
  source 1..20: mol_type = other DNA
aaaaggggattgcatcactc

SEQ ID NO: 55639 - DNA, 20 bp, synthetic construct
  misc_feature 1..20: note = Description of Artificial Sequence: Synthetic oligonucleotide
  misc_feature 1..20: note = Target: SCN10A; (-) strand; PAM type: YTN; PAM sequence: TTT
  source 1..20: mol_type = other DNA
aaaaaggggattgcatcact

SEQ ID NO: 55640 - DNA, 20 bp, synthetic construct
  misc_feature 1..20: note = Description of Artificial Sequence: Synthetic oligonucleotide
  misc_feature 1..20: note = Target: SCN10A; (-) strand; PAM type: YTN; PAM sequence: TTT
  source 1..20: mol_type = other DNA
taaaaaggggattgcatcac

SEQ ID NO: 55641 - DNA, 20 bp, synthetic construct
  misc_feature 1..20: note = Description of Artificial Sequence: Synthetic oligonucleotide
  misc_feature 1..20: note = Target: SCN10A; (-) strand; PAM type: YTN; PAM sequence: TTA
  source 1..20: mol_type = other DNA
aagtataataattttaaaaa

SEQ ID NO: 55642 - DNA, 20 bp, synthetic construct
  misc_feature 1..20: note = Description of Artificial Sequence: Synthetic oligonucleotide
  misc_feature 1..20: note = Target: SCN10A; (-) strand; PAM type: YTN; PAM sequence: CTT
  source 1..20: mol_type = other DNA
aaagtataataattttaaaa

SEQ ID NO: 55643 - DNA, 20 bp, synthetic construct
  misc_feature 1..20: note = Description of Artificial Sequence: Synthetic oligonucleotide
  misc_feature 1..20: note = Target: SCN10A; (-) strand; PAM type: YTN; PAM sequence: CTG
  source 1..20: mol_type = other DNA
cacatgtaccccagaactta

SEQ ID NO: 55644 - DNA, 20 bp, synthetic construct
  misc_feature 1..20: note = Description of Artificial Sequence: Synthetic oligonucleotide
  misc_feature 1..20: note = Target: SCN10A; (-) strand; PAM type: YTN; PAM sequence: TTC
  source 1..20: mol_type = other DNA
tgcacatgtaccccagaact

SEQ ID NO: 55645 - DNA, 20 bp, synthetic construct
  misc_feature 1..20: note = Description of Artificial Sequence: Synthetic oligonucleotide
  misc_feature 1..20: note = Target: SCN10A; (-) strand; PAM type: YTN; PAM sequence: CTA
  source 1..20: mol_type = other DNA
tgtaacaaaccggcacgttc

SEQ ID NO: 55646 - DNA, 20 bp, synthetic construct
  misc_feature 1..20: note = Description of Artificial Sequence: Synthetic oligonucleotide
  misc_feature 1..20: note = Target: SCN10A; (-) strand; PAM type: YTN; PAM sequence: TTG
  source 1..20: mol_type = other DNA
aagggtgcagcaaaccacca

SEQ ID NO: 55647 - DNA, 20 bp, synthetic construct
  misc_feature 1..20: note = Description of Artificial Sequence: Synthetic oligonucleotide
  misc_feature 1..20: note = Target: SCN10A; (-) strand; PAM type: YTN; PAM sequence: CTA
  source 1..20: mol_type = other DNA
atgtaaatgacgggttgaag

SEQ ID NO: 55648 - DNA, 20 bp, synthetic construct
  misc_feature 1..20: note = Description of Artificial Sequence: Synthetic oligonucleotide
  misc_feature 1..20: note = Target: SCN10A; (-) strand; PAM type: YTN; PAM sequence: TTA
  source 1..20: mol_type = other DNA
ggagaaatacctaatgtaaa

SEQ ID NO: 55649 - DNA, 20 bp, synthetic construct
  misc_feature 1..20: note = Description of Artificial Sequence: Synthetic oligonucleotide
  misc_feature 1..20: note = Target: SCN10A; (-) strand; PAM type: YTN; PAM sequence: CTA
  source 1..20: mol_type = other DNA
ggggagggatagcattagga

SEQ ID NO: 55650 - DNA, 20 bp, synthetic construct
  misc_feature 1..20: note = Description of Artificial Sequence: Synthetic oligonucleotide
  misc_feature 1..20: note = Target: SCN10A; (-) strand; PAM type: YTN; PAM sequence: TTG
  source 1..20: mol_type = other DNA
aggggtggggggctagggga

SEQ ID NO: 55651 - DNA, 20 bp, synthetic construct
  misc_feature 1..20: note = Description of Artificial Sequence: Synthetic oligonucleotide
  misc_feature 1..20: note = Target: SCN10A; (-) strand; PAM type: YTN; PAM sequence: CTG
  source 1..20: mol_type = other DNA
ttgaggggtggggggctagg

SEQ ID NO: 55652 - DNA, 20 bp, synthetic construct
  misc_feature 1..20: note = Description of Artificial Sequence: Synthetic oligonucleotide
  misc_feature 1..20: note = Target: SCN10A; (-) strand; PAM type: YTN; PAM sequence: CTG
  source 1..20: mol_type = other DNA
gggcctgttgaggggtgggg

SEQ ID NO: 55653 - DNA, 20 bp, synthetic construct
  misc_feature 1..20: note = Description of Artificial Sequence: Synthetic oligonucleotide
  misc_feature 1..20: note = Target: SCN10A; (-) strand; PAM type: YTN; PAM sequence: TTG
  source 1..20: mol_type = other DNA
aacaatgagaacacatggac

SEQ ID NO: 55654 - DNA, 20 bp, synthetic construct
  misc_feature 1..20: note = Description of Artificial Sequence: Synthetic oligonucleotide
  misc_feature 1..20: note = Target: SCN10A; (-) strand; PAM type: YTN; PAM sequence: CTC
  source 1..20: mol_type = other DNA
ataagtgggagttgaacaat

SEQ ID NO: 55655 - DNA, 20 bp, synthetic construct
  misc_feature 1..20: note = Description of Artificial Sequence: Synthetic oligonucleotide
  misc_feature 1..20: note = Target: SCN10A; (-) strand; PAM type: YTN; PAM sequence: CTC
  source 1..20: mol_type = other DNA
actcataagtgggagttgaa

SEQ ID NO: 55656 - DNA, 20 bp, synthetic construct
  misc_feature 1..20: note = Description of Artificial Sequence: Synthetic oligonucleotide
  misc_feature 1..20: note = Target: SCN10A; (-) strand; PAM type: YTN; PAM sequence: TTC
  source 1..20: mol_type = other DNA
tcactcataagtgggagttg

SEQ ID NO: 55657 - DNA, 20 bp, synthetic construct
  misc_feature 1..20: note = Description of Artificial Sequence: Synthetic oligonucleotide
  misc_feature 1..20: note = Target: SCN10A; (-) strand; PAM type: YTN; PAM sequence: CTA
  source 1..20: mol_type = other DNA
acacaagaacagaaaaccaa

SEQ ID NO: 55658 - DNA, 20 bp, synthetic construct
  misc_feature 1..20: note = Description of Artificial Sequence: Synthetic oligonucleotide
  misc_feature 1..20: note = Target: SCN10A; (-) strand; PAM type: YTN; PAM sequence: CTC
  source 1..20: mol_type = other DNA
agcaaactaacacaagaaca

SEQ ID NO: 55659 - DNA, 20 bp, synthetic construct
  misc_feature 1..20: note = Description of Artificial Sequence: Synthetic oligonucleotide
  misc_feature 1..20: note = Target: SCN10A; (-) strand; PAM type: YTN; PAM sequence: TTC
  source 1..20: mol_type = other DNA
tcagcaaactaacacaagaa

SEQ ID NO: 55660 - DNA, 20 bp, synthetic construct
  misc_feature 1..20: note = Description of Artificial Sequence: Synthetic oligonucleotide
  misc_feature 1..20: note = Target: SCN10A; (-) strand; PAM type: YTN; PAM sequence: CTG
  source 1..20: mol_type = other DNA
gaaaccatcattctcagcaa

SEQ ID NO: 55661 - DNA, 20 bp, synthetic construct
  misc_feature 1..20: note = Description of Artificial Sequence: Synthetic oligonucleotide
  misc_feature 1..20: note = Target: SCN10A; (-) strand; PAM type: YTN; PAM sequence: TTG
  source 1..20: mol_type = other DNA
cagggacatggatgaagctg

SEQ ID NO: 55662 - DNA, 20 bp, synthetic construct
  misc_feature 1..20: note = Description of Artificial Sequence: Synthetic oligonucleotide
  misc_feature 1..20: note = Target: SCN10A; (-) strand; PAM type: YTN; PAM sequence: TTT
  source 1..20: mol_type = other DNA
gcagggacatggatgaagct

SEQ ID NO: 55663 - DNA, 20 bp, synthetic construct
  misc_feature 1..20: note = Description of Artificial Sequence: Synthetic oligonucleotide
  misc_feature 1..20: note = Target: SCN10A; (-) strand; PAM type: YTN; PAM sequence: CTT
  source 1..20: mol_type = other DNA
tgcagggacatggatgaagc

SEQ ID NO: 55664 - DNA, 20 bp, synthetic construct
  misc_feature 1..20: note = Description of Artificial Sequence: Synthetic oligonucleotide
  misc_feature 1..20: note = Target: SCN10A; (-) strand; PAM type: YTN; PAM sequence: TTC
  source 1..20: mol_type = other DNA
atgtcctttgcagggacatg

SEQ ID NO: 55665 - DNA, 20 bp, synthetic construct
  misc_feature 1..20: note = Description of Artificial Sequence: Synthetic oligonucleotide
  misc_feature 1..20: note = Target: SCN10A; (-) strand; PAM type: YTN; PAM sequence: CTA
  source 1..20: mol_type = other DNA
tgcagtcataaaaaaggatg

SEQ ID NO: 55666 - DNA, 20 bp, synthetic construct
  misc_feature 1..20: note = Description of Artificial Sequence: Synthetic oligonucleotide
  misc_feature 1..20: note = Target: SCN10A; (-) strand; PAM type: YTN; PAM sequence: TTG
  source 1..20: mol_type = other DNA
aaatagaagggaataaatgt

SEQ ID NO: 55667 - DNA, 20 bp, synthetic construct
  misc_feature 1..20: note = Description of Artificial Sequence: Synthetic oligonucleotide
  misc_feature 1..20: note = Target: SCN10A; (-) strand; PAM type: YTN; PAM sequence: TTA
  source 1..20: mol_type = other DNA
gaaaagttgaaatagaaggg

SEQ ID NO: 55668 - DNA, 20 bp, synthetic construct
  misc_feature 1..20: note = Description of Artificial Sequence: Synthetic oligonucleotide
  misc_feature 1..20: note = Target: SCN10A; (-) strand; PAM type: YTN; PAM sequence: CTT
  source 1..20: mol_type = other DNA
agaaaagttgaaatagaagg

SEQ ID NO: 55669 - DNA, 20 bp, synthetic construct
  misc_feature 1..20: note = Description of Artificial Sequence: Synthetic oligonucleotide
  misc_feature 1..20: note = Target: SCN10A; (-) strand; PAM type: YTN; PAM sequence: TTC
  source 1..20: mol_type = other DNA
ttagaaaagttgaaatagaa

SEQ ID NO: 55670 - DNA, 20 bp, synthetic construct
  misc_feature 1..20: note = Description of Artificial Sequence: Synthetic oligonucleotide
  misc_feature 1..20: note = Target: SCN10A; (-) strand; PAM type: YTN; PAM sequence: TTA
  source 1..20: mol_type = other DNA
aattcttagaaaagttgaaa

SEQ ID NO: 55671 - DNA, 20 bp, synthetic construct
  misc_feature 1..20: note = Description of Artificial Sequence: Synthetic oligonucleotide
  misc_feature 1..20: note = Target: SCN10A; (-) strand; PAM type: YTN; PAM sequence: TTT
  source 1..20: mol_type = other DNA
aaattcttagaaaagttgaa

SEQ ID NO: 55672 - DNA, 20 bp, synthetic construct
  misc_feature 1..20: note = Description of Artificial Sequence: Synthetic oligonucleotide
  misc_feature 1..20: note = Target: SCN10A; (-) strand; PAM type: YTN; PAM sequence: TTT
  source 1..20: mol_type = other DNA
taaattcttagaaaagttga

SEQ ID NO: 55673 - DNA, 20 bp, synthetic construct
  misc_feature 1..20: note = Description of Artificial Sequence: Synthetic oligonucleotide
  misc_feature 1..20: note = Target: SCN10A; (-) strand; PAM type: YTN; PAM sequence: TTA
  source 1..20: mol_type = other DNA
taattttaaattcttagaaa

SEQ ID NO: 55674 - DNA, 20 bp, synthetic construct
  misc_feature 1..20: note = Description of Artificial Sequence: Synthetic oligonucleotide
  misc_feature 1..20: note = Target: SCN10A; (-) strand; PAM type: YTN; PAM sequence: TTT
  source 1..20: mol_type = other DNA
ataattttaaattcttagaa

SEQ ID NO: 55675 - DNA, 20 bp, synthetic construct
  misc_feature 1..20: note = Description of Artificial Sequence: Synthetic oligonucleotide
  misc_feature 1..20: note = Target: SCN10A; (-) strand; PAM type: YTN; PAM sequence: TTC
  source 1..20: mol_type = other DNA
catttataattttaaattct

SEQ ID NO: 55676 - DNA, 20 bp, synthetic construct
  misc_feature 1..20: note = Description of Artificial Sequence: Synthetic oligonucleotide
  misc_feature 1..20: note = Target: SCN10A; (-) strand; PAM type: YTN; PAM sequence: TTT
  source 1..20: mol_type = other DNA
ccatttataattttaaattc

SEQ ID NO: 55677 - DNA, 20 bp, synthetic construct
  misc_feature 1..20: note = Description of Artificial Sequence: Synthetic oligonucleotide
  misc_feature 1..20: note = Target: SCN10A; (-) strand; PAM type: YTN; PAM sequence: TTA
  source 1..20: mol_type = other DNA
atttccatttataattttaa

SEQ ID NO: 55678 - DNA, 20 bp, synthetic construct
  misc_feature 1..20: note = Description of Artificial Sequence: Synthetic oligonucleotide
  misc_feature 1..20: note = Target: SCN10A; (-) strand; PAM type: YTN; PAM sequence: TTT
  source 1..20: mol_type = other DNA
aatttccatttataatttta

SEQ ID NO: 55679 - DNA, 20 bp, synthetic construct
  misc_feature 1..20: note = Description of Artificial Sequence: Synthetic oligonucleotide
  misc_feature 1..20: note = Target: SCN10A; (-) strand; PAM type: YTN; PAM sequence: TTG
  source 1..20: mol_type = other DNA
ataaagtttaatttccattt

SEQ ID NO: 55680 - DNA, 20 bp, synthetic construct
  misc_feature 1..20: note = Description of Artificial Sequence: Synthetic oligonucleotide
  misc_feature 1..20: note = Target: SCN10A; (-) strand; PAM type: YTN; PAM sequence: TTT
  source 1..20: mol_type = other DNA
gataaagtttaatttccatt

SEQ ID NO: 55681 - DNA, 20 bp, synthetic construct
  misc_feature 1..20: note = Description of Artificial Sequence: Synthetic oligonucleotide
  misc_feature 1..20: note = Target: SCN10A; (-) strand; PAM type: YTN; PAM sequence: CTA
  source 1..20: mol_type = other DNA
aaatcatttgataaagttta

SEQ ID NO: 55682 - DNA, 20 bp, synthetic construct
  misc_feature 1..20: note = Description of Artificial Sequence: Synthetic oligonucleotide
  misc_feature 1..20: note = Target: SCN10A; (-) strand; PAM type: YTN; PAM sequence: TTG
  source 1..20: mol_type = other DNA
atgctaaaatcatttgataa

SEQ ID NO: 55683 - DNA, 20 bp, synthetic construct
  misc_feature 1..20: note = Description of Artificial Sequence: Synthetic oligonucleotide
  misc_feature 1..20: note = Target: SCN10A; (-) strand; PAM type: YTN; PAM sequence: TTA
  source 1..20: mol_type = other DNA
attgatgctaaaatcatttg

SEQ ID NO: 55684 - DNA, 20 bp, synthetic construct
  misc_feature 1..20: note = Description of Artificial Sequence: Synthetic oligonucleotide
  misc_feature 1..20: note = Target: SCN10A; (-) strand; PAM type: YTN; PAM sequence: CTT
  source 1..20: mol_type = other DNA
aattgatgctaaaatcattt

SEQ ID NO: 55685 - DNA, 20 bp, synthetic construct
  misc_feature 1..20: note = Description of Artificial Sequence: Synthetic oligonucleotide
  misc_feature 1..20: note = Target: SCN10A; (-) strand; PAM type: YTN; PAM sequence: TTC
  source 1..20: mol_type = other DNA
ttaattgatgctaaaatcat

SEQ ID NO: 55686 - DNA, 20 bp, synthetic construct
  misc_feature 1..20: note = Description of Artificial Sequence: Synthetic oligonucleotide
  misc_feature 1..20: note = Target: SCN10A; (-) strand; PAM type: YTN; PAM sequence: CTT
  source 1..20: mol_type = other DNA
cttaattgatgctaaaatca

SEQ ID NO: 55687 - DNA, 20 bp, synthetic construct
  misc_feature 1..20: note = Description of Artificial Sequence: Synthetic oligonucleotide
  misc_feature 1..20: note = Target: SCN10A; (-) strand; PAM type: YTN; PAM sequence: TTA
  source 1..20: mol_type = other DNA
aaggaaaaggatcacatagt

SEQ ID NO: 55688 - DNA, 20 bp, synthetic construct
  misc_feature 1..20: note = Description of Artificial Sequence: Synthetic oligonucleotide
  misc_feature 1..20: note = Target: SCN10A; (-) strand; PAM type: YTN; PAM sequence: TTA
  source 1..20: mol_type = other DNA
atagattaaaggaaaaggat

SEQ ID NO: 55689 - DNA, 20 bp, synthetic construct
  misc_feature 1..20: note = Description of Artificial Sequence: Synthetic oligonucleotide
  misc_feature 1..20: note = Target: SCN10A; (-) strand; PAM type: YTN; PAM sequence: TTA
  source 1..20: mol_type = other DNA
ttaatagattaaaggaaaag

SEQ ID NO: 55690 - DNA, 20 bp, synthetic construct
  misc_feature 1..20: note = Description of Artificial Sequence: Synthetic oligonucleotide
  misc_feature 1..20: note = Target: SCN10A; (-) strand; PAM type: YTN; PAM sequence: TTT
  source 1..20: mol_type = other DNA
attaatagattaaaggaaaa

SEQ ID NO: 55691 - DNA, 20 bp, synthetic construct
  misc_feature 1..20: note = Description of Artificial Sequence: Synthetic oligonucleotide
  misc_feature 1..20: note = Target: SCN10A; (-) strand; PAM type: YTN; PAM sequence: TTT
  source 1..20: mol_type = other DNA
tattaatagattaaaggaaa

SEQ ID NO: 55692 - DNA, 20 bp, synthetic construct
  misc_feature 1..20: note = Description of Artificial Sequence: Synthetic oligonucleotide
  misc_feature 1..20: note = Target: SCN10A; (-) strand; PAM type: YTN; PAM sequence: TTT
  source 1..20: mol_type = other DNA
ttattaatagattaaaggaa

SEQ ID NO: 55693 - DNA, 20 bp, synthetic construct
  misc_feature 1..20: note = Description of Artificial Sequence: Synthetic oligonucleotide
  misc_feature 1..20: note = Target: SCN10A; (-) strand; PAM type: YTN; PAM sequence: TTA
  source 1..20: mol_type = other DNA
tatttttattaatagattaa

SEQ ID NO: 55694 - DNA, 20 bp, synthetic construct
  misc_feature 1..20: note = Description of Artificial Sequence: Synthetic oligonucleotide
  misc_feature 1..20: note = Target: SCN10A; (-) strand; PAM type: YTN; PAM sequence: CTA
  source 1..20: mol_type = other DNA
atcataacagtaatgcatgc

SEQ ID NO: 55695 - DNA, 20 bp, synthetic construct
  misc_feature 1..20: note = Description of Artificial Sequence: Synthetic oligonucleotide
  misc_feature 1..20: note = Target: SCN10A; (-) strand; PAM type: YTN; PAM sequence: TTG
  source 1..20: mol_type = other DNA
ctaatcataacagtaatgca

SEQ ID NO: 55696 - DNA, 20 bp, synthetic construct
  misc_feature 1..20: note = Description of Artificial Sequence: Synthetic oligonucleotide
  misc_feature 1..20: note = Target: SCN10A; (-) strand; PAM type: YTN; PAM sequence: TTT
  source 1..20: mol_type = other DNA
gctaatcataacagtaatgc

SEQ ID NO: 55697 - DNA, 20 bp, synthetic construct
  misc_feature 1..20: note = Description of Artificial Sequence: Synthetic oligonucleotide
  misc_feature 1..20: note = Target: SCN10A; (-) strand; PAM type: YTN; PAM sequence: TTT
  source 1..20: mol_type = other DNA
tgctaatcataacagtaatg

SEQ ID NO: 55698 - DNA, 20 bp, synthetic construct
  misc_feature 1..20: note = Description of Artificial Sequence: Synthetic oligonucleotide
  misc_feature 1..20: note = Target: SCN10A; (-) strand; PAM type: YTN; PAM sequence: TTT
  source 1..20: mol_type = other DNA
ttgctaatcataacagtaat

SEQ ID NO: 55699 - DNA, 20 bp, synthetic construct
  misc_feature 1..20: note = Description of Artificial Sequence: Synthetic oligonucleotide
  misc_feature 1..20: note = Target: SCN10A; (-) strand; PAM type: YTN; PAM sequence: TTT
  source 1..20: mol_type = other DNA
tttgctaatcataacagtaa

SEQ ID NO: 55700 - DNA, 20 bp, synthetic construct
  misc_feature 1..20: note = Description of Artificial Sequence: Synthetic oligonucleotide
  misc_feature 1..20: note = Target: SCN10A; (-) strand; PAM type: YTN; PAM sequence: TTT
  source 1..20: mol_type = other DNA
ttttgctaatcataacagta

SEQ ID NO: 55701 - DNA, 20 bp, synthetic construct
  misc_feature 1..20: note = Description of Artificial Sequence: Synthetic oligonucleotide
  misc_feature 1..20: note = Target: SCN10A; (-) strand; PAM type: YTN; PAM sequence: TTT
  source 1..20: mol_type = other DNA
tttttgctaatcataacagt

SEQ ID NO: 55702 - DNA, 20 bp, synthetic construct
  misc_feature 1..20: note = Description of Artificial Sequence: Synthetic oligonucleotide
  misc_feature 1..20: note = Target: SCN10A; (-) strand; PAM type: YTN; PAM sequence: TTT
  source 1..20: mol_type = other DNA
ttttttgctaatcataacag

SEQ ID NO: 55703 - DNA, 20 bp, synthetic construct
  misc_feature 1..20: note = Description of Artificial Sequence: Synthetic oligonucleotide
  misc_feature 1..20: note = Target: SCN10A; (-) strand; PAM type: YTN; PAM sequence: TTT
  source 1..20: mol_type = other DNA
tttttttgctaatcataaca

SEQ ID NO: 55704 - DNA, 20 bp, synthetic construct
  misc_feature 1..20: note = Description of Artificial Sequence: Synthetic oligonucleotide
  misc_feature 1..20: note = Target: SCN10A; (-) strand; PAM type: YTN; PAM sequence: TTT
  source 1..20: mol_type = other DNA
ttttttttgctaatcataac

SEQ ID NO: 55705 - DNA, 20 bp, synthetic construct
  misc_feature 1..20: note = Description of Artificial Sequence: Synthetic oligonucleotide
  misc_feature 1..20: note = Target: SCN10A; (-) strand; PAM type: YTN; PAM sequence: TTT
  source 1..20: mol_type = other DNA
tttttttttgctaatcataa

SEQ ID NO: 55706 - DNA, 20 bp, synthetic construct
  misc_feature 1..20: note = Description of Artificial Sequence: Synthetic oligonucleotide
  misc_feature 1..20: note = Target: SCN10A; (-) strand; PAM type: YTN; PAM sequence: TTT
  source 1..20: mol_type = other DNA
ttttttttttgctaatcata

SEQ ID NO: 55707 - DNA, 20 bp, synthetic construct
  misc_feature 1..20: note = Description of Artificial Sequence: Synthetic oligonucleotide
  misc_feature 1..20: note = Target: SCN10A; (-) strand; PAM type: YTN; PAM sequence: TTT
  source 1..20: mol_type = other DNA
tttttttttttgctaatcat

SEQ ID NO: 55708 - DNA, 20 bp, synthetic construct
  misc_feature 1..20: note = Description of Artificial Sequence: Synthetic oligonucleotide
  misc_feature 1..20: note = Target: SCN10A; (-) strand; PAM type: YTN; PAM sequence: TTT
  source 1..20: mol_type = other DNA
ttttttttttttgctaatca

SEQ ID NO: 55709 - DNA, 20 bp, synthetic construct
  misc_feature 1..20: note = Description of Artificial Sequence: Synthetic oligonucleotide
  misc_feature 1..20: note = Target: SCN10A; (-) strand; PAM type: YTN; PAM sequence: TTT
  source 1..20: mol_type = other DNA
tttttttttttttgctaatc

SEQ ID NO: 55710 - DNA, 20 bp, synthetic construct
  misc_feature 1..20: note = Description of Artificial Sequence: Synthetic oligonucleotide
  misc_feature 1..20: note = Target: SCN10A; (-) strand; PAM type: YTN; PAM sequence: TTT
  source 1..20: mol_type = other DNA
ttttttttttttttgctaat

SEQ ID NO: 55711 - DNA, 20 bp, synthetic construct
  misc_feature 1..20: note = Description of Artificial Sequence: Synthetic oligonucleotide
  misc_feature 1..20: note = Target: SCN10A; (-) strand; PAM type: YTN; PAM sequence: TTT
  source 1..20: mol_type = other DNA
tttttttttttttttgctaa

SEQ ID NO: 55712 - DNA, 20 bp, synthetic construct
  misc_feature 1..20: note = Description of Artificial Sequence: Synthetic oligonucleotide
  misc_feature 1..20: note = Target: SCN10A; (-) strand; PAM type: YTN; PAM sequence: TTT
  source 1..20: mol_type = other DNA
ttttttttttttttttgcta

SEQ ID NO: 55713 - DNA, 20 bp, synthetic construct
  misc_feature 1..20: note = Description of Artificial Sequence: Synthetic oligonucleotide
  misc_feature 1..20: note = Target: SCN10A; (-) strand; PAM type: YTN; PAM sequence: TTT
  source 1..20: mol_type = other DNA
tttttttttttttttttgct

SEQ ID NO: 55714 - DNA, 20 bp, synthetic construct
  misc_feature 1..20: note = Description of Artificial Sequence: Synthetic oligonucleotide
  misc_feature 1..20: note = Target: SCN10A; (-) strand; PAM type: YTN; PAM sequence: TTT
  source 1..20: mol_type = other DNA
ttttttttttttttttttgc

SEQ ID NO: 55715 - DNA, 20 bp, synthetic construct
  misc_feature 1..20: note = Description of Artificial Sequence: Synthetic oligonucleotide
  misc_feature 1..20: note = Target: SCN10A; (-) strand; PAM type: YTN; PAM sequence: TTT
  source 1..20: mol_type = other DNA
tttttttttttttttttttg

SEQ ID NO: 55716 - DNA, 20 bp, synthetic construct
  misc_feature 1..20: note = Description of Artificial Sequence: Synthetic oligonucleotide
  misc_feature 1..20: note = Target: SCN10A; (-) strand; PAM type: YTN; PAM sequence: TTT
  source 1..20: mol_type = other DNA
tttttttttttttttttttt

SEQ ID NO: 55717 - DNA, 20 bp, synthetic construct
  misc_feature 1..20: note = Description of Artificial Sequence: Synthetic oligonucleotide
  misc_feature 1..20: note = Target: SCN10A; (-) strand; PAM type: YTN; PAM sequence: CTT
  source 1..20: mol_type = other DNA
tttttttttttttttttttt

SEQ ID NO: 55718 - DNA, 20 bp, synthetic construct
  misc_feature 1..20: note = Description of Artificial Sequence: Synthetic oligonucleotide
  misc_feature 1..20: note = Target: SCN10A; (-) strand; PAM type: YTN; PAM sequence: TTC
  source 1..20: mol_type = other DNA
tttttttttttttttttttt

SEQ ID NO: 55719 - DNA, 20 bp, synthetic construct
  misc_feature 1..20: note = Description of Artificial Sequence: Synthetic oligonucleotide
  misc_feature 1..20: note = Target: SCN10A; (-) strand; PAM type: YTN; PAM sequence: TTT
  source 1..20: mol_type = other DNA
cttttttttttttttttttt

SEQ ID NO: 55720 - DNA, 20 bp, synthetic construct
  misc_feature 1..20: note = Description of Artificial Sequence: Synthetic oligonucleotide
  misc_feature 1..20: note = Target: SCN10A; (-) strand; PAM type: YTN; PAM sequence: CTT
  source 1..20: mol_type = other DNA
tctttttttttttttttttt

SEQ ID NO: 55721 - DNA, 20 bp, synthetic construct
  misc_feature 1..20: note = Description of Artificial Sequence: Synthetic oligonucleotide
  misc_feature 1..20: note = Target: SCN10A; (-) strand; PAM type: YTN; PAM sequence: TTG
  source 1..20: mol_type = other DNA
cagagctttctttttttttt

SEQ ID NO: 55722 - DNA, 20 bp, synthetic construct
  misc_feature 1..20: note = Description of Artificial Sequence: Synthetic oligonucleotide
  misc_feature 1..20: note = Target: SCN10A; (-) strand; PAM type: YTN; PAM sequence: TTT
  source 1..20: mol_type = other DNA
gcagagctttcttttttttt

SEQ ID NO: 55723 - DNA, 20 bp, synthetic construct
  misc_feature 1..20: note = Description of Artificial Sequence: Synthetic oligonucleotide
  misc_feature 1..20: note = Target: SCN10A; (-) strand; PAM type: YTN; PAM sequence: CTT
  source 1..20: mol_type = other DNA
tgcagagctttctttttttt

SEQ ID NO: 55724 - DNA, 20 bp, synthetic construct
  misc_feature 1..20: note = Description of Artificial Sequence: Synthetic oligonucleotide
  misc_feature 1..20: note = Target: SCN10A; (-) strand; PAM type: YTN; PAM sequence: TTA
  source 1..20: mol_type = other DNA
taataacaggtgctttgcag

SEQ ID NO: 55725 - DNA, 20 bp, synthetic construct
  misc_feature 1..20: note = Description of Artificial Sequence: Synthetic oligonucleotide
  misc_feature 1..20: note = Target: SCN10A; (-) strand; PAM type: YTN; PAM sequence: TTG
  source 1..20: mol_type = other DNA
gttataataacaggtgcttt

SEQ ID NO: 55726 - DNA, 20 bp, synthetic construct
  misc_feature 1..20: note = Description of Artificial Sequence: Synthetic oligonucleotide
  misc_feature 1..20: note = Target: SCN10A; (-) strand; PAM type: YTN; PAM sequence: TTT
  source 1..20: mol_type = other DNA
ggttataataacaggtgctt

SEQ ID NO: 55727 - DNA, 20 bp, synthetic construct
  misc_feature 1..20: note = Description of Artificial Sequence: Synthetic oligonucleotide
  misc_feature 1..20: note = Target: SCN10A; (-) strand; PAM type: YTN; PAM sequence: CTT
  source 1..20: mol_type = other DNA
tggttataataacaggtgct

SEQ ID NO: 55728 - DNA, 20 bp, synthetic construct
  misc_feature 1..20: note = Description of Artificial Sequence: Synthetic oligonucleotide
  misc_feature 1..20: note = Target: SCN10A; (-) strand; PAM type: YTN; PAM sequence: CTA
  source 1..20: mol_type = other DNA
acatacctttggttataata

SEQ ID NO: 55729 - DNA, 20 bp, synthetic construct
  misc_feature 1..20: note = Description of Artificial Sequence: Synthetic oligonucleotide
  misc_feature 1..20: note = Target: SCN10A; (-) strand; PAM type: YTN; PAM sequence: TTG
  source 1..20: mol_type = other DNA
aacctaacatacctttggtt

SEQ ID NO: 55730 - DNA, 20 bp, synthetic construct
  misc_feature 1..20: note = Description of Artificial Sequence: Synthetic oligonucleotide
  misc_feature 1..20: note = Target: SCN10A; (-) strand; PAM type: YTN; PAM sequence: CTT
  source 1..20: mol_type = other DNA
gaacctaacatacctttggt

SEQ ID NO: 55731 - DNA, 20 bp, synthetic construct
  misc_feature 1..20: note = Description of Artificial Sequence: Synthetic oligonucleotide
  misc_feature 1..20: note = Target: SCN10A; (-) strand; PAM type: YTN; PAM sequence: CTC
  source 1..20: mol_type = other DNA
cagcttgaacctaacatacc

SEQ ID NO: 55732 - DNA, 20 bp, synthetic construct
  misc_feature 1..20: note = Description of Artificial Sequence: Synthetic oligonucleotide
  misc_feature 1..20: note = Target: SCN10A; (-) strand; PAM type: YTN; PAM sequence: TTC
  source 1..20: mol_type = other DNA
cactccagcttgaacctaac

SEQ ID NO: 55733 - DNA, 20 bp, synthetic construct
  misc_feature 1..20: note = Description of Artificial Sequence: Synthetic oligonucleotide
  misc_feature 1..20: note = Target: SCN10A; (-) strand; PAM type: YTN; PAM sequence: CTT
  source 1..20: mol_type = other DNA
ccactccagcttgaacctaa

SEQ ID NO: 55734 - DNA, 20 bp, synthetic construct
  misc_feature 1..20: note = Description of Artificial Sequence: Synthetic oligonucleotide
  misc_feature 1..20: note = Target: SCN10A; (-) strand; PAM type: YTN; PAM sequence: CTG
  source 1..20: mol_type = other DNA
ggagggatgcttccactcca

SEQ ID NO: 55735 - DNA, 20 bp, synthetic construct
  misc_feature 1..20: note = Description of Artificial Sequence: Synthetic oligonucleotide
  misc_feature 1..20: note = Target: SCN10A; (-) strand; PAM type: YTN; PAM sequence: TTC
  source 1..20: mol_type = other DNA
catatccacacatctgggag

SEQ ID NO: 55736 - DNA, 20 bp, synthetic construct
  misc_feature 1..20: note = Description of Artificial Sequence: Synthetic oligonucleotide
  misc_feature 1..20: note = Target: SCN10A; (-) strand; PAM type: YTN; PAM sequence: TTC
  source 1..20: mol_type = other DNA
caaaaacattccatatccac

SEQ ID NO: 55737 - DNA, 20 bp, synthetic construct
  misc_feature 1..20: note = Description of Artificial Sequence: Synthetic oligonucleotide
  misc_feature 1..20: note = Target: SCN10A; (-) strand; PAM type: YTN; PAM sequence: TTT
  source 1..20: mol_type = other DNA
ccaaaaacattccatatcca

SEQ ID NO: 55738 - DNA, 20 bp, synthetic construct
  misc_feature 1..20: note = Description of Artificial Sequence: Synthetic oligonucleotide
  misc_feature 1..20: note = Target: SCN10A; (-) strand; PAM type: YTN; PAM sequence: TTT
  source 1..20: mol_type = other DNA
tccaaaaacattccatatcc

SEQ ID NO: 55739 - DNA, 20 bp, synthetic construct
  misc_feature 1..20: note = Description of Artificial Sequence: Synthetic oligonucleotide
  misc_feature 1..20: note = Target: SCN10A; (-) strand; PAM type: YTN; PAM sequence: CTG
  source 1..20: mol_type = other DNA
ggagttttccaaaaacattc

SEQ ID NO: 55740 - DNA, 20 bp, synthetic construct
  misc_feature 1..20: note = Description of Artificial Sequence: Synthetic oligonucleotide
  misc_feature 1..20: note = Target: SCN10A; (-) strand; PAM type: YTN; PAM sequence: TTC
  source 1..20: mol_type = other DNA
agaatctgggagttttccaa

SEQ ID NO: 55741 - DNA, 20 bp, synthetic construct
  misc_feature 1..20: note = Description of Artificial Sequence: Synthetic oligonucleotide
  misc_feature 1..20: note = Target: SCN10A; (-) strand; PAM type: YTN; PAM sequence: TTT
  source 1..20: mol_type = other DNA
cagaatctgggagttttcca

SEQ ID NO: 55742 - DNA, 20 bp, synthetic construct
  misc_feature 1..20: note = Description of Artificial Sequence: Synthetic oligonucleotide
  misc_feature 1..20: note = Target: SCN10A; (-) strand; PAM type: YTN; PAM sequence: CTA
  source 1..20: mol_type = other DNA
tagtttcagaatctgggagt

SEQ ID NO: 55743 - DNA, 20 bp, synthetic construct
  misc_feature 1..20: note = Description of Artificial Sequence: Synthetic oligonucleotide
  misc_feature 1..20: note = Target: SCN10A; (-) strand; PAM type: YTN; PAM sequence: TTA
  source 1..20: mol_type = other DNA
gtgggtgaaacccctatagt

SEQ ID NO: 55744 - DNA, 20 bp, synthetic construct
  misc_feature 1..20: note = Description of Artificial Sequence: Synthetic oligonucleotide
  misc_feature 1..20: note = Target: SCN10A; (-) strand; PAM type: YTN; PAM sequence: CTA
  source 1..20: mol_type = other DNA
ggttagtgggtgaaacccct

SEQ ID NO: 55745 - DNA, 20 bp, synthetic construct
  misc_feature 1..20: note = Description of Artificial Sequence: Synthetic oligonucleotide
  misc_feature 1..20: note = Target: SCN10A; (-) strand; PAM type: YTN; PAM sequence: TTC
  source 1..20: mol_type = other DNA
cctaggttagtgggtgaaac

SEQ ID NO: 55746 - DNA, 20 bp, synthetic construct
  misc_feature 1..20: note = Description of Artificial Sequence: Synthetic oligonucleotide
  misc_feature 1..20: note = Target: SCN10A; (-) strand; PAM type: YTN; PAM sequence: TTT
  source 1..20: mol_type = other DNA
ccctaggttagtgggtgaaa

SEQ ID NO: 55747 - DNA, 20 bp, synthetic construct
  misc_feature 1..20: note = Description of Artificial Sequence: Synthetic oligonucleotide
  misc_feature 1..20: note = Target: SCN10A; (-) strand; PAM type: YTN; PAM sequence: CTA
  source 1..20: mol_type = other DNA
tttccctaggttagtgggtg

SEQ ID NO: 55748 - DNA, 20 bp, synthetic construct
  misc_feature 1..20: note = Description of Artificial Sequence: Synthetic oligonucleotide
  misc_feature 1..20: note = Target: SCN10A; (-) strand; PAM type: YTN; PAM sequence: TTC
  source 1..20: mol_type = other DNA
tatttccctaggttagtggg

SEQ ID NO: 55749 - DNA, 20 bp, synthetic construct
  misc_feature 1..20: note = Description of Artificial Sequence: Synthetic oligonucleotide
  misc_feature 1..20: note = Target: SCN10A; (-) strand; PAM type: YTN; PAM sequence: TTA
  source 1..20: mol_type = other DNA
ttctatttccctaggttagt

SEQ ID NO: 55750 - DNA, 20 bp, synthetic construct
  misc_feature 1..20: note = Description of Artificial Sequence: Synthetic oligonucleotide
  misc_feature 1..20: note = Target: SCN10A; (-) strand; PAM type: YTN; PAM sequence: CTG
  source 1..20: mol_type = other DNA
aagttattctatttccctag

SEQ ID NO: 55751 - DNA, 20 bp, synthetic construct
  misc_feature 1..20: note = Description of Artificial Sequence: Synthetic oligonucleotide
  misc_feature 1..20: note = Target: SCN10A; (-) strand; PAM type: YTN; PAM sequence: TTC
  source 1..20: mol_type = other DNA
ctgaagttattctatttccc

SEQ ID NO: 55752 - DNA, 20 bp, synthetic construct
  misc_feature 1..20: note = Description of Artificial Sequence: Synthetic oligonucleotide
  misc_feature 1..20: note = Target: SCN10A; (-) strand; PAM type: YTN; PAM sequence: TTA
  source 1..20: mol_type = other DNA
gtattcctgaagttattcta

SEQ ID NO: 55753 - DNA, 20 bp, synthetic construct
  misc_feature 1..20: note = Description of Artificial Sequence: Synthetic oligonucleotide
  misc_feature 1..20: note = Target: SCN10A; (-) strand; PAM type: YTN; PAM sequence: CTT
  source 1..20: mol_type = other DNA
agtattcctgaagttattct

SEQ ID NO: 55754 - DNA, 20 bp, synthetic construct
  misc_feature 1..20: note = Description of Artificial Sequence: Synthetic oligonucleotide
  misc_feature 1..20: note = Target: SCN10A; (-) strand; PAM type: YTN; PAM sequence: CTC
  source 1..20: mol_type = other DNA
aaagtaaccttagtattcct

SEQ ID NO: 55755 - DNA, 20 bp, synthetic construct
  misc_feature 1..20: note = Description of Artificial Sequence: Synthetic oligonucleotide
  misc_feature 1..20: note = Target: SCN10A; (-) strand; PAM type: YTN; PAM sequence: TTC
  source 1..20: mol_type = other DNA
atatgcctcaaagtaacctt

SEQ ID NO: 55756 - DNA, 20 bp, synthetic construct
  misc_feature 1..20: note = Description of Artificial Sequence: Synthetic oligonucleotide
  misc_feature 1..20: note = Target: SCN10A; (-) strand; PAM type: YTN; PAM sequence: CTT
  source 1..20: mol_type = other DNA
catatgcctcaaagtaacct

SEQ ID NO: 55757 - DNA, 20 bp, synthetic construct
  misc_feature 1..20: note = Description of Artificial Sequence: Synthetic oligonucleotide
  misc_feature 1..20: note = Target: SCN10A; (-) strand; PAM type: YTN; PAM sequence: TTA
  source 1..20: mol_type = other DNA
tcatgcttcatatgcctcaa

SEQ ID NO: 55758 - DNA, 20 bp, synthetic construct
  misc_feature 1..20: note = Description of Artificial Sequence: Synthetic oligonucleotide
  misc_feature 1..20: note = Target: SCN10A; (-) strand; PAM type: YTN; PAM sequence: TTA
  source 1..20: mol_type = other DNA
agttatcatgcttcatatgc

SEQ ID NO: 55759 - DNA, 20 bp, synthetic construct
  misc_feature 1..20: note = Description of Artificial Sequence: Synthetic oligonucleotide
  misc_feature 1..20: note = Target: SCN10A; (-) strand; PAM type: YTN; PAM sequence: TTT
  source 1..20: mol_type = other DNA
aagttatcatgcttcatatg

SEQ ID NO: 55760 - DNA, 20 bp, synthetic construct
  misc_feature 1..20: note = Description of Artificial Sequence: Synthetic oligonucleotide
  misc_feature 1..20: note = Target: SCN10A; (-) strand; PAM type: YTN; PAM sequence: CTG
  source 1..20: mol_type = other DNA
tttaagttatcatgcttcat

SEQ ID NO: 55761 - DNA, 20 bp, synthetic construct
  misc_feature 1..20: note = Description of Artificial Sequence: Synthetic oligonucleotide
  misc_feature 1..20: note = Target: SCN10A; (-) strand; PAM type: YTN; PAM sequence: CTC
  source 1..20: mol_type = other DNA
ataaatgaagctgtttaagt

SEQ ID NO: 55762 - DNA, 20 bp, synthetic construct
  misc_feature 1..20: note = Description of Artificial Sequence: Synthetic oligonucleotide
  misc_feature 1..20: note = Target: SCN10A; (-) strand; PAM type: YTN; PAM sequence: TTA
  source 1..20: mol_type = other DNA
gaaaataactcataaatgaa

SEQ ID NO: 55763 - DNA, 20 bp, synthetic construct
  misc_feature 1..20: note = Description of Artificial Sequence: Synthetic oligonucleotide
  misc_feature 1..20: note = Target: SCN10A; (-) strand; PAM type: YTN; PAM sequence: TTT
  source 1..20: mol_type = other DNA
agaaaataactcataaatga

SEQ ID NO: 55764 - DNA, 20 bp, synthetic construct
  misc_feature 1..20: note = Description of Artificial Sequence: Synthetic oligonucleotide
  misc_feature 1..20: note = Target: SCN10A; (-) strand; PAM type: YTN; PAM sequence: CTG
  source 1..20: mol_type = other DNA
gagtatatttagaaaataac

SEQ ID NO: 55765 - DNA, 20 bp, synthetic construct
  misc_feature 1..20: note = Description of Artificial Sequence: Synthetic oligonucleotide
  misc_feature 1..20: note = Target: SCN10A; (-) strand; PAM type: YTN; PAM sequence: CTC
  source 1..20: mol_type = other DNA
tggagtatatttagaaaata

SEQ ID NO: 55766 - DNA, 20 bp, synthetic construct
  misc_feature 1..20: note = Description of Artificial Sequence: Synthetic oligonucleotide
  misc_feature 1..20: note = Target: SCN10A; (-) strand; PAM type: YTN; PAM sequence: CTA
  source 1..20: mol_type = other DNA
agaacaaatggctctggagt

SEQ ID NO: 55767 - DNA, 20 bp, synthetic construct
  misc_feature 1..20: note = Description of Artificial Sequence: Synthetic oligonucleotide
  misc_feature 1..20: note = Target: SCN10A; (-) strand; PAM type: YTN; PAM sequence: CTG
  source 1..20: mol_type = other DNA
agacagaactaagaacaaat

SEQ ID NO: 55768 - DNA, 20 bp, synthetic construct
  misc_feature 1..20: note = Description of Artificial Sequence: Synthetic oligonucleotide
  misc_feature 1..20: note = Target: SCN10A; (-) strand; PAM type: YTN; PAM sequence: CTA
  source 1..20: mol_type = other DNA
tgaaagagagacaggagcaa

SEQ ID NO: 55769 - DNA, 20 bp, synthetic construct
  misc_feature 1..20: note = Description of Artificial Sequence: Synthetic oligonucleotide
  misc_feature 1..20: note = Target: SCN10A; (-) strand; PAM type: YTN; PAM sequence: CTG
  source 1..20: mol_type = other DNA
ctatgaaagagagacaggag

SEQ ID NO: 55770 - DNA, 20 bp, synthetic construct
  misc_feature 1..20: note = Description of Artificial Sequence: Synthetic oligonucleotide
  misc_feature 1..20: note = Target: SCN10A; (-) strand; PAM type: YTN; PAM sequence: TTG
  source 1..20: mol_type = other DNA
agaaggcctgctatgaaaga

SEQ ID NO: 55771 - DNA, 20 bp, synthetic construct
  misc_feature 1..20: note = Description of Artificial Sequence: Synthetic oligonucleotide
  misc_feature 1..20: note = Target: SCN10A; (-) strand; PAM type: YTN; PAM sequence: TTT
  source 1..20: mol_type = other DNA
gagaaggcctgctatgaaag

SEQ ID NO: 55772 - DNA, 20 bp, synthetic construct
  misc_feature 1..20: note = Description of Artificial Sequence: Synthetic oligonucleotide
  misc_feature 1..20: note = Target: SCN10A; (-) strand; PAM type: YTN; PAM sequence: TTT
  source 1..20: mol_type = other DNA
tgagaaggcctgctatgaaa

SEQ ID NO: 55773 - DNA, 20 bp, synthetic construct
  misc_feature 1..20: note = Description of Artificial Sequence: Synthetic oligonucleotide
  misc_feature 1..20: note = Target: SCN10A; (-) strand; PAM type: YTN; PAM sequence: CTT
  source 1..20: mol_type = other DNA
ttgagaaggcctgctatgaa

SEQ ID NO: 55774 - DNA, 20 bp, synthetic construct
  misc_feature 1..20: note = Description of Artificial Sequence: Synthetic oligonucleotide
  misc_feature 1..20: note = Target: SCN10A; (-) strand; PAM type: YTN; PAM sequence: TTA
  source 1..20: mol_type = other DNA
gagaaggtatgcttttgaga

SEQ ID NO: 55775 - DNA, 20 bp, synthetic construct
  misc_feature 1..20: note = Description of Artificial Sequence: Synthetic oligonucleotide
  misc_feature 1..20: note = Target: SCN10A; (-) strand; PAM type: YTN; PAM sequence: CTT
  source 1..20: mol_type = other DNA
agagaaggtatgcttttgag

SEQ ID NO: 55776 - DNA, 20 bp, synthetic construct
  misc_feature 1..20: note = Description of Artificial Sequence: Synthetic oligonucleotide
  misc_feature 1..20: note = Target: SCN10A; (-) strand; PAM type: YTN; PAM sequence: CTA
  source 1..20: mol_type = other DNA
gatgcacacacaaatgtatg

SEQ ID NO: 55777 - DNA, 20 bp, synthetic construct
  misc_feature 1..20: note = Description of Artificial Sequence: Synthetic oligonucleotide
  misc_feature 1..20: note = Target: SCN10A; (-) strand; PAM type: YTN; PAM sequence: CTG
  source 1..20: mol_type = other DNA
ctagatgcacacacaaatgt

SEQ ID NO: 55778 - DNA, 20 bp, synthetic construct
  misc_feature 1..20: note = Description of Artificial Sequence: Synthetic oligonucleotide
  misc_feature 1..20: note = Target: SCN10A; (-) strand; PAM type: YTN; PAM sequence: CTC
  source 1..20: mol_type = other DNA
acctgctagatgcacacaca

SEQ ID NO: 55779 - DNA, 20 bp, synthetic construct
  misc_feature 1..20: note = Description of Artificial Sequence: Synthetic oligonucleotide
  misc_feature 1..20: note = Target: SCN10A; (-) strand; PAM type: YTN; PAM sequence: CTC
  source 1..20: mol_type = other DNA
actcacctgctagatgcaca

SEQ ID NO: 55780 - DNA, 20 bp, synthetic construct
  misc_feature 1..20: note = Description of Artificial Sequence: Synthetic oligonucleotide
  misc_feature 1..20: note = Target: SCN10A; (-) strand; PAM type: YTN; PAM sequence: CTC
  source 1..20: mol_type = other DNA
gcccccacccccccccaaca

SEQ ID NO: 55781 - DNA, 20 bp, synthetic construct
  misc_feature 1..20: note = Description of Artificial Sequence: Synthetic oligonucleotide
  misc_feature 1..20: note = Target: SCN10A; (-) strand; PAM type: YTN; PAM sequence: CTC
  source 1..20: mol_type = other DNA
ctcgcccccaccccccccca

SEQ ID NO: 55782 - DNA, 20 bp, synthetic construct
  misc_feature 1..20: note = Description of Artificial Sequence: Synthetic oligonucleotide
  misc_feature 1..20: note = Target: SCN10A; (-) strand; PAM type: YTN; PAM sequence: CTG
  source 1..20: mol_type = other DNA
ggaagatgagtctcctcgcc

SEQ ID NO: 55783 - DNA, 20 bp, synthetic construct
  misc_feature 1..20: note = Description of Artificial Sequence: Synthetic oligonucleotide
  misc_feature 1..20: note = Target: SCN10A; (-) strand; PAM type: YTN; PAM sequence: CTA
  source 1..20: mol_type = other DNA
aggtggcctgggaagatgag

SEQ ID NO: 55784 - DNA, 20 bp, synthetic construct
  misc_feature 1..20: note = Description of Artificial Sequence: Synthetic oligonucleotide
  misc_feature 1..20: note = Target: SCN10A; (-) strand; PAM type: YTN; PAM sequence: CTG
  source 1..20: mol_type = other DNA
agtcccagccccagaaagtc

SEQ ID NO: 55785 - DNA, 20 bp, synthetic construct
  misc_feature 1..20: note = Description of Artificial Sequence: Synthetic oligonucleotide
  misc_feature 1..20: note = Target: SCN10A; (-) strand; PAM type: YTN; PAM sequence: TTA
  source 1..20: mol_type = other DNA
aatgcctgagtcccagcccc

SEQ ID NO: 55786 - DNA, 20 bp, synthetic construct
  misc_feature 1..20: note = Description of Artificial Sequence: Synthetic oligonucleotide
  misc_feature 1..20: note = Target: SCN10A; (-) strand; PAM type: YTN; PAM sequence: TTT
  source 1..20: mol_type = other DNA
aaatgcctgagtcccagccc

SEQ ID NO: 55787 - DNA, 20 bp, synthetic construct
  misc_feature 1..20: note = Description of Artificial Sequence: Synthetic oligonucleotide
  misc_feature 1..20: note = Target: SCN10A; (-) strand; PAM type: YTN; PAM sequence: TTT
  source 1..20: mol_type = other DNA
taaatgcctgagtcccagcc

SEQ ID NO: 55788 - DNA, 20 bp, synthetic construct
  misc_feature 1..20: note = Description of Artificial Sequence: Synthetic oligonucleotide
  misc_feature 1..20: note = Target: SCN10A; (-) strand; PAM type: YTN; PAM sequence: TTT
  source 1..20: mol_type = other DNA
ttaaatgcctgagtcccagc

SEQ ID NO: 55789 - DNA, 20 bp, synthetic construct
  misc_feature 1..20: note = Description of Artificial Sequence: Synthetic oligonucleotide
  misc_feature 1..20: note = Target: SCN10A; (-) strand; PAM type: YTN; PAM sequence: TTT
  source 1..20: mol_type = other DNA
tttaaatgcctgagtcccag

SEQ ID NO: 55790 - DNA, 20 bp, synthetic construct
  misc_feature 1..20: note = Description of Artificial Sequence: Synthetic oligonucleotide
  misc_feature 1..20: note = Target: SCN10A; (-) strand; PAM type: YTN; PAM sequence: TTG
  source 1..20: mol_type = other DNA
gggagattttttaaatgcct

SEQ ID NO: 55791 - DNA, 20 bp, synthetic construct
  misc_feature 1..20: note = Description of Artificial Sequence: Synthetic oligonucleotide
  misc_feature 1..20: note = Target: SCN10A; (-) strand; PAM type: YTN; PAM sequence: TTT
  source 1..20: mol_type = other DNA
ggggagattttttaaatgcc

SEQ ID NO: 55792 - DNA, 20 bp, synthetic construct
  misc_feature 1..20: note = Description of Artificial Sequence: Synthetic oligonucleotide
  misc_feature 1..20: note = Target: SCN10A; (-) strand; PAM type: YTN; PAM sequence: TTT
  source 1..20: mol_type = other DNA
tggggagattttttaaatgc

SEQ ID NO: 55793 - DNA, 20 bp, synthetic construct
  misc_feature 1..20: note = Description of Artificial Sequence: Synthetic oligonucleotide
  misc_feature 1..20: note = Target: SCN10A; (-) strand; PAM type: YTN; PAM sequence: TTT
  source 1..20: mol_type = other DNA
ttggggagattttttaaatg

SEQ ID NO: 55794 - DNA, 20 bp, synthetic construct
  misc_feature 1..20: note = Description of Artificial Sequence: Synthetic oligonucleotide
  misc_feature 1..20: note = Target: SCN10A; (-) strand; PAM type: YTN; PAM sequence: TTG
  source 1..20: mol_type = other DNA
caatttttggggagattttt

SEQ ID NO: 55795 - DNA, 20 bp, synthetic construct
  misc_feature 1..20: note = Description of Artificial Sequence: Synthetic oligonucleotide
  misc_feature 1..20: note = Target: SCN10A; (-) strand; PAM type: YTN; PAM sequence: CTG
  source 1..20: mol_type = other DNA
catattgcaatttttgggga

SEQ ID NO: 55796 - DNA, 20 bp, synthetic construct
  misc_feature 1..20: note = Description of Artificial Sequence: Synthetic oligonucleotide
  misc_feature 1..20: note = Target: SCN10A; (-) strand; PAM type: YTN; PAM sequence: TTG
  source 1..20: mol_type = other DNA
gctgcatattgcaatttttg

SEQ ID NO: 55797 - DNA, 20 bp, synthetic construct
  misc_feature 1..20: note = Description of Artificial Sequence: Synthetic oligonucleotide
  misc_feature 1..20: note = Target: SCN10A; (-) strand; PAM type: YTN; PAM sequence: TTT
  source 1..20: mol_type = other DNA
ggctgcatattgcaattttt

SEQ ID NO: 55798 - DNA, 20 bp, synthetic construct
  misc_feature 1..20: note = Description of Artificial Sequence: Synthetic oligonucleotide
  misc_feature 1..20: note = Target: SCN10A; (-) strand; PAM type: YTN; PAM sequence: CTT
  source 1..20: mol_type = other DNA
tggctgcatattgcaatttt

SEQ ID NO: 55799 - DNA, 20 bp, synthetic construct
  misc_feature 1..20: note = Description of Artificial Sequence: Synthetic oligonucleotide
  misc_feature 1..20: note = Target: SCN10A; (-) strand; PAM type: YTN; PAM sequence: CTC
  source 1..20: mol_type = other DNA
aactttggctgcatattgca

SEQ ID NO: 55800 - DNA, 20 bp, synthetic construct
  misc_feature 1..20: note = Description of Artificial Sequence: Synthetic oligonucleotide
  misc_feature 1..20: note = Target: SCN10A; (-) strand; PAM type: YTN; PAM sequence: TTC
  source 1..20: mol_type = other DNA
tcaactttggctgcatattg

SEQ ID NO: 55801 - DNA, 20 bp, synthetic construct
  misc_feature 1..20: note = Description of Artificial Sequence: Synthetic oligonucleotide
  misc_feature 1..20: note = Target: SCN10A; (-) strand; PAM type: YTN; PAM sequence: TTA
  source 1..20: mol_type = other DNA
gtggttctcaactttggctg

SEQ ID NO: 55802 - DNA, 20 bp, synthetic construct
  misc_feature 1..20: note = Description of Artificial Sequence: Synthetic oligonucleotide
  misc_feature 1..20: note = Target: SCN10A; (-) strand; PAM type: YTN; PAM sequence: TTC
  source 1..20: mol_type = other DNA
aaagagatacagattagtgg

SEQ ID NO: 55803 - DNA, 20 bp, synthetic construct
  misc_feature 1..20: note = Description of Artificial Sequence: Synthetic oligonucleotide
  misc_feature 1..20: note = Target: SCN10A; (-) strand; PAM type: YTN; PAM sequence: TTT
  source 1..20: mol_type = other DNA
caaagagatacagattagtg

SEQ ID NO: 55804 - DNA, 20 bp, synthetic construct
  misc_feature 1..20: note = Description of Artificial Sequence: Synthetic oligonucleotide
  misc_feature 1..20: note = Target: SCN10A; (-) strand; PAM type: YTN; PAM sequence: TTC
  source 1..20: mol_type = other DNA
agtttcaaagagatacagat

SEQ ID NO: 55805 - DNA, 20 bp, synthetic construct
  misc_feature 1..20: note = Description of Artificial Sequence: Synthetic oligonucleotide
  misc_feature 1..20: note = Target: SCN10A; (-) strand; PAM type: YTN; PAM sequence: TTT
  source 1..20: mol_type = other DNA
cagtttcaaagagatacaga

SEQ ID NO: 55806 - DNA, 20 bp, synthetic construct
  misc_feature 1..20: note = Description of Artificial Sequence: Synthetic oligonucleotide
  misc_feature 1..20: note = Target: SCN10A; (-) strand; PAM type: YTN; PAM sequence: TTT
  source 1..20: mol_type = other DNA
tcagtttcaaagagatacag

SEQ ID NO: 55807 - DNA, 20 bp, synthetic construct
  misc_feature 1..20: note = Description of Artificial Sequence: Synthetic oligonucleotide
  misc_feature 1..20: note = Target: SCN10A; (-) strand; PAM type: YTN; PAM sequence: TTC
  source 1..20: mol_type = other DNA
ataaacatacatgattttca

SEQ ID NO: 55808 - DNA, 20 bp, synthetic construct
  misc_feature 1..20: note = Description of Artificial Sequence: Synthetic oligonucleotide
  misc_feature 1..20: note = Target: SCN10A; (-) strand; PAM type: YTN; PAM sequence: TTT
  source 1..20: mol_type = other DNA
cataaacatacatgattttc

SEQ ID NO: 55809 - DNA, 20 bp, synthetic construct
  misc_feature 1..20: note = Description of Artificial Sequence: Synthetic oligonucleotide
  misc_feature 1..20: note = Target: SCN10A; (-) strand; PAM type: YTN; PAM sequence: TTG
  source 1..20: mol_type = other DNA
tttcataaacatacatgatt

SEQ ID NO: 55810 - DNA, 20 bp, synthetic construct
  misc_feature 1..20: note = Description of Artificial Sequence: Synthetic oligonucleotide
  misc_feature 1..20: note = Target: SCN10A; (-) strand; PAM type: YTN; PAM sequence: TTT
  source 1..20: mol_type = other DNA
gtttcataaacatacatgat

SEQ ID NO: 55811 - DNA, 20 bp, synthetic construct
  misc_feature 1..20: note = Description of Artificial Sequence: Synthetic oligonucleotide
  misc_feature 1..20: note = Target: SCN10A; (-) strand; PAM type: YTN; PAM sequence: CTG
  source 1..20: mol_type = other DNA
tgagatttgtttcataaaca

SEQ ID NO: 55812 - DNA, 20 bp, synthetic construct
  misc_feature 1..20: note = Description of Artificial Sequence: Synthetic oligonucleotide
  misc_feature 1..20: note = Target: SCN10A; (-) strand; PAM type: YTN; PAM sequence: TTC
  source 1..20: mol_type = other DNA
tgtgagatttgtttcataaa

SEQ ID NO: 55813 - DNA, 20 bp, synthetic construct
  misc_feature 1..20: note = Description of Artificial Sequence: Synthetic oligonucleotide
  misc_feature 1..20: note = Target: SCN10A; (-) strand; PAM type: YTN; PAM sequence: CTT
  source 1..20: mol_type = other DNA
ctgtgagatttgtttcataa

SEQ ID NO: 55814 - DNA, 20 bp, synthetic construct
  misc_feature 1..20: note = Description of Artificial Sequence: Synthetic oligonucleotide
  misc_feature 1..20: note = Target: SCN10A; (-) strand; PAM type: YTN; PAM sequence: CTC
  source 1..20: mol_type = other DNA
cttctgtgagatttgtttca

SEQ ID NO: 55815 - DNA, 20 bp, synthetic construct
  misc_feature 1..20: note = Description of Artificial Sequence: Synthetic oligonucleotide
  misc_feature 1..20: note = Target: SCN10A; (-) strand; PAM type: YTN; PAM sequence: CTC
  source 1..20: mol_type = other DNA
tccttctgtgagatttgttt

SEQ ID NO: 55816 - DNA, 20 bp, synthetic construct
  misc_feature 1..20: note = Description of Artificial Sequence: Synthetic oligonucleotide
  misc_feature 1..20: note = Target: SCN10A; (-) strand; PAM type: YTN; PAM sequence: TTG
  source 1..20: mol_type = other DNA
taataaccaggtctctcctt

SEQ ID NO: 55817 - DNA, 20 bp, synthetic construct
  misc_feature 1..20: note = Description of Artificial Sequence: Synthetic oligonucleotide
  misc_feature 1..20: note = Target: SCN10A; (-) strand; PAM type: YTN; PAM sequence: TTT
  source 1..20: mol_type = other DNA
gtaataaccaggtctctcct

SEQ ID NO: 55818 - DNA, 20 bp, synthetic construct
  misc_feature 1..20: note = Description of Artificial Sequence: Synthetic oligonucleotide
  misc_feature 1..20: note = Target: SCN10A; (-) strand; PAM type: YTN; PAM sequence: CTT
  source 1..20: mol_type = other DNA
tgtaataaccaggtctctcc

SEQ ID NO: 55819 - DNA, 20 bp, synthetic construct
  misc_feature 1..20: note = Description of Artificial Sequence: Synthetic oligonucleotide
  misc_feature 1..20: note = Target: SCN10A; (-) strand; PAM type: YTN; PAM sequence: CTA
  source 1..20: mol_type = other DNA
tatgtctttgtaataaccag

SEQ ID NO: 55820 - DNA, 20 bp, synthetic construct
  misc_feature 1..20: note = Description of Artificial Sequence: Synthetic oligonucleotide
  misc_feature 1..20: note = Target: SCN10A; (-) strand; PAM type: YTN; PAM sequence: TTG
  source 1..20: mol_type = other DNA
tctatatgtctttgtaataa

SEQ ID NO: 55821 - DNA, 20 bp, synthetic construct
  misc_feature 1..20: note = Description of Artificial Sequence: Synthetic oligonucleotide
  misc_feature 1..20: note = Target: SCN10A; (-) strand; PAM type: YTN; PAM sequence: CTC
  source 1..20: mol_type = other DNA
attgtctatatgtctttgta

SEQ ID NO: 55822 - DNA, 20 bp, synthetic construct
  misc_feature 1..20: note = Description of Artificial Sequence: Synthetic oligonucleotide
  misc_feature 1..20: note = Target: SCN10A; (-) strand; PAM type: YTN; PAM sequence: CTG
  source 1..20: mol_type = other DNA
aatctcattgtctatatgtc

SEQ ID NO: 55823 - DNA, 20 bp, synthetic construct
  misc_feature 1..20: note = Description of Artificial Sequence: Synthetic oligonucleotide
  misc_feature 1..20: note = Target: SCN10A; (-) strand; PAM type: YTN; PAM sequence: CTC
  source 1..20: mol_type = other DNA
atgtgggtaatgctgaatct

SEQ ID NO: 55824 - DNA, 20 bp, synthetic construct
  misc_feature 1..20: note = Description of Artificial Sequence: Synthetic oligonucleotide
  misc_feature 1..20: note = Target: SCN10A; (-) strand; PAM type: YTN; PAM sequence: CTG
  source 1..20: mol_type = other DNA
ccatgcctcatgtgggtaat

SEQ ID NO: 55825 - DNA, 20 bp, synthetic construct
  misc_feature 1..20: note = Description of Artificial Sequence: Synthetic oligonucleotide
  misc_feature 1..20: note = Target: SCN10A; (-) strand; PAM type: YTN; PAM sequence: TTA
  source 1..20: mol_type = other DNA
tcctgccatgcctcatgtgg

SEQ ID NO: 55826 - DNA, 20 bp, synthetic construct
  misc_feature 1..20: note = Description of Artificial Sequence: Synthetic oligonucleotide
  misc_feature 1..20: note = Target: SCN10A; (-) strand; PAM type: YTN; PAM sequence: TTT
  source 1..20: mol_type = other DNA
atcctgccatgcctcatgtg

SEQ ID NO: 55827 - DNA, 20 bp, synthetic construct
  misc_feature 1..20: note = Description of Artificial Sequence: Synthetic oligonucleotide
  misc_feature 1..20: note = Target: SCN10A; (-) strand; PAM type: YTN; PAM sequence: TTA
  source 1..20: mol_type = other DNA
tttatcctgccatgcctcat

SEQ ID NO: 55828 - DNA, 20 bp, synthetic construct
  misc_feature 1..20: note = Description of Artificial Sequence: Synthetic oligonucleotide
  misc_feature 1..20: note = Target: SCN10A; (-) strand; PAM type: YTN; PAM sequence: TTT
  source 1..20: mol_type = other DNA
atttatcctgccatgcctca

SEQ ID NO: 55829 - DNA, 20 bp, synthetic construct
  misc_feature 1..20: note = Description of Artificial Sequence: Synthetic oligonucleotide
  misc_feature 1..20: note = Target: SCN10A; (-) strand; PAM type: YTN; PAM sequence: TTT
  source 1..20: mol_type = other DNA
tatttatcctgccatgcctc

SEQ ID NO: 55830 - DNA, 20 bp, synthetic construct
  misc_feature 1..20: note = Description of Artificial Sequence: Synthetic oligonucleotide
  misc_feature 1..20: note = Target: SCN10A; (-) strand; PAM type: YTN; PAM sequence: CTT
  source 1..20: mol_type = other DNA
ttatttatcctgccatgcct

SEQ ID NO: 55831 - DNA, 20 bp, synthetic construct
  misc_feature 1..20: note = Description of Artificial Sequence: Synthetic oligonucleotide
  misc_feature 1..20: note = Target: SCN10A; (-) strand; PAM type: YTN; PAM sequence: TTG
  source 1..20: mol_type = other DNA
tcttttatttatcctgccat

SEQ ID NO: 55832 - DNA, 20 bp, synthetic construct
  misc_feature 1..20: note = Description of Artificial Sequence: Synthetic oligonucleotide
  misc_feature 1..20: note = Target: SCN10A; (-) strand; PAM type: YTN; PAM sequence: TTT
  source 1..20: mol_type = other DNA
gtcttttatttatcctgcca

SEQ ID NO: 55833 - DNA, 20 bp, synthetic construct
  misc_feature 1..20: note = Description of Artificial Sequence: Synthetic oligonucleotide
  misc_feature 1..20: note = Target: SCN10A; (-) strand; PAM type: YTN; PAM sequence: CTT
  source 1..20: mol_type = other DNA
tgtcttttatttatcctgcc

SEQ ID NO: 55834 - DNA, 20 bp, synthetic construct
  misc_feature 1..20: note = Description of Artificial Sequence: Synthetic oligonucleotide
  misc_feature 1..20: note = Target: SCN10A; (-) strand; PAM type: YTN; PAM sequence: TTG
  source 1..20: mol_type = other DNA
gcagtctttgtcttttattt

SEQ ID NO: 55835 - DNA, 20 bp, synthetic construct
  misc_feature 1..20: note = Description of Artificial Sequence: Synthetic oligonucleotide
  misc_feature 1..20: note = Target: SCN10A; (-) strand; PAM type: YTN; PAM sequence: CTT
  source 1..20: mol_type = other DNA
ggcagtctttgtcttttatt

SEQ ID NO: 55836 - DNA, 20 bp, synthetic construct
  misc_feature 1..20: note = Description of Artificial Sequence: Synthetic oligonucleotide
  misc_feature 1..20: note = Target: SCN10A; (-) strand; PAM type: YTN; PAM sequence: TTC
  source 1..20: mol_type = other DNA
acttggcagtctttgtcttt

SEQ ID NO: 55837 - DNA, 20 bp, synthetic construct
  misc_feature 1..20: note = Description of Artificial Sequence: Synthetic oligonucleotide
  misc_feature 1..20: note = Target: SCN10A; (-) strand; PAM type: YTN; PAM sequence: CTT
  source 1..20: mol_type = other DNA
cacttggcagtctttgtctt

SEQ ID NO: 55838 - DNA, 20 bp, synthetic construct
  misc_feature 1..20: note = Description of Artificial Sequence: Synthetic oligonucleotide
  misc_feature 1..20: note = Target: SCN10A; (-) strand; PAM type: YTN; PAM sequence: TTC
  source 1..20: mol_type = other DNA
cttcacttggcagtctttgt

SEQ ID NO: 55839 - DNA, 20 bp, synthetic construct
  misc_feature 1..20: note = Description of Artificial Sequence: Synthetic oligonucleotide
  misc_feature 1..20: note = Target: SCN10A; (-) strand; PAM type: YTN; PAM sequence: CTT
  source 1..20: mol_type = other DNA
ccttcacttggcagtctttg

SEQ ID NO: 55840 - DNA, 20 bp, synthetic construct
  misc_feature 1..20: note = Description of Artificial Sequence: Synthetic oligonucleotide
  misc_feature 1..20: note = Target: SCN10A; (-) strand; PAM type: YTN; PAM sequence: TTC
  source 1..20: mol_type = other DNA
ttccttcacttggcagtctt

SEQ ID NO: 55841 - DNA, 20 bp, synthetic construct
  misc_feature 1..20: note = Description of Artificial Sequence: Synthetic oligonucleotide
  misc_feature 1..20: note = Target: SCN10A; (-) strand; PAM type: YTN; PAM sequence: TTT
  source 1..20: mol_type = other DNA
cttccttcacttggcagtct

SEQ ID NO: 55842 - DNA, 20 bp, synthetic construct
  misc_feature 1..20: note = Description of Artificial Sequence: Synthetic oligonucleotide
  misc_feature 1..20: note = Target: SCN10A; (-) strand; PAM type: YTN; PAM sequence: TTT
  source 1..20: mol_type = other DNA
tcttccttcacttggcagtc

SEQ ID NO: 55843 - DNA, 20 bp, synthetic construct
  misc_feature 1..20: note = Description of Artificial Sequence: Synthetic oligonucleotide
  misc_feature 1..20: note = Target: SCN10A; (-) strand; PAM type: YTN; PAM sequence: CTT
  source 1..20: mol_type = other DNA
ttcttccttcacttggcagt

SEQ ID NO: 55844 - DNA, 20 bp, synthetic construct
  misc_feature 1..20: note = Description of Artificial Sequence: Synthetic oligonucleotide
  misc_feature 1..20: note = Target: SCN10A; (-) strand; PAM type: YTN; PAM sequence: TTC
  source 1..20: mol_type = other DNA
ttttcttccttcacttggca

SEQ ID NO: 55845 - DNA, 20 bp, synthetic construct
  misc_feature 1..20: note = Description of Artificial Sequence: Synthetic oligonucleotide
  misc_feature 1..20: note = Target: SCN10A; (-) strand; PAM type: YTN; PAM sequence: TTT
  source 1..20: mol_type = other DNA
cttttcttccttcacttggc

SEQ ID NO: 55846 - DNA, 20 bp, synthetic construct
  misc_feature 1..20: note = Description of Artificial Sequence: Synthetic oligonucleotide
  misc_feature 1..20: note = Target: SCN10A; (-) strand; PAM type: YTN; PAM sequence: CTT
  source 1..20: mol_type = other DNA
tcttttcttccttcacttgg

SEQ ID NO: 55847 - DNA, 20 bp, synthetic construct
  misc_feature 1..20: note = Description of Artificial Sequence: Synthetic oligonucleotide
  misc_feature 1..20: note = Target: SCN10A; (-) strand; PAM type: YTN; PAM sequence: TTG
  source 1..20: mol_type = other DNA
ctttcttttcttccttcact

SEQ ID NO: 55848 - DNA, 20 bp, synthetic construct
  misc_feature 1..20: note = Description of Artificial Sequence: Synthetic oligonucleotide
  misc_feature 1..20: note = Target: SCN10A; (-) strand; PAM type: YTN; PAM sequence: TTT
  source 1..20: mol_type = other DNA
gctttcttttcttccttcac

SEQ ID NO: 55849 - DNA, 20 bp, synthetic construct
  misc_feature 1..20: note = Description of Artificial Sequence: Synthetic oligonucleotide
  misc_feature 1..20: note = Target: SCN10A; (-) strand; PAM type: YTN; PAM sequence: TTT
  source 1..20: mol_type = other DNA
tgctttcttttcttccttca

SEQ ID NO: 55850 - DNA, 20 bp, synthetic construct
  misc_feature 1..20: note = Description of Artificial Sequence: Synthetic oligonucleotide
  misc_feature 1..20: note = Target: SCN10A; (-) strand; PAM type: YTN; PAM sequence: TTT
  source 1..20: mol_type = other DNA
ttgctttcttttcttccttc

SEQ ID NO: 55851 - DNA, 20 bp, synthetic construct
  misc_feature 1..20: note = Description of Artificial Sequence: Synthetic oligonucleotide
  misc_feature 1..20: note = Target: SCN10A; (-) strand; PAM type: YTN; PAM sequence: CTT
  source 1..20: mol_type = other DNA
tttgctttcttttcttcctt

SEQ ID NO: 55852 - DNA, 20 bp, synthetic construct
  misc_feature 1..20: note = Description of Artificial Sequence: Synthetic oligonucleotide
  misc_feature 1..20: note = Target: SCN10A; (-) strand; PAM type: YTN; PAM sequence: CTC
  source 1..20: mol_type = other DNA
tttttgctttcttttcttcc

SEQ ID NO: 55853 - DNA, 20 bp, synthetic construct
  misc_feature 1..20: note = Description of Artificial Sequence: Synthetic oligonucleotide
  misc_feature 1..20: note = Target: SCN10A; (-) strand; PAM type: YTN; PAM sequence: TTG
  source 1..20: mol_type = other DNA
taccatctctttttgctttc

SEQ ID NO: 55854 - DNA, 20 bp, synthetic construct
  misc_feature 1..20: note = Description of Artificial Sequence: Synthetic oligonucleotide
  misc_feature 1..20: note = Target: SCN10A; (-) strand; PAM type: YTN; PAM sequence: TTA
  source 1..20: mol_type = other DNA
ttgtaccatctctttttgct

SEQ ID NO: 55855 - DNA, 20 bp, synthetic construct
  misc_feature 1..20: note = Description of Artificial Sequence: Synthetic oligonucleotide
  misc_feature 1..20: note = Target: SCN10A; (-) strand; PAM type: YTN; PAM sequence: CTA
  source 1..20: mol_type = other DNA
tcattattgtaccatctctt

SEQ ID NO: 55856 - DNA, 20 bp, synthetic construct
  misc_feature 1..20: note = Description of Artificial Sequence: Synthetic oligonucleotide
  misc_feature 1..20: note = Target: SCN10A; (-) strand; PAM type: YTN; PAM sequence: TTG
  source 1..20: mol_type = other DNA
ctatcattattgtaccatct

SEQ ID NO: 55857 - DNA, 20 bp, synthetic construct
  misc_feature 1..20: note = Description of Artificial Sequence: Synthetic oligonucleotide
  misc_feature 1..20: note = Target: SCN10A; (-) strand; PAM type: YTN; PAM sequence: TTT
  source 1..20: mol_type = other DNA
gctatcattattgtaccatc

SEQ ID NO: 55858 - DNA, 20 bp, synthetic construct
  misc_feature 1..20: note = Description of Artificial Sequence: Synthetic oligonucleotide
  misc_feature 1..20: note = Target: SCN10A; (-) strand; PAM type: YTN; PAM sequence: TTG
  source 1..20: mol_type = other DNA
agtgagtagatttgctatca

SEQ ID NO: 55859 - DNA, 20 bp, synthetic construct
  misc_feature 1..20: note = Description of Artificial Sequence: Synthetic oligonucleotide
  misc_feature 1..20: note = Target: SCN10A; (-) strand; PAM type: YTN; PAM sequence: TTC
  source 1..20: mol_type = other DNA
cagagaaaattgagtgagta

SEQ ID NO: 55860 - DNA, 20 bp, synthetic construct
  misc_feature 1..20: note = Description of Artificial Sequence: Synthetic oligonucleotide
  misc_feature 1..20: note = Target: SCN10A; (-) strand; PAM type: YTN; PAM sequence: CTT
  source 1..20: mol_type = other DNA
ccagagaaaattgagtgagt

SEQ ID NO: 55861 - DNA, 20 bp, synthetic construct
  misc_feature 1..20: note = Description of Artificial Sequence: Synthetic oligonucleotide
  misc_feature 1..20: note = Target: SCN10A; (-) strand; PAM type: YTN; PAM sequence: CTG
  source 1..20: mol_type = other DNA
accttccagagaaaattgag

SEQ ID NO: 55862 - DNA, 20 bp, synthetic construct
  misc_feature 1..20: note = Description of Artificial Sequence: Synthetic oligonucleotide
  misc_feature 1..20: note = Target: SCN10A; (-) strand; PAM type: YTN; PAM sequence: TTG
  source 1..20: mol_type = other DNA
tgtgtgcatgacccgaactg

SEQ ID NO: 55863 - DNA, 20 bp, synthetic construct
  misc_feature 1..20: note = Description of Artificial Sequence: Synthetic oligonucleotide
  misc_feature 1..20: note = Target: SCN10A; (-) strand; PAM type: YTN; PAM sequence: TTA
  source 1..20: mol_type = other DNA
attgtgtgtgcatgacccga

SEQ ID NO: 55864 - DNA, 20 bp, synthetic construct
  misc_feature 1..20: note = Description of Artificial Sequence: Synthetic oligonucleotide
  misc_feature 1..20: note = Target: SCN10A; (-) strand; PAM type: YTN; PAM sequence: TTG
  source 1..20: mol_type = other DNA
gttaattgtgtgtgcatgac

SEQ ID NO: 55865 - DNA, 20 bp, synthetic construct
  misc_feature 1..20: note = Description of Artificial Sequence: Synthetic oligonucleotide
  misc_feature 1..20: note = Target: SCN10A; (-) strand; PAM type: YTN; PAM sequence: TTT
  source 1..20: mol_type = other DNA
ggttaattgtgtgtgcatga

SEQ ID NO: 55866 - DNA, 20 bp, synthetic construct
  misc_feature 1..20: note = Description of Artificial Sequence: Synthetic oligonucleotide
  misc_feature 1..20: note = Target: SCN10A; (-) strand; PAM type: YTN; PAM sequence: TTT
  source 1..20: mol_type = other DNA
tggttaattgtgtgtgcatg

SEQ ID NO: 55867 - DNA, 20 bp, synthetic construct
  misc_feature 1..20: note = Description of Artificial Sequence: Synthetic oligonucleotide
  misc_feature 1..20: note = Target: SCN10A; (-) strand; PAM type: YTN; PAM sequence: CTA
  source 1..20: mol_type = other DNA
ttttggttaattgtgtgtgc

SEQ ID NO: 55868 - DNA, 20 bp, synthetic construct
  misc_feature 1..20: note = Description of Artificial Sequence: Synthetic oligonucleotide
  misc_feature 1..20: note = Target: SCN10A; (-) strand; PAM type: YTN; PAM sequence: TTA
  source 1..20: mol_type = other DNA
cggtcactattttggttaat

SEQ ID NO: 55869 - DNA, 20 bp, synthetic construct
  misc_feature 1..20: note = Description of Artificial Sequence: Synthetic oligonucleotide
  misc_feature 1..20: note = Target: SCN10A; (-) strand; PAM type: YTN; PAM sequence: TTA
  source 1..20: mol_type = other DNA
ttacggtcactattttggtt

SEQ ID NO: 55870 - DNA, 20 bp, synthetic construct
  misc_feature 1..20: note = Description of Artificial Sequence: Synthetic oligonucleotide
  misc_feature 1..20: note = Target: SCN10A; (-) strand; PAM type: YTN; PAM sequence: TTT
  source 1..20: mol_type = other DNA
attacggtcactattttggt

SEQ ID NO: 55871 - DNA, 20 bp, synthetic construct
  misc_feature 1..20: note = Description of Artificial Sequence: Synthetic oligonucleotide
  misc_feature 1..20: note = Target: SCN10A; (-) strand; PAM type: YTN; PAM sequence: TTA
  source 1..20: mol_type = other DNA
tttattacggtcactatttt

SEQ ID NO: 55872 - DNA, 20 bp, synthetic construct
  misc_feature 1..20: note = Description of Artificial Sequence: Synthetic oligonucleotide
  misc_feature 1..20: note = Target: SCN10A; (-) strand; PAM type: YTN; PAM sequence: TTT
  source 1..20: mol_type = other DNA
atttattacggtcactattt

SEQ ID NO: 55873 - DNA, 20 bp, synthetic construct
  misc_feature 1..20: note = Description of Artificial Sequence: Synthetic oligonucleotide
  misc_feature 1..20: note = Target: SCN10A; (-) strand; PAM type: YTN; PAM sequence: TTC
  source 1..20: mol_type = other DNA
agtttatttattacggtcac

SEQ ID NO: 55874 - DNA, 20 bp, synthetic construct
  misc_feature 1..20: note = Description of Artificial Sequence: Synthetic oligonucleotide
  misc_feature 1..20: note = Target: SCN10A; (-) strand; PAM type: YTN; PAM sequence: TTC
  source 1..20: mol_type = other DNA
aggtggttcagtttatttat

SEQ ID NO: 55875 - DNA, 20 bp, synthetic construct
  misc_feature 1..20: note = Description of Artificial Sequence: Synthetic oligonucleotide
  misc_feature 1..20: note = Target: SCN10A; (-) strand; PAM type: YTN; PAM sequence: TTT
  source 1..20: mol_type = other DNA
caggtggttcagtttattta

SEQ ID NO: 55876 - DNA, 20 bp, synthetic construct
  misc_feature 1..20: note = Description of Artificial Sequence: Synthetic oligonucleotide
  misc_feature 1..20: note = Target: SCN10A; (-) strand; PAM type: YTN; PAM sequence: CTT
  source 1..20: mol_type = other DNA
tcaggtggttcagtttattt

SEQ ID NO: 55877 - DNA, 20 bp, synthetic construct
  misc_feature 1..20: note = Description of Artificial Sequence: Synthetic oligonucleotide
  misc_feature 1..20: note = Target: SCN10A; (-) strand; PAM type: YTN; PAM sequence: TTA
  source 1..20: mol_type = other DNA
acacaggcctttcaggtggt

SEQ ID NO: 55878 - DNA, 20 bp, synthetic construct
  misc_feature 1..20: note = Description of Artificial Sequence: Synthetic oligonucleotide
  misc_feature 1..20: note = Target: SCN10A; (-) strand; PAM type: YTN; PAM sequence: CTT
  source 1..20: mol_type = other DNA
aacacaggcctttcaggtgg

SEQ ID NO: 55879 - DNA, 20 bp, synthetic construct
  misc_feature 1..20: note = Description of Artificial Sequence: Synthetic oligonucleotide
  misc_feature 1..20: note = Target: SCN10A; (-) strand; PAM type: YTN; PAM sequence: TTC
  source 1..20: mol_type = other DNA
cttaacacaggcctttcagg

SEQ ID NO: 55880 - DNA, 20 bp, synthetic construct
  misc_feature 1..20: note = Description of Artificial Sequence: Synthetic oligonucleotide
  misc_feature 1..20: note = Target: SCN10A; (-) strand; PAM type: YTN; PAM sequence: TTT
  source 1..20: mol_type = other DNA
ccttaacacaggcctttcag

SEQ ID NO: 55881 - DNA, 20 bp, synthetic construct
  misc_feature 1..20: note = Description of Artificial Sequence: Synthetic oligonucleotide
  misc_feature 1..20: note = Target: SCN10A; (-) strand; PAM type: YTN; PAM sequence: TTT
  source 1..20: mol_type = other DNA
tccttaacacaggcctttca

SEQ ID NO: 55882 - DNA, 20 bp, synthetic construct
  misc_feature 1..20: note = Description of Artificial Sequence: Synthetic oligonucleotide
  misc_feature 1..20: note = Target: SCN10A; (-) strand; PAM type: YTN; PAM sequence: CTT
  source 1..20: mol_type = other DNA
ttccttaacacaggcctttc

SEQ ID NO: 55883 - DNA, 20 bp, synthetic construct
  misc_feature 1..20: note = Description of Artificial Sequence: Synthetic oligonucleotide
  misc_feature 1..20: note = Target: SCN10A; (-) strand; PAM type: YTN; PAM sequence: CTC
  source 1..20: mol_type = other DNA
agcttttccttaacacaggc

SEQ ID NO: 55884 - DNA, 20 bp, synthetic construct
  misc_feature 1..20: note = Description of Artificial Sequence: Synthetic oligonucleotide
  misc_feature 1..20: note = Target: SCN10A; (-) strand; PAM type: YTN; PAM sequence: TTG
  source 1..20: mol_type = other DNA
gtgatctcagcttttcctta

SEQ ID NO: 55885 - DNA, 20 bp, synthetic construct
  misc_feature 1..20: note = Description of Artificial Sequence: Synthetic oligonucleotide
  misc_feature 1..20: note = Target: SCN10A; (-) strand; PAM type: YTN; PAM sequence: CTT
  source 1..20: mol_type = other DNA
ggtgatctcagcttttcctt

SEQ ID NO: 55886 - DNA, 20 bp, synthetic construct
  misc_feature 1..20: note = Description of Artificial Sequence: Synthetic oligonucleotide
  misc_feature 1..20: note = Target: SCN10A; (-) strand; PAM type: YTN; PAM sequence: CTA
  source 1..20: mol_type = other DNA
gatgacatcacagagacttg

SEQ ID NO: 55887 - DNA, 20 bp, synthetic construct
  misc_feature 1..20: note = Description of Artificial Sequence: Synthetic oligonucleotide
  misc_feature 1..20: note = Target: SCN10A; (-) strand; PAM type: YTN; PAM sequence: TTC
  source 1..20: mol_type = other DNA
agcatcaaggtgatcctaga

SEQ ID NO: 55888 - DNA, 20 bp, synthetic construct
  misc_feature 1..20: note = Description of Artificial Sequence: Synthetic oligonucleotide
  misc_feature 1..20: note = Target: SCN10A; (-) strand; PAM type: YTN; PAM sequence: TTA
  source 1..20: mol_type = other DNA
tgaatgtaatcattcagcat

SEQ ID NO: 55889 - DNA, 20 bp, synthetic construct
  misc_feature 1..20: note = Description of Artificial Sequence: Synthetic oligonucleotide
  misc_feature 1..20: note = Target: SCN10A; (-) strand; PAM type: YTN; PAM sequence: TTT
  source 1..20: mol_type = other DNA
atgaatgtaatcattcagca

SEQ ID NO: 55890 - DNA, 20 bp, synthetic construct
  misc_feature 1..20: note = Description of Artificial Sequence: Synthetic oligonucleotide
  misc_feature 1..20: note = Target: SCN10A; (-) strand; PAM type: YTN; PAM sequence: CTA
  source 1..20: mol_type = other DNA
agatttatgaatgtaatcat

SEQ ID NO: 55891 - DNA, 20 bp, synthetic construct
  misc_feature 1..20: note = Description of Artificial Sequence: Synthetic oligonucleotide
  misc_feature 1..20: note = Target: SCN10A; (-) strand; PAM type: YTN; PAM sequence: TTG
  source 1..20: mol_type = other DNA
gctaagatttatgaatgtaa

SEQ ID NO: 55892 - DNA, 20 bp, synthetic construct
  misc_feature 1..20: note = Description of Artificial Sequence: Synthetic oligonucleotide
  misc_feature 1..20: note = Target: SCN10A; (-) strand; PAM type: YTN; PAM sequence: CTA
  source 1..20: mol_type = other DNA
atattggctaagatttatga

SEQ ID NO: 55893 - DNA, 20 bp, synthetic construct
  misc_feature 1..20: note = Description of Artificial Sequence: Synthetic oligonucleotide
  misc_feature 1..20: note = Target: SCN10A; (-) strand; PAM type: YTN; PAM sequence: TTA
  source 1..20: mol_type = other DNA
tgtgacaagatcataaagct

SEQ ID NO: 55894 - DNA, 20 bp, synthetic construct
  misc_feature 1..20: note = Description of Artificial Sequence: Synthetic oligonucleotide
  misc_feature 1..20: note = Target: SCN10A; (-) strand; PAM type: YTN; PAM sequence: TTA
  source 1..20: mol_type = other DNA
ttatgtgacaagatcataaa

SEQ ID NO: 55895 - DNA, 20 bp, synthetic construct
  misc_feature 1..20: note = Description of Artificial Sequence: Synthetic oligonucleotide
  misc_feature 1..20: note = Target: SCN10A; (-) strand; PAM type: YTN; PAM sequence: TTA
  source 1..20: mol_type = other DNA
gtggttattatgtgacaaga

SEQ ID NO: 55896 - DNA, 20 bp, synthetic construct
  misc_feature 1..20: note = Description of Artificial Sequence: Synthetic oligonucleotide
  misc_feature 1..20: note = Target: SCN10A; (-) strand; PAM type: YTN; PAM sequence: CTC
  source 1..20: mol_type = other DNA
agtaaatgttagtggttatt

SEQ ID NO: 55897 - DNA, 20 bp, synthetic construct
  misc_feature 1..20: note = Description of Artificial Sequence: Synthetic oligonucleotide
  misc_feature 1..20: note = Target: SCN10A; (-) strand; PAM type: YTN; PAM sequence: TTA
  source 1..20: mol_type = other DNA
ggcactcagtaaatgttagt

SEQ ID NO: 55898 - DNA, 20 bp, synthetic construct
  misc_feature 1..20: note = Description of Artificial Sequence: Synthetic oligonucleotide
  misc_feature 1..20: note = Target: SCN10A; (-) strand; PAM type: YTN; PAM sequence: CTT
  source 1..20: mol_type = other DNA
aggcactcagtaaatgttag

SEQ ID NO: 55899 - DNA, 20 bp, synthetic construct
  misc_feature 1..20: note = Description of Artificial Sequence: Synthetic oligonucleotide
  misc_feature 1..20: note = Target: SCN10A; (-) strand; PAM type: YTN; PAM sequence: CTA
  source 1..20: mol_type = other DNA
gcttaggcactcagtaaatg

SEQ ID NO: 55900 - DNA, 20 bp, synthetic construct
  misc_feature 1..20: note = Description of Artificial Sequence: Synthetic oligonucleotide
  misc_feature 1..20: note = Target: SCN10A; (-) strand; PAM type: YTN; PAM sequence: CTC
  source 1..20: mol_type = other DNA
agcctagcttaggcactcag

SEQ ID NO: 55901 - DNA, 20 bp, synthetic construct
  misc_feature 1..20: note = Description of Artificial Sequence: Synthetic oligonucleotide
  misc_feature 1..20: note = Target: SCN10A; (-) strand; PAM type: YTN; PAM sequence: TTA
  source 1..20: mol_type = other DNA
gaagtaacatggacaaagta

SEQ ID NO: 55902 - DNA, 20 bp, synthetic construct
  misc_feature 1..20: note = Description of Artificial Sequence: Synthetic oligonucleotide
  misc_feature 1..20: note = Target: SCN10A; (-) strand; PAM type: YTN; PAM sequence: TTG
  source 1..20: mol_type = other DNA
tattagaagtaacatggaca

SEQ ID NO: 55903 - DNA, 20 bp, synthetic construct
  misc_feature 1..20: note = Description of Artificial Sequence: Synthetic oligonucleotide
  misc_feature 1..20: note = Target: SCN10A; (-) strand; PAM type: YTN; PAM sequence: CTG
  source 1..20: mol_type = other DNA
tagatcagttgtattagaag

SEQ ID NO: 55904 - DNA, 20 bp, synthetic construct
  misc_feature 1..20: note = Description of Artificial Sequence: Synthetic oligonucleotide
  misc_feature 1..20: note = Target: SCN10A; (-) strand; PAM type: YTN; PAM sequence: TTA
  source 1..20: mol_type = other DNA
tacccacctgtagatcagtt

SEQ ID NO: 55905 - DNA, 20 bp, synthetic construct
  misc_feature 1..20: note = Description of Artificial Sequence: Synthetic oligonucleotide
  misc_feature 1..20: note = Target: SCN10A; (-) strand; PAM type: YTN; PAM sequence: TTT
  source 1..20: mol_type = other DNA
atacccacctgtagatcagt

SEQ ID NO: 55906 - DNA, 20 bp, synthetic construct
  misc_feature 1..20: note = Description of Artificial Sequence: Synthetic oligonucleotide
  misc_feature 1..20: note = Target: SCN10A; (-) strand; PAM type: YTN; PAM sequence: TTC
  source 1..20: mol_type = other DNA
aaaatgtagatatttatacc

SEQ ID NO: 55907 - DNA, 20 bp, synthetic construct
  misc_feature 1..20: note = Description of Artificial Sequence: Synthetic oligonucleotide
  misc_feature 1..20: note = Target: SCN10A; (-) strand; PAM type: YTN; PAM sequence: CTT
  source 1..20: mol_type = other DNA
caaaatgtagatatttatac

SEQ ID NO: 55908 - DNA, 20 bp, synthetic construct
  misc_feature 1..20: note = Description of Artificial Sequence: Synthetic oligonucleotide
  misc_feature 1..20: note = Target: SCN10A; (-) strand; PAM type: YTN; PAM sequence: CTC
  source 1..20: mol_type = other DNA
agcttcaaaatgtagatatt

SEQ ID NO: 55909 - DNA, 20 bp, synthetic construct
  misc_feature 1..20: note = Description of Artificial Sequence: Synthetic oligonucleotide
  misc_feature 1..20: note = Target: SCN10A; (-) strand; PAM type: YTN; PAM sequence: TTC
  source 1..20: mol_type = other DNA
tcagcttcaaaatgtagata

SEQ ID NO: 55910 - DNA, 20 bp, synthetic construct
  misc_feature 1..20: note = Description of Artificial Sequence: Synthetic oligonucleotide
  misc_feature 1..20: note = Target: SCN10A; (-) strand; PAM type: YTN; PAM sequence: TTT
  source 1..20: mol_type = other DNA
ctcagcttcaaaatgtagat

SEQ ID NO: 55911 - DNA, 20 bp, synthetic construct
  misc_feature 1..20: note = Description of Artificial Sequence: Synthetic oligonucleotide
  misc_feature 1..20: note = Target: SCN10A; (-) strand; PAM type: YTN; PAM sequence: CTG
  source 1..20: mol_type = other DNA
tttctcagcttcaaaatgta

SEQ ID NO: 55912 - DNA, 20 bp, synthetic construct
  misc_feature 1..20: note = Description of Artificial Sequence: Synthetic oligonucleotide
  misc_feature 1..20: note = Target: SCN10A; (-) strand; PAM type: YTN; PAM sequence: TTG
  source 1..20: mol_type = other DNA
tcagcctgtttctcagcttc

SEQ ID NO: 55913 - DNA, 20 bp, synthetic construct
  misc_feature 1..20: note = Description of Artificial Sequence: Synthetic oligonucleotide
  misc_feature 1..20: note = Target: SCN10A; (-) strand; PAM type: YTN; PAM sequence: TTT
  source 1..20: mol_type = other DNA
gtcagcctgtttctcagctt

SEQ ID NO: 55914 - DNA, 20 bp, synthetic construct
  misc_feature 1..20: note = Description of Artificial Sequence: Synthetic oligonucleotide
  misc_feature 1..20: note = Target: SCN10A; (-) strand; PAM type: YTN; PAM sequence: TTT
  source 1..20: mol_type = other DNA
tgtcagcctgtttctcagct

SEQ ID NO: 55915 - DNA, 20 bp, synthetic construct
  misc_feature 1..20: note = Description of Artificial Sequence: Synthetic oligonucleotide
  misc_feature 1..20: note = Target: SCN10A; (-) strand; PAM type: YTN; PAM sequence: TTT
  source 1..20: mol_type = other DNA
ttgtcagcctgtttctcagc

SEQ ID NO: 55916 - DNA, 20 bp, synthetic construct
  misc_feature 1..20: note = Description of Artificial Sequence: Synthetic oligonucleotide
  misc_feature 1..20: note = Target: SCN10A; (-) strand; PAM type: YTN; PAM sequence: TTT
  source 1..20: mol_type = other DNA
tttgtcagcctgtttctcag

SEQ ID NO: 55917 - DNA, 20 bp, synthetic construct
  misc_feature 1..20: note = Description of Artificial Sequence: Synthetic oligonucleotide
  misc_feature 1..20: note = Target: SCN10A; (-) strand; PAM type: YTN; PAM sequence: TTA
  source 1..20: mol_type = other DNA
ttttttgtcagcctgtttct

SEQ ID NO: 55918 - DNA, 20 bp, synthetic construct
  misc_feature 1..20: note = Description of Artificial Sequence: Synthetic oligonucleotide
  misc_feature 1..20: note = Target: SCN10A; (-) strand; PAM type: YTN; PAM sequence: TTT
  source 1..20: mol_type = other DNA
attttttgtcagcctgtttc

SEQ ID NO: 55919 - DNA, 20 bp, synthetic construct
  misc_feature 1..20: note = Description of Artificial Sequence: Synthetic oligonucleotide
  misc_feature 1..20: note = Target: SCN10A; (-) strand; PAM type: YTN; PAM sequence: TTT
  source 1..20: mol_type = other DNA
tattttttgtcagcctgttt

SEQ ID NO: 55920 - DNA, 20 bp, synthetic construct
  misc_feature 1..20: note = Description of Artificial Sequence: Synthetic oligonucleotide
  misc_feature 1..20: note = Target: SCN10A; (-) strand; PAM type: YTN; PAM sequence: CTT
  source 1..20: mol_type = other DNA
ttattttttgtcagcctgtt

SEQ ID NO: 55921 - DNA, 20 bp, synthetic construct
  misc_feature 1..20: note = Description of Artificial Sequence: Synthetic oligonucleotide
  misc_feature 1..20: note = Target: SCN10A; (-) strand; PAM type: YTN; PAM sequence: TTA
  source 1..20: mol_type = other DNA
acttttattttttgtcagcc

SEQ ID NO: 55922 - DNA, 20 bp, synthetic construct
  misc_feature 1..20: note = Description of Artificial Sequence: Synthetic oligonucleotide
  misc_feature 1..20: note = Target: SCN10A; (-) strand; PAM type: YTN; PAM sequence: TTT
  source 1..20: mol_type = other DNA
aacttttattttttgtcagc

SEQ ID NO: 55923 - DNA, 20 bp, synthetic construct
  misc_feature 1..20: note = Description of Artificial Sequence: Synthetic oligonucleotide
  misc_feature 1..20: note = Target: SCN10A; (-) strand; PAM type: YTN; PAM sequence: TTA
  source 1..20: mol_type = other DNA
tttaacttttattttttgtc

SEQ ID NO: 55924 - DNA, 20 bp, synthetic construct
  misc_feature 1..20: note = Description of Artificial Sequence: Synthetic oligonucleotide
  misc_feature 1..20: note = Target: SCN10A; (-) strand; PAM type: YTN; PAM sequence: CTG
  source 1..20: mol_type = other DNA
agaaaagttatttaactttt

SEQ ID NO: 55925 - DNA, 20 bp, synthetic construct
  misc_feature 1..20: note = Description of Artificial Sequence: Synthetic oligonucleotide
  misc_feature 1..20: note = Target: SCN10A; (-) strand; PAM type: YTN; PAM sequence: CTG
  source 1..20: mol_type = other DNA
catgacctgagaaaagttat

SEQ ID NO: 55926 - DNA, 20 bp, synthetic construct
  misc_feature 1..20: note = Description of Artificial Sequence: Synthetic oligonucleotide
  misc_feature 1..20: note = Target: SCN10A; (-) strand; PAM type: YTN; PAM sequence: CTA
  source 1..20: mol_type = other DNA
gctgcatgacctgagaaaag

SEQ ID NO: 55927 - DNA, 20 bp, synthetic construct
  misc_feature 1..20: note = Description of Artificial Sequence: Synthetic oligonucleotide
  misc_feature 1..20: note = Target: SCN10A; (-) strand; PAM type: YTN; PAM sequence: TTG
  source 1..20: mol_type = other DNA
actagctgcatgacctgaga

SEQ ID NO: 55928 - DNA, 20 bp, synthetic construct
  misc_feature 1..20: note = Description of Artificial Sequence: Synthetic oligonucleotide
  misc_feature 1..20: note = Target: SCN10A; (-) strand; PAM type: YTN; PAM sequence: CTG
  source 1..20: mol_type = other DNA
cagcatggttgactagctgc

SEQ ID NO: 55929 - DNA, 20 bp, synthetic construct
  misc_feature 1..20: note = Description of Artificial Sequence: Synthetic oligonucleotide
  misc_feature 1..20: note = Target: SCN10A; (-) strand; PAM type: YTN; PAM sequence: CTC
  source 1..20: mol_type = other DNA
tgcagcatggttgactagct

SEQ ID NO: 55930 - DNA, 20 bp, synthetic construct
  misc_feature 1..20: note = Description of Artificial Sequence: Synthetic oligonucleotide
  misc_feature 1..20: note = Target: SCN10A; (-) strand; PAM type: YTN; PAM sequence: TTC
  source 1..20: mol_type = other DNA
acatctctgcagcatggttg

SEQ ID NO: 55931 - DNA, 20 bp, synthetic construct
  misc_feature 1..20: note = Description of Artificial Sequence: Synthetic oligonucleotide
  misc_feature 1..20: note = Target: SCN10A; (-) strand; PAM type: YTN; PAM sequence: TTA
  source 1..20: mol_type = other DNA
tcaaacagataagagttcac

SEQ ID NO: 55932 - DNA, 20 bp, synthetic construct
  misc_feature 1..20: note = Description of Artificial Sequence: Synthetic oligonucleotide
  misc_feature 1..20: note = Target: SCN10A; (-) strand; PAM type: YTN; PAM sequence: TTG
  source 1..20: mol_type = other DNA
ttatcaaacagataagagtt

SEQ ID NO: 55933 - DNA, 20 bp, synthetic construct
  misc_feature 1..20: note = Description of Artificial Sequence: Synthetic oligonucleotide
  misc_feature 1..20: note = Target: SCN10A; (-) strand; PAM type: YTN; PAM sequence: TTT
  source 1..20: mol_type = other DNA
gttatcaaacagataagagt

SEQ ID NO: 55934 - DNA, 20 bp, synthetic construct
  misc_feature 1..20: note = Description of Artificial Sequence: Synthetic oligonucleotide
  misc_feature 1..20: note = Target: SCN10A; (-) strand; PAM type: YTN; PAM sequence: CTC
  source 1..20: mol_type = other DNA
agagtttgttatcaaacaga

SEQ ID NO: 55935 - DNA, 20 bp, synthetic construct
  misc_feature 1..20: note = Description of Artificial Sequence: Synthetic oligonucleotide
  misc_feature 1..20: note = Target: SCN10A; (-) strand; PAM type: YTN; PAM sequence: TTG
  source 1..20: mol_type = other DNA
ctcagagtttgttatcaaac

SEQ ID NO: 55936 - DNA, 20 bp, synthetic construct
  misc_feature 1..20: note = Description of Artificial Sequence: Synthetic oligonucleotide
  misc_feature 1..20: note = Target: SCN10A; (-) strand; PAM type: YTN; PAM sequence: CTT
  source 1..20: mol_type = other DNA
gctcagagtttgttatcaaa

SEQ ID NO: 55937 - DNA, 20 bp, synthetic construct
  misc_feature 1..20: note = Description of Artificial Sequence: Synthetic oligonucleotide
  misc_feature 1..20: note = Target: SCN10A; (-) strand; PAM type: YTN; PAM sequence: CTA
  source 1..20: mol_type = other DNA
tcttgctcagagtttgttat

SEQ ID NO: 55938 - DNA, 20 bp, synthetic construct
  misc_feature 1..20: note = Description of Artificial Sequence: Synthetic oligonucleotide
  misc_feature 1..20: note = Target: SCN10A; (-) strand; PAM type: YTN; PAM sequence: TTC
  source 1..20: mol_type = other DNA
tatcttgctcagagtttgtt

SEQ ID NO: 55939 - DNA, 20 bp, synthetic construct
  misc_feature 1..20: note = Description of Artificial Sequence: Synthetic oligonucleotide
  misc_feature 1..20: note = Target: SCN10A; (-) strand; PAM type: YTN; PAM sequence: CTT
  source 1..20: mol_type = other DNA
ctatcttgctcagagtttgt

SEQ ID NO: 55940 - DNA, 20 bp, synthetic construct
  misc_feature 1..20: note = Description of Artificial Sequence: Synthetic oligonucleotide
  misc_feature 1..20: note = Target: SCN10A; (-) strand; PAM type: YTN; PAM sequence: TTC
  source 1..20: mol_type = other DNA
cttctatcttgctcagagtt

SEQ ID NO: 55941 - DNA, 20 bp, synthetic construct
  misc_feature 1..20: note = Description of Artificial Sequence: Synthetic oligonucleotide
  misc_feature 1..20: note = Target: SCN10A; (-) strand; PAM type: YTN; PAM sequence: TTT
  source 1..20: mol_type = other DNA
ccttctatcttgctcagagt

SEQ ID NO: 55942 - DNA, 20 bp, synthetic construct
  misc_feature 1..20: note = Description of Artificial Sequence: Synthetic oligonucleotide
  misc_feature 1..20: note = Target: SCN10A; (-) strand; PAM type: YTN; PAM sequence: CTG
  source 1..20: mol_type = other DNA
tttccttctatcttgctcag

SEQ ID NO: 55943 - DNA, 20 bp, synthetic construct
  misc_feature 1..20: note = Description of Artificial Sequence: Synthetic oligonucleotide
  misc_feature 1..20: note = Target: SCN10A; (-) strand; PAM type: YTN; PAM sequence: TTG
  source 1..20: mol_type = other DNA
gaaaagggagtctgtttcct

SEQ ID NO: 55944 - DNA, 20 bp, synthetic construct
  misc_feature 1..20: note = Description of Artificial Sequence: Synthetic oligonucleotide
  misc_feature 1..20: note = Target: SCN10A; (-) strand; PAM type: YTN; PAM sequence: TTT
  source 1..20: mol_type = other DNA
ggaaaagggagtctgtttcc

SEQ ID NO: 55945 - DNA, 20 bp, synthetic construct
  misc_feature 1..20: note = Description of Artificial Sequence: Synthetic oligonucleotide
  misc_feature 1..20: note = Target: SCN10A; (-) strand; PAM type: YTN; PAM sequence: TTT
  source 1..20: mol_type = other DNA
tggaaaagggagtctgtttc

SEQ ID NO: 55946 - DNA, 20 bp, synthetic construct
  misc_feature 1..20: note = Description of Artificial Sequence: Synthetic oligonucleotide
  misc_feature 1..20: note = Target: SCN10A; (-) strand; PAM type: YTN; PAM sequence: TTC
  source 1..20: mol_type = other DNA
ggggcagaaggacattttgg

SEQ ID NO: 55947 - DNA, 20 bp, synthetic construct
  misc_feature 1..20: note = Description of Artificial Sequence: Synthetic oligonucleotide
  misc_feature 1..20: note = Target: SCN10A; (-) strand; PAM type: YTN; PAM sequence: CTT
  source 1..20: mol_type = other DNA
cggggcagaaggacattttg

SEQ ID NO: 55948 - DNA, 20 bp, synthetic construct
  misc_feature 1..20: note = Description of Artificial Sequence: Synthetic oligonucleotide
  misc_feature 1..20: note = Target: SCN10A; (-) strand; PAM type: YTN; PAM sequence: CTG
  source 1..20: mol_type = other DNA
aaatgaaggcttcggggcag

SEQ ID NO: 55949 - DNA, 20 bp, synthetic construct
  misc_feature 1..20: note = Description of Artificial Sequence: Synthetic oligonucleotide
  misc_feature 1..20: note = Target: SCN10A; (-) strand; PAM type: YTN; PAM sequence: TTG
  source 1..20: mol_type = other DNA
tatactgaaatgaaggcttc

SEQ ID NO: 55950 - DNA, 20 bp, synthetic construct
  misc_feature 1..20: note = Description of Artificial Sequence: Synthetic oligonucleotide
  misc_feature 1..20: note = Target: SCN10A; (-) strand; PAM type: YTN; PAM sequence: TTT
  source 1..20: mol_type = other DNA
gtatactgaaatgaaggctt

SEQ ID NO: 55951 - DNA, 20 bp, synthetic construct
  misc_feature 1..20: note = Description of Artificial Sequence: Synthetic oligonucleotide
  misc_feature 1..20: note = Target: SCN10A; (-) strand; PAM type: YTN; PAM sequence: TTT
  source 1..20: mol_type = other DNA
tgtatactgaaatgaaggct

SEQ ID NO: 55952 - DNA, 20 bp, synthetic construct
  misc_feature 1..20: note = Description of Artificial Sequence: Synthetic oligonucleotide
  misc_feature 1..20: note = Target: SCN10A; (-) strand; PAM type: YTN; PAM sequence: TTC
  source 1..20: mol_type = other DNA
aggccattttgtatactgaa

SEQ ID NO: 55953 - DNA, 20 bp, synthetic construct
  misc_feature 1..20: note = Description of Artificial Sequence: Synthetic oligonucleotide
  misc_feature 1..20: note = Target: SCN10A; (-) strand; PAM type: YTN; PAM sequence: TTT
  source 1..20: mol_type = other DNA
caggccattttgtatactga

SEQ ID NO: 55954 - DNA, 20 bp, synthetic construct
  misc_feature 1..20: note = Description of Artificial Sequence: Synthetic oligonucleotide
  misc_feature 1..20: note = Target: SCN10A; (-) strand; PAM type: YTN; PAM sequence: TTG
  source 1..20: mol_type = other DNA
ccagatgaaatttcaggcca

SEQ ID NO: 55955 - DNA, 20 bp, synthetic construct
  misc_feature 1..20: note = Description of Artificial Sequence: Synthetic oligonucleotide
  misc_feature 1..20: note = Target: SCN10A; (-) strand; PAM type: YTN; PAM sequence: TTT
  source 1..20: mol_type = other DNA
gccagatgaaatttcaggcc

SEQ ID NO: 55956 - DNA, 20 bp, synthetic construct
  misc_feature 1..20: note = Description of Artificial Sequence: Synthetic oligonucleotide
  misc_feature 1..20: note = Target: SCN10A; (-) strand; PAM type: YTN; PAM sequence: TTA
  source 1..20: mol_type = other DNA
gaataaaaaagacatttgcc

SEQ ID NO: 55957 - DNA, 20 bp, synthetic construct
  misc_feature 1..20: note = Description of Artificial Sequence: Synthetic oligonucleotide
  misc_feature 1..20: note = Target: SCN10A; (-) strand; PAM type: YTN; PAM sequence: TTT
  source 1..20: mol_type = other DNA
agaataaaaaagacatttgc

SEQ ID NO: 55958 - DNA, 20 bp, synthetic construct
  misc_feature 1..20: note = Description of Artificial Sequence: Synthetic oligonucleotide
  misc_feature 1..20: note = Target: SCN10A; (-) strand; PAM type: YTN; PAM sequence: TTT
  source 1..20: mol_type = other DNA
tagaataaaaaagacatttg

SEQ ID NO: 55959 - DNA, 20 bp, synthetic construct
  misc_feature 1..20: note = Description of Artificial Sequence: Synthetic oligonucleotide
  misc_feature 1..20: note = Target: SCN10A; (-) strand; PAM type: YTN; PAM sequence: CTT
  source 1..20: mol_type = other DNA
ttagaataaaaaagacattt

SEQ ID NO: 55960 - DNA, 20 bp, synthetic construct
  misc_feature 1..20: note = Description of Artificial Sequence: Synthetic oligonucleotide
  misc_feature 1..20: note = Target: SCN10A; (-) strand; PAM type: YTN; PAM sequence: TTG
  source 1..20: mol_type = other DNA
tcttttagaataaaaaagac

SEQ ID NO: 55961 - DNA, 20 bp, synthetic construct
  misc_feature 1..20: note = Description of Artificial Sequence: Synthetic oligonucleotide
  misc_feature 1..20: note = Target: SCN10A; (-) strand; PAM type: YTN; PAM sequence: TTT
  source 1..20: mol_type = other DNA
gtcttttagaataaaaaaga

SEQ ID NO: 55962 - DNA, 20 bp, synthetic construct
  misc_feature 1..20: note = Description of Artificial Sequence: Synthetic oligonucleotide
  misc_feature 1..20: note = Target: SCN10A; (-) strand; PAM type: YTN; PAM sequence: CTT
  source 1..20: mol_type = other DNA
tgtcttttagaataaaaaag

SEQ ID NO: 55963 - DNA, 20 bp, synthetic construct
  misc_feature 1..20: note = Description of Artificial Sequence: Synthetic oligonucleotide
  misc_feature 1..20: note = Target: SCN10A; (-) strand; PAM type: YTN; PAM sequence: TTC
  source 1..20: mol_type = other DNA
tttgtcttttagaataaaaa

SEQ ID NO: 55964 - DNA, 20 bp, synthetic construct
  misc_feature 1..20: note = Description of Artificial Sequence: Synthetic oligonucleotide
  misc_feature 1..20: note = Target: SCN10A; (-) strand; PAM type: YTN; PAM sequence: TTT
  source 1..20: mol_type = other DNA
ctttgtcttttagaataaaa

SEQ ID NO: 55965 - DNA, 20 bp, synthetic construct
  misc_feature 1..20: note = Description of Artificial Sequence: Synthetic oligonucleotide
  misc_feature 1..20: note = Target: SCN10A; (-) strand; PAM type: YTN; PAM sequence: TTT
  source 1..20: mol_type = other DNA
tctttgtcttttagaataaa

SEQ ID NO: 55966 - DNA, 20 bp, synthetic construct
  misc_feature 1..20: note = Description of Artificial Sequence: Synthetic oligonucleotide
  misc_feature 1..20: note = Target: SCN10A; (-) strand; PAM type: YTN; PAM sequence: CTT
  source 1..20: mol_type = other DNA
ttctttgtcttttagaataa

SEQ ID NO: 55967 - DNA, 20 bp, synthetic construct
  misc_feature 1..20: note = Description of Artificial Sequence: Synthetic oligonucleotide
  misc_feature 1..20: note = Target: SCN10A; (-) strand; PAM type: YTN; PAM sequence: CTA
  source 1..20: mol_type = other DNA
acttttctttgtcttttaga

SEQ ID NO: 55968 - DNA, 20 bp, synthetic construct
  misc_feature 1..20: note = Description of Artificial Sequence: Synthetic oligonucleotide
  misc_feature 1..20: note = Target: SCN10A; (-) strand; PAM type: YTN; PAM sequence: TTC
  source 1..20: mol_type = other DNA
taacttttctttgtctttta

SEQ ID NO: 55969 - DNA, 20 bp, synthetic construct
  misc_feature 1..20: note = Description of Artificial Sequence: Synthetic oligonucleotide
  misc_feature 1..20: note = Target: SCN10A; (-) strand; PAM type: YTN; PAM sequence: TTT
  source 1..20: mol_type = other DNA
ctaacttttctttgtctttt

SEQ ID NO: 55970 - DNA, 20 bp, synthetic construct
  misc_feature 1..20: note = Description of Artificial Sequence: Synthetic oligonucleotide
  misc_feature 1..20: note = Target: SCN10A; (-) strand; PAM type: YTN; PAM sequence: CTC
  source 1..20: mol_type = other DNA
caagtttctaacttttcttt

SEQ ID NO: 55971 - DNA, 20 bp, synthetic construct
  misc_feature 1..20: note = Description of Artificial Sequence: Synthetic oligonucleotide
  misc_feature 1..20: note = Target: SCN10A; (-) strand; PAM type: YTN; PAM sequence: TTA
  source 1..20: mol_type = other DNA
tctccaagtttctaactttt

SEQ ID NO: 55972 - DNA, 20 bp, synthetic construct
  misc_feature 1..20: note = Description of Artificial Sequence: Synthetic oligonucleotide
  misc_feature 1..20: note = Target: SCN10A; (-) strand; PAM type: YTN; PAM sequence: CTT
  source 1..20: mol_type = other DNA
atctccaagtttctaacttt

SEQ ID NO: 55973 - DNA, 20 bp, synthetic construct
  misc_feature 1..20: note = Description of Artificial Sequence: Synthetic oligonucleotide
  misc_feature 1..20: note = Target: SCN10A; (-) strand; PAM type: YTN; PAM sequence: TTC
  source 1..20: mol_type = other DNA
acttatctccaagtttctaa

SEQ ID NO: 55974 - DNA, 20 bp, synthetic construct
  misc_feature 1..20: note = Description of Artificial Sequence: Synthetic oligonucleotide
  misc_feature 1..20: note = Target: SCN10A; (-) strand; PAM type: YTN; PAM sequence: CTT
  source 1..20: mol_type = other DNA
cacttatctccaagtttcta

SEQ ID NO: 55975 - DNA, 20 bp, synthetic construct
  misc_feature 1..20: note = Description of Artificial Sequence: Synthetic oligonucleotide
  misc_feature 1..20: note = Target: SCN10A; (-) strand; PAM type: YTN; PAM sequence: CTC
  source 1..20: mol_type = other DNA
ttcacttatctccaagtttc

SEQ ID NO: 55976 - DNA, 20 bp, synthetic construct
  misc_feature 1..20: note = Description of Artificial Sequence: Synthetic oligonucleotide
  misc_feature 1..20: note = Target: SCN10A; (-) strand; PAM type: YTN; PAM sequence: TTG
  source 1..20: mol_type = other DNA
tacctcttcacttatctcca

SEQ ID NO: 55977 - DNA, 20 bp, synthetic construct
  misc_feature 1..20: note = Description of Artificial Sequence: Synthetic oligonucleotide
  misc_feature 1..20: note = Target: SCN10A; (-) strand; PAM type: YTN; PAM sequence: TTT
  source 1..20: mol_type = other DNA
gtacctcttcacttatctcc

SEQ ID NO: 55978 - DNA, 20 bp, synthetic construct
  misc_feature 1..20: note = Description of Artificial Sequence: Synthetic oligonucleotide
  misc_feature 1..20: note = Target: SCN10A; (-) strand; PAM type: YTN; PAM sequence: TTC
  source 1..20: mol_type = other DNA
ccatgaaagtttgtacctct

SEQ ID NO: 55979 - DNA, 20 bp, synthetic construct
  misc_feature 1..20: note = Description of Artificial Sequence: Synthetic oligonucleotide
  misc_feature 1..20: note = Target: SCN10A; (-) strand; PAM type: YTN; PAM sequence: CTA
  source 1..20: mol_type = other DNA
attcccatgaaagtttgtac

SEQ ID NO: 55980 - DNA, 20 bp, synthetic construct
  misc_feature 1..20: note = Description of Artificial Sequence: Synthetic oligonucleotide
  misc_feature 1..20: note = Target: SCN10A; (-) strand; PAM type: YTN; PAM sequence: CTG
  source 1..20: mol_type = other DNA
atgaaactaattcccatgaa

SEQ ID NO: 55981 - DNA, 20 bp, synthetic construct
  misc_feature 1..20: note = Description of Artificial Sequence: Synthetic oligonucleotide
  misc_feature 1..20: note = Target: SCN10A; (-) strand; PAM type: YTN; PAM sequence: TTA
  source 1..20: mol_type = other DNA
cccaaacaatctgatgaaac

SEQ ID NO: 55982 - DNA, 20 bp, synthetic construct
  misc_feature 1..20: note = Description of Artificial Sequence: Synthetic oligonucleotide
  misc_feature 1..20: note = Target: SCN10A; (-) strand; PAM type: YTN; PAM sequence: CTA
  source 1..20: mol_type = other DNA
agttacccaaacaatctgat

SEQ ID NO: 55983 - DNA, 20 bp, synthetic construct
  misc_feature 1..20: note = Description of Artificial Sequence: Synthetic oligonucleotide
  misc_feature 1..20: note = Target: SCN10A; (-) strand; PAM type: YTN; PAM sequence: CTC
  source 1..20: mol_type = other DNA
aactaagttacccaaacaat

SEQ ID NO: 55984 - DNA, 20 bp, synthetic construct
  misc_feature 1..20: note = Description of Artificial Sequence: Synthetic oligonucleotide
  misc_feature 1..20: note = Target: SCN10A; (-) strand; PAM type: YTN; PAM sequence: CTG
  source 1..20: mol_type = other DNA
atctcaactaagttacccaa

SEQ ID NO: 55985 - DNA, 20 bp, synthetic construct
  misc_feature 1..20: note = Description of Artificial Sequence: Synthetic oligonucleotide
  misc_feature 1..20: note = Target: SCN10A; (-) strand; PAM type: YTN; PAM sequence: CTC
  source 1..20: mol_type = other DNA
ggtggaactgatctcaacta

SEQ ID NO: 55986 - DNA, 20 bp, synthetic construct
  misc_feature 1..20: note = Description of Artificial Sequence: Synthetic oligonucleotide
  misc_feature 1..20: note = Target: SCN10A; (-) strand; PAM type: YTN; PAM sequence: TTC
  source 1..20: mol_type = other DNA
ctcggtggaactgatctcaa

SEQ ID NO: 55987 - DNA, 20 bp, synthetic construct
  misc_feature 1..20: note = Description of Artificial Sequence: Synthetic oligonucleotide
  misc_feature 1..20: note = Target: SCN10A; (-) strand; PAM type: YTN; PAM sequence: TTT
  source 1..20: mol_type = other DNA
cctcggtggaactgatctca

SEQ ID NO: 55988 - DNA, 20 bp, synthetic construct
  misc_feature 1..20: note = Description of Artificial Sequence: Synthetic oligonucleotide
  misc_feature 1..20: note = Target: SCN10A; (-) strand; PAM type: YTN; PAM sequence: CTA
  source 1..20: mol_type = other DNA
cccagaagaccatttcctcg

SEQ ID NO: 55989 - DNA, 20 bp, synthetic construct
  misc_feature 1..20: note = Description of Artificial Sequence: Synthetic oligonucleotide
  misc_feature 1..20: note = Target: SCN10A; (-) strand; PAM type: YTN; PAM sequence: TTC
  source 1..20: mol_type = other DNA
ctacccagaagaccatttcc

SEQ ID NO: 55990 - DNA, 20 bp, synthetic construct
  misc_feature 1..20: note = Description of Artificial Sequence: Synthetic oligonucleotide
  misc_feature 1..20: note = Target: SCN10A; (-) strand; PAM type: YTN; PAM sequence: CTC
  source 1..20: mol_type = other DNA
caccgttcctacccagaaga

SEQ ID NO: 55991 - DNA, 20 bp, synthetic construct
  misc_feature 1..20: note = Description of Artificial Sequence: Synthetic oligonucleotide
  misc_feature 1..20: note = Target: SCN10A; (-) strand; PAM type: YTN; PAM sequence: CTG
  source 1..20: mol_type = other DNA
cctccaccgttcctacccag

SEQ ID NO: 55992 - DNA, 20 bp, synthetic construct
  misc_feature 1..20: note = Description of Artificial Sequence: Synthetic oligonucleotide
  misc_feature 1..20: note = Target: SCN10A; (-) strand; PAM type: YTN; PAM sequence: CTG
  source 1..20: mol_type = other DNA
tgcctgcctccaccgttcct

SEQ ID NO: 55993 - DNA, 20 bp, synthetic construct
  misc_feature 1..20: note = Description of Artificial Sequence: Synthetic oligonucleotide
  misc_feature 1..20: note = Target: SCN10A; (-) strand; PAM type: YTN; PAM sequence: TTC
  source 1..20: mol_type = other DNA
cctgtgcctgcctccaccgt

SEQ ID NO: 55994 - DNA, 20 bp, synthetic construct
  misc_feature 1..20: note = Description of Artificial Sequence: Synthetic oligonucleotide
  misc_feature 1..20: note = Target: SCN10A; (-) strand; PAM type: YTN; PAM sequence: TTT
  source 1..20: mol_type = other DNA
ccctgtgcctgcctccaccg

SEQ ID NO: 55995 - DNA, 20 bp, synthetic construct
  misc_feature 1..20: note = Description of Artificial Sequence: Synthetic oligonucleotide
  misc_feature 1..20: note = Target: SCN10A; (-) strand; PAM type: YTN; PAM sequence: TTC
  source 1..20: mol_type = other DNA
atttccctgtgcctgcctcc

SEQ ID NO: 55996 - DNA, 20 bp, synthetic construct
  misc_feature 1..20: note = Description of Artificial Sequence: Synthetic oligonucleotide
  misc_feature 1..20: note = Target: SCN10A; (-) strand; PAM type: YTN; PAM sequence: TTT
  source 1..20: mol_type = other DNA
catttccctgtgcctgcctc

SEQ ID NO: 55997 - DNA, 20 bp, synthetic construct
  misc_feature 1..20: note = Description of Artificial Sequence: Synthetic oligonucleotide
  misc_feature 1..20: note = Target: SCN10A; (-) strand; PAM type: YTN; PAM sequence: CTG
  source 1..20: mol_type = other DNA
agccagtatttcatttccct

SEQ ID NO: 55998 - DNA, 20 bp, synthetic construct
  misc_feature 1..20: note = Description of Artificial Sequence: Synthetic oligonucleotide
  misc_feature 1..20: note = Target: SCN10A; (-) strand; PAM type: YTN; PAM sequence: TTC
  source 1..20: mol_type = other DNA
ctgagccagtatttcatttc

SEQ ID NO: 55999 - DNA, 20 bp, synthetic construct
  misc_feature 1..20: note = Description of Artificial Sequence: Synthetic oligonucleotide
  misc_feature 1..20: note = Target: SCN10A; (-) strand; PAM type: YTN; PAM sequence: CTT
  source 1..20: mol_type = other DNA
cctgagccagtatttcattt

SEQ ID NO: 56000 - DNA, 20 bp, synthetic construct
  misc_feature 1..20: note = Description of Artificial Sequence: Synthetic oligonucleotide
  misc_feature 1..20: note = Target: SCN10A; (-) strand; PAM type: YTN; PAM sequence: TTC
  source 1..20: mol_type = other DNA
ttcctgagccagtatttcat

SEQ ID NO: 56001 - DNA, 20 bp, synthetic construct
  misc_feature 1..20: note = Description of Artificial Sequence: Synthetic oligonucleotide
  misc_feature 1..20: note = Target: SCN10A; (-) strand; PAM type: YTN; PAM sequence: TTT
  source 1..20: mol_type = other DNA
cttcctgagccagtatttca

SEQ ID NO: 56002 - DNA, 20 bp, synthetic construct
  misc_feature 1..20: note = Description of Artificial Sequence: Synthetic oligonucleotide
  misc_feature 1..20: note = Target: SCN10A; (-) strand; PAM type: YTN; PAM sequence: TTT
  source 1..20: mol_type = other DNA
tcttcctgagccagtatttc

SEQ ID NO: 56003 - DNA, 20 bp, synthetic construct
  misc_feature 1..20: note = Description of Artificial Sequence: Synthetic oligonucleotide
  misc_feature 1..20: note = Target: SCN10A; (-) strand; PAM type: YTN; PAM sequence: TTG
  source 1..20: mol_type = other DNA
gggttttcttcctgagccag

SEQ ID NO: 56004 - DNA, 20 bp, synthetic construct
  misc_feature 1..20: note = Description of Artificial Sequence: Synthetic oligonucleotide
  misc_feature 1..20: note = Target: SCN10A; (-) strand; PAM type: YTN; PAM sequence: CTT
  source 1..20: mol_type = other DNA
ggggttttcttcctgagcca

SEQ ID NO: 56005 - DNA, 20 bp, synthetic construct
  misc_feature 1..20: note = Description of Artificial Sequence: Synthetic oligonucleotide
  misc_feature 1..20: note = Target: SCN10A; (-) strand; PAM type: YTN; PAM sequence: CTA
  source 1..20: mol_type = other DNA
cttggggttttcttcctgag

SEQ ID NO: 56006 - DNA, 20 bp, synthetic construct
  misc_feature 1..20: note = Description of Artificial Sequence: Synthetic oligonucleotide
  misc_feature 1..20: note = Target: SCN10A; (-) strand; PAM type: YTN; PAM sequence: CTA
  source 1..20: mol_type = other DNA
atcctacttggggttttctt

SEQ ID NO: 56007 - DNA, 20 bp, synthetic construct
  misc_feature 1..20: note = Description of Artificial Sequence: Synthetic oligonucleotide
  misc_feature 1..20: note = Target: SCN10A; (-) strand; PAM type: YTN; PAM sequence: CTC
  source 1..20: mol_type = other DNA
cagcctaatcctacttgggg

SEQ ID NO: 56008 - DNA, 20 bp, synthetic construct
  misc_feature 1..20: note = Description of Artificial Sequence: Synthetic oligonucleotide
  misc_feature 1..20: note = Target: SCN10A; (-) strand; PAM type: YTN; PAM sequence: CTC
  source 1..20: mol_type = other DNA
cactccagcctaatcctact

SEQ ID NO: 56009 - DNA, 20 bp, synthetic construct
  misc_feature 1..20: note = Description of Artificial Sequence: Synthetic oligonucleotide
  misc_feature 1..20: note = Target: SCN10A; (-) strand; PAM type: YTN; PAM sequence: TTC
  source 1..20: mol_type = other DNA
tccactccagcctaatccta

SEQ ID NO: 56010 - DNA, 20 bp, synthetic construct
  misc_feature 1..20: note = Description of Artificial Sequence: Synthetic oligonucleotide
  misc_feature 1..20: note = Target: SCN10A; (-) strand; PAM type: YTN; PAM sequence: TTC
  source 1..20: mol_type = other DNA
agagttctccactccagcct

SEQ ID NO: 56011 - DNA, 20 bp, synthetic construct
  misc_feature 1..20: note = Description of Artificial Sequence: Synthetic oligonucleotide
  misc_feature 1..20: note = Target: SCN10A; (-) strand; PAM type: YTN; PAM sequence: CTA
  source 1..20: mol_type = other DNA
ttcagagttctccactccag

SEQ ID NO: 56012 - DNA, 20 bp, synthetic construct
  misc_feature 1..20: note = Description of Artificial Sequence: Synthetic oligonucleotide
  misc_feature 1..20: note = Target: SCN10A; (-) strand; PAM type: YTN; PAM sequence: CTA
  source 1..20: mol_type = other DNA
gctattcagagttctccact

SEQ ID NO: 56013 - DNA, 20 bp, synthetic construct
  misc_feature 1..20: note = Description of Artificial Sequence: Synthetic oligonucleotide
  misc_feature 1..20: note = Target: SCN10A; (-) strand; PAM type: YTN; PAM sequence: CTC
  source 1..20: mol_type = other DNA
tagctattcagagttctcca

SEQ ID NO: 56014 - DNA, 20 bp, synthetic construct
  misc_feature 1..20: note = Description of Artificial Sequence: Synthetic oligonucleotide
  misc_feature 1..20: note = Target: SCN10A; (-) strand; PAM type: YTN; PAM sequence: CTC
  source 1..20: mol_type = other DNA
cactctagctattcagagtt

SEQ ID NO: 56015 - DNA, 20 bp, synthetic construct
  misc_feature 1..20: note = Description of Artificial Sequence: Synthetic oligonucleotide
  misc_feature 1..20: note = Target: SCN10A; (-) strand; PAM type: YTN; PAM sequence: TTC
  source 1..20: mol_type = other DNA
tccactctagctattcagag

SEQ ID NO: 56016 - DNA, 20 bp, synthetic construct
  misc_feature 1..20: note = Description of Artificial Sequence: Synthetic oligonucleotide
  misc_feature 1..20: note = Target: SCN10A; (-) strand; PAM type: YTN; PAM sequence: CTG
  source 1..20: mol_type = other DNA
tcaatattctccactctagc

SEQ ID NO: 56017 - DNA, 20 bp, synthetic construct
  misc_feature 1..20: note = Description of Artificial Sequence: Synthetic oligonucleotide
  misc_feature 1..20: note = Target: SCN10A; (-) strand; PAM type: YTN; PAM sequence: CTG
  source 1..20: mol_type = other DNA
ctgtcaatattctccactct

SEQ ID NO: 56018 - DNA, 20 bp, synthetic construct
  misc_feature 1..20: note = Description of Artificial Sequence: Synthetic oligonucleotide
  misc_feature 1..20: note = Target: SCN10A; (-) strand; PAM type: YTN; PAM sequence: TTG
  source 1..20: mol_type = other DNA
cccatagtctgctgtcaata

SEQ ID NO: 56019 - DNA, 20 bp, synthetic construct
  misc_feature 1..20: note = Description of Artificial Sequence: Synthetic oligonucleotide
  misc_feature 1..20: note = Target: SCN10A; (-) strand; PAM type: YTN; PAM sequence: TTT
  source 1..20: mol_type = other DNA
gcccatagtctgctgtcaat

SEQ ID NO: 56020 - DNA, 20 bp, synthetic construct
  misc_feature 1..20: note = Description of Artificial Sequence: Synthetic oligonucleotide
  misc_feature 1..20: note = Target: SCN10A; (-) strand; PAM type: YTN; PAM sequence: CTT
  source 1..20: mol_type = other DNA
tgcccatagtctgctgtcaa

SEQ ID NO: 56021 - DNA, 20 bp, synthetic construct
  misc_feature 1..20: note = Description of Artificial Sequence: Synthetic oligonucleotide
  misc_feature 1..20: note = Target: SCN10A; (-) strand; PAM type: YTN; PAM sequence: TTG
  source 1..20: mol_type = other DNA
ataatccctttgcccatagt

SEQ ID NO: 56022 - DNA, 20 bp, synthetic construct
  misc_feature 1..20: note = Description of Artificial Sequence: Synthetic oligonucleotide
  misc_feature 1..20: note = Target: SCN10A; (-) strand; PAM type: YTN; PAM sequence: TTT
  source 1..20: mol_type = other DNA
gataatccctttgcccatag

SEQ ID NO: 56023 - DNA, 20 bp, synthetic construct
  misc_feature 1..20: note = Description of Artificial Sequence: Synthetic oligonucleotide
  misc_feature 1..20: note = Target: SCN10A; (-) strand; PAM type: YTN; PAM sequence: TTT
  source 1..20: mol_type = other DNA
tgataatccctttgcccata

SEQ ID NO: 56024 - DNA, 20 bp, synthetic construct
  misc_feature 1..20: note = Description of Artificial Sequence: Synthetic oligonucleotide
  misc_feature 1..20: note = Target: SCN10A; (-) strand; PAM type: YTN; PAM sequence: CTT
  source 1..20: mol_type = other DNA
ttgataatccctttgcccat

SEQ ID NO: 56025 - DNA, 20 bp, synthetic construct
  misc_feature 1..20: note = Description of Artificial Sequence: Synthetic oligonucleotide
  misc_feature 1..20: note = Target: SCN10A; (-) strand; PAM type: YTN; PAM sequence: CTC
  source 1..20: mol_type = other DNA
cccttttgataatccctttg

SEQ ID NO: 56026 - DNA, 20 bp, synthetic construct
  misc_feature 1..20: note = Description of Artificial Sequence: Synthetic oligonucleotide
  misc_feature 1..20: note = Target: SCN10A; (-) strand; PAM type: YTN; PAM sequence: CTC
  source 1..20: mol_type = other DNA
cctccccttttgataatccc

SEQ ID NO: 56027 - DNA, 20 bp, synthetic construct
  misc_feature 1..20: note = Description of Artificial Sequence: Synthetic oligonucleotide
  misc_feature 1..20: note = Target: SCN10A; (-) strand; PAM type: YTN; PAM sequence: TTC
  source 1..20: mol_type = other DNA
aatgtctccctccccttttg

SEQ ID NO: 56028 - DNA, 20 bp, synthetic construct
  misc_feature 1..20: note = Description of Artificial Sequence: Synthetic oligonucleotide
  misc_feature 1..20: note = Target: SCN10A; (-) strand; PAM type: YTN; PAM sequence: TTT
  source 1..20: mol_type = other DNA
caatgtctccctcccctttt

SEQ ID NO: 56029 - DNA, 20 bp, synthetic construct
  misc_feature 1..20: note = Description of Artificial Sequence: Synthetic oligonucleotide
  misc_feature 1..20: note = Target: SCN10A; (-) strand; PAM type: YTN; PAM sequence: CTT
  source 1..20: mol_type = other DNA
tcaatgtctccctccccttt

SEQ ID NO: 56030 - DNA, 20 bp, synthetic construct
  misc_feature 1..20: note = Description of Artificial Sequence: Synthetic oligonucleotide
  misc_feature 1..20: note = Target: SCN10A; (-) strand; PAM type: YTN; PAM sequence: TTC
  source 1..20: mol_type = other DNA
ctttcaatgtctccctcccc

SEQ ID NO: 56031 - DNA, 20 bp, synthetic construct
  misc_feature 1..20: note = Description of Artificial Sequence: Synthetic oligonucleotide
  misc_feature 1..20: note = Target: SCN10A; (-) strand; PAM type: YTN; PAM sequence: CTT
  source 1..20: mol_type = other DNA
cctttcaatgtctccctccc

SEQ ID NO: 56032 - DNA, 20 bp, synthetic construct
  misc_feature 1..20: note = Description of Artificial Sequence: Synthetic oligonucleotide
  misc_feature 1..20: note = Target: SCN10A; (-) strand; PAM type: YTN; PAM sequence: TTC
  source 1..20: mol_type = other DNA
cacccaccttcctttcaatg

SEQ ID NO: 56033 - DNA, 20 bp, synthetic construct
  misc_feature 1..20: note = Description of Artificial Sequence: Synthetic oligonucleotide
  misc_feature 1..20: note = Target: SCN10A; (-) strand; PAM type: YTN; PAM sequence: CTT
  source 1..20: mol_type = other DNA
ccacccaccttcctttcaat

SEQ ID NO: 56034 - DNA, 20 bp, synthetic construct
  misc_feature 1..20: note = Description of Artificial Sequence: Synthetic oligonucleotide
  misc_feature 1..20: note = Target: SCN10A; (-) strand; PAM type: YTN; PAM sequence: TTC
  source 1..20: mol_type = other DNA
cccttccacccaccttcctt

SEQ ID NO: 56035 - DNA, 20 bp, synthetic construct
  misc_feature 1..20: note = Description of Artificial Sequence: Synthetic oligonucleotide
  misc_feature 1..20: note = Target: SCN10A; (-) strand; PAM type: YTN; PAM sequence: TTT
  source 1..20: mol_type = other DNA
ccccttccacccaccttcct

SEQ ID NO: 56036 - DNA, 20 bp, synthetic construct
  misc_feature 1..20: note = Description of Artificial Sequence: Synthetic oligonucleotide
  misc_feature 1..20: note = Target: SCN10A; (-) strand; PAM type: YTN; PAM sequence: TTT
  source 1..20: mol_type = other DNA
tccccttccacccaccttcc

SEQ ID NO: 56037 - DNA, 20 bp, synthetic construct
  misc_feature 1..20: note = Description of Artificial Sequence: Synthetic oligonucleotide
  misc_feature 1..20: note = Target: SCN10A; (-) strand; PAM type: YTN; PAM sequence: CTA
  source 1..20: mol_type = other DNA
ttttccccttccacccacct

SEQ ID NO: 56038 - DNA, 20 bp, synthetic construct
  misc_feature 1..20: note = Description of Artificial Sequence: Synthetic oligonucleotide
  misc_feature 1..20: note = Target: SCN10A; (-) strand; PAM type: YTN; PAM sequence: TTC
  source 1..20: mol_type = other DNA
tattttccccttccacccac

SEQ ID NO: 56039 - DNA, 20 bp, synthetic construct
  misc_feature 1..20: note = Description of Artificial Sequence: Synthetic oligonucleotide
  misc_feature 1..20: note = Target: SCN10A; (-) strand; PAM type: YTN; PAM sequence: CTT
  source 1..20: mol_type = other DNA
ctattttccccttccaccca

SEQ ID NO: 56040 - DNA, 20 bp, synthetic construct
  misc_feature 1..20: note = Description of Artificial Sequence: Synthetic oligonucleotide
  misc_feature 1..20: note = Target: SCN10A; (-) strand; PAM type: YTN; PAM sequence: TTC
  source 1..20: mol_type = other DNA
ccttctattttccccttcca

SEQ ID NO: 56041 - DNA, 20 bp, synthetic construct
  misc_feature 1..20: note = Description of Artificial Sequence: Synthetic oligonucleotide
  misc_feature 1..20: note = Target: SCN10A; (-) strand; PAM type: YTN; PAM sequence: CTT
  source 1..20: mol_type = other DNA
cccttctattttccccttcc

SEQ ID NO: 56042 - DNA, 20 bp, synthetic construct
  misc_feature 1..20: note = Description of Artificial Sequence: Synthetic oligonucleotide
  misc_feature 1..20: note = Target: SCN10A; (-) strand; PAM type: YTN; PAM sequence: TTC
  source 1..20: mol_type = other DNA
ttcccttctattttcccctt

SEQ ID NO: 56043 - DNA, 20 bp, synthetic construct
  misc_feature 1..20: note = Description of Artificial Sequence: Synthetic oligonucleotide
  misc_feature 1..20: note = Target: SCN10A; (-) strand; PAM type: YTN; PAM sequence: TTT
  source 1..20: mol_type = other DNA
cttcccttctattttcccct

SEQ ID NO: 56044 - DNA, 20 bp, synthetic construct
  misc_feature 1..20: note = Description of Artificial Sequence: Synthetic oligonucleotide
  misc_feature 1..20: note = Target: SCN10A; (-) strand; PAM type: YTN; PAM sequence: CTC
  source 1..20: mol_type = other DNA
cccaccaacatttcttccct

SEQ ID NO: 56045 - DNA, 20 bp, synthetic construct
  misc_feature 1..20: note = Description of Artificial Sequence: Synthetic oligonucleotide
  misc_feature 1..20: note = Target: SCN10A; (-) strand; PAM type: YTN; PAM sequence: TTC
  source 1..20: mol_type = other DNA
tccccaccaacatttcttcc

SEQ ID NO: 56046 - DNA, 20 bp, synthetic construct
  misc_feature 1..20: note = Description of Artificial Sequence: Synthetic oligonucleotide
  misc_feature 1..20: note = Target: SCN10A; (-) strand; PAM type: YTN; PAM sequence: TTA
  source 1..20: mol_type = other DNA
gattctccccaccaacattt

SEQ ID NO: 56047 - DNA, 20 bp, synthetic construct
  misc_feature 1..20: note = Description of Artificial Sequence: Synthetic oligonucleotide
  misc_feature 1..20: note = Target: SCN10A; (-) strand; PAM type: YTN; PAM sequence: TTT
  source 1..20: mol_type = other DNA
agattctccccaccaacatt

SEQ ID NO: 56048 - DNA, 20 bp, synthetic construct
  misc_feature 1..20: note = Description of Artificial Sequence: Synthetic oligonucleotide
  misc_feature 1..20: note = Target: SCN10A; (-) strand; PAM type: YTN; PAM sequence: CTT
  source 1..20: mol_type = other DNA
tagattctccccaccaacat

SEQ ID NO: 56049 - DNA, 20 bp, synthetic construct
  misc_feature 1..20: note = Description of Artificial Sequence: Synthetic oligonucleotide
  misc_feature 1..20: note = Target: SCN10A; (-) strand; PAM type: YTN; PAM sequence: TTA
  source 1..20: mol_type = other DNA
cctttagattctccccacca

SEQ ID NO: 56050 - DNA, 20 bp, synthetic construct
  misc_feature 1..20: note = Description of Artificial Sequence: Synthetic oligonucleotide
  misc_feature 1..20: note = Target: SCN10A; (-) strand; PAM type: YTN; PAM sequence: TTT
  source 1..20: mol_type = other DNA
acctttagattctccccacc

SEQ ID NO: 56051 - DNA, 20 bp, synthetic construct
  misc_feature 1..20: note = Description of Artificial Sequence: Synthetic oligonucleotide
  misc_feature 1..20: note = Target: SCN10A; (-) strand; PAM type: YTN; PAM sequence: CTA
  source 1..20: mol_type = other DNA
agaaaaatgtccaagtggga

SEQ ID NO: 56052 - DNA, 20 bp, synthetic construct
  misc_feature 1..20: note = Description of Artificial Sequence: Synthetic oligonucleotide
  misc_feature 1..20: note = Target: SCN10A; (-) strand; PAM type: YTN; PAM sequence: TTC
  source 1..20: mol_type = other DNA
ctaagaaaaatgtccaagtg

SEQ ID NO: 56053 - DNA, 20 bp, synthetic construct
  misc_feature 1..20: note = Description of Artificial Sequence: Synthetic oligonucleotide
  misc_feature 1..20: note = Target: SCN10A; (-) strand; PAM type: YTN; PAM sequence: CTA
  source 1..20: mol_type = other DNA
ttcctaagaaaaatgtccaa

SEQ ID NO: 56054 - DNA, 20 bp, synthetic construct
  misc_feature 1..20: note = Description of Artificial Sequence: Synthetic oligonucleotide
  misc_feature 1..20: note = Target: SCN10A; (-) strand; PAM type: YTN; PAM sequence: TTG
  source 1..20: mol_type = other DNA
ggagcccagctattcctaag

SEQ ID NO: 56055 - DNA, 20 bp, synthetic construct
  misc_feature 1..20: note = Description of Artificial Sequence: Synthetic oligonucleotide
  misc_feature 1..20: note = Target: SCN10A; (-) strand; PAM type: YTN; PAM sequence: CTG
  source 1..20: mol_type = other DNA
ttgggagcccagctattcct

SEQ ID NO: 56056 - DNA, 20 bp, synthetic construct
  misc_feature 1..20: note = Description of Artificial Sequence: Synthetic oligonucleotide
  misc_feature 1..20: note = Target: SCN10A; (-) strand; PAM type: YTN; PAM sequence: TTA
  source 1..20: mol_type = other DNA
ggaagcactgttgggagccc

SEQ ID NO: 56057 - DNA, 20 bp, synthetic construct
  misc_feature 1..20: note = Description of Artificial Sequence: Synthetic oligonucleotide
  misc_feature 1..20: note = Target: SCN10A; (-) strand; PAM type: YTN; PAM sequence: CTT
  source 1..20: mol_type = other DNA
aggaagcactgttgggagcc

SEQ ID NO: 56058 - DNA, 20 bp, synthetic construct
  misc_feature 1..20: note = Description of Artificial Sequence: Synthetic oligonucleotide
  misc_feature 1..20: note = Target: SCN10A; (-) strand; PAM type: YTN; PAM sequence: TTC
  source 1..20: mol_type = other DNA
cttaggaagcactgttggga

SEQ ID NO: 56059 - DNA, 20 bp, synthetic construct
  misc_feature 1..20: note = Description of Artificial Sequence: Synthetic oligonucleotide
  misc_feature 1..20: note = Target: SCN10A; (-) strand; PAM type: YTN; PAM sequence: TTT
  source 1..20: mol_type = other DNA
ccttaggaagcactgttggg

SEQ ID NO: 56060 - DNA, 20 bp, synthetic construct
  misc_feature 1..20: note = Description of Artificial Sequence: Synthetic oligonucleotide
  misc_feature 1..20: note = Target: SCN10A; (-) strand; PAM type: YTN; PAM sequence: TTT
  source 1..20: mol_type = other DNA
tccttaggaagcactgttgg

SEQ ID NO: 56061 - DNA, 20 bp, synthetic construct
  misc_feature 1..20: note = Description of Artificial Sequence: Synthetic oligonucleotide
  misc_feature 1..20: note = Target: SCN10A; (-) strand; PAM type: YTN; PAM sequence: TTT
  source 1..20: mol_type = other DNA
ttccttaggaagcactgttg

SEQ ID NO: 56062 - DNA, 20 bp, synthetic construct
  misc_feature 1..20: note = Description of Artificial Sequence: Synthetic oligonucleotide
  misc_feature 1..20: note = Target: SCN10A; (-) strand; PAM type: YTN; PAM sequence: TTA
  source 1..20: mol_type = other DNA
tttttccttaggaagcactg

SEQ ID NO: 56063 - DNA, 20 bp, synthetic construct
  misc_feature 1..20: note = Description of Artificial Sequence: Synthetic oligonucleotide
  misc_feature 1..20: note = Target: SCN10A; (-) strand; PAM type: YTN; PAM sequence: TTT
  source 1..20: mol_type = other DNA
atttttccttaggaagcact

SEQ ID NO: 56064 - DNA, 20 bp, synthetic construct
  misc_feature 1..20: note = Description of Artificial Sequence: Synthetic oligonucleotide
  misc_feature 1..20: note = Target: SCN10A; (-) strand; PAM type: YTN; PAM sequence: TTT
  source 1..20: mol_type = other DNA
tatttttccttaggaagcac

SEQ ID NO: 56065 - DNA, 20 bp, synthetic construct
  misc_feature 1..20: note = Description of Artificial Sequence: Synthetic oligonucleotide
  misc_feature 1..20: note = Target: SCN10A; (-) strand; PAM type: YTN; PAM sequence: TTC
  source 1..20: mol_type = other DNA
aagttttatttttccttagg

SEQ ID NO: 56066 - DNA, 20 bp, synthetic construct
  misc_feature 1..20: note = Description of Artificial Sequence: Synthetic oligonucleotide
  misc_feature 1..20: note = Target: SCN10A; (-) strand; PAM type: YTN; PAM sequence: CTT
  source 1..20: mol_type = other DNA
caagttttatttttccttag

SEQ ID NO: 56067 - DNA, 20 bp, synthetic construct
  misc_feature 1..20: note = Description of Artificial Sequence: Synthetic oligonucleotide
  misc_feature 1..20: note = Target: SCN10A; (-) strand; PAM type: YTN; PAM sequence: TTA
  source 1..20: mol_type = other DNA
tcttcaagttttatttttcc

SEQ ID NO: 56068 - DNA, 20 bp, synthetic construct
  misc_feature 1..20: note = Description of Artificial Sequence: Synthetic oligonucleotide
  misc_feature 1..20: note = Target: SCN10A; (-) strand; PAM type: YTN; PAM sequence: TTT
  source 1..20: mol_type = other DNA
atcttcaagttttatttttc

SEQ ID NO: 56069 - DNA, 20 bp, synthetic construct
  misc_feature 1..20: note = Description of Artificial Sequence: Synthetic oligonucleotide
  misc_feature 1..20: note = Target: SCN10A; (-) strand; PAM type: YTN; PAM sequence: CTG
  source 1..20: mol_type = other DNA
taggtcaagtttatcttcaa

SEQ ID NO: 56070 - DNA, 20 bp, synthetic construct
  misc_feature 1..20: note = Description of Artificial Sequence: Synthetic oligonucleotide
  misc_feature 1..20: note = Target: SCN10A; (-) strand; PAM type: YTN; PAM sequence: CTC
  source 1..20: mol_type = other DNA
tgtaggtcaagtttatcttc

SEQ ID NO: 56071 - DNA, 20 bp, synthetic construct
  misc_feature 1..20: note = Description of Artificial Sequence: Synthetic oligonucleotide
  misc_feature 1..20: note = Target: SCN10A; (-) strand; PAM type: YTN; PAM sequence: CTC
  source 1..20: mol_type = other DNA
tctgtaggtcaagtttatct

SEQ ID NO: 56072 - DNA, 20 bp, synthetic construct
  misc_feature 1..20: note = Description of Artificial Sequence: Synthetic oligonucleotide
  misc_feature 1..20: note = Target: SCN10A; (-) strand; PAM type: YTN; PAM sequence: CTC
  source 1..20: mol_type = other DNA
tctctgtaggtcaagtttat

SEQ ID NO: 56073 - DNA, 20 bp, synthetic construct
  misc_feature 1..20: note = Description of Artificial Sequence: Synthetic oligonucleotide
  misc_feature 1..20: note = Target: SCN10A; (-) strand; PAM type: YTN; PAM sequence: TTG
  source 1..20: mol_type = other DNA
tactctctctgtaggtcaag

SEQ ID NO: 56074 - DNA, 20 bp, synthetic construct
  misc_feature 1..20: note = Description of Artificial Sequence: Synthetic oligonucleotide
  misc_feature 1..20: note = Target: SCN10A; (-) strand; PAM type: YTN; PAM sequence: TTG
  source 1..20: mol_type = other DNA
aaaaatgagtgttgtactct

SEQ ID NO: 56075 - DNA, 20 bp, synthetic construct
  misc_feature 1..20: note = Description of Artificial Sequence: Synthetic oligonucleotide
  misc_feature 1..20: note = Target: SCN10A; (-) strand; PAM type: YTN; PAM sequence: CTC
  source 1..20: mol_type = other DNA
aaattgaaaaatgagtgttg

SEQ ID NO: 56076 - DNA, 20 bp, synthetic construct
  misc_feature 1..20: note = Description of Artificial Sequence: Synthetic oligonucleotide
  misc_feature 1..20: note = Target: SCN10A; (-) strand; PAM type: YTN; PAM sequence: CTG
  source 1..20: mol_type = other DNA
ctcaaattgaaaaatgagtg

SEQ ID NO: 56077 - DNA, 20 bp, synthetic construct
  misc_feature 1..20: note = Description of Artificial Sequence: Synthetic oligonucleotide
  misc_feature 1..20: note = Target: SCN10A; (-) strand; PAM type: YTN; PAM sequence: TTC
  source 1..20: mol_type = other DNA
tgctcaaattgaaaaatgag

SEQ ID NO: 56078 - DNA, 20 bp, synthetic construct
  misc_feature 1..20: note = Description of Artificial Sequence: Synthetic oligonucleotide
  misc_feature 1..20: note = Target: SCN10A; (-) strand; PAM type: YTN; PAM sequence: CTT
  source 1..20: mol_type = other DNA
ctgctcaaattgaaaaatga

SEQ ID NO: 56079 - DNA, 20 bp, synthetic construct
  misc_feature 1..20: note = Description of Artificial Sequence: Synthetic oligonucleotide
  misc_feature 1..20: note = Target: SCN10A; (-) strand; PAM type: YTN; PAM sequence: TTA
  source 1..20: mol_type = other DNA
aatacttctgctcaaattga

SEQ ID NO: 56080 - DNA, 20 bp, synthetic construct
  misc_feature 1..20: note = Description of Artificial Sequence: Synthetic oligonucleotide
  misc_feature 1..20: note = Target: SCN10A; (-) strand; PAM type: YTN; PAM sequence: TTT
  source 1..20: mol_type = other DNA
aaatacttctgctcaaattg

SEQ ID NO: 56081 - DNA, 20 bp, synthetic construct
  misc_feature 1..20: note = Description of Artificial Sequence: Synthetic oligonucleotide
  misc_feature 1..20: note = Target: SCN10A; (-) strand; PAM type: YTN; PAM sequence: CTA
  source 1..20: mol_type = other DNA
aaatacatttaaatacttct

SEQ ID NO: 56082 - DNA, 20 bp, synthetic construct
  misc_feature 1..20: note = Description of Artificial Sequence: Synthetic oligonucleotide
  misc_feature 1..20: note = Target: SCN10A; (-) strand; PAM type: YTN; PAM sequence: TTA
  source 1..20: mol_type = other DNA
cagaaaactaaaatacattt

SEQ ID NO: 56083 - DNA, 20 bp, synthetic construct
  misc_feature 1..20: note = Description of Artificial Sequence: Synthetic oligonucleotide
  misc_feature 1..20: note = Target: SCN10A; (-) strand; PAM type: YTN; PAM sequence: TTT
  source 1..20: mol_type = other DNA
acagaaaactaaaatacatt

SEQ ID NO: 56084 - DNA, 20 bp, synthetic construct
  misc_feature 1..20: note = Description of Artificial Sequence: Synthetic oligonucleotide
  misc_feature 1..20: note = Target: SCN10A; (-) strand; PAM type: YTN; PAM sequence: CTA
  source 1..20: mol_type = other DNA
gacacatcaaggcatttaca

SEQ ID NO: 56085 - DNA, 20 bp, synthetic construct
  misc_feature 1..20: note = Description of Artificial Sequence: Synthetic oligonucleotide
  misc_feature 1..20: note = Target: SCN10A; (-) strand; PAM type: YTN; PAM sequence: CTG
  source 1..20: mol_type = other DNA
taaaactagacacatcaagg

SEQ ID NO: 56086 - DNA, 20 bp, synthetic construct
  misc_feature 1..20: note = Description of Artificial Sequence: Synthetic oligonucleotide
  misc_feature 1..20: note = Target: SCN10A; (-) strand; PAM type: YTN; PAM sequence: CTA
  source 1..20: mol_type = other DNA
agtaactgtaaaactagaca

SEQ ID NO: 56087 - DNA, 20 bp, synthetic construct
  misc_feature 1..20: note = Description of Artificial Sequence: Synthetic oligonucleotide
  misc_feature 1..20: note = Target: SCN10A; (-) strand; PAM type: YTN; PAM sequence: TTC
  source 1..20: mol_type = other DNA
ctaagtaactgtaaaactag

SEQ ID NO: 56088 - DNA, 20 bp, synthetic construct
  misc_feature 1..20: note = Description of Artificial Sequence: Synthetic oligonucleotide
  misc_feature 1..20: note = Target: SCN10A; (-) strand; PAM type: YTN; PAM sequence: TTC
  source 1..20: mol_type = other DNA
ataatagatgtgttcctaag

SEQ ID NO: 56089 - DNA, 20 bp, synthetic construct
  misc_feature 1..20: note = Description of Artificial Sequence: Synthetic oligonucleotide
  misc_feature 1..20: note = Target: SCN10A; (-) strand; PAM type: YTN; PAM sequence: TTT
  source 1..20: mol_type = other DNA
cataatagatgtgttcctaa

SEQ ID NO: 56090 - DNA, 20 bp, synthetic construct
  misc_feature 1..20: note = Description of Artificial Sequence: Synthetic oligonucleotide
  misc_feature 1..20: note = Target: SCN10A; (-) strand; PAM type: YTN; PAM sequence: TTT
  source 1..20: mol_type = other DNA
tcataatagatgtgttccta

SEQ ID NO: 56091 - DNA, 20 bp, synthetic construct
  misc_feature 1..20: note = Description of Artificial Sequence: Synthetic oligonucleotide
  misc_feature 1..20: note = Target: SCN10A; (-) strand; PAM type: YTN; PAM sequence: CTT
  source 1..20: mol_type = other DNA
ttcataatagatgtgttcct

SEQ ID NO: 56092 - DNA, 20 bp, synthetic construct
  misc_feature 1..20: note = Description of Artificial Sequence: Synthetic oligonucleotide
  misc_feature 1..20: note = Target: SCN10A; (-) strand; PAM type: YTN; PAM sequence: TTC
  source 1..20: mol_type = other DNA
cttttcataatagatgtgtt

SEQ ID NO: 56093 - DNA, 20 bp, synthetic construct
  misc_feature 1..20: note = Description of Artificial Sequence: Synthetic oligonucleotide
  misc_feature 1..20: note = Target: SCN10A; (-) strand; PAM type: YTN; PAM sequence: TTT
  source 1..20: mol_type = other DNA
ccttttcataatagatgtgt

SEQ ID NO: 56094 - DNA, 20 bp, synthetic construct
  misc_feature 1..20: note = Description of Artificial Sequence: Synthetic oligonucleotide
  misc_feature 1..20: note = Target: SCN10A; (-) strand; PAM type: YTN; PAM sequence: TTT
  source 1..20: mol_type = other DNA
tccttttcataatagatgtg

SEQ ID NO: 56095 - DNA, 20 bp, synthetic construct
  misc_feature 1..20: note = Description of Artificial Sequence: Synthetic oligonucleotide
  misc_feature 1..20: note = Target: SCN10A; (-) strand; PAM type: YTN; PAM sequence: TTA
  source 1..20: mol_type = other DNA
atagaattttccttttcata

SEQ ID NO: 56096 - DNA, 20 bp, synthetic construct
  misc_feature 1..20: note = Description of Artificial Sequence: Synthetic oligonucleotide
  misc_feature 1..20: note = Target: SCN10A; (-) strand; PAM type: YTN; PAM sequence: TTA
  source 1..20: mol_type = other DNA
attaatagaattttcctttt

SEQ ID NO: 56097 - DNA, 20 bp, synthetic construct
  misc_feature 1..20: note = Description of Artificial Sequence: Synthetic oligonucleotide
  misc_feature 1..20: note = Target: SCN10A; (-) strand; PAM type: YTN; PAM sequence: TTT
  source 1..20: mol_type = other DNA
aattaatagaattttccttt

SEQ ID NO: 56098 - DNA, 20 bp, synthetic construct
  misc_feature 1..20: note = Description of Artificial Sequence: Synthetic oligonucleotide
  misc_feature 1..20: note = Target: SCN10A; (-) strand; PAM type: YTN; PAM sequence: TTG
  source 1..20: mol_type = other DNA
taagtcagcaggaaaatgtg

SEQ ID NO: 56099 - DNA, 20 bp, synthetic construct
  misc_feature 1..20: note = Description of Artificial Sequence: Synthetic oligonucleotide
  misc_feature 1..20: note = Target: SCN10A; (-) strand; PAM type: YTN; PAM sequence: TTA
  source 1..20: mol_type = other DNA
attgtaagtcagcaggaaaa

SEQ ID NO: 56100 - DNA, 20 bp, synthetic construct
  misc_feature 1..20: note = Description of Artificial Sequence: Synthetic oligonucleotide
  misc_feature 1..20: note = Target: SCN10A; (-) strand; PAM type: YTN; PAM sequence: TTT
  source 1..20: mol_type = other DNA
aattgtaagtcagcaggaaa

SEQ ID NO: 56101 - DNA, 20 bp, synthetic construct
  misc_feature 1..20: note = Description of Artificial Sequence: Synthetic oligonucleotide
  misc_feature 1..20: note = Target: SCN10A; (-) strand; PAM type: YTN; PAM sequence: TTA
  source 1..20: mol_type = other DNA
atttaattgtaagtcagcag

SEQ ID NO: 56102 - DNA, 20 bp, synthetic construct
  misc_feature 1..20: note = Description of Artificial Sequence: Synthetic oligonucleotide
  misc_feature 1..20: note = Target: SCN10A; (-) strand; PAM type: YTN; PAM sequence: CTT
  source 1..20: mol_type = other DNA
aatttaattgtaagtcagca

SEQ ID NO: 56103 - DNA, 20 bp, synthetic construct
  misc_feature 1..20: note = Description of Artificial Sequence: Synthetic oligonucleotide
  misc_feature 1..20: note = Target: SCN10A; (-) strand; PAM type: YTN; PAM sequence: TTC
  source 1..20: mol_type = other DNA
ttaatttaattgtaagtcag

SEQ ID NO: 56104 - DNA, 20 bp, synthetic construct
  misc_feature 1..20: note = Description of Artificial Sequence: Synthetic oligonucleotide
  misc_feature 1..20: note = Target: SCN10A; (-) strand; PAM type: YTN; PAM sequence: TTT
  source 1..20: mol_type = other DNA
cttaatttaattgtaagtca

SEQ ID NO: 56105 - DNA, 20 bp, synthetic construct
  misc_feature 1..20: note = Description of Artificial Sequence: Synthetic oligonucleotide
  misc_feature 1..20: note = Target: SCN10A; (-) strand; PAM type: YTN; PAM sequence: TTC
  source 1..20: mol_type = other DNA
cccccatgtgagcatatttc

SEQ ID NO: 56106 - DNA, 20 bp, synthetic construct
  misc_feature 1..20: note = Description of Artificial Sequence: Synthetic oligonucleotide
  misc_feature 1..20: note = Target: SCN10A; (-) strand; PAM type: YTN; PAM sequence: TTT
  source 1..20: mol_type = other DNA
ccccccatgtgagcatattt

SEQ ID NO: 56107 - DNA, 20 bp, synthetic construct
  misc_feature 1..20: note = Description of Artificial Sequence: Synthetic oligonucleotide
  misc_feature 1..20: note = Target: SCN10A; (-) strand; PAM type: YTN; PAM sequence: TTA
  source 1..20: mol_type = other DNA
acatttccccccatgtgagc

SEQ ID NO: 56108 - DNA, 20 bp, synthetic construct
  misc_feature 1..20: note = Description of Artificial Sequence: Synthetic oligonucleotide
  misc_feature 1..20: note = Target: SCN10A; (-) strand; PAM type: YTN; PAM sequence: TTG
  source 1..20: mol_type = other DNA
gattaacatttccccccatg

SEQ ID NO: 56109 - DNA, 20 bp, synthetic construct
  misc_feature 1..20: note = Description of Artificial Sequence: Synthetic oligonucleotide
  misc_feature 1..20: note = Target: SCN10A; (-) strand; PAM type: YTN; PAM sequence: CTT
  source 1..20: mol_type = other DNA
ggattaacatttccccccat

SEQ ID NO: 56110 - DNA, 20 bp, synthetic construct
  misc_feature 1..20: note = Description of Artificial Sequence: Synthetic oligonucleotide
  misc_feature 1..20: note = Target: SCN10A; (-) strand; PAM type: YTN; PAM sequence: TTA
  source 1..20: mol_type = other DNA
atccttggattaacatttcc

SEQ ID NO: 56111 - DNA, 20 bp, synthetic construct
  misc_feature 1..20: note = Description of Artificial Sequence: Synthetic oligonucleotide
  misc_feature 1..20: note = Target: SCN10A; (-) strand; PAM type: YTN; PAM sequence: TTT
  source 1..20: mol_type = other DNA
aatccttggattaacatttc

SEQ ID NO: 56112 - DNA, 20 bp, synthetic construct
  misc_feature 1..20: note = Description of Artificial Sequence: Synthetic oligonucleotide
  misc_feature 1..20: note = Target: SCN10A; (-) strand; PAM type: YTN; PAM sequence: TTA
  source 1..20: mol_type = other DNA
gtttaatccttggattaaca

SEQ ID NO: 56113 - DNA, 20 bp, synthetic construct
  misc_feature 1..20: note = Description of Artificial Sequence: Synthetic oligonucleotide
  misc_feature 1..20: note = Target: SCN10A; (-) strand; PAM type: YTN; PAM sequence: TTT
  source 1..20: mol_type = other DNA
agtttaatccttggattaac

SEQ ID NO: 56114 - DNA, 20 bp, synthetic construct
  misc_feature 1..20: note = Description of Artificial Sequence: Synthetic oligonucleotide
  misc_feature 1..20: note = Target: SCN10A; (-) strand; PAM type: YTN; PAM sequence: TTT
  source 1..20: mol_type = other DNA
tagtttaatccttggattaa

SEQ ID NO: 56115 - DNA, 20 bp, synthetic construct
  misc_feature 1..20: note = Description of Artificial Sequence: Synthetic oligonucleotide
  misc_feature 1..20: note = Target: SCN10A; (-) strand; PAM type: YTN; PAM sequence: TTG
  source 1..20: mol_type = other DNA
gagacacgattttagtttaa

SEQ ID NO: 56116 - DNA, 20 bp, synthetic construct
  misc_feature 1..20: note = Description of Artificial Sequence: Synthetic oligonucleotide
  misc_feature 1..20: note = Target: SCN10A; (-) strand; PAM type: YTN; PAM sequence: TTG
  source 1..20: mol_type = other DNA
tagaattggagacacgattt

SEQ ID NO: 56117 - DNA, 20 bp, synthetic construct
  misc_feature 1..20: note = Description of Artificial Sequence: Synthetic oligonucleotide
  misc_feature 1..20: note = Target: SCN10A; (-) strand; PAM type: YTN; PAM sequence: TTT
  source 1..20: mol_type = other DNA
gtagaattggagacacgatt

SEQ ID NO: 56118 - DNA, 20 bp, synthetic construct
  misc_feature 1..20: note = Description of Artificial Sequence: Synthetic oligonucleotide
  misc_feature 1..20: note = Target: SCN10A; (-) strand; PAM type: YTN; PAM sequence: TTA
  source 1..20: mol_type = other DNA
aatatttgtagaattggaga

SEQ ID NO: 56119 - DNA, 20 bp, synthetic construct
  misc_feature 1..20: note = Description of Artificial Sequence: Synthetic oligonucleotide
  misc_feature 1..20: note = Target: SCN10A; (-) strand; PAM type: YTN; PAM sequence: TTT
  source 1..20: mol_type = other DNA
aaatatttgtagaattggag

SEQ ID NO: 56120 - DNA, 20 bp, synthetic construct
  misc_feature 1..20: note = Description of Artificial Sequence: Synthetic oligonucleotide
  misc_feature 1..20: note = Target: SCN10A; (-) strand; PAM type: YTN; PAM sequence: TTT
  source 1..20: mol_type = other DNA
taaatatttgtagaattgga

SEQ ID NO: 56121 - DNA, 20 bp, synthetic construct
  misc_feature 1..20: note = Description of Artificial Sequence: Synthetic oligonucleotide
  misc_feature 1..20: note = Target: SCN10A; (-) strand; PAM type: YTN; PAM sequence: CTT
  source 1..20: mol_type = other DNA
ttaaatatttgtagaattgg

SEQ ID NO: 56122 - DNA, 20 bp, synthetic construct
  misc_feature 1..20: note = Description of Artificial Sequence: Synthetic oligonucleotide
  misc_feature 1..20: note = Target: SCN10A; (-) strand; PAM type: YTN; PAM sequence: TTA
  source 1..20: mol_type = other DNA
cttttaaatatttgtagaat

SEQ ID NO: 56123 - DNA, 20 bp, synthetic construct
  misc_feature 1..20: note = Description of Artificial Sequence: Synthetic oligonucleotide
  misc_feature 1..20: note = Target: SCN10A; (-) strand; PAM type: YTN; PAM sequence: TTA
  source 1..20: mol_type = other DNA
tacataagatatattacttt

SEQ ID NO: 56124 - DNA, 20 bp, synthetic construct
  misc_feature 1..20: note = Description of Artificial Sequence: Synthetic oligonucleotide
  misc_feature 1..20: note = Target: SCN10A; (-) strand; PAM type: YTN; PAM sequence: CTA
  source 1..20: mol_type = other DNA
atattatacataagatatat

SEQ ID NO: 56125 - DNA, 20 bp, synthetic construct
  misc_feature 1..20: note = Description of Artificial Sequence: Synthetic oligonucleotide
  misc_feature 1..20: note = Target: SCN10A; (-) strand; PAM type: YTN; PAM sequence: TTC
  source 1..20: mol_type = other DNA
ataactaatattatacataa

SEQ ID NO: 56126 - DNA, 20 bp, synthetic construct
  misc_feature 1..20: note = Description of Artificial Sequence: Synthetic oligonucleotide
  misc_feature 1..20: note = Target: SCN10A; (-) strand; PAM type: YTN; PAM sequence: TTT
  source 1..20: mol_type = other DNA
cataactaatattatacata

SEQ ID NO: 56127 - DNA, 20 bp, synthetic construct
  misc_feature 1..20: note = Description of Artificial Sequence: Synthetic oligonucleotide
  misc_feature 1..20: note = Target: SCN10A; (-) strand; PAM type: YTN; PAM sequence: TTT
  source 1..20: mol_type = other DNA
tcataactaatattatacat

SEQ ID NO: 56128 - DNA, 20 bp, synthetic construct
  misc_feature 1..20: note = Description of Artificial Sequence: Synthetic oligonucleotide
  misc_feature 1..20: note = Target: SCN10A; (-) strand; PAM type: YTN; PAM sequence: CTA
  source 1..20: mol_type = other DNA
tgaatgttttcataactaat

SEQ ID NO: 56129 - DNA, 20 bp, synthetic construct
  misc_feature 1..20: note = Description of Artificial Sequence: Synthetic oligonucleotide
  misc_feature 1..20: note = Target: SCN10A; (-) strand; PAM type: YTN; PAM sequence: TTG
  source 1..20: mol_type = other DNA
ctatgaatgttttcataact

SEQ ID NO: 56130 - DNA, 20 bp, synthetic construct
  misc_feature 1..20: note = Description of Artificial Sequence: Synthetic oligonucleotide
  misc_feature 1..20: note = Target: SCN10A; (-) strand; PAM type: YTN; PAM sequence: TTT
  source 1..20: mol_type = other DNA
gctatgaatgttttcataac

SEQ ID NO: 56131 - DNA, 20 bp, synthetic construct
  misc_feature 1..20: note = Description of Artificial Sequence: Synthetic oligonucleotide
  misc_feature 1..20: note = Target: SCN10A; (-) strand; PAM type: YTN; PAM sequence: CTA
  source 1..20: mol_type = other DNA
atcacatttgctatgaatgt

SEQ ID NO: 56132 - DNA, 20 bp, synthetic construct
  misc_feature 1..20: note = Description of Artificial Sequence: Synthetic oligonucleotide
  misc_feature 1..20: note = Target: SCN10A; (-) strand; PAM type: YTN; PAM sequence: TTC
  source 1..20: mol_type = other DNA
taatcacatttgctatgaat

SEQ ID NO: 56133 - DNA, 20 bp, synthetic construct
  misc_feature 1..20: note = Description of Artificial Sequence: Synthetic oligonucleotide
  misc_feature 1..20: note = Target: SCN10A; (-) strand; PAM type: YTN; PAM sequence: TTC
  source 1..20: mol_type = other DNA
accaaaaatataattctaat

SEQ ID NO: 56134 - DNA, 20 bp, synthetic construct
  misc_feature 1..20: note = Description of Artificial Sequence: Synthetic oligonucleotide
  misc_feature 1..20: note = Target: SCN10A; (-) strand; PAM type: YTN; PAM sequence: TTT
  source 1..20: mol_type = other DNA
caccaaaaatataattctaa

SEQ ID NO: 56135 - DNA, 20 bp, synthetic construct
  misc_feature 1..20: note = Description of Artificial Sequence: Synthetic oligonucleotide
  misc_feature 1..20: note = Target: SCN10A; (-) strand; PAM type: YTN; PAM sequence: TTA
  source 1..20: mol_type = other DNA
atatttcaccaaaaatataa

SEQ ID NO: 56136 - DNA, 20 bp, synthetic construct
  misc_feature 1..20: note = Description of Artificial Sequence: Synthetic oligonucleotide
  misc_feature 1..20: note = Target: SCN10A; (-) strand; PAM type: YTN; PAM sequence: TTA
  source 1..20: mol_type = other DNA
ttaatatttcaccaaaaata

SEQ ID NO: 56137 - DNA, 20 bp, synthetic construct
  misc_feature 1..20: note = Description of Artificial Sequence: Synthetic oligonucleotide
  misc_feature 1..20: note = Target: SCN10A; (-) strand; PAM type: YTN; PAM sequence: CTA
  source 1..20: mol_type = other DNA
ttattaatatttcaccaaaa

SEQ ID NO: 56138 - DNA, 20 bp, synthetic construct
  misc_feature 1..20: note = Description of Artificial Sequence: Synthetic oligonucleotide
  misc_feature 1..20: note = Target: SCN10A; (-) strand; PAM type: YTN; PAM sequence: CTC
  source 1..20: mol_type = other DNA
agggccctattattaatatt

SEQ ID NO: 56139 - DNA, 20 bp, synthetic construct
  misc_feature 1..20: note = Description of Artificial Sequence: Synthetic oligonucleotide
  misc_feature 1..20: note = Target: SCN10A; (-) strand; PAM type: YTN; PAM sequence: TTC
  source 1..20: mol_type = other DNA
tcagggccctattattaata

SEQ ID NO: 56140 - DNA, 20 bp, synthetic construct
  misc_feature 1..20: note = Description of Artificial Sequence: Synthetic oligonucleotide
  misc_feature 1..20: note = Target: SCN10A; (-) strand; PAM type: YTN; PAM sequence: CTA
  source 1..20: mol_type = other DNA
gaattctcagggccctatta

SEQ ID NO: 56141 - DNA, 20 bp, synthetic construct
  misc_feature 1..20: note = Description of Artificial Sequence: Synthetic oligonucleotide
  misc_feature 1..20: note = Target: SCN10A; (-) strand; PAM type: YTN; PAM sequence: CTC
  source 1..20: mol_type = other DNA
cagccccaaaagatactaga

SEQ ID NO: 56142 - DNA, 20 bp, synthetic construct
  misc_feature 1..20: note = Description of Artificial Sequence: Synthetic oligonucleotide
  misc_feature 1..20: note = Target: SCN10A; (-) strand; PAM type: YTN; PAM sequence: TTG
  source 1..20: mol_type = other DNA
gtaactccagccccaaaaga

SEQ ID NO: 56143 - DNA, 20 bp, synthetic construct
  misc_feature 1..20: note = Description of Artificial Sequence: Synthetic oligonucleotide
  misc_feature 1..20: note = Target: SCN10A; (-) strand; PAM type: YTN; PAM sequence: TTT
  source 1..20: mol_type = other DNA
ggtaactccagccccaaaag

SEQ ID NO: 56144 - DNA, 20 bp, synthetic construct
  misc_feature 1..20: note = Description of Artificial Sequence: Synthetic oligonucleotide
  misc_feature 1..20: note = Target: SCN10A; (-) strand; PAM type: YTN; PAM sequence: CTC
  source 1..20: mol_type = other DNA
ataaatttggtaactccagc

SEQ ID NO: 56145 - DNA, 20 bp, synthetic construct
  misc_feature 1..20: note = Description of Artificial Sequence: Synthetic oligonucleotide
  misc_feature 1..20: note = Target: SCN10A; (-) strand; PAM type: YTN; PAM sequence: TTA
  source 1..20: mol_type = other DNA
aatctcataaatttggtaac

SEQ ID NO: 56146 - DNA, 20 bp, synthetic construct
  misc_feature 1..20: note = Description of Artificial Sequence: Synthetic oligonucleotide
  misc_feature 1..20: note = Target: SCN10A; (-) strand; PAM type: YTN; PAM sequence: TTT
  source 1..20: mol_type = other DNA
aaatctcataaatttggtaa

SEQ ID NO: 56147 - DNA, 20 bp, synthetic construct
  misc_feature 1..20: note = Description of Artificial Sequence: Synthetic oligonucleotide
  misc_feature 1..20: note = Target: SCN10A; (-) strand; PAM type: YTN; PAM sequence: CTG
  source 1..20: mol_type = other DNA
catttaaatctcataaattt

SEQ ID NO: 56148 - DNA, 20 bp, synthetic construct
  misc_feature 1..20: note = Description of Artificial Sequence: Synthetic oligonucleotide
  misc_feature 1..20: note = Target: SCN10A; (-) strand; PAM type: YTN; PAM sequence: CTC
  source 1..20: mol_type = other DNA
acaaaagtctgcatttaaat

SEQ ID NO: 56149 - DNA, 20 bp, synthetic construct
  misc_feature 1..20: note = Description of Artificial Sequence: Synthetic oligonucleotide
  misc_feature 1..20: note = Target: SCN10A; (-) strand; PAM type: YTN; PAM sequence: TTC
  source 1..20: mol_type = other DNA
ctcacaaaagtctgcattta

SEQ ID NO: 56150 - DNA, 20 bp, synthetic construct
  misc_feature 1..20: note = Description of Artificial Sequence: Synthetic oligonucleotide
  misc_feature 1..20: note = Target: SCN10A; (-) strand; PAM type: YTN; PAM sequence: CTT
  source 1..20: mol_type = other DNA
cctcacaaaagtctgcattt

SEQ ID NO: 56151 - DNA, 20 bp, synthetic construct
  misc_feature 1..20: note = Description of Artificial Sequence: Synthetic oligonucleotide
  misc_feature 1..20: note = Target: SCN10A; (-) strand; PAM type: YTN; PAM sequence: CTC
  source 1..20: mol_type = other DNA
ttcctcacaaaagtctgcat

SEQ ID NO: 56152 - DNA, 20 bp, synthetic construct
  misc_feature 1..20: note = Description of Artificial Sequence: Synthetic oligonucleotide
  misc_feature 1..20: note = Target: SCN10A; (-) strand; PAM type: YTN; PAM sequence: TTG
  source 1..20: mol_type = other DNA
agggggtctcttcctcacaa

SEQ ID NO: 56153 - DNA, 20 bp, synthetic construct
  misc_feature 1..20: note = Description of Artificial Sequence: Synthetic oligonucleotide
  misc_feature 1..20: note = Target: SCN10A; (-) strand; PAM type: YTN; PAM sequence: CTG
  source 1..20: mol_type = other DNA
ttgagggggtctcttcctca

SEQ ID NO: 56154 - DNA, 20 bp, synthetic construct
  misc_feature 1..20: note = Description of Artificial Sequence: Synthetic oligonucleotide
  misc_feature 1..20: note = Target: SCN10A; (-) strand; PAM type: YTN; PAM sequence: CTG
  source 1..20: mol_type = other DNA
gacagaaaagctgttgaggg

SEQ ID NO: 56155 - DNA, 20 bp, synthetic construct
  misc_feature 1..20: note = Description of Artificial Sequence: Synthetic oligonucleotide
  misc_feature 1..20: note = Target: SCN10A; (-) strand; PAM type: YTN; PAM sequence: TTG
  source 1..20: mol_type = other DNA
gtagagtcacagctggacag

SEQ ID NO: 56156 - DNA, 20 bp, synthetic construct
  misc_feature 1..20: note = Description of Artificial Sequence: Synthetic oligonucleotide
  misc_feature 1..20: note = Target: SCN10A; (-) strand; PAM type: YTN; PAM sequence: CTT
  source 1..20: mol_type = other DNA
ggtagagtcacagctggaca

SEQ ID NO: 56157 - DNA, 20 bp, synthetic construct
  misc_feature 1..20: note = Description of Artificial Sequence: Synthetic oligonucleotide
  misc_feature 1..20: note = Target: SCN10A; (-) strand; PAM type: YTN; PAM sequence: TTG
  source 1..20: mol_type = other DNA
cttggtagagtcacagctgg

SEQ ID NO: 56158 - DNA, 20 bp, synthetic construct
  misc_feature 1..20: note = Description of Artificial Sequence: Synthetic oligonucleotide
  misc_feature 1..20: note = Target: SCN10A; (-) strand; PAM type: YTN; PAM sequence: TTG
  source 1..20: mol_type = other DNA
atgagtaaataattgcttgg

SEQ ID NO: 56159 - DNA, 20 bp, synthetic construct
  misc_feature 1..20: note = Description of Artificial Sequence: Synthetic oligonucleotide
  misc_feature 1..20: note = Target: SCN10A; (-) strand; PAM type: YTN; PAM sequence: TTT
  source 1..20: mol_type = other DNA
gatgagtaaataattgcttg

SEQ ID NO: 56160 - DNA, 20 bp, synthetic construct
  misc_feature 1..20: note = Description of Artificial Sequence: Synthetic oligonucleotide
  misc_feature 1..20: note = Target: SCN10A; (-) strand; PAM type: YTN; PAM sequence: TTG
  source 1..20: mol_type = other DNA
agatttgatgagtaaataat

SEQ ID NO: 56161 - DNA, 20 bp, synthetic construct
  misc_feature 1..20: note = Description of Artificial Sequence: Synthetic oligonucleotide
  misc_feature 1..20: note = Target: SCN10A; (-) strand; PAM type: YTN; PAM sequence: CTT
  source 1..20: mol_type = other DNA
gagatttgatgagtaaataa

SEQ ID NO: 56162 - DNA, 20 bp, synthetic construct
  misc_feature 1..20: note = Description of Artificial Sequence: Synthetic oligonucleotide
  misc_feature 1..20: note = Target: SCN10A; (-) strand; PAM type: YTN; PAM sequence: TTC
  source 1..20: mol_type = other DNA
atcttgagatttgatgagta

SEQ ID NO: 56163 - DNA, 20 bp, synthetic construct
  misc_feature 1..20: note = Description of Artificial Sequence: Synthetic oligonucleotide
  misc_feature 1..20: note = Target: SCN10A; (-) strand; PAM type: YTN; PAM sequence: CTT
  source 1..20: mol_type = other DNA
catcttgagatttgatgagt

SEQ ID NO: 56164 - DNA, 20 bp, synthetic construct
  misc_feature 1..20: note = Description of Artificial Sequence: Synthetic oligonucleotide
  misc_feature 1..20: note = Target: SCN10A; (-) strand; PAM type: YTN; PAM sequence: CTC
  source 1..20: mol_type = other DNA
ttcatcttgagatttgatga

SEQ ID NO: 56165 - DNA, 20 bp, synthetic construct
  misc_feature 1..20: note = Description of Artificial Sequence: Synthetic oligonucleotide
  misc_feature 1..20: note = Target: SCN10A; (-) strand; PAM type: YTN; PAM sequence: TTC
  source 1..20: mol_type = other DNA
tcttcatcttgagatttgat

SEQ ID NO: 56166 - DNA, 20 bp, synthetic construct
  misc_feature 1..20: note = Description of Artificial Sequence: Synthetic oligonucleotide
  misc_feature 1..20: note = Target: SCN10A; (-) strand; PAM type: YTN; PAM sequence: CTA
  source 1..20: mol_type = other DNA
aaaagaaccaagtgaccagt

SEQ ID NO: 56167 - DNA, 20 bp, synthetic construct
  misc_feature 1..20: note = Description of Artificial Sequence: Synthetic oligonucleotide
  misc_feature 1..20: note = Target: SCN10A; (-) strand; PAM type: YTN; PAM sequence: TTA
  source 1..20: mol_type = other DNA
gaaataaaatcccctaaaaa

SEQ ID NO: 56168 - DNA, 20 bp, synthetic construct
  misc_feature 1..20: note = Description of Artificial Sequence: Synthetic oligonucleotide
  misc_feature 1..20: note = Target: SCN10A; (-) strand; PAM type: YTN; PAM sequence: CTA
  source 1..20: mol_type = other DNA
attagaaataaaatccccta

SEQ ID NO: 56169 - DNA, 20 bp, synthetic construct
  misc_feature 1..20: note = Description of Artificial Sequence: Synthetic oligonucleotide
  misc_feature 1..20: note = Target: SCN10A; (-) strand; PAM type: YTN; PAM sequence: CTG
  source 1..20: mol_type = other DNA
gataagtaagaaacagctaa

SEQ ID NO: 56170 - DNA, 20 bp, synthetic construct
  misc_feature 1..20: note = Description of Artificial Sequence: Synthetic oligonucleotide
  misc_feature 1..20: note = Target: SCN10A; (-) strand; PAM type: YTN; PAM sequence: TTA
  source 1..20: mol_type = other DNA
catctggataagtaagaaac

SEQ ID NO: 56171 - DNA, 20 bp, synthetic construct
  misc_feature 1..20: note = Description of Artificial Sequence: Synthetic oligonucleotide
  misc_feature 1..20: note = Target: SCN10A; (-) strand; PAM type: YTN; PAM sequence: TTG
  source 1..20: mol_type = other DNA
aattacatctggataagtaa

SEQ ID NO: 56172 - DNA, 20 bp, synthetic construct
  misc_feature 1..20: note = Description of Artificial Sequence: Synthetic oligonucleotide
  misc_feature 1..20: note = Target: SCN10A; (-) strand; PAM type: YTN; PAM sequence: CTG
  source 1..20: mol_type = other DNA
gttgaattacatctggataa

SEQ ID NO: 56173 - DNA, 20 bp, synthetic construct
  misc_feature 1..20: note = Description of Artificial Sequence: Synthetic oligonucleotide
  misc_feature 1..20: note = Target: SCN10A; (-) strand; PAM type: YTN; PAM sequence: TTC
  source 1..20: mol_type = other DNA
tggttgaattacatctggat

SEQ ID NO: 56174 - DNA, 20 bp, synthetic construct
  misc_feature 1..20: note = Description of Artificial Sequence: Synthetic oligonucleotide
  misc_feature 1..20: note = Target: SCN10A; (-) strand; PAM type: YTN; PAM sequence: TTA
  source 1..20: mol_type = other DNA
tggattctggttgaattaca

SEQ ID NO: 56175 - DNA, 20 bp, synthetic construct
  misc_feature 1..20: note = Description of Artificial Sequence: Synthetic oligonucleotide
  misc_feature 1..20: note = Target: SCN10A; (-) strand; PAM type: YTN; PAM sequence: TTT
  source 1..20: mol_type = other DNA
atggattctggttgaattac

SEQ ID NO: 56176 - DNA, 20 bp, synthetic construct
  misc_feature 1..20: note = Description of Artificial Sequence: Synthetic oligonucleotide
  misc_feature 1..20: note = Target: SCN10A; (-) strand; PAM type: YTN; PAM sequence: CTT
  source 1..20: mol_type = other DNA
tatggattctggttgaatta

SEQ ID NO: 56177 - DNA, 20 bp, synthetic construct
  misc_feature 1..20: note = Description of Artificial Sequence: Synthetic oligonucleotide
  misc_feature 1..20: note = Target: SCN10A; (-) strand; PAM type: YTN; PAM sequence: CTC
  source 1..20: mol_type = other DNA
tttatggattctggttgaat

SEQ ID NO: 56178 - DNA, 20 bp, synthetic construct
  misc_feature 1..20: note = Description of Artificial Sequence: Synthetic oligonucleotide
  misc_feature 1..20: note = Target: SCN10A; (-) strand; PAM type: YTN; PAM sequence: CTC
  source 1..20: mol_type = other DNA
ctctttatggattctggttg

SEQ ID NO: 56179 - DNA, 20 bp, synthetic construct
  misc_feature 1..20: note = Description of Artificial Sequence: Synthetic oligonucleotide
  misc_feature 1..20: note = Target: SCN10A; (-) strand; PAM type: YTN; PAM sequence: TTA
  source 1..20: mol_type = other DNA
caaataaagagaaatcacaa

SEQ ID NO: 56180 - DNA, 20 bp, synthetic construct
  misc_feature 1..20: note = Description of Artificial Sequence: Synthetic oligonucleotide
  misc_feature 1..20: note = Target: SCN10A; (-) strand; PAM type: YTN; PAM sequence: TTA
  source 1..20: mol_type = other DNA
catggaaattacaaataaag

SEQ ID NO: 56181 - DNA, 20 bp, synthetic construct
  misc_feature 1..20: note = Description of Artificial Sequence: Synthetic oligonucleotide
  misc_feature 1..20: note = Target: SCN10A; (-) strand; PAM type: YTN; PAM sequence: TTC
  source 1..20: mol_type = other DNA
aaaatatatacaattacatg

SEQ ID NO: 56182 - DNA, 20 bp, synthetic construct
  misc_feature 1..20: note = Description of Artificial Sequence: Synthetic oligonucleotide
  misc_feature 1..20: note = Target: SCN10A; (-) strand; PAM type: YTN; PAM sequence: TTT
  source 1..20: mol_type = other DNA
caaaatatatacaattacat

SEQ ID NO: 56183 - DNA, 20 bp, synthetic construct
  misc_feature 1..20: note = Description of Artificial Sequence: Synthetic oligonucleotide
  misc_feature 1..20: note = Target: SCN10A; (-) strand; PAM type: YTN; PAM sequence: TTT
  source 1..20: mol_type = other DNA
tcaaaatatatacaattaca

SEQ ID NO: 56184 - DNA, 20 bp, synthetic construct
  misc_feature 1..20: note = Description of Artificial Sequence: Synthetic oligonucleotide
  misc_feature 1..20: note = Target: SCN10A; (-) strand; PAM type: YTN; PAM sequence: TTT
  source 1..20: mol_type = other DNA
ttcaaaatatatacaattac

SEQ ID NO: 56185 - DNA, 20 bp, synthetic construct
  misc_feature 1..20: note = Description of Artificial Sequence: Synthetic oligonucleotide
  misc_feature 1..20: note = Target: SCN10A; (-) strand; PAM type: YTN; PAM sequence: CTT
  source 1..20: mol_type = other DNA
tttcaaaatatatacaatta

SEQ ID NO: 56186 - DNA, 20 bp, synthetic construct
  misc_feature 1..20: note = Description of Artificial Sequence: Synthetic oligonucleotide
  misc_feature 1..20: note = Target: SCN10A; (-) strand; PAM type: YTN; PAM sequence: TTG
  source 1..20: mol_type = other DNA
ctttttcaaaatatatacaa

SEQ ID NO: 56187 - DNA, 20 bp, synthetic construct
  misc_feature 1..20: note = Description of Artificial Sequence: Synthetic oligonucleotide
  misc_feature 1..20: note = Target: SCN10A; (-) strand; PAM type: YTN; PAM sequence: TTG
  source 1..20: mol_type = other DNA
ttgctttttcaaaatatata

SEQ ID NO: 56188 - DNA, 20 bp, synthetic construct
  misc_feature 1..20: note = Description of Artificial Sequence: Synthetic oligonucleotide
  misc_feature 1..20: note = Target: SCN10A; (-) strand; PAM type: YTN; PAM sequence: TTG
  source 1..20: mol_type = other DNA
ggtagttgttgctttttcaa

SEQ ID NO: 56189 - DNA, 20 bp, synthetic construct
  misc_feature 1..20: note = Description of Artificial Sequence: Synthetic oligonucleotide
  misc_feature 1..20: note = Target: SCN10A; (-) strand; PAM type: YTN; PAM sequence: CTT
  source 1..20: mol_type = other DNA
gggtagttgttgctttttca

SEQ ID NO: 56190 - DNA, 20 bp, synthetic construct
  misc_feature 1..20: note = Description of Artificial Sequence: Synthetic oligonucleotide
  misc_feature 1..20: note = Target: SCN10A; (-) strand; PAM type: YTN; PAM sequence: CTG
  source 1..20: mol_type = other DNA
cttgggtagttgttgctttt

SEQ ID NO: 56191 - DNA, 20 bp, synthetic construct
  misc_feature 1..20: note = Description of Artificial Sequence: Synthetic oligonucleotide
  misc_feature 1..20: note = Target: SCN10A; (-) strand; PAM type: YTN; PAM sequence: CTC
  source 1..20: mol_type = other DNA
tgcttgggtagttgttgctt

SEQ ID NO: 56192 - DNA, 20 bp, synthetic construct
  misc_feature 1..20: note = Description of Artificial Sequence: Synthetic oligonucleotide
  misc_feature 1..20: note = Target: SCN10A; (-) strand; PAM type: YTN; PAM sequence: CTC
  source 1..20: mol_type = other DNA
aatgtgtcgtctctgcttgg

SEQ ID NO: 56193 - DNA, 20 bp, synthetic construct
  misc_feature 1..20: note = Description of Artificial Sequence: Synthetic oligonucleotide
  misc_feature 1..20: note = Target: SCN10A; (-) strand; PAM type: YTN; PAM sequence: CTC
  source 1..20: mol_type = other DNA
tcaatgtgtcgtctctgctt

SEQ ID NO: 56194 - DNA, 20 bp, synthetic construct
  misc_feature 1..20: note = Description of Artificial Sequence: Synthetic oligonucleotide
  misc_feature 1..20: note = Target: SCN10A; (-) strand; PAM type: YTN; PAM sequence: TTC
  source 1..20: mol_type = other DNA
tctcaatgtgtcgtctctgc

SEQ ID NO: 56195 - DNA, 20 bp, synthetic construct
  misc_feature 1..20: note = Description of Artificial Sequence: Synthetic oligonucleotide
  misc_feature 1..20: note = Target: SCN10A; (-) strand; PAM type: YTN; PAM sequence: TTA
  source 1..20: mol_type = other DNA
ttctctcaatgtgtcgtctc

SEQ ID NO: 56196 - DNA, 20 bp, synthetic construct
  misc_feature 1..20: note = Description of Artificial Sequence: Synthetic oligonucleotide
  misc_feature 1..20: note = Target: SCN10A; (-) strand; PAM type: YTN; PAM sequence: CTA
  source 1..20: mol_type = other DNA
cagtgaggaagtagggtgga

SEQ ID NO: 56197 - DNA, 20 bp, synthetic construct
  misc_feature 1..20: note = Description of Artificial Sequence: Synthetic oligonucleotide
  misc_feature 1..20: note = Target: SCN10A; (-) strand; PAM type: YTN; PAM sequence: CTG
  source 1..20: mol_type = other DNA
cgtagagcagtatctacagt

SEQ ID NO: 56198 - DNA, 20 bp, synthetic construct
  misc_feature 1..20: note = Description of Artificial Sequence: Synthetic oligonucleotide
  misc_feature 1..20: note = Target: SCN10A; (-) strand; PAM type: YTN; PAM sequence: CTG
  source 1..20: mol_type = other DNA
catcctgcgtagagcagtat

SEQ ID NO: 56199 - DNA, 20 bp, synthetic construct
  misc_feature 1..20: note = Description of Artificial Sequence: Synthetic oligonucleotide
  misc_feature 1..20: note = Target: SCN10A; (-) strand; PAM type: YTN; PAM sequence: TTA
  source 1..20: mol_type = other DNA
agaagtccagcctgcatcct

SEQ ID NO: 56200 - DNA, 20 bp, synthetic construct
  misc_feature 1..20: note = Description of Artificial Sequence: Synthetic oligonucleotide
  misc_feature 1..20: note = Target: SCN10A; (-) strand; PAM type: YTN; PAM sequence: CTA
  source 1..20: mol_type = other DNA
gttaagaagtccagcctgca

SEQ ID NO: 56201 - DNA, 20 bp, synthetic construct
  misc_feature 1..20: note = Description of Artificial Sequence: Synthetic oligonucleotide
  misc_feature 1..20: note = Target: SCN10A; (-) strand; PAM type: YTN; PAM sequence: TTA
  source 1..20: mol_type = other DNA
tccaagaccatgtagctagt

SEQ ID NO: 56202 - DNA, 20 bp, synthetic construct
  misc_feature 1..20: note = Description of Artificial Sequence: Synthetic oligonucleotide
  misc_feature 1..20: note = Target: SCN10A; (-) strand; PAM type: YTN; PAM sequence: TTA
  source 1..20: mol_type = other DNA
agtaaattatccaagaccat

SEQ ID NO: 56203 - DNA, 20 bp, synthetic construct
  misc_feature 1..20: note = Description of Artificial Sequence: Synthetic oligonucleotide
  misc_feature 1..20: note = Target: SCN10A; (-) strand; PAM type: YTN; PAM sequence: CTG
  source 1..20: mol_type = other DNA
acacacagaggcattaagta

SEQ ID NO: 56204 - DNA, 20 bp, synthetic construct
  misc_feature 1..20: note = Description of Artificial Sequence: Synthetic oligonucleotide
  misc_feature 1..20: note = Target: SCN10A; (-) strand; PAM type: YTN; PAM sequence: TTA
  source 1..20: mol_type = other DNA
cagataatgaaactgacaca

SEQ ID NO: 56205 - DNA, 20 bp, synthetic construct
  misc_feature 1..20: note = Description of Artificial Sequence: Synthetic oligonucleotide
  misc_feature 1..20: note = Target: SCN10A; (-) strand; PAM type: YTN; PAM sequence: TTT
  source 1..20: mol_type = other DNA
acagataatgaaactgacac

SEQ ID NO: 56206 - DNA, 20 bp, synthetic construct
  misc_feature 1..20: note = Description of Artificial Sequence: Synthetic oligonucleotide
  misc_feature 1..20: note = Target: SCN10A; (-) strand; PAM type: YTN; PAM sequence: TTT
  source 1..20: mol_type = other DNA
tacagataatgaaactgaca

SEQ ID NO: 56207 - DNA, 20 bp, synthetic construct
  misc_feature 1..20: note = Description of Artificial Sequence: Synthetic oligonucleotide
  misc_feature 1..20: note = Target: SCN10A; (-) strand; PAM type: YTN; PAM sequence: TTA
  source 1..20: mol_type = other DNA
ccatccccattttacagata

SEQ ID NO: 56208 - DNA, 20 bp, synthetic construct
  misc_feature 1..20: note = Description of Artificial Sequence: Synthetic oligonucleotide
  misc_feature 1..20: note = Target: SCN10A; (-) strand; PAM type: YTN; PAM sequence: CTG
  source 1..20: mol_type = other DNA
aagtagagattaccatcccc

SEQ ID NO: 56209 - DNA, 20 bp, synthetic construct
  misc_feature 1..20: note = Description of Artificial Sequence: Synthetic oligonucleotide
  misc_feature 1..20: note = Target: SCN10A; (-) strand; PAM type: YTN; PAM sequence: CTC
  source 1..20: mol_type = other DNA
tgaagtagagattaccatcc

SEQ ID NO: 56210 - DNA, 20 bp, synthetic construct
  misc_feature 1..20: note = Description of Artificial Sequence: Synthetic oligonucleotide
  misc_feature 1..20: note = Target: SCN10A; (-) strand; PAM type: YTN; PAM sequence: TTC
  source 1..20: mol_type = other DNA
aaaagcctctgaagtagaga

SEQ ID NO: 56211 - DNA, 20 bp, synthetic construct
  misc_feature 1..20: note = Description of Artificial Sequence: Synthetic oligonucleotide
  misc_feature 1..20: note = Target: SCN10A; (-) strand; PAM type: YTN; PAM sequence: CTA
  source 1..20: mol_type = other DNA
agtgtcaataccatcatcag

SEQ ID NO: 56212 - DNA, 20 bp, synthetic construct
  misc_feature 1..20: note = Description of Artificial Sequence: Synthetic oligonucleotide
  misc_feature 1..20: note = Target: SCN10A; (-) strand; PAM type: YTN; PAM sequence: TTC
  source 1..20: mol_type = other DNA
ctaagtgtcaataccatcat

SEQ ID NO: 56213 - DNA, 20 bp, synthetic construct
  misc_feature 1..20: note = Description of Artificial Sequence: Synthetic oligonucleotide
  misc_feature 1..20: note = Target: SCN10A; (-) strand; PAM type: YTN; PAM sequence: CTT
  source 1..20: mol_type = other DNA
cctaagtgtcaataccatca

SEQ ID NO: 56214 - DNA, 20 bp, synthetic construct
  misc_feature 1..20: note = Description of Artificial Sequence: Synthetic oligonucleotide
  misc_feature 1..20: note = Target: SCN10A; (-) strand; PAM type: YTN; PAM sequence: CTA
  source 1..20: mol_type = other DNA
aatacttcctaagtgtcaat

SEQ ID NO: 56215 - DNA, 20 bp, synthetic construct
  misc_feature 1..20: note = Description of Artificial Sequence: Synthetic oligonucleotide
  misc_feature 1..20: note = Target: SCN10A; (-) strand; PAM type: YTN; PAM sequence: TTG
  source 1..20: mol_type = other DNA
ctaaatacttcctaagtgtc

SEQ ID NO: 56216 - DNA, 20 bp, synthetic construct
  misc_feature 1..20: note = Description of Artificial Sequence: Synthetic oligonucleotide
  misc_feature 1..20: note = Target: SCN10A; (-) strand; PAM type: YTN; PAM sequence: CTT
  source 1..20: mol_type = other DNA
gctaaatacttcctaagtgt

SEQ ID NO: 56217 - DNA, 20 bp, synthetic construct
  misc_feature 1..20: note = Description of Artificial Sequence: Synthetic oligonucleotide
  misc_feature 1..20: note = Target: SCN10A; (-) strand; PAM type: YTN; PAM sequence: CTC
  source 1..20: mol_type = other DNA
acttgctaaatacttcctaa

SEQ ID NO: 56218 - DNA, 20 bp, synthetic construct
  misc_feature 1..20: note = Description of Artificial Sequence: Synthetic oligonucleotide
  misc_feature 1..20: note = Target: SCN10A; (-) strand; PAM type: YTN; PAM sequence: CTC
  source 1..20: mol_type = other DNA
tcacttgctaaatacttcct

SEQ ID NO: 56219 - DNA, 20 bp, synthetic construct
  misc_feature 1..20: note = Description of Artificial Sequence: Synthetic oligonucleotide
  misc_feature 1..20: note = Target: SCN10A; (-) strand; PAM type: YTN; PAM sequence: TTA
  source 1..20: mol_type = other DNA
atgacaatacagtctctcac

SEQ ID NO: 56220 - DNA, 20 bp, synthetic construct
  misc_feature 1..20: note = Description of Artificial Sequence: Synthetic oligonucleotide
  misc_feature 1..20: note = Target: SCN10A; (-) strand; PAM type: YTN; PAM sequence: TTT
  source 1..20: mol_type = other DNA
aatgacaatacagtctctca

SEQ ID NO: 56221 - DNA, 20 bp, synthetic construct
  misc_feature 1..20: note = Description of Artificial Sequence: Synthetic oligonucleotide
  misc_feature 1..20: note = Target: SCN10A; (-) strand; PAM type: YTN; PAM sequence: CTA
  source 1..20: mol_type = other DNA
cagaaggatatttaatgaca

SEQ ID NO: 56222 - DNA, 20 bp, synthetic construct
  misc_feature 1..20: note = Description of Artificial Sequence: Synthetic oligonucleotide
  misc_feature 1..20: note = Target: SCN10A; (-) strand; PAM type: YTN; PAM sequence: TTC
  source 1..20: mol_type = other DNA
tacagaaggatatttaatga

SEQ ID NO: 56223 - DNA, 20 bp, synthetic construct
  misc_feature 1..20: note = Description of Artificial Sequence: Synthetic oligonucleotide
  misc_feature 1..20: note = Target: SCN10A; (-) strand; PAM type: YTN; PAM sequence: TTC
  source 1..20: mol_type = other DNA
agattctacagaaggatatt

SEQ ID NO: 56224 - DNA, 20 bp, synthetic construct
  misc_feature 1..20: note = Description of Artificial Sequence: Synthetic oligonucleotide
  misc_feature 1..20: note = Target: SCN10A; (-) strand; PAM type: YTN; PAM sequence: TTT
  source 1..20: mol_type = other DNA
cagattctacagaaggatat

SEQ ID NO: 56225 - DNA, 20 bp, synthetic construct
  misc_feature 1..20: note = Description of Artificial Sequence: Synthetic oligonucleotide
  misc_feature 1..20: note = Target: SCN10A; (-) strand; PAM type: YTN; PAM sequence: TTT
  source 1..20: mol_type = other DNA
tcagattctacagaaggata

SEQ ID NO: 56226 - DNA, 20 bp, synthetic construct
  misc_feature 1..20: note = Description of Artificial Sequence: Synthetic oligonucleotide
  misc_feature 1..20: note = Target: SCN10A; (-) strand; PAM type: YTN; PAM sequence: TTG
  source 1..20: mol_type = other DNA
aattttcagattctacagaa

SEQ ID NO: 56227 - DNA, 20 bp, synthetic construct
  misc_feature 1..20: note = Description of Artificial Sequence: Synthetic oligonucleotide
  misc_feature 1..20: note = Target: SCN10A; (-) strand; PAM type: YTN; PAM sequence: CTT
  source 1..20: mol_type = other DNA
gaattttcagattctacaga

SEQ ID NO: 56228 - DNA, 20 bp, synthetic construct
  misc_feature 1..20: note = Description of Artificial Sequence: Synthetic oligonucleotide
  misc_feature 1..20: note = Target: SCN10A; (-) strand; PAM type: YTN; PAM sequence: CTG
  source 1..20: mol_type = other DNA
aatcttgaattttcagattc

SEQ ID NO: 56229 - DNA, 20 bp, synthetic construct
  misc_feature 1..20: note = Description of Artificial Sequence: Synthetic oligonucleotide
  misc_feature 1..20: note = Target: SCN10A; (-) strand; PAM type: YTN; PAM sequence: CTG
  source 1..20: mol_type = other DNA
agctgaatcttgaattttca

SEQ ID NO: 56230 - DNA, 20 bp, synthetic construct
  misc_feature 1..20: note = Description of Artificial Sequence: Synthetic oligonucleotide
  misc_feature 1..20: note = Target: SCN10A; (-) strand; PAM type: YTN; PAM sequence: TTC
  source 1..20: mol_type = other DNA
tgagctgaatcttgaatttt

SEQ ID NO: 56231 - DNA, 20 bp, synthetic construct
  misc_feature 1..20: note = Description of Artificial Sequence: Synthetic oligonucleotide
  misc_feature 1..20: note = Target: SCN10A; (-) strand; PAM type: YTN; PAM sequence: TTT
  source 1..20: mol_type = other DNA
ctgagctgaatcttgaattt

SEQ ID NO: 56232 - DNA, 20 bp, synthetic construct
  misc_feature 1..20: note = Description of Artificial Sequence: Synthetic oligonucleotide
  misc_feature 1..20: note = Target: SCN10A; (-) strand; PAM type: YTN; PAM sequence: TTT
  source 1..20: mol_type = other DNA
tctgagctgaatcttgaatt

SEQ ID NO: 56233 - DNA, 20 bp, synthetic construct
  misc_feature 1..20: note = Description of Artificial Sequence: Synthetic oligonucleotide
  misc_feature 1..20: note = Target: SCN10A; (-) strand; PAM type: YTN; PAM sequence: TTA
  source 1..20: mol_type = other DNA
cgttttctgagctgaatctt

SEQ ID NO: 56234 - DNA, 20 bp, synthetic construct
  misc_feature 1..20: note = Description of Artificial Sequence: Synthetic oligonucleotide
  misc_feature 1..20: note = Target: SCN10A; (-) strand; PAM type: YTN; PAM sequence: CTG
  source 1..20: mol_type = other DNA
gccagcaagaattacgtttt

SEQ ID NO: 56235 - DNA, 20 bp, synthetic construct
  misc_feature 1..20: note = Description of Artificial Sequence: Synthetic oligonucleotide
  misc_feature 1..20: note = Target: SCN10A; (-) strand; PAM type: YTN; PAM sequence: CTG
  source 1..20: mol_type = other DNA
gctggccagcaagaattacg

SEQ ID NO: 56236 - DNA, 20 bp, synthetic construct
  misc_feature 1..20: note = Description of Artificial Sequence: Synthetic oligonucleotide
  misc_feature 1..20: note = Target: SCN10A; (-) strand; PAM type: YTN; PAM sequence: TTC
  source 1..20: mol_type = other DNA
tggctggccagcaagaatta

SEQ ID NO: 56237 - DNA, 20 bp, synthetic construct
  misc_feature 1..20: note = Description of Artificial Sequence: Synthetic oligonucleotide
  misc_feature 1..20: note = Target: SCN10A; (-) strand; PAM type: YTN; PAM sequence: TTT
  source 1..20: mol_type = other DNA
ctggctggccagcaagaatt

SEQ ID NO: 56238 - DNA, 20 bp, synthetic construct
  misc_feature 1..20: note = Description of Artificial Sequence: Synthetic oligonucleotide
  misc_feature 1..20: note = Target: SCN10A; (-) strand; PAM type: YTN; PAM sequence: CTT
  source 1..20: mol_type = other DNA
tctggctggccagcaagaat

SEQ ID NO: 56239 - DNA, 20 bp, synthetic construct
  misc_feature 1..20: note = Description of Artificial Sequence: Synthetic oligonucleotide
  misc_feature 1..20: note = Target: SCN10A; (-) strand; PAM type: YTN; PAM sequence: TTC
  source 1..20: mol_type = other DNA
tttctggctggccagcaaga

SEQ ID NO: 56240 - DNA, 20 bp, synthetic construct
  misc_feature 1..20: note = Description of Artificial Sequence: Synthetic oligonucleotide
  misc_feature 1..20: note = Target: SCN10A; (-) strand; PAM type: YTN; PAM sequence: TTT
  source 1..20: mol_type = other DNA
ctttctggctggccagcaag

SEQ ID NO: 56241 - DNA, 20 bp, synthetic construct
  misc_feature 1..20: note = Description of Artificial Sequence: Synthetic oligonucleotide
  misc_feature 1..20: note = Target: SCN10A; (-) strand; PAM type: YTN; PAM sequence: TTT
  source 1..20: mol_type = other DNA
tctttctggctggccagcaa

SEQ ID NO: 56242 - DNA, 20 bp, synthetic construct
  misc_feature 1..20: note = Description of Artificial Sequence: Synthetic oligonucleotide
  misc_feature 1..20: note = Target: SCN10A; (-) strand; PAM type: YTN; PAM sequence: TTT
  source 1..20: mol_type = other DNA
ttctttctggctggccagca

SEQ ID NO: 56243 - DNA, 20 bp, synthetic construct
  misc_feature 1..20: note = Description of Artificial Sequence: Synthetic oligonucleotide
  misc_feature 1..20: note = Target: SCN10A; (-) strand; PAM type: YTN; PAM sequence: TTT
  source 1..20: mol_type = other DNA
tttctttctggctggccagc

SEQ ID NO: 56244 - DNA, 20 bp, synthetic construct
  misc_feature 1..20: note = Description of Artificial Sequence: Synthetic oligonucleotide
  misc_feature 1..20: note = Target: SCN10A; (-) strand; PAM type: YTN; PAM sequence: TTT
  source 1..20: mol_type = other DNA
ttttctttctggctggccag

SEQ ID NO: 56245 - DNA, 20 bp, synthetic construct
  misc_feature 1..20: note = Description of Artificial Sequence: Synthetic oligonucleotide
  misc_feature 1..20: note = Target: SCN10A; (-) strand; PAM type: YTN; PAM sequence: TTA
  source 1..20: mol_type = other DNA
catttttttctttctggctg

SEQ ID NO: 56246 - DNA, 20 bp, synthetic construct
  misc_feature 1..20: note = Description of Artificial Sequence: Synthetic oligonucleotide
  misc_feature 1..20: note = Target: SCN10A; (-) strand; PAM type: YTN; PAM sequence: TTT
  source 1..20: mol_type = other DNA
acatttttttctttctggct

SEQ ID NO: 56247 - DNA, 20 bp, synthetic construct
  misc_feature 1..20: note = Description of Artificial Sequence: Synthetic oligonucleotide
  misc_feature 1..20: note = Target: SCN10A; (-) strand; PAM type: YTN; PAM sequence: TTT
  source 1..20: mol_type = other DNA
tacatttttttctttctggc

SEQ ID NO: 56248 - DNA, 20 bp, synthetic construct
  misc_feature 1..20: note = Description of Artificial Sequence: Synthetic oligonucleotide
  misc_feature 1..20: note = Target: SCN10A; (-) strand; PAM type: YTN; PAM sequence: TTT
  source 1..20: mol_type = other DNA
ttacatttttttctttctgg

SEQ ID NO: 56249 - DNA, 20 bp, synthetic construct
  misc_feature 1..20: note = Description of Artificial Sequence: Synthetic oligonucleotide
  misc_feature 1..20: note = Target: SCN10A; (-) strand; PAM type: YTN; PAM sequence: CTT
  source 1..20: mol_type = other DNA
tttacatttttttctttctg

SEQ ID NO: 56250 - DNA, 20 bp, synthetic construct
  misc_feature 1..20: note = Description of Artificial Sequence: Synthetic oligonucleotide
  misc_feature 1..20: note = Target: SCN10A; (-) strand; PAM type: YTN; PAM sequence: CTC
  source 1..20: mol_type = other DNA
tttttacatttttttctttc

SEQ ID NO: 56251 - DNA, 20 bp, synthetic construct
  misc_feature 1..20: note = Description of Artificial Sequence: Synthetic oligonucleotide
  misc_feature 1..20: note = Target: SCN10A; (-) strand; PAM type: YTN; PAM sequence: TTC
  source 1..20: mol_type = other DNA
tctttttacatttttttctt

SEQ ID NO: 56252 - DNA, 20 bp, synthetic construct
  misc_feature 1..20: note = Description of Artificial Sequence: Synthetic oligonucleotide
  misc_feature 1..20: note = Target: SCN10A; (-) strand; PAM type: YTN; PAM sequence: TTT
  source 1..20: mol_type = other DNA
ctctttttacatttttttct

SEQ ID NO: 56253 - DNA, 20 bp, synthetic construct
  misc_feature 1..20: note = Description of Artificial Sequence: Synthetic oligonucleotide
  misc_feature 1..20: note = Target: SCN10A; (-) strand; PAM type: YTN; PAM sequence: TTT
  source 1..20: mol_type = other DNA
tctctttttacatttttttc

SEQ ID NO: 56254 - DNA, 20 bp, synthetic construct
  misc_feature 1..20: note = Description of Artificial Sequence: Synthetic oligonucleotide
  misc_feature 1..20: note = Target: SCN10A; (-) strand; PAM type: YTN; PAM sequence: TTA
  source 1..20: mol_type = other DNA
cgttttctctttttacattt

SEQ ID NO: 56255 - DNA, 20 bp, synthetic construct
  misc_feature 1..20: note = Description of Artificial Sequence: Synthetic oligonucleotide
  misc_feature 1..20: note = Target: SCN10A; (-) strand; PAM type: YTN; PAM sequence: TTG
  source 1..20: mol_type = other DNA
cattacgttttctcttttta

SEQ ID NO: 56256 - DNA, 20 bp, synthetic construct
  misc_feature 1..20: note = Description of Artificial Sequence: Synthetic oligonucleotide
  misc_feature 1..20: note = Target: SCN10A; (-) strand; PAM type: YTN; PAM sequence: TTG
  source 1..20: mol_type = other DNA
atgaagttgcattacgtttt

SEQ ID NO: 56257 - DNA, 20 bp, synthetic construct
  misc_feature 1..20: note = Description of Artificial Sequence: Synthetic oligonucleotide
  misc_feature 1..20: note = Target: SCN10A; (-) strand; PAM type: YTN; PAM sequence: CTT
  source 1..20: mol_type = other DNA
gatgaagttgcattacgttt

SEQ ID NO: 56258 - DNA, 20 bp, synthetic construct
  misc_feature 1..20: note = Description of Artificial Sequence: Synthetic oligonucleotide
  misc_feature 1..20: note = Target: SCN10A; (-) strand; PAM type: YTN; PAM sequence: CTG
  source 1..20: mol_type = other DNA
cacagcttgatgaagttgca

SEQ ID NO: 56259 - DNA, 20 bp, synthetic construct
  misc_feature 1..20: note = Description of Artificial Sequence: Synthetic oligonucleotide
  misc_feature 1..20: note = Target: SCN10A; (-) strand; PAM type: YTN; PAM sequence: CTC
  source 1..20: mol_type = other DNA
aacatgaagctgcacagctt

SEQ ID NO: 56260 - DNA, 20 bp, synthetic construct
  misc_feature 1..20: note = Description of Artificial Sequence: Synthetic oligonucleotide
  misc_feature 1..20: note = Target: SCN10A; (-) strand; PAM type: YTN; PAM sequence: CTG
  source 1..20: mol_type = other DNA
cacactcaacatgaagctgc

SEQ ID NO: 56261 - DNA, 20 bp, synthetic construct
  misc_feature 1..20: note = Description of Artificial Sequence: Synthetic oligonucleotide
  misc_feature 1..20: note = Target: SCN10A; (-) strand; PAM type: YTN; PAM sequence: CTA
  source 1..20: mol_type = other DNA
tctgcacactcaacatgaag

SEQ ID NO: 56262 - DNA, 20 bp, synthetic construct
  misc_feature 1..20: note = Description of Artificial Sequence: Synthetic oligonucleotide
  misc_feature 1..20: note = Target: SCN10A; (-) strand; PAM type: YTN; PAM sequence: TTG
  source 1..20: mol_type = other DNA
gcacagtcatctatctgcac

SEQ ID NO: 56263 - DNA, 20 bp, synthetic construct
  misc_feature 1..20: note = Description of Artificial Sequence: Synthetic oligonucleotide
  misc_feature 1..20: note = Target: SCN10A; (-) strand; PAM type: YTN; PAM sequence: CTT
  source 1..20: mol_type = other DNA
ggcacagtcatctatctgca

SEQ ID NO: 56264 - DNA, 20 bp, synthetic construct
  misc_feature 1..20: note = Description of Artificial Sequence: Synthetic oligonucleotide
  misc_feature 1..20: note = Target: SCN10A; (-) strand; PAM type: YTN; PAM sequence: CTG
  source 1..20: mol_type = other DNA
gtaaccttggcacagtcatc

SEQ ID NO: 56265 - DNA, 20 bp, synthetic construct
  misc_feature 1..20: note = Description of Artificial Sequence: Synthetic oligonucleotide
  misc_feature 1..20: note = Target: SCN10A; (-) strand; PAM type: YTN; PAM sequence: TTG
  source 1..20: mol_type = other DNA
agctggtaaccttggcacag

SEQ ID NO: 56266 - DNA, 20 bp, synthetic construct
  misc_feature 1..20: note = Description of Artificial Sequence: Synthetic oligonucleotide
  misc_feature 1..20: note = Target: SCN10A; (-) strand; PAM type: YTN; PAM sequence: TTG
  source 1..20: mol_type = other DNA
tcattgagctggtaaccttg

SEQ ID NO: 56267 - DNA, 20 bp, synthetic construct
  misc_feature 1..20: note = Description of Artificial Sequence: Synthetic oligonucleotide
  misc_feature 1..20: note = Target: SCN10A; (-) strand; PAM type: YTN; PAM sequence: CTG
  source 1..20: mol_type = other DNA
gacagttgtcattgagctgg

SEQ ID NO: 56268 - DNA, 20 bp, synthetic construct
  misc_feature 1..20: note = Description of Artificial Sequence: Synthetic oligonucleotide
  misc_feature 1..20: note = Target: SCN10A; (-) strand; PAM type: YTN; PAM sequence: TTC
  source 1..20: mol_type = other DNA
tggacagttgtcattgagct

SEQ ID NO: 56269 - DNA, 20 bp, synthetic construct
  misc_feature 1..20: note = Description of Artificial Sequence: Synthetic oligonucleotide
  misc_feature 1..20: note = Target: SCN10A; (-) strand; PAM type: YTN; PAM sequence: TTT
  source 1..20: mol_type = other DNA
ctggacagttgtcattgagc

SEQ ID NO: 56270 - DNA, 20 bp, synthetic construct
  misc_feature 1..20: note = Description of Artificial Sequence: Synthetic oligonucleotide
  misc_feature 1..20: note = Target: SCN10A; (-) strand; PAM type: YTN; PAM sequence: TTG
  source 1..20: mol_type = other DNA
gatttctggacagttgtcat

SEQ ID NO: 56271 - DNA, 20 bp, synthetic construct
  misc_feature 1..20: note = Description of Artificial Sequence: Synthetic oligonucleotide
  misc_feature 1..20: note = Target: SCN10A; (-) strand; PAM type: YTN; PAM sequence: TTG
  source 1..20: mol_type = other DNA
ttggatttctggacagttgt

SEQ ID NO: 56272 - DNA, 20 bp, synthetic construct
  misc_feature 1..20: note = Description of Artificial Sequence: Synthetic oligonucleotide
  misc_feature 1..20: note = Target: SCN10A; (-) strand; PAM type: YTN; PAM sequence: CTG
  source 1..20: mol_type = other DNA
aggcagattgttggatttct

SEQ ID NO: 56273 - DNA, 20 bp, synthetic construct
  misc_feature 1..20: note = Description of Artificial Sequence: Synthetic oligonucleotide
  misc_feature 1..20: note = Target: SCN10A; (-) strand; PAM type: YTN; PAM sequence: CTC
  source 1..20: mol_type = other DNA
tgaggcagattgttggattt

SEQ ID NO: 56274 - DNA, 20 bp, synthetic construct
  misc_feature 1..20: note = Description of Artificial Sequence: Synthetic oligonucleotide
  misc_feature 1..20: note = Target: SCN10A; (-) strand; PAM type: YTN; PAM sequence: CTA
  source 1..20: mol_type = other DNA
actctgaggcagattgttgg

SEQ ID NO: 56275 - DNA, 20 bp, synthetic construct
  misc_feature 1..20: note = Description of Artificial Sequence: Synthetic oligonucleotide
  misc_feature 1..20: note = Target: SCN10A; (-) strand; PAM type: YTN; PAM sequence: CTC
  source 1..20: mol_type = other DNA
cctaactctgaggcagattg

SEQ ID NO: 56276 - DNA, 20 bp, synthetic construct
  misc_feature 1..20: note = Description of Artificial Sequence: Synthetic oligonucleotide
  misc_feature 1..20: note = Target: SCN10A; (-) strand; PAM type: YTN; PAM sequence: CTG
  source 1..20: mol_type = other DNA
ctccctaactctgaggcaga

SEQ ID NO: 56277 - DNA, 20 bp, synthetic construct
  misc_feature 1..20: note = Description of Artificial Sequence: Synthetic oligonucleotide
  misc_feature 1..20: note = Target: SCN10A; (-) strand; PAM type: YTN; PAM sequence: CTA
  source 1..20: mol_type = other DNA
ccctgctccctaactctgag

SEQ ID NO: 56278 - DNA, 20 bp, synthetic construct
  misc_feature 1..20: note = Description of Artificial Sequence: Synthetic oligonucleotide
  misc_feature 1..20: note = Target: SCN10A; (-) strand; PAM type: YTN; PAM sequence: TTC
  source 1..20: mol_type = other DNA
taccctgctccctaactctg

SEQ ID NO: 56279 - DNA, 20 bp, synthetic construct
  misc_feature 1..20: note = Description of Artificial Sequence: Synthetic oligonucleotide
  misc_feature 1..20: note = Target: SCN10A; (-) strand; PAM type: YTN; PAM sequence: TTC
  source 1..20: mol_type = other DNA
agtaaaaaagagttctaccc

SEQ ID NO: 56280 - DNA, 20 bp, synthetic construct
  misc_feature 1..20: note = Description of Artificial Sequence: Synthetic oligonucleotide
  misc_feature 1..20: note = Target: SCN10A; (-) strand; PAM type: YTN; PAM sequence: CTT
  source 1..20: mol_type = other DNA
cagtaaaaaagagttctacc

SEQ ID NO: 56281 - DNA, 20 bp, synthetic construct
  misc_feature 1..20: note = Description of Artificial Sequence: Synthetic oligonucleotide
  misc_feature 1..20: note = Target: SCN10A; (-) strand; PAM type: YTN; PAM sequence: TTA
  source 1..20: mol_type = other DNA
gaaggcttcagtaaaaaaga

SEQ ID NO: 56282 - DNA, 20 bp, synthetic construct
  misc_feature 1..20: note = Description of Artificial Sequence: Synthetic oligonucleotide
  misc_feature 1..20: note = Target: SCN10A; (-) strand; PAM type: YTN; PAM sequence: CTT
  source 1..20: mol_type = other DNA
agaaggcttcagtaaaaaag

SEQ ID NO: 56283 - DNA, 20 bp, synthetic construct
  misc_feature 1..20: note = Description of Artificial Sequence: Synthetic oligonucleotide
  misc_feature 1..20: note = Target: SCN10A; (-) strand; PAM type: YTN; PAM sequence: TTC
  source 1..20: mol_type = other DNA
ttagaaggcttcagtaaaaa

SEQ ID NO: 56284 - DNA, 20 bp, synthetic construct
  misc_feature 1..20: note = Description of Artificial Sequence: Synthetic oligonucleotide
  misc_feature 1..20: note = Target: SCN10A; (-) strand; PAM type: YTN; PAM sequence: TTT
  source 1..20: mol_type = other DNA
cttagaaggcttcagtaaaa

SEQ ID NO: 56285 - DNA, 20 bp, synthetic construct
  misc_feature 1..20: note = Description of Artificial Sequence: Synthetic oligonucleotide
  misc_feature 1..20: note = Target: SCN10A; (-) strand; PAM type: YTN; PAM sequence: TTT
  source 1..20: mol_type = other DNA
tcttagaaggcttcagtaaa

SEQ ID NO: 56286 - DNA, 20 bp, synthetic construct
  misc_feature 1..20: note = Description of Artificial Sequence: Synthetic oligonucleotide
  misc_feature 1..20: note = Target: SCN10A; (-) strand; PAM type: YTN; PAM sequence: CTT
  source 1..20: mol_type = other DNA
ttcttagaaggcttcagtaa

SEQ ID NO: 56287 - DNA, 20 bp, synthetic construct
  misc_feature 1..20: note = Description of Artificial Sequence: Synthetic oligonucleotide
  misc_feature 1..20: note = Target: SCN10A; (-) strand; PAM type: YTN; PAM sequence: CTG
  source 1..20: mol_type = other DNA
acaaatggtaaccagccttt

SEQ ID NO: 56288 - DNA, 20 bp, synthetic construct
  misc_feature 1..20: note = Description of Artificial Sequence: Synthetic oligonucleotide
  misc_feature 1..20: note = Target: SCN10A; (-) strand; PAM type: YTN; PAM sequence: TTG
  source 1..20: mol_type = other DNA
cctgacaaatggtaaccagc

SEQ ID NO: 56289 - DNA, 20 bp, synthetic construct
  misc_feature 1..20: note = Description of Artificial Sequence: Synthetic oligonucleotide
  misc_feature 1..20: note = Target: SCN10A; (-) strand; PAM type: YTN; PAM sequence: CTC
  source 1..20: mol_type = other DNA
agttgcctgacaaatggtaa

SEQ ID NO: 56290 - DNA, 20 bp, synthetic construct
  misc_feature 1..20: note = Description of Artificial Sequence: Synthetic oligonucleotide
  misc_feature 1..20: note = Target: SCN10A; (-) strand; PAM type: YTN; PAM sequence: CTG
  source 1..20: mol_type = other DNA
cctcagttgcctgacaaatg

SEQ ID NO: 56291 - DNA, 20 bp, synthetic construct
  misc_feature 1..20: note = Description of Artificial Sequence: Synthetic oligonucleotide
  misc_feature 1..20: note = Target: SCN10A; (-) strand; PAM type: YTN; PAM sequence: TTG
  source 1..20: mol_type = other DNA
atgtacaagaatacacctgc

SEQ ID NO: 56292 - DNA, 20 bp, synthetic construct
  misc_feature 1..20: note = Description of Artificial Sequence: Synthetic oligonucleotide
  misc_feature 1..20: note = Target: SCN10A; (-) strand; PAM type: YTN; PAM sequence: TTG
  source 1..20: mol_type = other DNA
caggaggttgatgtacaaga

SEQ ID NO: 56293 - DNA, 20 bp, synthetic construct
  misc_feature 1..20: note = Description of Artificial Sequence: Synthetic oligonucleotide
  misc_feature 1..20: note = Target: SCN10A; (-) strand; PAM type: YTN; PAM sequence: CTT
  source 1..20: mol_type = other DNA
gcaggaggttgatgtacaag

SEQ ID NO: 56294 - DNA, 20 bp, synthetic construct
  misc_feature 1..20: note = Description of Artificial Sequence: Synthetic oligonucleotide
  misc_feature 1..20: note = Target: SCN10A; (-) strand; PAM type: YTN; PAM sequence: CTG
  source 1..20: mol_type = other DNA
gcttgcaggaggttgatgta

SEQ ID NO: 56295 - DNA, 20 bp, synthetic construct
  misc_feature 1..20: note = Description of Artificial Sequence: Synthetic oligonucleotide
  misc_feature 1..20: note = Target: SCN10A; (-) strand; PAM type: YTN; PAM sequence: TTA
  source 1..20: mol_type = other DNA
gccctggcttgcaggaggtt

SEQ ID NO: 56296 - DNA, 20 bp, synthetic construct
  misc_feature 1..20: note = Description of Artificial Sequence: Synthetic oligonucleotide
  misc_feature 1..20: note = Target: SCN10A; (-) strand; PAM type: YTN; PAM sequence: TTT
  source 1..20: mol_type = other DNA
agccctggcttgcaggaggt

SEQ ID NO: 56297 - DNA, 20 bp, synthetic construct
  misc_feature 1..20: note = Description of Artificial Sequence: Synthetic oligonucleotide
  misc_feature 1..20: note = Target: SCN10A; (-) strand; PAM type: YTN; PAM sequence: TTA
  source 1..20: mol_type = other DNA
tgacaaatttagccctggct

SEQ ID NO: 56298 - DNA, 20 bp, synthetic construct
  misc_feature 1..20: note = Description of Artificial Sequence: Synthetic oligonucleotide
  misc_feature 1..20: note = Target: SCN10A; (-) strand; PAM type: YTN; PAM sequence: TTT
  source 1..20: mol_type = other DNA
atgacaaatttagccctggc

SEQ ID NO: 56299 - DNA, 20 bp, synthetic construct
  misc_feature 1..20: note = Description of Artificial Sequence: Synthetic oligonucleotide
  misc_feature 1..20: note = Target: SCN10A; (-) strand; PAM type: YTN; PAM sequence: CTT
  source 1..20: mol_type = other DNA
tatgacaaatttagccctgg

SEQ ID NO: 56300 - DNA, 20 bp, synthetic construct
  misc_feature 1..20: note = Description of Artificial Sequence: Synthetic oligonucleotide
  misc_feature 1..20: note = Target: SCN10A; (-) strand; PAM type: YTN; PAM sequence: TTC
  source 1..20: mol_type = other DNA
tttatgacaaatttagccct

SEQ ID NO: 56301 - DNA, 20 bp, synthetic construct
  misc_feature 1..20: note = Description of Artificial Sequence: Synthetic oligonucleotide
  misc_feature 1..20: note = Target: SCN10A; (-) strand; PAM type: YTN; PAM sequence: TTG
  source 1..20: mol_type = other DNA
gaagttctttatgacaaatt

SEQ ID NO: 56302 - DNA, 20 bp, synthetic construct
  misc_feature 1..20: note = Description of Artificial Sequence: Synthetic oligonucleotide
  misc_feature 1..20: note = Target: SCN10A; (-) strand; PAM type: YTN; PAM sequence: TTG
  source 1..20: mol_type = other DNA
gtcatcggaaggattggaag

SEQ ID NO: 56303 - DNA, 20 bp, synthetic construct
  misc_feature 1..20: note = Description of Artificial Sequence: Synthetic oligonucleotide
  misc_feature 1..20: note = Target: SCN10A; (-) strand; PAM type: YTN; PAM sequence: CTT
  source 1..20: mol_type = other DNA
ggtcatcggaaggattggaa

SEQ ID NO: 56304 - DNA, 20 bp, synthetic construct
  misc_feature 1..20: note = Description of Artificial Sequence: Synthetic oligonucleotide
  misc_feature 1..20: note = Target: SCN10A; (-) strand; PAM type: YTN; PAM sequence: CTA
  source 1..20: mol_type = other DNA
agatccttggtcatcggaag

SEQ ID NO: 56305 - DNA, 20 bp, synthetic construct
  misc_feature 1..20: note = Description of Artificial Sequence: Synthetic oligonucleotide
  misc_feature 1..20: note = Target: SCN10A; (-) strand; PAM type: YTN; PAM sequence: CTA
  source 1..20: mol_type = other DNA
atgacctaagatccttggtc

SEQ ID NO: 56306 - DNA, 20 bp, synthetic construct
  misc_feature 1..20: note = Description of Artificial Sequence: Synthetic oligonucleotide
  misc_feature 1..20: note = Target: SCN10A; (-) strand; PAM type: YTN; PAM sequence: CTA
  source 1..20: mol_type = other DNA
atggaaagatcctaatgacc

SEQ ID NO: 56307 - DNA, 20 bp, synthetic construct
  misc_feature 1..20: note = Description of Artificial Sequence: Synthetic oligonucleotide
  misc_feature 1..20: note = Target: SCN10A; (-) strand; PAM type: YTN; PAM sequence: CTG
  source 1..20: mol_type = other DNA
ggtgatcctaatggaaagat

SEQ ID NO: 56308 - DNA, 20 bp, synthetic construct
  misc_feature 1..20: note = Description of Artificial Sequence: Synthetic oligonucleotide
  misc_feature 1..20: note = Target: SCN10A; (-) strand; PAM type: YTN; PAM sequence: TTC
  source 1..20: mol_type = other DNA
ctgggtgatcctaatggaaa

SEQ ID NO: 56309 - DNA, 20 bp, synthetic construct
  misc_feature 1..20: note = Description of Artificial Sequence: Synthetic oligonucleotide
  misc_feature 1..20: note = Target: SCN10A; (-) strand; PAM type: YTN; PAM sequence: CTT
  source 1..20: mol_type = other DNA
cctgggtgatcctaatggaa

SEQ ID NO: 56310 - DNA, 20 bp, synthetic construct
  misc_feature 1..20: note = Description of Artificial Sequence: Synthetic oligonucleotide
  misc_feature 1..20: note = Target: SCN10A; (-) strand; PAM type: YTN; PAM sequence: CTA
  source 1..20: mol_type = other DNA
agatcttcctgggtgatcct

SEQ ID NO: 56311 - DNA, 20 bp, synthetic construct
  misc_feature 1..20: note = Description of Artificial Sequence: Synthetic oligonucleotide
  misc_feature 1..20: note = Target: SCN10A; (-) strand; PAM type: YTN; PAM sequence: TTC
  source 1..20: mol_type = other DNA
ctaagatcttcctgggtgat

SEQ ID NO: 56312 - DNA, 20 bp, synthetic construct
  misc_feature 1..20: note = Description of Artificial Sequence: Synthetic oligonucleotide
  misc_feature 1..20: note = Target: SCN10A; (-) strand; PAM type: YTN; PAM sequence: TTT
  source 1..20: mol_type = other DNA
cctaagatcttcctgggtga

SEQ ID NO: 56313 - DNA, 20 bp, synthetic construct
  misc_feature 1..20: note = Description of Artificial Sequence: Synthetic oligonucleotide
  misc_feature 1..20: note = Target: SCN10A; (-) strand; PAM type: YTN; PAM sequence: TTG
  source 1..20: mol_type = other DNA
gtttcctaagatcttcctgg

SEQ ID NO: 56314 - DNA, 20 bp, synthetic construct
  misc_feature 1..20: note = Description of Artificial Sequence: Synthetic oligonucleotide
  misc_feature 1..20: note = Target: SCN10A; (-) strand; PAM type: YTN; PAM sequence: TTT
  source 1..20: mol_type = other DNA
ggtttcctaagatcttcctg

SEQ ID NO: 56315 - DNA, 20 bp, synthetic construct
  misc_feature 1..20: note = Description of Artificial Sequence: Synthetic oligonucleotide
  misc_feature 1..20: note = Target: SCN10A; (-) strand; PAM type: YTN; PAM sequence: TTG
  source 1..20: mol_type = other DNA
gtttggtttcctaagatctt

SEQ ID NO: 56316 - DNA, 20 bp, synthetic construct
  misc_feature 1..20: note = Description of Artificial Sequence: Synthetic oligonucleotide
  misc_feature 1..20: note = Target: SCN10A; (-) strand; PAM type: YTN; PAM sequence: TTT
  source 1..20: mol_type = other DNA
ggtttggtttcctaagatct

SEQ ID NO: 56317 - DNA, 20 bp, synthetic construct
  misc_feature 1..20: note = Description of Artificial Sequence: Synthetic oligonucleotide
  misc_feature 1..20: note = Target: SCN10A; (-) strand; PAM type: YTN; PAM sequence: CTT
  source 1..20: mol_type = other DNA
tggtttggtttcctaagatc

SEQ ID NO: 56318 - DNA, 20 bp, synthetic construct
  misc_feature 1..20: note = Description of Artificial Sequence: Synthetic oligonucleotide
  misc_feature 1..20: note = Target: SCN10A; (-) strand; PAM type: YTN; PAM sequence: CTA
  source 1..20: mol_type = other DNA
gtagaaaaaagatactttgg

SEQ ID NO: 56319 - DNA, 20 bp, synthetic construct
  misc_feature 1..20: note = Description of Artificial Sequence: Synthetic oligonucleotide
  misc_feature 1..20: note = Target: SCN10A; (-) strand; PAM type: YTN; PAM sequence: TTG
  source 1..20: mol_type = other DNA
caaggcaagccaaactagta

SEQ ID NO: 56320 - DNA, 20 bp, synthetic construct
  misc_feature 1..20: note = Description of Artificial Sequence: Synthetic oligonucleotide
  misc_feature 1..20: note = Target: SCN10A; (-) strand; PAM type: YTN; PAM sequence: TTT
  source 1..20: mol_type = other DNA
gcaaggcaagccaaactagt

SEQ ID NO: 56321 - DNA, 20 bp, synthetic construct
  misc_feature 1..20: note = Description of Artificial Sequence: Synthetic oligonucleotide
  misc_feature 1..20: note = Target: SCN10A; (-) strand; PAM type: YTN; PAM sequence: TTT
  source 1..20: mol_type = other DNA
tgcaaggcaagccaaactag

SEQ ID NO: 56322 - DNA, 20 bp, synthetic construct
  misc_feature 1..20: note = Description of Artificial Sequence: Synthetic oligonucleotide
  misc_feature 1..20: note = Target: SCN10A; (-) strand; PAM type: YTN; PAM sequence: TTC
  source 1..20: mol_type = other DNA
aggggattttgcaaggcaag

SEQ ID NO: 56323 - DNA, 20 bp, synthetic construct
  misc_feature 1..20: note = Description of Artificial Sequence: Synthetic oligonucleotide
  misc_feature 1..20: note = Target: SCN10A; (-) strand; PAM type: YTN; PAM sequence: TTT
  source 1..20: mol_type = other DNA
caggggattttgcaaggcaa

SEQ ID NO: 56324 - DNA, 20 bp, synthetic construct
  misc_feature 1..20: note = Description of Artificial Sequence: Synthetic oligonucleotide
  misc_feature 1..20: note = Target: SCN10A; (-) strand; PAM type: YTN; PAM sequence: CTT
  source 1..20: mol_type = other DNA
tcaggggattttgcaaggca

SEQ ID NO: 56325 - DNA, 20 bp, synthetic construct
  misc_feature 1..20: note = Description of Artificial Sequence: Synthetic oligonucleotide
  misc_feature 1..20: note = Target: SCN10A; (-) strand; PAM type: YTN; PAM sequence: CTG
  source 1..20: mol_type = other DNA
ctttcaggggattttgcaag

SEQ ID NO: 56326 - DNA, 20 bp, synthetic construct
  misc_feature 1..20: note = Description of Artificial Sequence: Synthetic oligonucleotide
  misc_feature 1..20: note = Target: SCN10A; (-) strand; PAM type: YTN; PAM sequence: TTA
  source 1..20: mol_type = other DNA
ggtaatgtcagaagctgctt

SEQ ID NO: 56327 - DNA, 20 bp, synthetic construct
  misc_feature 1..20: note = Description of Artificial Sequence: Synthetic oligonucleotide
  misc_feature 1..20: note = Target: SCN10A; (-) strand; PAM type: YTN; PAM sequence: TTT
  source 1..20: mol_type = other DNA
aggtaatgtcagaagctgct

SEQ ID NO: 56328 - DNA, 20 bp, synthetic construct
  misc_feature 1..20: note = Description of Artificial Sequence: Synthetic oligonucleotide
  misc_feature 1..20: note = Target: SCN10A; (-) strand; PAM type: YTN; PAM sequence: TTT
  source 1..20: mol_type = other DNA
taggtaatgtcagaagctgc

SEQ ID NO: 56329 - DNA, 20 bp, synthetic construct
  misc_feature 1..20: note = Description of Artificial Sequence: Synthetic oligonucleotide
  misc_feature 1..20: note = Target: SCN10A; (-) strand; PAM type: YTN; PAM sequence: TTG
  source 1..20: mol_type = other DNA
ttttaggtaatgtcagaagc

SEQ ID NO: 56330 - DNA, 20 bp, synthetic construct
  misc_feature 1..20: note = Description of Artificial Sequence: Synthetic oligonucleotide
  misc_feature 1..20: note = Target: SCN10A; (-) strand; PAM type: YTN; PAM sequence: CTA
  source 1..20: mol_type = other DNA
tatgaattgttttaggtaat

SEQ ID NO: 56331 - DNA, 20 bp, synthetic construct
  misc_feature 1..20: note = Description of Artificial Sequence: Synthetic oligonucleotide
  misc_feature 1..20: note = Target: SCN10A; (-) strand; PAM type: YTN; PAM sequence: CTA
  source 1..20: mol_type = other DNA
ctatatgaattgttttaggt

SEQ ID NO: 56332 - DNA, 20 bp, synthetic construct
  misc_feature 1..20: note = Description of Artificial Sequence: Synthetic oligonucleotide
  misc_feature 1..20: note = Target: SCN10A; (-) strand; PAM type: YTN; PAM sequence: TTG
  source 1..20: mol_type = other DNA
gtcaaatgtctactatatga

SEQ ID NO: 56333 - DNA, 20 bp, synthetic construct
  misc_feature 1..20: note = Description of Artificial Sequence: Synthetic oligonucleotide
  misc_feature 1..20: note = Target: SCN10A; (-) strand; PAM type: YTN; PAM sequence: TTA
  source 1..20: mol_type = other DNA
gagacacattggtcaaatgt

SEQ ID NO: 56334 - DNA, 20 bp, synthetic construct
  misc_feature 1..20: note = Description of Artificial Sequence: Synthetic oligonucleotide
  misc_feature 1..20: note = Target: SCN10A; (-) strand; PAM type: YTN; PAM sequence: CTG
  source 1..20: mol_type = other DNA
taatgattagagacacattg

SEQ ID NO: 56335 - DNA, 20 bp, synthetic construct
  misc_feature 1..20: note = Description of Artificial Sequence: Synthetic oligonucleotide
  misc_feature 1..20: note = Target: SCN10A; (-) strand; PAM type: YTN; PAM sequence: TTC
  source 1..20: mol_type = other DNA
atgccatacaagactgtaat

SEQ ID NO: 56336 - DNA, 20 bp, synthetic construct
  misc_feature 1..20: note = Description of Artificial Sequence: Synthetic oligonucleotide
  misc_feature 1..20: note = Target: SCN10A; (-) strand; PAM type: YTN; PAM sequence: CTG
  source 1..20: mol_type = other DNA
atgttcatgccatacaagac

SEQ ID NO: 56337 - DNA, 20 bp, synthetic construct
  misc_feature 1..20: note = Description of Artificial Sequence: Synthetic oligonucleotide
  misc_feature 1..20: note = Target: SCN10A; (-) strand; PAM type: YTN; PAM sequence: TTA
  source 1..20: mol_type = other DNA
aaatgtcaataatctgatgt

SEQ ID NO: 56338 - DNA, 20 bp, synthetic construct
  misc_feature 1..20: note = Description of Artificial Sequence: Synthetic oligonucleotide
  misc_feature 1..20: note = Target: SCN10A; (-) strand; PAM type: YTN; PAM sequence: TTT
  source 1..20: mol_type = other DNA
aaaatgtcaataatctgatg

SEQ ID NO: 56339 - DNA, 20 bp, synthetic construct
  misc_feature 1..20: note = Description of Artificial Sequence: Synthetic oligonucleotide
  misc_feature 1..20: note = Target: SCN10A; (-) strand; PAM type: YTN; PAM sequence: CTA
  source 1..20: mol_type = other DNA
gcaggtttaaaatgtcaata

SEQ ID NO: 56340 - DNA, 20 bp, synthetic construct
  misc_feature 1..20: note = Description of Artificial Sequence: Synthetic oligonucleotide
  misc_feature 1..20: note = Target: SCN10A; (-) strand; PAM type: YTN; PAM sequence: CTA
  source 1..20: mol_type = other DNA
ctagcaggtttaaaatgtca

SEQ ID NO: 56341 - DNA, 20 bp, synthetic construct
  misc_feature 1..20: note = Description of Artificial Sequence: Synthetic oligonucleotide
  misc_feature 1..20: note = Target: SCN10A; (-) strand; PAM type: YTN; PAM sequence: CTC
  source 1..20: mol_type = other DNA
aaaaactactagcaggttta

SEQ ID NO: 56342 - DNA, 20 bp, synthetic construct
  misc_feature 1..20: note = Description of Artificial Sequence: Synthetic oligonucleotide
  misc_feature 1..20: note = Target: SCN10A; (-) strand; PAM type: YTN; PAM sequence: TTA
  source 1..20: mol_type = other DNA
ctcaaaaactactagcaggt

SEQ ID NO: 56343 - DNA, 20 bp, synthetic construct
  misc_feature 1..20: note = Description of Artificial Sequence: Synthetic oligonucleotide
  misc_feature 1..20: note = Target: SCN10A; (-) strand; PAM type: YTN; PAM sequence: TTA
  source 1..20: mol_type = other DNA
acatcacaaattactcaaaa

SEQ ID NO: 56344 - DNA, 20 bp, synthetic construct
  misc_feature 1..20: note = Description of Artificial Sequence: Synthetic oligonucleotide
  misc_feature 1..20: note = Target: SCN10A; (-) strand; PAM type: YTN; PAM sequence: CTG
  source 1..20: mol_type = other DNA
ttaacatcacaaattactca

SEQ ID NO: 56345 - DNA, 20 bp, synthetic construct
  misc_feature 1..20: note = Description of Artificial Sequence: Synthetic oligonucleotide
  misc_feature 1..20: note = Target: SCN10A; (-) strand; PAM type: YTN; PAM sequence: TTG
  source 1..20: mol_type = other DNA
gtcatggggcactgttaaca

SEQ ID NO: 56346 - DNA, 20 bp, synthetic construct
  misc_feature 1..20: note = Description of Artificial Sequence: Synthetic oligonucleotide
  misc_feature 1..20: note = Target: SCN10A; (-) strand; PAM type: YTN; PAM sequence: CTC
  source 1..20: mol_type = other DNA
attggtcatggggcactgtt

SEQ ID NO: 56347 - DNA, 20 bp, synthetic construct
  misc_feature 1..20: note = Description of Artificial Sequence: Synthetic oligonucleotide
  misc_feature 1..20: note = Target: SCN10A; (-) strand; PAM type: YTN; PAM sequence: CTC
  source 1..20: mol_type = other DNA
aatgggacctcattggtcat

SEQ ID NO: 56348 - DNA, 20 bp, synthetic construct
  misc_feature 1..20: note = Description of Artificial Sequence: Synthetic oligonucleotide
  misc_feature 1..20: note = Target: SCN10A; (-) strand; PAM type: YTN; PAM sequence: CTC
  source 1..20: mol_type = other DNA
ccagagggcaaggaaaacag

SEQ ID NO: 56349 - DNA, 20 bp, synthetic construct
  misc_feature 1..20: note = Description of Artificial Sequence: Synthetic oligonucleotide
  misc_feature 1..20: note = Target: SCN10A; (-) strand; PAM type: YTN; PAM sequence: CTG
  source 1..20: mol_type = other DNA
ggcaaaagagcagcacctcc

SEQ ID NO: 56350 - DNA, 20 bp, synthetic construct
  misc_feature 1..20: note = Description of Artificial Sequence: Synthetic oligonucleotide
  misc_feature 1..20: note = Target: SCN10A; (-) strand; PAM type: YTN; PAM sequence: TTA
  source 1..20: mol_type = other DNA
ctgggcaaaagagcagcacc

SEQ ID NO: 56351 - DNA, 20 bp, synthetic construct
  misc_feature 1..20: note = Description of Artificial Sequence: Synthetic oligonucleotide
  misc_feature 1..20: note = Target: SCN10A; (-) strand; PAM type: YTN; PAM sequence: CTT
  source 1..20: mol_type = other DNA
actgggcaaaagagcagcac

SEQ ID NO: 56352 - DNA, 20 bp, synthetic construct
  misc_feature 1..20: note = Description of Artificial Sequence: Synthetic oligonucleotide
  misc_feature 1..20: note = Target: SCN10A; (-) strand; PAM type: YTN; PAM sequence: CTG
  source 1..20: mol_type = other DNA
cttactgggcaaaagagcag

SEQ ID NO: 56353 - DNA, 20 bp, synthetic construct
  misc_feature 1..20: note = Description of Artificial Sequence: Synthetic oligonucleotide
  misc_feature 1..20: note = Target: SCN10A; (-) strand; PAM type: YTN; PAM sequence: CTG
  source 1..20: mol_type = other DNA
agaagtggctgcttactggg

SEQ ID NO: 56354 - DNA, 20 bp, synthetic construct
  misc_feature 1..20: note = Description of Artificial Sequence: Synthetic oligonucleotide
  misc_feature 1..20: note = Target: SCN10A; (-) strand; PAM type: YTN; PAM sequence: CTG
  source 1..20: mol_type = other DNA
tgccatagccatgctgagaa

SEQ ID NO: 56355 - DNA, 20 bp, synthetic construct
  misc_feature 1..20: note = Description of Artificial Sequence: Synthetic oligonucleotide
  misc_feature 1..20: note = Target: SCN10A; (-) strand; PAM type: YTN; PAM sequence: CTC
  source 1..20: mol_type = other DNA
tgtgccatagccatgctgag

SEQ ID NO: 56356 - DNA, 20 bp, synthetic construct
  misc_feature 1..20: note = Description of Artificial Sequence: Synthetic oligonucleotide
  misc_feature 1..20: note = Target: SCN10A; (-) strand; PAM type: YTN; PAM sequence: TTG
  source 1..20: mol_type = other DNA
ctctgtgccatagccatgct

SEQ ID NO: 56357 - DNA, 20 bp, synthetic construct
  misc_feature 1..20: note = Description of Artificial Sequence: Synthetic oligonucleotide
  misc_feature 1..20: note = Target: SCN10A; (-) strand; PAM type: YTN; PAM sequence: TTG
  source 1..20: mol_type = other DNA
ttgctctgtgccatagccat

SEQ ID NO: 56358 - DNA, 20 bp, synthetic construct
  misc_feature 1..20: note = Description of Artificial Sequence: Synthetic oligonucleotide
  misc_feature 1..20: note = Target: SCN10A; (-) strand; PAM type: YTN; PAM sequence: TTG
  source 1..20: mol_type = other DNA
ggcagatgagataggcatga

SEQ ID NO: 56359 - DNA, 20 bp, synthetic construct
  misc_feature 1..20: note = Description of Artificial Sequence: Synthetic oligonucleotide
  misc_feature 1..20: note = Target: SCN10A; (-) strand; PAM type: YTN; PAM sequence: TTT
  source 1..20: mol_type = other DNA
gggcagatgagataggcatg

SEQ ID NO: 56360 - DNA, 20 bp, synthetic construct
  misc_feature 1..20: note = Description of Artificial Sequence: Synthetic oligonucleotide
  misc_feature 1..20: note = Target: SCN10A; (-) strand; PAM type: YTN; PAM sequence: CTT
  source 1..20: mol_type = other DNA
tgggcagatgagataggcat

SEQ ID NO: 56361 - DNA, 20 bp, synthetic construct
  misc_feature 1..20: note = Description of Artificial Sequence: Synthetic oligonucleotide
  misc_feature 1..20: note = Target: SCN10A; (-) strand; PAM type: YTN; PAM sequence: TTC
  source 1..20: mol_type = other DNA
tttgggcagatgagataggc

SEQ ID NO: 56362 - DNA, 20 bp, synthetic construct
  misc_feature 1..20: note = Description of Artificial Sequence: Synthetic oligonucleotide
  misc_feature 1..20: note = Target: SCN10A; (-) strand; PAM type: YTN; PAM sequence: CTT
  source 1..20: mol_type = other DNA
ctttgggcagatgagatagg

SEQ ID NO: 56363 - DNA, 20 bp, synthetic construct
  misc_feature 1..20: note = Description of Artificial Sequence: Synthetic oligonucleotide
  misc_feature 1..20: note = Target: SCN10A; (-) strand; PAM type: YTN; PAM sequence: TTC
  source 1..20: mol_type = other DNA
cccacaacacaacaggcagt

SEQ ID NO: 56364 - DNA, 20 bp, synthetic construct
  misc_feature 1..20: note = Description of Artificial Sequence: Synthetic oligonucleotide
  misc_feature 1..20: note = Target: SCN10A; (-) strand; PAM type: YTN; PAM sequence: TTT
  source 1..20: mol_type = other DNA
ccccacaacacaacaggcag

SEQ ID NO: 56365 - DNA, 20 bp, synthetic construct
  misc_feature 1..20: note = Description of Artificial Sequence: Synthetic oligonucleotide
  misc_feature 1..20: note = Target: SCN10A; (-) strand; PAM type: YTN; PAM sequence: CTT
  source 1..20: mol_type = other DNA
tccccacaacacaacaggca

SEQ ID NO: 56366 - DNA, 20 bp, synthetic construct
  misc_feature 1..20: note = Description of Artificial Sequence: Synthetic oligonucleotide
  misc_feature 1..20: note = Target: SCN10A; (-) strand; PAM type: YTN; PAM sequence: CTC
  source 1..20: mol_type = other DNA
accacggtgtgtggtccgct

SEQ ID NO: 56367 - DNA, 20 bp, synthetic construct
  misc_feature 1..20: note = Description of Artificial Sequence: Synthetic oligonucleotide
  misc_feature 1..20: note = Target: SCN10A; (-) strand; PAM type: YTN; PAM sequence: TTC
  source 1..20: mol_type = other DNA
tcaccacggtgtgtggtccg

SEQ ID NO: 56368 - DNA, 20 bp, synthetic construct
  misc_feature 1..20: note = Description of Artificial Sequence: Synthetic oligonucleotide
  misc_feature 1..20: note = Target: SCN10A; (-) strand; PAM type: YTN; PAM sequence: CTG
  source 1..20: mol_type = other DNA
atgcccccagacacattctc

SEQ ID NO: 56369 - DNA, 20 bp, synthetic construct
  misc_feature 1..20: note = Description of Artificial Sequence: Synthetic oligonucleotide
  misc_feature 1..20: note = Target: SCN10A; (-) strand; PAM type: YTN; PAM sequence: TTG
  source 1..20: mol_type = other DNA
ctgatgcccccagacacatt

SEQ ID NO: 56370 - DNA, 20 bp, synthetic construct
  misc_feature 1..20: note = Description of Artificial Sequence: Synthetic oligonucleotide
  misc_feature 1..20: note = Target: SCN10A; (-) strand; PAM type: YTN; PAM sequence: TTT
  source 1..20: mol_type = other DNA
gctgatgcccccagacacat

SEQ ID NO: 56371 - DNA, 20 bp, synthetic construct
  misc_feature 1..20: note = Description of Artificial Sequence: Synthetic oligonucleotide
  misc_feature 1..20: note = Target: SCN10A; (-) strand; PAM type: YTN; PAM sequence: TTA
  source 1..20: mol_type = other DNA
tgaggggaggtttgctgatg

SEQ ID NO: 56372 - DNA, 20 bp, synthetic construct
  misc_feature 1..20: note = Description of Artificial Sequence: Synthetic oligonucleotide
  misc_feature 1..20: note = Target: SCN10A; (-) strand; PAM type: YTN; PAM sequence: TTT
  source 1..20: mol_type = other DNA
atgaggggaggtttgctgat

SEQ ID NO: 56373 - DNA, 20 bp, synthetic construct
  misc_feature 1..20: note = Description of Artificial Sequence: Synthetic oligonucleotide
  misc_feature 1..20: note = Target: SCN10A; (-) strand; PAM type: YTN; PAM sequence: CTT
  source 1..20: mol_type = other DNA
tatgaggggaggtttgctga

SEQ ID NO: 56374 - DNA, 20 bp, synthetic construct
  misc_feature 1..20: note = Description of Artificial Sequence: Synthetic oligonucleotide
  misc_feature 1..20: note = Target: SCN10A; (-) strand; PAM type: YTN; PAM sequence: CTC
  source 1..20: mol_type = other DNA
tttatgaggggaggtttgct

SEQ ID NO: 56375 - DNA, 20 bp, synthetic construct
  misc_feature 1..20: note = Description of Artificial Sequence: Synthetic oligonucleotide
  misc_feature 1..20: note = Target: SCN10A; (-) strand; PAM type: YTN; PAM sequence: TTG
  source 1..20: mol_type = other DNA
aaaaacatcctctttatgag

SEQ ID NO: 56376 - DNA, 20 bp, synthetic construct
  misc_feature 1..20: note = Description of Artificial Sequence: Synthetic oligonucleotide
  misc_feature 1..20: note = Target: SCN10A; (-) strand; PAM type: YTN; PAM sequence: CTT
  source 1..20: mol_type = other DNA
gaaaaacatcctctttatga

SEQ ID NO: 56377 - DNA, 20 bp, synthetic construct
  misc_feature 1..20: note = Description of Artificial Sequence: Synthetic oligonucleotide
  misc_feature 1..20: note = Target: SCN10A; (-) strand; PAM type: YTN; PAM sequence: CTG
  source 1..20: mol_type = other DNA
tggatgcacaacttgaaaaa

SEQ ID NO: 56378 - DNA, 20 bp, synthetic construct
  misc_feature 1..20: note = Description of Artificial Sequence: Synthetic oligonucleotide
  misc_feature 1..20: note = Target: SCN10A; (-) strand; PAM type: YTN; PAM sequence: CTA
  source 1..20: mol_type = other DNA
gacacacctgtggatgcaca

SEQ ID NO: 56379 - DNA, 20 bp, synthetic construct
  misc_feature 1..20: note = Description of Artificial Sequence: Synthetic oligonucleotide
  misc_feature 1..20: note = Target: SCN10A; (-) strand; PAM type: YTN; PAM sequence: CTA
  source 1..20: mol_type = other DNA
atctagacacacctgtggat

SEQ ID NO: 56380 - DNA, 20 bp, synthetic construct
  misc_feature 1..20: note = Description of Artificial Sequence: Synthetic oligonucleotide
  misc_feature 1..20: note = Target: SCN10A; (-) strand; PAM type: YTN; PAM sequence: CTC
  source 1..20: mol_type = other DNA
agactaatctagacacacct

SEQ ID NO: 56381 - DNA, 20 bp, synthetic construct
  misc_feature 1..20: note = Description of Artificial Sequence: Synthetic oligonucleotide
  misc_feature 1..20: note = Target: SCN10A; (-) strand; PAM type: YTN; PAM sequence: TTC
  source 1..20: mol_type = other DNA
acctcagactaatctagaca

SEQ ID NO: 56382 - DNA, 20 bp, synthetic construct
  misc_feature 1..20: note = Description of Artificial Sequence: Synthetic oligonucleotide
  misc_feature 1..20: note = Target: SCN10A; (-) strand; PAM type: YTN; PAM sequence: TTG
  source 1..20: mol_type = other DNA
gattcacctcagactaatct

SEQ ID NO: 56383 - DNA, 20 bp, synthetic construct
  misc_feature 1..20: note = Description of Artificial Sequence: Synthetic oligonucleotide
  misc_feature 1..20: note = Target: SCN10A; (-) strand; PAM type: YTN; PAM sequence: TTT
  source 1..20: mol_type = other DNA
ggattcacctcagactaatc

SEQ ID NO: 56384 - DNA, 20 bp, synthetic construct
  misc_feature 1..20: note = Description of Artificial Sequence: Synthetic oligonucleotide
  misc_feature 1..20: note = Target: SCN10A; (-) strand; PAM type: YTN; PAM sequence: TTA
  source 1..20: mol_type = other DNA
tgcaacacacaggtggtttg

SEQ ID NO: 56385 - DNA, 20 bp, synthetic construct
  misc_feature 1..20: note = Description of Artificial Sequence: Synthetic oligonucleotide
  misc_feature 1..20: note = Target: SCN10A; (-) strand; PAM type: YTN; PAM sequence: TTT
  source 1..20: mol_type = other DNA
atgcaacacacaggtggttt

SEQ ID NO: 56386 - DNA, 20 bp, synthetic construct
  misc_feature 1..20: note = Description of Artificial Sequence: Synthetic oligonucleotide
  misc_feature 1..20: note = Target: SCN10A; (-) strand; PAM type: YTN; PAM sequence: TTA
  source 1..20: mol_type = other DNA
atgtgtcccacaccccaaag

SEQ ID NO: 56387 - DNA, 20 bp, synthetic construct
  misc_feature 1..20: note = Description of Artificial Sequence: Synthetic oligonucleotide
  misc_feature 1..20: note = Target: SCN10A; (-) strand; PAM type: YTN; PAM sequence: TTT
  source 1..20: mol_type = other DNA
aatgtgtcccacaccccaaa

SEQ ID NO: 56388 - DNA, 20 bp, synthetic construct
  misc_feature 1..20: note = Description of Artificial Sequence: Synthetic oligonucleotide
  misc_feature 1..20: note = Target: SCN10A; (-) strand; PAM type: YTN; PAM sequence: CTT
  source 1..20: mol_type = other DNA
taatgtgtcccacaccccaa

SEQ ID NO: 56389 - DNA, 20 bp, synthetic construct
  misc_feature 1..20: note = Description of Artificial Sequence: Synthetic oligonucleotide
  misc_feature 1..20: note = Target: SCN10A; (-) strand; PAM type: YTN; PAM sequence: TTG
  source 1..20: mol_type = other DNA
ggcctttaatgtgtcccaca

SEQ ID NO: 56390 - DNA, 20 bp, synthetic construct
  misc_feature 1..20: note = Description of Artificial Sequence: Synthetic oligonucleotide
  misc_feature 1..20: note = Target: SCN10A; (-) strand; PAM type: YTN; PAM sequence: CTT
  source 1..20: mol_type = other DNA
gggcctttaatgtgtcccac

SEQ ID NO: 56391 - DNA, 20 bp, synthetic construct
  misc_feature 1..20: note = Description of Artificial Sequence: Synthetic oligonucleotide
  misc_feature 1..20: note = Target: SCN10A; (-) strand; PAM type: YTN; PAM sequence: TTG
  source 1..20: mol_type = other DNA
aaaaaatggcttgggccttt

SEQ ID NO: 56392 - DNA, 20 bp, synthetic construct
  misc_feature 1..20: note = Description of Artificial Sequence: Synthetic oligonucleotide
  misc_feature 1..20: note = Target: SCN10A; (-) strand; PAM type: YTN; PAM sequence: TTA
  source 1..20: mol_type = other DNA
gattgaaaaaatggcttggg

SEQ ID NO: 56393 - DNA, 20 bp, synthetic construct
  misc_feature 1..20: note = Description of Artificial Sequence: Synthetic oligonucleotide
  misc_feature 1..20: note = Target: SCN10A; (-) strand; PAM type: YTN; PAM sequence: TTG
  source 1..20: mol_type = other DNA
aatcccaaaagtacaatgag

SEQ ID NO: 56394 - DNA, 20 bp, synthetic construct
  misc_feature 1..20: note = Description of Artificial Sequence: Synthetic oligonucleotide
  misc_feature 1..20: note = Target: SCN10A; (-) strand; PAM type: YTN; PAM sequence: TTA
  source 1..20: mol_type = other DNA
tccaattgaatcccaaaagt

SEQ ID NO: 56395 - DNA, 20 bp, synthetic construct
  misc_feature 1..20: note = Description of Artificial Sequence: Synthetic oligonucleotide
  misc_feature 1..20: note = Target: SCN10A; (-) strand; PAM type: YTN; PAM sequence: CTT
  source 1..20: mol_type = other DNA
atccaattgaatcccaaaag

SEQ ID NO: 56396 - DNA, 20 bp, synthetic construct
  misc_feature 1..20: note = Description of Artificial Sequence: Synthetic oligonucleotide
  misc_feature 1..20: note = Target: SCN10A; (-) strand; PAM type: YTN; PAM sequence: TTA
  source 1..20: mol_type = other DNA
gcaacagagcccttatccaa

SEQ ID NO: 56397 - DNA, 20 bp, synthetic construct
  misc_feature 1..20: note = Description of Artificial Sequence: Synthetic oligonucleotide
  misc_feature 1..20: note = Target: SCN10A; (-) strand; PAM type: YTN; PAM sequence: TTA
  source 1..20: mol_type = other DNA
gaggttagcaacagagccct

SEQ ID NO: 56398 - DNA, 20 bp, synthetic construct
  misc_feature 1..20: note = Description of Artificial Sequence: Synthetic oligonucleotide
  misc_feature 1..20: note = Target: SCN10A; (-) strand; PAM type: YTN; PAM sequence: TTT
  source 1..20: mol_type = other DNA
agaggttagcaacagagccc

SEQ ID NO: 56399 - DNA, 20 bp, synthetic construct
  misc_feature 1..20: note = Description of Artificial Sequence: Synthetic oligonucleotide
  misc_feature 1..20: note = Target: SCN10A; (-) strand; PAM type: YTN; PAM sequence: CTT
  source 1..20: mol_type = other DNA
tagaggttagcaacagagcc

SEQ ID NO: 56400 - DNA, 20 bp, synthetic construct
  misc_feature 1..20: note = Description of Artificial Sequence: Synthetic oligonucleotide
  misc_feature 1..20: note = Target: SCN10A; (-) strand; PAM type: YTN; PAM sequence: TTC
  source 1..20: mol_type = other DNA
tttagaggttagcaacagag

SEQ ID NO: 56401 - DNA, 20 bp, synthetic construct
  misc_feature 1..20: note = Description of Artificial Sequence: Synthetic oligonucleotide
  misc_feature 1..20: note = Target: SCN10A; (-) strand; PAM type: YTN; PAM sequence: CTT
  source 1..20: mol_type = other DNA
ctttagaggttagcaacaga

SEQ ID NO: 56402 - DNA, 20 bp, synthetic construct
  misc_feature 1..20: note = Description of Artificial Sequence: Synthetic oligonucleotide
  misc_feature 1..20: note = Target: SCN10A; (-) strand; PAM type: YTN; PAM sequence: CTG
  source 1..20: mol_type = other DNA
tgtccagtaccttctttaga

SEQ ID NO: 56403 - DNA, 20 bp, synthetic construct
  misc_feature 1..20: note = Description of Artificial Sequence: Synthetic oligonucleotide
  misc_feature 1..20: note = Target: SCN10A; (-) strand; PAM type: YTN; PAM sequence: CTA
  source 1..20: mol_type = other DNA
ctgtgtccagtaccttcttt

SEQ ID NO: 56404 - DNA, 20 bp, synthetic construct
  misc_feature 1..20: note = Description of Artificial Sequence: Synthetic oligonucleotide
  misc_feature 1..20: note = Target: SCN10A; (-) strand; PAM type: YTN; PAM sequence: TTG
  source 1..20: mol_type = other DNA
cctactgtgtccagtacctt

SEQ ID NO: 56405 - DNA, 20 bp, synthetic construct
  misc_feature 1..20: note = Description of Artificial Sequence: Synthetic oligonucleotide
  misc_feature 1..20: note = Target: SCN10A; (-) strand; PAM type: YTN; PAM sequence: CTT
  source 1..20: mol_type = other DNA
gcctactgtgtccagtacct

SEQ ID NO: 56406 - DNA, 20 bp, synthetic construct
  misc_feature 1..20: note = Description of Artificial Sequence: Synthetic oligonucleotide
  misc_feature 1..20: note = Target: SCN10A; (-) strand; PAM type: YTN; PAM sequence: TTA
  source 1..20: mol_type = other DNA
gaccttgcctactgtgtcca

SEQ ID NO: 56407 - DNA, 20 bp, synthetic construct
  misc_feature 1..20: note = Description of Artificial Sequence: Synthetic oligonucleotide
  misc_feature 1..20: note = Target: SCN10A; (-) strand; PAM type: YTN; PAM sequence: TTA
  source 1..20: mol_type = other DNA
caattagaccttgcctactg

SEQ ID NO: 56408 - DNA, 20 bp, synthetic construct
  misc_feature 1..20: note = Description of Artificial Sequence: Synthetic oligonucleotide
  misc_feature 1..20: note = Target: SCN10A; (-) strand; PAM type: YTN; PAM sequence: TTC
  source 1..20: mol_type = other DNA
cacgtgttacaattagacct

SEQ ID NO: 56409 - DNA, 20 bp, synthetic construct
  misc_feature 1..20: note = Description of Artificial Sequence: Synthetic oligonucleotide
  misc_feature 1..20: note = Target: SCN10A; (-) strand; PAM type: YTN; PAM sequence: CTT
  source 1..20: mol_type = other DNA
ccacgtgttacaattagacc

SEQ ID NO: 56410 - DNA, 20 bp, synthetic construct
  misc_feature 1..20: note = Description of Artificial Sequence: Synthetic oligonucleotide
  misc_feature 1..20: note = Target: SCN10A; (-) strand; PAM type: YTN; PAM sequence: CTC
  source 1..20: mol_type = other DNA
ttccacgtgttacaattaga

SEQ ID NO: 56411 - DNA, 20 bp, synthetic construct
  misc_feature 1..20: note = Description of Artificial Sequence: Synthetic oligonucleotide
  misc_feature 1..20: note = Target: SCN10A; (-) strand; PAM type: YTN; PAM sequence: TTG
  source 1..20: mol_type = other DNA
cctcttccacgtgttacaat

SEQ ID NO: 56412 - DNA, 20 bp, synthetic construct
  misc_feature 1..20: note = Description of Artificial Sequence: Synthetic oligonucleotide
  misc_feature 1..20: note = Target: SCN10A; (-) strand; PAM type: YTN; PAM sequence: TTG
  source 1..20: mol_type = other DNA
cacgattgcctcttccacgt

SEQ ID NO: 56413 - DNA, 20 bp, synthetic construct
  misc_feature 1..20: note = Description of Artificial Sequence: Synthetic oligonucleotide
  misc_feature 1..20: note = Target: SCN10A; (-) strand; PAM type: YTN; PAM sequence: TTT
  source 1..20: mol_type = other DNA
gcacgattgcctcttccacg

SEQ ID NO: 56414 - DNA, 20 bp, synthetic construct
  misc_feature 1..20: note = Description of Artificial Sequence: Synthetic oligonucleotide
  misc_feature 1..20: note = Target: SCN10A; (-) strand; PAM type: YTN; PAM sequence: CTT
  source 1..20: mol_type = other DNA
tgcacgattgcctcttccac

SEQ ID NO: 56415 - DNA, 20 bp, synthetic construct
  misc_feature 1..20: note = Description of Artificial Sequence: Synthetic oligonucleotide
  misc_feature 1..20: note = Target: SCN10A; (-) strand; PAM type: YTN; PAM sequence: CTC
  source 1..20: mol_type = other DNA
atatcctttgcacgattgcc

SEQ ID NO: 56416 - DNA, 20 bp, synthetic construct
  misc_feature 1..20: note = Description of Artificial Sequence: Synthetic oligonucleotide
  misc_feature 1..20: note = Target: SCN10A; (-) strand; PAM type: YTN; PAM sequence: CTG
  source 1..20: mol_type = other DNA
tccactcatatcctttgcac

SEQ ID NO: 56417 - DNA, 20 bp, synthetic construct
  misc_feature 1..20: note = Description of Artificial Sequence: Synthetic oligonucleotide
  misc_feature 1..20: note = Target: SCN10A; (-) strand; PAM type: YTN; PAM sequence: CTG
  source 1..20: mol_type = other DNA
atcagaagaacggccatcaa

SEQ ID NO: 56418 - DNA, 20 bp, synthetic construct
  misc_feature 1..20: note = Description of Artificial Sequence: Synthetic oligonucleotide
  misc_feature 1..20: note = Target: SCN10A; (-) strand; PAM type: YTN; PAM sequence: TTC
  source 1..20: mol_type = other DNA
aacctgatcagaagaacggc

SEQ ID NO: 56419 - DNA, 20 bp, synthetic construct
  misc_feature 1..20: note = Description of Artificial Sequence: Synthetic oligonucleotide
  misc_feature 1..20: note = Target: SCN10A; (-) strand; PAM type: YTN; PAM sequence: TTT
  source 1..20: mol_type = other DNA
caacctgatcagaagaacgg

SEQ ID NO: 56420 - DNA, 20 bp, synthetic construct
  misc_feature 1..20: note = Description of Artificial Sequence: Synthetic oligonucleotide
  misc_feature 1..20: note = Target: SCN10A; (-) strand; PAM type: YTN; PAM sequence: CTT
  source 1..20: mol_type = other DNA
tcaacctgatcagaagaacg

SEQ ID NO: 56421 - DNA, 20 bp, synthetic construct
  misc_feature 1..20: note = Description of Artificial Sequence: Synthetic oligonucleotide
  misc_feature 1..20: note = Target: SCN10A; (-) strand; PAM type: YTN; PAM sequence: TTC
  source 1..20: mol_type = other DNA
agtcctttcaacctgatcag

SEQ ID NO: 56422 - DNA, 20 bp, synthetic construct
  misc_feature 1..20: note = Description of Artificial Sequence: Synthetic oligonucleotide
  misc_feature 1..20: note = Target: SCN10A; (-) strand; PAM type: YTN; PAM sequence: CTA
  source 1..20: mol_type = other DNA
ttcagtcctttcaacctgat

SEQ ID NO: 56423 - DNA, 20 bp, synthetic construct
  misc_feature 1..20: note = Description of Artificial Sequence: Synthetic oligonucleotide
  misc_feature 1..20: note = Target: SCN10A; (-) strand; PAM type: YTN; PAM sequence: CTG
  source 1..20: mol_type = other DNA
tggctattcagtcctttcaa

SEQ ID NO: 56424 - DNA, 20 bp, synthetic construct
  misc_feature 1..20: note = Description of Artificial Sequence: Synthetic oligonucleotide
  misc_feature 1..20: note = Target: SCN10A; (-) strand; PAM type: YTN; PAM sequence: CTC
  source 1..20: mol_type = other DNA
gggccctgtggctattcagt

SEQ ID NO: 56425 - DNA, 20 bp, synthetic construct
  misc_feature 1..20: note = Description of Artificial Sequence: Synthetic oligonucleotide
  misc_feature 1..20: note = Target: SCN10A; (-) strand; PAM type: YTN; PAM sequence: TTA
  source 1..20: mol_type = other DNA
gtgccactcgggccctgtgg

SEQ ID NO: 56426 - DNA, 20 bp, synthetic construct
  misc_feature 1..20: note = Description of Artificial Sequence: Synthetic oligonucleotide
  misc_feature 1..20: note = Target: SCN10A; (-) strand; PAM type: YTN; PAM sequence: TTT
  source 1..20: mol_type = other DNA
agtgccactcgggccctgtg

SEQ ID NO: 56427 - DNA, 20 bp, synthetic construct
  misc_feature 1..20: note = Description of Artificial Sequence: Synthetic oligonucleotide
  misc_feature 1..20: note = Target: SCN10A; (-) strand; PAM type: YTN; PAM sequence: TTC
  source 1..20: mol_type = other DNA
ccggtttagtgccactcggg

SEQ ID NO: 56428 - DNA, 20 bp, synthetic construct
  misc_feature 1..20: note = Description of Artificial Sequence: Synthetic oligonucleotide
  misc_feature 1..20: note = Target: SCN10A; (-) strand; PAM type: YTN; PAM sequence: TTT
  source 1..20: mol_type = other DNA
cccggtttagtgccactcgg

SEQ ID NO: 56429 - DNA, 20 bp, synthetic construct
  misc_feature 1..20: note = Description of Artificial Sequence: Synthetic oligonucleotide
  misc_feature 1..20: note = Target: SCN10A; (-) strand; PAM type: YTN; PAM sequence: CTG
  source 1..20: mol_type = other DNA
aacaaagggaggaccatttc

SEQ ID NO: 56430 - DNA, 20 bp, synthetic construct
  misc_feature 1..20: note = Description of Artificial Sequence: Synthetic oligonucleotide
  misc_feature 1..20: note = Target: SCN10A; (-) strand; PAM type: YTN; PAM sequence: TTA
  source 1..20: mol_type = other DNA
tggtgctgaacaaagggagg

SEQ ID NO: 56431 - DNA, 20 bp, synthetic construct
  misc_feature 1..20: note = Description of Artificial Sequence: Synthetic oligonucleotide
  misc_feature 1..20: note = Target: SCN10A; (-) strand; PAM type: YTN; PAM sequence: TTT
  source 1..20: mol_type = other DNA
atggtgctgaacaaagggag

SEQ ID NO: 56432 - DNA, 20 bp, synthetic construct
  misc_feature 1..20: note = Description of Artificial Sequence: Synthetic oligonucleotide
  misc_feature 1..20: note = Target: SCN10A; (-) strand; PAM type: YTN; PAM sequence: TTC
  source 1..20: mol_type = other DNA
agacatttatggtgctgaac

SEQ ID NO: 56433 - DNA, 20 bp, synthetic construct
  misc_feature 1..20: note = Description of Artificial Sequence: Synthetic oligonucleotide
  misc_feature 1..20: note = Target: SCN10A; (-) strand; PAM type: YTN; PAM sequence: TTT
  source 1..20: mol_type = other DNA
cagacatttatggtgctgaa

SEQ ID NO: 56434 - DNA, 20 bp, synthetic construct
  misc_feature 1..20: note = Description of Artificial Sequence: Synthetic oligonucleotide
  misc_feature 1..20: note = Target: SCN10A; (-) strand; PAM type: YTN; PAM sequence: TTG
  source 1..20: mol_type = other DNA
tttcagacatttatggtgct

SEQ ID NO: 56435 - DNA, 20 bp, synthetic construct
  misc_feature 1..20: note = Description of Artificial Sequence: Synthetic oligonucleotide
  misc_feature 1..20: note = Target: SCN10A; (-) strand; PAM type: YTN; PAM sequence: TTT
  source 1..20: mol_type = other DNA
gtttcagacatttatggtgc

SEQ ID NO: 56436 - DNA, 20 bp, synthetic construct
  misc_feature 1..20: note = Description of Artificial Sequence: Synthetic oligonucleotide
  misc_feature 1..20: note = Target: SCN10A; (-) strand; PAM type: YTN; PAM sequence: TTT
  source 1..20: mol_type = other DNA
tgtttcagacatttatggtg

SEQ ID NO: 56437 - DNA, 20 bp, synthetic construct
  misc_feature 1..20: note = Description of Artificial Sequence: Synthetic oligonucleotide
  misc_feature 1..20: note = Target: SCN10A; (-) strand; PAM type: YTN; PAM sequence: TTG
  source 1..20: mol_type = other DNA
ttttgtttcagacatttatg

SEQ ID NO: 56438 - DNA, 20 bp, synthetic construct
  misc_feature 1..20: note = Description of Artificial Sequence: Synthetic oligonucleotide
  misc_feature 1..20: note = Target: SCN10A; (-) strand; PAM type: YTN; PAM sequence: TTT
  source 1..20: mol_type = other DNA
gttttgtttcagacatttat

SEQ ID NO: 56439 - DNA, 20 bp, synthetic construct
  misc_feature 1..20: note = Description of Artificial Sequence: Synthetic oligonucleotide
  misc_feature 1..20: note = Target: SCN10A; (-) strand; PAM type: YTN; PAM sequence: TTT
  source 1..20: mol_type = other DNA
tgttttgtttcagacattta

SEQ ID NO: 56440 - DNA, 20 bp, synthetic construct
  misc_feature 1..20: note = Description of Artificial Sequence: Synthetic oligonucleotide
  misc_feature 1..20: note = Target: SCN10A; (-) strand; PAM type: YTN; PAM sequence: CTG
  source 1..20: mol_type = other DNA
ttttgttttgtttcagacat

SEQ ID NO: 56441 - DNA, 20 bp, synthetic construct
  misc_feature 1..20: note = Description of Artificial Sequence: Synthetic oligonucleotide
  misc_feature 1..20: note = Target: SCN10A; (-) strand; PAM type: YTN; PAM sequence: TTC
  source 1..20: mol_type = other DNA
tgttttgttttgtttcagac

SEQ ID NO: 56442 - DNA, 20 bp, synthetic construct
  misc_feature 1..20: note = Description of Artificial Sequence: Synthetic oligonucleotide
  misc_feature 1..20: note = Target: SCN10A; (-) strand; PAM type: YTN; PAM sequence: TTT
  source 1..20: mol_type = other DNA
ctgttttgttttgtttcaga

SEQ ID NO: 56443 - DNA, 20 bp, synthetic construct
  misc_feature 1..20: note = Description of Artificial Sequence: Synthetic oligonucleotide
  misc_feature 1..20: note = Target: SCN10A; (-) strand; PAM type: YTN; PAM sequence: CTT
  source 1..20: mol_type = other DNA
tctgttttgttttgtttcag

SEQ ID NO: 56444 - DNA, 20 bp, synthetic construct
  misc_feature 1..20: note = Description of Artificial Sequence: Synthetic oligonucleotide
  misc_feature 1..20: note = Target: SCN10A; (-) strand; PAM type: YTN; PAM sequence: TTG
  source 1..20: mol_type = other DNA
gaggtccactttctgttttg

SEQ ID NO: 56445 - DNA, 20 bp, synthetic construct
  misc_feature 1..20: note = Description of Artificial Sequence: Synthetic oligonucleotide
  misc_feature 1..20: note = Target: SCN10A; (-) strand; PAM type: YTN; PAM sequence: CTC
  source 1..20: mol_type = other DNA
attggaggtccactttctgt

SEQ ID NO: 56446 - DNA, 20 bp, synthetic construct
  misc_feature 1..20: note = Description of Artificial Sequence: Synthetic oligonucleotide
  misc_feature 1..20: note = Target: SCN10A; (-) strand; PAM type: YTN; PAM sequence: TTC
  source 1..20: mol_type = other DNA
tcattggaggtccactttct

SEQ ID NO: 56447 - DNA, 20 bp, synthetic construct
  misc_feature 1..20: note = Description of Artificial Sequence: Synthetic oligonucleotide
  misc_feature 1..20: note = Target: SCN10A; (-) strand; PAM type: YTN; PAM sequence: TTT
  source 1..20: mol_type = other DNA
ctcattggaggtccactttc

SEQ ID NO: 56448 - DNA, 20 bp, synthetic construct
  misc_feature 1..20: note = Description of Artificial Sequence: Synthetic oligonucleotide
  misc_feature 1..20: note = Target: SCN10A; (-) strand; PAM type: YTN; PAM sequence: TTG
  source 1..20: mol_type = other DNA
tttctcattggaggtccact

SEQ ID NO: 56449 - DNA, 20 bp, synthetic construct
  misc_feature 1..20: note = Description of Artificial Sequence: Synthetic oligonucleotide
  misc_feature 1..20: note = Target: SCN10A; (-) strand; PAM type: YTN; PAM sequence: CTT
  source 1..20: mol_type = other DNA
gtttctcattggaggtccac

SEQ ID NO: 56450 - DNA, 20 bp, synthetic construct
  misc_feature 1..20: note = Description of Artificial Sequence: Synthetic oligonucleotide
  misc_feature 1..20: note = Target: SCN10A; (-) strand; PAM type: YTN; PAM sequence: TTG
  source 1..20: mol_type = other DNA
tataaggaatcttgtttctc

SEQ ID NO: 56451 - DNA, 20 bp, synthetic construct
  misc_feature 1..20: note = Description of Artificial Sequence: Synthetic oligonucleotide
  misc_feature 1..20: note = Target: SCN10A; (-) strand; PAM type: YTN; PAM sequence: TTA
  source 1..20: mol_type = other DNA
aaaacatggttgtataagga

SEQ ID NO: 56452 - DNA, 20 bp, synthetic construct
  misc_feature 1..20: note = Description of Artificial Sequence: Synthetic oligonucleotide
  misc_feature 1..20: note = Target: SCN10A; (-) strand; PAM type: YTN; PAM sequence: TTT
  source 1..20: mol_type = other DNA
aaaaacatggttgtataagg

SEQ ID NO: 56453 - DNA, 20 bp, synthetic construct
  misc_feature 1..20: note = Description of Artificial Sequence: Synthetic oligonucleotide
  misc_feature 1..20: note = Target: SCN10A; (-) strand; PAM type: YTN; PAM sequence: CTC
  source 1..20: mol_type = other DNA
atgtttaaaaacatggttgt

SEQ ID NO: 56454 - DNA, 20 bp, synthetic construct
  misc_feature 1..20: note = Description of Artificial Sequence: Synthetic oligonucleotide
  misc_feature 1..20: note = Target: SCN10A; (-) strand; PAM type: YTN; PAM sequence: CTC
  source 1..20: mol_type = other DNA
tcatgtttaaaaacatggtt

SEQ ID NO: 56455 - DNA, 20 bp, synthetic construct
  misc_feature 1..20: note = Description of Artificial Sequence: Synthetic oligonucleotide
  misc_feature 1..20: note = Target: SCN10A; (-) strand; PAM type: YTN; PAM sequence: CTG
  source 1..20: mol_type = other DNA
agataatgcctctcatgttt

SEQ ID NO: 56456 - DNA, 20 bp, synthetic construct
  misc_feature 1..20: note = Description of Artificial Sequence: Synthetic oligonucleotide
  misc_feature 1..20: note = Target: SCN10A; (-) strand; PAM type: YTN; PAM sequence: CTC
  source 1..20: mol_type = other DNA
ataagcctgagataatgcct

SEQ ID NO: 56457 - DNA, 20 bp, synthetic construct
  misc_feature 1..20: note = Description of Artificial Sequence: Synthetic oligonucleotide
  misc_feature 1..20: note = Target: SCN10A; (-) strand; PAM type: YTN; PAM sequence: TTG
  source 1..20: mol_type = other DNA
ctcataagcctgagataatg

SEQ ID NO: 56458 - DNA, 20 bp, synthetic construct
  misc_feature 1..20: note = Description of Artificial Sequence: Synthetic oligonucleotide
  misc_feature 1..20: note = Target: SCN10A; (-) strand; PAM type: YTN; PAM sequence: CTT
  source 1..20: mol_type = other DNA
gctcataagcctgagataat

SEQ ID NO: 56459 - DNA, 20 bp, synthetic construct
  misc_feature 1..20: note = Description of Artificial Sequence: Synthetic oligonucleotide
  misc_feature 1..20: note = Target: SCN10A; (-) strand; PAM type: YTN; PAM sequence: TTC
  source 1..20: mol_type = other DNA
ttgctcataagcctgagata

SEQ ID NO: 56460 - DNA, 20 bp, synthetic construct
  misc_feature 1..20: note = Description of Artificial Sequence: Synthetic oligonucleotide
  misc_feature 1..20: note = Target: SCN10A; (-) strand; PAM type: YTN; PAM sequence: CTT
  source 1..20: mol_type = other DNA
cttgctcataagcctgagat

SEQ ID NO: 56461 - DNA, 20 bp, synthetic construct
  misc_feature 1..20: note = Description of Artificial Sequence: Synthetic oligonucleotide
  misc_feature 1..20: note = Target: SCN10A; (-) strand; PAM type: YTN; PAM sequence: TTC
  source 1..20: mol_type = other DNA
ccagagcccttcttgctcat

SEQ ID NO: 56462 - DNA, 20 bp, synthetic construct
  misc_feature 1..20: note = Description of Artificial Sequence: Synthetic oligonucleotide
  misc_feature 1..20: note = Target: SCN10A; (-) strand; PAM type: YTN; PAM sequence: CTG
  source 1..20: mol_type = other DNA
tagttcccagagcccttctt

SEQ ID NO: 56463 - DNA, 20 bp, synthetic construct
  misc_feature 1..20: note = Description of Artificial Sequence: Synthetic oligonucleotide
  misc_feature 1..20: note = Target: SCN10A; (-) strand; PAM type: YTN; PAM sequence: TTG
  source 1..20: mol_type = other DNA
acctgtagttcccagagccc

SEQ ID NO: 56464 - DNA, 20 bp, synthetic construct
  misc_feature 1..20: note = Description of Artificial Sequence: Synthetic oligonucleotide
  misc_feature 1..20: note = Target: SCN10A; (-) strand; PAM type: YTN; PAM sequence: CTC
  source 1..20: mol_type = other DNA
attgacctgtagttcccaga

SEQ ID NO: 56465 - DNA, 20 bp, synthetic construct
  misc_feature 1..20: note = Description of Artificial Sequence: Synthetic oligonucleotide
  misc_feature 1..20: note = Target: SCN10A; (-) strand; PAM type: YTN; PAM sequence: CTC
  source 1..20: mol_type = other DNA
tcattgacctgtagttccca

SEQ ID NO: 56466 - DNA, 20 bp, synthetic construct
  misc_feature 1..20: note = Description of Artificial Sequence: Synthetic oligonucleotide
  misc_feature 1..20: note = Target: SCN10A; (-) strand; PAM type: YTN; PAM sequence: TTG
  source 1..20: mol_type = other DNA
actctcattgacctgtagtt

SEQ ID NO: 56467 - DNA, 20 bp, synthetic construct
  misc_feature 1..20: note = Description of Artificial Sequence: Synthetic oligonucleotide
  misc_feature 1..20: note = Target: SCN10A; (-) strand; PAM type: YTN; PAM sequence: TTT
  source 1..20: mol_type = other DNA
gactctcattgacctgtagt

SEQ ID NO: 56468 - DNA, 20 bp, synthetic construct
  misc_feature 1..20: note = Description of Artificial Sequence: Synthetic oligonucleotide
  misc_feature 1..20: note = Target: SCN10A; (-) strand; PAM type: YTN; PAM sequence: CTG
  source 1..20: mol_type = other DNA
catttgactctcattgacct

SEQ ID NO: 56469 - DNA, 20 bp, synthetic construct
  misc_feature 1..20: note = Description of Artificial Sequence: Synthetic oligonucleotide
  misc_feature 1..20: note = Target: SCN10A; (-) strand; PAM type: YTN; PAM sequence: CTG
  source 1..20: mol_type = other DNA
tacctgcatttgactctcat

SEQ ID NO: 56470 - DNA, 20 bp, synthetic construct
  misc_feature 1..20: note = Description of Artificial Sequence: Synthetic oligonucleotide
  misc_feature 1..20: note = Target: SCN10A; (-) strand; PAM type: YTN; PAM sequence: CTC
  source 1..20: mol_type = other DNA
tgtacctgcatttgactctc

SEQ ID NO: 56471 - DNA, 20 bp, synthetic construct
  misc_feature 1..20: note = Description of Artificial Sequence: Synthetic oligonucleotide
  misc_feature 1..20: note = Target: SCN10A; (-) strand; PAM type: YTN; PAM sequence: CTC
  source 1..20: mol_type = other DNA
tctgtacctgcatttgactc

SEQ ID NO: 56472 - DNA, 20 bp, synthetic construct
  misc_feature 1..20: note = Description of Artificial Sequence: Synthetic oligonucleotide
  misc_feature 1..20: note = Target: SCN10A; (-) strand; PAM type: YTN; PAM sequence: CTG
  source 1..20: mol_type = other DNA
cctctctgtacctgcatttg

SEQ ID NO: 56473 - DNA, 20 bp, synthetic construct
  misc_feature 1..20: note = Description of Artificial Sequence: Synthetic oligonucleotide
  misc_feature 1..20: note = Target: SCN10A; (-) strand; PAM type: YTN; PAM sequence: CTC
  source 1..20: mol_type = other DNA
tgcctctctgtacctgcatt

SEQ ID NO: 56474 - DNA, 20 bp, synthetic construct
  misc_feature 1..20: note = Description of Artificial Sequence: Synthetic oligonucleotide
  misc_feature 1..20: note = Target: SCN10A; (-) strand; PAM type: YTN; PAM sequence: CTC
  source 1..20: mol_type = other DNA
tctgcctctctgtacctgca

SEQ ID NO: 56475 - DNA, 20 bp, synthetic construct
  misc_feature 1..20: note = Description of Artificial Sequence: Synthetic oligonucleotide
  misc_feature 1..20: note = Target: SCN10A; (-) strand; PAM type: YTN; PAM sequence: TTG
  source 1..20: mol_type = other DNA
atcctctctgcctctctgta

SEQ ID NO: 56476 - DNA, 20 bp, synthetic construct
  misc_feature 1..20: note = Description of Artificial Sequence: Synthetic oligonucleotide
  misc_feature 1..20: note = Target: SCN10A; (-) strand; PAM type: YTN; PAM sequence: CTT
  source 1..20: mol_type = other DNA
gatcctctctgcctctctgt

SEQ ID NO: 56477 - DNA, 20 bp, synthetic construct
  misc_feature 1..20: note = Description of Artificial Sequence: Synthetic oligonucleotide
  misc_feature 1..20: note = Target: SCN10A; (-) strand; PAM type: YTN; PAM sequence: TTA
  source 1..20: mol_type = other DNA
gtccttgatcctctctgcct

SEQ ID NO: 56478 - DNA, 20 bp, synthetic construct
  misc_feature 1..20: note = Description of Artificial Sequence: Synthetic oligonucleotide
  misc_feature 1..20: note = Target: SCN10A; (-) strand; PAM type: YTN; PAM sequence: TTT
  source 1..20: mol_type = other DNA
agtccttgatcctctctgcc

SEQ ID NO: 56479 - DNA, 20 bp, synthetic construct
  misc_feature 1..20: note = Description of Artificial Sequence: Synthetic oligonucleotide
  misc_feature 1..20: note = Target: SCN10A; (-) strand; PAM type: YTN; PAM sequence: TTT
  source 1..20: mol_type = other DNA
tagtccttgatcctctctgc

SEQ ID NO: 56480 - DNA, 20 bp, synthetic construct
  misc_feature 1..20: note = Description of Artificial Sequence: Synthetic oligonucleotide
  misc_feature 1..20: note = Target: SCN10A; (-) strand; PAM type: YTN; PAM sequence: CTT
  source 1..20: mol_type = other DNA
ttagtccttgatcctctctg

SEQ ID NO: 56481 - DNA, 20 bp, synthetic construct
  misc_feature 1..20: note = Description of Artificial Sequence: Synthetic oligonucleotide
  misc_feature 1..20: note = Target: SCN10A; (-) strand; PAM type: YTN; PAM sequence: CTG
  source 1..20: mol_type = other DNA
agagggtgaggatatggctt

SEQ ID NO: 56482 - DNA, 20 bp, synthetic construct
  misc_feature 1..20: note = Description of Artificial Sequence: Synthetic oligonucleotide
  misc_feature 1..20: note = Target: SCN10A; (-) strand; PAM type: YTN; PAM sequence: TTG
  source 1..20: mol_type = other DNA
ctgagagggtgaggatatgg

SEQ ID NO: 56483 - DNA, 20 bp, synthetic construct
  misc_feature 1..20: note = Description of Artificial Sequence: Synthetic oligonucleotide
  misc_feature 1..20: note = Target: SCN10A; (-) strand; PAM type: YTN; PAM sequence: CTT
  source 1..20: mol_type = other DNA
gctgagagggtgaggatatg

SEQ ID NO: 56484 - DNA, 20 bp, synthetic construct
  misc_feature 1..20: note = Description of Artificial Sequence: Synthetic oligonucleotide
  misc_feature 1..20: note = Target: SCN10A; (-) strand; PAM type: YTN; PAM sequence: CTG
  source 1..20: mol_type = other DNA
tcagtcccagagatgaggat

SEQ ID NO: 56485 - DNA, 20 bp, synthetic construct
  misc_feature 1..20: note = Description of Artificial Sequence: Synthetic oligonucleotide
  misc_feature 1..20: note = Target: SCN10A; (-) strand; PAM type: YTN; PAM sequence: TTG
  source 1..20: mol_type = other DNA
gtgcactgtcagtcccagag

SEQ ID NO: 56486 - DNA, 20 bp, synthetic construct
  misc_feature 1..20: note = Description of Artificial Sequence: Synthetic oligonucleotide
  misc_feature 1..20: note = Target: SCN10A; (-) strand; PAM type: YTN; PAM sequence: CTT
  source 1..20: mol_type = other DNA
ggtgcactgtcagtcccaga

SEQ ID NO: 56487 - DNA, 20 bp, synthetic construct
  misc_feature 1..20: note = Description of Artificial Sequence: Synthetic oligonucleotide
  misc_feature 1..20: note = Target: SCN10A; (-) strand; PAM type: YTN; PAM sequence: CTC
  source 1..20: mol_type = other DNA
atcttggtgcactgtcagtc

SEQ ID NO: 56488 - DNA, 20 bp, synthetic construct
  misc_feature 1..20: note = Description of Artificial Sequence: Synthetic oligonucleotide
  misc_feature 1..20: note = Target: SCN10A; (-) strand; PAM type: YTN; PAM sequence: CTC
  source 1..20: mol_type = other DNA
agtgggctcatcttggtgca

SEQ ID NO: 56489 - DNA, 20 bp, synthetic construct
  misc_feature 1..20: note = Description of Artificial Sequence: Synthetic oligonucleotide
  misc_feature 1..20: note = Target: SCN10A; (-) strand; PAM type: YTN; PAM sequence: TTA
  source 1..20: mol_type = other DNA
aagtaccctcagtgggctca

SEQ ID NO: 56490 - DNA, 20 bp, synthetic construct
  misc_feature 1..20: note = Description of Artificial Sequence: Synthetic oligonucleotide
  misc_feature 1..20: note = Target: SCN10A; (-) strand; PAM type: YTN; PAM sequence: CTG
  source 1..20: mol_type = other DNA
tccattaaagtaccctcagt

SEQ ID NO: 56491 - DNA, 20 bp, synthetic construct
  misc_feature 1..20: note = Description of Artificial Sequence: Synthetic oligonucleotide
  misc_feature 1..20: note = Target: SCN10A; (-) strand; PAM type: YTN; PAM sequence: CTG
  source 1..20: mol_type = other DNA
tctgtccattaaagtaccct

SEQ ID NO: 56492 - DNA, 20 bp, synthetic construct
  misc_feature 1..20: note = Description of Artificial Sequence: Synthetic oligonucleotide
  misc_feature 1..20: note = Target: SCN10A; (-) strand; PAM type: YTN; PAM sequence: TTG
  source 1..20: mol_type = other DNA
gctgtctgtccattaaagta

SEQ ID NO: 56493 - DNA, 20 bp, synthetic construct
  misc_feature 1..20: note = Description of Artificial Sequence: Synthetic oligonucleotide
  misc_feature 1..20: note = Target: SCN10A; (-) strand; PAM type: YTN; PAM sequence: CTG
  source 1..20: mol_type = other DNA
aggattggctgtctgtccat

SEQ ID NO: 56494 - DNA, 20 bp, synthetic construct
  misc_feature 1..20: note = Description of Artificial Sequence: Synthetic oligonucleotide
  misc_feature 1..20: note = Target: SCN10A; (-) strand; PAM type: YTN; PAM sequence: TTA
  source 1..20: mol_type = other DNA
ccagcctgaggattggctgt

SEQ ID NO: 56495 - DNA, 20 bp, synthetic construct
  misc_feature 1..20: note = Description of Artificial Sequence: Synthetic oligonucleotide
  misc_feature 1..20: note = Target: SCN10A; (-) strand; PAM type: YTN; PAM sequence: CTT
  source 1..20: mol_type = other DNA
accagcctgaggattggctg

SEQ ID NO: 56496 - DNA, 20 bp, synthetic construct
  misc_feature 1..20: note = Description of Artificial Sequence: Synthetic oligonucleotide
  misc_feature 1..20: note = Target: SCN10A; (-) strand; PAM type: YTN; PAM sequence: CTC
  source 1..20: mol_type = other DNA
ttaccagcctgaggattggc

SEQ ID NO: 56497 - DNA, 20 bp, synthetic construct
  misc_feature 1..20: note = Description of Artificial Sequence: Synthetic oligonucleotide
  misc_feature 1..20: note = Target: SCN10A; (-) strand; PAM type: YTN; PAM sequence: CTG
  source 1..20: mol_type = other DNA
ggcataacacctcttaccag

SEQ ID NO: 56498 - DNA, 20 bp, synthetic construct
  misc_feature 1..20: note = Description of Artificial Sequence: Synthetic oligonucleotide
  misc_feature 1..20: note = Target: SCN10A; (-) strand; PAM type: YTN; PAM sequence: CTC
  source 1..20: mol_type = other DNA
ccctgggcataacacctctt

SEQ ID NO: 56499 - DNA, 20 bp, synthetic construct
  misc_feature 1..20: note = Description of Artificial Sequence: Synthetic oligonucleotide
  misc_feature 1..20: note = Target: SCN10A; (-) strand; PAM type: YTN; PAM sequence: TTG
  source 1..20: mol_type = other DNA
ccagagtcctcccctgggca

SEQ ID NO: 56500 - DNA, 20 bp, synthetic construct
  misc_feature 1..20: note = Description of Artificial Sequence: Synthetic oligonucleotide
  misc_feature 1..20: note = Target: SCN10A; (-) strand; PAM type: YTN; PAM sequence: CTG
  source 1..20: mol_type = other DNA
ttgccagagtcctcccctgg

SEQ ID NO: 56501 - DNA, 20 bp, synthetic construct
  misc_feature 1..20: note = Description of Artificial Sequence: Synthetic oligonucleotide
  misc_feature 1..20: note = Target: SCN10A; (-) strand; PAM type: YTN; PAM sequence: TTC
  source 1..20: mol_type = other DNA
accatcctgttgccagagtc

SEQ ID NO: 56502 - DNA, 20 bp, synthetic construct
  misc_feature 1..20: note = Description of Artificial Sequence: Synthetic oligonucleotide
  misc_feature 1..20: note = Target: SCN10A; (-) strand; PAM type: YTN; PAM sequence: CTT
  source 1..20: mol_type = other DNA
caccatcctgttgccagagt

SEQ ID NO: 56503 - DNA, 20 bp, synthetic construct
  misc_feature 1..20: note = Description of Artificial Sequence: Synthetic oligonucleotide
  misc_feature 1..20: note = Target: SCN10A; (-) strand; PAM type: YTN; PAM sequence: TTA
  source 1..20: mol_type = other DNA
aatgcaaccataacttcacc

SEQ ID NO: 56504 - DNA, 20 bp, synthetic construct
  misc_feature 1..20: note = Description of Artificial Sequence: Synthetic oligonucleotide
  misc_feature 1..20: note = Target: SCN10A; (-) strand; PAM type: YTN; PAM sequence: TTG
  source 1..20: mol_type = other DNA
tcagaagagaaattaaatgc

SEQ ID NO: 56505 - DNA, 20 bp, synthetic construct
  misc_feature 1..20: note = Description of Artificial Sequence: Synthetic oligonucleotide
  misc_feature 1..20: note = Target: SCN10A; (-) strand; PAM type: YTN; PAM sequence: CTT
  source 1..20: mol_type = other DNA
gtcagaagagaaattaaatg

SEQ ID NO: 56506 - DNA, 20 bp, synthetic construct
  misc_feature 1..20: note = Description of Artificial Sequence: Synthetic oligonucleotide
  misc_feature 1..20: note = Target: SCN10A; (-) strand; PAM type: YTN; PAM sequence: CTC
  source 1..20: mol_type = other DNA
ttgtcagaagagaaattaaa

SEQ ID NO: 56507 - DNA, 20 bp, synthetic construct
  misc_feature 1..20: note = Description of Artificial Sequence: Synthetic oligonucleotide
  misc_feature 1..20: note = Target: SCN10A; (-) strand; PAM type: YTN; PAM sequence: TTC
  source 1..20: mol_type = other DNA
tcttgtcagaagagaaatta

SEQ ID NO: 56508 - DNA, 20 bp, synthetic construct
  misc_feature 1..20: note = Description of Artificial Sequence: Synthetic oligonucleotide
  misc_feature 1..20: note = Target: SCN10A; (-) strand; PAM type: YTN; PAM sequence: TTA
  source 1..20: mol_type = other DNA
caaaacaaggatggttctct

SEQ ID NO: 56509 - DNA, 20 bp, synthetic construct
  misc_feature 1..20: note = Description of Artificial Sequence: Synthetic oligonucleotide
  misc_feature 1..20: note = Target: SCN10A; (-) strand; PAM type: YTN; PAM sequence: TTA
  source 1..20: mol_type = other DNA
agagacagagatgtagaagg

SEQ ID NO: 56510 - DNA, 20 bp, synthetic construct
  misc_feature 1..20: note = Description of Artificial Sequence: Synthetic oligonucleotide
  misc_feature 1..20: note = Target: SCN10A; (-) strand; PAM type: YTN; PAM sequence: TTT
  source 1..20: mol_type = other DNA
aagagacagagatgtagaag

SEQ ID NO: 56511 - DNA, 20 bp, synthetic construct
  misc_feature 1..20: note = Description of Artificial Sequence: Synthetic oligonucleotide
  misc_feature 1..20: note = Target: SCN10A; (-) strand; PAM type: YTN; PAM sequence: CTC
  source 1..20: mol_type = other DNA
agagggagaaaccaggagag

SEQ ID NO: 56512 - DNA, 20 bp, synthetic construct
  misc_feature 1..20: note = Description of Artificial Sequence: Synthetic oligonucleotide
  misc_feature 1..20: note = Target: SCN10A; (-) strand; PAM type: YTN; PAM sequence: CTA
  source 1..20: mol_type = other DNA
aatcctcagagggagaaacc

SEQ ID NO: 56513 - DNA, 20 bp, synthetic construct
  misc_feature 1..20: note = Description of Artificial Sequence: Synthetic oligonucleotide
  misc_feature 1..20: note = Target: SCN10A; (-) strand; PAM type: YTN; PAM sequence: CTC
  source 1..20: mol_type = other DNA
ctaaatcctcagagggagaa

SEQ ID NO: 56514 - DNA, 20 bp, synthetic construct
  misc_feature 1..20: note = Description of Artificial Sequence: Synthetic oligonucleotide
  misc_feature 1..20: note = Target: SCN10A; (-) strand; PAM type: YTN; PAM sequence: TTC
  source 1..20: mol_type = other DNA
atatcctcctaaatcctcag

SEQ ID NO: 56515 - DNA, 20 bp, synthetic construct
  misc_feature 1..20: note = Description of Artificial Sequence: Synthetic oligonucleotide
  misc_feature 1..20: note = Target: SCN10A; (-) strand; PAM type: YTN; PAM sequence: CTC
  source 1..20: mol_type = other DNA
ccatgccaagagttcatatc

SEQ ID NO: 56516 - DNA, 20 bp, synthetic construct
  misc_feature 1..20: note = Description of Artificial Sequence: Synthetic oligonucleotide
  misc_feature 1..20: note = Target: SCN10A; (-) strand; PAM type: YTN; PAM sequence: CTC
  source 1..20: mol_type = other DNA
tcccatgccaagagttcata

SEQ ID NO: 56517 - DNA, 20 bp, synthetic construct
  misc_feature 1..20: note = Description of Artificial Sequence: Synthetic oligonucleotide
  misc_feature 1..20: note = Target: SCN10A; (-) strand; PAM type: YTN; PAM sequence: CTC
  source 1..20: mol_type = other DNA
ctctcccatgccaagagttc

SEQ ID NO: 56518 - DNA, 20 bp, synthetic construct
  misc_feature 1..20: note = Description of Artificial Sequence: Synthetic oligonucleotide
  misc_feature 1..20: note = Target: SCN10A; (-) strand; PAM type: YTN; PAM sequence: TTC
  source 1..20: mol_type = other DNA
ctcctctcccatgccaagag

SEQ ID NO: 56519 - DNA, 20 bp, synthetic construct
  misc_feature 1..20: note = Description of Artificial Sequence: Synthetic oligonucleotide
  misc_feature 1..20: note = Target: SCN10A; (-) strand; PAM type: YTN; PAM sequence: CTT
  source 1..20: mol_type = other DNA
cctcctctcccatgccaaga

SEQ ID NO: 56520 - DNA, 20 bp, synthetic construct
  misc_feature 1..20: note = Description of Artificial Sequence: Synthetic oligonucleotide
  misc_feature 1..20: note = Target: SCN10A; (-) strand; PAM type: YTN; PAM sequence: TTC
  source 1..20: mol_type = other DNA
ttcctcctctcccatgccaa

SEQ ID NO: 56521 - DNA, 20 bp, synthetic construct
  misc_feature 1..20: note = Description of Artificial Sequence: Synthetic oligonucleotide
  misc_feature 1..20: note = Target: SCN10A; (-) strand; PAM type: YTN; PAM sequence: TTT
  source 1..20: mol_type = other DNA
cttcctcctctcccatgcca

SEQ ID NO: 56522 - DNA, 20 bp, synthetic construct
  misc_feature 1..20: note = Description of Artificial Sequence: Synthetic oligonucleotide
  misc_feature 1..20: note = Target: SCN10A; (-) strand; PAM type: YTN; PAM sequence: CTT
  source 1..20: mol_type = other DNA
tcttcctcctctcccatgcc

SEQ ID NO: 56523 - DNA, 20 bp, synthetic construct
  misc_feature 1..20: note = Description of Artificial Sequence: Synthetic oligonucleotide
  misc_feature 1..20: note = Target: SCN10A; (-) strand; PAM type: YTN; PAM sequence: CTG
  source 1..20: mol_type = other DNA
aatatctttcttcctcctct

SEQ ID NO: 56524 - DNA, 20 bp, synthetic construct
  misc_feature 1..20: note = Description of Artificial Sequence: Synthetic oligonucleotide
  misc_feature 1..20: note = Target: SCN10A; (-) strand; PAM type: YTN; PAM sequence: CTA
  source 1..20: mol_type = other DNA
gcagagtaaataaaaaggca

SEQ ID NO: 56525 - DNA, 20 bp, synthetic construct
  misc_feature 1..20: note = Description of Artificial Sequence: Synthetic oligonucleotide
  misc_feature 1..20: note = Target: SCN10A; (-) strand; PAM type: YTN; PAM sequence: CTC
  source 1..20: mol_type = other DNA
aaatatggctagcagagtaa

SEQ ID NO: 56526 - DNA, 20 bp, synthetic construct
  misc_feature 1..20: note = Description of Artificial Sequence: Synthetic oligonucleotide
  misc_feature 1..20: note = Target: SCN10A; (-) strand; PAM type: YTN; PAM sequence: TTA
  source 1..20: mol_type = other DNA
ggaggacaggaatcagccat

SEQ ID NO: 56527 - DNA, 20 bp, synthetic construct
  misc_feature 1..20: note = Description of Artificial Sequence: Synthetic oligonucleotide
  misc_feature 1..20: note = Target: SCN10A; (-) strand; PAM type: YTN; PAM sequence: TTG
  source 1..20: mol_type = other DNA
ggagttaggaggacaggaat

SEQ ID NO: 56528 - DNA, 20 bp, synthetic construct
  misc_feature 1..20: note = Description of Artificial Sequence: Synthetic oligonucleotide
  misc_feature 1..20: note = Target: SCN10A; (-) strand; PAM type: YTN; PAM sequence: TTT
  source 1..20: mol_type = other DNA
gggagttaggaggacaggaa

SEQ ID NO: 56529 - DNA, 20 bp, synthetic construct
  misc_feature 1..20: note = Description of Artificial Sequence: Synthetic oligonucleotide
  misc_feature 1..20: note = Target: SCN10A; (-) strand; PAM type: YTN; PAM sequence: CTA
  source 1..20: mol_type = other DNA
cgagccaaaaaatggtgaat

SEQ ID NO: 56530 - DNA, 20 bp, synthetic construct
  misc_feature 1..20: note = Description of Artificial Sequence: Synthetic oligonucleotide
  misc_feature 1..20: note = Target: SCN10A; (-) strand; PAM type: YTN; PAM sequence: TTC
  source 1..20: mol_type = other DNA
tacgagccaaaaaatggtga

SEQ ID NO: 56531 - DNA, 20 bp, synthetic construct
  misc_feature 1..20: note = Description of Artificial Sequence: Synthetic oligonucleotide
  misc_feature 1..20: note = Target: SCN10A; (-) strand; PAM type: YTN; PAM sequence: TTG
  source 1..20: mol_type = other DNA
atgttctacgagccaaaaaa

SEQ ID NO: 56532 - DNA, 20 bp, synthetic construct
  misc_feature 1..20: note = Description of Artificial Sequence: Synthetic oligonucleotide
  misc_feature 1..20: note = Target: SCN10A; (-) strand; PAM type: YTN; PAM sequence: TTT
  source 1..20: mol_type = other DNA
gatgttctacgagccaaaaa

SEQ ID NO: 56533 - DNA, 20 bp, synthetic construct
  misc_feature 1..20: note = Description of Artificial Sequence: Synthetic oligonucleotide
  misc_feature 1..20: note = Target: SCN10A; (-) strand; PAM type: YTN; PAM sequence: TTT
  source 1..20: mol_type = other DNA
tgatgttctacgagccaaaa

SEQ ID NO: 56534 - DNA, 20 bp, synthetic construct
  misc_feature 1..20: note = Description of Artificial Sequence: Synthetic oligonucleotide
  misc_feature 1..20: note = Target: SCN10A; (-) strand; PAM type: YTN; PAM sequence: TTT
  source 1..20: mol_type = other DNA
ttgatgttctacgagccaaa

SEQ ID NO: 56535 - DNA, 20 bp, synthetic construct
  misc_feature 1..20: note = Description of Artificial Sequence: Synthetic oligonucleotide
  misc_feature 1..20: note = Target: SCN10A; (-) strand; PAM type: YTN; PAM sequence: TTG
  source 1..20: mol_type = other DNA
tatttttgatgttctacgag

SEQ ID NO: 56536 - DNA, 20 bp, synthetic construct
  misc_feature 1..20: note = Description of Artificial Sequence: Synthetic oligonucleotide
  misc_feature 1..20: note = Target: SCN10A; (-) strand; PAM type: YTN; PAM sequence: CTG
  source 1..20: mol_type = other DNA
tgttgtatttttgatgttct

SEQ ID NO: 56537 - DNA, 20 bp, synthetic construct
  misc_feature 1..20: note = Description of Artificial Sequence: Synthetic oligonucleotide
  misc_feature 1..20: note = Target: SCN10A; (-) strand; PAM type: YTN; PAM sequence: CTC
  source 1..20: mol_type = other DNA
acctgtgttgtatttttgat

SEQ ID NO: 56538 - DNA, 20 bp, synthetic construct
  misc_feature 1..20: note = Description of Artificial Sequence: Synthetic oligonucleotide
  misc_feature 1..20: note = Target: SCN10A; (-) strand; PAM type: YTN; PAM sequence: TTA
  source 1..20: mol_type = other DNA
tctcacctgtgttgtatttt

SEQ ID NO: 56539 - DNA, 20 bp, synthetic construct
  misc_feature 1..20: note = Description of Artificial Sequence: Synthetic oligonucleotide
  misc_feature 1..20: note = Target: SCN10A; (-) strand; PAM type: YTN; PAM sequence: TTC
  source 1..20: mol_type = other DNA
atgacaattatctcacctgt

SEQ ID NO: 56540 - DNA, 20 bp, synthetic construct
  misc_feature 1..20: note = Description of Artificial Sequence: Synthetic oligonucleotide
  misc_feature 1..20: note = Target: SCN10A; (-) strand; PAM type: YTN; PAM sequence: CTT
  source 1..20: mol_type = other DNA
catgacaattatctcacctg

SEQ ID NO: 56541 - DNA, 20 bp, synthetic construct
  misc_feature 1..20: note = Description of Artificial Sequence: Synthetic oligonucleotide
  misc_feature 1..20: note = Target: SCN10A; (-) strand; PAM type: YTN; PAM sequence: TTC
  source 1..20: mol_type = other DNA
ttcatgacaattatctcacc

SEQ ID NO: 56542 - DNA, 20 bp, synthetic construct
  misc_feature 1..20: note = Description of Artificial Sequence: Synthetic oligonucleotide
  misc_feature 1..20: note = Target: SCN10A; (-) strand; PAM type: YTN; PAM sequence: CTT
  source 1..20: mol_type = other DNA
cttcatgacaattatctcac

SEQ ID NO: 56543 - DNA, 20 bp, synthetic construct
  misc_feature 1..20: note = Description of Artificial Sequence: Synthetic oligonucleotide
  misc_feature 1..20: note = Target: SCN10A; (-) strand; PAM type: YTN; PAM sequence: TTA
  source 1..20: mol_type = other DNA
aacaagagcttcttcatgac

SEQ ID NO: 56544 - DNA, 20 bp, synthetic construct
  misc_feature 1..20: note = Description of Artificial Sequence: Synthetic oligonucleotide
  misc_feature 1..20: note = Target: SCN10A; (-) strand; PAM type: YTN; PAM sequence: TTT
  source 1..20: mol_type = other DNA
aaacaagagcttcttcatga

SEQ ID NO: 56545 - DNA, 20 bp, synthetic construct
  misc_feature 1..20: note = Description of Artificial Sequence: Synthetic oligonucleotide
  misc_feature 1..20: note = Target: SCN10A; (-) strand; PAM type: YTN; PAM sequence: TTG
  source 1..20: mol_type = other DNA
agaatcagtagtttaaacaa

SEQ ID NO: 56546 - DNA, 20 bp, synthetic construct
  misc_feature 1..20: note = Description of Artificial Sequence: Synthetic oligonucleotide
  misc_feature 1..20: note = Target: SCN10A; (-) strand; PAM type: YTN; PAM sequence: TTT
  source 1..20: mol_type = other DNA
gagaatcagtagtttaaaca

SEQ ID NO: 56547 - DNA, 20 bp, synthetic construct
  misc_feature 1..20: note = Description of Artificial Sequence: Synthetic oligonucleotide
  misc_feature 1..20: note = Target: SCN10A; (-) strand; PAM type: YTN; PAM sequence: CTG
  source 1..20: mol_type = other DNA
aaatcaaaaagtttgagaat

SEQ ID NO: 56548 - DNA, 20 bp, synthetic construct
  misc_feature 1..20: note = Description of Artificial Sequence: Synthetic oligonucleotide
  misc_feature 1..20: note = Target: SCN10A; (-) strand; PAM type: YTN; PAM sequence: TTG
  source 1..20: mol_type = other DNA
agagtaataatccctgaaat

SEQ ID NO: 56549 - DNA, 20 bp, synthetic construct
  misc_feature 1..20: note = Description of Artificial Sequence: Synthetic oligonucleotide
  misc_feature 1..20: note = Target: SCN10A; (-) strand; PAM type: YTN; PAM sequence: TTT
  source 1..20: mol_type = other DNA
gagagtaataatccctgaaa

SEQ ID NO: 56550 - DNA, 20 bp, synthetic construct
  misc_feature 1..20: note = Description of Artificial Sequence: Synthetic oligonucleotide
  misc_feature 1..20: note = Target: SCN10A; (-) strand; PAM type: YTN; PAM sequence: CTC
  source 1..20: mol_type = other DNA
aataaggtttgagagtaata

SEQ ID NO: 56551 - DNA, 20 bp, synthetic construct
  misc_feature 1..20: note = Description of Artificial Sequence: Synthetic oligonucleotide
  misc_feature 1..20: note = Target: SCN10A; (-) strand; PAM type: YTN; PAM sequence: TTG
  source 1..20: mol_type = other DNA
gggtcctcaataaggtttga

SEQ ID NO: 56552 - DNA, 20 bp, synthetic construct
  misc_feature 1..20: note = Description of Artificial Sequence: Synthetic oligonucleotide
  misc_feature 1..20: note = Target: SCN10A; (-) strand; PAM type: YTN; PAM sequence: TTT
  source 1..20: mol_type = other DNA
ggggtcctcaataaggtttg

SEQ ID NO: 56553 - DNA, 20 bp, synthetic construct
  misc_feature 1..20: note = Description of Artificial Sequence: Synthetic oligonucleotide
  misc_feature 1..20: note = Target: SCN10A; (-) strand; PAM type: YTN; PAM sequence: TTA
  source 1..20: mol_type = other DNA
tttggggtcctcaataaggt

SEQ ID NO: 56554 - DNA, 20 bp, synthetic construct
  misc_feature 1..20: note = Description of Artificial Sequence: Synthetic oligonucleotide
  misc_feature 1..20: note = Target: SCN10A; (-) strand; PAM type: YTN; PAM sequence: CTG
  source 1..20: mol_type = other DNA
gcataaacaaaaaggtatca

SEQ ID NO: 56555 - DNA, 20 bp, synthetic construct
  misc_feature 1..20: note = Description of Artificial Sequence: Synthetic oligonucleotide
  misc_feature 1..20: note = Target: SCN10A; (-) strand; PAM type: YTN; PAM sequence: CTA
  source 1..20: mol_type = other DNA
atatgatatacatatatctg

SEQ ID NO: 56556 - DNA, 20 bp, synthetic construct
  misc_feature 1..20: note = Description of Artificial Sequence: Synthetic oligonucleotide
  misc_feature 1..20: note = Target: SCN10A; (-) strand; PAM type: YTN; PAM sequence: TTC
  source 1..20: mol_type = other DNA
taatatgatatacatatatc

SEQ ID NO: 56557 - DNA, 20 bp, synthetic construct
  misc_feature 1..20: note = Description of Artificial Sequence: Synthetic oligonucleotide
  misc_feature 1..20: note = Target: SCN10A; (-) strand; PAM type: YTN; PAM sequence: TTT
  source 1..20: mol_type = other DNA
ctaatatgatatacatatat

SEQ ID NO: 56558 - DNA, 20 bp, synthetic construct
  misc_feature 1..20: note = Description of Artificial Sequence: Synthetic oligonucleotide
  misc_feature 1..20: note = Target: SCN10A; (-) strand; PAM type: YTN; PAM sequence: TTA
  source 1..20: mol_type = other DNA
atttctaatatgatatacat

SEQ ID NO: 56559 - DNA, 20 bp, synthetic construct
  misc_feature 1..20: note = Description of Artificial Sequence: Synthetic oligonucleotide
  misc_feature 1..20: note = Target: SCN10A; (-) strand; PAM type: YTN; PAM sequence: TTA
  source 1..20: mol_type = other DNA
tgtatatataggtatataag

SEQ ID NO: 56560 - DNA, 20 bp, synthetic construct
  misc_feature 1..20: note = Description of Artificial Sequence: Synthetic oligonucleotide
  misc_feature 1..20: note = Target: SCN10A; (-) strand; PAM type: YTN; PAM sequence: CTA
  source 1..20: mol_type = other DNA
gttatgtatatataggtata

SEQ ID NO: 56561 - DNA, 20 bp, synthetic construct
  misc_feature 1..20: note = Description of Artificial Sequence: Synthetic oligonucleotide
  misc_feature 1..20: note = Target: SCN10A; (-) strand; PAM type: YTN; PAM sequence: CTA
  source 1..20: mol_type = other DNA
gaccatgtagctagttatgt

SEQ ID NO: 56562 - DNA, 20 bp, synthetic construct
  misc_feature 1..20: note = Description of Artificial Sequence: Synthetic oligonucleotide
  misc_feature 1..20: note = Target: SCN10A; (-) strand; PAM type: YTN; PAM sequence: CTA
  source 1..20: mol_type = other DNA
tgtatatacatacaactaga

SEQ ID NO: 56563 - DNA, 20 bp, synthetic construct
  misc_feature 1..20: note = Description of Artificial Sequence: Synthetic oligonucleotide
  misc_feature 1..20: note = Target: SCN10A; (-) strand; PAM type: YTN; PAM sequence: CTA
  source 1..20: mol_type = other DNA
tatatatacatacaactatg

SEQ ID NO: 56564 - DNA, 20 bp, synthetic construct
  misc_feature 1..20: note = Description of Artificial Sequence: Synthetic oligonucleotide
  misc_feature 1..20: note = Target: SCN10A; (-) strand; PAM type: YTN; PAM sequence: CTA
  source 1..20: mol_type = other DNA
tacactatatatatacatac

SEQ ID NO: 56565 - DNA, 20 bp, synthetic construct
  misc_feature 1..20: note = Description of Artificial Sequence: Synthetic oligonucleotide
  misc_feature 1..20: note = Target: SCN10A; (-) strand; PAM type: YTN; PAM sequence: CTA
  source 1..20: mol_type = other DNA
atatgagatatatatacaca

SEQ ID NO: 56566 - DNA, 20 bp, synthetic construct
  misc_feature 1..20: note = Description of Artificial Sequence: Synthetic oligonucleotide
  misc_feature 1..20: note = Target: SCN10A; (-) strand; PAM type: YTN; PAM sequence: TTC
  source 1..20: mol_type = other DNA
taatatgagatatatataca

SEQ ID NO: 56567 - DNA, 20 bp, synthetic construct
  misc_feature 1..20: note = Description of Artificial Sequence: Synthetic oligonucleotide
  misc_feature 1..20: note = Target: SCN10A; (-) strand; PAM type: YTN; PAM sequence: TTT
  source 1..20: mol_type = other DNA
ctaatatgagatatatatac

SEQ ID NO: 56568 - DNA, 20 bp, synthetic construct
  misc_feature 1..20: note = Description of Artificial Sequence: Synthetic oligonucleotide
  misc_feature 1..20: note = Target: SCN10A; (-) strand; PAM type: YTN; PAM sequence: TTG
  source 1..20: mol_type = other DNA
aatttctaatatgagatata

SEQ ID NO: 56569 - DNA, 20 bp, synthetic construct
  misc_feature 1..20: note = Description of Artificial Sequence: Synthetic oligonucleotide
  misc_feature 1..20: note = Target: SCN10A; (-) strand; PAM type: YTN; PAM sequence: TTT
  source 1..20: mol_type = other DNA
gaatttctaatatgagatat

SEQ ID NO: 56570 - DNA, 20 bp, synthetic construct
  misc_feature 1..20: note = Description of Artificial Sequence: Synthetic oligonucleotide
  misc_feature 1..20: note = Target: SCN10A; (-) strand; PAM type: YTN; PAM sequence: TTT
  source 1..20: mol_type = other DNA
tgaatttctaatatgagata

SEQ ID NO: 56571 - DNA, 20 bp, synthetic construct
  misc_feature 1..20: note = Description of Artificial Sequence: Synthetic oligonucleotide
  misc_feature 1..20: note = Target: SCN10A; (-) strand; PAM type: YTN; PAM sequence: CTG
  source 1..20: mol_type = other DNA
agttttgaatttctaatatg

SEQ ID NO: 56572 - DNA, 20 bp, synthetic construct
  misc_feature 1..20: note = Description of Artificial Sequence: Synthetic oligonucleotide
  misc_feature 1..20: note = Target: SCN10A; (-) strand; PAM type: YTN; PAM sequence: TTC
  source 1..20: mol_type = other DNA
ctgagttttgaatttctaat

SEQ ID NO: 56573 - DNA, 20 bp, synthetic construct
  misc_feature 1..20: note = Description of Artificial Sequence: Synthetic oligonucleotide
  misc_feature 1..20: note = Target: SCN10A; (-) strand; PAM type: YTN; PAM sequence: TTT
  source 1..20: mol_type = other DNA
cctgagttttgaatttctaa

SEQ ID NO: 56574 - DNA, 20 bp, synthetic construct
  misc_feature 1..20: note = Description of Artificial Sequence: Synthetic oligonucleotide
  misc_feature 1..20: note = Target: SCN10A; (-) strand; PAM type: YTN; PAM sequence: TTA
  source 1..20: mol_type = other DNA
aaatttcctgagttttgaat

SEQ ID NO: 56575 - DNA, 20 bp, synthetic construct
  misc_feature 1..20: note = Description of Artificial Sequence: Synthetic oligonucleotide
  misc_feature 1..20: note = Target: SCN10A; (-) strand; PAM type: YTN; PAM sequence: TTT
  source 1..20: mol_type = other DNA
aaaatttcctgagttttgaa

SEQ ID NO: 56576 - DNA, 20 bp, synthetic construct
  misc_feature 1..20: note = Description of Artificial Sequence: Synthetic oligonucleotide
  misc_feature 1..20: note = Target: SCN10A; (-) strand; PAM type: YTN; PAM sequence: TTT
  source 1..20: mol_type = other DNA
taaaatttcctgagttttga

SEQ ID NO: 56577 - DNA, 20 bp, synthetic construct
  misc_feature 1..20: note = Description of Artificial Sequence: Synthetic oligonucleotide
  misc_feature 1..20: note = Target: SCN10A; (-) strand; PAM type: YTN; PAM sequence: TTC
  source 1..20: mol_type = other DNA
ccgtgttttaaaatttcctg

SEQ ID NO: 56578 - DNA, 20 bp, synthetic construct
  misc_feature 1..20: note = Description of Artificial Sequence: Synthetic oligonucleotide
  misc_feature 1..20: note = Target: SCN10A; (-) strand; PAM type: YTN; PAM sequence: CTG
  source 1..20: mol_type = other DNA
tatattcccgtgttttaaaa

SEQ ID NO: 56579 - DNA, 20 bp, synthetic construct
  misc_feature 1..20: note = Description of Artificial Sequence: Synthetic oligonucleotide
  misc_feature 1..20: note = Target: SCN10A; (-) strand; PAM type: YTN; PAM sequence: CTG
  source 1..20: mol_type = other DNA
gaatgtgtgcctgtatattc

SEQ ID NO: 56580 - DNA, 20 bp, synthetic construct
  misc_feature 1..20: note = Description of Artificial Sequence: Synthetic oligonucleotide
  misc_feature 1..20: note = Target: SCN10A; (-) strand; PAM type: YTN; PAM sequence: CTA
  source 1..20: mol_type = other DNA
ctggaatgtgtgcctgtata

SEQ ID NO: 56581 - DNA, 20 bp, synthetic construct
  misc_feature 1..20: note = Description of Artificial Sequence: Synthetic oligonucleotide
  misc_feature 1..20: note = Target: SCN10A; (-) strand; PAM type: YTN; PAM sequence: CTA
  source 1..20: mol_type = other DNA
aaagctactggaatgtgtgc

SEQ ID NO: 56582 - DNA, 20 bp, synthetic construct
  misc_feature 1..20: note = Description of Artificial Sequence: Synthetic oligonucleotide
  misc_feature 1..20: note = Target: SCN10A; (-) strand; PAM type: YTN; PAM sequence: CTC
  source 1..20: mol_type = other DNA
taaaagctactggaatgtgt

SEQ ID NO: 56583 - DNA, 20 bp, synthetic construct
  misc_feature 1..20: note = Description of Artificial Sequence: Synthetic oligonucleotide
  misc_feature 1..20: note = Target: SCN10A; (-) strand; PAM type: YTN; PAM sequence: TTG
  source 1..20: mol_type = other DNA
atgggggatgatgtcatcac

SEQ ID NO: 56584 - DNA, 20 bp, synthetic construct
  misc_feature 1..20: note = Description of Artificial Sequence: Synthetic oligonucleotide
  misc_feature 1..20: note = Target: SCN10A; (-) strand; PAM type: YTN; PAM sequence: CTA
  source 1..20: mol_type = other DNA
ttgatgggggatgatgtcat

SEQ ID NO: 56585 - DNA, 20 bp, synthetic construct
  misc_feature 1..20: note = Description of Artificial Sequence: Synthetic oligonucleotide
  misc_feature 1..20: note = Target: SCN10A; (-) strand; PAM type: YTN; PAM sequence: TTG
  source 1..20: mol_type = other DNA
gtgaatatagaggctattga

SEQ ID NO: 56586 - DNA, 20 bp, synthetic construct
  misc_feature 1..20: note = Description of Artificial Sequence: Synthetic oligonucleotide
  misc_feature 1..20: note = Target: SCN10A; (-) strand; PAM type: YTN; PAM sequence: TTA
  source 1..20: mol_type = other DNA
tgatcatacattggtgaata

SEQ ID NO: 56587 - DNA, 20 bp, synthetic construct
  misc_feature 1..20: note = Description of Artificial Sequence: Synthetic oligonucleotide
  misc_feature 1..20: note = Target: SCN10A; (-) strand; PAM type: YTN; PAM sequence: CTT
  source 1..20: mol_type = other DNA
atgatcatacattggtgaat

SEQ ID NO: 56588 - DNA, 20 bp, synthetic construct
  misc_feature 1..20: note = Description of Artificial Sequence: Synthetic oligonucleotide
  misc_feature 1..20: note = Target: SCN10A; (-) strand; PAM type: YTN; PAM sequence: CTC
  source 1..20: mol_type = other DNA
ttatgatcatacattggtga

SEQ ID NO: 56589 - DNA, 20 bp, synthetic construct
  misc_feature 1..20: note = Description of Artificial Sequence: Synthetic oligonucleotide
  misc_feature 1..20: note = Target: SCN10A; (-) strand; PAM type: YTN; PAM sequence: TTC
  source 1..20: mol_type = other DNA
tcttatgatcatacattggt

SEQ ID NO: 56590 - DNA, 20 bp, synthetic construct
  misc_feature 1..20: note = Description of Artificial Sequence: Synthetic oligonucleotide
  misc_feature 1..20: note = Target: SCN10A; (-) strand; PAM type: YTN; PAM sequence: TTT
  source 1..20: mol_type = other DNA
ctcttatgatcatacattgg

SEQ ID NO: 56591 - DNA, 20 bp, synthetic construct
  misc_feature 1..20: note = Description of Artificial Sequence: Synthetic oligonucleotide
  misc_feature 1..20: note = Target: SCN10A; (-) strand; PAM type: YTN; PAM sequence: CTT
  source 1..20: mol_type = other DNA
tctcttatgatcatacattg

SEQ ID NO: 56592 - DNA, 20 bp, synthetic construct
  misc_feature 1..20: note = Description of Artificial Sequence: Synthetic oligonucleotide
  misc_feature 1..20: note = Target: SCN10A; (-) strand; PAM type: YTN; PAM sequence: TTC
  source 1..20: mol_type = other DNA
acacactttctcttatgatc

SEQ ID NO: 56593 - DNA, 20 bp, synthetic construct
  misc_feature 1..20: note = Description of Artificial Sequence: Synthetic oligonucleotide
  misc_feature 1..20: note = Target: SCN10A; (-) strand; PAM type: YTN; PAM sequence: TTT
  source 1..20: mol_type = other DNA
cacacactttctcttatgat

SEQ ID NO: 56594 - DNA, 20 bp, synthetic construct
  misc_feature 1..20: note = Description of Artificial Sequence: Synthetic oligonucleotide
  misc_feature 1..20: note = Target: SCN10A; (-) strand; PAM type: YTN; PAM sequence: TTT
  source 1..20: mol_type = other DNA
tcacacactttctcttatga

SEQ ID NO: 56595 - DNA, 20 bp, synthetic construct
  misc_feature 1..20: note = Description of Artificial Sequence: Synthetic oligonucleotide
  misc_feature 1..20: note = Target: SCN10A; (-) strand; PAM type: YTN; PAM sequence: TTT
  source 1..20: mol_type = other DNA
ttcacacactttctcttatg

SEQ ID NO: 56596 - DNA, 20 bp, synthetic construct
  misc_feature 1..20: note = Description of Artificial Sequence: Synthetic oligonucleotide
  misc_feature 1..20: note = Target: SCN10A; (-) strand; PAM type: YTN; PAM sequence: CTT
  source 1..20: mol_type = other DNA
tttcacacactttctcttat

SEQ ID NO: 56597 - DNA, 20 bp, synthetic construct
  misc_feature 1..20: note = Description of Artificial Sequence: Synthetic oligonucleotide
  misc_feature 1..20: note = Target: SCN10A; (-) strand; PAM type: YTN; PAM sequence: TTG
  source 1..20: mol_type = other DNA
tctttttcacacactttctc

SEQ ID NO: 56598 - DNA, 20 bp, synthetic construct
  misc_feature 1..20: note = Description of Artificial Sequence: Synthetic oligonucleotide
  misc_feature 1..20: note = Target: SCN10A; (-) strand; PAM type: YTN; PAM sequence: TTT
  source 1..20: mol_type = other DNA
gtctttttcacacactttct

SEQ ID NO: 56599 - DNA, 20 bp, synthetic construct
  misc_feature 1..20: note = Description of Artificial Sequence: Synthetic oligonucleotide
  misc_feature 1..20: note = Target: SCN10A; (-) strand; PAM type: YTN; PAM sequence: TTG
  source 1..20: mol_type = other DNA
gatgtaatttgtctttttca

SEQ ID NO: 56600 - DNA, 20 bp, synthetic construct
  misc_feature 1..20: note = Description of Artificial Sequence: Synthetic oligonucleotide
  misc_feature 1..20: note = Target: SCN10A; (-) strand; PAM type: YTN; PAM sequence: CTT
  source 1..20: mol_type = other DNA
ggatgtaatttgtctttttc

SEQ ID NO: 56601 - DNA, 20 bp, synthetic construct
  misc_feature 1..20: note = Description of Artificial Sequence: Synthetic oligonucleotide
  misc_feature 1..20: note = Target: SCN10A; (-) strand; PAM type: YTN; PAM sequence: TTG
  source 1..20: mol_type = other DNA
tataacaatacttggatgta

SEQ ID NO: 56602 - DNA, 20 bp, synthetic construct
  misc_feature 1..20: note = Description of Artificial Sequence: Synthetic oligonucleotide
  misc_feature 1..20: note = Target: SCN10A; (-) strand; PAM type: YTN; PAM sequence: CTA
  source 1..20: mol_type = other DNA
ttgtataacaatacttggat

SEQ ID NO: 56603 - DNA, 20 bp, synthetic construct
  misc_feature 1..20: note = Description of Artificial Sequence: Synthetic oligonucleotide
  misc_feature 1..20: note = Target: SCN10A; (-) strand; PAM type: YTN; PAM sequence: TTA
  source 1..20: mol_type = other DNA
taaaatgaaaactattgtat

SEQ ID NO: 56604 - DNA, 20 bp, synthetic construct
  misc_feature 1..20: note = Description of Artificial Sequence: Synthetic oligonucleotide
  misc_feature 1..20: note = Target: SCN10A; (-) strand; PAM type: YTN; PAM sequence: TTT
  source 1..20: mol_type = other DNA
ataaaatgaaaactattgta

SEQ ID NO: 56605 - DNA, 20 bp, synthetic construct
  misc_feature 1..20: note = Description of Artificial Sequence: Synthetic oligonucleotide
  misc_feature 1..20: note = Target: SCN10A; (-) strand; PAM type: YTN; PAM sequence: TTA
  source 1..20: mol_type = other DNA
gtgggtttataaaatgaaaa

SEQ ID NO: 56606 - DNA, 20 bp, synthetic construct
  misc_feature 1..20: note = Description of Artificial Sequence: Synthetic oligonucleotide
  misc_feature 1..20: note = Target: SCN10A; (-) strand; PAM type: YTN; PAM sequence: TTT
  source 1..20: mol_type = other DNA
agtgggtttataaaatgaaa

SEQ ID NO: 56607 - DNA, 20 bp, synthetic construct
  misc_feature 1..20: note = Description of Artificial Sequence: Synthetic oligonucleotide
  misc_feature 1..20: note = Target: SCN10A; (-) strand; PAM type: YTN; PAM sequence: TTT
  source 1..20: mol_type = other DNA
tagtgggtttataaaatgaa

SEQ ID NO: 56608 - DNA, 20 bp, synthetic construct
  misc_feature 1..20: note = Description of Artificial Sequence: Synthetic oligonucleotide
  misc_feature 1..20: note = Target: SCN10A; (-) strand; PAM type: YTN; PAM sequence: CTG
  source 1..20: mol_type = other DNA
ttttagtgggtttataaaat

SEQ ID NO: 56609 - DNA, 20 bp, synthetic construct
  misc_feature 1..20: note = Description of Artificial Sequence: Synthetic oligonucleotide
  misc_feature 1..20: note = Target: SCN10A; (-) strand; PAM type: YTN; PAM sequence: CTG
  source 1..20: mol_type = other DNA
gtgtccccaaaactgtttta

SEQ ID NO: 56610 - DNA, 20 bp, synthetic construct
  misc_feature 1..20: note = Description of Artificial Sequence: Synthetic oligonucleotide
  misc_feature 1..20: note = Target: SCN10A; (-) strand; PAM type: YTN; PAM sequence: TTG
  source 1..20: mol_type = other DNA
gaacccctggtgtccccaaa

SEQ ID NO: 56611 - DNA, 20 bp, synthetic construct
  misc_feature 1..20: note = Description of Artificial Sequence: Synthetic oligonucleotide
  misc_feature 1..20: note = Target: SCN10A; (-) strand; PAM type: YTN; PAM sequence: CTT
  source 1..20: mol_type = other DNA
ggaacccctggtgtccccaa

SEQ ID NO: 56612 - DNA, 20 bp, synthetic construct
  misc_feature 1..20: note = Description of Artificial Sequence: Synthetic oligonucleotide
  misc_feature 1..20: note = Target: SCN10A; (-) strand; PAM type: YTN; PAM sequence: CTA
  source 1..20: mol_type = other DNA
tgatcttggaacccctggtg

SEQ ID NO: 56613 - DNA, 20 bp, synthetic construct
  misc_feature 1..20: note = Description of Artificial Sequence: Synthetic oligonucleotide
  misc_feature 1..20: note = Target: SCN10A; (-) strand; PAM type: YTN; PAM sequence: CTC
  source 1..20: mol_type = other DNA
aactatgatcttggaacccc

SEQ ID NO: 56614 - DNA, 20 bp, synthetic construct
  misc_feature 1..20: note = Description of Artificial Sequence: Synthetic oligonucleotide
  misc_feature 1..20: note = Target: SCN10A; (-) strand; PAM type: YTN; PAM sequence: TTA
  source 1..20: mol_type = other DNA
agccagtggtcctcaactat

SEQ ID NO: 56615 - DNA, 20 bp, synthetic construct
  misc_feature 1..20: note = Description of Artificial Sequence: Synthetic oligonucleotide
  misc_feature 1..20: note = Target: SCN10A; (-) strand; PAM type: YTN; PAM sequence: TTT
  source 1..20: mol_type = other DNA
aagccagtggtcctcaacta

SEQ ID NO: 56616 - DNA, 20 bp, synthetic construct
  misc_feature 1..20: note = Description of Artificial Sequence: Synthetic oligonucleotide
  misc_feature 1..20: note = Target: SCN10A; (-) strand; PAM type: YTN; PAM sequence: TTG
  source 1..20: mol_type = other DNA
ggggaggagcatggcggtga

SEQ ID NO: 56617 - DNA, 20 bp, synthetic construct
  misc_feature 1..20: note = Description of Artificial Sequence: Synthetic oligonucleotide
  misc_feature 1..20: note = Target: SCN10A; (-) strand; PAM type: YTN; PAM sequence: TTG
  source 1..20: mol_type = other DNA
aggttgggggaggagcatgg

SEQ ID NO: 56618 - DNA, 20 bp, synthetic construct
  misc_feature 1..20: note = Description of Artificial Sequence: Synthetic oligonucleotide
  misc_feature 1..20: note = Target: SCN10A; (-) strand; PAM type: YTN; PAM sequence: CTT
  source 1..20: mol_type = other DNA
gaggttgggggaggagcatg

SEQ ID NO: 56619 - DNA, 20 bp, synthetic construct
  misc_feature 1..20: note = Description of Artificial Sequence: Synthetic oligonucleotide
  misc_feature 1..20: note = Target: SCN10A; (-) strand; PAM type: YTN; PAM sequence: TTG
  source 1..20: mol_type = other DNA
caggtggagagcagacatct

SEQ ID NO: 56620 - DNA, 20 bp, synthetic construct
  misc_feature 1..20: note = Description of Artificial Sequence: Synthetic oligonucleotide
  misc_feature 1..20: note = Target: SCN10A; (-) strand; PAM type: YTN; PAM sequence: TTT
  source 1..20: mol_type = other DNA
gcaggtggagagcagacatc

SEQ ID NO: 56621 - DNA, 20 bp, synthetic construct
  misc_feature 1..20: note = Description of Artificial Sequence: Synthetic oligonucleotide
  misc_feature 1..20: note = Target: SCN10A; (-) strand; PAM type: YTN; PAM sequence: CTT
  source 1..20: mol_type = other DNA
tgcaggtggagagcagacat

SEQ ID NO: 56622 - DNA, 20 bp, synthetic construct
  misc_feature 1..20: note = Description of Artificial Sequence: Synthetic oligonucleotide
  misc_feature 1..20: note = Target: SCN10A; (-) strand; PAM type: YTN; PAM sequence: CTC
  source 1..20: mol_type = other DNA
tttgcaggtggagagcagac

SEQ ID NO: 56623 - DNA, 20 bp, synthetic construct
  misc_feature 1..20: note = Description of Artificial Sequence: Synthetic oligonucleotide
  misc_feature 1..20: note = Target: SCN10A; (-) strand; PAM type: YTN; PAM sequence: TTG
  source 1..20: mol_type = other DNA
ggtctctttgcaggtggaga

SEQ ID NO: 56624 - DNA, 20 bp, synthetic construct
  misc_feature 1..20: note = Description of Artificial Sequence: Synthetic oligonucleotide
  misc_feature 1..20: note = Target: SCN10A; (-) strand; PAM type: YTN; PAM sequence: CTC
  source 1..20: mol_type = other DNA
cagaggagttgggtctcttt

SEQ ID NO: 56625 - DNA, 20 bp, synthetic construct
  misc_feature 1..20: note = Description of Artificial Sequence: Synthetic oligonucleotide
  misc_feature 1..20: note = Target: SCN10A; (-) strand; PAM type: YTN; PAM sequence: CTG
  source 1..20: mol_type = other DNA
gggcctccagaggagttggg

SEQ ID NO: 56626 - DNA, 20 bp, synthetic construct
  misc_feature 1..20: note = Description of Artificial Sequence: Synthetic oligonucleotide
  misc_feature 1..20: note = Target: SCN10A; (-) strand; PAM type: YTN; PAM sequence: CTG
  source 1..20: mol_type = other DNA
gcctggggcctccagaggag

SEQ ID NO: 56627 - DNA, 20 bp, synthetic construct
  misc_feature 1..20: note = Description of Artificial Sequence: Synthetic oligonucleotide
  misc_feature 1..20: note = Target: SCN10A; (-) strand; PAM type: YTN; PAM sequence: CTC
  source 1..20: mol_type = other DNA
tggcctggggcctccagagg

SEQ ID NO: 56628 - DNA, 20 bp, synthetic construct
  misc_feature 1..20: note = Description of Artificial Sequence: Synthetic oligonucleotide
  misc_feature 1..20: note = Target: SCN10A; (-) strand; PAM type: YTN; PAM sequence: TTG
  source 1..20: mol_type = other DNA
gatgacctctggcctggggc

SEQ ID NO: 56629 - DNA, 20 bp, synthetic construct
  misc_feature 1..20: note = Description of Artificial Sequence: Synthetic oligonucleotide
  misc_feature 1..20: note = Target: SCN10A; (-) strand; PAM type: YTN; PAM sequence: CTT
  source 1..20: mol_type = other DNA
ggatgacctctggcctgggg

SEQ ID NO: 56630 - DNA, 20 bp, synthetic construct
  misc_feature 1..20: note = Description of Artificial Sequence: Synthetic oligonucleotide
  misc_feature 1..20: note = Target: SCN10A; (-) strand; PAM type: YTN; PAM sequence: TTC
  source 1..20: mol_type = other DNA
ccttggatgacctctggcct

SEQ ID NO: 56631 - DNA, 20 bp, synthetic construct
  misc_feature 1..20: note = Description of Artificial Sequence: Synthetic oligonucleotide
  misc_feature 1..20: note = Target: SCN10A; (-) strand; PAM type: YTN; PAM sequence: CTG
  source 1..20: mol_type = other DNA
ttcccttggatgacctctgg

SEQ ID NO: 56632 - DNA, 20 bp, synthetic construct
  misc_feature 1..20: note = Description of Artificial Sequence: Synthetic oligonucleotide
  misc_feature 1..20: note = Target: SCN10A; (-) strand; PAM type: YTN; PAM sequence: TTG
  source 1..20: mol_type = other DNA
gctgttcccttggatgacct

SEQ ID NO: 56633 - DNA, 20 bp, synthetic construct
  misc_feature 1..20: note = Description of Artificial Sequence: Synthetic oligonucleotide
  misc_feature 1..20: note = Target: SCN10A; (-) strand; PAM type: YTN; PAM sequence: TTC
  source 1..20: mol_type = other DNA
agggaaagttggctgttccc

SEQ ID NO: 56634 - DNA, 20 bp, synthetic construct
  misc_feature 1..20: note = Description of Artificial Sequence: Synthetic oligonucleotide
  misc_feature 1..20: note = Target: SCN10A; (-) strand; PAM type: YTN; PAM sequence: TTT
  source 1..20: mol_type = other DNA
cagggaaagttggctgttcc

SEQ ID NO: 56635 - DNA, 20 bp, synthetic construct
  misc_feature 1..20: note = Description of Artificial Sequence: Synthetic oligonucleotide
  misc_feature 1..20: note = Target: SCN10A; (-) strand; PAM type: YTN; PAM sequence: CTT
  source 1..20: mol_type = other DNA
tcagggaaagttggctgttc

SEQ ID NO: 56636 - DNA, 20 bp, synthetic construct
  misc_feature 1..20: note = Description of Artificial Sequence: Synthetic oligonucleotide
  misc_feature 1..20: note = Target: SCN10A; (-) strand; PAM type: YTN; PAM sequence: CTG
  source 1..20: mol_type = other DNA
cagagctttcagggaaagtt

SEQ ID NO: 56637 - DNA, 20 bp, synthetic construct
  misc_feature 1..20: note = Description of Artificial Sequence: Synthetic oligonucleotide
  misc_feature 1..20: note = Target: SCN10A; (-) strand; PAM type: YTN; PAM sequence: CTG
  source 1..20: mol_type = other DNA
ctgcagagctttcagggaaa

SEQ ID NO: 56638 - DNA, 20 bp, synthetic construct
  misc_feature 1..20: note = Description of Artificial Sequence: Synthetic oligonucleotide
  misc_feature 1..20: note = Target: SCN10A; (-) strand; PAM type: YTN; PAM sequence: TTC
  source 1..20: mol_type = other DNA
aaaagcagataactgctgca

SEQ ID NO: 56639 - DNA, 20 bp, synthetic construct
  misc_feature 1..20: note = Description of Artificial Sequence: Synthetic oligonucleotide
  misc_feature 1..20: note = Target: SCN10A; (-) strand; PAM type: YTN; PAM sequence: CTT
  source 1..20: mol_type = other DNA
caaaagcagataactgctgc

SEQ ID NO: 56640 - DNA, 20 bp, synthetic construct
  misc_feature 1..20: note = Description of Artificial Sequence: Synthetic oligonucleotide
  misc_feature 1..20: note = Target: SCN10A; (-) strand; PAM type: YTN; PAM sequence: CTA
  source 1..20: mol_type = other DNA
aacccacatcttcaaaagca

SEQ ID NO: 56641 - DNA, 20 bp, synthetic construct
  misc_feature 1..20: note = Description of Artificial Sequence: Synthetic oligonucleotide
  misc_feature 1..20: note = Target: SCN10A; (-) strand; PAM type: YTN; PAM sequence: CTA
  source 1..20: mol_type = other DNA
actaaacccacatcttcaaa

SEQ ID NO: 56642 - DNA, 20 bp, synthetic construct
  misc_feature 1..20: note = Description of Artificial Sequence: Synthetic oligonucleotide
  misc_feature 1..20: note = Target: SCN10A; (-) strand; PAM type: YTN; PAM sequence: TTA
  source 1..20: mol_type = other DNA
tgatagaaactaactaaacc

SEQ ID NO: 56643 - DNA, 20 bp, synthetic construct
  misc_feature 1..20: note = Description of Artificial Sequence: Synthetic oligonucleotide
  misc_feature 1..20: note = Target: SCN10A; (-) strand; PAM type: YTN; PAM sequence: TTT
  source 1..20: mol_type = other DNA
atgatagaaactaactaaac

SEQ ID NO: 56644 - DNA, 20 bp, synthetic construct
  misc_feature 1..20: note = Description of Artificial Sequence: Synthetic oligonucleotide
  misc_feature 1..20: note = Target: SCN10A; (-) strand; PAM type: YTN; PAM sequence: TTA
  source 1..20: mol_type = other DNA
tgacatttatgatagaaact

SEQ ID NO: 56645 - DNA, 20 bp, synthetic construct
  misc_feature 1..20: note = Description of Artificial Sequence: Synthetic oligonucleotide
  misc_feature 1..20: note = Target: SCN10A; (-) strand; PAM type: YTN; PAM sequence: TTT
  source 1..20: mol_type = other DNA
atgacatttatgatagaaac

SEQ ID NO: 56646 - DNA, 20 bp, synthetic construct
  misc_feature 1..20: note = Description of Artificial Sequence: Synthetic oligonucleotide
  misc_feature 1..20: note = Target: SCN10A; (-) strand; PAM type: YTN; PAM sequence: TTT
  source 1..20: mol_type = other DNA
tatgacatttatgatagaaa

SEQ ID NO: 56647 - DNA, 20 bp, synthetic construct
  misc_feature 1..20: note = Description of Artificial Sequence: Synthetic oligonucleotide
  misc_feature 1..20: note = Target: SCN10A; (-) strand; PAM type: YTN; PAM sequence: TTT
  source 1..20: mol_type = other DNA
ttatgacatttatgatagaa

SEQ ID NO: 56648 - DNA, 20 bp, synthetic construct
  misc_feature 1..20: note = Description of Artificial Sequence: Synthetic oligonucleotide
  misc_feature 1..20: note = Target: SCN10A; (-) strand; PAM type: YTN; PAM sequence: TTG
  source 1..20: mol_type = other DNA
aatttttatgacatttatga

SEQ ID NO: 56649 - DNA, 20 bp, synthetic construct
  misc_feature 1..20: note = Description of Artificial Sequence: Synthetic oligonucleotide
  misc_feature 1..20: note = Target: SCN10A; (-) strand; PAM type: YTN; PAM sequence: TTT
  source 1..20: mol_type = other DNA
gaatttttatgacatttatg

SEQ ID NO: 56650 - DNA, 20 bp, synthetic construct
  misc_feature 1..20: note = Description of Artificial Sequence: Synthetic oligonucleotide
  misc_feature 1..20: note = Target: SCN10A; (-) strand; PAM type: YTN; PAM sequence: CTT
  source 1..20: mol_type = other DNA
tgaatttttatgacatttat

SEQ ID NO: 56651 - DNA, 20 bp, synthetic construct
  misc_feature 1..20: note = Description of Artificial Sequence: Synthetic oligonucleotide
  misc_feature 1..20: note = Target: SCN10A; (-) strand; PAM type: YTN; PAM sequence: CTC
  source 1..20: mol_type = other DNA
tttgaatttttatgacattt

SEQ ID NO: 56652 - DNA, 20 bp, synthetic construct
  misc_feature 1..20: note = Description of Artificial Sequence: Synthetic oligonucleotide
  misc_feature 1..20: note = Target: SCN10A; (-) strand; PAM type: YTN; PAM sequence: TTG
  source 1..20: mol_type = other DNA
atgatctctttgaattttta

SEQ ID NO: 56653 - DNA, 20 bp, synthetic construct
  misc_feature 1..20: note = Description of Artificial Sequence: Synthetic oligonucleotide
  misc_feature 1..20: note = Target: SCN10A; (-) strand; PAM type: YTN; PAM sequence: TTT
  source 1..20: mol_type = other DNA
gatgatctctttgaattttt

SEQ ID NO: 56654 - DNA, 20 bp, synthetic construct
  misc_feature 1..20: note = Description of Artificial Sequence: Synthetic oligonucleotide
  misc_feature 1..20: note = Target: SCN10A; (-) strand; PAM type: YTN; PAM sequence: TTA
  source 1..20: mol_type = other DNA
tttgatgatctctttgaatt

SEQ ID NO: 56655 - DNA, 20 bp, synthetic construct
  misc_feature 1..20: note = Description of Artificial Sequence: Synthetic oligonucleotide
  misc_feature 1..20: note = Target: SCN10A; (-) strand; PAM type: YTN; PAM sequence: CTT
  source 1..20: mol_type = other DNA
atttgatgatctctttgaat

SEQ ID NO: 56656 - DNA, 20 bp, synthetic construct
  misc_feature 1..20: note = Description of Artificial Sequence: Synthetic oligonucleotide
  misc_feature 1..20: note = Target: SCN10A; (-) strand; PAM type: YTN; PAM sequence: CTA
  source 1..20: mol_type = other DNA
acttatttgatgatctcttt

SEQ ID NO: 56657 - DNA, 20 bp, synthetic construct
  misc_feature 1..20: note = Description of Artificial Sequence: Synthetic oligonucleotide
  misc_feature 1..20: note = Target: SCN10A; (-) strand; PAM type: YTN; PAM sequence: CTC
  source 1..20: mol_type = other DNA
taacttatttgatgatctct

SEQ ID NO: 56658 - DNA, 20 bp, synthetic construct
  misc_feature 1..20: note = Description of Artificial Sequence: Synthetic oligonucleotide
  misc_feature 1..20: note = Target: SCN10A; (-) strand; PAM type: YTN; PAM sequence: TTA
  source 1..20: mol_type = other DNA
acaaccaaaaaaaatatata

SEQ ID NO: 56659 - DNA, 20 bp, synthetic construct
  misc_feature 1..20: note = Description of Artificial Sequence: Synthetic oligonucleotide
  misc_feature 1..20: note = Target: SCN10A; (-) strand; PAM type: YTN; PAM sequence: TTC
  source 1..20: mol_type = other DNA
cgttaacaaccaaaaaaaat

SEQ ID NO: 56660 - DNA, 20 bp, synthetic construct
  misc_feature 1..20: note = Description of Artificial Sequence: Synthetic oligonucleotide
  misc_feature 1..20: note = Target: SCN10A; (-) strand; PAM type: YTN; PAM sequence: CTA
  source 1..20: mol_type = other DNA
aagattccgttaacaaccaa

SEQ ID NO: 56661 - DNA, 20 bp, synthetic construct
  misc_feature 1..20: note = Description of Artificial Sequence: Synthetic oligonucleotide
  misc_feature 1..20: note = Target: SCN10A; (-) strand; PAM type: YTN; PAM sequence: CTG
  source 1..20: mol_type = other DNA
ctaaagattccgttaacaac

SEQ ID NO: 56662 - DNA, 20 bp, synthetic construct
  misc_feature 1..20: note = Description of Artificial Sequence: Synthetic oligonucleotide
  misc_feature 1..20: note = Target: SCN10A; (-) strand; PAM type: YTN; PAM sequence: CTG
  source 1..20: mol_type = other DNA
ggtgatgtggcagtctgcta

SEQ ID NO: 56663 - DNA, 20 bp, synthetic construct
  misc_feature 1..20: note = Description of Artificial Sequence: Synthetic oligonucleotide
  misc_feature 1..20: note = Target: SCN10A; (-) strand; PAM type: YTN; PAM sequence: TTG
  source 1..20: mol_type = other DNA
gccctgggtgatgtggcagt

SEQ ID NO: 56664 - DNA, 20 bp, synthetic construct
  misc_feature 1..20: note = Description of Artificial Sequence: Synthetic oligonucleotide
  misc_feature 1..20: note = Target: SCN10A; (-) strand; PAM type: YTN; PAM sequence: CTT
  source 1..20: mol_type = other DNA
ggccctgggtgatgtggcag

SEQ ID NO: 56665 - DNA, 20 bp, synthetic construct
  misc_feature 1..20: note = Description of Artificial Sequence: Synthetic oligonucleotide
  misc_feature 1..20: note = Target: SCN10A; (-) strand; PAM type: YTN; PAM sequence: CTC
  source 1..20: mol_type = other DNA
cttggccctgggtgatgtgg

SEQ ID NO: 56666 - DNA, 20 bp, synthetic construct
  misc_feature 1..20: note = Description of Artificial Sequence: Synthetic oligonucleotide
  misc_feature 1..20: note = Target: SCN10A; (-) strand; PAM type: YTN; PAM sequence: CTC
  source 1..20: mol_type = other DNA
ggtcccacccagcccagaaa

SEQ ID NO: 56667 - DNA, 20 bp, synthetic construct
  misc_feature 1..20: note = Description of Artificial Sequence: Synthetic oligonucleotide
  misc_feature 1..20: note = Target: SCN10A; (-) strand; PAM type: YTN; PAM sequence: TTG
  source 1..20: mol_type = other DNA
gagaggaagtctcggtccca

SEQ ID NO: 56668 - DNA, 20 bp, synthetic construct
  misc_feature 1..20: note = Description of Artificial Sequence: Synthetic oligonucleotide
  misc_feature 1..20: note = Target: SCN10A; (-) strand; PAM type: YTN; PAM sequence: CTT
  source 1..20: mol_type = other DNA
ggagaggaagtctcggtccc

SEQ ID NO: 56669 - DNA, 20 bp, synthetic construct
  misc_feature 1..20: note = Description of Artificial Sequence: Synthetic oligonucleotide
  misc_feature 1..20: note = Target: SCN10A; (-) strand; PAM type: YTN; PAM sequence: CTC
  source 1..20: mol_type = other DNA
ttggagaggaagtctcggtc

SEQ ID NO: 56670 - DNA, 20 bp, synthetic construct
  misc_feature 1..20: note = Description of Artificial Sequence: Synthetic oligonucleotide
  misc_feature 1..20: note = Target: SCN10A; (-) strand; PAM type: YTN; PAM sequence: CTC
  source 1..20: mol_type = other DNA
agctcttggagaggaagtct

SEQ ID NO: 56671 - DNA, 20 bp, synthetic construct
  misc_feature 1..20: note = Description of Artificial Sequence: Synthetic oligonucleotide
  misc_feature 1..20: note = Target: SCN10A; (-) strand; PAM type: YTN; PAM sequence: CTC
  source 1..20: mol_type = other DNA
tcagctcttggagaggaagt

SEQ ID NO: 56672 - DNA, 20 bp, synthetic construct
  misc_feature 1..20: note = Description of Artificial Sequence: Synthetic oligonucleotide
  misc_feature 1..20: note = Target: SCN10A; (-) strand; PAM type: YTN; PAM sequence: CTG
  source 1..20: mol_type = other DNA
ctctcagctcttggagagga

SEQ ID NO: 56673 - DNA, 20 bp, synthetic construct
  misc_feature 1..20: note = Description of Artificial Sequence: Synthetic oligonucleotide
  misc_feature 1..20: note = Target: SCN10A; (-) strand; PAM type: YTN; PAM sequence: CTA
  source 1..20: mol_type = other DNA
gtaggaatgtctgctctcag

SEQ ID NO: 56674 - DNA, 20 bp, synthetic construct
  misc_feature 1..20: note = Description of Artificial Sequence: Synthetic oligonucleotide
  misc_feature 1..20: note = Target: SCN10A; (-) strand; PAM type: YTN; PAM sequence: CTA
  source 1..20: mol_type = other DNA
ctagtaggaatgtctgctct

SEQ ID NO: 56675 - DNA, 20 bp, synthetic construct
  misc_feature 1..20: note = Description of Artificial Sequence: Synthetic oligonucleotide
  misc_feature 1..20: note = Target: SCN10A; (-) strand; PAM type: YTN; PAM sequence: CTA
  source 1..20: mol_type = other DNA
cagcacacaccgggtaagag

SEQ ID NO: 56676 - DNA, 20 bp, synthetic construct
  misc_feature 1..20: note = Description of Artificial Sequence: Synthetic oligonucleotide
  misc_feature 1..20: note = Target: SCN10A; (-) strand; PAM type: YTN; PAM sequence: TTC
  source 1..20: mol_type = other DNA
tacagcacacaccgggtaag

SEQ ID NO: 56677 - DNA, 20 bp, synthetic construct
  misc_feature 1..20: note = Description of Artificial Sequence: Synthetic oligonucleotide
  misc_feature 1..20: note = Target: SCN10A; (-) strand; PAM type: YTN; PAM sequence: CTA
  source 1..20: mol_type = other DNA
gatccgttctacagcacaca

SEQ ID NO: 56678 - DNA, 20 bp, synthetic construct
  misc_feature 1..20: note = Description of Artificial Sequence: Synthetic oligonucleotide
  misc_feature 1..20: note = Target: SCN10A; (-) strand; PAM type: YTN; PAM sequence: CTG
  source 1..20: mol_type = other DNA
gaggatctagatccgttcta

SEQ ID NO: 56679 - DNA, 20 bp, synthetic construct
  misc_feature 1..20: note = Description of Artificial Sequence: Synthetic oligonucleotide
  misc_feature 1..20: note = Target: SCN10A; (-) strand; PAM type: YTN; PAM sequence: CTG
  source 1..20: mol_type = other DNA
atcggggagcccctggagga

SEQ ID NO: 56680 - DNA, 20 bp, synthetic construct
  misc_feature 1..20: note = Description of Artificial Sequence: Synthetic oligonucleotide
  misc_feature 1..20: note = Target: SCN10A; (-) strand; PAM type: YTN; PAM sequence: CTC
  source 1..20: mol_type = other DNA
ccagcagaactgatcgggga

SEQ ID NO: 56681 - DNA, 20 bp, synthetic construct
  misc_feature 1..20: note = Description of Artificial Sequence: Synthetic oligonucleotide
  misc_feature 1..20: note = Target: SCN10A; (-) strand; PAM type: YTN; PAM sequence: CTA
  source 1..20: mol_type = other DNA
tggtgagctcccagcagaac

SEQ ID NO: 56682 - DNA, 20 bp, synthetic construct
  misc_feature 1..20: note = Description of Artificial Sequence: Synthetic oligonucleotide
  misc_feature 1..20: note = Target: SCN10A; (-) strand; PAM type: YTN; PAM sequence: TTC
  source 1..20: mol_type = other DNA
tatggtgagctcccagcaga

SEQ ID NO: 56683 - DNA, 20 bp, synthetic construct
  misc_feature 1..20: note = Description of Artificial Sequence: Synthetic oligonucleotide
  misc_feature 1..20: note = Target: SCN10A; (-) strand; PAM type: YTN; PAM sequence: CTG
  source 1..20: mol_type = other DNA
cccaagttctatggtgagct

SEQ ID NO: 56684 - DNA, 20 bp, synthetic construct
  misc_feature 1..20: note = Description of Artificial Sequence: Synthetic oligonucleotide
  misc_feature 1..20: note = Target: SCN10A; (-) strand; PAM type: YTN; PAM sequence: CTG
  source 1..20: mol_type = other DNA
caaccagctgcccaagttct

SEQ ID NO: 56685 - DNA, 20 bp, synthetic construct
  misc_feature 1..20: note = Description of Artificial Sequence: Synthetic oligonucleotide
  misc_feature 1..20: note = Target: SCN10A; (-) strand; PAM type: YTN; PAM sequence: TTG
  source 1..20: mol_type = other DNA
aaagcctgcaaccagctgcc

SEQ ID NO: 56686 - DNA, 20 bp, synthetic construct
  misc_feature 1..20: note = Description of Artificial Sequence: Synthetic oligonucleotide
  misc_feature 1..20: note = Target: SCN10A; (-) strand; PAM type: YTN; PAM sequence: CTT
  source 1..20: mol_type = other DNA
gaaagcctgcaaccagctgc

SEQ ID NO: 56687 - DNA, 20 bp, synthetic construct
  misc_feature 1..20: note = Description of Artificial Sequence: Synthetic oligonucleotide
  misc_feature 1..20: note = Target: SCN10A; (-) strand; PAM type: YTN; PAM sequence: CTG
  source 1..20: mol_type = other DNA
gacttgaaagcctgcaacca

SEQ ID NO: 56688 - DNA, 20 bp, synthetic construct
  misc_feature 1..20: note = Description of Artificial Sequence: Synthetic oligonucleotide
  misc_feature 1..20: note = Target: SCN10A; (-) strand; PAM type: YTN; PAM sequence: CTC
  source 1..20: mol_type = other DNA
ggccccagctggacttgaaa

SEQ ID NO: 56689 - DNA, 20 bp, synthetic construct
  misc_feature 1..20: note = Description of Artificial Sequence: Synthetic oligonucleotide
  misc_feature 1..20: note = Target: SCN10A; (-) strand; PAM type: YTN; PAM sequence: CTG
  source 1..20: mol_type = other DNA
ccaagcagggaacaaagaaa

SEQ ID NO: 56690 - DNA, 20 bp, synthetic construct
  misc_feature 1..20: note = Description of Artificial Sequence: Synthetic oligonucleotide
  misc_feature 1..20: note = Target: SCN10A; (-) strand; PAM type: YTN; PAM sequence: TTG
  source 1..20: mol_type = other DNA
ctgccaagcagggaacaaag

SEQ ID NO: 56691 - DNA, 20 bp, synthetic construct
  misc_feature 1..20: note = Description of Artificial Sequence: Synthetic oligonucleotide
  misc_feature 1..20: note = Target: SCN10A; (-) strand; PAM type: YTN; PAM sequence: CTG
  source 1..20: mol_type = other DNA
gtggagatagagaagcaaat

SEQ ID NO: 56692 - DNA, 20 bp, synthetic construct
  misc_feature 1..20: note = Description of Artificial Sequence: Synthetic oligonucleotide
  misc_feature 1..20: note = Target: SCN10A; (-) strand; PAM type: YTN; PAM sequence: CTC
  source 1..20: mol_type = other DNA
cggagtcactggtggagata

SEQ ID NO: 56693 - DNA, 20 bp, synthetic construct
  misc_feature 1..20: note = Description of Artificial Sequence: Synthetic oligonucleotide
  misc_feature 1..20: note = Target: SCN10A; (-) strand; PAM type: YTN; PAM sequence: TTA
  source 1..20: mol_type = other DNA
ctccggagtcactggtggag

SEQ ID NO: 56694 - DNA, 20 bp, synthetic construct
  misc_feature 1..20: note = Description of Artificial Sequence: Synthetic oligonucleotide
  misc_feature 1..20: note = Target: SCN10A; (-) strand; PAM type: YTN; PAM sequence: TTT
  source 1..20: mol_type = other DNA
actccggagtcactggtgga

SEQ ID NO: 56695 - DNA, 20 bp, synthetic construct
  misc_feature 1..20: note = Description of Artificial Sequence: Synthetic oligonucleotide
  misc_feature 1..20: note = Target: SCN10A; (-) strand; PAM type: YTN; PAM sequence: CTT
  source 1..20: mol_type = other DNA
tactccggagtcactggtgg

SEQ ID NO: 56696 - DNA, 20 bp, synthetic construct
  misc_feature 1..20: note = Description of Artificial Sequence: Synthetic oligonucleotide
  misc_feature 1..20: note = Target: SCN10A; (-) strand; PAM type: YTN; PAM sequence: TTC
  source 1..20: mol_type = other DNA
cgtcgctttactccggagtc

SEQ ID NO: 56697 - DNA, 20 bp, synthetic construct
  misc_feature 1..20: note = Description of Artificial Sequence: Synthetic oligonucleotide
  misc_feature 1..20: note = Target: SCN10A; (-) strand; PAM type: YTN; PAM sequence: CTT
  source 1..20: mol_type = other DNA
ccgtcgctttactccggagt

SEQ ID NO: 56698 - DNA, 20 bp, synthetic construct
  misc_feature 1..20: note = Description of Artificial Sequence: Synthetic oligonucleotide
  misc_feature 1..20: note = Target: SCN10A; (-) strand; PAM type: YTN; PAM sequence: CTA
  source 1..20: mol_type = other DNA
acaacttccgtcgctttact

SEQ ID NO: 56699 - DNA, 20 bp, synthetic construct
  misc_feature 1..20: note = Description of Artificial Sequence: Synthetic oligonucleotide
  misc_feature 1..20: note = Target: SCN10A; (-) strand; PAM type: YTN; PAM sequence: CTC
  source 1..20: mol_type = other DNA
gaaactaacaacttccgtcg

SEQ ID NO: 56700 - DNA, 20 bp, synthetic construct
  misc_feature 1..20: note = Description of Artificial Sequence: Synthetic oligonucleotide
  misc_feature 1..20: note = Target: SCN10A; (-) strand; PAM type: YTN; PAM sequence: TTG
  source 1..20: mol_type = other DNA
gatccctcgaaactaacaac

SEQ ID NO: 56701 - DNA, 20 bp, synthetic construct
  misc_feature 1..20: note = Description of Artificial Sequence: Synthetic oligonucleotide
  misc_feature 1..20: note = Target: SCN10A; (-) strand; PAM type: YTN; PAM sequence: TTC
  source 1..20: mol_type = other DNA
cccattggatccctcgaaac

SEQ ID NO: 56702 - DNA, 20 bp, synthetic construct
  misc_feature 1..20: note = Description of Artificial Sequence: Synthetic oligonucleotide
  misc_feature 1..20: note = Target: SCN10A; (-) strand; PAM type: YTN; PAM sequence: CTG
  source 1..20: mol_type = other DNA
aagaagaatgagaagatgga

SEQ ID NO: 56703 - DNA, 20 bp, synthetic construct
  misc_feature 1..20: note = Description of Artificial Sequence: Synthetic oligonucleotide
  misc_feature 1..20: note = Target: SCN10A; (-) strand; PAM type: YTN; PAM sequence: TTC
  source 1..20: mol_type = other DNA
ctgaagaagaatgagaagat

SEQ ID NO: 56704 - DNA, 20 bp, synthetic construct
  misc_feature 1..20: note = Description of Artificial Sequence: Synthetic oligonucleotide
  misc_feature 1..20: note = Target: SCN10A; (-) strand; PAM type: YTN; PAM sequence: CTT
  source 1..20: mol_type = other DNA
cctgaagaagaatgagaaga

SEQ ID NO: 56705 - DNA, 20 bp, synthetic construct
  misc_feature 1..20: note = Description of Artificial Sequence: Synthetic oligonucleotide
  misc_feature 1..20: note = Target: SCN10A; (-) strand; PAM type: YTN; PAM sequence: TTA
  source 1..20: mol_type = other DNA
taagagtataaatacttcct

SEQ ID NO: 56706 - DNA, 20 bp, synthetic construct
  misc_feature 1..20: note = Description of Artificial Sequence: Synthetic oligonucleotide
  misc_feature 1..20: note = Target: SCN10A; (-) strand; PAM type: YTN; PAM sequence: CTT
  source 1..20: mol_type = other DNA
ataagagtataaatacttcc

SEQ ID NO: 56707 - DNA, 20 bp, synthetic construct
  misc_feature 1..20: note = Description of Artificial Sequence: Synthetic oligonucleotide
  misc_feature 1..20: note = Target: SCN10A; (-) strand; PAM type: YTN; PAM sequence: CTC
  source 1..20: mol_type = other DNA
ttataagagtataaatactt

SEQ ID NO: 56708 - DNA, 20 bp, synthetic construct
  misc_feature 1..20: note = Description of Artificial Sequence: Synthetic oligonucleotide
  misc_feature 1..20: note = Target: SCN10A; (-) strand; PAM type: YTN; PAM sequence: TTA
  source 1..20: mol_type = other DNA
tgtccactcttataagagta

SEQ ID NO: 56709 - DNA, 20 bp, synthetic construct
  misc_feature 1..20: note = Description of Artificial Sequence: Synthetic oligonucleotide
  misc_feature 1..20: note = Target: SCN10A; (-) strand; PAM type: YTN; PAM sequence: CTG
  source 1..20: mol_type = other DNA
tggttatgtccactcttata

SEQ ID NO: 56710 - DNA, 20 bp, synthetic construct
  misc_feature 1..20: note = Description of Artificial Sequence: Synthetic oligonucleotide
  misc_feature 1..20: note = Target: SCN10A; (-) strand; PAM type: YTN; PAM sequence: CTC
  source 1..20: mol_type = other DNA
tgtggttatgtccactctta

SEQ ID NO: 56711 - DNA, 20 bp, synthetic construct
  misc_feature 1..20: note = Description of Artificial Sequence: Synthetic oligonucleotide
  misc_feature 1..20: note = Target: SCN10A; (-) strand; PAM type: YTN; PAM sequence: CTC
  source 1..20: mol_type = other DNA
tctgtggttatgtccactct

SEQ ID NO: 56712 - DNA, 20 bp, synthetic construct
  misc_feature 1..20: note = Description of Artificial Sequence: Synthetic oligonucleotide
  misc_feature 1..20: note = Target: SCN10A; (-) strand; PAM type: YTN; PAM sequence: CTG
  source 1..20: mol_type = other DNA
tcacctctctgtggttatgt

SEQ ID NO: 56713 - DNA, 20 bp, synthetic construct
  misc_feature 1..20: note = Description of Artificial Sequence: Synthetic oligonucleotide
  misc_feature 1..20: note = Target: SCN10A; (-) strand; PAM type: YTN; PAM sequence: CTG
  source 1..20: mol_type = other DNA
acaatcaagatgggacagat

SEQ ID NO: 56714 - DNA, 20 bp, synthetic construct
  misc_feature 1..20: note = Description of Artificial Sequence: Synthetic oligonucleotide
  misc_feature 1..20: note = Target: SCN10A; (-) strand; PAM type: YTN; PAM sequence: TTC
  source 1..20: mol_type = other DNA
tgacaatcaagatgggacag

SEQ ID NO: 56715 - DNA, 20 bp, synthetic construct
  misc_feature 1..20: note = Description of Artificial Sequence: Synthetic oligonucleotide
  misc_feature 1..20: note = Target: SCN10A; (-) strand; PAM type: YTN; PAM sequence: CTG
  source 1..20: mol_type = other DNA
ttctgacaatcaagatggga

SEQ ID NO: 56716 - DNA, 20 bp, synthetic construct
  misc_feature 1..20: note = Description of Artificial Sequence: Synthetic oligonucleotide
  misc_feature 1..20: note = Target: SCN10A; (-) strand; PAM type: YTN; PAM sequence: TTC
  source 1..20: mol_type = other DNA
agggaggggccagatatgag

SEQ ID NO: 56717 - DNA, 20 bp, synthetic construct
  misc_feature 1..20: note = Description of Artificial Sequence: Synthetic oligonucleotide
  misc_feature 1..20: note = Target: SCN10A; (-) strand; PAM type: YTN; PAM sequence: CTG
  source 1..20: mol_type = other DNA
ggaggagccaagtgtgagtt

SEQ ID NO: 56718 - DNA, 20 bp, synthetic construct
  misc_feature 1..20: note = Description of Artificial Sequence: Synthetic oligonucleotide
  misc_feature 1..20: note = Target: SCN10A; (-) strand; PAM type: YTN; PAM sequence: TTC
  source 1..20: mol_type = other DNA
ctgggaggagccaagtgtga

SEQ ID NO: 56719 - DNA, 20 bp, synthetic construct
  misc_feature 1..20: note = Description of Artificial Sequence: Synthetic oligonucleotide
  misc_feature 1..20: note = Target: SCN10A; (-) strand; PAM type: YTN; PAM sequence: TTG
  source 1..20: mol_type = other DNA
caggggaatgggttcctggg

SEQ ID NO: 56720 - DNA, 20 bp, synthetic construct
  misc_feature 1..20: note = Description of Artificial Sequence: Synthetic oligonucleotide
  misc_feature 1..20: note = Target: SCN10A; (-) strand; PAM type: YTN; PAM sequence: CTT
  source 1..20: mol_type = other DNA
gcaggggaatgggttcctgg

SEQ ID NO: 56721 - DNA, 20 bp, synthetic construct
  misc_feature 1..20: note = Description of Artificial Sequence: Synthetic oligonucleotide
  misc_feature 1..20: note = Target: SCN10A; (-) strand; PAM type: YTN; PAM sequence: CTG
  source 1..20: mol_type = other DNA
aatgccttgcaggggaatgg

SEQ ID NO: 56722 - DNA, 20 bp, synthetic construct
  misc_feature 1..20: note = Description of Artificial Sequence: Synthetic oligonucleotide
  misc_feature 1..20: note = Target: SCN10A; (-) strand; PAM type: YTN; PAM sequence: CTC
  source 1..20: mol_type = other DNA
ccctgaatgccttgcagggg

SEQ ID NO: 56723 - DNA, 20 bp, synthetic construct
  misc_feature 1..20: note = Description of Artificial Sequence: Synthetic oligonucleotide
  misc_feature 1..20: note = Target: SCN10A; (-) strand; PAM type: YTN; PAM sequence: TTG
  source 1..20: mol_type = other DNA
aataaacagcctcccctgaa

SEQ ID NO: 56724 - DNA, 20 bp, synthetic construct
  misc_feature 1..20: note = Description of Artificial Sequence: Synthetic oligonucleotide
  misc_feature 1..20: note = Target: SCN10A; (-) strand; PAM type: YTN; PAM sequence: CTG
  source 1..20: mol_type = other DNA
gaggagggttgaataaacag

SEQ ID NO: 56725 - DNA, 20 bp, synthetic construct
  misc_feature 1..20: note = Description of Artificial Sequence: Synthetic oligonucleotide
  misc_feature 1..20: note = Target: SCN10A; (-) strand; PAM type: YTN; PAM sequence: CTG
  source 1..20: mol_type = other DNA
aggcacctggaggagggttg

SEQ ID NO: 56726 - DNA, 20 bp, synthetic construct
  misc_feature 1..20: note = Description of Artificial Sequence: Synthetic oligonucleotide
  misc_feature 1..20: note = Target: SCN10A; (-) strand; PAM type: YTN; PAM sequence: CTG
  source 1..20: mol_type = other DNA
gtggtggtggtaggatggta

SEQ ID NO: 56727 - DNA, 20 bp, synthetic construct
  misc_feature 1..20: note = Description of Artificial Sequence: Synthetic oligonucleotide
  misc_feature 1..20: note = Target: SCN10A; (-) strand; PAM type: YTN; PAM sequence: CTA
  source 1..20: mol_type = other DNA
aatctggtggtggtggtagg

SEQ ID NO: 56728 - DNA, 20 bp, synthetic construct
  misc_feature 1..20: note = Description of Artificial Sequence: Synthetic oligonucleotide
  misc_feature 1..20: note = Target: SCN10A; (-) strand; PAM type: YTN; PAM sequence: CTG
  source 1..20: mol_type = other DNA
gaaatgaggagagagggcag

SEQ ID NO: 56729 - DNA, 20 bp, synthetic construct
  misc_feature 1..20: note = Description of Artificial Sequence: Synthetic oligonucleotide
  misc_feature 1..20: note = Target: SCN10A; (-) strand; PAM type: YTN; PAM sequence: CTC
  source 1..20: mol_type = other DNA
agtggtcctggaaatgagga

SEQ ID NO: 56730 - DNA, 20 bp, synthetic construct
  misc_feature 1..20: note = Description of Artificial Sequence: Synthetic oligonucleotide
  misc_feature 1..20: note = Target: SCN10A; (-) strand; PAM type: YTN; PAM sequence: CTG
  source 1..20: mol_type = other DNA
gaactcagtggtcctggaaa

SEQ ID NO: 56731 - DNA, 20 bp, synthetic construct
  misc_feature 1..20: note = Description of Artificial Sequence: Synthetic oligonucleotide
  misc_feature 1..20: note = Target: SCN10A; (-) strand; PAM type: YTN; PAM sequence: TTG
  source 1..20: mol_type = other DNA
atgaatatgggagagtgcct

SEQ ID NO: 56732 - DNA, 20 bp, synthetic construct
  misc_feature 1..20: note = Description of Artificial Sequence: Synthetic oligonucleotide
  misc_feature 1..20: note = Target: SCN10A; (-) strand; PAM type: YTN; PAM sequence: TTT
  source 1..20: mol_type = other DNA
gatgaatatgggagagtgcc

SEQ ID NO: 56733 - DNA, 20 bp, synthetic construct
  misc_feature 1..20: note = Description of Artificial Sequence: Synthetic oligonucleotide
  misc_feature 1..20: note = Target: SCN10A; (-) strand; PAM type: YTN; PAM sequence: CTT
  source 1..20: mol_type = other DNA
tgatgaatatgggagagtgc

SEQ ID NO: 56734 - DNA, 20 bp, synthetic construct
  misc_feature 1..20: note = Description of Artificial Sequence: Synthetic oligonucleotide
  misc_feature 1..20: note = Target: SCN10A; (-) strand; PAM type: YTN; PAM sequence: CTA
  source 1..20: mol_type = other DNA
taaaccaaagtctttgatga

SEQ ID NO: 56735 - DNA, 20 bp, synthetic construct
  misc_feature 1..20: note = Description of Artificial Sequence: Synthetic oligonucleotide
  misc_feature 1..20: note = Target: SCN10A; (-) strand; PAM type: YTN; PAM sequence: TTA
  source 1..20: mol_type = other DNA
agataaagtagactataaac

SEQ ID NO: 56736 - DNA, 20 bp, synthetic construct
  misc_feature 1..20: note = Description of Artificial Sequence: Synthetic oligonucleotide
  misc_feature 1..20: note = Target: SCN10A; (-) strand; PAM type: YTN; PAM sequence: CTT
  source 1..20: mol_type = other DNA
aagataaagtagactataaa

SEQ ID NO: 56737 - DNA, 20 bp, synthetic construct
  misc_feature 1..20: note = Description of Artificial Sequence: Synthetic oligonucleotide
  misc_feature 1..20: note = Target: SCN10A; (-) strand; PAM type: YTN; PAM sequence: TTG
  source 1..20: mol_type = other DNA
tgataagaaagtagcatgag

SEQ ID NO: 56738 - DNA, 20 bp, synthetic construct
  misc_feature 1..20: note = Description of Artificial Sequence: Synthetic oligonucleotide
  misc_feature 1..20: note = Target: SCN10A; (-) strand; PAM type: YTN; PAM sequence: TTG
  source 1..20: mol_type = other DNA
acaatgtcaataaataaaag

SEQ ID NO: 56739 - DNA, 20 bp, synthetic construct
  misc_feature 1..20: note = Description of Artificial Sequence: Synthetic oligonucleotide
  misc_feature 1..20: note = Target: SCN10A; (-) strand; PAM type: YTN; PAM sequence: TTC
  source 1..20: mol_type = other DNA
aaacaggtggagaaatgttg

SEQ ID NO: 56740 - DNA, 20 bp, synthetic construct
  misc_feature 1..20: note = Description of Artificial Sequence: Synthetic oligonucleotide
  misc_feature 1..20: note = Target: SCN10A; (-) strand; PAM type: YTN; PAM sequence: TTG
  source 1..20: mol_type = other DNA
gaggtccaaatgaaattcaa

SEQ ID NO: 56741 - DNA, 20 bp, synthetic construct
  misc_feature 1..20: note = Description of Artificial Sequence: Synthetic oligonucleotide
  misc_feature 1..20: note = Target: SCN10A; (-) strand; PAM type: YTN; PAM sequence: CTT
  source 1..20: mol_type = other DNA
ggaggtccaaatgaaattca

SEQ ID NO: 56742 - DNA, 20 bp, synthetic construct
  misc_feature 1..20: note = Description of Artificial Sequence: Synthetic oligonucleotide
  misc_feature 1..20: note = Target: SCN10A; (-) strand; PAM type: YTN; PAM sequence: CTC
  source 1..20: mol_type = other DNA
cagtaacttggaggtccaaa

SEQ ID NO: 56743 - DNA, 20 bp, synthetic construct
  misc_feature 1..20: note = Description of Artificial Sequence: Synthetic oligonucleotide
  misc_feature 1..20: note = Target: SCN10A; (-) strand; PAM type: YTN; PAM sequence: TTC
  source 1..20: mol_type = other DNA
tccagtaacttggaggtcca

SEQ ID NO: 56744 - DNA, 20 bp, synthetic construct
  misc_feature 1..20: note = Description of Artificial Sequence: Synthetic oligonucleotide
  misc_feature 1..20: note = Target: SCN10A; (-) strand; PAM type: YTN; PAM sequence: CTG
  source 1..20: mol_type = other DNA
gagttctccagtaacttgga

SEQ ID NO: 56745 - DNA, 20 bp, synthetic construct
  misc_feature 1..20: note = Description of Artificial Sequence: Synthetic oligonucleotide
  misc_feature 1..20: note = Target: SCN10A; (-) strand; PAM type: YTN; PAM sequence: CTC
  source 1..20: mol_type = other DNA
caataatctggagttctcca

SEQ ID NO: 56746 - DNA, 20 bp, synthetic construct
  misc_feature 1..20: note = Description of Artificial Sequence: Synthetic oligonucleotide
  misc_feature 1..20: note = Target: SCN10A; (-) strand; PAM type: YTN; PAM sequence: TTC
  source 1..20: mol_type = other DNA
tccaataatctggagttctc

SEQ ID NO: 56747 - DNA, 20 bp, synthetic construct
  misc_feature 1..20: note = Description of Artificial Sequence: Synthetic oligonucleotide
  misc_feature 1..20: note = Target: SCN10A; (-) strand; PAM type: YTN; PAM sequence: TTG
  source 1..20: mol_type = other DNA
gaggtcccaatgaaattctc

SEQ ID NO: 56748 - DNA, 20 bp, synthetic construct
  misc_feature 1..20: note = Description of Artificial Sequence: Synthetic oligonucleotide
  misc_feature 1..20: note = Target: SCN10A; (-) strand; PAM type: YTN; PAM sequence: CTG
  source 1..20: mol_type = other DNA
gaggtcccagagaaattgga

SEQ ID NO: 56749 - DNA, 20 bp, synthetic construct
  misc_feature 1..20: note = Description of Artificial Sequence: Synthetic oligonucleotide
  misc_feature 1..20: note = Target: SCN10A; (-) strand; PAM type: YTN; PAM sequence: CTG
  source 1..20: mol_type = other DNA
aacctggaggtcccagagaa

SEQ ID NO: 56750 - DNA, 20 bp, synthetic construct
  misc_feature 1..20: note = Description of Artificial Sequence: Synthetic oligonucleotide
  misc_feature 1..20: note = Target: SCN10A; (-) strand; PAM type: YTN; PAM sequence: TTC
  source 1..20: mol_type = other DNA
agccacagactgaacctgga

SEQ ID NO: 56751 - DNA, 20 bp, synthetic construct
  misc_feature 1..20: note = Description of Artificial Sequence: Synthetic oligonucleotide
  misc_feature 1..20: note = Target: SCN10A; (-) strand; PAM type: YTN; PAM sequence: TTA
  source 1..20: mol_type = other DNA
tggggaaaagtgttcagcca

SEQ ID NO: 56752 - DNA, 20 bp, synthetic construct
  misc_feature 1..20: note = Description of Artificial Sequence: Synthetic oligonucleotide
  misc_feature 1..20: note = Target: SCN10A; (-) strand; PAM type: YTN; PAM sequence: CTG
  source 1..20: mol_type = other DNA
gttatggggaaaagtgttca

SEQ ID NO: 56753 - DNA, 20 bp, synthetic construct
  misc_feature 1..20: note = Description of Artificial Sequence: Synthetic oligonucleotide
  misc_feature 1..20: note = Target: SCN10A; (-) strand; PAM type: YTN; PAM sequence: CTA
  source 1..20: mol_type = other DNA
atctggttatggggaaaagt

SEQ ID NO: 56754 - DNA, 20 bp, synthetic construct
  misc_feature 1..20: note = Description of Artificial Sequence: Synthetic oligonucleotide
  misc_feature 1..20: note = Target: SCN10A; (-) strand; PAM type: YTN; PAM sequence: TTG
  source 1..20: mol_type = other DNA
tggaccacaggtctaatctg

SEQ ID NO: 56755 - DNA, 20 bp, synthetic construct
  misc_feature 1..20: note = Description of Artificial Sequence: Synthetic oligonucleotide
  misc_feature 1..20: note = Target: SCN10A; (-) strand; PAM type: YTN; PAM sequence: TTA
  source 1..20: mol_type = other DNA
ggataagggtgagggagtgg

SEQ ID NO: 56756 - DNA, 20 bp, synthetic construct
  misc_feature 1..20: note = Description of Artificial Sequence: Synthetic oligonucleotide
  misc_feature 1..20: note = Target: SCN10A; (-) strand; PAM type: YTN; PAM sequence: TTT
  source 1..20: mol_type = other DNA
aggataagggtgagggagtg

SEQ ID NO: 56757 - DNA, 20 bp, synthetic construct
  misc_feature 1..20: note = Description of Artificial Sequence: Synthetic oligonucleotide
  misc_feature 1..20: note = Target: SCN10A; (-) strand; PAM type: YTN; PAM sequence: TTG
  source 1..20: mol_type = other DNA
ggatttaggataagggtgag

SEQ ID NO: 56758 - DNA, 20 bp, synthetic construct
  misc_feature 1..20: note = Description of Artificial Sequence: Synthetic oligonucleotide
  misc_feature 1..20: note = Target: SCN10A; (-) strand; PAM type: YTN; PAM sequence: CTT
  source 1..20: mol_type = other DNA
gggatttaggataagggtga

SEQ ID NO: 56759 - DNA, 20 bp, synthetic construct
  misc_feature 1..20: note = Description of Artificial Sequence: Synthetic oligonucleotide
  misc_feature 1..20: note = Target: SCN10A; (-) strand; PAM type: YTN; PAM sequence: TTA
  source 1..20: mol_type = other DNA
gccttgggatttaggataag

SEQ ID NO: 56760 - DNA, 20 bp, synthetic construct
  misc_feature 1..20: note = Description of Artificial Sequence: Synthetic oligonucleotide
  misc_feature 1..20: note = Target: SCN10A; (-) strand; PAM type: YTN; PAM sequence: CTT
  source 1..20: mol_type = other DNA
agccttgggatttaggataa

SEQ ID NO: 56761 - DNA, 20 bp, synthetic construct
  misc_feature 1..20: note = Description of Artificial Sequence: Synthetic oligonucleotide
  misc_feature 1..20: note = Target: SCN10A; (-) strand; PAM type: YTN; PAM sequence: TTG
  source 1..20: mol_type = other DNA
acttagccttgggatttagg

SEQ ID NO: 56762 - DNA, 20 bp, synthetic construct
  misc_feature 1..20: note = Description of Artificial Sequence: Synthetic oligonucleotide
  misc_feature 1..20: note = Target: SCN10A; (-) strand; PAM type: YTN; PAM sequence: CTA
  source 1..20: mol_type = other DNA
gattgacttagccttgggat

SEQ ID NO: 56763 - DNA, 20 bp, synthetic construct
  misc_feature 1..20: note = Description of Artificial Sequence: Synthetic oligonucleotide
  misc_feature 1..20: note = Target: SCN10A; (-) strand; PAM type: YTN; PAM sequence: TTC
  source 1..20: mol_type = other DNA
tagattgacttagccttggg

SEQ ID NO: 56764 - DNA, 20 bp, synthetic construct
  misc_feature 1..20: note = Description of Artificial Sequence: Synthetic oligonucleotide
  misc_feature 1..20: note = Target: SCN10A; (-) strand; PAM type: YTN; PAM sequence: CTG
  source 1..20: mol_type = other DNA
ttctagattgacttagcctt

SEQ ID NO: 56765 - DNA, 20 bp, synthetic construct
  misc_feature 1..20: note = Description of Artificial Sequence: Synthetic oligonucleotide
  misc_feature 1..20: note = Target: SCN10A; (-) strand; PAM type: YTN; PAM sequence: TTC
  source 1..20: mol_type = other DNA
aggggaactgttctagattg

SEQ ID NO: 56766 - DNA, 20 bp, synthetic construct
  misc_feature 1..20: note = Description of Artificial Sequence: Synthetic oligonucleotide
  misc_feature 1..20: note = Target: SCN10A; (-) strand; PAM type: YTN; PAM sequence: CTC
  source 1..20: mol_type = other DNA
agcagttcaggggaactgtt

SEQ ID NO: 56767 - DNA, 20 bp, synthetic construct
  misc_feature 1..20: note = Description of Artificial Sequence: Synthetic oligonucleotide
  misc_feature 1..20: note = Target: SCN10A; (-) strand; PAM type: YTN; PAM sequence: TTC
  source 1..20: mol_type = other DNA
cccataacccctcagcagtt

SEQ ID NO: 56768 - DNA, 20 bp, synthetic construct
  misc_feature 1..20: note = Description of Artificial Sequence: Synthetic oligonucleotide
  misc_feature 1..20: note = Target: SCN10A; (-) strand; PAM type: YTN; PAM sequence: CTG
  source 1..20: mol_type = other DNA
aggttccccataacccctca

SEQ ID NO: 56769 - DNA, 20 bp, synthetic construct
  misc_feature 1..20: note = Description of Artificial Sequence: Synthetic oligonucleotide
  misc_feature 1..20: note = Target: SCN10A; (-) strand; PAM type: YTN; PAM sequence: TTC
  source 1..20: mol_type = other DNA
ccaggcaatactgaggttcc

SEQ ID NO: 56770 - DNA, 20 bp, synthetic construct
  misc_feature 1..20: note = Description of Artificial Sequence: Synthetic oligonucleotide
  misc_feature 1..20: note = Target: SCN10A; (-) strand; PAM type: YTN; PAM sequence: CTA
  source 1..20: mol_type = other DNA
gggataccatatgattccca

SEQ ID NO: 56771 - DNA, 20 bp, synthetic construct
  misc_feature 1..20: note = Description of Artificial Sequence: Synthetic oligonucleotide
  misc_feature 1..20: note = Target: SCN10A; (-) strand; PAM type: YTN; PAM sequence: CTG
  source 1..20: mol_type = other DNA
actagggataccatatgatt

SEQ ID NO: 56772 - DNA, 20 bp, synthetic construct
  misc_feature 1..20: note = Description of Artificial Sequence: Synthetic oligonucleotide
  misc_feature 1..20: note = Target: SCN10A; (-) strand; PAM type: YTN; PAM sequence: CTG
  source 1..20: mol_type = other DNA
ctgactagggataccatatg

SEQ ID NO: 56773 - DNA, 20 bp, synthetic construct
  misc_feature 1..20: note = Description of Artificial Sequence: Synthetic oligonucleotide
  misc_feature 1..20: note = Target: SCN10A; (-) strand; PAM type: YTN; PAM sequence: CTA
  source 1..20: mol_type = other DNA
gaagaaactgctgactaggg

SEQ ID NO: 56774 - DNA, 20 bp, synthetic construct
  misc_feature 1..20: note = Description of Artificial Sequence: Synthetic oligonucleotide
  misc_feature 1..20: note = Target: SCN10A; (-) strand; PAM type: YTN; PAM sequence: CTC
  source 1..20: mol_type = other DNA
agactagaagaaactgctga

SEQ ID NO: 56775 - DNA, 20 bp, synthetic construct
  misc_feature 1..20: note = Description of Artificial Sequence: Synthetic oligonucleotide
  misc_feature 1..20: note = Target: SCN10A; (-) strand; PAM type: YTN; PAM sequence: TTG
  source 1..20: mol_type = other DNA
aaacctcagactagaagaaa

SEQ ID NO: 56776 - DNA, 20 bp, synthetic construct
  misc_feature 1..20: note = Description of Artificial Sequence: Synthetic oligonucleotide
  misc_feature 1..20: note = Target: SCN10A; (-) strand; PAM type: YTN; PAM sequence: TTT
  source 1..20: mol_type = other DNA
gaaacctcagactagaagaa

SEQ ID NO: 56777 - DNA, 20 bp, synthetic construct
  misc_feature 1..20: note = Description of Artificial Sequence: Synthetic oligonucleotide
  misc_feature 1..20: note = Target: SCN10A; (-) strand; PAM type: YTN; PAM sequence: CTG
  source 1..20: mol_type = other DNA
caagggaagacagggaatag

SEQ ID NO: 56778 - DNA, 20 bp, synthetic construct
  misc_feature 1..20: note = Description of Artificial Sequence: Synthetic oligonucleotide
  misc_feature 1..20: note = Target: SCN10A; (-) strand; PAM type: YTN; PAM sequence: TTA
  source 1..20: mol_type = other DNA
ctgcaagggaagacagggaa

SEQ ID NO: 56779 - DNA, 20 bp, synthetic construct
  misc_feature 1..20: note = Description of Artificial Sequence: Synthetic oligonucleotide
  misc_feature 1..20: note = Target: SCN10A; (-) strand; PAM type: YTN; PAM sequence: CTT
  source 1..20: mol_type = other DNA
actgcaagggaagacaggga

SEQ ID NO: 56780 - DNA, 20 bp, synthetic construct
  misc_feature 1..20: note = Description of Artificial Sequence: Synthetic oligonucleotide
  misc_feature 1..20: note = Target: SCN10A; (-) strand; PAM type: YTN; PAM sequence: TTG
  source 1..20: mol_type = other DNA
gcttactgcaagggaagaca

SEQ ID NO: 56781 - DNA, 20 bp, synthetic construct
  misc_feature 1..20: note = Description of Artificial Sequence: Synthetic oligonucleotide
  misc_feature 1..20: note = Target: SCN10A; (-) strand; PAM type: YTN; PAM sequence: CTA
  source 1..20: mol_type = other DNA
ggaaatatggtcattggctt

SEQ ID NO: 56782 - DNA, 20 bp, synthetic construct
  misc_feature 1..20: note = Description of Artificial Sequence: Synthetic oligonucleotide
  misc_feature 1..20: note = Target: SCN10A; (-) strand; PAM type: YTN; PAM sequence: CTC
  source 1..20: mol_type = other DNA
catgaactaggaaatatggt

SEQ ID NO: 56783 - DNA, 20 bp, synthetic construct
  misc_feature 1..20: note = Description of Artificial Sequence: Synthetic oligonucleotide
  misc_feature 1..20: note = Target: SCN10A; (-) strand; PAM type: YTN; PAM sequence: TTC
  source 1..20: mol_type = other DNA
tccatgaactaggaaatatg

SEQ ID NO: 56784 - DNA, 20 bp, synthetic construct
  misc_feature 1..20: note = Description of Artificial Sequence: Synthetic oligonucleotide
  misc_feature 1..20: note = Target: SCN10A; (-) strand; PAM type: YTN; PAM sequence: TTT
  source 1..20: mol_type = other DNA
ctccatgaactaggaaatat

SEQ ID NO: 56785 - DNA, 20 bp, synthetic construct
  misc_feature 1..20: note = Description of Artificial Sequence: Synthetic oligonucleotide
  misc_feature 1..20: note = Target: SCN10A; (-) strand; PAM type: YTN; PAM sequence: TTT
  source 1..20: mol_type = other DNA
tctccatgaactaggaaata

SEQ ID NO: 56786 - DNA, 20 bp, synthetic construct
  misc_feature 1..20: note = Description of Artificial Sequence: Synthetic oligonucleotide
  misc_feature 1..20: note = Target: SCN10A; (-) strand; PAM type: YTN; PAM sequence: TTT
  source 1..20: mol_type = other DNA
ttctccatgaactaggaaat

SEQ ID NO: 56787 - DNA, 20 bp, synthetic construct
  misc_feature 1..20: note = Description of Artificial Sequence: Synthetic oligonucleotide
  misc_feature 1..20: note = Target: SCN10A; (-) strand; PAM type: YTN; PAM sequence: CTG
  source 1..20: mol_type = other DNA
tttttctccatgaactagga

SEQ ID NO: 56788 - DNA, 20 bp, synthetic construct
  misc_feature 1..20: note = Description of Artificial Sequence: Synthetic oligonucleotide
  misc_feature 1..20: note = Target: SCN10A; (-) strand; PAM type: YTN; PAM sequence: TTC
  source 1..20: mol_type = other DNA
tgtttttctccatgaactag

SEQ ID NO: 56789 - DNA, 20 bp, synthetic construct
  misc_feature 1..20: note = Description of Artificial Sequence: Synthetic oligonucleotide
  misc_feature 1..20: note = Target: SCN10A; (-) strand; PAM type: YTN; PAM sequence: TTG
  source 1..20: mol_type = other DNA
gcagagttctgtttttctcc

SEQ ID NO: 56790 - DNA, 20 bp, synthetic construct
  misc_feature 1..20: note = Description of Artificial Sequence: Synthetic oligonucleotide
  misc_feature 1..20: note = Target: SCN10A; (-) strand; PAM type: YTN; PAM sequence: TTG
  source 1..20: mol_type = other DNA
atggtatgaagttggcagag

SEQ ID NO: 56791 - DNA, 20 bp, synthetic construct
  misc_feature 1..20: note = Description of Artificial Sequence: Synthetic oligonucleotide
  misc_feature 1..20: note = Target: SCN10A; (-) strand; PAM type: YTN; PAM sequence: TTT
  source 1..20: mol_type = other DNA
gatggtatgaagttggcaga

SEQ ID NO: 56792 - DNA, 20 bp, synthetic construct
  misc_feature 1..20: note = Description of Artificial Sequence: Synthetic oligonucleotide
  misc_feature 1..20: note = Target: SCN10A; (-) strand; PAM type: YTN; PAM sequence: TTG
  source 1..20: mol_type = other DNA
gaggtttgatggtatgaagt

SEQ ID NO: 56793 - DNA, 20 bp, synthetic construct
  misc_feature 1..20: note = Description of Artificial Sequence: Synthetic oligonucleotide
  misc_feature 1..20: note = Target: SCN10A; (-) strand; PAM type: YTN; PAM sequence: CTG
  source 1..20: mol_type = other DNA
cagacacaggtgagttggag

SEQ ID NO: 56794 - DNA, 20 bp, synthetic construct
  misc_feature 1..20: note = Description of Artificial Sequence: Synthetic oligonucleotide
  misc_feature 1..20: note = Target: SCN10A; (-) strand; PAM type: YTN; PAM sequence: TTG
  source 1..20: mol_type = other DNA
taagagaagggaaggaggaa

SEQ ID NO: 56795 - DNA, 20 bp, synthetic construct
  misc_feature 1..20: note = Description of Artificial Sequence: Synthetic oligonucleotide
  misc_feature 1..20: note = Target: SCN10A; (-) strand; PAM type: YTN; PAM sequence: CTC
  source 1..20: mol_type = other DNA
atgttgtaagagaagggaag

SEQ ID NO: 56796 - DNA, 20 bp, synthetic construct
  misc_feature 1..20: note = Description of Artificial Sequence: Synthetic oligonucleotide
  misc_feature 1..20: note = Target: SCN10A; (-) strand; PAM type: YTN; PAM sequence: CTC
  source 1..20: mol_type = other DNA
tcatgttgtaagagaaggga

SEQ ID NO: 56797 - DNA, 20 bp, synthetic construct
  misc_feature 1..20: note = Description of Artificial Sequence: Synthetic oligonucleotide
  misc_feature 1..20: note = Target: SCN10A; (-) strand; PAM type: YTN; PAM sequence: TTA
  source 1..20: mol_type = other DNA
gaatgtaggaagatacctct

SEQ ID NO: 56798 - DNA, 20 bp, synthetic construct
  misc_feature 1..20: note = Description of Artificial Sequence: Synthetic oligonucleotide
  misc_feature 1..20: note = Target: SCN10A; (-) strand; PAM type: YTN; PAM sequence: CTT
  source 1..20: mol_type = other DNA
agaatgtaggaagatacctc

SEQ ID NO: 56799 - DNA, 20 bp, synthetic construct
  misc_feature 1..20: note = Description of Artificial Sequence: Synthetic oligonucleotide
  misc_feature 1..20: note = Target: SCN10A; (-) strand; PAM type: YTN; PAM sequence: CTA
  source 1..20: mol_type = other DNA
agcagagggaaaggaatggt

SEQ ID NO: 56800 - DNA, 20 bp, synthetic construct
  misc_feature 1..20: note = Description of Artificial Sequence: Synthetic oligonucleotide
  misc_feature 1..20: note = Target: SCN10A; (-) strand; PAM type: YTN; PAM sequence: CTG
  source 1..20: mol_type = other DNA
gcagacaaggagagagaaaa

SEQ ID NO: 56801 - DNA, 20 bp, synthetic construct
  misc_feature 1..20: note = Description of Artificial Sequence: Synthetic oligonucleotide
  misc_feature 1..20: note = Target: SCN10A; (-) strand; PAM type: YTN; PAM sequence: CTG
  source 1..20: mol_type = other DNA
ataggaaagagctggcagac

SEQ ID NO: 56802 - DNA, 20 bp, synthetic construct
  misc_feature 1..20: note = Description of Artificial Sequence: Synthetic oligonucleotide
  misc_feature 1..20: note = Target: SCN10A; (-) strand; PAM type: YTN; PAM sequence: TTA
  source 1..20: mol_type = other DNA
aatgctgataggaaagagct

SEQ ID NO: 56803 - DNA, 20 bp, synthetic construct
  misc_feature 1..20: note = Description of Artificial Sequence: Synthetic oligonucleotide
  misc_feature 1..20: note = Target: SCN10A; (-) strand; PAM type: YTN; PAM sequence: TTT
  source 1..20: mol_type = other DNA
aaatgctgataggaaagagc

SEQ ID NO: 56804 - DNA, 20 bp, synthetic construct
  misc_feature 1..20: note = Description of Artificial Sequence: Synthetic oligonucleotide
  misc_feature 1..20: note = Target: SCN10A; (-) strand; PAM type: YTN; PAM sequence: CTT
  source 1..20: mol_type = other DNA
taaatgctgataggaaagag

SEQ ID NO: 56805 - DNA, 20 bp, synthetic construct
  misc_feature 1..20: note = Description of Artificial Sequence: Synthetic oligonucleotide
  misc_feature 1..20: note = Target: SCN10A; (-) strand; PAM type: YTN; PAM sequence: TTA
  source 1..20: mol_type = other DNA
agcatctttaaatgctgata

SEQ ID NO: 56806 - DNA, 20 bp, synthetic construct
  misc_feature 1..20: note = Description of Artificial Sequence: Synthetic oligonucleotide
  misc_feature 1..20: note = Target: SCN10A; (-) strand; PAM type: YTN; PAM sequence: TTG
  source 1..20: mol_type = other DNA
gaggaaagttaagcatcttt

SEQ ID NO: 56807 - DNA, 20 bp, synthetic construct
  misc_feature 1..20: note = Description of Artificial Sequence: Synthetic oligonucleotide
  misc_feature 1..20: note = Target: SCN10A; (-) strand; PAM type: YTN; PAM sequence: TTA
  source 1..20: mol_type = other DNA
aagttggaggaaagttaagc

SEQ ID NO: 56808 - DNA, 20 bp, synthetic construct
  misc_feature 1..20: note = Description of Artificial Sequence: Synthetic oligonucleotide
  misc_feature 1..20: note = Target: SCN10A; (-) strand; PAM type: YTN; PAM sequence: TTT
  source 1..20: mol_type = other DNA
aaagttggaggaaagttaag

SEQ ID NO: 56809 - DNA, 20 bp, synthetic construct
  misc_feature 1..20: note = Description of Artificial Sequence: Synthetic oligonucleotide
  misc_feature 1..20: note = Target: SCN10A; (-) strand; PAM type: YTN; PAM sequence: TTT
  source 1..20: mol_type = other DNA
taaagttggaggaaagttaa

SEQ ID NO: 56810 - DNA, 20 bp, synthetic construct
  misc_feature 1..20: note = Description of Artificial Sequence: Synthetic oligonucleotide
  misc_feature 1..20: note = Target: SCN10A; (-) strand; PAM type: YTN; PAM sequence: TTT
  source 1..20: mol_type = other DNA
ttaaagttggaggaaagtta

SEQ ID NO: 56811 - DNA, 20 bp, synthetic construct
  misc_feature 1..20: note = Description of Artificial Sequence: Synthetic oligonucleotide
  misc_feature 1..20: note = Target: SCN10A; (-) strand; PAM type: YTN; PAM sequence: CTG
  source 1..20: mol_type = other DNA
catcaagggaaagtttttaa

SEQ ID NO: 56812 - DNA, 20 bp, synthetic construct
  misc_feature 1..20: note = Description of Artificial Sequence: Synthetic oligonucleotide
  misc_feature 1..20: note = Target: SCN10A; (-) strand; PAM type: YTN; PAM sequence: CTC
  source 1..20: mol_type = other DNA
tgcatcaagggaaagttttt

SEQ ID NO: 56813 - DNA, 20 bp, synthetic construct
  misc_feature 1..20: note = Description of Artificial Sequence: Synthetic oligonucleotide
  misc_feature 1..20: note = Target: SCN10A; (-) strand; PAM type: YTN; PAM sequence: CTG
  source 1..20: mol_type = other DNA
gatgggctctgcatcaaggg

SEQ ID NO: 56814 - DNA, 20 bp, synthetic construct
  misc_feature 1..20: note = Description of Artificial Sequence: Synthetic oligonucleotide
  misc_feature 1..20: note = Target: SCN10A; (-) strand; PAM type: YTN; PAM sequence: TTA
  source 1..20: mol_type = other DNA
aaagccaatagagaacagga

SEQ ID NO: 56815 - DNA, 20 bp, synthetic construct
  misc_feature 1..20: note = Description of Artificial Sequence: Synthetic oligonucleotide
  misc_feature 1..20: note = Target: SCN10A; (-) strand; PAM type: YTN; PAM sequence: TTA
  source 1..20: mol_type = other DNA
ttaaaagccaatagagaaca

SEQ ID NO: 56816 - DNA, 20 bp, synthetic construct
  misc_feature 1..20: note = Description of Artificial Sequence: Synthetic oligonucleotide
  misc_feature 1..20: note = Target: SCN10A; (-) strand; PAM type: YTN; PAM sequence: TTT
  source 1..20: mol_type = other DNA
attaaaagccaatagagaac

SEQ ID NO: 56817 - DNA, 20 bp, synthetic construct
  misc_feature 1..20: note = Description of Artificial Sequence: Synthetic oligonucleotide
  misc_feature 1..20: note = Target: SCN10A; (-) strand; PAM type: YTN; PAM sequence: CTT
  source 1..20: mol_type = other DNA
tattaaaagccaatagagaa

SEQ ID NO: 56818 - DNA, 20 bp, synthetic construct
  misc_feature 1..20: note = Description of Artificial Sequence: Synthetic oligonucleotide
  misc_feature 1..20: note = Target: SCN10A; (-) strand; PAM type: YTN; PAM sequence: CTG
  source 1..20: mol_type = other DNA
gaaacagtgagtagaagtaa

SEQ ID NO: 56819 - DNA, 20 bp, synthetic construct
  misc_feature 1..20: note = Description of Artificial Sequence: Synthetic oligonucleotide
  misc_feature 1..20: note = Target: SCN10A; (-) strand; PAM type: YTN; PAM sequence: CTG
  source 1..20: mol_type = other DNA
aaaagtgactggaaacagtg

SEQ ID NO: 56820 - DNA, 20 bp, synthetic construct
  misc_feature 1..20: note = Description of Artificial Sequence: Synthetic oligonucleotide
  misc_feature 1..20: note = Target: SCN10A; (-) strand; PAM type: YTN; PAM sequence: TTC
  source 1..20: mol_type = other DNA
aaagactgaaaagtgactgg

SEQ ID NO: 56821 - DNA, 20 bp, synthetic construct
  misc_feature 1..20: note = Description of Artificial Sequence: Synthetic oligonucleotide
  misc_feature 1..20: note = Target: SCN10A; (-) strand; PAM type: YTN; PAM sequence: CTT
  source 1..20: mol_type = other DNA
caaagactgaaaagtgactg

SEQ ID NO: 56822 - DNA, 20 bp, synthetic construct
  misc_feature 1..20: note = Description of Artificial Sequence: Synthetic oligonucleotide
  misc_feature 1..20: note = Target: SCN10A; (-) strand; PAM type: YTN; PAM sequence: TTA
  source 1..20: mol_type = other DNA
gtgagataggagggcaaaat

SEQ ID NO: 56823 - DNA, 20 bp, synthetic construct
  misc_feature 1..20: note = Description of Artificial Sequence: Synthetic oligonucleotide
  misc_feature 1..20: note = Target: SCN10A; (-) strand; PAM type: YTN; PAM sequence: TTT
  source 1..20: mol_type = other DNA
agtgagataggagggcaaaa

SEQ ID NO: 56824 - DNA, 20 bp, synthetic construct
  misc_feature 1..20: note = Description of Artificial Sequence: Synthetic oligonucleotide
  misc_feature 1..20: note = Target: SCN10A; (-) strand; PAM type: YTN; PAM sequence: TTT
  source 1..20: mol_type = other DNA
tagtgagataggagggcaaa

SEQ ID NO: 56825 - DNA, 20 bp, synthetic construct
  misc_feature 1..20: note = Description of Artificial Sequence: Synthetic oligonucleotide
  misc_feature 1..20: note = Target: SCN10A; (-) strand; PAM type: YTN; PAM sequence: CTG
  source 1..20: mol_type = other DNA
caaggaagcattttagtgag

SEQ ID NO: 56826 - DNA, 20 bp, synthetic construct
  misc_feature 1..20: note = Description of Artificial Sequence: Synthetic oligonucleotide
  misc_feature 1..20: note = Target: SCN10A; (-) strand; PAM type: YTN; PAM sequence: TTG
  source 1..20: mol_type = other DNA
tatccctgcaaggaagcatt

SEQ ID NO: 56827 - DNA, 20 bp, synthetic construct
  misc_feature 1..20: note = Description of Artificial Sequence: Synthetic oligonucleotide
  misc_feature 1..20: note = Target: SCN10A; (-) strand; PAM type: YTN; PAM sequence: CTT
  source 1..20: mol_type = other DNA
gtatccctgcaaggaagcat

SEQ ID NO: 56828 - DNA, 20 bp, synthetic construct
  misc_feature 1..20: note = Description of Artificial Sequence: Synthetic oligonucleotide
  misc_feature 1..20: note = Target: SCN10A; (-) strand; PAM type: YTN; PAM sequence: CTC
  source 1..20: mol_type = other DNA
ttgtatccctgcaaggaagc

SEQ ID NO: 56829 - DNA, 20 bp, synthetic construct
  misc_feature 1..20: note = Description of Artificial Sequence: Synthetic oligonucleotide
  misc_feature 1..20: note = Target: SCN10A; (-) strand; PAM type: YTN; PAM sequence: TTA
  source 1..20: mol_type = other DNA
gccacaaggcaatctcttgt

SEQ ID NO: 56830 - DNA, 20 bp, synthetic construct
  misc_feature 1..20: note = Description of Artificial Sequence: Synthetic oligonucleotide
  misc_feature 1..20: note = Target: SCN10A; (-) strand; PAM type: YTN; PAM sequence: TTT
  source 1..20: mol_type = other DNA
agccacaaggcaatctcttg

SEQ ID NO: 56831 - DNA, 20 bp, synthetic construct
  misc_feature 1..20: note = Description of Artificial Sequence: Synthetic oligonucleotide
  misc_feature 1..20: note = Target: SCN10A; (-) strand; PAM type: YTN; PAM sequence: CTT
  source 1..20: mol_type = other DNA
tagccacaaggcaatctctt

SEQ ID NO: 56832 - DNA, 20 bp, synthetic construct
  misc_feature 1..20: note = Description of Artificial Sequence: Synthetic oligonucleotide
  misc_feature 1..20: note = Target: SCN10A; (-) strand; PAM type: YTN; PAM sequence: CTG
  source 1..20: mol_type = other DNA
actttagccacaaggcaatc

SEQ ID NO: 56833 - DNA, 20 bp, synthetic construct
  misc_feature 1..20: note = Description of Artificial Sequence: Synthetic oligonucleotide
  misc_feature 1..20: note = Target: SCN10A; (-) strand; PAM type: YTN; PAM sequence: CTG
  source 1..20: mol_type = other DNA
agaagggccccctgacttta

SEQ ID NO: 56834 - DNA, 20 bp, synthetic construct
  misc_feature 1..20: note = Description of Artificial Sequence: Synthetic oligonucleotide
  misc_feature 1..20: note = Target: SCN10A; (-) strand; PAM type: YTN; PAM sequence: CTC
  source 1..20: mol_type = other DNA
aaaaaaaaaaaaagaaaaag

SEQ ID NO: 56835 - DNA, 20 bp, synthetic construct
  misc_feature 1..20: note = Description of Artificial Sequence: Synthetic oligonucleotide
  misc_feature 1..20: note = Target: SCN10A; (-) strand; PAM type: YTN; PAM sequence: CTG
  source 1..20: mol_type = other DNA
tctcaaaaaaaaaaaaagaa

SEQ ID NO: 56836 - DNA, 20 bp, synthetic construct
  misc_feature 1..20: note = Description of Artificial Sequence: Synthetic oligonucleotide
  misc_feature 1..20: note = Target: SCN10A; (-) strand; PAM type: YTN; PAM sequence: CTA
  source 1..20: mol_type = other DNA
gtccgggtgacagtgatacc

SEQ ID NO: 56837 - DNA, 20 bp, synthetic construct
  misc_feature 1..20: note = Description of Artificial Sequence: Synthetic oligonucleotide
  misc_feature 1..20: note = Target: SCN10A; (-) strand; PAM type: YTN; PAM sequence: CTC
  source 1..20: mol_type = other DNA
tagtccgggtgacagtgata

SEQ ID NO: 56838 - DNA, 20 bp, synthetic construct
  misc_feature 1..20: note = Description of Artificial Sequence: Synthetic oligonucleotide
  misc_feature 1..20: note = Target: SCN10A; (-) strand; PAM type: YTN; PAM sequence: CTG
  source 1..20: mol_type = other DNA
cactctagtccgggtgacag

SEQ ID NO: 56839 - DNA, 20 bp, synthetic construct
  misc_feature 1..20: note = Description of Artificial Sequence: Synthetic oligonucleotide
  misc_feature 1..20: note = Target: SCN10A; (-) strand; PAM type: YTN; PAM sequence: TTG
  source 1..20: mol_type = other DNA
caccactgcactctagtccg

SEQ ID NO: 56840 - DNA, 20 bp, synthetic construct
  misc_feature 1..20: note = Description of Artificial Sequence: Synthetic oligonucleotide
  misc_feature 1..20: note = Target: SCN10A; (-) strand; PAM type: YTN; PAM sequence: TTG
  source 1..20: mol_type = other DNA
cagtgagcagagattgcacc

SEQ ID NO: 56841 - DNA, 20 bp, synthetic construct
  misc_feature 1..20: note = Description of Artificial Sequence: Synthetic oligonucleotide
  misc_feature 1..20: note = Target: SCN10A; (-) strand; PAM type: YTN; PAM sequence: TTG
  source 1..20: mol_type = other DNA
agcccaggagacagaggttg

SEQ ID NO: 56842 - DNA, 20 bp, synthetic construct
  misc_feature 1..20: note = Description of Artificial Sequence: Synthetic oligonucleotide
  misc_feature 1..20: note = Target: SCN10A; (-) strand; PAM type: YTN; PAM sequence: CTT
  source 1..20: mol_type = other DNA
gagcccaggagacagaggtt

SEQ ID NO: 56843 - DNA, 20 bp, synthetic construct
  misc_feature 1..20: note = Description of Artificial Sequence: Synthetic oligonucleotide
  misc_feature 1..20: note = Target: SCN10A; (-) strand; PAM type: YTN; PAM sequence: TTG
  source 1..20: mol_type = other DNA
cttgagcccaggagacagag

SEQ ID NO: 56844 - DNA, 20 bp, synthetic construct
  misc_feature 1..20: note = Description of Artificial Sequence: Synthetic oligonucleotide
  misc_feature 1..20: note = Target: SCN10A; (-) strand; PAM type: YTN; PAM sequence: CTG
  source 1..20: mol_type = other DNA
aggtgggagaattgcttgag

SEQ ID NO: 56845 - DNA, 20 bp, synthetic construct
  misc_feature 1..20: note = Description of Artificial Sequence: Synthetic oligonucleotide
  misc_feature 1..20: note = Target: SCN10A; (-) strand; PAM type: YTN; PAM sequence: TTC
  source 1..20: mol_type = other DNA
gggaggctgaggtgggagaa

SEQ ID NO: 56846 - DNA, 20 bp, synthetic construct
  misc_feature 1..20: note = Description of Artificial Sequence: Synthetic oligonucleotide
  misc_feature 1..20: note = Target: SCN10A; (-) strand; PAM type: YTN; PAM sequence: CTA
  source 1..20: mol_type = other DNA
ttcgggaggctgaggtggga

SEQ ID NO: 56847 - DNA, 20 bp, synthetic construct
  misc_feature 1..20: note = Description of Artificial Sequence: Synthetic oligonucleotide
  misc_feature 1..20: note = Target: SCN10A; (-) strand; PAM type: YTN; PAM sequence: CTA
  source 1..20: mol_type = other DNA
tagcccagctattcgggagg

SEQ ID NO: 56848 - DNA, 20 bp, synthetic construct
  misc_feature 1..20: note = Description of Artificial Sequence: Synthetic oligonucleotide
  misc_feature 1..20: note = Target: SCN10A; (-) strand; PAM type: YTN; PAM sequence: CTA
  source 1..20: mol_type = other DNA
gccgagtgtggtgacatgtg

SEQ ID NO: 56849 - DNA, 20 bp, synthetic construct
  misc_feature 1..20: note = Description of Artificial Sequence: Synthetic oligonucleotide
  misc_feature 1..20: note = Target: SCN10A; (-) strand; PAM type: YTN; PAM sequence: TTC
  source 1..20: mol_type = other DNA
aaaactagccgagtgtggtg

SEQ ID NO: 56850 - DNA, 20 bp, synthetic construct
  misc_feature 1..20: note = Description of Artificial Sequence: Synthetic oligonucleotide
  misc_feature 1..20: note = Target: SCN10A; (-) strand; PAM type: YTN; PAM sequence: TTT
  source 1..20: mol_type = other DNA
caaaactagccgagtgtggt

SEQ ID NO: 56851 - DNA, 20 bp, synthetic construct
  misc_feature 1..20: note = Description of Artificial Sequence: Synthetic oligonucleotide
  misc_feature 1..20: note = Target: SCN10A; (-) strand; PAM type: YTN; PAM sequence: TTT
  source 1..20: mol_type = other DNA
tcaaaactagccgagtgtgg

SEQ ID NO: 56852 - DNA, 20 bp, synthetic construct
  misc_feature 1..20: note = Description of Artificial Sequence: Synthetic oligonucleotide
  misc_feature 1..20: note = Target: SCN10A; (-) strand; PAM type: YTN; PAM sequence: TTT
  source 1..20: mol_type = other DNA
ttcaaaactagccgagtgtg

SEQ ID NO: 56853 - DNA, 20 bp, synthetic construct
  misc_feature 1..20: note = Description of Artificial Sequence: Synthetic oligonucleotide
  misc_feature 1..20: note = Target: SCN10A; (-) strand; PAM type: YTN; PAM sequence: TTT
  source 1..20: mol_type = other DNA
tttcaaaactagccgagtgt

SEQ ID NO: 56854 - DNA, 20 bp, synthetic construct
  misc_feature 1..20: note = Description of Artificial Sequence: Synthetic oligonucleotide
  misc_feature 1..20: note = Target: SCN10A; (-) strand; PAM type: YTN; PAM sequence: CTA
  source 1..20: mol_type = other DNA
caaaaaaattttttcaaaac

SEQ ID NO: 56855 - DNA, 20 bp, synthetic construct
  misc_feature 1..20: note = Description of Artificial Sequence: Synthetic oligonucleotide
  misc_feature 1..20: note = Target: SCN10A; (-) strand; PAM type: YTN; PAM sequence: CTG
  source 1..20: mol_type = other DNA
cctacaaaaaaattttttca

SEQ ID NO: 56856 - DNA, 20 bp, synthetic construct
  misc_feature 1..20: note = Description of Artificial Sequence: Synthetic oligonucleotide
  misc_feature 1..20: note = Target: SCN10A; (-) strand; PAM type: YTN; PAM sequence: CTG
  source 1..20: mol_type = other DNA
gacaatatagtggtacactg

SEQ ID NO: 56857 - DNA, 20 bp, synthetic construct
  misc_feature 1..20: note = Description of Artificial Sequence: Synthetic oligonucleotide
  misc_feature 1..20: note = Target: SCN10A; (-) strand; PAM type: YTN; PAM sequence: CTG
  source 1..20: mol_type = other DNA
agatgggcctggacaatata

SEQ ID NO: 56858 - DNA, 20 bp, synthetic construct
  misc_feature 1..20: note = Description of Artificial Sequence: Synthetic oligonucleotide
  misc_feature 1..20: note = Target: SCN10A; (-) strand; PAM type: YTN; PAM sequence: TTG
  source 1..20: mol_type = other DNA
tcaaaacagccaataggacc

SEQ ID NO: 56859 - DNA, 20 bp, synthetic construct
  misc_feature 1..20: note = Description of Artificial Sequence: Synthetic oligonucleotide
  misc_feature 1..20: note = Target: SCN10A; (-) strand; PAM type: YTN; PAM sequence: TTA
  source 1..20: mol_type = other DNA
aggaggaaattgtcaaaaca

SEQ ID NO: 56860 - DNA, 20 bp, synthetic construct
  misc_feature 1..20: note = Description of Artificial Sequence: Synthetic oligonucleotide
  misc_feature 1..20: note = Target: SCN10A; (-) strand; PAM type: YTN; PAM sequence: TTT
  source 1..20: mol_type = other DNA
aaggaggaaattgtcaaaac

SEQ ID NO: 56861 - DNA, 20 bp, synthetic construct
  misc_feature 1..20: note = Description of Artificial Sequence: Synthetic oligonucleotide
  misc_feature 1..20: note = Target: SCN10A; (-) strand; PAM type: YTN; PAM sequence: TTT
  source 1..20: mol_type = other DNA
taaggaggaaattgtcaaaa

SEQ ID NO: 56862 - DNA, 20 bp, synthetic construct
  misc_feature 1..20: note = Description of Artificial Sequence: Synthetic oligonucleotide
  misc_feature 1..20: note = Target: SCN10A; (-) strand; PAM type: YTN; PAM sequence: TTA
  source 1..20: mol_type = other DNA
ggaaaaccaagagagtgtca

SEQ ID NO: 56863 - DNA, 20 bp, synthetic construct
  misc_feature 1..20: note = Description of Artificial Sequence: Synthetic oligonucleotide
  misc_feature 1..20: note = Target: SCN10A; (-) strand; PAM type: YTN; PAM sequence: CTG
  source 1..20: mol_type = other DNA
agaaggagaagagagaaagt

SEQ ID NO: 56864 - DNA, 20 bp, synthetic construct
  misc_feature 1..20: note = Description of Artificial Sequence: Synthetic oligonucleotide
  misc_feature 1..20: note = Target: SCN10A; (-) strand; PAM type: YTN; PAM sequence: CTG
  source 1..20: mol_type = other DNA
agaaaggagagactgagaag

SEQ ID NO: 56865 - DNA, 20 bp, synthetic construct
  misc_feature 1..20: note = Description of Artificial Sequence: Synthetic oligonucleotide
  misc_feature 1..20: note = Target: SCN10A; (-) strand; PAM type: YTN; PAM sequence: TTC
  source 1..20: mol_type = other DNA
acaatcatgtatgggaaaag

SEQ ID NO: 56866 - DNA, 20 bp, synthetic construct
  misc_feature 1..20: note = Description of Artificial Sequence: Synthetic oligonucleotide
  misc_feature 1..20: note = Target: SCN10A; (-) strand; PAM type: YTN; PAM sequence: TTA
  source 1..20: mol_type = other DNA
ttcacaatcatgtatgggaa

SEQ ID NO: 56867 - DNA, 20 bp, synthetic construct
  misc_feature 1..20: note = Description of Artificial Sequence: Synthetic oligonucleotide
  misc_feature 1..20: note = Target: SCN10A; (-) strand; PAM type: YTN; PAM sequence: CTG
  source 1..20: mol_type = other DNA
aaaacaaaagatagagtgcc

SEQ ID NO: 56868 - DNA, 20 bp, synthetic construct
  misc_feature 1..20: note = Description of Artificial Sequence: Synthetic oligonucleotide
  misc_feature 1..20: note = Target: SCN10A; (-) strand; PAM type: YTN; PAM sequence: TTC
  source 1..20: mol_type = other DNA
tgaaaacaaaagatagagtg

SEQ ID NO: 56869 - DNA, 20 bp, synthetic construct
  misc_feature 1..20: note = Description of Artificial Sequence: Synthetic oligonucleotide
  misc_feature 1..20: note = Target: SCN10A; (-) strand; PAM type: YTN; PAM sequence: TTA
  source 1..20: mol_type = other DNA
ttctgaaaacaaaagataga

SEQ ID NO: 56870 - DNA, 20 bp, synthetic construct
  misc_feature 1..20: note = Description of Artificial Sequence: Synthetic oligonucleotide
  misc_feature 1..20: note = Target: SCN10A; (-) strand; PAM type: YTN; PAM sequence: TTA
  source 1..20: mol_type = other DNA
ttattctgaaaacaaaagat

SEQ ID NO: 56871 - DNA, 20 bp, synthetic construct
  misc_feature 1..20: note = Description of Artificial Sequence: Synthetic oligonucleotide
  misc_feature 1..20: note = Target: SCN10A; (-) strand; PAM type: YTN; PAM sequence: TTG
  source 1..20: mol_type = other DNA
ttattattctgaaaacaaaa

SEQ ID NO: 56872 - DNA, 20 bp, synthetic construct
  misc_feature 1..20: note = Description of Artificial Sequence: Synthetic oligonucleotide
  misc_feature 1..20: note = Target: SCN10A; (-) strand; PAM type: YTN; PAM sequence: CTA
  source 1..20: mol_type = other DNA
ttgttattattctgaaaaca

SEQ ID NO: 56873 - DNA, 20 bp, synthetic construct
  misc_feature 1..20: note = Description of Artificial Sequence: Synthetic oligonucleotide
  misc_feature 1..20: note = Target: SCN10A; (-) strand; PAM type: YTN; PAM sequence: TTA
  source 1..20: mol_type = other DNA
ctattgttattattctgaaa

SEQ ID NO: 56874 - DNA, 20 bp, synthetic construct
  misc_feature 1..20: note = Description of Artificial Sequence: Synthetic oligonucleotide
  misc_feature 1..20: note = Target: SCN10A; (-) strand; PAM type: YTN; PAM sequence: TTG
  source 1..20: mol_type = other DNA
ttactattgttattattctg

SEQ ID NO: 56875 - DNA, 20 bp, synthetic construct
  misc_feature 1..20: note = Description of Artificial Sequence: Synthetic oligonucleotide
  misc_feature 1..20: note = Target: SCN10A; (-) strand; PAM type: YTN; PAM sequence: TTG
  source 1..20: mol_type = other DNA
aagttgttactattgttatt

SEQ ID NO: 56876 - DNA, 20 bp, synthetic construct
  misc_feature 1..20: note = Description of Artificial Sequence: Synthetic oligonucleotide
  misc_feature 1..20: note = Target: SCN10A; (-) strand; PAM type: YTN; PAM sequence: CTG
  source 1..20: mol_type = other DNA
ttgaagttgttactattgtt

SEQ ID NO: 56877 - DNA, 20 bp, synthetic construct
  misc_feature 1..20: note = Description of Artificial Sequence: Synthetic oligonucleotide
  misc_feature 1..20: note = Target: SCN10A; (-) strand; PAM type: YTN; PAM sequence: CTA
  source 1..20: mol_type = other DNA
gcgctgttgaagttgttact

SEQ ID NO: 56878 - DNA, 20 bp, synthetic construct
  misc_feature 1..20: note = Description of Artificial Sequence: Synthetic oligonucleotide
  misc_feature 1..20: note = Target: SCN10A; (-) strand; PAM type: YTN; PAM sequence: CTC
  source 1..20: mol_type = other DNA
agtaaatgctagcgctgttg

SEQ ID NO: 56879 - DNA, 20 bp, synthetic construct
  misc_feature 1..20: note = Description of Artificial Sequence: Synthetic oligonucleotide
  misc_feature 1..20: note = Target: SCN10A; (-) strand; PAM type: YTN; PAM sequence: CTG
  source 1..20: mol_type = other DNA
aaatacagtggaatctcagt

SEQ ID NO: 56880 - DNA, 20 bp, synthetic construct
  misc_feature 1..20: note = Description of Artificial Sequence: Synthetic oligonucleotide
  misc_feature 1..20: note = Target: SCN10A; (-) strand; PAM type: YTN; PAM sequence: TTA
  source 1..20: mol_type = other DNA
atccagagtctgaaatacag

SEQ ID NO: 56881 - DNA, 20 bp, synthetic construct
  misc_feature 1..20: note = Description of Artificial Sequence: Synthetic oligonucleotide
  misc_feature 1..20: note = Target: SCN10A; (-) strand; PAM type: YTN; PAM sequence: CTT
  source 1..20: mol_type = other DNA
aatccagagtctgaaataca

SEQ ID NO: 56882 - DNA, 20 bp, synthetic construct
  misc_feature 1..20: note = Description of Artificial Sequence: Synthetic oligonucleotide
  misc_feature 1..20: note = Target: SCN10A; (-) strand; PAM type: YTN; PAM sequence: TTG
  source 1..20: mol_type = other DNA
cttaatccagagtctgaaat

SEQ ID NO: 56883 - DNA, 20 bp, synthetic construct
  misc_feature 1..20: note = Description of Artificial Sequence: Synthetic oligonucleotide
  misc_feature 1..20: note = Target: SCN10A; (-) strand; PAM type: YTN; PAM sequence: TTA
  source 1..20: mol_type = other DNA
atgtaataatgcatgaaaat

SEQ ID NO: 56884 - DNA, 20 bp, synthetic construct
  misc_feature 1..20: note = Description of Artificial Sequence: Synthetic oligonucleotide
  misc_feature 1..20: note = Target: SCN10A; (-) strand; PAM type: YTN; PAM sequence: TTC
  source 1..20: mol_type = other DNA
acaggtacagtgatagttaa

SEQ ID NO: 56885 - DNA, 20 bp, synthetic construct
  misc_feature 1..20: note = Description of Artificial Sequence: Synthetic oligonucleotide
  misc_feature 1..20: note = Target: SCN10A; (-) strand; PAM type: YTN; PAM sequence: CTT
  source 1..20: mol_type = other DNA
cacaggtacagtgatagtta

SEQ ID NO: 56886 - DNA, 20 bp, synthetic construct
  misc_feature 1..20: note = Description of Artificial Sequence: Synthetic oligonucleotide
  misc_feature 1..20: note = Target: SCN10A; (-) strand; PAM type: YTN; PAM sequence: TTA
  source 1..20: mol_type = other DNA
gagataatacttcacaggta

SEQ ID NO: 56887 - DNA, 20 bp, synthetic construct
  misc_feature 1..20: note = Description of Artificial Sequence: Synthetic oligonucleotide
  misc_feature 1..20: note = Target: SCN10A; (-) strand; PAM type: YTN; PAM sequence: TTA
  source 1..20: mol_type = other DNA
tatattagagataatacttc

SEQ ID NO: 56888 - DNA, 20 bp, synthetic construct
  misc_feature 1..20: note = Description of Artificial Sequence: Synthetic oligonucleotide
  misc_feature 1..20: note = Target: SCN10A; (-) strand; PAM type: YTN; PAM sequence: TTT
  source 1..20: mol_type = other DNA
atatattagagataatactt

SEQ ID NO: 56889 - DNA, 20 bp, synthetic construct
  misc_feature 1..20: note = Description of Artificial Sequence: Synthetic oligonucleotide
  misc_feature 1..20: note = Target: SCN10A; (-) strand; PAM type: YTN; PAM sequence: TTA
  source 1..20: mol_type = other DNA
tttatatattagagataata

SEQ ID NO: 56890 - DNA, 20 bp, synthetic construct
  misc_feature 1..20: note = Description of Artificial Sequence: Synthetic oligonucleotide
  misc_feature 1..20: note = Target: SCN10A; (-) strand; PAM type: YTN; PAM sequence: CTT
  source 1..20: mol_type = other DNA
atttatatattagagataat

SEQ ID NO: 56891 - DNA, 20 bp, synthetic construct
  misc_feature 1..20: note = Description of Artificial Sequence: Synthetic oligonucleotide
  misc_feature 1..20: note = Target: SCN10A; (-) strand; PAM type: YTN; PAM sequence: CTG
  source 1..20: mol_type = other DNA
gtatcttatttatatattag

SEQ ID NO: 56892 - DNA, 20 bp, synthetic construct
  misc_feature 1..20: note = Description of Artificial Sequence: Synthetic oligonucleotide
  misc_feature 1..20: note = Target: SCN10A; (-) strand; PAM type: YTN; PAM sequence: CTC
  source 1..20: mol_type = other DNA
tggtatcttatttatatatt

SEQ ID NO: 56893 - DNA, 20 bp, synthetic construct
  misc_feature 1..20: note = Description of Artificial Sequence: Synthetic oligonucleotide
  misc_feature 1..20: note = Target: SCN10A; (-) strand; PAM type: YTN; PAM sequence: CTG
  source 1..20: mol_type = other DNA
ctctggtatcttatttatat

SEQ ID NO: 56894 - DNA, 20 bp, synthetic construct
  misc_feature 1..20: note = Description of Artificial Sequence: Synthetic oligonucleotide
  misc_feature 1..20: note = Target: SCN10A; (-) strand; PAM type: YTN; PAM sequence: TTG
  source 1..20: mol_type = other DNA
ctgctctggtatcttattta

SEQ ID NO: 56895 - DNA, 20 bp, synthetic construct
  misc_feature 1..20: note = Description of Artificial Sequence: Synthetic oligonucleotide
  misc_feature 1..20: note = Target: SCN10A; (-) strand; PAM type: YTN; PAM sequence: TTT
  source 1..20: mol_type = other DNA
gctgctctggtatcttattt

SEQ ID NO: 56896 - DNA, 20 bp, synthetic construct
  misc_feature 1..20: note = Description of Artificial Sequence: Synthetic oligonucleotide
  misc_feature 1..20: note = Target: SCN10A; (-) strand; PAM type: YTN; PAM sequence: CTT
  source 1..20: mol_type = other DNA
tgctgctctggtatcttatt

SEQ ID NO: 56897 - DNA, 20 bp, synthetic construct
  misc_feature 1..20: note = Description of Artificial Sequence: Synthetic oligonucleotide
  misc_feature 1..20: note = Target: SCN10A; (-) strand; PAM type: YTN; PAM sequence: TTA
  source 1..20: mol_type = other DNA
actttgctgctctggtatct

SEQ ID NO: 56898 - DNA, 20 bp, synthetic construct
  misc_feature 1..20: note = Description of Artificial Sequence: Synthetic oligonucleotide
  misc_feature 1..20: note = Target: SCN10A; (-) strand; PAM type: YTN; PAM sequence: TTT
  source 1..20: mol_type = other DNA
aactttgctgctctggtatc

SEQ ID NO: 56899 - DNA, 20 bp, synthetic construct
  misc_feature 1..20: note = Description of Artificial Sequence: Synthetic oligonucleotide
  misc_feature 1..20: note = Target: SCN10A; (-) strand; PAM type: YTN; PAM sequence: TTT
  source 1..20: mol_type = other DNA
taactttgctgctctggtat

SEQ ID NO: 56900 - DNA, 20 bp, synthetic construct
  misc_feature 1..20: note = Description of Artificial Sequence: Synthetic oligonucleotide
  misc_feature 1..20: note = Target: SCN10A; (-) strand; PAM type: YTN; PAM sequence: TTG
  source 1..20: mol_type = other DNA
gaaattttaactttgctgct

SEQ ID NO: 56901 - DNA, 20 bp, synthetic construct
  misc_feature 1..20: note = Description of Artificial Sequence: Synthetic oligonucleotide
  misc_feature 1..20: note = Target: SCN10A; (-) strand; PAM type: YTN; PAM sequence: CTT
  source 1..20: mol_type = other DNA
ggaaattttaactttgctgc

SEQ ID NO: 56902 - DNA, 20 bp, synthetic construct
  misc_feature 1..20: note = Description of Artificial Sequence: Synthetic oligonucleotide
  misc_feature 1..20: note = Target: SCN10A; (-) strand; PAM type: YTN; PAM sequence: TTA
  source 1..20: mol_type = other DNA
gtaatgtgatcttggaaatt

SEQ ID NO: 56903 - DNA, 20 bp, synthetic construct
  misc_feature 1..20: note = Description of Artificial Sequence: Synthetic oligonucleotide
  misc_feature 1..20: note = Target: SCN10A; (-) strand; PAM type: YTN; PAM sequence: CTC
  source 1..20: mol_type = other DNA
attagtaatgtgatcttgga

SEQ ID NO: 56904 - DNA, 20 bp, synthetic construct
  misc_feature 1..20: note = Description of Artificial Sequence: Synthetic oligonucleotide
  misc_feature 1..20: note = Target: SCN10A; (-) strand; PAM type: YTN; PAM sequence: CTG
  source 1..20: mol_type = other DNA
ccactcattagtaatgtgat

SEQ ID NO: 56905 - DNA, 20 bp, synthetic construct
  misc_feature 1..20: note = Description of Artificial Sequence: Synthetic oligonucleotide
  misc_feature 1..20: note = Target: SCN10A; (-) strand; PAM type: YTN; PAM sequence: TTC
  source 1..20: mol_type = other DNA
tgccactcattagtaatgtg

SEQ ID NO: 56906 - DNA, 20 bp, synthetic construct
  misc_feature 1..20: note = Description of Artificial Sequence: Synthetic oligonucleotide
  misc_feature 1..20: note = Target: SCN10A; (-) strand; PAM type: YTN; PAM sequence: TTA
  source 1..20: mol_type = other DNA
agtaccgttctgccactcat

SEQ ID NO: 56907 - DNA, 20 bp, synthetic construct
  misc_feature 1..20: note = Description of Artificial Sequence: Synthetic oligonucleotide
  misc_feature 1..20: note = Target: SCN10A; (-) strand; PAM type: YTN; PAM sequence: TTT
  source 1..20: mol_type = other DNA
aagtaccgttctgccactca

SEQ ID NO: 56908 - DNA, 20 bp, synthetic construct
  misc_feature 1..20: note = Description of Artificial Sequence: Synthetic oligonucleotide
  misc_feature 1..20: note = Target: SCN10A; (-) strand; PAM type: YTN; PAM sequence: CTG
  source 1..20: mol_type = other DNA
agtttaagtaccgttctgcc

SEQ ID NO: 56909 - DNA, 20 bp, synthetic construct
  misc_feature 1..20: note = Description of Artificial Sequence: Synthetic oligonucleotide
  misc_feature 1..20: note = Target: SCN10A; (-) strand; PAM type: YTN; PAM sequence: TTG
  source 1..20: mol_type = other DNA
tggcaaacatacctgagttt

SEQ ID NO: 56910 - DNA, 20 bp, synthetic construct
  misc_feature 1..20: note = Description of Artificial Sequence: Synthetic oligonucleotide
  misc_feature 1..20: note = Target: SCN10A; (-) strand; PAM type: YTN; PAM sequence: TTC
  source 1..20: mol_type = other DNA
caagagattgtggcaaacat

SEQ ID NO: 56911 - DNA, 20 bp, synthetic construct
  misc_feature 1..20: note = Description of Artificial Sequence: Synthetic oligonucleotide
  misc_feature 1..20: note = Target: SCN10A; (-) strand; PAM type: YTN; PAM sequence: TTT
  source 1..20: mol_type = other DNA
ccaagagattgtggcaaaca

SEQ ID NO: 56912 - DNA, 20 bp, synthetic construct
  misc_feature 1..20: note = Description of Artificial Sequence: Synthetic oligonucleotide
  misc_feature 1..20: note = Target: SCN10A; (-) strand; PAM type: YTN; PAM sequence: CTG
  source 1..20: mol_type = other DNA
catataaatgagaagtgaag

SEQ ID NO: 56913 - DNA, 20 bp, synthetic construct
  misc_feature 1..20: note = Description of Artificial Sequence: Synthetic oligonucleotide
  misc_feature 1..20: note = Target: SCN10A; (-) strand; PAM type: YTN; PAM sequence: CTC
  source 1..20: mol_type = other DNA
agtcatctgcatataaatga

SEQ ID NO: 56914 - DNA, 20 bp, synthetic construct
  misc_feature 1..20: note = Description of Artificial Sequence: Synthetic oligonucleotide
  misc_feature 1..20: note = Target: SCN10A; (-) strand; PAM type: YTN; PAM sequence: CTA
  source 1..20: mol_type = other DNA
cagataaagactcagtcatc

SEQ ID NO: 56915 - DNA, 20 bp, synthetic construct
  misc_feature 1..20: note = Description of Artificial Sequence: Synthetic oligonucleotide
  misc_feature 1..20: note = Target: SCN10A; (-) strand; PAM type: YTN; PAM sequence: CTG
  source 1..20: mol_type = other DNA
agagctacagataaagactc

SEQ ID NO: 56916 - DNA, 20 bp, synthetic construct
  misc_feature 1..20: note = Description of Artificial Sequence: Synthetic oligonucleotide
  misc_feature 1..20: note = Target: SCN10A; (-) strand; PAM type: YTN; PAM sequence: TTC
  source 1..20: mol_type = other DNA
tgagagctacagataaagac

SEQ ID NO: 56917 - DNA, 20 bp, synthetic construct
  misc_feature 1..20: note = Description of Artificial Sequence: Synthetic oligonucleotide
  misc_feature 1..20: note = Target: SCN10A; (-) strand; PAM type: YTN; PAM sequence: CTT
  source 1..20: mol_type = other DNA
ctgagagctacagataaaga

SEQ ID NO: 56918 - DNA, 20 bp, synthetic construct
  misc_feature 1..20: note = Description of Artificial Sequence: Synthetic oligonucleotide
  misc_feature 1..20: note = Target: SCN10A; (-) strand; PAM type: YTN; PAM sequence: CTG
  source 1..20: mol_type = other DNA
agccccatggacttctgaga

SEQ ID NO: 56919 - DNA, 20 bp, synthetic construct
  misc_feature 1..20: note = Description of Artificial Sequence: Synthetic oligonucleotide
  misc_feature 1..20: note = Target: SCN10A; (-) strand; PAM type: YTN; PAM sequence: CTG
  source 1..20: mol_type = other DNA
aagtggagagatcaaatgaa

SEQ ID NO: 56920 - DNA, 20 bp, synthetic construct
  misc_feature 1..20: note = Description of Artificial Sequence: Synthetic oligonucleotide
  misc_feature 1..20: note = Target: SCN10A; (-) strand; PAM type: YTN; PAM sequence: CTC
  source 1..20: mol_type = other DNA
atgagacactgaagtggaga

SEQ ID NO: 56921 - DNA, 20 bp, synthetic construct
  misc_feature 1..20: note = Description of Artificial Sequence: Synthetic oligonucleotide
  misc_feature 1..20: note = Target: SCN10A; (-) strand; PAM type: YTN; PAM sequence: TTG
  source 1..20: mol_type = other DNA
aggtgctcatgagacactga

SEQ ID NO: 56922 - DNA, 20 bp, synthetic construct
  misc_feature 1..20: note = Description of Artificial Sequence: Synthetic oligonucleotide
  misc_feature 1..20: note = Target: SCN10A; (-) strand; PAM type: YTN; PAM sequence: CTT
  source 1..20: mol_type = other DNA
gaggtgctcatgagacactg

SEQ ID NO: 56923 - DNA, 20 bp, synthetic construct
  misc_feature 1..20: note = Description of Artificial Sequence: Synthetic oligonucleotide
  misc_feature 1..20: note = Target: SCN10A; (-) strand; PAM type: YTN; PAM sequence: CTG
  source 1..20: mol_type = other DNA
agcttgaggtgctcatgaga

SEQ ID NO: 56924 - DNA, 20 bp, synthetic construct
  misc_feature 1..20: note = Description of Artificial Sequence: Synthetic oligonucleotide
  misc_feature 1..20: note = Target: SCN10A; (-) strand; PAM type: YTN; PAM sequence: TTG
  source 1..20: mol_type = other DNA
gggcatgctgagcttgaggt

SEQ ID NO: 56925 - DNA, 20 bp, synthetic construct
  misc_feature 1..20: note = Description of Artificial Sequence: Synthetic oligonucleotide
  misc_feature 1..20: note = Target: SCN10A; (-) strand; PAM type: YTN; PAM sequence: TTT
  source 1..20: mol_type = other DNA
ggggcatgctgagcttgagg

SEQ ID NO: 56926 - DNA, 20 bp, synthetic construct
  misc_feature 1..20: note = Description of Artificial Sequence: Synthetic oligonucleotide
  misc_feature 1..20: note = Target: SCN10A; (-) strand; PAM type: YTN; PAM sequence: TTA
  source 1..20: mol_type = other DNA
gtttggggcatgctgagctt

SEQ ID NO: 56927 - DNA, 20 bp, synthetic construct
  misc_feature 1..20: note = Description of Artificial Sequence: Synthetic oligonucleotide
  misc_feature 1..20: note = Target: SCN10A; (-) strand; PAM type: YTN; PAM sequence: TTT
  source 1..20: mol_type = other DNA
agtttggggcatgctgagct

SEQ ID NO: 56928 - DNA, 20 bp, synthetic construct
  misc_feature 1..20: note = Description of Artificial Sequence: Synthetic oligonucleotide
  misc_feature 1..20: note = Target: SCN10A; (-) strand; PAM type: YTN; PAM sequence: TTA
  source 1..20: mol_type = other DNA
tgagtttagtttggggcatg

SEQ ID NO: 56929 - DNA, 20 bp, synthetic construct
  misc_feature 1..20: note = Description of Artificial Sequence: Synthetic oligonucleotide
  misc_feature 1..20: note = Target: SCN10A; (-) strand; PAM type: YTN; PAM sequence: TTA
  source 1..20: mol_type = other DNA
gaaagaagtgaggagataat

SEQ ID NO: 56930 - DNA, 20 bp, synthetic construct
  misc_feature 1..20: note = Description of Artificial Sequence: Synthetic oligonucleotide
  misc_feature 1..20: note = Target: SCN10A; (-) strand; PAM type: YTN; PAM sequence: CTA
  source 1..20: mol_type = other DNA
atggcagtaaaaagacatag

SEQ ID NO: 56931 - DNA, 20 bp, synthetic construct
  misc_feature 1..20: note = Description of Artificial Sequence: Synthetic oligonucleotide
  misc_feature 1..20: note = Target: SCN10A; (-) strand; PAM type: YTN; PAM sequence: TTG
  source 1..20: mol_type = other DNA
gggctaatggcagtaaaaag

SEQ ID NO: 56932 - DNA, 20 bp, synthetic construct
  misc_feature 1..20: note = Description of Artificial Sequence: Synthetic oligonucleotide
  misc_feature 1..20: note = Target: SCN10A; (-) strand; PAM type: YTN; PAM sequence: TTT
  source 1..20: mol_type = other DNA
ggggctaatggcagtaaaaa

SEQ ID NO: 56933 - DNA, 20 bp, synthetic construct
  misc_feature 1..20: note = Description of Artificial Sequence: Synthetic oligonucleotide
  misc_feature 1..20: note = Target: SCN10A; (-) strand; PAM type: YTN; PAM sequence: CTA
  source 1..20: mol_type = other DNA
tttggggctaatggcagtaa

SEQ ID NO: 56934 - DNA, 20 bp, synthetic construct
  misc_feature 1..20: note = Description of Artificial Sequence: Synthetic oligonucleotide
  misc_feature 1..20: note = Target: SCN10A; (-) strand; PAM type: YTN; PAM sequence: TTG
  source 1..20: mol_type = other DNA
tggacagacacagaaacagg

SEQ ID NO: 56935 - DNA, 20 bp, synthetic construct
  misc_feature 1..20: note = Description of Artificial Sequence: Synthetic oligonucleotide
  misc_feature 1..20: note = Target: SCN10A; (-) strand; PAM type: YTN; PAM sequence: TTA
  source 1..20: mol_type = other DNA
tggtacccaggttgtggaca

SEQ ID NO: 56936 - DNA, 20 bp, synthetic construct
  misc_feature 1..20: note = Description of Artificial Sequence: Synthetic oligonucleotide
  misc_feature 1..20: note = Target: SCN10A; (-) strand; PAM type: YTN; PAM sequence: TTG
  source 1..20: mol_type = other DNA
tatgtggaatgaaatagaaa

SEQ ID NO: 56937 - DNA, 20 bp, synthetic construct
  misc_feature 1..20: note = Description of Artificial Sequence: Synthetic oligonucleotide
  misc_feature 1..20: note = Target: SCN10A; (-) strand; PAM type: YTN; PAM sequence: TTG
  source 1..20: mol_type = other DNA
attgtatgtggaatgaaata

SEQ ID NO: 56938 - DNA, 20 bp, synthetic construct
  misc_feature 1..20: note = Description of Artificial Sequence: Synthetic oligonucleotide
  misc_feature 1..20: note = Target: SCN10A; (-) strand; PAM type: YTN; PAM sequence: TTT
  source 1..20: mol_type = other DNA
gattgtatgtggaatgaaat

SEQ ID NO: 56939 - DNA, 20 bp, synthetic construct
  misc_feature 1..20: note = Description of Artificial Sequence: Synthetic oligonucleotide
  misc_feature 1..20: note = Target: SCN10A; (-) strand; PAM type: YTN; PAM sequence: CTA
  source 1..20: mol_type = other DNA
gatgtttgattgtatgtgga

SEQ ID NO: 56940 - DNA, 20 bp, synthetic construct
  misc_feature 1..20: note = Description of Artificial Sequence: Synthetic oligonucleotide
  misc_feature 1..20: note = Target: SCN10A; (-) strand; PAM type: YTN; PAM sequence: TTA
  source 1..20: mol_type = other DNA
aggaggcagaagcaacagca

SEQ ID NO: 56941 - DNA, 20 bp, synthetic construct
  misc_feature 1..20: note = Description of Artificial Sequence: Synthetic oligonucleotide
  misc_feature 1..20: note = Target: SCN10A; (-) strand; PAM type: YTN; PAM sequence: TTA
  source 1..20: mol_type = other DNA
gagagatatgaagagaagat

SEQ ID NO: 56942 - DNA, 20 bp, synthetic construct
  misc_feature 1..20: note = Description of Artificial Sequence: Synthetic oligonucleotide
  misc_feature 1..20: note = Target: SCN10A; (-) strand; PAM type: YTN; PAM sequence: TTG
  source 1..20: mol_type = other DNA
gaccagcagtatgatggaga

SEQ ID NO: 56943 - DNA, 20 bp, synthetic construct
  misc_feature 1..20: note = Description of Artificial Sequence: Synthetic oligonucleotide
  misc_feature 1..20: note = Target: SCN10A; (-) strand; PAM type: YTN; PAM sequence: CTA
  source 1..20: mol_type = other DNA
aaggggaatcaaaatgacac

SEQ ID NO: 56944 - DNA, 20 bp, synthetic construct
  misc_feature 1..20: note = Description of Artificial Sequence: Synthetic oligonucleotide
  misc_feature 1..20: note = Target: SCN10A; (-) strand; PAM type: YTN; PAM sequence: TTA
  source 1..20: mol_type = other DNA
gaaaggactaaaggggaatc

SEQ ID NO: 56945 - DNA, 20 bp, synthetic construct
  misc_feature 1..20: note = Description of Artificial Sequence: Synthetic oligonucleotide
  misc_feature 1..20: note = Target: SCN10A; (-) strand; PAM type: YTN; PAM sequence: TTG
  source 1..20: mol_type = other DNA
gagaataggttagaaaggac

SEQ ID NO: 56946 - DNA, 20 bp, synthetic construct
  misc_feature 1..20: note = Description of Artificial Sequence: Synthetic oligonucleotide
  misc_feature 1..20: note = Target: SCN10A; (-) strand; PAM type: YTN; PAM sequence: CTG
  source 1..20: mol_type = other DNA
ttggagaataggttagaaag

SEQ ID NO: 56947 - DNA, 20 bp, synthetic construct
  misc_feature 1..20: note = Description of Artificial Sequence: Synthetic oligonucleotide
  misc_feature 1..20: note = Target: SCN10A; (-) strand; PAM type: YTN; PAM sequence: TTG
  source 1..20: mol_type = other DNA
gccactgttggagaataggt

SEQ ID NO: 56948 - DNA, 20 bp, synthetic construct
  misc_feature 1..20: note = Description of Artificial Sequence: Synthetic oligonucleotide
  misc_feature 1..20: note = Target: SCN10A; (-) strand; PAM type: YTN; PAM sequence: TTT
  source 1..20: mol_type = other DNA
ggccactgttggagaatagg

SEQ ID NO: 56949 - DNA, 20 bp, synthetic construct
  misc_feature 1..20: note = Description of Artificial Sequence: Synthetic oligonucleotide
  misc_feature 1..20: note = Target: SCN10A; (-) strand; PAM type: YTN; PAM sequence: TTA
  source 1..20: mol_type = other DNA
gaaatatcatttggccactg

SEQ ID NO: 56950 - DNA, 20 bp, synthetic construct
  misc_feature 1..20: note = Description of Artificial Sequence: Synthetic oligonucleotide
  misc_feature 1..20: note = Target: SCN10A; (-) strand; PAM type: YTN; PAM sequence: TTT
  source 1..20: mol_type = other DNA
agaaatatcatttggccact

SEQ ID NO: 56951 - DNA, 20 bp, synthetic construct
  misc_feature 1..20: note = Description of Artificial Sequence: Synthetic oligonucleotide
  misc_feature 1..20: note = Target: SCN10A; (-) strand; PAM type: YTN; PAM sequence: TTT
  source 1..20: mol_type = other DNA
tagaaatatcatttggccac

SEQ ID NO: 56952 - DNA, 20 bp, synthetic construct
  misc_feature 1..20: note = Description of Artificial Sequence: Synthetic oligonucleotide
  misc_feature 1..20: note = Target: SCN10A; (-) strand; PAM type: YTN; PAM sequence: TTC
  source 1..20: mol_type = other DNA
attttagaaatatcatttgg

SEQ ID NO: 56953 - DNA, 20 bp, synthetic construct
  misc_feature 1..20: note = Description of Artificial Sequence: Synthetic oligonucleotide
  misc_feature 1..20: note = Target: SCN10A; (-) strand; PAM type: YTN; PAM sequence: TTT
  source 1..20: mol_type = other DNA
cattttagaaatatcatttg

SEQ ID NO: 56954 - DNA, 20 bp, synthetic construct
  misc_feature 1..20: note = Description of Artificial Sequence: Synthetic oligonucleotide
  misc_feature 1..20: note = Target: SCN10A; (-) strand; PAM type: YTN; PAM sequence: TTT
  source 1..20: mol_type = other DNA
tcattttagaaatatcattt

SEQ ID NO: 56955 - DNA, 20 bp, synthetic construct
  misc_feature 1..20: note = Description of Artificial Sequence: Synthetic oligonucleotide
  misc_feature 1..20: note = Target: SCN10A; (-) strand; PAM type: YTN; PAM sequence: TTA
  source 1..20: mol_type = other DNA
aataaagatatcacataacc

SEQ ID NO: 56956 - DNA, 20 bp, synthetic construct
  misc_feature 1..20: note = Description of Artificial Sequence: Synthetic oligonucleotide
  misc_feature 1..20: note = Target: SCN10A; (-) strand; PAM type: YTN; PAM sequence: TTT
  source 1..20: mol_type = other DNA
aaataaagatatcacataac

SEQ ID NO: 56957 - DNA, 20 bp, synthetic construct
  misc_feature 1..20: note = Description of Artificial Sequence: Synthetic oligonucleotide
  misc_feature 1..20: note = Target: SCN10A; (-) strand; PAM type: YTN; PAM sequence: TTT
  source 1..20: mol_type = other DNA
taaataaagatatcacataa

SEQ ID NO: 56958 - DNA, 20 bp, synthetic construct
  misc_feature 1..20: note = Description of Artificial Sequence: Synthetic oligonucleotide
  misc_feature 1..20: note = Target: SCN10A; (-) strand; PAM type: YTN; PAM sequence: TTA
  source 1..20: mol_type = other DNA
gaatgattttaaataaagat

SEQ ID NO: 56959 - DNA, 20 bp, synthetic construct
  misc_feature 1..20: note = Description of Artificial Sequence: Synthetic oligonucleotide
  misc_feature 1..20: note = Target: SCN10A; (-) strand; PAM type: YTN; PAM sequence: TTT
  source 1..20: mol_type = other DNA
agaatgattttaaataaaga

SEQ ID NO: 56960 - DNA, 20 bp, synthetic construct
  misc_feature 1..20: note = Description of Artificial Sequence: Synthetic oligonucleotide
  misc_feature 1..20: note = Target: SCN10A; (-) strand; PAM type: YTN; PAM sequence: CTT
  source 1..20: mol_type = other DNA
tagaatgattttaaataaag

SEQ ID NO: 56961 - DNA, 20 bp, synthetic construct
  misc_feature 1..20: note = Description of Artificial Sequence: Synthetic oligonucleotide
  misc_feature 1..20: note = Target: SCN10A; (-) strand; PAM type: YTN; PAM sequence: CTA
  source 1..20: mol_type = other DNA
tggagagctttagaatgatt

SEQ ID NO: 56962 - DNA, 20 bp, synthetic construct
  misc_feature 1..20: note = Description of Artificial Sequence: Synthetic oligonucleotide
  misc_feature 1..20: note = Target: SCN10A; (-) strand; PAM type: YTN; PAM sequence: TTG
  source 1..20: mol_type = other DNA
agtgctatggagagctttag

SEQ ID NO: 56963 - DNA, 20 bp, synthetic construct
  misc_feature 1..20: note = Description of Artificial Sequence: Synthetic oligonucleotide
  misc_feature 1..20: note = Target: SCN10A; (-) strand; PAM type: YTN; PAM sequence: CTT
  source 1..20: mol_type = other DNA
gagtgctatggagagcttta

SEQ ID NO: 56964 - DNA, 20 bp, synthetic construct
  misc_feature 1..20: note = Description of Artificial Sequence: Synthetic oligonucleotide
  misc_feature 1..20: note = Target: SCN10A; (-) strand; PAM type: YTN; PAM sequence: TTA
  source 1..20: mol_type = other DNA
tcttgagtgctatggagagc

SEQ ID NO: 56965 - DNA, 20 bp, synthetic construct
  misc_feature 1..20: note = Description of Artificial Sequence: Synthetic oligonucleotide
  misc_feature 1..20: note = Target: SCN10A; (-) strand; PAM type: YTN; PAM sequence: TTG
  source 1..20: mol_type = other DNA
ggttatcttgagtgctatgg

SEQ ID NO: 56966 - DNA, 20 bp, synthetic construct
  misc_feature 1..20: note = Description of Artificial Sequence: Synthetic oligonucleotide
  misc_feature 1..20: note = Target: SCN10A; (-) strand; PAM type: YTN; PAM sequence: TTT
  source 1..20: mol_type = other DNA
gggttatcttgagtgctatg

SEQ ID NO: 56967 - DNA, 20 bp, synthetic construct
  misc_feature 1..20: note = Description of Artificial Sequence: Synthetic oligonucleotide
  misc_feature 1..20: note = Target: SCN10A; (-) strand; PAM type: YTN; PAM sequence: CTG
  source 1..20: mol_type = other DNA
gagaggtcagcgcacagttt

SEQ ID NO: 56968 - DNA, 20 bp, synthetic construct
  misc_feature 1..20: note = Description of Artificial Sequence: Synthetic oligonucleotide
  misc_feature 1..20: note = Target: SCN10A; (-) strand; PAM type: YTN; PAM sequence: CTA
  source 1..20: mol_type = other DNA
ccatgctggagaggtcagcg

SEQ ID NO: 56969 - DNA, 20 bp, synthetic construct
  misc_feature 1..20: note = Description of Artificial Sequence: Synthetic oligonucleotide
  misc_feature 1..20: note = Target: SCN10A; (-) strand; PAM type: YTN; PAM sequence: CTG
  source 1..20: mol_type = other DNA
gggactaccatgctggagag

SEQ ID NO: 56970 - DNA, 20 bp, synthetic construct
  misc_feature 1..20: note = Description of Artificial Sequence: Synthetic oligonucleotide
  misc_feature 1..20: note = Target: SCN10A; (-) strand; PAM type: YTN; PAM sequence: TTA
  source 1..20: mol_type = other DNA
taaaagtagtgtggctgggg

SEQ ID NO: 56971 - DNA, 20 bp, synthetic construct
  misc_feature 1..20: note = Description of Artificial Sequence: Synthetic oligonucleotide
  misc_feature 1..20: note = Target: SCN10A; (-) strand; PAM type: YTN; PAM sequence: CTT
  source 1..20: mol_type = other DNA
ataaaagtagtgtggctggg

SEQ ID NO: 56972 - DNA, 20 bp, synthetic construct
  misc_feature 1..20: note = Description of Artificial Sequence: Synthetic oligonucleotide
  misc_feature 1..20: note = Target: SCN10A; (-) strand; PAM type: YTN; PAM sequence: TTC
  source 1..20: mol_type = other DNA
aaggataaacttataaaagt

SEQ ID NO: 56973 - DNA, 20 bp, synthetic construct
  misc_feature 1..20: note = Description of Artificial Sequence: Synthetic oligonucleotide
  misc_feature 1..20: note = Target: SCN10A; (-) strand; PAM type: YTN; PAM sequence: TTA
  source 1..20: mol_type = other DNA
acataaaaaagaatgggtca

SEQ ID NO: 56974 - DNA, 20 bp, synthetic construct
  misc_feature 1..20: note = Description of Artificial Sequence: Synthetic oligonucleotide
  misc_feature 1..20: note = Target: SCN10A; (-) strand; PAM type: YTN; PAM sequence: CTT
  source 1..20: mol_type = other DNA
aacataaaaaagaatgggtc

SEQ ID NO: 56975 - DNA, 20 bp, synthetic construct
  misc_feature 1..20: note = Description of Artificial Sequence: Synthetic oligonucleotide
  misc_feature 1..20: note = Target: SCN10A; (-) strand; PAM type: YTN; PAM sequence: TTA
  source 1..20: mol_type = other DNA
ggcaaaggaaggggaatatg

SEQ ID NO: 56976 - DNA, 20 bp, synthetic construct
  misc_feature 1..20: note = Description of Artificial Sequence: Synthetic oligonucleotide
  misc_feature 1..20: note = Target: SCN10A; (-) strand; PAM type: YTN; PAM sequence: TTT
  source 1..20: mol_type = other DNA
aggcaaaggaaggggaatat

SEQ ID NO: 56977 - DNA, 20 bp, synthetic construct
  misc_feature 1..20: note = Description of Artificial Sequence: Synthetic oligonucleotide
  misc_feature 1..20: note = Target: SCN10A; (-) strand; PAM type: YTN; PAM sequence: TTT
  source 1..20: mol_type = other DNA
taggcaaaggaaggggaata

SEQ ID NO: 56978 - DNA, 20 bp, synthetic construct
  misc_feature 1..20: note = Description of Artificial Sequence: Synthetic oligonucleotide
  misc_feature 1..20: note = Target: SCN10A; (-) strand; PAM type: YTN; PAM sequence: TTA
  source 1..20: mol_type = other DNA
gccagacaaaataaagtgga

SEQ ID NO: 56979 - DNA, 20 bp, synthetic construct
  misc_feature 1..20: note = Description of Artificial Sequence: Synthetic oligonucleotide
  misc_feature 1..20: note = Target: SCN10A; (-) strand; PAM type: YTN; PAM sequence: CTC
  source 1..20: mol_type = other DNA
aaagccaagagtacaagaat

SEQ ID NO: 56980 - DNA, 20 bp, synthetic construct
  misc_feature 1..20: note = Description of Artificial Sequence: Synthetic oligonucleotide
  misc_feature 1..20: note = Target: SCN10A; (-) strand; PAM type: YTN; PAM sequence: TTG
  source 1..20: mol_type = other DNA
tctcaaagccaagagtacaa

SEQ ID NO: 56981 - DNA, 20 bp, synthetic construct
  misc_feature 1..20: note = Description of Artificial Sequence: Synthetic oligonucleotide
  misc_feature 1..20: note = Target: SCN10A; (-) strand; PAM type: YTN; PAM sequence: TTC
  source 1..20: mol_type = other DNA
atataggtcagaaatggaag

SEQ ID NO: 56982 - DNA, 20 bp, synthetic construct
  misc_feature 1..20: note = Description of Artificial Sequence: Synthetic oligonucleotide
  misc_feature 1..20: note = Target: SCN10A; (-) strand; PAM type: YTN; PAM sequence: CTT
  source 1..20: mol_type = other DNA
catataggtcagaaatggaa

SEQ ID NO: 56983 - DNA, 20 bp, synthetic construct
  misc_feature 1..20: note = Description of Artificial Sequence: Synthetic oligonucleotide
  misc_feature 1..20: note = Target: SCN10A; (-) strand; PAM type: YTN; PAM sequence: CTA
  source 1..20: mol_type = other DNA
acatagacttcatataggtc

SEQ ID NO: 56984 - DNA, 20 bp, synthetic construct
  misc_feature 1..20: note = Description of Artificial Sequence: Synthetic oligonucleotide
  misc_feature 1..20: note = Target: SCN10A; (-) strand; PAM type: YTN; PAM sequence: TTA
  source 1..20: mol_type = other DNA
tgggaacatgaaacaggaat

SEQ ID NO: 56985 - DNA, 20 bp, synthetic construct
  misc_feature 1..20: note = Description of Artificial Sequence: Synthetic oligonucleotide
  misc_feature 1..20: note = Target: SCN10A; (-) strand; PAM type: YTN; PAM sequence: TTA
  source 1..20: mol_type = other DNA
tagagaaagtgcagagagtt

SEQ ID NO: 56986 - DNA, 20 bp, synthetic construct
  misc_feature 1..20: note = Description of Artificial Sequence: Synthetic oligonucleotide
  misc_feature 1..20: note = Target: SCN10A; (-) strand; PAM type: YTN; PAM sequence: TTT
  source 1..20: mol_type = other DNA
atagagaaagtgcagagagt

SEQ ID NO: 56987 - DNA, 20 bp, synthetic construct
  misc_feature 1..20: note = Description of Artificial Sequence: Synthetic oligonucleotide
  misc_feature 1..20: note = Target: SCN10A; (-) strand; PAM type: YTN; PAM sequence: TTA
  source 1..20: mol_type = other DNA
caaatcagatgtttatagag

SEQ ID NO: 56988 - DNA, 20 bp, synthetic construct
  misc_feature 1..20: note = Description of Artificial Sequence: Synthetic oligonucleotide
  misc_feature 1..20: note = Target: SCN10A; (-) strand; PAM type: YTN; PAM sequence: TTG
  source 1..20: mol_type = other DNA
gtagaaacaatagaaaggca

SEQ ID NO: 56989 - DNA, 20 bp, synthetic construct
  misc_feature 1..20: note = Description of Artificial Sequence: Synthetic oligonucleotide
  misc_feature 1..20: note = Target: SCN10A; (-) strand; PAM type: YTN; PAM sequence: TTT
  source 1..20: mol_type = other DNA
ggtagaaacaatagaaaggc

SEQ ID NO: 56990 - DNA, 20 bp, synthetic construct
  misc_feature 1..20: note = Description of Artificial Sequence: Synthetic oligonucleotide
  misc_feature 1..20: note = Target: SCN10A; (-) strand; PAM type: YTN; PAM sequence: TTA
  source 1..20: mol_type = other DNA
caatttggtagaaacaatag

SEQ ID NO: 56991 - DNA, 20 bp, synthetic construct
  misc_feature 1..20: note = Description of Artificial Sequence: Synthetic oligonucleotide
  misc_feature 1..20: note = Target: SCN10A; (-) strand; PAM type: YTN; PAM sequence: CTT
  source 1..20: mol_type = other DNA
acaatttggtagaaacaata

SEQ ID NO: 56992 - DNA, 20 bp, synthetic construct
  misc_feature 1..20: note = Description of Artificial Sequence: Synthetic oligonucleotide
  misc_feature 1..20: note = Target: SCN10A; (-) strand; PAM type: YTN; PAM sequence: CTG
  source 1..20: mol_type = other DNA
agcttacaatttggtagaaa

SEQ ID NO: 56993 - DNA, 20 bp, synthetic construct
  misc_feature 1..20: note = Description of Artificial Sequence: Synthetic oligonucleotide
  misc_feature 1..20: note = Target: SCN10A; (-) strand; PAM type: YTN; PAM sequence: CTC
  source 1..20: mol_type = other DNA
actgagcttacaatttggta

SEQ ID NO: 56994 - DNA, 20 bp, synthetic construct
  misc_feature 1..20: note = Description of Artificial Sequence: Synthetic oligonucleotide
  misc_feature 1..20: note = Target: SCN10A; (-) strand; PAM type: YTN; PAM sequence: CTC
  source 1..20: mol_type = other DNA
tcactgagcttacaatttgg

SEQ ID NO: 56995 - DNA, 20 bp, synthetic construct
  misc_feature 1..20: note = Description of Artificial Sequence: Synthetic oligonucleotide
  misc_feature 1..20: note = Target: SCN10A; (-) strand; PAM type: YTN; PAM sequence: CTG
  source 1..20: mol_type = other DNA
aacaaaatagatgtgagtcc

SEQ ID NO: 56996 - DNA, 20 bp, synthetic construct
  misc_feature 1..20: note = Description of Artificial Sequence: Synthetic oligonucleotide
  misc_feature 1..20: note = Target: SCN10A; (-) strand; PAM type: YTN; PAM sequence: CTG
  source 1..20: mol_type = other DNA
gaaaatcaatgctgaacaaa

SEQ ID NO: 56997 - DNA, 20 bp, synthetic construct
  misc_feature 1..20: note = Description of Artificial Sequence: Synthetic oligonucleotide
  misc_feature 1..20: note = Target: SCN10A; (-) strand; PAM type: YTN; PAM sequence: TTC
  source 1..20: mol_type = other DNA
tggaaaatcaatgctgaaca

SEQ ID NO: 56998 - DNA, 20 bp, synthetic construct
  misc_feature 1..20: note = Description of Artificial Sequence: Synthetic oligonucleotide
  misc_feature 1..20: note = Target: SCN10A; (-) strand; PAM type: YTN; PAM sequence: CTA
  source 1..20: mol_type = other DNA
ggttctggaaaatcaatgct

SEQ ID NO: 56999 - DNA, 20 bp, synthetic construct
  misc_feature 1..20: note = Description of Artificial Sequence: Synthetic oligonucleotide
  misc_feature 1..20: note = Target: SCN10A; (-) strand; PAM type: YTN; PAM sequence: CTG
  source 1..20: mol_type = other DNA
tactaggttctggaaaatca

SEQ ID NO: 57000 - DNA, 20 bp, synthetic construct
  misc_feature 1..20: note = Description of Artificial Sequence: Synthetic oligonucleotide
  misc_feature 1..20: note = Target: SCN10A; (-) strand; PAM type: YTN; PAM sequence: TTC
  source 1..20: mol_type = other DNA
caggcactgtactaggttct

SEQ ID NO: 57001 - DNA, 20 bp, synthetic construct
  misc_feature 1..20: note = Description of Artificial Sequence: Synthetic oligonucleotide
  misc_feature 1..20: note = Target: SCN10A; (-) strand; PAM type: YTN; PAM sequence: TTA
  source 1..20: mol_type = other DNA
gttccaggcactgtactagg

SEQ ID NO: 57002 - DNA, 20 bp, synthetic construct
  misc_feature 1..20: note = Description of Artificial Sequence: Synthetic oligonucleotide
  misc_feature 1..20: note = Target: SCN10A; (-) strand; PAM type: YTN; PAM sequence: CTA
  source 1..20: mol_type = other DNA
gttagttccaggcactgtac

SEQ ID NO: 57003 - DNA, 20 bp, synthetic construct
  misc_feature 1..20: note = Description of Artificial Sequence: Synthetic oligonucleotide
  misc_feature 1..20: note = Target: SCN10A; (-) strand; PAM type: YTN; PAM sequence: CTG
  source 1..20: mol_type = other DNA
tatctagttagttccaggca

SEQ ID NO: 57004 - DNA, 20 bp, synthetic construct
  misc_feature 1..20: note = Description of Artificial Sequence: Synthetic oligonucleotide
  misc_feature 1..20: note = Target: SCN10A; (-) strand; PAM type: YTN; PAM sequence: TTC
  source 1..20: mol_type = other DNA
tgtatctagttagttccagg

SEQ ID NO: 57005 - DNA, 20 bp, synthetic construct
  misc_feature 1..20: note = Description of Artificial Sequence: Synthetic oligonucleotide
  misc_feature 1..20: note = Target: SCN10A; (-) strand; PAM type: YTN; PAM sequence: CTA
  source 1..20: mol_type = other DNA
ttctgtatctagttagttcc

SEQ ID NO: 57006 - DNA, 20 bp, synthetic construct
  misc_feature 1..20: note = Description of Artificial Sequence: Synthetic oligonucleotide
  misc_feature 1..20: note = Target: SCN10A; (-) strand; PAM type: YTN; PAM sequence: CTA
  source 1..20: mol_type = other DNA
tctattctgtatctagttag

SEQ ID NO: 57007 - DNA, 20 bp, synthetic construct
  misc_feature 1..20: note = Description of Artificial Sequence: Synthetic oligonucleotide
  misc_feature 1..20: note = Target: SCN10A; (-) strand; PAM type: YTN; PAM sequence: TTC
  source 1..20: mol_type = other DNA
atgcaacaactatctattct

SEQ ID NO: 57008 - DNA, 20 bp, synthetic construct
  misc_feature 1..20: note = Description of Artificial Sequence: Synthetic oligonucleotide
  misc_feature 1..20: note = Target: SCN10A; (-) strand; PAM type: YTN; PAM sequence: CTA
  source 1..20: mol_type = other DNA
ttcatgcaacaactatctat

SEQ ID NO: 57009 - DNA, 20 bp, synthetic construct
  misc_feature 1..20: note = Description of Artificial Sequence: Synthetic oligonucleotide
  misc_feature 1..20: note = Target: SCN10A; (-) strand; PAM type: YTN; PAM sequence: CTC
  source 1..20: mol_type = other DNA
tattcatgcaacaactatct

SEQ ID NO: 57010 - DNA, 20 bp, synthetic construct
  misc_feature 1..20: note = Description of Artificial Sequence: Synthetic oligonucleotide
  misc_feature 1..20: note = Target: SCN10A; (-) strand; PAM type: YTN; PAM sequence: TTA
  source 1..20: mol_type = other DNA
tctctattcatgcaacaact

SEQ ID NO: 57011 - DNA, 20 bp, synthetic construct
  misc_feature 1..20: note = Description of Artificial Sequence: Synthetic oligonucleotide
  misc_feature 1..20: note = Target: SCN10A; (-) strand; PAM type: YTN; PAM sequence: TTC
  source 1..20: mol_type = other DNA
gccattatctctattcatgc

SEQ ID NO: 57012 - DNA, 20 bp, synthetic construct
  misc_feature 1..20: note = Description of Artificial Sequence: Synthetic oligonucleotide
  misc_feature 1..20: note = Target: SCN10A; (-) strand; PAM type: YTN; PAM sequence: TTT
  source 1..20: mol_type = other DNA
cgccattatctctattcatg

SEQ ID NO: 57013 - DNA, 20 bp, synthetic construct
  misc_feature 1..20: note = Description of Artificial Sequence: Synthetic oligonucleotide
  misc_feature 1..20: note = Target: SCN10A; (-) strand; PAM type: YTN; PAM sequence: TTA
  source 1..20: mol_type = other DNA
agtttcgccattatctctat

SEQ ID NO: 57014 - DNA, 20 bp, synthetic construct
  misc_feature 1..20: note = Description of Artificial Sequence: Synthetic oligonucleotide
  misc_feature 1..20: note = Target: SCN10A; (-) strand; PAM type: YTN; PAM sequence: CTA
  source 1..20: mol_type = other DNA
ttaagtttcgccattatctc

SEQ ID NO: 57015 - DNA, 20 bp, synthetic construct
  misc_feature 1..20: note = Description of Artificial Sequence: Synthetic oligonucleotide
  misc_feature 1..20: note = Target: SCN10A; (-) strand; PAM type: YTN; PAM sequence: TTC
  source 1..20: mol_type = other DNA
agctattaagtttcgccatt

SEQ ID NO: 57016 - DNA, 20 bp, synthetic construct
  misc_feature 1..20: note = Description of Artificial Sequence: Synthetic oligonucleotide
  misc_feature 1..20: note = Target: SCN10A; (-) strand; PAM type: YTN; PAM sequence: TTT
  source 1..20: mol_type = other DNA
cagctattaagtttcgccat

SEQ ID NO: 57017 - DNA, 20 bp, synthetic construct
  misc_feature 1..20: note = Description of Artificial Sequence: Synthetic oligonucleotide
  misc_feature 1..20: note = Target: SCN10A; (-) strand; PAM type: YTN; PAM sequence: TTT
  source 1..20: mol_type = other DNA
tcagctattaagtttcgcca

SEQ ID NO: 57018 - DNA, 20 bp, synthetic construct
  misc_feature 1..20: note = Description of Artificial Sequence: Synthetic oligonucleotide
  misc_feature 1..20: note = Target: SCN10A; (-) strand; PAM type: YTN; PAM sequence: TTT
  source 1..20: mol_type = other DNA
ttcagctattaagtttcgcc

SEQ ID NO: 57019 - DNA, 20 bp, synthetic construct
  misc_feature 1..20: note = Description of Artificial Sequence: Synthetic oligonucleotide
  misc_feature 1..20: note = Target: SCN10A; (-) strand; PAM type: YTN; PAM sequence: TTA
  source 1..20: mol_type = other DNA
gtttttcagctattaagttt

SEQ ID NO: 57020 - DNA, 20 bp, synthetic construct
  misc_feature 1..20: note = Description of Artificial Sequence: Synthetic oligonucleotide
  misc_feature 1..20: note = Target: SCN10A; (-) strand; PAM type: YTN; PAM sequence: TTT
  source 1..20: mol_type = other DNA
agtttttcagctattaagtt

SEQ ID NO: 57021 - DNA, 20 bp, synthetic construct
  misc_feature 1..20: note = Description of Artificial Sequence: Synthetic oligonucleotide
  misc_feature 1..20: note = Target: SCN10A; (-) strand; PAM type: YTN; PAM sequence: CTT
  source 1..20: mol_type = other DNA
tagtttttcagctattaagt

SEQ ID NO: 57022 - DNA, 20 bp, synthetic construct
  misc_feature 1..20: note = Description of Artificial Sequence: Synthetic oligonucleotide
  misc_feature 1..20: note = Target: SCN10A; (-) strand; PAM type: YTN; PAM sequence: TTC
  source 1..20: mol_type = other DNA
tttagtttttcagctattaa

SEQ ID NO: 57023 - DNA, 20 bp, synthetic construct
  misc_feature 1..20: note = Description of Artificial Sequence: Synthetic oligonucleotide
  misc_feature 1..20: note = Target: SCN10A; (-) strand; PAM type: YTN; PAM sequence: CTG
  source 1..20: mol_type = other DNA
aacaaaatgttctttagttt

SEQ ID NO: 57024 - DNA, 20 bp, synthetic construct
  misc_feature 1..20: note = Description of Artificial Sequence: Synthetic oligonucleotide
  misc_feature 1..20: note = Target: SCN10A; (-) strand; PAM type: YTN; PAM sequence: TTC
  source 1..20: mol_type = other DNA
tgaacaaaatgttctttagt

SEQ ID NO: 57025 - DNA, 20 bp, synthetic construct
  misc_feature 1..20: note = Description of Artificial Sequence: Synthetic oligonucleotide
  misc_feature 1..20: note = Target: SCN10A; (-) strand; PAM type: YTN; PAM sequence: TTT
  source 1..20: mol_type = other DNA
ctgaacaaaatgttctttag

SEQ ID NO: 57026 - DNA, 20 bp, synthetic construct
  misc_feature 1..20: note = Description of Artificial Sequence: Synthetic oligonucleotide
  misc_feature 1..20: note = Target: SCN10A; (-) strand; PAM type: YTN; PAM sequence: TTT
  source 1..20: mol_type = other DNA
tctgaacaaaatgttcttta

SEQ ID NO: 57027 - DNA, 20 bp, synthetic construct
  misc_feature 1..20: note = Description of Artificial Sequence: Synthetic oligonucleotide
  misc_feature 1..20: note = Target: SCN10A; (-) strand; PAM type: YTN; PAM sequence: TTT
  source 1..20: mol_type = other DNA
ttctgaacaaaatgttcttt

SEQ ID NO: 57028 - DNA, 20 bp, synthetic construct
  misc_feature 1..20: note = Description of Artificial Sequence: Synthetic oligonucleotide
  misc_feature 1..20: note = Target: SCN10A; (-) strand; PAM type: YTN; PAM sequence: CTG
  source 1..20: mol_type = other DNA
catttttctgaacaaaatgt

SEQ ID NO: 57029 - DNA, 20 bp, synthetic construct
  misc_feature 1..20: note = Description of Artificial Sequence: Synthetic oligonucleotide
  misc_feature 1..20: note = Target: SCN10A; (-) strand; PAM type: YTN; PAM sequence: TTG
  source 1..20: mol_type = other DNA
ctgcatttttctgaacaaaa

SEQ ID NO: 57030 - DNA, 20 bp, synthetic construct
  misc_feature 1..20: note = Description of Artificial Sequence: Synthetic oligonucleotide
  misc_feature 1..20: note = Target: SCN10A; (-) strand; PAM type: YTN; PAM sequence: TTT
  source 1..20: mol_type = other DNA
gctgcatttttctgaacaaa

SEQ ID NO: 57031 - DNA, 20 bp, synthetic construct
  misc_feature 1..20: note = Description of Artificial Sequence: Synthetic oligonucleotide
  misc_feature 1..20: note = Target: SCN10A; (-) strand; PAM type: YTN; PAM sequence: TTT
  source 1..20: mol_type = other DNA
tgctgcatttttctgaacaa

SEQ ID NO: 57032 - DNA, 20 bp, synthetic construct
  misc_feature 1..20: note = Description of Artificial Sequence: Synthetic oligonucleotide
  misc_feature 1..20: note = Target: SCN10A; (-) strand; PAM type: YTN; PAM sequence: TTT
  source 1..20: mol_type = other DNA
ttgctgcatttttctgaaca

SEQ ID NO: 57033 - DNA, 20 bp, synthetic construct
  misc_feature 1..20: note = Description of Artificial Sequence: Synthetic oligonucleotide
  misc_feature 1..20: note = Target: SCN10A; (-) strand; PAM type: YTN; PAM sequence: CTG
  source 1..20: mol_type = other DNA
tgatttttgctgcatttttc

SEQ ID NO: 57034 - DNA, 20 bp, synthetic construct
  misc_feature 1..20: note = Description of Artificial Sequence: Synthetic oligonucleotide
  misc_feature 1..20: note = Target: SCN10A; (-) strand; PAM type: YTN; PAM sequence: TTG
  source 1..20: mol_type = other DNA
gatctgtgatttttgctgca

SEQ ID NO: 57035 - DNA, 20 bp, synthetic construct
  misc_feature 1..20: note = Description of Artificial Sequence: Synthetic oligonucleotide
  misc_feature 1..20: note = Target: SCN10A; (-) strand; PAM type: YTN; PAM sequence: TTA
  source 1..20: mol_type = other DNA
ttggatctgtgatttttgct

SEQ ID NO: 57036 - DNA, 20 bp, synthetic construct
  misc_feature 1..20: note = Description of Artificial Sequence: Synthetic oligonucleotide
  misc_feature 1..20: note = Target: SCN10A; (-) strand; PAM type: YTN; PAM sequence: CTA
  source 1..20: mol_type = other DNA
ttattggatctgtgattttt

SEQ ID NO: 57037 - DNA, 20 bp, synthetic construct
  misc_feature 1..20: note = Description of Artificial Sequence: Synthetic oligonucleotide
  misc_feature 1..20: note = Target: SCN10A; (-) strand; PAM type: YTN; PAM sequence: TTC
  source 1..20: mol_type = other DNA
ctattattggatctgtgatt

SEQ ID NO: 57038 - DNA, 20 bp, synthetic construct
  misc_feature 1..20: note = Description of Artificial Sequence: Synthetic oligonucleotide
  misc_feature 1..20: note = Target: SCN10A; (-) strand; PAM type: YTN; PAM sequence: TTA
  source 1..20: mol_type = other DNA
tattcctattattggatctg

SEQ ID NO: 57039 - DNA, 20 bp, synthetic construct
  misc_feature 1..20: note = Description of Artificial Sequence: Synthetic oligonucleotide
  misc_feature 1..20: note = Target: SCN10A; (-) strand; PAM type: YTN; PAM sequence: CTT
  source 1..20: mol_type = other DNA
atattcctattattggatct

SEQ ID NO: 57040 - DNA, 20 bp, synthetic construct
  misc_feature 1..20: note = Description of Artificial Sequence: Synthetic oligonucleotide
  misc_feature 1..20: note = Target: SCN10A; (-) strand; PAM type: YTN; PAM sequence: TTC
  source 1..20: mol_type = other DNA
cttatattcctattattgga

SEQ ID NO: 57041 - DNA, 20 bp, synthetic construct
  misc_feature 1..20: note = Description of Artificial Sequence: Synthetic oligonucleotide
  misc_feature 1..20: note = Target: SCN10A; (-) strand; PAM type: YTN; PAM sequence: TTG
  source 1..20: mol_type = other DNA
gttccttatattcctattat

SEQ ID NO: 57042 - DNA, 20 bp, synthetic construct
  misc_feature 1..20: note = Description of Artificial Sequence: Synthetic oligonucleotide
  misc_feature 1..20: note = Target: SCN10A; (-) strand; PAM type: YTN; PAM sequence: TTT
  source 1..20: mol_type = other DNA
ggttccttatattcctatta

SEQ ID NO: 57043 - DNA, 20 bp, synthetic construct
  misc_feature 1..20: note = Description of Artificial Sequence: Synthetic oligonucleotide
  misc_feature 1..20: note = Target: SCN10A; (-) strand; PAM type: YTN; PAM sequence: CTT
  source 1..20: mol_type = other DNA
tggttccttatattcctatt

SEQ ID NO: 57044 - DNA, 20 bp, synthetic construct
  misc_feature 1..20: note = Description of Artificial Sequence: Synthetic oligonucleotide
  misc_feature 1..20: note = Target: SCN10A; (-) strand; PAM type: YTN; PAM sequence: CTC
  source 1..20: mol_type = other DNA
tttggttccttatattccta

SEQ ID NO: 57045 - DNA, 20 bp, synthetic construct
  misc_feature 1..20: note = Description of Artificial Sequence: Synthetic oligonucleotide
  misc_feature 1..20: note = Target: SCN10A; (-) strand; PAM type: YTN; PAM sequence: CTC
  source 1..20: mol_type = other DNA
aataatctctttggttcctt

SEQ ID NO: 57046 - DNA, 20 bp, synthetic construct
  misc_feature 1..20: note = Description of Artificial Sequence: Synthetic oligonucleotide
  misc_feature 1..20: note = Target: SCN10A; (-) strand; PAM type: YTN; PAM sequence: TTA
  source 1..20: mol_type = other DNA
aaatgtcaatagactcaata

SEQ ID NO: 57047 - DNA, 20 bp, synthetic construct
  misc_feature 1..20: note = Description of Artificial Sequence: Synthetic oligonucleotide
  misc_feature 1..20: note = Target: SCN10A; (-) strand; PAM type: YTN; PAM sequence: TTT
  source 1..20: mol_type = other DNA
aaaatgtcaatagactcaat

SEQ ID NO: 57048 - DNA, 20 bp, synthetic construct
  misc_feature 1..20: note = Description of Artificial Sequence: Synthetic oligonucleotide
  misc_feature 1..20: note = Target: SCN10A; (-) strand; PAM type: YTN; PAM sequence: CTT
  source 1..20: mol_type = other DNA
taaaatgtcaatagactcaa

SEQ ID NO: 57049 - DNA, 20 bp, synthetic construct
  misc_feature 1..20: note = Description of Artificial Sequence: Synthetic oligonucleotide
  misc_feature 1..20: note = Target: SCN10A; (-) strand; PAM type: YTN; PAM sequence: TTG
  source 1..20: mol_type = other DNA
gggtgtgtgagctttaaaat

SEQ ID NO: 57050 - DNA, 20 bp, synthetic construct
  misc_feature 1..20: note = Description of Artificial Sequence: Synthetic oligonucleotide
  misc_feature 1..20: note = Target: SCN10A; (-) strand; PAM type: YTN; PAM sequence: TTT
  source 1..20: mol_type = other DNA
ggggtgtgtgagctttaaaa

SEQ ID NO: 57051 - DNA, 20 bp, synthetic construct
  misc_feature 1..20: note = Description of Artificial Sequence: Synthetic oligonucleotide
  misc_feature 1..20: note = Target: SCN10A; (-) strand; PAM type: YTN; PAM sequence: CTT
  source 1..20: mol_type = other DNA
tggggtgtgtgagctttaaa

SEQ ID NO: 57052 - DNA, 20 bp, synthetic construct
  misc_feature 1..20: note = Description of Artificial Sequence: Synthetic oligonucleotide
  misc_feature 1..20: note = Target: SCN10A; (-) strand; PAM type: YTN; PAM sequence: TTG
  source 1..20: mol_type = other DNA
actttggggtgtgtgagctt

SEQ ID NO: 57053 - DNA, 20 bp, synthetic construct
  misc_feature 1..20: note = Description of Artificial Sequence: Synthetic oligonucleotide
  misc_feature 1..20: note = Target: SCN10A; (-) strand; PAM type: YTN; PAM sequence: CTT
  source 1..20: mol_type = other DNA
gactttggggtgtgtgagct

SEQ ID NO: 57054 - DNA, 20 bp, synthetic construct
  misc_feature 1..20: note = Description of Artificial Sequence: Synthetic oligonucleotide
  misc_feature 1..20: note = Target: SCN10A; (-) strand; PAM type: YTN; PAM sequence: CTG
  source 1..20: mol_type = other DNA
cttgactttggggtgtgtga

SEQ ID NO: 57055 - DNA, 20 bp, synthetic construct
  misc_feature 1..20: note = Description of Artificial Sequence: Synthetic oligonucleotide
  misc_feature 1..20: note = Target: SCN10A; (-) strand; PAM type: YTN; PAM sequence: CTG
  source 1..20: mol_type = other DNA
ccaccatctgcttgactttg

SEQ ID NO: 57056 - DNA, 20 bp, synthetic construct
  misc_feature 1..20: note = Description of Artificial Sequence: Synthetic oligonucleotide
  misc_feature 1..20: note = Target: SCN10A; (-) strand; PAM type: YTN; PAM sequence: CTC
  source 1..20: mol_type = other DNA
tgccaccatctgcttgactt

SEQ ID NO: 57057 - DNA, 20 bp, synthetic construct
  misc_feature 1..20: note = Description of Artificial Sequence: Synthetic oligonucleotide
  misc_feature 1..20: note = Target: SCN10A; (-) strand; PAM type: YTN; PAM sequence: CTG
  source 1..20: mol_type = other DNA
cctctgccaccatctgcttg

SEQ ID NO: 57058 - DNA, 20 bp, synthetic construct
  misc_feature 1..20: note = Description of Artificial Sequence: Synthetic oligonucleotide
  misc_feature 1..20: note = Target: SCN10A; (-) strand; PAM type: YTN; PAM sequence: TTA
  source 1..20: mol_type = other DNA
agcactgcctctgccaccat

SEQ ID NO: 57059 - DNA, 20 bp, synthetic construct
  misc_feature 1..20: note = Description of Artificial Sequence: Synthetic oligonucleotide
  misc_feature 1..20: note = Target: SCN10A; (-) strand; PAM type: YTN; PAM sequence: TTT
  source 1..20: mol_type = other DNA
aagcactgcctctgccacca

SEQ ID NO: 57060 - DNA, 20 bp, synthetic construct
  misc_feature 1..20: note = Description of Artificial Sequence: Synthetic oligonucleotide
  misc_feature 1..20: note = Target: SCN10A; (-) strand; PAM type: YTN; PAM sequence: TTG
  source 1..20: mol_type = other DNA
atttaagcactgcctctgcc

SEQ ID NO: 57061 - DNA, 20 bp, synthetic construct
  misc_feature 1..20: note = Description of Artificial Sequence: Synthetic oligonucleotide
  misc_feature 1..20: note = Target: SCN10A; (-) strand; PAM type: YTN; PAM sequence: TTT
  source 1..20: mol_type = other DNA
gatttaagcactgcctctgc

SEQ ID NO: 57062 - DNA, 20 bp, synthetic construct
  misc_feature 1..20: note = Description of Artificial Sequence: Synthetic oligonucleotide
  misc_feature 1..20: note = Target: SCN10A; (-) strand; PAM type: YTN; PAM sequence: CTC
  source 1..20: mol_type = other DNA
catcataggggtatttgatt

SEQ ID NO: 57063 - DNA, 20 bp, synthetic construct
  misc_feature 1..20: note = Description of Artificial Sequence: Synthetic oligonucleotide
  misc_feature 1..20: note = Target: SCN10A; (-) strand; PAM type: YTN; PAM sequence: CTA
  source 1..20: mol_type = other DNA
ggtatggtgggagcaagcag

SEQ ID NO: 57064 - DNA, 20 bp, synthetic construct
  misc_feature 1..20: note = Description of Artificial Sequence: Synthetic oligonucleotide
  misc_feature 1..20: note = Target: SCN10A; (-) strand; PAM type: YTN; PAM sequence: CTC
  source 1..20: mol_type = other DNA
taggtatggtgggagcaagc

SEQ ID NO: 57065 - DNA, 20 bp, synthetic construct
  misc_feature 1..20: note = Description of Artificial Sequence: Synthetic oligonucleotide
  misc_feature 1..20: note = Target: SCN10A; (-) strand; PAM type: YTN; PAM sequence: TTC
  source 1..20: mol_type = other DNA
aagaaatacctctaggtatg

SEQ ID NO: 57066 - DNA, 20 bp, synthetic construct
  misc_feature 1..20: note = Description of Artificial Sequence: Synthetic oligonucleotide
  misc_feature 1..20: note = Target: SCN10A; (-) strand; PAM type: YTN; PAM sequence: TTG
  source 1..20: mol_type = other DNA
gattcaagaaatacctctag

SEQ ID NO: 57067 - DNA, 20 bp, synthetic construct
  misc_feature 1..20: note = Description of Artificial Sequence: Synthetic oligonucleotide
  misc_feature 1..20: note = Target: SCN10A; (-) strand; PAM type: YTN; PAM sequence: CTA
  source 1..20: mol_type = other DNA
tatcacagaggtattggatt

SEQ ID NO: 57068 - DNA, 20 bp, synthetic construct
  misc_feature 1..20: note = Description of Artificial Sequence: Synthetic oligonucleotide
  misc_feature 1..20: note = Target: SCN10A; (-) strand; PAM type: YTN; PAM sequence: CTG
  source 1..20: mol_type = other DNA
gtgacaataagcagtgtcta

SEQ ID NO: 57069 - DNA, 20 bp, synthetic construct
  misc_feature 1..20: note = Description of Artificial Sequence: Synthetic oligonucleotide
  misc_feature 1..20: note = Target: SCN10A; (-) strand; PAM type: YTN; PAM sequence: CTA
  source 1..20: mol_type = other DNA
gggctggtgacaataagcag

SEQ ID NO: 57070 - DNA, 20 bp, synthetic construct
  misc_feature 1..20: note = Description of Artificial Sequence: Synthetic oligonucleotide
  misc_feature 1..20: note = Target: SCN10A; (-) strand; PAM type: YTN; PAM sequence: CTC
  source 1..20: mol_type = other DNA
tagggctggtgacaataagc

SEQ ID NO: 57071 - DNA, 20 bp, synthetic construct
  misc_feature 1..20: note = Description of Artificial Sequence: Synthetic oligonucleotide
  misc_feature 1..20: note = Target: SCN10A; (-) strand; PAM type: YTN; PAM sequence: CTG
  source 1..20: mol_type = other DNA
cctctagggctggtgacaat

SEQ ID NO: 57072 - DNA, 20 bp, synthetic construct
  misc_feature 1..20: note = Description of Artificial Sequence: Synthetic oligonucleotide
  misc_feature 1..20: note = Target: SCN10A; (-) strand; PAM type: YTN; PAM sequence: TTG
  source 1..20: mol_type = other DNA
ggtaccagagctgcctctag

SEQ ID NO: 57073 - DNA, 20 bp, synthetic construct
  misc_feature 1..20: note = Description of Artificial Sequence: Synthetic oligonucleotide
  misc_feature 1..20: note = Target: SCN10A; (-) strand; PAM type: YTN; PAM sequence: CTA
  source 1..20: mol_type = other DNA
catatgggtattgggtacca

SEQ ID NO: 57074 - DNA, 20 bp, synthetic construct
  misc_feature 1..20: note = Description of Artificial Sequence: Synthetic oligonucleotide
  misc_feature 1..20: note = Target: SCN10A; (-) strand; PAM type: YTN; PAM sequence: CTC
  source 1..20: mol_type = other DNA
ctacatatgggtattgggta

SEQ ID NO: 57075 - DNA, 20 bp, synthetic construct
  misc_feature 1..20: note = Description of Artificial Sequence: Synthetic oligonucleotide
  misc_feature 1..20: note = Target: SCN10A; (-) strand; PAM type: YTN; PAM sequence: CTG
  source 1..20: mol_type = other DNA
gtgacaaccagcagagcctc

SEQ ID NO: 57076 - DNA, 20 bp, synthetic construct
  misc_feature 1..20: note = Description of Artificial Sequence: Synthetic oligonucleotide
  misc_feature 1..20: note = Target: SCN10A; (-) strand; PAM type: YTN; PAM sequence: TTC
  source 1..20: mol_type = other DNA
aatgcatggaaggactggtg

SEQ ID NO: 57077 - DNA, 20 bp, synthetic construct
  misc_feature 1..20: note = Description of Artificial Sequence: Synthetic oligonucleotide
  misc_feature 1..20: note = Target: SCN10A; (-) strand; PAM type: YTN; PAM sequence: CTT
  source 1..20: mol_type = other DNA
caatgcatggaaggactggt

SEQ ID NO: 57078 - DNA, 20 bp, synthetic construct
  misc_feature 1..20: note = Description of Artificial Sequence: Synthetic oligonucleotide
  misc_feature 1..20: note = Target: SCN10A; (-) strand; PAM type: YTN; PAM sequence: CTC
  source 1..20: mol_type = other DNA
ccaggacttcaatgcatgga

SEQ ID NO: 57079 - DNA, 20 bp, synthetic construct
  misc_feature 1..20: note = Description of Artificial Sequence: Synthetic oligonucleotide
  misc_feature 1..20: note = Target: SCN10A; (-) strand; PAM type: YTN; PAM sequence: CTC
  source 1..20: mol_type = other DNA
ctcccaggacttcaatgcat

SEQ ID NO: 57080 - DNA, 20 bp, synthetic construct
  misc_feature 1..20: note = Description of Artificial Sequence: Synthetic oligonucleotide
  misc_feature 1..20: note = Target: SCN10A; (-) strand; PAM type: YTN; PAM sequence: TTA
  source 1..20: mol_type = other DNA
aggaagaggaatggtgtcag

SEQ ID NO: 57081 - DNA, 20 bp, synthetic construct
  misc_feature 1..20: note = Description of Artificial Sequence: Synthetic oligonucleotide
  misc_feature 1..20: note = Target: SCN10A; (-) strand; PAM type: YTN; PAM sequence: CTC
  source 1..20: mol_type = other DNA
agaagaaagtaatggaggac

SEQ ID NO: 57082 - DNA, 20 bp, synthetic construct
  misc_feature 1..20: note = Description of Artificial Sequence: Synthetic oligonucleotide
  misc_feature 1..20: note = Target: SCN10A; (-) strand; PAM type: YTN; PAM sequence: CTC
  source 1..20: mol_type = other DNA
tcagaagaaagtaatggagg

SEQ ID NO: 57083 - DNA, 20 bp, synthetic construct
  misc_feature 1..20: note = Description of Artificial Sequence: Synthetic oligonucleotide
  misc_feature 1..20: note = Target: SCN10A; (-) strand; PAM type: YTN; PAM sequence: CTA
  source 1..20: mol_type = other DNA
caaataggcaggaggagagg

SEQ ID NO: 57084 - DNA, 20 bp, synthetic construct
  misc_feature 1..20: note = Description of Artificial Sequence: Synthetic oligonucleotide
  misc_feature 1..20: note = Target: SCN10A; (-) strand; PAM type: YTN; PAM sequence: TTC
  source 1..20: mol_type = other DNA
cgtaagaaacagatcaacta

SEQ ID NO: 57085 - DNA, 20 bp, synthetic construct
  misc_feature 1..20: note = Description of Artificial Sequence: Synthetic oligonucleotide
  misc_feature 1..20: note = Target: SCN10A; (-) strand; PAM type: YTN; PAM sequence: TTG
  source 1..20: mol_type = other DNA
aaaagttccgtaagaaacag

SEQ ID NO: 57086 - DNA, 20 bp, synthetic construct
  misc_feature 1..20: note = Description of Artificial Sequence: Synthetic oligonucleotide
  misc_feature 1..20: note = Target: SCN10A; (-) strand; PAM type: YTN; PAM sequence: TTT
  source 1..20: mol_type = other DNA
gaaaagttccgtaagaaaca

SEQ ID NO: 57087 - DNA, 20 bp, synthetic construct
  misc_feature 1..20: note = Description of Artificial Sequence: Synthetic oligonucleotide
  misc_feature 1..20: note = Target: SCN10A; (-) strand; PAM type: YTN; PAM sequence: CTT
  source 1..20: mol_type = other DNA
tgaaaagttccgtaagaaac

SEQ ID NO: 57088 - DNA, 20 bp, synthetic construct
  misc_feature 1..20: note = Description of Artificial Sequence: Synthetic oligonucleotide
  misc_feature 1..20: note = Target: SCN10A; (-) strand; PAM type: YTN; PAM sequence: TTG
  source 1..20: mol_type = other DNA
actttgaaaagttccgtaag

SEQ ID NO: 57089 - DNA, 20 bp, synthetic construct
  misc_feature 1..20: note = Description of Artificial Sequence: Synthetic oligonucleotide
  misc_feature 1..20: note = Target: SCN10A; (-) strand; PAM type: YTN; PAM sequence: TTA
  source 1..20: mol_type = other DNA
tgtaatgtaggttgactttg

SEQ ID NO: 57090 - DNA, 20 bp, synthetic construct
  misc_feature 1..20: note = Description of Artificial Sequence: Synthetic oligonucleotide
  misc_feature 1..20: note = Target: SCN10A; (-) strand; PAM type: YTN; PAM sequence: TTC
  source 1..20: mol_type = other DNA
aattatgtaatgtaggttga

SEQ ID NO: 57091 - DNA, 20 bp, synthetic construct
  misc_feature 1..20: note = Description of Artificial Sequence: Synthetic oligonucleotide
  misc_feature 1..20: note = Target: SCN10A; (-) strand; PAM type: YTN; PAM sequence: TTA
  source 1..20: mol_type = other DNA
gaagaaaatagaagacagat

SEQ ID NO: 57092 - DNA, 20 bp, synthetic construct
  misc_feature 1..20: note = Description of Artificial Sequence: Synthetic oligonucleotide
  misc_feature 1..20: note = Target: SCN10A; (-) strand; PAM type: YTN; PAM sequence: CTA
  source 1..20: mol_type = other DNA
agttagaagaaaatagaaga

SEQ ID NO: 57093 - DNA, 20 bp, synthetic construct
  misc_feature 1..20: note = Description of Artificial Sequence: Synthetic oligonucleotide
  misc_feature 1..20: note = Target: SCN10A; (-) strand; PAM type: YTN; PAM sequence: TTC
  source 1..20: mol_type = other DNA
taagttagaagaaaatagaa

SEQ ID NO: 57094 - DNA, 20 bp, synthetic construct
  misc_feature 1..20: note = Description of Artificial Sequence: Synthetic oligonucleotide
  misc_feature 1..20: note = Target: SCN10A; (-) strand; PAM type: YTN; PAM sequence: CTT
  source 1..20: mol_type = other DNA
ctaagttagaagaaaataga

SEQ ID NO: 57095 - DNA, 20 bp, synthetic construct
  misc_feature 1..20: note = Description of Artificial Sequence: Synthetic oligonucleotide
  misc_feature 1..20: note = Target: SCN10A; (-) strand; PAM type: YTN; PAM sequence: TTG
  source 1..20: mol_type = other DNA
ggcacacaacacatagaact

SEQ ID NO: 57096 - DNA, 20 bp, synthetic construct
  misc_feature 1..20: note = Description of Artificial Sequence: Synthetic oligonucleotide
  misc_feature 1..20: note = Target: SCN10A; (-) strand; PAM type: YTN; PAM sequence: TTT
  source 1..20: mol_type = other DNA
gggcacacaacacatagaac

SEQ ID NO: 57097 - DNA, 20 bp, synthetic construct
  misc_feature 1..20: note = Description of Artificial Sequence: Synthetic oligonucleotide
  misc_feature 1..20: note = Target: SCN10A; (-) strand; PAM type: YTN; PAM sequence: TTA
  source 1..20: mol_type = other DNA
atcagaatttgggcacacaa

SEQ ID NO: 57098 - DNA, 20 bp, synthetic construct
  misc_feature 1..20: note = Description of Artificial Sequence: Synthetic oligonucleotide
  misc_feature 1..20: note = Target: SCN10A; (-) strand; PAM type: YTN; PAM sequence: TTG
  source 1..20: mol_type = other DNA
cataaatacaccatgttaat

SEQ ID NO: 57099 - DNA, 20 bp, synthetic construct
  misc_feature 1..20: note = Description of Artificial Sequence: Synthetic oligonucleotide
  misc_feature 1..20: note = Target: SCN10A; (-) strand; PAM type: YTN; PAM sequence: TTG
  source 1..20: mol_type = other DNA
aatggtcattgcataaatac

SEQ ID NO: 57100 - DNA, 20 bp, synthetic construct
  misc_feature 1..20: note = Description of Artificial Sequence: Synthetic oligonucleotide
  misc_feature 1..20: note = Target: SCN10A; (-) strand; PAM type: YTN; PAM sequence: TTT
  source 1..20: mol_type = other DNA
gaatggtcattgcataaata

SEQ ID NO: 57101 - DNA, 20 bp, synthetic construct
  misc_feature 1..20: note = Description of Artificial Sequence: Synthetic oligonucleotide
  misc_feature 1..20: note = Target: SCN10A; (-) strand; PAM type: YTN; PAM sequence: CTG
  source 1..20: mol_type = other DNA
aagtcaacagtgtttgaatg

SEQ ID NO: 57102 - DNA, 20 bp, synthetic construct
  misc_feature 1..20: note = Description of Artificial Sequence: Synthetic oligonucleotide
  misc_feature 1..20: note = Target: SCN10A; (-) strand; PAM type: YTN; PAM sequence: TTA
  source 1..20: mol_type = other DNA
aagacactgaagtcaacagt

SEQ ID NO: 57103 - DNA, 20 bp, synthetic construct
  misc_feature 1..20: note = Description of Artificial Sequence: Synthetic oligonucleotide
  misc_feature 1..20: note = Target: SCN10A; (-) strand; PAM type: YTN; PAM sequence: CTC
  source 1..20: mol_type = other DNA
agaagggaagaattaaagac

SEQ ID NO: 57104 - DNA, 20 bp, synthetic construct
  misc_feature 1..20: note = Description of Artificial Sequence: Synthetic oligonucleotide
  misc_feature 1..20: note = Target: SCN10A; (-) strand; PAM type: YTN; PAM sequence: TTC
  source 1..20: mol_type = other DNA
tcagaagggaagaattaaag

SEQ ID NO: 57105 - DNA, 20 bp, synthetic construct
  misc_feature 1..20: note = Description of Artificial Sequence: Synthetic oligonucleotide
  misc_feature 1..20: note = Target: SCN10A; (-) strand; PAM type: YTN; PAM sequence: TTT
  source 1..20: mol_type = other DNA
ctcagaagggaagaattaaa

SEQ ID NO: 57106 - DNA, 20 bp, synthetic construct
  misc_feature 1..20: note = Description of Artificial Sequence: Synthetic oligonucleotide
  misc_feature 1..20: note = Target: SCN10A; (-) strand; PAM type: YTN; PAM sequence: TTG
  source 1..20: mol_type = other DNA
tttctcagaagggaagaatt

SEQ ID NO: 57107 - DNA, 20 bp, synthetic construct
  misc_feature 1..20: note = Description of Artificial Sequence: Synthetic oligonucleotide
  misc_feature 1..20: note = Target: SCN10A; (-) strand; PAM type: YTN; PAM sequence: TTT
  source 1..20: mol_type = other DNA
gtttctcagaagggaagaat

SEQ ID NO: 57108 - DNA, 20 bp, synthetic construct
  misc_feature 1..20: note = Description of Artificial Sequence: Synthetic oligonucleotide
  misc_feature 1..20: note = Target: SCN10A; (-) strand; PAM type: YTN; PAM sequence: CTT
  source 1..20: mol_type = other DNA
tgtttctcagaagggaagaa

SEQ ID NO: 57109 - DNA, 20 bp, synthetic construct
  misc_feature 1..20: note = Description of Artificial Sequence: Synthetic oligonucleotide
  misc_feature 1..20: note = Target: SCN10A; (-) strand; PAM type: YTN; PAM sequence: TTA
  source 1..20: mol_type = other DNA
atctttgtttctcagaaggg

SEQ ID NO: 57110 - DNA, 20 bp, synthetic construct
  misc_feature 1..20: note = Description of Artificial Sequence: Synthetic oligonucleotide
  misc_feature 1..20: note = Target: SCN10A; (-) strand; PAM type: YTN; PAM sequence: CTT
  source 1..20: mol_type = other DNA
aatctttgtttctcagaagg

SEQ ID NO: 57111 - DNA, 20 bp, synthetic construct
  misc_feature 1..20: note = Description of Artificial Sequence: Synthetic oligonucleotide
  misc_feature 1..20: note = Target: SCN10A; (-) strand; PAM type: YTN; PAM sequence: TTA
  source 1..20: mol_type = other DNA
acttaatctttgtttctcag

SEQ ID NO: 57112 - DNA, 20 bp, synthetic construct
  misc_feature 1..20: note = Description of Artificial Sequence: Synthetic oligonucleotide
  misc_feature 1..20: note = Target: SCN10A; (-) strand; PAM type: YTN; PAM sequence: CTA
  source 1..20: mol_type = other DNA
gacaaggaagagaaagttaa

SEQ ID NO: 57113 - DNA, 20 bp, synthetic construct
  misc_feature 1..20: note = Description of Artificial Sequence: Synthetic oligonucleotide
  misc_feature 1..20: note = Target: SCN10A; (-) strand; PAM type: YTN; PAM sequence: CTC
  source 1..20: mol_type = other DNA
ccctagacaaggaagagaaa

SEQ ID NO: 57114 - DNA, 20 bp, synthetic construct
  misc_feature 1..20: note = Description of Artificial Sequence: Synthetic oligonucleotide
  misc_feature 1..20: note = Target: SCN10A; (-) strand; PAM type: YTN; PAM sequence: TTC
  source 1..20: mol_type = other DNA
tcccctagacaaggaagaga

SEQ ID NO: 57115 - DNA, 20 bp, synthetic construct
  misc_feature 1..20: note = Description of Artificial Sequence: Synthetic oligonucleotide
  misc_feature 1..20: note = Target: SCN10A; (-) strand; PAM type: YTN; PAM sequence: CTT
  source 1..20: mol_type = other DNA
ctcccctagacaaggaagag

SEQ ID NO: 57116 - DNA, 20 bp, synthetic construct
  misc_feature 1..20: note = Description of Artificial Sequence: Synthetic oligonucleotide
  misc_feature 1..20: note = Target: SCN10A; (-) strand; PAM type: YTN; PAM sequence: CTC
  source 1..20: mol_type = other DNA
ttctcccctagacaaggaag

SEQ ID NO: 57117 - DNA, 20 bp, synthetic construct
  misc_feature 1..20: note = Description of Artificial Sequence: Synthetic oligonucleotide
  misc_feature 1..20: note = Target: SCN10A; (-) strand; PAM type: YTN; PAM sequence: CTA
  source 1..20: mol_type = other DNA
taagtatctcttctccccta

SEQ ID NO: 57118 - DNA, 20 bp, synthetic construct
  misc_feature 1..20: note = Description of Artificial Sequence: Synthetic oligonucleotide
  misc_feature 1..20: note = Target: SCN10A; (-) strand; PAM type: YTN; PAM sequence: TTC
  source 1..20: mol_type = other DNA
caaactataagtatctcttc

SEQ ID NO: 57119 - DNA, 20 bp, synthetic construct
  misc_feature 1..20: note = Description of Artificial Sequence: Synthetic oligonucleotide
  misc_feature 1..20: note = Target: SCN10A; (-) strand; PAM type: YTN; PAM sequence: TTG
  source 1..20: mol_type = other DNA
gttccaaactataagtatct

SEQ ID NO: 57120 - DNA, 20 bp, synthetic construct
  misc_feature 1..20: note = Description of Artificial Sequence: Synthetic oligonucleotide
  misc_feature 1..20: note = Target: SCN10A; (-) strand; PAM type: YTN; PAM sequence: TTT
  source 1..20: mol_type = other DNA
ggttccaaactataagtatc

SEQ ID NO: 57121 - DNA, 20 bp, synthetic construct
  misc_feature 1..20: note = Description of Artificial Sequence: Synthetic oligonucleotide
  misc_feature 1..20: note = Target: SCN10A; (-) strand; PAM type: YTN; PAM sequence: TTC
  source 1..20: mol_type = other DNA
aaatttggttccaaactata

SEQ ID NO: 57122 - DNA, 20 bp, synthetic construct
  misc_feature 1..20: note = Description of Artificial Sequence: Synthetic oligonucleotide
  misc_feature 1..20: note = Target: SCN10A; (-) strand; PAM type: YTN; PAM sequence: CTG
  source 1..20: mol_type = other DNA
ggattcaaatttggttccaa

SEQ ID NO: 57123 - DNA, 20 bp, synthetic construct
  misc_feature 1..20: note = Description of Artificial Sequence: Synthetic oligonucleotide
  misc_feature 1..20: note = Target: SCN10A; (-) strand; PAM type: YTN; PAM sequence: CTG
  source 1..20: mol_type = other DNA
agtcctgggattcaaatttg

SEQ ID NO: 57124 - DNA, 20 bp, synthetic construct
  misc_feature 1..20: note = Description of Artificial Sequence: Synthetic oligonucleotide
  misc_feature 1..20: note = Target: SCN10A; (-) strand; PAM type: YTN; PAM sequence: CTA
  source 1..20: mol_type = other DNA
aacaactgagtcctgggatt

SEQ ID NO: 57125 - DNA, 20 bp, synthetic construct
  misc_feature 1..20: note = Description of Artificial Sequence: Synthetic oligonucleotide
  misc_feature 1..20: note = Target: SCN10A; (-) strand; PAM type: YTN; PAM sequence: TTA
  source 1..20: mol_type = other DNA
ctaaacaactgagtcctggg

SEQ ID NO: 57126 - DNA, 20 bp, synthetic construct
  misc_feature 1..20: note = Description of Artificial Sequence: Synthetic oligonucleotide
  misc_feature 1..20: note = Target: SCN10A; (-) strand; PAM type: YTN; PAM sequence: TTG
  source 1..20: mol_type = other DNA
ttactaaacaactgagtcct

SEQ ID NO: 57127 - DNA, 20 bp, synthetic construct
  misc_feature 1..20: note = Description of Artificial Sequence: Synthetic oligonucleotide
  misc_feature 1..20: note = Target: SCN10A; (-) strand; PAM type: YTN; PAM sequence: TTG
  source 1..20: mol_type = other DNA
cattgttactaaacaactga

SEQ ID NO: 57128 - DNA, 20 bp, synthetic construct
  misc_feature 1..20: note = Description of Artificial Sequence: Synthetic oligonucleotide
  misc_feature 1..20: note = Target: SCN10A; (-) strand; PAM type: YTN; PAM sequence: CTT
  source 1..20: mol_type = other DNA
gcattgttactaaacaactg

SEQ ID NO: 57129 - DNA, 20 bp, synthetic construct
  misc_feature 1..20: note = Description of Artificial Sequence: Synthetic oligonucleotide
  misc_feature 1..20: note = Target: SCN10A; (-) strand; PAM type: YTN; PAM sequence: TTC
  source 1..20: mol_type = other DNA
ttgcattgttactaaacaac

SEQ ID NO: 57130 - DNA, 20 bp, synthetic construct
  misc_feature 1..20: note = Description of Artificial Sequence: Synthetic oligonucleotide
  misc_feature 1..20: note = Target: SCN10A; (-) strand; PAM type: YTN; PAM sequence: CTG
  source 1..20: mol_type = other DNA
agagaattcttgcattgtta

SEQ ID NO: 57131 - DNA, 20 bp, synthetic construct
  misc_feature 1..20: note = Description of Artificial Sequence: Synthetic oligonucleotide
  misc_feature 1..20: note = Target: SCN10A; (-) strand; PAM type: YTN; PAM sequence: TTC
  source 1..20: mol_type = other DNA
cagtgtcactgagagaattc

SEQ ID NO: 57132 - DNA, 20 bp, synthetic construct
  misc_feature 1..20: note = Description of Artificial Sequence: Synthetic oligonucleotide
  misc_feature 1..20: note = Target: SCN10A; (-) strand; PAM type: YTN; PAM sequence: TTG
  source 1..20: mol_type = other DNA
cattccagtgtcactgagag

SEQ ID NO: 57133 - DNA, 20 bp, synthetic construct
  misc_feature 1..20: note = Description of Artificial Sequence: Synthetic oligonucleotide
  misc_feature 1..20: note = Target: SCN10A; (-) strand; PAM type: YTN; PAM sequence: CTC
  source 1..20: mol_type = other DNA
aacattgcattccagtgtca

SEQ ID NO: 57134 - DNA, 20 bp, synthetic construct
  misc_feature 1..20: note = Description of Artificial Sequence: Synthetic oligonucleotide
  misc_feature 1..20: note = Target: SCN10A; (-) strand; PAM type: YTN; PAM sequence: CTC
  source 1..20: mol_type = other DNA
aatcctcaacattgcattcc

SEQ ID NO: 57135 - DNA, 20 bp, synthetic construct
  misc_feature 1..20: note = Description of Artificial Sequence: Synthetic oligonucleotide
  misc_feature 1..20: note = Target: SCN10A; (-) strand; PAM type: YTN; PAM sequence: TTC
  source 1..20: mol_type = other DNA
tcaatcctcaacattgcatt

SEQ ID NO: 57136 - DNA, 20 bp, synthetic construct
  misc_feature 1..20: note = Description of Artificial Sequence: Synthetic oligonucleotide
  misc_feature 1..20: note = Target: SCN10A; (-) strand; PAM type: YTN; PAM sequence: CTG
  source 1..20: mol_type = other DNA
ttctcaatcctcaacattgc

SEQ ID NO: 57137 - DNA, 20 bp, synthetic construct
  misc_feature 1..20: note = Description of Artificial Sequence: Synthetic oligonucleotide
  misc_feature 1..20: note = Target: SCN10A; (-) strand; PAM type: YTN; PAM sequence: TTA
  source 1..20: mol_type = other DNA
gtcctgttctcaatcctcaa

SEQ ID NO: 57138 - DNA, 20 bp, synthetic construct
  misc_feature 1..20: note = Description of Artificial Sequence: Synthetic oligonucleotide
  misc_feature 1..20: note = Target: SCN10A; (-) strand; PAM type: YTN; PAM sequence: CTT
  source 1..20: mol_type = other DNA
agtcctgttctcaatcctca

SEQ ID NO: 57139 - DNA, 20 bp, synthetic construct
  misc_feature 1..20: note = Description of Artificial Sequence: Synthetic oligonucleotide
  misc_feature 1..20: note = Target: SCN10A; (-) strand; PAM type: YTN; PAM sequence: CTG
  source 1..20: mol_type = other DNA
gcttagtcctgttctcaatc

SEQ ID NO: 57140 - DNA, 20 bp, synthetic construct
  misc_feature 1..20: note = Description of Artificial Sequence: Synthetic oligonucleotide
  misc_feature 1..20: note = Target: SCN10A; (-) strand; PAM type: YTN; PAM sequence: TTC
  source 1..20: mol_type = other DNA
tggcttagtcctgttctcaa

SEQ ID NO: 57141 - DNA, 20 bp, synthetic construct
  misc_feature 1..20: note = Description of Artificial Sequence: Synthetic oligonucleotide
  misc_feature 1..20: note = Target: SCN10A; (-) strand; PAM type: YTN; PAM sequence: CTG
  source 1..20: mol_type = other DNA
gaattctggcttagtcctgt

SEQ ID NO: 57142 - DNA, 20 bp, synthetic construct
  misc_feature 1..20: note = Description of Artificial Sequence: Synthetic oligonucleotide
  misc_feature 1..20: note = Target: SCN10A; (-) strand; PAM type: YTN; PAM sequence: CTC
  source 1..20: mol_type = other DNA
caggacctggaattctggct

SEQ ID NO: 57143 - DNA, 20 bp, synthetic construct
  misc_feature 1..20: note = Description of Artificial Sequence: Synthetic oligonucleotide
  misc_feature 1..20: note = Target: SCN10A; (-) strand; PAM type: YTN; PAM sequence: CTC
  source 1..20: mol_type = other DNA
cagctccaggacctggaatt

SEQ ID NO: 57144 - DNA, 20 bp, synthetic construct
  misc_feature 1..20: note = Description of Artificial Sequence: Synthetic oligonucleotide
  misc_feature 1..20: note = Target: SCN10A; (-) strand; PAM type: YTN; PAM sequence: CTC
  source 1..20: mol_type = other DNA
aagctccagctccaggacct

SEQ ID NO: 57145 - DNA, 20 bp, synthetic construct
  misc_feature 1..20: note = Description of Artificial Sequence: Synthetic oligonucleotide
  misc_feature 1..20: note = Target: SCN10A; (-) strand; PAM type: YTN; PAM sequence: TTG
  source 1..20: mol_type = other DNA
acctcaagctccagctccag

SEQ ID NO: 57146 - DNA, 20 bp, synthetic construct
  misc_feature 1..20: note = Description of Artificial Sequence: Synthetic oligonucleotide
  misc_feature 1..20: note = Target: SCN10A; (-) strand; PAM type: YTN; PAM sequence: TTT
  source 1..20: mol_type = other DNA
gacctcaagctccagctcca

SEQ ID NO: 57147 - DNA, 20 bp, synthetic construct
  misc_feature 1..20: note = Description of Artificial Sequence: Synthetic oligonucleotide
  misc_feature 1..20: note = Target: SCN10A; (-) strand; PAM type: YTN; PAM sequence: CTT
  source 1..20: mol_type = other DNA
tgacctcaagctccagctcc

SEQ ID NO: 57148 - DNA, 20 bp, synthetic construct
  misc_feature 1..20: note = Description of Artificial Sequence: Synthetic oligonucleotide
  misc_feature 1..20: note = Target: SCN10A; (-) strand; PAM type: YTN; PAM sequence: CTG
  source 1..20: mol_type = other DNA
ctttgacctcaagctccagc

SEQ ID NO: 57149 - DNA, 20 bp, synthetic construct
  misc_feature 1..20: note = Description of Artificial Sequence: Synthetic oligonucleotide
  misc_feature 1..20: note = Target: SCN10A; (-) strand; PAM type: YTN; PAM sequence: CTG
  source 1..20: mol_type = other DNA
agtctgctttgacctcaagc

SEQ ID NO: 57150 - DNA, 20 bp, synthetic construct
  misc_feature 1..20: note = Description of Artificial Sequence: Synthetic oligonucleotide
  misc_feature 1..20: note = Target: SCN10A; (-) strand; PAM type: YTN; PAM sequence: CTC
  source 1..20: mol_type = other DNA
atagctgagtctgctttgac

SEQ ID NO: 57151 - DNA, 20 bp, synthetic construct
  misc_feature 1..20: note = Description of Artificial Sequence: Synthetic oligonucleotide
  misc_feature 1..20: note = Target: SCN10A; (-) strand; PAM type: YTN; PAM sequence: TTG
  source 1..20: mol_type = other DNA
gcatgaagtcagtctcatag

SEQ ID NO: 57152 - DNA, 20 bp, synthetic construct
  misc_feature 1..20: note = Description of Artificial Sequence: Synthetic oligonucleotide
  misc_feature 1..20: note = Target: SCN10A; (-) strand; PAM type: YTN; PAM sequence: TTT
  source 1..20: mol_type = other DNA
ggcatgaagtcagtctcata

SEQ ID NO: 57153 - DNA, 20 bp, synthetic construct
  misc_feature 1..20: note = Description of Artificial Sequence: Synthetic oligonucleotide
  misc_feature 1..20: note = Target: SCN10A; (-) strand; PAM type: YTN; PAM sequence: TTA
  source 1..20: mol_type = other DNA
tggtcatttggcatgaagtc

SEQ ID NO: 57154 - DNA, 20 bp, synthetic construct
  misc_feature 1..20: note = Description of Artificial Sequence: Synthetic oligonucleotide
  misc_feature 1..20: note = Target: SCN10A; (-) strand; PAM type: YTN; PAM sequence: TTA
  source 1..20: mol_type = other DNA
tggtagcccagaataattat

SEQ ID NO: 57155 - DNA, 20 bp, synthetic construct
  misc_feature 1..20: note = Description of Artificial Sequence: Synthetic oligonucleotide
  misc_feature 1..20: note = Target: SCN10A; (-) strand; PAM type: YTN; PAM sequence: TTT
  source 1..20: mol_type = other DNA
atggtagcccagaataatta

SEQ ID NO: 57156 - DNA, 20 bp, synthetic construct
  misc_feature 1..20: note = Description of Artificial Sequence: Synthetic oligonucleotide
  misc_feature 1..20: note = Target: SCN10A; (-) strand; PAM type: YTN; PAM sequence: CTG
  source 1..20: mol_type = other DNA
gagggatttatggtagccca

SEQ ID NO: 57157 - DNA, 20 bp, synthetic construct
  misc_feature 1..20: note = Description of Artificial Sequence: Synthetic oligonucleotide
  misc_feature 1..20: note = Target: SCN10A; (-) strand; PAM type: YTN; PAM sequence: TTA
  source 1..20: mol_type = other DNA
gctggagggatttatggtag

SEQ ID NO: 57158 - DNA, 20 bp, synthetic construct
  misc_feature 1..20: note = Description of Artificial Sequence: Synthetic oligonucleotide
  misc_feature 1..20: note = Target: SCN10A; (-) strand; PAM type: YTN; PAM sequence: CTT
  source 1..20: mol_type = other DNA
agctggagggatttatggta

SEQ ID NO: 57159 - DNA, 20 bp, synthetic construct
  misc_feature 1..20: note = Description of Artificial Sequence: Synthetic oligonucleotide
  misc_feature 1..20: note = Target: SCN10A; (-) strand; PAM type: YTN; PAM sequence: TTG
  source 1..20: mol_type = other DNA
tccttagctggagggattta

SEQ ID NO: 57160 - DNA, 20 bp, synthetic construct
  misc_feature 1..20: note = Description of Artificial Sequence: Synthetic oligonucleotide
  misc_feature 1..20: note = Target: SCN10A; (-) strand; PAM type: YTN; PAM sequence: TTT
  source 1..20: mol_type = other DNA
gtccttagctggagggattt

SEQ ID NO: 57161 - DNA, 20 bp, synthetic construct
  misc_feature 1..20: note = Description of Artificial Sequence: Synthetic oligonucleotide
  misc_feature 1..20: note = Target: SCN10A; (-) strand; PAM type: YTN; PAM sequence: TTT
  source 1..20: mol_type = other DNA
tgtccttagctggagggatt

SEQ ID NO: 57162 - DNA, 20 bp, synthetic construct
  misc_feature 1..20: note = Description of Artificial Sequence: Synthetic oligonucleotide
  misc_feature 1..20: note = Target: SCN10A; (-) strand; PAM type: YTN; PAM sequence: TTG
  source 1..20: mol_type = other DNA
aaaacaattttgtccttagc

SEQ ID NO: 57163 - DNA, 20 bp, synthetic construct
  misc_feature 1..20: note = Description of Artificial Sequence: Synthetic oligonucleotide
  misc_feature 1..20: note = Target: SCN10A; (-) strand; PAM type: YTN; PAM sequence: TTC
  source 1..20: mol_type = other DNA
ccaccccaatgttgaaaaca

SEQ ID NO: 57164 - DNA, 20 bp, synthetic construct
  misc_feature 1..20: note = Description of Artificial Sequence: Synthetic oligonucleotide
  misc_feature 1..20: note = Target: SCN10A; (-) strand; PAM type: YTN; PAM sequence: CTA
  source 1..20: mol_type = other DNA
caaattcccaccccaatgtt

SEQ ID NO: 57165 - DNA, 20 bp, synthetic construct
  misc_feature 1..20: note = Description of Artificial Sequence: Synthetic oligonucleotide
  misc_feature 1..20: note = Target: SCN10A; (-) strand; PAM type: YTN; PAM sequence: CTA
  source 1..20: mol_type = other DNA
catcacatcactacaaattc

SEQ ID NO: 57166 - DNA, 20 bp, synthetic construct
  misc_feature 1..20: note = Description of Artificial Sequence: Synthetic oligonucleotide
  misc_feature 1..20: note = Target: SCN10A; (-) strand; PAM type: YTN; PAM sequence: CTC
  source 1..20: mol_type = other DNA
atacctacatcacatcacta

SEQ ID NO: 57167 - DNA, 20 bp, synthetic construct
  misc_feature 1..20: note = Description of Artificial Sequence: Synthetic oligonucleotide
  misc_feature 1..20: note = Target: SCN10A; (-) strand; PAM type: YTN; PAM sequence: CTG
  source 1..20: mol_type = other DNA
gtccctcatacctacatcac

SEQ ID NO: 57168 - DNA, 20 bp, synthetic construct
  misc_feature 1..20: note = Description of Artificial Sequence: Synthetic oligonucleotide
  misc_feature 1..20: note = Target: SCN10A; (-) strand; PAM type: YTN; PAM sequence: TTA
  source 1..20: mol_type = other DNA
aaagaaggactggtccctca

SEQ ID NO: 57169 - DNA, 20 bp, synthetic construct
  misc_feature 1..20: note = Description of Artificial Sequence: Synthetic oligonucleotide
  misc_feature 1..20: note = Target: SCN10A; (-) strand; PAM type: YTN; PAM sequence: CTT
  source 1..20: mol_type = other DNA
aaaagaaggactggtccctc

SEQ ID NO: 57170 - DNA, 20 bp, synthetic construct
  misc_feature 1..20: note = Description of Artificial Sequence: Synthetic oligonucleotide
  misc_feature 1..20: note = Target: SCN10A; (-) strand; PAM type: YTN; PAM sequence: CTG
  source 1..20: mol_type = other DNA
atgggaaagtcttaaaagaa

SEQ ID NO: 57171 - DNA, 20 bp, synthetic construct
  misc_feature 1..20: note = Description of Artificial Sequence: Synthetic oligonucleotide
  misc_feature 1..20: note = Target: SCN10A; (-) strand; PAM type: YTN; PAM sequence: TTC
  source 1..20: mol_type = other DNA
tgatgggaaagtcttaaaag

SEQ ID NO: 57172 - DNA, 20 bp, synthetic construct
  misc_feature 1..20: note = Description of Artificial Sequence: Synthetic oligonucleotide
  misc_feature 1..20: note = Target: SCN10A; (-) strand; PAM type: YTN; PAM sequence: CTT
  source 1..20: mol_type = other DNA
ctgatgggaaagtcttaaaa

SEQ ID NO: 57173 - DNA, 20 bp, synthetic construct
  misc_feature 1..20: note = Description of Artificial Sequence: Synthetic oligonucleotide
  misc_feature 1..20: note = Target: SCN10A; (-) strand; PAM type: YTN; PAM sequence: CTA
  source 1..20: mol_type = other DNA
tcacttctgatgggaaagtc

SEQ ID NO: 57174 - DNA, 20 bp, synthetic construct
  misc_feature 1..20: note = Description of Artificial Sequence: Synthetic oligonucleotide
  misc_feature 1..20: note = Target: SCN10A; (-) strand; PAM type: YTN; PAM sequence: TTC
  source 1..20: mol_type = other DNA
aatcaagggatcccaagtcc

SEQ ID NO: 57175 - DNA, 20 bp, synthetic construct
  misc_feature 1..20: note = Description of Artificial Sequence: Synthetic oligonucleotide
  misc_feature 1..20: note = Target: SCN10A; (-) strand; PAM type: YTN; PAM sequence: CTT
  source 1..20: mol_type = other DNA
caatcaagggatcccaagtc

SEQ ID NO: 57176 - DNA, 20 bp, synthetic construct
  misc_feature 1..20: note = Description of Artificial Sequence: Synthetic oligonucleotide
  misc_feature 1..20: note = Target: SCN10A; (-) strand; PAM type: YTN; PAM sequence: CTG
  source 1..20: mol_type = other DNA
ggtaatagatgggaatatag

SEQ ID NO: 57177 - DNA, 20 bp, synthetic construct
  misc_feature 1..20: note = Description of Artificial Sequence: Synthetic oligonucleotide
  misc_feature 1..20: note = Target: SCN10A; (-) strand; PAM type: YTN; PAM sequence: CTC
  source 1..20: mol_type = other DNA
agaatgtcatgtaaagacac

SEQ ID NO: 57178 - DNA, 20 bp, synthetic construct
  misc_feature 1..20: note = Description of Artificial Sequence: Synthetic oligonucleotide
  misc_feature 1..20: note = Target: SCN10A; (-) strand; PAM type: YTN; PAM sequence: TTC
  source 1..20: mol_type = other DNA
tcagaatgtcatgtaaagac

SEQ ID NO: 57179 - DNA, 20 bp, synthetic construct
  misc_feature 1..20: note = Description of Artificial Sequence: Synthetic oligonucleotide
  misc_feature 1..20: note = Target: SCN10A; (-) strand; PAM type: YTN; PAM sequence: TTT
  source 1..20: mol_type = other DNA
ctcagaatgtcatgtaaaga

SEQ ID NO: 57180 - DNA, 20 bp, synthetic construct
  misc_feature 1..20: note = Description of Artificial Sequence: Synthetic oligonucleotide
  misc_feature 1..20: note = Target: SCN10A; (-) strand; PAM type: YTN; PAM sequence: TTT
  source 1..20: mol_type = other DNA
tctcagaatgtcatgtaaag

SEQ ID NO: 57181 - DNA, 20 bp, synthetic construct
  misc_feature 1..20: note = Description of Artificial Sequence: Synthetic oligonucleotide
  misc_feature 1..20: note = Target: SCN10A; (-) strand; PAM type: YTN; PAM sequence: TTG
  source 1..20: mol_type = other DNA
caccccaatagttttctcag

SEQ ID NO: 57182 - DNA, 20 bp, synthetic construct
  misc_feature 1..20: note = Description of Artificial Sequence: Synthetic oligonucleotide
  misc_feature 1..20: note = Target: SCN10A; (-) strand; PAM type: YTN; PAM sequence: CTT
  source 1..20: mol_type = other DNA
gcaccccaatagttttctca

SEQ ID NO: 57183 - DNA, 20 bp, synthetic construct
  misc_feature 1..20: note = Description of Artificial Sequence: Synthetic oligonucleotide
  misc_feature 1..20: note = Target: SCN10A; (-) strand; PAM type: YTN; PAM sequence: CTA
  source 1..20: mol_type = other DNA
cttgcaccccaatagttttc

SEQ ID NO: 57184 - DNA, 20 bp, synthetic construct
  misc_feature 1..20: note = Description of Artificial Sequence: Synthetic oligonucleotide
  misc_feature 1..20: note = Target: SCN10A; (-) strand; PAM type: YTN; PAM sequence: CTC
  source 1..20: mol_type = other DNA
agataaactacttgcacccc

SEQ ID NO: 57185 - DNA, 20 bp, synthetic construct
  misc_feature 1..20: note = Description of Artificial Sequence: Synthetic oligonucleotide
  misc_feature 1..20: note = Target: SCN10A; (-) strand; PAM type: YTN; PAM sequence: CTC
  source 1..20: mol_type = other DNA
tcagataaactacttgcacc

SEQ ID NO: 57186 - DNA, 20 bp, synthetic construct
  misc_feature 1..20: note = Description of Artificial Sequence: Synthetic oligonucleotide
  misc_feature 1..20: note = Target: SCN10A; (-) strand; PAM type: YTN; PAM sequence: CTA
  source 1..20: mol_type = other DNA
gaaatagctctcagataaac

SEQ ID NO: 57187 - DNA, 20 bp, synthetic construct
  misc_feature 1..20: note = Description of Artificial Sequence: Synthetic oligonucleotide
  misc_feature 1..20: note = Target: SCN10A; (-) strand; PAM type: YTN; PAM sequence: TTC
  source 1..20: mol_type = other DNA
ctagaaatagctctcagata

SEQ ID NO: 57188 - DNA, 20 bp, synthetic construct
  misc_feature 1..20: note = Description of Artificial Sequence: Synthetic oligonucleotide
  misc_feature 1..20: note = Target: SCN10A; (-) strand; PAM type: YTN; PAM sequence: CTA
  source 1..20: mol_type = other DNA
tgacattcctagaaatagct

SEQ ID NO: 57189 - DNA, 20 bp, synthetic construct
  misc_feature 1..20: note = Description of Artificial Sequence: Synthetic oligonucleotide
  misc_feature 1..20: note = Target: SCN10A; (-) strand; PAM type: YTN; PAM sequence: TTC
  source 1..20: mol_type = other DNA
tatgacattcctagaaatag

SEQ ID NO: 57190 - DNA, 20 bp, synthetic construct
  misc_feature 1..20: note = Description of Artificial Sequence: Synthetic oligonucleotide
  misc_feature 1..20: note = Target: SCN10A; (-) strand; PAM type: YTN; PAM sequence: CTT
  source 1..20: mol_type = other DNA
ctatgacattcctagaaata

SEQ ID NO: 57191 - DNA, 20 bp, synthetic construct
  misc_feature 1..20: note = Description of Artificial Sequence: Synthetic oligonucleotide
  misc_feature 1..20: note = Target: SCN10A; (-) strand; PAM type: YTN; PAM sequence: CTC
  source 1..20: mol_type = other DNA
ttctatgacattcctagaaa

SEQ ID NO: 57192 - DNA, 20 bp, synthetic construct
  misc_feature 1..20: note = Description of Artificial Sequence: Synthetic oligonucleotide
  misc_feature 1..20: note = Target: SCN10A; (-) strand; PAM type: YTN; PAM sequence: CTC
  source 1..20: mol_type = other DNA
tcttctatgacattcctaga

SEQ ID NO: 57193 - DNA, 20 bp, synthetic construct
  misc_feature 1..20: note = Description of Artificial Sequence: Synthetic oligonucleotide
  misc_feature 1..20: note = Target: SCN10A; (-) strand; PAM type: YTN; PAM sequence: TTC
  source 1..20: mol_type = other DNA
ctctcttctatgacattcct

SEQ ID NO: 57194 - DNA, 20 bp, synthetic construct
  misc_feature 1..20: note = Description of Artificial Sequence: Synthetic oligonucleotide
  misc_feature 1..20: note = Target: SCN10A; (-) strand; PAM type: YTN; PAM sequence: TTT
  source 1..20: mol_type = other DNA
cctctcttctatgacattcc

SEQ ID NO: 57195 - DNA, 20 bp, synthetic construct
  misc_feature 1..20: note = Description of Artificial Sequence: Synthetic oligonucleotide
  misc_feature 1..20: note = Target: SCN10A; (-) strand; PAM type: YTN; PAM sequence: TTT
  source 1..20: mol_type = other DNA
tcctctcttctatgacattc

SEQ ID NO: 57196 - DNA, 20 bp, synthetic construct
  misc_feature 1..20: note = Description of Artificial Sequence: Synthetic oligonucleotide
  misc_feature 1..20: note = Target: SCN10A; (-) strand; PAM type: YTN; PAM sequence: CTT
  source 1..20: mol_type = other DNA
ttcctctcttctatgacatt

SEQ ID NO: 57197 - DNA, 20 bp, synthetic construct
  misc_feature 1..20: note = Description of Artificial Sequence: Synthetic oligonucleotide
  misc_feature 1..20: note = Target: SCN10A; (-) strand; PAM type: YTN; PAM sequence: TTA
  source 1..20: mol_type = other DNA
cttttcctctcttctatgac

SEQ ID NO: 57198 - DNA, 20 bp, synthetic construct
  misc_feature 1..20: note = Description of Artificial Sequence: Synthetic oligonucleotide
  misc_feature 1..20: note = Target: SCN10A; (-) strand; PAM type: YTN; PAM sequence: TTA
  source 1..20: mol_type = other DNA
tgttacttttcctctcttct

SEQ ID NO: 57199 - DNA, 20 bp, synthetic construct
  misc_feature 1..20: note = Description of Artificial Sequence: Synthetic oligonucleotide
  misc_feature 1..20: note = Target: SCN10A; (-) strand; PAM type: YTN; PAM sequence: CTT
  source 1..20: mol_type = other DNA
atgttacttttcctctcttc

SEQ ID NO: 57200 - DNA, 20 bp, synthetic construct
  misc_feature 1..20: note = Description of Artificial Sequence: Synthetic oligonucleotide
  misc_feature 1..20: note = Target: SCN10A; (-) strand; PAM type: YTN; PAM sequence: TTC
  source 1..20: mol_type = other DNA
ttatgttacttttcctctct

SEQ ID NO: 57201 - DNA, 20 bp, synthetic construct
  misc_feature 1..20: note = Description of Artificial Sequence: Synthetic oligonucleotide
  misc_feature 1..20: note = Target: SCN10A; (-) strand; PAM type: YTN; PAM sequence: CTT
  source 1..20: mol_type = other DNA
cttatgttacttttcctctc

SEQ ID NO: 57202 - DNA, 20 bp, synthetic construct
  misc_feature 1..20: note = Description of Artificial Sequence: Synthetic oligonucleotide
  misc_feature 1..20: note = Target: SCN10A; (-) strand; PAM type: YTN; PAM sequence: TTC
  source 1..20: mol_type = other DNA
ttcttatgttacttttcctc

SEQ ID NO: 57203 - DNA, 20 bp, synthetic construct
  misc_feature 1..20: note = Description of Artificial Sequence: Synthetic oligonucleotide
  misc_feature 1..20: note = Target: SCN10A; (-) strand; PAM type: YTN; PAM sequence: CTT
  source 1..20: mol_type = other DNA
cttcttatgttacttttcct

SEQ ID NO: 57204 - DNA, 20 bp, synthetic construct
  misc_feature 1..20: note = Description of Artificial Sequence: Synthetic oligonucleotide
  misc_feature 1..20: note = Target: SCN10A; (-) strand; PAM type: YTN; PAM sequence: TTC
  source 1..20: mol_type = other DNA
ttcttcttatgttacttttc

SEQ ID NO: 57205 - DNA, 20 bp, synthetic construct
  misc_feature 1..20: note = Description of Artificial Sequence: Synthetic oligonucleotide
  misc_feature 1..20: note = Target: SCN10A; (-) strand; PAM type: YTN; PAM sequence: TTT
  source 1..20: mol_type = other DNA
cttcttcttatgttactttt

SEQ ID NO: 57206 - DNA, 20 bp, synthetic construct
  misc_feature 1..20: note = Description of Artificial Sequence: Synthetic oligonucleotide
  misc_feature 1..20: note = Target: SCN10A; (-) strand; PAM type: YTN; PAM sequence: CTT
  source 1..20: mol_type = other DNA
tcttcttcttatgttacttt

SEQ ID NO: 57207 - DNA, 20 bp, synthetic construct
  misc_feature 1..20: note = Description of Artificial Sequence: Synthetic oligonucleotide
  misc_feature 1..20: note = Target: SCN10A; (-) strand; PAM type: YTN; PAM sequence: CTG
  source 1..20: mol_type = other DNA
ctttcttcttcttatgttac

SEQ ID NO: 57208 - DNA, 20 bp, synthetic construct
  misc_feature 1..20: note = Description of Artificial Sequence: Synthetic oligonucleotide
  misc_feature 1..20: note = Target: SCN10A; (-) strand; PAM type: YTN; PAM sequence: CTC
  source 1..20: mol_type = other DNA
ataaaaatactgctttcttc

SEQ ID NO: 57209 - DNA, 20 bp, synthetic construct
  misc_feature 1..20: note = Description of Artificial Sequence: Synthetic oligonucleotide
  misc_feature 1..20: note = Target: SCN10A; (-) strand; PAM type: YTN; PAM sequence: TTG
  source 1..20: mol_type = other DNA
cccataagagtaaatggctc

SEQ ID NO: 57210 - DNA, 20 bp, synthetic construct
  misc_feature 1..20: note = Description of Artificial Sequence: Synthetic oligonucleotide
  misc_feature 1..20: note = Target: SCN10A; (-) strand; PAM type: YTN; PAM sequence: TTT
  source 1..20: mol_type = other DNA
gcccataagagtaaatggct

SEQ ID NO: 57211 - DNA, 20 bp, synthetic construct
  misc_feature 1..20: note = Description of Artificial Sequence: Synthetic oligonucleotide
  misc_feature 1..20: note = Target: SCN10A; (-) strand; PAM type: YTN; PAM sequence: CTG
  source 1..20: mol_type = other DNA
agcccagtttgcccataaga

SEQ ID NO: 57212 - DNA, 20 bp, synthetic construct
  misc_feature 1..20: note = Description of Artificial Sequence: Synthetic oligonucleotide
  misc_feature 1..20: note = Target: SCN10A; (-) strand; PAM type: YTN; PAM sequence: TTC
  source 1..20: mol_type = other DNA
tgagcccagtttgcccataa

SEQ ID NO: 57213 - DNA, 20 bp, synthetic construct
  misc_feature 1..20: note = Description of Artificial Sequence: Synthetic oligonucleotide
  misc_feature 1..20: note = Target: SCN10A; (-) strand; PAM type: YTN; PAM sequence: CTC
  source 1..20: mol_type = other DNA
agtgaaacaattctgagccc

SEQ ID NO: 57214 - DNA, 20 bp, synthetic construct
  misc_feature 1..20: note = Description of Artificial Sequence: Synthetic oligonucleotide
  misc_feature 1..20: note = Target: SCN10A; (-) strand; PAM type: YTN; PAM sequence: TTA
  source 1..20: mol_type = other DNA
cccctcagtgaaacaattct

SEQ ID NO: 57215 - DNA, 20 bp, synthetic construct
  misc_feature 1..20: note = Description of Artificial Sequence: Synthetic oligonucleotide
  misc_feature 1..20: note = Target: SCN10A; (-) strand; PAM type: YTN; PAM sequence: CTT
  source 1..20: mol_type = other DNA
acccctcagtgaaacaattc

SEQ ID NO: 57216 - DNA, 20 bp, synthetic construct
  misc_feature 1..20: note = Description of Artificial Sequence: Synthetic oligonucleotide
  misc_feature 1..20: note = Target: SCN10A; (-) strand; PAM type: YTN; PAM sequence: CTA
  source 1..20: mol_type = other DNA
gtatccttacccctcagtga

SEQ ID NO: 57217 - DNA, 20 bp, synthetic construct
  misc_feature 1..20: note = Description of Artificial Sequence: Synthetic oligonucleotide
  misc_feature 1..20: note = Target: SCN10A; (-) strand; PAM type: YTN; PAM sequence: CTG
  source 1..20: mol_type = other DNA
gtagataaaaccctagtatc

SEQ ID NO: 57218 - DNA, 20 bp, synthetic construct
  misc_feature 1..20: note = Description of Artificial Sequence: Synthetic oligonucleotide
  misc_feature 1..20: note = Target: SCN10A; (-) strand; PAM type: YTN; PAM sequence: TTA
  source 1..20: mol_type = other DNA
aaatcccaggacaaccgtca

SEQ ID NO: 57219 - DNA, 20 bp, synthetic construct
  misc_feature 1..20: note = Description of Artificial Sequence: Synthetic oligonucleotide
  misc_feature 1..20: note = Target: SCN10A; (-) strand; PAM type: YTN; PAM sequence: CTG
  source 1..20: mol_type = other DNA
tagagttaaaatcccaggac

SEQ ID NO: 57220 - DNA, 20 bp, synthetic construct
  misc_feature 1..20: note = Description of Artificial Sequence: Synthetic oligonucleotide
  misc_feature 1..20: note = Target: SCN10A; (-) strand; PAM type: YTN; PAM sequence: TTC
  source 1..20: mol_type = other DNA
tgtagagttaaaatcccagg

SEQ ID NO: 57221 - DNA, 20 bp, synthetic construct
  misc_feature 1..20: note = Description of Artificial Sequence: Synthetic oligonucleotide
  misc_feature 1..20: note = Target: SCN10A; (-) strand; PAM type: YTN; PAM sequence: CTG
  source 1..20: mol_type = other DNA
aagtaagttctgtagagtta

SEQ ID NO: 57222 - DNA, 20 bp, synthetic construct
  misc_feature 1..20: note = Description of Artificial Sequence: Synthetic oligonucleotide
  misc_feature 1..20: note = Target: SCN10A; (-) strand; PAM type: YTN; PAM sequence: CTG
  source 1..20: mol_type = other DNA
gccactgaagtaagttctgt

SEQ ID NO: 57223 - DNA, 20 bp, synthetic construct
  misc_feature 1..20: note = Description of Artificial Sequence: Synthetic oligonucleotide
  misc_feature 1..20: note = Target: SCN10A; (-) strand; PAM type: YTN; PAM sequence: CTC
  source 1..20: mol_type = other DNA
tggccactgaagtaagttct

SEQ ID NO: 57224 - DNA, 20 bp, synthetic construct
  misc_feature 1..20: note = Description of Artificial Sequence: Synthetic oligonucleotide
  misc_feature 1..20: note = Target: SCN10A; (-) strand; PAM type: YTN; PAM sequence: TTC
  source 1..20: mol_type = other DNA
tctggccactgaagtaagtt

SEQ ID NO: 57225 - DNA, 20 bp, synthetic construct
  misc_feature 1..20: note = Description of Artificial Sequence: Synthetic oligonucleotide
  misc_feature 1..20: note = Target: SCN10A; (-) strand; PAM type: YTN; PAM sequence: TTT
  source 1..20: mol_type = other DNA
ctctggccactgaagtaagt

SEQ ID NO: 57226 - DNA, 20 bp, synthetic construct
  misc_feature 1..20: note = Description of Artificial Sequence: Synthetic oligonucleotide
  misc_feature 1..20: note = Target: SCN10A; (-) strand; PAM type: YTN; PAM sequence: CTT
  source 1..20: mol_type = other DNA
tctctggccactgaagtaag

SEQ ID NO: 57227 - DNA, 20 bp, synthetic construct
  misc_feature 1..20: note = Description of Artificial Sequence: Synthetic oligonucleotide
  misc_feature 1..20: note = Target: SCN10A; (-) strand; PAM type: YTN; PAM sequence: CTG
  source 1..20: mol_type = other DNA
cccagggctttctctggcca

SEQ ID NO: 57228 - DNA, 20 bp, synthetic construct
  misc_feature 1..20: note = Description of Artificial Sequence: Synthetic oligonucleotide
  misc_feature 1..20: note = Target: SCN10A; (-) strand; PAM type: YTN; PAM sequence: CTG
  source 1..20: mol_type = other DNA
tctgcccagggctttctctg

SEQ ID NO: 57229 - DNA, 20 bp, synthetic construct
  misc_feature 1..20: note = Description of Artificial Sequence: Synthetic oligonucleotide
  misc_feature 1..20: note = Target: SCN10A; (-) strand; PAM type: YTN; PAM sequence: CTC
  source 1..20: mol_type = other DNA
tgtctgcccagggctttctc

SEQ ID NO: 57230 - DNA, 20 bp, synthetic construct
  misc_feature 1..20: note = Description of Artificial Sequence: Synthetic oligonucleotide
  misc_feature 1..20: note = Target: SCN10A; (-) strand; PAM type: YTN; PAM sequence: CTG
  source 1..20: mol_type = other DNA
cctctgtctgcccagggctt

SEQ ID NO: 57231 - DNA, 20 bp, synthetic construct
  misc_feature 1..20: note = Description of Artificial Sequence: Synthetic oligonucleotide
  misc_feature 1..20: note = Target: SCN10A; (-) strand; PAM type: YTN; PAM sequence: TTC
  source 1..20: mol_type = other DNA
ctgcctctgtctgcccaggg

SEQ ID NO: 57232 - DNA, 20 bp, synthetic construct
  misc_feature 1..20: note = Description of Artificial Sequence: Synthetic oligonucleotide
  misc_feature 1..20: note = Target: SCN10A; (-) strand; PAM type: YTN; PAM sequence: CTT
  source 1..20: mol_type = other DNA
cctgcctctgtctgcccagg

SEQ ID NO: 57233 - DNA, 20 bp, synthetic construct
  misc_feature 1..20: note = Description of Artificial Sequence: Synthetic oligonucleotide
  misc_feature 1..20: note = Target: SCN10A; (-) strand; PAM type: YTN; PAM sequence: CTA
  source 1..20: mol_type = other DNA
catgtgacttcctgcctctg

SEQ ID NO: 57234 - DNA, 20 bp, synthetic construct
  misc_feature 1..20: note = Description of Artificial Sequence: Synthetic oligonucleotide
  misc_feature 1..20: note = Target: SCN10A; (-) strand; PAM type: YTN; PAM sequence: TTC
  source 1..20: mol_type = other DNA
ctacatgtgacttcctgcct

SEQ ID NO: 57235 - DNA, 20 bp, synthetic construct
  misc_feature 1..20: note = Description of Artificial Sequence: Synthetic oligonucleotide
  misc_feature 1..20: note = Target: SCN10A; (-) strand; PAM type: YTN; PAM sequence: CTT
  source 1..20: mol_type = other DNA
cctacatgtgacttcctgcc

SEQ ID NO: 57236 - DNA, 20 bp, synthetic construct
  misc_feature 1..20: note = Description of Artificial Sequence: Synthetic oligonucleotide
  misc_feature 1..20: note = Target: SCN10A; (-) strand; PAM type: YTN; PAM sequence: CTA
  source 1..20: mol_type = other DNA
gaccagaggtcaccagcaga

SEQ ID NO: 57237 - DNA, 20 bp, synthetic construct
  misc_feature 1..20: note = Description of Artificial Sequence: Synthetic oligonucleotide
  misc_feature 1..20: note = Target: SCN10A; (-) strand; PAM type: YTN; PAM sequence: TTC
  source 1..20: mol_type = other DNA
ccagggatctagaccagagg

SEQ ID NO: 57238 - DNA, 20 bp, synthetic construct
  misc_feature 1..20: note = Description of Artificial Sequence: Synthetic oligonucleotide
  misc_feature 1..20: note = Target: SCN10A; (-) strand; PAM type: YTN; PAM sequence: TTT
  source 1..20: mol_type = other DNA
cccagggatctagaccagag

SEQ ID NO: 57239 - DNA, 20 bp, synthetic construct
  misc_feature 1..20: note = Description of Artificial Sequence: Synthetic oligonucleotide
  misc_feature 1..20: note = Target: SCN10A; (-) strand; PAM type: YTN; PAM sequence: CTC
  source 1..20: mol_type = other DNA
atttcccagggatctagacc

SEQ ID NO: 57240 - DNA, 20 bp, synthetic construct
  misc_feature 1..20: note = Description of Artificial Sequence: Synthetic oligonucleotide
  misc_feature 1..20: note = Target: SCN10A; (-) strand; PAM type: YTN; PAM sequence: TTG
  source 1..20: mol_type = other DNA
ctcatttcccagggatctag

SEQ ID NO: 57241 - DNA, 20 bp, synthetic construct
  misc_feature 1..20: note = Description of Artificial Sequence: Synthetic oligonucleotide
  misc_feature 1..20: note = Target: SCN10A; (-) strand; PAM type: YTN; PAM sequence: CTT
  source 1..20: mol_type = other DNA
gctcatttcccagggatcta

SEQ ID NO: 57242 - DNA, 20 bp, synthetic construct
  misc_feature 1..20: note = Description of Artificial Sequence: Synthetic oligonucleotide
  misc_feature 1..20: note = Target: SCN10A; (-) strand; PAM type: YTN; PAM sequence: CTG
  source 1..20: mol_type = other DNA
caccttgctcatttcccagg

SEQ ID NO: 57243 - DNA, 20 bp, synthetic construct
  misc_feature 1..20: note = Description of Artificial Sequence: Synthetic oligonucleotide
  misc_feature 1..20: note = Target: SCN10A; (-) strand; PAM type: YTN; PAM sequence: CTA
  source 1..20: mol_type = other DNA
tctgcaccttgctcatttcc

SEQ ID NO: 57244 - DNA, 20 bp, synthetic construct
  misc_feature 1..20: note = Description of Artificial Sequence: Synthetic oligonucleotide
  misc_feature 1..20: note = Target: SCN10A; (-) strand; PAM type: YTN; PAM sequence: CTA
  source 1..20: mol_type = other DNA
tagccgtcactatctgcacc

SEQ ID NO: 57245 - DNA, 20 bp, synthetic construct
  misc_feature 1..20: note = Description of Artificial Sequence: Synthetic oligonucleotide
  misc_feature 1..20: note = Target: SCN10A; (-) strand; PAM type: YTN; PAM sequence: TTG
  source 1..20: mol_type = other DNA
caaggactatagccgtcact

SEQ ID NO: 57246 - DNA, 20 bp, synthetic construct
  misc_feature 1..20: note = Description of Artificial Sequence: Synthetic oligonucleotide
  misc_feature 1..20: note = Target: SCN10A; (-) strand; PAM type: YTN; PAM sequence: TTA
  source 1..20: mol_type = other DNA
aggttgcaaggactatagcc

SEQ ID NO: 57247 - DNA, 20 bp, synthetic construct
  misc_feature 1..20: note = Description of Artificial Sequence: Synthetic oligonucleotide
  misc_feature 1..20: note = Target: SCN10A; (-) strand; PAM type: YTN; PAM sequence: TTC
  source 1..20: mol_type = other DNA
ccaattaaggttgcaaggac

SEQ ID NO: 57248 - DNA, 20 bp, synthetic construct
  misc_feature 1..20: note = Description of Artificial Sequence: Synthetic oligonucleotide
  misc_feature 1..20: note = Target: SCN10A; (-) strand; PAM type: YTN; PAM sequence: CTA
  source 1..20: mol_type = other DNA
aaatagggattcccaattaa

SEQ ID NO: 57249 - DNA, 20 bp, synthetic construct
  misc_feature 1..20: note = Description of Artificial Sequence: Synthetic oligonucleotide
  misc_feature 1..20: note = Target: SCN10A; (-) strand; PAM type: YTN; PAM sequence: CTC
  source 1..20: mol_type = other DNA
taaaatagggattcccaatt

SEQ ID NO: 57250 - DNA, 20 bp, synthetic construct
  misc_feature 1..20: note = Description of Artificial Sequence: Synthetic oligonucleotide
  misc_feature 1..20: note = Target: SCN10A; (-) strand; PAM type: YTN; PAM sequence: CTA
  source 1..20: mol_type = other DNA
gactctaaaatagggattcc

SEQ ID NO: 57251 - DNA, 20 bp, synthetic construct
  misc_feature 1..20: note = Description of Artificial Sequence: Synthetic oligonucleotide
  misc_feature 1..20: note = Target: SCN10A; (-) strand; PAM type: YTN; PAM sequence: TTC
  source 1..20: mol_type = other DNA
aactagactctaaaataggg

SEQ ID NO: 57252 - DNA, 20 bp, synthetic construct
  misc_feature 1..20: note = Description of Artificial Sequence: Synthetic oligonucleotide
  misc_feature 1..20: note = Target: SCN10A; (-) strand; PAM type: YTN; PAM sequence: CTA
  source 1..20: mol_type = other DNA
cattcaactagactctaaaa

SEQ ID NO: 57253 - DNA, 20 bp, synthetic construct
  misc_feature 1..20: note = Description of Artificial Sequence: Synthetic oligonucleotide
  misc_feature 1..20: note = Target: SCN10A; (-) strand; PAM type: YTN; PAM sequence: TTC
  source 1..20: mol_type = other DNA
cccactacattcaactagac

SEQ ID NO: 57254 - DNA, 20 bp, synthetic construct
  misc_feature 1..20: note = Description of Artificial Sequence: Synthetic oligonucleotide
  misc_feature 1..20: note = Target: SCN10A; (-) strand; PAM type: YTN; PAM sequence: TTT
  source 1..20: mol_type = other DNA
ccccactacattcaactaga

SEQ ID NO: 57255 - DNA, 20 bp, synthetic construct
  misc_feature 1..20: note = Description of Artificial Sequence: Synthetic oligonucleotide
  misc_feature 1..20: note = Target: SCN10A; (-) strand; PAM type: YTN; PAM sequence: CTT
  source 1..20: mol_type = other DNA
tccccactacattcaactag

SEQ ID NO: 57256 - DNA, 20 bp, synthetic construct
  misc_feature 1..20: note = Description of Artificial Sequence: Synthetic oligonucleotide
  misc_feature 1..20: note = Target: SCN10A; (-) strand; PAM type: YTN; PAM sequence: CTC
  source 1..20: mol_type = other DNA
acaaaggatgtgctttcccc

SEQ ID NO: 57257 - DNA, 20 bp, synthetic construct
  misc_feature 1..20: note = Description of Artificial Sequence: Synthetic oligonucleotide
  misc_feature 1..20: note = Target: SCN10A; (-) strand; PAM type: YTN; PAM sequence: CTA
  source 1..20: mol_type = other DNA
cctcacaaaggatgtgcttt

SEQ ID NO: 57258 - DNA, 20 bp, synthetic construct
  misc_feature 1..20: note = Description of Artificial Sequence: Synthetic oligonucleotide
  misc_feature 1..20: note = Target: SCN10A; (-) strand; PAM type: YTN; PAM sequence: TTG
  source 1..20: mol_type = other DNA
atatggctacctcacaaagg

SEQ ID NO: 57259 - DNA, 20 bp, synthetic construct
  misc_feature 1..20: note = Description of Artificial Sequence: Synthetic oligonucleotide
  misc_feature 1..20: note = Target: SCN10A; (-) strand; PAM type: YTN; PAM sequence: TTT
  source 1..20: mol_type = other DNA
gatatggctacctcacaaag

SEQ ID NO: 57260 - DNA, 20 bp, synthetic construct
  misc_feature 1..20: note = Description of Artificial Sequence: Synthetic oligonucleotide
  misc_feature 1..20: note = Target: SCN10A; (-) strand; PAM type: YTN; PAM sequence: CTA
  source 1..20: mol_type = other DNA
taacacatacatttgatatg

SEQ ID NO: 57261 - DNA, 20 bp, synthetic construct
  misc_feature 1..20: note = Description of Artificial Sequence: Synthetic oligonucleotide
  misc_feature 1..20: note = Target: SCN10A; (-) strand; PAM type: YTN; PAM sequence: CTA
  source 1..20: mol_type = other DNA
atcctataacacatacattt

SEQ ID NO: 57262 - DNA, 20 bp, synthetic construct
  misc_feature 1..20: note = Description of Artificial Sequence: Synthetic oligonucleotide
  misc_feature 1..20: note = Target: SCN10A; (-) strand; PAM type: YTN; PAM sequence: TTA
  source 1..20: mol_type = other DNA
atccaagaagtgagtatcag

SEQ ID NO: 57263 - DNA, 20 bp, synthetic construct
  misc_feature 1..20: note = Description of Artificial Sequence: Synthetic oligonucleotide
  misc_feature 1..20: note = Target: SCN10A; (-) strand; PAM type: YTN; PAM sequence: CTC
  source 1..20: mol_type = other DNA
agccattaatccaagaagtg

SEQ ID NO: 57264 - DNA, 20 bp, synthetic construct
  misc_feature 1..20: note = Description of Artificial Sequence: Synthetic oligonucleotide
  misc_feature 1..20: note = Target: SCN10A; (-) strand; PAM type: YTN; PAM sequence: CTC
  source 1..20: mol_type = other DNA
ctcagccattaatccaagaa

SEQ ID NO: 57265 - DNA, 20 bp, synthetic construct
  misc_feature 1..20: note = Description of Artificial Sequence: Synthetic oligonucleotide
  misc_feature 1..20: note = Target: SCN10A; (-) strand; PAM type: YTN; PAM sequence: CTC
  source 1..20: mol_type = other DNA
ctcctcagccattaatccaa

SEQ ID NO: 57266 - DNA, 20 bp, synthetic construct
  misc_feature 1..20: note = Description of Artificial Sequence: Synthetic oligonucleotide
  misc_feature 1..20: note = Target: SCN10A; (-) strand; PAM type: YTN; PAM sequence: TTG
  source 1..20: mol_type = other DNA
tctcctcctcagccattaat

SEQ ID NO: 57267 - DNA, 20 bp, synthetic construct
  misc_feature 1..20: note = Description of Artificial Sequence: Synthetic oligonucleotide
  misc_feature 1..20: note = Target: SCN10A; (-) strand; PAM type: YTN; PAM sequence: TTG
  source 1..20: mol_type = other DNA
gattgtctcctcctcagcca

SEQ ID NO: 57268 - DNA, 20 bp, synthetic construct
  misc_feature 1..20: note = Description of Artificial Sequence: Synthetic oligonucleotide
  misc_feature 1..20: note = Target: SCN10A; (-) strand; PAM type: YTN; PAM sequence: CTT
  source 1..20: mol_type = other DNA
ggattgtctcctcctcagcc

SEQ ID NO: 57269 - DNA, 20 bp, synthetic construct
  misc_feature 1..20: note = Description of Artificial Sequence: Synthetic oligonucleotide
  misc_feature 1..20: note = Target: SCN10A; (-) strand; PAM type: YTN; PAM sequence: TTC
  source 1..20: mol_type = other DNA
ttggattgtctcctcctcag

SEQ ID NO: 57270 - DNA, 20 bp, synthetic construct
  misc_feature 1..20: note = Description of Artificial Sequence: Synthetic oligonucleotide
  misc_feature 1..20: note = Target: SCN10A; (-) strand; PAM type: YTN; PAM sequence: TTT
  source 1..20: mol_type = other DNA
cttggattgtctcctcctca

SEQ ID NO: 57271 - DNA, 20 bp, synthetic construct
  misc_feature 1..20: note = Description of Artificial Sequence: Synthetic oligonucleotide
  misc_feature 1..20: note = Target: SCN10A; (-) strand; PAM type: YTN; PAM sequence: CTA
  source 1..20: mol_type = other DNA
gaatagatatttcttggatt

SEQ ID NO: 57272 - DNA, 20 bp, synthetic construct
  misc_feature 1..20: note = Description of Artificial Sequence: Synthetic oligonucleotide
  misc_feature 1..20: note = Target: SCN10A; (-) strand; PAM type: YTN; PAM sequence: CTA
  source 1..20: mol_type = other DNA
aactagaatagatatttctt

SEQ ID NO: 57273 - DNA, 20 bp, synthetic construct
  misc_feature 1..20: note = Description of Artificial Sequence: Synthetic oligonucleotide
  misc_feature 1..20: note = Target: SCN10A; (-) strand; PAM type: YTN; PAM sequence: TTG
  source 1..20: mol_type = other DNA
gagctaaactagaatagata

SEQ ID NO: 57274 - DNA, 20 bp, synthetic construct
  misc_feature 1..20: note = Description of Artificial Sequence: Synthetic oligonucleotide
  misc_feature 1..20: note = Target: SCN10A; (-) strand; PAM type: YTN; PAM sequence: CTT
  source 1..20: mol_type = other DNA
ggagctaaactagaatagat

SEQ ID NO: 57275 - DNA, 20 bp, synthetic construct
  misc_feature 1..20: note = Description of Artificial Sequence: Synthetic oligonucleotide
  misc_feature 1..20: note = Target: SCN10A; (-) strand; PAM type: YTN; PAM sequence: TTG
  source 1..20: mol_type = other DNA
aaagccagggccgagcttgg

SEQ ID NO: 57276 - DNA, 20 bp, synthetic construct
  misc_feature 1..20: note = Description of Artificial Sequence: Synthetic oligonucleotide
  misc_feature 1..20: note = Target: SCN10A; (-) strand; PAM type: YTN; PAM sequence: TTT
  source 1..20: mol_type = other DNA
gaaagccagggccgagcttg

SEQ ID NO: 57277 - DNA, 20 bp, synthetic construct
  misc_feature 1..20: note = Description of Artificial Sequence: Synthetic oligonucleotide
  misc_feature 1..20: note = Target: SCN10A; (-) strand; PAM type: YTN; PAM sequence: CTG
  source 1..20: mol_type = other DNA
tttgaaagccagggccgagc

SEQ ID NO: 57278 - DNA, 20 bp, synthetic construct
  misc_feature 1..20: note = Description of Artificial Sequence: Synthetic oligonucleotide
  misc_feature 1..20: note = Target: SCN10A; (-) strand; PAM type: YTN; PAM sequence: CTC
  source 1..20: mol_type = other DNA
atgcagactgtttgaaagcc

SEQ ID NO: 57279 - DNA, 20 bp, synthetic construct
  misc_feature 1..20: note = Description of Artificial Sequence: Synthetic oligonucleotide
  misc_feature 1..20: note = Target: SCN10A; (-) strand; PAM type: YTN; PAM sequence: CTG
  source 1..20: mol_type = other DNA
caaaaactcatgcagactgt

SEQ ID NO: 57280 - DNA, 20 bp, synthetic construct
  misc_feature 1..20: note = Description of Artificial Sequence: Synthetic oligonucleotide
  misc_feature 1..20: note = Target: SCN10A; (-) strand; PAM type: YTN; PAM sequence: TTA
  source 1..20: mol_type = other DNA
agggaatatacctgcaaaaa

SEQ ID NO: 57281 - DNA, 20 bp, synthetic construct
  misc_feature 1..20: note = Description of Artificial Sequence: Synthetic oligonucleotide
  misc_feature 1..20: note = Target: SCN10A; (-) strand; PAM type: YTN; PAM sequence: CTT
  source 1..20: mol_type = other DNA
aagggaatatacctgcaaaa

SEQ ID NO: 57282 - DNA, 20 bp, synthetic construct
  misc_feature 1..20: note = Description of Artificial Sequence: Synthetic oligonucleotide
  misc_feature 1..20: note = Target: SCN10A; (-) strand; PAM type: YTN; PAM sequence: TTA
  source 1..20: mol_type = other DNA
aacttaagggaatatacctg

SEQ ID NO: 57283 - DNA, 20 bp, synthetic construct
  misc_feature 1..20: note = Description of Artificial Sequence: Synthetic oligonucleotide
  misc_feature 1..20: note = Target: SCN10A; (-) strand; PAM type: YTN; PAM sequence: CTA
  source 1..20: mol_type = other DNA
ttaaacttaagggaatatac

SEQ ID NO: 57284 - DNA, 20 bp, synthetic construct
  misc_feature 1..20: note = Description of Artificial Sequence: Synthetic oligonucleotide
  misc_feature 1..20: note = Target: SCN10A; (-) strand; PAM type: YTN; PAM sequence: TTA
  source 1..20: mol_type = other DNA
gcaggaacagctattaaact

SEQ ID NO: 57285 - DNA, 20 bp, synthetic construct
  misc_feature 1..20: note = Description of Artificial Sequence: Synthetic oligonucleotide
  misc_feature 1..20: note = Target: SCN10A; (-) strand; PAM type: YTN; PAM sequence: CTT
  source 1..20: mol_type = other DNA
agcaggaacagctattaaac

SEQ ID NO: 57286 - DNA, 20 bp, synthetic construct
  misc_feature 1..20: note = Description of Artificial Sequence: Synthetic oligonucleotide
  misc_feature 1..20: note = Target: SCN10A; (-) strand; PAM type: YTN; PAM sequence: TTG
  source 1..20: mol_type = other DNA
cttagcaggaacagctatta

SEQ ID NO: 57287 - DNA, 20 bp, synthetic construct
  misc_feature 1..20: note = Description of Artificial Sequence: Synthetic oligonucleotide
  misc_feature 1..20: note = Target: SCN10A; (-) strand; PAM type: YTN; PAM sequence: CTT
  source 1..20: mol_type = other DNA
gcttagcaggaacagctatt

SEQ ID NO: 57288 - DNA, 20 bp, synthetic construct
  misc_feature 1..20: note = Description of Artificial Sequence: Synthetic oligonucleotide
  misc_feature 1..20: note = Target: SCN10A; (-) strand; PAM type: YTN; PAM sequence: CTG
  source 1..20: mol_type = other DNA
aatgcccaccgaatagaaag

SEQ ID NO: 57289 - DNA, 20 bp, synthetic construct
  misc_feature 1..20: note = Description of Artificial Sequence: Synthetic oligonucleotide
  misc_feature 1..20: note = Target: SCN10A; (-) strand; PAM type: YTN; PAM sequence: TTG
  source 1..20: mol_type = other DNA
ggagggctgaatgcccaccg

SEQ ID NO: 57290 - DNA, 20 bp, synthetic construct
  misc_feature 1..20: note = Description of Artificial Sequence: Synthetic oligonucleotide
  misc_feature 1..20: note = Target: SCN10A; (-) strand; PAM type: YTN; PAM sequence: CTT
  source 1..20: mol_type = other DNA
gggagggctgaatgcccacc

SEQ ID NO: 57291 - DNA, 20 bp, synthetic construct
  misc_feature 1..20: note = Description of Artificial Sequence: Synthetic oligonucleotide
  misc_feature 1..20: note = Target: SCN10A; (-) strand; PAM type: YTN; PAM sequence: TTC
  source 1..20: mol_type = other DNA
atcttgggagggctgaatgc

SEQ ID NO: 57292 - DNA, 20 bp, synthetic construct
  misc_feature 1..20: note = Description of Artificial Sequence: Synthetic oligonucleotide
  misc_feature 1..20: note = Target: SCN10A; (-) strand; PAM type: YTN; PAM sequence: TTG
  source 1..20: mol_type = other DNA
gttcatcttgggagggctga

SEQ ID NO: 57293 - DNA, 20 bp, synthetic construct
  misc_feature 1..20: note = Description of Artificial Sequence: Synthetic oligonucleotide
  misc_feature 1..20: note = Target: SCN10A; (-) strand; PAM type: YTN; PAM sequence: CTG
  source 1..20: mol_type = other DNA
ttggttcatcttgggagggc

SEQ ID NO: 57294 - DNA, 20 bp, synthetic construct
  misc_feature 1..20: note = Description of Artificial Sequence: Synthetic oligonucleotide
  misc_feature 1..20: note = Target: SCN10A; (-) strand; PAM type: YTN; PAM sequence: CTC
  source 1..20: mol_type = other DNA
aaaaaaaaaaaaaaaaaaaa

SEQ ID NO: 57295 - DNA, 20 bp, synthetic construct
  misc_feature 1..20: note = Description of Artificial Sequence: Synthetic oligonucleotide
  misc_feature 1..20: note = Target: SCN10A; (-) strand; PAM type: YTN; PAM sequence: TTG
  source 1..20: mol_type = other DNA
tctcaaaaaaaaaaaaaaaa

SEQ ID NO: 57296 - DNA, 20 bp, synthetic construct
  misc_feature 1..20: note = Description of Artificial Sequence: Synthetic oligonucleotide
  misc_feature 1..20: note = Target: SCN10A; (-) strand; PAM type: YTN; PAM sequence: CTT
  source 1..20: mol_type = other DNA
gtctcaaaaaaaaaaaaaaa

SEQ ID NO: 57297 - DNA, 20 bp, synthetic construct
  misc_feature 1..20: note = Description of Artificial Sequence: Synthetic oligonucleotide
  misc_feature 1..20: note = Target: SCN10A; (-) strand; PAM type: YTN; PAM sequence: CTG
  source 1..20: mol_type = other DNA
gacaacagagtgagaacttg

SEQ ID NO: 57298 - DNA, 20 bp, synthetic construct
  misc_feature 1..20: note = Description of Artificial Sequence: Synthetic oligonucleotide
  misc_feature 1..20: note = Target: SCN10A; (-) strand; PAM type: YTN; PAM sequence: CTC
  source 1..20: mol_type = other DNA
cagcctggacaacagagtga

SEQ ID NO: 57299 - DNA, 20 bp, synthetic construct
  misc_feature 1..20: note = Description of Artificial Sequence: Synthetic oligonucleotide
  misc_feature 1..20: note = Target: SCN10A; (-) strand; PAM type: YTN; PAM sequence: CTG
  source 1..20: mol_type = other DNA
cactccagcctggacaacag

SEQ ID NO: 57300 - DNA, 20 bp, synthetic construct
  misc_feature 1..20: note = Description of Artificial Sequence: Synthetic oligonucleotide
  misc_feature 1..20: note = Target: SCN10A; (-) strand; PAM type: YTN; PAM sequence: TTG
  source 1..20: mol_type = other DNA
tgccactgcactccagcctg

SEQ ID NO: 57301 - DNA, 20 bp, synthetic construct
  misc_feature 1..20: note = Description of Artificial Sequence: Synthetic oligonucleotide
  misc_feature 1..20: note = Target: SCN10A; (-) strand; PAM type: YTN; PAM sequence: CTG
  source 1..20: mol_type = other DNA
tgattgtgccactgcactcc

SEQ ID NO: 57302 - DNA, 20 bp, synthetic construct
  misc_feature 1..20: note = Description of Artificial Sequence: Synthetic oligonucleotide
  misc_feature 1..20: note = Target: SCN10A; (-) strand; PAM type: YTN; PAM sequence: CTG
  source 1..20: mol_type = other DNA
caatgagctgtgattgtgcc

SEQ ID NO: 57303 - DNA, 20 bp, synthetic construct
  misc_feature 1..20: note = Description of Artificial Sequence: Synthetic oligonucleotide
  misc_feature 1..20: note = Target: SCN10A; (-) strand; PAM type: YTN; PAM sequence: TTG
  source 1..20: mol_type = other DNA
aacatgggaggtcaaggctg

SEQ ID NO: 57304 - DNA, 20 bp, synthetic construct
  misc_feature 1..20: note = Description of Artificial Sequence: Synthetic oligonucleotide
  misc_feature 1..20: note = Target: SCN10A; (-) strand; PAM type: YTN; PAM sequence: CTT
  source 1..20: mol_type = other DNA
gaacatgggaggtcaaggct

SEQ ID NO: 57305 - DNA, 20 bp, synthetic construct
  misc_feature 1..20: note = Description of Artificial Sequence: Synthetic oligonucleotide
  misc_feature 1..20: note = Target: SCN10A; (-) strand; PAM type: YTN; PAM sequence: CTG
  source 1..20: mol_type = other DNA
aggtgggaggatcacttgaa

SEQ ID NO: 57306 - DNA, 20 bp, synthetic construct
  misc_feature 1..20: note = Description of Artificial Sequence: Synthetic oligonucleotide
  misc_feature 1..20: note = Target: SCN10A; (-) strand; PAM type: YTN; PAM sequence: TTG
  source 1..20: mol_type = other DNA
ggaggctgaggtgggaggat

SEQ ID NO: 57307 - DNA, 20 bp, synthetic construct
  misc_feature 1..20: note = Description of Artificial Sequence: Synthetic oligonucleotide
  misc_feature 1..20: note = Target: SCN10A; (-) strand; PAM type: YTN; PAM sequence: CTT
  source 1..20: mol_type = other DNA
gggaggctgaggtgggagga

SEQ ID NO: 57308 - DNA, 20 bp, synthetic construct
  misc_feature 1..20: note = Description of Artificial Sequence: Synthetic oligonucleotide
  misc_feature 1..20: note = Target: SCN10A; (-) strand; PAM type: YTN; PAM sequence: CTA
  source 1..20: mol_type = other DNA
cttgggaggctgaggtggga

SEQ ID NO: 57309 - DNA, 20 bp, synthetic construct
  misc_feature 1..20: note = Description of Artificial Sequence: Synthetic oligonucleotide
  misc_feature 1..20: note = Target: SCN10A; (-) strand; PAM type: YTN; PAM sequence: TTC
  source 1..20: mol_type = other DNA
cactacttgggaggctgagg

SEQ ID NO: 57310 - DNA, 20 bp, synthetic construct
  misc_feature 1..20: note = Description of Artificial Sequence: Synthetic oligonucleotide
  misc_feature 1..20: note = Target: SCN10A; (-) strand; PAM type: YTN; PAM sequence: CTG
  source 1..20: mol_type = other DNA
tagttccactacttgggagg

SEQ ID NO: 57311 - DNA, 20 bp, synthetic construct
  misc_feature 1..20: note = Description of Artificial Sequence: Synthetic oligonucleotide
  misc_feature 1..20: note = Target: SCN10A; (-) strand; PAM type: YTN; PAM sequence: TTA
  source 1..20: mol_type = other DNA
gccaggcgtggtggcacata

SEQ ID NO: 57312 - DNA, 20 bp, synthetic construct
  misc_feature 1..20: note = Description of Artificial Sequence: Synthetic oligonucleotide
  misc_feature 1..20: note = Target: SCN10A; (-) strand; PAM type: YTN; PAM sequence: CTG
  source 1..20: mol_type = other DNA
gggaacatggaaaaacccca

SEQ ID NO: 57313 - DNA, 20 bp, synthetic construct
  misc_feature 1..20: note = Description of Artificial Sequence: Synthetic oligonucleotide
  misc_feature 1..20: note = Target: SCN10A; (-) strand; PAM type: YTN; PAM sequence: TTG
  source 1..20: mol_type = other DNA
agaccagcctggggaacatg

SEQ ID NO: 57314 - DNA, 20 bp, synthetic construct
  misc_feature 1..20: note = Description of Artificial Sequence: Synthetic oligonucleotide
  misc_feature 1..20: note = Target: SCN10A; (-) strand; PAM type: YTN; PAM sequence: TTT
  source 1..20: mol_type = other DNA
gagaccagcctggggaacat

SEQ ID NO: 57315 - DNA, 20 bp, synthetic construct
  misc_feature 1..20: note = Description of Artificial Sequence: Synthetic oligonucleotide
  misc_feature 1..20: note = Target: SCN10A; (+) strand; PAM type: YTN; PAM sequence: TTG
  source 1..20: mol_type = other DNA
tttgaattttattctatggc

SEQ ID NO: 57316 - DNA, 20 bp, synthetic construct
  misc_feature 1..20: note = Description of Artificial Sequence: Synthetic oligonucleotide
  misc_feature 1..20: note = Target: SCN10A; (+) strand; PAM type: YTN; PAM sequence: TTT
  source 1..20: mol_type = other DNA
gaattttattctatggccag

SEQ ID NO: 57317 - DNA, 20 bp, synthetic construct
  misc_feature 1..20: note = Description of Artificial Sequence: Synthetic oligonucleotide
  misc_feature 1..20: note = Target: SCN10A; (+) strand; PAM type: YTN; PAM sequence: TTG
  source 1..20: mol_type = other DNA
aattttattctatggccagg

SEQ ID NO: 57318 - DNA, 20 bp, synthetic construct
  misc_feature 1..20: note = Description of Artificial Sequence: Synthetic oligonucleotide
  misc_feature 1..20: note = Target: SCN10A; (+) strand; PAM type: YTN; PAM sequence: TTT
  source 1..20: mol_type = other DNA
tattctatggccaggcatac

SEQ ID NO: 57319 - DNA, 20 bp, synthetic construct
  misc_feature 1..20: note = Description of Artificial Sequence: Synthetic oligonucleotide
  misc_feature 1..20: note = Target: SCN10A; (+) strand; PAM type: YTN; PAM sequence: TTT
  source 1..20: mol_type = other DNA
attctatggccaggcatacg

SEQ ID NO: 57320 - DNA, 20 bp, synthetic construct
  misc_feature 1..20: note = Description of Artificial Sequence: Synthetic oligonucleotide
  misc_feature 1..20: note = Target: SCN10A; (+) strand; PAM type: YTN; PAM sequence: TTA
  source 1..20: mol_type = other DNA
ttctatggccaggcatacgg

SEQ ID NO: 57321 - DNA, 20 bp, synthetic construct
  misc_feature 1..20: note = Description of Artificial Sequence: Synthetic oligonucleotide
  misc_feature 1..20: note = Target: SCN10A; (+) strand; PAM type: YTN; PAM sequence: TTC
  source 1..20: mol_type = other DNA
tatggccaggcatacggact

SEQ ID NO: 57322 - DNA, 20 bp, synthetic construct
  misc_feature 1..20: note = Description of Artificial Sequence: Synthetic oligonucleotide
  misc_feature 1..20: note = Target: SCN10A; (+) strand; PAM type: YTN; PAM sequence: CTA
  source 1..20: mol_type = other DNA
tggccaggcatacggactat

SEQ ID NO: 57323 - DNA, 20 bp, synthetic construct
  misc_feature 1..20: note = Description of Artificial Sequence: Synthetic oligonucleotide
  misc_feature 1..20: note = Target: SCN10A; (+) strand; PAM type: YTN; PAM sequence: CTA
  source 1..20: mol_type = other DNA
tttttgtaaatgtgccctat

SEQ ID NO: 57324 - DNA, 20 bp, synthetic construct
  misc_feature 1..20: note = Description of Artificial Sequence: Synthetic oligonucleotide
  misc_feature 1..20: note = Target: SCN10A; (+) strand; PAM type: YTN; PAM sequence: TTT
  source 1..20: mol_type = other DNA
ttgtaaatgtgccctatgta

SEQ ID NO: 57325 - DNA, 20 bp, synthetic construct
  misc_feature 1..20: note = Description of Artificial Sequence: Synthetic oligonucleotide
  misc_feature 1..20: note = Target: SCN10A; (+) strand; PAM type: YTN; PAM sequence: TTT
  source 1..20: mol_type = other DNA
tgtaaatgtgccctatgtac

SEQ ID NO: 57326 - DNA, 20 bp, synthetic construct
  misc_feature 1..20: note = Description of Artificial Sequence: Synthetic oligonucleotide
  misc_feature 1..20: note = Target: SCN10A; (+) strand; PAM type: YTN; PAM sequence: TTT
  source 1..20: mol_type = other DNA
gtaaatgtgccctatgtact

SEQ ID NO: 57327 - DNA, 20 bp, synthetic construct
  misc_feature 1..20: note = Description of Artificial Sequence: Synthetic oligonucleotide
  misc_feature 1..20: note = Target: SCN10A; (+) strand; PAM type: YTN; PAM sequence: TTG
  source 1..20: mol_type = other DNA
taaatgtgccctatgtactt

SEQ ID NO: 57328 - DNA, 20 bp, synthetic construct
  misc_feature 1..20: note = Description of Artificial Sequence: Synthetic oligonucleotide
  misc_feature 1..20: note = Target: SCN10A; (+) strand; PAM type: YTN; PAM sequence: CTA
  source 1..20: mol_type = other DNA
tgtacttgtatttgtaccct

SEQ ID NO: 57329 - DNA, 20 bp, synthetic construct
  misc_feature 1..20: note = Description of Artificial Sequence: Synthetic oligonucleotide
  misc_feature 1..20: note = Target: SCN10A; (+) strand; PAM type: YTN; PAM sequence: CTT
  source 1..20: mol_type = other DNA
gtatttgtacccttttggta

SEQ ID NO: 57330 - DNA, 20 bp, synthetic construct
  misc_feature 1..20: note = Description of Artificial Sequence: Synthetic oligonucleotide
  misc_feature 1..20: note = Target: SCN10A; (+) strand; PAM type: YTN; PAM sequence: TTG
  source 1..20: mol_type = other DNA
tatttgtacccttttggtaa

SEQ ID NO: 57331 - DNA, 20 bp, synthetic construct
  misc_feature 1..20: note = Description of Artificial Sequence: Synthetic oligonucleotide
  misc_feature 1..20: note = Target: SCN10A; (+) strand; PAM type: YTN; PAM sequence: TTT
  source 1..20: mol_type = other DNA
gtacccttttggtaacctta

SEQ ID NO: 57332 - DNA, 20 bp, synthetic construct
  misc_feature 1..20: note = Description of Artificial Sequence: Synthetic oligonucleotide
  misc_feature 1..20: note = Target: SCN10A; (+) strand; PAM type: YTN; PAM sequence: TTG
  source 1..20: mol_type = other DNA
tacccttttggtaaccttag

SEQ ID NO: 57333 - DNA, 20 bp, synthetic construct
  misc_feature 1..20: note = Description of Artificial Sequence: Synthetic oligonucleotide
  misc_feature 1..20: note = Target: SCN10A; (+) strand; PAM type: YTN; PAM sequence: CTT
  source 1..20: mol_type = other DNA
ttggtaaccttaggttttgt

SEQ ID NO: 57334 - DNA, 20 bp, synthetic construct
  misc_feature 1..20: note = Description of Artificial Sequence: Synthetic oligonucleotide
  misc_feature 1..20: note = Target: SCN10A; (+) strand; PAM type: YTN; PAM sequence: TTT
  source 1..20: mol_type = other DNA
tggtaaccttaggttttgtg

SEQ ID NO: 57335 - DNA, 20 bp, synthetic construct
  misc_feature 1..20: note = Description of Artificial Sequence: Synthetic oligonucleotide
  misc_feature 1..20: note = Target: SCN10A; (+) strand; PAM type: YTN; PAM sequence: TTT
  source 1..20: mol_type = other DNA
ggtaaccttaggttttgtgt

SEQ ID NO: 57336 - DNA, 20 bp, synthetic construct
  misc_feature 1..20: note = Description of Artificial Sequence: Synthetic oligonucleotide
  misc_feature 1..20: note = Target: SCN10A; (+) strand; PAM type: YTN; PAM sequence: TTG
  source 1..20: mol_type = other DNA
gtaaccttaggttttgtgtg

SEQ ID NO: 57337 - DNA, 20 bp, synthetic construct
  misc_feature 1..20: note = Description of Artificial Sequence: Synthetic oligonucleotide
  misc_feature 1..20: note = Target: SCN10A; (+) strand; PAM type: YTN; PAM sequence: CTT
  source 1..20: mol_type = other DNA
aggttttgtgtggctttctg

SEQ ID NO: 57338 - DNA, 20 bp, synthetic construct
  misc_feature 1..20: note = Description of Artificial Sequence: Synthetic oligonucleotide
  misc_feature 1..20: note = Target: SCN10A; (+) strand; PAM type: YTN; PAM sequence: TTA
  source 1..20: mol_type = other DNA
ggttttgtgtggctttctgt

SEQ ID NO: 57339 - DNA, 20 bp, synthetic construct
  misc_feature 1..20: note = Description of Artificial Sequence: Synthetic oligonucleotide
  misc_feature 1..20: note = Target: SCN10A; (+) strand; PAM type: YTN; PAM sequence: TTT
  source 1..20: mol_type = other DNA
tgtgtggctttctgtaaaca

SEQ ID NO: 57340 - DNA, 20 bp, synthetic construct
  misc_feature 1..20: note = Description of Artificial Sequence: Synthetic oligonucleotide
  misc_feature 1..20: note = Target: SCN10A; (+) strand; PAM type: YTN; PAM sequence: TTT
  source 1..20: mol_type = other DNA
gtgtggctttctgtaaacag

SEQ ID NO: 57341 - DNA, 20 bp, synthetic construct
  misc_feature 1..20: note = Description of Artificial Sequence: Synthetic oligonucleotide
  misc_feature 1..20: note = Target: SCN10A; (+) strand; PAM type: YTN; PAM sequence: TTG
  source 1..20: mol_type = other DNA
tgtggctttctgtaaacaga

SEQ ID NO: 57342 - DNA, 20 bp, synthetic construct
  misc_feature 1..20: note = Description of Artificial Sequence: Synthetic oligonucleotide
  misc_feature 1..20: note = Target: SCN10A; (+) strand; PAM type: YTN; PAM sequence: CTT
  source 1..20: mol_type = other DNA
tctgtaaacagaatttattt

SEQ ID NO: 57343 - DNA, 20 bp, synthetic construct
  misc_feature 1..20: note = Description of Artificial Sequence: Synthetic oligonucleotide
  misc_feature 1..20: note = Target: SCN10A; (+) strand; PAM type: YTN; PAM sequence: TTT
  source 1..20: mol_type = other DNA
ctgtaaacagaatttatttg

SEQ ID NO: 57344 - DNA, 20 bp, synthetic construct
  misc_feature 1..20: note = Description of Artificial Sequence: Synthetic oligonucleotide
  misc_feature 1..20: note = Target: SCN10A; (+) strand; PAM type: YTN; PAM sequence: TTC
  source 1..20: mol_type = other DNA
tgtaaacagaatttatttga

SEQ ID NO: 57345 - DNA, 20 bp, synthetic construct
  misc_feature 1..20: note = Description of Artificial Sequence: Synthetic oligonucleotide
  misc_feature 1..20: note = Target: SCN10A; (+) strand; PAM type: YTN; PAM sequence: CTG
  source 1..20: mol_type = other DNA
taaacagaatttatttgaat

SEQ ID NO: 57346 - DNA, 20 bp, synthetic construct
  misc_feature 1..20: note = Description of Artificial Sequence: Synthetic oligonucleotide
  misc_feature 1..20: note = Target: SCN10A; (+) strand; PAM type: YTN; PAM sequence: TTT
  source 1..20: mol_type = other DNA
atttgaatttttaaaaatct

SEQ ID NO: 57347 - DNA, 20 bp, synthetic construct
  misc_feature 1..20: note = Description of Artificial Sequence: Synthetic oligonucleotide
  misc_feature 1..20: note = Target: SCN10A; (+) strand; PAM type: YTN; PAM sequence: TTA
  source 1..20: mol_type = other DNA
tttgaatttttaaaaatctt

SEQ ID NO: 57348 - DNA, 20 bp, synthetic construct
  misc_feature 1..20: note = Description of Artificial Sequence: Synthetic oligonucleotide
  misc_feature 1..20: note = Target: SCN10A; (+) strand; PAM type: YTN; PAM sequence: TTT
  source 1..20: mol_type = other DNA
gaatttttaaaaatcttgac

SEQ ID NO: 57349 - DNA, 20 bp, synthetic construct
  misc_feature 1..20: note = Description of Artificial Sequence: Synthetic oligonucleotide
  misc_feature 1..20: note = Target: SCN10A; (+) strand; PAM type: YTN; PAM sequence: TTG
  source 1..20: mol_type = other DNA
aatttttaaaaatcttgact

SEQ ID NO: 57350 - DNA, 20 bp, synthetic construct
  misc_feature 1..20: note = Description of Artificial Sequence: Synthetic oligonucleotide
  misc_feature 1..20: note = Target: SCN10A; (+) strand; PAM type: YTN; PAM sequence: TTT
  source 1..20: mol_type = other DNA
ttaaaaatcttgactgacac

SEQ ID NO: 57351 - DNA, 20 bp, synthetic construct
  misc_feature 1..20: note = Description of Artificial Sequence: Synthetic oligonucleotide
  misc_feature 1..20: note = Target: SCN10A; (+) strand; PAM type: YTN; PAM sequence: TTT
  source 1..20: mol_type = other DNA
taaaaatcttgactgacact

SEQ ID NO: 57352 - DNA, 20 bp, synthetic construct
  misc_feature 1..20: note = Description of Artificial Sequence: Synthetic oligonucleotide
  misc_feature 1..20: note = Target: SCN10A; (+) strand; PAM type: YTN; PAM sequence: TTT
  source 1..20: mol_type = other DNA
aaaaatcttgactgacactc

SEQ ID NO: 57353 - DNA, 20 bp, synthetic construct
  misc_feature 1..20: note = Description of Artificial Sequence: Synthetic oligonucleotide
  misc_feature 1..20: note = Target: SCN10A; (+) strand; PAM type: YTN; PAM sequence: TTA
  source 1..20: mol_type = other DNA
aaaatcttgactgacactct

SEQ ID NO: 57354 - DNA, 20 bp, synthetic construct
  misc_feature 1..20: note = Description of Artificial Sequence: Synthetic oligonucleotide
  misc_feature 1..20: note = Target: SCN10A; (+) strand; PAM type: YTN; PAM sequence: CTT
  source 1..20: mol_type = other DNA
gactgacactctttttccca

SEQ ID NO: 57355 - DNA, 20 bp, synthetic construct
  misc_feature 1..20: note = Description of Artificial Sequence: Synthetic oligonucleotide
  misc_feature 1..20: note = Target: SCN10A; (+) strand; PAM type: YTN; PAM sequence: TTG
  source 1..20: mol_type = other DNA
actgacactctttttcccag

SEQ ID NO: 57356 - DNA, 20 bp, synthetic construct
  misc_feature 1..20: note = Description of Artificial Sequence: Synthetic oligonucleotide
  misc_feature 1..20: note = Target: SCN10A; (+) strand; PAM type: YTN; PAM sequence: CTG
  source 1..20: mol_type = other DNA
acactctttttcccagagtc

SEQ ID NO: 57357 - DNA, 20 bp, synthetic construct
  misc_feature 1..20: note = Description of Artificial Sequence: Synthetic oligonucleotide
  misc_feature 1..20: note = Target: SCN10A; (+) strand; PAM type: YTN; PAM sequence: CTC
  source 1..20: mol_type = other DNA
tttttcccagagtccattta

SEQ ID NO: 57358 - DNA, 20 bp, synthetic construct
  misc_feature 1..20: note = Description of Artificial Sequence: Synthetic oligonucleotide
  misc_feature 1..20: note = Target: SCN10A; (+) strand; PAM type: YTN; PAM sequence: CTT
  source 1..20: mol_type = other DNA
tttcccagagtccatttaaa

SEQ ID NO: 57359 - DNA, 20 bp, synthetic construct
  misc_feature 1..20: note = Description of Artificial Sequence: Synthetic oligonucleotide
  misc_feature 1..20: note = Target: SCN10A; (+) strand; PAM type: YTN; PAM sequence: TTT
  source 1..20: mol_type = other DNA
ttcccagagtccatttaaat

SEQ ID NO: 57360 - DNA, 20 bp, synthetic construct
  misc_feature 1..20: note = Description of Artificial Sequence: Synthetic oligonucleotide
  misc_feature 1..20: note = Target: SCN10A; (+) strand; PAM type: YTN; PAM sequence: TTT
  source 1..20: mol_type = other DNA
tcccagagtccatttaaatt

SEQ ID NO: 57361 - DNA, 20 bp, synthetic construct
  misc_feature 1..20: note = Description of Artificial Sequence: Synthetic oligonucleotide
  misc_feature 1..20: note = Target: SCN10A; (+) strand; PAM type: YTN; PAM sequence: TTT
  source 1..20: mol_type = other DNA
cccagagtccatttaaattt

SEQ ID NO: 57362 - DNA, 20 bp, synthetic construct
  misc_feature 1..20: note = Description of Artificial Sequence: Synthetic oligonucleotide
  misc_feature 1..20: note = Target: SCN10A; (+) strand; PAM type: YTN; PAM sequence: TTC
  source 1..20: mol_type = other DNA
ccagagtccatttaaattta

SEQ ID NO: 57363 - DNA, 20 bp, synthetic construct
  misc_feature 1..20: note = Description of Artificial Sequence: Synthetic oligonucleotide
  misc_feature 1..20: note = Target: SCN10A; (+) strand; PAM type: YTN; PAM sequence: TTT
  source 1..20: mol_type = other DNA
aaatttaatgtaatttatga

SEQ ID NO: 57364 - DNA, 20 bp, synthetic construct
  misc_feature 1..20: note = Description of Artificial Sequence: Synthetic oligonucleotide
  misc_feature 1..20: note = Target: SCN10A; (+) strand; PAM type: YTN; PAM sequence: TTA
  source 1..20: mol_type = other DNA
aatttaatgtaatttatgaa

SEQ ID NO: 57365 - DNA, 20 bp, synthetic construct
  misc_feature 1..20: note = Description of Artificial Sequence: Synthetic oligonucleotide
  misc_feature 1..20: note = Target: SCN10A; (+) strand; PAM type: YTN; PAM sequence: TTT
  source 1..20: mol_type = other DNA
aatgtaatttatgaatattt

SEQ ID NO: 57366 - DNA, 20 bp, synthetic construct
  misc_feature 1..20: note = Description of Artificial Sequence: Synthetic oligonucleotide
  misc_feature 1..20: note = Target: SCN10A; (+) strand; PAM type: YTN; PAM sequence: TTA
  source 1..20: mol_type = other DNA
atgtaatttatgaatatttt

SEQ ID NO: 57367 - DNA, 20 bp, synthetic construct
  misc_feature 1..20: note = Description of Artificial Sequence: Synthetic oligonucleotide
  misc_feature 1..20: note = Target: SCN10A; (+) strand; PAM type: YTN; PAM sequence: TTT
  source 1..20: mol_type = other DNA
atgaatatttttgtttttga

SEQ ID NO: 57368 - DNA, 20 bp, synthetic construct
  misc_feature 1..20: note = Description of Artificial Sequence: Synthetic oligonucleotide
  misc_feature 1..20: note = Target: SCN10A; (+) strand; PAM type: YTN; PAM sequence: TTA
  source 1..20: mol_type = other DNA
tgaatatttttgtttttgaa

SEQ ID NO: 57369 - DNA, 20 bp, synthetic construct
  misc_feature 1..20: note = Description of Artificial Sequence: Synthetic oligonucleotide
  misc_feature 1..20: note = Target: SCN10A; (+) strand; PAM type: YTN; PAM sequence: TTT
  source 1..20: mol_type = other DNA
ttgtttttgaatatactact

SEQ ID NO: 57370 - DNA, 20 bp, synthetic construct
  misc_feature 1..20: note = Description of Artificial Sequence: Synthetic oligonucleotide
  misc_feature 1..20: note = Target: SCN10A; (+) strand; PAM type: YTN; PAM sequence: TTT
  source 1..20: mol_type = other DNA
tgtttttgaatatactactt

SEQ ID NO: 57371 - DNA, 20 bp, synthetic construct
  misc_feature 1..20: note = Description of Artificial Sequence: Synthetic oligonucleotide
  misc_feature 1..20: note = Target: SCN10A; (+) strand; PAM type: YTN; PAM sequence: TTT
  source 1..20: mol_type = other DNA
gtttttgaatatactacttt

SEQ ID NO: 57372 - DNA, 20 bp, synthetic construct
  misc_feature 1..20: note = Description of Artificial Sequence: Synthetic oligonucleotide
  misc_feature 1..20: note = Target: SCN10A; (+) strand; PAM type: YTN; PAM sequence: TTG
  source 1..20: mol_type = other DNA
tttttgaatatactacttta

SEQ ID NO: 57373 - DNA, 20 bp, synthetic construct
  misc_feature 1..20: note = Description of Artificial Sequence: Synthetic oligonucleotide
  misc_feature 1..20: note = Target: SCN10A; (+) strand; PAM type: YTN; PAM sequence: TTT
  source 1..20: mol_type = other DNA
ttgaatatactactttactc

SEQ ID NO: 57374 - DNA, 20 bp, synthetic construct
  misc_feature 1..20: note = Description of Artificial Sequence: Synthetic oligonucleotide
  misc_feature 1..20: note = Target: SCN10A; (+) strand; PAM type: YTN; PAM sequence: TTT
  source 1..20: mol_type = other DNA
tgaatatactactttactct

SEQ ID NO: 57375 - DNA, 20 bp, synthetic construct
  misc_feature 1..20: note = Description of Artificial Sequence: Synthetic oligonucleotide
  misc_feature 1..20: note = Target: SCN10A; (+) strand; PAM type: YTN; PAM sequence: TTT
  source 1..20: mol_type = other DNA
gaatatactactttactctg

SEQ ID NO: 57376 - DNA, 20 bp, synthetic construct
  misc_feature 1..20: note = Description of Artificial Sequence: Synthetic oligonucleotide
  misc_feature 1..20: note = Target: SCN10A; (+) strand; PAM type: YTN; PAM sequence: TTG
  source 1..20: mol_type = other DNA
aatatactactttactctgt

SEQ ID NO: 57377 - DNA, 20 bp, synthetic construct
  misc_feature 1..20: note = Description of Artificial Sequence: Synthetic oligonucleotide
  misc_feature 1..20: note = Target: SCN10A; (+) strand; PAM type: YTN; PAM sequence: CTA
  source 1..20: mol_type = other DNA
ctttactctgtcttttctat

SEQ ID NO: 57378 - DNA, 20 bp, synthetic construct
  misc_feature 1..20: note = Description of Artificial Sequence: Synthetic oligonucleotide
  misc_feature 1..20: note = Target: SCN10A; (+) strand; PAM type: YTN; PAM sequence: CTT
  source 1..20: mol_type = other DNA
tactctgtcttttctatttg

SEQ ID NO: 57379 - DNA, 20 bp, synthetic construct
  misc_feature 1..20: note = Description of Artificial Sequence: Synthetic oligonucleotide
  misc_feature 1..20: note = Target: SCN10A; (+) strand; PAM type: YTN; PAM sequence: TTT
  source 1..20: mol_type = other DNA
actctgtcttttctatttgt

SEQ ID NO: 57380 - DNA, 20 bp, synthetic construct
  misc_feature 1..20: note = Description of Artificial Sequence: Synthetic oligonucleotide
  misc_feature 1..20: note = Target: SCN10A; (+) strand; PAM type: YTN; PAM sequence: TTA
  source 1..20: mol_type = other DNA
ctctgtcttttctatttgtt

SEQ ID NO: 57381 - DNA, 20 bp, synthetic construct
  misc_feature 1..20: note = Description of Artificial Sequence: Synthetic oligonucleotide
  misc_feature 1..20: note = Target: SCN10A; (+) strand; PAM type: YTN; PAM sequence: CTC
  source 1..20: mol_type = other DNA
tgtcttttctatttgtttct

SEQ ID NO: 57382 - DNA, 20 bp, synthetic construct
  misc_feature 1..20: note = Description of Artificial Sequence: Synthetic oligonucleotide
  misc_feature 1..20: note = Target: SCN10A; (+) strand; PAM type: YTN; PAM sequence: CTG
  source 1..20: mol_type = other DNA
tcttttctatttgtttcttt

SEQ ID NO: 57383 - DNA, 20 bp, synthetic construct
  misc_feature 1..20: note = Description of Artificial Sequence: Synthetic oligonucleotide
  misc_feature 1..20: note = Target: SCN10A; (+) strand; PAM type: YTN; PAM sequence: CTT
  source 1..20: mol_type = other DNA
ttctatttgtttcttttatt

SEQ ID NO: 57384 - DNA, 20 bp, synthetic construct
  misc_feature 1..20: note = Description of Artificial Sequence: Synthetic oligonucleotide
  misc_feature 1..20: note = Target: SCN10A; (+) strand; PAM type: YTN; PAM sequence: TTT
  source 1..20: mol_type = other DNA
tctatttgtttcttttattc

SEQ ID NO: 57385 - DNA, 20 bp, synthetic construct
  misc_feature 1..20: note = Description of Artificial Sequence: Synthetic oligonucleotide
  misc_feature 1..20: note = Target: SCN10A; (+) strand; PAM type: YTN; PAM sequence: TTT
  source 1..20: mol_type = other DNA
ctatttgtttcttttattct

SEQ ID NO: 57386 - DNA, 20 bp, synthetic construct
  misc_feature 1..20: note = Description of Artificial Sequence: Synthetic oligonucleotide
  misc_feature 1..20: note = Target: SCN10A; (+) strand; PAM type: YTN; PAM sequence: TTC
  source 1..20: mol_type = other DNA
tatttgtttcttttattctg

SEQ ID NO: 57387 - DNA, 20 bp, synthetic construct
  misc_feature 1..20: note = Description of Artificial Sequence: Synthetic oligonucleotide
  misc_feature 1..20: note = Target: SCN10A; (+) strand; PAM type: YTN; PAM sequence: CTA
  source 1..20: mol_type = other DNA
tttgtttcttttattctgta

SEQ ID NO: 57388 - DNA, 20 bp, synthetic construct
  misc_feature 1..20: note = Description of Artificial Sequence: Synthetic oligonucleotide
  misc_feature 1..20: note = Target: SCN10A; (+) strand; PAM type: YTN; PAM sequence: TTT
  source 1..20: mol_type = other DNA
gtttcttttattctgtatgt

SEQ ID NO: 57389 - DNA, 20 bp, synthetic construct
  misc_feature 1..20: note = Description of Artificial Sequence: Synthetic oligonucleotide
  misc_feature 1..20: note = Target: SCN10A; (+) strand; PAM type: YTN; PAM sequence: TTG
  source 1..20: mol_type = other DNA
tttcttttattctgtatgtc

SEQ ID NO: 57390 - DNA, 20 bp, synthetic construct
  misc_feature 1..20: note = Description of Artificial Sequence: Synthetic oligonucleotide
  misc_feature 1..20: note = Target: SCN10A; (+) strand; PAM type: YTN; PAM sequence: TTT
  source 1..20: mol_type = other DNA
cttttattctgtatgtctct

SEQ ID NO: 57391 - DNA, 20 bp, synthetic construct
  misc_feature 1..20: note = Description of Artificial Sequence: Synthetic oligonucleotide
  misc_feature 1..20: note = Target: SCN10A; (+) strand; PAM type: YTN; PAM sequence: TTC
  source 1..20: mol_type = other DNA
ttttattctgtatgtctcta

SEQ ID NO: 57392 - DNA, 20 bp, synthetic construct
  misc_feature 1..20: note = Description of Artificial Sequence: Synthetic oligonucleotide
  misc_feature 1..20: note = Target: SCN10A; (+) strand; PAM type: YTN; PAM sequence: CTT
  source 1..20: mol_type = other DNA
ttattctgtatgtctctata

SEQ ID NO: 57393 - DNA, 20 bp, synthetic construct
  misc_feature 1..20: note = Description of Artificial Sequence: Synthetic oligonucleotide
  misc_feature 1..20: note = Target: SCN10A; (+) strand; PAM type: YTN; PAM sequence: TTT
  source 1..20: mol_type = other DNA
tattctgtatgtctctatat

SEQ ID NO: 57394 - DNA, 20 bp, synthetic construct
  misc_feature 1..20: note = Description of Artificial Sequence: Synthetic oligonucleotide
  misc_feature 1..20: note = Target: SCN10A; (+) strand; PAM type: YTN; PAM sequence: TTT
  source 1..20: mol_type = other DNA
attctgtatgtctctatatc

SEQ ID NO: 57395 - DNA, 20 bp, synthetic construct
  misc_feature 1..20: note = Description of Artificial Sequence: Synthetic oligonucleotide
  misc_feature 1..20: note = Target: SCN10A; (+) strand; PAM type: YTN; PAM sequence: TTA
  source 1..20: mol_type = other DNA
ttctgtatgtctctatatcc

SEQ ID NO: 57396 - DNA, 20 bp, synthetic construct
  misc_feature 1..20: note = Description of Artificial Sequence: Synthetic oligonucleotide
  misc_feature 1..20: note = Target: SCN10A; (+) strand; PAM type: YTN; PAM sequence: TTC
  source 1..20: mol_type = other DNA
tgtatgtctctatatcccgg
